United States Patent Application Publication US 2005/0287570 A1 - sequence listing, part 8

SEQ ID NO: 132803 - DNA, 25 bp, Artificial
  Probe
acttcatgctctaagaatatcacac

SEQ ID NO: 132804 - DNA, 25 bp, Artificial
  Probe
ttccaacatcaatgtactgtgacaa

SEQ ID NO: 132805 - DNA, 25 bp, Artificial
  Probe
agttcatatatcttcttctgcttcc

SEQ ID NO: 132806 - DNA, 25 bp, Artificial
  Probe
ctaaggaatgcttctgtccaactaa

SEQ ID NO: 132807 - DNA, 25 bp, Artificial
  Probe
taaggaatgcttctgtccaactaac

SEQ ID NO: 132808 - DNA, 25 bp, Artificial
  Probe
gaagcaagcattctacattccaagg

SEQ ID NO: 132809 - DNA, 25 bp, Artificial
  Probe
atgcttgacctctgctataaccatc

SEQ ID NO: 132810 - DNA, 25 bp, Artificial
  Probe
ttcatgctctaagaatatcacacaa

SEQ ID NO: 132811 - DNA, 25 bp, Artificial
  Probe
atcaagatgaggaagaggaagagga

SEQ ID NO: 132812 - DNA, 25 bp, Artificial
  Probe
gtacatcaagaactcaagaccagag

SEQ ID NO: 132813 - DNA, 25 bp, Artificial
  Probe
tacatcaagaactcaagaccagagg

SEQ ID NO: 132814 - DNA, 25 bp, Artificial
  Probe
aactcaagaccagaggctaatgaag

SEQ ID NO: 132815 - DNA, 25 bp, Artificial
  Probe
gaactcaagaccagaggctaatgaa

SEQ ID NO: 132816 - DNA, 25 bp, Artificial
  Probe
aagaactcaagaccagaggctaatg

SEQ ID NO: 132817 - DNA, 25 bp, Artificial
  Probe
caagaactcaagaccagaggctaat

SEQ ID NO: 132818 - DNA, 25 bp, Artificial
  Probe
cgtacatcaagaactcaagaccaga

SEQ ID NO: 132819 - DNA, 25 bp, Artificial
  Probe
ctctgcgtacatcaagaactcaaga

SEQ ID NO: 132820 - DNA, 25 bp, Artificial
  Probe
tctctgcgtacatcaagaactcaag

SEQ ID NO: 132821 - DNA, 25 bp, Artificial
  Probe
aacggatgtaaataagattgaggaa

SEQ ID NO: 132822 - DNA, 25 bp, Artificial
  Probe
aaacggatgtaaataagattgagga

SEQ ID NO: 132823 - DNA, 25 bp, Artificial
  Probe
agaactcaagaccagaggctaatga

SEQ ID NO: 132824 - DNA, 25 bp, Artificial
  Probe
atcaagaactcaagaccagaggcta

SEQ ID NO: 132825 - DNA, 25 bp, Artificial
  Probe
tctgcgtacatcaagaactcaagac

SEQ ID NO: 132826 - DNA, 25 bp, Artificial
  Probe
acggatgtaaataagattgaggaat

SEQ ID NO: 132827 - DNA, 25 bp, Artificial
  Probe
tcaagaactcaagaccagaggctaa

SEQ ID NO: 132828 - DNA, 25 bp, Artificial
  Probe
acccaccatttataaccttcaacag

SEQ ID NO: 132829 - DNA, 25 bp, Artificial
  Probe
cacccaccatttataaccttcaaca

SEQ ID NO: 132830 - DNA, 25 bp, Artificial
  Probe
accatttataaccttcaacagcgaa

SEQ ID NO: 132831 - DNA, 25 bp, Artificial
  Probe
caccatttataaccttcaacagcga

SEQ ID NO: 132832 - DNA, 25 bp, Artificial
  Probe
cagaagctggatgagtacctgaatt

SEQ ID NO: 132833 - DNA, 25 bp, Artificial
  Probe
ccacccaccatttataaccttcaac

SEQ ID NO: 132834 - DNA, 25 bp, Artificial
  Probe
ttctctgcgtacatcaagaactcaa

SEQ ID NO: 132835 - DNA, 25 bp, Artificial
  Probe
gcgtacatcaagaactcaagaccag

SEQ ID NO: 132836 - DNA, 25 bp, Artificial
  Probe
ctgcgtacatcaagaactcaagacc

SEQ ID NO: 132837 - DNA, 25 bp, Artificial
  Probe
ttataaccttcaacagcgaagtcaa

SEQ ID NO: 132838 - DNA, 25 bp, Artificial
  Probe
ctacagtagggatgagttcaccaac

SEQ ID NO: 132839 - DNA, 25 bp, Artificial
  Probe
cccaccatttataaccttcaacagc

SEQ ID NO: 132840 - DNA, 25 bp, Artificial
  Probe
cggatgtaaataagattgaggaatt

SEQ ID NO: 132841 - DNA, 25 bp, Artificial
  Probe
gaagctggatgagtacctgaattct

SEQ ID NO: 132842 - DNA, 25 bp, Artificial
  Probe
agaagctggatgagtacctgaattc

SEQ ID NO: 132843 - DNA, 25 bp, Artificial
  Probe
tacagtagggatgagttcaccaaca

SEQ ID NO: 132844 - DNA, 25 bp, Artificial
  Probe
ccaccatttataaccttcaacagcg

SEQ ID NO: 132845 - DNA, 25 bp, Artificial
  Probe
aagctggatgagtacctgaattctc

SEQ ID NO: 132846 - DNA, 25 bp, Artificial
  Probe
gcgaagtcaaaacggatgtaaataa

SEQ ID NO: 132847 - DNA, 25 bp, Artificial
  Probe
cccacccaccatttataaccttcaa

SEQ ID NO: 132848 - DNA, 25 bp, Artificial
  Probe
tgcgtacatcaagaactcaagacca

SEQ ID NO: 132849 - DNA, 25 bp, Artificial
  Probe
ccaagttctctgcgtacatcaagaa

SEQ ID NO: 132850 - DNA, 25 bp, Artificial
  Probe
aaataccgcaactttgacattccca

SEQ ID NO: 132851 - DNA, 25 bp, Artificial
  Probe
cgaagtcaaaacggatgtaaataag

SEQ ID NO: 132852 - DNA, 25 bp, Artificial
  Probe
agcgaagtcaaaacggatgtaaata

SEQ ID NO: 132853 - DNA, 25 bp, Artificial
  Probe
atgagaacagcatggaggacatcaa

SEQ ID NO: 132854 - DNA, 25 bp, Artificial
  Probe
gatacctgacaaacgcctacagtag

SEQ ID NO: 132855 - DNA, 25 bp, Artificial
  Probe
catcaagaactcaagaccagaggct

SEQ ID NO: 132856 - DNA, 25 bp, Artificial
  Probe
agaacagcatggaggacatcaaatc

SEQ ID NO: 132857 - DNA, 25 bp, Artificial
  Probe
atctactgtcttagtctcaatggcg

SEQ ID NO: 132858 - DNA, 25 bp, Artificial
  Probe
ttgtgttgaaggtatgtggaggatg

SEQ ID NO: 132859 - DNA, 25 bp, Artificial
  Probe
cagtttgtgttgaaggtatgtggag

SEQ ID NO: 132860 - DNA, 25 bp, Artificial
  Probe
tttgtgttgaaggtatgtggaggat

SEQ ID NO: 132861 - DNA, 25 bp, Artificial
  Probe
gtagttcacatagagctgcttctgt

SEQ ID NO: 132862 - DNA, 25 bp, Artificial
  Probe
tctactgtcttagtctcaatggcgg

SEQ ID NO: 132863 - DNA, 25 bp, Artificial
  Probe
ggtagttcacatagagctgcttctg

SEQ ID NO: 132864 - DNA, 25 bp, Artificial
  Probe
gtttgtgttgaaggtatgtggagga

SEQ ID NO: 132865 - DNA, 25 bp, Artificial
  Probe
agtttgtgttgaaggtatgtggagg

SEQ ID NO: 132866 - DNA, 25 bp, Artificial
  Probe
acagtttgtgttgaaggtatgtgga

SEQ ID NO: 132867 - DNA, 25 bp, Artificial
  Probe
caggctgactgtcactaagtttatg

SEQ ID NO: 132868 - DNA, 25 bp, Artificial
  Probe
acatagagctgcttctgtgtaaatg

SEQ ID NO: 132869 - DNA, 25 bp, Artificial
  Probe
tgtgttgaaggtatgtggaggatgg

SEQ ID NO: 132870 - DNA, 25 bp, Artificial
  Probe
caggtggggtctaacttacttattt

SEQ ID NO: 132871 - DNA, 25 bp, Artificial
  Probe
aggctgactgtcactaagtttatgg

SEQ ID NO: 132872 - DNA, 25 bp, Artificial
  Probe
gggtctaacttacttatttattgct

SEQ ID NO: 132873 - DNA, 25 bp, Artificial
  Probe
catagagctgcttctgtgtaaatgc

SEQ ID NO: 132874 - DNA, 25 bp, Artificial
  Probe
aggtggggtctaacttacttattta

SEQ ID NO: 132875 - DNA, 25 bp, Artificial
  Probe
ccaggtggggtctaacttacttatt

SEQ ID NO: 132876 - DNA, 25 bp, Artificial
  Probe
ctgcttctgtgtaaatgctgcttct

SEQ ID NO: 132877 - DNA, 25 bp, Artificial
  Probe
gcttctgtgtaaatgctgcttctgt

SEQ ID NO: 132878 - DNA, 25 bp, Artificial
  Probe
tgcttctgtgtaaatgctgcttctg

SEQ ID NO: 132879 - DNA, 25 bp, Artificial
  Probe
ggtggggtctaacttacttatttat

SEQ ID NO: 132880 - DNA, 25 bp, Artificial
  Probe
ggggtctaacttacttatttattgc

SEQ ID NO: 132881 - DNA, 25 bp, Artificial
  Probe
atagagctgcttctgtgtaaatgct

SEQ ID NO: 132882 - DNA, 25 bp, Artificial
  Probe
gagcgactgggtagttcacatagag

SEQ ID NO: 132883 - DNA, 25 bp, Artificial
  Probe
gggtagttcacatagagctgcttct

SEQ ID NO: 132884 - DNA, 25 bp, Artificial
  Probe
ctgagcgactgggtagttcacatag

SEQ ID NO: 132885 - DNA, 25 bp, Artificial
  Probe
ctactgtcttagtctcaatggcggg

SEQ ID NO: 132886 - DNA, 25 bp, Artificial
  Probe
ttcacatagagctgcttctgtgtaa

SEQ ID NO: 132887 - DNA, 25 bp, Artificial
  Probe
tgggtagttcacatagagctgcttc

SEQ ID NO: 132888 - DNA, 25 bp, Artificial
  Probe
ctgggtagttcacatagagctgctt

SEQ ID NO: 132889 - DNA, 25 bp, Artificial
  Probe
tagagctgcttctgtgtaaatgctg

SEQ ID NO: 132890 - DNA, 25 bp, Artificial
  Probe
tagttcacatagagctgcttctgtg

SEQ ID NO: 132891 - DNA, 25 bp, Artificial
  Probe
acaggctgactgtcactaagtttat

SEQ ID NO: 132892 - DNA, 25 bp, Artificial
  Probe
tgagcgactgggtagttcacataga

SEQ ID NO: 132893 - DNA, 25 bp, Artificial
  Probe
tctgagcgactgggtagttcacata

SEQ ID NO: 132894 - DNA, 25 bp, Artificial
  Probe
tggggtctaacttacttatttattg

SEQ ID NO: 132895 - DNA, 25 bp, Artificial
  Probe
gtggggtctaacttacttatttatt

SEQ ID NO: 132896 - DNA, 25 bp, Artificial
  Probe
gttcacatagagctgcttctgtgta

SEQ ID NO: 132897 - DNA, 25 bp, Artificial
  Probe
tactgtcttagtctcaatggcgggt

SEQ ID NO: 132898 - DNA, 25 bp, Artificial
  Probe
cgactgggtagttcacatagagctg

SEQ ID NO: 132899 - DNA, 25 bp, Artificial
  Probe
cacatagagctgcttctgtgtaaat

SEQ ID NO: 132900 - DNA, 25 bp, Artificial
  Probe
cacaggctgactgtcactaagttta

SEQ ID NO: 132901 - DNA, 25 bp, Artificial
  Probe
gactgggtagttcacatagagctgc

SEQ ID NO: 132902 - DNA, 25 bp, Artificial
  Probe
cattaacttaccatccagagaccaa

SEQ ID NO: 132903 - DNA, 25 bp, Artificial
  Probe
aaccagttagaagacagatatgaca

SEQ ID NO: 132904 - DNA, 25 bp, Artificial
  Probe
tgtaataaggacacaaggtaggaac

SEQ ID NO: 132905 - DNA, 25 bp, Artificial
  Probe
ctgtaataaggacacaaggtaggaa

SEQ ID NO: 132906 - DNA, 25 bp, Artificial
  Probe
actgtaataaggacacaaggtagga

SEQ ID NO: 132907 - DNA, 25 bp, Artificial
  Probe
cactgtaataaggacacaaggtagg

SEQ ID NO: 132908 - DNA, 25 bp, Artificial
  Probe
gcactgtaataaggacacaaggtag

SEQ ID NO: 132909 - DNA, 25 bp, Artificial
  Probe
gcattaacttaccatccagagacca

SEQ ID NO: 132910 - DNA, 25 bp, Artificial
  Probe
taaccagttagaagacagatatgac

SEQ ID NO: 132911 - DNA, 25 bp, Artificial
  Probe
gtaataaggacacaaggtaggaacc

SEQ ID NO: 132912 - DNA, 25 bp, Artificial
  Probe
taataaggacacaaggtaggaacca

SEQ ID NO: 132913 - DNA, 25 bp, Artificial
  Probe
gatcttgctgcattaacttaccatc

SEQ ID NO: 132914 - DNA, 25 bp, Artificial
  Probe
tcccatatcaataacaaagtccgaa

SEQ ID NO: 132915 - DNA, 25 bp, Artificial
  Probe
ttcccatatcaataacaaagtccga

SEQ ID NO: 132916 - DNA, 25 bp, Artificial
  Probe
aacttaccatccagagaccaaataa

SEQ ID NO: 132917 - DNA, 25 bp, Artificial
  Probe
acttaccatccagagaccaaataat

SEQ ID NO: 132918 - DNA, 25 bp, Artificial
  Probe
ttaacttaccatccagagaccaaat

SEQ ID NO: 132919 - DNA, 25 bp, Artificial
  Probe
attaacttaccatccagagaccaaa

SEQ ID NO: 132920 - DNA, 25 bp, Artificial
  Probe
tttcccatatcaataacaaagtccg

SEQ ID NO: 132921 - DNA, 25 bp, Artificial
  Probe
gcttcattcatttcaatcaaccaaa

SEQ ID NO: 132922 - DNA, 25 bp, Artificial
  Probe
cccatatcaataacaaagtccgaat

SEQ ID NO: 132923 - DNA, 25 bp, Artificial
  Probe
caagtggtagtggattctgagactg

SEQ ID NO: 132924 - DNA, 25 bp, Artificial
  Probe
taacttaccatccagagaccaaata

SEQ ID NO: 132925 - DNA, 25 bp, Artificial
  Probe
gaacctactccttacaaatcagcag

SEQ ID NO: 132926 - DNA, 25 bp, Artificial
  Probe
aataaggacacaaggtaggaaccaa

SEQ ID NO: 132927 - DNA, 25 bp, Artificial
  Probe
agttagttcagtagcttatctcact

SEQ ID NO: 132928 - DNA, 25 bp, Artificial
  Probe
aatcaaccaaagttagttcagtagc

SEQ ID NO: 132929 - DNA, 25 bp, Artificial
  Probe
acttatgagtatggtgcagtacatg

SEQ ID NO: 132930 - DNA, 25 bp, Artificial
  Probe
atcttgctgcattaacttaccatcc

SEQ ID NO: 132931 - DNA, 25 bp, Artificial
  Probe
ggtgaaataaagtctcctgggttta

SEQ ID NO: 132932 - DNA, 25 bp, Artificial
  Probe
ttcaatcaaccaaagttagttcagt

SEQ ID NO: 132933 - DNA, 25 bp, Artificial
  Probe
aagttagttcagtagcttatctcac

SEQ ID NO: 132934 - DNA, 25 bp, Artificial
  Probe
tagttcaaacaaaccactctctcaa

SEQ ID NO: 132935 - DNA, 25 bp, Artificial
  Probe
gtgaaataaagtctcctgggtttaa

SEQ ID NO: 132936 - DNA, 25 bp, Artificial
  Probe
cttaccatccagagaccaaataatt

SEQ ID NO: 132937 - DNA, 25 bp, Artificial
  Probe
ttaaccagttagaagacagatatga

SEQ ID NO: 132938 - DNA, 25 bp, Artificial
  Probe
gttagttcagtagcttatctcactt

SEQ ID NO: 132939 - DNA, 25 bp, Artificial
  Probe
ttcattcatttcaatcaaccaaagt

SEQ ID NO: 132940 - DNA, 25 bp, Artificial
  Probe
ctagttcaaacaaaccactctctca

SEQ ID NO: 132941 - DNA, 25 bp, Artificial
  Probe
atatcaataacaaagtccgaatcct

SEQ ID NO: 132942 - DNA, 25 bp, Artificial
  Probe
catatcaataacaaagtccgaatcc

SEQ ID NO: 132943 - DNA, 25 bp, Artificial
  Probe
ccatatcaataacaaagtccgaatc

SEQ ID NO: 132944 - DNA, 25 bp, Artificial
  Probe
atcctagttcaaacaaaccactctc

SEQ ID NO: 132945 - DNA, 25 bp, Artificial
  Probe
cacttatgagtatggtgcagtacat

SEQ ID NO: 132946 - DNA, 25 bp, Artificial
  Probe
agttcaaacaaaccactctctcaag

SEQ ID NO: 132947 - DNA, 25 bp, Artificial
  Probe
ttatcggcacacctagaatatgaag

SEQ ID NO: 132948 - DNA, 25 bp, Artificial
  Probe
cagacttcattatcttcacagttga

SEQ ID NO: 132949 - DNA, 25 bp, Artificial
  Probe
tcagacttcattatcttcacagttg

SEQ ID NO: 132950 - DNA, 25 bp, Artificial
  Probe
atcagacttcattatcttcacagtt

SEQ ID NO: 132951 - DNA, 25 bp, Artificial
  Probe
aatcagacttcattatcttcacagt

SEQ ID NO: 132952 - DNA, 25 bp, Artificial
  Probe
ctccagtgtttcttatcctttgttc

SEQ ID NO: 132953 - DNA, 25 bp, Artificial
  Probe
tttcctccagtgtttcttatccttt

SEQ ID NO: 132954 - DNA, 25 bp, Artificial
  Probe
tccagtgtttcttatcctttgttca

SEQ ID NO: 132955 - DNA, 25 bp, Artificial
  Probe
ccagtgtttcttatcctttgttcat

SEQ ID NO: 132956 - DNA, 25 bp, Artificial
  Probe
ttcctccagtgtttcttatcctttg

SEQ ID NO: 132957 - DNA, 25 bp, Artificial
  Probe
tatcggcacacctagaatatgaagg

SEQ ID NO: 132958 - DNA, 25 bp, Artificial
  Probe
tcaggatatgggaggaagtgtttat

SEQ ID NO: 132959 - DNA, 25 bp, Artificial
  Probe
cctccagtgtttcttatcctttgtt

SEQ ID NO: 132960 - DNA, 25 bp, Artificial
  Probe
atattatttccctctctcccagaca

SEQ ID NO: 132961 - DNA, 25 bp, Artificial
  Probe
tttatcggcacacctagaatatgaa

SEQ ID NO: 132962 - DNA, 25 bp, Artificial
  Probe
gtttatcggcacacctagaatatga

SEQ ID NO: 132963 - DNA, 25 bp, Artificial
  Probe
tattatttccctctctcccagacag

SEQ ID NO: 132964 - DNA, 25 bp, Artificial
  Probe
tcctccagtgtttcttatcctttgt

SEQ ID NO: 132965 - DNA, 25 bp, Artificial
  Probe
tccttgtttcatacttctgagtcac

SEQ ID NO: 132966 - DNA, 25 bp, Artificial
  Probe
ctccttgtttcatacttctgagtca

SEQ ID NO: 132967 - DNA, 25 bp, Artificial
  Probe
agtcatctctttgtagtttcagttt

SEQ ID NO: 132968 - DNA, 25 bp, Artificial
  Probe
atgctccttgtttcatacttctgag

SEQ ID NO: 132969 - DNA, 25 bp, Artificial
  Probe
caggatatgggaggaagtgtttatc

SEQ ID NO: 132970 - DNA, 25 bp, Artificial
  Probe
aagtcatctctttgtagtttcagtt

SEQ ID NO: 132971 - DNA, 25 bp, Artificial
  Probe
gtttcatacttctgagtcacccaag

SEQ ID NO: 132972 - DNA, 25 bp, Artificial
  Probe
cttgtttcatacttctgagtcaccc

SEQ ID NO: 132973 - DNA, 25 bp, Artificial
  Probe
ccttgtttcatacttctgagtcacc

SEQ ID NO: 132974 - DNA, 25 bp, Artificial
  Probe
tttagcctgaaagttggtgaacatc

SEQ ID NO: 132975 - DNA, 25 bp, Artificial
  Probe
ctcaggatatgggaggaagtgttta

SEQ ID NO: 132976 - DNA, 25 bp, Artificial
  Probe
acaatgttcactgtcaaggaaatga

SEQ ID NO: 132977 - DNA, 25 bp, Artificial
  Probe
gctccttgtttcatacttctgagtc

SEQ ID NO: 132978 - DNA, 25 bp, Artificial
  Probe
tgtttatcggcacacctagaatatg

SEQ ID NO: 132979 - DNA, 25 bp, Artificial
  Probe
tatgctccttgtttcatacttctga

SEQ ID NO: 132980 - DNA, 25 bp, Artificial
  Probe
tgtttcatacttctgagtcacccaa

SEQ ID NO: 132981 - DNA, 25 bp, Artificial
  Probe
ttgtttcatacttctgagtcaccca

SEQ ID NO: 132982 - DNA, 25 bp, Artificial
  Probe
ggtgaatattatttccctctctccc

SEQ ID NO: 132983 - DNA, 25 bp, Artificial
  Probe
gtgaatattatttccctctctccca

SEQ ID NO: 132984 - DNA, 25 bp, Artificial
  Probe
ttatgctccttgtttcatacttctg

SEQ ID NO: 132985 - DNA, 25 bp, Artificial
  Probe
tgaatattatttccctctctcccag

SEQ ID NO: 132986 - DNA, 25 bp, Artificial
  Probe
aacaataggatctaagaagtatgca

SEQ ID NO: 132987 - DNA, 25 bp, Artificial
  Probe
aggatatgggaggaagtgtttatcg

SEQ ID NO: 132988 - DNA, 25 bp, Artificial
  Probe
aatattatttccctctctcccagac

SEQ ID NO: 132989 - DNA, 25 bp, Artificial
  Probe
tgctccttgtttcatacttctgagt

SEQ ID NO: 132990 - DNA, 25 bp, Artificial
  Probe
gaatattatttccctctctcccaga

SEQ ID NO: 132991 - DNA, 25 bp, Artificial
  Probe
gaatgttctttcccttattcagagc

SEQ ID NO: 132992 - DNA, 25 bp, Artificial
  Probe
gttcatctgttgcagtataaccatc

SEQ ID NO: 132993 - DNA, 25 bp, Artificial
  Probe
tccttatacttcttgtaagacatcc

SEQ ID NO: 132994 - DNA, 25 bp, Artificial
  Probe
tgttcatctgttgcagtataaccat

SEQ ID NO: 132995 - DNA, 25 bp, Artificial
  Probe
gcatttctctctccttatacttctt

SEQ ID NO: 132996 - DNA, 25 bp, Artificial
  Probe
ttcatctgttgcagtataaccatcg

SEQ ID NO: 132997 - DNA, 25 bp, Artificial
  Probe
ctctccttatacttcttgtaagaca

SEQ ID NO: 132998 - DNA, 25 bp, Artificial
  Probe
ttctctctccttatacttcttgtaa

SEQ ID NO: 132999 - DNA, 25 bp, Artificial
  Probe
tctctccttatacttcttgtaagac

SEQ ID NO: 133000 - DNA, 25 bp, Artificial
  Probe
tctctctccttatacttcttgtaag

SEQ ID NO: 133001 - DNA, 25 bp, Artificial
  Probe
atatgacttaggaaatcccttggca

SEQ ID NO: 133002 - DNA, 25 bp, Artificial
  Probe
catagagatcctatcccactccatg

SEQ ID NO: 133003 - DNA, 25 bp, Artificial
  Probe
ctctctccttatacttcttgtaaga

SEQ ID NO: 133004 - DNA, 25 bp, Artificial
  Probe
tctccttatacttcttgtaagacat

SEQ ID NO: 133005 - DNA, 25 bp, Artificial
  Probe
tgcatttctctctccttatacttct

SEQ ID NO: 133006 - DNA, 25 bp, Artificial
  Probe
aaactttgcatttctctctccttat

SEQ ID NO: 133007 - DNA, 25 bp, Artificial
  Probe
attaccgtcatggaatggtactgta

SEQ ID NO: 133008 - DNA, 25 bp, Artificial
  Probe
actttgcatttctctctccttatac

SEQ ID NO: 133009 - DNA, 25 bp, Artificial
  Probe
caaacaggacaaacagcaaggaaag

SEQ ID NO: 133010 - DNA, 25 bp, Artificial
  Probe
atttctctctccttatacttcttgt

SEQ ID NO: 133011 - DNA, 25 bp, Artificial
  Probe
ctccttatacttcttgtaagacatc

SEQ ID NO: 133012 - DNA, 25 bp, Artificial
  Probe
ccatagagatcctatcccactccat

SEQ ID NO: 133013 - DNA, 25 bp, Artificial
  Probe
ttgcatttctctctccttatacttc

SEQ ID NO: 133014 - DNA, 25 bp, Artificial
  Probe
ctttgcatttctctctccttatact

SEQ ID NO: 133015 - DNA, 25 bp, Artificial
  Probe
taccacatatgacttaggaaatccc

SEQ ID NO: 133016 - DNA, 25 bp, Artificial
  Probe
gggataccacatatgacttaggaaa

SEQ ID NO: 133017 - DNA, 25 bp, Artificial
  Probe
catttctctctccttatacttcttg

SEQ ID NO: 133018 - DNA, 25 bp, Artificial
  Probe
tcatctgttgcagtataaccatcgg

SEQ ID NO: 133019 - DNA, 25 bp, Artificial
  Probe
tatgacttaggaaatcccttggcac

SEQ ID NO: 133020 - DNA, 25 bp, Artificial
  Probe
ttaccgtcatggaatggtactgtag

SEQ ID NO: 133021 - DNA, 25 bp, Artificial
  Probe
caattcgcccatagagatcctatcc

SEQ ID NO: 133022 - DNA, 25 bp, Artificial
  Probe
ccaattcgcccatagagatcctatc

SEQ ID NO: 133023 - DNA, 25 bp, Artificial
  Probe
tttgcatttctctctccttatactt

SEQ ID NO: 133024 - DNA, 25 bp, Artificial
  Probe
aactttgcatttctctctccttata

SEQ ID NO: 133025 - DNA, 25 bp, Artificial
  Probe
tttctctctccttatacttcttgta

SEQ ID NO: 133026 - DNA, 25 bp, Artificial
  Probe
acaaacaggacaaacagcaaggaaa

SEQ ID NO: 133027 - DNA, 25 bp, Artificial
  Probe
acatatgacttaggaaatcccttgg

SEQ ID NO: 133028 - DNA, 25 bp, Artificial
  Probe
ccacatatgacttaggaaatccctt

SEQ ID NO: 133029 - DNA, 25 bp, Artificial
  Probe
taccgtcatggaatggtactgtaga

SEQ ID NO: 133030 - DNA, 25 bp, Artificial
  Probe
ataccacatatgacttaggaaatcc

SEQ ID NO: 133031 - DNA, 25 bp, Artificial
  Probe
ggataccacatatgacttaggaaat

SEQ ID NO: 133032 - DNA, 25 bp, Artificial
  Probe
cattaccgtcatggaatggtactgt

SEQ ID NO: 133033 - DNA, 25 bp, Artificial
  Probe
cacatatgacttaggaaatcccttg

SEQ ID NO: 133034 - DNA, 25 bp, Artificial
  Probe
accacatatgacttaggaaatccct

SEQ ID NO: 133035 - DNA, 25 bp, Artificial
  Probe
gaaactttgcatttctctctcctta

SEQ ID NO: 133036 - DNA, 25 bp, Artificial
  Probe
actggaaacctgggataccacatat

SEQ ID NO: 133037 - DNA, 25 bp, Artificial
  Probe
cagaaggtcaaggtgatctacattg

SEQ ID NO: 133038 - DNA, 25 bp, Artificial
  Probe
tcagaaggtcaaggtgatctacatt

SEQ ID NO: 133039 - DNA, 25 bp, Artificial
  Probe
agaaggtcaaggtgatctacattgc

SEQ ID NO: 133040 - DNA, 25 bp, Artificial
  Probe
atcagaaggtcaaggtgatctacat

SEQ ID NO: 133041 - DNA, 25 bp, Artificial
  Probe
tctatgaagacataaaggagaaccc

SEQ ID NO: 133042 - DNA, 25 bp, Artificial
  Probe
gaaggtcaaggtgatctacattgcc

SEQ ID NO: 133043 - DNA, 25 bp, Artificial
  Probe
tggtactacctggatgagtgagatc

SEQ ID NO: 133044 - DNA, 25 bp, Artificial
  Probe
ctggtactacctggatgagtgagat

SEQ ID NO: 133045 - DNA, 25 bp, Artificial
  Probe
aagtctggtactacctggatgagtg

SEQ ID NO: 133046 - DNA, 25 bp, Artificial
  Probe
gtctggtactacctggatgagtgag

SEQ ID NO: 133047 - DNA, 25 bp, Artificial
  Probe
aagacataaaggagaaccccaaaag

SEQ ID NO: 133048 - DNA, 25 bp, Artificial
  Probe
gaagacataaaggagaaccccaaaa

SEQ ID NO: 133049 - DNA, 25 bp, Artificial
  Probe
tctggtactacctggatgagtgaga

SEQ ID NO: 133050 - DNA, 25 bp, Artificial
  Probe
cacaaagatccctatcactgagcac

SEQ ID NO: 133051 - DNA, 25 bp, Artificial
  Probe
caaagtctggtactacctggatgag

SEQ ID NO: 133052 - DNA, 25 bp, Artificial
  Probe
agtctggtactacctggatgagtga

SEQ ID NO: 133053 - DNA, 25 bp, Artificial
  Probe
ttctatgaagacataaaggagaacc

SEQ ID NO: 133054 - DNA, 25 bp, Artificial
  Probe
tgaagacataaaggagaaccccaaa

SEQ ID NO: 133055 - DNA, 25 bp, Artificial
  Probe
aaagtctggtactacctggatgagt

SEQ ID NO: 133056 - DNA, 25 bp, Artificial
  Probe
atgaagacataaaggagaaccccaa

SEQ ID NO: 133057 - DNA, 25 bp, Artificial
  Probe
caaggtgatctacattgcccgaaat

SEQ ID NO: 133058 - DNA, 25 bp, Artificial
  Probe
ctatgaagacataaaggagaacccc

SEQ ID NO: 133059 - DNA, 25 bp, Artificial
  Probe
agacataaaggagaaccccaaaagg

SEQ ID NO: 133060 - DNA, 25 bp, Artificial
  Probe
tatgaagacataaaggagaacccca

SEQ ID NO: 133061 - DNA, 25 bp, Artificial
  Probe
ccaaagtctggtactacctggatga

SEQ ID NO: 133062 - DNA, 25 bp, Artificial
  Probe
acaaagatccctatcactgagcacc

SEQ ID NO: 133063 - DNA, 25 bp, Artificial
  Probe
catacccaaagtctggtactacctg

SEQ ID NO: 133064 - DNA, 25 bp, Artificial
  Probe
cttcatgaggaaaggtactactggg

SEQ ID NO: 133065 - DNA, 25 bp, Artificial
  Probe
aaggtgatctacattgcccgaaatg

SEQ ID NO: 133066 - DNA, 25 bp, Artificial
  Probe
acatacccaaagtctggtactacct

SEQ ID NO: 133067 - DNA, 25 bp, Artificial
  Probe
cacatacccaaagtctggtactacc

SEQ ID NO: 133068 - DNA, 25 bp, Artificial
  Probe
tcaaggtgatctacattgcccgaaa

SEQ ID NO: 133069 - DNA, 25 bp, Artificial
  Probe
aaaggtactactggggactggaaaa

SEQ ID NO: 133070 - DNA, 25 bp, Artificial
  Probe
cttctatgaagacataaaggagaac

SEQ ID NO: 133071 - DNA, 25 bp, Artificial
  Probe
gcacatacccaaagtctggtactac

SEQ ID NO: 133072 - DNA, 25 bp, Artificial
  Probe
atacccaaagtctggtactacctgg

SEQ ID NO: 133073 - DNA, 25 bp, Artificial
  Probe
agcacatacccaaagtctggtacta

SEQ ID NO: 133074 - DNA, 25 bp, Artificial
  Probe
caaagatccctatcactgagcaccc

SEQ ID NO: 133075 - DNA, 25 bp, Artificial
  Probe
cccaaagtctggtactacctggatg

SEQ ID NO: 133076 - DNA, 25 bp, Artificial
  Probe
aaggtcaaggtgatctacattgccc

SEQ ID NO: 133077 - DNA, 25 bp, Artificial
  Probe
gaaaggtactactggggactggaaa

SEQ ID NO: 133078 - DNA, 25 bp, Artificial
  Probe
atcagcacatacccaaagtctggta

SEQ ID NO: 133079 - DNA, 25 bp, Artificial
  Probe
acccaaagtctggtactacctggat

SEQ ID NO: 133080 - DNA, 25 bp, Artificial
  Probe
gtcaaggtgatctacattgcccgaa

SEQ ID NO: 133081 - DNA, 25 bp, Artificial
  Probe
atgaggaaaggtactactggggact

SEQ ID NO: 133082 - DNA, 25 bp, Artificial
  Probe
gtgaagtctctgttgaatgaagaag

SEQ ID NO: 133083 - DNA, 25 bp, Artificial
  Probe
ggtgaagtctctgttgaatgaagaa

SEQ ID NO: 133084 - DNA, 25 bp, Artificial
  Probe
ctggtgaagtctctgttgaatgaag

SEQ ID NO: 133085 - DNA, 25 bp, Artificial
  Probe
tgaagtctctgttgaatgaagaagc

SEQ ID NO: 133086 - DNA, 25 bp, Artificial
  Probe
tggtgaagtctctgttgaatgaaga

SEQ ID NO: 133087 - DNA, 25 bp, Artificial
  Probe
cctggtgaagtctctgttgaatgaa

SEQ ID NO: 133088 - DNA, 25 bp, Artificial
  Probe
atatggaccagaatctgtacctagt

SEQ ID NO: 133089 - DNA, 25 bp, Artificial
  Probe
agtatatggaccagaatctgtacct

SEQ ID NO: 133090 - DNA, 25 bp, Artificial
  Probe
cagtatatggaccagaatctgtacc

SEQ ID NO: 133091 - DNA, 25 bp, Artificial
  Probe
tatggaccagaatctgtacctagtg

SEQ ID NO: 133092 - DNA, 25 bp, Artificial
  Probe
aagtctctgttgaatgaagaagctc

SEQ ID NO: 133093 - DNA, 25 bp, Artificial
  Probe
gaagtctctgttgaatgaagaagct

SEQ ID NO: 133094 - DNA, 25 bp, Artificial
  Probe
tcagtatatggaccagaatctgtac

SEQ ID NO: 133095 - DNA, 25 bp, Artificial
  Probe
ctcagtatatggaccagaatctgta

SEQ ID NO: 133096 - DNA, 25 bp, Artificial
  Probe
cctcagtatatggaccagaatctgt

SEQ ID NO: 133097 - DNA, 25 bp, Artificial
  Probe
ggagcttgataccacaattaaggag

SEQ ID NO: 133098 - DNA, 25 bp, Artificial
  Probe
gaggagcttgataccacaattaagg

SEQ ID NO: 133099 - DNA, 25 bp, Artificial
  Probe
ggaggagcttgataccacaattaag

SEQ ID NO: 133100 - DNA, 25 bp, Artificial
  Probe
gtatatggaccagaatctgtaccta

SEQ ID NO: 133101 - DNA, 25 bp, Artificial
  Probe
gctcaagaagtcactcaaagatttc

SEQ ID NO: 133102 - DNA, 25 bp, Artificial
  Probe
aggagcttgataccacaattaagga

SEQ ID NO: 133103 - DNA, 25 bp, Artificial
  Probe
gaagtcactcaaagatttctatggg

SEQ ID NO: 133104 - DNA, 25 bp, Artificial
  Probe
tatatggaccagaatctgtacctag

SEQ ID NO: 133105 - DNA, 25 bp, Artificial
  Probe
tctgttgaatgaagaagctcacaag

SEQ ID NO: 133106 - DNA, 25 bp, Artificial
  Probe
ctctgttgaatgaagaagctcacaa

SEQ ID NO: 133107 - DNA, 25 bp, Artificial
  Probe
gtctctgttgaatgaagaagctcac

SEQ ID NO: 133108 - DNA, 25 bp, Artificial
  Probe
agtctctgttgaatgaagaagctca

SEQ ID NO: 133109 - DNA, 25 bp, Artificial
  Probe
attcaatttatcaaccagcgtgaga

SEQ ID NO: 133110 - DNA, 25 bp, Artificial
  Probe
cattcaatttatcaaccagcgtgag

SEQ ID NO: 133111 - DNA, 25 bp, Artificial
  Probe
ttcaatttatcaaccagcgtgagaa

SEQ ID NO: 133112 - DNA, 25 bp, Artificial
  Probe
gattatgggaggatcatcaatgacc

SEQ ID NO: 133113 - DNA, 25 bp, Artificial
  Probe
tcaatttatcaaccagcgtgagaag

SEQ ID NO: 133114 - DNA, 25 bp, Artificial
  Probe
tctctgttgaatgaagaagctcaca

SEQ ID NO: 133115 - DNA, 25 bp, Artificial
  Probe
ctgttgaatgaagaagctcacaagg

SEQ ID NO: 133116 - DNA, 25 bp, Artificial
  Probe
ctcacgatacatagctccaaccatc

SEQ ID NO: 133117 - DNA, 25 bp, Artificial
  Probe
agctcaagaagtcactcaaagattt

SEQ ID NO: 133118 - DNA, 25 bp, Artificial
  Probe
aagctcaagaagtcactcaaagatt

SEQ ID NO: 133119 - DNA, 25 bp, Artificial
  Probe
tggaggagcttgataccacaattaa

SEQ ID NO: 133120 - DNA, 25 bp, Artificial
  Probe
tagcgacactcatccctcagtatat

SEQ ID NO: 133121 - DNA, 25 bp, Artificial
  Probe
ccttgtcataggtgcttggaactac

SEQ ID NO: 133122 - DNA, 25 bp, Artificial
  Probe
ccattcaatttatcaaccagcgtga

SEQ ID NO: 133123 - DNA, 25 bp, Artificial
  Probe
gaagctcaagaagtcactcaaagat

SEQ ID NO: 133124 - DNA, 25 bp, Artificial
  Probe
atccctcagtatatggaccagaatc

SEQ ID NO: 133125 - DNA, 25 bp, Artificial
  Probe
catccctcagtatatggaccagaat

SEQ ID NO: 133126 - DNA, 25 bp, Artificial
  Probe
ctggaggagcttgataccacaatta

SEQ ID NO: 133127 - DNA, 25 bp, Artificial
  Probe
aacctgagtacatcaatcattgctg

SEQ ID NO: 133128 - DNA, 25 bp, Artificial
  Probe
caacctgagtacatcaatcattgct

SEQ ID NO: 133129 - DNA, 25 bp, Artificial
  Probe
tacatcaatcattgctgtcaccatc

SEQ ID NO: 133130 - DNA, 25 bp, Artificial
  Probe
ctgagtacatcaatcattgctgtca

SEQ ID NO: 133131 - DNA, 25 bp, Artificial
  Probe
tgagtacatcaatcattgctgtcac

SEQ ID NO: 133132 - DNA, 25 bp, Artificial
  Probe
gtacatcaatcattgctgtcaccat

SEQ ID NO: 133133 - DNA, 25 bp, Artificial
  Probe
cctgagtacatcaatcattgctgtc

SEQ ID NO: 133134 - DNA, 25 bp, Artificial
  Probe
gagtacatcaatcattgctgtcacc

SEQ ID NO: 133135 - DNA, 25 bp, Artificial
  Probe
tttccagcaaatcaaagacttgttc

SEQ ID NO: 133136 - DNA, 25 bp, Artificial
  Probe
acctgagtacatcaatcattgctgt

SEQ ID NO: 133137 - DNA, 25 bp, Artificial
  Probe
ttacccgtaccctactaactttcta

SEQ ID NO: 133138 - DNA, 25 bp, Artificial
  Probe
gattacccgtaccctactaactttc

SEQ ID NO: 133139 - DNA, 25 bp, Artificial
  Probe
tacccgtaccctactaactttctag

SEQ ID NO: 133140 - DNA, 25 bp, Artificial
  Probe
attacccgtaccctactaactttct

SEQ ID NO: 133141 - DNA, 25 bp, Artificial
  Probe
ctgagcatcggtattatgggaaatc

SEQ ID NO: 133142 - DNA, 25 bp, Artificial
  Probe
agtacatcaatcattgctgtcacca

SEQ ID NO: 133143 - DNA, 25 bp, Artificial
  Probe
ggattacccgtaccctactaacttt

SEQ ID NO: 133144 - DNA, 25 bp, Artificial
  Probe
catcggtattatgggaaatcgcttc

SEQ ID NO: 133145 - DNA, 25 bp, Artificial
  Probe
ttactgttctcgccatgatggatta

SEQ ID NO: 133146 - DNA, 25 bp, Artificial
  Probe
gatggattacccgtaccctactaac

SEQ ID NO: 133147 - DNA, 25 bp, Artificial
  Probe
atgatggattacccgtaccctacta

SEQ ID NO: 133148 - DNA, 25 bp, Artificial
  Probe
ttccagcaaatcaaagacttgttcc

SEQ ID NO: 133149 - DNA, 25 bp, Artificial
  Probe
caaatcaaagacttgttcctccagg

SEQ ID NO: 133150 - DNA, 25 bp, Artificial
  Probe
atggattacccgtaccctactaact

SEQ ID NO: 133151 - DNA, 25 bp, Artificial
  Probe
tgatggattacccgtaccctactaa

SEQ ID NO: 133152 - DNA, 25 bp, Artificial
  Probe
aaatccctttctctgatgaactccg

SEQ ID NO: 133153 - DNA, 25 bp, Artificial
  Probe
tggattacccgtaccctactaactt

SEQ ID NO: 133154 - DNA, 25 bp, Artificial
  Probe
tactgttctcgccatgatggattac

SEQ ID NO: 133155 - DNA, 25 bp, Artificial
  Probe
gcaaatcaaagacttgttcctccag

SEQ ID NO: 133156 - DNA, 25 bp, Artificial
  Probe
cagcaaatcaaagacttgttcctcc

SEQ ID NO: 133157 - DNA, 25 bp, Artificial
  Probe
ccagcaaatcaaagacttgttcctc

SEQ ID NO: 133158 - DNA, 25 bp, Artificial
  Probe
gaccaattcttccgagatgtcacag

SEQ ID NO: 133159 - DNA, 25 bp, Artificial
  Probe
catcaatcattgctgtcaccatcca

SEQ ID NO: 133160 - DNA, 25 bp, Artificial
  Probe
ctgtacggagatcaatctgaccttt

SEQ ID NO: 133161 - DNA, 25 bp, Artificial
  Probe
tgagcatcggtattatgggaaatcg

SEQ ID NO: 133162 - DNA, 25 bp, Artificial
  Probe
tgaaatccctttctctgatgaactc

SEQ ID NO: 133163 - DNA, 25 bp, Artificial
  Probe
ctgaaatccctttctctgatgaact

SEQ ID NO: 133164 - DNA, 25 bp, Artificial
  Probe
cctgtacggagatcaatctgacctt

SEQ ID NO: 133165 - DNA, 25 bp, Artificial
  Probe
ctttccagcaaatcaaagacttgtt

SEQ ID NO: 133166 - DNA, 25 bp, Artificial
  Probe
agcaaatcaaagacttgttcctcca

SEQ ID NO: 133167 - DNA, 25 bp, Artificial
  Probe
tccagcaaatcaaagacttgttcct

SEQ ID NO: 133168 - DNA, 25 bp, Artificial
  Probe
tgtacggagatcaatctgacctttg

SEQ ID NO: 133169 - DNA, 25 bp, Artificial
  Probe
acatcaatcattgctgtcaccatcc

SEQ ID NO: 133170 - DNA, 25 bp, Artificial
  Probe
gaaatccctttctctgatgaactcc

SEQ ID NO: 133171 - DNA, 25 bp, Artificial
  Probe
aaatcaaagacttgttcctccaggg

SEQ ID NO: 133172 - DNA, 25 bp, Artificial
  Probe
ggtgcagaagagaaagtgtcaactg

SEQ ID NO: 133173 - DNA, 25 bp, Artificial
  Probe
ctcggtgcagaagagaaagtgtcaa

SEQ ID NO: 133174 - DNA, 25 bp, Artificial
  Probe
gaatctcggtgcagaagagaaagtg

SEQ ID NO: 133175 - DNA, 25 bp, Artificial
  Probe
tgaatctcggtgcagaagagaaagt

SEQ ID NO: 133176 - DNA, 25 bp, Artificial
  Probe
aatctcggtgcagaagagaaagtgt

SEQ ID NO: 133177 - DNA, 25 bp, Artificial
  Probe
atctcggtgcagaagagaaagtgtc

SEQ ID NO: 133178 - DNA, 25 bp, Artificial
  Probe
gatgttgcttctgaatcactggtaa

SEQ ID NO: 133179 - DNA, 25 bp, Artificial
  Probe
cgaagttattggttggtgtgaagaa

SEQ ID NO: 133180 - DNA, 25 bp, Artificial
  Probe
gtaggatgttgcttctgaatcactg

SEQ ID NO: 133181 - DNA, 25 bp, Artificial
  Probe
taggatgttgcttctgaatcactgg

SEQ ID NO: 133182 - DNA, 25 bp, Artificial
  Probe
ggtaggatgttgcttctgaatcact

SEQ ID NO: 133183 - DNA, 25 bp, Artificial
  Probe
aagttattggttggtgtgaagaaag

SEQ ID NO: 133184 - DNA, 25 bp, Artificial
  Probe
gaagttattggttggtgtgaagaaa

SEQ ID NO: 133185 - DNA, 25 bp, Artificial
  Probe
gttcgtaaggattctcatgctgatg

SEQ ID NO: 133186 - DNA, 25 bp, Artificial
  Probe
ggatgttgcttctgaatcactggta

SEQ ID NO: 133187 - DNA, 25 bp, Artificial
  Probe
gcttctgttcttctcttgatgaaat

SEQ ID NO: 133188 - DNA, 25 bp, Artificial
  Probe
tattaagggtaggatgttgcttctg

SEQ ID NO: 133189 - DNA, 25 bp, Artificial
  Probe
gtattaagggtaggatgttgcttct

SEQ ID NO: 133190 - DNA, 25 bp, Artificial
  Probe
agtattaagggtaggatgttgcttc

SEQ ID NO: 133191 - DNA, 25 bp, Artificial
  Probe
cagtattaagggtaggatgttgctt

SEQ ID NO: 133192 - DNA, 25 bp, Artificial
  Probe
atgttgcttctgaatcactggtaaa

SEQ ID NO: 133193 - DNA, 25 bp, Artificial
  Probe
cttctgaatcactggtaaagtctga

SEQ ID NO: 133194 - DNA, 25 bp, Artificial
  Probe
cagcttctgttcttctcttgatgaa

SEQ ID NO: 133195 - DNA, 25 bp, Artificial
  Probe
gacacatcaactgactggttcctac

SEQ ID NO: 133196 - DNA, 25 bp, Artificial
  Probe
taagggtaggatgttgcttctgaat

SEQ ID NO: 133197 - DNA, 25 bp, Artificial
  Probe
attaagggtaggatgttgcttctga

SEQ ID NO: 133198 - DNA, 25 bp, Artificial
  Probe
aacatctcagcgttcgtaaggattc

SEQ ID NO: 133199 - DNA, 25 bp, Artificial
  Probe
agacacatcaactgactggttccta

SEQ ID NO: 133200 - DNA, 25 bp, Artificial
  Probe
tgttgcttctgaatcactggtaaag

SEQ ID NO: 133201 - DNA, 25 bp, Artificial
  Probe
catctcagcgttcgtaaggattctc

SEQ ID NO: 133202 - DNA, 25 bp, Artificial
  Probe
tgacagtattaagggtaggatgttg

SEQ ID NO: 133203 - DNA, 25 bp, Artificial
  Probe
agttattggttggtgtgaagaaagc

SEQ ID NO: 133204 - DNA, 25 bp, Artificial
  Probe
ttaagggtaggatgttgcttctgaa

SEQ ID NO: 133205 - DNA, 25 bp, Artificial
  Probe
ttgcttctgaatcactggtaaagtc

SEQ ID NO: 133206 - DNA, 25 bp, Artificial
  Probe
atgcgaagttattggttggtgtgaa

SEQ ID NO: 133207 - DNA, 25 bp, Artificial
  Probe
aatgcgaagttattggttggtgtga

SEQ ID NO: 133208 - DNA, 25 bp, Artificial
  Probe
ctgacagtattaagggtaggatgtt

SEQ ID NO: 133209 - DNA, 25 bp, Artificial
  Probe
cactggtaaagtctgatgatgtcac

SEQ ID NO: 133210 - DNA, 25 bp, Artificial
  Probe
tcactggtaaagtctgatgatgtca

SEQ ID NO: 133211 - DNA, 25 bp, Artificial
  Probe
tgatgatgtcacataagggttatcc

SEQ ID NO: 133212 - DNA, 25 bp, Artificial
  Probe
gtctgatgatgtcacataagggtta

SEQ ID NO: 133213 - DNA, 25 bp, Artificial
  Probe
gacagtattaagggtaggatgttgc

SEQ ID NO: 133214 - DNA, 25 bp, Artificial
  Probe
gttgcttctgaatcactggtaaagt

SEQ ID NO: 133215 - DNA, 25 bp, Artificial
  Probe
tggtaaagtctgatgatgtcacata

SEQ ID NO: 133216 - DNA, 25 bp, Artificial
  Probe
aaagtctgatgatgtcacataaggg

SEQ ID NO: 133217 - DNA, 25 bp, Artificial
  Probe
ctggtaaagtctgatgatgtcacat

SEQ ID NO: 133218 - DNA, 25 bp, Artificial
  Probe
ttcgtaaggattctcatgctgatgg

SEQ ID NO: 133219 - DNA, 25 bp, Artificial
  Probe
tctgatgatgtcacataagggttat

SEQ ID NO: 133220 - DNA, 25 bp, Artificial
  Probe
gcttctgaatcactggtaaagtctg

SEQ ID NO: 133221 - DNA, 25 bp, Artificial
  Probe
acagtattaagggtaggatgttgct

SEQ ID NO: 133222 - DNA, 25 bp, Artificial
  Probe
caacatctcagcgttcgtaaggatt

SEQ ID NO: 133223 - DNA, 25 bp, Artificial
  Probe
tgggaccctttggactttgtttatt

SEQ ID NO: 133224 - DNA, 25 bp, Artificial
  Probe
ttgggaccctttggactttgtttat

SEQ ID NO: 133225 - DNA, 25 bp, Artificial
  Probe
attgggaccctttggactttgttta

SEQ ID NO: 133226 - DNA, 25 bp, Artificial
  Probe
ctagcgtcaggataaagattgggac

SEQ ID NO: 133227 - DNA, 25 bp, Artificial
  Probe
ataaagattgggaccctttggactt

SEQ ID NO: 133228 - DNA, 25 bp, Artificial
  Probe
taaagattgggaccctttggacttt

SEQ ID NO: 133229 - DNA, 25 bp, Artificial
  Probe
gataaagattgggaccctttggact

SEQ ID NO: 133230 - DNA, 25 bp, Artificial
  Probe
tcaggataaagattgggaccctttg

SEQ ID NO: 133231 - DNA, 25 bp, Artificial
  Probe
gtcaggataaagattgggacccttt

SEQ ID NO: 133232 - DNA, 25 bp, Artificial
  Probe
gattgggaccctttggactttgttt

SEQ ID NO: 133233 - DNA, 25 bp, Artificial
  Probe
ggaataaacacagaaatcggggaga

SEQ ID NO: 133234 - DNA, 25 bp, Artificial
  Probe
ggataaagattgggaccctttggac

SEQ ID NO: 133235 - DNA, 25 bp, Artificial
  Probe
caggataaagattgggaccctttgg

SEQ ID NO: 133236 - DNA, 25 bp, Artificial
  Probe
tagcgtcaggataaagattgggacc

SEQ ID NO: 133237 - DNA, 25 bp, Artificial
  Probe
aggataaagattgggaccctttgga

SEQ ID NO: 133238 - DNA, 25 bp, Artificial
  Probe
agattgggaccctttggactttgtt

SEQ ID NO: 133239 - DNA, 25 bp, Artificial
  Probe
aaagattgggaccctttggactttg

SEQ ID NO: 133240 - DNA, 25 bp, Artificial
  Probe
aagattgggaccctttggactttgt

SEQ ID NO: 133241 - DNA, 25 bp, Artificial
  Probe
cgtcaggataaagattgggaccctt

SEQ ID NO: 133242 - DNA, 25 bp, Artificial
  Probe
atgttctgaggtgaatactggtgat

SEQ ID NO: 133243 - DNA, 25 bp, Artificial
  Probe
aaggtctcttattgacatcagcatc

SEQ ID NO: 133244 - DNA, 25 bp, Artificial
  Probe
ggtctcttattgacatcagcatcat

SEQ ID NO: 133245 - DNA, 25 bp, Artificial
  Probe
gtctcttattgacatcagcatcatt

SEQ ID NO: 133246 - DNA, 25 bp, Artificial
  Probe
gatgttctgaggtgaatactggtga

SEQ ID NO: 133247 - DNA, 25 bp, Artificial
  Probe
agatgttctgaggtgaatactggtg

SEQ ID NO: 133248 - DNA, 25 bp, Artificial
  Probe
tgttctgaggtgaatactggtgatg

SEQ ID NO: 133249 - DNA, 25 bp, Artificial
  Probe
aggtctcttattgacatcagcatca

SEQ ID NO: 133250 - DNA, 25 bp, Artificial
  Probe
tgctattgtccagagtgaaagatat

SEQ ID NO: 133251 - DNA, 25 bp, Artificial
  Probe
gttctgaggtgaatactggtgatgg

SEQ ID NO: 133252 - DNA, 25 bp, Artificial
  Probe
gctattgtccagagtgaaagatatt

SEQ ID NO: 133253 - DNA, 25 bp, Artificial
  Probe
ccttgtttccaccaatgttaagttt

SEQ ID NO: 133254 - DNA, 25 bp, Artificial
  Probe
tcttattgacatcagcatcatttga

SEQ ID NO: 133255 - DNA, 25 bp, Artificial
  Probe
ttccagtattaatctcttcttgcat

SEQ ID NO: 133256 - DNA, 25 bp, Artificial
  Probe
ctgctattgtccagagtgaaagata

SEQ ID NO: 133257 - DNA, 25 bp, Artificial
  Probe
ctcttattgacatcagcatcatttg

SEQ ID NO: 133258 - DNA, 25 bp, Artificial
  Probe
tctcttattgacatcagcatcattt

SEQ ID NO: 133259 - DNA, 25 bp, Artificial
  Probe
aaaggtctcttattgacatcagcat

SEQ ID NO: 133260 - DNA, 25 bp, Artificial
  Probe
agaaaggtctcttattgacatcagc

SEQ ID NO: 133261 - DNA, 25 bp, Artificial
  Probe
gaaaggtctcttattgacatcagca

SEQ ID NO: 133262 - DNA, 25 bp, Artificial
  Probe
cccttgtttccaccaatgttaagtt

SEQ ID NO: 133263 - DNA, 25 bp, Artificial
  Probe
cagtattaatctcttcttgcatagc

SEQ ID NO: 133264 - DNA, 25 bp, Artificial
  Probe
cttattgacatcagcatcatttgaa

SEQ ID NO: 133265 - DNA, 25 bp, Artificial
  Probe
tccagtattaatctcttcttgcata

SEQ ID NO: 133266 - DNA, 25 bp, Artificial
  Probe
ttattgacatcagcatcatttgaaa

SEQ ID NO: 133267 - DNA, 25 bp, Artificial
  Probe
ccagtattaatctcttcttgcatag

SEQ ID NO: 133268 - DNA, 25 bp, Artificial
  Probe
gtttccagtattaatctcttcttgc

SEQ ID NO: 133269 - DNA, 25 bp, Artificial
  Probe
atttgtgtggtggtagcagtgattt

SEQ ID NO: 133270 - DNA, 25 bp, Artificial
  Probe
ctaagcagatgttctgaggtgaata

SEQ ID NO: 133271 - DNA, 25 bp, Artificial
  Probe
taagcagatgttctgaggtgaatac

SEQ ID NO: 133272 - DNA, 25 bp, Artificial
  Probe
tttccagtattaatctcttcttgca

SEQ ID NO: 133273 - DNA, 25 bp, Artificial
  Probe
gggagaaagacacagaaataaaagg

SEQ ID NO: 133274 - DNA, 25 bp, Artificial
  Probe
ggggagaaagacacagaaataaaag

SEQ ID NO: 133275 - DNA, 25 bp, Artificial
  Probe
aggggagaaagacacagaaataaaa

SEQ ID NO: 133276 - DNA, 25 bp, Artificial
  Probe
caggggagaaagacacagaaataaa

SEQ ID NO: 133277 - DNA, 25 bp, Artificial
  Probe
atcatttgaaaacactaaaggcaca

SEQ ID NO: 133278 - DNA, 25 bp, Artificial
  Probe
catcatttgaaaacactaaaggcac

SEQ ID NO: 133279 - DNA, 25 bp, Artificial
  Probe
ggagaaagacacagaaataaaaggt

SEQ ID NO: 133280 - DNA, 25 bp, Artificial
  Probe
ctattgtccagagtgaaagatattt

SEQ ID NO: 133281 - DNA, 25 bp, Artificial
  Probe
cagcatcatttgaaaacactaaagg

SEQ ID NO: 133282 - DNA, 25 bp, Artificial
  Probe
gctgctattgtccagagtgaaagat

SEQ ID NO: 133283 - DNA, 25 bp, Artificial
  Probe
agcatcatttgaaaacactaaaggc

SEQ ID NO: 133284 - DNA, 25 bp, Artificial
  Probe
ttaatctcttcttgcatagcatcat

SEQ ID NO: 133285 - DNA, 25 bp, Artificial
  Probe
attaatctcttcttgcatagcatca

SEQ ID NO: 133286 - DNA, 25 bp, Artificial
  Probe
gcatcatttgaaaacactaaaggca

SEQ ID NO: 133287 - DNA, 25 bp, Artificial
  Probe
cttagtcactttagtacctccactg

SEQ ID NO: 133288 - DNA, 25 bp, Artificial
  Probe
ctcagcttagtcactttagtacctc

SEQ ID NO: 133289 - DNA, 25 bp, Artificial
  Probe
gcttagtcactttagtacctccact

SEQ ID NO: 133290 - DNA, 25 bp, Artificial
  Probe
ttagtcactttagtacctccactgc

SEQ ID NO: 133291 - DNA, 25 bp, Artificial
  Probe
tcagcttagtcactttagtacctcc

SEQ ID NO: 133292 - DNA, 25 bp, Artificial
  Probe
cctcagcttagtcactttagtacct

SEQ ID NO: 133293 - DNA, 25 bp, Artificial
  Probe
agcttagtcactttagtacctccac

SEQ ID NO: 133294 - DNA, 25 bp, Artificial
  Probe
cagcttagtcactttagtacctcca

SEQ ID NO: 133295 - DNA, 25 bp, Artificial
  Probe
gtattatcagcagggacagatgtgg

SEQ ID NO: 133296 - DNA, 25 bp, Artificial
  Probe
ggtattatcagcagggacagatgtg

SEQ ID NO: 133297 - DNA, 25 bp, Artificial
  Probe
ctccttctgtgttggatgtctcatg

SEQ ID NO: 133298 - DNA, 25 bp, Artificial
  Probe
agtccaggtctgaatgagtcacaag

SEQ ID NO: 133299 - DNA, 25 bp, Artificial
  Probe
gagtccaggtctgaatgagtcacaa

SEQ ID NO: 133300 - DNA, 25 bp, Artificial
  Probe
tagtcactttagtacctccactgct

SEQ ID NO: 133301 - DNA, 25 bp, Artificial
  Probe
gtcactttagtacctccactgcttc

SEQ ID NO: 133302 - DNA, 25 bp, Artificial
  Probe
gcctcagcttagtcactttagtacc

SEQ ID NO: 133303 - DNA, 25 bp, Artificial
  Probe
tgggtattatcagcagggacagatg

SEQ ID NO: 133304 - DNA, 25 bp, Artificial
  Probe
gtgggtattatcagcagggacagat

SEQ ID NO: 133305 - DNA, 25 bp, Artificial
  Probe
gtcagggacatttggctcttcttag

SEQ ID NO: 133306 - DNA, 25 bp, Artificial
  Probe
tcactttagtacctccactgcttca

SEQ ID NO: 133307 - DNA, 25 bp, Artificial
  Probe
agtcactttagtacctccactgctt

SEQ ID NO: 133308 - DNA, 25 bp, Artificial
  Probe
tattatcagcagggacagatgtggg

SEQ ID NO: 133309 - DNA, 25 bp, Artificial
  Probe
gggtattatcagcagggacagatgt

SEQ ID NO: 133310 - DNA, 25 bp, Artificial
  Probe
ggatggattgccatactcttaggtt

SEQ ID NO: 133311 - DNA, 25 bp, Artificial
  Probe
cacccctttccaaaatacgcaatag

SEQ ID NO: 133312 - DNA, 25 bp, Artificial
  Probe
tttgttcttacagagaccaagaggc

SEQ ID NO: 133313 - DNA, 25 bp, Artificial
  Probe
gtccaggtctgaatgagtcacaagg

SEQ ID NO: 133314 - DNA, 25 bp, Artificial
  Probe
gctccttctgtgttggatgtctcat

SEQ ID NO: 133315 - DNA, 25 bp, Artificial
  Probe
cctttccaaaatacgcaatagcctg

SEQ ID NO: 133316 - DNA, 25 bp, Artificial
  Probe
gaggagtccaggtctgaatgagtca

SEQ ID NO: 133317 - DNA, 25 bp, Artificial
  Probe
gatacaagggctcctatcacaccaa

SEQ ID NO: 133318 - DNA, 25 bp, Artificial
  Probe
ggcctcagcttagtcactttagtac

SEQ ID NO: 133319 - DNA, 25 bp, Artificial
  Probe
gacggatggattgccatactcttag

SEQ ID NO: 133320 - DNA, 25 bp, Artificial
  Probe
ctgctggcaaggattaacaaccaag

SEQ ID NO: 133321 - DNA, 25 bp, Artificial
  Probe
gatggattgccatactcttaggttt

SEQ ID NO: 133322 - DNA, 25 bp, Artificial
  Probe
ctcttcttagcaggctctgttcacc

SEQ ID NO: 133323 - DNA, 25 bp, Artificial
  Probe
atacaagggctcctatcacaccaac

SEQ ID NO: 133324 - DNA, 25 bp, Artificial
  Probe
ttttgttcttacagagaccaagagg

SEQ ID NO: 133325 - DNA, 25 bp, Artificial
  Probe
gctgttctatctgcaaaatcatcga

SEQ ID NO: 133326 - DNA, 25 bp, Artificial
  Probe
cttcttagcaggctctgttcaccag

SEQ ID NO: 133327 - DNA, 25 bp, Artificial
  Probe
aaatcatcgatacaagggctcctat

SEQ ID NO: 133328 - DNA, 25 bp, Artificial
  Probe
ccacccctttccaaaatacgcaata

SEQ ID NO: 133329 - DNA, 25 bp, Artificial
  Probe
tccttctgtgttggatgtctcatga

SEQ ID NO: 133330 - DNA, 25 bp, Artificial
  Probe
ccctttccaaaatacgcaatagcct

SEQ ID NO: 133331 - DNA, 25 bp, Artificial
  Probe
aatcatcgatacaagggctcctatc

SEQ ID NO: 133332 - DNA, 25 bp, Artificial
  Probe
tgtctatcttggattactatgagcc

SEQ ID NO: 133333 - DNA, 25 bp, Artificial
  Probe
atgtctatcttggattactatgagc

SEQ ID NO: 133334 - DNA, 25 bp, Artificial
  Probe
tcttggattactatgagccagtcta

SEQ ID NO: 133335 - DNA, 25 bp, Artificial
  Probe
cttggattactatgagccagtctaa

SEQ ID NO: 133336 - DNA, 25 bp, Artificial
  Probe
tatcttggattactatgagccagtc

SEQ ID NO: 133337 - DNA, 25 bp, Artificial
  Probe
ctatcttggattactatgagccagt

SEQ ID NO: 133338 - DNA, 25 bp, Artificial
  Probe
gtctatcttggattactatgagcca

SEQ ID NO: 133339 - DNA, 25 bp, Artificial
  Probe
atcttggattactatgagccagtct

SEQ ID NO: 133340 - DNA, 25 bp, Artificial
  Probe
tctatcttggattactatgagccag

SEQ ID NO: 133341 - DNA, 25 bp, Artificial
  Probe
tggacagttgctttgaagagtataa

SEQ ID NO: 133342 - DNA, 25 bp, Artificial
  Probe
atggacagttgctttgaagagtata

SEQ ID NO: 133343 - DNA, 25 bp, Artificial
  Probe
tatggacagttgctttgaagagtat

SEQ ID NO: 133344 - DNA, 25 bp, Artificial
  Probe
aaggatgagtgtgttatagcgactg

SEQ ID NO: 133345 - DNA, 25 bp, Artificial
  Probe
ctatggacagttgctttgaagagta

SEQ ID NO: 133346 - DNA, 25 bp, Artificial
  Probe
tgtgttatagcgactgaggtttaag

SEQ ID NO: 133347 - DNA, 25 bp, Artificial
  Probe
tctactctacttcaaaggacaccaa

SEQ ID NO: 133348 - DNA, 25 bp, Artificial
  Probe
taccagtcggtgtatgttctatctg

SEQ ID NO: 133349 - DNA, 25 bp, Artificial
  Probe
ggacagttgctttgaagagtataat

SEQ ID NO: 133350 - DNA, 25 bp, Artificial
  Probe
aagtaccagtcggtgtatgttctat

SEQ ID NO: 133351 - DNA, 25 bp, Artificial
  Probe
gtgtgttatagcgactgaggtttaa

SEQ ID NO: 133352 - DNA, 25 bp, Artificial
  Probe
ctactctacttcaaaggacaccaag

SEQ ID NO: 133353 - DNA, 25 bp, Artificial
  Probe
ttaaatggacgagtgacttgagttc

SEQ ID NO: 133354 - DNA, 25 bp, Artificial
  Probe
gttatagcgactgaggtttaaggtg

SEQ ID NO: 133355 - DNA, 25 bp, Artificial
  Probe
gtgttatagcgactgaggtttaagg

SEQ ID NO: 133356 - DNA, 25 bp, Artificial
  Probe
tgaactagaaacacaactgccttta

SEQ ID NO: 133357 - DNA, 25 bp, Artificial
  Probe
gtaccagtcggtgtatgttctatct

SEQ ID NO: 133358 - DNA, 25 bp, Artificial
  Probe
agtaccagtcggtgtatgttctatc

SEQ ID NO: 133359 - DNA, 25 bp, Artificial
  Probe
gatgagtgtgttatagcgactgagg

SEQ ID NO: 133360 - DNA, 25 bp, Artificial
  Probe
ggatgagtgtgttatagcgactgag

SEQ ID NO: 133361 - DNA, 25 bp, Artificial
  Probe
agtctgtctactctacttcaaagga

SEQ ID NO: 133362 - DNA, 25 bp, Artificial
  Probe
ctatgagccagtctaaacttgaact

SEQ ID NO: 133363 - DNA, 25 bp, Artificial
  Probe
ggattactatgagccagtctaaact

SEQ ID NO: 133364 - DNA, 25 bp, Artificial
  Probe
actatgagccagtctaaacttgaac

SEQ ID NO: 133365 - DNA, 25 bp, Artificial
  Probe
tgttatagcgactgaggtttaaggt

SEQ ID NO: 133366 - DNA, 25 bp, Artificial
  Probe
tatgagccagtctaaacttgaacta

SEQ ID NO: 133367 - DNA, 25 bp, Artificial
  Probe
tactatgagccagtctaaacttgaa

SEQ ID NO: 133368 - DNA, 25 bp, Artificial
  Probe
ttactatgagccagtctaaacttga

SEQ ID NO: 133369 - DNA, 25 bp, Artificial
  Probe
aaacttgaactagaaacacaactgc

SEQ ID NO: 133370 - DNA, 25 bp, Artificial
  Probe
caagtaccagtcggtgtatgttcta

SEQ ID NO: 133371 - DNA, 25 bp, Artificial
  Probe
atgagccagtctaaacttgaactag

SEQ ID NO: 133372 - DNA, 25 bp, Artificial
  Probe
ggcaaagttcccatttctcttaaat

SEQ ID NO: 133373 - DNA, 25 bp, Artificial
  Probe
aggatgagtgtgttatagcgactga

SEQ ID NO: 133374 - DNA, 25 bp, Artificial
  Probe
gtctgtctactctacttcaaaggac

SEQ ID NO: 133375 - DNA, 25 bp, Artificial
  Probe
agtgtgttatagcgactgaggttta

SEQ ID NO: 133376 - DNA, 25 bp, Artificial
  Probe
ttgaactagaaacacaactgccttt

SEQ ID NO: 133377 - DNA, 25 bp, Artificial
  Probe
ttattgctcaagtcaacaactatga

SEQ ID NO: 133378 - DNA, 25 bp, Artificial
  Probe
tcaagtcaacaactatgagctgaac

SEQ ID NO: 133379 - DNA, 25 bp, Artificial
  Probe
ccatctttattgctcaagtcaacaa

SEQ ID NO: 133380 - DNA, 25 bp, Artificial
  Probe
catctttattgctcaagtcaacaac

SEQ ID NO: 133381 - DNA, 25 bp, Artificial
  Probe
atctttattgctcaagtcaacaact

SEQ ID NO: 133382 - DNA, 25 bp, Artificial
  Probe
tctttattgctcaagtcaacaacta

SEQ ID NO: 133383 - DNA, 25 bp, Artificial
  Probe
gtcaacaactatgagctgaaccttg

SEQ ID NO: 133384 - DNA, 25 bp, Artificial
  Probe
agtcaacaactatgagctgaacctt

SEQ ID NO: 133385 - DNA, 25 bp, Artificial
  Probe
aagtcaacaactatgagctgaacct

SEQ ID NO: 133386 - DNA, 25 bp, Artificial
  Probe
caagtcaacaactatgagctgaacc

SEQ ID NO: 133387 - DNA, 25 bp, Artificial
  Probe
ggtaatgagagtgtcatgtgagaag

SEQ ID NO: 133388 - DNA, 25 bp, Artificial
  Probe
gattggttccttgatcgacttcgta

SEQ ID NO: 133389 - DNA, 25 bp, Artificial
  Probe
gccatctttattgctcaagtcaaca

SEQ ID NO: 133390 - DNA, 25 bp, Artificial
  Probe
tttattgctcaagtcaacaactatg

SEQ ID NO: 133391 - DNA, 25 bp, Artificial
  Probe
aggtaatgagagtgtcatgtgagaa

SEQ ID NO: 133392 - DNA, 25 bp, Artificial
  Probe
attggttccttgatcgacttcgtac

SEQ ID NO: 133393 - DNA, 25 bp, Artificial
  Probe
ctttattgctcaagtcaacaactat

SEQ ID NO: 133394 - DNA, 25 bp, Artificial
  Probe
gtaatgagagtgtcatgtgagaagc

SEQ ID NO: 133395 - DNA, 25 bp, Artificial
  Probe
gaggtaatgagagtgtcatgtgaga

SEQ ID NO: 133396 - DNA, 25 bp, Artificial
  Probe
aacaactatgagctgaaccttggtc

SEQ ID NO: 133397 - DNA, 25 bp, Artificial
  Probe
tcaacaactatgagctgaaccttgg

SEQ ID NO: 133398 - DNA, 25 bp, Artificial
  Probe
attgatcatagctgtggattggttc

SEQ ID NO: 133399 - DNA, 25 bp, Artificial
  Probe
taatgagagtgtcatgtgagaagct

SEQ ID NO: 133400 - DNA, 25 bp, Artificial
  Probe
atagctgtggattggttccttgatc

SEQ ID NO: 133401 - DNA, 25 bp, Artificial
  Probe
gatcatagctgtggattggttcctt

SEQ ID NO: 133402 - DNA, 25 bp, Artificial
  Probe
caacaactatgagctgaaccttggt

SEQ ID NO: 133403 - DNA, 25 bp, Artificial
  Probe
cattgatcatagctgtggattggtt

SEQ ID NO: 133404 - DNA, 25 bp, Artificial
  Probe
ggaggtaatgagagtgtcatgtgag

SEQ ID NO: 133405 - DNA, 25 bp, Artificial
  Probe
catagctgtggattggttccttgat

SEQ ID NO: 133406 - DNA, 25 bp, Artificial
  Probe
atcatagctgtggattggttccttg

SEQ ID NO: 133407 - DNA, 25 bp, Artificial
  Probe
tgctgagataaaagagaaggaatga

SEQ ID NO: 133408 - DNA, 25 bp, Artificial
  Probe
actgctgagataaaagagaaggaat

SEQ ID NO: 133409 - DNA, 25 bp, Artificial
  Probe
gactgctgagataaaagagaaggaa

SEQ ID NO: 133410 - DNA, 25 bp, Artificial
  Probe
ctgctgagataaaagagaaggaatg

SEQ ID NO: 133411 - DNA, 25 bp, Artificial
  Probe
tattgctcaagtcaacaactatgag

SEQ ID NO: 133412 - DNA, 25 bp, Artificial
  Probe
gctgagataaaagagaaggaatgaa

SEQ ID NO: 133413 - DNA, 25 bp, Artificial
  Probe
agccatctttattgctcaagtcaac

SEQ ID NO: 133414 - DNA, 25 bp, Artificial
  Probe
cagccatctttattgctcaagtcaa

SEQ ID NO: 133415 - DNA, 25 bp, Artificial
  Probe
ctcaagtcaacaactatgagctgaa

SEQ ID NO: 133416 - DNA, 25 bp, Artificial
  Probe
ggactgctgagataaaagagaagga

SEQ ID NO: 133417 - DNA, 25 bp, Artificial
  Probe
acaactatgagctgaaccttggtca

SEQ ID NO: 133418 - DNA, 25 bp, Artificial
  Probe
acattgatcatagctgtggattggt

SEQ ID NO: 133419 - DNA, 25 bp, Artificial
  Probe
agataaaagagaaggaatgaaaggt

SEQ ID NO: 133420 - DNA, 25 bp, Artificial
  Probe
gtggattggttccttgatcgacttc

SEQ ID NO: 133421 - DNA, 25 bp, Artificial
  Probe
tcatagctgtggattggttccttga

SEQ ID NO: 133422 - DNA, 25 bp, Artificial
  Probe
ctggtaatgaattagagtgtgtggt

SEQ ID NO: 133423 - DNA, 25 bp, Artificial
  Probe
tggtaatgaattagagtgtgtggta

SEQ ID NO: 133424 - DNA, 25 bp, Artificial
  Probe
tctggtaatgaattagagtgtgtgg

SEQ ID NO: 133425 - DNA, 25 bp, Artificial
  Probe
ggtaatgaattagagtgtgtggtaa

SEQ ID NO: 133426 - DNA, 25 bp, Artificial
  Probe
gtaatgaattagagtgtgtggtaac

SEQ ID NO: 133427 - DNA, 25 bp, Artificial
  Probe
tgtaagaacacgatcaatatggatt

SEQ ID NO: 133428 - DNA, 25 bp, Artificial
  Probe
taatgaattagagtgtgtggtaaca

SEQ ID NO: 133429 - DNA, 25 bp, Artificial
  Probe
ggtaaatgtttcgcccaaatatagg

SEQ ID NO: 133430 - DNA, 25 bp, Artificial
  Probe
gtaaatgtttcgcccaaatatagga

SEQ ID NO: 133431 - DNA, 25 bp, Artificial
  Probe
ataataggtggtggtaaatgtttcg

SEQ ID NO: 133432 - DNA, 25 bp, Artificial
  Probe
aggagtgaagagtctaatgaaatga

SEQ ID NO: 133433 - DNA, 25 bp, Artificial
  Probe
aatgtttcgcccaaatataggaatg

SEQ ID NO: 133434 - DNA, 25 bp, Artificial
  Probe
gtttcgcccaaatataggaatgatt

SEQ ID NO: 133435 - DNA, 25 bp, Artificial
  Probe
ctgagcattagtgatatgaccctat

SEQ ID NO: 133436 - DNA, 25 bp, Artificial
  Probe
ggagtgaagagtctaatgaaatgag

SEQ ID NO: 133437 - DNA, 25 bp, Artificial
  Probe
tgtttcgcccaaatataggaatgat

SEQ ID NO: 133438 - DNA, 25 bp, Artificial
  Probe
atgtttcgcccaaatataggaatga

SEQ ID NO: 133439 - DNA, 25 bp, Artificial
  Probe
aaatgtttcgcccaaatataggaat

SEQ ID NO: 133440 - DNA, 25 bp, Artificial
  Probe
tgagcattagtgatatgaccctatt

SEQ ID NO: 133441 - DNA, 25 bp, Artificial
  Probe
ctaagatgtatgctattccctatgc

SEQ ID NO: 133442 - DNA, 25 bp, Artificial
  Probe
taataggtggtggtaaatgtttcgc

SEQ ID NO: 133443 - DNA, 25 bp, Artificial
  Probe
taaatgtttcgcccaaatataggaa

SEQ ID NO: 133444 - DNA, 25 bp, Artificial
  Probe
aaatgagattcactttctgggtagg

SEQ ID NO: 133445 - DNA, 25 bp, Artificial
  Probe
actgagcattagtgatatgacccta

SEQ ID NO: 133446 - DNA, 25 bp, Artificial
  Probe
aaggagtgaagagtctaatgaaatg

SEQ ID NO: 133447 - DNA, 25 bp, Artificial
  Probe
gagcattagtgatatgaccctattt

SEQ ID NO: 133448 - DNA, 25 bp, Artificial
  Probe
aacacgatcaatatggatttacaca

SEQ ID NO: 133449 - DNA, 25 bp, Artificial
  Probe
tttcgcccaaatataggaatgattt

SEQ ID NO: 133450 - DNA, 25 bp, Artificial
  Probe
ttctctatggtaatttcctgaatgg

SEQ ID NO: 133451 - DNA, 25 bp, Artificial
  Probe
atcaaacaggatatgtcttgtgacc

SEQ ID NO: 133452 - DNA, 25 bp, Artificial
  Probe
gagtgaagagtctaatgaaatgaga

SEQ ID NO: 133453 - DNA, 25 bp, Artificial
  Probe
cataataggtggtggtaaatgtttc

SEQ ID NO: 133454 - DNA, 25 bp, Artificial
  Probe
acacgatcaatatggatttacacat

SEQ ID NO: 133455 - DNA, 25 bp, Artificial
  Probe
gaacacgatcaatatggatttacac

SEQ ID NO: 133456 - DNA, 25 bp, Artificial
  Probe
agaacacgatcaatatggatttaca

SEQ ID NO: 133457 - DNA, 25 bp, Artificial
  Probe
ccaagactaagaatttaaggagtga

SEQ ID NO: 133458 - DNA, 25 bp, Artificial
  Probe
gatcaaacaggatatgtcttgtgac

SEQ ID NO: 133459 - DNA, 25 bp, Artificial
  Probe
tggtaatttcctgaatggagtaagt

SEQ ID NO: 133460 - DNA, 25 bp, Artificial
  Probe
actaagatgtatgctattccctatg

SEQ ID NO: 133461 - DNA, 25 bp, Artificial
  Probe
tctatggtaatttcctgaatggagt

SEQ ID NO: 133462 - DNA, 25 bp, Artificial
  Probe
gtggtaaatgtttcgcccaaatata

SEQ ID NO: 133463 - DNA, 25 bp, Artificial
  Probe
tggtaaatgtttcgcccaaatatag

SEQ ID NO: 133464 - DNA, 25 bp, Artificial
  Probe
tctctatggtaatttcctgaatgga

SEQ ID NO: 133465 - DNA, 25 bp, Artificial
  Probe
ttaaggagtgaagagtctaatgaaa

SEQ ID NO: 133466 - DNA, 25 bp, Artificial
  Probe
tttaaggagtgaagagtctaatgaa

SEQ ID NO: 133467 - DNA, 25 bp, Artificial
  Probe
atttgggataagtggttaggttcat

SEQ ID NO: 133468 - DNA, 25 bp, Artificial
  Probe
agatttgggataagtggttaggttc

SEQ ID NO: 133469 - DNA, 25 bp, Artificial
  Probe
tacagatttgggataagtggttagg

SEQ ID NO: 133470 - DNA, 25 bp, Artificial
  Probe
gtaacaaagacaagaggacaacatt

SEQ ID NO: 133471 - DNA, 25 bp, Artificial
  Probe
agtaacaaagacaagaggacaacat

SEQ ID NO: 133472 - DNA, 25 bp, Artificial
  Probe
gatttgggataagtggttaggttca

SEQ ID NO: 133473 - DNA, 25 bp, Artificial
  Probe
cagatttgggataagtggttaggtt

SEQ ID NO: 133474 - DNA, 25 bp, Artificial
  Probe
aacaaagacaagaggacaacattag

SEQ ID NO: 133475 - DNA, 25 bp, Artificial
  Probe
tgggataagtggttaggttcataaa

SEQ ID NO: 133476 - DNA, 25 bp, Artificial
  Probe
ttgggataagtggttaggttcataa

SEQ ID NO: 133477 - DNA, 25 bp, Artificial
  Probe
tttgggataagtggttaggttcata

SEQ ID NO: 133478 - DNA, 25 bp, Artificial
  Probe
acaaagacaagaggacaacattagg

SEQ ID NO: 133479 - DNA, 25 bp, Artificial
  Probe
cagtaacaaagacaagaggacaaca

SEQ ID NO: 133480 - DNA, 25 bp, Artificial
  Probe
ctctgtagatgctctcatttcaaac

SEQ ID NO: 133481 - DNA, 25 bp, Artificial
  Probe
acagatttgggataagtggttaggt

SEQ ID NO: 133482 - DNA, 25 bp, Artificial
  Probe
acccacttgaaaccacattaagaaa

SEQ ID NO: 133483 - DNA, 25 bp, Artificial
  Probe
aaccctttgtttatctgtcactctg

SEQ ID NO: 133484 - DNA, 25 bp, Artificial
  Probe
gctctgtagatgctctcatttcaaa

SEQ ID NO: 133485 - DNA, 25 bp, Artificial
  Probe
tctgtagatgctctcatttcaaacg

SEQ ID NO: 133486 - DNA, 25 bp, Artificial
  Probe
ttacagatttgggataagtggttag

SEQ ID NO: 133487 - DNA, 25 bp, Artificial
  Probe
taacaaagacaagaggacaacatta

SEQ ID NO: 133488 - DNA, 25 bp, Artificial
  Probe
ccagtaacaaagacaagaggacaac

SEQ ID NO: 133489 - DNA, 25 bp, Artificial
  Probe
gacccacttgaaaccacattaagaa

SEQ ID NO: 133490 - DNA, 25 bp, Artificial
  Probe
accctttgtttatctgtcactctgt

SEQ ID NO: 133491 - DNA, 25 bp, Artificial
  Probe
ttgttcaatatatgtttgtgtgcca

SEQ ID NO: 133492 - DNA, 25 bp, Artificial
  Probe
tctcccattcagtacagttatccag

SEQ ID NO: 133493 - DNA, 25 bp, Artificial
  Probe
cattcagtacagttatccagccacc

SEQ ID NO: 133494 - DNA, 25 bp, Artificial
  Probe
ccattcagtacagttatccagccac

SEQ ID NO: 133495 - DNA, 25 bp, Artificial
  Probe
gttgttcaatatatgtttgtgtgcc

SEQ ID NO: 133496 - DNA, 25 bp, Artificial
  Probe
ggttgttcaatatatgtttgtgtgc

SEQ ID NO: 133497 - DNA, 25 bp, Artificial
  Probe
caaagacaagaggacaacattaggc

SEQ ID NO: 133498 - DNA, 25 bp, Artificial
  Probe
gtctcccattcagtacagttatcca

SEQ ID NO: 133499 - DNA, 25 bp, Artificial
  Probe
tttacagatttgggataagtggtta

SEQ ID NO: 133500 - DNA, 25 bp, Artificial
  Probe
ttgtttatctgtcactctgtgtagt

SEQ ID NO: 133501 - DNA, 25 bp, Artificial
  Probe
atgttgatgtaaaggcacactgaaa

SEQ ID NO: 133502 - DNA, 25 bp, Artificial
  Probe
cctttgtttatctgtcactctgtgt

SEQ ID NO: 133503 - DNA, 25 bp, Artificial
  Probe
tgacccacttgaaaccacattaaga

SEQ ID NO: 133504 - DNA, 25 bp, Artificial
  Probe
tttgtttatctgtcactctgtgtag

SEQ ID NO: 133505 - DNA, 25 bp, Artificial
  Probe
ctttgtttatctgtcactctgtgta

SEQ ID NO: 133506 - DNA, 25 bp, Artificial
  Probe
gtagatgctctcatttcaaacgctc

SEQ ID NO: 133507 - DNA, 25 bp, Artificial
  Probe
gatgttgatgtaaaggcacactgaa

SEQ ID NO: 133508 - DNA, 25 bp, Artificial
  Probe
tggttgttcaatatatgtttgtgtg

SEQ ID NO: 133509 - DNA, 25 bp, Artificial
  Probe
gtggttgttcaatatatgtttgtgt

SEQ ID NO: 133510 - DNA, 25 bp, Artificial
  Probe
tgttggctctgtagatgctctcatt

SEQ ID NO: 133511 - DNA, 25 bp, Artificial
  Probe
ccctttgtttatctgtcactctgtg

SEQ ID NO: 133512 - DNA, 25 bp, Artificial
  Probe
tagtatgatcttgattgagaggctt

SEQ ID NO: 133513 - DNA, 25 bp, Artificial
  Probe
catagtatgatcttgattgagaggc

SEQ ID NO: 133514 - DNA, 25 bp, Artificial
  Probe
atagtatgatcttgattgagaggct

SEQ ID NO: 133515 - DNA, 25 bp, Artificial
  Probe
cacacctcccagaaatcaagataat

SEQ ID NO: 133516 - DNA, 25 bp, Artificial
  Probe
aagtctgactccttcactctctagt

SEQ ID NO: 133517 - DNA, 25 bp, Artificial
  Probe
atcacacctcccagaaatcaagata

SEQ ID NO: 133518 - DNA, 25 bp, Artificial
  Probe
tcacacctcccagaaatcaagataa

SEQ ID NO: 133519 - DNA, 25 bp, Artificial
  Probe
taaccaggtatggactgacaacttc

SEQ ID NO: 133520 - DNA, 25 bp, Artificial
  Probe
ctaaccaggtatggactgacaactt

SEQ ID NO: 133521 - DNA, 25 bp, Artificial
  Probe
agtatgatcttgattgagaggcttt

SEQ ID NO: 133522 - DNA, 25 bp, Artificial
  Probe
gatgttgaccacttccgaataccag

SEQ ID NO: 133523 - DNA, 25 bp, Artificial
  Probe
atgttgaccacttccgaataccaga

SEQ ID NO: 133524 - DNA, 25 bp, Artificial
  Probe
aaagtctgactccttcactctctag

SEQ ID NO: 133525 - DNA, 25 bp, Artificial
  Probe
catcacacctcccagaaatcaagat

SEQ ID NO: 133526 - DNA, 25 bp, Artificial
  Probe
caaagtctgactccttcactctcta

SEQ ID NO: 133527 - DNA, 25 bp, Artificial
  Probe
tgatgttgaccacttccgaatacca

SEQ ID NO: 133528 - DNA, 25 bp, Artificial
  Probe
aaccaggtatggactgacaacttct

SEQ ID NO: 133529 - DNA, 25 bp, Artificial
  Probe
tgttgaccacttccgaataccagag

SEQ ID NO: 133530 - DNA, 25 bp, Artificial
  Probe
gtgatgttgaccacttccgaatacc

SEQ ID NO: 133531 - DNA, 25 bp, Artificial
  Probe
cctaaccaggtatggactgacaact

SEQ ID NO: 133532 - DNA, 25 bp, Artificial
  Probe
tcatagtatgatcttgattgagagg

SEQ ID NO: 133533 - DNA, 25 bp, Artificial
  Probe
accaggtatggactgacaacttctc

SEQ ID NO: 133534 - DNA, 25 bp, Artificial
  Probe
cacttccgaataccagagggatttc

SEQ ID NO: 133535 - DNA, 25 bp, Artificial
  Probe
gaataccagagggatttccagcttc

SEQ ID NO: 133536 - DNA, 25 bp, Artificial
  Probe
tatgatcttgattgagaggcttttg

SEQ ID NO: 133537 - DNA, 25 bp, Artificial
  Probe
gtatgatcttgattgagaggctttt

SEQ ID NO: 133538 - DNA, 25 bp, Artificial
  Probe
gttgaccacttccgaataccagagg

SEQ ID NO: 133539 - DNA, 25 bp, Artificial
  Probe
tagtgatgttgaccacttccgaata

SEQ ID NO: 133540 - DNA, 25 bp, Artificial
  Probe
ccaggtatggactgacaacttctcc

SEQ ID NO: 133541 - DNA, 25 bp, Artificial
  Probe
actctctagtgatgttgaccacttc

SEQ ID NO: 133542 - DNA, 25 bp, Artificial
  Probe
ccaaagtctgactccttcactctct

SEQ ID NO: 133543 - DNA, 25 bp, Artificial
  Probe
cactctctagtgatgttgaccactt

SEQ ID NO: 133544 - DNA, 25 bp, Artificial
  Probe
atgatcttgattgagaggcttttgc

SEQ ID NO: 133545 - DNA, 25 bp, Artificial
  Probe
tggtgattcagactctgtgttttaa

SEQ ID NO: 133546 - DNA, 25 bp, Artificial
  Probe
ggtgattcagactctgtgttttaat

SEQ ID NO: 133547 - DNA, 25 bp, Artificial
  Probe
ctggtgattcagactctgtgtttta

SEQ ID NO: 133548 - DNA, 25 bp, Artificial
  Probe
ctctctagtgatgttgaccacttcc

SEQ ID NO: 133549 - DNA, 25 bp, Artificial
  Probe
gagatgttcagactccagtctcttc

SEQ ID NO: 133550 - DNA, 25 bp, Artificial
  Probe
ctagtgatgttgaccacttccgaat

SEQ ID NO: 133551 - DNA, 25 bp, Artificial
  Probe
agtctgactccttcactctctagtg

SEQ ID NO: 133552 - DNA, 25 bp, Artificial
  Probe
gtgattcagactctgtgttttaatg

SEQ ID NO: 133553 - DNA, 25 bp, Artificial
  Probe
ttccgaataccagagggatttccag

SEQ ID NO: 133554 - DNA, 25 bp, Artificial
  Probe
cttccgaataccagagggatttcca

SEQ ID NO: 133555 - DNA, 25 bp, Artificial
  Probe
acttccgaataccagagggatttcc

SEQ ID NO: 133556 - DNA, 25 bp, Artificial
  Probe
tgattcagactctgtgttttaatga

SEQ ID NO: 133557 - DNA, 25 bp, Artificial
  Probe
ccaaacccaaacaacaaacaaataa

SEQ ID NO: 133558 - DNA, 25 bp, Artificial
  Probe
aagaagtgctccaaagaaattagac

SEQ ID NO: 133559 - DNA, 25 bp, Artificial
  Probe
cccaaacccaaacaacaaacaaata

SEQ ID NO: 133560 - DNA, 25 bp, Artificial
  Probe
gaagaagtgctccaaagaaattaga

SEQ ID NO: 133561 - DNA, 25 bp, Artificial
  Probe
aagtgctccaaagaaattagactct

SEQ ID NO: 133562 - DNA, 25 bp, Artificial
  Probe
gaagtgctccaaagaaattagactc

SEQ ID NO: 133563 - DNA, 25 bp, Artificial
  Probe
agaagtgctccaaagaaattagact

SEQ ID NO: 133564 - DNA, 25 bp, Artificial
  Probe
caaacccaaacaacaaacaaataaa

SEQ ID NO: 133565 - DNA, 25 bp, Artificial
  Probe
ggaagaagtgctccaaagaaattag

SEQ ID NO: 133566 - DNA, 25 bp, Artificial
  Probe
aggaagaagtgctccaaagaaatta

SEQ ID NO: 133567 - DNA, 25 bp, Artificial
  Probe
aagtactagaacatctctctgcacc

SEQ ID NO: 133568 - DNA, 25 bp, Artificial
  Probe
caggaagaagtgctccaaagaaatt

SEQ ID NO: 133569 - DNA, 25 bp, Artificial
  Probe
agtgctccaaagaaattagactctt

SEQ ID NO: 133570 - DNA, 25 bp, Artificial
  Probe
agcattggttagggaagagaggaaa

SEQ ID NO: 133571 - DNA, 25 bp, Artificial
  Probe
aagcattggttagggaagagaggaa

SEQ ID NO: 133572 - DNA, 25 bp, Artificial
  Probe
tagggaagagaggaaaagaagagaa

SEQ ID NO: 133573 - DNA, 25 bp, Artificial
  Probe
ttagggaagagaggaaaagaagaga

SEQ ID NO: 133574 - DNA, 25 bp, Artificial
  Probe
gttagggaagagaggaaaagaagag

SEQ ID NO: 133575 - DNA, 25 bp, Artificial
  Probe
gggaagagaggaaaagaagagaaaa

SEQ ID NO: 133576 - DNA, 25 bp, Artificial
  Probe
tcaggaagaagtgctccaaagaaat

SEQ ID NO: 133577 - DNA, 25 bp, Artificial
  Probe
gaagagaggaaaagaagagaaaacc

SEQ ID NO: 133578 - DNA, 25 bp, Artificial
  Probe
ggaagagaggaaaagaagagaaaac

SEQ ID NO: 133579 - DNA, 25 bp, Artificial
  Probe
caaataaaacacctacagaaccagt

SEQ ID NO: 133580 - DNA, 25 bp, Artificial
  Probe
acaaataaaacacctacagaaccag

SEQ ID NO: 133581 - DNA, 25 bp, Artificial
  Probe
gtgctccaaagaaattagactctta

SEQ ID NO: 133582 - DNA, 25 bp, Artificial
  Probe
aacaaataaaacacctacagaacca

SEQ ID NO: 133583 - DNA, 25 bp, Artificial
  Probe
aaaagaagagaaaaccttagcactg

SEQ ID NO: 133584 - DNA, 25 bp, Artificial
  Probe
ggaaaagaagagaaaaccttagcac

SEQ ID NO: 133585 - DNA, 25 bp, Artificial
  Probe
agggaagagaggaaaagaagagaaa

SEQ ID NO: 133586 - DNA, 25 bp, Artificial
  Probe
attggttagggaagagaggaaaaga

SEQ ID NO: 133587 - DNA, 25 bp, Artificial
  Probe
cattggttagggaagagaggaaaag

SEQ ID NO: 133588 - DNA, 25 bp, Artificial
  Probe
acccaaacaacaaacaaataaaaca

SEQ ID NO: 133589 - DNA, 25 bp, Artificial
  Probe
aaagaagagaaaaccttagcactgt

SEQ ID NO: 133590 - DNA, 25 bp, Artificial
  Probe
gaaaagaagagaaaaccttagcact

SEQ ID NO: 133591 - DNA, 25 bp, Artificial
  Probe
tagaactttcagaagataggggagg

SEQ ID NO: 133592 - DNA, 25 bp, Artificial
  Probe
ccaaacaacaaacaaataaaacacc

SEQ ID NO: 133593 - DNA, 25 bp, Artificial
  Probe
cccaaacaacaaacaaataaaacac

SEQ ID NO: 133594 - DNA, 25 bp, Artificial
  Probe
aagaagagaaaaccttagcactgtt

SEQ ID NO: 133595 - DNA, 25 bp, Artificial
  Probe
ttggttagggaagagaggaaaagaa

SEQ ID NO: 133596 - DNA, 25 bp, Artificial
  Probe
ggttagggaagagaggaaaagaaga

SEQ ID NO: 133597 - DNA, 25 bp, Artificial
  Probe
agaagagaaaaccttagcactgttc

SEQ ID NO: 133598 - DNA, 25 bp, Artificial
  Probe
ctagaactttcagaagataggggag

SEQ ID NO: 133599 - DNA, 25 bp, Artificial
  Probe
tggttagggaagagaggaaaagaag

SEQ ID NO: 133600 - DNA, 25 bp, Artificial
  Probe
tgctccaaagaaattagactcttaa

SEQ ID NO: 133601 - DNA, 25 bp, Artificial
  Probe
gaagagaaaaccttagcactgttca

SEQ ID NO: 133602 - DNA, 25 bp, Artificial
  Probe
ttcatcaaccagttatatcagccaa

SEQ ID NO: 133603 - DNA, 25 bp, Artificial
  Probe
tcatcaaccagttatatcagccaag

SEQ ID NO: 133604 - DNA, 25 bp, Artificial
  Probe
atcaaccagttatatcagccaagtg

SEQ ID NO: 133605 - DNA, 25 bp, Artificial
  Probe
catcaaccagttatatcagccaagt

SEQ ID NO: 133606 - DNA, 25 bp, Artificial
  Probe
gtgttcatcaaccagttatatcagc

SEQ ID NO: 133607 - DNA, 25 bp, Artificial
  Probe
cgagtgttcatcaaccagttatatc

SEQ ID NO: 133608 - DNA, 25 bp, Artificial
  Probe
gttcatcaaccagttatatcagcca

SEQ ID NO: 133609 - DNA, 25 bp, Artificial
  Probe
tgttcatcaaccagttatatcagcc

SEQ ID NO: 133610 - DNA, 25 bp, Artificial
  Probe
gcgagtgttcatcaaccagttatat

SEQ ID NO: 133611 - DNA, 25 bp, Artificial
  Probe
agtgttcatcaaccagttatatcag

SEQ ID NO: 133612 - DNA, 25 bp, Artificial
  Probe
gagtgttcatcaaccagttatatca

SEQ ID NO: 133613 - DNA, 25 bp, Artificial
  Probe
caaccagttatatcagccaagtgtg

SEQ ID NO: 133614 - DNA, 25 bp, Artificial
  Probe
tcaaccagttatatcagccaagtgt

SEQ ID NO: 133615 - DNA, 25 bp, Artificial
  Probe
agtgaaacgctgaaattatctgaaa

SEQ ID NO: 133616 - DNA, 25 bp, Artificial
  Probe
gtcttgttggtggatgaggttagtg

SEQ ID NO: 133617 - DNA, 25 bp, Artificial
  Probe
gtgtcttgttggtggatgaggttag

SEQ ID NO: 133618 - DNA, 25 bp, Artificial
  Probe
agttatatcagccaagtgtggtgaa

SEQ ID NO: 133619 - DNA, 25 bp, Artificial
  Probe
cagtgaaacgctgaaattatctgaa

SEQ ID NO: 133620 - DNA, 25 bp, Artificial
  Probe
tgtcttgttggtggatgaggttagt

SEQ ID NO: 133621 - DNA, 25 bp, Artificial
  Probe
agtgtcttgttggtggatgaggtta

SEQ ID NO: 133622 - DNA, 25 bp, Artificial
  Probe
cagttatatcagccaagtgtggtga

SEQ ID NO: 133623 - DNA, 25 bp, Artificial
  Probe
cctatacctgccagacctaactgaa

SEQ ID NO: 133624 - DNA, 25 bp, Artificial
  Probe
tgagaactttgcgaatttcagagac

SEQ ID NO: 133625 - DNA, 25 bp, Artificial
  Probe
aaccagttatatcagccaagtgtgg

SEQ ID NO: 133626 - DNA, 25 bp, Artificial
  Probe
tatacctgccagacctaactgaaag

SEQ ID NO: 133627 - DNA, 25 bp, Artificial
  Probe
ctatacctgccagacctaactgaaa

SEQ ID NO: 133628 - DNA, 25 bp, Artificial
  Probe
ccagtgaaacgctgaaattatctga

SEQ ID NO: 133629 - DNA, 25 bp, Artificial
  Probe
gaactttgcgaatttcagagacctc

SEQ ID NO: 133630 - DNA, 25 bp, Artificial
  Probe
gagaactttgcgaatttcagagacc

SEQ ID NO: 133631 - DNA, 25 bp, Artificial
  Probe
gaatttcagagacctcagactcctc

SEQ ID NO: 133632 - DNA, 25 bp, Artificial
  Probe
ttatatcagccaagtgtggtgaaag

SEQ ID NO: 133633 - DNA, 25 bp, Artificial
  Probe
ctcctatacctgccagacctaactg

SEQ ID NO: 133634 - DNA, 25 bp, Artificial
  Probe
agaactttgcgaatttcagagacct

SEQ ID NO: 133635 - DNA, 25 bp, Artificial
  Probe
gttatatcagccaagtgtggtgaaa

SEQ ID NO: 133636 - DNA, 25 bp, Artificial
  Probe
tcttgttggtggatgaggttagtgg

SEQ ID NO: 133637 - DNA, 25 bp, Artificial
  Probe
aactttgcgaatttcagagacctca

SEQ ID NO: 133638 - DNA, 25 bp, Artificial
  Probe
ctttgcgaatttcagagacctcaga

SEQ ID NO: 133639 - DNA, 25 bp, Artificial
  Probe
tatatcagccaagtgtggtgaaaga

SEQ ID NO: 133640 - DNA, 25 bp, Artificial
  Probe
ccagttatatcagccaagtgtggtg

SEQ ID NO: 133641 - DNA, 25 bp, Artificial
  Probe
cccagtgaaacgctgaaattatctg

SEQ ID NO: 133642 - DNA, 25 bp, Artificial
  Probe
tcctatacctgccagacctaactga

SEQ ID NO: 133643 - DNA, 25 bp, Artificial
  Probe
tgagagtgtcttgttggtggatgag

SEQ ID NO: 133644 - DNA, 25 bp, Artificial
  Probe
ctgagagtgtcttgttggtggatga

SEQ ID NO: 133645 - DNA, 25 bp, Artificial
  Probe
tctgagagtgtcttgttggtggatg

SEQ ID NO: 133646 - DNA, 25 bp, Artificial
  Probe
tttgcgaatttcagagacctcagac

SEQ ID NO: 133647 - DNA, 25 bp, Artificial
  Probe
taccactcaagaactgtcaagtaac

SEQ ID NO: 133648 - DNA, 25 bp, Artificial
  Probe
ttaccactcaagaactgtcaagtaa

SEQ ID NO: 133649 - DNA, 25 bp, Artificial
  Probe
gagcaaattagagaaatgaacccaa

SEQ ID NO: 133650 - DNA, 25 bp, Artificial
  Probe
aacaagggagcaaattagagaaatg

SEQ ID NO: 133651 - DNA, 25 bp, Artificial
  Probe
caacaagggagcaaattagagaaat

SEQ ID NO: 133652 - DNA, 25 bp, Artificial
  Probe
cttcaactttaccactcaagaactg

SEQ ID NO: 133653 - DNA, 25 bp, Artificial
  Probe
acaagggagcaaattagagaaatga

SEQ ID NO: 133654 - DNA, 25 bp, Artificial
  Probe
aagggagcaaattagagaaatgaac

SEQ ID NO: 133655 - DNA, 25 bp, Artificial
  Probe
caagggagcaaattagagaaatgaa

SEQ ID NO: 133656 - DNA, 25 bp, Artificial
  Probe
agcaaattagagaaatgaacccaaa

SEQ ID NO: 133657 - DNA, 25 bp, Artificial
  Probe
aactttaccactcaagaactgtcaa

SEQ ID NO: 133658 - DNA, 25 bp, Artificial
  Probe
ttcaactttaccactcaagaactgt

SEQ ID NO: 133659 - DNA, 25 bp, Artificial
  Probe
accactcaagaactgtcaagtaacc

SEQ ID NO: 133660 - DNA, 25 bp, Artificial
  Probe
actttaccactcaagaactgtcaag

SEQ ID NO: 133661 - DNA, 25 bp, Artificial
  Probe
tcaactttaccactcaagaactgtc

SEQ ID NO: 133662 - DNA, 25 bp, Artificial
  Probe
agggagcaaattagagaaatgaacc

SEQ ID NO: 133663 - DNA, 25 bp, Artificial
  Probe
caactttaccactcaagaactgtca

SEQ ID NO: 133664 - DNA, 25 bp, Artificial
  Probe
ggagcaaattagagaaatgaaccca

SEQ ID NO: 133665 - DNA, 25 bp, Artificial
  Probe
tttaccactcaagaactgtcaagta

SEQ ID NO: 133666 - DNA, 25 bp, Artificial
  Probe
gcaaattagagaaatgaacccaaat

SEQ ID NO: 133667 - DNA, 25 bp, Artificial
  Probe
ccaacaagggagcaaattagagaaa

SEQ ID NO: 133668 - DNA, 25 bp, Artificial
  Probe
ctttaccactcaagaactgtcaagt

SEQ ID NO: 133669 - DNA, 25 bp, Artificial
  Probe
gacccaaatgtcaaactaccaaatg

SEQ ID NO: 133670 - DNA, 25 bp, Artificial
  Probe
accaacaagggagcaaattagagaa

SEQ ID NO: 133671 - DNA, 25 bp, Artificial
  Probe
ggacccaaatgtcaaactaccaaat

SEQ ID NO: 133672 - DNA, 25 bp, Artificial
  Probe
gaacaccaacaagggagcaaattag

SEQ ID NO: 133673 - DNA, 25 bp, Artificial
  Probe
ctcagatactaatgctggagaccgt

SEQ ID NO: 133674 - DNA, 25 bp, Artificial
  Probe
aacaccaacaagggagcaaattaga

SEQ ID NO: 133675 - DNA, 25 bp, Artificial
  Probe
actcaagaactgtcaagtaacccac

SEQ ID NO: 133676 - DNA, 25 bp, Artificial
  Probe
cactcaagaactgtcaagtaaccca

SEQ ID NO: 133677 - DNA, 25 bp, Artificial
  Probe
gagaaatgaacccaaattatacaga

SEQ ID NO: 133678 - DNA, 25 bp, Artificial
  Probe
agagaaatgaacccaaattatacag

SEQ ID NO: 133679 - DNA, 25 bp, Artificial
  Probe
caccaacaagggagcaaattagaga

SEQ ID NO: 133680 - DNA, 25 bp, Artificial
  Probe
tcagatactaatgctggagaccgtg

SEQ ID NO: 133681 - DNA, 25 bp, Artificial
  Probe
tcttcaactttaccactcaagaact

SEQ ID NO: 133682 - DNA, 25 bp, Artificial
  Probe
ctcttcaactttaccactcaagaac

SEQ ID NO: 133683 - DNA, 25 bp, Artificial
  Probe
attacgggacccaaatgtcaaacta

SEQ ID NO: 133684 - DNA, 25 bp, Artificial
  Probe
cctcttcaactttaccactcaagaa

SEQ ID NO: 133685 - DNA, 25 bp, Artificial
  Probe
acccaaatgtcaaactaccaaatgg

SEQ ID NO: 133686 - DNA, 25 bp, Artificial
  Probe
acaccaacaagggagcaaattagag

SEQ ID NO: 133687 - DNA, 25 bp, Artificial
  Probe
ttgatgaattacgggacccaaatgt

SEQ ID NO: 133688 - DNA, 25 bp, Artificial
  Probe
gatactaatgctggagaccgtggac

SEQ ID NO: 133689 - DNA, 25 bp, Artificial
  Probe
caaatgtcaaactaccaaatgggcg

SEQ ID NO: 133690 - DNA, 25 bp, Artificial
  Probe
agaaatgaacccaaattatacagaa

SEQ ID NO: 133691 - DNA, 25 bp, Artificial
  Probe
agatactaatgctggagaccgtgga

SEQ ID NO: 133692 - DNA, 25 bp, Artificial
  Probe
tcaactatgagaagacacacaactt

SEQ ID NO: 133693 - DNA, 25 bp, Artificial
  Probe
ttcaactatgagaagacacacaact

SEQ ID NO: 133694 - DNA, 25 bp, Artificial
  Probe
atgacaaccacttcaactatgagaa

SEQ ID NO: 133695 - DNA, 25 bp, Artificial
  Probe
aatgacaaccacttcaactatgaga

SEQ ID NO: 133696 - DNA, 25 bp, Artificial
  Probe
caatgacaaccacttcaactatgag

SEQ ID NO: 133697 - DNA, 25 bp, Artificial
  Probe
acaatgacaaccacttcaactatga

SEQ ID NO: 133698 - DNA, 25 bp, Artificial
  Probe
cacaatgacaaccacttcaactatg

SEQ ID NO: 133699 - DNA, 25 bp, Artificial
  Probe
acacaatgacaaccacttcaactat

SEQ ID NO: 133700 - DNA, 25 bp, Artificial
  Probe
cacacaatgacaaccacttcaacta

SEQ ID NO: 133701 - DNA, 25 bp, Artificial
  Probe
acgactggtatcagattaatgtctt

SEQ ID NO: 133702 - DNA, 25 bp, Artificial
  Probe
cgactggtatcagattaatgtcttg

SEQ ID NO: 133703 - DNA, 25 bp, Artificial
  Probe
aaggacaatttaatgaacgcagaaa

SEQ ID NO: 133704 - DNA, 25 bp, Artificial
  Probe
aaaggacaatttaatgaacgcagaa

SEQ ID NO: 133705 - DNA, 25 bp, Artificial
  Probe
aattacgcagcattcaacagagaga

SEQ ID NO: 133706 - DNA, 25 bp, Artificial
  Probe
ctacccagacataaacatcatcacc

SEQ ID NO: 133707 - DNA, 25 bp, Artificial
  Probe
attacgcagcattcaacagagagaa

SEQ ID NO: 133708 - DNA, 25 bp, Artificial
  Probe
gataaatatctcttcactggtccga

SEQ ID NO: 133709 - DNA, 25 bp, Artificial
  Probe
tctacccagacataaacatcatcac

SEQ ID NO: 133710 - DNA, 25 bp, Artificial
  Probe
aacatctacccagacataaacatca

SEQ ID NO: 133711 - DNA, 25 bp, Artificial
  Probe
gctaacatctacccagacataaaca

SEQ ID NO: 133712 - DNA, 25 bp, Artificial
  Probe
tgctaacatctacccagacataaac

SEQ ID NO: 133713 - DNA, 25 bp, Artificial
  Probe
ataaatatctcttcactggtccgaa

SEQ ID NO: 133714 - DNA, 25 bp, Artificial
  Probe
acatctacccagacataaacatcat

SEQ ID NO: 133715 - DNA, 25 bp, Artificial
  Probe
atctacccagacataaacatcatca

SEQ ID NO: 133716 - DNA, 25 bp, Artificial
  Probe
cgataaatatctcttcactggtccg

SEQ ID NO: 133717 - DNA, 25 bp, Artificial
  Probe
catctacccagacataaacatcatc

SEQ ID NO: 133718 - DNA, 25 bp, Artificial
  Probe
gggaaattgaagcaagaggattaaa

SEQ ID NO: 133719 - DNA, 25 bp, Artificial
  Probe
tatgtattcgggaaattgaagcaag

SEQ ID NO: 133720 - DNA, 25 bp, Artificial
  Probe
cattcaacagagagaagagacctgg

SEQ ID NO: 133721 - DNA, 25 bp, Artificial
  Probe
agcattcaacagagagaagagacct

SEQ ID NO: 133722 - DNA, 25 bp, Artificial
  Probe
cagcattcaacagagagaagagacc

SEQ ID NO: 133723 - DNA, 25 bp, Artificial
  Probe
gactggtatcagattaatgtcttgt

SEQ ID NO: 133724 - DNA, 25 bp, Artificial
  Probe
atatgtattcgggaaattgaagcaa

SEQ ID NO: 133725 - DNA, 25 bp, Artificial
  Probe
atgtattcgggaaattgaagcaaga

SEQ ID NO: 133726 - DNA, 25 bp, Artificial
  Probe
gtatgtatgtctgtttcgctggaag

SEQ ID NO: 133727 - DNA, 25 bp, Artificial
  Probe
aaatcagaagggctttacagagtct

SEQ ID NO: 133728 - DNA, 25 bp, Artificial
  Probe
ttacgcagcattcaacagagagaag

SEQ ID NO: 133729 - DNA, 25 bp, Artificial
  Probe
ctgctaacatctacccagacataaa

SEQ ID NO: 133730 - DNA, 25 bp, Artificial
  Probe
aatgtcttgtatatctgaattccgc

SEQ ID NO: 133731 - DNA, 25 bp, Artificial
  Probe
tatgtatgtctgtttcgctggaaga

SEQ ID NO: 133732 - DNA, 25 bp, Artificial
  Probe
tttcaaacaagtggcagaatttcct

SEQ ID NO: 133733 - DNA, 25 bp, Artificial
  Probe
cgggaaattgaagcaagaggattaa

SEQ ID NO: 133734 - DNA, 25 bp, Artificial
  Probe
tgtattcgggaaattgaagcaagag

SEQ ID NO: 133735 - DNA, 25 bp, Artificial
  Probe
acacacaatgacaaccacttcaact

SEQ ID NO: 133736 - DNA, 25 bp, Artificial
  Probe
cacacacaatgacaaccacttcaac

SEQ ID NO: 133737 - DNA, 25 bp, Artificial
  Probe
gctatatcaagtcaggacaacaaga

SEQ ID NO: 133738 - DNA, 25 bp, Artificial
  Probe
atatcaagtcaggacaacaagaagg

SEQ ID NO: 133739 - DNA, 25 bp, Artificial
  Probe
ggctatatcaagtcaggacaacaag

SEQ ID NO: 133740 - DNA, 25 bp, Artificial
  Probe
tatatcaagtcaggacaacaagaag

SEQ ID NO: 133741 - DNA, 25 bp, Artificial
  Probe
ctatatcaagtcaggacaacaagaa

SEQ ID NO: 133742 - DNA, 25 bp, Artificial
  Probe
gaaagtcaggatttgataaacaggg

SEQ ID NO: 133743 - DNA, 25 bp, Artificial
  Probe
aagaagatcctgggctatatcaagt

SEQ ID NO: 133744 - DNA, 25 bp, Artificial
  Probe
taagaagatcctgggctatatcaag

SEQ ID NO: 133745 - DNA, 25 bp, Artificial
  Probe
tgcaggaggatgtgtatgatgaatt

SEQ ID NO: 133746 - DNA, 25 bp, Artificial
  Probe
agaagatcctgggctatatcaagtc

SEQ ID NO: 133747 - DNA, 25 bp, Artificial
  Probe
agtttaagaagatcctgggctatat

SEQ ID NO: 133748 - DNA, 25 bp, Artificial
  Probe
aaagtcaggatttgataaacagggc

SEQ ID NO: 133749 - DNA, 25 bp, Artificial
  Probe
ttaagaagatcctgggctatatcaa

SEQ ID NO: 133750 - DNA, 25 bp, Artificial
  Probe
tttaagaagatcctgggctatatca

SEQ ID NO: 133751 - DNA, 25 bp, Artificial
  Probe
gatgtgtatgatgaattcgtggaac

SEQ ID NO: 133752 - DNA, 25 bp, Artificial
  Probe
gaagatcctgggctatatcaagtca

SEQ ID NO: 133753 - DNA, 25 bp, Artificial
  Probe
gtttaagaagatcctgggctatatc

SEQ ID NO: 133754 - DNA, 25 bp, Artificial
  Probe
gtggatgagactcagtttaagaaga

SEQ ID NO: 133755 - DNA, 25 bp, Artificial
  Probe
caggaggatgtgtatgatgaattcg

SEQ ID NO: 133756 - DNA, 25 bp, Artificial
  Probe
tatcaagtcaggacaacaagaaggg

SEQ ID NO: 133757 - DNA, 25 bp, Artificial
  Probe
ggatgtgtatgatgaattcgtggaa

SEQ ID NO: 133758 - DNA, 25 bp, Artificial
  Probe
cagtttaagaagatcctgggctata

SEQ ID NO: 133759 - DNA, 25 bp, Artificial
  Probe
gagactcagtttaagaagatcctgg

SEQ ID NO: 133760 - DNA, 25 bp, Artificial
  Probe
tggatgagactcagtttaagaagat

SEQ ID NO: 133761 - DNA, 25 bp, Artificial
  Probe
ggtggatgagactcagtttaagaag

SEQ ID NO: 133762 - DNA, 25 bp, Artificial
  Probe
gggctatatcaagtcaggacaacaa

SEQ ID NO: 133763 - DNA, 25 bp, Artificial
  Probe
gcaggaggatgtgtatgatgaattc

SEQ ID NO: 133764 - DNA, 25 bp, Artificial
  Probe
gaggatgtgtatgatgaattcgtgg

SEQ ID NO: 133765 - DNA, 25 bp, Artificial
  Probe
ggaggatgtgtatgatgaattcgtg

SEQ ID NO: 133766 - DNA, 25 bp, Artificial
  Probe
aggaggatgtgtatgatgaattcgt

SEQ ID NO: 133767 - DNA, 25 bp, Artificial
  Probe
gtgcaggaggatgtgtatgatgaat

SEQ ID NO: 133768 - DNA, 25 bp, Artificial
  Probe
tcagtttaagaagatcctgggctat

SEQ ID NO: 133769 - DNA, 25 bp, Artificial
  Probe
atgagactcagtttaagaagatcct

SEQ ID NO: 133770 - DNA, 25 bp, Artificial
  Probe
aggtggatgagactcagtttaagaa

SEQ ID NO: 133771 - DNA, 25 bp, Artificial
  Probe
tgagactcagtttaagaagatcctg

SEQ ID NO: 133772 - DNA, 25 bp, Artificial
  Probe
gatgagactcagtttaagaagatcc

SEQ ID NO: 133773 - DNA, 25 bp, Artificial
  Probe
ggatgagactcagtttaagaagatc

SEQ ID NO: 133774 - DNA, 25 bp, Artificial
  Probe
aggatgtgtatgatgaattcgtgga

SEQ ID NO: 133775 - DNA, 25 bp, Artificial
  Probe
gagcagcaatctcaagagagtaacc

SEQ ID NO: 133776 - DNA, 25 bp, Artificial
  Probe
ggagcagcaatctcaagagagtaac

SEQ ID NO: 133777 - DNA, 25 bp, Artificial
  Probe
aagatcctgggctatatcaagtcag

SEQ ID NO: 133778 - DNA, 25 bp, Artificial
  Probe
agactcagtttaagaagatcctggg

SEQ ID NO: 133779 - DNA, 25 bp, Artificial
  Probe
aagtcaggatttgataaacagggca

SEQ ID NO: 133780 - DNA, 25 bp, Artificial
  Probe
ctcagtttaagaagatcctgggcta

SEQ ID NO: 133781 - DNA, 25 bp, Artificial
  Probe
caggtggatgagactcagtttaaga

SEQ ID NO: 133782 - DNA, 25 bp, Artificial
  Probe
taccttcaaactcatttattcccag

SEQ ID NO: 133783 - DNA, 25 bp, Artificial
  Probe
accttcaaactcatttattcccagt

SEQ ID NO: 133784 - DNA, 25 bp, Artificial
  Probe
ataccttcaaactcatttattccca

SEQ ID NO: 133785 - DNA, 25 bp, Artificial
  Probe
gataccttcaaactcatttattccc

SEQ ID NO: 133786 - DNA, 25 bp, Artificial
  Probe
acctatgcacacttcctcttcaatg

SEQ ID NO: 133787 - DNA, 25 bp, Artificial
  Probe
cacctatgcacacttcctcttcaat

SEQ ID NO: 133788 - DNA, 25 bp, Artificial
  Probe
agataccttcaaactcatttattcc

SEQ ID NO: 133789 - DNA, 25 bp, Artificial
  Probe
ccttcaaactcatttattcccagtt

SEQ ID NO: 133790 - DNA, 25 bp, Artificial
  Probe
aactcatttattcccagttcttccc

SEQ ID NO: 133791 - DNA, 25 bp, Artificial
  Probe
aaactcatttattcccagttcttcc

SEQ ID NO: 133792 - DNA, 25 bp, Artificial
  Probe
cacttcctcttcaatgccttcgatg

SEQ ID NO: 133793 - DNA, 25 bp, Artificial
  Probe
tcaaactcatttattcccagttctt

SEQ ID NO: 133794 - DNA, 25 bp, Artificial
  Probe
ttcaaactcatttattcccagttct

SEQ ID NO: 133795 - DNA, 25 bp, Artificial
  Probe
caaactcatttattcccagttcttc

SEQ ID NO: 133796 - DNA, 25 bp, Artificial
  Probe
cttcaaactcatttattcccagttc

SEQ ID NO: 133797 - DNA, 25 bp, Artificial
  Probe
acacttcctcttcaatgccttcgat

SEQ ID NO: 133798 - DNA, 25 bp, Artificial
  Probe
actcatttattcccagttcttcccc

SEQ ID NO: 133799 - DNA, 25 bp, Artificial
  Probe
ccacctatgcacacttcctcttcaa

SEQ ID NO: 133800 - DNA, 25 bp, Artificial
  Probe
aagataccttcaaactcatttattc

SEQ ID NO: 133801 - DNA, 25 bp, Artificial
  Probe
cacacttcctcttcaatgccttcga

SEQ ID NO: 133802 - DNA, 25 bp, Artificial
  Probe
caccacctatgcacacttcctcttc

SEQ ID NO: 133803 - DNA, 25 bp, Artificial
  Probe
ctatgcacacttcctcttcaatgcc

SEQ ID NO: 133804 - DNA, 25 bp, Artificial
  Probe
cctatgcacacttcctcttcaatgc

SEQ ID NO: 133805 - DNA, 25 bp, Artificial
  Probe
tatgcacacttcctcttcaatgcct

SEQ ID NO: 133806 - DNA, 25 bp, Artificial
  Probe
atgcacacttcctcttcaatgcctt

SEQ ID NO: 133807 - DNA, 25 bp, Artificial
  Probe
gaagataccttcaaactcatttatt

SEQ ID NO: 133808 - DNA, 25 bp, Artificial
  Probe
taatgagacaatgacagttgagagt

SEQ ID NO: 133809 - DNA, 25 bp, Artificial
  Probe
cacctataatgagacaatgacagtt

SEQ ID NO: 133810 - DNA, 25 bp, Artificial
  Probe
aatgagacaatgacagttgagagtg

SEQ ID NO: 133811 - DNA, 25 bp, Artificial
  Probe
tcacctataatgagacaatgacagt

SEQ ID NO: 133812 - DNA, 25 bp, Artificial
  Probe
ataatgagacaatgacagttgagag

SEQ ID NO: 133813 - DNA, 25 bp, Artificial
  Probe
acctataatgagacaatgacagttg

SEQ ID NO: 133814 - DNA, 25 bp, Artificial
  Probe
caggaaggttaccacaagtctatga

SEQ ID NO: 133815 - DNA, 25 bp, Artificial
  Probe
cctataatgagacaatgacagttga

SEQ ID NO: 133816 - DNA, 25 bp, Artificial
  Probe
atgagacaatgacagttgagagtgt

SEQ ID NO: 133817 - DNA, 25 bp, Artificial
  Probe
aggaaggttaccacaagtctatgac

SEQ ID NO: 133818 - DNA, 25 bp, Artificial
  Probe
tataatgagacaatgacagttgaga

SEQ ID NO: 133819 - DNA, 25 bp, Artificial
  Probe
atcgtagagattgatgctcatatag

SEQ ID NO: 133820 - DNA, 25 bp, Artificial
  Probe
ttaggagtagcattgttgtttggag

SEQ ID NO: 133821 - DNA, 25 bp, Artificial
  Probe
cttaggagtagcattgttgtttgga

SEQ ID NO: 133822 - DNA, 25 bp, Artificial
  Probe
ctataatgagacaatgacagttgag

SEQ ID NO: 133823 - DNA, 25 bp, Artificial
  Probe
gagacaatgacagttgagagtgtga

SEQ ID NO: 133824 - DNA, 25 bp, Artificial
  Probe
agacaatgacagttgagagtgtgac

SEQ ID NO: 133825 - DNA, 25 bp, Artificial
  Probe
tgagacaatgacagttgagagtgtg

SEQ ID NO: 133826 - DNA, 25 bp, Artificial
  Probe
gcaggaaggttaccacaagtctatg

SEQ ID NO: 133827 - DNA, 25 bp, Artificial
  Probe
ccttaggagtagcattgttgtttgg

SEQ ID NO: 133828 - DNA, 25 bp, Artificial
  Probe
taggagtagcattgttgtttggagg

SEQ ID NO: 133829 - DNA, 25 bp, Artificial
  Probe
gccttaggagtagcattgttgtttg

SEQ ID NO: 133830 - DNA, 25 bp, Artificial
  Probe
aatcgtagagattgatgctcatata

SEQ ID NO: 133831 - DNA, 25 bp, Artificial
  Probe
gacaatgacagttgagagtgtgacc

SEQ ID NO: 133832 - DNA, 25 bp, Artificial
  Probe
gttaccacaagtctatgactctgaa

SEQ ID NO: 133833 - DNA, 25 bp, Artificial
  Probe
cagttcggagaagaagatgcagatc

SEQ ID NO: 133834 - DNA, 25 bp, Artificial
  Probe
aaatcgtagagattgatgctcatat

SEQ ID NO: 133835 - DNA, 25 bp, Artificial
  Probe
gaaggttaccacaagtctatgactc

SEQ ID NO: 133836 - DNA, 25 bp, Artificial
  Probe
aaggttaccacaagtctatgactct

SEQ ID NO: 133837 - DNA, 25 bp, Artificial
  Probe
tgcaggaaggttaccacaagtctat

SEQ ID NO: 133838 - DNA, 25 bp, Artificial
  Probe
ctatgtctcgtgccttaggagtagc

SEQ ID NO: 133839 - DNA, 25 bp, Artificial
  Probe
gctatgtctcgtgccttaggagtag

SEQ ID NO: 133840 - DNA, 25 bp, Artificial
  Probe
tagcagcattgagaaaatcgtagag

SEQ ID NO: 133841 - DNA, 25 bp, Artificial
  Probe
ggttaccacaagtctatgactctga

SEQ ID NO: 133842 - DNA, 25 bp, Artificial
  Probe
aggttaccacaagtctatgactctg

SEQ ID NO: 133843 - DNA, 25 bp, Artificial
  Probe
ttgcaggaaggttaccacaagtcta

SEQ ID NO: 133844 - DNA, 25 bp, Artificial
  Probe
ggaaggttaccacaagtctatgact

SEQ ID NO: 133845 - DNA, 25 bp, Artificial
  Probe
gcagcattgagaaaatcgtagagat

SEQ ID NO: 133846 - DNA, 25 bp, Artificial
  Probe
ctagcagcattgagaaaatcgtaga

SEQ ID NO: 133847 - DNA, 25 bp, Artificial
  Probe
aggagtagcattgttgtttggagga

SEQ ID NO: 133848 - DNA, 25 bp, Artificial
  Probe
gtgccttaggagtagcattgttgtt

SEQ ID NO: 133849 - DNA, 25 bp, Artificial
  Probe
tgctatgtctcgtgccttaggagta

SEQ ID NO: 133850 - DNA, 25 bp, Artificial
  Probe
cctagcagcattgagaaaatcgtag

SEQ ID NO: 133851 - DNA, 25 bp, Artificial
  Probe
agcagcattgagaaaatcgtagaga

SEQ ID NO: 133852 - DNA, 25 bp, Artificial
  Probe
cttgtgttcgtcttttcagcctaag

SEQ ID NO: 133853 - DNA, 25 bp, Artificial
  Probe
tatgtacctgctcttggatattgtg

SEQ ID NO: 133854 - DNA, 25 bp, Artificial
  Probe
gcttatgtacctgctcttggatatt

SEQ ID NO: 133855 - DNA, 25 bp, Artificial
  Probe
ttatgtacctgctcttggatattgt

SEQ ID NO: 133856 - DNA, 25 bp, Artificial
  Probe
cttatgtacctgctcttggatattg

SEQ ID NO: 133857 - DNA, 25 bp, Artificial
  Probe
tgtagaggaagcattcaagaacatc

SEQ ID NO: 133858 - DNA, 25 bp, Artificial
  Probe
tgcttatgtacctgctcttggatat

SEQ ID NO: 133859 - DNA, 25 bp, Artificial
  Probe
ttgcttatgtacctgctcttggata

SEQ ID NO: 133860 - DNA, 25 bp, Artificial
  Probe
gaagcattcaagaacatcctcacag

SEQ ID NO: 133861 - DNA, 25 bp, Artificial
  Probe
aagcattcaagaacatcctcacaga

SEQ ID NO: 133862 - DNA, 25 bp, Artificial
  Probe
aagaacaacttgtccttcattgaga

SEQ ID NO: 133863 - DNA, 25 bp, Artificial
  Probe
agcattcaagaacatcctcacagaa

SEQ ID NO: 133864 - DNA, 25 bp, Artificial
  Probe
atgtacctgctcttggatattgtgg

SEQ ID NO: 133865 - DNA, 25 bp, Artificial
  Probe
gtagaggaagcattcaagaacatcc

SEQ ID NO: 133866 - DNA, 25 bp, Artificial
  Probe
agaacaacttgtccttcattgagac

SEQ ID NO: 133867 - DNA, 25 bp, Artificial
  Probe
atcctcacagaaatctaccgtattg

SEQ ID NO: 133868 - DNA, 25 bp, Artificial
  Probe
catcctcacagaaatctaccgtatt

SEQ ID NO: 133869 - DNA, 25 bp, Artificial
  Probe
aatctaccgtattgtgtcacagaag

SEQ ID NO: 133870 - DNA, 25 bp, Artificial
  Probe
cattcaagaacatcctcacagaaat

SEQ ID NO: 133871 - DNA, 25 bp, Artificial
  Probe
caatgtagaggaagcattcaagaac

SEQ ID NO: 133872 - DNA, 25 bp, Artificial
  Probe
acatcctcacagaaatctaccgtat

SEQ ID NO: 133873 - DNA, 25 bp, Artificial
  Probe
ttcaagaacatcctcacagaaatct

SEQ ID NO: 133874 - DNA, 25 bp, Artificial
  Probe
aatgtagaggaagcattcaagaaca

SEQ ID NO: 133875 - DNA, 25 bp, Artificial
  Probe
aagaacatcctcacagaaatctacc

SEQ ID NO: 133876 - DNA, 25 bp, Artificial
  Probe
attcaagaacatcctcacagaaatc

SEQ ID NO: 133877 - DNA, 25 bp, Artificial
  Probe
cttgcttatgtacctgctcttggat

SEQ ID NO: 133878 - DNA, 25 bp, Artificial
  Probe
caagaacatcctcacagaaatctac

SEQ ID NO: 133879 - DNA, 25 bp, Artificial
  Probe
tcaagaacatcctcacagaaatcta

SEQ ID NO: 133880 - DNA, 25 bp, Artificial
  Probe
aacatcctcacagaaatctaccgta

SEQ ID NO: 133881 - DNA, 25 bp, Artificial
  Probe
ccaatgtagaggaagcattcaagaa

SEQ ID NO: 133882 - DNA, 25 bp, Artificial
  Probe
gaacaacttgtccttcattgagacc

SEQ ID NO: 133883 - DNA, 25 bp, Artificial
  Probe
gcattcaagaacatcctcacagaaa

SEQ ID NO: 133884 - DNA, 25 bp, Artificial
  Probe
aacaacttgtccttcattgagacct

SEQ ID NO: 133885 - DNA, 25 bp, Artificial
  Probe
acagaaatctaccgtattgtgtcac

SEQ ID NO: 133886 - DNA, 25 bp, Artificial
  Probe
atgtagaggaagcattcaagaacat

SEQ ID NO: 133887 - DNA, 25 bp, Artificial
  Probe
accaatgtagaggaagcattcaaga

SEQ ID NO: 133888 - DNA, 25 bp, Artificial
  Probe
caccaatgtagaggaagcattcaag

SEQ ID NO: 133889 - DNA, 25 bp, Artificial
  Probe
tcctcacagaaatctaccgtattgt

SEQ ID NO: 133890 - DNA, 25 bp, Artificial
  Probe
aacttgtccttcattgagacctcag

SEQ ID NO: 133891 - DNA, 25 bp, Artificial
  Probe
acaacttgtccttcattgagacctc

SEQ ID NO: 133892 - DNA, 25 bp, Artificial
  Probe
gaacatcctcacagaaatctaccgt

SEQ ID NO: 133893 - DNA, 25 bp, Artificial
  Probe
agaacatcctcacagaaatctaccg

SEQ ID NO: 133894 - DNA, 25 bp, Artificial
  Probe
aaagaacaacttgtccttcattgag

SEQ ID NO: 133895 - DNA, 25 bp, Artificial
  Probe
caacttgtccttcattgagacctca

SEQ ID NO: 133896 - DNA, 25 bp, Artificial
  Probe
atctaccgtattgtgtcacagaagc

SEQ ID NO: 133897 - DNA, 25 bp, Artificial
  Probe
ctcttggatattgtgggcatcttga

SEQ ID NO: 133898 - DNA, 25 bp, Artificial
  Probe
acagaaacacccagactaatcattt

SEQ ID NO: 133899 - DNA, 25 bp, Artificial
  Probe
caatagtgagtcatacctaacccat

SEQ ID NO: 133900 - DNA, 25 bp, Artificial
  Probe
cacagaaacacccagactaatcatt

SEQ ID NO: 133901 - DNA, 25 bp, Artificial
  Probe
agtgagtcatacctaacccataatg

SEQ ID NO: 133902 - DNA, 25 bp, Artificial
  Probe
cagaaacacccagactaatcattta

SEQ ID NO: 133903 - DNA, 25 bp, Artificial
  Probe
gtgagtcatacctaacccataatgc

SEQ ID NO: 133904 - DNA, 25 bp, Artificial
  Probe
ccaatagtgagtcatacctaaccca

SEQ ID NO: 133905 - DNA, 25 bp, Artificial
  Probe
acccaatagtgagtcatacctaacc

SEQ ID NO: 133906 - DNA, 25 bp, Artificial
  Probe
atgagaccaacatcacagaatctga

SEQ ID NO: 133907 - DNA, 25 bp, Artificial
  Probe
aaacacccagactaatcatttatca

SEQ ID NO: 133908 - DNA, 25 bp, Artificial
  Probe
tagtgagtcatacctaacccataat

SEQ ID NO: 133909 - DNA, 25 bp, Artificial
  Probe
atagtgagtcatacctaacccataa

SEQ ID NO: 133910 - DNA, 25 bp, Artificial
  Probe
aatagtgagtcatacctaacccata

SEQ ID NO: 133911 - DNA, 25 bp, Artificial
  Probe
cccaatagtgagtcatacctaaccc

SEQ ID NO: 133912 - DNA, 25 bp, Artificial
  Probe
aacacccagactaatcatttatcat

SEQ ID NO: 133913 - DNA, 25 bp, Artificial
  Probe
attaggagcatacccagataatact

SEQ ID NO: 133914 - DNA, 25 bp, Artificial
  Probe
gacccaatagtgagtcatacctaac

SEQ ID NO: 133915 - DNA, 25 bp, Artificial
  Probe
agaaacacccagactaatcatttat

SEQ ID NO: 133916 - DNA, 25 bp, Artificial
  Probe
gattcacaatgtatgtaagagatgt

SEQ ID NO: 133917 - DNA, 25 bp, Artificial
  Probe
tgattcacaatgtatgtaagagatg

SEQ ID NO: 133918 - DNA, 25 bp, Artificial
  Probe
gaaacacccagactaatcatttatc

SEQ ID NO: 133919 - DNA, 25 bp, Artificial
  Probe
tgagaccaacatcacagaatctgac

SEQ ID NO: 133920 - DNA, 25 bp, Artificial
  Probe
tgtaagagatgtatgattgtatgac

SEQ ID NO: 133921 - DNA, 25 bp, Artificial
  Probe
aacatcacagaatctgacccaatag

SEQ ID NO: 133922 - DNA, 25 bp, Artificial
  Probe
cctattaggagcatacccagataat

SEQ ID NO: 133923 - DNA, 25 bp, Artificial
  Probe
caacatcacagaatctgacccaata

SEQ ID NO: 133924 - DNA, 25 bp, Artificial
  Probe
gaacttacaggttaaatgattcaca

SEQ ID NO: 133925 - DNA, 25 bp, Artificial
  Probe
cacaatgtatgtaagagatgtatga

SEQ ID NO: 133926 - DNA, 25 bp, Artificial
  Probe
tcacaatgtatgtaagagatgtatg

SEQ ID NO: 133927 - DNA, 25 bp, Artificial
  Probe
acacccagactaatcatttatcata

SEQ ID NO: 133928 - DNA, 25 bp, Artificial
  Probe
agtcatacctaacccataatgcaag

SEQ ID NO: 133929 - DNA, 25 bp, Artificial
  Probe
gagtcatacctaacccataatgcaa

SEQ ID NO: 133930 - DNA, 25 bp, Artificial
  Probe
agaacttacaggttaaatgattcac

SEQ ID NO: 133931 - DNA, 25 bp, Artificial
  Probe
gagaccaacatcacagaatctgacc

SEQ ID NO: 133932 - DNA, 25 bp, Artificial
  Probe
gatgagaccaacatcacagaatctg

SEQ ID NO: 133933 - DNA, 25 bp, Artificial
  Probe
acatcacagaatctgacccaatagt

SEQ ID NO: 133934 - DNA, 25 bp, Artificial
  Probe
gcacagaaacacccagactaatcat

SEQ ID NO: 133935 - DNA, 25 bp, Artificial
  Probe
catcacagaatctgacccaatagtg

SEQ ID NO: 133936 - DNA, 25 bp, Artificial
  Probe
gtaagagatgtatgattgtatgaca

SEQ ID NO: 133937 - DNA, 25 bp, Artificial
  Probe
aatgattcacaatgtatgtaagaga

SEQ ID NO: 133938 - DNA, 25 bp, Artificial
  Probe
catacctaacccataatgcaagcat

SEQ ID NO: 133939 - DNA, 25 bp, Artificial
  Probe
tgagtcatacctaacccataatgca

SEQ ID NO: 133940 - DNA, 25 bp, Artificial
  Probe
aacttacaggttaaatgattcacaa

SEQ ID NO: 133941 - DNA, 25 bp, Artificial
  Probe
acttacaggttaaatgattcacaat

SEQ ID NO: 133942 - DNA, 25 bp, Artificial
  Probe
cacccagactaatcatttatcatag

SEQ ID NO: 133943 - DNA, 25 bp, Artificial
  Probe
gcactgaagatagtaatggaagtct

SEQ ID NO: 133944 - DNA, 25 bp, Artificial
  Probe
taggcactgaagatagtaatggaag

SEQ ID NO: 133945 - DNA, 25 bp, Artificial
  Probe
ggcactgaagatagtaatggaagtc

SEQ ID NO: 133946 - DNA, 25 bp, Artificial
  Probe
ataggcactgaagatagtaatggaa

SEQ ID NO: 133947 - DNA, 25 bp, Artificial
  Probe
aataggcactgaagatagtaatgga

SEQ ID NO: 133948 - DNA, 25 bp, Artificial
  Probe
aggcactgaagatagtaatggaagt

SEQ ID NO: 133949 - DNA, 25 bp, Artificial
  Probe
aagcataccatacctcattccacag

SEQ ID NO: 133950 - DNA, 25 bp, Artificial
  Probe
acaggtagcaggtgagatgagataa

SEQ ID NO: 133951 - DNA, 25 bp, Artificial
  Probe
agaagaaagcataccatacctcatt

SEQ ID NO: 133952 - DNA, 25 bp, Artificial
  Probe
aagaagaaagcataccatacctcat

SEQ ID NO: 133953 - DNA, 25 bp, Artificial
  Probe
caagaagaaagcataccatacctca

SEQ ID NO: 133954 - DNA, 25 bp, Artificial
  Probe
aacgaatggaaggtctgaactgaag

SEQ ID NO: 133955 - DNA, 25 bp, Artificial
  Probe
gaacgaatggaaggtctgaactgaa

SEQ ID NO: 133956 - DNA, 25 bp, Artificial
  Probe
gtttagccaaatactctgaggaatg

SEQ ID NO: 133957 - DNA, 25 bp, Artificial
  Probe
ggtttagccaaatactctgaggaat

SEQ ID NO: 133958 - DNA, 25 bp, Artificial
  Probe
taggaccaccaactttgctttattt

SEQ ID NO: 133959 - DNA, 25 bp, Artificial
  Probe
ttaggaccaccaactttgctttatt

SEQ ID NO: 133960 - DNA, 25 bp, Artificial
  Probe
tttaggaccaccaactttgctttat

SEQ ID NO: 133961 - DNA, 25 bp, Artificial
  Probe
atttaggaccaccaactttgcttta

SEQ ID NO: 133962 - DNA, 25 bp, Artificial
  Probe
gaagaaagcataccatacctcattc

SEQ ID NO: 133963 - DNA, 25 bp, Artificial
  Probe
cactgaagatagtaatggaagtcta

SEQ ID NO: 133964 - DNA, 25 bp, Artificial
  Probe
aagaaagcataccatacctcattcc

SEQ ID NO: 133965 - DNA, 25 bp, Artificial
  Probe
caggtgagatgagataaaggtcttc

SEQ ID NO: 133966 - DNA, 25 bp, Artificial
  Probe
ccaagaagaaagcataccatacctc

SEQ ID NO: 133967 - DNA, 25 bp, Artificial
  Probe
aggtagcaggtgagatgagataaag

SEQ ID NO: 133968 - DNA, 25 bp, Artificial
  Probe
aagaacgaatggaaggtctgaactg

SEQ ID NO: 133969 - DNA, 25 bp, Artificial
  Probe
tagcaggtgagatgagataaaggtc

SEQ ID NO: 133970 - DNA, 25 bp, Artificial
  Probe
atgagataaaggtcttcactgctac

SEQ ID NO: 133971 - DNA, 25 bp, Artificial
  Probe
gatgagataaaggtcttcactgcta

SEQ ID NO: 133972 - DNA, 25 bp, Artificial
  Probe
tgagatgagataaaggtcttcactg

SEQ ID NO: 133973 - DNA, 25 bp, Artificial
  Probe
ttaacagattcgtttcaatagtgct

SEQ ID NO: 133974 - DNA, 25 bp, Artificial
  Probe
gaatggaaggtctgaactgaaggtg

SEQ ID NO: 133975 - DNA, 25 bp, Artificial
  Probe
gtagcaggtgagatgagataaaggt

SEQ ID NO: 133976 - DNA, 25 bp, Artificial
  Probe
caggtagcaggtgagatgagataaa

SEQ ID NO: 133977 - DNA, 25 bp, Artificial
  Probe
cttaacagattcgtttcaatagtgc

SEQ ID NO: 133978 - DNA, 25 bp, Artificial
  Probe
aactttgctttatttcctgggagag

SEQ ID NO: 133979 - DNA, 25 bp, Artificial
  Probe
ggcaaataggcactgaagatagtaa

SEQ ID NO: 133980 - DNA, 25 bp, Artificial
  Probe
aggtgagatgagataaaggtcttca

SEQ ID NO: 133981 - DNA, 25 bp, Artificial
  Probe
ctttcctcggtttagccaaatactc

SEQ ID NO: 133982 - DNA, 25 bp, Artificial
  Probe
caactttgctttatttcctgggaga

SEQ ID NO: 133983 - DNA, 25 bp, Artificial
  Probe
gaaagcataccatacctcattccac

SEQ ID NO: 133984 - DNA, 25 bp, Artificial
  Probe
agaaagcataccatacctcattcca

SEQ ID NO: 133985 - DNA, 25 bp, Artificial
  Probe
gcaaataggcactgaagatagtaat

SEQ ID NO: 133986 - DNA, 25 bp, Artificial
  Probe
gagatgagataaaggtcttcactgc

SEQ ID NO: 133987 - DNA, 25 bp, Artificial
  Probe
tttcctcggtttagccaaatactct

SEQ ID NO: 133988 - DNA, 25 bp, Artificial
  Probe
ttctgaggatagatatgtacgccat

SEQ ID NO: 133989 - DNA, 25 bp, Artificial
  Probe
tctgaggatagatatgtacgccatg

SEQ ID NO: 133990 - DNA, 25 bp, Artificial
  Probe
atgactattgtaatgccaacatgac

SEQ ID NO: 133991 - DNA, 25 bp, Artificial
  Probe
ctattgtaatgccaacatgacacag

SEQ ID NO: 133992 - DNA, 25 bp, Artificial
  Probe
gactattgtaatgccaacatgacac

SEQ ID NO: 133993 - DNA, 25 bp, Artificial
  Probe
gtatatggctccagaggtgttagag

SEQ ID NO: 133994 - DNA, 25 bp, Artificial
  Probe
tgactattgtaatgccaacatgaca

SEQ ID NO: 133995 - DNA, 25 bp, Artificial
  Probe
actattgtaatgccaacatgacaca

SEQ ID NO: 133996 - DNA, 25 bp, Artificial
  Probe
aatgactattgtaatgccaacatga

SEQ ID NO: 133997 - DNA, 25 bp, Artificial
  Probe
ttagagggtgctataaacttccaaa

SEQ ID NO: 133998 - DNA, 25 bp, Artificial
  Probe
ttaagagattattggcagaaacacg

SEQ ID NO: 133999 - DNA, 25 bp, Artificial
  Probe
ttgaagatatgcaggaagttgttgt

SEQ ID NO: 134000 - DNA, 25 bp, Artificial
  Probe
cttgaagatatgcaggaagttgttg

SEQ ID NO: 134001 - DNA, 25 bp, Artificial
  Probe
tcagttccacggttgctaaattata

SEQ ID NO: 134002 - DNA, 25 bp, Artificial
  Probe
agaatctagtctatgatggttgcac

SEQ ID NO: 134003 - DNA, 25 bp, Artificial
  Probe
tagagggtgctataaacttccaaag

SEQ ID NO: 134004 - DNA, 25 bp, Artificial
  Probe
tcttgaagatatgcaggaagttgtt

SEQ ID NO: 134005 - DNA, 25 bp, Artificial
  Probe
aagaatctagtctatgatggttgca

SEQ ID NO: 134006 - DNA, 25 bp, Artificial
  Probe
ttacatgaggatatacctggcttaa

SEQ ID NO: 134007 - DNA, 25 bp, Artificial
  Probe
tactacagaggacattgtaacagtg

SEQ ID NO: 134008 - DNA, 25 bp, Artificial
  Probe
tctcttgaagatatgcaggaagttg

SEQ ID NO: 134009 - DNA, 25 bp, Artificial
  Probe
cattactttaacctccctcaacaag

SEQ ID NO: 134010 - DNA, 25 bp, Artificial
  Probe
atgctctgtgaaacgatagaagaat

SEQ ID NO: 134011 - DNA, 25 bp, Artificial
  Probe
gacgcatttctgaggatagatatgt

SEQ ID NO: 134012 - DNA, 25 bp, Artificial
  Probe
gttagagggtgctataaacttccaa

SEQ ID NO: 134013 - DNA, 25 bp, Artificial
  Probe
ctcttgaagatatgcaggaagttgt

SEQ ID NO: 134014 - DNA, 25 bp, Artificial
  Probe
ggtatatggctccagaggtgttaga

SEQ ID NO: 134015 - DNA, 25 bp, Artificial
  Probe
aggtatatggctccagaggtgttag

SEQ ID NO: 134016 - DNA, 25 bp, Artificial
  Probe
aatgctctgtgaaacgatagaagaa

SEQ ID NO: 134017 - DNA, 25 bp, Artificial
  Probe
gaaactgcgaactgtaaagaacttc

SEQ ID NO: 134018 - DNA, 25 bp, Artificial
  Probe
gcattactttaacctccctcaacaa

SEQ ID NO: 134019 - DNA, 25 bp, Artificial
  Probe
ggctagaggattggcatatttacat

SEQ ID NO: 134020 - DNA, 25 bp, Artificial
  Probe
tttggacctggctaatcaagtattt

SEQ ID NO: 134021 - DNA, 25 bp, Artificial
  Probe
ttactacagaggacattgtaacagt

SEQ ID NO: 134022 - DNA, 25 bp, Artificial
  Probe
acgcatttctgaggatagatatgta

SEQ ID NO: 134023 - DNA, 25 bp, Artificial
  Probe
tgaagatatgcaggaagttgttgtg

SEQ ID NO: 134024 - DNA, 25 bp, Artificial
  Probe
aagcattactttaacctccctcaac

SEQ ID NO: 134025 - DNA, 25 bp, Artificial
  Probe
caagcattactttaacctccctcaa

SEQ ID NO: 134026 - DNA, 25 bp, Artificial
  Probe
ctctgtgaaacgatagaagaatgct

SEQ ID NO: 134027 - DNA, 25 bp, Artificial
  Probe
ggacgcatttctgaggatagatatg

SEQ ID NO: 134028 - DNA, 25 bp, Artificial
  Probe
gtgttagagggtgctataaacttcc

SEQ ID NO: 134029 - DNA, 25 bp, Artificial
  Probe
ggtgttagagggtgctataaacttc

SEQ ID NO: 134030 - DNA, 25 bp, Artificial
  Probe
cagaggtgttagagggtgctataaa

SEQ ID NO: 134031 - DNA, 25 bp, Artificial
  Probe
ctcagttccacggttgctaaattat

SEQ ID NO: 134032 - DNA, 25 bp, Artificial
  Probe
tgttagagggtgctataaacttcca

SEQ ID NO: 134033 - DNA, 25 bp, Artificial
  Probe
ttaagggctgggatataatacaacc

SEQ ID NO: 134034 - DNA, 25 bp, Artificial
  Probe
acactatttatttaagggctgggat

SEQ ID NO: 134035 - DNA, 25 bp, Artificial
  Probe
tacactatttatttaagggctggga

SEQ ID NO: 134036 - DNA, 25 bp, Artificial
  Probe
tttaagggctgggatataatacaac

SEQ ID NO: 134037 - DNA, 25 bp, Artificial
  Probe
gtctatgcctacatctttgaacacc

SEQ ID NO: 134038 - DNA, 25 bp, Artificial
  Probe
ggtctatgcctacatctttgaacac

SEQ ID NO: 134039 - DNA, 25 bp, Artificial
  Probe
taagggctgggatataatacaaccg

SEQ ID NO: 134040 - DNA, 25 bp, Artificial
  Probe
atacactatttatttaagggctggg

SEQ ID NO: 134041 - DNA, 25 bp, Artificial
  Probe
cactatttatttaagggctgggata

SEQ ID NO: 134042 - DNA, 25 bp, Artificial
  Probe
gggtctatgcctacatctttgaaca

SEQ ID NO: 134043 - DNA, 25 bp, Artificial
  Probe
atttaagggctgggatataatacaa

SEQ ID NO: 134044 - DNA, 25 bp, Artificial
  Probe
ggaagaaccagttcgaccactatag

SEQ ID NO: 134045 - DNA, 25 bp, Artificial
  Probe
tctatgcctacatctttgaacaccg

SEQ ID NO: 134046 - DNA, 25 bp, Artificial
  Probe
actatttatttaagggctgggatat

SEQ ID NO: 134047 - DNA, 25 bp, Artificial
  Probe
gagaatctttgctcagcgacttatg

SEQ ID NO: 134048 - DNA, 25 bp, Artificial
  Probe
agagaatctttgctcagcgacttat

SEQ ID NO: 134049 - DNA, 25 bp, Artificial
  Probe
ctatgcctacatctttgaacaccgt

SEQ ID NO: 134050 - DNA, 25 bp, Artificial
  Probe
gaagaaccagttcgaccactatagc

SEQ ID NO: 134051 - DNA, 25 bp, Artificial
  Probe
aagggctgggatataatacaaccga

SEQ ID NO: 134052 - DNA, 25 bp, Artificial
  Probe
gaactacaccgtggaggagagaatc

SEQ ID NO: 134053 - DNA, 25 bp, Artificial
  Probe
gaaccagttcgaccactatagcaag

SEQ ID NO: 134054 - DNA, 25 bp, Artificial
  Probe
gagagaatctttgctcagcgactta

SEQ ID NO: 134055 - DNA, 25 bp, Artificial
  Probe
cgggtctatgcctacatctttgaac

SEQ ID NO: 134056 - DNA, 25 bp, Artificial
  Probe
caatactggagattttcaagacctg

SEQ ID NO: 134057 - DNA, 25 bp, Artificial
  Probe
tcaatactggagattttcaagacct

SEQ ID NO: 134058 - DNA, 25 bp, Artificial
  Probe
tatgcctacatctttgaacaccgtg

SEQ ID NO: 134059 - DNA, 25 bp, Artificial
  Probe
caaagacaatgaatctctcatcagc

SEQ ID NO: 134060 - DNA, 25 bp, Artificial
  Probe
gcaaagacaatgaatctctcatcag

SEQ ID NO: 134061 - DNA, 25 bp, Artificial
  Probe
cagcaaagacaatgaatctctcatc

SEQ ID NO: 134062 - DNA, 25 bp, Artificial
  Probe
agcaaagacaatgaatctctcatca

SEQ ID NO: 134063 - DNA, 25 bp, Artificial
  Probe
tcagcaaagacaatgaatctctcat

SEQ ID NO: 134064 - DNA, 25 bp, Artificial
  Probe
tatttaagggctgggatataataca

SEQ ID NO: 134065 - DNA, 25 bp, Artificial
  Probe
agggctgggatataatacaaccgag

SEQ ID NO: 134066 - DNA, 25 bp, Artificial
  Probe
tcgggtctatgcctacatctttgaa

SEQ ID NO: 134067 - DNA, 25 bp, Artificial
  Probe
aagacaatgaatctctcatcagccg

SEQ ID NO: 134068 - DNA, 25 bp, Artificial
  Probe
aatactggagattttcaagacctgc

SEQ ID NO: 134069 - DNA, 25 bp, Artificial
  Probe
tggaagaaccagttcgaccactata

SEQ ID NO: 134070 - DNA, 25 bp, Artificial
  Probe
aaagacaatgaatctctcatcagcc

SEQ ID NO: 134071 - DNA, 25 bp, Artificial
  Probe
agaaccagttcgaccactatagcaa

SEQ ID NO: 134072 - DNA, 25 bp, Artificial
  Probe
aagaaccagttcgaccactatagca

SEQ ID NO: 134073 - DNA, 25 bp, Artificial
  Probe
cttcagcaaagacaatgaatctctc

SEQ ID NO: 134074 - DNA, 25 bp, Artificial
  Probe
atcaatactggagattttcaagacc

SEQ ID NO: 134075 - DNA, 25 bp, Artificial
  Probe
ttcagcaaagacaatgaatctctca

SEQ ID NO: 134076 - DNA, 25 bp, Artificial
  Probe
actacaccgtggaggagagaatctt

SEQ ID NO: 134077 - DNA, 25 bp, Artificial
  Probe
aactacaccgtggaggagagaatct

SEQ ID NO: 134078 - DNA, 25 bp, Artificial
  Probe
ctagtactgttgctgcctcaaacac

SEQ ID NO: 134079 - DNA, 25 bp, Artificial
  Probe
tctagtactgttgctgcctcaaaca

SEQ ID NO: 134080 - DNA, 25 bp, Artificial
  Probe
tagtactgttgctgcctcaaacaca

SEQ ID NO: 134081 - DNA, 25 bp, Artificial
  Probe
tactgttgctgcctcaaacacagaa

SEQ ID NO: 134082 - DNA, 25 bp, Artificial
  Probe
gcattctcttcagacacaatttgta

SEQ ID NO: 134083 - DNA, 25 bp, Artificial
  Probe
tttgcattctcttcagacacaattt

SEQ ID NO: 134084 - DNA, 25 bp, Artificial
  Probe
cattctcttcagacacaatttgtag

SEQ ID NO: 134085 - DNA, 25 bp, Artificial
  Probe
ttgcattctcttcagacacaatttg

SEQ ID NO: 134086 - DNA, 25 bp, Artificial
  Probe
tgcattctcttcagacacaatttgt

SEQ ID NO: 134087 - DNA, 25 bp, Artificial
  Probe
aatgagattgggacatggagtgact

SEQ ID NO: 134088 - DNA, 25 bp, Artificial
  Probe
acagccaacaatctcctgatctgag

SEQ ID NO: 134089 - DNA, 25 bp, Artificial
  Probe
atcccgaatcctttccactcaagtt

SEQ ID NO: 134090 - DNA, 25 bp, Artificial
  Probe
tcccgaatcctttccactcaagttt

SEQ ID NO: 134091 - DNA, 25 bp, Artificial
  Probe
cacagccaacaatctcctgatctga

SEQ ID NO: 134092 - DNA, 25 bp, Artificial
  Probe
ttttgcattctcttcagacacaatt

SEQ ID NO: 134093 - DNA, 25 bp, Artificial
  Probe
cttttgcattctcttcagacacaat

SEQ ID NO: 134094 - DNA, 25 bp, Artificial
  Probe
atgagattgggacatggagtgactg

SEQ ID NO: 134095 - DNA, 25 bp, Artificial
  Probe
gatcccgaatcctttccactcaagt

SEQ ID NO: 134096 - DNA, 25 bp, Artificial
  Probe
caatgagattgggacatggagtgac

SEQ ID NO: 134097 - DNA, 25 bp, Artificial
  Probe
gacaatgagattgggacatggagtg

SEQ ID NO: 134098 - DNA, 25 bp, Artificial
  Probe
ctccatacccttcttgaccagtgtc

SEQ ID NO: 134099 - DNA, 25 bp, Artificial
  Probe
tgatcccgaatcctttccactcaag

SEQ ID NO: 134100 - DNA, 25 bp, Artificial
  Probe
ctgatcccgaatcctttccactcaa

SEQ ID NO: 134101 - DNA, 25 bp, Artificial
  Probe
ccttttgcattctcttcagacacaa

SEQ ID NO: 134102 - DNA, 25 bp, Artificial
  Probe
acaatgagattgggacatggagtga

SEQ ID NO: 134103 - DNA, 25 bp, Artificial
  Probe
aaggacaatgagattgggacatgga

SEQ ID NO: 134104 - DNA, 25 bp, Artificial
  Probe
caaggacaatgagattgggacatgg

SEQ ID NO: 134105 - DNA, 25 bp, Artificial
  Probe
cccgaatcctttccactcaagtttt

SEQ ID NO: 134106 - DNA, 25 bp, Artificial
  Probe
gaccttttgcattctcttcagacac

SEQ ID NO: 134107 - DNA, 25 bp, Artificial
  Probe
aggacaatgagattgggacatggag

SEQ ID NO: 134108 - DNA, 25 bp, Artificial
  Probe
accttttgcattctcttcagacaca

SEQ ID NO: 134109 - DNA, 25 bp, Artificial
  Probe
caacaatctcctgatctgagccctg

SEQ ID NO: 134110 - DNA, 25 bp, Artificial
  Probe
aggaccttttgcattctcttcagac

SEQ ID NO: 134111 - DNA, 25 bp, Artificial
  Probe
gaggaccttttgcattctcttcaga

SEQ ID NO: 134112 - DNA, 25 bp, Artificial
  Probe
ggacaatgagattgggacatggagt

SEQ ID NO: 134113 - DNA, 25 bp, Artificial
  Probe
ggaccttttgcattctcttcagaca

SEQ ID NO: 134114 - DNA, 25 bp, Artificial
  Probe
ggaggaccttttgcattctcttcag

SEQ ID NO: 134115 - DNA, 25 bp, Artificial
  Probe
ccaaggacaatgagattgggacatg

SEQ ID NO: 134116 - DNA, 25 bp, Artificial
  Probe
caggaggaccttttgcattctcttc

SEQ ID NO: 134117 - DNA, 25 bp, Artificial
  Probe
aggaggaccttttgcattctcttca

SEQ ID NO: 134118 - DNA, 25 bp, Artificial
  Probe
gccaaggacaatgagattgggacat

SEQ ID NO: 134119 - DNA, 25 bp, Artificial
  Probe
attagtccactcagaatcagatgtc

SEQ ID NO: 134120 - DNA, 25 bp, Artificial
  Probe
cattagtccactcagaatcagatgt

SEQ ID NO: 134121 - DNA, 25 bp, Artificial
  Probe
tagtccactcagaatcagatgtcaa

SEQ ID NO: 134122 - DNA, 25 bp, Artificial
  Probe
ttagtccactcagaatcagatgtca

SEQ ID NO: 134123 - DNA, 25 bp, Artificial
  Probe
gcattagtccactcagaatcagatg

SEQ ID NO: 134124 - DNA, 25 bp, Artificial
  Probe
ttaagacaacagttaatacgacagg

SEQ ID NO: 134125 - DNA, 25 bp, Artificial
  Probe
cagaatcagatgtcaacagcagaac

SEQ ID NO: 134126 - DNA, 25 bp, Artificial
  Probe
agtccactcagaatcagatgtcaac

SEQ ID NO: 134127 - DNA, 25 bp, Artificial
  Probe
agaatcagatgtcaacagcagaact

SEQ ID NO: 134128 - DNA, 25 bp, Artificial
  Probe
tcagaatcagatgtcaacagcagaa

SEQ ID NO: 134129 - DNA, 25 bp, Artificial
  Probe
tccactcagaatcagatgtcaacag

SEQ ID NO: 134130 - DNA, 25 bp, Artificial
  Probe
ctcagaatcagatgtcaacagcaga

SEQ ID NO: 134131 - DNA, 25 bp, Artificial
  Probe
gtccactcagaatcagatgtcaaca

SEQ ID NO: 134132 - DNA, 25 bp, Artificial
  Probe
tggtctactgggtggtttatttatc

SEQ ID NO: 134133 - DNA, 25 bp, Artificial
  Probe
cgtattctctttccagtcacatttg

SEQ ID NO: 134134 - DNA, 25 bp, Artificial
  Probe
tcgtattctctttccagtcacattt

SEQ ID NO: 134135 - DNA, 25 bp, Artificial
  Probe
ggtctactgggtggtttatttatct

SEQ ID NO: 134136 - DNA, 25 bp, Artificial
  Probe
atatgctcgtattctctttccagtc

SEQ ID NO: 134137 - DNA, 25 bp, Artificial
  Probe
atggtctactgggtggtttatttat

SEQ ID NO: 134138 - DNA, 25 bp, Artificial
  Probe
ctcgtattctctttccagtcacatt

SEQ ID NO: 134139 - DNA, 25 bp, Artificial
  Probe
taagacaacagttaatacgacaggg

SEQ ID NO: 134140 - DNA, 25 bp, Artificial
  Probe
tgggtggtttatttatctaaggaca

SEQ ID NO: 134141 - DNA, 25 bp, Artificial
  Probe
actcagaatcagatgtcaacagcag

SEQ ID NO: 134142 - DNA, 25 bp, Artificial
  Probe
actgggtggtttatttatctaagga

SEQ ID NO: 134143 - DNA, 25 bp, Artificial
  Probe
gaatcagatgtcaacagcagaactg

SEQ ID NO: 134144 - DNA, 25 bp, Artificial
  Probe
ataaccgtgatggaaatacagactg

SEQ ID NO: 134145 - DNA, 25 bp, Artificial
  Probe
ctgggtggtttatttatctaaggac

SEQ ID NO: 134146 - DNA, 25 bp, Artificial
  Probe
cataaccgtgatggaaatacagact

SEQ ID NO: 134147 - DNA, 25 bp, Artificial
  Probe
aatatgctcgtattctctttccagt

SEQ ID NO: 134148 - DNA, 25 bp, Artificial
  Probe
tatgctcgtattctctttccagtca

SEQ ID NO: 134149 - DNA, 25 bp, Artificial
  Probe
caaatatgctcgtattctctttcca

SEQ ID NO: 134150 - DNA, 25 bp, Artificial
  Probe
acaaatatgctcgtattctctttcc

SEQ ID NO: 134151 - DNA, 25 bp, Artificial
  Probe
cactcagaatcagatgtcaacagca

SEQ ID NO: 134152 - DNA, 25 bp, Artificial
  Probe
tgcattagtccactcagaatcagat

SEQ ID NO: 134153 - DNA, 25 bp, Artificial
  Probe
ttcataaccgtgatggaaatacaga

SEQ ID NO: 134154 - DNA, 25 bp, Artificial
  Probe
aaatatgctcgtattctctttccag

SEQ ID NO: 134155 - DNA, 25 bp, Artificial
  Probe
cgcattaagacaacagttaatacga

SEQ ID NO: 134156 - DNA, 25 bp, Artificial
  Probe
taaagcaatttcataaccgtgatgg

SEQ ID NO: 134157 - DNA, 25 bp, Artificial
  Probe
tcataaccgtgatggaaatacagac

SEQ ID NO: 134158 - DNA, 25 bp, Artificial
  Probe
ctaaagcaatttcataaccgtgatg

SEQ ID NO: 134159 - DNA, 25 bp, Artificial
  Probe
catggtctactgggtggtttattta

SEQ ID NO: 134160 - DNA, 25 bp, Artificial
  Probe
agacaaatatgctcgtattctcttt

SEQ ID NO: 134161 - DNA, 25 bp, Artificial
  Probe
gctaaagcaatttcataaccgtgat

SEQ ID NO: 134162 - DNA, 25 bp, Artificial
  Probe
gcattaagacaacagttaatacgac

SEQ ID NO: 134163 - DNA, 25 bp, Artificial
  Probe
gacaaatatgctcgtattctctttc

SEQ ID NO: 134164 - DNA, 25 bp, Artificial
  Probe
ttctctaccatcaccaagtacactt

SEQ ID NO: 134165 - DNA, 25 bp, Artificial
  Probe
ctgacctgagaagtctctaacaata

SEQ ID NO: 134166 - DNA, 25 bp, Artificial
  Probe
tgacctgagaagtctctaacaatat

SEQ ID NO: 134167 - DNA, 25 bp, Artificial
  Probe
cctgacctgagaagtctctaacaat

SEQ ID NO: 134168 - DNA, 25 bp, Artificial
  Probe
aagtaaggaattgaagaaagccatt

SEQ ID NO: 134169 - DNA, 25 bp, Artificial
  Probe
aaagtaaggaattgaagaaagccat

SEQ ID NO: 134170 - DNA, 25 bp, Artificial
  Probe
aggttaaagccatttacatccattg

SEQ ID NO: 134171 - DNA, 25 bp, Artificial
  Probe
caggttaaagccatttacatccatt

SEQ ID NO: 134172 - DNA, 25 bp, Artificial
  Probe
tgaacaggttaaagccatttacatc

SEQ ID NO: 134173 - DNA, 25 bp, Artificial
  Probe
gaacaggttaaagccatttacatcc

SEQ ID NO: 134174 - DNA, 25 bp, Artificial
  Probe
tttgaacaggttaaagccatttaca

SEQ ID NO: 134175 - DNA, 25 bp, Artificial
  Probe
aacaaatcaagacactttctcaaga

SEQ ID NO: 134176 - DNA, 25 bp, Artificial
  Probe
ttgaacaggttaaagccatttacat

SEQ ID NO: 134177 - DNA, 25 bp, Artificial
  Probe
acaggttaaagccatttacatccat

SEQ ID NO: 134178 - DNA, 25 bp, Artificial
  Probe
aacaggttaaagccatttacatcca

SEQ ID NO: 134179 - DNA, 25 bp, Artificial
  Probe
tactcaatctccatgtgaagctcaa

SEQ ID NO: 134180 - DNA, 25 bp, Artificial
  Probe
aatcaagacactttctcaagaactg

SEQ ID NO: 134181 - DNA, 25 bp, Artificial
  Probe
ctctaccatcaccaagtacacttta

SEQ ID NO: 134182 - DNA, 25 bp, Artificial
  Probe
ggttaaagccatttacatccattgt

SEQ ID NO: 134183 - DNA, 25 bp, Artificial
  Probe
taaagccatttacatccattgtgac

SEQ ID NO: 134184 - DNA, 25 bp, Artificial
  Probe
acaaatcaagacactttctcaagaa

SEQ ID NO: 134185 - DNA, 25 bp, Artificial
  Probe
aaacaaatcaagacactttctcaag

SEQ ID NO: 134186 - DNA, 25 bp, Artificial
  Probe
tctaccatcaccaagtacactttat

SEQ ID NO: 134187 - DNA, 25 bp, Artificial
  Probe
tttctctaccatcaccaagtacact

SEQ ID NO: 134188 - DNA, 25 bp, Artificial
  Probe
ttaaagccatttacatccattgtga

SEQ ID NO: 134189 - DNA, 25 bp, Artificial
  Probe
gttaaagccatttacatccattgtg

SEQ ID NO: 134190 - DNA, 25 bp, Artificial
  Probe
caaatcaagacactttctcaagaac

SEQ ID NO: 134191 - DNA, 25 bp, Artificial
  Probe
tcctgacctgagaagtctctaacaa

SEQ ID NO: 134192 - DNA, 25 bp, Artificial
  Probe
ttcctgacctgagaagtctctaaca

SEQ ID NO: 134193 - DNA, 25 bp, Artificial
  Probe
tctctaccatcaccaagtacacttt

SEQ ID NO: 134194 - DNA, 25 bp, Artificial
  Probe
aaatcaagacactttctcaagaact

SEQ ID NO: 134195 - DNA, 25 bp, Artificial
  Probe
atcaagacactttctcaagaactgt

SEQ ID NO: 134196 - DNA, 25 bp, Artificial
  Probe
aagccatttacatccattgtgacat

SEQ ID NO: 134197 - DNA, 25 bp, Artificial
  Probe
gacctgagaagtctctaacaatatt

SEQ ID NO: 134198 - DNA, 25 bp, Artificial
  Probe
gtactcaatctccatgtgaagctca

SEQ ID NO: 134199 - DNA, 25 bp, Artificial
  Probe
tgtactcaatctccatgtgaagctc

SEQ ID NO: 134200 - DNA, 25 bp, Artificial
  Probe
ctaccatcaccaagtacactttatt

SEQ ID NO: 134201 - DNA, 25 bp, Artificial
  Probe
aaagccatttacatccattgtgaca

SEQ ID NO: 134202 - DNA, 25 bp, Artificial
  Probe
tctcaagaactgtgtaccactaaag

SEQ ID NO: 134203 - DNA, 25 bp, Artificial
  Probe
ttctcaagaactgtgtaccactaaa

SEQ ID NO: 134204 - DNA, 25 bp, Artificial
  Probe
tttctcaagaactgtgtaccactaa

SEQ ID NO: 134205 - DNA, 25 bp, Artificial
  Probe
ctttctcaagaactgtgtaccacta

SEQ ID NO: 134206 - DNA, 25 bp, Artificial
  Probe
ctcaagaactgtgtaccactaaagt

SEQ ID NO: 134207 - DNA, 25 bp, Artificial
  Probe
taccatcaccaagtacactttattt

SEQ ID NO: 134208 - DNA, 25 bp, Artificial
  Probe
tcaagaactgtgtaccactaaagta

SEQ ID NO: 134209 - DNA, 25 bp, Artificial
  Probe
ccttcagtgtagatggtgctaagac

SEQ ID NO: 134210 - DNA, 25 bp, Artificial
  Probe
ttacagaaatcatctctcatcctcc

SEQ ID NO: 134211 - DNA, 25 bp, Artificial
  Probe
gaaatcatctctcatcctcccaatg

SEQ ID NO: 134212 - DNA, 25 bp, Artificial
  Probe
agaaatcatctctcatcctcccaat

SEQ ID NO: 134213 - DNA, 25 bp, Artificial
  Probe
tacagaaatcatctctcatcctccc

SEQ ID NO: 134214 - DNA, 25 bp, Artificial
  Probe
catcatctgctggtttccttacttc

SEQ ID NO: 134215 - DNA, 25 bp, Artificial
  Probe
atcatctgctggtttccttacttca

SEQ ID NO: 134216 - DNA, 25 bp, Artificial
  Probe
tcatcatctgctggtttccttactt

SEQ ID NO: 134217 - DNA, 25 bp, Artificial
  Probe
ttcatcatctgctggtttccttact

SEQ ID NO: 134218 - DNA, 25 bp, Artificial
  Probe
gttcatcatctgctggtttccttac

SEQ ID NO: 134219 - DNA, 25 bp, Artificial
  Probe
cagaaatcatctctcatcctcccaa

SEQ ID NO: 134220 - DNA, 25 bp, Artificial
  Probe
tttacagaaatcatctctcatcctc

SEQ ID NO: 134221 - DNA, 25 bp, Artificial
  Probe
cttcagtgtagatggtgctaagacc

SEQ ID NO: 134222 - DNA, 25 bp, Artificial
  Probe
aaatcatctctcatcctcccaatgg

SEQ ID NO: 134223 - DNA, 25 bp, Artificial
  Probe
atctgctggtttccttacttcactg

SEQ ID NO: 134224 - DNA, 25 bp, Artificial
  Probe
catctgctggtttccttacttcact

SEQ ID NO: 134225 - DNA, 25 bp, Artificial
  Probe
tcatctgctggtttccttacttcac

SEQ ID NO: 134226 - DNA, 25 bp, Artificial
  Probe
accttcagtgtagatggtgctaaga

SEQ ID NO: 134227 - DNA, 25 bp, Artificial
  Probe
ttccttacttcactgcattcgttta

SEQ ID NO: 134228 - DNA, 25 bp, Artificial
  Probe
acagaaatcatctctcatcctccca

SEQ ID NO: 134229 - DNA, 25 bp, Artificial
  Probe
tccttacttcactgcattcgtttac

SEQ ID NO: 134230 - DNA, 25 bp, Artificial
  Probe
tttccttacttcactgcattcgttt

SEQ ID NO: 134231 - DNA, 25 bp, Artificial
  Probe
cgttcatcatctgctggtttcctta

SEQ ID NO: 134232 - DNA, 25 bp, Artificial
  Probe
gtttccttacttcactgcattcgtt

SEQ ID NO: 134233 - DNA, 25 bp, Artificial
  Probe
ccttacttcactgcattcgtttacc

SEQ ID NO: 134234 - DNA, 25 bp, Artificial
  Probe
ctggtttccttacttcactgcattc

SEQ ID NO: 134235 - DNA, 25 bp, Artificial
  Probe
cttacttcactgcattcgtttaccg

SEQ ID NO: 134236 - DNA, 25 bp, Artificial
  Probe
aaacttccctgaggttgaacaactc

SEQ ID NO: 134237 - DNA, 25 bp, Artificial
  Probe
ccattccatgagcattttacagaaa

SEQ ID NO: 134238 - DNA, 25 bp, Artificial
  Probe
agaaggtagatggcaggaggagaag

SEQ ID NO: 134239 - DNA, 25 bp, Artificial
  Probe
gagaaggtagatggcaggaggagaa

SEQ ID NO: 134240 - DNA, 25 bp, Artificial
  Probe
taagaccattccatgagcattttac

SEQ ID NO: 134241 - DNA, 25 bp, Artificial
  Probe
accattccatgagcattttacagaa

SEQ ID NO: 134242 - DNA, 25 bp, Artificial
  Probe
aagaccattccatgagcattttaca

SEQ ID NO: 134243 - DNA, 25 bp, Artificial
  Probe
ctaagaccattccatgagcatttta

SEQ ID NO: 134244 - DNA, 25 bp, Artificial
  Probe
atcaggtaaaggttgtgggttggaa

SEQ ID NO: 134245 - DNA, 25 bp, Artificial
  Probe
aatcaggtaaaggttgtgggttgga

SEQ ID NO: 134246 - DNA, 25 bp, Artificial
  Probe
ttacttcactgcattcgtttaccgt

SEQ ID NO: 134247 - DNA, 25 bp, Artificial
  Probe
agcattttacagaaatcatctctca

SEQ ID NO: 134248 - DNA, 25 bp, Artificial
  Probe
tgagcattttacagaaatcatctct

SEQ ID NO: 134249 - DNA, 25 bp, Artificial
  Probe
gaccattccatgagcattttacaga

SEQ ID NO: 134250 - DNA, 25 bp, Artificial
  Probe
agaccattccatgagcattttacag

SEQ ID NO: 134251 - DNA, 25 bp, Artificial
  Probe
caatcaggtaaaggttgtgggttgg

SEQ ID NO: 134252 - DNA, 25 bp, Artificial
  Probe
ttttacagaaatcatctctcatcct

SEQ ID NO: 134253 - DNA, 25 bp, Artificial
  Probe
ttccatgagcattttacagaaatca

SEQ ID NO: 134254 - DNA, 25 bp, Artificial
  Probe
tacattctccattacgacattgatg

SEQ ID NO: 134255 - DNA, 25 bp, Artificial
  Probe
gtacattctccattacgacattgat

SEQ ID NO: 134256 - DNA, 25 bp, Artificial
  Probe
aaggaggaaggaatcatctcatcac

SEQ ID NO: 134257 - DNA, 25 bp, Artificial
  Probe
caaggaggaaggaatcatctcatca

SEQ ID NO: 134258 - DNA, 25 bp, Artificial
  Probe
gaggaaggaatcatctcatcaccaa

SEQ ID NO: 134259 - DNA, 25 bp, Artificial
  Probe
acatctttcttccaattccaaactg

SEQ ID NO: 134260 - DNA, 25 bp, Artificial
  Probe
cacatctttcttccaattccaaact

SEQ ID NO: 134261 - DNA, 25 bp, Artificial
  Probe
tcacatctttcttccaattccaaac

SEQ ID NO: 134262 - DNA, 25 bp, Artificial
  Probe
atcacatctttcttccaattccaaa

SEQ ID NO: 134263 - DNA, 25 bp, Artificial
  Probe
cctttgagaattaagatgcctgaaa

SEQ ID NO: 134264 - DNA, 25 bp, Artificial
  Probe
ccctttgagaattaagatgcctgaa

SEQ ID NO: 134265 - DNA, 25 bp, Artificial
  Probe
ccagcaatcagagatggatacttct

SEQ ID NO: 134266 - DNA, 25 bp, Artificial
  Probe
cttcagatatggagatcaacccttt

SEQ ID NO: 134267 - DNA, 25 bp, Artificial
  Probe
aaccctttgagaattaagatgcctg

SEQ ID NO: 134268 - DNA, 25 bp, Artificial
  Probe
gatcacatctttcttccaattccaa

SEQ ID NO: 134269 - DNA, 25 bp, Artificial
  Probe
gcaaggaggaaggaatcatctcatc

SEQ ID NO: 134270 - DNA, 25 bp, Artificial
  Probe
accagcaatcagagatggatacttc

SEQ ID NO: 134271 - DNA, 25 bp, Artificial
  Probe
caaccctttgagaattaagatgcct

SEQ ID NO: 134272 - DNA, 25 bp, Artificial
  Probe
acttcagatatggagatcaaccctt

SEQ ID NO: 134273 - DNA, 25 bp, Artificial
  Probe
gccttacaaatacaacaacaatact

SEQ ID NO: 134274 - DNA, 25 bp, Artificial
  Probe
ttcagatatggagatcaaccctttg

SEQ ID NO: 134275 - DNA, 25 bp, Artificial
  Probe
gaactgcacttcagatatggagatc

SEQ ID NO: 134276 - DNA, 25 bp, Artificial
  Probe
caccagcaatcagagatggatactt

SEQ ID NO: 134277 - DNA, 25 bp, Artificial
  Probe
ctgcacttcagatatggagatcaac

SEQ ID NO: 134278 - DNA, 25 bp, Artificial
  Probe
accctttgagaattaagatgcctga

SEQ ID NO: 134279 - DNA, 25 bp, Artificial
  Probe
ctgagaaacaatggtccaagttcat

SEQ ID NO: 134280 - DNA, 25 bp, Artificial
  Probe
agcaaggaggaaggaatcatctcat

SEQ ID NO: 134281 - DNA, 25 bp, Artificial
  Probe
tgcacttcagatatggagatcaacc

SEQ ID NO: 134282 - DNA, 25 bp, Artificial
  Probe
cacttcagatatggagatcaaccct

SEQ ID NO: 134283 - DNA, 25 bp, Artificial
  Probe
actgcacttcagatatggagatcaa

SEQ ID NO: 134284 - DNA, 25 bp, Artificial
  Probe
aactgcacttcagatatggagatca

SEQ ID NO: 134285 - DNA, 25 bp, Artificial
  Probe
aggaggaaggaatcatctcatcacc

SEQ ID NO: 134286 - DNA, 25 bp, Artificial
  Probe
aaatacaacaacaatactttgctgt

SEQ ID NO: 134287 - DNA, 25 bp, Artificial
  Probe
cacatctatgagctgagaaacaatg

SEQ ID NO: 134288 - DNA, 25 bp, Artificial
  Probe
catctttcttccaattccaaactgg

SEQ ID NO: 134289 - DNA, 25 bp, Artificial
  Probe
ggaggaaggaatcatctcatcacca

SEQ ID NO: 134290 - DNA, 25 bp, Artificial
  Probe
atctatgagctgagaaacaatggtc

SEQ ID NO: 134291 - DNA, 25 bp, Artificial
  Probe
catctatgagctgagaaacaatggt

SEQ ID NO: 134292 - DNA, 25 bp, Artificial
  Probe
acatctatgagctgagaaacaatgg

SEQ ID NO: 134293 - DNA, 25 bp, Artificial
  Probe
tccaagttcattcagcaaggcaatc

SEQ ID NO: 134294 - DNA, 25 bp, Artificial
  Probe
atctttcttccaattccaaactggg

SEQ ID NO: 134295 - DNA, 25 bp, Artificial
  Probe
ctgagcaaggaggaaggaatcatct

SEQ ID NO: 134296 - DNA, 25 bp, Artificial
  Probe
gcacatctatgagctgagaaacaat

SEQ ID NO: 134297 - DNA, 25 bp, Artificial
  Probe
caatggtccaagttcattcagcaag

SEQ ID NO: 134298 - DNA, 25 bp, Artificial
  Probe
gataagaggagtttcaagccctgat

SEQ ID NO: 134299 - DNA, 25 bp, Artificial
  Probe
ccactactctgcttccactactatg

SEQ ID NO: 134300 - DNA, 25 bp, Artificial
  Probe
accactactctgcttccactactat

SEQ ID NO: 134301 - DNA, 25 bp, Artificial
  Probe
aaccactactctgcttccactacta

SEQ ID NO: 134302 - DNA, 25 bp, Artificial
  Probe
tgagaaactatcccagaagaacatt

SEQ ID NO: 134303 - DNA, 25 bp, Artificial
  Probe
cagcctttaccagaattacagtgag

SEQ ID NO: 134304 - DNA, 25 bp, Artificial
  Probe
cactactctgcttccactactatgg

SEQ ID NO: 134305 - DNA, 25 bp, Artificial
  Probe
gtcagcctttaccagaattacagtg

SEQ ID NO: 134306 - DNA, 25 bp, Artificial
  Probe
actatcccagaagaacattaacttg

SEQ ID NO: 134307 - DNA, 25 bp, Artificial
  Probe
tcccagaagaacattaacttgatct

SEQ ID NO: 134308 - DNA, 25 bp, Artificial
  Probe
ctatcccagaagaacattaacttga

SEQ ID NO: 134309 - DNA, 25 bp, Artificial
  Probe
gagaaactatcccagaagaacatta

SEQ ID NO: 134310 - DNA, 25 bp, Artificial
  Probe
tctgatgactcaagcaatgtccttc

SEQ ID NO: 134311 - DNA, 25 bp, Artificial
  Probe
ctgagaaactatcccagaagaacat

SEQ ID NO: 134312 - DNA, 25 bp, Artificial
  Probe
gatgactgagaaactatcccagaag

SEQ ID NO: 134313 - DNA, 25 bp, Artificial
  Probe
gactgagaaactatcccagaagaac

SEQ ID NO: 134314 - DNA, 25 bp, Artificial
  Probe
atcccagaagaacattaacttgatc

SEQ ID NO: 134315 - DNA, 25 bp, Artificial
  Probe
atgtcgtcagcctttaccagaatta

SEQ ID NO: 134316 - DNA, 25 bp, Artificial
  Probe
atgactgagaaactatcccagaaga

SEQ ID NO: 134317 - DNA, 25 bp, Artificial
  Probe
tgactgagaaactatcccagaagaa

SEQ ID NO: 134318 - DNA, 25 bp, Artificial
  Probe
tgatgactgagaaactatcccagaa

SEQ ID NO: 134319 - DNA, 25 bp, Artificial
  Probe
tcagcctttaccagaattacagtga

SEQ ID NO: 134320 - DNA, 25 bp, Artificial
  Probe
aaactatcccagaagaacattaact

SEQ ID NO: 134321 - DNA, 25 bp, Artificial
  Probe
tgatgactcaagcaatgtccttcag

SEQ ID NO: 134322 - DNA, 25 bp, Artificial
  Probe
ctgatgactcaagcaatgtccttca

SEQ ID NO: 134323 - DNA, 25 bp, Artificial
  Probe
gtctgatgactcaagcaatgtcctt

SEQ ID NO: 134324 - DNA, 25 bp, Artificial
  Probe
actgagaaactatcccagaagaaca

SEQ ID NO: 134325 - DNA, 25 bp, Artificial
  Probe
gaaactatcccagaagaacattaac

SEQ ID NO: 134326 - DNA, 25 bp, Artificial
  Probe
aactatcccagaagaacattaactt

SEQ ID NO: 134327 - DNA, 25 bp, Artificial
  Probe
ctgatgactgagaaactatcccaga

SEQ ID NO: 134328 - DNA, 25 bp, Artificial
  Probe
caaccactactctgcttccactact

SEQ ID NO: 134329 - DNA, 25 bp, Artificial
  Probe
gacaaccactactctgcttccacta

SEQ ID NO: 134330 - DNA, 25 bp, Artificial
  Probe
agaaactatcccagaagaacattaa

SEQ ID NO: 134331 - DNA, 25 bp, Artificial
  Probe
tatcccagaagaacattaacttgat

SEQ ID NO: 134332 - DNA, 25 bp, Artificial
  Probe
tcgtcagcctttaccagaattacag

SEQ ID NO: 134333 - DNA, 25 bp, Artificial
  Probe
aaatgtcgtcagcctttaccagaat

SEQ ID NO: 134334 - DNA, 25 bp, Artificial
  Probe
acaaccactactctgcttccactac

SEQ ID NO: 134335 - DNA, 25 bp, Artificial
  Probe
aatgtcgtcagcctttaccagaatt

SEQ ID NO: 134336 - DNA, 25 bp, Artificial
  Probe
agcctttaccagaattacagtgagc

SEQ ID NO: 134337 - DNA, 25 bp, Artificial
  Probe
cgtcagcctttaccagaattacagt

SEQ ID NO: 134338 - DNA, 25 bp, Artificial
  Probe
gtcgtcagcctttaccagaattaca

SEQ ID NO: 134339 - DNA, 25 bp, Artificial
  Probe
tgtcgtcagcctttaccagaattac

SEQ ID NO: 134340 - DNA, 25 bp, Artificial
  Probe
ctgtctgatgactcaagcaatgtcc

SEQ ID NO: 134341 - DNA, 25 bp, Artificial
  Probe
cctgtctgatgactcaagcaatgtc

SEQ ID NO: 134342 - DNA, 25 bp, Artificial
  Probe
gtcctgtctgatgactcaagcaatg

SEQ ID NO: 134343 - DNA, 25 bp, Artificial
  Probe
acattaacttgatctttgcagtgac

SEQ ID NO: 134344 - DNA, 25 bp, Artificial
  Probe
tttgtttctgctcttctgtcttctg

SEQ ID NO: 134345 - DNA, 25 bp, Artificial
  Probe
tttgttgttctgcttctctgttctg

SEQ ID NO: 134346 - DNA, 25 bp, Artificial
  Probe
tttctggtttcttctcgtctccttc

SEQ ID NO: 134347 - DNA, 25 bp, Artificial
  Probe
ctttctggtttcttctcgtctcctt

SEQ ID NO: 134348 - DNA, 25 bp, Artificial
  Probe
ctttggtttgtctttcttgtccgtc

SEQ ID NO: 134349 - DNA, 25 bp, Artificial
  Probe
ttgttgttctgcttctctgttctgc

SEQ ID NO: 134350 - DNA, 25 bp, Artificial
  Probe
ttctgccctttggtttgtctttctt

SEQ ID NO: 134351 - DNA, 25 bp, Artificial
  Probe
cttttgtttctgctcttctgtcttc

SEQ ID NO: 134352 - DNA, 25 bp, Artificial
  Probe
ttgtttctgctcttctgtcttctgc

SEQ ID NO: 134353 - DNA, 25 bp, Artificial
  Probe
ttttgtttctgctcttctgtcttct

SEQ ID NO: 134354 - DNA, 25 bp, Artificial
  Probe
tcttttgtttctgctcttctgtctt

SEQ ID NO: 134355 - DNA, 25 bp, Artificial
  Probe
gtttctttggggtcttttgtttctg

SEQ ID NO: 134356 - DNA, 25 bp, Artificial
  Probe
gtttctgctcttctgtcttctgctc

SEQ ID NO: 134357 - DNA, 25 bp, Artificial
  Probe
ttttgttgttctgcttctctgttct

SEQ ID NO: 134358 - DNA, 25 bp, Artificial
  Probe
gttttgttgttctgcttctctgttc

SEQ ID NO: 134359 - DNA, 25 bp, Artificial
  Probe
gtcttttgtttctgctcttctgtct

SEQ ID NO: 134360 - DNA, 25 bp, Artificial
  Probe
ctttgcttcttcttttctgctttgg

SEQ ID NO: 134361 - DNA, 25 bp, Artificial
  Probe
gtttgtctttcttgtccgtcctctg

SEQ ID NO: 134362 - DNA, 25 bp, Artificial
  Probe
tttggtttgtctttcttgtccgtcc

SEQ ID NO: 134363 - DNA, 25 bp, Artificial
  Probe
cctttggtttgtctttcttgtccgt

SEQ ID NO: 134364 - DNA, 25 bp, Artificial
  Probe
tctgccctttggtttgtctttcttg

SEQ ID NO: 134365 - DNA, 25 bp, Artificial
  Probe
gttctgccctttggtttgtctttct

SEQ ID NO: 134366 - DNA, 25 bp, Artificial
  Probe
tttgcttcttcttttctgctttggt

SEQ ID NO: 134367 - DNA, 25 bp, Artificial
  Probe
gctttgcttcttcttttctgctttg

SEQ ID NO: 134368 - DNA, 25 bp, Artificial
  Probe
ggtttctttggggtcttttgtttct

SEQ ID NO: 134369 - DNA, 25 bp, Artificial
  Probe
ttctggtttcttctcgtctccttcc

SEQ ID NO: 134370 - DNA, 25 bp, Artificial
  Probe
ggtcttttgtttctgctcttctgtc

SEQ ID NO: 134371 - DNA, 25 bp, Artificial
  Probe
tgccctttggtttgtctttcttgtc

SEQ ID NO: 134372 - DNA, 25 bp, Artificial
  Probe
ctgccctttggtttgtctttcttgt

SEQ ID NO: 134373 - DNA, 25 bp, Artificial
  Probe
tgttctgccctttggtttgtctttc

SEQ ID NO: 134374 - DNA, 25 bp, Artificial
  Probe
ctgttctgccctttggtttgtcttt

SEQ ID NO: 134375 - DNA, 25 bp, Artificial
  Probe
tgctttgcttcttcttttctgcttt

SEQ ID NO: 134376 - DNA, 25 bp, Artificial
  Probe
ttgcttcttcttttctgctttggtc

SEQ ID NO: 134377 - DNA, 25 bp, Artificial
  Probe
tctcctggctttctggtttcttctc

SEQ ID NO: 134378 - DNA, 25 bp, Artificial
  Probe
ctctcctggctttctggtttcttct

SEQ ID NO: 134379 - DNA, 25 bp, Artificial
  Probe
cttctctgttctgccctttggtttg

SEQ ID NO: 134380 - DNA, 25 bp, Artificial
  Probe
tgtttctgctcttctgtcttctgct

SEQ ID NO: 134381 - DNA, 25 bp, Artificial
  Probe
tttctttggggtcttttgtttctgc

SEQ ID NO: 134382 - DNA, 25 bp, Artificial
  Probe
cgttttgttgttctgcttctctgtt

SEQ ID NO: 134383 - DNA, 25 bp, Artificial
  Probe
cttcttcttttctgctttggtctgc

SEQ ID NO: 134384 - DNA, 25 bp, Artificial
  Probe
gcttcttcttttctgctttggtctg

SEQ ID NO: 134385 - DNA, 25 bp, Artificial
  Probe
ctggtttcttctcgtctccttcctc

SEQ ID NO: 134386 - DNA, 25 bp, Artificial
  Probe
gtgctttgcttcttcttttctgctt

SEQ ID NO: 134387 - DNA, 25 bp, Artificial
  Probe
gctttctggtttcttctcgtctcct

SEQ ID NO: 134388 - DNA, 25 bp, Artificial
  Probe
ccctttggtttgtctttcttgtccg

SEQ ID NO: 134389 - DNA, 25 bp, Artificial
  Probe
gaagaacgagacctgaagattactg

SEQ ID NO: 134390 - DNA, 25 bp, Artificial
  Probe
gaacgagacctgaagattactgatg

SEQ ID NO: 134391 - DNA, 25 bp, Artificial
  Probe
agaacgagacctgaagattactgat

SEQ ID NO: 134392 - DNA, 25 bp, Artificial
  Probe
aagaacgagacctgaagattactga

SEQ ID NO: 134393 - DNA, 25 bp, Artificial
  Probe
aacgagacctgaagattactgatgt

SEQ ID NO: 134394 - DNA, 25 bp, Artificial
  Probe
ggaagaacgagacctgaagattact

SEQ ID NO: 134395 - DNA, 25 bp, Artificial
  Probe
gagacctgaagattactgatgtcat

SEQ ID NO: 134396 - DNA, 25 bp, Artificial
  Probe
agacctgaagattactgatgtcatc

SEQ ID NO: 134397 - DNA, 25 bp, Artificial
  Probe
gaggaagaacgagacctgaagatta

SEQ ID NO: 134398 - DNA, 25 bp, Artificial
  Probe
cgagacctgaagattactgatgtca

SEQ ID NO: 134399 - DNA, 25 bp, Artificial
  Probe
acgagacctgaagattactgatgtc

SEQ ID NO: 134400 - DNA, 25 bp, Artificial
  Probe
aggaagaacgagacctgaagattac

SEQ ID NO: 134401 - DNA, 25 bp, Artificial
  Probe
tagaggaagaacgagacctgaagat

SEQ ID NO: 134402 - DNA, 25 bp, Artificial
  Probe
caacaggattgtcttccaagagttc

SEQ ID NO: 134403 - DNA, 25 bp, Artificial
  Probe
ttaacagccagtaaggtgatccaga

SEQ ID NO: 134404 - DNA, 25 bp, Artificial
  Probe
agaggaagaacgagacctgaagatt

SEQ ID NO: 134405 - DNA, 25 bp, Artificial
  Probe
ctagaggaagaacgagacctgaaga

SEQ ID NO: 134406 - DNA, 25 bp, Artificial
  Probe
aacaggattgtcttccaagagttcc

SEQ ID NO: 134407 - DNA, 25 bp, Artificial
  Probe
gtggaggctcttcactaaagtaaag

SEQ ID NO: 134408 - DNA, 25 bp, Artificial
  Probe
taacagccagtaaggtgatccagag

SEQ ID NO: 134409 - DNA, 25 bp, Artificial
  Probe
ccaacaggattgtcttccaagagtt

SEQ ID NO: 134410 - DNA, 25 bp, Artificial
  Probe
aacagttaacagccagtaaggtgat

SEQ ID NO: 134411 - DNA, 25 bp, Artificial
  Probe
gacctgaagattactgatgtcatca

SEQ ID NO: 134412 - DNA, 25 bp, Artificial
  Probe
ggtggaggctcttcactaaagtaaa

SEQ ID NO: 134413 - DNA, 25 bp, Artificial
  Probe
aagattactgatgtcatcatggctt

SEQ ID NO: 134414 - DNA, 25 bp, Artificial
  Probe
acctgaagattactgatgtcatcat

SEQ ID NO: 134415 - DNA, 25 bp, Artificial
  Probe
acagttaacagccagtaaggtgatc

SEQ ID NO: 134416 - DNA, 25 bp, Artificial
  Probe
gaagattactgatgtcatcatggct

SEQ ID NO: 134417 - DNA, 25 bp, Artificial
  Probe
ctgaagattactgatgtcatcatgg

SEQ ID NO: 134418 - DNA, 25 bp, Artificial
  Probe
cctgaagattactgatgtcatcatg

SEQ ID NO: 134419 - DNA, 25 bp, Artificial
  Probe
tgaagattactgatgtcatcatggc

SEQ ID NO: 134420 - DNA, 25 bp, Artificial
  Probe
cctagaggaagaacgagacctgaag

SEQ ID NO: 134421 - DNA, 25 bp, Artificial
  Probe
caacagttaacagccagtaaggtga

SEQ ID NO: 134422 - DNA, 25 bp, Artificial
  Probe
atggtggaggctcttcactaaagta

SEQ ID NO: 134423 - DNA, 25 bp, Artificial
  Probe
gttaacagccagtaaggtgatccag

SEQ ID NO: 134424 - DNA, 25 bp, Artificial
  Probe
cagttaacagccagtaaggtgatcc

SEQ ID NO: 134425 - DNA, 25 bp, Artificial
  Probe
acctagaggaagaacgagacctgaa

SEQ ID NO: 134426 - DNA, 25 bp, Artificial
  Probe
tggtggaggctcttcactaaagtaa

SEQ ID NO: 134427 - DNA, 25 bp, Artificial
  Probe
agttaacagccagtaaggtgatcca

SEQ ID NO: 134428 - DNA, 25 bp, Artificial
  Probe
ttcaccaagaggcagcaacagttaa

SEQ ID NO: 134429 - DNA, 25 bp, Artificial
  Probe
caatggtggaggctcttcactaaag

SEQ ID NO: 134430 - DNA, 25 bp, Artificial
  Probe
tggaggctcttcactaaagtaaagc

SEQ ID NO: 134431 - DNA, 25 bp, Artificial
  Probe
gattactgatgtcatcatggctttc

SEQ ID NO: 134432 - DNA, 25 bp, Artificial
  Probe
attgggcagagcaaaatcttctttc

SEQ ID NO: 134433 - DNA, 25 bp, Artificial
  Probe
agattactgatgtcatcatggcttt

SEQ ID NO: 134434 - DNA, 25 bp, Artificial
  Probe
aacatcttcctatacattctcacca

SEQ ID NO: 134435 - DNA, 25 bp, Artificial
  Probe
acatcttcctatacattctcaccat

SEQ ID NO: 134436 - DNA, 25 bp, Artificial
  Probe
caacatcttcctatacattctcacc

SEQ ID NO: 134437 - DNA, 25 bp, Artificial
  Probe
tcttcctatacattctcaccatcat

SEQ ID NO: 134438 - DNA, 25 bp, Artificial
  Probe
atcttcctatacattctcaccatca

SEQ ID NO: 134439 - DNA, 25 bp, Artificial
  Probe
catcttcctatacattctcaccatc

SEQ ID NO: 134440 - DNA, 25 bp, Artificial
  Probe
ttcctatacattctcaccatcattg

SEQ ID NO: 134441 - DNA, 25 bp, Artificial
  Probe
gacatcatcaacatcttcctataca

SEQ ID NO: 134442 - DNA, 25 bp, Artificial
  Probe
cttcctatacattctcaccatcatt

SEQ ID NO: 134443 - DNA, 25 bp, Artificial
  Probe
tcaacatcttcctatacattctcac

SEQ ID NO: 134444 - DNA, 25 bp, Artificial
  Probe
ctactatgtctcctacgccatcttc

SEQ ID NO: 134445 - DNA, 25 bp, Artificial
  Probe
tactatgtctcctacgccatcttct

SEQ ID NO: 134446 - DNA, 25 bp, Artificial
  Probe
gtacacggacatcatcaacatcttc

SEQ ID NO: 134447 - DNA, 25 bp, Artificial
  Probe
acatcatcaacatcttcctatacat

SEQ ID NO: 134448 - DNA, 25 bp, Artificial
  Probe
cggacatcatcaacatcttcctata

SEQ ID NO: 134449 - DNA, 25 bp, Artificial
  Probe
ctatgtctcctacgccatcttcttc

SEQ ID NO: 134450 - DNA, 25 bp, Artificial
  Probe
tcctatacattctcaccatcattgg

SEQ ID NO: 134451 - DNA, 25 bp, Artificial
  Probe
atcaacatcttcctatacattctca

SEQ ID NO: 134452 - DNA, 25 bp, Artificial
  Probe
tcatcaacatcttcctatacattct

SEQ ID NO: 134453 - DNA, 25 bp, Artificial
  Probe
ggacatcatcaacatcttcctatac

SEQ ID NO: 134454 - DNA, 25 bp, Artificial
  Probe
atgtctggacctactatgtctccta

SEQ ID NO: 134455 - DNA, 25 bp, Artificial
  Probe
catcaacatcttcctatacattctc

SEQ ID NO: 134456 - DNA, 25 bp, Artificial
  Probe
acggacatcatcaacatcttcctat

SEQ ID NO: 134457 - DNA, 25 bp, Artificial
  Probe
cctatacattctcaccatcattggc

SEQ ID NO: 134458 - DNA, 25 bp, Artificial
  Probe
catcttcttcatctccctcattgtc

SEQ ID NO: 134459 - DNA, 25 bp, Artificial
  Probe
tatgtctcctacgccatcttcttca

SEQ ID NO: 134460 - DNA, 25 bp, Artificial
  Probe
actatgtctcctacgccatcttctt

SEQ ID NO: 134461 - DNA, 25 bp, Artificial
  Probe
cctactatgtctcctacgccatctt

SEQ ID NO: 134462 - DNA, 25 bp, Artificial
  Probe
aatgtctggacctactatgtctcct

SEQ ID NO: 134463 - DNA, 25 bp, Artificial
  Probe
caatgtctggacctactatgtctcc

SEQ ID NO: 134464 - DNA, 25 bp, Artificial
  Probe
tgtctggacctactatgtctcctac

SEQ ID NO: 134465 - DNA, 25 bp, Artificial
  Probe
ccaatgtctggacctactatgtctc

SEQ ID NO: 134466 - DNA, 25 bp, Artificial
  Probe
catcatcaacatcttcctatacatt

SEQ ID NO: 134467 - DNA, 25 bp, Artificial
  Probe
atcttcttcatctccctcattgtcc

SEQ ID NO: 134468 - DNA, 25 bp, Artificial
  Probe
gagaaggatcataccaagaggtgag

SEQ ID NO: 134469 - DNA, 25 bp, Artificial
  Probe
cacggacatcatcaacatcttccta

SEQ ID NO: 134470 - DNA, 25 bp, Artificial
  Probe
tctcctacgccatcttcttcatctc

SEQ ID NO: 134471 - DNA, 25 bp, Artificial
  Probe
atgtctcctacgccatcttcttcat

SEQ ID NO: 134472 - DNA, 25 bp, Artificial
  Probe
ccttctgtctactcattgttgcatg

SEQ ID NO: 134473 - DNA, 25 bp, Artificial
  Probe
ccatcttcttcatctccctcattgt

SEQ ID NO: 134474 - DNA, 25 bp, Artificial
  Probe
ccaccttctgtctactcattgttgc

SEQ ID NO: 134475 - DNA, 25 bp, Artificial
  Probe
gccaccttctgtctactcattgttg

SEQ ID NO: 134476 - DNA, 25 bp, Artificial
  Probe
atcatcaacatcttcctatacattc

SEQ ID NO: 134477 - DNA, 25 bp, Artificial
  Probe
accttctgtctactcattgttgcat

SEQ ID NO: 134478 - DNA, 25 bp, Artificial
  Probe
tacacggacatcatcaacatcttcc

SEQ ID NO: 134479 - DNA, 25 bp, Artificial
  Probe
aaaggagaaggtggagttgtaggac

SEQ ID NO: 134480 - DNA, 25 bp, Artificial
  Probe
caaaggagaaggtggagttgtagga

SEQ ID NO: 134481 - DNA, 25 bp, Artificial
  Probe
gtatcccaggaattgtaggacccag

SEQ ID NO: 134482 - DNA, 25 bp, Artificial
  Probe
ccaggtatcccaggaattgtaggac

SEQ ID NO: 134483 - DNA, 25 bp, Artificial
  Probe
caggtatcccaggaattgtaggacc

SEQ ID NO: 134484 - DNA, 25 bp, Artificial
  Probe
caggttttcttggtgaagtaggtcc

SEQ ID NO: 134485 - DNA, 25 bp, Artificial
  Probe
tatcccaggaattgtaggacccagt

SEQ ID NO: 134486 - DNA, 25 bp, Artificial
  Probe
aaagccaggttttcttggtgaagta

SEQ ID NO: 134487 - DNA, 25 bp, Artificial
  Probe
ccaaaggagaaggtggagttgtagg

SEQ ID NO: 134488 - DNA, 25 bp, Artificial
  Probe
cccaaaggagaaggtggagttgtag

SEQ ID NO: 134489 - DNA, 25 bp, Artificial
  Probe
aagccaggttttcttggtgaagtag

SEQ ID NO: 134490 - DNA, 25 bp, Artificial
  Probe
ccaggttttcttggtgaagtaggtc

SEQ ID NO: 134491 - DNA, 25 bp, Artificial
  Probe
aggttttcttggtgaagtaggtccc

SEQ ID NO: 134492 - DNA, 25 bp, Artificial
  Probe
cccaggtatcccaggaattgtagga

SEQ ID NO: 134493 - DNA, 25 bp, Artificial
  Probe
aggtatcccaggaattgtaggaccc

SEQ ID NO: 134494 - DNA, 25 bp, Artificial
  Probe
ggtatcccaggaattgtaggaccca

SEQ ID NO: 134495 - DNA, 25 bp, Artificial
  Probe
cataccaggggatcaaggtctacag

SEQ ID NO: 134496 - DNA, 25 bp, Artificial
  Probe
acccaaaggagaaggtggagttgta

SEQ ID NO: 134497 - DNA, 25 bp, Artificial
  Probe
gaaagccaggttttcttggtgaagt

SEQ ID NO: 134498 - DNA, 25 bp, Artificial
  Probe
ggttttcttggtgaagtaggtcccc

SEQ ID NO: 134499 - DNA, 25 bp, Artificial
  Probe
ctataggacccaagggagaaggtgg

SEQ ID NO: 134500 - DNA, 25 bp, Artificial
  Probe
agccaggttttcttggtgaagtagg

SEQ ID NO: 134501 - DNA, 25 bp, Artificial
  Probe
ataccaggggatcaaggtctacagg

SEQ ID NO: 134502 - DNA, 25 bp, Artificial
  Probe
ggaaagccaggttttcttggtgaag

SEQ ID NO: 134503 - DNA, 25 bp, Artificial
  Probe
gccaggttttcttggtgaagtaggt

SEQ ID NO: 134504 - DNA, 25 bp, Artificial
  Probe
tggaaagccaggttttcttggtgaa

SEQ ID NO: 134505 - DNA, 25 bp, Artificial
  Probe
ctattggtttccctggacccaaagg

SEQ ID NO: 134506 - DNA, 25 bp, Artificial
  Probe
atgttagatacggagatgttcactt

SEQ ID NO: 134507 - DNA, 25 bp, Artificial
  Probe
ttaacacagtaatacctcgcttctc

SEQ ID NO: 134508 - DNA, 25 bp, Artificial
  Probe
caagaagaacactactgcctaacaa

SEQ ID NO: 134509 - DNA, 25 bp, Artificial
  Probe
taacacagtaatacctcgcttctct

SEQ ID NO: 134510 - DNA, 25 bp, Artificial
  Probe
tatgttagatacggagatgttcact

SEQ ID NO: 134511 - DNA, 25 bp, Artificial
  Probe
attaacacagtaatacctcgcttct

SEQ ID NO: 134512 - DNA, 25 bp, Artificial
  Probe
atgtaagtcgttggctcctgtatta

SEQ ID NO: 134513 - DNA, 25 bp, Artificial
  Probe
gctcttatgttagatacggagatgt

SEQ ID NO: 134514 - DNA, 25 bp, Artificial
  Probe
tgctcttatgttagatacggagatg

SEQ ID NO: 134515 - DNA, 25 bp, Artificial
  Probe
ttatgttagatacggagatgttcac

SEQ ID NO: 134516 - DNA, 25 bp, Artificial
  Probe
tgtaagtcgttggctcctgtattaa

SEQ ID NO: 134517 - DNA, 25 bp, Artificial
  Probe
ttccaagaagaacactactgcctaa

SEQ ID NO: 134518 - DNA, 25 bp, Artificial
  Probe
gtaagtcgttggctcctgtattaac

SEQ ID NO: 134519 - DNA, 25 bp, Artificial
  Probe
atgctcttatgttagatacggagat

SEQ ID NO: 134520 - DNA, 25 bp, Artificial
  Probe
cttatgttagatacggagatgttca

SEQ ID NO: 134521 - DNA, 25 bp, Artificial
  Probe
ctcatgctcttatgttagatacgga

SEQ ID NO: 134522 - DNA, 25 bp, Artificial
  Probe
tccaagaagaacactactgcctaac

SEQ ID NO: 134523 - DNA, 25 bp, Artificial
  Probe
catgctcttatgttagatacggaga

SEQ ID NO: 134524 - DNA, 25 bp, Artificial
  Probe
tcatgctcttatgttagatacggag

SEQ ID NO: 134525 - DNA, 25 bp, Artificial
  Probe
ccaagaagaacactactgcctaaca

SEQ ID NO: 134526 - DNA, 25 bp, Artificial
  Probe
gctcatgctcttatgttagatacgg

SEQ ID NO: 134527 - DNA, 25 bp, Artificial
  Probe
tcttatgttagatacggagatgttc

SEQ ID NO: 134528 - DNA, 25 bp, Artificial
  Probe
taagtcgttggctcctgtattaaca

SEQ ID NO: 134529 - DNA, 25 bp, Artificial
  Probe
tattaacacagtaatacctcgcttc

SEQ ID NO: 134530 - DNA, 25 bp, Artificial
  Probe
ctcttatgttagatacggagatgtt

SEQ ID NO: 134531 - DNA, 25 bp, Artificial
  Probe
cacacctgtatgcaagatagtagtt

SEQ ID NO: 134532 - DNA, 25 bp, Artificial
  Probe
atcacacctgtatgcaagatagtag

SEQ ID NO: 134533 - DNA, 25 bp, Artificial
  Probe
tgttagatacggagatgttcacttt

SEQ ID NO: 134534 - DNA, 25 bp, Artificial
  Probe
aagaagaacactactgcctaacaaa

SEQ ID NO: 134535 - DNA, 25 bp, Artificial
  Probe
aatcacacctgtatgcaagatagta

SEQ ID NO: 134536 - DNA, 25 bp, Artificial
  Probe
gttagatacggagatgttcactttc

SEQ ID NO: 134537 - DNA, 25 bp, Artificial
  Probe
tcacacctgtatgcaagatagtagt

SEQ ID NO: 134538 - DNA, 25 bp, Artificial
  Probe
acagtgcctttacagatttatggac

SEQ ID NO: 134539 - DNA, 25 bp, Artificial
  Probe
aatgaattgtccataagtttgtccc

SEQ ID NO: 134540 - DNA, 25 bp, Artificial
  Probe
aacacagtaatacctcgcttctctg

SEQ ID NO: 134541 - DNA, 25 bp, Artificial
  Probe
ttagatacggagatgttcactttct

SEQ ID NO: 134542 - DNA, 25 bp, Artificial
  Probe
cacagtgcctttacagatttatgga

SEQ ID NO: 134543 - DNA, 25 bp, Artificial
  Probe
atttatggactgggaaagaggactt

SEQ ID NO: 134544 - DNA, 25 bp, Artificial
  Probe
agatacggagatgttcactttctag

SEQ ID NO: 134545 - DNA, 25 bp, Artificial
  Probe
cagtgcctttacagatttatggact

SEQ ID NO: 134546 - DNA, 25 bp, Artificial
  Probe
gatttatggactgggaaagaggact

SEQ ID NO: 134547 - DNA, 25 bp, Artificial
  Probe
agatttatggactgggaaagaggac

SEQ ID NO: 134548 - DNA, 25 bp, Artificial
  Probe
catgtaagtcgttggctcctgtatt

SEQ ID NO: 134549 - DNA, 25 bp, Artificial
  Probe
tacggagatgttcactttctagttc

SEQ ID NO: 134550 - DNA, 25 bp, Artificial
  Probe
gatacggagatgttcactttctagt

SEQ ID NO: 134551 - DNA, 25 bp, Artificial
  Probe
gaacctgcctataaataacacacca

SEQ ID NO: 134552 - DNA, 25 bp, Artificial
  Probe
tgaacctgcctataaataacacacc

SEQ ID NO: 134553 - DNA, 25 bp, Artificial
  Probe
tctgaactggtagcgaatttgatat

SEQ ID NO: 134554 - DNA, 25 bp, Artificial
  Probe
atgaacctgcctataaataacacac

SEQ ID NO: 134555 - DNA, 25 bp, Artificial
  Probe
cccaaatgaacctgcctataaataa

SEQ ID NO: 134556 - DNA, 25 bp, Artificial
  Probe
ctgaactggtagcgaatttgatatt

SEQ ID NO: 134557 - DNA, 25 bp, Artificial
  Probe
aacctgcctataaataacacaccac

SEQ ID NO: 134558 - DNA, 25 bp, Artificial
  Probe
ggagatgagaaatagtgtctaagca

SEQ ID NO: 134559 - DNA, 25 bp, Artificial
  Probe
aggagatgagaaatagtgtctaagc

SEQ ID NO: 134560 - DNA, 25 bp, Artificial
  Probe
gtctgaactggtagcgaatttgata

SEQ ID NO: 134561 - DNA, 25 bp, Artificial
  Probe
cctgcctataaataacacaccactg

SEQ ID NO: 134562 - DNA, 25 bp, Artificial
  Probe
ttgctaatcttctcagaggtcaaag

SEQ ID NO: 134563 - DNA, 25 bp, Artificial
  Probe
aatgaacctgcctataaataacaca

SEQ ID NO: 134564 - DNA, 25 bp, Artificial
  Probe
acctgcctataaataacacaccact

SEQ ID NO: 134565 - DNA, 25 bp, Artificial
  Probe
tgaactggtagcgaatttgatatta

SEQ ID NO: 134566 - DNA, 25 bp, Artificial
  Probe
ccaaatgaacctgcctataaataac

SEQ ID NO: 134567 - DNA, 25 bp, Artificial
  Probe
ctgcctataaataacacaccactgt

SEQ ID NO: 134568 - DNA, 25 bp, Artificial
  Probe
agatgagaaatagtgtctaagcacc

SEQ ID NO: 134569 - DNA, 25 bp, Artificial
  Probe
aactggtagcgaatttgatattaac

SEQ ID NO: 134570 - DNA, 25 bp, Artificial
  Probe
taatcttctcagaggtcaaaggcag

SEQ ID NO: 134571 - DNA, 25 bp, Artificial
  Probe
ctaatcttctcagaggtcaaaggca

SEQ ID NO: 134572 - DNA, 25 bp, Artificial
  Probe
tgctaatcttctcagaggtcaaagg

SEQ ID NO: 134573 - DNA, 25 bp, Artificial
  Probe
gagatgagaaatagtgtctaagcac

SEQ ID NO: 134574 - DNA, 25 bp, Artificial
  Probe
aaatgaacctgcctataaataacac

SEQ ID NO: 134575 - DNA, 25 bp, Artificial
  Probe
caaatgaacctgcctataaataaca

SEQ ID NO: 134576 - DNA, 25 bp, Artificial
  Probe
gatgagaaatagtgtctaagcaccc

SEQ ID NO: 134577 - DNA, 25 bp, Artificial
  Probe
atgagaaatagtgtctaagcaccct

SEQ ID NO: 134578 - DNA, 25 bp, Artificial
  Probe
ggtagcgaatttgatattaaccagc

SEQ ID NO: 134579 - DNA, 25 bp, Artificial
  Probe
gaactggtagcgaatttgatattaa

SEQ ID NO: 134580 - DNA, 25 bp, Artificial
  Probe
gaaatagtgtctaagcaccctgaac

SEQ ID NO: 134581 - DNA, 25 bp, Artificial
  Probe
agaaatagtgtctaagcaccctgaa

SEQ ID NO: 134582 - DNA, 25 bp, Artificial
  Probe
actggtagcgaatttgatattaacc

SEQ ID NO: 134583 - DNA, 25 bp, Artificial
  Probe
aaatagtgtctaagcaccctgaact

SEQ ID NO: 134584 - DNA, 25 bp, Artificial
  Probe
gagaaatagtgtctaagcaccctga

SEQ ID NO: 134585 - DNA, 25 bp, Artificial
  Probe
tgagaaatagtgtctaagcaccctg

SEQ ID NO: 134586 - DNA, 25 bp, Artificial
  Probe
ctgaactgtggagaaatgctgctat

SEQ ID NO: 134587 - DNA, 25 bp, Artificial
  Probe
aatagtgtctaagcaccctgaactg

SEQ ID NO: 134588 - DNA, 25 bp, Artificial
  Probe
tgaactgtggagaaatgctgctatg

SEQ ID NO: 134589 - DNA, 25 bp, Artificial
  Probe
taggagatgagaaatagtgtctaag

SEQ ID NO: 134590 - DNA, 25 bp, Artificial
  Probe
tttatttgcttacggaaaacacagt

SEQ ID NO: 134591 - DNA, 25 bp, Artificial
  Probe
ttatttgcttacggaaaacacagtc

SEQ ID NO: 134592 - DNA, 25 bp, Artificial
  Probe
gctaatcttctcagaggtcaaaggc

SEQ ID NO: 134593 - DNA, 25 bp, Artificial
  Probe
tttgctaatcttctcagaggtcaaa

SEQ ID NO: 134594 - DNA, 25 bp, Artificial
  Probe
ccccaaatgaacctgcctataaata

SEQ ID NO: 134595 - DNA, 25 bp, Artificial
  Probe
tatttgcttacggaaaacacagtct

SEQ ID NO: 134596 - DNA, 25 bp, Artificial
  Probe
tctgctatctatatcctggcttcta

SEQ ID NO: 134597 - DNA, 25 bp, Artificial
  Probe
ctctgctatctatatcctggcttct

SEQ ID NO: 134598 - DNA, 25 bp, Artificial
  Probe
ctgctatctatatcctggcttctaa

SEQ ID NO: 134599 - DNA, 25 bp, Artificial
  Probe
tgctatctatatcctggcttctaat

SEQ ID NO: 134600 - DNA, 25 bp, Artificial
  Probe
cctctgctatctatatcctggcttc

SEQ ID NO: 134601 - DNA, 25 bp, Artificial
  Probe
gctatctatatcctggcttctaatc

SEQ ID NO: 134602 - DNA, 25 bp, Artificial
  Probe
gctcttgagtctgtgtattaaacct

SEQ ID NO: 134603 - DNA, 25 bp, Artificial
  Probe
ctatctatatcctggcttctaatca

SEQ ID NO: 134604 - DNA, 25 bp, Artificial
  Probe
ctcttgagtctgtgtattaaaccta

SEQ ID NO: 134605 - DNA, 25 bp, Artificial
  Probe
agctcttgagtctgtgtattaaacc

SEQ ID NO: 134606 - DNA, 25 bp, Artificial
  Probe
tatctatatcctggcttctaatcag

SEQ ID NO: 134607 - DNA, 25 bp, Artificial
  Probe
aacctaatttcagctaagcatcttg

SEQ ID NO: 134608 - DNA, 25 bp, Artificial
  Probe
taatttcagctaagcatcttgggaa

SEQ ID NO: 134609 - DNA, 25 bp, Artificial
  Probe
ctaatttcagctaagcatcttggga

SEQ ID NO: 134610 - DNA, 25 bp, Artificial
  Probe
tcttgagtctgtgtattaaacctaa

SEQ ID NO: 134611 - DNA, 25 bp, Artificial
  Probe
ccctctgctatctatatcctggctt

SEQ ID NO: 134612 - DNA, 25 bp, Artificial
  Probe
aatttcagctaagcatcttgggaat

SEQ ID NO: 134613 - DNA, 25 bp, Artificial
  Probe
aaacctaatttcagctaagcatctt

SEQ ID NO: 134614 - DNA, 25 bp, Artificial
  Probe
acctaatttcagctaagcatcttgg

SEQ ID NO: 134615 - DNA, 25 bp, Artificial
  Probe
atctttgtcagctagtgtctccttt

SEQ ID NO: 134616 - DNA, 25 bp, Artificial
  Probe
gaagcataatctagggagacagatg

SEQ ID NO: 134617 - DNA, 25 bp, Artificial
  Probe
atttcagctaagcatcttgggaatg

SEQ ID NO: 134618 - DNA, 25 bp, Artificial
  Probe
taaacctaatttcagctaagcatct

SEQ ID NO: 134619 - DNA, 25 bp, Artificial
  Probe
cctaatttcagctaagcatcttggg

SEQ ID NO: 134620 - DNA, 25 bp, Artificial
  Probe
gatctttgtcagctagtgtctcctt

SEQ ID NO: 134621 - DNA, 25 bp, Artificial
  Probe
tctgtgtattaaacctaatttcagc

SEQ ID NO: 134622 - DNA, 25 bp, Artificial
  Probe
ttaaacctaatttcagctaagcatc

SEQ ID NO: 134623 - DNA, 25 bp, Artificial
  Probe
cgaagcataatctagggagacagat

SEQ ID NO: 134624 - DNA, 25 bp, Artificial
  Probe
cttgagtctgtgtattaaacctaat

SEQ ID NO: 134625 - DNA, 25 bp, Artificial
  Probe
cttctcttccatagagcctgtcaag

SEQ ID NO: 134626 - DNA, 25 bp, Artificial
  Probe
gaggatctttgtcagctagtgtctc

SEQ ID NO: 134627 - DNA, 25 bp, Artificial
  Probe
atgcaagacctatcggctaagactc

SEQ ID NO: 134628 - DNA, 25 bp, Artificial
  Probe
ataatctagggagacagatgcaaga

SEQ ID NO: 134629 - DNA, 25 bp, Artificial
  Probe
cataatctagggagacagatgcaag

SEQ ID NO: 134630 - DNA, 25 bp, Artificial
  Probe
gatgcaagacctatcggctaagact

SEQ ID NO: 134631 - DNA, 25 bp, Artificial
  Probe
agatgcaagacctatcggctaagac

SEQ ID NO: 134632 - DNA, 25 bp, Artificial
  Probe
cagatgcaagacctatcggctaaga

SEQ ID NO: 134633 - DNA, 25 bp, Artificial
  Probe
gacctatcggctaagactcgcattc

SEQ ID NO: 134634 - DNA, 25 bp, Artificial
  Probe
attaaacctaatttcagctaagcat

SEQ ID NO: 134635 - DNA, 25 bp, Artificial
  Probe
ctgtgtattaaacctaatttcagct

SEQ ID NO: 134636 - DNA, 25 bp, Artificial
  Probe
gcgaagcataatctagggagacaga

SEQ ID NO: 134637 - DNA, 25 bp, Artificial
  Probe
taatctagggagacagatgcaagac

SEQ ID NO: 134638 - DNA, 25 bp, Artificial
  Probe
acagatgcaagacctatcggctaag

SEQ ID NO: 134639 - DNA, 25 bp, Artificial
  Probe
gacagatgcaagacctatcggctaa

SEQ ID NO: 134640 - DNA, 25 bp, Artificial
  Probe
agtctgtgtattaaacctaatttca

SEQ ID NO: 134641 - DNA, 25 bp, Artificial
  Probe
agaggatgaagctgaagaggaggag

SEQ ID NO: 134642 - DNA, 25 bp, Artificial
  Probe
atctttcttcgctccttgcctcatc

SEQ ID NO: 134643 - DNA, 25 bp, Artificial
  Probe
gatctttcttcgctccttgcctcat

SEQ ID NO: 134644 - DNA, 25 bp, Artificial
  Probe
cagaggatgaagctgaagaggagga

SEQ ID NO: 134645 - DNA, 25 bp, Artificial
  Probe
tccagaggatgaagctgaagaggag

SEQ ID NO: 134646 - DNA, 25 bp, Artificial
  Probe
ctccagaggatgaagctgaagagga

SEQ ID NO: 134647 - DNA, 25 bp, Artificial
  Probe
atagatggtattgatggtgaccgag

SEQ ID NO: 134648 - DNA, 25 bp, Artificial
  Probe
catagatggtattgatggtgaccga

SEQ ID NO: 134649 - DNA, 25 bp, Artificial
  Probe
ggcatagatggtattgatggtgacc

SEQ ID NO: 134650 - DNA, 25 bp, Artificial
  Probe
ctgatggattaacaggacctgatgg

SEQ ID NO: 134651 - DNA, 25 bp, Artificial
  Probe
gcatagatggtattgatggtgaccg

SEQ ID NO: 134652 - DNA, 25 bp, Artificial
  Probe
gggcatagatggtattgatggtgac

SEQ ID NO: 134653 - DNA, 25 bp, Artificial
  Probe
tagatggtattgatggtgaccgagg

SEQ ID NO: 134654 - DNA, 25 bp, Artificial
  Probe
caggacctagtggaacaattggatt

SEQ ID NO: 134655 - DNA, 25 bp, Artificial
  Probe
gctgatggattaacaggacctgatg

SEQ ID NO: 134656 - DNA, 25 bp, Artificial
  Probe
agctgatggattaacaggacctgat

SEQ ID NO: 134657 - DNA, 25 bp, Artificial
  Probe
atgaactgccagtcagaatcacaac

SEQ ID NO: 134658 - DNA, 25 bp, Artificial
  Probe
catgaactgccagtcagaatcacaa

SEQ ID NO: 134659 - DNA, 25 bp, Artificial
  Probe
cctagtggaacaattggatttcatg

SEQ ID NO: 134660 - DNA, 25 bp, Artificial
  Probe
acctagtggaacaattggatttcat

SEQ ID NO: 134661 - DNA, 25 bp, Artificial
  Probe
gacctagtggaacaattggatttca

SEQ ID NO: 134662 - DNA, 25 bp, Artificial
  Probe
gagctgatggattaacaggacctga

SEQ ID NO: 134663 - DNA, 25 bp, Artificial
  Probe
agtggaacaattggatttcatgatt

SEQ ID NO: 134664 - DNA, 25 bp, Artificial
  Probe
ctagtggaacaattggatttcatga

SEQ ID NO: 134665 - DNA, 25 bp, Artificial
  Probe
ggacctagtggaacaattggatttc

SEQ ID NO: 134666 - DNA, 25 bp, Artificial
  Probe
aggacctagtggaacaattggattt

SEQ ID NO: 134667 - DNA, 25 bp, Artificial
  Probe
gatttcatgattgagacccattgtg

SEQ ID NO: 134668 - DNA, 25 bp, Artificial
  Probe
tagtggaacaattggatttcatgat

SEQ ID NO: 134669 - DNA, 25 bp, Artificial
  Probe
cgggcatagatggtattgatggtga

SEQ ID NO: 134670 - DNA, 25 bp, Artificial
  Probe
ggatttcatgattgagacccattgt

SEQ ID NO: 134671 - DNA, 25 bp, Artificial
  Probe
attggatttcatgattgagacccat

SEQ ID NO: 134672 - DNA, 25 bp, Artificial
  Probe
ttggatttcatgattgagacccatt

SEQ ID NO: 134673 - DNA, 25 bp, Artificial
  Probe
aattggatttcatgattgagaccca

SEQ ID NO: 134674 - DNA, 25 bp, Artificial
  Probe
atttcatgattgagacccattgtgc

SEQ ID NO: 134675 - DNA, 25 bp, Artificial
  Probe
tggatttcatgattgagacccattg

SEQ ID NO: 134676 - DNA, 25 bp, Artificial
  Probe
acaattggatttcatgattgagacc

SEQ ID NO: 134677 - DNA, 25 bp, Artificial
  Probe
ggagctgatggattaacaggacctg

SEQ ID NO: 134678 - DNA, 25 bp, Artificial
  Probe
caggagctgatggattaacaggacc

SEQ ID NO: 134679 - DNA, 25 bp, Artificial
  Probe
caattggatttcatgattgagaccc

SEQ ID NO: 134680 - DNA, 25 bp, Artificial
  Probe
tggaacaattggatttcatgattga

SEQ ID NO: 134681 - DNA, 25 bp, Artificial
  Probe
gtggaacaattggatttcatgattg

SEQ ID NO: 134682 - DNA, 25 bp, Artificial
  Probe
ggaacaattggatttcatgattgag

SEQ ID NO: 134683 - DNA, 25 bp, Artificial
  Probe
tgatggattaacaggacctgatggg

SEQ ID NO: 134684 - DNA, 25 bp, Artificial
  Probe
gttccgggcatagatggtattgatg

SEQ ID NO: 134685 - DNA, 25 bp, Artificial
  Probe
agttccgggcatagatggtattgat

SEQ ID NO: 134686 - DNA, 25 bp, Artificial
  Probe
agatggtattgatggtgaccgaggt

SEQ ID NO: 134687 - DNA, 25 bp, Artificial
  Probe
ccatgaactgccagtcagaatcaca

SEQ ID NO: 134688 - DNA, 25 bp, Artificial
  Probe
aggagctgatggattaacaggacct

SEQ ID NO: 134689 - DNA, 25 bp, Artificial
  Probe
ccaggagctgatggattaacaggac

SEQ ID NO: 134690 - DNA, 25 bp, Artificial
  Probe
aacaattggatttcatgattgagac

SEQ ID NO: 134691 - DNA, 25 bp, Artificial
  Probe
gatggattaacaggacctgatgggt

SEQ ID NO: 134692 - DNA, 25 bp, Artificial
  Probe
cactcttaatttgtttgcctccttg

SEQ ID NO: 134693 - DNA, 25 bp, Artificial
  Probe
actcttaatttgtttgcctccttgg

SEQ ID NO: 134694 - DNA, 25 bp, Artificial
  Probe
atcccaccacactcttaatttgttt

SEQ ID NO: 134695 - DNA, 25 bp, Artificial
  Probe
acactcttaatttgtttgcctcctt

SEQ ID NO: 134696 - DNA, 25 bp, Artificial
  Probe
catcccaccacactcttaatttgtt

SEQ ID NO: 134697 - DNA, 25 bp, Artificial
  Probe
ctcttaatttgtttgcctccttggg

SEQ ID NO: 134698 - DNA, 25 bp, Artificial
  Probe
tcccaccacactcttaatttgtttg

SEQ ID NO: 134699 - DNA, 25 bp, Artificial
  Probe
cacactcttaatttgtttgcctcct

SEQ ID NO: 134700 - DNA, 25 bp, Artificial
  Probe
atcttcgatgataaggaccaacagc

SEQ ID NO: 134701 - DNA, 25 bp, Artificial
  Probe
accacactcttaatttgtttgcctc

SEQ ID NO: 134702 - DNA, 25 bp, Artificial
  Probe
caccacactcttaatttgtttgcct

SEQ ID NO: 134703 - DNA, 25 bp, Artificial
  Probe
agatcactggtgagtttcccttatc

SEQ ID NO: 134704 - DNA, 25 bp, Artificial
  Probe
gagatcactggtgagtttcccttat

SEQ ID NO: 134705 - DNA, 25 bp, Artificial
  Probe
ccacactcttaatttgtttgcctcc

SEQ ID NO: 134706 - DNA, 25 bp, Artificial
  Probe
catcttcgatgataaggaccaacag

SEQ ID NO: 134707 - DNA, 25 bp, Artificial
  Probe
gaaacaaaatgaaggaagacccaag

SEQ ID NO: 134708 - DNA, 25 bp, Artificial
  Probe
tcttcgatgataaggaccaacagct

SEQ ID NO: 134709 - DNA, 25 bp, Artificial
  Probe
cacagaaacaaaatgaaggaagacc

SEQ ID NO: 134710 - DNA, 25 bp, Artificial
  Probe
agaaacaaaatgaaggaagacccaa

SEQ ID NO: 134711 - DNA, 25 bp, Artificial
  Probe
aggaccctgaaaagttagaaatgag

SEQ ID NO: 134712 - DNA, 25 bp, Artificial
  Probe
ccaccacactcttaatttgtttgcc

SEQ ID NO: 134713 - DNA, 25 bp, Artificial
  Probe
cccaccacactcttaatttgtttgc

SEQ ID NO: 134714 - DNA, 25 bp, Artificial
  Probe
gcacagaaacaaaatgaaggaagac

SEQ ID NO: 134715 - DNA, 25 bp, Artificial
  Probe
agcacagaaacaaaatgaaggaaga

SEQ ID NO: 134716 - DNA, 25 bp, Artificial
  Probe
cagcacagaaacaaaatgaaggaag

SEQ ID NO: 134717 - DNA, 25 bp, Artificial
  Probe
gatcactggtgagtttcccttatcc

SEQ ID NO: 134718 - DNA, 25 bp, Artificial
  Probe
aaagttttaagatcccagacagtca

SEQ ID NO: 134719 - DNA, 25 bp, Artificial
  Probe
cagaaacaaaatgaaggaagaccca

SEQ ID NO: 134720 - DNA, 25 bp, Artificial
  Probe
acagaaacaaaatgaaggaagaccc

SEQ ID NO: 134721 - DNA, 25 bp, Artificial
  Probe
aagttttaagatcccagacagtcag

SEQ ID NO: 134722 - DNA, 25 bp, Artificial
  Probe
gaaagttttaagatcccagacagtc

SEQ ID NO: 134723 - DNA, 25 bp, Artificial
  Probe
caggatgaacatggctacatctctc

SEQ ID NO: 134724 - DNA, 25 bp, Artificial
  Probe
tttaagatcccagacagtcaggcat

SEQ ID NO: 134725 - DNA, 25 bp, Artificial
  Probe
aaacaaaatgaaggaagacccaagg

SEQ ID NO: 134726 - DNA, 25 bp, Artificial
  Probe
ggaccctgaaaagttagaaatgagc

SEQ ID NO: 134727 - DNA, 25 bp, Artificial
  Probe
gcatcccaccacactcttaatttgt

SEQ ID NO: 134728 - DNA, 25 bp, Artificial
  Probe
atgaacatggctacatctctcggtg

SEQ ID NO: 134729 - DNA, 25 bp, Artificial
  Probe
ggcatcccaccacactcttaatttg

SEQ ID NO: 134730 - DNA, 25 bp, Artificial
  Probe
agttttaagatcccagacagtcagg

SEQ ID NO: 134731 - DNA, 25 bp, Artificial
  Probe
ttaagatcccagacagtcaggcatc

SEQ ID NO: 134732 - DNA, 25 bp, Artificial
  Probe
aggcatcccaccacactcttaattt

SEQ ID NO: 134733 - DNA, 25 bp, Artificial
  Probe
gaccctgaaaagttagaaatgagct

SEQ ID NO: 134734 - DNA, 25 bp, Artificial
  Probe
aagacctcatccccaaataagcaag

SEQ ID NO: 134735 - DNA, 25 bp, Artificial
  Probe
gaagacctcatccccaaataagcaa

SEQ ID NO: 134736 - DNA, 25 bp, Artificial
  Probe
ggaaagttttaagatcccagacagt

SEQ ID NO: 134737 - DNA, 25 bp, Artificial
  Probe
tgtatcagacctaatgtgtgactct

SEQ ID NO: 134738 - DNA, 25 bp, Artificial
  Probe
gtgtatcagacctaatgtgtgactc

SEQ ID NO: 134739 - DNA, 25 bp, Artificial
  Probe
tgtgtatcagacctaatgtgtgact

SEQ ID NO: 134740 - DNA, 25 bp, Artificial
  Probe
tactgtgtatcagacctaatgtgtg

SEQ ID NO: 134741 - DNA, 25 bp, Artificial
  Probe
ctactgtgtatcagacctaatgtgt

SEQ ID NO: 134742 - DNA, 25 bp, Artificial
  Probe
tctactgtgtatcagacctaatgtg

SEQ ID NO: 134743 - DNA, 25 bp, Artificial
  Probe
ctgtgtatcagacctaatgtgtgac

SEQ ID NO: 134744 - DNA, 25 bp, Artificial
  Probe
agacctaatgtgtgactctgctaac

SEQ ID NO: 134745 - DNA, 25 bp, Artificial
  Probe
actgtgtatcagacctaatgtgtga

SEQ ID NO: 134746 - DNA, 25 bp, Artificial
  Probe
cctaatgtgtgactctgctaaccat

SEQ ID NO: 134747 - DNA, 25 bp, Artificial
  Probe
atctactgtgtatcagacctaatgt

SEQ ID NO: 134748 - DNA, 25 bp, Artificial
  Probe
gacctaatgtgtgactctgctaacc

SEQ ID NO: 134749 - DNA, 25 bp, Artificial
  Probe
actatctactgtgtatcagacctaa

SEQ ID NO: 134750 - DNA, 25 bp, Artificial
  Probe
ctaatgtgtgactctgctaaccatt

SEQ ID NO: 134751 - DNA, 25 bp, Artificial
  Probe
acctaatgtgtgactctgctaacca

SEQ ID NO: 134752 - DNA, 25 bp, Artificial
  Probe
tatctactgtgtatcagacctaatg

SEQ ID NO: 134753 - DNA, 25 bp, Artificial
  Probe
ctatctactgtgtatcagacctaat

SEQ ID NO: 134754 - DNA, 25 bp, Artificial
  Probe
taatgtgtgactctgctaaccattt

SEQ ID NO: 134755 - DNA, 25 bp, Artificial
  Probe
gtatcagacctaatgtgtgactctg

SEQ ID NO: 134756 - DNA, 25 bp, Artificial
  Probe
tatcagacctaatgtgtgactctgc

SEQ ID NO: 134757 - DNA, 25 bp, Artificial
  Probe
cagacctaatgtgtgactctgctaa

SEQ ID NO: 134758 - DNA, 25 bp, Artificial
  Probe
tcagacctaatgtgtgactctgcta

SEQ ID NO: 134759 - DNA, 25 bp, Artificial
  Probe
atcagacctaatgtgtgactctgct

SEQ ID NO: 134760 - DNA, 25 bp, Artificial
  Probe
aatgtgtgactctgctaaccatttt

SEQ ID NO: 134761 - DNA, 25 bp, Artificial
  Probe
ctacaagacacatagctctctaagg

SEQ ID NO: 134762 - DNA, 25 bp, Artificial
  Probe
gttctacaagacacatagctctcta

SEQ ID NO: 134763 - DNA, 25 bp, Artificial
  Probe
tctacaagacacatagctctctaag

SEQ ID NO: 134764 - DNA, 25 bp, Artificial
  Probe
ttctacaagacacatagctctctaa

SEQ ID NO: 134765 - DNA, 25 bp, Artificial
  Probe
ggttctacaagacacatagctctct

SEQ ID NO: 134766 - DNA, 25 bp, Artificial
  Probe
tacaagacacatagctctctaaggc

SEQ ID NO: 134767 - DNA, 25 bp, Artificial
  Probe
tggttctacaagacacatagctctc

SEQ ID NO: 134768 - DNA, 25 bp, Artificial
  Probe
caagacacatagctctctaaggctg

SEQ ID NO: 134769 - DNA, 25 bp, Artificial
  Probe
acaagacacatagctctctaaggct

SEQ ID NO: 134770 - DNA, 25 bp, Artificial
  Probe
cacatagctctctaaggctgcatac

SEQ ID NO: 134771 - DNA, 25 bp, Artificial
  Probe
acacatagctctctaaggctgcata

SEQ ID NO: 134772 - DNA, 25 bp, Artificial
  Probe
acatttcctgtgtcttccaaaggga

SEQ ID NO: 134773 - DNA, 25 bp, Artificial
  Probe
aagacacatagctctctaaggctgc

SEQ ID NO: 134774 - DNA, 25 bp, Artificial
  Probe
acatagctctctaaggctgcatacg

SEQ ID NO: 134775 - DNA, 25 bp, Artificial
  Probe
gacacatagctctctaaggctgcat

SEQ ID NO: 134776 - DNA, 25 bp, Artificial
  Probe
tgtgattaataaatttctgaaacgt

SEQ ID NO: 134777 - DNA, 25 bp, Artificial
  Probe
ccggtatgtgattaataaatttctg

SEQ ID NO: 134778 - DNA, 25 bp, Artificial
  Probe
tccggtatgtgattaataaatttct

SEQ ID NO: 134779 - DNA, 25 bp, Artificial
  Probe
cggtatgtgattaataaatttctga

SEQ ID NO: 134780 - DNA, 25 bp, Artificial
  Probe
catagctctctaaggctgcatacgg

SEQ ID NO: 134781 - DNA, 25 bp, Artificial
  Probe
atttcctgtgtcttccaaagggaac

SEQ ID NO: 134782 - DNA, 25 bp, Artificial
  Probe
catttcctgtgtcttccaaagggaa

SEQ ID NO: 134783 - DNA, 25 bp, Artificial
  Probe
ttccggtatgtgattaataaatttc

SEQ ID NO: 134784 - DNA, 25 bp, Artificial
  Probe
atagctctctaaggctgcatacggt

SEQ ID NO: 134785 - DNA, 25 bp, Artificial
  Probe
agacacatagctctctaaggctgca

SEQ ID NO: 134786 - DNA, 25 bp, Artificial
  Probe
aactagccacatttcctgtgtcttc

SEQ ID NO: 134787 - DNA, 25 bp, Artificial
  Probe
gaactagccacatttcctgtgtctt

SEQ ID NO: 134788 - DNA, 25 bp, Artificial
  Probe
tttccggtatgtgattaataaattt

SEQ ID NO: 134789 - DNA, 25 bp, Artificial
  Probe
tttcctgtgtcttccaaagggaaca

SEQ ID NO: 134790 - DNA, 25 bp, Artificial
  Probe
cacatttcctgtgtcttccaaaggg

SEQ ID NO: 134791 - DNA, 25 bp, Artificial
  Probe
ccacatttcctgtgtcttccaaagg

SEQ ID NO: 134792 - DNA, 25 bp, Artificial
  Probe
tagccacatttcctgtgtcttccaa

SEQ ID NO: 134793 - DNA, 25 bp, Artificial
  Probe
gccacatttcctgtgtcttccaaag

SEQ ID NO: 134794 - DNA, 25 bp, Artificial
  Probe
ctagccacatttcctgtgtcttcca

SEQ ID NO: 134795 - DNA, 25 bp, Artificial
  Probe
actagccacatttcctgtgtcttcc

SEQ ID NO: 134796 - DNA, 25 bp, Artificial
  Probe
ggaactagccacatttcctgtgtct

SEQ ID NO: 134797 - DNA, 25 bp, Artificial
  Probe
ttttccggtatgtgattaataaatt

SEQ ID NO: 134798 - DNA, 25 bp, Artificial
  Probe
agccacatttcctgtgtcttccaaa

SEQ ID NO: 134799 - DNA, 25 bp, Artificial
  Probe
ttatggagattaccagagtgagtac

SEQ ID NO: 134800 - DNA, 25 bp, Artificial
  Probe
cttgtctcaccctcctgaaatgaat

SEQ ID NO: 134801 - DNA, 25 bp, Artificial
  Probe
gagattaccagagtgagtactacgg

SEQ ID NO: 134802 - DNA, 25 bp, Artificial
  Probe
ggagattaccagagtgagtactacg

SEQ ID NO: 134803 - DNA, 25 bp, Artificial
  Probe
tttatggagattaccagagtgagta

SEQ ID NO: 134804 - DNA, 25 bp, Artificial
  Probe
ttgtctcaccctcctgaaatgaatg

SEQ ID NO: 134805 - DNA, 25 bp, Artificial
  Probe
ctttctcatctctgtcggtcaatgg

SEQ ID NO: 134806 - DNA, 25 bp, Artificial
  Probe
cctttctcatctctgtcggtcaatg

SEQ ID NO: 134807 - DNA, 25 bp, Artificial
  Probe
atggagattaccagagtgagtacta

SEQ ID NO: 134808 - DNA, 25 bp, Artificial
  Probe
tatggagattaccagagtgagtact

SEQ ID NO: 134809 - DNA, 25 bp, Artificial
  Probe
tggagattaccagagtgagtactac

SEQ ID NO: 134810 - DNA, 25 bp, Artificial
  Probe
ttctcatctctgtcggtcaatggtg

SEQ ID NO: 134811 - DNA, 25 bp, Artificial
  Probe
gattaccagagtgagtactacggtc

SEQ ID NO: 134812 - DNA, 25 bp, Artificial
  Probe
tgtctcaccctcctgaaatgaatga

SEQ ID NO: 134813 - DNA, 25 bp, Artificial
  Probe
atcacttgtctcaccctcctgaaat

SEQ ID NO: 134814 - DNA, 25 bp, Artificial
  Probe
acttgtctcaccctcctgaaatgaa

SEQ ID NO: 134815 - DNA, 25 bp, Artificial
  Probe
aatcacttgtctcaccctcctgaaa

SEQ ID NO: 134816 - DNA, 25 bp, Artificial
  Probe
tttctcatctctgtcggtcaatggt

SEQ ID NO: 134817 - DNA, 25 bp, Artificial
  Probe
agattaccagagtgagtactacggt

SEQ ID NO: 134818 - DNA, 25 bp, Artificial
  Probe
tacagagacgagcttttatttcaga

SEQ ID NO: 134819 - DNA, 25 bp, Artificial
  Probe
gtacagagacgagcttttatttcag

SEQ ID NO: 134820 - DNA, 25 bp, Artificial
  Probe
cagagacgagcttttatttcagaaa

SEQ ID NO: 134821 - DNA, 25 bp, Artificial
  Probe
acagagacgagcttttatttcagaa

SEQ ID NO: 134822 - DNA, 25 bp, Artificial
  Probe
gaatcacttgtctcaccctcctgaa

SEQ ID NO: 134823 - DNA, 25 bp, Artificial
  Probe
ccttttatggagattaccagagtga

SEQ ID NO: 134824 - DNA, 25 bp, Artificial
  Probe
tccttttatggagattaccagagtg

SEQ ID NO: 134825 - DNA, 25 bp, Artificial
  Probe
attaccagagtgagtactacggtcc

SEQ ID NO: 134826 - DNA, 25 bp, Artificial
  Probe
acctttctcatctctgtcggtcaat

SEQ ID NO: 134827 - DNA, 25 bp, Artificial
  Probe
ttttatggagattaccagagtgagt

SEQ ID NO: 134828 - DNA, 25 bp, Artificial
  Probe
cacttgtctcaccctcctgaaatga

SEQ ID NO: 134829 - DNA, 25 bp, Artificial
  Probe
tcacttgtctcaccctcctgaaatg

SEQ ID NO: 134830 - DNA, 25 bp, Artificial
  Probe
cttttatggagattaccagagtgag

SEQ ID NO: 134831 - DNA, 25 bp, Artificial
  Probe
agagacgagcttttatttcagaaaa

SEQ ID NO: 134832 - DNA, 25 bp, Artificial
  Probe
ccagtccacctttctcatctctgtc

SEQ ID NO: 134833 - DNA, 25 bp, Artificial
  Probe
gagacgagcttttatttcagaaaat

SEQ ID NO: 134834 - DNA, 25 bp, Artificial
  Probe
ttaccagagtgagtactacggtcct

SEQ ID NO: 134835 - DNA, 25 bp, Artificial
  Probe
cacctttctcatctctgtcggtcaa

SEQ ID NO: 134836 - DNA, 25 bp, Artificial
  Probe
cagtccacctttctcatctctgtcg

SEQ ID NO: 134837 - DNA, 25 bp, Artificial
  Probe
gtctcaccctcctgaaatgaatgag

SEQ ID NO: 134838 - DNA, 25 bp, Artificial
  Probe
tgtacagagacgagcttttatttca

SEQ ID NO: 134839 - DNA, 25 bp, Artificial
  Probe
gttgtacagagacgagcttttattt

SEQ ID NO: 134840 - DNA, 25 bp, Artificial
  Probe
ttgtacagagacgagcttttatttc

SEQ ID NO: 134841 - DNA, 25 bp, Artificial
  Probe
ggttgtacagagacgagcttttatt

SEQ ID NO: 134842 - DNA, 25 bp, Artificial
  Probe
taccagagtgagtactacggtcctg

SEQ ID NO: 134843 - DNA, 25 bp, Artificial
  Probe
acgagcttttatttcagaaaatagg

SEQ ID NO: 134844 - DNA, 25 bp, Artificial
  Probe
ctcaatgtccactatcactgctcag

SEQ ID NO: 134845 - DNA, 25 bp, Artificial
  Probe
tcaatgtccactatcactgctcagg

SEQ ID NO: 134846 - DNA, 25 bp, Artificial
  Probe
gctcaatgtccactatcactgctca

SEQ ID NO: 134847 - DNA, 25 bp, Artificial
  Probe
aatgtccactatcactgctcaggag

SEQ ID NO: 134848 - DNA, 25 bp, Artificial
  Probe
caatgtccactatcactgctcagga

SEQ ID NO: 134849 - DNA, 25 bp, Artificial
  Probe
cttcgtgtctgtctctgctgtactg

SEQ ID NO: 134850 - DNA, 25 bp, Artificial
  Probe
taaacaattacattacaaagcgcag

SEQ ID NO: 134851 - DNA, 25 bp, Artificial
  Probe
tctgtctctgctgtactgaggtgtt

SEQ ID NO: 134852 - DNA, 25 bp, Artificial
  Probe
ttaaacaattacattacaaagcgca

SEQ ID NO: 134853 - DNA, 25 bp, Artificial
  Probe
cggtcctgtccatttgaggtttaaa

SEQ ID NO: 134854 - DNA, 25 bp, Artificial
  Probe
aaacaattacattacaaagcgcagc

SEQ ID NO: 134855 - DNA, 25 bp, Artificial
  Probe
ctgtctctgctgtactgaggtgttt

SEQ ID NO: 134856 - DNA, 25 bp, Artificial
  Probe
tttaaacaattacattacaaagcgc

SEQ ID NO: 134857 - DNA, 25 bp, Artificial
  Probe
aacaattacattacaaagcgcagca

SEQ ID NO: 134858 - DNA, 25 bp, Artificial
  Probe
acaattacattacaaagcgcagcag

SEQ ID NO: 134859 - DNA, 25 bp, Artificial
  Probe
tgtctctgctgtactgaggtgtttt

SEQ ID NO: 134860 - DNA, 25 bp, Artificial
  Probe
caattacattacaaagcgcagcagc

SEQ ID NO: 134861 - DNA, 25 bp, Artificial
  Probe
ctaaacccacatgtccatgtcatcg

SEQ ID NO: 134862 - DNA, 25 bp, Artificial
  Probe
aattacattacaaagcgcagcagcc

SEQ ID NO: 134863 - DNA, 25 bp, Artificial
  Probe
taaacccacatgtccatgtcatcgg

SEQ ID NO: 134864 - DNA, 25 bp, Artificial
  Probe
taatatcgttgtccatgtcaagacc

SEQ ID NO: 134865 - DNA, 25 bp, Artificial
  Probe
aataatatcgttgtccatgtcaaga

SEQ ID NO: 134866 - DNA, 25 bp, Artificial
  Probe
caataatatcgttgtccatgtcaag

SEQ ID NO: 134867 - DNA, 25 bp, Artificial
  Probe
ataatatcgttgtccatgtcaagac

SEQ ID NO: 134868 - DNA, 25 bp, Artificial
  Probe
acatacaagccagaaatcaagaaag

SEQ ID NO: 134869 - DNA, 25 bp, Artificial
  Probe
gaacatacaagccagaaatcaagaa

SEQ ID NO: 134870 - DNA, 25 bp, Artificial
  Probe
atacaagccagaaatcaagaaagga

SEQ ID NO: 134871 - DNA, 25 bp, Artificial
  Probe
catacaagccagaaatcaagaaagg

SEQ ID NO: 134872 - DNA, 25 bp, Artificial
  Probe
atagaaatgcgtaaagggaaagtca

SEQ ID NO: 134873 - DNA, 25 bp, Artificial
  Probe
tacaagccagaaatcaagaaaggaa

SEQ ID NO: 134874 - DNA, 25 bp, Artificial
  Probe
aacatacaagccagaaatcaagaaa

SEQ ID NO: 134875 - DNA, 25 bp, Artificial
  Probe
tgtgtcttcagaggtgactgtattc

SEQ ID NO: 134876 - DNA, 25 bp, Artificial
  Probe
ctgtgtcttcagaggtgactgtatt

SEQ ID NO: 134877 - DNA, 25 bp, Artificial
  Probe
tagaaatgcgtaaagggaaagtcag

SEQ ID NO: 134878 - DNA, 25 bp, Artificial
  Probe
tatagaaatgcgtaaagggaaagtc

SEQ ID NO: 134879 - DNA, 25 bp, Artificial
  Probe
cgaacatacaagccagaaatcaaga

SEQ ID NO: 134880 - DNA, 25 bp, Artificial
  Probe
acaagccagaaatcaagaaaggaag

SEQ ID NO: 134881 - DNA, 25 bp, Artificial
  Probe
gtgtcttcagaggtgactgtattcg

SEQ ID NO: 134882 - DNA, 25 bp, Artificial
  Probe
cagaaatcaagaaaggaagctacaa

SEQ ID NO: 134883 - DNA, 25 bp, Artificial
  Probe
gacttgaccatcgacgactcatatt

SEQ ID NO: 134884 - DNA, 25 bp, Artificial
  Probe
cttatttctgtgagagctttggatg

SEQ ID NO: 134885 - DNA, 25 bp, Artificial
  Probe
acttatttctgtgagagctttggat

SEQ ID NO: 134886 - DNA, 25 bp, Artificial
  Probe
atggacttatttctgtgagagcttt

SEQ ID NO: 134887 - DNA, 25 bp, Artificial
  Probe
aatggacttatttctgtgagagctt

SEQ ID NO: 134888 - DNA, 25 bp, Artificial
  Probe
ccagaaatcaagaaaggaagctaca

SEQ ID NO: 134889 - DNA, 25 bp, Artificial
  Probe
gctatagaaatgcgtaaagggaaag

SEQ ID NO: 134890 - DNA, 25 bp, Artificial
  Probe
gacttatttctgtgagagctttgga

SEQ ID NO: 134891 - DNA, 25 bp, Artificial
  Probe
acttgaccatcgacgactcatattg

SEQ ID NO: 134892 - DNA, 25 bp, Artificial
  Probe
agaaatcaagaaaggaagctacaat

SEQ ID NO: 134893 - DNA, 25 bp, Artificial
  Probe
ttatttctgtgagagctttggatgg

SEQ ID NO: 134894 - DNA, 25 bp, Artificial
  Probe
tggacttatttctgtgagagctttg

SEQ ID NO: 134895 - DNA, 25 bp, Artificial
  Probe
caagccagaaatcaagaaaggaagc

SEQ ID NO: 134896 - DNA, 25 bp, Artificial
  Probe
agattctcctcctgggtacactatc

SEQ ID NO: 134897 - DNA, 25 bp, Artificial
  Probe
gctacaataatatcgttgtccatgt

SEQ ID NO: 134898 - DNA, 25 bp, Artificial
  Probe
ctatagaaatgcgtaaagggaaagt

SEQ ID NO: 134899 - DNA, 25 bp, Artificial
  Probe
ggctatagaaatgcgtaaagggaaa

SEQ ID NO: 134900 - DNA, 25 bp, Artificial
  Probe
aatatcgttgtccatgtcaagaccg

SEQ ID NO: 134901 - DNA, 25 bp, Artificial
  Probe
aaatggacttatttctgtgagagct

SEQ ID NO: 134902 - DNA, 25 bp, Artificial
  Probe
gtaccgtattgaagcatcaagaacc

SEQ ID NO: 134903 - DNA, 25 bp, Artificial
  Probe
tcgaacatacaagccagaaatcaag

SEQ ID NO: 134904 - DNA, 25 bp, Artificial
  Probe
acaataatatcgttgtccatgtcaa

SEQ ID NO: 134905 - DNA, 25 bp, Artificial
  Probe
ggacttatttctgtgagagctttgg

SEQ ID NO: 134906 - DNA, 25 bp, Artificial
  Probe
ctcctgggtacactatcctagatgt

SEQ ID NO: 134907 - DNA, 25 bp, Artificial
  Probe
cctcctgggtacactatcctagatg

SEQ ID NO: 134908 - DNA, 25 bp, Artificial
  Probe
tcctcctgggtacactatcctagat

SEQ ID NO: 134909 - DNA, 25 bp, Artificial
  Probe
caatcaccaagaacatgatgtgtgc

SEQ ID NO: 134910 - DNA, 25 bp, Artificial
  Probe
gcaatcaccaagaacatgatgtgtg

SEQ ID NO: 134911 - DNA, 25 bp, Artificial
  Probe
tttgtatgatgtgcaaagtgtagtg

SEQ ID NO: 134912 - DNA, 25 bp, Artificial
  Probe
atttgtatgatgtgcaaagtgtagt

SEQ ID NO: 134913 - DNA, 25 bp, Artificial
  Probe
catttgtatgatgtgcaaagtgtag

SEQ ID NO: 134914 - DNA, 25 bp, Artificial
  Probe
gcatttgtatgatgtgcaaagtgta

SEQ ID NO: 134915 - DNA, 25 bp, Artificial
  Probe
aagcatttgtatgatgtgcaaagtg

SEQ ID NO: 134916 - DNA, 25 bp, Artificial
  Probe
caagcatttgtatgatgtgcaaagt

SEQ ID NO: 134917 - DNA, 25 bp, Artificial
  Probe
tatgatgtgcaaagtgtagtgcttc

SEQ ID NO: 134918 - DNA, 25 bp, Artificial
  Probe
aatcaccaagaacatgatgtgtgca

SEQ ID NO: 134919 - DNA, 25 bp, Artificial
  Probe
ggcaatcaccaagaacatgatgtgt

SEQ ID NO: 134920 - DNA, 25 bp, Artificial
  Probe
gtatgatgtgcaaagtgtagtgctt

SEQ ID NO: 134921 - DNA, 25 bp, Artificial
  Probe
acaagcatttgtatgatgtgcaaag

SEQ ID NO: 134922 - DNA, 25 bp, Artificial
  Probe
agcatttgtatgatgtgcaaagtgt

SEQ ID NO: 134923 - DNA, 25 bp, Artificial
  Probe
ttgtatgatgtgcaaagtgtagtgc

SEQ ID NO: 134924 - DNA, 25 bp, Artificial
  Probe
ctacatggcttcagtgcaagtgaat

SEQ ID NO: 134925 - DNA, 25 bp, Artificial
  Probe
catggatggagtgaccaaggatgag

SEQ ID NO: 134926 - DNA, 25 bp, Artificial
  Probe
caccaagaacatgatgtgtgcagag

SEQ ID NO: 134927 - DNA, 25 bp, Artificial
  Probe
gagaccgtgactcacaataaatgca

SEQ ID NO: 134928 - DNA, 25 bp, Artificial
  Probe
atcaccaagaacatgatgtgtgcag

SEQ ID NO: 134929 - DNA, 25 bp, Artificial
  Probe
atgctctttaagctctcccacaatg

SEQ ID NO: 134930 - DNA, 25 bp, Artificial
  Probe
catgctctttaagctctcccacaat

SEQ ID NO: 134931 - DNA, 25 bp, Artificial
  Probe
tacatggcttcagtgcaagtgaatg

SEQ ID NO: 134932 - DNA, 25 bp, Artificial
  Probe
ggagaccgtgactcacaataaatgc

SEQ ID NO: 134933 - DNA, 25 bp, Artificial
  Probe
tgtatgatgtgcaaagtgtagtgct

SEQ ID NO: 134934 - DNA, 25 bp, Artificial
  Probe
tcaccaagaacatgatgtgtgcaga

SEQ ID NO: 134935 - DNA, 25 bp, Artificial
  Probe
tctttaagctctcccacaatgcctc

SEQ ID NO: 134936 - DNA, 25 bp, Artificial
  Probe
ctctttaagctctcccacaatgcct

SEQ ID NO: 134937 - DNA, 25 bp, Artificial
  Probe
tacaagcatttgtatgatgtgcaaa

SEQ ID NO: 134938 - DNA, 25 bp, Artificial
  Probe
ctttaagctctcccacaatgcctca

SEQ ID NO: 134939 - DNA, 25 bp, Artificial
  Probe
atgatgtgcaaagtgtagtgcttca

SEQ ID NO: 134940 - DNA, 25 bp, Artificial
  Probe
tcatgctctttaagctctcccacaa

SEQ ID NO: 134941 - DNA, 25 bp, Artificial
  Probe
gaccgtgactcacaataaatgcatg

SEQ ID NO: 134942 - DNA, 25 bp, Artificial
  Probe
agaccgtgactcacaataaatgcat

SEQ ID NO: 134943 - DNA, 25 bp, Artificial
  Probe
ctcatgctctttaagctctcccaca

SEQ ID NO: 134944 - DNA, 25 bp, Artificial
  Probe
acgacctcatgctctttaagctctc

SEQ ID NO: 134945 - DNA, 25 bp, Artificial
  Probe
gacgacctcatgctctttaagctct

SEQ ID NO: 134946 - DNA, 25 bp, Artificial
  Probe
gggcaatcaccaagaacatgatgtg

SEQ ID NO: 134947 - DNA, 25 bp, Artificial
  Probe
cggagaccgtgactcacaataaatg

SEQ ID NO: 134948 - DNA, 25 bp, Artificial
  Probe
tgatgtgcaaagtgtagtgcttcac

SEQ ID NO: 134949 - DNA, 25 bp, Artificial
  Probe
caactgacagtgtcaatcatggacc

SEQ ID NO: 134950 - DNA, 25 bp, Artificial
  Probe
gacctcatgctctttaagctctccc

SEQ ID NO: 134951 - DNA, 25 bp, Artificial
  Probe
cctcatgctctttaagctctcccac

SEQ ID NO: 134952 - DNA, 25 bp, Artificial
  Probe
cgacctcatgctctttaagctctcc

SEQ ID NO: 134953 - DNA, 25 bp, Artificial
  Probe
gatgtgcaaagtgtagtgcttcacc

SEQ ID NO: 134954 - DNA, 25 bp, Artificial
  Probe
ataacatcatggtgctggtatctac

SEQ ID NO: 134955 - DNA, 25 bp, Artificial
  Probe
atataacatcatggtgctggtatct

SEQ ID NO: 134956 - DNA, 25 bp, Artificial
  Probe
catataacatcatggtgctggtatc

SEQ ID NO: 134957 - DNA, 25 bp, Artificial
  Probe
tataacatcatggtgctggtatcta

SEQ ID NO: 134958 - DNA, 25 bp, Artificial
  Probe
ttctttctttccatcctcagcatat

SEQ ID NO: 134959 - DNA, 25 bp, Artificial
  Probe
ctgtaaactcctgaatccaatccat

SEQ ID NO: 134960 - DNA, 25 bp, Artificial
  Probe
tcacctggacaccatataacatcat

SEQ ID NO: 134961 - DNA, 25 bp, Artificial
  Probe
gttctttctttccatcctcagcata

SEQ ID NO: 134962 - DNA, 25 bp, Artificial
  Probe
ttctcttctgtaaactcctgaatcc

SEQ ID NO: 134963 - DNA, 25 bp, Artificial
  Probe
ctcttctgtaaactcctgaatccaa

SEQ ID NO: 134964 - DNA, 25 bp, Artificial
  Probe
tcttctgtaaactcctgaatccaat

SEQ ID NO: 134965 - DNA, 25 bp, Artificial
  Probe
ttctgtaaactcctgaatccaatcc

SEQ ID NO: 134966 - DNA, 25 bp, Artificial
  Probe
cttctgtaaactcctgaatccaatc

SEQ ID NO: 134967 - DNA, 25 bp, Artificial
  Probe
tctcttctgtaaactcctgaatcca

SEQ ID NO: 134968 - DNA, 25 bp, Artificial
  Probe
tcatctccaagacaaatatccaagc

SEQ ID NO: 134969 - DNA, 25 bp, Artificial
  Probe
tctgtaaactcctgaatccaatcca

SEQ ID NO: 134970 - DNA, 25 bp, Artificial
  Probe
agattctcttctgtaaactcctgaa

SEQ ID NO: 134971 - DNA, 25 bp, Artificial
  Probe
ctcacctggacaccatataacatca

SEQ ID NO: 134972 - DNA, 25 bp, Artificial
  Probe
cacctggacaccatataacatcatg

SEQ ID NO: 134973 - DNA, 25 bp, Artificial
  Probe
atcatctccaagacaaatatccaag

SEQ ID NO: 134974 - DNA, 25 bp, Artificial
  Probe
atcgttcaacctccttacaaatgac

SEQ ID NO: 134975 - DNA, 25 bp, Artificial
  Probe
tgtaaactcctgaatccaatccatg

SEQ ID NO: 134976 - DNA, 25 bp, Artificial
  Probe
taacatcatggtgctggtatctacc

SEQ ID NO: 134977 - DNA, 25 bp, Artificial
  Probe
cctcacctggacaccatataacatc

SEQ ID NO: 134978 - DNA, 25 bp, Artificial
  Probe
catcctcacctggacaccatataac

SEQ ID NO: 134979 - DNA, 25 bp, Artificial
  Probe
catctccaagacaaatatccaagcg

SEQ ID NO: 134980 - DNA, 25 bp, Artificial
  Probe
tcatcctcacctggacaccatataa

SEQ ID NO: 134981 - DNA, 25 bp, Artificial
  Probe
ttcatcctcacctggacaccatata

SEQ ID NO: 134982 - DNA, 25 bp, Artificial
  Probe
gatcatctccaagacaaatatccaa

SEQ ID NO: 134983 - DNA, 25 bp, Artificial
  Probe
gatcgttcaacctccttacaaatga

SEQ ID NO: 134984 - DNA, 25 bp, Artificial
  Probe
ctttccaaactttgctattcccaga

SEQ ID NO: 134985 - DNA, 25 bp, Artificial
  Probe
tgttctttctttccatcctcagcat

SEQ ID NO: 134986 - DNA, 25 bp, Artificial
  Probe
gagactctactagctttccaaactt

SEQ ID NO: 134987 - DNA, 25 bp, Artificial
  Probe
agactctactagctttccaaacttt

SEQ ID NO: 134988 - DNA, 25 bp, Artificial
  Probe
tcctcacctggacaccatataacat

SEQ ID NO: 134989 - DNA, 25 bp, Artificial
  Probe
atcctcacctggacaccatataaca

SEQ ID NO: 134990 - DNA, 25 bp, Artificial
  Probe
atctccaagacaaatatccaagcgt

SEQ ID NO: 134991 - DNA, 25 bp, Artificial
  Probe
tttccaaactttgctattcccagac

SEQ ID NO: 134992 - DNA, 25 bp, Artificial
  Probe
gtaaactcctgaatccaatccatgc

SEQ ID NO: 134993 - DNA, 25 bp, Artificial
  Probe
agagactctactagctttccaaact

SEQ ID NO: 134994 - DNA, 25 bp, Artificial
  Probe
gactctactagctttccaaactttg

SEQ ID NO: 134995 - DNA, 25 bp, Artificial
  Probe
gagagactctactagctttccaaac

SEQ ID NO: 134996 - DNA, 25 bp, Artificial
  Probe
catcatggtgctggtatctaccttc

SEQ ID NO: 134997 - DNA, 25 bp, Artificial
  Probe
actctactagctttccaaactttgc

SEQ ID NO: 134998 - DNA, 25 bp, Artificial
  Probe
atcatggtgctggtatctaccttct

SEQ ID NO: 134999 - DNA, 25 bp, Artificial
  Probe
atgatgaagttgtagacagactgaa

SEQ ID NO: 135000 - DNA, 25 bp, Artificial
  Probe
atccatgatgaagttgtagacagac

SEQ ID NO: 135001 - DNA, 25 bp, Artificial
  Probe
catgatgaagttgtagacagactga

SEQ ID NO: 135002 - DNA, 25 bp, Artificial
  Probe
ccatgatgaagttgtagacagactg

SEQ ID NO: 135003 - DNA, 25 bp, Artificial
  Probe
tccatgatgaagttgtagacagact

SEQ ID NO: 135004 - DNA, 25 bp, Artificial
  Probe
tgatgaagttgtagacagactgaaa

SEQ ID NO: 135005 - DNA, 25 bp, Artificial
  Probe
gtggaagaagcaaagaaagaaggag

SEQ ID NO: 135006 - DNA, 25 bp, Artificial
  Probe
catccatgatgaagttgtagacaga

SEQ ID NO: 135007 - DNA, 25 bp, Artificial
  Probe
aagcatccatgatgaagttgtagac

SEQ ID NO: 135008 - DNA, 25 bp, Artificial
  Probe
tggaagaagcaaagaaagaaggagg

SEQ ID NO: 135009 - DNA, 25 bp, Artificial
  Probe
gcatccatgatgaagttgtagacag

SEQ ID NO: 135010 - DNA, 25 bp, Artificial
  Probe
agcatccatgatgaagttgtagaca

SEQ ID NO: 135011 - DNA, 25 bp, Artificial
  Probe
actttcgagtagtatctttaccaag

SEQ ID NO: 135012 - DNA, 25 bp, Artificial
  Probe
gaagaagcaaagaaagaaggaggca

SEQ ID NO: 135013 - DNA, 25 bp, Artificial
  Probe
cgtggaagaagcaaagaaagaagga

SEQ ID NO: 135014 - DNA, 25 bp, Artificial
  Probe
aaatgactactcacagatccgtgtc

SEQ ID NO: 135015 - DNA, 25 bp, Artificial
  Probe
aagaagcaaagaaagaaggaggcac

SEQ ID NO: 135016 - DNA, 25 bp, Artificial
  Probe
gatgaagttgtagacagactgaaaa

SEQ ID NO: 135017 - DNA, 25 bp, Artificial
  Probe
gaaagcatccatgatgaagttgtag

SEQ ID NO: 135018 - DNA, 25 bp, Artificial
  Probe
aaagcatccatgatgaagttgtaga

SEQ ID NO: 135019 - DNA, 25 bp, Artificial
  Probe
aatgactactcacagatccgtgtcg

SEQ ID NO: 135020 - DNA, 25 bp, Artificial
  Probe
ggaagaagcaaagaaagaaggaggc

SEQ ID NO: 135021 - DNA, 25 bp, Artificial
  Probe
cgaaagcatccatgatgaagttgta

SEQ ID NO: 135022 - DNA, 25 bp, Artificial
  Probe
ccgtggaagaagcaaagaaagaagg

SEQ ID NO: 135023 - DNA, 25 bp, Artificial
  Probe
aaaatgactactcacagatccgtgt

SEQ ID NO: 135024 - DNA, 25 bp, Artificial
  Probe
gccgtggaagaagcaaagaaagaag

SEQ ID NO: 135025 - DNA, 25 bp, Artificial
  Probe
cacgaaagcatccatgatgaagttg

SEQ ID NO: 135026 - DNA, 25 bp, Artificial
  Probe
caagccgtggaagaagcaaagaaag

SEQ ID NO: 135027 - DNA, 25 bp, Artificial
  Probe
acgaaagcatccatgatgaagttgt

SEQ ID NO: 135028 - DNA, 25 bp, Artificial
  Probe
cacaaggagacttttgccccaattc

SEQ ID NO: 135029 - DNA, 25 bp, Artificial
  Probe
gcacgaaagcatccatgatgaagtt

SEQ ID NO: 135030 - DNA, 25 bp, Artificial
  Probe
acaaggagacttttgccccaattct

SEQ ID NO: 135031 - DNA, 25 bp, Artificial
  Probe
tttgcacgaaagcatccatgatgaa

SEQ ID NO: 135032 - DNA, 25 bp, Artificial
  Probe
ttcacaaggagacttttgccccaat

SEQ ID NO: 135033 - DNA, 25 bp, Artificial
  Probe
tcacaaggagacttttgccccaatt

SEQ ID NO: 135034 - DNA, 25 bp, Artificial
  Probe
caatatcctctatggaccgctccac

SEQ ID NO: 135035 - DNA, 25 bp, Artificial
  Probe
ttgcacgaaagcatccatgatgaag

SEQ ID NO: 135036 - DNA, 25 bp, Artificial
  Probe
aatatcctctatggaccgctccaca

SEQ ID NO: 135037 - DNA, 25 bp, Artificial
  Probe
ctgggaccccaatatcctctatgga

SEQ ID NO: 135038 - DNA, 25 bp, Artificial
  Probe
tgggaccccaatatcctctatggac

SEQ ID NO: 135039 - DNA, 25 bp, Artificial
  Probe
ttttgcacgaaagcatccatgatga

SEQ ID NO: 135040 - DNA, 25 bp, Artificial
  Probe
tattgttggattctgtgccttgtat

SEQ ID NO: 135041 - DNA, 25 bp, Artificial
  Probe
ttattgttggattctgtgccttgta

SEQ ID NO: 135042 - DNA, 25 bp, Artificial
  Probe
attgttggattctgtgccttgtatt

SEQ ID NO: 135043 - DNA, 25 bp, Artificial
  Probe
tggattctgtgccttgtatttcata

SEQ ID NO: 135044 - DNA, 25 bp, Artificial
  Probe
gagccttctttattgttggattctg

SEQ ID NO: 135045 - DNA, 25 bp, Artificial
  Probe
cttctttattgttggattctgtgcc

SEQ ID NO: 135046 - DNA, 25 bp, Artificial
  Probe
ccttctttattgttggattctgtgc

SEQ ID NO: 135047 - DNA, 25 bp, Artificial
  Probe
gccttctttattgttggattctgtg

SEQ ID NO: 135048 - DNA, 25 bp, Artificial
  Probe
agccttctttattgttggattctgt

SEQ ID NO: 135049 - DNA, 25 bp, Artificial
  Probe
ggattctgtgccttgtatttcatat

SEQ ID NO: 135050 - DNA, 25 bp, Artificial
  Probe
ttggattctgtgccttgtatttcat

SEQ ID NO: 135051 - DNA, 25 bp, Artificial
  Probe
ctttattgttggattctgtgccttg

SEQ ID NO: 135052 - DNA, 25 bp, Artificial
  Probe
tctttattgttggattctgtgcctt

SEQ ID NO: 135053 - DNA, 25 bp, Artificial
  Probe
ttctttattgttggattctgtgcct

SEQ ID NO: 135054 - DNA, 25 bp, Artificial
  Probe
agagccttctttattgttggattct

SEQ ID NO: 135055 - DNA, 25 bp, Artificial
  Probe
ttgttggattctgtgccttgtattt

SEQ ID NO: 135056 - DNA, 25 bp, Artificial
  Probe
tttattgttggattctgtgccttgt

SEQ ID NO: 135057 - DNA, 25 bp, Artificial
  Probe
gttggattctgtgccttgtatttca

SEQ ID NO: 135058 - DNA, 25 bp, Artificial
  Probe
tgttggattctgtgccttgtatttc

SEQ ID NO: 135059 - DNA, 25 bp, Artificial
  Probe
tgtgccttgtatttcatattagaga

SEQ ID NO: 135060 - DNA, 25 bp, Artificial
  Probe
gattctgtgccttgtatttcatatt

SEQ ID NO: 135061 - DNA, 25 bp, Artificial
  Probe
gtgccttgtatttcatattagagac

SEQ ID NO: 135062 - DNA, 25 bp, Artificial
  Probe
ctgtgccttgtatttcatattagag

SEQ ID NO: 135063 - DNA, 25 bp, Artificial
  Probe
tctgtgccttgtatttcatattaga

SEQ ID NO: 135064 - DNA, 25 bp, Artificial
  Probe
ttctgtgccttgtatttcatattag

SEQ ID NO: 135065 - DNA, 25 bp, Artificial
  Probe
tgccttgtatttcatattagagaca

SEQ ID NO: 135066 - DNA, 25 bp, Artificial
  Probe
aagagccttctttattgttggattc

SEQ ID NO: 135067 - DNA, 25 bp, Artificial
  Probe
attctgtgccttgtatttcatatta

SEQ ID NO: 135068 - DNA, 25 bp, Artificial
  Probe
tgaagagccttctttattgttggat

SEQ ID NO: 135069 - DNA, 25 bp, Artificial
  Probe
gaagagccttctttattgttggatt

SEQ ID NO: 135070 - DNA, 25 bp, Artificial
  Probe
atttcccttgttgctcttgaaccag

SEQ ID NO: 135071 - DNA, 25 bp, Artificial
  Probe
gatttcccttgttgctcttgaacca

SEQ ID NO: 135072 - DNA, 25 bp, Artificial
  Probe
ctgaagagccttctttattgttgga

SEQ ID NO: 135073 - DNA, 25 bp, Artificial
  Probe
aggatttcccttgttgctcttgaac

SEQ ID NO: 135074 - DNA, 25 bp, Artificial
  Probe
caggatttcccttgttgctcttgaa

SEQ ID NO: 135075 - DNA, 25 bp, Artificial
  Probe
cctgaagagccttctttattgttgg

SEQ ID NO: 135076 - DNA, 25 bp, Artificial
  Probe
ggatttcccttgttgctcttgaacc

SEQ ID NO: 135077 - DNA, 25 bp, Artificial
  Probe
tttcccttgttgctcttgaaccagt

SEQ ID NO: 135078 - DNA, 25 bp, Artificial
  Probe
cttgttgctcttgaaccagtcaact

SEQ ID NO: 135079 - DNA, 25 bp, Artificial
  Probe
gccttgtatttcatattagagacaa

SEQ ID NO: 135080 - DNA, 25 bp, Artificial
  Probe
ccttgttgctcttgaaccagtcaac

SEQ ID NO: 135081 - DNA, 25 bp, Artificial
  Probe
gaagagtaaatatgccttgtgatgg

SEQ ID NO: 135082 - DNA, 25 bp, Artificial
  Probe
ttcagaagagtaaatatgccttgtg

SEQ ID NO: 135083 - DNA, 25 bp, Artificial
  Probe
gttcagaagagtaaatatgccttgt

SEQ ID NO: 135084 - DNA, 25 bp, Artificial
  Probe
tgttcagaagagtaaatatgccttg

SEQ ID NO: 135085 - DNA, 25 bp, Artificial
  Probe
gctgttcagaagagtaaatatgcct

SEQ ID NO: 135086 - DNA, 25 bp, Artificial
  Probe
agaagagtaaatatgccttgtgatg

SEQ ID NO: 135087 - DNA, 25 bp, Artificial
  Probe
cagaagagtaaatatgccttgtgat

SEQ ID NO: 135088 - DNA, 25 bp, Artificial
  Probe
tcagaagagtaaatatgccttgtga

SEQ ID NO: 135089 - DNA, 25 bp, Artificial
  Probe
ctgttcagaagagtaaatatgcctt

SEQ ID NO: 135090 - DNA, 25 bp, Artificial
  Probe
tctacctcaccctgttcttcaagag

SEQ ID NO: 135091 - DNA, 25 bp, Artificial
  Probe
gtctacctcaccctgttcttcaaga

SEQ ID NO: 135092 - DNA, 25 bp, Artificial
  Probe
tataaactccagtttcctagtaccc

SEQ ID NO: 135093 - DNA, 25 bp, Artificial
  Probe
ctacctcaccctgttcttcaagagt

SEQ ID NO: 135094 - DNA, 25 bp, Artificial
  Probe
tacctcaccctgttcttcaagagtg

SEQ ID NO: 135095 - DNA, 25 bp, Artificial
  Probe
cgtctacctcaccctgttcttcaag

SEQ ID NO: 135096 - DNA, 25 bp, Artificial
  Probe
atataaactccagtttcctagtacc

SEQ ID NO: 135097 - DNA, 25 bp, Artificial
  Probe
aagagtaaatatgccttgtgatggc

SEQ ID NO: 135098 - DNA, 25 bp, Artificial
  Probe
ctacgtctacctcaccctgttcttc

SEQ ID NO: 135099 - DNA, 25 bp, Artificial
  Probe
cttctacgtctacctcaccctgttc

SEQ ID NO: 135100 - DNA, 25 bp, Artificial
  Probe
cagtttcctagtaccccacttcatg

SEQ ID NO: 135101 - DNA, 25 bp, Artificial
  Probe
ggctgttcagaagagtaaatatgcc

SEQ ID NO: 135102 - DNA, 25 bp, Artificial
  Probe
tctacgtctacctcaccctgttctt

SEQ ID NO: 135103 - DNA, 25 bp, Artificial
  Probe
ttctacgtctacctcaccctgttct

SEQ ID NO: 135104 - DNA, 25 bp, Artificial
  Probe
tgtatataaactccagtttcctagt

SEQ ID NO: 135105 - DNA, 25 bp, Artificial
  Probe
ataaactccagtttcctagtacccc

SEQ ID NO: 135106 - DNA, 25 bp, Artificial
  Probe
ccagtttcctagtaccccacttcat

SEQ ID NO: 135107 - DNA, 25 bp, Artificial
  Probe
tacgtctacctcaccctgttcttca

SEQ ID NO: 135108 - DNA, 25 bp, Artificial
  Probe
ctccagtttcctagtaccccacttc

SEQ ID NO: 135109 - DNA, 25 bp, Artificial
  Probe
ctcaccctgttcttcaagagtgtgg

SEQ ID NO: 135110 - DNA, 25 bp, Artificial
  Probe
cctcaccctgttcttcaagagtgtg

SEQ ID NO: 135111 - DNA, 25 bp, Artificial
  Probe
taaactccagtttcctagtacccca

SEQ ID NO: 135112 - DNA, 25 bp, Artificial
  Probe
ccttctacgtctacctcaccctgtt

SEQ ID NO: 135113 - DNA, 25 bp, Artificial
  Probe
agtttcctagtaccccacttcatgc

SEQ ID NO: 135114 - DNA, 25 bp, Artificial
  Probe
acgtctacctcaccctgttcttcaa

SEQ ID NO: 135115 - DNA, 25 bp, Artificial
  Probe
tagtaccccacttcatgccctagaa

SEQ ID NO: 135116 - DNA, 25 bp, Artificial
  Probe
tccagtttcctagtaccccacttca

SEQ ID NO: 135117 - DNA, 25 bp, Artificial
  Probe
actccagtttcctagtaccccactt

SEQ ID NO: 135118 - DNA, 25 bp, Artificial
  Probe
aactccagtttcctagtaccccact

SEQ ID NO: 135119 - DNA, 25 bp, Artificial
  Probe
agagtaaatatgccttgtgatggcc

SEQ ID NO: 135120 - DNA, 25 bp, Artificial
  Probe
aaactccagtttcctagtaccccac

SEQ ID NO: 135121 - DNA, 25 bp, Artificial
  Probe
tatataaactccagtttcctagtac

SEQ ID NO: 135122 - DNA, 25 bp, Artificial
  Probe
gtatataaactccagtttcctagta

SEQ ID NO: 135123 - DNA, 25 bp, Artificial
  Probe
gtttcctagtaccccacttcatgcc

SEQ ID NO: 135124 - DNA, 25 bp, Artificial
  Probe
ctagtaccccacttcatgccctaga

SEQ ID NO: 135125 - DNA, 25 bp, Artificial
  Probe
gtatcagaccttggaactagagaag

SEQ ID NO: 135126 - DNA, 25 bp, Artificial
  Probe
gatgaggagaaggtggaagaagaag

SEQ ID NO: 135127 - DNA, 25 bp, Artificial
  Probe
agatgaggagaaggtggaagaagaa

SEQ ID NO: 135128 - DNA, 25 bp, Artificial
  Probe
ggtatcagaccttggaactagagaa

SEQ ID NO: 135129 - DNA, 25 bp, Artificial
  Probe
gagatgaggagaaggtggaagaaga

SEQ ID NO: 135130 - DNA, 25 bp, Artificial
  Probe
ttaatccttatttgaccagaaagcg

SEQ ID NO: 135131 - DNA, 25 bp, Artificial
  Probe
aaggagaacaacaaggataaacttc

SEQ ID NO: 135132 - DNA, 25 bp, Artificial
  Probe
gaaagacaagtgaagatttggttcc

SEQ ID NO: 135133 - DNA, 25 bp, Artificial
  Probe
ggaaagacaagtgaagatttggttc

SEQ ID NO: 135134 - DNA, 25 bp, Artificial
  Probe
aaaggagaacaacaaggataaactt

SEQ ID NO: 135135 - DNA, 25 bp, Artificial
  Probe
gaatgaggaagaggagaaggaggag

SEQ ID NO: 135136 - DNA, 25 bp, Artificial
  Probe
acaagtgaagatttggttccagaat

SEQ ID NO: 135137 - DNA, 25 bp, Artificial
  Probe
aaagacaagtgaagatttggttcca

SEQ ID NO: 135138 - DNA, 25 bp, Artificial
  Probe
atgaggagaaggtggaagaagaagg

SEQ ID NO: 135139 - DNA, 25 bp, Artificial
  Probe
gacaagtgaagatttggttccagaa

SEQ ID NO: 135140 - DNA, 25 bp, Artificial
  Probe
aagacaagtgaagatttggttccag

SEQ ID NO: 135141 - DNA, 25 bp, Artificial
  Probe
gaagaagaagggaatgaggaagagg

SEQ ID NO: 135142 - DNA, 25 bp, Artificial
  Probe
ggaagaagaagggaatgaggaagag

SEQ ID NO: 135143 - DNA, 25 bp, Artificial
  Probe
cggaaagacaagtgaagatttggtt

SEQ ID NO: 135144 - DNA, 25 bp, Artificial
  Probe
tttaatccttatttgaccagaaagc

SEQ ID NO: 135145 - DNA, 25 bp, Artificial
  Probe
aggagaacaacaaggataaacttcc

SEQ ID NO: 135146 - DNA, 25 bp, Artificial
  Probe
agacaagtgaagatttggttccaga

SEQ ID NO: 135147 - DNA, 25 bp, Artificial
  Probe
aagaagggaatgaggaagaggagaa

SEQ ID NO: 135148 - DNA, 25 bp, Artificial
  Probe
aagaagaagggaatgaggaagagga

SEQ ID NO: 135149 - DNA, 25 bp, Artificial
  Probe
caagtgaagatttggttccagaatc

SEQ ID NO: 135150 - DNA, 25 bp, Artificial
  Probe
cggtatcagaccttggaactagaga

SEQ ID NO: 135151 - DNA, 25 bp, Artificial
  Probe
tggaagaagaagggaatgaggaaga

SEQ ID NO: 135152 - DNA, 25 bp, Artificial
  Probe
gtggaagaagaagggaatgaggaag

SEQ ID NO: 135153 - DNA, 25 bp, Artificial
  Probe
gaaggtggaagaagaagggaatgag

SEQ ID NO: 135154 - DNA, 25 bp, Artificial
  Probe
gagaaggtggaagaagaagggaatg

SEQ ID NO: 135155 - DNA, 25 bp, Artificial
  Probe
tctctttaatccttatttgaccaga

SEQ ID NO: 135156 - DNA, 25 bp, Artificial
  Probe
agaagggaatgaggaagaggagaag

SEQ ID NO: 135157 - DNA, 25 bp, Artificial
  Probe
gaagaagggaatgaggaagaggaga

SEQ ID NO: 135158 - DNA, 25 bp, Artificial
  Probe
agaagaagggaatgaggaagaggag

SEQ ID NO: 135159 - DNA, 25 bp, Artificial
  Probe
agaaggtggaagaagaagggaatga

SEQ ID NO: 135160 - DNA, 25 bp, Artificial
  Probe
cgagatgaggagaaggtggaagaag

SEQ ID NO: 135161 - DNA, 25 bp, Artificial
  Probe
aagtgaagatttggttccagaatcg

SEQ ID NO: 135162 - DNA, 25 bp, Artificial
  Probe
acggaaagacaagtgaagatttggt

SEQ ID NO: 135163 - DNA, 25 bp, Artificial
  Probe
ttctctttaatccttatttgaccag

SEQ ID NO: 135164 - DNA, 25 bp, Artificial
  Probe
gaggaggaggaaaaggaagaaaata

SEQ ID NO: 135165 - DNA, 25 bp, Artificial
  Probe
ttggttccagaatcgaaggatgaag

SEQ ID NO: 135166 - DNA, 25 bp, Artificial
  Probe
ggaggaaaaggaagaaaataaggac

SEQ ID NO: 135167 - DNA, 25 bp, Artificial
  Probe
aggaggaaaaggaagaaaataagga

SEQ ID NO: 135168 - DNA, 25 bp, Artificial
  Probe
aggaggaggaaaaggaagaaaataa

SEQ ID NO: 135169 - DNA, 25 bp, Artificial
  Probe
gaggaggaaaaggaagaaaataagg

SEQ ID NO: 135170 - DNA, 25 bp, Artificial
  Probe
tatgtgagtgtgtaagtgtgtgtag

SEQ ID NO: 135171 - DNA, 25 bp, Artificial
  Probe
gtatgtgagtgtgtaagtgtgtgta

SEQ ID NO: 135172 - DNA, 25 bp, Artificial
  Probe
gtaggtgtatgtgagtgtgtaagtg

SEQ ID NO: 135173 - DNA, 25 bp, Artificial
  Probe
gtgtaggtgtatgtgagtgtgtaag

SEQ ID NO: 135174 - DNA, 25 bp, Artificial
  Probe
taggtgtatgtgagtgtgtaagtgt

SEQ ID NO: 135175 - DNA, 25 bp, Artificial
  Probe
tgtaggtgtatgtgagtgtgtaagt

SEQ ID NO: 135176 - DNA, 25 bp, Artificial
  Probe
tgtgtaggtgtatgtgagtgtgtaa

SEQ ID NO: 135177 - DNA, 25 bp, Artificial
  Probe
gtgtatgtgagtgtgtaagtgtgtg

SEQ ID NO: 135178 - DNA, 25 bp, Artificial
  Probe
gtgtgtaggtgtatgtgagtgtgta

SEQ ID NO: 135179 - DNA, 25 bp, Artificial
  Probe
tgtatgtgagtgtgtaagtgtgtgt

SEQ ID NO: 135180 - DNA, 25 bp, Artificial
  Probe
tgtgtgtgtgtatgtgtgtgtgtag

SEQ ID NO: 135181 - DNA, 25 bp, Artificial
  Probe
gagagtgtgtgtaggtgtatgtgag

SEQ ID NO: 135182 - DNA, 25 bp, Artificial
  Probe
atgtgagtgtgtaagtgtgtgtagg

SEQ ID NO: 135183 - DNA, 25 bp, Artificial
  Probe
aggtgtatgtgagtgtgtaagtgtg

SEQ ID NO: 135184 - DNA, 25 bp, Artificial
  Probe
tgtgtgagtgtgtgtgttagtgtag

SEQ ID NO: 135185 - DNA, 25 bp, Artificial
  Probe
ggtgtatgtgagtgtgtaagtgtgt

SEQ ID NO: 135186 - DNA, 25 bp, Artificial
  Probe
gttagtgtaggtgtgtgagagtgtg

SEQ ID NO: 135187 - DNA, 25 bp, Artificial
  Probe
gtgttagtgtaggtgtgtgagagtg

SEQ ID NO: 135188 - DNA, 25 bp, Artificial
  Probe
gtgtgttagtgtaggtgtgtgagag

SEQ ID NO: 135189 - DNA, 25 bp, Artificial
  Probe
gagtgtgtgtaggtgtatgtgagtg

SEQ ID NO: 135190 - DNA, 25 bp, Artificial
  Probe
gtgagagtgtgtgtaggtgtatgtg

SEQ ID NO: 135191 - DNA, 25 bp, Artificial
  Probe
gtgtgagagtgtgtgtaggtgtatg

SEQ ID NO: 135192 - DNA, 25 bp, Artificial
  Probe
agagtgtgtgtaggtgtatgtgagt

SEQ ID NO: 135193 - DNA, 25 bp, Artificial
  Probe
tgagagtgtgtgtaggtgtatgtga

SEQ ID NO: 135194 - DNA, 25 bp, Artificial
  Probe
gtgtgtgagtgtgtgtgttagtgta

SEQ ID NO: 135195 - DNA, 25 bp, Artificial
  Probe
ttagtgtaggtgtgtgagagtgtgt

SEQ ID NO: 135196 - DNA, 25 bp, Artificial
  Probe
tgttagtgtaggtgtgtgagagtgt

SEQ ID NO: 135197 - DNA, 25 bp, Artificial
  Probe
tgtgttagtgtaggtgtgtgagagt

SEQ ID NO: 135198 - DNA, 25 bp, Artificial
  Probe
tgtgagagtgtgtgtaggtgtatgt

SEQ ID NO: 135199 - DNA, 25 bp, Artificial
  Probe
tgtgtgagagtgtgtgtaggtgtat

SEQ ID NO: 135200 - DNA, 25 bp, Artificial
  Probe
gtaagtgtgtgtaggtgtgtgagtg

SEQ ID NO: 135201 - DNA, 25 bp, Artificial
  Probe
gtgtaagtgtgtgtaggtgtgtgag

SEQ ID NO: 135202 - DNA, 25 bp, Artificial
  Probe
gagtgtgtaagtgtgtgtaggtgtg

SEQ ID NO: 135203 - DNA, 25 bp, Artificial
  Probe
gtgagtgtgtaagtgtgtgtaggtg

SEQ ID NO: 135204 - DNA, 25 bp, Artificial
  Probe
gtgtgtgttagtgtaggtgtgtgag

SEQ ID NO: 135205 - DNA, 25 bp, Artificial
  Probe
gagtgtgtgtgttagtgtaggtgtg

SEQ ID NO: 135206 - DNA, 25 bp, Artificial
  Probe
gtgagtgtgtgtgttagtgtaggtg

SEQ ID NO: 135207 - DNA, 25 bp, Artificial
  Probe
gtgtgagtgtgtgtgttagtgtagg

SEQ ID NO: 135208 - DNA, 25 bp, Artificial
  Probe
gtgtgtgtaggtgtatgtgagtgtg

SEQ ID NO: 135209 - DNA, 25 bp, Artificial
  Probe
agtgtgtgtaggtgtatgtgagtgt

SEQ ID NO: 135210 - DNA, 25 bp, Artificial
  Probe
tgtgtgttagtgtaggtgtgtgaga

SEQ ID NO: 135211 - DNA, 25 bp, Artificial
  Probe
ttatatttacctcctgatggcatgg

SEQ ID NO: 135212 - DNA, 25 bp, Artificial
  Probe
taagtgtgtgtaggtgtgtgagtgt

SEQ ID NO: 135213 - DNA, 25 bp, Artificial
  Probe
tgtaagtgtgtgtaggtgtgtgagt

SEQ ID NO: 135214 - DNA, 25 bp, Artificial
  Probe
tgagtgtgtaagtgtgtgtaggtgt

SEQ ID NO: 135215 - DNA, 25 bp, Artificial
  Probe
gagtctgtatagaagatgagagagc

SEQ ID NO: 135216 - DNA, 25 bp, Artificial
  Probe
tcctgagtctgtatagaagatgaga

SEQ ID NO: 135217 - DNA, 25 bp, Artificial
  Probe
cctcctgagtctgtatagaagatga

SEQ ID NO: 135218 - DNA, 25 bp, Artificial
  Probe
cctgagtctgtatagaagatgagag

SEQ ID NO: 135219 - DNA, 25 bp, Artificial
  Probe
ctcctgagtctgtatagaagatgag

SEQ ID NO: 135220 - DNA, 25 bp, Artificial
  Probe
tgagtctgtatagaagatgagagag

SEQ ID NO: 135221 - DNA, 25 bp, Artificial
  Probe
ctgagtctgtatagaagatgagaga

SEQ ID NO: 135222 - DNA, 25 bp, Artificial
  Probe
gcctcctgagtctgtatagaagatg

SEQ ID NO: 135223 - DNA, 25 bp, Artificial
  Probe
cagcattgtcaccttctccatctat

SEQ ID NO: 135224 - DNA, 25 bp, Artificial
  Probe
agcattgtcaccttctccatctatg

SEQ ID NO: 135225 - DNA, 25 bp, Artificial
  Probe
cttgactgtaactctaaggagccaa

SEQ ID NO: 135226 - DNA, 25 bp, Artificial
  Probe
aacttgactgtaactctaaggagcc

SEQ ID NO: 135227 - DNA, 25 bp, Artificial
  Probe
agtctgtatagaagatgagagagct

SEQ ID NO: 135228 - DNA, 25 bp, Artificial
  Probe
gtatagaagatgagagagcttagca

SEQ ID NO: 135229 - DNA, 25 bp, Artificial
  Probe
tgtatagaagatgagagagcttagc

SEQ ID NO: 135230 - DNA, 25 bp, Artificial
  Probe
gtctgtatagaagatgagagagctt

SEQ ID NO: 135231 - DNA, 25 bp, Artificial
  Probe
gtcataccttatagcctctttgtca

SEQ ID NO: 135232 - DNA, 25 bp, Artificial
  Probe
tatagaagatgagagagcttagcaa

SEQ ID NO: 135233 - DNA, 25 bp, Artificial
  Probe
gaaggactacctggcatctacttac

SEQ ID NO: 135234 - DNA, 25 bp, Artificial
  Probe
ataccttatagcctctttgtcatca

SEQ ID NO: 135235 - DNA, 25 bp, Artificial
  Probe
tcataccttatagcctctttgtcat

SEQ ID NO: 135236 - DNA, 25 bp, Artificial
  Probe
aaactgcttaaacaaggtgattctg

SEQ ID NO: 135237 - DNA, 25 bp, Artificial
  Probe
cataccttatagcctctttgtcatc

SEQ ID NO: 135238 - DNA, 25 bp, Artificial
  Probe
tgggaactactggtttgacatattc

SEQ ID NO: 135239 - DNA, 25 bp, Artificial
  Probe
ctgggaactactggtttgacatatt

SEQ ID NO: 135240 - DNA, 25 bp, Artificial
  Probe
agaaacttgactgtaactctaagga

SEQ ID NO: 135241 - DNA, 25 bp, Artificial
  Probe
tgaaggactacctggcatctactta

SEQ ID NO: 135242 - DNA, 25 bp, Artificial
  Probe
taaggagccaaacaagcaattacat

SEQ ID NO: 135243 - DNA, 25 bp, Artificial
  Probe
atgctgtcattgtgtctgtcatcaa

SEQ ID NO: 135244 - DNA, 25 bp, Artificial
  Probe
taccttatagcctctttgtcatcaa

SEQ ID NO: 135245 - DNA, 25 bp, Artificial
  Probe
gggaactactggtttgacatattca

SEQ ID NO: 135246 - DNA, 25 bp, Artificial
  Probe
acttgactgtaactctaaggagcca

SEQ ID NO: 135247 - DNA, 25 bp, Artificial
  Probe
cctctttatcttctacctgagtgac

SEQ ID NO: 135248 - DNA, 25 bp, Artificial
  Probe
tctaaggagccaaacaagcaattac

SEQ ID NO: 135249 - DNA, 25 bp, Artificial
  Probe
aaacttgactgtaactctaaggagc

SEQ ID NO: 135250 - DNA, 25 bp, Artificial
  Probe
tctggtcagtgctctacttcttcat

SEQ ID NO: 135251 - DNA, 25 bp, Artificial
  Probe
ctaaggagccaaacaagcaattaca

SEQ ID NO: 135252 - DNA, 25 bp, Artificial
  Probe
tctgtatagaagatgagagagctta

SEQ ID NO: 135253 - DNA, 25 bp, Artificial
  Probe
ttacccaaacaagtacagtgaagtg

SEQ ID NO: 135254 - DNA, 25 bp, Artificial
  Probe
gaaacttgactgtaactctaaggag

SEQ ID NO: 135255 - DNA, 25 bp, Artificial
  Probe
cttacccaaacaagtacagtgaagt

SEQ ID NO: 135256 - DNA, 25 bp, Artificial
  Probe
aggagccaaacaagcaattacattt

SEQ ID NO: 135257 - DNA, 25 bp, Artificial
  Probe
aaggagccaaacaagcaattacatt

SEQ ID NO: 135258 - DNA, 25 bp, Artificial
  Probe
ctgtatagaagatgagagagcttag

SEQ ID NO: 135259 - DNA, 25 bp, Artificial
  Probe
gcctctttatcttctacctgagtga

SEQ ID NO: 135260 - DNA, 25 bp, Artificial
  Probe
aggacaattcaaggtaacatagagt

SEQ ID NO: 135261 - DNA, 25 bp, Artificial
  Probe
agaggacaattcaaggtaacataga

SEQ ID NO: 135262 - DNA, 25 bp, Artificial
  Probe
gaggacaattcaaggtaacatagag

SEQ ID NO: 135263 - DNA, 25 bp, Artificial
  Probe
aagaggacaattcaaggtaacatag

SEQ ID NO: 135264 - DNA, 25 bp, Artificial
  Probe
ggacaattcaaggtaacatagagta

SEQ ID NO: 135265 - DNA, 25 bp, Artificial
  Probe
aattcaaggtaacatagagtacagc

SEQ ID NO: 135266 - DNA, 25 bp, Artificial
  Probe
attcaaggtaacatagagtacagct

SEQ ID NO: 135267 - DNA, 25 bp, Artificial
  Probe
acaattcaaggtaacatagagtaca

SEQ ID NO: 135268 - DNA, 25 bp, Artificial
  Probe
caattcaaggtaacatagagtacag

SEQ ID NO: 135269 - DNA, 25 bp, Artificial
  Probe
gacaattcaaggtaacatagagtac

SEQ ID NO: 135270 - DNA, 25 bp, Artificial
  Probe
cacgaatgaatgtgagatcaccaag

SEQ ID NO: 135271 - DNA, 25 bp, Artificial
  Probe
ccacgaatgaatgtgagatcaccaa

SEQ ID NO: 135272 - DNA, 25 bp, Artificial
  Probe
acgaatgaatgtgagatcaccaagc

SEQ ID NO: 135273 - DNA, 25 bp, Artificial
  Probe
cgaatgaatgtgagatcaccaagcg

SEQ ID NO: 135274 - DNA, 25 bp, Artificial
  Probe
gaatgaatgtgagatcaccaagcgc

SEQ ID NO: 135275 - DNA, 25 bp, Artificial
  Probe
ttccttctctctctctctctctctc

SEQ ID NO: 135276 - DNA, 25 bp, Artificial
  Probe
ccttctctctctctctctctctctc

SEQ ID NO: 135277 - DNA, 25 bp, Artificial
  Probe
tccttctctctctctctctctctct

SEQ ID NO: 135278 - DNA, 25 bp, Artificial
  Probe
tttctttccttctctctctctctct

SEQ ID NO: 135279 - DNA, 25 bp, Artificial
  Probe
ctttctttccttctctctctctctc

SEQ ID NO: 135280 - DNA, 25 bp, Artificial
  Probe
tctttctttccttctctctctctct

SEQ ID NO: 135281 - DNA, 25 bp, Artificial
  Probe
gtctttctttccttctctctctctc

SEQ ID NO: 135282 - DNA, 25 bp, Artificial
  Probe
tgaaatgttagataggctttggagt

SEQ ID NO: 135283 - DNA, 25 bp, Artificial
  Probe
gtgcttgtgtgaaatgttagatagg

SEQ ID NO: 135284 - DNA, 25 bp, Artificial
  Probe
gtgtgcttgtgtgaaatgttagata

SEQ ID NO: 135285 - DNA, 25 bp, Artificial
  Probe
agtctttctttccttctctctctct

SEQ ID NO: 135286 - DNA, 25 bp, Artificial
  Probe
cagtctttctttccttctctctctc

SEQ ID NO: 135287 - DNA, 25 bp, Artificial
  Probe
gtgaaatgttagataggctttggag

SEQ ID NO: 135288 - DNA, 25 bp, Artificial
  Probe
tgtgaaatgttagataggctttgga

SEQ ID NO: 135289 - DNA, 25 bp, Artificial
  Probe
gtgtgaaatgttagataggctttgg

SEQ ID NO: 135290 - DNA, 25 bp, Artificial
  Probe
gaggagagagaagcagatttatcag

SEQ ID NO: 135291 - DNA, 25 bp, Artificial
  Probe
tgtgtgaaatgttagataggctttg

SEQ ID NO: 135292 - DNA, 25 bp, Artificial
  Probe
tgtgcttgtgtgaaatgttagatag

SEQ ID NO: 135293 - DNA, 25 bp, Artificial
  Probe
ttctttccttctctctctctctctc

SEQ ID NO: 135294 - DNA, 25 bp, Artificial
  Probe
gagagagaagcagatttatcaggtc

SEQ ID NO: 135295 - DNA, 25 bp, Artificial
  Probe
ctatatgtctgtttgtgtgcttgtg

SEQ ID NO: 135296 - DNA, 25 bp, Artificial
  Probe
cttgtgtgaaatgttagataggctt

SEQ ID NO: 135297 - DNA, 25 bp, Artificial
  Probe
ctttccttctctctctctctctctc

SEQ ID NO: 135298 - DNA, 25 bp, Artificial
  Probe
tttgtgtgcttgtgtgaaatgttag

SEQ ID NO: 135299 - DNA, 25 bp, Artificial
  Probe
tatatgtctgtttgtgtgcttgtgt

SEQ ID NO: 135300 - DNA, 25 bp, Artificial
  Probe
tgttagataggctttggagtagaag

SEQ ID NO: 135301 - DNA, 25 bp, Artificial
  Probe
atgttagataggctttggagtagaa

SEQ ID NO: 135302 - DNA, 25 bp, Artificial
  Probe
aatgttagataggctttggagtaga

SEQ ID NO: 135303 - DNA, 25 bp, Artificial
  Probe
tttccttctctctctctctctctct

SEQ ID NO: 135304 - DNA, 25 bp, Artificial
  Probe
tctttccttctctctctctctctct

SEQ ID NO: 135305 - DNA, 25 bp, Artificial
  Probe
ttgtgtgaaatgttagataggcttt

SEQ ID NO: 135306 - DNA, 25 bp, Artificial
  Probe
gttagataggctttggagtagaaga

SEQ ID NO: 135307 - DNA, 25 bp, Artificial
  Probe
agagaagcagatttatcaggtctac

SEQ ID NO: 135308 - DNA, 25 bp, Artificial
  Probe
gtttgtgtgcttgtgtgaaatgtta

SEQ ID NO: 135309 - DNA, 25 bp, Artificial
  Probe
gagagaagcagatttatcaggtcta

SEQ ID NO: 135310 - DNA, 25 bp, Artificial
  Probe
ttagataggctttggagtagaagag

SEQ ID NO: 135311 - DNA, 25 bp, Artificial
  Probe
gcttgtgtgaaatgttagataggct

SEQ ID NO: 135312 - DNA, 25 bp, Artificial
  Probe
agagagaagcagatttatcaggtct

SEQ ID NO: 135313 - DNA, 25 bp, Artificial
  Probe
aggagagagaagcagatttatcagg

SEQ ID NO: 135314 - DNA, 25 bp, Artificial
  Probe
tgtgtgcttgtgtgaaatgttagat

SEQ ID NO: 135315 - DNA, 25 bp, Artificial
  Probe
tgcttgtgtgaaatgttagataggc

SEQ ID NO: 135316 - DNA, 25 bp, Artificial
  Probe
ttgtgtgcttgtgtgaaatgttaga

SEQ ID NO: 135317 - DNA, 25 bp, Artificial
  Probe
gagaagcagatttatcaggtctacc

SEQ ID NO: 135318 - DNA, 25 bp, Artificial
  Probe
ggagagagaagcagatttatcaggt

SEQ ID NO: 135319 - DNA, 25 bp, Artificial
  Probe
gaaatgttagataggctttggagta

SEQ ID NO: 135320 - DNA, 25 bp, Artificial
  Probe
agcaggttcacacttctataactag

SEQ ID NO: 135321 - DNA, 25 bp, Artificial
  Probe
tagcaggttcacacttctataacta

SEQ ID NO: 135322 - DNA, 25 bp, Artificial
  Probe
ggttcacacttctataactagcctg

SEQ ID NO: 135323 - DNA, 25 bp, Artificial
  Probe
caggttcacacttctataactagcc

SEQ ID NO: 135324 - DNA, 25 bp, Artificial
  Probe
ttcacacttctataactagcctgct

SEQ ID NO: 135325 - DNA, 25 bp, Artificial
  Probe
gcaatagcaggttcacacttctata

SEQ ID NO: 135326 - DNA, 25 bp, Artificial
  Probe
gttcacacttctataactagcctgc

SEQ ID NO: 135327 - DNA, 25 bp, Artificial
  Probe
gcaggttcacacttctataactagc

SEQ ID NO: 135328 - DNA, 25 bp, Artificial
  Probe
atagcaggttcacacttctataact

SEQ ID NO: 135329 - DNA, 25 bp, Artificial
  Probe
gcaacagattgtaatccagtcttct

SEQ ID NO: 135330 - DNA, 25 bp, Artificial
  Probe
agcaacagattgtaatccagtcttc

SEQ ID NO: 135331 - DNA, 25 bp, Artificial
  Probe
gagcaacagattgtaatccagtctt

SEQ ID NO: 135332 - DNA, 25 bp, Artificial
  Probe
tcacacttctataactagcctgctg

SEQ ID NO: 135333 - DNA, 25 bp, Artificial
  Probe
aatagcaggttcacacttctataac

SEQ ID NO: 135334 - DNA, 25 bp, Artificial
  Probe
caatagcaggttcacacttctataa

SEQ ID NO: 135335 - DNA, 25 bp, Artificial
  Probe
aggttcacacttctataactagcct

SEQ ID NO: 135336 - DNA, 25 bp, Artificial
  Probe
acacttctataactagcctgctgtt

SEQ ID NO: 135337 - DNA, 25 bp, Artificial
  Probe
agcaatagcaggttcacacttctat

SEQ ID NO: 135338 - DNA, 25 bp, Artificial
  Probe
tgagcaacagattgtaatccagtct

SEQ ID NO: 135339 - DNA, 25 bp, Artificial
  Probe
gtgagcaacagattgtaatccagtc

SEQ ID NO: 135340 - DNA, 25 bp, Artificial
  Probe
gtaaatctggtttgtgctgaagtag

SEQ ID NO: 135341 - DNA, 25 bp, Artificial
  Probe
cagcaatagcaggttcacacttcta

SEQ ID NO: 135342 - DNA, 25 bp, Artificial
  Probe
attaggtaaatctggtttgtgctga

SEQ ID NO: 135343 - DNA, 25 bp, Artificial
  Probe
gtaataaagtcagcaatagcaggtt

SEQ ID NO: 135344 - DNA, 25 bp, Artificial
  Probe
ttaggtaaatctggtttgtgctgaa

SEQ ID NO: 135345 - DNA, 25 bp, Artificial
  Probe
aataaagtcagcaatagcaggttca

SEQ ID NO: 135346 - DNA, 25 bp, Artificial
  Probe
taataaagtcagcaatagcaggttc

SEQ ID NO: 135347 - DNA, 25 bp, Artificial
  Probe
atggtaataaagtcagcaatagcag

SEQ ID NO: 135348 - DNA, 25 bp, Artificial
  Probe
ggtaataaagtcagcaatagcaggt

SEQ ID NO: 135349 - DNA, 25 bp, Artificial
  Probe
tggtaataaagtcagcaatagcagg

SEQ ID NO: 135350 - DNA, 25 bp, Artificial
  Probe
tattaggtaaatctggtttgtgctg

SEQ ID NO: 135351 - DNA, 25 bp, Artificial
  Probe
agtagctcaaggactatgactgtac

SEQ ID NO: 135352 - DNA, 25 bp, Artificial
  Probe
taggtaaatctggtttgtgctgaag

SEQ ID NO: 135353 - DNA, 25 bp, Artificial
  Probe
gaacgtgttgaagcagttaatatgg

SEQ ID NO: 135354 - DNA, 25 bp, Artificial
  Probe
ggaacgtgttgaagcagttaatatg

SEQ ID NO: 135355 - DNA, 25 bp, Artificial
  Probe
aggaacgtgttgaagcagttaatat

SEQ ID NO: 135356 - DNA, 25 bp, Artificial
  Probe
cacacttctataactagcctgctgt

SEQ ID NO: 135357 - DNA, 25 bp, Artificial
  Probe
aatggtaataaagtcagcaatagca

SEQ ID NO: 135358 - DNA, 25 bp, Artificial
  Probe
tctggtggattaagcaaagatgata

SEQ ID NO: 135359 - DNA, 25 bp, Artificial
  Probe
ggtaaatctggtttgtgctgaagta

SEQ ID NO: 135360 - DNA, 25 bp, Artificial
  Probe
ttctggtggattaagcaaagatgat

SEQ ID NO: 135361 - DNA, 25 bp, Artificial
  Probe
aaggaacgtgttgaagcagttaata

SEQ ID NO: 135362 - DNA, 25 bp, Artificial
  Probe
ctggtggattaagcaaagatgatat

SEQ ID NO: 135363 - DNA, 25 bp, Artificial
  Probe
ataaagtcagcaatagcaggttcac

SEQ ID NO: 135364 - DNA, 25 bp, Artificial
  Probe
aggcatcattgaaactctttgaaat

SEQ ID NO: 135365 - DNA, 25 bp, Artificial
  Probe
gtgatgatgaagatgtctgtagtga

SEQ ID NO: 135366 - DNA, 25 bp, Artificial
  Probe
gataggtgatgatgaagatgtctgt

SEQ ID NO: 135367 - DNA, 25 bp, Artificial
  Probe
tgataggtgatgatgaagatgtctg

SEQ ID NO: 135368 - DNA, 25 bp, Artificial
  Probe
taggtgatgatgaagatgtctgtag

SEQ ID NO: 135369 - DNA, 25 bp, Artificial
  Probe
gccaagaattaagaccatagagact

SEQ ID NO: 135370 - DNA, 25 bp, Artificial
  Probe
tgatgatgaagatgtctgtagtgat

SEQ ID NO: 135371 - DNA, 25 bp, Artificial
  Probe
tgccaagaattaagaccatagagac

SEQ ID NO: 135372 - DNA, 25 bp, Artificial
  Probe
ttgccaagaattaagaccatagaga

SEQ ID NO: 135373 - DNA, 25 bp, Artificial
  Probe
atgataggtgatgatgaagatgtct

SEQ ID NO: 135374 - DNA, 25 bp, Artificial
  Probe
ggtgatgatgaagatgtctgtagtg

SEQ ID NO: 135375 - DNA, 25 bp, Artificial
  Probe
aggtgatgatgaagatgtctgtagt

SEQ ID NO: 135376 - DNA, 25 bp, Artificial
  Probe
gaatcctgaagaacaagacctctac

SEQ ID NO: 135377 - DNA, 25 bp, Artificial
  Probe
ataggtgatgatgaagatgtctgta

SEQ ID NO: 135378 - DNA, 25 bp, Artificial
  Probe
attgccaagaattaagaccatagag

SEQ ID NO: 135379 - DNA, 25 bp, Artificial
  Probe
aagactacggcttgatgaagataga

SEQ ID NO: 135380 - DNA, 25 bp, Artificial
  Probe
ccaagaattaagaccatagagactg

SEQ ID NO: 135381 - DNA, 25 bp, Artificial
  Probe
gatgatgaagatgtctgtagtgatt

SEQ ID NO: 135382 - DNA, 25 bp, Artificial
  Probe
acacaccagttatatattgccaaga

SEQ ID NO: 135383 - DNA, 25 bp, Artificial
  Probe
atgatgaagatgtctgtagtgattc

SEQ ID NO: 135384 - DNA, 25 bp, Artificial
  Probe
agaattaagaccatagagactgagt

SEQ ID NO: 135385 - DNA, 25 bp, Artificial
  Probe
cacaccagttatatattgccaagaa

SEQ ID NO: 135386 - DNA, 25 bp, Artificial
  Probe
taagaccatagagactgagtagatg

SEQ ID NO: 135387 - DNA, 25 bp, Artificial
  Probe
agactacggcttgatgaagatagac

SEQ ID NO: 135388 - DNA, 25 bp, Artificial
  Probe
ggaatcctgaagaacaagacctcta

SEQ ID NO: 135389 - DNA, 25 bp, Artificial
  Probe
tacacaccagttatatattgccaag

SEQ ID NO: 135390 - DNA, 25 bp, Artificial
  Probe
tatgataggtgatgatgaagatgtc

SEQ ID NO: 135391 - DNA, 25 bp, Artificial
  Probe
cagacactccataccacaatatgat

SEQ ID NO: 135392 - DNA, 25 bp, Artificial
  Probe
acactccataccacaatatgatagg

SEQ ID NO: 135393 - DNA, 25 bp, Artificial
  Probe
gacctacatgatgatgacgaagatg

SEQ ID NO: 135394 - DNA, 25 bp, Artificial
  Probe
agacctacatgatgatgacgaagat

SEQ ID NO: 135395 - DNA, 25 bp, Artificial
  Probe
ctgaagaacaagacctctacgactt

SEQ ID NO: 135396 - DNA, 25 bp, Artificial
  Probe
aatcctgaagaacaagacctctacg

SEQ ID NO: 135397 - DNA, 25 bp, Artificial
  Probe
caagaattaagaccatagagactga

SEQ ID NO: 135398 - DNA, 25 bp, Artificial
  Probe
acaccagttatatattgccaagaat

SEQ ID NO: 135399 - DNA, 25 bp, Artificial
  Probe
ttaagaccatagagactgagtagat

SEQ ID NO: 135400 - DNA, 25 bp, Artificial
  Probe
attaagaccatagagactgagtaga

SEQ ID NO: 135401 - DNA, 25 bp, Artificial
  Probe
aagacctacatgatgatgacgaaga

SEQ ID NO: 135402 - DNA, 25 bp, Artificial
  Probe
tattgccaagaattaagaccataga

SEQ ID NO: 135403 - DNA, 25 bp, Artificial
  Probe
aagaattaagaccatagagactgag

SEQ ID NO: 135404 - DNA, 25 bp, Artificial
  Probe
agacactccataccacaatatgata

SEQ ID NO: 135405 - DNA, 25 bp, Artificial
  Probe
atacacaccagttatatattgccaa

SEQ ID NO: 135406 - DNA, 25 bp, Artificial
  Probe
actccataccacaatatgataggtg

SEQ ID NO: 135407 - DNA, 25 bp, Artificial
  Probe
cactccataccacaatatgataggt

SEQ ID NO: 135408 - DNA, 25 bp, Artificial
  Probe
gacactccataccacaatatgatag

SEQ ID NO: 135409 - DNA, 25 bp, Artificial
  Probe
ctccataccacaatatgataggtga

SEQ ID NO: 135410 - DNA, 25 bp, Artificial
  Probe
agactgaggacctagacaaggactt

SEQ ID NO: 135411 - DNA, 25 bp, Artificial
  Probe
gactgaggacctagacaaggacttg

SEQ ID NO: 135412 - DNA, 25 bp, Artificial
  Probe
gagactgaggacctagacaaggact

SEQ ID NO: 135413 - DNA, 25 bp, Artificial
  Probe
agtgtttgaagattacgtggagctg

SEQ ID NO: 135414 - DNA, 25 bp, Artificial
  Probe
cagtgtttgaagattacgtggagct

SEQ ID NO: 135415 - DNA, 25 bp, Artificial
  Probe
agcagtgtttgaagattacgtggag

SEQ ID NO: 135416 - DNA, 25 bp, Artificial
  Probe
cagcagtgtttgaagattacgtgga

SEQ ID NO: 135417 - DNA, 25 bp, Artificial
  Probe
ttttcaagtccctaaagcatcagga

SEQ ID NO: 135418 - DNA, 25 bp, Artificial
  Probe
accagcagtgtttgaagattacgtg

SEQ ID NO: 135419 - DNA, 25 bp, Artificial
  Probe
caccagcagtgtttgaagattacgt

SEQ ID NO: 135420 - DNA, 25 bp, Artificial
  Probe
gcaccagcagtgtttgaagattacg

SEQ ID NO: 135421 - DNA, 25 bp, Artificial
  Probe
ttgcaccagcagtgtttgaagatta

SEQ ID NO: 135422 - DNA, 25 bp, Artificial
  Probe
gtgtttgaagattacgtggagctgc

SEQ ID NO: 135423 - DNA, 25 bp, Artificial
  Probe
gcagtgtttgaagattacgtggagc

SEQ ID NO: 135424 - DNA, 25 bp, Artificial
  Probe
tctacctctctgggtccctctctag

SEQ ID NO: 135425 - DNA, 25 bp, Artificial
  Probe
ccagcagtgtttgaagattacgtgg

SEQ ID NO: 135426 - DNA, 25 bp, Artificial
  Probe
actgaggacctagacaaggacttgt

SEQ ID NO: 135427 - DNA, 25 bp, Artificial
  Probe
tgcaccagcagtgtttgaagattac

SEQ ID NO: 135428 - DNA, 25 bp, Artificial
  Probe
gtctacctctctgggtccctctcta

SEQ ID NO: 135429 - DNA, 25 bp, Artificial
  Probe
gtcccttctgaaagtccagctcttg

SEQ ID NO: 135430 - DNA, 25 bp, Artificial
  Probe
tttgaagattacgtggagctgcctc

SEQ ID NO: 135431 - DNA, 25 bp, Artificial
  Probe
ctaaagcatcaggactacctgtcac

SEQ ID NO: 135432 - DNA, 25 bp, Artificial
  Probe
cttgcaccagcagtgtttgaagatt

SEQ ID NO: 135433 - DNA, 25 bp, Artificial
  Probe
taaagcatcaggactacctgtcact

SEQ ID NO: 135434 - DNA, 25 bp, Artificial
  Probe
tttcaagtccctaaagcatcaggac

SEQ ID NO: 135435 - DNA, 25 bp, Artificial
  Probe
ctacctctctgggtccctctctaga

SEQ ID NO: 135436 - DNA, 25 bp, Artificial
  Probe
cctaaagcatcaggactacctgtca

SEQ ID NO: 135437 - DNA, 25 bp, Artificial
  Probe
ccctaaagcatcaggactacctgtc

SEQ ID NO: 135438 - DNA, 25 bp, Artificial
  Probe
aaagcatcaggactacctgtcactg

SEQ ID NO: 135439 - DNA, 25 bp, Artificial
  Probe
gtccctaaagcatcaggactacctg

SEQ ID NO: 135440 - DNA, 25 bp, Artificial
  Probe
aaaagcttccctaccaacccatacc

SEQ ID NO: 135441 - DNA, 25 bp, Artificial
  Probe
tccctaaagcatcaggactacctgt

SEQ ID NO: 135442 - DNA, 25 bp, Artificial
  Probe
gtgtgcctgctgaataacttctatc

SEQ ID NO: 135443 - DNA, 25 bp, Artificial
  Probe
tgtgtgcctgctgaataacttctat

SEQ ID NO: 135444 - DNA, 25 bp, Artificial
  Probe
ttgtgtgcctgctgaataacttcta

SEQ ID NO: 135445 - DNA, 25 bp, Artificial
  Probe
tgtgcctgctgaataacttctatcc

SEQ ID NO: 135446 - DNA, 25 bp, Artificial
  Probe
aaagcagactacgagaaacacaaag

SEQ ID NO: 135447 - DNA, 25 bp, Artificial
  Probe
tgaataacttctatcccagagaggc

SEQ ID NO: 135448 - DNA, 25 bp, Artificial
  Probe
caaagcagactacgagaaacacaaa

SEQ ID NO: 135449 - DNA, 25 bp, Artificial
  Probe
gctgaataacttctatcccagagag

SEQ ID NO: 135450 - DNA, 25 bp, Artificial
  Probe
ctgaataacttctatcccagagagg

SEQ ID NO: 135451 - DNA, 25 bp, Artificial
  Probe
ctgctgaataacttctatcccagag

SEQ ID NO: 135452 - DNA, 25 bp, Artificial
  Probe
tgctgaataacttctatcccagaga

SEQ ID NO: 135453 - DNA, 25 bp, Artificial
  Probe
cctgctgaataacttctatcccaga

SEQ ID NO: 135454 - DNA, 25 bp, Artificial
  Probe
gttgtgtgcctgctgaataacttct

SEQ ID NO: 135455 - DNA, 25 bp, Artificial
  Probe
atctgatgagcagttgaaatctgga

SEQ ID NO: 135456 - DNA, 25 bp, Artificial
  Probe
tgttgtgtgcctgctgaataacttc

SEQ ID NO: 135457 - DNA, 25 bp, Artificial
  Probe
ctgttgtgtgcctgctgaataactt

SEQ ID NO: 135458 - DNA, 25 bp, Artificial
  Probe
ctgatgagcagttgaaatctggaac

SEQ ID NO: 135459 - DNA, 25 bp, Artificial
  Probe
aagcagactacgagaaacacaaagt

SEQ ID NO: 135460 - DNA, 25 bp, Artificial
  Probe
tctgatgagcagttgaaatctggaa

SEQ ID NO: 135461 - DNA, 25 bp, Artificial
  Probe
catctgatgagcagttgaaatctgg

SEQ ID NO: 135462 - DNA, 25 bp, Artificial
  Probe
ccatctgatgagcagttgaaatctg

SEQ ID NO: 135463 - DNA, 25 bp, Artificial
  Probe
gtgcctgctgaataacttctatccc

SEQ ID NO: 135464 - DNA, 25 bp, Artificial
  Probe
ctctgttgtgtgcctgctgaataac

SEQ ID NO: 135465 - DNA, 25 bp, Artificial
  Probe
gcctgctgaataacttctatcccag

SEQ ID NO: 135466 - DNA, 25 bp, Artificial
  Probe
ttgaaatctggaactgcctctgttg

SEQ ID NO: 135467 - DNA, 25 bp, Artificial
  Probe
gttgaaatctggaactgcctctgtt

SEQ ID NO: 135468 - DNA, 25 bp, Artificial
  Probe
tgcctgctgaataacttctatccca

SEQ ID NO: 135469 - DNA, 25 bp, Artificial
  Probe
caaggtggaaatcaaacgtactgtg

SEQ ID NO: 135470 - DNA, 25 bp, Artificial
  Probe
tctgttgtgtgcctgctgaataact

SEQ ID NO: 135471 - DNA, 25 bp, Artificial
  Probe
aataaagtgaatctttgcacctgtg

SEQ ID NO: 135472 - DNA, 25 bp, Artificial
  Probe
aaataaagtgaatctttgcacctgt

SEQ ID NO: 135473 - DNA, 25 bp, Artificial
  Probe
gcaaagcagactacgagaaacacaa

SEQ ID NO: 135474 - DNA, 25 bp, Artificial
  Probe
gagcaaagcagactacgagaaacac

SEQ ID NO: 135475 - DNA, 25 bp, Artificial
  Probe
gccatctgatgagcagttgaaatct

SEQ ID NO: 135476 - DNA, 25 bp, Artificial
  Probe
gaaatctggaactgcctctgttgtg

SEQ ID NO: 135477 - DNA, 25 bp, Artificial
  Probe
gaataacttctatcccagagaggcc

SEQ ID NO: 135478 - DNA, 25 bp, Artificial
  Probe
taaataaagtgaatctttgcacctg

SEQ ID NO: 135479 - DNA, 25 bp, Artificial
  Probe
tgatgagcagttgaaatctggaact

SEQ ID NO: 135480 - DNA, 25 bp, Artificial
  Probe
ctgagcaaagcagactacgagaaac

SEQ ID NO: 135481 - DNA, 25 bp, Artificial
  Probe
aaggtggaaatcaaacgtactgtgg

SEQ ID NO: 135482 - DNA, 25 bp, Artificial
  Probe
tgagcaaagcagactacgagaaaca

SEQ ID NO: 135483 - DNA, 25 bp, Artificial
  Probe
tgaaatctggaactgcctctgttgt

SEQ ID NO: 135484 - DNA, 25 bp, Artificial
  Probe
ataacttctatcccagagaggccaa

SEQ ID NO: 135485 - DNA, 25 bp, Artificial
  Probe
aataacttctatcccagagaggcca

SEQ ID NO: 135486 - DNA, 25 bp, Artificial
  Probe
taacttctatcccagagaggccaaa

SEQ ID NO: 135487 - DNA, 25 bp, Artificial
  Probe
cctattacatcatcaaccttggcta

SEQ ID NO: 135488 - DNA, 25 bp, Artificial
  Probe
cttgcctattacatcatcaaccttg

SEQ ID NO: 135489 - DNA, 25 bp, Artificial
  Probe
tcttgcctattacatcatcaacctt

SEQ ID NO: 135490 - DNA, 25 bp, Artificial
  Probe
gtcttgcctattacatcatcaacct

SEQ ID NO: 135491 - DNA, 25 bp, Artificial
  Probe
ctattacatcatcaaccttggctat

SEQ ID NO: 135492 - DNA, 25 bp, Artificial
  Probe
tattacatcatcaaccttggctatg

SEQ ID NO: 135493 - DNA, 25 bp, Artificial
  Probe
ttgcctattacatcatcaaccttgg

SEQ ID NO: 135494 - DNA, 25 bp, Artificial
  Probe
actgtcttgcctattacatcatcaa

SEQ ID NO: 135495 - DNA, 25 bp, Artificial
  Probe
ctgtcttgcctattacatcatcaac

SEQ ID NO: 135496 - DNA, 25 bp, Artificial
  Probe
gactgtcttgcctattacatcatca

SEQ ID NO: 135497 - DNA, 25 bp, Artificial
  Probe
tgtcttgcctattacatcatcaacc

SEQ ID NO: 135498 - DNA, 25 bp, Artificial
  Probe
ggactgtcttgcctattacatcatc

SEQ ID NO: 135499 - DNA, 25 bp, Artificial
  Probe
ctcttcctggtgatctctcttcttc

SEQ ID NO: 135500 - DNA, 25 bp, Artificial
  Probe
tatacttcattgctggacaggatgg

SEQ ID NO: 135501 - DNA, 25 bp, Artificial
  Probe
gaaggactgtcttgcctattacatc

SEQ ID NO: 135502 - DNA, 25 bp, Artificial
  Probe
gatgaaggactgtcttgcctattac

SEQ ID NO: 135503 - DNA, 25 bp, Artificial
  Probe
aaccttggctatgatctacctgatg

SEQ ID NO: 135504 - DNA, 25 bp, Artificial
  Probe
caaccttggctatgatctacctgat

SEQ ID NO: 135505 - DNA, 25 bp, Artificial
  Probe
tgatgaaggactgtcttgcctatta

SEQ ID NO: 135506 - DNA, 25 bp, Artificial
  Probe
aggactgtcttgcctattacatcat

SEQ ID NO: 135507 - DNA, 25 bp, Artificial
  Probe
aaggactgtcttgcctattacatca

SEQ ID NO: 135508 - DNA, 25 bp, Artificial
  Probe
tgaaggactgtcttgcctattacat

SEQ ID NO: 135509 - DNA, 25 bp, Artificial
  Probe
atgaaggactgtcttgcctattaca

SEQ ID NO: 135510 - DNA, 25 bp, Artificial
  Probe
tactaaggaactctcgacacttcta

SEQ ID NO: 135511 - DNA, 25 bp, Artificial
  Probe
ttcctggtgatctctcttcttcaag

SEQ ID NO: 135512 - DNA, 25 bp, Artificial
  Probe
cttcctggtgatctctcttcttcaa

SEQ ID NO: 135513 - DNA, 25 bp, Artificial
  Probe
gaaaccaagtgagaaagaagtgaac

SEQ ID NO: 135514 - DNA, 25 bp, Artificial
  Probe
ctaaggaactctcgacacttctact

SEQ ID NO: 135515 - DNA, 25 bp, Artificial
  Probe
ctactaaggaactctcgacacttct

SEQ ID NO: 135516 - DNA, 25 bp, Artificial
  Probe
aagtgtactacagactgtgtgagaa

SEQ ID NO: 135517 - DNA, 25 bp, Artificial
  Probe
gctctgtacttctgacttgtgactt

SEQ ID NO: 135518 - DNA, 25 bp, Artificial
  Probe
taaggaactctcgacacttctactg

SEQ ID NO: 135519 - DNA, 25 bp, Artificial
  Probe
actaaggaactctcgacacttctac

SEQ ID NO: 135520 - DNA, 25 bp, Artificial
  Probe
cttgctgttggtgtatacttcattg

SEQ ID NO: 135521 - DNA, 25 bp, Artificial
  Probe
ttaaagatgggcacagaataagtcc

SEQ ID NO: 135522 - DNA, 25 bp, Artificial
  Probe
ggaaaccaagtgagaaagaagtgaa

SEQ ID NO: 135523 - DNA, 25 bp, Artificial
  Probe
aaggaaaccaagtgagaaagaagtg

SEQ ID NO: 135524 - DNA, 25 bp, Artificial
  Probe
caaggaaaccaagtgagaaagaagt

SEQ ID NO: 135525 - DNA, 25 bp, Artificial
  Probe
taaagatgggcacagaataagtcct

SEQ ID NO: 135526 - DNA, 25 bp, Artificial
  Probe
gtgtactacagactgtgtgagaact

SEQ ID NO: 135527 - DNA, 25 bp, Artificial
  Probe
agtgtactacagactgtgtgagaac

SEQ ID NO: 135528 - DNA, 25 bp, Artificial
  Probe
caagtgtactacagactgtgtgaga

SEQ ID NO: 135529 - DNA, 25 bp, Artificial
  Probe
tcttcctggtgatctctcttcttca

SEQ ID NO: 135530 - DNA, 25 bp, Artificial
  Probe
ccttgctgttggtgtatacttcatt

SEQ ID NO: 135531 - DNA, 25 bp, Artificial
  Probe
aaaccaagtgagaaagaagtgaact

SEQ ID NO: 135532 - DNA, 25 bp, Artificial
  Probe
aggaaggcaagcaatcagaatactt

SEQ ID NO: 135533 - DNA, 25 bp, Artificial
  Probe
caggaaggcaagcaatcagaatact

SEQ ID NO: 135534 - DNA, 25 bp, Artificial
  Probe
aaggcaagcaatcagaatacttcta

SEQ ID NO: 135535 - DNA, 25 bp, Artificial
  Probe
aggcaagcaatcagaatacttctag

SEQ ID NO: 135536 - DNA, 25 bp, Artificial
  Probe
ggcaagcaatcagaatacttctagt

SEQ ID NO: 135537 - DNA, 25 bp, Artificial
  Probe
ccaggaaggcaagcaatcagaatac

SEQ ID NO: 135538 - DNA, 25 bp, Artificial
  Probe
agccctatctaggaagactgtaaac

SEQ ID NO: 135539 - DNA, 25 bp, Artificial
  Probe
cagccctatctaggaagactgtaaa

SEQ ID NO: 135540 - DNA, 25 bp, Artificial
  Probe
gaaggcaagcaatcagaatacttct

SEQ ID NO: 135541 - DNA, 25 bp, Artificial
  Probe
ctatctaggaagactgtaaacgtgg

SEQ ID NO: 135542 - DNA, 25 bp, Artificial
  Probe
tatctaggaagactgtaaacgtgga

SEQ ID NO: 135543 - DNA, 25 bp, Artificial
  Probe
accaggaaggcaagcaatcagaata

SEQ ID NO: 135544 - DNA, 25 bp, Artificial
  Probe
taccaggaaggcaagcaatcagaat

SEQ ID NO: 135545 - DNA, 25 bp, Artificial
  Probe
ggaaggcaagcaatcagaatacttc

SEQ ID NO: 135546 - DNA, 25 bp, Artificial
  Probe
atctaggaagactgtaaacgtggag

SEQ ID NO: 135547 - DNA, 25 bp, Artificial
  Probe
gccctatctaggaagactgtaaacg

SEQ ID NO: 135548 - DNA, 25 bp, Artificial
  Probe
cctatctaggaagactgtaaacgtg

SEQ ID NO: 135549 - DNA, 25 bp, Artificial
  Probe
ctaggaagactgtaaacgtggagag

SEQ ID NO: 135550 - DNA, 25 bp, Artificial
  Probe
ccagccctatctaggaagactgtaa

SEQ ID NO: 135551 - DNA, 25 bp, Artificial
  Probe
ccctatctaggaagactgtaaacgt

SEQ ID NO: 135552 - DNA, 25 bp, Artificial
  Probe
ctaccaggaaggcaagcaatcagaa

SEQ ID NO: 135553 - DNA, 25 bp, Artificial
  Probe
gaagactgtaaacgtggagaggatc

SEQ ID NO: 135554 - DNA, 25 bp, Artificial
  Probe
tctaggaagactgtaaacgtggaga

SEQ ID NO: 135555 - DNA, 25 bp, Artificial
  Probe
aagactgtaaacgtggagaggatca

SEQ ID NO: 135556 - DNA, 25 bp, Artificial
  Probe
taggaagactgtaaacgtggagagg

SEQ ID NO: 135557 - DNA, 25 bp, Artificial
  Probe
ggaagactgtaaacgtggagaggat

SEQ ID NO: 135558 - DNA, 25 bp, Artificial
  Probe
agactgtaaacgtggagaggatcag

SEQ ID NO: 135559 - DNA, 25 bp, Artificial
  Probe
cccagccctatctaggaagactgta

SEQ ID NO: 135560 - DNA, 25 bp, Artificial
  Probe
ccaccgtgatattgcgaggtatctg

SEQ ID NO: 135561 - DNA, 25 bp, Artificial
  Probe
ctggagattgattgcaggtcctcag

SEQ ID NO: 135562 - DNA, 25 bp, Artificial
  Probe
aggaagactgtaaacgtggagagga

SEQ ID NO: 135563 - DNA, 25 bp, Artificial
  Probe
ctgtaaacgtggagaggatcagcag

SEQ ID NO: 135564 - DNA, 25 bp, Artificial
  Probe
gactgtaaacgtggagaggatcagc

SEQ ID NO: 135565 - DNA, 25 bp, Artificial
  Probe
ttttctccccagccctatctaggaa

SEQ ID NO: 135566 - DNA, 25 bp, Artificial
  Probe
tttctccccagccctatctaggaag

SEQ ID NO: 135567 - DNA, 25 bp, Artificial
  Probe
ttctcctgtcgcttcattcattatt

SEQ ID NO: 135568 - DNA, 25 bp, Artificial
  Probe
cttctcctgtcgcttcattcattat

SEQ ID NO: 135569 - DNA, 25 bp, Artificial
  Probe
tgctgaacttatacatcctcaacat

SEQ ID NO: 135570 - DNA, 25 bp, Artificial
  Probe
atgctgaacttatacatcctcaaca

SEQ ID NO: 135571 - DNA, 25 bp, Artificial
  Probe
ttaacttcctctacttcttctacga

SEQ ID NO: 135572 - DNA, 25 bp, Artificial
  Probe
taacttcctctacttcttctacgaa

SEQ ID NO: 135573 - DNA, 25 bp, Artificial
  Probe
gctgaacttatacatcctcaacatg

SEQ ID NO: 135574 - DNA, 25 bp, Artificial
  Probe
ctgaacttatacatcctcaacatgg

SEQ ID NO: 135575 - DNA, 25 bp, Artificial
  Probe
tgaacttatacatcctcaacatggc

SEQ ID NO: 135576 - DNA, 25 bp, Artificial
  Probe
gggcagagaagcgaaataaataaat

SEQ ID NO: 135577 - DNA, 25 bp, Artificial
  Probe
ctcctgtcgcttcattcattatttc

SEQ ID NO: 135578 - DNA, 25 bp, Artificial
  Probe
tgtcgcttcattcattatttctacc

SEQ ID NO: 135579 - DNA, 25 bp, Artificial
  Probe
ttcctctcatcgcagtgtttaatat

SEQ ID NO: 135580 - DNA, 25 bp, Artificial
  Probe
tcctgtcgcttcattcattatttct

SEQ ID NO: 135581 - DNA, 25 bp, Artificial
  Probe
tctcctgtcgcttcattcattattt

SEQ ID NO: 135582 - DNA, 25 bp, Artificial
  Probe
tttcctctcatcgcagtgtttaata

SEQ ID NO: 135583 - DNA, 25 bp, Artificial
  Probe
ctctcatcgcagtgtttaatatcct

SEQ ID NO: 135584 - DNA, 25 bp, Artificial
  Probe
tcctctcatcgcagtgtttaatatc

SEQ ID NO: 135585 - DNA, 25 bp, Artificial
  Probe
gtcgcttcattcattatttctacct

SEQ ID NO: 135586 - DNA, 25 bp, Artificial
  Probe
cctgtcgcttcattcattatttcta

SEQ ID NO: 135587 - DNA, 25 bp, Artificial
  Probe
ggcagagaagcgaaataaataaatc

SEQ ID NO: 135588 - DNA, 25 bp, Artificial
  Probe
gcttcattcattatttctaccttgc

SEQ ID NO: 135589 - DNA, 25 bp, Artificial
  Probe
aacttcctctacttcttctacgaaa

SEQ ID NO: 135590 - DNA, 25 bp, Artificial
  Probe
ttcattatttctaccttgccaacat

SEQ ID NO: 135591 - DNA, 25 bp, Artificial
  Probe
attcattatttctaccttgccaaca

SEQ ID NO: 135592 - DNA, 25 bp, Artificial
  Probe
ttcattcattatttctaccttgcca

SEQ ID NO: 135593 - DNA, 25 bp, Artificial
  Probe
gcttctcctgtcgcttcattcatta

SEQ ID NO: 135594 - DNA, 25 bp, Artificial
  Probe
ttcctctacttcttctacgaaatca

SEQ ID NO: 135595 - DNA, 25 bp, Artificial
  Probe
acttcctctacttcttctacgaaat

SEQ ID NO: 135596 - DNA, 25 bp, Artificial
  Probe
cgcttcattcattatttctaccttg

SEQ ID NO: 135597 - DNA, 25 bp, Artificial
  Probe
tcgcttcattcattatttctacctt

SEQ ID NO: 135598 - DNA, 25 bp, Artificial
  Probe
cctctcatcgcagtgtttaatatcc

SEQ ID NO: 135599 - DNA, 25 bp, Artificial
  Probe
cattcattatttctaccttgccaac

SEQ ID NO: 135600 - DNA, 25 bp, Artificial
  Probe
tcattcattatttctaccttgccaa

SEQ ID NO: 135601 - DNA, 25 bp, Artificial
  Probe
ctgtcgcttcattcattatttctac

SEQ ID NO: 135602 - DNA, 25 bp, Artificial
  Probe
gcagagaagcgaaataaataaatca

SEQ ID NO: 135603 - DNA, 25 bp, Artificial
  Probe
cttcattcattatttctaccttgcc

SEQ ID NO: 135604 - DNA, 25 bp, Artificial
  Probe
cttcctctacttcttctacgaaatc

SEQ ID NO: 135605 - DNA, 25 bp, Artificial
  Probe
cagcactccatcatcattaccaaag

SEQ ID NO: 135606 - DNA, 25 bp, Artificial
  Probe
cctggttaacttcctctacttcttc

SEQ ID NO: 135607 - DNA, 25 bp, Artificial
  Probe
agcactccatcatcattaccaaaga

SEQ ID NO: 135608 - DNA, 25 bp, Artificial
  Probe
ctggttaacttcctctacttcttct

SEQ ID NO: 135609 - DNA, 25 bp, Artificial
  Probe
tcattatttctaccttgccaacatg

SEQ ID NO: 135610 - DNA, 25 bp, Artificial
  Probe
cactccatcatcattaccaaagagg

SEQ ID NO: 135611 - DNA, 25 bp, Artificial
  Probe
acctggttaacttcctctacttctt

SEQ ID NO: 135612 - DNA, 25 bp, Artificial
  Probe
ttatacctgatagcaacgaatggaa

SEQ ID NO: 135613 - DNA, 25 bp, Artificial
  Probe
attatacctgatagcaacgaatgga

SEQ ID NO: 135614 - DNA, 25 bp, Artificial
  Probe
tatacctgatagcaacgaatggaac

SEQ ID NO: 135615 - DNA, 25 bp, Artificial
  Probe
ggcattatacctgatagcaacgaat

SEQ ID NO: 135616 - DNA, 25 bp, Artificial
  Probe
atacctgatagcaacgaatggaaca

SEQ ID NO: 135617 - DNA, 25 bp, Artificial
  Probe
ctaaagaagcaatgaagagtaaccg

SEQ ID NO: 135618 - DNA, 25 bp, Artificial
  Probe
tacctgatagcaacgaatggaacac

SEQ ID NO: 135619 - DNA, 25 bp, Artificial
  Probe
cctttacgggcattatacctgatag

SEQ ID NO: 135620 - DNA, 25 bp, Artificial
  Probe
cttaaatcggtgtttggaaatggat

SEQ ID NO: 135621 - DNA, 25 bp, Artificial
  Probe
tcctttacgggcattatacctgata

SEQ ID NO: 135622 - DNA, 25 bp, Artificial
  Probe
ttaaatcggtgtttggaaatggatg

SEQ ID NO: 135623 - DNA, 25 bp, Artificial
  Probe
aaatcctttacgggcattatacctg

SEQ ID NO: 135624 - DNA, 25 bp, Artificial
  Probe
aagaactattacagcatcctttcct

SEQ ID NO: 135625 - DNA, 25 bp, Artificial
  Probe
ttcttaaatcggtgtttggaaatgg

SEQ ID NO: 135626 - DNA, 25 bp, Artificial
  Probe
gcattatacctgatagcaacgaatg

SEQ ID NO: 135627 - DNA, 25 bp, Artificial
  Probe
tcagccaaagaactattacagcatc

SEQ ID NO: 135628 - DNA, 25 bp, Artificial
  Probe
tcttaaatcggtgtttggaaatgga

SEQ ID NO: 135629 - DNA, 25 bp, Artificial
  Probe
cattatacctgatagcaacgaatgg

SEQ ID NO: 135630 - DNA, 25 bp, Artificial
  Probe
ctttacgggcattatacctgatagc

SEQ ID NO: 135631 - DNA, 25 bp, Artificial
  Probe
ttcagccaaagaactattacagcat

SEQ ID NO: 135632 - DNA, 25 bp, Artificial
  Probe
taaatcggtgtttggaaatggatgt

SEQ ID NO: 135633 - DNA, 25 bp, Artificial
  Probe
atcctttacgggcattatacctgat

SEQ ID NO: 135634 - DNA, 25 bp, Artificial
  Probe
aatcctttacgggcattatacctga

SEQ ID NO: 135635 - DNA, 25 bp, Artificial
  Probe
taaagaagcaatgaagagtaaccgc

SEQ ID NO: 135636 - DNA, 25 bp, Artificial
  Probe
gccaaagaactattacagcatcctt

SEQ ID NO: 135637 - DNA, 25 bp, Artificial
  Probe
ttacgggcattatacctgatagcaa

SEQ ID NO: 135638 - DNA, 25 bp, Artificial
  Probe
tttacgggcattatacctgatagca

SEQ ID NO: 135639 - DNA, 25 bp, Artificial
  Probe
gtttggaaatggatgtggagaagag

SEQ ID NO: 135640 - DNA, 25 bp, Artificial
  Probe
cagccaaagaactattacagcatcc

SEQ ID NO: 135641 - DNA, 25 bp, Artificial
  Probe
agccaaagaactattacagcatcct

SEQ ID NO: 135642 - DNA, 25 bp, Artificial
  Probe
aactattacagcatcctttcctgaa

SEQ ID NO: 135643 - DNA, 25 bp, Artificial
  Probe
gaactattacagcatcctttcctga

SEQ ID NO: 135644 - DNA, 25 bp, Artificial
  Probe
agaactattacagcatcctttcctg

SEQ ID NO: 135645 - DNA, 25 bp, Artificial
  Probe
tacgggcattatacctgatagcaac

SEQ ID NO: 135646 - DNA, 25 bp, Artificial
  Probe
tattacagcatcctttcctgaaact

SEQ ID NO: 135647 - DNA, 25 bp, Artificial
  Probe
actattacagcatcctttcctgaaa

SEQ ID NO: 135648 - DNA, 25 bp, Artificial
  Probe
gatagcaacgaatggaacacctgag

SEQ ID NO: 135649 - DNA, 25 bp, Artificial
  Probe
ctattacagcatcctttcctgaaac

SEQ ID NO: 135650 - DNA, 25 bp, Artificial
  Probe
tgtttggaaatggatgtggagaaga

SEQ ID NO: 135651 - DNA, 25 bp, Artificial
  Probe
gtgtttggaaatggatgtggagaag

SEQ ID NO: 135652 - DNA, 25 bp, Artificial
  Probe
aaatcggtgtttggaaatggatgtg

SEQ ID NO: 135653 - DNA, 25 bp, Artificial
  Probe
tttgggaatggaaggctcagttaaa

SEQ ID NO: 135654 - DNA, 25 bp, Artificial
  Probe
attacagcatcctttcctgaaactg

SEQ ID NO: 135655 - DNA, 25 bp, Artificial
  Probe
gaagcaatgaagagtaaccgctaac

SEQ ID NO: 135656 - DNA, 25 bp, Artificial
  Probe
agaagcaatgaagagtaaccgctaa

SEQ ID NO: 135657 - DNA, 25 bp, Artificial
  Probe
gaagataacaacaccaacagactcc

SEQ ID NO: 135658 - DNA, 25 bp, Artificial
  Probe
ggaagataacaacaccaacagactc

SEQ ID NO: 135659 - DNA, 25 bp, Artificial
  Probe
aagataacaacaccaacagactccg

SEQ ID NO: 135660 - DNA, 25 bp, Artificial
  Probe
acctgtttgaaagcatctggaataa

SEQ ID NO: 135661 - DNA, 25 bp, Artificial
  Probe
atctggaataacaggtggttacgaa

SEQ ID NO: 135662 - DNA, 25 bp, Artificial
  Probe
cctgtttgaaagcatctggaataac

SEQ ID NO: 135663 - DNA, 25 bp, Artificial
  Probe
aagcatctggaataacaggtggtta

SEQ ID NO: 135664 - DNA, 25 bp, Artificial
  Probe
gacctgtttgaaagcatctggaata

SEQ ID NO: 135665 - DNA, 25 bp, Artificial
  Probe
caaacattactgctaccctcacttc

SEQ ID NO: 135666 - DNA, 25 bp, Artificial
  Probe
tatgccaactatactgtccctgaag

SEQ ID NO: 135667 - DNA, 25 bp, Artificial
  Probe
catctggaataacaggtggttacga

SEQ ID NO: 135668 - DNA, 25 bp, Artificial
  Probe
aaccatttccatcatcctgttcttg

SEQ ID NO: 135669 - DNA, 25 bp, Artificial
  Probe
aaacattactgctaccctcacttca

SEQ ID NO: 135670 - DNA, 25 bp, Artificial
  Probe
attgtcgtgacatcatccagagaat

SEQ ID NO: 135671 - DNA, 25 bp, Artificial
  Probe
ccatttccatcatcctgttcttgaa

SEQ ID NO: 135672 - DNA, 25 bp, Artificial
  Probe
tctggaataacaggtggttacgaac

SEQ ID NO: 135673 - DNA, 25 bp, Artificial
  Probe
agcatctggaataacaggtggttac

SEQ ID NO: 135674 - DNA, 25 bp, Artificial
  Probe
gagaagatcccaaagttacaagagc

SEQ ID NO: 135675 - DNA, 25 bp, Artificial
  Probe
gtttgaaagcatctggaataacagg

SEQ ID NO: 135676 - DNA, 25 bp, Artificial
  Probe
gttacgaaccatttccatcatcctg

SEQ ID NO: 135677 - DNA, 25 bp, Artificial
  Probe
tttgaaagcatctggaataacaggt

SEQ ID NO: 135678 - DNA, 25 bp, Artificial
  Probe
catttccatcatcctgttcttgaac

SEQ ID NO: 135679 - DNA, 25 bp, Artificial
  Probe
aacaaacaagatatgctggcagaaa

SEQ ID NO: 135680 - DNA, 25 bp, Artificial
  Probe
ttacgaaccatttccatcatcctgt

SEQ ID NO: 135681 - DNA, 25 bp, Artificial
  Probe
gattgtcgtgacatcatccagagaa

SEQ ID NO: 135682 - DNA, 25 bp, Artificial
  Probe
tacgaaccatttccatcatcctgtt

SEQ ID NO: 135683 - DNA, 25 bp, Artificial
  Probe
aacattactgctaccctcacttcac

SEQ ID NO: 135684 - DNA, 25 bp, Artificial
  Probe
atcccaaagttacaagagccaagtt

SEQ ID NO: 135685 - DNA, 25 bp, Artificial
  Probe
ttgaaagcatctggaataacaggtg

SEQ ID NO: 135686 - DNA, 25 bp, Artificial
  Probe
gaacaaacaagatatgctggcagaa

SEQ ID NO: 135687 - DNA, 25 bp, Artificial
  Probe
accatttccatcatcctgttcttga

SEQ ID NO: 135688 - DNA, 25 bp, Artificial
  Probe
gggaagataacaacaccaacagact

SEQ ID NO: 135689 - DNA, 25 bp, Artificial
  Probe
ttgtcgtgacatcatccagagaatg

SEQ ID NO: 135690 - DNA, 25 bp, Artificial
  Probe
ccaactatactgtccctgaagatgc

SEQ ID NO: 135691 - DNA, 25 bp, Artificial
  Probe
gccaactatactgtccctgaagatg

SEQ ID NO: 135692 - DNA, 25 bp, Artificial
  Probe
aagatcccaaagttacaagagccaa

SEQ ID NO: 135693 - DNA, 25 bp, Artificial
  Probe
ggagaagatcccaaagttacaagag

SEQ ID NO: 135694 - DNA, 25 bp, Artificial
  Probe
caggagaagatcccaaagttacaag

SEQ ID NO: 135695 - DNA, 25 bp, Artificial
  Probe
gtatgccaactatactgtccctgaa

SEQ ID NO: 135696 - DNA, 25 bp, Artificial
  Probe
aggagaagatcccaaagttacaaga

SEQ ID NO: 135697 - DNA, 25 bp, Artificial
  Probe
tgccaactatactgtccctgaagat

SEQ ID NO: 135698 - DNA, 25 bp, Artificial
  Probe
atgccaactatactgtccctgaaga

SEQ ID NO: 135699 - DNA, 25 bp, Artificial
  Probe
agaagatcccaaagttacaagagcc

SEQ ID NO: 135700 - DNA, 25 bp, Artificial
  Probe
taacgatgtcactgccatcatctat

SEQ ID NO: 135701 - DNA, 25 bp, Artificial
  Probe
ttgaacaaacaagatatgctggcag

SEQ ID NO: 135702 - DNA, 25 bp, Artificial
  Probe
acagtaagagacaacagagataaca

SEQ ID NO: 135703 - DNA, 25 bp, Artificial
  Probe
cagtaagagacaacagagataacac

SEQ ID NO: 135704 - DNA, 25 bp, Artificial
  Probe
cacagtaagagacaacagagataac

SEQ ID NO: 135705 - DNA, 25 bp, Artificial
  Probe
tcacagtaagagacaacagagataa

SEQ ID NO: 135706 - DNA, 25 bp, Artificial
  Probe
ttcacagtaagagacaacagagata

SEQ ID NO: 135707 - DNA, 25 bp, Artificial
  Probe
aaccagccaatagttacagttagtg

SEQ ID NO: 135708 - DNA, 25 bp, Artificial
  Probe
caaccagccaatagttacagttagt

SEQ ID NO: 135709 - DNA, 25 bp, Artificial
  Probe
ccaaccagccaatagttacagttag

SEQ ID NO: 135710 - DNA, 25 bp, Artificial
  Probe
agtaagagacaacagagataacact

SEQ ID NO: 135711 - DNA, 25 bp, Artificial
  Probe
tccaaccagccaatagttacagtta

SEQ ID NO: 135712 - DNA, 25 bp, Artificial
  Probe
taagagacaacagagataacactgc

SEQ ID NO: 135713 - DNA, 25 bp, Artificial
  Probe
gtaagagacaacagagataacactg

SEQ ID NO: 135714 - DNA, 25 bp, Artificial
  Probe
accagccaatagttacagttagtgc

SEQ ID NO: 135715 - DNA, 25 bp, Artificial
  Probe
gtagcaccaataccctcactataaa

SEQ ID NO: 135716 - DNA, 25 bp, Artificial
  Probe
tttcacagtaagagacaacagagat

SEQ ID NO: 135717 - DNA, 25 bp, Artificial
  Probe
atttcacagtaagagacaacagaga

SEQ ID NO: 135718 - DNA, 25 bp, Artificial
  Probe
gccaatagttacagttagtgcagat

SEQ ID NO: 135719 - DNA, 25 bp, Artificial
  Probe
ctccaaccagccaatagttacagtt

SEQ ID NO: 135720 - DNA, 25 bp, Artificial
  Probe
ctctccaaccagccaatagttacag

SEQ ID NO: 135721 - DNA, 25 bp, Artificial
  Probe
tatgaaggctttatctgtgagagtg

SEQ ID NO: 135722 - DNA, 25 bp, Artificial
  Probe
ttatgaaggctttatctgtgagagt

SEQ ID NO: 135723 - DNA, 25 bp, Artificial
  Probe
aatttcacagtaagagacaacagag

SEQ ID NO: 135724 - DNA, 25 bp, Artificial
  Probe
cttatgaaggctttatctgtgagag

SEQ ID NO: 135725 - DNA, 25 bp, Artificial
  Probe
agtagcaccaataccctcactataa

SEQ ID NO: 135726 - DNA, 25 bp, Artificial
  Probe
agccaatagttacagttagtgcaga

SEQ ID NO: 135727 - DNA, 25 bp, Artificial
  Probe
cagccaatagttacagttagtgcag

SEQ ID NO: 135728 - DNA, 25 bp, Artificial
  Probe
ccaatagttacagttagtgcagata

SEQ ID NO: 135729 - DNA, 25 bp, Artificial
  Probe
tgaaggctttatctgtgagagtgat

SEQ ID NO: 135730 - DNA, 25 bp, Artificial
  Probe
atgaaggctttatctgtgagagtga

SEQ ID NO: 135731 - DNA, 25 bp, Artificial
  Probe
gagtagcaccaataccctcactata

SEQ ID NO: 135732 - DNA, 25 bp, Artificial
  Probe
cactctccaaccagccaatagttac

SEQ ID NO: 135733 - DNA, 25 bp, Artificial
  Probe
gaaggctttatctgtgagagtgatc

SEQ ID NO: 135734 - DNA, 25 bp, Artificial
  Probe
agttacagttagtgcagataacctg

SEQ ID NO: 135735 - DNA, 25 bp, Artificial
  Probe
cacagtcaatggaccaagatttatc

SEQ ID NO: 135736 - DNA, 25 bp, Artificial
  Probe
acacagtcaatggaccaagatttat

SEQ ID NO: 135737 - DNA, 25 bp, Artificial
  Probe
tctccaaccagccaatagttacagt

SEQ ID NO: 135738 - DNA, 25 bp, Artificial
  Probe
acagtcaatggaccaagatttatct

SEQ ID NO: 135739 - DNA, 25 bp, Artificial
  Probe
tacagttagtgcagataacctggat

SEQ ID NO: 135740 - DNA, 25 bp, Artificial
  Probe
gacacagtcaatggaccaagattta

SEQ ID NO: 135741 - DNA, 25 bp, Artificial
  Probe
gttacagttagtgcagataacctgg

SEQ ID NO: 135742 - DNA, 25 bp, Artificial
  Probe
tagttacagttagtgcagataacct

SEQ ID NO: 135743 - DNA, 25 bp, Artificial
  Probe
aatgacaatgctcctaagtttgctg

SEQ ID NO: 135744 - DNA, 25 bp, Artificial
  Probe
caatgacaatgctcctaagtttgct

SEQ ID NO: 135745 - DNA, 25 bp, Artificial
  Probe
tcaatgacaatgctcctaagtttgc

SEQ ID NO: 135746 - DNA, 25 bp, Artificial
  Probe
ttacagttagtgcagataacctgga

SEQ ID NO: 135747 - DNA, 25 bp, Artificial
  Probe
cattggtttctgtgagcatctgact

SEQ ID NO: 135748 - DNA, 25 bp, Artificial
  Probe
ttaaagacaaagtgattcagtgggg

SEQ ID NO: 135749 - DNA, 25 bp, Artificial
  Probe
tgtggtttggggattgactttattc

SEQ ID NO: 135750 - DNA, 25 bp, Artificial
  Probe
aaagttcatttgcagcttctacacc

SEQ ID NO: 135751 - DNA, 25 bp, Artificial
  Probe
gtgtggtttggggattgactttatt

SEQ ID NO: 135752 - DNA, 25 bp, Artificial
  Probe
taaagacaaagtgattcagtgggga

SEQ ID NO: 135753 - DNA, 25 bp, Artificial
  Probe
gacaaagtgattcagtggggaaatt

SEQ ID NO: 135754 - DNA, 25 bp, Artificial
  Probe
acattggtttctgtgagcatctgac

SEQ ID NO: 135755 - DNA, 25 bp, Artificial
  Probe
tgtgtggtttggggattgactttat

SEQ ID NO: 135756 - DNA, 25 bp, Artificial
  Probe
ctcatctggtgccaaaagttcattt

SEQ ID NO: 135757 - DNA, 25 bp, Artificial
  Probe
agacaaagtgattcagtggggaaat

SEQ ID NO: 135758 - DNA, 25 bp, Artificial
  Probe
aagacaaagtgattcagtggggaaa

SEQ ID NO: 135759 - DNA, 25 bp, Artificial
  Probe
aaagacaaagtgattcagtggggaa

SEQ ID NO: 135760 - DNA, 25 bp, Artificial
  Probe
caaagtgattcagtggggaaattta

SEQ ID NO: 135761 - DNA, 25 bp, Artificial
  Probe
aaaagttcatttgcagcttctacac

SEQ ID NO: 135762 - DNA, 25 bp, Artificial
  Probe
tctcatctggtgccaaaagttcatt

SEQ ID NO: 135763 - DNA, 25 bp, Artificial
  Probe
aaagtgattcagtggggaaatttat

SEQ ID NO: 135764 - DNA, 25 bp, Artificial
  Probe
acaaagtgattcagtggggaaattt

SEQ ID NO: 135765 - DNA, 25 bp, Artificial
  Probe
gtggtttggggattgactttattcc

SEQ ID NO: 135766 - DNA, 25 bp, Artificial
  Probe
agtgattcagtggggaaatttataa

SEQ ID NO: 135767 - DNA, 25 bp, Artificial
  Probe
aagtgattcagtggggaaatttata

SEQ ID NO: 135768 - DNA, 25 bp, Artificial
  Probe
ctctcatctggtgccaaaagttcat

SEQ ID NO: 135769 - DNA, 25 bp, Artificial
  Probe
aagttcatttgcagcttctacaccg

SEQ ID NO: 135770 - DNA, 25 bp, Artificial
  Probe
cttgcttgtaagccacattggtttc

SEQ ID NO: 135771 - DNA, 25 bp, Artificial
  Probe
gttcatttgcagcttctacaccgtt

SEQ ID NO: 135772 - DNA, 25 bp, Artificial
  Probe
ttgcttgtaagccacattggtttct

SEQ ID NO: 135773 - DNA, 25 bp, Artificial
  Probe
attcagtggggaaatttataaagct

SEQ ID NO: 135774 - DNA, 25 bp, Artificial
  Probe
tcatctggtgccaaaagttcatttg

SEQ ID NO: 135775 - DNA, 25 bp, Artificial
  Probe
caaaagttcatttgcagcttctaca

SEQ ID NO: 135776 - DNA, 25 bp, Artificial
  Probe
gattcagtggggaaatttataaagc

SEQ ID NO: 135777 - DNA, 25 bp, Artificial
  Probe
ccaaaagttcatttgcagcttctac

SEQ ID NO: 135778 - DNA, 25 bp, Artificial
  Probe
tcagtggggaaatttataaagctat

SEQ ID NO: 135779 - DNA, 25 bp, Artificial
  Probe
ttcagtggggaaatttataaagcta

SEQ ID NO: 135780 - DNA, 25 bp, Artificial
  Probe
gcttgtaagccacattggtttctgt

SEQ ID NO: 135781 - DNA, 25 bp, Artificial
  Probe
tgcttgtaagccacattggtttctg

SEQ ID NO: 135782 - DNA, 25 bp, Artificial
  Probe
agttcatttgcagcttctacaccgt

SEQ ID NO: 135783 - DNA, 25 bp, Artificial
  Probe
gtgattcagtggggaaatttataaa

SEQ ID NO: 135784 - DNA, 25 bp, Artificial
  Probe
cttgtaagccacattggtttctgtg

SEQ ID NO: 135785 - DNA, 25 bp, Artificial
  Probe
tgattcagtggggaaatttataaag

SEQ ID NO: 135786 - DNA, 25 bp, Artificial
  Probe
ttgtaagccacattggtttctgtga

SEQ ID NO: 135787 - DNA, 25 bp, Artificial
  Probe
gccaaaagttcatttgcagcttcta

SEQ ID NO: 135788 - DNA, 25 bp, Artificial
  Probe
catctggtgccaaaagttcatttgc

SEQ ID NO: 135789 - DNA, 25 bp, Artificial
  Probe
tgtaagccacattggtttctgtgag

SEQ ID NO: 135790 - DNA, 25 bp, Artificial
  Probe
cagtggggaaatttataaagctata

SEQ ID NO: 135791 - DNA, 25 bp, Artificial
  Probe
gtattttccccggaactggagattc

SEQ ID NO: 135792 - DNA, 25 bp, Artificial
  Probe
atacttcaggcttcttctattaggc

SEQ ID NO: 135793 - DNA, 25 bp, Artificial
  Probe
tacttcaggcttcttctattaggct

SEQ ID NO: 135794 - DNA, 25 bp, Artificial
  Probe
ttcaggcttcttctattaggctcaa

SEQ ID NO: 135795 - DNA, 25 bp, Artificial
  Probe
cttcaggcttcttctattaggctca

SEQ ID NO: 135796 - DNA, 25 bp, Artificial
  Probe
acttcaggcttcttctattaggctc

SEQ ID NO: 135797 - DNA, 25 bp, Artificial
  Probe
tcaggcttcttctattaggctcaac

SEQ ID NO: 135798 - DNA, 25 bp, Artificial
  Probe
ttcttcttcctcttggataccatca

SEQ ID NO: 135799 - DNA, 25 bp, Artificial
  Probe
gccaaggaatatagtttacagagga

SEQ ID NO: 135800 - DNA, 25 bp, Artificial
  Probe
caggcttcttctattaggctcaacc

SEQ ID NO: 135801 - DNA, 25 bp, Artificial
  Probe
tatacttcaggcttcttctattagg

SEQ ID NO: 135802 - DNA, 25 bp, Artificial
  Probe
tcttcttcctcttggataccatcac

SEQ ID NO: 135803 - DNA, 25 bp, Artificial
  Probe
gcaaacaaacaaagccagaactaaa

SEQ ID NO: 135804 - DNA, 25 bp, Artificial
  Probe
atatagtttacagaggaaccaggtg

SEQ ID NO: 135805 - DNA, 25 bp, Artificial
  Probe
cttcctcttggataccatcaccatt

SEQ ID NO: 135806 - DNA, 25 bp, Artificial
  Probe
aggaatatagtttacagaggaacca

SEQ ID NO: 135807 - DNA, 25 bp, Artificial
  Probe
ctcaacccacccattcctataattg

SEQ ID NO: 135808 - DNA, 25 bp, Artificial
  Probe
aatatagtttacagaggaaccaggt

SEQ ID NO: 135809 - DNA, 25 bp, Artificial
  Probe
gaatatagtttacagaggaaccagg

SEQ ID NO: 135810 - DNA, 25 bp, Artificial
  Probe
ggaatatagtttacagaggaaccag

SEQ ID NO: 135811 - DNA, 25 bp, Artificial
  Probe
agcaaacaaacaaagccagaactaa

SEQ ID NO: 135812 - DNA, 25 bp, Artificial
  Probe
aagcaaacaaacaaagccagaacta

SEQ ID NO: 135813 - DNA, 25 bp, Artificial
  Probe
ttctacccatgctttgctaagtata

SEQ ID NO: 135814 - DNA, 25 bp, Artificial
  Probe
cttcttcctcttggataccatcacc

SEQ ID NO: 135815 - DNA, 25 bp, Artificial
  Probe
cttctacccatgctttgctaagtat

SEQ ID NO: 135816 - DNA, 25 bp, Artificial
  Probe
aacaaatgtttcttcttcctcttgg

SEQ ID NO: 135817 - DNA, 25 bp, Artificial
  Probe
atcaccatttgttgtgtgtgtattt

SEQ ID NO: 135818 - DNA, 25 bp, Artificial
  Probe
ccaaggaatatagtttacagaggaa

SEQ ID NO: 135819 - DNA, 25 bp, Artificial
  Probe
catcaccatttgttgtgtgtgtatt

SEQ ID NO: 135820 - DNA, 25 bp, Artificial
  Probe
tatagtttacagaggaaccaggtgc

SEQ ID NO: 135821 - DNA, 25 bp, Artificial
  Probe
atgtttcttcttcctcttggatacc

SEQ ID NO: 135822 - DNA, 25 bp, Artificial
  Probe
aaggaatatagtttacagaggaacc

SEQ ID NO: 135823 - DNA, 25 bp, Artificial
  Probe
caaatgtttcttcttcctcttggat

SEQ ID NO: 135824 - DNA, 25 bp, Artificial
  Probe
acaaatgtttcttcttcctcttgga

SEQ ID NO: 135825 - DNA, 25 bp, Artificial
  Probe
cttctctcctcaagtcctactcagg

SEQ ID NO: 135826 - DNA, 25 bp, Artificial
  Probe
tcttcctcttggataccatcaccat

SEQ ID NO: 135827 - DNA, 25 bp, Artificial
  Probe
cttcttctattaggctcaacccacc

SEQ ID NO: 135828 - DNA, 25 bp, Artificial
  Probe
tttcttcttcctcttggataccatc

SEQ ID NO: 135829 - DNA, 25 bp, Artificial
  Probe
gtttcttcttcctcttggataccat

SEQ ID NO: 135830 - DNA, 25 bp, Artificial
  Probe
gctcaacccacccattcctataatt

SEQ ID NO: 135831 - DNA, 25 bp, Artificial
  Probe
aatgtttcttcttcctcttggatac

SEQ ID NO: 135832 - DNA, 25 bp, Artificial
  Probe
aaagcaaacaaacaaagccagaact

SEQ ID NO: 135833 - DNA, 25 bp, Artificial
  Probe
gcttctctcctcaagtcctactcag

SEQ ID NO: 135834 - DNA, 25 bp, Artificial
  Probe
ttcttcctcttggataccatcacca

SEQ ID NO: 135835 - DNA, 25 bp, Artificial
  Probe
ctcttggataccatcaccatttgtt

SEQ ID NO: 135836 - DNA, 25 bp, Artificial
  Probe
gataccatcaccatttgttgtgtgt

SEQ ID NO: 135837 - DNA, 25 bp, Artificial
  Probe
aagtcatggctttctgtggaataaa

SEQ ID NO: 135838 - DNA, 25 bp, Artificial
  Probe
aataaagatggtccaaaggtagacg

SEQ ID NO: 135839 - DNA, 25 bp, Artificial
  Probe
gaataaagatggtccaaaggtagac

SEQ ID NO: 135840 - DNA, 25 bp, Artificial
  Probe
gaagtcatggctttctgtggaataa

SEQ ID NO: 135841 - DNA, 25 bp, Artificial
  Probe
ggaataaagatggtccaaaggtaga

SEQ ID NO: 135842 - DNA, 25 bp, Artificial
  Probe
ataaagatggtccaaaggtagacgg

SEQ ID NO: 135843 - DNA, 25 bp, Artificial
  Probe
atggctttctgtggaataaagatgg

SEQ ID NO: 135844 - DNA, 25 bp, Artificial
  Probe
catggctttctgtggaataaagatg

SEQ ID NO: 135845 - DNA, 25 bp, Artificial
  Probe
tcatggctttctgtggaataaagat

SEQ ID NO: 135846 - DNA, 25 bp, Artificial
  Probe
aaaggtagacggaaaataagtaggt

SEQ ID NO: 135847 - DNA, 25 bp, Artificial
  Probe
ggaagtcatggctttctgtggaata

SEQ ID NO: 135848 - DNA, 25 bp, Artificial
  Probe
caaaggtagacggaaaataagtagg

SEQ ID NO: 135849 - DNA, 25 bp, Artificial
  Probe
ccaaaggtagacggaaaataagtag

SEQ ID NO: 135850 - DNA, 25 bp, Artificial
  Probe
gtcatggctttctgtggaataaaga

SEQ ID NO: 135851 - DNA, 25 bp, Artificial
  Probe
agtcatggctttctgtggaataaag

SEQ ID NO: 135852 - DNA, 25 bp, Artificial
  Probe
gctttctgtggaataaagatggtcc

SEQ ID NO: 135853 - DNA, 25 bp, Artificial
  Probe
ggctttctgtggaataaagatggtc

SEQ ID NO: 135854 - DNA, 25 bp, Artificial
  Probe
aggtagacggaaaataagtaggtaa

SEQ ID NO: 135855 - DNA, 25 bp, Artificial
  Probe
aaggtagacggaaaataagtaggta

SEQ ID NO: 135856 - DNA, 25 bp, Artificial
  Probe
gagaactccacaagaaacccaaagg

SEQ ID NO: 135857 - DNA, 25 bp, Artificial
  Probe
gctcctgatccaataaaagatgaat

SEQ ID NO: 135858 - DNA, 25 bp, Artificial
  Probe
ggtagacggaaaataagtaggtaaa

SEQ ID NO: 135859 - DNA, 25 bp, Artificial
  Probe
taaagatggtccaaaggtagacgga

SEQ ID NO: 135860 - DNA, 25 bp, Artificial
  Probe
tggctttctgtggaataaagatggt

SEQ ID NO: 135861 - DNA, 25 bp, Artificial
  Probe
cgctcctgatccaataaaagatgaa

SEQ ID NO: 135862 - DNA, 25 bp, Artificial
  Probe
cgagaactccacaagaaacccaaag

SEQ ID NO: 135863 - DNA, 25 bp, Artificial
  Probe
tccaaaggtagacggaaaataagta

SEQ ID NO: 135864 - DNA, 25 bp, Artificial
  Probe
gtccaaaggtagacggaaaataagt

SEQ ID NO: 135865 - DNA, 25 bp, Artificial
  Probe
ggtccaaaggtagacggaaaataag

SEQ ID NO: 135866 - DNA, 25 bp, Artificial
  Probe
aagatggtccaaaggtagacggaaa

SEQ ID NO: 135867 - DNA, 25 bp, Artificial
  Probe
aaagatggtccaaaggtagacggaa

SEQ ID NO: 135868 - DNA, 25 bp, Artificial
  Probe
atggtccaaaggtagacggaaaata

SEQ ID NO: 135869 - DNA, 25 bp, Artificial
  Probe
tggtccaaaggtagacggaaaataa

SEQ ID NO: 135870 - DNA, 25 bp, Artificial
  Probe
tgatccaataaaagatgaattgcct

SEQ ID NO: 135871 - DNA, 25 bp, Artificial
  Probe
ctgatccaataaaagatgaattgcc

SEQ ID NO: 135872 - DNA, 25 bp, Artificial
  Probe
cctgatccaataaaagatgaattgc

SEQ ID NO: 135873 - DNA, 25 bp, Artificial
  Probe
ctcctgatccaataaaagatgaatt

SEQ ID NO: 135874 - DNA, 25 bp, Artificial
  Probe
tggaagtcatggctttctgtggaat

SEQ ID NO: 135875 - DNA, 25 bp, Artificial
  Probe
gaactccacaagaaacccaaaggtg

SEQ ID NO: 135876 - DNA, 25 bp, Artificial
  Probe
gtagacggaaaataagtaggtaaat

SEQ ID NO: 135877 - DNA, 25 bp, Artificial
  Probe
gatccaataaaagatgaattgcctt

SEQ ID NO: 135878 - DNA, 25 bp, Artificial
  Probe
agaactccacaagaaacccaaaggt

SEQ ID NO: 135879 - DNA, 25 bp, Artificial
  Probe
gatggtccaaaggtagacggaaaat

SEQ ID NO: 135880 - DNA, 25 bp, Artificial
  Probe
atccaataaaagatgaattgccttt

SEQ ID NO: 135881 - DNA, 25 bp, Artificial
  Probe
tggaataaagatggtccaaaggtag

SEQ ID NO: 135882 - DNA, 25 bp, Artificial
  Probe
agagacaaactttccaaggcttata

SEQ ID NO: 135883 - DNA, 25 bp, Artificial
  Probe
actttccaaggcttatattcaacca

SEQ ID NO: 135884 - DNA, 25 bp, Artificial
  Probe
aactttccaaggcttatattcaacc

SEQ ID NO: 135885 - DNA, 25 bp, Artificial
  Probe
ctttccaaggcttatattcaaccat

SEQ ID NO: 135886 - DNA, 25 bp, Artificial
  Probe
gagacaaactttccaaggcttatat

SEQ ID NO: 135887 - DNA, 25 bp, Artificial
  Probe
gagagacaaactttccaaggcttat

SEQ ID NO: 135888 - DNA, 25 bp, Artificial
  Probe
acaaactttccaaggcttatattca

SEQ ID NO: 135889 - DNA, 25 bp, Artificial
  Probe
agacaaactttccaaggcttatatt

SEQ ID NO: 135890 - DNA, 25 bp, Artificial
  Probe
accattcgctcatttgaagaagaaa

SEQ ID NO: 135891 - DNA, 25 bp, Artificial
  Probe
gacaaactttccaaggcttatattc

SEQ ID NO: 135892 - DNA, 25 bp, Artificial
  Probe
tttccaaggcttatattcaaccatg

SEQ ID NO: 135893 - DNA, 25 bp, Artificial
  Probe
agagagacaaactttccaaggctta

SEQ ID NO: 135894 - DNA, 25 bp, Artificial
  Probe
gaccattcgctcatttgaagaagaa

SEQ ID NO: 135895 - DNA, 25 bp, Artificial
  Probe
aaactttccaaggcttatattcaac

SEQ ID NO: 135896 - DNA, 25 bp, Artificial
  Probe
caaactttccaaggcttatattcaa

SEQ ID NO: 135897 - DNA, 25 bp, Artificial
  Probe
cagctaactttactaccttccttga

SEQ ID NO: 135898 - DNA, 25 bp, Artificial
  Probe
ccagctaactttactaccttccttg

SEQ ID NO: 135899 - DNA, 25 bp, Artificial
  Probe
agctaactttactaccttccttgaa

SEQ ID NO: 135900 - DNA, 25 bp, Artificial
  Probe
tttacccagccagctaactttacta

SEQ ID NO: 135901 - DNA, 25 bp, Artificial
  Probe
cccacacaaattaaagaggaataat

SEQ ID NO: 135902 - DNA, 25 bp, Artificial
  Probe
gagagagacaaactttccaaggctt

SEQ ID NO: 135903 - DNA, 25 bp, Artificial
  Probe
aagagagagacaaactttccaaggc

SEQ ID NO: 135904 - DNA, 25 bp, Artificial
  Probe
aaagagagagacaaactttccaagg

SEQ ID NO: 135905 - DNA, 25 bp, Artificial
  Probe
ttacccagccagctaactttactac

SEQ ID NO: 135906 - DNA, 25 bp, Artificial
  Probe
gccagctaactttactaccttcctt

SEQ ID NO: 135907 - DNA, 25 bp, Artificial
  Probe
acacatacacaaaagagagagacaa

SEQ ID NO: 135908 - DNA, 25 bp, Artificial
  Probe
cacacatacacaaaagagagagaca

SEQ ID NO: 135909 - DNA, 25 bp, Artificial
  Probe
acacacatacacaaaagagagagac

SEQ ID NO: 135910 - DNA, 25 bp, Artificial
  Probe
cacacacatacacaaaagagagaga

SEQ ID NO: 135911 - DNA, 25 bp, Artificial
  Probe
acatacacaaaagagagagacaaac

SEQ ID NO: 135912 - DNA, 25 bp, Artificial
  Probe
cacatacacaaaagagagagacaaa

SEQ ID NO: 135913 - DNA, 25 bp, Artificial
  Probe
catacacaaaagagagagacaaact

SEQ ID NO: 135914 - DNA, 25 bp, Artificial
  Probe
ccccacacaaattaaagaggaataa

SEQ ID NO: 135915 - DNA, 25 bp, Artificial
  Probe
atatacatagatagcaatgtgcagg

SEQ ID NO: 135916 - DNA, 25 bp, Artificial
  Probe
ccattcgctcatttgaagaagaaaa

SEQ ID NO: 135917 - DNA, 25 bp, Artificial
  Probe
gcgttgcctaagtattaaaacattg

SEQ ID NO: 135918 - DNA, 25 bp, Artificial
  Probe
agagagagacaaactttccaaggct

SEQ ID NO: 135919 - DNA, 25 bp, Artificial
  Probe
cgttgcctaagtattaaaacattgg

SEQ ID NO: 135920 - DNA, 25 bp, Artificial
  Probe
cagccagctaactttactaccttcc

SEQ ID NO: 135921 - DNA, 25 bp, Artificial
  Probe
ccagccagctaactttactaccttc

SEQ ID NO: 135922 - DNA, 25 bp, Artificial
  Probe
agccagctaactttactaccttcct

SEQ ID NO: 135923 - DNA, 25 bp, Artificial
  Probe
gctaactttactaccttccttgaag

SEQ ID NO: 135924 - DNA, 25 bp, Artificial
  Probe
atacacaaaagagagagacaaactt

SEQ ID NO: 135925 - DNA, 25 bp, Artificial
  Probe
gcacacacatacacaaaagagagag

SEQ ID NO: 135926 - DNA, 25 bp, Artificial
  Probe
tgacttcaacaccaacaaatgcaag

SEQ ID NO: 135927 - DNA, 25 bp, Artificial
  Probe
gagaagtaacgaatgtatccatctg

SEQ ID NO: 135928 - DNA, 25 bp, Artificial
  Probe
gtcatcttactggcttcgcattatt

SEQ ID NO: 135929 - DNA, 25 bp, Artificial
  Probe
atgagtcattatctggtcctgtatg

SEQ ID NO: 135930 - DNA, 25 bp, Artificial
  Probe
catgagtcattatctggtcctgtat

SEQ ID NO: 135931 - DNA, 25 bp, Artificial
  Probe
gaacatgagtcattatctggtcctg

SEQ ID NO: 135932 - DNA, 25 bp, Artificial
  Probe
tgtcatcttactggcttcgcattat

SEQ ID NO: 135933 - DNA, 25 bp, Artificial
  Probe
ggagaagtaacgaatgtatccatct

SEQ ID NO: 135934 - DNA, 25 bp, Artificial
  Probe
ctgaacatgagtcattatctggtcc

SEQ ID NO: 135935 - DNA, 25 bp, Artificial
  Probe
ttgtcatcttactggcttcgcatta

SEQ ID NO: 135936 - DNA, 25 bp, Artificial
  Probe
tgaacatgagtcattatctggtcct

SEQ ID NO: 135937 - DNA, 25 bp, Artificial
  Probe
acatgagtcattatctggtcctgta

SEQ ID NO: 135938 - DNA, 25 bp, Artificial
  Probe
gctgaacatgagtcattatctggtc

SEQ ID NO: 135939 - DNA, 25 bp, Artificial
  Probe
tagctgaacatgagtcattatctgg

SEQ ID NO: 135940 - DNA, 25 bp, Artificial
  Probe
aacatgagtcattatctggtcctgt

SEQ ID NO: 135941 - DNA, 25 bp, Artificial
  Probe
gtagctgaacatgagtcattatctg

SEQ ID NO: 135942 - DNA, 25 bp, Artificial
  Probe
tctcaaaggaattactgccacaata

SEQ ID NO: 135943 - DNA, 25 bp, Artificial
  Probe
taatttgctttgtcatcttactggc

SEQ ID NO: 135944 - DNA, 25 bp, Artificial
  Probe
tgtgtagctgaacatgagtcattat

SEQ ID NO: 135945 - DNA, 25 bp, Artificial
  Probe
tcatcttactggcttcgcattattt

SEQ ID NO: 135946 - DNA, 25 bp, Artificial
  Probe
ttaattgtgtttcagcaggttgtaa

SEQ ID NO: 135947 - DNA, 25 bp, Artificial
  Probe
tttaattgtgtttcagcaggttgta

SEQ ID NO: 135948 - DNA, 25 bp, Artificial
  Probe
gtgtagctgaacatgagtcattatc

SEQ ID NO: 135949 - DNA, 25 bp, Artificial
  Probe
tgtagctgaacatgagtcattatct

SEQ ID NO: 135950 - DNA, 25 bp, Artificial
  Probe
taattgtgtttcagcaggttgtaat

SEQ ID NO: 135951 - DNA, 25 bp, Artificial
  Probe
ctcaaaggaattactgccacaatat

SEQ ID NO: 135952 - DNA, 25 bp, Artificial
  Probe
attgtgtttcagcaggttgtaattg

SEQ ID NO: 135953 - DNA, 25 bp, Artificial
  Probe
ttactaagttggaagcctttcgtta

SEQ ID NO: 135954 - DNA, 25 bp, Artificial
  Probe
cagtttactaagttggaagcctttc

SEQ ID NO: 135955 - DNA, 25 bp, Artificial
  Probe
tcagtttactaagttggaagccttt

SEQ ID NO: 135956 - DNA, 25 bp, Artificial
  Probe
ttcagtttactaagttggaagcctt

SEQ ID NO: 135957 - DNA, 25 bp, Artificial
  Probe
tttcagtttactaagttggaagcct

SEQ ID NO: 135958 - DNA, 25 bp, Artificial
  Probe
gtgtgtagctgaacatgagtcatta

SEQ ID NO: 135959 - DNA, 25 bp, Artificial
  Probe
ggagtttggagaagtaacgaatgta

SEQ ID NO: 135960 - DNA, 25 bp, Artificial
  Probe
atttgctttgtcatcttactggctt

SEQ ID NO: 135961 - DNA, 25 bp, Artificial
  Probe
ttcgttagttctgtggcttggaatt

SEQ ID NO: 135962 - DNA, 25 bp, Artificial
  Probe
tttactaagttggaagcctttcgtt

SEQ ID NO: 135963 - DNA, 25 bp, Artificial
  Probe
tagttctgtggcttggaatttcatt

SEQ ID NO: 135964 - DNA, 25 bp, Artificial
  Probe
ttagttctgtggcttggaatttcat

SEQ ID NO: 135965 - DNA, 25 bp, Artificial
  Probe
taagttggaagcctttcgttagttc

SEQ ID NO: 135966 - DNA, 25 bp, Artificial
  Probe
gtttcctacaatacggtgaccatag

SEQ ID NO: 135967 - DNA, 25 bp, Artificial
  Probe
ctctcaaaggaattactgccacaat

SEQ ID NO: 135968 - DNA, 25 bp, Artificial
  Probe
agtttggagaagtaacgaatgtatc

SEQ ID NO: 135969 - DNA, 25 bp, Artificial
  Probe
gagtttggagaagtaacgaatgtat

SEQ ID NO: 135970 - DNA, 25 bp, Artificial
  Probe
cctgtatgaaatggaatgtatggta

SEQ ID NO: 135971 - DNA, 25 bp, Artificial
  Probe
aaaccaagtgagttaatttaaggct

SEQ ID NO: 135972 - DNA, 25 bp, Artificial
  Probe
gagaactcctgacaacctcccttag

SEQ ID NO: 135973 - DNA, 25 bp, Artificial
  Probe
agagaactcctgacaacctccctta

SEQ ID NO: 135974 - DNA, 25 bp, Artificial
  Probe
cagtcagcgccccaataaagattag

SEQ ID NO: 135975 - DNA, 25 bp, Artificial
  Probe
cagcgccccaataaagattagcaag

SEQ ID NO: 135976 - DNA, 25 bp, Artificial
  Probe
tcagcgccccaataaagattagcaa

SEQ ID NO: 135977 - DNA, 25 bp, Artificial
  Probe
ccagtcagcgccccaataaagatta

SEQ ID NO: 135978 - DNA, 25 bp, Artificial
  Probe
taacattcatagcctacaaccacag

SEQ ID NO: 135979 - DNA, 25 bp, Artificial
  Probe
ttaacattcatagcctacaaccaca

SEQ ID NO: 135980 - DNA, 25 bp, Artificial
  Probe
aacattcatagcctacaaccacaga

SEQ ID NO: 135981 - DNA, 25 bp, Artificial
  Probe
acattcatagcctacaaccacagac

SEQ ID NO: 135982 - DNA, 25 bp, Artificial
  Probe
tttaacattcatagcctacaaccac

SEQ ID NO: 135983 - DNA, 25 bp, Artificial
  Probe
gcatttaacattcatagcctacaac

SEQ ID NO: 135984 - DNA, 25 bp, Artificial
  Probe
atttaacattcatagcctacaacca

SEQ ID NO: 135985 - DNA, 25 bp, Artificial
  Probe
catttaacattcatagcctacaacc

SEQ ID NO: 135986 - DNA, 25 bp, Artificial
  Probe
cattcatagcctacaaccacagacg

SEQ ID NO: 135987 - DNA, 25 bp, Artificial
  Probe
gtgcatttaacattcatagcctaca

SEQ ID NO: 135988 - DNA, 25 bp, Artificial
  Probe
tgcatttaacattcatagcctacaa

SEQ ID NO: 135989 - DNA, 25 bp, Artificial
  Probe
tgtgcatttaacattcatagcctac

SEQ ID NO: 135990 - DNA, 25 bp, Artificial
  Probe
gtgtgcatttaacattcatagccta

SEQ ID NO: 135991 - DNA, 25 bp, Artificial
  Probe
cccagtgtgcatttaacattcatag

SEQ ID NO: 135992 - DNA, 25 bp, Artificial
  Probe
agtgtgcatttaacattcatagcct

SEQ ID NO: 135993 - DNA, 25 bp, Artificial
  Probe
cagtgtgcatttaacattcatagcc

SEQ ID NO: 135994 - DNA, 25 bp, Artificial
  Probe
ccagtgtgcatttaacattcatagc

SEQ ID NO: 135995 - DNA, 25 bp, Artificial
  Probe
cctttcagaggagatcctattccag

SEQ ID NO: 135996 - DNA, 25 bp, Artificial
  Probe
cagcctttcagaggagatcctattc

SEQ ID NO: 135997 - DNA, 25 bp, Artificial
  Probe
attcatagcctacaaccacagacgt

SEQ ID NO: 135998 - DNA, 25 bp, Artificial
  Probe
ctttcagaggagatcctattccagc

SEQ ID NO: 135999 - DNA, 25 bp, Artificial
  Probe
gaggagatcctattccagccaaatg

SEQ ID NO: 136000 - DNA, 25 bp, Artificial
  Probe
agaggagatcctattccagccaaat

SEQ ID NO: 136001 - DNA, 25 bp, Artificial
  Probe
agcctttcagaggagatcctattcc

SEQ ID NO: 136002 - DNA, 25 bp, Artificial
  Probe
tcagaggagatcctattccagccaa

SEQ ID NO: 136003 - DNA, 25 bp, Artificial
  Probe
ttcagaggagatcctattccagcca

SEQ ID NO: 136004 - DNA, 25 bp, Artificial
  Probe
ccagcctttcagaggagatcctatt

SEQ ID NO: 136005 - DNA, 25 bp, Artificial
  Probe
gagatcctattccagccaaatgcag

SEQ ID NO: 136006 - DNA, 25 bp, Artificial
  Probe
tttcagaggagatcctattccagcc

SEQ ID NO: 136007 - DNA, 25 bp, Artificial
  Probe
gcctttcagaggagatcctattcca

SEQ ID NO: 136008 - DNA, 25 bp, Artificial
  Probe
cagaggagatcctattccagccaaa

SEQ ID NO: 136009 - DNA, 25 bp, Artificial
  Probe
acgttttatacatttaggcggggta

SEQ ID NO: 136010 - DNA, 25 bp, Artificial
  Probe
ccccagtgtgcatttaacattcata

SEQ ID NO: 136011 - DNA, 25 bp, Artificial
  Probe
ttcatagcctacaaccacagacgtg

SEQ ID NO: 136012 - DNA, 25 bp, Artificial
  Probe
tagcctcttcctccgactttccttt

SEQ ID NO: 136013 - DNA, 25 bp, Artificial
  Probe
ctttccttttgcaggtctttcacta

SEQ ID NO: 136014 - DNA, 25 bp, Artificial
  Probe
tccagcctttcagaggagatcctat

SEQ ID NO: 136015 - DNA, 25 bp, Artificial
  Probe
tttccttttgcaggtctttcactac

SEQ ID NO: 136016 - DNA, 25 bp, Artificial
  Probe
ctccgcaattctcatgcttctcatg

SEQ ID NO: 136017 - DNA, 25 bp, Artificial
  Probe
aggagatcctattccagccaaatgc

SEQ ID NO: 136018 - DNA, 25 bp, Artificial
  Probe
ttccttttgcaggtctttcactaca

SEQ ID NO: 136019 - DNA, 25 bp, Artificial
  Probe
cacgttttatacatttaggcggggt

SEQ ID NO: 136020 - DNA, 25 bp, Artificial
  Probe
gactttccttttgcaggtctttcac

SEQ ID NO: 136021 - DNA, 25 bp, Artificial
  Probe
atgcagggaaacactttattttgtt

SEQ ID NO: 136022 - DNA, 25 bp, Artificial
  Probe
cactttattttgttttaggttttgt

SEQ ID NO: 136023 - DNA, 25 bp, Artificial
  Probe
atctctaatgagttctccatccaga

SEQ ID NO: 136024 - DNA, 25 bp, Artificial
  Probe
catctctaatgagttctccatccag

SEQ ID NO: 136025 - DNA, 25 bp, Artificial
  Probe
tgaaatagaagtcaccacctttgag

SEQ ID NO: 136026 - DNA, 25 bp, Artificial
  Probe
cggaaactgactgtgaaatagaagt

SEQ ID NO: 136027 - DNA, 25 bp, Artificial
  Probe
gacatcatctctaatgagttctcca

SEQ ID NO: 136028 - DNA, 25 bp, Artificial
  Probe
tcatctctaatgagttctccatcca

SEQ ID NO: 136029 - DNA, 25 bp, Artificial
  Probe
atcatctctaatgagttctccatcc

SEQ ID NO: 136030 - DNA, 25 bp, Artificial
  Probe
agacatcatctctaatgagttctcc

SEQ ID NO: 136031 - DNA, 25 bp, Artificial
  Probe
acatcatctctaatgagttctccat

SEQ ID NO: 136032 - DNA, 25 bp, Artificial
  Probe
cgaagacgtagacatcatctctaat

SEQ ID NO: 136033 - DNA, 25 bp, Artificial
  Probe
tcaccacctttgaggatttcataaa

SEQ ID NO: 136034 - DNA, 25 bp, Artificial
  Probe
cgtagacatcatctctaatgagttc

SEQ ID NO: 136035 - DNA, 25 bp, Artificial
  Probe
catcatctctaatgagttctccatc

SEQ ID NO: 136036 - DNA, 25 bp, Artificial
  Probe
tctaatgagttctccatccagaggc

SEQ ID NO: 136037 - DNA, 25 bp, Artificial
  Probe
gtcaccacctttgaggatttcataa

SEQ ID NO: 136038 - DNA, 25 bp, Artificial
  Probe
gaagacgtagacatcatctctaatg

SEQ ID NO: 136039 - DNA, 25 bp, Artificial
  Probe
gaaatagaagtcaccacctttgagg

SEQ ID NO: 136040 - DNA, 25 bp, Artificial
  Probe
atagaagtcaccacctttgaggatt

SEQ ID NO: 136041 - DNA, 25 bp, Artificial
  Probe
aatagaagtcaccacctttgaggat

SEQ ID NO: 136042 - DNA, 25 bp, Artificial
  Probe
tagaagtcaccacctttgaggattt

SEQ ID NO: 136043 - DNA, 25 bp, Artificial
  Probe
aaatagaagtcaccacctttgagga

SEQ ID NO: 136044 - DNA, 25 bp, Artificial
  Probe
agtcaccacctttgaggatttcata

SEQ ID NO: 136045 - DNA, 25 bp, Artificial
  Probe
gaaccttaaaggctttctgtttgat

SEQ ID NO: 136046 - DNA, 25 bp, Artificial
  Probe
tctctaatgagttctccatccagag

SEQ ID NO: 136047 - DNA, 25 bp, Artificial
  Probe
accacctttgaggatttcataaaga

SEQ ID NO: 136048 - DNA, 25 bp, Artificial
  Probe
caccacctttgaggatttcataaag

SEQ ID NO: 136049 - DNA, 25 bp, Artificial
  Probe
ttaaaggctttctgtttgatatccc

SEQ ID NO: 136050 - DNA, 25 bp, Artificial
  Probe
gacgtagacatcatctctaatgagt

SEQ ID NO: 136051 - DNA, 25 bp, Artificial
  Probe
agacgtagacatcatctctaatgag

SEQ ID NO: 136052 - DNA, 25 bp, Artificial
  Probe
aaccttaaaggctttctgtttgata

SEQ ID NO: 136053 - DNA, 25 bp, Artificial
  Probe
acctttgaggatttcataaagaacc

SEQ ID NO: 136054 - DNA, 25 bp, Artificial
  Probe
ccacctttgaggatttcataaagaa

SEQ ID NO: 136055 - DNA, 25 bp, Artificial
  Probe
acgtagacatcatctctaatgagtt

SEQ ID NO: 136056 - DNA, 25 bp, Artificial
  Probe
cctttgaggatttcataaagaacct

SEQ ID NO: 136057 - DNA, 25 bp, Artificial
  Probe
accttaaaggctttctgtttgatat

SEQ ID NO: 136058 - DNA, 25 bp, Artificial
  Probe
aagacgtagacatcatctctaatga

SEQ ID NO: 136059 - DNA, 25 bp, Artificial
  Probe
gtagacatcatctctaatgagttct

SEQ ID NO: 136060 - DNA, 25 bp, Artificial
  Probe
aagtcaccacctttgaggatttcat

SEQ ID NO: 136061 - DNA, 25 bp, Artificial
  Probe
ctctaatgagttctccatccagagg

SEQ ID NO: 136062 - DNA, 25 bp, Artificial
  Probe
catgtagatgccatcaaagaagctc

SEQ ID NO: 136063 - DNA, 25 bp, Artificial
  Probe
ggatttcataaagaaccttaaaggc

SEQ ID NO: 136064 - DNA, 25 bp, Artificial
  Probe
acgaagacgtagacatcatctctaa

SEQ ID NO: 136065 - DNA, 25 bp, Artificial
  Probe
aacgaagacgtagacatcatctcta

SEQ ID NO: 136066 - DNA, 25 bp, Artificial
  Probe
atgtagatgccatcaaagaagctct

SEQ ID NO: 136067 - DNA, 25 bp, Artificial
  Probe
tagacatcatctctaatgagttctc

SEQ ID NO: 136068 - DNA, 25 bp, Artificial
  Probe
ttccagtacttctgtgattatggcc

SEQ ID NO: 136069 - DNA, 25 bp, Artificial
  Probe
ccgacttcgctatcatggctttaaa

SEQ ID NO: 136070 - DNA, 25 bp, Artificial
  Probe
tttccagtacttctgtgattatggc

SEQ ID NO: 136071 - DNA, 25 bp, Artificial
  Probe
agcatgatatccttttccagtactt

SEQ ID NO: 136072 - DNA, 25 bp, Artificial
  Probe
gcatgatatccttttccagtacttc

SEQ ID NO: 136073 - DNA, 25 bp, Artificial
  Probe
aagcatgatatccttttccagtact

SEQ ID NO: 136074 - DNA, 25 bp, Artificial
  Probe
atccttttccagtacttctgtgatt

SEQ ID NO: 136075 - DNA, 25 bp, Artificial
  Probe
catgatatccttttccagtacttct

SEQ ID NO: 136076 - DNA, 25 bp, Artificial
  Probe
aaagcatgatatccttttccagtac

SEQ ID NO: 136077 - DNA, 25 bp, Artificial
  Probe
cccgacttcgctatcatggctttaa

SEQ ID NO: 136078 - DNA, 25 bp, Artificial
  Probe
tccttttccagtacttctgtgatta

SEQ ID NO: 136079 - DNA, 25 bp, Artificial
  Probe
tatccttttccagtacttctgtgat

SEQ ID NO: 136080 - DNA, 25 bp, Artificial
  Probe
atatccttttccagtacttctgtga

SEQ ID NO: 136081 - DNA, 25 bp, Artificial
  Probe
tgatatccttttccagtacttctgt

SEQ ID NO: 136082 - DNA, 25 bp, Artificial
  Probe
gatatccttttccagtacttctgtg

SEQ ID NO: 136083 - DNA, 25 bp, Artificial
  Probe
ttaaagcatgatatccttttccagt

SEQ ID NO: 136084 - DNA, 25 bp, Artificial
  Probe
ccttttccagtacttctgtgattat

SEQ ID NO: 136085 - DNA, 25 bp, Artificial
  Probe
ttgggatggctcatttccacagttt

SEQ ID NO: 136086 - DNA, 25 bp, Artificial
  Probe
ttttccagtacttctgtgattatgg

SEQ ID NO: 136087 - DNA, 25 bp, Artificial
  Probe
atgatatccttttccagtacttctg

SEQ ID NO: 136088 - DNA, 25 bp, Artificial
  Probe
cgacttcgctatcatggctttaaag

SEQ ID NO: 136089 - DNA, 25 bp, Artificial
  Probe
taaagcatgatatccttttccagta

SEQ ID NO: 136090 - DNA, 25 bp, Artificial
  Probe
tttaaagcatgatatccttttccag

SEQ ID NO: 136091 - DNA, 25 bp, Artificial
  Probe
cttttccagtacttctgtgattatg

SEQ ID NO: 136092 - DNA, 25 bp, Artificial
  Probe
tccagtacttctgtgattatggccc

SEQ ID NO: 136093 - DNA, 25 bp, Artificial
  Probe
tgggatggctcatttccacagtttt

SEQ ID NO: 136094 - DNA, 25 bp, Artificial
  Probe
ctttaaagcatgatatccttttcca

SEQ ID NO: 136095 - DNA, 25 bp, Artificial
  Probe
atgtgaatacctaccttcagacatc

SEQ ID NO: 136096 - DNA, 25 bp, Artificial
  Probe
tatgtgaatacctaccttcagacat

SEQ ID NO: 136097 - DNA, 25 bp, Artificial
  Probe
atatgtgaatacctaccttcagaca

SEQ ID NO: 136098 - DNA, 25 bp, Artificial
  Probe
gaatacctaccttcagacatcgcca

SEQ ID NO: 136099 - DNA, 25 bp, Artificial
  Probe
tgtgaatacctaccttcagacatcg

SEQ ID NO: 136100 - DNA, 25 bp, Artificial
  Probe
aatatgtgaatacctaccttcagac

SEQ ID NO: 136101 - DNA, 25 bp, Artificial
  Probe
tgaatatgtgaatacctaccttcag

SEQ ID NO: 136102 - DNA, 25 bp, Artificial
  Probe
gaatatgtgaatacctaccttcaga

SEQ ID NO: 136103 - DNA, 25 bp, Artificial
  Probe
ttgaatatgtgaatacctaccttca

SEQ ID NO: 136104 - DNA, 25 bp, Artificial
  Probe
tttgaatatgtgaatacctaccttc

SEQ ID NO: 136105 - DNA, 25 bp, Artificial
  Probe
gtgaatacctaccttcagacatcgc

SEQ ID NO: 136106 - DNA, 25 bp, Artificial
  Probe
aacctgatcatggatgtaacgacaa

SEQ ID NO: 136107 - DNA, 25 bp, Artificial
  Probe
ataaacctgatcatggatgtaacga

SEQ ID NO: 136108 - DNA, 25 bp, Artificial
  Probe
taaacctgatcatggatgtaacgac

SEQ ID NO: 136109 - DNA, 25 bp, Artificial
  Probe
tgaatacctaccttcagacatcgcc

SEQ ID NO: 136110 - DNA, 25 bp, Artificial
  Probe
tgaggattttgaatatgtgaatacc

SEQ ID NO: 136111 - DNA, 25 bp, Artificial
  Probe
acctgatcatggatgtaacgacaaa

SEQ ID NO: 136112 - DNA, 25 bp, Artificial
  Probe
aaacctgatcatggatgtaacgaca

SEQ ID NO: 136113 - DNA, 25 bp, Artificial
  Probe
ttttgaatatgtgaatacctacctt

SEQ ID NO: 136114 - DNA, 25 bp, Artificial
  Probe
gaggattttgaatatgtgaatacct

SEQ ID NO: 136115 - DNA, 25 bp, Artificial
  Probe
actattgaggattttgaatatgtga

SEQ ID NO: 136116 - DNA, 25 bp, Artificial
  Probe
attttgaatatgtgaatacctacct

SEQ ID NO: 136117 - DNA, 25 bp, Artificial
  Probe
gattttgaatatgtgaatacctacc

SEQ ID NO: 136118 - DNA, 25 bp, Artificial
  Probe
ggattttgaatatgtgaatacctac

SEQ ID NO: 136119 - DNA, 25 bp, Artificial
  Probe
ttgaggattttgaatatgtgaatac

SEQ ID NO: 136120 - DNA, 25 bp, Artificial
  Probe
cactattgaggattttgaatatgtg

SEQ ID NO: 136121 - DNA, 25 bp, Artificial
  Probe
ctattgaggattttgaatatgtgaa

SEQ ID NO: 136122 - DNA, 25 bp, Artificial
  Probe
aggattttgaatatgtgaataccta

SEQ ID NO: 136123 - DNA, 25 bp, Artificial
  Probe
gacacggcttagaaggcttagaatt

SEQ ID NO: 136124 - DNA, 25 bp, Artificial
  Probe
gggagccatattcatttacaaacct

SEQ ID NO: 136125 - DNA, 25 bp, Artificial
  Probe
caatcctctcaacattaatcaacaa

SEQ ID NO: 136126 - DNA, 25 bp, Artificial
  Probe
atcagagaacagcaggaagtaaagt

SEQ ID NO: 136127 - DNA, 25 bp, Artificial
  Probe
ggagccatattcatttacaaacctc

SEQ ID NO: 136128 - DNA, 25 bp, Artificial
  Probe
taaagcaaagaagaatgaaccatca

SEQ ID NO: 136129 - DNA, 25 bp, Artificial
  Probe
gaataaagcaaagaagaatgaacca

SEQ ID NO: 136130 - DNA, 25 bp, Artificial
  Probe
aaggcttagaatttcttccagagat

SEQ ID NO: 136131 - DNA, 25 bp, Artificial
  Probe
agaataaagcaaagaagaatgaacc

SEQ ID NO: 136132 - DNA, 25 bp, Artificial
  Probe
gatcagagaacagcaggaagtaaag

SEQ ID NO: 136133 - DNA, 25 bp, Artificial
  Probe
aggcttagaatttcttccagagata

SEQ ID NO: 136134 - DNA, 25 bp, Artificial
  Probe
ataaagcaaagaagaatgaaccatc

SEQ ID NO: 136135 - DNA, 25 bp, Artificial
  Probe
agagaacagcaggaagtaaagtcag

SEQ ID NO: 136136 - DNA, 25 bp, Artificial
  Probe
tcagagaacagcaggaagtaaagtc

SEQ ID NO: 136137 - DNA, 25 bp, Artificial
  Probe
caatgacacggcttagaaggcttag

SEQ ID NO: 136138 - DNA, 25 bp, Artificial
  Probe
cacggcttagaaggcttagaatttc

SEQ ID NO: 136139 - DNA, 25 bp, Artificial
  Probe
cagagaacagcaggaagtaaagtca

SEQ ID NO: 136140 - DNA, 25 bp, Artificial
  Probe
ggcttagaatttcttccagagataa

SEQ ID NO: 136141 - DNA, 25 bp, Artificial
  Probe
tgacacggcttagaaggcttagaat

SEQ ID NO: 136142 - DNA, 25 bp, Artificial
  Probe
atgacacggcttagaaggcttagaa

SEQ ID NO: 136143 - DNA, 25 bp, Artificial
  Probe
aatgacacggcttagaaggcttaga

SEQ ID NO: 136144 - DNA, 25 bp, Artificial
  Probe
aataaagcaaagaagaatgaaccat

SEQ ID NO: 136145 - DNA, 25 bp, Artificial
  Probe
atcttgggagccatattcatttaca

SEQ ID NO: 136146 - DNA, 25 bp, Artificial
  Probe
ttgggagccatattcatttacaaac

SEQ ID NO: 136147 - DNA, 25 bp, Artificial
  Probe
tcttgggagccatattcatttacaa

SEQ ID NO: 136148 - DNA, 25 bp, Artificial
  Probe
acacggcttagaaggcttagaattt

SEQ ID NO: 136149 - DNA, 25 bp, Artificial
  Probe
cttgggagccatattcatttacaaa

SEQ ID NO: 136150 - DNA, 25 bp, Artificial
  Probe
caagacaatgacacggcttagaagg

SEQ ID NO: 136151 - DNA, 25 bp, Artificial
  Probe
ccaagacaatgacacggcttagaag

SEQ ID NO: 136152 - DNA, 25 bp, Artificial
  Probe
gatcttgggagccatattcatttac

SEQ ID NO: 136153 - DNA, 25 bp, Artificial
  Probe
tgggagccatattcatttacaaacc

SEQ ID NO: 136154 - DNA, 25 bp, Artificial
  Probe
cgatcttgggagccatattcattta

SEQ ID NO: 136155 - DNA, 25 bp, Artificial
  Probe
gagaacagcaggaagtaaagtcagg

SEQ ID NO: 136156 - DNA, 25 bp, Artificial
  Probe
atatgaatgatcagagaacagcagg

SEQ ID NO: 136157 - DNA, 25 bp, Artificial
  Probe
atgatcagagaacagcaggaagtaa

SEQ ID NO: 136158 - DNA, 25 bp, Artificial
  Probe
aatgatcagagaacagcaggaagta

SEQ ID NO: 136159 - DNA, 25 bp, Artificial
  Probe
acaatgacacggcttagaaggctta

SEQ ID NO: 136160 - DNA, 25 bp, Artificial
  Probe
aatatgaatgatcagagaacagcag

SEQ ID NO: 136161 - DNA, 25 bp, Artificial
  Probe
gaatatgaatgatcagagaacagca

SEQ ID NO: 136162 - DNA, 25 bp, Artificial
  Probe
tgaatatgaatgatcagagaacagc

SEQ ID NO: 136163 - DNA, 25 bp, Artificial
  Probe
tatgaatgatcagagaacagcagga

SEQ ID NO: 136164 - DNA, 25 bp, Artificial
  Probe
cggcttagaaggcttagaatttctt

SEQ ID NO: 136165 - DNA, 25 bp, Artificial
  Probe
aaagcaaagaagaatgaaccatcat

SEQ ID NO: 136166 - DNA, 25 bp, Artificial
  Probe
ggattaggtgccaagacaatgacac

SEQ ID NO: 136167 - DNA, 25 bp, Artificial
  Probe
aatcctctcaacattaatcaacaaa

SEQ ID NO: 136168 - DNA, 25 bp, Artificial
  Probe
ttaatacctatcttcagacatcgcc

SEQ ID NO: 136169 - DNA, 25 bp, Artificial
  Probe
taatacctatcttcagacatcgcca

SEQ ID NO: 136170 - DNA, 25 bp, Artificial
  Probe
atcagaagagagcagtatgttccaa

SEQ ID NO: 136171 - DNA, 25 bp, Artificial
  Probe
aatcagaagagagcagtatgttcca

SEQ ID NO: 136172 - DNA, 25 bp, Artificial
  Probe
aatacctatcttcagacatcgccag

SEQ ID NO: 136173 - DNA, 25 bp, Artificial
  Probe
tacttctgaccatgttgatgtatgc

SEQ ID NO: 136174 - DNA, 25 bp, Artificial
  Probe
gtgacaaggacatacttctgaccat

SEQ ID NO: 136175 - DNA, 25 bp, Artificial
  Probe
aactggtgacaaggacatacttctg

SEQ ID NO: 136176 - DNA, 25 bp, Artificial
  Probe
attaatacctatcttcagacatcgc

SEQ ID NO: 136177 - DNA, 25 bp, Artificial
  Probe
ccaaatcagaagagagcagtatgtt

SEQ ID NO: 136178 - DNA, 25 bp, Artificial
  Probe
ctggtgacaaggacatacttctgac

SEQ ID NO: 136179 - DNA, 25 bp, Artificial
  Probe
caaatcagaagagagcagtatgttc

SEQ ID NO: 136180 - DNA, 25 bp, Artificial
  Probe
tgacaaggacatacttctgaccatg

SEQ ID NO: 136181 - DNA, 25 bp, Artificial
  Probe
atacttctgaccatgttgatgtatg

SEQ ID NO: 136182 - DNA, 25 bp, Artificial
  Probe
catacttctgaccatgttgatgtat

SEQ ID NO: 136183 - DNA, 25 bp, Artificial
  Probe
aaatcagaagagagcagtatgttcc

SEQ ID NO: 136184 - DNA, 25 bp, Artificial
  Probe
gaccaaatcagaagagagcagtatg

SEQ ID NO: 136185 - DNA, 25 bp, Artificial
  Probe
tctgactgaggaagaaatagaagac

SEQ ID NO: 136186 - DNA, 25 bp, Artificial
  Probe
actggtgacaaggacatacttctga

SEQ ID NO: 136187 - DNA, 25 bp, Artificial
  Probe
accaaatcagaagagagcagtatgt

SEQ ID NO: 136188 - DNA, 25 bp, Artificial
  Probe
tcagaagagagcagtatgttccaaa

SEQ ID NO: 136189 - DNA, 25 bp, Artificial
  Probe
cagaagagagcagtatgttccaaac

SEQ ID NO: 136190 - DNA, 25 bp, Artificial
  Probe
ttctgaccatgttgatgtatgcgaa

SEQ ID NO: 136191 - DNA, 25 bp, Artificial
  Probe
aaactggtgacaaggacatacttct

SEQ ID NO: 136192 - DNA, 25 bp, Artificial
  Probe
caaactggtgacaaggacatacttc

SEQ ID NO: 136193 - DNA, 25 bp, Artificial
  Probe
ggaccaaatcagaagagagcagtat

SEQ ID NO: 136194 - DNA, 25 bp, Artificial
  Probe
accctcacttataggagattcagtt

SEQ ID NO: 136195 - DNA, 25 bp, Artificial
  Probe
gagtccattaatacctatcttcaga

SEQ ID NO: 136196 - DNA, 25 bp, Artificial
  Probe
tagagtttaagagtctgactgagga

SEQ ID NO: 136197 - DNA, 25 bp, Artificial
  Probe
gtagagtttaagagtctgactgagg

SEQ ID NO: 136198 - DNA, 25 bp, Artificial
  Probe
tgagtccattaatacctatcttcag

SEQ ID NO: 136199 - DNA, 25 bp, Artificial
  Probe
cctcacttataggagattcagttat

SEQ ID NO: 136200 - DNA, 25 bp, Artificial
  Probe
acatacttctgaccatgttgatgta

SEQ ID NO: 136201 - DNA, 25 bp, Artificial
  Probe
agagtttaagagtctgactgaggaa

SEQ ID NO: 136202 - DNA, 25 bp, Artificial
  Probe
cttctgaccatgttgatgtatgcga

SEQ ID NO: 136203 - DNA, 25 bp, Artificial
  Probe
cattaatacctatcttcagacatcg

SEQ ID NO: 136204 - DNA, 25 bp, Artificial
  Probe
tgtagagtttaagagtctgactgag

SEQ ID NO: 136205 - DNA, 25 bp, Artificial
  Probe
caccctcacttataggagattcagt

SEQ ID NO: 136206 - DNA, 25 bp, Artificial
  Probe
gtccattaatacctatcttcagaca

SEQ ID NO: 136207 - DNA, 25 bp, Artificial
  Probe
gacatacttctgaccatgttgatgt

SEQ ID NO: 136208 - DNA, 25 bp, Artificial
  Probe
tcaaactggtgacaaggacatactt

SEQ ID NO: 136209 - DNA, 25 bp, Artificial
  Probe
ttcaaactggtgacaaggacatact

SEQ ID NO: 136210 - DNA, 25 bp, Artificial
  Probe
gttcaaactggtgacaaggacatac

SEQ ID NO: 136211 - DNA, 25 bp, Artificial
  Probe
ccctcacttataggagattcagtta

SEQ ID NO: 136212 - DNA, 25 bp, Artificial
  Probe
aagagagcagtatgttccaaaccaa

SEQ ID NO: 136213 - DNA, 25 bp, Artificial
  Probe
tgtgttacttctctgtttgtgacta

SEQ ID NO: 136214 - DNA, 25 bp, Artificial
  Probe
ttctaccaggtctaatattgactgc

SEQ ID NO: 136215 - DNA, 25 bp, Artificial
  Probe
gctcagagttactaaataggtgtgt

SEQ ID NO: 136216 - DNA, 25 bp, Artificial
  Probe
agagttactaaataggtgtgtgagg

SEQ ID NO: 136217 - DNA, 25 bp, Artificial
  Probe
ctgtgttacttctctgtttgtgact

SEQ ID NO: 136218 - DNA, 25 bp, Artificial
  Probe
ggctcagagttactaaataggtgtg

SEQ ID NO: 136219 - DNA, 25 bp, Artificial
  Probe
gagttactaaataggtgtgtgaggc

SEQ ID NO: 136220 - DNA, 25 bp, Artificial
  Probe
gtgttacttctctgtttgtgactag

SEQ ID NO: 136221 - DNA, 25 bp, Artificial
  Probe
ccttctaccaggtctaatattgact

SEQ ID NO: 136222 - DNA, 25 bp, Artificial
  Probe
tctaccaggtctaatattgactgcc

SEQ ID NO: 136223 - DNA, 25 bp, Artificial
  Probe
cagagttactaaataggtgtgtgag

SEQ ID NO: 136224 - DNA, 25 bp, Artificial
  Probe
ctcagagttactaaataggtgtgtg

SEQ ID NO: 136225 - DNA, 25 bp, Artificial
  Probe
taccaggtctaatattgactgcctc

SEQ ID NO: 136226 - DNA, 25 bp, Artificial
  Probe
ctaccaggtctaatattgactgcct

SEQ ID NO: 136227 - DNA, 25 bp, Artificial
  Probe
tcaaactcgcacttgtattggtaaa

SEQ ID NO: 136228 - DNA, 25 bp, Artificial
  Probe
ttcaaactcgcacttgtattggtaa

SEQ ID NO: 136229 - DNA, 25 bp, Artificial
  Probe
tttcaaactcgcacttgtattggta

SEQ ID NO: 136230 - DNA, 25 bp, Artificial
  Probe
tcggctcagagttactaaataggtg

SEQ ID NO: 136231 - DNA, 25 bp, Artificial
  Probe
gtcggctcagagttactaaataggt

SEQ ID NO: 136232 - DNA, 25 bp, Artificial
  Probe
tcagagttactaaataggtgtgtga

SEQ ID NO: 136233 - DNA, 25 bp, Artificial
  Probe
cttctaccaggtctaatattgactg

SEQ ID NO: 136234 - DNA, 25 bp, Artificial
  Probe
ctgtcgcatgagaacattaacaagg

SEQ ID NO: 136235 - DNA, 25 bp, Artificial
  Probe
cctgtcgcatgagaacattaacaag

SEQ ID NO: 136236 - DNA, 25 bp, Artificial
  Probe
cggctcagagttactaaataggtgt

SEQ ID NO: 136237 - DNA, 25 bp, Artificial
  Probe
agtcggctcagagttactaaatagg

SEQ ID NO: 136238 - DNA, 25 bp, Artificial
  Probe
gtcaacatgccaagagtgaaataat

SEQ ID NO: 136239 - DNA, 25 bp, Artificial
  Probe
tagtcaacatgccaagagtgaaata

SEQ ID NO: 136240 - DNA, 25 bp, Artificial
  Probe
gctgtgttacttctctgtttgtgac

SEQ ID NO: 136241 - DNA, 25 bp, Artificial
  Probe
atagtcaacatgccaagagtgaaat

SEQ ID NO: 136242 - DNA, 25 bp, Artificial
  Probe
taataataaaggcgtttcaaactcg

SEQ ID NO: 136243 - DNA, 25 bp, Artificial
  Probe
agtcaacatgccaagagtgaaataa

SEQ ID NO: 136244 - DNA, 25 bp, Artificial
  Probe
ccaggtctaatattgactgcctctg

SEQ ID NO: 136245 - DNA, 25 bp, Artificial
  Probe
tcaacatgccaagagtgaaataata

SEQ ID NO: 136246 - DNA, 25 bp, Artificial
  Probe
gatagtcaacatgccaagagtgaaa

SEQ ID NO: 136247 - DNA, 25 bp, Artificial
  Probe
caacatgccaagagtgaaataataa

SEQ ID NO: 136248 - DNA, 25 bp, Artificial
  Probe
cgatagtcaacatgccaagagtgaa

SEQ ID NO: 136249 - DNA, 25 bp, Artificial
  Probe
tctaatattgactgcctctgcctgt

SEQ ID NO: 136250 - DNA, 25 bp, Artificial
  Probe
tagtcggctcagagttactaaatag

SEQ ID NO: 136251 - DNA, 25 bp, Artificial
  Probe
ctagtcggctcagagttactaaata

SEQ ID NO: 136252 - DNA, 25 bp, Artificial
  Probe
tcacctagagcctagaaccttctac

SEQ ID NO: 136253 - DNA, 25 bp, Artificial
  Probe
gtcacctagagcctagaaccttcta

SEQ ID NO: 136254 - DNA, 25 bp, Artificial
  Probe
accaggtctaatattgactgcctct

SEQ ID NO: 136255 - DNA, 25 bp, Artificial
  Probe
ctaatattgactgcctctgcctgtc

SEQ ID NO: 136256 - DNA, 25 bp, Artificial
  Probe
gtctaatattgactgcctctgcctg

SEQ ID NO: 136257 - DNA, 25 bp, Artificial
  Probe
gtttcaaactcgcacttgtattggt

SEQ ID NO: 136258 - DNA, 25 bp, Artificial
  Probe
gagcaggagtaatgtaatgtggaag

SEQ ID NO: 136259 - DNA, 25 bp, Artificial
  Probe
agagcaggagtaatgtaatgtggaa

SEQ ID NO: 136260 - DNA, 25 bp, Artificial
  Probe
aagagcaggagtaatgtaatgtgga

SEQ ID NO: 136261 - DNA, 25 bp, Artificial
  Probe
agcaggagtaatgtaatgtggaagg

SEQ ID NO: 136262 - DNA, 25 bp, Artificial
  Probe
acctcttatttgtctgaactccttt

SEQ ID NO: 136263 - DNA, 25 bp, Artificial
  Probe
aacctcttatttgtctgaactcctt

SEQ ID NO: 136264 - DNA, 25 bp, Artificial
  Probe
aaagagcaggagtaatgtaatgtgg

SEQ ID NO: 136265 - DNA, 25 bp, Artificial
  Probe
tgggtaaataaagttgttgtgtgat

SEQ ID NO: 136266 - DNA, 25 bp, Artificial
  Probe
atgggtaaataaagttgttgtgtga

SEQ ID NO: 136267 - DNA, 25 bp, Artificial
  Probe
tatttgtctgaactcctttctcctg

SEQ ID NO: 136268 - DNA, 25 bp, Artificial
  Probe
ttatttgtctgaactcctttctcct

SEQ ID NO: 136269 - DNA, 25 bp, Artificial
  Probe
gggtaaataaagttgttgtgtgatg

SEQ ID NO: 136270 - DNA, 25 bp, Artificial
  Probe
cttatttgtctgaactcctttctcc

SEQ ID NO: 136271 - DNA, 25 bp, Artificial
  Probe
cctcttatttgtctgaactcctttc

SEQ ID NO: 136272 - DNA, 25 bp, Artificial
  Probe
gtatccatttacgacatccctagaa

SEQ ID NO: 136273 - DNA, 25 bp, Artificial
  Probe
tatccatttacgacatccctagaag

SEQ ID NO: 136274 - DNA, 25 bp, Artificial
  Probe
caacctcttatttgtctgaactcct

SEQ ID NO: 136275 - DNA, 25 bp, Artificial
  Probe
taaagagcaggagtaatgtaatgtg

SEQ ID NO: 136276 - DNA, 25 bp, Artificial
  Probe
cctctagcctcagttaaatcaagtc

SEQ ID NO: 136277 - DNA, 25 bp, Artificial
  Probe
agtcaacctcttatttgtctgaact

SEQ ID NO: 136278 - DNA, 25 bp, Artificial
  Probe
tgaagtcaacctcttatttgtctga

SEQ ID NO: 136279 - DNA, 25 bp, Artificial
  Probe
tcaacctcttatttgtctgaactcc

SEQ ID NO: 136280 - DNA, 25 bp, Artificial
  Probe
gtcaacctcttatttgtctgaactc

SEQ ID NO: 136281 - DNA, 25 bp, Artificial
  Probe
atccatttacgacatccctagaagt

SEQ ID NO: 136282 - DNA, 25 bp, Artificial
  Probe
ctctagcctcagttaaatcaagtcg

SEQ ID NO: 136283 - DNA, 25 bp, Artificial
  Probe
ctaaagagcaggagtaatgtaatgt

SEQ ID NO: 136284 - DNA, 25 bp, Artificial
  Probe
atgaagtcaacctcttatttgtctg

SEQ ID NO: 136285 - DNA, 25 bp, Artificial
  Probe
ggtaaataaagttgttgtgtgatgt

SEQ ID NO: 136286 - DNA, 25 bp, Artificial
  Probe
aagtcaacctcttatttgtctgaac

SEQ ID NO: 136287 - DNA, 25 bp, Artificial
  Probe
gatcagccagttgtccattctctac

SEQ ID NO: 136288 - DNA, 25 bp, Artificial
  Probe
tcttatttgtctgaactcctttctc

SEQ ID NO: 136289 - DNA, 25 bp, Artificial
  Probe
ctcttatttgtctgaactcctttct

SEQ ID NO: 136290 - DNA, 25 bp, Artificial
  Probe
gaagtcaacctcttatttgtctgaa

SEQ ID NO: 136291 - DNA, 25 bp, Artificial
  Probe
tgatgaagtcaacctcttatttgtc

SEQ ID NO: 136292 - DNA, 25 bp, Artificial
  Probe
gatgaagtcaacctcttatttgtct

SEQ ID NO: 136293 - DNA, 25 bp, Artificial
  Probe
gttccaccacactgtatccatttac

SEQ ID NO: 136294 - DNA, 25 bp, Artificial
  Probe
atttgtctgaactcctttctcctga

SEQ ID NO: 136295 - DNA, 25 bp, Artificial
  Probe
actgtatccatttacgacatcccta

SEQ ID NO: 136296 - DNA, 25 bp, Artificial
  Probe
catgggtaaataaagttgttgtgtg

SEQ ID NO: 136297 - DNA, 25 bp, Artificial
  Probe
tcatgggtaaataaagttgttgtgt

SEQ ID NO: 136298 - DNA, 25 bp, Artificial
  Probe
ctgtatccatttacgacatccctag

SEQ ID NO: 136299 - DNA, 25 bp, Artificial
  Probe
gtcatgggtaaataaagttgttgtg

SEQ ID NO: 136300 - DNA, 25 bp, Artificial
  Probe
tgtatccatttacgacatccctaga

SEQ ID NO: 136301 - DNA, 25 bp, Artificial
  Probe
agtcatgggtaaataaagttgttgt

SEQ ID NO: 136302 - DNA, 25 bp, Artificial
  Probe
catttacgacatccctagaagtcat

SEQ ID NO: 136303 - DNA, 25 bp, Artificial
  Probe
atacggtacaatatctccagaggaa

SEQ ID NO: 136304 - DNA, 25 bp, Artificial
  Probe
aatacggtacaatatctccagagga

SEQ ID NO: 136305 - DNA, 25 bp, Artificial
  Probe
tacggtacaatatctccagaggaag

SEQ ID NO: 136306 - DNA, 25 bp, Artificial
  Probe
ccaacttctatgcactactgacaag

SEQ ID NO: 136307 - DNA, 25 bp, Artificial
  Probe
caagatggagaaggaatacggaagc

SEQ ID NO: 136308 - DNA, 25 bp, Artificial
  Probe
ggtgaaatacggtacaatatctcca

SEQ ID NO: 136309 - DNA, 25 bp, Artificial
  Probe
tggtgaaatacggtacaatatctcc

SEQ ID NO: 136310 - DNA, 25 bp, Artificial
  Probe
aaatacggtacaatatctccagagg

SEQ ID NO: 136311 - DNA, 25 bp, Artificial
  Probe
atgatgacacagtatcgaacacctt

SEQ ID NO: 136312 - DNA, 25 bp, Artificial
  Probe
aatgatgacacagtatcgaacacct

SEQ ID NO: 136313 - DNA, 25 bp, Artificial
  Probe
caagatggctttactaaccgtgaaa

SEQ ID NO: 136314 - DNA, 25 bp, Artificial
  Probe
tgaaatacggtacaatatctccaga

SEQ ID NO: 136315 - DNA, 25 bp, Artificial
  Probe
gtgaaatacggtacaatatctccag

SEQ ID NO: 136316 - DNA, 25 bp, Artificial
  Probe
aaatgatggtgaaatacggtacaat

SEQ ID NO: 136317 - DNA, 25 bp, Artificial
  Probe
caacttctatgcactactgacaagc

SEQ ID NO: 136318 - DNA, 25 bp, Artificial
  Probe
tgatggtgaaatacggtacaatatc

SEQ ID NO: 136319 - DNA, 25 bp, Artificial
  Probe
atccttaatccttatttcctcttgg

SEQ ID NO: 136320 - DNA, 25 bp, Artificial
  Probe
gaaatacggtacaatatctccagag

SEQ ID NO: 136321 - DNA, 25 bp, Artificial
  Probe
atttgatgctgtttccagtagttct

SEQ ID NO: 136322 - DNA, 25 bp, Artificial
  Probe
atggtgaaatacggtacaatatctc

SEQ ID NO: 136323 - DNA, 25 bp, Artificial
  Probe
cagagaagagtcacgaagaaacaga

SEQ ID NO: 136324 - DNA, 25 bp, Artificial
  Probe
ctagaagatgaagtagcagaggctt

SEQ ID NO: 136325 - DNA, 25 bp, Artificial
  Probe
gatggtgaaatacggtacaatatct

SEQ ID NO: 136326 - DNA, 25 bp, Artificial
  Probe
caggcacatactctagaagatgaag

SEQ ID NO: 136327 - DNA, 25 bp, Artificial
  Probe
gaagcctacttggaagccattagaa

SEQ ID NO: 136328 - DNA, 25 bp, Artificial
  Probe
aatgatggtgaaatacggtacaata

SEQ ID NO: 136329 - DNA, 25 bp, Artificial
  Probe
gatgacacagtatcgaacaccttga

SEQ ID NO: 136330 - DNA, 25 bp, Artificial
  Probe
atgatggtgaaatacggtacaatat

SEQ ID NO: 136331 - DNA, 25 bp, Artificial
  Probe
aggcacatactctagaagatgaagt

SEQ ID NO: 136332 - DNA, 25 bp, Artificial
  Probe
ccaagatggagaaggaatacggaag

SEQ ID NO: 136333 - DNA, 25 bp, Artificial
  Probe
atgacacagtatcgaacaccttgac

SEQ ID NO: 136334 - DNA, 25 bp, Artificial
  Probe
tgatgacacagtatcgaacaccttg

SEQ ID NO: 136335 - DNA, 25 bp, Artificial
  Probe
gacagaggagtgtttgacaagattg

SEQ ID NO: 136336 - DNA, 25 bp, Artificial
  Probe
aagagtcacgaagaaacagacagta

SEQ ID NO: 136337 - DNA, 25 bp, Artificial
  Probe
tacaatatctccagaggaaggcgtt

SEQ ID NO: 136338 - DNA, 25 bp, Artificial
  Probe
tccttaatccttatttcctcttgga

SEQ ID NO: 136339 - DNA, 25 bp, Artificial
  Probe
ccaggcacatactctagaagatgaa

SEQ ID NO: 136340 - DNA, 25 bp, Artificial
  Probe
aaagacagatgaagccaaagggaaa

SEQ ID NO: 136341 - DNA, 25 bp, Artificial
  Probe
aaatgatgacacagtatcgaacacc

SEQ ID NO: 136342 - DNA, 25 bp, Artificial
  Probe
gaagacgttgattgactttgtgaaa

SEQ ID NO: 136343 - DNA, 25 bp, Artificial
  Probe
cagaagcctacttggaagccattag

SEQ ID NO: 136344 - DNA, 25 bp, Artificial
  Probe
aagatggagaaggaatacggaagcc

SEQ ID NO: 136345 - DNA, 25 bp, Artificial
  Probe
agagaagagtcacgaagaaacagac

SEQ ID NO: 136346 - DNA, 25 bp, Artificial
  Probe
ccagagaagagtcacgaagaaacag

SEQ ID NO: 136347 - DNA, 25 bp, Artificial
  Probe
acggtacaatatctccagaggaagg

SEQ ID NO: 136348 - DNA, 25 bp, Artificial
  Probe
aagttatggaatactctgggtgtct

SEQ ID NO: 136349 - DNA, 25 bp, Artificial
  Probe
agttatggaatactctgggtgtctg

SEQ ID NO: 136350 - DNA, 25 bp, Artificial
  Probe
cataatggatgggttacacagatcg

SEQ ID NO: 136351 - DNA, 25 bp, Artificial
  Probe
agacaagaccatcatcatgtggaag

SEQ ID NO: 136352 - DNA, 25 bp, Artificial
  Probe
gagacaagaccatcatcatgtggaa

SEQ ID NO: 136353 - DNA, 25 bp, Artificial
  Probe
gttatggaatactctgggtgtctgc

SEQ ID NO: 136354 - DNA, 25 bp, Artificial
  Probe
ataatggatgggttacacagatcgc

SEQ ID NO: 136355 - DNA, 25 bp, Artificial
  Probe
tcaaggtgtggaatctggctaactg

SEQ ID NO: 136356 - DNA, 25 bp, Artificial
  Probe
gtcaaggtgtggaatctggctaact

SEQ ID NO: 136357 - DNA, 25 bp, Artificial
  Probe
ttgttagcgatgttgtcatctcctc

SEQ ID NO: 136358 - DNA, 25 bp, Artificial
  Probe
cccactttgttagcgatgttgtcat

SEQ ID NO: 136359 - DNA, 25 bp, Artificial
  Probe
tagcgatgttgtcatctcctctgat

SEQ ID NO: 136360 - DNA, 25 bp, Artificial
  Probe
ctcccactttgttagcgatgttgtc

SEQ ID NO: 136361 - DNA, 25 bp, Artificial
  Probe
gacaagaccatcatcatgtggaagc

SEQ ID NO: 136362 - DNA, 25 bp, Artificial
  Probe
gttagcgatgttgtcatctcctctg

SEQ ID NO: 136363 - DNA, 25 bp, Artificial
  Probe
actttgttagcgatgttgtcatctc

SEQ ID NO: 136364 - DNA, 25 bp, Artificial
  Probe
ttagcgatgttgtcatctcctctga

SEQ ID NO: 136365 - DNA, 25 bp, Artificial
  Probe
cactttgttagcgatgttgtcatct

SEQ ID NO: 136366 - DNA, 25 bp, Artificial
  Probe
ctaactgcaagctaaagaccaacca

SEQ ID NO: 136367 - DNA, 25 bp, Artificial
  Probe
ttatggaatactctgggtgtctgca

SEQ ID NO: 136368 - DNA, 25 bp, Artificial
  Probe
tgttagcgatgttgtcatctcctct

SEQ ID NO: 136369 - DNA, 25 bp, Artificial
  Probe
cactcccactttgttagcgatgttg

SEQ ID NO: 136370 - DNA, 25 bp, Artificial
  Probe
ctttgttagcgatgttgtcatctcc

SEQ ID NO: 136371 - DNA, 25 bp, Artificial
  Probe
aagaccatcatcatgtggaagctga

SEQ ID NO: 136372 - DNA, 25 bp, Artificial
  Probe
caagaccatcatcatgtggaagctg

SEQ ID NO: 136373 - DNA, 25 bp, Artificial
  Probe
taactgcaagctaaagaccaaccac

SEQ ID NO: 136374 - DNA, 25 bp, Artificial
  Probe
tcactcccactttgttagcgatgtt

SEQ ID NO: 136375 - DNA, 25 bp, Artificial
  Probe
cgagacaagaccatcatcatgtgga

SEQ ID NO: 136376 - DNA, 25 bp, Artificial
  Probe
tttgttagcgatgttgtcatctcct

SEQ ID NO: 136377 - DNA, 25 bp, Artificial
  Probe
gaatctggctaactgcaagctaaag

SEQ ID NO: 136378 - DNA, 25 bp, Artificial
  Probe
acaagaccatcatcatgtggaagct

SEQ ID NO: 136379 - DNA, 25 bp, Artificial
  Probe
ccataatggatgggttacacagatc

SEQ ID NO: 136380 - DNA, 25 bp, Artificial
  Probe
ccactttgttagcgatgttgtcatc

SEQ ID NO: 136381 - DNA, 25 bp, Artificial
  Probe
tcccactttgttagcgatgttgtca

SEQ ID NO: 136382 - DNA, 25 bp, Artificial
  Probe
actcccactttgttagcgatgttgt

SEQ ID NO: 136383 - DNA, 25 bp, Artificial
  Probe
aatctggctaactgcaagctaaaga

SEQ ID NO: 136384 - DNA, 25 bp, Artificial
  Probe
taatggatgggttacacagatcgcc

SEQ ID NO: 136385 - DNA, 25 bp, Artificial
  Probe
tcgagacaagaccatcatcatgtgg

SEQ ID NO: 136386 - DNA, 25 bp, Artificial
  Probe
ctgcaagctaaagaccaaccacatt

SEQ ID NO: 136387 - DNA, 25 bp, Artificial
  Probe
agaccatcatcatgtggaagctgac

SEQ ID NO: 136388 - DNA, 25 bp, Artificial
  Probe
gtcactcccactttgttagcgatgt

SEQ ID NO: 136389 - DNA, 25 bp, Artificial
  Probe
atctggctaactgcaagctaaagac

SEQ ID NO: 136390 - DNA, 25 bp, Artificial
  Probe
ttcgaggtcactcccactttgttag

SEQ ID NO: 136391 - DNA, 25 bp, Artificial
  Probe
cttcgaggtcactcccactttgtta

SEQ ID NO: 136392 - DNA, 25 bp, Artificial
  Probe
tggaatctggctaactgcaagctaa

SEQ ID NO: 136393 - DNA, 25 bp, Artificial
  Probe
cttagattaactgtgctgagactcc

SEQ ID NO: 136394 - DNA, 25 bp, Artificial
  Probe
tgttgtctcttagattaactgtgct

SEQ ID NO: 136395 - DNA, 25 bp, Artificial
  Probe
ttgtctcttagattaactgtgctga

SEQ ID NO: 136396 - DNA, 25 bp, Artificial
  Probe
gttgtctcttagattaactgtgctg

SEQ ID NO: 136397 - DNA, 25 bp, Artificial
  Probe
tcttagattaactgtgctgagactc

SEQ ID NO: 136398 - DNA, 25 bp, Artificial
  Probe
ctcttagattaactgtgctgagact

SEQ ID NO: 136399 - DNA, 25 bp, Artificial
  Probe
tgtctcttagattaactgtgctgag

SEQ ID NO: 136400 - DNA, 25 bp, Artificial
  Probe
tccaagaatactataacagtcctga

SEQ ID NO: 136401 - DNA, 25 bp, Artificial
  Probe
tcttgtcaagttatctgaattgtgt

SEQ ID NO: 136402 - DNA, 25 bp, Artificial
  Probe
ttccaagaatactataacagtcctg

SEQ ID NO: 136403 - DNA, 25 bp, Artificial
  Probe
ctcttgtcaagttatctgaattgtg

SEQ ID NO: 136404 - DNA, 25 bp, Artificial
  Probe
tctcttgtcaagttatctgaattgt

SEQ ID NO: 136405 - DNA, 25 bp, Artificial
  Probe
ccaagaatactataacagtcctgat

SEQ ID NO: 136406 - DNA, 25 bp, Artificial
  Probe
tcaagttatctgaattgtgtaacca

SEQ ID NO: 136407 - DNA, 25 bp, Artificial
  Probe
ccttataggagacatagtcaagttc

SEQ ID NO: 136408 - DNA, 25 bp, Artificial
  Probe
tccagaacaaatactctcacatctc

SEQ ID NO: 136409 - DNA, 25 bp, Artificial
  Probe
gtcaagttatctgaattgtgtaacc

SEQ ID NO: 136410 - DNA, 25 bp, Artificial
  Probe
cagaacaaatactctcacatctcca

SEQ ID NO: 136411 - DNA, 25 bp, Artificial
  Probe
taacccagtgaaattcttctcttgt

SEQ ID NO: 136412 - DNA, 25 bp, Artificial
  Probe
ttccagaacaaatactctcacatct

SEQ ID NO: 136413 - DNA, 25 bp, Artificial
  Probe
agaacaaatactctcacatctccat

SEQ ID NO: 136414 - DNA, 25 bp, Artificial
  Probe
ccttccagaacaaatactctcacat

SEQ ID NO: 136415 - DNA, 25 bp, Artificial
  Probe
cttccagaacaaatactctcacatc

SEQ ID NO: 136416 - DNA, 25 bp, Artificial
  Probe
ttcttctcttgtcaagttatctgaa

SEQ ID NO: 136417 - DNA, 25 bp, Artificial
  Probe
ccagaacaaatactctcacatctcc

SEQ ID NO: 136418 - DNA, 25 bp, Artificial
  Probe
ataacccagtgaaattcttctcttg

SEQ ID NO: 136419 - DNA, 25 bp, Artificial
  Probe
tctctggtccaataactcaaagaag

SEQ ID NO: 136420 - DNA, 25 bp, Artificial
  Probe
ctctctggtccaataactcaaagaa

SEQ ID NO: 136421 - DNA, 25 bp, Artificial
  Probe
tcttctcttgtcaagttatctgaat

SEQ ID NO: 136422 - DNA, 25 bp, Artificial
  Probe
attcttctcttgtcaagttatctga

SEQ ID NO: 136423 - DNA, 25 bp, Artificial
  Probe
aacccagtgaaattcttctcttgtc

SEQ ID NO: 136424 - DNA, 25 bp, Artificial
  Probe
cttataggagacatagtcaagttca

SEQ ID NO: 136425 - DNA, 25 bp, Artificial
  Probe
tggtccaataactcaaagaagcaag

SEQ ID NO: 136426 - DNA, 25 bp, Artificial
  Probe
ctggtccaataactcaaagaagcaa

SEQ ID NO: 136427 - DNA, 25 bp, Artificial
  Probe
aagagggcaactttgtactattcag

SEQ ID NO: 136428 - DNA, 25 bp, Artificial
  Probe
cccagtgaaattcttctcttgtcaa

SEQ ID NO: 136429 - DNA, 25 bp, Artificial
  Probe
caagttatctgaattgtgtaaccat

SEQ ID NO: 136430 - DNA, 25 bp, Artificial
  Probe
tgtcaagttatctgaattgtgtaac

SEQ ID NO: 136431 - DNA, 25 bp, Artificial
  Probe
ttagattaactgtgctgagactccc

SEQ ID NO: 136432 - DNA, 25 bp, Artificial
  Probe
ggtccaataactcaaagaagcaagg

SEQ ID NO: 136433 - DNA, 25 bp, Artificial
  Probe
ttgtcaagttatctgaattgtgtaa

SEQ ID NO: 136434 - DNA, 25 bp, Artificial
  Probe
aataacccagtgaaattcttctctt

SEQ ID NO: 136435 - DNA, 25 bp, Artificial
  Probe
gaacaaatactctcacatctccatg

SEQ ID NO: 136436 - DNA, 25 bp, Artificial
  Probe
aataactcaaagaagcaaggcgatg

SEQ ID NO: 136437 - DNA, 25 bp, Artificial
  Probe
caataactcaaagaagcaaggcgat

SEQ ID NO: 136438 - DNA, 25 bp, Artificial
  Probe
ctcctgctccttatgaagtatccag

SEQ ID NO: 136439 - DNA, 25 bp, Artificial
  Probe
tcctgctccttatgaagtatccaga

SEQ ID NO: 136440 - DNA, 25 bp, Artificial
  Probe
caagattgaggaggagaaggacaac

SEQ ID NO: 136441 - DNA, 25 bp, Artificial
  Probe
ctgtctgtgggtctaacttgtttac

SEQ ID NO: 136442 - DNA, 25 bp, Artificial
  Probe
caacctgaagtctgagttccatctg

SEQ ID NO: 136443 - DNA, 25 bp, Artificial
  Probe
tcaagaagacagactactttgttcc

SEQ ID NO: 136444 - DNA, 25 bp, Artificial
  Probe
acaacctgaagtctgagttccatct

SEQ ID NO: 136445 - DNA, 25 bp, Artificial
  Probe
ttcaagaagacagactactttgttc

SEQ ID NO: 136446 - DNA, 25 bp, Artificial
  Probe
caagaagacagactactttgttccc

SEQ ID NO: 136447 - DNA, 25 bp, Artificial
  Probe
aagacagactactttgttcccttct

SEQ ID NO: 136448 - DNA, 25 bp, Artificial
  Probe
agaagacagactactttgttccctt

SEQ ID NO: 136449 - DNA, 25 bp, Artificial
  Probe
aagaagacagactactttgttccct

SEQ ID NO: 136450 - DNA, 25 bp, Artificial
  Probe
tgcttcaagaagacagactactttg

SEQ ID NO: 136451 - DNA, 25 bp, Artificial
  Probe
aagccaggatatcatagagccttaa

SEQ ID NO: 136452 - DNA, 25 bp, Artificial
  Probe
gacaacctgaagtctgagttccatc

SEQ ID NO: 136453 - DNA, 25 bp, Artificial
  Probe
gcatgagattcaaagatacatcact

SEQ ID NO: 136454 - DNA, 25 bp, Artificial
  Probe
aagatgaagctgccttataccgatg

SEQ ID NO: 136455 - DNA, 25 bp, Artificial
  Probe
caagatgaagctgccttataccgat

SEQ ID NO: 136456 - DNA, 25 bp, Artificial
  Probe
gctcctgctccttatgaagtatcca

SEQ ID NO: 136457 - DNA, 25 bp, Artificial
  Probe
gaaggacaacctgaagtctgagttc

SEQ ID NO: 136458 - DNA, 25 bp, Artificial
  Probe
agacagactactttgttcccttctc

SEQ ID NO: 136459 - DNA, 25 bp, Artificial
  Probe
accacatggacatttatttcgattt

SEQ ID NO: 136460 - DNA, 25 bp, Artificial
  Probe
aaccacatggacatttatttcgatt

SEQ ID NO: 136461 - DNA, 25 bp, Artificial
  Probe
aaaccacatggacatttatttcgat

SEQ ID NO: 136462 - DNA, 25 bp, Artificial
  Probe
gcttcaagaagacagactactttgt

SEQ ID NO: 136463 - DNA, 25 bp, Artificial
  Probe
cttcaagaagacagactactttgtt

SEQ ID NO: 136464 - DNA, 25 bp, Artificial
  Probe
tttggaggtaataaagccaggatat

SEQ ID NO: 136465 - DNA, 25 bp, Artificial
  Probe
aattaatgtaatggcctacgttcat

SEQ ID NO: 136466 - DNA, 25 bp, Artificial
  Probe
gactactttgttcccttctcccttg

SEQ ID NO: 136467 - DNA, 25 bp, Artificial
  Probe
aggacaagatgaagctgccttatac

SEQ ID NO: 136468 - DNA, 25 bp, Artificial
  Probe
agaaggacaacctgaagtctgagtt

SEQ ID NO: 136469 - DNA, 25 bp, Artificial
  Probe
tgtctgtgggtctaacttgtttacg

SEQ ID NO: 136470 - DNA, 25 bp, Artificial
  Probe
gctgtctgtgggtctaacttgttta

SEQ ID NO: 136471 - DNA, 25 bp, Artificial
  Probe
aagattgaggaggagaaggacaacc

SEQ ID NO: 136472 - DNA, 25 bp, Artificial
  Probe
agccaggatatcatagagccttaag

SEQ ID NO: 136473 - DNA, 25 bp, Artificial
  Probe
atttacatgatttgtgccacattca

SEQ ID NO: 136474 - DNA, 25 bp, Artificial
  Probe
catttacatgatttgtgccacattc

SEQ ID NO: 136475 - DNA, 25 bp, Artificial
  Probe
acatttacatgatttgtgccacatt

SEQ ID NO: 136476 - DNA, 25 bp, Artificial
  Probe
aacatttacatgatttgtgccacat

SEQ ID NO: 136477 - DNA, 25 bp, Artificial
  Probe
gatatcatagagccttaagcggacc

SEQ ID NO: 136478 - DNA, 25 bp, Artificial
  Probe
ggatatcatagagccttaagcggac

SEQ ID NO: 136479 - DNA, 25 bp, Artificial
  Probe
aaacatttacatgatttgtgccaca

SEQ ID NO: 136480 - DNA, 25 bp, Artificial
  Probe
aataaagccaggatatcatagagcc

SEQ ID NO: 136481 - DNA, 25 bp, Artificial
  Probe
ggaggtaataaagccaggatatcat

SEQ ID NO: 136482 - DNA, 25 bp, Artificial
  Probe
ggacaagatgaagctgccttatacc

SEQ ID NO: 136483 - DNA, 25 bp, Artificial
  Probe
ctcgtcttcttcctcatcttctact

SEQ ID NO: 136484 - DNA, 25 bp, Artificial
  Probe
tcgtcttcttcctcatcttctactg

SEQ ID NO: 136485 - DNA, 25 bp, Artificial
  Probe
agaccaacttccatcaggctattaa

SEQ ID NO: 136486 - DNA, 25 bp, Artificial
  Probe
gagttacttactacagagagccatt

SEQ ID NO: 136487 - DNA, 25 bp, Artificial
  Probe
agtgaggagttacttactacagaga

SEQ ID NO: 136488 - DNA, 25 bp, Artificial
  Probe
gtgaggagttacttactacagagag

SEQ ID NO: 136489 - DNA, 25 bp, Artificial
  Probe
tgaggagttacttactacagagagc

SEQ ID NO: 136490 - DNA, 25 bp, Artificial
  Probe
ggagttacttactacagagagccat

SEQ ID NO: 136491 - DNA, 25 bp, Artificial
  Probe
cctcgtcttcttcctcatcttctac

SEQ ID NO: 136492 - DNA, 25 bp, Artificial
  Probe
cagaccaacttccatcaggctatta

SEQ ID NO: 136493 - DNA, 25 bp, Artificial
  Probe
tcctcgtcttcttcctcatcttcta

SEQ ID NO: 136494 - DNA, 25 bp, Artificial
  Probe
gaggagttacttactacagagagcc

SEQ ID NO: 136495 - DNA, 25 bp, Artificial
  Probe
gaccaacttccatcaggctattaat

SEQ ID NO: 136496 - DNA, 25 bp, Artificial
  Probe
caactgcgtcttagatcctgttatc

SEQ ID NO: 136497 - DNA, 25 bp, Artificial
  Probe
cttcctcgtcttcttcctcatcttc

SEQ ID NO: 136498 - DNA, 25 bp, Artificial
  Probe
aggagttacttactacagagagcca

SEQ ID NO: 136499 - DNA, 25 bp, Artificial
  Probe
accaacttccatcaggctattaatg

SEQ ID NO: 136500 - DNA, 25 bp, Artificial
  Probe
ccaacttccatcaggctattaatga

SEQ ID NO: 136501 - DNA, 25 bp, Artificial
  Probe
cgtcttcttcctcatcttctactgc

SEQ ID NO: 136502 - DNA, 25 bp, Artificial
  Probe
ttcctcgtcttcttcctcatcttct

SEQ ID NO: 136503 - DNA, 25 bp, Artificial
  Probe
tcttcctcgtcttcttcctcatctt

SEQ ID NO: 136504 - DNA, 25 bp, Artificial
  Probe
ttcttcctcgtcttcttcctcatct

SEQ ID NO: 136505 - DNA, 25 bp, Artificial
  Probe
atcctgttatctactgctttctcac

SEQ ID NO: 136506 - DNA, 25 bp, Artificial
  Probe
ctgttatctactgctttctcaccaa

SEQ ID NO: 136507 - DNA, 25 bp, Artificial
  Probe
ttacttactacagagagccatttgc

SEQ ID NO: 136508 - DNA, 25 bp, Artificial
  Probe
gttacttactacagagagccatttg

SEQ ID NO: 136509 - DNA, 25 bp, Artificial
  Probe
cttcttcctcatcttctactgcaac

SEQ ID NO: 136510 - DNA, 25 bp, Artificial
  Probe
tgttatctactgctttctcaccaag

SEQ ID NO: 136511 - DNA, 25 bp, Artificial
  Probe
tcttcttcctcatcttctactgcaa

SEQ ID NO: 136512 - DNA, 25 bp, Artificial
  Probe
gttatctactgctttctcaccaaga

SEQ ID NO: 136513 - DNA, 25 bp, Artificial
  Probe
ccaactgcgtcttagatcctgttat

SEQ ID NO: 136514 - DNA, 25 bp, Artificial
  Probe
tcttcctcatcttctactgcaacat

SEQ ID NO: 136515 - DNA, 25 bp, Artificial
  Probe
ttcttcctcatcttctactgcaaca

SEQ ID NO: 136516 - DNA, 25 bp, Artificial
  Probe
cttcctcatcttctactgcaacatg

SEQ ID NO: 136517 - DNA, 25 bp, Artificial
  Probe
gatcctgttatctactgctttctca

SEQ ID NO: 136518 - DNA, 25 bp, Artificial
  Probe
agttacttactacagagagccattt

SEQ ID NO: 136519 - DNA, 25 bp, Artificial
  Probe
gtcttcttcctcatcttctactgca

SEQ ID NO: 136520 - DNA, 25 bp, Artificial
  Probe
tcctgttatctactgctttctcacc

SEQ ID NO: 136521 - DNA, 25 bp, Artificial
  Probe
cttctactgcaacatggtcatcatc

SEQ ID NO: 136522 - DNA, 25 bp, Artificial
  Probe
catcttctactgcaacatggtcatc

SEQ ID NO: 136523 - DNA, 25 bp, Artificial
  Probe
aactgcgtcttagatcctgttatct

SEQ ID NO: 136524 - DNA, 25 bp, Artificial
  Probe
atcttctactgcaacatggtcatca

SEQ ID NO: 136525 - DNA, 25 bp, Artificial
  Probe
cctgttatctactgctttctcacca

SEQ ID NO: 136526 - DNA, 25 bp, Artificial
  Probe
tcttctactgcaacatggtcatcat

SEQ ID NO: 136527 - DNA, 25 bp, Artificial
  Probe
tcatcttctactgcaacatggtcat

SEQ ID NO: 136528 - DNA, 25 bp, Artificial
  Probe
cagacattcactcaacatcaaggtg

SEQ ID NO: 136529 - DNA, 25 bp, Artificial
  Probe
gcagacattcactcaacatcaaggt

SEQ ID NO: 136530 - DNA, 25 bp, Artificial
  Probe
attcactcaacatcaaggtgctgtc

SEQ ID NO: 136531 - DNA, 25 bp, Artificial
  Probe
gacattcactcaacatcaaggtgct

SEQ ID NO: 136532 - DNA, 25 bp, Artificial
  Probe
agacattcactcaacatcaaggtgc

SEQ ID NO: 136533 - DNA, 25 bp, Artificial
  Probe
cattcactcaacatcaaggtgctgt

SEQ ID NO: 136534 - DNA, 25 bp, Artificial
  Probe
acattcactcaacatcaaggtgctg

SEQ ID NO: 136535 - DNA, 25 bp, Artificial
  Probe
ttcccttcttgattttgttgttgtt

SEQ ID NO: 136536 - DNA, 25 bp, Artificial
  Probe
tttcccttcttgattttgttgttgt

SEQ ID NO: 136537 - DNA, 25 bp, Artificial
  Probe
tgcagacattcactcaacatcaagg

SEQ ID NO: 136538 - DNA, 25 bp, Artificial
  Probe
cactcaacatcaaggtgctgtcaag

SEQ ID NO: 136539 - DNA, 25 bp, Artificial
  Probe
tcactcaacatcaaggtgctgtcaa

SEQ ID NO: 136540 - DNA, 25 bp, Artificial
  Probe
ttcactcaacatcaaggtgctgtca

SEQ ID NO: 136541 - DNA, 25 bp, Artificial
  Probe
ggttatttggaagtacccaaccatg

SEQ ID NO: 136542 - DNA, 25 bp, Artificial
  Probe
ctataaggagctcatctcaggccat

SEQ ID NO: 136543 - DNA, 25 bp, Artificial
  Probe
tataaggagctcatctcaggccatg

SEQ ID NO: 136544 - DNA, 25 bp, Artificial
  Probe
agctggttatttggaagtacccaac

SEQ ID NO: 136545 - DNA, 25 bp, Artificial
  Probe
gctggttatttggaagtacccaacc

SEQ ID NO: 136546 - DNA, 25 bp, Artificial
  Probe
cactataaggagctcatctcaggcc

SEQ ID NO: 136547 - DNA, 25 bp, Artificial
  Probe
ccactataaggagctcatctcaggc

SEQ ID NO: 136548 - DNA, 25 bp, Artificial
  Probe
actataaggagctcatctcaggcca

SEQ ID NO: 136549 - DNA, 25 bp, Artificial
  Probe
cccactataaggagctcatctcagg

SEQ ID NO: 136550 - DNA, 25 bp, Artificial
  Probe
gttatttggaagtacccaaccatgg

SEQ ID NO: 136551 - DNA, 25 bp, Artificial
  Probe
ccccactataaggagctcatctcag

SEQ ID NO: 136552 - DNA, 25 bp, Artificial
  Probe
ttatttggaagtacccaaccatggc

SEQ ID NO: 136553 - DNA, 25 bp, Artificial
  Probe
tccccactataaggagctcatctca

SEQ ID NO: 136554 - DNA, 25 bp, Artificial
  Probe
tatttggaagtacccaaccatggcc

SEQ ID NO: 136555 - DNA, 25 bp, Artificial
  Probe
ctccccactataaggagctcatctc

SEQ ID NO: 136556 - DNA, 25 bp, Artificial
  Probe
gtctccccactataaggagctcatc

SEQ ID NO: 136557 - DNA, 25 bp, Artificial
  Probe
tctccccactataaggagctcatct

SEQ ID NO: 136558 - DNA, 25 bp, Artificial
  Probe
ggtctccccactataaggagctcat

SEQ ID NO: 136559 - DNA, 25 bp, Artificial
  Probe
agtaccaagtgtcagtgaacaagta

SEQ ID NO: 136560 - DNA, 25 bp, Artificial
  Probe
taccaagtgtcagtgaacaagtaca

SEQ ID NO: 136561 - DNA, 25 bp, Artificial
  Probe
caagtaccaagtgtcagtgaacaag

SEQ ID NO: 136562 - DNA, 25 bp, Artificial
  Probe
aagtaccaagtgtcagtgaacaagt

SEQ ID NO: 136563 - DNA, 25 bp, Artificial
  Probe
caacaagtaccaagtgtcagtgaac

SEQ ID NO: 136564 - DNA, 25 bp, Artificial
  Probe
ggtaactacagatccaagaaagcag

SEQ ID NO: 136565 - DNA, 25 bp, Artificial
  Probe
accaagtgtcagtgaacaagtacaa

SEQ ID NO: 136566 - DNA, 25 bp, Artificial
  Probe
acaagtaccaagtgtcagtgaacaa

SEQ ID NO: 136567 - DNA, 25 bp, Artificial
  Probe
aacaagtaccaagtgtcagtgaaca

SEQ ID NO: 136568 - DNA, 25 bp, Artificial
  Probe
taactacagatccaagaaagcagtg

SEQ ID NO: 136569 - DNA, 25 bp, Artificial
  Probe
gtaactacagatccaagaaagcagt

SEQ ID NO: 136570 - DNA, 25 bp, Artificial
  Probe
caagtgtcagtgaacaagtacaaag

SEQ ID NO: 136571 - DNA, 25 bp, Artificial
  Probe
aagtgtcagtgaacaagtacaaagg

SEQ ID NO: 136572 - DNA, 25 bp, Artificial
  Probe
gtaccaagtgtcagtgaacaagtac

SEQ ID NO: 136573 - DNA, 25 bp, Artificial
  Probe
ccaacaagtaccaagtgtcagtgaa

SEQ ID NO: 136574 - DNA, 25 bp, Artificial
  Probe
gggtaactacagatccaagaaagca

SEQ ID NO: 136575 - DNA, 25 bp, Artificial
  Probe
ccaagtgtcagtgaacaagtacaaa

SEQ ID NO: 136576 - DNA, 25 bp, Artificial
  Probe
ctgggtaactacagatccaagaaag

SEQ ID NO: 136577 - DNA, 25 bp, Artificial
  Probe
gaacagaaccatgaccatccacaac

SEQ ID NO: 136578 - DNA, 25 bp, Artificial
  Probe
agaacagaaccatgaccatccacaa

SEQ ID NO: 136579 - DNA, 25 bp, Artificial
  Probe
gtcagtgaacaagtacaaagggact

SEQ ID NO: 136580 - DNA, 25 bp, Artificial
  Probe
tgggtaactacagatccaagaaagc

SEQ ID NO: 136581 - DNA, 25 bp, Artificial
  Probe
gctgggtaactacagatccaagaaa

SEQ ID NO: 136582 - DNA, 25 bp, Artificial
  Probe
tttggaatgataaaggataaagaca

SEQ ID NO: 136583 - DNA, 25 bp, Artificial
  Probe
gtgtcagtgaacaagtacaaaggga

SEQ ID NO: 136584 - DNA, 25 bp, Artificial
  Probe
agtgtcagtgaacaagtacaaaggg

SEQ ID NO: 136585 - DNA, 25 bp, Artificial
  Probe
tgtcagtgaacaagtacaaagggac

SEQ ID NO: 136586 - DNA, 25 bp, Artificial
  Probe
gatgatggtgtggtgtggatgaact

SEQ ID NO: 136587 - DNA, 25 bp, Artificial
  Probe
agatgatggtgtggtgtggatgaac

SEQ ID NO: 136588 - DNA, 25 bp, Artificial
  Probe
cagatgatggtgtggtgtggatgaa

SEQ ID NO: 136589 - DNA, 25 bp, Artificial
  Probe
aactacagatccaagaaagcagtgc

SEQ ID NO: 136590 - DNA, 25 bp, Artificial
  Probe
gagaacagaaccatgaccatccaca

SEQ ID NO: 136591 - DNA, 25 bp, Artificial
  Probe
atgataaaggataaagacattggaa

SEQ ID NO: 136592 - DNA, 25 bp, Artificial
  Probe
ttggaatgataaaggataaagacat

SEQ ID NO: 136593 - DNA, 25 bp, Artificial
  Probe
atgatggtgtggtgtggatgaactg

SEQ ID NO: 136594 - DNA, 25 bp, Artificial
  Probe
gtgaacaagtacaaagggactgctg

SEQ ID NO: 136595 - DNA, 25 bp, Artificial
  Probe
agtgaacaagtacaaagggactgct

SEQ ID NO: 136596 - DNA, 25 bp, Artificial
  Probe
ggctgggtaactacagatccaagaa

SEQ ID NO: 136597 - DNA, 25 bp, Artificial
  Probe
atggctgggtaactacagatccaag

SEQ ID NO: 136598 - DNA, 25 bp, Artificial
  Probe
gatggctgggtaactacagatccaa

SEQ ID NO: 136599 - DNA, 25 bp, Artificial
  Probe
aacgatggctgggtaactacagatc

SEQ ID NO: 136600 - DNA, 25 bp, Artificial
  Probe
caacgatggctgggtaactacagat

SEQ ID NO: 136601 - DNA, 25 bp, Artificial
  Probe
aatgataaaggataaagacattgga

SEQ ID NO: 136602 - DNA, 25 bp, Artificial
  Probe
tggaatgataaaggataaagacatt

SEQ ID NO: 136603 - DNA, 25 bp, Artificial
  Probe
gaatgataaaggataaagacattgg

SEQ ID NO: 136604 - DNA, 25 bp, Artificial
  Probe
cagtgctattgtcatggaattggtt

SEQ ID NO: 136605 - DNA, 25 bp, Artificial
  Probe
tcaagaatagacgagaaagtttcca

SEQ ID NO: 136606 - DNA, 25 bp, Artificial
  Probe
caagaatagacgagaaagtttccag

SEQ ID NO: 136607 - DNA, 25 bp, Artificial
  Probe
aagaatagacgagaaagtttccagg

SEQ ID NO: 136608 - DNA, 25 bp, Artificial
  Probe
cgaagtttggaaccatttgaaagag

SEQ ID NO: 136609 - DNA, 25 bp, Artificial
  Probe
gaatagacgagaaagtttccaggac

SEQ ID NO: 136610 - DNA, 25 bp, Artificial
  Probe
agaatagacgagaaagtttccagga

SEQ ID NO: 136611 - DNA, 25 bp, Artificial
  Probe
gaagtttggaaccatttgaaagagc

SEQ ID NO: 136612 - DNA, 25 bp, Artificial
  Probe
agtgctattgtcatggaattggttt

SEQ ID NO: 136613 - DNA, 25 bp, Artificial
  Probe
gtcaagaatagacgagaaagtttcc

SEQ ID NO: 136614 - DNA, 25 bp, Artificial
  Probe
acagtgctattgtcatggaattggt

SEQ ID NO: 136615 - DNA, 25 bp, Artificial
  Probe
aagtttggaaccatttgaaagagca

SEQ ID NO: 136616 - DNA, 25 bp, Artificial
  Probe
tgtcaagaatagacgagaaagtttc

SEQ ID NO: 136617 - DNA, 25 bp, Artificial
  Probe
atgtcaagaatagacgagaaagttt

SEQ ID NO: 136618 - DNA, 25 bp, Artificial
  Probe
aatgtcaagaatagacgagaaagtt

SEQ ID NO: 136619 - DNA, 25 bp, Artificial
  Probe
aaatgtcaagaatagacgagaaagt

SEQ ID NO: 136620 - DNA, 25 bp, Artificial
  Probe
aaaggaaaggacatgaatataccaa

SEQ ID NO: 136621 - DNA, 25 bp, Artificial
  Probe
aatagacgagaaagtttccaggacc

SEQ ID NO: 136622 - DNA, 25 bp, Artificial
  Probe
aagcgaagtttggaaccatttgaaa

SEQ ID NO: 136623 - DNA, 25 bp, Artificial
  Probe
aaggaaaggacatgaatataccaat

SEQ ID NO: 136624 - DNA, 25 bp, Artificial
  Probe
agtttggaaccatttgaaagagcac

SEQ ID NO: 136625 - DNA, 25 bp, Artificial
  Probe
ttgaattgtgaagcagctaaattgt

SEQ ID NO: 136626 - DNA, 25 bp, Artificial
  Probe
tttgaattgtgaagcagctaaattg

SEQ ID NO: 136627 - DNA, 25 bp, Artificial
  Probe
tgaattgtgaagcagctaaattgtg

SEQ ID NO: 136628 - DNA, 25 bp, Artificial
  Probe
gcgaagtttggaaccatttgaaaga

SEQ ID NO: 136629 - DNA, 25 bp, Artificial
  Probe
agcgaagtttggaaccatttgaaag

SEQ ID NO: 136630 - DNA, 25 bp, Artificial
  Probe
gaagcgaagtttggaaccatttgaa

SEQ ID NO: 136631 - DNA, 25 bp, Artificial
  Probe
aggaaaggacatgaatataccaata

SEQ ID NO: 136632 - DNA, 25 bp, Artificial
  Probe
gagaagcgaagtttggaaccatttg

SEQ ID NO: 136633 - DNA, 25 bp, Artificial
  Probe
ccccttccctaaaatgtcaagaata

SEQ ID NO: 136634 - DNA, 25 bp, Artificial
  Probe
gggcaggattttgtttgtttctttt

SEQ ID NO: 136635 - DNA, 25 bp, Artificial
  Probe
cccttccctaaaatgtcaagaatag

SEQ ID NO: 136636 - DNA, 25 bp, Artificial
  Probe
agaagcgaagtttggaaccatttga

SEQ ID NO: 136637 - DNA, 25 bp, Artificial
  Probe
tgagaagcgaagtttggaaccattt

SEQ ID NO: 136638 - DNA, 25 bp, Artificial
  Probe
ttgagaagcgaagtttggaaccatt

SEQ ID NO: 136639 - DNA, 25 bp, Artificial
  Probe
tttgagaagcgaagtttggaaccat

SEQ ID NO: 136640 - DNA, 25 bp, Artificial
  Probe
aaaagcaaaaggaaaggacatgaat

SEQ ID NO: 136641 - DNA, 25 bp, Artificial
  Probe
gaattggttttgaattgtgaagcag

SEQ ID NO: 136642 - DNA, 25 bp, Artificial
  Probe
tgctattgtcatggaattggttttg

SEQ ID NO: 136643 - DNA, 25 bp, Artificial
  Probe
gtgctattgtcatggaattggtttt

SEQ ID NO: 136644 - DNA, 25 bp, Artificial
  Probe
gtttggaaccatttgaaagagcacg

SEQ ID NO: 136645 - DNA, 25 bp, Artificial
  Probe
aaagcaaaaggaaaggacatgaata

SEQ ID NO: 136646 - DNA, 25 bp, Artificial
  Probe
gaactttcaccccttccctaaaatg

SEQ ID NO: 136647 - DNA, 25 bp, Artificial
  Probe
gaaaagcaaaaggaaaggacatgaa

SEQ ID NO: 136648 - DNA, 25 bp, Artificial
  Probe
aagcaaaaggaaaggacatgaatat

SEQ ID NO: 136649 - DNA, 25 bp, Artificial
  Probe
ccttataccagcgttatgagatcaa

SEQ ID NO: 136650 - DNA, 25 bp, Artificial
  Probe
ataccagcgttatgagatcaagatg

SEQ ID NO: 136651 - DNA, 25 bp, Artificial
  Probe
ttataccagcgttatgagatcaaga

SEQ ID NO: 136652 - DNA, 25 bp, Artificial
  Probe
tataccagcgttatgagatcaagat

SEQ ID NO: 136653 - DNA, 25 bp, Artificial
  Probe
caccttataccagcgttatgagatc

SEQ ID NO: 136654 - DNA, 25 bp, Artificial
  Probe
ccaccttataccagcgttatgagat

SEQ ID NO: 136655 - DNA, 25 bp, Artificial
  Probe
accttataccagcgttatgagatca

SEQ ID NO: 136656 - DNA, 25 bp, Artificial
  Probe
cttataccagcgttatgagatcaag

SEQ ID NO: 136657 - DNA, 25 bp, Artificial
  Probe
cagcgttatgagatcaagatgacta

SEQ ID NO: 136658 - DNA, 25 bp, Artificial
  Probe
agcgttatgagatcaagatgactaa

SEQ ID NO: 136659 - DNA, 25 bp, Artificial
  Probe
agatcaagatgactaagatgctcaa

SEQ ID NO: 136660 - DNA, 25 bp, Artificial
  Probe
gcgttatgagatcaagatgactaag

SEQ ID NO: 136661 - DNA, 25 bp, Artificial
  Probe
gagatcaagatgactaagatgctca

SEQ ID NO: 136662 - DNA, 25 bp, Artificial
  Probe
tgagatcaagatgactaagatgctc

SEQ ID NO: 136663 - DNA, 25 bp, Artificial
  Probe
atgagatcaagatgactaagatgct

SEQ ID NO: 136664 - DNA, 25 bp, Artificial
  Probe
taccagcgttatgagatcaagatga

SEQ ID NO: 136665 - DNA, 25 bp, Artificial
  Probe
gaccaccttataccagcgttatgag

SEQ ID NO: 136666 - DNA, 25 bp, Artificial
  Probe
gagaccaccttataccagcgttatg

SEQ ID NO: 136667 - DNA, 25 bp, Artificial
  Probe
tatgagatcaagatgactaagatgc

SEQ ID NO: 136668 - DNA, 25 bp, Artificial
  Probe
cgttatgagatcaagatgactaaga

SEQ ID NO: 136669 - DNA, 25 bp, Artificial
  Probe
accaccttataccagcgttatgaga

SEQ ID NO: 136670 - DNA, 25 bp, Artificial
  Probe
agaccaccttataccagcgttatga

SEQ ID NO: 136671 - DNA, 25 bp, Artificial
  Probe
ccagcgttatgagatcaagatgact

SEQ ID NO: 136672 - DNA, 25 bp, Artificial
  Probe
agatgactaagatgctcaaaggatt

SEQ ID NO: 136673 - DNA, 25 bp, Artificial
  Probe
aagatgactaagatgctcaaaggat

SEQ ID NO: 136674 - DNA, 25 bp, Artificial
  Probe
gatgactaagatgctcaaaggattc

SEQ ID NO: 136675 - DNA, 25 bp, Artificial
  Probe
caagatgactaagatgctcaaagga

SEQ ID NO: 136676 - DNA, 25 bp, Artificial
  Probe
tcaagatgactaagatgctcaaagg

SEQ ID NO: 136677 - DNA, 25 bp, Artificial
  Probe
tcattgcttgtggacagatcagatc

SEQ ID NO: 136678 - DNA, 25 bp, Artificial
  Probe
atgactaagatgctcaaaggattcg

SEQ ID NO: 136679 - DNA, 25 bp, Artificial
  Probe
atcaagatgactaagatgctcaaag

SEQ ID NO: 136680 - DNA, 25 bp, Artificial
  Probe
accagcgttatgagatcaagatgac

SEQ ID NO: 136681 - DNA, 25 bp, Artificial
  Probe
gatcaagatgactaagatgctcaaa

SEQ ID NO: 136682 - DNA, 25 bp, Artificial
  Probe
cttgtggacagatcagatcctcatg

SEQ ID NO: 136683 - DNA, 25 bp, Artificial
  Probe
gactaagatgctcaaaggattcgac

SEQ ID NO: 136684 - DNA, 25 bp, Artificial
  Probe
tagagacacgctagagcagatacca

SEQ ID NO: 136685 - DNA, 25 bp, Artificial
  Probe
tgactaagatgctcaaaggattcga

SEQ ID NO: 136686 - DNA, 25 bp, Artificial
  Probe
cattgcttgtggacagatcagatcc

SEQ ID NO: 136687 - DNA, 25 bp, Artificial
  Probe
ttatgagatcaagatgactaagatg

SEQ ID NO: 136688 - DNA, 25 bp, Artificial
  Probe
gttatgagatcaagatgactaagat

SEQ ID NO: 136689 - DNA, 25 bp, Artificial
  Probe
ctagagacacgctagagcagatacc

SEQ ID NO: 136690 - DNA, 25 bp, Artificial
  Probe
cctagagacacgctagagcagatac

SEQ ID NO: 136691 - DNA, 25 bp, Artificial
  Probe
attgcttgtggacagatcagatcct

SEQ ID NO: 136692 - DNA, 25 bp, Artificial
  Probe
tcctagagacacgctagagcagata

SEQ ID NO: 136693 - DNA, 25 bp, Artificial
  Probe
actaagatgctcaaaggattcgacg

SEQ ID NO: 136694 - DNA, 25 bp, Artificial
  Probe
agagatggatggattcctatacagc

SEQ ID NO: 136695 - DNA, 25 bp, Artificial
  Probe
atggatggattcctatacagcacat

SEQ ID NO: 136696 - DNA, 25 bp, Artificial
  Probe
gtagagatggatggattcctataca

SEQ ID NO: 136697 - DNA, 25 bp, Artificial
  Probe
tgtagagatggatggattcctatac

SEQ ID NO: 136698 - DNA, 25 bp, Artificial
  Probe
gagatggatggattcctatacagca

SEQ ID NO: 136699 - DNA, 25 bp, Artificial
  Probe
aatgtagagatggatggattcctat

SEQ ID NO: 136700 - DNA, 25 bp, Artificial
  Probe
atgaataaagggagtgaaaccagac

SEQ ID NO: 136701 - DNA, 25 bp, Artificial
  Probe
tagagatggatggattcctatacag

SEQ ID NO: 136702 - DNA, 25 bp, Artificial
  Probe
agatggatggattcctatacagcac

SEQ ID NO: 136703 - DNA, 25 bp, Artificial
  Probe
gatggatggattcctatacagcaca

SEQ ID NO: 136704 - DNA, 25 bp, Artificial
  Probe
agagttaatggatgactggctttat

SEQ ID NO: 136705 - DNA, 25 bp, Artificial
  Probe
atggatgactggctttatattcacc

SEQ ID NO: 136706 - DNA, 25 bp, Artificial
  Probe
aatggatgactggctttatattcac

SEQ ID NO: 136707 - DNA, 25 bp, Artificial
  Probe
atgtagagatggatggattcctata

SEQ ID NO: 136708 - DNA, 25 bp, Artificial
  Probe
ctatacagcacatgggaaaggatat

SEQ ID NO: 136709 - DNA, 25 bp, Artificial
  Probe
tatacagcacatgggaaaggatatt

SEQ ID NO: 136710 - DNA, 25 bp, Artificial
  Probe
caagcatgaataaagggagtgaaac

SEQ ID NO: 136711 - DNA, 25 bp, Artificial
  Probe
catgaataaagggagtgaaaccaga

SEQ ID NO: 136712 - DNA, 25 bp, Artificial
  Probe
acacacacacacaccagagttaatg

SEQ ID NO: 136713 - DNA, 25 bp, Artificial
  Probe
cacacacacacacaccagagttaat

SEQ ID NO: 136714 - DNA, 25 bp, Artificial
  Probe
atacagcacatgggaaaggatattg

SEQ ID NO: 136715 - DNA, 25 bp, Artificial
  Probe
tgaataaagggagtgaaaccagact

SEQ ID NO: 136716 - DNA, 25 bp, Artificial
  Probe
cagagttaatggatgactggcttta

SEQ ID NO: 136717 - DNA, 25 bp, Artificial
  Probe
gagttaatggatgactggctttata

SEQ ID NO: 136718 - DNA, 25 bp, Artificial
  Probe
tggatggattcctatacagcacatg

SEQ ID NO: 136719 - DNA, 25 bp, Artificial
  Probe
acacaccagagttaatggatgactg

SEQ ID NO: 136720 - DNA, 25 bp, Artificial
  Probe
cacacaccagagttaatggatgact

SEQ ID NO: 136721 - DNA, 25 bp, Artificial
  Probe
tcaagcatgaataaagggagtgaaa

SEQ ID NO: 136722 - DNA, 25 bp, Artificial
  Probe
aagcatgaataaagggagtgaaacc

SEQ ID NO: 136723 - DNA, 25 bp, Artificial
  Probe
acacacaccagagttaatggatgac

SEQ ID NO: 136724 - DNA, 25 bp, Artificial
  Probe
cacacacaccagagttaatggatga

SEQ ID NO: 136725 - DNA, 25 bp, Artificial
  Probe
atgggaaaggatattgcctatgtac

SEQ ID NO: 136726 - DNA, 25 bp, Artificial
  Probe
taatggatgactggctttatattca

SEQ ID NO: 136727 - DNA, 25 bp, Artificial
  Probe
agttaatggatgactggctttatat

SEQ ID NO: 136728 - DNA, 25 bp, Artificial
  Probe
gatgactggctttatattcaccaaa

SEQ ID NO: 136729 - DNA, 25 bp, Artificial
  Probe
ggatgactggctttatattcaccaa

SEQ ID NO: 136730 - DNA, 25 bp, Artificial
  Probe
acacacacaccagagttaatggatg

SEQ ID NO: 136731 - DNA, 25 bp, Artificial
  Probe
cacacacacaccagagttaatggat

SEQ ID NO: 136732 - DNA, 25 bp, Artificial
  Probe
catgggaaaggatattgcctatgta

SEQ ID NO: 136733 - DNA, 25 bp, Artificial
  Probe
aaatgtagagatggatggattccta

SEQ ID NO: 136734 - DNA, 25 bp, Artificial
  Probe
gcatgaataaagggagtgaaaccag

SEQ ID NO: 136735 - DNA, 25 bp, Artificial
  Probe
caaccttcagcatctacacatcctg

SEQ ID NO: 136736 - DNA, 25 bp, Artificial
  Probe
ggatggattcctatacagcacatgg

SEQ ID NO: 136737 - DNA, 25 bp, Artificial
  Probe
gttaatggatgactggctttatatt

SEQ ID NO: 136738 - DNA, 25 bp, Artificial
  Probe
agcatgaataaagggagtgaaacca

SEQ ID NO: 136739 - DNA, 25 bp, Artificial
  Probe
caacaacctcacatatcacttcaac

SEQ ID NO: 136740 - DNA, 25 bp, Artificial
  Probe
tacttcaccaacaacctcacatatc

SEQ ID NO: 136741 - DNA, 25 bp, Artificial
  Probe
ctacttcaccaacaacctcacatat

SEQ ID NO: 136742 - DNA, 25 bp, Artificial
  Probe
aacaacctcacatatcacttcaaca

SEQ ID NO: 136743 - DNA, 25 bp, Artificial
  Probe
acaacctcacatatcacttcaacag

SEQ ID NO: 136744 - DNA, 25 bp, Artificial
  Probe
ccaacaacctcacatatcacttcaa

SEQ ID NO: 136745 - DNA, 25 bp, Artificial
  Probe
aacctcacatatcacttcaacagtt

SEQ ID NO: 136746 - DNA, 25 bp, Artificial
  Probe
caacctcacatatcacttcaacagt

SEQ ID NO: 136747 - DNA, 25 bp, Artificial
  Probe
cacctacaacttcaacaccaatctc

SEQ ID NO: 136748 - DNA, 25 bp, Artificial
  Probe
ctcacctacaacttcaacaccaatc

SEQ ID NO: 136749 - DNA, 25 bp, Artificial
  Probe
caccaacaacctcacatatcacttc

SEQ ID NO: 136750 - DNA, 25 bp, Artificial
  Probe
cttcaccaacaacctcacatatcac

SEQ ID NO: 136751 - DNA, 25 bp, Artificial
  Probe
caatctcgtctactcctcaacctac

SEQ ID NO: 136752 - DNA, 25 bp, Artificial
  Probe
aacttcaacaccaatctcgtctact

SEQ ID NO: 136753 - DNA, 25 bp, Artificial
  Probe
caacttcaacaccaatctcgtctac

SEQ ID NO: 136754 - DNA, 25 bp, Artificial
  Probe
ctacaacttcaacaccaatctcgtc

SEQ ID NO: 136755 - DNA, 25 bp, Artificial
  Probe
tcacctacaacttcaacaccaatct

SEQ ID NO: 136756 - DNA, 25 bp, Artificial
  Probe
tctcacctacaacttcaacaccaat

SEQ ID NO: 136757 - DNA, 25 bp, Artificial
  Probe
cttcatctgctacttcaccaacaac

SEQ ID NO: 136758 - DNA, 25 bp, Artificial
  Probe
acaacttcaacaccaatctcgtcta

SEQ ID NO: 136759 - DNA, 25 bp, Artificial
  Probe
tacaacttcaacaccaatctcgtct

SEQ ID NO: 136760 - DNA, 25 bp, Artificial
  Probe
accaacaacctcacatatcacttca

SEQ ID NO: 136761 - DNA, 25 bp, Artificial
  Probe
tcaccaacaacctcacatatcactt

SEQ ID NO: 136762 - DNA, 25 bp, Artificial
  Probe
ttcaccaacaacctcacatatcact

SEQ ID NO: 136763 - DNA, 25 bp, Artificial
  Probe
acttcaccaacaacctcacatatca

SEQ ID NO: 136764 - DNA, 25 bp, Artificial
  Probe
acttcatctgctacttcaccaacaa

SEQ ID NO: 136765 - DNA, 25 bp, Artificial
  Probe
acttcaacaccaatctcgtctactc

SEQ ID NO: 136766 - DNA, 25 bp, Artificial
  Probe
actatgagatacgagtcaactgttg

SEQ ID NO: 136767 - DNA, 25 bp, Artificial
  Probe
gaaggtacagtgtaatgtctcagag

SEQ ID NO: 136768 - DNA, 25 bp, Artificial
  Probe
agaaggtacagtgtaatgtctcaga

SEQ ID NO: 136769 - DNA, 25 bp, Artificial
  Probe
cagaaggtacagtgtaatgtctcag

SEQ ID NO: 136770 - DNA, 25 bp, Artificial
  Probe
gtcagaaggtacagtgtaatgtctc

SEQ ID NO: 136771 - DNA, 25 bp, Artificial
  Probe
tcagaaggtacagtgtaatgtctca

SEQ ID NO: 136772 - DNA, 25 bp, Artificial
  Probe
caataatgaggaccagtatggaact

SEQ ID NO: 136773 - DNA, 25 bp, Artificial
  Probe
ctatgagatacgagtcaactgttgc

SEQ ID NO: 136774 - DNA, 25 bp, Artificial
  Probe
gctacttcaccaacaacctcacata

SEQ ID NO: 136775 - DNA, 25 bp, Artificial
  Probe
gacttcatctgctacttcaccaaca

SEQ ID NO: 136776 - DNA, 25 bp, Artificial
  Probe
aaggtacagtgtaatgtctcagagg

SEQ ID NO: 136777 - DNA, 25 bp, Artificial
  Probe
ccaatctcgtctactcctcaaccta

SEQ ID NO: 136778 - DNA, 25 bp, Artificial
  Probe
gtctcacctacaacttcaacaccaa

SEQ ID NO: 136779 - DNA, 25 bp, Artificial
  Probe
tatgagatacgagtcaactgttgct

SEQ ID NO: 136780 - DNA, 25 bp, Artificial
  Probe
ggtcagaaggtacagtgtaatgtct

SEQ ID NO: 136781 - DNA, 25 bp, Artificial
  Probe
ctgacttcatctgctacttcaccaa

SEQ ID NO: 136782 - DNA, 25 bp, Artificial
  Probe
cttcaacaccaatctcgtctactcc

SEQ ID NO: 136783 - DNA, 25 bp, Artificial
  Probe
cctacaacttcaacaccaatctcgt

SEQ ID NO: 136784 - DNA, 25 bp, Artificial
  Probe
ctaagtacatacctggcaatctagt

SEQ ID NO: 136785 - DNA, 25 bp, Artificial
  Probe
actaagtacatacctggcaatctag

SEQ ID NO: 136786 - DNA, 25 bp, Artificial
  Probe
gcaatctagtacagaccagtaagta

SEQ ID NO: 136787 - DNA, 25 bp, Artificial
  Probe
atactaagtacatacctggcaatct

SEQ ID NO: 136788 - DNA, 25 bp, Artificial
  Probe
gtaggtcttagatgattgactccag

SEQ ID NO: 136789 - DNA, 25 bp, Artificial
  Probe
gtgtaggtcttagatgattgactcc

SEQ ID NO: 136790 - DNA, 25 bp, Artificial
  Probe
tgtaggtcttagatgattgactcca

SEQ ID NO: 136791 - DNA, 25 bp, Artificial
  Probe
cagtgtaggtcttagatgattgact

SEQ ID NO: 136792 - DNA, 25 bp, Artificial
  Probe
agtgtaggtcttagatgattgactc

SEQ ID NO: 136793 - DNA, 25 bp, Artificial
  Probe
gcagtgtaggtcttagatgattgac

SEQ ID NO: 136794 - DNA, 25 bp, Artificial
  Probe
taagtacatacctggcaatctagta

SEQ ID NO: 136795 - DNA, 25 bp, Artificial
  Probe
tactaagtacatacctggcaatcta

SEQ ID NO: 136796 - DNA, 25 bp, Artificial
  Probe
ggcaatctagtacagaccagtaagt

SEQ ID NO: 136797 - DNA, 25 bp, Artificial
  Probe
aatactaagtacatacctggcaatc

SEQ ID NO: 136798 - DNA, 25 bp, Artificial
  Probe
tacatacctggcaatctagtacaga

SEQ ID NO: 136799 - DNA, 25 bp, Artificial
  Probe
taggtcttagatgattgactccagc

SEQ ID NO: 136800 - DNA, 25 bp, Artificial
  Probe
cttgcagtgtaggtcttagatgatt

SEQ ID NO: 136801 - DNA, 25 bp, Artificial
  Probe
ttgcagtgtaggtcttagatgattg

SEQ ID NO: 136802 - DNA, 25 bp, Artificial
  Probe
gcaaaggagtcagcatttattcaaa

SEQ ID NO: 136803 - DNA, 25 bp, Artificial
  Probe
acatacctggcaatctagtacagac

SEQ ID NO: 136804 - DNA, 25 bp, Artificial
  Probe
gtcatatagaaaggatgggtaggtg

SEQ ID NO: 136805 - DNA, 25 bp, Artificial
  Probe
tacagaccagtaagtaaagcaaatg

SEQ ID NO: 136806 - DNA, 25 bp, Artificial
  Probe
tgcagtgtaggtcttagatgattga

SEQ ID NO: 136807 - DNA, 25 bp, Artificial
  Probe
tagcttgaacgaggaacagttagat

SEQ ID NO: 136808 - DNA, 25 bp, Artificial
  Probe
tcatatagaaaggatgggtaggtgg

SEQ ID NO: 136809 - DNA, 25 bp, Artificial
  Probe
ggtcatatagaaaggatgggtaggt

SEQ ID NO: 136810 - DNA, 25 bp, Artificial
  Probe
agcaaaggagtcagcatttattcaa

SEQ ID NO: 136811 - DNA, 25 bp, Artificial
  Probe
agagcaaaggagtcagcatttattc

SEQ ID NO: 136812 - DNA, 25 bp, Artificial
  Probe
gagagcaaaggagtcagcatttatt

SEQ ID NO: 136813 - DNA, 25 bp, Artificial
  Probe
ttagcttgaacgaggaacagttaga

SEQ ID NO: 136814 - DNA, 25 bp, Artificial
  Probe
aagtcttcttattggatttcctggg

SEQ ID NO: 136815 - DNA, 25 bp, Artificial
  Probe
tggcaatctagtacagaccagtaag

SEQ ID NO: 136816 - DNA, 25 bp, Artificial
  Probe
accagtaagtaaagcaaatgtctaa

SEQ ID NO: 136817 - DNA, 25 bp, Artificial
  Probe
agtacagaccagtaagtaaagcaaa

SEQ ID NO: 136818 - DNA, 25 bp, Artificial
  Probe
ttaatactaagtacatacctggcaa

SEQ ID NO: 136819 - DNA, 25 bp, Artificial
  Probe
gagcaaaggagtcagcatttattca

SEQ ID NO: 136820 - DNA, 25 bp, Artificial
  Probe
agcaaatgtctaagaattgatggtt

SEQ ID NO: 136821 - DNA, 25 bp, Artificial
  Probe
aagcaaatgtctaagaattgatggt

SEQ ID NO: 136822 - DNA, 25 bp, Artificial
  Probe
gggtcatatagaaaggatgggtagg

SEQ ID NO: 136823 - DNA, 25 bp, Artificial
  Probe
ctagtacagaccagtaagtaaagca

SEQ ID NO: 136824 - DNA, 25 bp, Artificial
  Probe
catacctggcaatctagtacagacc

SEQ ID NO: 136825 - DNA, 25 bp, Artificial
  Probe
caatctagtacagaccagtaagtaa

SEQ ID NO: 136826 - DNA, 25 bp, Artificial
  Probe
atatagaaaggatgggtaggtggga

SEQ ID NO: 136827 - DNA, 25 bp, Artificial
  Probe
tagtacagaccagtaagtaaagcaa

SEQ ID NO: 136828 - DNA, 25 bp, Artificial
  Probe
gtcagcatttattcaaatcccagtt

SEQ ID NO: 136829 - DNA, 25 bp, Artificial
  Probe
gatcttctccttcctctgtgaatac

SEQ ID NO: 136830 - DNA, 25 bp, Artificial
  Probe
tgatcttctccttcctctgtgaata

SEQ ID NO: 136831 - DNA, 25 bp, Artificial
  Probe
cttctccttcctctgtgaatacaat

SEQ ID NO: 136832 - DNA, 25 bp, Artificial
  Probe
atcttctccttcctctgtgaataca

SEQ ID NO: 136833 - DNA, 25 bp, Artificial
  Probe
tcttctccttcctctgtgaatacaa

SEQ ID NO: 136834 - DNA, 25 bp, Artificial
  Probe
tctccttcctctgtgaatacaataa

SEQ ID NO: 136835 - DNA, 25 bp, Artificial
  Probe
ttctccttcctctgtgaatacaata

SEQ ID NO: 136836 - DNA, 25 bp, Artificial
  Probe
ctgatcttctccttcctctgtgaat

SEQ ID NO: 136837 - DNA, 25 bp, Artificial
  Probe
tctacttcagttctgatcttctcct

SEQ ID NO: 136838 - DNA, 25 bp, Artificial
  Probe
tacttcagttctgatcttctccttc

SEQ ID NO: 136839 - DNA, 25 bp, Artificial
  Probe
ctacttcagttctgatcttctcctt

SEQ ID NO: 136840 - DNA, 25 bp, Artificial
  Probe
ttctacttcagttctgatcttctcc

SEQ ID NO: 136841 - DNA, 25 bp, Artificial
  Probe
acttctacttcagttctgatcttct

SEQ ID NO: 136842 - DNA, 25 bp, Artificial
  Probe
cctgttacttctacttcagttctga

SEQ ID NO: 136843 - DNA, 25 bp, Artificial
  Probe
ttcagttctgatcttctccttcctc

SEQ ID NO: 136844 - DNA, 25 bp, Artificial
  Probe
cttcagttctgatcttctccttcct

SEQ ID NO: 136845 - DNA, 25 bp, Artificial
  Probe
cttctacttcagttctgatcttctc

SEQ ID NO: 136846 - DNA, 25 bp, Artificial
  Probe
gttctgatcttctccttcctctgtg

SEQ ID NO: 136847 - DNA, 25 bp, Artificial
  Probe
ttctgatcttctccttcctctgtga

SEQ ID NO: 136848 - DNA, 25 bp, Artificial
  Probe
agttctgatcttctccttcctctgt

SEQ ID NO: 136849 - DNA, 25 bp, Artificial
  Probe
acttcagttctgatcttctccttcc

SEQ ID NO: 136850 - DNA, 25 bp, Artificial
  Probe
tctgatcttctccttcctctgtgaa

SEQ ID NO: 136851 - DNA, 25 bp, Artificial
  Probe
tgttacttctacttcagttctgatc

SEQ ID NO: 136852 - DNA, 25 bp, Artificial
  Probe
tacaataaagacccatctcatctgc

SEQ ID NO: 136853 - DNA, 25 bp, Artificial
  Probe
ttcacaaatcagttcagagagagga

SEQ ID NO: 136854 - DNA, 25 bp, Artificial
  Probe
gttcacaaatcagttcagagagagg

SEQ ID NO: 136855 - DNA, 25 bp, Artificial
  Probe
ggttcacaaatcagttcagagagag

SEQ ID NO: 136856 - DNA, 25 bp, Artificial
  Probe
tcacaaatcagttcagagagaggat

SEQ ID NO: 136857 - DNA, 25 bp, Artificial
  Probe
tcagttctgatcttctccttcctct

SEQ ID NO: 136858 - DNA, 25 bp, Artificial
  Probe
cagttctgatcttctccttcctctg

SEQ ID NO: 136859 - DNA, 25 bp, Artificial
  Probe
gttacttctacttcagttctgatct

SEQ ID NO: 136860 - DNA, 25 bp, Artificial
  Probe
ctgttacttctacttcagttctgat

SEQ ID NO: 136861 - DNA, 25 bp, Artificial
  Probe
caaatcagttcagagagaggatcaa

SEQ ID NO: 136862 - DNA, 25 bp, Artificial
  Probe
ttatgactacctcaaggattgcaga

SEQ ID NO: 136863 - DNA, 25 bp, Artificial
  Probe
gttatgactacctcaaggattgcag

SEQ ID NO: 136864 - DNA, 25 bp, Artificial
  Probe
aaatcagttcagagagaggatcaaa

SEQ ID NO: 136865 - DNA, 25 bp, Artificial
  Probe
cactctattaggtagtttattggcg

SEQ ID NO: 136866 - DNA, 25 bp, Artificial
  Probe
ctcccaagtagcatgacaaagtata

SEQ ID NO: 136867 - DNA, 25 bp, Artificial
  Probe
tacttctacttcagttctgatcttc

SEQ ID NO: 136868 - DNA, 25 bp, Artificial
  Probe
tcccaagtagcatgacaaagtataa

SEQ ID NO: 136869 - DNA, 25 bp, Artificial
  Probe
tcctctgtgaatacaataaagaccc

SEQ ID NO: 136870 - DNA, 25 bp, Artificial
  Probe
cctctgtgaatacaataaagaccca

SEQ ID NO: 136871 - DNA, 25 bp, Artificial
  Probe
cacaaatcagttcagagagaggatc

SEQ ID NO: 136872 - DNA, 25 bp, Artificial
  Probe
aatcagttcagagagaggatcaaac

SEQ ID NO: 136873 - DNA, 25 bp, Artificial
  Probe
atcaaacttgcccaagattaaagag

SEQ ID NO: 136874 - DNA, 25 bp, Artificial
  Probe
aagggttgctgtgtgtaagttattt

SEQ ID NO: 136875 - DNA, 25 bp, Artificial
  Probe
cagtgacctacatcaacgagaagag

SEQ ID NO: 136876 - DNA, 25 bp, Artificial
  Probe
tatttctattgaatttgggactgcc

SEQ ID NO: 136877 - DNA, 25 bp, Artificial
  Probe
gaagggttgctgtgtgtaagttatt

SEQ ID NO: 136878 - DNA, 25 bp, Artificial
  Probe
gcccactgtatgaactgtataaata

SEQ ID NO: 136879 - DNA, 25 bp, Artificial
  Probe
tgaagggttgctgtgtgtaagttat

SEQ ID NO: 136880 - DNA, 25 bp, Artificial
  Probe
gactgccctttccttagctttatat

SEQ ID NO: 136881 - DNA, 25 bp, Artificial
  Probe
actgccctttccttagctttatata

SEQ ID NO: 136882 - DNA, 25 bp, Artificial
  Probe
atatttctattgaatttgggactgc

SEQ ID NO: 136883 - DNA, 25 bp, Artificial
  Probe
ctgccctttccttagctttatatat

SEQ ID NO: 136884 - DNA, 25 bp, Artificial
  Probe
agtgacctacatcaacgagaagagg

SEQ ID NO: 136885 - DNA, 25 bp, Artificial
  Probe
gtgaagggttgctgtgtgtaagtta

SEQ ID NO: 136886 - DNA, 25 bp, Artificial
  Probe
ggttgctgtgtgtaagttattttgt

SEQ ID NO: 136887 - DNA, 25 bp, Artificial
  Probe
gggttgctgtgtgtaagttattttg

SEQ ID NO: 136888 - DNA, 25 bp, Artificial
  Probe
agggttgctgtgtgtaagttatttt

SEQ ID NO: 136889 - DNA, 25 bp, Artificial
  Probe
gcagtgacctacatcaacgagaaga

SEQ ID NO: 136890 - DNA, 25 bp, Artificial
  Probe
agcagtgacctacatcaacgagaag

SEQ ID NO: 136891 - DNA, 25 bp, Artificial
  Probe
ggcccactgtatgaactgtataaat

SEQ ID NO: 136892 - DNA, 25 bp, Artificial
  Probe
gttgctgtgtgtaagttattttgta

SEQ ID NO: 136893 - DNA, 25 bp, Artificial
  Probe
ggactgccctttccttagctttata

SEQ ID NO: 136894 - DNA, 25 bp, Artificial
  Probe
cccactgtatgaactgtataaatat

SEQ ID NO: 136895 - DNA, 25 bp, Artificial
  Probe
cagcagtgacctacatcaacgagaa

SEQ ID NO: 136896 - DNA, 25 bp, Artificial
  Probe
atttctattgaatttgggactgccc

SEQ ID NO: 136897 - DNA, 25 bp, Artificial
  Probe
tggcccactgtatgaactgtataaa

SEQ ID NO: 136898 - DNA, 25 bp, Artificial
  Probe
ttggcccactgtatgaactgtataa

SEQ ID NO: 136899 - DNA, 25 bp, Artificial
  Probe
ttgctgtgtgtaagttattttgtac

SEQ ID NO: 136900 - DNA, 25 bp, Artificial
  Probe
ctattgaatttgggactgccctttc

SEQ ID NO: 136901 - DNA, 25 bp, Artificial
  Probe
tgccctttccttagctttatatata

SEQ ID NO: 136902 - DNA, 25 bp, Artificial
  Probe
cttggcccactgtatgaactgtata

SEQ ID NO: 136903 - DNA, 25 bp, Artificial
  Probe
cctacatcaacgagaagagggactt

SEQ ID NO: 136904 - DNA, 25 bp, Artificial
  Probe
tctattgaatttgggactgcccttt

SEQ ID NO: 136905 - DNA, 25 bp, Artificial
  Probe
ttctattgaatttgggactgccctt

SEQ ID NO: 136906 - DNA, 25 bp, Artificial
  Probe
tttctattgaatttgggactgccct

SEQ ID NO: 136907 - DNA, 25 bp, Artificial
  Probe
ctacatcaacgagaagagggacttc

SEQ ID NO: 136908 - DNA, 25 bp, Artificial
  Probe
gacctacatcaacgagaagagggac

SEQ ID NO: 136909 - DNA, 25 bp, Artificial
  Probe
tgtgaagggttgctgtgtgtaagtt

SEQ ID NO: 136910 - DNA, 25 bp, Artificial
  Probe
tttgtacatgattgggtgtggtttg

SEQ ID NO: 136911 - DNA, 25 bp, Artificial
  Probe
tattgaatttgggactgccctttcc

SEQ ID NO: 136912 - DNA, 25 bp, Artificial
  Probe
gtgacctacatcaacgagaagaggg

SEQ ID NO: 136913 - DNA, 25 bp, Artificial
  Probe
acctacatcaacgagaagagggact

SEQ ID NO: 136914 - DNA, 25 bp, Artificial
  Probe
tgacctacatcaacgagaagaggga

SEQ ID NO: 136915 - DNA, 25 bp, Artificial
  Probe
gaatttgggactgccctttccttag

SEQ ID NO: 136916 - DNA, 25 bp, Artificial
  Probe
gccctttccttagctttatatatat

SEQ ID NO: 136917 - DNA, 25 bp, Artificial
  Probe
aatatttctattgaatttgggactg

SEQ ID NO: 136918 - DNA, 25 bp, Artificial
  Probe
tacatcaacgagaagagggacttcc

SEQ ID NO: 136919 - DNA, 25 bp, Artificial
  Probe
cattctggtcctcttgagtcctctt

SEQ ID NO: 136920 - DNA, 25 bp, Artificial
  Probe
aacattctggtcctcttgagtcctc

SEQ ID NO: 136921 - DNA, 25 bp, Artificial
  Probe
attctggtcctcttgagtcctcttt

SEQ ID NO: 136922 - DNA, 25 bp, Artificial
  Probe
ttacaaccacacagtctgcacatag

SEQ ID NO: 136923 - DNA, 25 bp, Artificial
  Probe
caacattctggtcctcttgagtcct

SEQ ID NO: 136924 - DNA, 25 bp, Artificial
  Probe
acattctggtcctcttgagtcctct

SEQ ID NO: 136925 - DNA, 25 bp, Artificial
  Probe
ttctggtcctcttgagtcctctttc

SEQ ID NO: 136926 - DNA, 25 bp, Artificial
  Probe
tttacaaccacacagtctgcacata

SEQ ID NO: 136927 - DNA, 25 bp, Artificial
  Probe
gtcctcttgagtcctctttccttgg

SEQ ID NO: 136928 - DNA, 25 bp, Artificial
  Probe
ggtcctcttgagtcctctttccttg

SEQ ID NO: 136929 - DNA, 25 bp, Artificial
  Probe
tggtcctcttgagtcctctttcctt

SEQ ID NO: 136930 - DNA, 25 bp, Artificial
  Probe
ccaacattctggtcctcttgagtcc

SEQ ID NO: 136931 - DNA, 25 bp, Artificial
  Probe
gtcgattttacaaccacacagtctg

SEQ ID NO: 136932 - DNA, 25 bp, Artificial
  Probe
tacaaccacacagtctgcacatagc

SEQ ID NO: 136933 - DNA, 25 bp, Artificial
  Probe
gagccaacattctggtcctcttgag

SEQ ID NO: 136934 - DNA, 25 bp, Artificial
  Probe
gagcgacttctcccagattgtactc

SEQ ID NO: 136935 - DNA, 25 bp, Artificial
  Probe
ctggtcctcttgagtcctctttcct

SEQ ID NO: 136936 - DNA, 25 bp, Artificial
  Probe
tctggtcctcttgagtcctctttcc

SEQ ID NO: 136937 - DNA, 25 bp, Artificial
  Probe
gtgtcccttctgaaccaaactgtca

SEQ ID NO: 136938 - DNA, 25 bp, Artificial
  Probe
gattttacaaccacacagtctgcac

SEQ ID NO: 136939 - DNA, 25 bp, Artificial
  Probe
tgtcgattttacaaccacacagtct

SEQ ID NO: 136940 - DNA, 25 bp, Artificial
  Probe
ttttacaaccacacagtctgcacat

SEQ ID NO: 136941 - DNA, 25 bp, Artificial
  Probe
attttacaaccacacagtctgcaca

SEQ ID NO: 136942 - DNA, 25 bp, Artificial
  Probe
caactgctgtcgattttacaaccac

SEQ ID NO: 136943 - DNA, 25 bp, Artificial
  Probe
tcgattttacaaccacacagtctgc

SEQ ID NO: 136944 - DNA, 25 bp, Artificial
  Probe
aactgctgtcgattttacaaccaca

SEQ ID NO: 136945 - DNA, 25 bp, Artificial
  Probe
acaactgctgtcgattttacaacca

SEQ ID NO: 136946 - DNA, 25 bp, Artificial
  Probe
ctcttgagtcctctttccttgggaa

SEQ ID NO: 136947 - DNA, 25 bp, Artificial
  Probe
cgattttacaaccacacagtctgca

SEQ ID NO: 136948 - DNA, 25 bp, Artificial
  Probe
tcttgagtcctctttccttgggaac

SEQ ID NO: 136949 - DNA, 25 bp, Artificial
  Probe
ctgctgtcgattttacaaccacaca

SEQ ID NO: 136950 - DNA, 25 bp, Artificial
  Probe
actgctgtcgattttacaaccacac

SEQ ID NO: 136951 - DNA, 25 bp, Artificial
  Probe
tgtcccttctgaaccaaactgtcag

SEQ ID NO: 136952 - DNA, 25 bp, Artificial
  Probe
ctgtcgattttacaaccacacagtc

SEQ ID NO: 136953 - DNA, 25 bp, Artificial
  Probe
cttgagtcctctttccttgggaacc

SEQ ID NO: 136954 - DNA, 25 bp, Artificial
  Probe
gtcactacctccatcccacaattgg

SEQ ID NO: 136955 - DNA, 25 bp, Artificial
  Probe
gtcctctttccttgggaacctcatg

SEQ ID NO: 136956 - DNA, 25 bp, Artificial
  Probe
gacaactgctgtcgattttacaacc

SEQ ID NO: 136957 - DNA, 25 bp, Artificial
  Probe
ggacaactgctgtcgattttacaac

SEQ ID NO: 136958 - DNA, 25 bp, Artificial
  Probe
agtcctctttccttgggaacctcat

SEQ ID NO: 136959 - DNA, 25 bp, Artificial
  Probe
cctctttccttgggaacctcatgtg

SEQ ID NO: 136960 - DNA, 25 bp, Artificial
  Probe
tggacaactgctgtcgattttacaa

SEQ ID NO: 136961 - DNA, 25 bp, Artificial
  Probe
tcctctttccttgggaacctcatgt

SEQ ID NO: 136962 - DNA, 25 bp, Artificial
  Probe
ttgagtcctctttccttgggaacct

SEQ ID NO: 136963 - DNA, 25 bp, Artificial
  Probe
ctggacaactgctgtcgattttaca

SEQ ID NO: 136964 - DNA, 25 bp, Artificial
  Probe
catcatcatcttcttcatcgccatc

SEQ ID NO: 136965 - DNA, 25 bp, Artificial
  Probe
atcatcatcttcttcatcgccatca

SEQ ID NO: 136966 - DNA, 25 bp, Artificial
  Probe
ccattagtagccaactagacttcaa

SEQ ID NO: 136967 - DNA, 25 bp, Artificial
  Probe
tacaccattagtagccaactagact

SEQ ID NO: 136968 - DNA, 25 bp, Artificial
  Probe
caccattagtagccaactagacttc

SEQ ID NO: 136969 - DNA, 25 bp, Artificial
  Probe
cattagtagccaactagacttcaac

SEQ ID NO: 136970 - DNA, 25 bp, Artificial
  Probe
accattagtagccaactagacttca

SEQ ID NO: 136971 - DNA, 25 bp, Artificial
  Probe
gtacaccattagtagccaactagac

SEQ ID NO: 136972 - DNA, 25 bp, Artificial
  Probe
acaccattagtagccaactagactt

SEQ ID NO: 136973 - DNA, 25 bp, Artificial
  Probe
caaagccatcatcatcttcttcatc

SEQ ID NO: 136974 - DNA, 25 bp, Artificial
  Probe
tcaaagccatcatcatcttcttcat

SEQ ID NO: 136975 - DNA, 25 bp, Artificial
  Probe
tcatcatcttcttcatcgccatcac

SEQ ID NO: 136976 - DNA, 25 bp, Artificial
  Probe
ccatcatcatcttcttcatcgccat

SEQ ID NO: 136977 - DNA, 25 bp, Artificial
  Probe
attgtttcattgagtatggagatgc

SEQ ID NO: 136978 - DNA, 25 bp, Artificial
  Probe
atctgctgacataaagaggattacc

SEQ ID NO: 136979 - DNA, 25 bp, Artificial
  Probe
ccatctgctgacataaagaggatta

SEQ ID NO: 136980 - DNA, 25 bp, Artificial
  Probe
gaaatccatctgctgacataaagag

SEQ ID NO: 136981 - DNA, 25 bp, Artificial
  Probe
ttgtttcattgagtatggagatgct

SEQ ID NO: 136982 - DNA, 25 bp, Artificial
  Probe
catctgctgacataaagaggattac

SEQ ID NO: 136983 - DNA, 25 bp, Artificial
  Probe
cgattgtttcattgagtatggagat

SEQ ID NO: 136984 - DNA, 25 bp, Artificial
  Probe
aaatccatctgctgacataaagagg

SEQ ID NO: 136985 - DNA, 25 bp, Artificial
  Probe
agtcaaagccatcatcatcttcttc

SEQ ID NO: 136986 - DNA, 25 bp, Artificial
  Probe
gtcaaagccatcatcatcttcttca

SEQ ID NO: 136987 - DNA, 25 bp, Artificial
  Probe
cagtcaaagccatcatcatcttctt

SEQ ID NO: 136988 - DNA, 25 bp, Artificial
  Probe
ggaaatccatctgctgacataaaga

SEQ ID NO: 136989 - DNA, 25 bp, Artificial
  Probe
catcatcatcttctgcatcactgtc

SEQ ID NO: 136990 - DNA, 25 bp, Artificial
  Probe
aaagccatcatcatcttcttcatcg

SEQ ID NO: 136991 - DNA, 25 bp, Artificial
  Probe
gagaaacaaacaagaacctctacat

SEQ ID NO: 136992 - DNA, 25 bp, Artificial
  Probe
tgtttcattgagtatggagatgctc

SEQ ID NO: 136993 - DNA, 25 bp, Artificial
  Probe
atcatcatcttctgcatcactgtca

SEQ ID NO: 136994 - DNA, 25 bp, Artificial
  Probe
caagcagagaaacaaacaagaacct

SEQ ID NO: 136995 - DNA, 25 bp, Artificial
  Probe
tcatcatcttctgcatcactgtcaa

SEQ ID NO: 136996 - DNA, 25 bp, Artificial
  Probe
gattgtttcattgagtatggagatg

SEQ ID NO: 136997 - DNA, 25 bp, Artificial
  Probe
agaaacaaacaagaacctctacata

SEQ ID NO: 136998 - DNA, 25 bp, Artificial
  Probe
ctgacataaagaggattacctgctt

SEQ ID NO: 136999 - DNA, 25 bp, Artificial
  Probe
aacaaacaagaacctctacataggg

SEQ ID NO: 137000 - DNA, 25 bp, Artificial
  Probe
aagccatcatcatcttcttcatcgc

SEQ ID NO: 137001 - DNA, 25 bp, Artificial
  Probe
gaaacaaacaagaacctctacatag

SEQ ID NO: 137002 - DNA, 25 bp, Artificial
  Probe
gaaatgaggcaagcagagaaacaaa

SEQ ID NO: 137003 - DNA, 25 bp, Artificial
  Probe
ctgctgacataaagaggattacctg

SEQ ID NO: 137004 - DNA, 25 bp, Artificial
  Probe
tctgctgacataaagaggattacct

SEQ ID NO: 137005 - DNA, 25 bp, Artificial
  Probe
cagactgtttgaaggtagccatttg

SEQ ID NO: 137006 - DNA, 25 bp, Artificial
  Probe
aaacaaacaagaacctctacatagg

SEQ ID NO: 137007 - DNA, 25 bp, Artificial
  Probe
aagcagagaaacaaacaagaacctc

SEQ ID NO: 137008 - DNA, 25 bp, Artificial
  Probe
catcatcttcttcatcgccatcacc

SEQ ID NO: 137009 - DNA, 25 bp, Artificial
  Probe
gagaatccacaaggaattgaatgac

SEQ ID NO: 137010 - DNA, 25 bp, Artificial
  Probe
agagaatccacaaggaattgaatga

SEQ ID NO: 137011 - DNA, 25 bp, Artificial
  Probe
tgaagagaatccacaaggaattgaa

SEQ ID NO: 137012 - DNA, 25 bp, Artificial
  Probe
aagagaatccacaaggaattgaatg

SEQ ID NO: 137013 - DNA, 25 bp, Artificial
  Probe
gaagagaatccacaaggaattgaat

SEQ ID NO: 137014 - DNA, 25 bp, Artificial
  Probe
ctgaagagaatccacaaggaattga

SEQ ID NO: 137015 - DNA, 25 bp, Artificial
  Probe
tctgaagagaatccacaaggaattg

SEQ ID NO: 137016 - DNA, 25 bp, Artificial
  Probe
gaatccacaaggaattgaatgacct

SEQ ID NO: 137017 - DNA, 25 bp, Artificial
  Probe
agaatccacaaggaattgaatgacc

SEQ ID NO: 137018 - DNA, 25 bp, Artificial
  Probe
ctctgaagagaatccacaaggaatt

SEQ ID NO: 137019 - DNA, 25 bp, Artificial
  Probe
ctattcatttcccaacagattaccc

SEQ ID NO: 137020 - DNA, 25 bp, Artificial
  Probe
aatccacaaggaattgaatgacctg

SEQ ID NO: 137021 - DNA, 25 bp, Artificial
  Probe
ggtctccagcactaactatttcaaa

SEQ ID NO: 137022 - DNA, 25 bp, Artificial
  Probe
actattcatttcccaacagattacc

SEQ ID NO: 137023 - DNA, 25 bp, Artificial
  Probe
cattcatttgatggaaacacttgtg

SEQ ID NO: 137024 - DNA, 25 bp, Artificial
  Probe
atggcagcatttgtcttgatattct

SEQ ID NO: 137025 - DNA, 25 bp, Artificial
  Probe
aacattcatttgatggaaacacttg

SEQ ID NO: 137026 - DNA, 25 bp, Artificial
  Probe
tcttgactattcatttcccaacaga

SEQ ID NO: 137027 - DNA, 25 bp, Artificial
  Probe
gaacattcatttgatggaaacactt

SEQ ID NO: 137028 - DNA, 25 bp, Artificial
  Probe
ttcttgactattcatttcccaacag

SEQ ID NO: 137029 - DNA, 25 bp, Artificial
  Probe
cttgactattcatttcccaacagat

SEQ ID NO: 137030 - DNA, 25 bp, Artificial
  Probe
acattcatttgatggaaacacttgt

SEQ ID NO: 137031 - DNA, 25 bp, Artificial
  Probe
tttcttgactattcatttcccaaca

SEQ ID NO: 137032 - DNA, 25 bp, Artificial
  Probe
atcccaatccagatgatcctttagt

SEQ ID NO: 137033 - DNA, 25 bp, Artificial
  Probe
gatgatcctttagtgcctgagattg

SEQ ID NO: 137034 - DNA, 25 bp, Artificial
  Probe
agatgatcctttagtgcctgagatt

SEQ ID NO: 137035 - DNA, 25 bp, Artificial
  Probe
ttgactattcatttcccaacagatt

SEQ ID NO: 137036 - DNA, 25 bp, Artificial
  Probe
tgaacattcatttgatggaaacact

SEQ ID NO: 137037 - DNA, 25 bp, Artificial
  Probe
gactattcatttcccaacagattac

SEQ ID NO: 137038 - DNA, 25 bp, Artificial
  Probe
tgtgtatatttaaagacccagtgct

SEQ ID NO: 137039 - DNA, 25 bp, Artificial
  Probe
ccatctgttctctgttgtgtgatcc

SEQ ID NO: 137040 - DNA, 25 bp, Artificial
  Probe
tcccaatccagatgatcctttagtg

SEQ ID NO: 137041 - DNA, 25 bp, Artificial
  Probe
gctctgaagagaatccacaaggaat

SEQ ID NO: 137042 - DNA, 25 bp, Artificial
  Probe
ttgtgtatatttaaagacccagtgc

SEQ ID NO: 137043 - DNA, 25 bp, Artificial
  Probe
gtgaacattcatttgatggaaacac

SEQ ID NO: 137044 - DNA, 25 bp, Artificial
  Probe
tgactattcatttcccaacagatta

SEQ ID NO: 137045 - DNA, 25 bp, Artificial
  Probe
gtatatttaaagacccagtgcttcc

SEQ ID NO: 137046 - DNA, 25 bp, Artificial
  Probe
tatatttaaagacccagtgcttcct

SEQ ID NO: 137047 - DNA, 25 bp, Artificial
  Probe
gtgtatatttaaagacccagtgctt

SEQ ID NO: 137048 - DNA, 25 bp, Artificial
  Probe
attcatttgatggaaacacttgtgt

SEQ ID NO: 137049 - DNA, 25 bp, Artificial
  Probe
tgtatatttaaagacccagtgcttc

SEQ ID NO: 137050 - DNA, 25 bp, Artificial
  Probe
ttcatttgatggaaacacttgtgta

SEQ ID NO: 137051 - DNA, 25 bp, Artificial
  Probe
atccacaaggaattgaatgacctgg

SEQ ID NO: 137052 - DNA, 25 bp, Artificial
  Probe
tcatttgatggaaacacttgtgtat

SEQ ID NO: 137053 - DNA, 25 bp, Artificial
  Probe
caatccagatgatcctttagtgcct

SEQ ID NO: 137054 - DNA, 25 bp, Artificial
  Probe
gattgcttcatggattggagaactt

SEQ ID NO: 137055 - DNA, 25 bp, Artificial
  Probe
gatgaggaagacatggagagaagaa

SEQ ID NO: 137056 - DNA, 25 bp, Artificial
  Probe
ctagtggctctcttccaataacatc

SEQ ID NO: 137057 - DNA, 25 bp, Artificial
  Probe
cttctagtggctctcttccaataac

SEQ ID NO: 137058 - DNA, 25 bp, Artificial
  Probe
tagtggctctcttccaataacatct

SEQ ID NO: 137059 - DNA, 25 bp, Artificial
  Probe
tctagtggctctcttccaataacat

SEQ ID NO: 137060 - DNA, 25 bp, Artificial
  Probe
ttctagtggctctcttccaataaca

SEQ ID NO: 137061 - DNA, 25 bp, Artificial
  Probe
tggctctcttccaataacatctctg

SEQ ID NO: 137062 - DNA, 25 bp, Artificial
  Probe
gtggctctcttccaataacatctct

SEQ ID NO: 137063 - DNA, 25 bp, Artificial
  Probe
agtggctctcttccaataacatctc

SEQ ID NO: 137064 - DNA, 25 bp, Artificial
  Probe
gcttctagtggctctcttccaataa

SEQ ID NO: 137065 - DNA, 25 bp, Artificial
  Probe
ttcaggattgcttcatggattggag

SEQ ID NO: 137066 - DNA, 25 bp, Artificial
  Probe
tcatggattggagaactttctaacc

SEQ ID NO: 137067 - DNA, 25 bp, Artificial
  Probe
gcttcatggattggagaactttcta

SEQ ID NO: 137068 - DNA, 25 bp, Artificial
  Probe
ggattgcttcatggattggagaact

SEQ ID NO: 137069 - DNA, 25 bp, Artificial
  Probe
aggattgcttcatggattggagaac

SEQ ID NO: 137070 - DNA, 25 bp, Artificial
  Probe
caggattgcttcatggattggagaa

SEQ ID NO: 137071 - DNA, 25 bp, Artificial
  Probe
atgaggaagacatggagagaagaaa

SEQ ID NO: 137072 - DNA, 25 bp, Artificial
  Probe
ggatgaggaagacatggagagaaga

SEQ ID NO: 137073 - DNA, 25 bp, Artificial
  Probe
aggatgaggaagacatggagagaag

SEQ ID NO: 137074 - DNA, 25 bp, Artificial
  Probe
gaggatgaggaagacatggagagaa

SEQ ID NO: 137075 - DNA, 25 bp, Artificial
  Probe
ttcatggattggagaactttctaac

SEQ ID NO: 137076 - DNA, 25 bp, Artificial
  Probe
attgcttcatggattggagaacttt

SEQ ID NO: 137077 - DNA, 25 bp, Artificial
  Probe
cttcatggattggagaactttctaa

SEQ ID NO: 137078 - DNA, 25 bp, Artificial
  Probe
ggctctcttccaataacatctctgg

SEQ ID NO: 137079 - DNA, 25 bp, Artificial
  Probe
ttgcttcatggattggagaactttc

SEQ ID NO: 137080 - DNA, 25 bp, Artificial
  Probe
tgcttctagtggctctcttccaata

SEQ ID NO: 137081 - DNA, 25 bp, Artificial
  Probe
tcaggattgcttcatggattggaga

SEQ ID NO: 137082 - DNA, 25 bp, Artificial
  Probe
catggattggagaactttctaacca

SEQ ID NO: 137083 - DNA, 25 bp, Artificial
  Probe
tgcttcatggattggagaactttct

SEQ ID NO: 137084 - DNA, 25 bp, Artificial
  Probe
tttcaggattgcttcatggattgga

SEQ ID NO: 137085 - DNA, 25 bp, Artificial
  Probe
gtgaggatgaggaagacatggagag

SEQ ID NO: 137086 - DNA, 25 bp, Artificial
  Probe
tgaggatgaggaagacatggagaga

SEQ ID NO: 137087 - DNA, 25 bp, Artificial
  Probe
atgttgtgaggatgaggaagacatg

SEQ ID NO: 137088 - DNA, 25 bp, Artificial
  Probe
catgttgtgaggatgaggaagacat

SEQ ID NO: 137089 - DNA, 25 bp, Artificial
  Probe
ttgtgaggatgaggaagacatggag

SEQ ID NO: 137090 - DNA, 25 bp, Artificial
  Probe
ctcttgcttctagtggctctcttcc

SEQ ID NO: 137091 - DNA, 25 bp, Artificial
  Probe
ttgcttctagtggctctcttccaat

SEQ ID NO: 137092 - DNA, 25 bp, Artificial
  Probe
accatgttgtgaggatgaggaagac

SEQ ID NO: 137093 - DNA, 25 bp, Artificial
  Probe
gttgtgaggatgaggaagacatgga

SEQ ID NO: 137094 - DNA, 25 bp, Artificial
  Probe
caataacatctctggatgcaactgg

SEQ ID NO: 137095 - DNA, 25 bp, Artificial
  Probe
ccaataacatctctggatgcaactg

SEQ ID NO: 137096 - DNA, 25 bp, Artificial
  Probe
aacagtacactggcaaccattcaag

SEQ ID NO: 137097 - DNA, 25 bp, Artificial
  Probe
aatgtcttttcaggattgcttcatg

SEQ ID NO: 137098 - DNA, 25 bp, Artificial
  Probe
cttttcaggattgcttcatggattg

SEQ ID NO: 137099 - DNA, 25 bp, Artificial
  Probe
ataagaacatcatattgctctggct

SEQ ID NO: 137100 - DNA, 25 bp, Artificial
  Probe
taagaacatcatattgctctggcta

SEQ ID NO: 137101 - DNA, 25 bp, Artificial
  Probe
aataagaacatcatattgctctggc

SEQ ID NO: 137102 - DNA, 25 bp, Artificial
  Probe
aagaacatcatattgctctggctac

SEQ ID NO: 137103 - DNA, 25 bp, Artificial
  Probe
gctacactgaccttgaactattctg

SEQ ID NO: 137104 - DNA, 25 bp, Artificial
  Probe
gaacatcatattgctctggctacac

SEQ ID NO: 137105 - DNA, 25 bp, Artificial
  Probe
ctacactgaccttgaactattctgt

SEQ ID NO: 137106 - DNA, 25 bp, Artificial
  Probe
tacactgaccttgaactattctgtt

SEQ ID NO: 137107 - DNA, 25 bp, Artificial
  Probe
aacatcatattgctctggctacact

SEQ ID NO: 137108 - DNA, 25 bp, Artificial
  Probe
agaacatcatattgctctggctaca

SEQ ID NO: 137109 - DNA, 25 bp, Artificial
  Probe
ggctacactgaccttgaactattct

SEQ ID NO: 137110 - DNA, 25 bp, Artificial
  Probe
ctggctacactgaccttgaactatt

SEQ ID NO: 137111 - DNA, 25 bp, Artificial
  Probe
tggctacactgaccttgaactattc

SEQ ID NO: 137112 - DNA, 25 bp, Artificial
  Probe
acatcatattgctctggctacactg

SEQ ID NO: 137113 - DNA, 25 bp, Artificial
  Probe
ccataaagaccataacattgaaggg

SEQ ID NO: 137114 - DNA, 25 bp, Artificial
  Probe
atcatattgctctggctacactgac

SEQ ID NO: 137115 - DNA, 25 bp, Artificial
  Probe
catcatattgctctggctacactga

SEQ ID NO: 137116 - DNA, 25 bp, Artificial
  Probe
aaagaccataacattgaagggaaag

SEQ ID NO: 137117 - DNA, 25 bp, Artificial
  Probe
tctggctacactgaccttgaactat

SEQ ID NO: 137118 - DNA, 25 bp, Artificial
  Probe
cactgaccttgaactattctgtttg

SEQ ID NO: 137119 - DNA, 25 bp, Artificial
  Probe
ccttgaactattctgtttgtttcca

SEQ ID NO: 137120 - DNA, 25 bp, Artificial
  Probe
accttgaactattctgtttgtttcc

SEQ ID NO: 137121 - DNA, 25 bp, Artificial
  Probe
actgaccttgaactattctgtttgt

SEQ ID NO: 137122 - DNA, 25 bp, Artificial
  Probe
cataaagaccataacattgaaggga

SEQ ID NO: 137123 - DNA, 25 bp, Artificial
  Probe
tccataaagaccataacattgaagg

SEQ ID NO: 137124 - DNA, 25 bp, Artificial
  Probe
tacaagacctagaagccacatttag

SEQ ID NO: 137125 - DNA, 25 bp, Artificial
  Probe
ctgaccttgaactattctgtttgtt

SEQ ID NO: 137126 - DNA, 25 bp, Artificial
  Probe
ttctgtttgtttccataaagaccat

SEQ ID NO: 137127 - DNA, 25 bp, Artificial
  Probe
attctgtttgtttccataaagacca

SEQ ID NO: 137128 - DNA, 25 bp, Artificial
  Probe
aagaccataacattgaagggaaagc

SEQ ID NO: 137129 - DNA, 25 bp, Artificial
  Probe
tgaccttgaactattctgtttgttt

SEQ ID NO: 137130 - DNA, 25 bp, Artificial
  Probe
ccttatcaaccttctgaaccctaaa

SEQ ID NO: 137131 - DNA, 25 bp, Artificial
  Probe
gtacaagacctagaagccacattta

SEQ ID NO: 137132 - DNA, 25 bp, Artificial
  Probe
aagacctagaagccacatttagact

SEQ ID NO: 137133 - DNA, 25 bp, Artificial
  Probe
caagacctagaagccacatttagac

SEQ ID NO: 137134 - DNA, 25 bp, Artificial
  Probe
taaagaccataacattgaagggaaa

SEQ ID NO: 137135 - DNA, 25 bp, Artificial
  Probe
ctagaagccacatttagactccttg

SEQ ID NO: 137136 - DNA, 25 bp, Artificial
  Probe
cttatcaaccttctgaaccctaaag

SEQ ID NO: 137137 - DNA, 25 bp, Artificial
  Probe
gaccttgaactattctgtttgtttc

SEQ ID NO: 137138 - DNA, 25 bp, Artificial
  Probe
accttatcaaccttctgaaccctaa

SEQ ID NO: 137139 - DNA, 25 bp, Artificial
  Probe
aattagccaaatctttaggtgttga

SEQ ID NO: 137140 - DNA, 25 bp, Artificial
  Probe
caattagccaaatctttaggtgttg

SEQ ID NO: 137141 - DNA, 25 bp, Artificial
  Probe
attagccaaatctttaggtgttgat

SEQ ID NO: 137142 - DNA, 25 bp, Artificial
  Probe
acaagacctagaagccacatttaga

SEQ ID NO: 137143 - DNA, 25 bp, Artificial
  Probe
acactgaccttgaactattctgttt

SEQ ID NO: 137144 - DNA, 25 bp, Artificial
  Probe
agttctaggtactggtctccctttc

SEQ ID NO: 137145 - DNA, 25 bp, Artificial
  Probe
gttctaggtactggtctccctttcc

SEQ ID NO: 137146 - DNA, 25 bp, Artificial
  Probe
ctaggtactggtctccctttccatc

SEQ ID NO: 137147 - DNA, 25 bp, Artificial
  Probe
tctaggtactggtctccctttccat

SEQ ID NO: 137148 - DNA, 25 bp, Artificial
  Probe
ttctaggtactggtctccctttcca

SEQ ID NO: 137149 - DNA, 25 bp, Artificial
  Probe
tactggtctccctttccatcccatt

SEQ ID NO: 137150 - DNA, 25 bp, Artificial
  Probe
taggtactggtctccctttccatcc

SEQ ID NO: 137151 - DNA, 25 bp, Artificial
  Probe
cagttctaggtactggtctcccttt

SEQ ID NO: 137152 - DNA, 25 bp, Artificial
  Probe
ctggtctccctttccatcccatttg

SEQ ID NO: 137153 - DNA, 25 bp, Artificial
  Probe
tcagttctaggtactggtctccctt

SEQ ID NO: 137154 - DNA, 25 bp, Artificial
  Probe
gtcagttctaggtactggtctccct

SEQ ID NO: 137155 - DNA, 25 bp, Artificial
  Probe
agggtcagttctaggtactggtctc

SEQ ID NO: 137156 - DNA, 25 bp, Artificial
  Probe
cagggtcagttctaggtactggtct

SEQ ID NO: 137157 - DNA, 25 bp, Artificial
  Probe
ggtcagttctaggtactggtctccc

SEQ ID NO: 137158 - DNA, 25 bp, Artificial
  Probe
gggtcagttctaggtactggtctcc

SEQ ID NO: 137159 - DNA, 25 bp, Artificial
  Probe
gtgacaaagtttatggaagtggatg

SEQ ID NO: 137160 - DNA, 25 bp, Artificial
  Probe
tgtgacaaagtttatggaagtggat

SEQ ID NO: 137161 - DNA, 25 bp, Artificial
  Probe
atgtgacaaagtttatggaagtgga

SEQ ID NO: 137162 - DNA, 25 bp, Artificial
  Probe
tgacaaagtttatggaagtggatgc

SEQ ID NO: 137163 - DNA, 25 bp, Artificial
  Probe
catgtgacaaagtttatggaagtgg

SEQ ID NO: 137164 - DNA, 25 bp, Artificial
  Probe
gcatgtgacaaagtttatggaagtg

SEQ ID NO: 137165 - DNA, 25 bp, Artificial
  Probe
gacaaagtttatggaagtggatgcg

SEQ ID NO: 137166 - DNA, 25 bp, Artificial
  Probe
ctgcatgtgacaaagtttatggaag

SEQ ID NO: 137167 - DNA, 25 bp, Artificial
  Probe
tgcatgtgacaaagtttatggaagt

SEQ ID NO: 137168 - DNA, 25 bp, Artificial
  Probe
tttccctttctctgttttcttctca

SEQ ID NO: 137169 - DNA, 25 bp, Artificial
  Probe
gcatcattttccctttctctgtttt

SEQ ID NO: 137170 - DNA, 25 bp, Artificial
  Probe
ttttccctttctctgttttcttctc

SEQ ID NO: 137171 - DNA, 25 bp, Artificial
  Probe
tcattttccctttctctgttttctt

SEQ ID NO: 137172 - DNA, 25 bp, Artificial
  Probe
catcattttccctttctctgttttc

SEQ ID NO: 137173 - DNA, 25 bp, Artificial
  Probe
agcatcattttccctttctctgttt

SEQ ID NO: 137174 - DNA, 25 bp, Artificial
  Probe
cattttccctttctctgttttcttc

SEQ ID NO: 137175 - DNA, 25 bp, Artificial
  Probe
atcattttccctttctctgttttct

SEQ ID NO: 137176 - DNA, 25 bp, Artificial
  Probe
attttccctttctctgttttcttct

SEQ ID NO: 137177 - DNA, 25 bp, Artificial
  Probe
gctgcatgtgacaaagtttatggaa

SEQ ID NO: 137178 - DNA, 25 bp, Artificial
  Probe
tttctctgttttcttctcaggagtt

SEQ ID NO: 137179 - DNA, 25 bp, Artificial
  Probe
ctttctctgttttcttctcaggagt

SEQ ID NO: 137180 - DNA, 25 bp, Artificial
  Probe
ttccctttctctgttttcttctcag

SEQ ID NO: 137181 - DNA, 25 bp, Artificial
  Probe
tctctgttttcttctcaggagttaa

SEQ ID NO: 137182 - DNA, 25 bp, Artificial
  Probe
ttctctgttttcttctcaggagtta

SEQ ID NO: 137183 - DNA, 25 bp, Artificial
  Probe
ctgtgctgcatgtgacaaagtttat

SEQ ID NO: 137184 - DNA, 25 bp, Artificial
  Probe
ctctgttttcttctcaggagttaaa

SEQ ID NO: 137185 - DNA, 25 bp, Artificial
  Probe
cctttctctgttttcttctcaggag

SEQ ID NO: 137186 - DNA, 25 bp, Artificial
  Probe
tgtgctgcatgtgacaaagtttatg

SEQ ID NO: 137187 - DNA, 25 bp, Artificial
  Probe
cagcatcattttccctttctctgtt

SEQ ID NO: 137188 - DNA, 25 bp, Artificial
  Probe
tctgttttcttctcaggagttaaaa

SEQ ID NO: 137189 - DNA, 25 bp, Artificial
  Probe
gtgctgcatgtgacaaagtttatgg

SEQ ID NO: 137190 - DNA, 25 bp, Artificial
  Probe
ttcttatgcattccatttgactagc

SEQ ID NO: 137191 - DNA, 25 bp, Artificial
  Probe
tgctgcatgtgacaaagtttatgga

SEQ ID NO: 137192 - DNA, 25 bp, Artificial
  Probe
gtccagcatcattttccctttctct

SEQ ID NO: 137193 - DNA, 25 bp, Artificial
  Probe
ccctttctctgttttcttctcagga

SEQ ID NO: 137194 - DNA, 25 bp, Artificial
  Probe
tccctttctctgttttcttctcagg

SEQ ID NO: 137195 - DNA, 25 bp, Artificial
  Probe
tgtccagcatcattttccctttctc

SEQ ID NO: 137196 - DNA, 25 bp, Artificial
  Probe
ctgttttcttctcaggagttaaaat

SEQ ID NO: 137197 - DNA, 25 bp, Artificial
  Probe
gtgtccagcatcattttccctttct

SEQ ID NO: 137198 - DNA, 25 bp, Artificial
  Probe
tccagcatcattttccctttctctg

SEQ ID NO: 137199 - DNA, 25 bp, Artificial
  Probe
tgttttcttctcaggagttaaaatt

SEQ ID NO: 137200 - DNA, 25 bp, Artificial
  Probe
tttcttatgcattccatttgactag

SEQ ID NO: 137201 - DNA, 25 bp, Artificial
  Probe
ccagcatcattttccctttctctgt

SEQ ID NO: 137202 - DNA, 25 bp, Artificial
  Probe
cctgtgctgcatgtgacaaagttta

SEQ ID NO: 137203 - DNA, 25 bp, Artificial
  Probe
cttatgcattccatttgactagcac

SEQ ID NO: 137204 - DNA, 25 bp, Artificial
  Probe
atagaaccaggtcactacttagcag

SEQ ID NO: 137205 - DNA, 25 bp, Artificial
  Probe
gatagaaccaggtcactacttagca

SEQ ID NO: 137206 - DNA, 25 bp, Artificial
  Probe
ctgatagaaccaggtcactacttag

SEQ ID NO: 137207 - DNA, 25 bp, Artificial
  Probe
tgatagaaccaggtcactacttagc

SEQ ID NO: 137208 - DNA, 25 bp, Artificial
  Probe
gctgatagaaccaggtcactactta

SEQ ID NO: 137209 - DNA, 25 bp, Artificial
  Probe
acagaaagcatacaaaccacactat

SEQ ID NO: 137210 - DNA, 25 bp, Artificial
  Probe
cacagaaagcatacaaaccacacta

SEQ ID NO: 137211 - DNA, 25 bp, Artificial
  Probe
tctacgacatcaccaacaaagattc

SEQ ID NO: 137212 - DNA, 25 bp, Artificial
  Probe
ctctacgacatcaccaacaaagatt

SEQ ID NO: 137213 - DNA, 25 bp, Artificial
  Probe
tagaaccaggtcactacttagcagg

SEQ ID NO: 137214 - DNA, 25 bp, Artificial
  Probe
ggaataaagttctggatgtggatgg

SEQ ID NO: 137215 - DNA, 25 bp, Artificial
  Probe
cggaataaagttctggatgtggatg

SEQ ID NO: 137216 - DNA, 25 bp, Artificial
  Probe
ctacgacatcaccaacaaagattcc

SEQ ID NO: 137217 - DNA, 25 bp, Artificial
  Probe
atcacagaaagcatacaaaccacac

SEQ ID NO: 137218 - DNA, 25 bp, Artificial
  Probe
catcacagaaagcatacaaaccaca

SEQ ID NO: 137219 - DNA, 25 bp, Artificial
  Probe
ctagtaggctctgatgtaggaaacc

SEQ ID NO: 137220 - DNA, 25 bp, Artificial
  Probe
gaataaagttctggatgtggatggc

SEQ ID NO: 137221 - DNA, 25 bp, Artificial
  Probe
tagtaggctctgatgtaggaaacca

SEQ ID NO: 137222 - DNA, 25 bp, Artificial
  Probe
gttgacagaaatccaggaatatgcc

SEQ ID NO: 137223 - DNA, 25 bp, Artificial
  Probe
ggttgacagaaatccaggaatatgc

SEQ ID NO: 137224 - DNA, 25 bp, Artificial
  Probe
caagaatcatgttgtccatttgttg

SEQ ID NO: 137225 - DNA, 25 bp, Artificial
  Probe
gaacaaggttgactctactcaagaa

SEQ ID NO: 137226 - DNA, 25 bp, Artificial
  Probe
aacaaggttgactctactcaagaac

SEQ ID NO: 137227 - DNA, 25 bp, Artificial
  Probe
gatgtaggaaaccacaggaagattg

SEQ ID NO: 137228 - DNA, 25 bp, Artificial
  Probe
cagaaagcatacaaaccacactatg

SEQ ID NO: 137229 - DNA, 25 bp, Artificial
  Probe
tacgacatcaccaacaaagattcct

SEQ ID NO: 137230 - DNA, 25 bp, Artificial
  Probe
ataaagttctggatgtggatggcat

SEQ ID NO: 137231 - DNA, 25 bp, Artificial
  Probe
aataaagttctggatgtggatggca

SEQ ID NO: 137232 - DNA, 25 bp, Artificial
  Probe
tgatgtaggaaaccacaggaagatt

SEQ ID NO: 137233 - DNA, 25 bp, Artificial
  Probe
caactagtaggctctgatgtaggaa

SEQ ID NO: 137234 - DNA, 25 bp, Artificial
  Probe
gacatcaccaacaaagattccttcg

SEQ ID NO: 137235 - DNA, 25 bp, Artificial
  Probe
cgacatcaccaacaaagattccttc

SEQ ID NO: 137236 - DNA, 25 bp, Artificial
  Probe
ccatcacagaaagcatacaaaccac

SEQ ID NO: 137237 - DNA, 25 bp, Artificial
  Probe
aagtcaactagtaggctctgatgta

SEQ ID NO: 137238 - DNA, 25 bp, Artificial
  Probe
agtcaactagtaggctctgatgtag

SEQ ID NO: 137239 - DNA, 25 bp, Artificial
  Probe
tggttgacagaaatccaggaatatg

SEQ ID NO: 137240 - DNA, 25 bp, Artificial
  Probe
caacaaagattccttcgacaacatc

SEQ ID NO: 137241 - DNA, 25 bp, Artificial
  Probe
tcacagaaagcatacaaaccacact

SEQ ID NO: 137242 - DNA, 25 bp, Artificial
  Probe
gaacgagtggtaaagagggaagatg

SEQ ID NO: 137243 - DNA, 25 bp, Artificial
  Probe
ctgatgtaggaaaccacaggaagat

SEQ ID NO: 137244 - DNA, 25 bp, Artificial
  Probe
gaccaaaggctacaagaatcatgtt

SEQ ID NO: 137245 - DNA, 25 bp, Artificial
  Probe
ggaacaaggttgactctactcaaga

SEQ ID NO: 137246 - DNA, 25 bp, Artificial
  Probe
agaaagcatacaaaccacactatgg

SEQ ID NO: 137247 - DNA, 25 bp, Artificial
  Probe
agaacgagtggtaaagagggaagat

SEQ ID NO: 137248 - DNA, 25 bp, Artificial
  Probe
aaggttgactctactcaagaacgag

SEQ ID NO: 137249 - DNA, 25 bp, Artificial
  Probe
ggttacatggaaggagttgagaatt

SEQ ID NO: 137250 - DNA, 25 bp, Artificial
  Probe
tggttacatggaaggagttgagaat

SEQ ID NO: 137251 - DNA, 25 bp, Artificial
  Probe
gctgagatgacatgaattgttaagt

SEQ ID NO: 137252 - DNA, 25 bp, Artificial
  Probe
tgctgagatgacatgaattgttaag

SEQ ID NO: 137253 - DNA, 25 bp, Artificial
  Probe
cttgctgagatgacatgaattgtta

SEQ ID NO: 137254 - DNA, 25 bp, Artificial
  Probe
ttgctgagatgacatgaattgttaa

SEQ ID NO: 137255 - DNA, 25 bp, Artificial
  Probe
tcttgctgagatgacatgaattgtt

SEQ ID NO: 137256 - DNA, 25 bp, Artificial
  Probe
ttcttgctgagatgacatgaattgt

SEQ ID NO: 137257 - DNA, 25 bp, Artificial
  Probe
atggaaggagttgagaatttggata

SEQ ID NO: 137258 - DNA, 25 bp, Artificial
  Probe
tggaaggagttgagaatttggatac

SEQ ID NO: 137259 - DNA, 25 bp, Artificial
  Probe
gaacaagtcattgaggagaaacaag

SEQ ID NO: 137260 - DNA, 25 bp, Artificial
  Probe
ggaaggagttgagaatttggatacc

SEQ ID NO: 137261 - DNA, 25 bp, Artificial
  Probe
tgaggagaaacaagcccaatactta

SEQ ID NO: 137262 - DNA, 25 bp, Artificial
  Probe
ttggtagaagaaactagggtcactc

SEQ ID NO: 137263 - DNA, 25 bp, Artificial
  Probe
ggaacaagtcattgaggagaaacaa

SEQ ID NO: 137264 - DNA, 25 bp, Artificial
  Probe
tacatggaaggagttgagaatttgg

SEQ ID NO: 137265 - DNA, 25 bp, Artificial
  Probe
ttacatggaaggagttgagaatttg

SEQ ID NO: 137266 - DNA, 25 bp, Artificial
  Probe
gttacatggaaggagttgagaattt

SEQ ID NO: 137267 - DNA, 25 bp, Artificial
  Probe
ctgagatgacatgaattgttaagtt

SEQ ID NO: 137268 - DNA, 25 bp, Artificial
  Probe
cttggtagaagaaactagggtcact

SEQ ID NO: 137269 - DNA, 25 bp, Artificial
  Probe
tttcttgctgagatgacatgaattg

SEQ ID NO: 137270 - DNA, 25 bp, Artificial
  Probe
catggaaggagttgagaatttggat

SEQ ID NO: 137271 - DNA, 25 bp, Artificial
  Probe
ctagggtcactctggctaacataag

SEQ ID NO: 137272 - DNA, 25 bp, Artificial
  Probe
aacaagtcattgaggagaaacaagc

SEQ ID NO: 137273 - DNA, 25 bp, Artificial
  Probe
aagggaacaagtcattgaggagaaa

SEQ ID NO: 137274 - DNA, 25 bp, Artificial
  Probe
aaagggaacaagtcattgaggagaa

SEQ ID NO: 137275 - DNA, 25 bp, Artificial
  Probe
gtagaagaaactagggtcactctgg

SEQ ID NO: 137276 - DNA, 25 bp, Artificial
  Probe
ggtagaagaaactagggtcactctg

SEQ ID NO: 137277 - DNA, 25 bp, Artificial
  Probe
ttgaggagaaacaagcccaatactt

SEQ ID NO: 137278 - DNA, 25 bp, Artificial
  Probe
tggtagaagaaactagggtcactct

SEQ ID NO: 137279 - DNA, 25 bp, Artificial
  Probe
gagttgagaatttggataccagttc

SEQ ID NO: 137280 - DNA, 25 bp, Artificial
  Probe
aaggagttgagaatttggataccag

SEQ ID NO: 137281 - DNA, 25 bp, Artificial
  Probe
gaaggagttgagaatttggatacca

SEQ ID NO: 137282 - DNA, 25 bp, Artificial
  Probe
actagggtcactctggctaacataa

SEQ ID NO: 137283 - DNA, 25 bp, Artificial
  Probe
aactagggtcactctggctaacata

SEQ ID NO: 137284 - DNA, 25 bp, Artificial
  Probe
ggagttgagaatttggataccagtt

SEQ ID NO: 137285 - DNA, 25 bp, Artificial
  Probe
tggacttatgtgcaatttgttcaaa

SEQ ID NO: 137286 - DNA, 25 bp, Artificial
  Probe
acatggaaggagttgagaatttgga

SEQ ID NO: 137287 - DNA, 25 bp, Artificial
  Probe
gtcactctggctaacataagggtac

SEQ ID NO: 137288 - DNA, 25 bp, Artificial
  Probe
agggaacaagtcattgaggagaaac

SEQ ID NO: 137289 - DNA, 25 bp, Artificial
  Probe
aggagttgagaatttggataccagt

SEQ ID NO: 137290 - DNA, 25 bp, Artificial
  Probe
tagggtcactctggctaacataagg

SEQ ID NO: 137291 - DNA, 25 bp, Artificial
  Probe
tcactctggctaacataagggtaca

SEQ ID NO: 137292 - DNA, 25 bp, Artificial
  Probe
gttgagaatttggataccagttctg

SEQ ID NO: 137293 - DNA, 25 bp, Artificial
  Probe
agttgagaatttggataccagttct

SEQ ID NO: 137294 - DNA, 25 bp, Artificial
  Probe
aacgatgattgtggataggaagact

SEQ ID NO: 137295 - DNA, 25 bp, Artificial
  Probe
atgattgtggataggaagactgctt

SEQ ID NO: 137296 - DNA, 25 bp, Artificial
  Probe
gatgattgtggataggaagactgct

SEQ ID NO: 137297 - DNA, 25 bp, Artificial
  Probe
acgatgattgtggataggaagactg

SEQ ID NO: 137298 - DNA, 25 bp, Artificial
  Probe
gaaacgatgattgtggataggaaga

SEQ ID NO: 137299 - DNA, 25 bp, Artificial
  Probe
agaaacgatgattgtggataggaag

SEQ ID NO: 137300 - DNA, 25 bp, Artificial
  Probe
gagaaacgatgattgtggataggaa

SEQ ID NO: 137301 - DNA, 25 bp, Artificial
  Probe
cgagtatgtcaccaacgataatgtg

SEQ ID NO: 137302 - DNA, 25 bp, Artificial
  Probe
caccatcatcaaagcaaggaattta

SEQ ID NO: 137303 - DNA, 25 bp, Artificial
  Probe
aaacgatgattgtggataggaagac

SEQ ID NO: 137304 - DNA, 25 bp, Artificial
  Probe
accatcatcaaagcaaggaatttaa

SEQ ID NO: 137305 - DNA, 25 bp, Artificial
  Probe
gagtatgtcaccaacgataatgtgg

SEQ ID NO: 137306 - DNA, 25 bp, Artificial
  Probe
gaaggatatcgagtatgtcaccaac

SEQ ID NO: 137307 - DNA, 25 bp, Artificial
  Probe
ctggagaaacgatgattgtggatag

SEQ ID NO: 137308 - DNA, 25 bp, Artificial
  Probe
taaccctgtttacaatgaagccata

SEQ ID NO: 137309 - DNA, 25 bp, Artificial
  Probe
ctgtttacaatgaagccatagtctt

SEQ ID NO: 137310 - DNA, 25 bp, Artificial
  Probe
gtatgtcaccaacgataatgtggac

SEQ ID NO: 137311 - DNA, 25 bp, Artificial
  Probe
cctgtttacaatgaagccatagtct

SEQ ID NO: 137312 - DNA, 25 bp, Artificial
  Probe
atcaccatcatcaaagcaaggaatt

SEQ ID NO: 137313 - DNA, 25 bp, Artificial
  Probe
agtatgtcaccaacgataatgtgga

SEQ ID NO: 137314 - DNA, 25 bp, Artificial
  Probe
cgatgattgtggataggaagactgc

SEQ ID NO: 137315 - DNA, 25 bp, Artificial
  Probe
ttaaccctgtttacaatgaagccat

SEQ ID NO: 137316 - DNA, 25 bp, Artificial
  Probe
tcaccatcatcaaagcaaggaattt

SEQ ID NO: 137317 - DNA, 25 bp, Artificial
  Probe
aaccctgtttacaatgaagccatag

SEQ ID NO: 137318 - DNA, 25 bp, Artificial
  Probe
catcaccatcatcaaagcaaggaat

SEQ ID NO: 137319 - DNA, 25 bp, Artificial
  Probe
cttaaccctgtttacaatgaagcca

SEQ ID NO: 137320 - DNA, 25 bp, Artificial
  Probe
ggaaggatatcgagtatgtcaccaa

SEQ ID NO: 137321 - DNA, 25 bp, Artificial
  Probe
ttggaaggatatcgagtatgtcacc

SEQ ID NO: 137322 - DNA, 25 bp, Artificial
  Probe
ccctgtttacaatgaagccatagtc

SEQ ID NO: 137323 - DNA, 25 bp, Artificial
  Probe
ggagaaacgatgattgtggatagga

SEQ ID NO: 137324 - DNA, 25 bp, Artificial
  Probe
tgattgtggataggaagactgcttt

SEQ ID NO: 137325 - DNA, 25 bp, Artificial
  Probe
gtgtatgactttgacaggttctctc

SEQ ID NO: 137326 - DNA, 25 bp, Artificial
  Probe
acgcttaaccctgtttacaatgaag

SEQ ID NO: 137327 - DNA, 25 bp, Artificial
  Probe
aaggatatcgagtatgtcaccaacg

SEQ ID NO: 137328 - DNA, 25 bp, Artificial
  Probe
cacgcttaaccctgtttacaatgaa

SEQ ID NO: 137329 - DNA, 25 bp, Artificial
  Probe
tggagaaacgatgattgtggatagg

SEQ ID NO: 137330 - DNA, 25 bp, Artificial
  Probe
accctgtttacaatgaagccatagt

SEQ ID NO: 137331 - DNA, 25 bp, Artificial
  Probe
tatgtcaccaacgataatgtggacc

SEQ ID NO: 137332 - DNA, 25 bp, Artificial
  Probe
caaagcaaggaatttaaaggcaatg

SEQ ID NO: 137333 - DNA, 25 bp, Artificial
  Probe
tcaaagcaaggaatttaaaggcaat

SEQ ID NO: 137334 - DNA, 25 bp, Artificial
  Probe
atcaaagcaaggaatttaaaggcaa

SEQ ID NO: 137335 - DNA, 25 bp, Artificial
  Probe
aatttaaaggcaatggacattacgg

SEQ ID NO: 137336 - DNA, 25 bp, Artificial
  Probe
aaggaatttaaaggcaatggacatt

SEQ ID NO: 137337 - DNA, 25 bp, Artificial
  Probe
caaggaatttaaaggcaatggacat

SEQ ID NO: 137338 - DNA, 25 bp, Artificial
  Probe
tcatcaaagcaaggaatttaaaggc

SEQ ID NO: 137339 - DNA, 25 bp, Artificial
  Probe
aattctctaatacaaggctgagcac

SEQ ID NO: 137340 - DNA, 25 bp, Artificial
  Probe
ggacaaattctctaatacaaggctg

SEQ ID NO: 137341 - DNA, 25 bp, Artificial
  Probe
gggacaaattctctaatacaaggct

SEQ ID NO: 137342 - DNA, 25 bp, Artificial
  Probe
agggacaaattctctaatacaaggc

SEQ ID NO: 137343 - DNA, 25 bp, Artificial
  Probe
attctctaatacaaggctgagcacc

SEQ ID NO: 137344 - DNA, 25 bp, Artificial
  Probe
gacaaattctctaatacaaggctga

SEQ ID NO: 137345 - DNA, 25 bp, Artificial
  Probe
gagggacaaattctctaatacaagg

SEQ ID NO: 137346 - DNA, 25 bp, Artificial
  Probe
aaattctctaatacaaggctgagca

SEQ ID NO: 137347 - DNA, 25 bp, Artificial
  Probe
caaattctctaatacaaggctgagc

SEQ ID NO: 137348 - DNA, 25 bp, Artificial
  Probe
acaaattctctaatacaaggctgag

SEQ ID NO: 137349 - DNA, 25 bp, Artificial
  Probe
tgagggacaaattctctaatacaag

SEQ ID NO: 137350 - DNA, 25 bp, Artificial
  Probe
ttctctaatacaaggctgagcacca

SEQ ID NO: 137351 - DNA, 25 bp, Artificial
  Probe
gtctgcacttacacctatggagttg

SEQ ID NO: 137352 - DNA, 25 bp, Artificial
  Probe
agtctgcacttacacctatggagtt

SEQ ID NO: 137353 - DNA, 25 bp, Artificial
  Probe
ctgcacttacacctatggagttgtc

SEQ ID NO: 137354 - DNA, 25 bp, Artificial
  Probe
tctgcacttacacctatggagttgt

SEQ ID NO: 137355 - DNA, 25 bp, Artificial
  Probe
acttacacctatggagttgtcccag

SEQ ID NO: 137356 - DNA, 25 bp, Artificial
  Probe
cacttacacctatggagttgtccca

SEQ ID NO: 137357 - DNA, 25 bp, Artificial
  Probe
tgcacttacacctatggagttgtcc

SEQ ID NO: 137358 - DNA, 25 bp, Artificial
  Probe
cttacacctatggagttgtcccagc

SEQ ID NO: 137359 - DNA, 25 bp, Artificial
  Probe
gcacttacacctatggagttgtccc

SEQ ID NO: 137360 - DNA, 25 bp, Artificial
  Probe
attgagagtaaggtaaggcagattc

SEQ ID NO: 137361 - DNA, 25 bp, Artificial
  Probe
ccagataaggaagaatagtcattgc

SEQ ID NO: 137362 - DNA, 25 bp, Artificial
  Probe
gccagataaggaagaatagtcattg

SEQ ID NO: 137363 - DNA, 25 bp, Artificial
  Probe
cacacacacacacacaattaagtaa

SEQ ID NO: 137364 - DNA, 25 bp, Artificial
  Probe
aagaatagtcattgctccttaccag

SEQ ID NO: 137365 - DNA, 25 bp, Artificial
  Probe
gaagaatagtcattgctccttacca

SEQ ID NO: 137366 - DNA, 25 bp, Artificial
  Probe
tattgagagtaaggtaaggcagatt

SEQ ID NO: 137367 - DNA, 25 bp, Artificial
  Probe
ttattgagagtaaggtaaggcagat

SEQ ID NO: 137368 - DNA, 25 bp, Artificial
  Probe
acacacacacacacacaattaagta

SEQ ID NO: 137369 - DNA, 25 bp, Artificial
  Probe
cagataaggaagaatagtcattgct

SEQ ID NO: 137370 - DNA, 25 bp, Artificial
  Probe
agataaggaagaatagtcattgctc

SEQ ID NO: 137371 - DNA, 25 bp, Artificial
  Probe
ttgagagtaaggtaaggcagattcg

SEQ ID NO: 137372 - DNA, 25 bp, Artificial
  Probe
cacacacacacacacacaattaagt

SEQ ID NO: 137373 - DNA, 25 bp, Artificial
  Probe
acacacacacacacacacaattaag

SEQ ID NO: 137374 - DNA, 25 bp, Artificial
  Probe
gagtaaggtaaggcagattcgataa

SEQ ID NO: 137375 - DNA, 25 bp, Artificial
  Probe
agagtaaggtaaggcagattcgata

SEQ ID NO: 137376 - DNA, 25 bp, Artificial
  Probe
ggaagaatagtcattgctccttacc

SEQ ID NO: 137377 - DNA, 25 bp, Artificial
  Probe
gataaggaagaatagtcattgctcc

SEQ ID NO: 137378 - DNA, 25 bp, Artificial
  Probe
cacacacacacacacacacaattaa

SEQ ID NO: 137379 - DNA, 25 bp, Artificial
  Probe
tgtagaccgtttattgagagtaagg

SEQ ID NO: 137380 - DNA, 25 bp, Artificial
  Probe
cagtgtagaccgtttattgagagta

SEQ ID NO: 137381 - DNA, 25 bp, Artificial
  Probe
cgtttattgagagtaaggtaaggca

SEQ ID NO: 137382 - DNA, 25 bp, Artificial
  Probe
tttattgagagtaaggtaaggcaga

SEQ ID NO: 137383 - DNA, 25 bp, Artificial
  Probe
gtttattgagagtaaggtaaggcag

SEQ ID NO: 137384 - DNA, 25 bp, Artificial
  Probe
agtgtagaccgtttattgagagtaa

SEQ ID NO: 137385 - DNA, 25 bp, Artificial
  Probe
tttccagtgtagaccgtttattgag

SEQ ID NO: 137386 - DNA, 25 bp, Artificial
  Probe
acacacacacacacaattaagtaaa

SEQ ID NO: 137387 - DNA, 25 bp, Artificial
  Probe
gtgtagaccgtttattgagagtaag

SEQ ID NO: 137388 - DNA, 25 bp, Artificial
  Probe
gtttccagtgtagaccgtttattga

SEQ ID NO: 137389 - DNA, 25 bp, Artificial
  Probe
gagagtaaggtaaggcagattcgat

SEQ ID NO: 137390 - DNA, 25 bp, Artificial
  Probe
ccgtttattgagagtaaggtaaggc

SEQ ID NO: 137391 - DNA, 25 bp, Artificial
  Probe
gagcgggaactttatattctttgat

SEQ ID NO: 137392 - DNA, 25 bp, Artificial
  Probe
ggagcgggaactttatattctttga

SEQ ID NO: 137393 - DNA, 25 bp, Artificial
  Probe
ttccagtgtagaccgtttattgaga

SEQ ID NO: 137394 - DNA, 25 bp, Artificial
  Probe
agcgggaactttatattctttgatt

SEQ ID NO: 137395 - DNA, 25 bp, Artificial
  Probe
gacctgttgaactcatggctactag

SEQ ID NO: 137396 - DNA, 25 bp, Artificial
  Probe
tccagtgtagaccgtttattgagag

SEQ ID NO: 137397 - DNA, 25 bp, Artificial
  Probe
gggagcgggaactttatattctttg

SEQ ID NO: 137398 - DNA, 25 bp, Artificial
  Probe
ccagtgtagaccgtttattgagagt

SEQ ID NO: 137399 - DNA, 25 bp, Artificial
  Probe
gcgggaactttatattctttgattt

SEQ ID NO: 137400 - DNA, 25 bp, Artificial
  Probe
atgggagcgggaactttatattctt

SEQ ID NO: 137401 - DNA, 25 bp, Artificial
  Probe
tgggagcgggaactttatattcttt

SEQ ID NO: 137402 - DNA, 25 bp, Artificial
  Probe
ggccagataaggaagaatagtcatt

SEQ ID NO: 137403 - DNA, 25 bp, Artificial
  Probe
acacacacacacacacacacaatta

SEQ ID NO: 137404 - DNA, 25 bp, Artificial
  Probe
gatgggagcgggaactttatattct

SEQ ID NO: 137405 - DNA, 25 bp, Artificial
  Probe
ggaagtaatgtcttatggagaacga

SEQ ID NO: 137406 - DNA, 25 bp, Artificial
  Probe
gattatgagcagcatccagactatg

SEQ ID NO: 137407 - DNA, 25 bp, Artificial
  Probe
agattatgagcagcatccagactat

SEQ ID NO: 137408 - DNA, 25 bp, Artificial
  Probe
tcctaagtgccaccagaatatacaa

SEQ ID NO: 137409 - DNA, 25 bp, Artificial
  Probe
ttagaagcacctacagacttgaact

SEQ ID NO: 137410 - DNA, 25 bp, Artificial
  Probe
aagattatgagcagcatccagacta

SEQ ID NO: 137411 - DNA, 25 bp, Artificial
  Probe
ctcctaagtgccaccagaatataca

SEQ ID NO: 137412 - DNA, 25 bp, Artificial
  Probe
aactcctaagtgccaccagaatata

SEQ ID NO: 137413 - DNA, 25 bp, Artificial
  Probe
tagaagcacctacagacttgaactc

SEQ ID NO: 137414 - DNA, 25 bp, Artificial
  Probe
aacattcttgtgaacagcaatcttg

SEQ ID NO: 137415 - DNA, 25 bp, Artificial
  Probe
caacattcttgtgaacagcaatctt

SEQ ID NO: 137416 - DNA, 25 bp, Artificial
  Probe
aagaagattatgagcagcatccaga

SEQ ID NO: 137417 - DNA, 25 bp, Artificial
  Probe
tgtcttatggagaacgaccttattg

SEQ ID NO: 137418 - DNA, 25 bp, Artificial
  Probe
gtaatgtcttatggagaacgacctt

SEQ ID NO: 137419 - DNA, 25 bp, Artificial
  Probe
aagtaatgtcttatggagaacgacc

SEQ ID NO: 137420 - DNA, 25 bp, Artificial
  Probe
atgtcttatggagaacgaccttatt

SEQ ID NO: 137421 - DNA, 25 bp, Artificial
  Probe
aatgtcttatggagaacgaccttat

SEQ ID NO: 137422 - DNA, 25 bp, Artificial
  Probe
gaagtaatgtcttatggagaacgac

SEQ ID NO: 137423 - DNA, 25 bp, Artificial
  Probe
gtcttatggagaacgaccttattgg

SEQ ID NO: 137424 - DNA, 25 bp, Artificial
  Probe
taatgtcttatggagaacgacctta

SEQ ID NO: 137425 - DNA, 25 bp, Artificial
  Probe
agtaatgtcttatggagaacgacct

SEQ ID NO: 137426 - DNA, 25 bp, Artificial
  Probe
actcctaagtgccaccagaatatac

SEQ ID NO: 137427 - DNA, 25 bp, Artificial
  Probe
acattcttgtgaacagcaatcttgt

SEQ ID NO: 137428 - DNA, 25 bp, Artificial
  Probe
tgatcgtgatagagttcatggagaa

SEQ ID NO: 137429 - DNA, 25 bp, Artificial
  Probe
gaagattatgagcagcatccagact

SEQ ID NO: 137430 - DNA, 25 bp, Artificial
  Probe
agaagattatgagcagcatccagac

SEQ ID NO: 137431 - DNA, 25 bp, Artificial
  Probe
gaactcctaagtgccaccagaatat

SEQ ID NO: 137432 - DNA, 25 bp, Artificial
  Probe
atagaagaaggttatcgcttaccag

SEQ ID NO: 137433 - DNA, 25 bp, Artificial
  Probe
gatagaagaaggttatcgcttacca

SEQ ID NO: 137434 - DNA, 25 bp, Artificial
  Probe
ttggtaggaatgctgagaggaattg

SEQ ID NO: 137435 - DNA, 25 bp, Artificial
  Probe
gttggtaggaatgctgagaggaatt

SEQ ID NO: 137436 - DNA, 25 bp, Artificial
  Probe
ttacagtcattcagttggtaggaat

SEQ ID NO: 137437 - DNA, 25 bp, Artificial
  Probe
gcacctacagacttgaactcctaag

SEQ ID NO: 137438 - DNA, 25 bp, Artificial
  Probe
aacacagcagagacaataaacaaag

SEQ ID NO: 137439 - DNA, 25 bp, Artificial
  Probe
gaacacagcagagacaataaacaaa

SEQ ID NO: 137440 - DNA, 25 bp, Artificial
  Probe
agcacctacagacttgaactcctaa

SEQ ID NO: 137441 - DNA, 25 bp, Artificial
  Probe
tgatatactgggtccttcctacaat

SEQ ID NO: 137442 - DNA, 25 bp, Artificial
  Probe
gtttgatatactgggtccttcctac

SEQ ID NO: 137443 - DNA, 25 bp, Artificial
  Probe
cacagcagagacaataaacaaagta

SEQ ID NO: 137444 - DNA, 25 bp, Artificial
  Probe
tttgatatactgggtccttcctaca

SEQ ID NO: 137445 - DNA, 25 bp, Artificial
  Probe
tgtcattaaagcgatagaagaaggt

SEQ ID NO: 137446 - DNA, 25 bp, Artificial
  Probe
atttacagtcattcagttggtagga

SEQ ID NO: 137447 - DNA, 25 bp, Artificial
  Probe
cgaatcaagatgtcattaaagcgat

SEQ ID NO: 137448 - DNA, 25 bp, Artificial
  Probe
aagcacctacagacttgaactccta

SEQ ID NO: 137449 - DNA, 25 bp, Artificial
  Probe
ggagaggtataaagacaacttcaca

SEQ ID NO: 137450 - DNA, 25 bp, Artificial
  Probe
ctcacactacacagcactcatctag

SEQ ID NO: 137451 - DNA, 25 bp, Artificial
  Probe
ggtgctaactagagatcagagagag

SEQ ID NO: 137452 - DNA, 25 bp, Artificial
  Probe
aggtgctaactagagatcagagaga

SEQ ID NO: 137453 - DNA, 25 bp, Artificial
  Probe
caggtgctaactagagatcagagag

SEQ ID NO: 137454 - DNA, 25 bp, Artificial
  Probe
tccgagatattccgtagtacatatt

SEQ ID NO: 137455 - DNA, 25 bp, Artificial
  Probe
ttccgagatattccgtagtacatat

SEQ ID NO: 137456 - DNA, 25 bp, Artificial
  Probe
ggtgtttgtcttaggtttgagaaag

SEQ ID NO: 137457 - DNA, 25 bp, Artificial
  Probe
taactagagatcagagagagctgtt

SEQ ID NO: 137458 - DNA, 25 bp, Artificial
  Probe
ccaggtgctaactagagatcagaga

SEQ ID NO: 137459 - DNA, 25 bp, Artificial
  Probe
tccaggtgctaactagagatcagag

SEQ ID NO: 137460 - DNA, 25 bp, Artificial
  Probe
gtttgtcttaggtttgagaaagcag

SEQ ID NO: 137461 - DNA, 25 bp, Artificial
  Probe
atggtgtttgtcttaggtttgagaa

SEQ ID NO: 137462 - DNA, 25 bp, Artificial
  Probe
ctaactagagatcagagagagctgt

SEQ ID NO: 137463 - DNA, 25 bp, Artificial
  Probe
tggtgtttgtcttaggtttgagaaa

SEQ ID NO: 137464 - DNA, 25 bp, Artificial
  Probe
tttgtcttaggtttgagaaagcagt

SEQ ID NO: 137465 - DNA, 25 bp, Artificial
  Probe
gtgtttgtcttaggtttgagaaagc

SEQ ID NO: 137466 - DNA, 25 bp, Artificial
  Probe
tgtttgtcttaggtttgagaaagca

SEQ ID NO: 137467 - DNA, 25 bp, Artificial
  Probe
ttgtcttaggtttgagaaagcagtc

SEQ ID NO: 137468 - DNA, 25 bp, Artificial
  Probe
aactagagatcagagagagctgttg

SEQ ID NO: 137469 - DNA, 25 bp, Artificial
  Probe
ctccaggtgctaactagagatcaga

SEQ ID NO: 137470 - DNA, 25 bp, Artificial
  Probe
tttccgagatattccgtagtacata

SEQ ID NO: 137471 - DNA, 25 bp, Artificial
  Probe
cctcacactacacagcactcatcta

SEQ ID NO: 137472 - DNA, 25 bp, Artificial
  Probe
attcctggttcactatgaagagttg

SEQ ID NO: 137473 - DNA, 25 bp, Artificial
  Probe
cattcctggttcactatgaagagtt

SEQ ID NO: 137474 - DNA, 25 bp, Artificial
  Probe
catggtgtttgtcttaggtttgaga

SEQ ID NO: 137475 - DNA, 25 bp, Artificial
  Probe
gtgctaactagagatcagagagagc

SEQ ID NO: 137476 - DNA, 25 bp, Artificial
  Probe
acactacacagcactcatctaggtc

SEQ ID NO: 137477 - DNA, 25 bp, Artificial
  Probe
tcacactacacagcactcatctagg

SEQ ID NO: 137478 - DNA, 25 bp, Artificial
  Probe
atccattcctggttcactatgaaga

SEQ ID NO: 137479 - DNA, 25 bp, Artificial
  Probe
catccattcctggttcactatgaag

SEQ ID NO: 137480 - DNA, 25 bp, Artificial
  Probe
tacatggtgtttgtcttaggtttga

SEQ ID NO: 137481 - DNA, 25 bp, Artificial
  Probe
gtacatggtgtttgtcttaggtttg

SEQ ID NO: 137482 - DNA, 25 bp, Artificial
  Probe
ggtacatggtgtttgtcttaggttt

SEQ ID NO: 137483 - DNA, 25 bp, Artificial
  Probe
ccgagatattccgtagtacatattt

SEQ ID NO: 137484 - DNA, 25 bp, Artificial
  Probe
cacactacacagcactcatctaggt

SEQ ID NO: 137485 - DNA, 25 bp, Artificial
  Probe
tccattcctggttcactatgaagag

SEQ ID NO: 137486 - DNA, 25 bp, Artificial
  Probe
tgtcttaggtttgagaaagcagtcc

SEQ ID NO: 137487 - DNA, 25 bp, Artificial
  Probe
acatggtgtttgtcttaggtttgag

SEQ ID NO: 137488 - DNA, 25 bp, Artificial
  Probe
gctaactagagatcagagagagctg

SEQ ID NO: 137489 - DNA, 25 bp, Artificial
  Probe
ccattcctggttcactatgaagagt

SEQ ID NO: 137490 - DNA, 25 bp, Artificial
  Probe
ttcactatgaagagttggtgctcta

SEQ ID NO: 137491 - DNA, 25 bp, Artificial
  Probe
actagagatcagagagagctgttgg

SEQ ID NO: 137492 - DNA, 25 bp, Artificial
  Probe
tgctaactagagatcagagagagct

SEQ ID NO: 137493 - DNA, 25 bp, Artificial
  Probe
ttcctggttcactatgaagagttgg

SEQ ID NO: 137494 - DNA, 25 bp, Artificial
  Probe
tcttaggtttgagaaagcagtcctc

SEQ ID NO: 137495 - DNA, 25 bp, Artificial
  Probe
tggtgacaattattctaggtagacg

SEQ ID NO: 137496 - DNA, 25 bp, Artificial
  Probe
ttggtgacaattattctaggtagac

SEQ ID NO: 137497 - DNA, 25 bp, Artificial
  Probe
ggtgacaattattctaggtagacgt

SEQ ID NO: 137498 - DNA, 25 bp, Artificial
  Probe
aagaatacatcactgagctggaact

SEQ ID NO: 137499 - DNA, 25 bp, Artificial
  Probe
caagaatacatcactgagctggaac

SEQ ID NO: 137500 - DNA, 25 bp, Artificial
  Probe
ggatgctttgtctataccagagaaa

SEQ ID NO: 137501 - DNA, 25 bp, Artificial
  Probe
gtgacaattattctaggtagacgtg

SEQ ID NO: 137502 - DNA, 25 bp, Artificial
  Probe
ttattctaggtagacgtgatgacaa

SEQ ID NO: 137503 - DNA, 25 bp, Artificial
  Probe
tgacaattattctaggtagacgtga

SEQ ID NO: 137504 - DNA, 25 bp, Artificial
  Probe
attattctaggtagacgtgatgaca

SEQ ID NO: 137505 - DNA, 25 bp, Artificial
  Probe
gatgctttgtctataccagagaaat

SEQ ID NO: 137506 - DNA, 25 bp, Artificial
  Probe
acaattattctaggtagacgtgatg

SEQ ID NO: 137507 - DNA, 25 bp, Artificial
  Probe
aattattctaggtagacgtgatgac

SEQ ID NO: 137508 - DNA, 25 bp, Artificial
  Probe
caattattctaggtagacgtgatga

SEQ ID NO: 137509 - DNA, 25 bp, Artificial
  Probe
gacaattattctaggtagacgtgat

SEQ ID NO: 137510 - DNA, 25 bp, Artificial
  Probe
gtgtttggtgacaattattctaggt

SEQ ID NO: 137511 - DNA, 25 bp, Artificial
  Probe
tgtgtttggtgacaattattctagg

SEQ ID NO: 137512 - DNA, 25 bp, Artificial
  Probe
cactgtgtttggtgacaattattct

SEQ ID NO: 137513 - DNA, 25 bp, Artificial
  Probe
actgtgtttggtgacaattattcta

SEQ ID NO: 137514 - DNA, 25 bp, Artificial
  Probe
atccagggactcttcacttgaattt

SEQ ID NO: 137515 - DNA, 25 bp, Artificial
  Probe
tgctttgtctataccagagaaataa

SEQ ID NO: 137516 - DNA, 25 bp, Artificial
  Probe
aatggatgctttgtctataccagag

SEQ ID NO: 137517 - DNA, 25 bp, Artificial
  Probe
caatggatgctttgtctataccaga

SEQ ID NO: 137518 - DNA, 25 bp, Artificial
  Probe
atgctttgtctataccagagaaata

SEQ ID NO: 137519 - DNA, 25 bp, Artificial
  Probe
ctgtgtttggtgacaattattctag

SEQ ID NO: 137520 - DNA, 25 bp, Artificial
  Probe
ggtccaagaatacatcactgagctg

SEQ ID NO: 137521 - DNA, 25 bp, Artificial
  Probe
atggatgctttgtctataccagaga

SEQ ID NO: 137522 - DNA, 25 bp, Artificial
  Probe
ctgggtccaagaatacatcactgag

SEQ ID NO: 137523 - DNA, 25 bp, Artificial
  Probe
tggatgctttgtctataccagagaa

SEQ ID NO: 137524 - DNA, 25 bp, Artificial
  Probe
attctaggtagacgtgatgacaaag

SEQ ID NO: 137525 - DNA, 25 bp, Artificial
  Probe
tgtttggtgacaattattctaggta

SEQ ID NO: 137526 - DNA, 25 bp, Artificial
  Probe
acactgtgtttggtgacaattattc

SEQ ID NO: 137527 - DNA, 25 bp, Artificial
  Probe
catccagggactcttcacttgaatt

SEQ ID NO: 137528 - DNA, 25 bp, Artificial
  Probe
gtttggtgacaattattctaggtag

SEQ ID NO: 137529 - DNA, 25 bp, Artificial
  Probe
cacactgtgtttggtgacaattatt

SEQ ID NO: 137530 - DNA, 25 bp, Artificial
  Probe
tattctaggtagacgtgatgacaaa

SEQ ID NO: 137531 - DNA, 25 bp, Artificial
  Probe
tttggtgacaattattctaggtaga

SEQ ID NO: 137532 - DNA, 25 bp, Artificial
  Probe
ccaagaatacatcactgagctggaa

SEQ ID NO: 137533 - DNA, 25 bp, Artificial
  Probe
ttctaggtagacgtgatgacaaagt

SEQ ID NO: 137534 - DNA, 25 bp, Artificial
  Probe
tattgtcacatttgtgtttgtagct

SEQ ID NO: 137535 - DNA, 25 bp, Artificial
  Probe
ttattgtcacatttgtgtttgtagc

SEQ ID NO: 137536 - DNA, 25 bp, Artificial
  Probe
gctttgtctataccagagaaataat

SEQ ID NO: 137537 - DNA, 25 bp, Artificial
  Probe
gtccaagaatacatcactgagctgg

SEQ ID NO: 137538 - DNA, 25 bp, Artificial
  Probe
attcattgctgactattttgagacc

SEQ ID NO: 137539 - DNA, 25 bp, Artificial
  Probe
tctaggtagacgtgatgacaaagtc

SEQ ID NO: 137540 - DNA, 25 bp, Artificial
  Probe
ggctaatggcttatctcctattcaa

SEQ ID NO: 137541 - DNA, 25 bp, Artificial
  Probe
aaggctaatggcttatctcctattc

SEQ ID NO: 137542 - DNA, 25 bp, Artificial
  Probe
aggctaatggcttatctcctattca

SEQ ID NO: 137543 - DNA, 25 bp, Artificial
  Probe
tttcctttgtgtgggtttattgcta

SEQ ID NO: 137544 - DNA, 25 bp, Artificial
  Probe
acctttaggaccagtttgtatttga

SEQ ID NO: 137545 - DNA, 25 bp, Artificial
  Probe
gtatctttgaacctttaggaccagt

SEQ ID NO: 137546 - DNA, 25 bp, Artificial
  Probe
agtatctttgaacctttaggaccag

SEQ ID NO: 137547 - DNA, 25 bp, Artificial
  Probe
ggtagtgtagatacaatgtgagaat

SEQ ID NO: 137548 - DNA, 25 bp, Artificial
  Probe
gctaatggcttatctcctattcaaa

SEQ ID NO: 137549 - DNA, 25 bp, Artificial
  Probe
cctttaggaccagtttgtatttgaa

SEQ ID NO: 137550 - DNA, 25 bp, Artificial
  Probe
tgaacctttaggaccagtttgtatt

SEQ ID NO: 137551 - DNA, 25 bp, Artificial
  Probe
ttgaacctttaggaccagtttgtat

SEQ ID NO: 137552 - DNA, 25 bp, Artificial
  Probe
tttgaacctttaggaccagtttgta

SEQ ID NO: 137553 - DNA, 25 bp, Artificial
  Probe
atctttgaacctttaggaccagttt

SEQ ID NO: 137554 - DNA, 25 bp, Artificial
  Probe
tatctttgaacctttaggaccagtt

SEQ ID NO: 137555 - DNA, 25 bp, Artificial
  Probe
aacctttaggaccagtttgtatttg

SEQ ID NO: 137556 - DNA, 25 bp, Artificial
  Probe
tagtatctttgaacctttaggacca

SEQ ID NO: 137557 - DNA, 25 bp, Artificial
  Probe
aacactaacaacaaattgagcattg

SEQ ID NO: 137558 - DNA, 25 bp, Artificial
  Probe
atgctttcctttgtgtgggtttatt

SEQ ID NO: 137559 - DNA, 25 bp, Artificial
  Probe
gaacctttaggaccagtttgtattt

SEQ ID NO: 137560 - DNA, 25 bp, Artificial
  Probe
agtaacactaacaacaaattgagca

SEQ ID NO: 137561 - DNA, 25 bp, Artificial
  Probe
ttcctttgtgtgggtttattgctac

SEQ ID NO: 137562 - DNA, 25 bp, Artificial
  Probe
tctttgaacctttaggaccagtttg

SEQ ID NO: 137563 - DNA, 25 bp, Artificial
  Probe
ttaggaccagtttgtatttgaatct

SEQ ID NO: 137564 - DNA, 25 bp, Artificial
  Probe
ctttgaacctttaggaccagtttgt

SEQ ID NO: 137565 - DNA, 25 bp, Artificial
  Probe
gtaacactaacaacaaattgagcat

SEQ ID NO: 137566 - DNA, 25 bp, Artificial
  Probe
tagtgtagatacaatgtgagaatgt

SEQ ID NO: 137567 - DNA, 25 bp, Artificial
  Probe
aggaccagtttgtatttgaatctga

SEQ ID NO: 137568 - DNA, 25 bp, Artificial
  Probe
ctttcctttgtgtgggtttattgct

SEQ ID NO: 137569 - DNA, 25 bp, Artificial
  Probe
ggaccagtttgtatttgaatctgaa

SEQ ID NO: 137570 - DNA, 25 bp, Artificial
  Probe
gttgggtagtgtagatacaatgtga

SEQ ID NO: 137571 - DNA, 25 bp, Artificial
  Probe
ttgggtagtgtagatacaatgtgag

SEQ ID NO: 137572 - DNA, 25 bp, Artificial
  Probe
aagtaacactaacaacaaattgagc

SEQ ID NO: 137573 - DNA, 25 bp, Artificial
  Probe
gggtagtgtagatacaatgtgagaa

SEQ ID NO: 137574 - DNA, 25 bp, Artificial
  Probe
tgggtagtgtagatacaatgtgaga

SEQ ID NO: 137575 - DNA, 25 bp, Artificial
  Probe
ttagtatctttgaacctttaggacc

SEQ ID NO: 137576 - DNA, 25 bp, Artificial
  Probe
caaaggctaatggcttatctcctat

SEQ ID NO: 137577 - DNA, 25 bp, Artificial
  Probe
gtagtgtagatacaatgtgagaatg

SEQ ID NO: 137578 - DNA, 25 bp, Artificial
  Probe
aaaggctaatggcttatctcctatt

SEQ ID NO: 137579 - DNA, 25 bp, Artificial
  Probe
ggttgggtagtgtagatacaatgtg

SEQ ID NO: 137580 - DNA, 25 bp, Artificial
  Probe
ttcttaaggccacatagtacaatct

SEQ ID NO: 137581 - DNA, 25 bp, Artificial
  Probe
acactaacaacaaattgagcattgc

SEQ ID NO: 137582 - DNA, 25 bp, Artificial
  Probe
taggaccagtttgtatttgaatctg

SEQ ID NO: 137583 - DNA, 25 bp, Artificial
  Probe
tgctttcctttgtgtgggtttattg

SEQ ID NO: 137584 - DNA, 25 bp, Artificial
  Probe
taaggccacatagtacaatcttctt

SEQ ID NO: 137585 - DNA, 25 bp, Artificial
  Probe
tagaagataaccacaaggctgacat

SEQ ID NO: 137586 - DNA, 25 bp, Artificial
  Probe
gtagaagataaccacaaggctgaca

SEQ ID NO: 137587 - DNA, 25 bp, Artificial
  Probe
agaagataaccacaaggctgacatc

SEQ ID NO: 137588 - DNA, 25 bp, Artificial
  Probe
gaatacatagacgcagtgaaggact

SEQ ID NO: 137589 - DNA, 25 bp, Artificial
  Probe
gaagataaccacaaggctgacatca

SEQ ID NO: 137590 - DNA, 25 bp, Artificial
  Probe
catcgaatacatagacgcagtgaag

SEQ ID NO: 137591 - DNA, 25 bp, Artificial
  Probe
cgaatacatagacgcagtgaaggac

SEQ ID NO: 137592 - DNA, 25 bp, Artificial
  Probe
atcactttgagggacattaccagta

SEQ ID NO: 137593 - DNA, 25 bp, Artificial
  Probe
atcgaatacatagacgcagtgaagg

SEQ ID NO: 137594 - DNA, 25 bp, Artificial
  Probe
caatcactttgagggacattaccag

SEQ ID NO: 137595 - DNA, 25 bp, Artificial
  Probe
ctttgagggacattaccagtacaag

SEQ ID NO: 137596 - DNA, 25 bp, Artificial
  Probe
aatcactttgagggacattaccagt

SEQ ID NO: 137597 - DNA, 25 bp, Artificial
  Probe
ccatcgaatacatagacgcagtgaa

SEQ ID NO: 137598 - DNA, 25 bp, Artificial
  Probe
tttgagggacattaccagtacaagt

SEQ ID NO: 137599 - DNA, 25 bp, Artificial
  Probe
actttgagggacattaccagtacaa

SEQ ID NO: 137600 - DNA, 25 bp, Artificial
  Probe
ggtagaagataaccacaaggctgac

SEQ ID NO: 137601 - DNA, 25 bp, Artificial
  Probe
aagataaccacaaggctgacatcag

SEQ ID NO: 137602 - DNA, 25 bp, Artificial
  Probe
tcactttgagggacattaccagtac

SEQ ID NO: 137603 - DNA, 25 bp, Artificial
  Probe
ttgagggacattaccagtacaagtg

SEQ ID NO: 137604 - DNA, 25 bp, Artificial
  Probe
cactttgagggacattaccagtaca

SEQ ID NO: 137605 - DNA, 25 bp, Artificial
  Probe
tcgaatacatagacgcagtgaagga

SEQ ID NO: 137606 - DNA, 25 bp, Artificial
  Probe
ccaatcactttgagggacattacca

SEQ ID NO: 137607 - DNA, 25 bp, Artificial
  Probe
gaagccatcgaatacatagacgcag

SEQ ID NO: 137608 - DNA, 25 bp, Artificial
  Probe
ctctactgaatgtctcctcagactg

SEQ ID NO: 137609 - DNA, 25 bp, Artificial
  Probe
ctgtggagatccttcctttcctcta

SEQ ID NO: 137610 - DNA, 25 bp, Artificial
  Probe
cggtagaagataaccacaaggctga

SEQ ID NO: 137611 - DNA, 25 bp, Artificial
  Probe
ttcatggaagccatcgaatacatag

SEQ ID NO: 137612 - DNA, 25 bp, Artificial
  Probe
aagccatcgaatacatagacgcagt

SEQ ID NO: 137613 - DNA, 25 bp, Artificial
  Probe
ggacattaccagtacaagtgcatcc

SEQ ID NO: 137614 - DNA, 25 bp, Artificial
  Probe
gttcatggaagccatcgaatacata

SEQ ID NO: 137615 - DNA, 25 bp, Artificial
  Probe
gatcacggctctactgaatgtctcc

SEQ ID NO: 137616 - DNA, 25 bp, Artificial
  Probe
ggatcacggctctactgaatgtctc

SEQ ID NO: 137617 - DNA, 25 bp, Artificial
  Probe
tgtggagatccttcctttcctctac

SEQ ID NO: 137618 - DNA, 25 bp, Artificial
  Probe
catggaagccatcgaatacatagac

SEQ ID NO: 137619 - DNA, 25 bp, Artificial
  Probe
tcatggaagccatcgaatacataga

SEQ ID NO: 137620 - DNA, 25 bp, Artificial
  Probe
gagatccttcctttcctctacctcg

SEQ ID NO: 137621 - DNA, 25 bp, Artificial
  Probe
ctacctgatgatgaagaaacgggtg

SEQ ID NO: 137622 - DNA, 25 bp, Artificial
  Probe
ggagatccttcctttcctctacctc

SEQ ID NO: 137623 - DNA, 25 bp, Artificial
  Probe
atcacggctctactgaatgtctcct

SEQ ID NO: 137624 - DNA, 25 bp, Artificial
  Probe
tacctgatgatgaagaaacgggtga

SEQ ID NO: 137625 - DNA, 25 bp, Artificial
  Probe
gacattaccagtacaagtgcatccc

SEQ ID NO: 137626 - DNA, 25 bp, Artificial
  Probe
gggacattaccagtacaagtgcatc

SEQ ID NO: 137627 - DNA, 25 bp, Artificial
  Probe
gtggagatccttcctttcctctacc

SEQ ID NO: 137628 - DNA, 25 bp, Artificial
  Probe
gctctactgaatgtctcctcagact

SEQ ID NO: 137629 - DNA, 25 bp, Artificial
  Probe
aatacatagacgcagtgaaggactg

SEQ ID NO: 137630 - DNA, 25 bp, Artificial
  Probe
cttagccttcattcagtgtgtctta

SEQ ID NO: 137631 - DNA, 25 bp, Artificial
  Probe
tagccttcattcagtgtgtcttaat

SEQ ID NO: 137632 - DNA, 25 bp, Artificial
  Probe
ttagccttcattcagtgtgtcttaa

SEQ ID NO: 137633 - DNA, 25 bp, Artificial
  Probe
agccttcattcagtgtgtcttaatt

SEQ ID NO: 137634 - DNA, 25 bp, Artificial
  Probe
gccttcattcagtgtgtcttaatta

SEQ ID NO: 137635 - DNA, 25 bp, Artificial
  Probe
ccttagccttcattcagtgtgtctt

SEQ ID NO: 137636 - DNA, 25 bp, Artificial
  Probe
catcttctgccttagccttcattca

SEQ ID NO: 137637 - DNA, 25 bp, Artificial
  Probe
gcctaacagatttctatcactccaa

SEQ ID NO: 137638 - DNA, 25 bp, Artificial
  Probe
taacagatttctatcactccaagcg

SEQ ID NO: 137639 - DNA, 25 bp, Artificial
  Probe
ctaacagatttctatcactccaagc

SEQ ID NO: 137640 - DNA, 25 bp, Artificial
  Probe
cagcctaacagatttctatcactcc

SEQ ID NO: 137641 - DNA, 25 bp, Artificial
  Probe
ccagcctaacagatttctatcactc

SEQ ID NO: 137642 - DNA, 25 bp, Artificial
  Probe
agcctaacagatttctatcactcca

SEQ ID NO: 137643 - DNA, 25 bp, Artificial
  Probe
gaccagcctaacagatttctatcac

SEQ ID NO: 137644 - DNA, 25 bp, Artificial
  Probe
cagaccagcctaacagatttctatc

SEQ ID NO: 137645 - DNA, 25 bp, Artificial
  Probe
accagcctaacagatttctatcact

SEQ ID NO: 137646 - DNA, 25 bp, Artificial
  Probe
cctaacagatttctatcactccaag

SEQ ID NO: 137647 - DNA, 25 bp, Artificial
  Probe
agaccagcctaacagatttctatca

SEQ ID NO: 137648 - DNA, 25 bp, Artificial
  Probe
atcttctgccttagccttcattcag

SEQ ID NO: 137649 - DNA, 25 bp, Artificial
  Probe
ccatcttctgccttagccttcattc

SEQ ID NO: 137650 - DNA, 25 bp, Artificial
  Probe
acaatgaaattagtaggacggtaaa

SEQ ID NO: 137651 - DNA, 25 bp, Artificial
  Probe
aacaatgaaattagtaggacggtaa

SEQ ID NO: 137652 - DNA, 25 bp, Artificial
  Probe
aaacaatgaaattagtaggacggta

SEQ ID NO: 137653 - DNA, 25 bp, Artificial
  Probe
ccttcattcagtgtgtcttaattat

SEQ ID NO: 137654 - DNA, 25 bp, Artificial
  Probe
gcagaccagcctaacagatttctat

SEQ ID NO: 137655 - DNA, 25 bp, Artificial
  Probe
cttctgccttagccttcattcagtg

SEQ ID NO: 137656 - DNA, 25 bp, Artificial
  Probe
tcttctgccttagccttcattcagt

SEQ ID NO: 137657 - DNA, 25 bp, Artificial
  Probe
aacttctcctgtatatactctgcct

SEQ ID NO: 137658 - DNA, 25 bp, Artificial
  Probe
acttctcctgtatatactctgcctg

SEQ ID NO: 137659 - DNA, 25 bp, Artificial
  Probe
ttctgccttagccttcattcagtgt

SEQ ID NO: 137660 - DNA, 25 bp, Artificial
  Probe
cttctcctgtatatactctgcctgc

SEQ ID NO: 137661 - DNA, 25 bp, Artificial
  Probe
gccttagccttcattcagtgtgtct

SEQ ID NO: 137662 - DNA, 25 bp, Artificial
  Probe
cttcattcagtgtgtcttaattatt

SEQ ID NO: 137663 - DNA, 25 bp, Artificial
  Probe
tgccttagccttcattcagtgtgtc

SEQ ID NO: 137664 - DNA, 25 bp, Artificial
  Probe
aaacttctcctgtatatactctgcc

SEQ ID NO: 137665 - DNA, 25 bp, Artificial
  Probe
caatgaaattagtaggacggtaaaa

SEQ ID NO: 137666 - DNA, 25 bp, Artificial
  Probe
tctgccttagccttcattcagtgtg

SEQ ID NO: 137667 - DNA, 25 bp, Artificial
  Probe
ttctcctgtatatactctgcctgcc

SEQ ID NO: 137668 - DNA, 25 bp, Artificial
  Probe
cccatcttctgccttagccttcatt

SEQ ID NO: 137669 - DNA, 25 bp, Artificial
  Probe
ctgccttagccttcattcagtgtgt

SEQ ID NO: 137670 - DNA, 25 bp, Artificial
  Probe
taaacttctcctgtatatactctgc

SEQ ID NO: 137671 - DNA, 25 bp, Artificial
  Probe
agtgtgtcttaattattatttgtgt

SEQ ID NO: 137672 - DNA, 25 bp, Artificial
  Probe
aacagatttctatcactccaagcgc

SEQ ID NO: 137673 - DNA, 25 bp, Artificial
  Probe
ccgattggtcttctgcaagagaaag

SEQ ID NO: 137674 - DNA, 25 bp, Artificial
  Probe
gattggtcttctgcaagagaaagcc

SEQ ID NO: 137675 - DNA, 25 bp, Artificial
  Probe
cagtatgacttcttccgagtagact

SEQ ID NO: 137676 - DNA, 25 bp, Artificial
  Probe
ccagtatgacttcttccgagtagac

SEQ ID NO: 137677 - DNA, 25 bp, Artificial
  Probe
tatgacttcttccgagtagactcag

SEQ ID NO: 137678 - DNA, 25 bp, Artificial
  Probe
agtatgacttcttccgagtagactc

SEQ ID NO: 137679 - DNA, 25 bp, Artificial
  Probe
gtagactcagcgaaggagaactatc

SEQ ID NO: 137680 - DNA, 25 bp, Artificial
  Probe
gtatgacttcttccgagtagactca

SEQ ID NO: 137681 - DNA, 25 bp, Artificial
  Probe
agtagactcagcgaaggagaactat

SEQ ID NO: 137682 - DNA, 25 bp, Artificial
  Probe
gagtagactcagcgaaggagaacta

SEQ ID NO: 137683 - DNA, 25 bp, Artificial
  Probe
cccagtatgacttcttccgagtaga

SEQ ID NO: 137684 - DNA, 25 bp, Artificial
  Probe
atgacttcttccgagtagactcagc

SEQ ID NO: 137685 - DNA, 25 bp, Artificial
  Probe
gcccagtatgacttcttccgagtag

SEQ ID NO: 137686 - DNA, 25 bp, Artificial
  Probe
acttcttccgagtagactcagcgaa

SEQ ID NO: 137687 - DNA, 25 bp, Artificial
  Probe
cttcttccgagtagactcagcgaag

SEQ ID NO: 137688 - DNA, 25 bp, Artificial
  Probe
gtgatcgagaccccaataacttgct

SEQ ID NO: 137689 - DNA, 25 bp, Artificial
  Probe
tgaatctgaagaagaatttgccatc

SEQ ID NO: 137690 - DNA, 25 bp, Artificial
  Probe
cttgaatctgaagaagaatttgcca

SEQ ID NO: 137691 - DNA, 25 bp, Artificial
  Probe
tatctaccagagcataacccagaaa

SEQ ID NO: 137692 - DNA, 25 bp, Artificial
  Probe
ttatctaccagagcataacccagaa

SEQ ID NO: 137693 - DNA, 25 bp, Artificial
  Probe
tttatctaccagagcataacccaga

SEQ ID NO: 137694 - DNA, 25 bp, Artificial
  Probe
gaatctgaagaagaatttgccatcc

SEQ ID NO: 137695 - DNA, 25 bp, Artificial
  Probe
ttgaatctgaagaagaatttgccat

SEQ ID NO: 137696 - DNA, 25 bp, Artificial
  Probe
ctaccagagcataacccagaaattc

SEQ ID NO: 137697 - DNA, 25 bp, Artificial
  Probe
aatctgaagaagaatttgccatcca

SEQ ID NO: 137698 - DNA, 25 bp, Artificial
  Probe
atctaccagagcataacccagaaat

SEQ ID NO: 137699 - DNA, 25 bp, Artificial
  Probe
gcataacccagaaattcctcttgaa

SEQ ID NO: 137700 - DNA, 25 bp, Artificial
  Probe
tctaccagagcataacccagaaatt

SEQ ID NO: 137701 - DNA, 25 bp, Artificial
  Probe
atctgaagaagaatttgccatccac

SEQ ID NO: 137702 - DNA, 25 bp, Artificial
  Probe
agcataacccagaaattcctcttga

SEQ ID NO: 137703 - DNA, 25 bp, Artificial
  Probe
gagcataacccagaaattcctcttg

SEQ ID NO: 137704 - DNA, 25 bp, Artificial
  Probe
ttcctcttgaatctgaagaagaatt

SEQ ID NO: 137705 - DNA, 25 bp, Artificial
  Probe
aattcctcttgaatctgaagaagaa

SEQ ID NO: 137706 - DNA, 25 bp, Artificial
  Probe
taccagagcataacccagaaattcc

SEQ ID NO: 137707 - DNA, 25 bp, Artificial
  Probe
attcctcttgaatctgaagaagaat

SEQ ID NO: 137708 - DNA, 25 bp, Artificial
  Probe
taacccagaaattcctcttgaatct

SEQ ID NO: 137709 - DNA, 25 bp, Artificial
  Probe
cataacccagaaattcctcttgaat

SEQ ID NO: 137710 - DNA, 25 bp, Artificial
  Probe
ataacccagaaattcctcttgaatc

SEQ ID NO: 137711 - DNA, 25 bp, Artificial
  Probe
ctaccagtggaagtgcaagaagtac

SEQ ID NO: 137712 - DNA, 25 bp, Artificial
  Probe
gaagtgcaagaagtaccgagatcag

SEQ ID NO: 137713 - DNA, 25 bp, Artificial
  Probe
tcttgaatctgaagaagaatttgcc

SEQ ID NO: 137714 - DNA, 25 bp, Artificial
  Probe
tctaccagtggaagtgcaagaagta

SEQ ID NO: 137715 - DNA, 25 bp, Artificial
  Probe
tgaagaagaatttgccatccaccaa

SEQ ID NO: 137716 - DNA, 25 bp, Artificial
  Probe
ctcttgaatctgaagaagaatttgc

SEQ ID NO: 137717 - DNA, 25 bp, Artificial
  Probe
tctgaagaagaatttgccatccacc

SEQ ID NO: 137718 - DNA, 25 bp, Artificial
  Probe
ctgaagaagaatttgccatccacca

SEQ ID NO: 137719 - DNA, 25 bp, Artificial
  Probe
ttttatctaccagagcataacccag

SEQ ID NO: 137720 - DNA, 25 bp, Artificial
  Probe
attttatctaccagagcataaccca

SEQ ID NO: 137721 - DNA, 25 bp, Artificial
  Probe
ccagagcataacccagaaattcctc

SEQ ID NO: 137722 - DNA, 25 bp, Artificial
  Probe
cctcttgaatctgaagaagaatttg

SEQ ID NO: 137723 - DNA, 25 bp, Artificial
  Probe
tcctcttgaatctgaagaagaattt

SEQ ID NO: 137724 - DNA, 25 bp, Artificial
  Probe
aaattcctcttgaatctgaagaaga

SEQ ID NO: 137725 - DNA, 25 bp, Artificial
  Probe
agaaattcctcttgaatctgaagaa

SEQ ID NO: 137726 - DNA, 25 bp, Artificial
  Probe
accagagcataacccagaaattcct

SEQ ID NO: 137727 - DNA, 25 bp, Artificial
  Probe
cttcaacacagccaatcaggaactg

SEQ ID NO: 137728 - DNA, 25 bp, Artificial
  Probe
gaaattcctcttgaatctgaagaag

SEQ ID NO: 137729 - DNA, 25 bp, Artificial
  Probe
aattttatctaccagagcataaccc

SEQ ID NO: 137730 - DNA, 25 bp, Artificial
  Probe
aagaagaatttgccatccaccaaag

SEQ ID NO: 137731 - DNA, 25 bp, Artificial
  Probe
gaagaagaatttgccatccaccaaa

SEQ ID NO: 137732 - DNA, 25 bp, Artificial
  Probe
taccagtggaagtgcaagaagtacc

SEQ ID NO: 137733 - DNA, 25 bp, Artificial
  Probe
agcaaaagaagcactatgggaagat

SEQ ID NO: 137734 - DNA, 25 bp, Artificial
  Probe
gtgtggcttcagttcatatcctata

SEQ ID NO: 137735 - DNA, 25 bp, Artificial
  Probe
tgtggcttcagttcatatcctataa

SEQ ID NO: 137736 - DNA, 25 bp, Artificial
  Probe
cctctaagtcttgaagtagtaagca

SEQ ID NO: 137737 - DNA, 25 bp, Artificial
  Probe
aagtcttgaagtagtaagcattagg

SEQ ID NO: 137738 - DNA, 25 bp, Artificial
  Probe
ggtgtggcttcagttcatatcctat

SEQ ID NO: 137739 - DNA, 25 bp, Artificial
  Probe
ctctaagtcttgaagtagtaagcat

SEQ ID NO: 137740 - DNA, 25 bp, Artificial
  Probe
tctaagtcttgaagtagtaagcatt

SEQ ID NO: 137741 - DNA, 25 bp, Artificial
  Probe
gaagacaaggcaatacaaaggtaag

SEQ ID NO: 137742 - DNA, 25 bp, Artificial
  Probe
ccctctaagtcttgaagtagtaagc

SEQ ID NO: 137743 - DNA, 25 bp, Artificial
  Probe
agtcttgaagtagtaagcattaggg

SEQ ID NO: 137744 - DNA, 25 bp, Artificial
  Probe
ctaggtgtggcttcagttcatatcc

SEQ ID NO: 137745 - DNA, 25 bp, Artificial
  Probe
aagacaaggcaatacaaaggtaagg

SEQ ID NO: 137746 - DNA, 25 bp, Artificial
  Probe
ggaagacaaggcaatacaaaggtaa

SEQ ID NO: 137747 - DNA, 25 bp, Artificial
  Probe
tcaaacaaagacagccagttactaa

SEQ ID NO: 137748 - DNA, 25 bp, Artificial
  Probe
ttcaaacaaagacagccagttacta

SEQ ID NO: 137749 - DNA, 25 bp, Artificial
  Probe
gtcttgaagtagtaagcattagggc

SEQ ID NO: 137750 - DNA, 25 bp, Artificial
  Probe
caaacaaagacagccagttactaac

SEQ ID NO: 137751 - DNA, 25 bp, Artificial
  Probe
tccctctaagtcttgaagtagtaag

SEQ ID NO: 137752 - DNA, 25 bp, Artificial
  Probe
gtggcttcagttcatatcctataaa

SEQ ID NO: 137753 - DNA, 25 bp, Artificial
  Probe
caaggcaatacaaaggtaaggctta

SEQ ID NO: 137754 - DNA, 25 bp, Artificial
  Probe
atgataccgaatccagagtaattaa

SEQ ID NO: 137755 - DNA, 25 bp, Artificial
  Probe
aatgataccgaatccagagtaatta

SEQ ID NO: 137756 - DNA, 25 bp, Artificial
  Probe
ttactaactttggttgctaggtgtg

SEQ ID NO: 137757 - DNA, 25 bp, Artificial
  Probe
gttactaactttggttgctaggtgt

SEQ ID NO: 137758 - DNA, 25 bp, Artificial
  Probe
atccctctaagtcttgaagtagtaa

SEQ ID NO: 137759 - DNA, 25 bp, Artificial
  Probe
aatccctctaagtcttgaagtagta

SEQ ID NO: 137760 - DNA, 25 bp, Artificial
  Probe
taatccctctaagtcttgaagtagt

SEQ ID NO: 137761 - DNA, 25 bp, Artificial
  Probe
tgataccgaatccagagtaattaat

SEQ ID NO: 137762 - DNA, 25 bp, Artificial
  Probe
gctaggtgtggcttcagttcatatc

SEQ ID NO: 137763 - DNA, 25 bp, Artificial
  Probe
cttcaaacaaagacagccagttact

SEQ ID NO: 137764 - DNA, 25 bp, Artificial
  Probe
tggaagacaaggcaatacaaaggta

SEQ ID NO: 137765 - DNA, 25 bp, Artificial
  Probe
aaatgataccgaatccagagtaatt

SEQ ID NO: 137766 - DNA, 25 bp, Artificial
  Probe
aggtgtggcttcagttcatatccta

SEQ ID NO: 137767 - DNA, 25 bp, Artificial
  Probe
taggtgtggcttcagttcatatcct

SEQ ID NO: 137768 - DNA, 25 bp, Artificial
  Probe
tttctttctgtagctgagttgtttc

SEQ ID NO: 137769 - DNA, 25 bp, Artificial
  Probe
ttctttctgtagctgagttgtttcc

SEQ ID NO: 137770 - DNA, 25 bp, Artificial
  Probe
tgctaggtgtggcttcagttcatat

SEQ ID NO: 137771 - DNA, 25 bp, Artificial
  Probe
taagtcttgaagtagtaagcattag

SEQ ID NO: 137772 - DNA, 25 bp, Artificial
  Probe
ctaagtcttgaagtagtaagcatta

SEQ ID NO: 137773 - DNA, 25 bp, Artificial
  Probe
ttaatccctctaagtcttgaagtag

SEQ ID NO: 137774 - DNA, 25 bp, Artificial
  Probe
tactaactttggttgctaggtgtgg

SEQ ID NO: 137775 - DNA, 25 bp, Artificial
  Probe
acaaggcaatacaaaggtaaggctt

SEQ ID NO: 137776 - DNA, 25 bp, Artificial
  Probe
ttgctaggtgtggcttcagttcata

SEQ ID NO: 137777 - DNA, 25 bp, Artificial
  Probe
tagtaagcattagggctgaaatcaa

SEQ ID NO: 137778 - DNA, 25 bp, Artificial
  Probe
aagtagtaagcattagggctgaaat

SEQ ID NO: 137779 - DNA, 25 bp, Artificial
  Probe
ggatagaatgagacactggctatgt

SEQ ID NO: 137780 - DNA, 25 bp, Artificial
  Probe
caaggtagggaaggtatcaagaatg

SEQ ID NO: 137781 - DNA, 25 bp, Artificial
  Probe
tagggaaggtatcaagaatggagag

SEQ ID NO: 137782 - DNA, 25 bp, Artificial
  Probe
gtaagagaaatagatttgatggcgg

SEQ ID NO: 137783 - DNA, 25 bp, Artificial
  Probe
gaaggtatcaagaatggagaggctc

SEQ ID NO: 137784 - DNA, 25 bp, Artificial
  Probe
gtagggaaggtatcaagaatggaga

SEQ ID NO: 137785 - DNA, 25 bp, Artificial
  Probe
taagagaaatagatttgatggcggg

SEQ ID NO: 137786 - DNA, 25 bp, Artificial
  Probe
agtaagagaaatagatttgatggcg

SEQ ID NO: 137787 - DNA, 25 bp, Artificial
  Probe
aaggtagggaaggtatcaagaatgg

SEQ ID NO: 137788 - DNA, 25 bp, Artificial
  Probe
ccaaggtagggaaggtatcaagaat

SEQ ID NO: 137789 - DNA, 25 bp, Artificial
  Probe
gagattagtgtctaggttacccaag

SEQ ID NO: 137790 - DNA, 25 bp, Artificial
  Probe
agagattagtgtctaggttacccaa

SEQ ID NO: 137791 - DNA, 25 bp, Artificial
  Probe
aagagattagtgtctaggttaccca

SEQ ID NO: 137792 - DNA, 25 bp, Artificial
  Probe
aaagagattagtgtctaggttaccc

SEQ ID NO: 137793 - DNA, 25 bp, Artificial
  Probe
cccaaagagattagtgtctaggtta

SEQ ID NO: 137794 - DNA, 25 bp, Artificial
  Probe
actgaagttcattccagcatcctag

SEQ ID NO: 137795 - DNA, 25 bp, Artificial
  Probe
gactgaagttcattccagcatccta

SEQ ID NO: 137796 - DNA, 25 bp, Artificial
  Probe
ggtagggaaggtatcaagaatggag

SEQ ID NO: 137797 - DNA, 25 bp, Artificial
  Probe
ggtcttgatggacagtttctctatt

SEQ ID NO: 137798 - DNA, 25 bp, Artificial
  Probe
aggtagggaaggtatcaagaatgga

SEQ ID NO: 137799 - DNA, 25 bp, Artificial
  Probe
ggaaggtatcaagaatggagaggct

SEQ ID NO: 137800 - DNA, 25 bp, Artificial
  Probe
agattagtgtctaggttacccaagc

SEQ ID NO: 137801 - DNA, 25 bp, Artificial
  Probe
caacgcaaactccaacattagactt

SEQ ID NO: 137802 - DNA, 25 bp, Artificial
  Probe
caaagagattagtgtctaggttacc

SEQ ID NO: 137803 - DNA, 25 bp, Artificial
  Probe
ccaaagagattagtgtctaggttac

SEQ ID NO: 137804 - DNA, 25 bp, Artificial
  Probe
agtttctctattatactgagcggct

SEQ ID NO: 137805 - DNA, 25 bp, Artificial
  Probe
tctgactgaagttcattccagcatc

SEQ ID NO: 137806 - DNA, 25 bp, Artificial
  Probe
gaaatagatttgatggcgggtgatg

SEQ ID NO: 137807 - DNA, 25 bp, Artificial
  Probe
agaaatagatttgatggcgggtgat

SEQ ID NO: 137808 - DNA, 25 bp, Artificial
  Probe
aagagaaatagatttgatggcgggt

SEQ ID NO: 137809 - DNA, 25 bp, Artificial
  Probe
aacgcaaactccaacattagacttg

SEQ ID NO: 137810 - DNA, 25 bp, Artificial
  Probe
tttatagctgaaaccacacccattt

SEQ ID NO: 137811 - DNA, 25 bp, Artificial
  Probe
gggtcttgatggacagtttctctat

SEQ ID NO: 137812 - DNA, 25 bp, Artificial
  Probe
gtctgactgaagttcattccagcat

SEQ ID NO: 137813 - DNA, 25 bp, Artificial
  Probe
gattagtgtctaggttacccaagcc

SEQ ID NO: 137814 - DNA, 25 bp, Artificial
  Probe
atagatggacagccttgtgacctag

SEQ ID NO: 137815 - DNA, 25 bp, Artificial
  Probe
gtcttgatggacagtttctctatta

SEQ ID NO: 137816 - DNA, 25 bp, Artificial
  Probe
tcttgatggacagtttctctattat

SEQ ID NO: 137817 - DNA, 25 bp, Artificial
  Probe
catagatggacagccttgtgaccta

SEQ ID NO: 137818 - DNA, 25 bp, Artificial
  Probe
gggatagaatgagacactggctatg

SEQ ID NO: 137819 - DNA, 25 bp, Artificial
  Probe
aagtaagagaaatagatttgatggc

SEQ ID NO: 137820 - DNA, 25 bp, Artificial
  Probe
agggatagaatgagacactggctat

SEQ ID NO: 137821 - DNA, 25 bp, Artificial
  Probe
ttctctattatactgagcggctcca

SEQ ID NO: 137822 - DNA, 25 bp, Artificial
  Probe
agggaaggtatcaagaatggagagg

SEQ ID NO: 137823 - DNA, 25 bp, Artificial
  Probe
gagaaatagatttgatggcgggtga

SEQ ID NO: 137824 - DNA, 25 bp, Artificial
  Probe
cattcttgataccttccctaccttg

SEQ ID NO: 137825 - DNA, 25 bp, Artificial
  Probe
ctctccattcttgataccttcccta

SEQ ID NO: 137826 - DNA, 25 bp, Artificial
  Probe
gagcctctccattcttgataccttc

SEQ ID NO: 137827 - DNA, 25 bp, Artificial
  Probe
tctccattcttgataccttccctac

SEQ ID NO: 137828 - DNA, 25 bp, Artificial
  Probe
attcttgataccttccctaccttgg

SEQ ID NO: 137829 - DNA, 25 bp, Artificial
  Probe
ccattcttgataccttccctacctt

SEQ ID NO: 137830 - DNA, 25 bp, Artificial
  Probe
tgggtaacctagacactaatctctt

SEQ ID NO: 137831 - DNA, 25 bp, Artificial
  Probe
ttgggtaacctagacactaatctct

SEQ ID NO: 137832 - DNA, 25 bp, Artificial
  Probe
cttgggtaacctagacactaatctc

SEQ ID NO: 137833 - DNA, 25 bp, Artificial
  Probe
taacctagacactaatctctttggg

SEQ ID NO: 137834 - DNA, 25 bp, Artificial
  Probe
gggtaacctagacactaatctcttt

SEQ ID NO: 137835 - DNA, 25 bp, Artificial
  Probe
ctccattcttgataccttccctacc

SEQ ID NO: 137836 - DNA, 25 bp, Artificial
  Probe
tccattcttgataccttccctacct

SEQ ID NO: 137837 - DNA, 25 bp, Artificial
  Probe
agcctctccattcttgataccttcc

SEQ ID NO: 137838 - DNA, 25 bp, Artificial
  Probe
gcttgggtaacctagacactaatct

SEQ ID NO: 137839 - DNA, 25 bp, Artificial
  Probe
gtaacctagacactaatctctttgg

SEQ ID NO: 137840 - DNA, 25 bp, Artificial
  Probe
ggtaacctagacactaatctctttg

SEQ ID NO: 137841 - DNA, 25 bp, Artificial
  Probe
ggcttgggtaacctagacactaatc

SEQ ID NO: 137842 - DNA, 25 bp, Artificial
  Probe
ctaggtcacaaggctgtccatctat

SEQ ID NO: 137843 - DNA, 25 bp, Artificial
  Probe
taggtcacaaggctgtccatctatg

SEQ ID NO: 137844 - DNA, 25 bp, Artificial
  Probe
cctctccattcttgataccttccct

SEQ ID NO: 137845 - DNA, 25 bp, Artificial
  Probe
ctcccaataaaggctttacaactgc

SEQ ID NO: 137846 - DNA, 25 bp, Artificial
  Probe
cctcccaataaaggctttacaactg

SEQ ID NO: 137847 - DNA, 25 bp, Artificial
  Probe
atccctcccaataaaggctttacaa

SEQ ID NO: 137848 - DNA, 25 bp, Artificial
  Probe
aggcttgggtaacctagacactaat

SEQ ID NO: 137849 - DNA, 25 bp, Artificial
  Probe
ctactgtcctagcatggttcgagta

SEQ ID NO: 137850 - DNA, 25 bp, Artificial
  Probe
catccctcccaataaaggctttaca

SEQ ID NO: 137851 - DNA, 25 bp, Artificial
  Probe
ctgagcttaactgacattgggaaca

SEQ ID NO: 137852 - DNA, 25 bp, Artificial
  Probe
ccctcccaataaaggctttacaact

SEQ ID NO: 137853 - DNA, 25 bp, Artificial
  Probe
tccctcccaataaaggctttacaac

SEQ ID NO: 137854 - DNA, 25 bp, Artificial
  Probe
tactgtcctagcatggttcgagtac

SEQ ID NO: 137855 - DNA, 25 bp, Artificial
  Probe
aacctagacactaatctctttgggg

SEQ ID NO: 137856 - DNA, 25 bp, Artificial
  Probe
attgggaacacagggaacaggtaaa

SEQ ID NO: 137857 - DNA, 25 bp, Artificial
  Probe
gagcttaactgacattgggaacaca

SEQ ID NO: 137858 - DNA, 25 bp, Artificial
  Probe
tgagcttaactgacattgggaacac

SEQ ID NO: 137859 - DNA, 25 bp, Artificial
  Probe
cttaactgacattgggaacacaggg

SEQ ID NO: 137860 - DNA, 25 bp, Artificial
  Probe
tcccaataaaggctttacaactgca

SEQ ID NO: 137861 - DNA, 25 bp, Artificial
  Probe
ccatccctcccaataaaggctttac

SEQ ID NO: 137862 - DNA, 25 bp, Artificial
  Probe
caggcttgggtaacctagacactaa

SEQ ID NO: 137863 - DNA, 25 bp, Artificial
  Probe
cctgagcttaactgacattgggaac

SEQ ID NO: 137864 - DNA, 25 bp, Artificial
  Probe
taactgacattgggaacacagggaa

SEQ ID NO: 137865 - DNA, 25 bp, Artificial
  Probe
ttaactgacattgggaacacaggga

SEQ ID NO: 137866 - DNA, 25 bp, Artificial
  Probe
accatccctcccaataaaggcttta

SEQ ID NO: 137867 - DNA, 25 bp, Artificial
  Probe
agcttaactgacattgggaacacag

SEQ ID NO: 137868 - DNA, 25 bp, Artificial
  Probe
gcctctccattcttgataccttccc

SEQ ID NO: 137869 - DNA, 25 bp, Artificial
  Probe
tgctgaaactctccctatacattat

SEQ ID NO: 137870 - DNA, 25 bp, Artificial
  Probe
atgctgaaactctccctatacatta

SEQ ID NO: 137871 - DNA, 25 bp, Artificial
  Probe
tcatttggctaagaacatagtgatg

SEQ ID NO: 137872 - DNA, 25 bp, Artificial
  Probe
catgctgaaactctccctatacatt

SEQ ID NO: 137873 - DNA, 25 bp, Artificial
  Probe
ttcatttggctaagaacatagtgat

SEQ ID NO: 137874 - DNA, 25 bp, Artificial
  Probe
gctgaaactctccctatacattata

SEQ ID NO: 137875 - DNA, 25 bp, Artificial
  Probe
cttttgactgtccttgttctttctg

SEQ ID NO: 137876 - DNA, 25 bp, Artificial
  Probe
acttttgactgtccttgttctttct

SEQ ID NO: 137877 - DNA, 25 bp, Artificial
  Probe
catttggctaagaacatagtgatgt

SEQ ID NO: 137878 - DNA, 25 bp, Artificial
  Probe
tttgactgtccttgttctttctgcc

SEQ ID NO: 137879 - DNA, 25 bp, Artificial
  Probe
ttttgacttttgactgtccttgttc

SEQ ID NO: 137880 - DNA, 25 bp, Artificial
  Probe
atgttttgacttttgactgtccttg

SEQ ID NO: 137881 - DNA, 25 bp, Artificial
  Probe
gacttttgactgtccttgttctttc

SEQ ID NO: 137882 - DNA, 25 bp, Artificial
  Probe
atgttatgttttgacttttgactgt

SEQ ID NO: 137883 - DNA, 25 bp, Artificial
  Probe
gttttgacttttgactgtccttgtt

SEQ ID NO: 137884 - DNA, 25 bp, Artificial
  Probe
gttatgttttgacttttgactgtcc

SEQ ID NO: 137885 - DNA, 25 bp, Artificial
  Probe
ttgtgtgcgttcatttggctaagaa

SEQ ID NO: 137886 - DNA, 25 bp, Artificial
  Probe
ttttgactgtccttgttctttctgc

SEQ ID NO: 137887 - DNA, 25 bp, Artificial
  Probe
tgacttttgactgtccttgttcttt

SEQ ID NO: 137888 - DNA, 25 bp, Artificial
  Probe
ttgacttttgactgtccttgttctt

SEQ ID NO: 137889 - DNA, 25 bp, Artificial
  Probe
tttgacttttgactgtccttgttct

SEQ ID NO: 137890 - DNA, 25 bp, Artificial
  Probe
tatgttttgacttttgactgtcctt

SEQ ID NO: 137891 - DNA, 25 bp, Artificial
  Probe
ttatgttttgacttttgactgtcct

SEQ ID NO: 137892 - DNA, 25 bp, Artificial
  Probe
gtgatgttatgttttgacttttgac

SEQ ID NO: 137893 - DNA, 25 bp, Artificial
  Probe
tgatgttatgttttgacttttgact

SEQ ID NO: 137894 - DNA, 25 bp, Artificial
  Probe
tatacattataggccatgttgtgtg

SEQ ID NO: 137895 - DNA, 25 bp, Artificial
  Probe
cgttcatttggctaagaacatagtg

SEQ ID NO: 137896 - DNA, 25 bp, Artificial
  Probe
atacattataggccatgttgtgtgc

SEQ ID NO: 137897 - DNA, 25 bp, Artificial
  Probe
tgttttgacttttgactgtccttgt

SEQ ID NO: 137898 - DNA, 25 bp, Artificial
  Probe
gatgttatgttttgacttttgactg

SEQ ID NO: 137899 - DNA, 25 bp, Artificial
  Probe
gttcatttggctaagaacatagtga

SEQ ID NO: 137900 - DNA, 25 bp, Artificial
  Probe
tgttatgttttgacttttgactgtc

SEQ ID NO: 137901 - DNA, 25 bp, Artificial
  Probe
ctatacattataggccatgttgtgt

SEQ ID NO: 137902 - DNA, 25 bp, Artificial
  Probe
atgttgtgtgcgttcatttggctaa

SEQ ID NO: 137903 - DNA, 25 bp, Artificial
  Probe
ttgactgtccttgttctttctgcct

SEQ ID NO: 137904 - DNA, 25 bp, Artificial
  Probe
agtgatgttatgttttgacttttga

SEQ ID NO: 137905 - DNA, 25 bp, Artificial
  Probe
gttgtgtgcgttcatttggctaaga

SEQ ID NO: 137906 - DNA, 25 bp, Artificial
  Probe
attataggccatgttgtgtgcgttc

SEQ ID NO: 137907 - DNA, 25 bp, Artificial
  Probe
gcgttcatttggctaagaacatagt

SEQ ID NO: 137908 - DNA, 25 bp, Artificial
  Probe
tgcgttcatttggctaagaacatag

SEQ ID NO: 137909 - DNA, 25 bp, Artificial
  Probe
gtgcgttcatttggctaagaacata

SEQ ID NO: 137910 - DNA, 25 bp, Artificial
  Probe
gactgtccttgttctttctgcctca

SEQ ID NO: 137911 - DNA, 25 bp, Artificial
  Probe
tgactgtccttgttctttctgcctc

SEQ ID NO: 137912 - DNA, 25 bp, Artificial
  Probe
tgttgtgtgcgttcatttggctaag

SEQ ID NO: 137913 - DNA, 25 bp, Artificial
  Probe
cattataggccatgttgtgtgcgtt

SEQ ID NO: 137914 - DNA, 25 bp, Artificial
  Probe
attgtagaagcagacagaatgttcc

SEQ ID NO: 137915 - DNA, 25 bp, Artificial
  Probe
tagaagcagacagaatgttcctgaa

SEQ ID NO: 137916 - DNA, 25 bp, Artificial
  Probe
ttgtagaagcagacagaatgttcct

SEQ ID NO: 137917 - DNA, 25 bp, Artificial
  Probe
cattgtagaagcagacagaatgttc

SEQ ID NO: 137918 - DNA, 25 bp, Artificial
  Probe
gtagaagcagacagaatgttcctga

SEQ ID NO: 137919 - DNA, 25 bp, Artificial
  Probe
tgtagaagcagacagaatgttcctg

SEQ ID NO: 137920 - DNA, 25 bp, Artificial
  Probe
ccattgtagaagcagacagaatgtt

SEQ ID NO: 137921 - DNA, 25 bp, Artificial
  Probe
ctgaacttacagataggagctggtc

SEQ ID NO: 137922 - DNA, 25 bp, Artificial
  Probe
tggtccttgaaatggattgagaaag

SEQ ID NO: 137923 - DNA, 25 bp, Artificial
  Probe
ctggtccttgaaatggattgagaaa

SEQ ID NO: 137924 - DNA, 25 bp, Artificial
  Probe
agatgctgatcgtaagatcctcttc

SEQ ID NO: 137925 - DNA, 25 bp, Artificial
  Probe
gagatgctgatcgtaagatcctctt

SEQ ID NO: 137926 - DNA, 25 bp, Artificial
  Probe
atgacccgctcagaagagaataaag

SEQ ID NO: 137927 - DNA, 25 bp, Artificial
  Probe
gatgacccgctcagaagagaataaa

SEQ ID NO: 137928 - DNA, 25 bp, Artificial
  Probe
gaagcagacagaatgttcctgaaag

SEQ ID NO: 137929 - DNA, 25 bp, Artificial
  Probe
ctcaggagtagaagcaggaggattg

SEQ ID NO: 137930 - DNA, 25 bp, Artificial
  Probe
agaagcagacagaatgttcctgaaa

SEQ ID NO: 137931 - DNA, 25 bp, Artificial
  Probe
cagagatgctgatcgtaagatcctc

SEQ ID NO: 137932 - DNA, 25 bp, Artificial
  Probe
ggtccttgaaatggattgagaaagc

SEQ ID NO: 137933 - DNA, 25 bp, Artificial
  Probe
gatgctgatcgtaagatcctcttcc

SEQ ID NO: 137934 - DNA, 25 bp, Artificial
  Probe
gccattgtagaagcagacagaatgt

SEQ ID NO: 137935 - DNA, 25 bp, Artificial
  Probe
gtccttgaaatggattgagaaagcg

SEQ ID NO: 137936 - DNA, 25 bp, Artificial
  Probe
agagatgctgatcgtaagatcctct

SEQ ID NO: 137937 - DNA, 25 bp, Artificial
  Probe
tgaacttacagataggagctggtcc

SEQ ID NO: 137938 - DNA, 25 bp, Artificial
  Probe
cagacagaatgttcctgaaagccat

SEQ ID NO: 137939 - DNA, 25 bp, Artificial
  Probe
tgccattgtagaagcagacagaatg

SEQ ID NO: 137940 - DNA, 25 bp, Artificial
  Probe
actcaggagtagaagcaggaggatt

SEQ ID NO: 137941 - DNA, 25 bp, Artificial
  Probe
agacagaatgttcctgaaagccatt

SEQ ID NO: 137942 - DNA, 25 bp, Artificial
  Probe
gctggtccttgaaatggattgagaa

SEQ ID NO: 137943 - DNA, 25 bp, Artificial
  Probe
ctctgaacttacagataggagctgg

SEQ ID NO: 137944 - DNA, 25 bp, Artificial
  Probe
ggatgacccgctcagaagagaataa

SEQ ID NO: 137945 - DNA, 25 bp, Artificial
  Probe
aagcagacagaatgttcctgaaagc

SEQ ID NO: 137946 - DNA, 25 bp, Artificial
  Probe
tccttgaaatggattgagaaagcgg

SEQ ID NO: 137947 - DNA, 25 bp, Artificial
  Probe
tctgaacttacagataggagctggt

SEQ ID NO: 137948 - DNA, 25 bp, Artificial
  Probe
cttgaaatggattgagaaagcggct

SEQ ID NO: 137949 - DNA, 25 bp, Artificial
  Probe
tgacccgctcagaagagaataaagg

SEQ ID NO: 137950 - DNA, 25 bp, Artificial
  Probe
gatcgtaagatcctcttccggtaag

SEQ ID NO: 137951 - DNA, 25 bp, Artificial
  Probe
cagtcctttgctgccattgtagaag

SEQ ID NO: 137952 - DNA, 25 bp, Artificial
  Probe
ttgaaatggattgagaaagcggctg

SEQ ID NO: 137953 - DNA, 25 bp, Artificial
  Probe
atgctgatcgtaagatcctcttccg

SEQ ID NO: 137954 - DNA, 25 bp, Artificial
  Probe
gcagagatgctgatcgtaagatcct

SEQ ID NO: 137955 - DNA, 25 bp, Artificial
  Probe
cactcaggagtagaagcaggaggat

SEQ ID NO: 137956 - DNA, 25 bp, Artificial
  Probe
tgatcgtaagatcctcttccggtaa

SEQ ID NO: 137957 - DNA, 25 bp, Artificial
  Probe
gaaatggattgagaaagcggctgag

SEQ ID NO: 137958 - DNA, 25 bp, Artificial
  Probe
aacttacagataggagctggtcctt

SEQ ID NO: 137959 - DNA, 25 bp, Artificial
  Probe
ttatactcaggctctcttcttccag

SEQ ID NO: 137960 - DNA, 25 bp, Artificial
  Probe
tttatactcaggctctcttcttcca

SEQ ID NO: 137961 - DNA, 25 bp, Artificial
  Probe
ttttatactcaggctctcttcttcc

SEQ ID NO: 137962 - DNA, 25 bp, Artificial
  Probe
tatactcaggctctcttcttccagc

SEQ ID NO: 137963 - DNA, 25 bp, Artificial
  Probe
gtacacaccaaagtcaactttcaac

SEQ ID NO: 137964 - DNA, 25 bp, Artificial
  Probe
ctgaggtacacaccaaagtcaactt

SEQ ID NO: 137965 - DNA, 25 bp, Artificial
  Probe
cgggtatgtctccatgagtttgatg

SEQ ID NO: 137966 - DNA, 25 bp, Artificial
  Probe
tacacaccaaagtcaactttcaacc

SEQ ID NO: 137967 - DNA, 25 bp, Artificial
  Probe
ggtacacaccaaagtcaactttcaa

SEQ ID NO: 137968 - DNA, 25 bp, Artificial
  Probe
gaggtacacaccaaagtcaactttc

SEQ ID NO: 137969 - DNA, 25 bp, Artificial
  Probe
ggtatgtctccatgagtttgatgcc

SEQ ID NO: 137970 - DNA, 25 bp, Artificial
  Probe
gggtatgtctccatgagtttgatgc

SEQ ID NO: 137971 - DNA, 25 bp, Artificial
  Probe
acaccaaagtcaactttcaaccttc

SEQ ID NO: 137972 - DNA, 25 bp, Artificial
  Probe
aactgaggtacacaccaaagtcaac

SEQ ID NO: 137973 - DNA, 25 bp, Artificial
  Probe
caactgaggtacacaccaaagtcaa

SEQ ID NO: 137974 - DNA, 25 bp, Artificial
  Probe
gtcctggtctgcgtagtaagtttca

SEQ ID NO: 137975 - DNA, 25 bp, Artificial
  Probe
cacaccaaagtcaactttcaacctt

SEQ ID NO: 137976 - DNA, 25 bp, Artificial
  Probe
gtatgtctccatgagtttgatgccg

SEQ ID NO: 137977 - DNA, 25 bp, Artificial
  Probe
aggtacacaccaaagtcaactttca

SEQ ID NO: 137978 - DNA, 25 bp, Artificial
  Probe
tgaggtacacaccaaagtcaacttt

SEQ ID NO: 137979 - DNA, 25 bp, Artificial
  Probe
tcctggtctgcgtagtaagtttcag

SEQ ID NO: 137980 - DNA, 25 bp, Artificial
  Probe
actgaggtacacaccaaagtcaact

SEQ ID NO: 137981 - DNA, 25 bp, Artificial
  Probe
tatgtctccatgagtttgatgccgt

SEQ ID NO: 137982 - DNA, 25 bp, Artificial
  Probe
caccaaagtcaactttcaaccttcg

SEQ ID NO: 137983 - DNA, 25 bp, Artificial
  Probe
accaaagtcaactttcaaccttcga

SEQ ID NO: 137984 - DNA, 25 bp, Artificial
  Probe
cacaccctcttatttgggagacatg

SEQ ID NO: 137985 - DNA, 25 bp, Artificial
  Probe
acacaccaaagtcaactttcaacct

SEQ ID NO: 137986 - DNA, 25 bp, Artificial
  Probe
acacaccctcttatttgggagacat

SEQ ID NO: 137987 - DNA, 25 bp, Artificial
  Probe
atcctgtctcaagagggaaagagaa

SEQ ID NO: 137988 - DNA, 25 bp, Artificial
  Probe
tcctgtctcaagagggaaagagaaa

SEQ ID NO: 137989 - DNA, 25 bp, Artificial
  Probe
gatcctgtctcaagagggaaagaga

SEQ ID NO: 137990 - DNA, 25 bp, Artificial
  Probe
aaagtcaactttcaaccttcgaaac

SEQ ID NO: 137991 - DNA, 25 bp, Artificial
  Probe
tcaactttcaaccttcgaaacaatg

SEQ ID NO: 137992 - DNA, 25 bp, Artificial
  Probe
gtcaactttcaaccttcgaaacaat

SEQ ID NO: 137993 - DNA, 25 bp, Artificial
  Probe
caaagtcaactttcaaccttcgaaa

SEQ ID NO: 137994 - DNA, 25 bp, Artificial
  Probe
gcgggtatgtctccatgagtttgat

SEQ ID NO: 137995 - DNA, 25 bp, Artificial
  Probe
agtcaactttcaaccttcgaaacaa

SEQ ID NO: 137996 - DNA, 25 bp, Artificial
  Probe
aagtcaactttcaaccttcgaaaca

SEQ ID NO: 137997 - DNA, 25 bp, Artificial
  Probe
acaccctcttatttgggagacatgg

SEQ ID NO: 137998 - DNA, 25 bp, Artificial
  Probe
cacacaccctcttatttgggagaca

SEQ ID NO: 137999 - DNA, 25 bp, Artificial
  Probe
caactttcaaccttcgaaacaatgc

SEQ ID NO: 138000 - DNA, 25 bp, Artificial
  Probe
ccaaagtcaactttcaaccttcgaa

SEQ ID NO: 138001 - DNA, 25 bp, Artificial
  Probe
catgcaactgaggtacacaccaaag

SEQ ID NO: 138002 - DNA, 25 bp, Artificial
  Probe
cctgtctcaagagggaaagagaaaa

SEQ ID NO: 138003 - DNA, 25 bp, Artificial
  Probe
atgcaactgaggtacacaccaaagt

SEQ ID NO: 138004 - DNA, 25 bp, Artificial
  Probe
gttagtcgggagtaaagtctgtctg

SEQ ID NO: 138005 - DNA, 25 bp, Artificial
  Probe
ttagtcgggagtaaagtctgtctga

SEQ ID NO: 138006 - DNA, 25 bp, Artificial
  Probe
caggtcttcagggtagtaatcgttc

SEQ ID NO: 138007 - DNA, 25 bp, Artificial
  Probe
tctgatctaacattctgaatgagca

SEQ ID NO: 138008 - DNA, 25 bp, Artificial
  Probe
ctgatctaacattctgaatgagcag

SEQ ID NO: 138009 - DNA, 25 bp, Artificial
  Probe
tgatctaacattctgaatgagcagg

SEQ ID NO: 138010 - DNA, 25 bp, Artificial
  Probe
cttgagacactttgtaaagcccttt

SEQ ID NO: 138011 - DNA, 25 bp, Artificial
  Probe
tagggttagtcgggagtaaagtctg

SEQ ID NO: 138012 - DNA, 25 bp, Artificial
  Probe
gatagtaggaagctagggttagtcg

SEQ ID NO: 138013 - DNA, 25 bp, Artificial
  Probe
cgatagtaggaagctagggttagtc

SEQ ID NO: 138014 - DNA, 25 bp, Artificial
  Probe
atctgatctaacattctgaatgagc

SEQ ID NO: 138015 - DNA, 25 bp, Artificial
  Probe
ctagggttagtcgggagtaaagtct

SEQ ID NO: 138016 - DNA, 25 bp, Artificial
  Probe
tagtcgggagtaaagtctgtctgag

SEQ ID NO: 138017 - DNA, 25 bp, Artificial
  Probe
gaagcccttgagacactttgtaaag

SEQ ID NO: 138018 - DNA, 25 bp, Artificial
  Probe
gaagacagagctggaggagtatcaa

SEQ ID NO: 138019 - DNA, 25 bp, Artificial
  Probe
tgaagcccttgagacactttgtaaa

SEQ ID NO: 138020 - DNA, 25 bp, Artificial
  Probe
atgaagtgtgctgttctctgcctaa

SEQ ID NO: 138021 - DNA, 25 bp, Artificial
  Probe
aatgaagtgtgctgttctctgccta

SEQ ID NO: 138022 - DNA, 25 bp, Artificial
  Probe
ggttagtcgggagtaaagtctgtct

SEQ ID NO: 138023 - DNA, 25 bp, Artificial
  Probe
atccaatgttgcagatttgatacaa

SEQ ID NO: 138024 - DNA, 25 bp, Artificial
  Probe
aggtcttcagggtagtaatcgttcc

SEQ ID NO: 138025 - DNA, 25 bp, Artificial
  Probe
gaggagtatcaaaagacaaatcgga

SEQ ID NO: 138026 - DNA, 25 bp, Artificial
  Probe
ctggaggagtatcaaaagacaaatc

SEQ ID NO: 138027 - DNA, 25 bp, Artificial
  Probe
atagtaggaagctagggttagtcgg

SEQ ID NO: 138028 - DNA, 25 bp, Artificial
  Probe
ccgatagtaggaagctagggttagt

SEQ ID NO: 138029 - DNA, 25 bp, Artificial
  Probe
aggagtatcaaaagacaaatcggac

SEQ ID NO: 138030 - DNA, 25 bp, Artificial
  Probe
tggaggagtatcaaaagacaaatcg

SEQ ID NO: 138031 - DNA, 25 bp, Artificial
  Probe
tatccaatgttgcagatttgataca

SEQ ID NO: 138032 - DNA, 25 bp, Artificial
  Probe
ctgaagcccttgagacactttgtaa

SEQ ID NO: 138033 - DNA, 25 bp, Artificial
  Probe
gctggaggagtatcaaaagacaaat

SEQ ID NO: 138034 - DNA, 25 bp, Artificial
  Probe
ccaggtcttcagggtagtaatcgtt

SEQ ID NO: 138035 - DNA, 25 bp, Artificial
  Probe
ggaggagtatcaaaagacaaatcgg

SEQ ID NO: 138036 - DNA, 25 bp, Artificial
  Probe
ctcatacctgtgtcttactgggttg

SEQ ID NO: 138037 - DNA, 25 bp, Artificial
  Probe
agtatcaaaagacaaatcggacttg

SEQ ID NO: 138038 - DNA, 25 bp, Artificial
  Probe
aagcccttttatattccttgacaaa

SEQ ID NO: 138039 - DNA, 25 bp, Artificial
  Probe
gagtatcaaaagacaaatcggactt

SEQ ID NO: 138040 - DNA, 25 bp, Artificial
  Probe
tactctgaagcccttgagacacttt

SEQ ID NO: 138041 - DNA, 25 bp, Artificial
  Probe
aattatccaatgttgcagatttgat

SEQ ID NO: 138042 - DNA, 25 bp, Artificial
  Probe
ggagtatcaaaagacaaatcggact

SEQ ID NO: 138043 - DNA, 25 bp, Artificial
  Probe
ccttgagacactttgtaaagccctt

SEQ ID NO: 138044 - DNA, 25 bp, Artificial
  Probe
aaattatccaatgttgcagatttga

SEQ ID NO: 138045 - DNA, 25 bp, Artificial
  Probe
aagacagagctggaggagtatcaaa

SEQ ID NO: 138046 - DNA, 25 bp, Artificial
  Probe
gatctgatctaacattctgaatgag

SEQ ID NO: 138047 - DNA, 25 bp, Artificial
  Probe
ctaacattctgaatgagcagggtag

SEQ ID NO: 138048 - DNA, 25 bp, Artificial
  Probe
ttatccaatgttgcagatttgatac

SEQ ID NO: 138049 - DNA, 25 bp, Artificial
  Probe
ttgaagtaatcctgtggactaagac

SEQ ID NO: 138050 - DNA, 25 bp, Artificial
  Probe
gaagtaatcctgtggactaagacac

SEQ ID NO: 138051 - DNA, 25 bp, Artificial
  Probe
tgaagtaatcctgtggactaagaca

SEQ ID NO: 138052 - DNA, 25 bp, Artificial
  Probe
ttagccacgtagttaatattcatgc

SEQ ID NO: 138053 - DNA, 25 bp, Artificial
  Probe
tagccacgtagttaatattcatgcc

SEQ ID NO: 138054 - DNA, 25 bp, Artificial
  Probe
aggatgttcttggcaaattattagc

SEQ ID NO: 138055 - DNA, 25 bp, Artificial
  Probe
aagtaatcctgtggactaagacacc

SEQ ID NO: 138056 - DNA, 25 bp, Artificial
  Probe
ttcaaagtctgttcccataggtgta

SEQ ID NO: 138057 - DNA, 25 bp, Artificial
  Probe
gctttaaggatgttcttggcaaatt

SEQ ID NO: 138058 - DNA, 25 bp, Artificial
  Probe
cacgtagttaatattcatgccgcat

SEQ ID NO: 138059 - DNA, 25 bp, Artificial
  Probe
tttcaaagtctgttcccataggtgt

SEQ ID NO: 138060 - DNA, 25 bp, Artificial
  Probe
gtaatcctgtggactaagacaccag

SEQ ID NO: 138061 - DNA, 25 bp, Artificial
  Probe
cgaatgagcaaagacaaaggtatcc

SEQ ID NO: 138062 - DNA, 25 bp, Artificial
  Probe
ccgaatgagcaaagacaaaggtatc

SEQ ID NO: 138063 - DNA, 25 bp, Artificial
  Probe
cctgtgggagaatagataaacactt

SEQ ID NO: 138064 - DNA, 25 bp, Artificial
  Probe
cttagccacgtagttaatattcatg

SEQ ID NO: 138065 - DNA, 25 bp, Artificial
  Probe
tgtaccgacaactgtttaatgattg

SEQ ID NO: 138066 - DNA, 25 bp, Artificial
  Probe
ctttaaggatgttcttggcaaatta

SEQ ID NO: 138067 - DNA, 25 bp, Artificial
  Probe
ttgattccgaatgagcaaagacaaa

SEQ ID NO: 138068 - DNA, 25 bp, Artificial
  Probe
tgattccgaatgagcaaagacaaag

SEQ ID NO: 138069 - DNA, 25 bp, Artificial
  Probe
agtaatcctgtggactaagacacca

SEQ ID NO: 138070 - DNA, 25 bp, Artificial
  Probe
atcctgtgggagaatagataaacac

SEQ ID NO: 138071 - DNA, 25 bp, Artificial
  Probe
atgttcttggcaaattattagctgg

SEQ ID NO: 138072 - DNA, 25 bp, Artificial
  Probe
ggatgttcttggcaaattattagct

SEQ ID NO: 138073 - DNA, 25 bp, Artificial
  Probe
aggtatcctgtgggagaatagataa

SEQ ID NO: 138074 - DNA, 25 bp, Artificial
  Probe
aaggtatcctgtgggagaatagata

SEQ ID NO: 138075 - DNA, 25 bp, Artificial
  Probe
gaatgagcaaagacaaaggtatcct

SEQ ID NO: 138076 - DNA, 25 bp, Artificial
  Probe
acttagccacgtagttaatattcat

SEQ ID NO: 138077 - DNA, 25 bp, Artificial
  Probe
aaaggtatcctgtgggagaatagat

SEQ ID NO: 138078 - DNA, 25 bp, Artificial
  Probe
tcaaagtctgttcccataggtgtac

SEQ ID NO: 138079 - DNA, 25 bp, Artificial
  Probe
tcctgtgggagaatagataaacact

SEQ ID NO: 138080 - DNA, 25 bp, Artificial
  Probe
tccgaatgagcaaagacaaaggtat

SEQ ID NO: 138081 - DNA, 25 bp, Artificial
  Probe
aaggatgttcttggcaaattattag

SEQ ID NO: 138082 - DNA, 25 bp, Artificial
  Probe
tttgaagtaatcctgtggactaaga

SEQ ID NO: 138083 - DNA, 25 bp, Artificial
  Probe
gttgtagctttaaggatgttcttgg

SEQ ID NO: 138084 - DNA, 25 bp, Artificial
  Probe
agactcaccaagttcatctcaggag

SEQ ID NO: 138085 - DNA, 25 bp, Artificial
  Probe
ggtatcctgtgggagaatagataaa

SEQ ID NO: 138086 - DNA, 25 bp, Artificial
  Probe
aatgagcaaagacaaaggtatcctg

SEQ ID NO: 138087 - DNA, 25 bp, Artificial
  Probe
gatgttcttggcaaattattagctg

SEQ ID NO: 138088 - DNA, 25 bp, Artificial
  Probe
ctttgaagtaatcctgtggactaag

SEQ ID NO: 138089 - DNA, 25 bp, Artificial
  Probe
tgttgtagctttaaggatgttcttg

SEQ ID NO: 138090 - DNA, 25 bp, Artificial
  Probe
tgactccactttgaagtaatcctgt

SEQ ID NO: 138091 - DNA, 25 bp, Artificial
  Probe
aacacttagagacgtgatgccttat

SEQ ID NO: 138092 - DNA, 25 bp, Artificial
  Probe
ttccgaatgagcaaagacaaaggta

SEQ ID NO: 138093 - DNA, 25 bp, Artificial
  Probe
ctgttgtagctttaaggatgttctt

SEQ ID NO: 138094 - DNA, 25 bp, Artificial
  Probe
actgtgtaggaatgtatatgtgtgt

SEQ ID NO: 138095 - DNA, 25 bp, Artificial
  Probe
gagagacttattctggttgttggta

SEQ ID NO: 138096 - DNA, 25 bp, Artificial
  Probe
agagacttattctggttgttggtaa

SEQ ID NO: 138097 - DNA, 25 bp, Artificial
  Probe
aagagagacttattctggttgttgg

SEQ ID NO: 138098 - DNA, 25 bp, Artificial
  Probe
aactgtgtaggaatgtatatgtgtg

SEQ ID NO: 138099 - DNA, 25 bp, Artificial
  Probe
gagacttattctggttgttggtaat

SEQ ID NO: 138100 - DNA, 25 bp, Artificial
  Probe
agagagacttattctggttgttggt

SEQ ID NO: 138101 - DNA, 25 bp, Artificial
  Probe
ctgtgtaggaatgtatatgtgtgta

SEQ ID NO: 138102 - DNA, 25 bp, Artificial
  Probe
agacttattctggttgttggtaata

SEQ ID NO: 138103 - DNA, 25 bp, Artificial
  Probe
tgtgtaggaatgtatatgtgtgtat

SEQ ID NO: 138104 - DNA, 25 bp, Artificial
  Probe
taactgtgtaggaatgtatatgtgt

SEQ ID NO: 138105 - DNA, 25 bp, Artificial
  Probe
tgctatttatatcccaatgcccttc

SEQ ID NO: 138106 - DNA, 25 bp, Artificial
  Probe
ctgctatttatatcccaatgccctt

SEQ ID NO: 138107 - DNA, 25 bp, Artificial
  Probe
cccgtgtagtaaataagaaagaagt

SEQ ID NO: 138108 - DNA, 25 bp, Artificial
  Probe
aaagagagacttattctggttgttg

SEQ ID NO: 138109 - DNA, 25 bp, Artificial
  Probe
ctatttatatcccaatgcccttcgc

SEQ ID NO: 138110 - DNA, 25 bp, Artificial
  Probe
gctatttatatcccaatgcccttcg

SEQ ID NO: 138111 - DNA, 25 bp, Artificial
  Probe
cgtgtagtaaataagaaagaagtgc

SEQ ID NO: 138112 - DNA, 25 bp, Artificial
  Probe
tcccgtgtagtaaataagaaagaag

SEQ ID NO: 138113 - DNA, 25 bp, Artificial
  Probe
attctggttgttggtaataatgtta

SEQ ID NO: 138114 - DNA, 25 bp, Artificial
  Probe
actgtttaactgtgtaggaatgtat

SEQ ID NO: 138115 - DNA, 25 bp, Artificial
  Probe
ccgtgtagtaaataagaaagaagtg

SEQ ID NO: 138116 - DNA, 25 bp, Artificial
  Probe
cctgctatttatatcccaatgccct

SEQ ID NO: 138117 - DNA, 25 bp, Artificial
  Probe
tattctggttgttggtaataatgtt

SEQ ID NO: 138118 - DNA, 25 bp, Artificial
  Probe
atcccgtgtagtaaataagaaagaa

SEQ ID NO: 138119 - DNA, 25 bp, Artificial
  Probe
ttaactgtgtaggaatgtatatgtg

SEQ ID NO: 138120 - DNA, 25 bp, Artificial
  Probe
cactgtttaactgtgtaggaatgta

SEQ ID NO: 138121 - DNA, 25 bp, Artificial
  Probe
gcactgtttaactgtgtaggaatgt

SEQ ID NO: 138122 - DNA, 25 bp, Artificial
  Probe
ataagaaagaagtgcagaacaggat

SEQ ID NO: 138123 - DNA, 25 bp, Artificial
  Probe
gaagtgcagaacaggattaaagaaa

SEQ ID NO: 138124 - DNA, 25 bp, Artificial
  Probe
agaagtgcagaacaggattaaagaa

SEQ ID NO: 138125 - DNA, 25 bp, Artificial
  Probe
aagaagtgcagaacaggattaaaga

SEQ ID NO: 138126 - DNA, 25 bp, Artificial
  Probe
aaagaagtgcagaacaggattaaag

SEQ ID NO: 138127 - DNA, 25 bp, Artificial
  Probe
gaaagaagtgcagaacaggattaaa

SEQ ID NO: 138128 - DNA, 25 bp, Artificial
  Probe
agaaagaagtgcagaacaggattaa

SEQ ID NO: 138129 - DNA, 25 bp, Artificial
  Probe
aagaaagaagtgcagaacaggatta

SEQ ID NO: 138130 - DNA, 25 bp, Artificial
  Probe
taagaaagaagtgcagaacaggatt

SEQ ID NO: 138131 - DNA, 25 bp, Artificial
  Probe
aataagaaagaagtgcagaacagga

SEQ ID NO: 138132 - DNA, 25 bp, Artificial
  Probe
aaataagaaagaagtgcagaacagg

SEQ ID NO: 138133 - DNA, 25 bp, Artificial
  Probe
ctggttcatgtaatgcactgtttaa

SEQ ID NO: 138134 - DNA, 25 bp, Artificial
  Probe
ggttcatgtaatgcactgtttaact

SEQ ID NO: 138135 - DNA, 25 bp, Artificial
  Probe
ttcatgtaatgcactgtttaactgt

SEQ ID NO: 138136 - DNA, 25 bp, Artificial
  Probe
tggttcatgtaatgcactgtttaac

SEQ ID NO: 138137 - DNA, 25 bp, Artificial
  Probe
tctggttcatgtaatgcactgttta

SEQ ID NO: 138138 - DNA, 25 bp, Artificial
  Probe
tatcccgtgtagtaaataagaaaga

SEQ ID NO: 138139 - DNA, 25 bp, Artificial
  Probe
cttcttcttagaggacagttacagc

SEQ ID NO: 138140 - DNA, 25 bp, Artificial
  Probe
gcttcttcttagaggacagttacag

SEQ ID NO: 138141 - DNA, 25 bp, Artificial
  Probe
ttcttcttagaggacagttacagca

SEQ ID NO: 138142 - DNA, 25 bp, Artificial
  Probe
tcttcttagaggacagttacagcag

SEQ ID NO: 138143 - DNA, 25 bp, Artificial
  Probe
cttcttagaggacagttacagcagg

SEQ ID NO: 138144 - DNA, 25 bp, Artificial
  Probe
tacagcaggcttcagttcatcataa

SEQ ID NO: 138145 - DNA, 25 bp, Artificial
  Probe
ttacagcaggcttcagttcatcata

SEQ ID NO: 138146 - DNA, 25 bp, Artificial
  Probe
attctgtagcttcttcttagaggac

SEQ ID NO: 138147 - DNA, 25 bp, Artificial
  Probe
tagcttcttcttagaggacagttac

SEQ ID NO: 138148 - DNA, 25 bp, Artificial
  Probe
gtagcttcttcttagaggacagtta

SEQ ID NO: 138149 - DNA, 25 bp, Artificial
  Probe
agcttcttcttagaggacagttaca

SEQ ID NO: 138150 - DNA, 25 bp, Artificial
  Probe
ggactgttatctacctctaactgta

SEQ ID NO: 138151 - DNA, 25 bp, Artificial
  Probe
acttgggactgttatctacctctaa

SEQ ID NO: 138152 - DNA, 25 bp, Artificial
  Probe
aattctgtagcttcttcttagagga

SEQ ID NO: 138153 - DNA, 25 bp, Artificial
  Probe
ttctgtagcttcttcttagaggaca

SEQ ID NO: 138154 - DNA, 25 bp, Artificial
  Probe
aacttgggactgttatctacctcta

SEQ ID NO: 138155 - DNA, 25 bp, Artificial
  Probe
gaaacttgggactgttatctacctc

SEQ ID NO: 138156 - DNA, 25 bp, Artificial
  Probe
tgtagcttcttcttagaggacagtt

SEQ ID NO: 138157 - DNA, 25 bp, Artificial
  Probe
aaacttgggactgttatctacctct

SEQ ID NO: 138158 - DNA, 25 bp, Artificial
  Probe
aacagacattcactgccatatataa

SEQ ID NO: 138159 - DNA, 25 bp, Artificial
  Probe
tgtatccttcaaacagacattcact

SEQ ID NO: 138160 - DNA, 25 bp, Artificial
  Probe
ggaaacttgggactgttatctacct

SEQ ID NO: 138161 - DNA, 25 bp, Artificial
  Probe
tcaaacagacattcactgccatata

SEQ ID NO: 138162 - DNA, 25 bp, Artificial
  Probe
gtatccttcaaacagacattcactg

SEQ ID NO: 138163 - DNA, 25 bp, Artificial
  Probe
gttacagcaggcttcagttcatcat

SEQ ID NO: 138164 - DNA, 25 bp, Artificial
  Probe
ttcaaacagacattcactgccatat

SEQ ID NO: 138165 - DNA, 25 bp, Artificial
  Probe
actgttatctacctctaactgtaac

SEQ ID NO: 138166 - DNA, 25 bp, Artificial
  Probe
tatccttcaaacagacattcactgc

SEQ ID NO: 138167 - DNA, 25 bp, Artificial
  Probe
ttgggactgttatctacctctaact

SEQ ID NO: 138168 - DNA, 25 bp, Artificial
  Probe
cttgggactgttatctacctctaac

SEQ ID NO: 138169 - DNA, 25 bp, Artificial
  Probe
gcactttaagtctatcagtttgttg

SEQ ID NO: 138170 - DNA, 25 bp, Artificial
  Probe
cagcaggcttcagttcatcataaca

SEQ ID NO: 138171 - DNA, 25 bp, Artificial
  Probe
acagcaggcttcagttcatcataac

SEQ ID NO: 138172 - DNA, 25 bp, Artificial
  Probe
agcactttaagtctatcagtttgtt

SEQ ID NO: 138173 - DNA, 25 bp, Artificial
  Probe
cttcaaacagacattcactgccata

SEQ ID NO: 138174 - DNA, 25 bp, Artificial
  Probe
caaacagacattcactgccatatat

SEQ ID NO: 138175 - DNA, 25 bp, Artificial
  Probe
gactgttatctacctctaactgtaa

SEQ ID NO: 138176 - DNA, 25 bp, Artificial
  Probe
gggactgttatctacctctaactgt

SEQ ID NO: 138177 - DNA, 25 bp, Artificial
  Probe
tgggactgttatctacctctaactg

SEQ ID NO: 138178 - DNA, 25 bp, Artificial
  Probe
gaattctgtagcttcttcttagagg

SEQ ID NO: 138179 - DNA, 25 bp, Artificial
  Probe
tttctatgtatccttcaaacagaca

SEQ ID NO: 138180 - DNA, 25 bp, Artificial
  Probe
ttcttagaggacagttacagcaggc

SEQ ID NO: 138181 - DNA, 25 bp, Artificial
  Probe
tgaattctgtagcttcttcttagag

SEQ ID NO: 138182 - DNA, 25 bp, Artificial
  Probe
ctgaattctgtagcttcttcttaga

SEQ ID NO: 138183 - DNA, 25 bp, Artificial
  Probe
cagttacagcaggcttcagttcatc

SEQ ID NO: 138184 - DNA, 25 bp, Artificial
  Probe
gctatgagataaccagtcagaatgt

SEQ ID NO: 138185 - DNA, 25 bp, Artificial
  Probe
atgagataaccagtcagaatgtcaa

SEQ ID NO: 138186 - DNA, 25 bp, Artificial
  Probe
tatgagataaccagtcagaatgtca

SEQ ID NO: 138187 - DNA, 25 bp, Artificial
  Probe
ctatgagataaccagtcagaatgtc

SEQ ID NO: 138188 - DNA, 25 bp, Artificial
  Probe
agctatgagataaccagtcagaatg

SEQ ID NO: 138189 - DNA, 25 bp, Artificial
  Probe
cagctatgagataaccagtcagaat

SEQ ID NO: 138190 - DNA, 25 bp, Artificial
  Probe
agataaccagtcagaatgtcaaaga

SEQ ID NO: 138191 - DNA, 25 bp, Artificial
  Probe
gagataaccagtcagaatgtcaaag

SEQ ID NO: 138192 - DNA, 25 bp, Artificial
  Probe
gaatgtcaaagatggagggagatac

SEQ ID NO: 138193 - DNA, 25 bp, Artificial
  Probe
agaatgtcaaagatggagggagata

SEQ ID NO: 138194 - DNA, 25 bp, Artificial
  Probe
ataaccagtcagaatgtcaaagatg

SEQ ID NO: 138195 - DNA, 25 bp, Artificial
  Probe
acagctatgagataaccagtcagaa

SEQ ID NO: 138196 - DNA, 25 bp, Artificial
  Probe
aaagatggagggagatacacatttg

SEQ ID NO: 138197 - DNA, 25 bp, Artificial
  Probe
caaagatggagggagatacacattt

SEQ ID NO: 138198 - DNA, 25 bp, Artificial
  Probe
tggagggagatacacatttgaagat

SEQ ID NO: 138199 - DNA, 25 bp, Artificial
  Probe
gataaccagtcagaatgtcaaagat

SEQ ID NO: 138200 - DNA, 25 bp, Artificial
  Probe
ggagggagatacacatttgaagatg

SEQ ID NO: 138201 - DNA, 25 bp, Artificial
  Probe
gatggagggagatacacatttgaag

SEQ ID NO: 138202 - DNA, 25 bp, Artificial
  Probe
tgagataaccagtcagaatgtcaaa

SEQ ID NO: 138203 - DNA, 25 bp, Artificial
  Probe
atggagggagatacacatttgaaga

SEQ ID NO: 138204 - DNA, 25 bp, Artificial
  Probe
agatggagggagatacacatttgaa

SEQ ID NO: 138205 - DNA, 25 bp, Artificial
  Probe
aagatggagggagatacacatttga

SEQ ID NO: 138206 - DNA, 25 bp, Artificial
  Probe
tcaaagatggagggagatacacatt

SEQ ID NO: 138207 - DNA, 25 bp, Artificial
  Probe
cacagctatgagataaccagtcaga

SEQ ID NO: 138208 - DNA, 25 bp, Artificial
  Probe
tcacagctatgagataaccagtcag

SEQ ID NO: 138209 - DNA, 25 bp, Artificial
  Probe
gagggagatacacatttgaagatgc

SEQ ID NO: 138210 - DNA, 25 bp, Artificial
  Probe
gagatacacatttgaagatgcccag

SEQ ID NO: 138211 - DNA, 25 bp, Artificial
  Probe
cagaatgtcaaagatggagggagat

SEQ ID NO: 138212 - DNA, 25 bp, Artificial
  Probe
gtcaaagatggagggagatacacat

SEQ ID NO: 138213 - DNA, 25 bp, Artificial
  Probe
aatgtcaaagatggagggagataca

SEQ ID NO: 138214 - DNA, 25 bp, Artificial
  Probe
ctcaagaagcaacctctacaggatg

SEQ ID NO: 138215 - DNA, 25 bp, Artificial
  Probe
gatctcaagaagcaacctctacagg

SEQ ID NO: 138216 - DNA, 25 bp, Artificial
  Probe
tctcaagaagcaacctctacaggat

SEQ ID NO: 138217 - DNA, 25 bp, Artificial
  Probe
atctcaagaagcaacctctacagga

SEQ ID NO: 138218 - DNA, 25 bp, Artificial
  Probe
aatcaacctggattctcacagctat

SEQ ID NO: 138219 - DNA, 25 bp, Artificial
  Probe
atgtcaaagatggagggagatacac

SEQ ID NO: 138220 - DNA, 25 bp, Artificial
  Probe
atcaacctggattctcacagctatg

SEQ ID NO: 138221 - DNA, 25 bp, Artificial
  Probe
caagatctcaagaagcaacctctac

SEQ ID NO: 138222 - DNA, 25 bp, Artificial
  Probe
taaccagtcagaatgtcaaagatgg

SEQ ID NO: 138223 - DNA, 25 bp, Artificial
  Probe
agggagatacacatttgaagatgcc

SEQ ID NO: 138224 - DNA, 25 bp, Artificial
  Probe
gtcagaatgtcaaagatggagggag

SEQ ID NO: 138225 - DNA, 25 bp, Artificial
  Probe
aagatctcaagaagcaacctctaca

SEQ ID NO: 138226 - DNA, 25 bp, Artificial
  Probe
caagaagcaacctctacaggatgtg

SEQ ID NO: 138227 - DNA, 25 bp, Artificial
  Probe
tcagaatgtcaaagatggagggaga

SEQ ID NO: 138228 - DNA, 25 bp, Artificial
  Probe
atacacatttgaagatgcccaggag

SEQ ID NO: 138229 - DNA, 25 bp, Artificial
  Probe
ggatcaacattgacagcagaacaat

SEQ ID NO: 138230 - DNA, 25 bp, Artificial
  Probe
tggatcaacattgacagcagaacaa

SEQ ID NO: 138231 - DNA, 25 bp, Artificial
  Probe
ctggatcaacattgacagcagaaca

SEQ ID NO: 138232 - DNA, 25 bp, Artificial
  Probe
ctatgtcctagatgcagcacaactg

SEQ ID NO: 138233 - DNA, 25 bp, Artificial
  Probe
attgacagcagaacaatggagtgga

SEQ ID NO: 138234 - DNA, 25 bp, Artificial
  Probe
gctatgtcctagatgcagcacaact

SEQ ID NO: 138235 - DNA, 25 bp, Artificial
  Probe
ggactctgtttaccagcagttcctg

SEQ ID NO: 138236 - DNA, 25 bp, Artificial
  Probe
gactctgtttaccagcagttcctgg

SEQ ID NO: 138237 - DNA, 25 bp, Artificial
  Probe
acctcatctcctgtatcctcattaa

SEQ ID NO: 138238 - DNA, 25 bp, Artificial
  Probe
cacctcatctcctgtatcctcatta

SEQ ID NO: 138239 - DNA, 25 bp, Artificial
  Probe
catctggaagtgagagttcattgtt

SEQ ID NO: 138240 - DNA, 25 bp, Artificial
  Probe
cctcatctcctgtatcctcattaat

SEQ ID NO: 138241 - DNA, 25 bp, Artificial
  Probe
atacacagagctagagtacatccat

SEQ ID NO: 138242 - DNA, 25 bp, Artificial
  Probe
aatacacagagctagagtacatcca

SEQ ID NO: 138243 - DNA, 25 bp, Artificial
  Probe
tacacagagctagagtacatccatg

SEQ ID NO: 138244 - DNA, 25 bp, Artificial
  Probe
caacacaagttccagtacatcttcg

SEQ ID NO: 138245 - DNA, 25 bp, Artificial
  Probe
gttcattgtttccactatctcatcc

SEQ ID NO: 138246 - DNA, 25 bp, Artificial
  Probe
ttcattgtttccactatctcatccc

SEQ ID NO: 138247 - DNA, 25 bp, Artificial
  Probe
attgtttccactatctcatccctct

SEQ ID NO: 138248 - DNA, 25 bp, Artificial
  Probe
cattgtttccactatctcatccctc

SEQ ID NO: 138249 - DNA, 25 bp, Artificial
  Probe
gcaacacaagttccagtacatcttc

SEQ ID NO: 138250 - DNA, 25 bp, Artificial
  Probe
tcattgtttccactatctcatccct

SEQ ID NO: 138251 - DNA, 25 bp, Artificial
  Probe
agagactcaaggagatcatctgtga

SEQ ID NO: 138252 - DNA, 25 bp, Artificial
  Probe
acacctcatctcctgtatcctcatt

SEQ ID NO: 138253 - DNA, 25 bp, Artificial
  Probe
atctggaagtgagagttcattgttt

SEQ ID NO: 138254 - DNA, 25 bp, Artificial
  Probe
tgagagttcattgtttccactatct

SEQ ID NO: 138255 - DNA, 25 bp, Artificial
  Probe
agcaacacaagttccagtacatctt

SEQ ID NO: 138256 - DNA, 25 bp, Artificial
  Probe
ttgtttccactatctcatccctctg

SEQ ID NO: 138257 - DNA, 25 bp, Artificial
  Probe
agagttcattgtttccactatctca

SEQ ID NO: 138258 - DNA, 25 bp, Artificial
  Probe
tctggaagtgagagttcattgtttc

SEQ ID NO: 138259 - DNA, 25 bp, Artificial
  Probe
gcatctggaagtgagagttcattgt

SEQ ID NO: 138260 - DNA, 25 bp, Artificial
  Probe
gacacctcatctcctgtatcctcat

SEQ ID NO: 138261 - DNA, 25 bp, Artificial
  Probe
agttcattgtttccactatctcatc

SEQ ID NO: 138262 - DNA, 25 bp, Artificial
  Probe
aacacaagttccagtacatcttcga

SEQ ID NO: 138263 - DNA, 25 bp, Artificial
  Probe
gagttcattgtttccactatctcat

SEQ ID NO: 138264 - DNA, 25 bp, Artificial
  Probe
caatgtggaaagcatggattatgac

SEQ ID NO: 138265 - DNA, 25 bp, Artificial
  Probe
aagcatggattatgaccctttagtg

SEQ ID NO: 138266 - DNA, 25 bp, Artificial
  Probe
gtgagagttcattgtttccactatc

SEQ ID NO: 138267 - DNA, 25 bp, Artificial
  Probe
tcttcagcagaatttgaccaacatc

SEQ ID NO: 138268 - DNA, 25 bp, Artificial
  Probe
cagcaacacaagttccagtacatct

SEQ ID NO: 138269 - DNA, 25 bp, Artificial
  Probe
aaatacacagagctagagtacatcc

SEQ ID NO: 138270 - DNA, 25 bp, Artificial
  Probe
cttcagcagaatttgaccaacatca

SEQ ID NO: 138271 - DNA, 25 bp, Artificial
  Probe
aatgtggaaagcatggattatgacc

SEQ ID NO: 138272 - DNA, 25 bp, Artificial
  Probe
tgaaatacacagagctagagtacat

SEQ ID NO: 138273 - DNA, 25 bp, Artificial
  Probe
ttcagcagaatttgaccaacatcac

SEQ ID NO: 138274 - DNA, 25 bp, Artificial
  Probe
ttgcatctggaagtgagagttcatt

SEQ ID NO: 138275 - DNA, 25 bp, Artificial
  Probe
gaaatacacagagctagagtacatc

SEQ ID NO: 138276 - DNA, 25 bp, Artificial
  Probe
agcatggattatgaccctttagtgg

SEQ ID NO: 138277 - DNA, 25 bp, Artificial
  Probe
cttgcatctggaagtgagagttcat

SEQ ID NO: 138278 - DNA, 25 bp, Artificial
  Probe
gtgaaatacacagagctagagtaca

SEQ ID NO: 138279 - DNA, 25 bp, Artificial
  Probe
aaagcatggattatgaccctttagt

SEQ ID NO: 138280 - DNA, 25 bp, Artificial
  Probe
tgcatctggaagtgagagttcattg

SEQ ID NO: 138281 - DNA, 25 bp, Artificial
  Probe
gaaagcatggattatgaccctttag

SEQ ID NO: 138282 - DNA, 25 bp, Artificial
  Probe
tggctttcctattgtcactgtatta

SEQ ID NO: 138283 - DNA, 25 bp, Artificial
  Probe
tttactttgtggctttcctattgtc

SEQ ID NO: 138284 - DNA, 25 bp, Artificial
  Probe
ctttactttgtggctttcctattgt

SEQ ID NO: 138285 - DNA, 25 bp, Artificial
  Probe
tgtctttactttgtggctttcctat

SEQ ID NO: 138286 - DNA, 25 bp, Artificial
  Probe
tctttactttgtggctttcctattg

SEQ ID NO: 138287 - DNA, 25 bp, Artificial
  Probe
gtctttactttgtggctttcctatt

SEQ ID NO: 138288 - DNA, 25 bp, Artificial
  Probe
ttactttgtggctttcctattgtca

SEQ ID NO: 138289 - DNA, 25 bp, Artificial
  Probe
tttcctccctattaaagtcttgctc

SEQ ID NO: 138290 - DNA, 25 bp, Artificial
  Probe
gtgtctttactttgtggctttccta

SEQ ID NO: 138291 - DNA, 25 bp, Artificial
  Probe
ggctttcctattgtcactgtattaa

SEQ ID NO: 138292 - DNA, 25 bp, Artificial
  Probe
tcagcaaatatccagacatcagaga

SEQ ID NO: 138293 - DNA, 25 bp, Artificial
  Probe
ttcctccctattaaagtcttgctcc

SEQ ID NO: 138294 - DNA, 25 bp, Artificial
  Probe
ctgtcctgtgtgtctttactttgtg

SEQ ID NO: 138295 - DNA, 25 bp, Artificial
  Probe
tgtgtgtctttactttgtggctttc

SEQ ID NO: 138296 - DNA, 25 bp, Artificial
  Probe
ctgtgtgtctttactttgtggcttt

SEQ ID NO: 138297 - DNA, 25 bp, Artificial
  Probe
ctccctattaaagtcttgctccact

SEQ ID NO: 138298 - DNA, 25 bp, Artificial
  Probe
gtcagcaaatatccagacatcagag

SEQ ID NO: 138299 - DNA, 25 bp, Artificial
  Probe
gtggctttcctattgtcactgtatt

SEQ ID NO: 138300 - DNA, 25 bp, Artificial
  Probe
tactttgtggctttcctattgtcac

SEQ ID NO: 138301 - DNA, 25 bp, Artificial
  Probe
cctccctattaaagtcttgctccac

SEQ ID NO: 138302 - DNA, 25 bp, Artificial
  Probe
tcctccctattaaagtcttgctcca

SEQ ID NO: 138303 - DNA, 25 bp, Artificial
  Probe
gctttcctattgtcactgtattaaa

SEQ ID NO: 138304 - DNA, 25 bp, Artificial
  Probe
tgtgtctttactttgtggctttcct

SEQ ID NO: 138305 - DNA, 25 bp, Artificial
  Probe
gtgtgtctttactttgtggctttcc

SEQ ID NO: 138306 - DNA, 25 bp, Artificial
  Probe
tgtggctttcctattgtcactgtat

SEQ ID NO: 138307 - DNA, 25 bp, Artificial
  Probe
ttgtggctttcctattgtcactgta

SEQ ID NO: 138308 - DNA, 25 bp, Artificial
  Probe
ggtcagcaaatatccagacatcaga

SEQ ID NO: 138309 - DNA, 25 bp, Artificial
  Probe
tgtcctgtgtgtctttactttgtgg

SEQ ID NO: 138310 - DNA, 25 bp, Artificial
  Probe
ctgctgtcctgtgtgtctttacttt

SEQ ID NO: 138311 - DNA, 25 bp, Artificial
  Probe
gacttgtgtggcatctctactgtga

SEQ ID NO: 138312 - DNA, 25 bp, Artificial
  Probe
ctgacttgtgtggcatctctactgt

SEQ ID NO: 138313 - DNA, 25 bp, Artificial
  Probe
ttcctgacttgtgtggcatctctac

SEQ ID NO: 138314 - DNA, 25 bp, Artificial
  Probe
gttcctgacttgtgtggcatctcta

SEQ ID NO: 138315 - DNA, 25 bp, Artificial
  Probe
ctttgtggctttcctattgtcactg

SEQ ID NO: 138316 - DNA, 25 bp, Artificial
  Probe
gctgtcctgtgtgtctttactttgt

SEQ ID NO: 138317 - DNA, 25 bp, Artificial
  Probe
ttttcctccctattaaagtcttgct

SEQ ID NO: 138318 - DNA, 25 bp, Artificial
  Probe
tgacttgtgtggcatctctactgtg

SEQ ID NO: 138319 - DNA, 25 bp, Artificial
  Probe
tgctgtcctgtgtgtctttactttg

SEQ ID NO: 138320 - DNA, 25 bp, Artificial
  Probe
actttgtggctttcctattgtcact

SEQ ID NO: 138321 - DNA, 25 bp, Artificial
  Probe
ccctattaaagtcttgctccactta

SEQ ID NO: 138322 - DNA, 25 bp, Artificial
  Probe
acttgtgtggcatctctactgtgag

SEQ ID NO: 138323 - DNA, 25 bp, Artificial
  Probe
tttgtggctttcctattgtcactgt

SEQ ID NO: 138324 - DNA, 25 bp, Artificial
  Probe
cctgtgtgtctttactttgtggctt

SEQ ID NO: 138325 - DNA, 25 bp, Artificial
  Probe
tggtcagcaaatatccagacatcag

SEQ ID NO: 138326 - DNA, 25 bp, Artificial
  Probe
tccctattaaagtcttgctccactt

SEQ ID NO: 138327 - DNA, 25 bp, Artificial
  Probe
tgtatatagttcatgctgctaaggt

SEQ ID NO: 138328 - DNA, 25 bp, Artificial
  Probe
gtgtatatagttcatgctgctaagg

SEQ ID NO: 138329 - DNA, 25 bp, Artificial
  Probe
agtgtatatagttcatgctgctaag

SEQ ID NO: 138330 - DNA, 25 bp, Artificial
  Probe
atatagttcatgctgctaaggtatg

SEQ ID NO: 138331 - DNA, 25 bp, Artificial
  Probe
aagtgtatatagttcatgctgctaa

SEQ ID NO: 138332 - DNA, 25 bp, Artificial
  Probe
gtatatagttcatgctgctaaggta

SEQ ID NO: 138333 - DNA, 25 bp, Artificial
  Probe
tatactcttcagaactgggaacttc

SEQ ID NO: 138334 - DNA, 25 bp, Artificial
  Probe
ctatactcttcagaactgggaactt

SEQ ID NO: 138335 - DNA, 25 bp, Artificial
  Probe
gtattccttgctaaatcccgtttaa

SEQ ID NO: 138336 - DNA, 25 bp, Artificial
  Probe
attcacagacatggctaaggaagac

SEQ ID NO: 138337 - DNA, 25 bp, Artificial
  Probe
cattcacagacatggctaaggaaga

SEQ ID NO: 138338 - DNA, 25 bp, Artificial
  Probe
ggtattccttgctaaatcccgttta

SEQ ID NO: 138339 - DNA, 25 bp, Artificial
  Probe
atactcttcagaactgggaacttca

SEQ ID NO: 138340 - DNA, 25 bp, Artificial
  Probe
ggtagagagaaagggtacagattta

SEQ ID NO: 138341 - DNA, 25 bp, Artificial
  Probe
gctatactcttcagaactgggaact

SEQ ID NO: 138342 - DNA, 25 bp, Artificial
  Probe
gggtagagagaaagggtacagattt

SEQ ID NO: 138343 - DNA, 25 bp, Artificial
  Probe
agaactgggaacttcagaactaatt

SEQ ID NO: 138344 - DNA, 25 bp, Artificial
  Probe
cagaactgggaacttcagaactaat

SEQ ID NO: 138345 - DNA, 25 bp, Artificial
  Probe
atagttcatgctgctaaggtatgag

SEQ ID NO: 138346 - DNA, 25 bp, Artificial
  Probe
gaactgggaacttcagaactaattt

SEQ ID NO: 138347 - DNA, 25 bp, Artificial
  Probe
tatatagttcatgctgctaaggtat

SEQ ID NO: 138348 - DNA, 25 bp, Artificial
  Probe
tatagttcatgctgctaaggtatga

SEQ ID NO: 138349 - DNA, 25 bp, Artificial
  Probe
tcagaactgggaacttcagaactaa

SEQ ID NO: 138350 - DNA, 25 bp, Artificial
  Probe
ttcagaactgggaacttcagaacta

SEQ ID NO: 138351 - DNA, 25 bp, Artificial
  Probe
cacagacatggctaaggaagacaag

SEQ ID NO: 138352 - DNA, 25 bp, Artificial
  Probe
tactcttcagaactgggaacttcag

SEQ ID NO: 138353 - DNA, 25 bp, Artificial
  Probe
tgggtagagagaaagggtacagatt

SEQ ID NO: 138354 - DNA, 25 bp, Artificial
  Probe
attccttgctaaatcccgtttaaat

SEQ ID NO: 138355 - DNA, 25 bp, Artificial
  Probe
tagttcatgctgctaaggtatgagg

SEQ ID NO: 138356 - DNA, 25 bp, Artificial
  Probe
tcacagacatggctaaggaagacaa

SEQ ID NO: 138357 - DNA, 25 bp, Artificial
  Probe
ctcttcagaactgggaacttcagaa

SEQ ID NO: 138358 - DNA, 25 bp, Artificial
  Probe
tacctcccagctatactcttcagaa

SEQ ID NO: 138359 - DNA, 25 bp, Artificial
  Probe
agctatactcttcagaactgggaac

SEQ ID NO: 138360 - DNA, 25 bp, Artificial
  Probe
ttccttgctaaatcccgtttaaata

SEQ ID NO: 138361 - DNA, 25 bp, Artificial
  Probe
tattccttgctaaatcccgtttaaa

SEQ ID NO: 138362 - DNA, 25 bp, Artificial
  Probe
ttcacagacatggctaaggaagaca

SEQ ID NO: 138363 - DNA, 25 bp, Artificial
  Probe
agagagaaagggtacagatttattt

SEQ ID NO: 138364 - DNA, 25 bp, Artificial
  Probe
tccttgctaaatcccgtttaaatat

SEQ ID NO: 138365 - DNA, 25 bp, Artificial
  Probe
cttcagaactgggaacttcagaact

SEQ ID NO: 138366 - DNA, 25 bp, Artificial
  Probe
aggtattccttgctaaatcccgttt

SEQ ID NO: 138367 - DNA, 25 bp, Artificial
  Probe
gtagagagaaagggtacagatttat

SEQ ID NO: 138368 - DNA, 25 bp, Artificial
  Probe
tcttcagaactgggaacttcagaac

SEQ ID NO: 138369 - DNA, 25 bp, Artificial
  Probe
ctacctcccagctatactcttcaga

SEQ ID NO: 138370 - DNA, 25 bp, Artificial
  Probe
atcctacctcccagctatactcttc

SEQ ID NO: 138371 - DNA, 25 bp, Artificial
  Probe
cagctatactcttcagaactgggaa

SEQ ID NO: 138372 - DNA, 25 bp, Artificial
  Probe
catccaacaacaagaacagcaatag

SEQ ID NO: 138373 - DNA, 25 bp, Artificial
  Probe
atccaacaacaagaacagcaatagc

SEQ ID NO: 138374 - DNA, 25 bp, Artificial
  Probe
gcatccaacaacaagaacagcaata

SEQ ID NO: 138375 - DNA, 25 bp, Artificial
  Probe
aacaacaagaacagcaatagcgatg

SEQ ID NO: 138376 - DNA, 25 bp, Artificial
  Probe
caacaacaagaacagcaatagcgat

SEQ ID NO: 138377 - DNA, 25 bp, Artificial
  Probe
ctttacccttgttcctccttcattt

SEQ ID NO: 138378 - DNA, 25 bp, Artificial
  Probe
tttacccttgttcctccttcatttg

SEQ ID NO: 138379 - DNA, 25 bp, Artificial
  Probe
actttacccttgttcctccttcatt

SEQ ID NO: 138380 - DNA, 25 bp, Artificial
  Probe
ttacccttgttcctccttcatttga

SEQ ID NO: 138381 - DNA, 25 bp, Artificial
  Probe
cactttacccttgttcctccttcat

SEQ ID NO: 138382 - DNA, 25 bp, Artificial
  Probe
ttaaagctggaaatgaaacgacaaa

SEQ ID NO: 138383 - DNA, 25 bp, Artificial
  Probe
cttaaagctggaaatgaaacgacaa

SEQ ID NO: 138384 - DNA, 25 bp, Artificial
  Probe
tacccttgttcctccttcatttgac

SEQ ID NO: 138385 - DNA, 25 bp, Artificial
  Probe
ttgttcctccttcatttgacctcag

SEQ ID NO: 138386 - DNA, 25 bp, Artificial
  Probe
cttgttcctccttcatttgacctca

SEQ ID NO: 138387 - DNA, 25 bp, Artificial
  Probe
acaacaagaacagcaatagcgatgg

SEQ ID NO: 138388 - DNA, 25 bp, Artificial
  Probe
ccttaaagctggaaatgaaacgaca

SEQ ID NO: 138389 - DNA, 25 bp, Artificial
  Probe
ccaacaacaagaacagcaatagcga

SEQ ID NO: 138390 - DNA, 25 bp, Artificial
  Probe
tccaacaacaagaacagcaatagcg

SEQ ID NO: 138391 - DNA, 25 bp, Artificial
  Probe
gttcctccttcatttgacctcagtg

SEQ ID NO: 138392 - DNA, 25 bp, Artificial
  Probe
ccttgttcctccttcatttgacctc

SEQ ID NO: 138393 - DNA, 25 bp, Artificial
  Probe
tcatttgacctcagtgtgaagacag

SEQ ID NO: 138394 - DNA, 25 bp, Artificial
  Probe
atttgacctcagtgtgaagacagtg

SEQ ID NO: 138395 - DNA, 25 bp, Artificial
  Probe
catttgacctcagtgtgaagacagt

SEQ ID NO: 138396 - DNA, 25 bp, Artificial
  Probe
tggaaatgaaacgacaaaagcaaaa

SEQ ID NO: 138397 - DNA, 25 bp, Artificial
  Probe
ttcctccttcatttgacctcagtgt

SEQ ID NO: 138398 - DNA, 25 bp, Artificial
  Probe
tgttcctccttcatttgacctcagt

SEQ ID NO: 138399 - DNA, 25 bp, Artificial
  Probe
ctggaaatgaaacgacaaaagcaaa

SEQ ID NO: 138400 - DNA, 25 bp, Artificial
  Probe
gaagaaagtgcctggagccttaaag

SEQ ID NO: 138401 - DNA, 25 bp, Artificial
  Probe
gccttaaagctggaaatgaaacgac

SEQ ID NO: 138402 - DNA, 25 bp, Artificial
  Probe
taaagctggaaatgaaacgacaaaa

SEQ ID NO: 138403 - DNA, 25 bp, Artificial
  Probe
tcctccttcatttgacctcagtgtg

SEQ ID NO: 138404 - DNA, 25 bp, Artificial
  Probe
ttcatttgacctcagtgtgaagaca

SEQ ID NO: 138405 - DNA, 25 bp, Artificial
  Probe
aaagctggaaatgaaacgacaaaag

SEQ ID NO: 138406 - DNA, 25 bp, Artificial
  Probe
ctaccaagaaggcagctccatctac

SEQ ID NO: 138407 - DNA, 25 bp, Artificial
  Probe
cctccttcatttgacctcagtgtga

SEQ ID NO: 138408 - DNA, 25 bp, Artificial
  Probe
ctccttcatttgacctcagtgtgaa

SEQ ID NO: 138409 - DNA, 25 bp, Artificial
  Probe
tgaagaaagtgcctggagccttaaa

SEQ ID NO: 138410 - DNA, 25 bp, Artificial
  Probe
ttgaagaaagtgcctggagccttaa

SEQ ID NO: 138411 - DNA, 25 bp, Artificial
  Probe
cccttgttcctccttcatttgacct

SEQ ID NO: 138412 - DNA, 25 bp, Artificial
  Probe
ggagccttaaagctggaaatgaaac

SEQ ID NO: 138413 - DNA, 25 bp, Artificial
  Probe
gcactttacccttgttcctccttca

SEQ ID NO: 138414 - DNA, 25 bp, Artificial
  Probe
ctttctcttagacctcaggggacat

SEQ ID NO: 138415 - DNA, 25 bp, Artificial
  Probe
tggagccttaaagctggaaatgaaa

SEQ ID NO: 138416 - DNA, 25 bp, Artificial
  Probe
acccttgttcctccttcatttgacc

SEQ ID NO: 138417 - DNA, 25 bp, Artificial
  Probe
aatagcactgatggtagaattggtc

SEQ ID NO: 138418 - DNA, 25 bp, Artificial
  Probe
gttacaatagcactgatggtagaat

SEQ ID NO: 138419 - DNA, 25 bp, Artificial
  Probe
ctgatggtagaattggtctgtagta

SEQ ID NO: 138420 - DNA, 25 bp, Artificial
  Probe
cactgatggtagaattggtctgtag

SEQ ID NO: 138421 - DNA, 25 bp, Artificial
  Probe
gttgaagttacaatagcactgatgg

SEQ ID NO: 138422 - DNA, 25 bp, Artificial
  Probe
tgaagttacaatagcactgatggta

SEQ ID NO: 138423 - DNA, 25 bp, Artificial
  Probe
ttgaagttacaatagcactgatggt

SEQ ID NO: 138424 - DNA, 25 bp, Artificial
  Probe
agttacaatagcactgatggtagaa

SEQ ID NO: 138425 - DNA, 25 bp, Artificial
  Probe
aagttacaatagcactgatggtaga

SEQ ID NO: 138426 - DNA, 25 bp, Artificial
  Probe
gaagttacaatagcactgatggtag

SEQ ID NO: 138427 - DNA, 25 bp, Artificial
  Probe
attccatagtcagcagttactctaa

SEQ ID NO: 138428 - DNA, 25 bp, Artificial
  Probe
actgatggtagaattggtctgtagt

SEQ ID NO: 138429 - DNA, 25 bp, Artificial
  Probe
tgatggtagaattggtctgtagtat

SEQ ID NO: 138430 - DNA, 25 bp, Artificial
  Probe
atagcactgatggtagaattggtct

SEQ ID NO: 138431 - DNA, 25 bp, Artificial
  Probe
cctattccatagtcagcagttactc

SEQ ID NO: 138432 - DNA, 25 bp, Artificial
  Probe
tgttgaagttacaatagcactgatg

SEQ ID NO: 138433 - DNA, 25 bp, Artificial
  Probe
ctattccatagtcagcagttactct

SEQ ID NO: 138434 - DNA, 25 bp, Artificial
  Probe
aatgttgaagttacaatagcactga

SEQ ID NO: 138435 - DNA, 25 bp, Artificial
  Probe
ttacaatagcactgatggtagaatt

SEQ ID NO: 138436 - DNA, 25 bp, Artificial
  Probe
atgttgaagttacaatagcactgat

SEQ ID NO: 138437 - DNA, 25 bp, Artificial
  Probe
tattccatagtcagcagttactcta

SEQ ID NO: 138438 - DNA, 25 bp, Artificial
  Probe
aagcctattccatagtcagcagtta

SEQ ID NO: 138439 - DNA, 25 bp, Artificial
  Probe
atgtaagattgctcatgttcaagtt

SEQ ID NO: 138440 - DNA, 25 bp, Artificial
  Probe
tgttatgtaagattgctcatgttca

SEQ ID NO: 138441 - DNA, 25 bp, Artificial
  Probe
tagcactgatggtagaattggtctg

SEQ ID NO: 138442 - DNA, 25 bp, Artificial
  Probe
aagattgctcatgttcaagttagat

SEQ ID NO: 138443 - DNA, 25 bp, Artificial
  Probe
tgtaagattgctcatgttcaagtta

SEQ ID NO: 138444 - DNA, 25 bp, Artificial
  Probe
gcactgatggtagaattggtctgta

SEQ ID NO: 138445 - DNA, 25 bp, Artificial
  Probe
tgctcatgttcaagttagatattgt

SEQ ID NO: 138446 - DNA, 25 bp, Artificial
  Probe
tatgtaagattgctcatgttcaagt

SEQ ID NO: 138447 - DNA, 25 bp, Artificial
  Probe
gcctattccatagtcagcagttact

SEQ ID NO: 138448 - DNA, 25 bp, Artificial
  Probe
agcctattccatagtcagcagttac

SEQ ID NO: 138449 - DNA, 25 bp, Artificial
  Probe
gtaagattgctcatgttcaagttag

SEQ ID NO: 138450 - DNA, 25 bp, Artificial
  Probe
ccctttaccaaacatttccatttct

SEQ ID NO: 138451 - DNA, 25 bp, Artificial
  Probe
accctttaccaaacatttccatttc

SEQ ID NO: 138452 - DNA, 25 bp, Artificial
  Probe
aaccctttaccaaacatttccattt

SEQ ID NO: 138453 - DNA, 25 bp, Artificial
  Probe
taagattgctcatgttcaagttaga

SEQ ID NO: 138454 - DNA, 25 bp, Artificial
  Probe
ataatgtctatatcaccaggttacc

SEQ ID NO: 138455 - DNA, 25 bp, Artificial
  Probe
ttgttatgtaagattgctcatgttc

SEQ ID NO: 138456 - DNA, 25 bp, Artificial
  Probe
gattaaatgtcccaacttcctttca

SEQ ID NO: 138457 - DNA, 25 bp, Artificial
  Probe
gaaccctttaccaaacatttccatt

SEQ ID NO: 138458 - DNA, 25 bp, Artificial
  Probe
agattgctcatgttcaagttagata

SEQ ID NO: 138459 - DNA, 25 bp, Artificial
  Probe
agattaaatgtcccaacttcctttc

SEQ ID NO: 138460 - DNA, 25 bp, Artificial
  Probe
gttatgtaagattgctcatgttcaa

SEQ ID NO: 138461 - DNA, 25 bp, Artificial
  Probe
ttaaatgtcccaacttcctttcaat

SEQ ID NO: 138462 - DNA, 25 bp, Artificial
  Probe
taatgaagcagacttggatgaagag

SEQ ID NO: 138463 - DNA, 25 bp, Artificial
  Probe
ctaatgaagcagacttggatgaaga

SEQ ID NO: 138464 - DNA, 25 bp, Artificial
  Probe
gattctctacgccacatatatccaa

SEQ ID NO: 138465 - DNA, 25 bp, Artificial
  Probe
gatctgaatcctgaacaagtctgac

SEQ ID NO: 138466 - DNA, 25 bp, Artificial
  Probe
cagattctctacgccacatatatcc

SEQ ID NO: 138467 - DNA, 25 bp, Artificial
  Probe
agattctctacgccacatatatcca

SEQ ID NO: 138468 - DNA, 25 bp, Artificial
  Probe
gaactgattccgtacctagtaagaa

SEQ ID NO: 138469 - DNA, 25 bp, Artificial
  Probe
ttgaagaagtcatcgtggttacaac

SEQ ID NO: 138470 - DNA, 25 bp, Artificial
  Probe
gcagattctctacgccacatatatc

SEQ ID NO: 138471 - DNA, 25 bp, Artificial
  Probe
atgctcatctctactgcttgaagaa

SEQ ID NO: 138472 - DNA, 25 bp, Artificial
  Probe
atctgaatcctgaacaagtctgacc

SEQ ID NO: 138473 - DNA, 25 bp, Artificial
  Probe
taactgttaccaactgccttctcat

SEQ ID NO: 138474 - DNA, 25 bp, Artificial
  Probe
cgaactgattccgtacctagtaaga

SEQ ID NO: 138475 - DNA, 25 bp, Artificial
  Probe
catcacttgccatgttaatgaggaa

SEQ ID NO: 138476 - DNA, 25 bp, Artificial
  Probe
ctgcttgaagaaatatgttgtggat

SEQ ID NO: 138477 - DNA, 25 bp, Artificial
  Probe
cccacctgtttgactctgtatttat

SEQ ID NO: 138478 - DNA, 25 bp, Artificial
  Probe
tactgcttgaagaaatatgttgtgg

SEQ ID NO: 138479 - DNA, 25 bp, Artificial
  Probe
tgcttgaagaaatatgttgtggatt

SEQ ID NO: 138480 - DNA, 25 bp, Artificial
  Probe
tgaaattgaagccagatattgtgtg

SEQ ID NO: 138481 - DNA, 25 bp, Artificial
  Probe
gataacagatgttgccttacacgag

SEQ ID NO: 138482 - DNA, 25 bp, Artificial
  Probe
ccacctgtttgactctgtatttatt

SEQ ID NO: 138483 - DNA, 25 bp, Artificial
  Probe
actgcttgaagaaatatgttgtgga

SEQ ID NO: 138484 - DNA, 25 bp, Artificial
  Probe
gatgctcatctctactgcttgaaga

SEQ ID NO: 138485 - DNA, 25 bp, Artificial
  Probe
atgaaattgaagccagatattgtgt

SEQ ID NO: 138486 - DNA, 25 bp, Artificial
  Probe
agatattgtgtgcattcctgatgag

SEQ ID NO: 138487 - DNA, 25 bp, Artificial
  Probe
attgaagccagatattgtgtgcatt

SEQ ID NO: 138488 - DNA, 25 bp, Artificial
  Probe
aattgaagccagatattgtgtgcat

SEQ ID NO: 138489 - DNA, 25 bp, Artificial
  Probe
gaaattgaagccagatattgtgtgc

SEQ ID NO: 138490 - DNA, 25 bp, Artificial
  Probe
gatgaaattgaagccagatattgtg

SEQ ID NO: 138491 - DNA, 25 bp, Artificial
  Probe
agatgaaattgaagccagatattgt

SEQ ID NO: 138492 - DNA, 25 bp, Artificial
  Probe
gcccaagtctttagatatttacagt

SEQ ID NO: 138493 - DNA, 25 bp, Artificial
  Probe
gttaatgaggaaaggacaagagagc

SEQ ID NO: 138494 - DNA, 25 bp, Artificial
  Probe
gatttgaagaagtcatcgtggttac

SEQ ID NO: 138495 - DNA, 25 bp, Artificial
  Probe
ctactgcttgaagaaatatgttgtg

SEQ ID NO: 138496 - DNA, 25 bp, Artificial
  Probe
ctgataacagatgttgccttacacg

SEQ ID NO: 138497 - DNA, 25 bp, Artificial
  Probe
atttgaagaagtcatcgtggttaca

SEQ ID NO: 138498 - DNA, 25 bp, Artificial
  Probe
ttaatgaggaaaggacaagagagca

SEQ ID NO: 138499 - DNA, 25 bp, Artificial
  Probe
tgataacagatgttgccttacacga

SEQ ID NO: 138500 - DNA, 25 bp, Artificial
  Probe
attctctacgccacatatatccaaa

SEQ ID NO: 138501 - DNA, 25 bp, Artificial
  Probe
gctcatctctactgcttgaagaaat

SEQ ID NO: 138502 - DNA, 25 bp, Artificial
  Probe
tgcagattctctacgccacatatat

SEQ ID NO: 138503 - DNA, 25 bp, Artificial
  Probe
tttgaagaagtcatcgtggttacaa

SEQ ID NO: 138504 - DNA, 25 bp, Artificial
  Probe
agcccaagtctttagatatttacag

SEQ ID NO: 138505 - DNA, 25 bp, Artificial
  Probe
ggatttgaagaagtcatcgtggtta

SEQ ID NO: 138506 - DNA, 25 bp, Artificial
  Probe
tctactgcttgaagaaatatgttgt

SEQ ID NO: 138507 - DNA, 25 bp, Artificial
  Probe
gagcattgaatacagaagacagaac

SEQ ID NO: 138508 - DNA, 25 bp, Artificial
  Probe
agagcattgaatacagaagacagaa

SEQ ID NO: 138509 - DNA, 25 bp, Artificial
  Probe
gttgagagcattgaatacagaagac

SEQ ID NO: 138510 - DNA, 25 bp, Artificial
  Probe
ttgagagcattgaatacagaagaca

SEQ ID NO: 138511 - DNA, 25 bp, Artificial
  Probe
gagagcattgaatacagaagacaga

SEQ ID NO: 138512 - DNA, 25 bp, Artificial
  Probe
tgagagcattgaatacagaagacag

SEQ ID NO: 138513 - DNA, 25 bp, Artificial
  Probe
aaggattgaaggaatgctatgtgtt

SEQ ID NO: 138514 - DNA, 25 bp, Artificial
  Probe
agcattgaatacagaagacagaacc

SEQ ID NO: 138515 - DNA, 25 bp, Artificial
  Probe
gaaggattgaaggaatgctatgtgt

SEQ ID NO: 138516 - DNA, 25 bp, Artificial
  Probe
gaatctcaacacatcgtatccactg

SEQ ID NO: 138517 - DNA, 25 bp, Artificial
  Probe
aacgaatatatgaaccactggatgt

SEQ ID NO: 138518 - DNA, 25 bp, Artificial
  Probe
ttgaacgaatatatgaaccactgga

SEQ ID NO: 138519 - DNA, 25 bp, Artificial
  Probe
tgaacgaatatatgaaccactggat

SEQ ID NO: 138520 - DNA, 25 bp, Artificial
  Probe
ggaaggattgaaggaatgctatgtg

SEQ ID NO: 138521 - DNA, 25 bp, Artificial
  Probe
gaacgaatatatgaaccactggatg

SEQ ID NO: 138522 - DNA, 25 bp, Artificial
  Probe
acgaatatatgaaccactggatgtc

SEQ ID NO: 138523 - DNA, 25 bp, Artificial
  Probe
tgttgagagcattgaatacagaaga

SEQ ID NO: 138524 - DNA, 25 bp, Artificial
  Probe
ttgttgagagcattgaatacagaag

SEQ ID NO: 138525 - DNA, 25 bp, Artificial
  Probe
cattgttgagagcattgaatacaga

SEQ ID NO: 138526 - DNA, 25 bp, Artificial
  Probe
ccattgttgagagcattgaatacag

SEQ ID NO: 138527 - DNA, 25 bp, Artificial
  Probe
attgttgagagcattgaatacagaa

SEQ ID NO: 138528 - DNA, 25 bp, Artificial
  Probe
cgaatatatgaaccactggatgtca

SEQ ID NO: 138529 - DNA, 25 bp, Artificial
  Probe
atgatctgatgtacttcaacacact

SEQ ID NO: 138530 - DNA, 25 bp, Artificial
  Probe
tcaaccttcaacttccagtatccaa

SEQ ID NO: 138531 - DNA, 25 bp, Artificial
  Probe
ttcaaccttcaacttccagtatcca

SEQ ID NO: 138532 - DNA, 25 bp, Artificial
  Probe
tgaatctcaacacatcgtatccact

SEQ ID NO: 138533 - DNA, 25 bp, Artificial
  Probe
gatctgatgtacttcaacacactga

SEQ ID NO: 138534 - DNA, 25 bp, Artificial
  Probe
tgatctgatgtacttcaacacactg

SEQ ID NO: 138535 - DNA, 25 bp, Artificial
  Probe
gttcatgccatgttacaacactatt

SEQ ID NO: 138536 - DNA, 25 bp, Artificial
  Probe
catgatctgatgtacttcaacacac

SEQ ID NO: 138537 - DNA, 25 bp, Artificial
  Probe
gaatatatgaaccactggatgtcaa

SEQ ID NO: 138538 - DNA, 25 bp, Artificial
  Probe
aagattccttcgatgatgatgaact

SEQ ID NO: 138539 - DNA, 25 bp, Artificial
  Probe
caagattccttcgatgatgatgaac

SEQ ID NO: 138540 - DNA, 25 bp, Artificial
  Probe
acactgaacaacattgatgtgataa

SEQ ID NO: 138541 - DNA, 25 bp, Artificial
  Probe
agattccttcgatgatgatgaactc

SEQ ID NO: 138542 - DNA, 25 bp, Artificial
  Probe
aatctcaacacatcgtatccactgt

SEQ ID NO: 138543 - DNA, 25 bp, Artificial
  Probe
ttgtgtgtgaatgttattctgaact

SEQ ID NO: 138544 - DNA, 25 bp, Artificial
  Probe
ccaagattccttcgatgatgatgaa

SEQ ID NO: 138545 - DNA, 25 bp, Artificial
  Probe
attgaatacagaagacagaacccat

SEQ ID NO: 138546 - DNA, 25 bp, Artificial
  Probe
ccagtatccaaatcaagcattcaaa

SEQ ID NO: 138547 - DNA, 25 bp, Artificial
  Probe
gccattgttgagagcattgaataca

SEQ ID NO: 138548 - DNA, 25 bp, Artificial
  Probe
ttgaatacagaagacagaacccatc

SEQ ID NO: 138549 - DNA, 25 bp, Artificial
  Probe
ggattgaaggaatgctatgtgttta

SEQ ID NO: 138550 - DNA, 25 bp, Artificial
  Probe
cattgaatacagaagacagaaccca

SEQ ID NO: 138551 - DNA, 25 bp, Artificial
  Probe
tccagtatccaaatcaagcattcaa

SEQ ID NO: 138552 - DNA, 25 bp, Artificial
  Probe
gacagacttcttattctaacaaccg

SEQ ID NO: 138553 - DNA, 25 bp, Artificial
  Probe
tagagatcgtaagagcagatgtgtt

SEQ ID NO: 138554 - DNA, 25 bp, Artificial
  Probe
agacagacttcttattctaacaacc

SEQ ID NO: 138555 - DNA, 25 bp, Artificial
  Probe
ctagagatcgtaagagcagatgtgt

SEQ ID NO: 138556 - DNA, 25 bp, Artificial
  Probe
atcagattcattcctgtctccactt

SEQ ID NO: 138557 - DNA, 25 bp, Artificial
  Probe
agattcattcctgtctccacttgag

SEQ ID NO: 138558 - DNA, 25 bp, Artificial
  Probe
aatccatcagattcattcctgtctc

SEQ ID NO: 138559 - DNA, 25 bp, Artificial
  Probe
atccatcagattcattcctgtctcc

SEQ ID NO: 138560 - DNA, 25 bp, Artificial
  Probe
catcagattcattcctgtctccact

SEQ ID NO: 138561 - DNA, 25 bp, Artificial
  Probe
ataggcagacataaatcaactcagt

SEQ ID NO: 138562 - DNA, 25 bp, Artificial
  Probe
ggataggcagacataaatcaactca

SEQ ID NO: 138563 - DNA, 25 bp, Artificial
  Probe
atcgtaagagcagatgtgtttatgt

SEQ ID NO: 138564 - DNA, 25 bp, Artificial
  Probe
taggcagacataaatcaactcagtg

SEQ ID NO: 138565 - DNA, 25 bp, Artificial
  Probe
gataggcagacataaatcaactcag

SEQ ID NO: 138566 - DNA, 25 bp, Artificial
  Probe
gttcgcaagcatactgactttatat

SEQ ID NO: 138567 - DNA, 25 bp, Artificial
  Probe
cagattcattcctgtctccacttga

SEQ ID NO: 138568 - DNA, 25 bp, Artificial
  Probe
tcagattcattcctgtctccacttg

SEQ ID NO: 138569 - DNA, 25 bp, Artificial
  Probe
gggataggcagacataaatcaactc

SEQ ID NO: 138570 - DNA, 25 bp, Artificial
  Probe
gagcagatgtgtttatgtgggatag

SEQ ID NO: 138571 - DNA, 25 bp, Artificial
  Probe
tcgtaagagcagatgtgtttatgtg

SEQ ID NO: 138572 - DNA, 25 bp, Artificial
  Probe
tcgcaagcatactgactttatattt

SEQ ID NO: 138573 - DNA, 25 bp, Artificial
  Probe
ttcgcaagcatactgactttatatt

SEQ ID NO: 138574 - DNA, 25 bp, Artificial
  Probe
agagcagatgtgtttatgtgggata

SEQ ID NO: 138575 - DNA, 25 bp, Artificial
  Probe
ggttcgcaagcatactgactttata

SEQ ID NO: 138576 - DNA, 25 bp, Artificial
  Probe
tgggataggcagacataaatcaact

SEQ ID NO: 138577 - DNA, 25 bp, Artificial
  Probe
gtgggataggcagacataaatcaac

SEQ ID NO: 138578 - DNA, 25 bp, Artificial
  Probe
gatcgtaagagcagatgtgtttatg

SEQ ID NO: 138579 - DNA, 25 bp, Artificial
  Probe
agatcgtaagagcagatgtgtttat

SEQ ID NO: 138580 - DNA, 25 bp, Artificial
  Probe
taagagcagatgtgtttatgtggga

SEQ ID NO: 138581 - DNA, 25 bp, Artificial
  Probe
gtaagagcagatgtgtttatgtggg

SEQ ID NO: 138582 - DNA, 25 bp, Artificial
  Probe
gagatcgtaagagcagatgtgttta

SEQ ID NO: 138583 - DNA, 25 bp, Artificial
  Probe
cgtaagagcagatgtgtttatgtgg

SEQ ID NO: 138584 - DNA, 25 bp, Artificial
  Probe
gcagacataaatcaactcagtgtat

SEQ ID NO: 138585 - DNA, 25 bp, Artificial
  Probe
ggcagacataaatcaactcagtgta

SEQ ID NO: 138586 - DNA, 25 bp, Artificial
  Probe
aagagcagatgtgtttatgtgggat

SEQ ID NO: 138587 - DNA, 25 bp, Artificial
  Probe
ccatcagattcattcctgtctccac

SEQ ID NO: 138588 - DNA, 25 bp, Artificial
  Probe
tccatcagattcattcctgtctcca

SEQ ID NO: 138589 - DNA, 25 bp, Artificial
  Probe
gtttctaaacaaagtgaactcgttc

SEQ ID NO: 138590 - DNA, 25 bp, Artificial
  Probe
gatgtgtttatgtgggataggcaga

SEQ ID NO: 138591 - DNA, 25 bp, Artificial
  Probe
agatgtgtttatgtgggataggcag

SEQ ID NO: 138592 - DNA, 25 bp, Artificial
  Probe
agcagatgtgtttatgtgggatagg

SEQ ID NO: 138593 - DNA, 25 bp, Artificial
  Probe
agacttcttattctaacaaccggag

SEQ ID NO: 138594 - DNA, 25 bp, Artificial
  Probe
cagacttcttattctaacaaccgga

SEQ ID NO: 138595 - DNA, 25 bp, Artificial
  Probe
acagacttcttattctaacaaccgg

SEQ ID NO: 138596 - DNA, 25 bp, Artificial
  Probe
ttgtgtccagctagagatcgtaaga

SEQ ID NO: 138597 - DNA, 25 bp, Artificial
  Probe
atcctggaactcactatgtagacta

SEQ ID NO: 138598 - DNA, 25 bp, Artificial
  Probe
tatcctggaactcactatgtagact

SEQ ID NO: 138599 - DNA, 25 bp, Artificial
  Probe
ctatcctggaactcactatgtagac

SEQ ID NO: 138600 - DNA, 25 bp, Artificial
  Probe
tggaactcactatgtagactagact

SEQ ID NO: 138601 - DNA, 25 bp, Artificial
  Probe
cctggaactcactatgtagactaga

SEQ ID NO: 138602 - DNA, 25 bp, Artificial
  Probe
tcctggaactcactatgtagactag

SEQ ID NO: 138603 - DNA, 25 bp, Artificial
  Probe
gaactcactatgtagactagactgg

SEQ ID NO: 138604 - DNA, 25 bp, Artificial
  Probe
ggaactcactatgtagactagactg

SEQ ID NO: 138605 - DNA, 25 bp, Artificial
  Probe
ctggaactcactatgtagactagac

SEQ ID NO: 138606 - DNA, 25 bp, Artificial
  Probe
gctatcctggaactcactatgtaga

SEQ ID NO: 138607 - DNA, 25 bp, Artificial
  Probe
aactcactatgtagactagactggc

SEQ ID NO: 138608 - DNA, 25 bp, Artificial
  Probe
gcttcattcttcaagtacacttcaa

SEQ ID NO: 138609 - DNA, 25 bp, Artificial
  Probe
aaggcttcattcttcaagtacactt

SEQ ID NO: 138610 - DNA, 25 bp, Artificial
  Probe
ttcattcttcaagtacacttcaagg

SEQ ID NO: 138611 - DNA, 25 bp, Artificial
  Probe
cagccatccattgacaacatctaag

SEQ ID NO: 138612 - DNA, 25 bp, Artificial
  Probe
ggctatcctggaactcactatgtag

SEQ ID NO: 138613 - DNA, 25 bp, Artificial
  Probe
aggcttcattcttcaagtacacttc

SEQ ID NO: 138614 - DNA, 25 bp, Artificial
  Probe
gttcttgtctgtggcactgaattaa

SEQ ID NO: 138615 - DNA, 25 bp, Artificial
  Probe
tcattcttcaagtacacttcaaggc

SEQ ID NO: 138616 - DNA, 25 bp, Artificial
  Probe
ggcttcattcttcaagtacacttca

SEQ ID NO: 138617 - DNA, 25 bp, Artificial
  Probe
cagtaatgaactatcaatgtgaacg

SEQ ID NO: 138618 - DNA, 25 bp, Artificial
  Probe
tcaagacagagatcagtaatgaact

SEQ ID NO: 138619 - DNA, 25 bp, Artificial
  Probe
agtaatgaactatcaatgtgaacga

SEQ ID NO: 138620 - DNA, 25 bp, Artificial
  Probe
ggtgaccaagctattctaatactgt

SEQ ID NO: 138621 - DNA, 25 bp, Artificial
  Probe
aggtgaccaagctattctaatactg

SEQ ID NO: 138622 - DNA, 25 bp, Artificial
  Probe
tggctatcctggaactcactatgta

SEQ ID NO: 138623 - DNA, 25 bp, Artificial
  Probe
ttcttgtctgtggcactgaattaat

SEQ ID NO: 138624 - DNA, 25 bp, Artificial
  Probe
ttatgtaggaatggctggttctgtc

SEQ ID NO: 138625 - DNA, 25 bp, Artificial
  Probe
ccatccattgacaacatctaaggtc

SEQ ID NO: 138626 - DNA, 25 bp, Artificial
  Probe
cttaatgtggacggattcagaacag

SEQ ID NO: 138627 - DNA, 25 bp, Artificial
  Probe
aaggtgaccaagctattctaatact

SEQ ID NO: 138628 - DNA, 25 bp, Artificial
  Probe
cttcattcttcaagtacacttcaag

SEQ ID NO: 138629 - DNA, 25 bp, Artificial
  Probe
ggaaggtgaccaagctattctaata

SEQ ID NO: 138630 - DNA, 25 bp, Artificial
  Probe
tcttaatgtggacggattcagaaca

SEQ ID NO: 138631 - DNA, 25 bp, Artificial
  Probe
gaaggtgaccaagctattctaatac

SEQ ID NO: 138632 - DNA, 25 bp, Artificial
  Probe
caataaacatctcccacactttctc

SEQ ID NO: 138633 - DNA, 25 bp, Artificial
  Probe
tcaataaacatctcccacactttct

SEQ ID NO: 138634 - DNA, 25 bp, Artificial
  Probe
ctcaataaacatctcccacactttc

SEQ ID NO: 138635 - DNA, 25 bp, Artificial
  Probe
tctcaataaacatctcccacacttt

SEQ ID NO: 138636 - DNA, 25 bp, Artificial
  Probe
ttctcaataaacatctcccacactt

SEQ ID NO: 138637 - DNA, 25 bp, Artificial
  Probe
tttctcaataaacatctcccacact

SEQ ID NO: 138638 - DNA, 25 bp, Artificial
  Probe
tgccaaagataacagaaaggtaaac

SEQ ID NO: 138639 - DNA, 25 bp, Artificial
  Probe
gtgccaaagataacagaaaggtaaa

SEQ ID NO: 138640 - DNA, 25 bp, Artificial
  Probe
atactttatgtaggaatggctggtt

SEQ ID NO: 138641 - DNA, 25 bp, Artificial
  Probe
aatactttatgtaggaatggctggt

SEQ ID NO: 138642 - DNA, 25 bp, Artificial
  Probe
ctcagatggctcttacttcgtctac

SEQ ID NO: 138643 - DNA, 25 bp, Artificial
  Probe
cagatggctcttacttcgtctacag

SEQ ID NO: 138644 - DNA, 25 bp, Artificial
  Probe
actcagatggctcttacttcgtcta

SEQ ID NO: 138645 - DNA, 25 bp, Artificial
  Probe
tcagatggctcttacttcgtctaca

SEQ ID NO: 138646 - DNA, 25 bp, Artificial
  Probe
catggactcagatggctcttacttc

SEQ ID NO: 138647 - DNA, 25 bp, Artificial
  Probe
ttacttcgtctacagcaagctcaat

SEQ ID NO: 138648 - DNA, 25 bp, Artificial
  Probe
atcatggactcagatggctcttact

SEQ ID NO: 138649 - DNA, 25 bp, Artificial
  Probe
gacctgcatgataacagacttcttc

SEQ ID NO: 138650 - DNA, 25 bp, Artificial
  Probe
aaatactttcacctgctctgtgtta

SEQ ID NO: 138651 - DNA, 25 bp, Artificial
  Probe
tcatggactcagatggctcttactt

SEQ ID NO: 138652 - DNA, 25 bp, Artificial
  Probe
aatactttcacctgctctgtgttac

SEQ ID NO: 138653 - DNA, 25 bp, Artificial
  Probe
cttacttcgtctacagcaagctcaa

SEQ ID NO: 138654 - DNA, 25 bp, Artificial
  Probe
tgacctgcatgataacagacttctt

SEQ ID NO: 138655 - DNA, 25 bp, Artificial
  Probe
catgataacagacttcttccctgaa

SEQ ID NO: 138656 - DNA, 25 bp, Artificial
  Probe
tacttcgtctacagcaagctcaatg

SEQ ID NO: 138657 - DNA, 25 bp, Artificial
  Probe
ctcttacttcgtctacagcaagctc

SEQ ID NO: 138658 - DNA, 25 bp, Artificial
  Probe
ctgacctgcatgataacagacttct

SEQ ID NO: 138659 - DNA, 25 bp, Artificial
  Probe
tactttcacctgctctgtgttacat

SEQ ID NO: 138660 - DNA, 25 bp, Artificial
  Probe
atactttcacctgctctgtgttaca

SEQ ID NO: 138661 - DNA, 25 bp, Artificial
  Probe
atggactcagatggctcttacttcg

SEQ ID NO: 138662 - DNA, 25 bp, Artificial
  Probe
gactcagatggctcttacttcgtct

SEQ ID NO: 138663 - DNA, 25 bp, Artificial
  Probe
acctgcatgataacagacttcttcc

SEQ ID NO: 138664 - DNA, 25 bp, Artificial
  Probe
ctggtttgtagatgatgtggaggtg

SEQ ID NO: 138665 - DNA, 25 bp, Artificial
  Probe
gaactacaagaacactcagcccatc

SEQ ID NO: 138666 - DNA, 25 bp, Artificial
  Probe
tgttgtggtagacatcagcaaggat

SEQ ID NO: 138667 - DNA, 25 bp, Artificial
  Probe
tcttacttcgtctacagcaagctca

SEQ ID NO: 138668 - DNA, 25 bp, Artificial
  Probe
gaaatactttcacctgctctgtgtt

SEQ ID NO: 138669 - DNA, 25 bp, Artificial
  Probe
gtgtgttgtggtagacatcagcaag

SEQ ID NO: 138670 - DNA, 25 bp, Artificial
  Probe
gcatgataacagacttcttccctga

SEQ ID NO: 138671 - DNA, 25 bp, Artificial
  Probe
agcggagaactacaagaacactcag

SEQ ID NO: 138672 - DNA, 25 bp, Artificial
  Probe
agaactacaagaacactcagcccat

SEQ ID NO: 138673 - DNA, 25 bp, Artificial
  Probe
actacaagaacactcagcccatcat

SEQ ID NO: 138674 - DNA, 25 bp, Artificial
  Probe
atgataacagacttcttccctgaag

SEQ ID NO: 138675 - DNA, 25 bp, Artificial
  Probe
catcatggactcagatggctcttac

SEQ ID NO: 138676 - DNA, 25 bp, Artificial
  Probe
aactacaagaacactcagcccatca

SEQ ID NO: 138677 - DNA, 25 bp, Artificial
  Probe
cagcggagaactacaagaacactca

SEQ ID NO: 138678 - DNA, 25 bp, Artificial
  Probe
ctcagtcagtgaacttcccatcatg

SEQ ID NO: 138679 - DNA, 25 bp, Artificial
  Probe
ctacaagaacactcagcccatcatg

SEQ ID NO: 138680 - DNA, 25 bp, Artificial
  Probe
ctgaagacattactgtggagtggca

SEQ ID NO: 138681 - DNA, 25 bp, Artificial
  Probe
gtggtagacatcagcaaggatgatc

SEQ ID NO: 138682 - DNA, 25 bp, Artificial
  Probe
caaccaccatactgagaagagcctc

SEQ ID NO: 138683 - DNA, 25 bp, Artificial
  Probe
ttccctgaagacattactgtggagt

SEQ ID NO: 138684 - DNA, 25 bp, Artificial
  Probe
agaaaaccatctccaaaaccaaagg

SEQ ID NO: 138685 - DNA, 25 bp, Artificial
  Probe
ggactcagatggctcttacttcgtc

SEQ ID NO: 138686 - DNA, 25 bp, Artificial
  Probe
tgaagacattactgtggagtggcag

SEQ ID NO: 138687 - DNA, 25 bp, Artificial
  Probe
tggagaatggattaagtgactatgt

SEQ ID NO: 138688 - DNA, 25 bp, Artificial
  Probe
aatacattgcttgaacacacaggaa

SEQ ID NO: 138689 - DNA, 25 bp, Artificial
  Probe
atggagaatggattaagtgactatg

SEQ ID NO: 138690 - DNA, 25 bp, Artificial
  Probe
ggatcatggagaatggattaagtga

SEQ ID NO: 138691 - DNA, 25 bp, Artificial
  Probe
atcatggagaatggattaagtgact

SEQ ID NO: 138692 - DNA, 25 bp, Artificial
  Probe
gatcatggagaatggattaagtgac

SEQ ID NO: 138693 - DNA, 25 bp, Artificial
  Probe
tcatggagaatggattaagtgacta

SEQ ID NO: 138694 - DNA, 25 bp, Artificial
  Probe
ggagaatggattaagtgactatgta

SEQ ID NO: 138695 - DNA, 25 bp, Artificial
  Probe
catggagaatggattaagtgactat

SEQ ID NO: 138696 - DNA, 25 bp, Artificial
  Probe
taaatacattgcttgaacacacagg

SEQ ID NO: 138697 - DNA, 25 bp, Artificial
  Probe
atgaagacgaagagaacaaagatga

SEQ ID NO: 138698 - DNA, 25 bp, Artificial
  Probe
gatgaagacgaagagaacaaagatg

SEQ ID NO: 138699 - DNA, 25 bp, Artificial
  Probe
agatgaagacgaagagaacaaagat

SEQ ID NO: 138700 - DNA, 25 bp, Artificial
  Probe
aagatgaagacgaagagaacaaaga

SEQ ID NO: 138701 - DNA, 25 bp, Artificial
  Probe
tgaagacgaagagaacaaagatgaa

SEQ ID NO: 138702 - DNA, 25 bp, Artificial
  Probe
gaagacgaagagaacaaagatgaat

SEQ ID NO: 138703 - DNA, 25 bp, Artificial
  Probe
taagatgaagacgaagagaacaaag

SEQ ID NO: 138704 - DNA, 25 bp, Artificial
  Probe
aagacgaagagaacaaagatgaatt

SEQ ID NO: 138705 - DNA, 25 bp, Artificial
  Probe
atacattgcttgaacacacaggaaa

SEQ ID NO: 138706 - DNA, 25 bp, Artificial
  Probe
aaatacattgcttgaacacacagga

SEQ ID NO: 138707 - DNA, 25 bp, Artificial
  Probe
ttaaatacattgcttgaacacacag

SEQ ID NO: 138708 - DNA, 25 bp, Artificial
  Probe
ttaagatgaagacgaagagaacaaa

SEQ ID NO: 138709 - DNA, 25 bp, Artificial
  Probe
acttaagatgaagacgaagagaaca

SEQ ID NO: 138710 - DNA, 25 bp, Artificial
  Probe
ggcatacttaagatgaagacgaaga

SEQ ID NO: 138711 - DNA, 25 bp, Artificial
  Probe
gcatacttaagatgaagacgaagag

SEQ ID NO: 138712 - DNA, 25 bp, Artificial
  Probe
agacgaagagaacaaagatgaatta

SEQ ID NO: 138713 - DNA, 25 bp, Artificial
  Probe
cttaagatgaagacgaagagaacaa

SEQ ID NO: 138714 - DNA, 25 bp, Artificial
  Probe
attaaatacattgcttgaacacaca

SEQ ID NO: 138715 - DNA, 25 bp, Artificial
  Probe
tacattgcttgaacacacaggaaag

SEQ ID NO: 138716 - DNA, 25 bp, Artificial
  Probe
gggatcatggagaatggattaagtg

SEQ ID NO: 138717 - DNA, 25 bp, Artificial
  Probe
tacgggatcatggagaatggattaa

SEQ ID NO: 138718 - DNA, 25 bp, Artificial
  Probe
ttacgggatcatggagaatggatta

SEQ ID NO: 138719 - DNA, 25 bp, Artificial
  Probe
gacgaagagaacaaagatgaattaa

SEQ ID NO: 138720 - DNA, 25 bp, Artificial
  Probe
tacttaagatgaagacgaagagaac

SEQ ID NO: 138721 - DNA, 25 bp, Artificial
  Probe
attacgggatcatggagaatggatt

SEQ ID NO: 138722 - DNA, 25 bp, Artificial
  Probe
catacttaagatgaagacgaagaga

SEQ ID NO: 138723 - DNA, 25 bp, Artificial
  Probe
gagaatggattaagtgactatgtaa

SEQ ID NO: 138724 - DNA, 25 bp, Artificial
  Probe
gattacgggatcatggagaatggat

SEQ ID NO: 138725 - DNA, 25 bp, Artificial
  Probe
aattaaatacattgcttgaacacac

SEQ ID NO: 138726 - DNA, 25 bp, Artificial
  Probe
acgaagagaacaaagatgaattaaa

SEQ ID NO: 138727 - DNA, 25 bp, Artificial
  Probe
cgggatcatggagaatggattaagt

SEQ ID NO: 138728 - DNA, 25 bp, Artificial
  Probe
acgggatcatggagaatggattaag

SEQ ID NO: 138729 - DNA, 25 bp, Artificial
  Probe
atacttaagatgaagacgaagagaa

SEQ ID NO: 138730 - DNA, 25 bp, Artificial
  Probe
gaattaaatacattgcttgaacaca

SEQ ID NO: 138731 - DNA, 25 bp, Artificial
  Probe
tgaattaaatacattgcttgaacac

SEQ ID NO: 138732 - DNA, 25 bp, Artificial
  Probe
agatttctcttatgctgtccttact

SEQ ID NO: 138733 - DNA, 25 bp, Artificial
  Probe
atcaggagacaacataggagtcact

SEQ ID NO: 138734 - DNA, 25 bp, Artificial
  Probe
catcaggagacaacataggagtcac

SEQ ID NO: 138735 - DNA, 25 bp, Artificial
  Probe
caacataggagtcactgccttagag

SEQ ID NO: 138736 - DNA, 25 bp, Artificial
  Probe
agtcctcatacctactcacttcagg

SEQ ID NO: 138737 - DNA, 25 bp, Artificial
  Probe
gacaacataggagtcactgccttag

SEQ ID NO: 138738 - DNA, 25 bp, Artificial
  Probe
gatttctcttatgctgtccttacta

SEQ ID NO: 138739 - DNA, 25 bp, Artificial
  Probe
aacataggagtcactgccttagagt

SEQ ID NO: 138740 - DNA, 25 bp, Artificial
  Probe
tctcttatgctgtccttactagtca

SEQ ID NO: 138741 - DNA, 25 bp, Artificial
  Probe
ttctcttatgctgtccttactagtc

SEQ ID NO: 138742 - DNA, 25 bp, Artificial
  Probe
acaacataggagtcactgccttaga

SEQ ID NO: 138743 - DNA, 25 bp, Artificial
  Probe
agacaacataggagtcactgcctta

SEQ ID NO: 138744 - DNA, 25 bp, Artificial
  Probe
ttatgctgtccttactagtcattcc

SEQ ID NO: 138745 - DNA, 25 bp, Artificial
  Probe
atttctcttatgctgtccttactag

SEQ ID NO: 138746 - DNA, 25 bp, Artificial
  Probe
ctcttatgctgtccttactagtcat

SEQ ID NO: 138747 - DNA, 25 bp, Artificial
  Probe
tcaggagacaacataggagtcactg

SEQ ID NO: 138748 - DNA, 25 bp, Artificial
  Probe
tcttatgctgtccttactagtcatt

SEQ ID NO: 138749 - DNA, 25 bp, Artificial
  Probe
cttatgctgtccttactagtcattc

SEQ ID NO: 138750 - DNA, 25 bp, Artificial
  Probe
ccatcaggagacaacataggagtca

SEQ ID NO: 138751 - DNA, 25 bp, Artificial
  Probe
ttccttcatgctactaggtggctaa

SEQ ID NO: 138752 - DNA, 25 bp, Artificial
  Probe
tatgctgtccttactagtcattccg

SEQ ID NO: 138753 - DNA, 25 bp, Artificial
  Probe
gttcaagccagcctgtgttacatag

SEQ ID NO: 138754 - DNA, 25 bp, Artificial
  Probe
tccttcatgctactaggtggctaag

SEQ ID NO: 138755 - DNA, 25 bp, Artificial
  Probe
caaagatttctcttatgctgtcctt

SEQ ID NO: 138756 - DNA, 25 bp, Artificial
  Probe
aagatttctcttatgctgtccttac

SEQ ID NO: 138757 - DNA, 25 bp, Artificial
  Probe
ctcatacctactcacttcaggcagg

SEQ ID NO: 138758 - DNA, 25 bp, Artificial
  Probe
cctcatacctactcacttcaggcag

SEQ ID NO: 138759 - DNA, 25 bp, Artificial
  Probe
gtcctcatacctactcacttcaggc

SEQ ID NO: 138760 - DNA, 25 bp, Artificial
  Probe
gagtcctcatacctactcacttcag

SEQ ID NO: 138761 - DNA, 25 bp, Artificial
  Probe
cagagtcctcatacctactcacttc

SEQ ID NO: 138762 - DNA, 25 bp, Artificial
  Probe
tatcgcaaagatttctcttatgctg

SEQ ID NO: 138763 - DNA, 25 bp, Artificial
  Probe
ctatcgcaaagatttctcttatgct

SEQ ID NO: 138764 - DNA, 25 bp, Artificial
  Probe
tctatcgcaaagatttctcttatgc

SEQ ID NO: 138765 - DNA, 25 bp, Artificial
  Probe
gagacaacataggagtcactgcctt

SEQ ID NO: 138766 - DNA, 25 bp, Artificial
  Probe
gtgccatcaggagacaacataggag

SEQ ID NO: 138767 - DNA, 25 bp, Artificial
  Probe
agagtcctcatacctactcacttca

SEQ ID NO: 138768 - DNA, 25 bp, Artificial
  Probe
atcgcaaagatttctcttatgctgt

SEQ ID NO: 138769 - DNA, 25 bp, Artificial
  Probe
cttactagtcattccgtgccatcag

SEQ ID NO: 138770 - DNA, 25 bp, Artificial
  Probe
tttctcttatgctgtccttactagt

SEQ ID NO: 138771 - DNA, 25 bp, Artificial
  Probe
gcaaagatttctcttatgctgtcct

SEQ ID NO: 138772 - DNA, 25 bp, Artificial
  Probe
gtgttacatagcaaaactgtcttga

SEQ ID NO: 138773 - DNA, 25 bp, Artificial
  Probe
tgtgttacatagcaaaactgtcttg

SEQ ID NO: 138774 - DNA, 25 bp, Artificial
  Probe
ctgtgttacatagcaaaactgtctt

SEQ ID NO: 138775 - DNA, 25 bp, Artificial
  Probe
aaagatttctcttatgctgtcctta

SEQ ID NO: 138776 - DNA, 25 bp, Artificial
  Probe
tcctcatacctactcacttcaggca

SEQ ID NO: 138777 - DNA, 25 bp, Artificial
  Probe
taaattcatcaaatgggacgaggta

SEQ ID NO: 138778 - DNA, 25 bp, Artificial
  Probe
gctctcctactttatctaagactcc

SEQ ID NO: 138779 - DNA, 25 bp, Artificial
  Probe
ctctcctactttatctaagactccg

SEQ ID NO: 138780 - DNA, 25 bp, Artificial
  Probe
aaattcatcaaatgggacgaggtaa

SEQ ID NO: 138781 - DNA, 25 bp, Artificial
  Probe
aattcatcaaatgggacgaggtaag

SEQ ID NO: 138782 - DNA, 25 bp, Artificial
  Probe
gtaaattcatcaaatgggacgaggt

SEQ ID NO: 138783 - DNA, 25 bp, Artificial
  Probe
attcatcaaatgggacgaggtaaga

SEQ ID NO: 138784 - DNA, 25 bp, Artificial
  Probe
gattccttcagtcacattcggctag

SEQ ID NO: 138785 - DNA, 25 bp, Artificial
  Probe
ttccttcagtcacattcggctagat

SEQ ID NO: 138786 - DNA, 25 bp, Artificial
  Probe
attccttcagtcacattcggctaga

SEQ ID NO: 138787 - DNA, 25 bp, Artificial
  Probe
ttcatcaaatgggacgaggtaagag

SEQ ID NO: 138788 - DNA, 25 bp, Artificial
  Probe
catcaaatgggacgaggtaagagag

SEQ ID NO: 138789 - DNA, 25 bp, Artificial
  Probe
agctctcctactttatctaagactc

SEQ ID NO: 138790 - DNA, 25 bp, Artificial
  Probe
atcaaatgggacgaggtaagagagt

SEQ ID NO: 138791 - DNA, 25 bp, Artificial
  Probe
tcatcaaatgggacgaggtaagaga

SEQ ID NO: 138792 - DNA, 25 bp, Artificial
  Probe
tccttcagtcacattcggctagatg

SEQ ID NO: 138793 - DNA, 25 bp, Artificial
  Probe
ggattccttcagtcacattcggcta

SEQ ID NO: 138794 - DNA, 25 bp, Artificial
  Probe
tctcctactttatctaagactccgg

SEQ ID NO: 138795 - DNA, 25 bp, Artificial
  Probe
tcaaatgggacgaggtaagagagtg

SEQ ID NO: 138796 - DNA, 25 bp, Artificial
  Probe
caattccgctctatcatccctttgg

SEQ ID NO: 138797 - DNA, 25 bp, Artificial
  Probe
ccaattccgctctatcatccctttg

SEQ ID NO: 138798 - DNA, 25 bp, Artificial
  Probe
cccaattccgctctatcatcccttt

SEQ ID NO: 138799 - DNA, 25 bp, Artificial
  Probe
caaatgggacgaggtaagagagtgg

SEQ ID NO: 138800 - DNA, 25 bp, Artificial
  Probe
aattccgctctatcatccctttggc

SEQ ID NO: 138801 - DNA, 25 bp, Artificial
  Probe
ctactctgccctgatcgaaggattc

SEQ ID NO: 138802 - DNA, 25 bp, Artificial
  Probe
gtaagagagtggctgtaccctactc

SEQ ID NO: 138803 - DNA, 25 bp, Artificial
  Probe
gaggtaagagagtggctgtacccta

SEQ ID NO: 138804 - DNA, 25 bp, Artificial
  Probe
ggtaagagagtggctgtaccctact

SEQ ID NO: 138805 - DNA, 25 bp, Artificial
  Probe
aggtaagagagtggctgtaccctac

SEQ ID NO: 138806 - DNA, 25 bp, Artificial
  Probe
ggaaaacttgagacctactgagccg

SEQ ID NO: 138807 - DNA, 25 bp, Artificial
  Probe
cggaaaacttgagacctactgagcc

SEQ ID NO: 138808 - DNA, 25 bp, Artificial
  Probe
aaggattccttcagtcacattcggc

SEQ ID NO: 138809 - DNA, 25 bp, Artificial
  Probe
gaaaacttgagacctactgagccgg

SEQ ID NO: 138810 - DNA, 25 bp, Artificial
  Probe
ccggaaaacttgagacctactgagc

SEQ ID NO: 138811 - DNA, 25 bp, Artificial
  Probe
ttgattgtactcttctatgctggac

SEQ ID NO: 138812 - DNA, 25 bp, Artificial
  Probe
tgattgtactcttctatgctggacc

SEQ ID NO: 138813 - DNA, 25 bp, Artificial
  Probe
gtactcttctatgctggaccgaatt

SEQ ID NO: 138814 - DNA, 25 bp, Artificial
  Probe
ccaaacacaccataaactcacaatt

SEQ ID NO: 138815 - DNA, 25 bp, Artificial
  Probe
aaccaatgtctgccatacctagttc

SEQ ID NO: 138816 - DNA, 25 bp, Artificial
  Probe
gaaccaatgtctgccatacctagtt

SEQ ID NO: 138817 - DNA, 25 bp, Artificial
  Probe
aacacaccataaactcacaattaca

SEQ ID NO: 138818 - DNA, 25 bp, Artificial
  Probe
acacaccataaactcacaattacat

SEQ ID NO: 138819 - DNA, 25 bp, Artificial
  Probe
gattgtactcttctatgctggaccg

SEQ ID NO: 138820 - DNA, 25 bp, Artificial
  Probe
tttgattgtactcttctatgctgga

SEQ ID NO: 138821 - DNA, 25 bp, Artificial
  Probe
aaacacaccataaactcacaattac

SEQ ID NO: 138822 - DNA, 25 bp, Artificial
  Probe
caaacacaccataaactcacaatta

SEQ ID NO: 138823 - DNA, 25 bp, Artificial
  Probe
cccaaacacaccataaactcacaat

SEQ ID NO: 138824 - DNA, 25 bp, Artificial
  Probe
attgtactcttctatgctggaccga

SEQ ID NO: 138825 - DNA, 25 bp, Artificial
  Probe
caatgtctgccatacctagttccac

SEQ ID NO: 138826 - DNA, 25 bp, Artificial
  Probe
tgtactcttctatgctggaccgaat

SEQ ID NO: 138827 - DNA, 25 bp, Artificial
  Probe
ctacacacccaaacacaccataaac

SEQ ID NO: 138828 - DNA, 25 bp, Artificial
  Probe
ttgtactcttctatgctggaccgaa

SEQ ID NO: 138829 - DNA, 25 bp, Artificial
  Probe
atgtctgccatacctagttccactt

SEQ ID NO: 138830 - DNA, 25 bp, Artificial
  Probe
aatgtctgccatacctagttccact

SEQ ID NO: 138831 - DNA, 25 bp, Artificial
  Probe
tacacacccaaacacaccataaact

SEQ ID NO: 138832 - DNA, 25 bp, Artificial
  Probe
actacacacccaaacacaccataaa

SEQ ID NO: 138833 - DNA, 25 bp, Artificial
  Probe
cacaccataaactcacaattacata

SEQ ID NO: 138834 - DNA, 25 bp, Artificial
  Probe
gtctgccatacctagttccacttct

SEQ ID NO: 138835 - DNA, 25 bp, Artificial
  Probe
cttctatgctggaccgaattcatat

SEQ ID NO: 138836 - DNA, 25 bp, Artificial
  Probe
tactcttctatgctggaccgaattc

SEQ ID NO: 138837 - DNA, 25 bp, Artificial
  Probe
ttctatgctggaccgaattcatatg

SEQ ID NO: 138838 - DNA, 25 bp, Artificial
  Probe
acccaaacacaccataaactcacaa

SEQ ID NO: 138839 - DNA, 25 bp, Artificial
  Probe
tgtctgccatacctagttccacttc

SEQ ID NO: 138840 - DNA, 25 bp, Artificial
  Probe
tcttctatgctggaccgaattcata

SEQ ID NO: 138841 - DNA, 25 bp, Artificial
  Probe
cactacacacccaaacacaccataa

SEQ ID NO: 138842 - DNA, 25 bp, Artificial
  Probe
ctcttctatgctggaccgaattcat

SEQ ID NO: 138843 - DNA, 25 bp, Artificial
  Probe
ccaatgtctgccatacctagttcca

SEQ ID NO: 138844 - DNA, 25 bp, Artificial
  Probe
accaatgtctgccatacctagttcc

SEQ ID NO: 138845 - DNA, 25 bp, Artificial
  Probe
ggaaccaatgtctgccatacctagt

SEQ ID NO: 138846 - DNA, 25 bp, Artificial
  Probe
aatatataacgggtgtgcagccata

SEQ ID NO: 138847 - DNA, 25 bp, Artificial
  Probe
acaccataaactcacaattacataa

SEQ ID NO: 138848 - DNA, 25 bp, Artificial
  Probe
caccataaactcacaattacataac

SEQ ID NO: 138849 - DNA, 25 bp, Artificial
  Probe
ttataggggaggcgtaataccaatt

SEQ ID NO: 138850 - DNA, 25 bp, Artificial
  Probe
atatataacgggtgtgcagccatag

SEQ ID NO: 138851 - DNA, 25 bp, Artificial
  Probe
cttataggggaggcgtaataccaat

SEQ ID NO: 138852 - DNA, 25 bp, Artificial
  Probe
cacccaaacacaccataaactcaca

SEQ ID NO: 138853 - DNA, 25 bp, Artificial
  Probe
acacccaaacacaccataaactcac

SEQ ID NO: 138854 - DNA, 25 bp, Artificial
  Probe
cacacccaaacacaccataaactca

SEQ ID NO: 138855 - DNA, 25 bp, Artificial
  Probe
acacacccaaacacaccataaactc

SEQ ID NO: 138856 - DNA, 25 bp, Artificial
  Probe
ataatctcctcaatcactccagcat

SEQ ID NO: 138857 - DNA, 25 bp, Artificial
  Probe
taatctcctcaatcactccagcatt

SEQ ID NO: 138858 - DNA, 25 bp, Artificial
  Probe
gataatctcctcaatcactccagca

SEQ ID NO: 138859 - DNA, 25 bp, Artificial
  Probe
ctctggataatctcctcaatcactc

SEQ ID NO: 138860 - DNA, 25 bp, Artificial
  Probe
tctggataatctcctcaatcactcc

SEQ ID NO: 138861 - DNA, 25 bp, Artificial
  Probe
gctctggataatctcctcaatcact

SEQ ID NO: 138862 - DNA, 25 bp, Artificial
  Probe
gaggtgcagtatctactcaataagg

SEQ ID NO: 138863 - DNA, 25 bp, Artificial
  Probe
ggaggtgcagtatctactcaataag

SEQ ID NO: 138864 - DNA, 25 bp, Artificial
  Probe
ttcagctctggataatctcctcaat

SEQ ID NO: 138865 - DNA, 25 bp, Artificial
  Probe
ggataatctcctcaatcactccagc

SEQ ID NO: 138866 - DNA, 25 bp, Artificial
  Probe
tcagctctggataatctcctcaatc

SEQ ID NO: 138867 - DNA, 25 bp, Artificial
  Probe
aatctcctcaatcactccagcattt

SEQ ID NO: 138868 - DNA, 25 bp, Artificial
  Probe
aggtgcagtatctactcaataaggc

SEQ ID NO: 138869 - DNA, 25 bp, Artificial
  Probe
agctctggataatctcctcaatcac

SEQ ID NO: 138870 - DNA, 25 bp, Artificial
  Probe
cagctctggataatctcctcaatca

SEQ ID NO: 138871 - DNA, 25 bp, Artificial
  Probe
cagtatctactcaataaggccaagt

SEQ ID NO: 138872 - DNA, 25 bp, Artificial
  Probe
agtatctactcaataaggccaagtt

SEQ ID NO: 138873 - DNA, 25 bp, Artificial
  Probe
gcagtatctactcaataaggccaag

SEQ ID NO: 138874 - DNA, 25 bp, Artificial
  Probe
tgcagtatctactcaataaggccaa

SEQ ID NO: 138875 - DNA, 25 bp, Artificial
  Probe
gactctgagcctctggaattaggag

SEQ ID NO: 138876 - DNA, 25 bp, Artificial
  Probe
ctttgaagaatgatgagctgtgacc

SEQ ID NO: 138877 - DNA, 25 bp, Artificial
  Probe
cctttgaagaatgatgagctgtgac

SEQ ID NO: 138878 - DNA, 25 bp, Artificial
  Probe
catcttagaacctgacaaagaaggg

SEQ ID NO: 138879 - DNA, 25 bp, Artificial
  Probe
ccatcttagaacctgacaaagaagg

SEQ ID NO: 138880 - DNA, 25 bp, Artificial
  Probe
gtgcagtatctactcaataaggcca

SEQ ID NO: 138881 - DNA, 25 bp, Artificial
  Probe
gggaggtgcagtatctactcaataa

SEQ ID NO: 138882 - DNA, 25 bp, Artificial
  Probe
aatgacacctggacctggaagaatg

SEQ ID NO: 138883 - DNA, 25 bp, Artificial
  Probe
caatgacacctggacctggaagaat

SEQ ID NO: 138884 - DNA, 25 bp, Artificial
  Probe
cttagaacctgacaaagaagggctt

SEQ ID NO: 138885 - DNA, 25 bp, Artificial
  Probe
tttcagctctggataatctcctcaa

SEQ ID NO: 138886 - DNA, 25 bp, Artificial
  Probe
agactctgagcctctggaattagga

SEQ ID NO: 138887 - DNA, 25 bp, Artificial
  Probe
gccatcttagaacctgacaaagaag

SEQ ID NO: 138888 - DNA, 25 bp, Artificial
  Probe
ctttcagctctggataatctcctca

SEQ ID NO: 138889 - DNA, 25 bp, Artificial
  Probe
ttagaacctgacaaagaagggcttg

SEQ ID NO: 138890 - DNA, 25 bp, Artificial
  Probe
ggtgcagtatctactcaataaggcc

SEQ ID NO: 138891 - DNA, 25 bp, Artificial
  Probe
tctactcaataaggccaagtttact

SEQ ID NO: 138892 - DNA, 25 bp, Artificial
  Probe
atctcctcaatcactccagcatttt

SEQ ID NO: 138893 - DNA, 25 bp, Artificial
  Probe
tttgaagaatgatgagctgtgaccc

SEQ ID NO: 138894 - DNA, 25 bp, Artificial
  Probe
atcttagaacctgacaaagaagggc

SEQ ID NO: 138895 - DNA, 25 bp, Artificial
  Probe
caatcactccagcattttcctcaag

SEQ ID NO: 138896 - DNA, 25 bp, Artificial
  Probe
atctactcaataaggccaagtttac

SEQ ID NO: 138897 - DNA, 25 bp, Artificial
  Probe
gtatctactcaataaggccaagttt

SEQ ID NO: 138898 - DNA, 25 bp, Artificial
  Probe
actcaataaggccaagtttactaaa

SEQ ID NO: 138899 - DNA, 25 bp, Artificial
  Probe
catcaatgacacctggacctggaag

SEQ ID NO: 138900 - DNA, 25 bp, Artificial
  Probe
tcaatcactccagcattttcctcaa

SEQ ID NO: 138901 - DNA, 25 bp, Artificial
  Probe
agtttatgaagtctagaaatggcaa

SEQ ID NO: 138902 - DNA, 25 bp, Artificial
  Probe
gtttatgaagtctagaaatggcaag

SEQ ID NO: 138903 - DNA, 25 bp, Artificial
  Probe
tttatgaagtctagaaatggcaaga

SEQ ID NO: 138904 - DNA, 25 bp, Artificial
  Probe
aatacatgattcattgactatcagt

SEQ ID NO: 138905 - DNA, 25 bp, Artificial
  Probe
atacatgattcattgactatcagtc

SEQ ID NO: 138906 - DNA, 25 bp, Artificial
  Probe
aaatacatgattcattgactatcag

SEQ ID NO: 138907 - DNA, 25 bp, Artificial
  Probe
ggagaaggataccaccatcaatgaa

SEQ ID NO: 138908 - DNA, 25 bp, Artificial
  Probe
agaaggataccaccatcaatgaaat

SEQ ID NO: 138909 - DNA, 25 bp, Artificial
  Probe
gaaggataccaccatcaatgaaatc

SEQ ID NO: 138910 - DNA, 25 bp, Artificial
  Probe
gagaaggataccaccatcaatgaaa

SEQ ID NO: 138911 - DNA, 25 bp, Artificial
  Probe
aaggataccaccatcaatgaaatcg

SEQ ID NO: 138912 - DNA, 25 bp, Artificial
  Probe
tggagaaggataccaccatcaatga

SEQ ID NO: 138913 - DNA, 25 bp, Artificial
  Probe
ggataccaccatcaatgaaatcgaa

SEQ ID NO: 138914 - DNA, 25 bp, Artificial
  Probe
ttaacaagaaccgccaccctaattt

SEQ ID NO: 138915 - DNA, 25 bp, Artificial
  Probe
aggataccaccatcaatgaaatcga

SEQ ID NO: 138916 - DNA, 25 bp, Artificial
  Probe
cctaatttcctggtagtggagaagg

SEQ ID NO: 138917 - DNA, 25 bp, Artificial
  Probe
ccctaatttcctggtagtggagaag

SEQ ID NO: 138918 - DNA, 25 bp, Artificial
  Probe
taacaagaaccgccaccctaatttc

SEQ ID NO: 138919 - DNA, 25 bp, Artificial
  Probe
cttaacaagaaccgccaccctaatt

SEQ ID NO: 138920 - DNA, 25 bp, Artificial
  Probe
accctaatttcctggtagtggagaa

SEQ ID NO: 138921 - DNA, 25 bp, Artificial
  Probe
caccctaatttcctggtagtggaga

SEQ ID NO: 138922 - DNA, 25 bp, Artificial
  Probe
aatttcctggtagtggagaaggata

SEQ ID NO: 138923 - DNA, 25 bp, Artificial
  Probe
taatttcctggtagtggagaaggat

SEQ ID NO: 138924 - DNA, 25 bp, Artificial
  Probe
ctaatttcctggtagtggagaagga

SEQ ID NO: 138925 - DNA, 25 bp, Artificial
  Probe
atttcctggtagtggagaaggatac

SEQ ID NO: 138926 - DNA, 25 bp, Artificial
  Probe
tttcctggtagtggagaaggatacc

SEQ ID NO: 138927 - DNA, 25 bp, Artificial
  Probe
tacataacatatccatgatgctgct

SEQ ID NO: 138928 - DNA, 25 bp, Artificial
  Probe
ctacataacatatccatgatgctgc

SEQ ID NO: 138929 - DNA, 25 bp, Artificial
  Probe
gctacataacatatccatgatgctg

SEQ ID NO: 138930 - DNA, 25 bp, Artificial
  Probe
acataacatatccatgatgctgctt

SEQ ID NO: 138931 - DNA, 25 bp, Artificial
  Probe
ggctacataacatatccatgatgct

SEQ ID NO: 138932 - DNA, 25 bp, Artificial
  Probe
aggctacataacatatccatgatgc

SEQ ID NO: 138933 - DNA, 25 bp, Artificial
  Probe
aagaggctacataacatatccatga

SEQ ID NO: 138934 - DNA, 25 bp, Artificial
  Probe
gaggctacataacatatccatgatg

SEQ ID NO: 138935 - DNA, 25 bp, Artificial
  Probe
agaggctacataacatatccatgat

SEQ ID NO: 138936 - DNA, 25 bp, Artificial
  Probe
gtaagaggctacataacatatccat

SEQ ID NO: 138937 - DNA, 25 bp, Artificial
  Probe
taagaggctacataacatatccatg

SEQ ID NO: 138938 - DNA, 25 bp, Artificial
  Probe
tgtaagaggctacataacatatcca

SEQ ID NO: 138939 - DNA, 25 bp, Artificial
  Probe
atatccatgatgctgctttaaggtt

SEQ ID NO: 138940 - DNA, 25 bp, Artificial
  Probe
tatccatgatgctgctttaaggttt

SEQ ID NO: 138941 - DNA, 25 bp, Artificial
  Probe
aacatatccatgatgctgctttaag

SEQ ID NO: 138942 - DNA, 25 bp, Artificial
  Probe
cataacatatccatgatgctgcttt

SEQ ID NO: 138943 - DNA, 25 bp, Artificial
  Probe
agtataggttctctcccatgtaaga

SEQ ID NO: 138944 - DNA, 25 bp, Artificial
  Probe
catatccatgatgctgctttaaggt

SEQ ID NO: 138945 - DNA, 25 bp, Artificial
  Probe
acatatccatgatgctgctttaagg

SEQ ID NO: 138946 - DNA, 25 bp, Artificial
  Probe
gttgagtggtccgaattaggaacat

SEQ ID NO: 138947 - DNA, 25 bp, Artificial
  Probe
taacatatccatgatgctgctttaa

SEQ ID NO: 138948 - DNA, 25 bp, Artificial
  Probe
ataacatatccatgatgctgcttta

SEQ ID NO: 138949 - DNA, 25 bp, Artificial
  Probe
ttgagtggtccgaattaggaacatg

SEQ ID NO: 138950 - DNA, 25 bp, Artificial
  Probe
ctatacctcaaattagctgtggatt

SEQ ID NO: 138951 - DNA, 25 bp, Artificial
  Probe
ctgttgagtggtccgaattaggaac

SEQ ID NO: 138952 - DNA, 25 bp, Artificial
  Probe
atgatgctgctttaaggttttagag

SEQ ID NO: 138953 - DNA, 25 bp, Artificial
  Probe
gctgctttaaggttttagaggctat

SEQ ID NO: 138954 - DNA, 25 bp, Artificial
  Probe
tatacctcaaattagctgtggattt

SEQ ID NO: 138955 - DNA, 25 bp, Artificial
  Probe
tgatgctgctttaaggttttagagg

SEQ ID NO: 138956 - DNA, 25 bp, Artificial
  Probe
tgctttaaggttttagaggctatac

SEQ ID NO: 138957 - DNA, 25 bp, Artificial
  Probe
ctgctttaaggttttagaggctata

SEQ ID NO: 138958 - DNA, 25 bp, Artificial
  Probe
catgatgctgctttaaggttttaga

SEQ ID NO: 138959 - DNA, 25 bp, Artificial
  Probe
ccatgatgctgctttaaggttttag

SEQ ID NO: 138960 - DNA, 25 bp, Artificial
  Probe
tccatgatgctgctttaaggtttta

SEQ ID NO: 138961 - DNA, 25 bp, Artificial
  Probe
tataggttctctcccatgtaagagg

SEQ ID NO: 138962 - DNA, 25 bp, Artificial
  Probe
gtataggttctctcccatgtaagag

SEQ ID NO: 138963 - DNA, 25 bp, Artificial
  Probe
tgctgctttaaggttttagaggcta

SEQ ID NO: 138964 - DNA, 25 bp, Artificial
  Probe
cagattccaggaggaacactatcag

SEQ ID NO: 138965 - DNA, 25 bp, Artificial
  Probe
atccatgatgctgctttaaggtttt

SEQ ID NO: 138966 - DNA, 25 bp, Artificial
  Probe
gatgctgctttaaggttttagaggc

SEQ ID NO: 138967 - DNA, 25 bp, Artificial
  Probe
agattccaggaggaacactatcagt

SEQ ID NO: 138968 - DNA, 25 bp, Artificial
  Probe
gctttaaggttttagaggctatacc

SEQ ID NO: 138969 - DNA, 25 bp, Artificial
  Probe
atgctgctttaaggttttagaggct

SEQ ID NO: 138970 - DNA, 25 bp, Artificial
  Probe
atttacaatgggcagtacagacgtg

SEQ ID NO: 138971 - DNA, 25 bp, Artificial
  Probe
ccatgtaagaggctacataacatat

SEQ ID NO: 138972 - DNA, 25 bp, Artificial
  Probe
tcagcaagaagaatcaggataacat

SEQ ID NO: 138973 - DNA, 25 bp, Artificial
  Probe
ttgtgaatgaatccagagatgaaga

SEQ ID NO: 138974 - DNA, 25 bp, Artificial
  Probe
agcaagaagaatcaggataacatca

SEQ ID NO: 138975 - DNA, 25 bp, Artificial
  Probe
cagcaagaagaatcaggataacatc

SEQ ID NO: 138976 - DNA, 25 bp, Artificial
  Probe
tgtgaatgaatccagagatgaagat

SEQ ID NO: 138977 - DNA, 25 bp, Artificial
  Probe
gcaagaagaatcaggataacatcaa

SEQ ID NO: 138978 - DNA, 25 bp, Artificial
  Probe
tatgttaccttcattgttaccacca

SEQ ID NO: 138979 - DNA, 25 bp, Artificial
  Probe
ttcagcaagaagaatcaggataaca

SEQ ID NO: 138980 - DNA, 25 bp, Artificial
  Probe
attgtgaatgaatccagagatgaag

SEQ ID NO: 138981 - DNA, 25 bp, Artificial
  Probe
ctatgttaccttcattgttaccacc

SEQ ID NO: 138982 - DNA, 25 bp, Artificial
  Probe
cctatgttaccttcattgttaccac

SEQ ID NO: 138983 - DNA, 25 bp, Artificial
  Probe
gttcagcaagaagaatcaggataac

SEQ ID NO: 138984 - DNA, 25 bp, Artificial
  Probe
gcctatgttaccttcattgttacca

SEQ ID NO: 138985 - DNA, 25 bp, Artificial
  Probe
ggttcagcaagaagaatcaggataa

SEQ ID NO: 138986 - DNA, 25 bp, Artificial
  Probe
atgttaccttcattgttaccaccaa

SEQ ID NO: 138987 - DNA, 25 bp, Artificial
  Probe
tatattcaactcgtggttcttgtgg

SEQ ID NO: 138988 - DNA, 25 bp, Artificial
  Probe
gaacttctccttccaaccttgtaag

SEQ ID NO: 138989 - DNA, 25 bp, Artificial
  Probe
aggttcagcaagaagaatcaggata

SEQ ID NO: 138990 - DNA, 25 bp, Artificial
  Probe
tattgtgaatgaatccagagatgaa

SEQ ID NO: 138991 - DNA, 25 bp, Artificial
  Probe
atatattcaactcgtggttcttgtg

SEQ ID NO: 138992 - DNA, 25 bp, Artificial
  Probe
atattgtgaatgaatccagagatga

SEQ ID NO: 138993 - DNA, 25 bp, Artificial
  Probe
catattgtgaatgaatccagagatg

SEQ ID NO: 138994 - DNA, 25 bp, Artificial
  Probe
agaacttctccttccaaccttgtaa

SEQ ID NO: 138995 - DNA, 25 bp, Artificial
  Probe
aaggttcagcaagaagaatcaggat

SEQ ID NO: 138996 - DNA, 25 bp, Artificial
  Probe
tgtggaacataaggatctaatgaca

SEQ ID NO: 138997 - DNA, 25 bp, Artificial
  Probe
gtggaacataaggatctaatgacat

SEQ ID NO: 138998 - DNA, 25 bp, Artificial
  Probe
ctgtggaacataaggatctaatgac

SEQ ID NO: 138999 - DNA, 25 bp, Artificial
  Probe
tctgtggaacataaggatctaatga

SEQ ID NO: 139000 - DNA, 25 bp, Artificial
  Probe
ctgtgaatggagcttgatgtagaat

SEQ ID NO: 139001 - DNA, 25 bp, Artificial
  Probe
gaatgaatccagagatgaagattgc

SEQ ID NO: 139002 - DNA, 25 bp, Artificial
  Probe
tgtgaatggagcttgatgtagaatg

SEQ ID NO: 139003 - DNA, 25 bp, Artificial
  Probe
tatagtggtgttgtatcacatggac

SEQ ID NO: 139004 - DNA, 25 bp, Artificial
  Probe
cagaacttctccttccaaccttgta

SEQ ID NO: 139005 - DNA, 25 bp, Artificial
  Probe
tccagagatgaagattgcagtaatt

SEQ ID NO: 139006 - DNA, 25 bp, Artificial
  Probe
atccagagatgaagattgcagtaat

SEQ ID NO: 139007 - DNA, 25 bp, Artificial
  Probe
tgaatgaatccagagatgaagattg

SEQ ID NO: 139008 - DNA, 25 bp, Artificial
  Probe
gtgaatgaatccagagatgaagatt

SEQ ID NO: 139009 - DNA, 25 bp, Artificial
  Probe
ttctgtggaacataaggatctaatg

SEQ ID NO: 139010 - DNA, 25 bp, Artificial
  Probe
gtgaatggagcttgatgtagaatgg

SEQ ID NO: 139011 - DNA, 25 bp, Artificial
  Probe
caagaagaatcaggataacatcaat

SEQ ID NO: 139012 - DNA, 25 bp, Artificial
  Probe
actgtgaatggagcttgatgtagaa

SEQ ID NO: 139013 - DNA, 25 bp, Artificial
  Probe
ccttcattgttaccaccaaatactc

SEQ ID NO: 139014 - DNA, 25 bp, Artificial
  Probe
accttcattgttaccaccaaatact

SEQ ID NO: 139015 - DNA, 25 bp, Artificial
  Probe
gttaccttcattgttaccaccaaat

SEQ ID NO: 139016 - DNA, 25 bp, Artificial
  Probe
aagaagaatcaggataacatcaatc

SEQ ID NO: 139017 - DNA, 25 bp, Artificial
  Probe
attccaactctaatgtcaatcgttc

SEQ ID NO: 139018 - DNA, 25 bp, Artificial
  Probe
cttatcaggagaccaagacacattc

SEQ ID NO: 139019 - DNA, 25 bp, Artificial
  Probe
tctaatgtcaatcgttccttatcag

SEQ ID NO: 139020 - DNA, 25 bp, Artificial
  Probe
ctctaatgtcaatcgttccttatca

SEQ ID NO: 139021 - DNA, 25 bp, Artificial
  Probe
actctaatgtcaatcgttccttatc

SEQ ID NO: 139022 - DNA, 25 bp, Artificial
  Probe
caactctaatgtcaatcgttcctta

SEQ ID NO: 139023 - DNA, 25 bp, Artificial
  Probe
ccaactctaatgtcaatcgttcctt

SEQ ID NO: 139024 - DNA, 25 bp, Artificial
  Probe
ttccaactctaatgtcaatcgttcc

SEQ ID NO: 139025 - DNA, 25 bp, Artificial
  Probe
tccaactctaatgtcaatcgttcct

SEQ ID NO: 139026 - DNA, 25 bp, Artificial
  Probe
aactctaatgtcaatcgttccttat

SEQ ID NO: 139027 - DNA, 25 bp, Artificial
  Probe
ctaatgtcaatcgttccttatcagg

SEQ ID NO: 139028 - DNA, 25 bp, Artificial
  Probe
gtaacacctacaccattatcttgga

SEQ ID NO: 139029 - DNA, 25 bp, Artificial
  Probe
agattccaactctaatgtcaatcgt

SEQ ID NO: 139030 - DNA, 25 bp, Artificial
  Probe
gagattccaactctaatgtcaatcg

SEQ ID NO: 139031 - DNA, 25 bp, Artificial
  Probe
taacacctacaccattatcttggaa

SEQ ID NO: 139032 - DNA, 25 bp, Artificial
  Probe
gattccaactctaatgtcaatcgtt

SEQ ID NO: 139033 - DNA, 25 bp, Artificial
  Probe
ggagattccaactctaatgtcaatc

SEQ ID NO: 139034 - DNA, 25 bp, Artificial
  Probe
tgtaacacctacaccattatcttgg

SEQ ID NO: 139035 - DNA, 25 bp, Artificial
  Probe
ccttatcaggagaccaagacacatt

SEQ ID NO: 139036 - DNA, 25 bp, Artificial
  Probe
cataccactcatggatctgaatcag

SEQ ID NO: 139037 - DNA, 25 bp, Artificial
  Probe
ttatcaggagaccaagacacattcc

SEQ ID NO: 139038 - DNA, 25 bp, Artificial
  Probe
aaagaaacaaccgttggaaacataa

SEQ ID NO: 139039 - DNA, 25 bp, Artificial
  Probe
gaaagaaacaaccgttggaaacata

SEQ ID NO: 139040 - DNA, 25 bp, Artificial
  Probe
tgctactgattgtttcattgcgaat

SEQ ID NO: 139041 - DNA, 25 bp, Artificial
  Probe
aagaaacaaccgttggaaacataac

SEQ ID NO: 139042 - DNA, 25 bp, Artificial
  Probe
tatcaggagaccaagacacattcca

SEQ ID NO: 139043 - DNA, 25 bp, Artificial
  Probe
ctactgattgtttcattgcgaatct

SEQ ID NO: 139044 - DNA, 25 bp, Artificial
  Probe
aacacctacaccattatcttggaaa

SEQ ID NO: 139045 - DNA, 25 bp, Artificial
  Probe
actgattgtttcattgcgaatcttt

SEQ ID NO: 139046 - DNA, 25 bp, Artificial
  Probe
tactgattgtttcattgcgaatctt

SEQ ID NO: 139047 - DNA, 25 bp, Artificial
  Probe
acacctacaccattatcttggaaag

SEQ ID NO: 139048 - DNA, 25 bp, Artificial
  Probe
ttggaaacataaccattacagggag

SEQ ID NO: 139049 - DNA, 25 bp, Artificial
  Probe
gttggaaacataaccattacaggga

SEQ ID NO: 139050 - DNA, 25 bp, Artificial
  Probe
aaccgttggaaacataaccattaca

SEQ ID NO: 139051 - DNA, 25 bp, Artificial
  Probe
caaacacaacctctggtcctataag

SEQ ID NO: 139052 - DNA, 25 bp, Artificial
  Probe
gctactgattgtttcattgcgaatc

SEQ ID NO: 139053 - DNA, 25 bp, Artificial
  Probe
ctgaatcagatggacactcacatgg

SEQ ID NO: 139054 - DNA, 25 bp, Artificial
  Probe
gtgctactgattgtttcattgcgaa

SEQ ID NO: 139055 - DNA, 25 bp, Artificial
  Probe
atgtgctactgattgtttcattgcg

SEQ ID NO: 139056 - DNA, 25 bp, Artificial
  Probe
accgttggaaacataaccattacag

SEQ ID NO: 139057 - DNA, 25 bp, Artificial
  Probe
aatgtgctactgattgtttcattgc

SEQ ID NO: 139058 - DNA, 25 bp, Artificial
  Probe
caaccgttggaaacataaccattac

SEQ ID NO: 139059 - DNA, 25 bp, Artificial
  Probe
agaaacaaccgttggaaacataacc

SEQ ID NO: 139060 - DNA, 25 bp, Artificial
  Probe
cattatcttggaaagaaacaaccgt

SEQ ID NO: 139061 - DNA, 25 bp, Artificial
  Probe
accattatcttggaaagaaacaacc

SEQ ID NO: 139062 - DNA, 25 bp, Artificial
  Probe
agtctacatcatcctcttccatatt

SEQ ID NO: 139063 - DNA, 25 bp, Artificial
  Probe
aagtctacatcatcctcttccatat

SEQ ID NO: 139064 - DNA, 25 bp, Artificial
  Probe
caaagtctacatcatcctcttccat

SEQ ID NO: 139065 - DNA, 25 bp, Artificial
  Probe
aaagtctacatcatcctcttccata

SEQ ID NO: 139066 - DNA, 25 bp, Artificial
  Probe
gtctacatcatcctcttccatattt

SEQ ID NO: 139067 - DNA, 25 bp, Artificial
  Probe
tctacatcatcctcttccatatttt

SEQ ID NO: 139068 - DNA, 25 bp, Artificial
  Probe
ttgtgagctatgttatgagaagttc

SEQ ID NO: 139069 - DNA, 25 bp, Artificial
  Probe
tgtgagctatgttatgagaagttct

SEQ ID NO: 139070 - DNA, 25 bp, Artificial
  Probe
actgtattgtgagctatgttatgag

SEQ ID NO: 139071 - DNA, 25 bp, Artificial
  Probe
attgtgagctatgttatgagaagtt

SEQ ID NO: 139072 - DNA, 25 bp, Artificial
  Probe
gtgagctatgttatgagaagttctt

SEQ ID NO: 139073 - DNA, 25 bp, Artificial
  Probe
ctgtattgtgagctatgttatgaga

SEQ ID NO: 139074 - DNA, 25 bp, Artificial
  Probe
gcactgtattgtgagctatgttatg

SEQ ID NO: 139075 - DNA, 25 bp, Artificial
  Probe
tgtattgtgagctatgttatgagaa

SEQ ID NO: 139076 - DNA, 25 bp, Artificial
  Probe
gctatgttatgagaagttctttgct

SEQ ID NO: 139077 - DNA, 25 bp, Artificial
  Probe
cactgtattgtgagctatgttatga

SEQ ID NO: 139078 - DNA, 25 bp, Artificial
  Probe
tattgtgagctatgttatgagaagt

SEQ ID NO: 139079 - DNA, 25 bp, Artificial
  Probe
tatataggctttgtggaggagaagg

SEQ ID NO: 139080 - DNA, 25 bp, Artificial
  Probe
tatgagaagttctttgctcctgaat

SEQ ID NO: 139081 - DNA, 25 bp, Artificial
  Probe
ttatgagaagttctttgctcctgaa

SEQ ID NO: 139082 - DNA, 25 bp, Artificial
  Probe
atgttatgagaagttctttgctcct

SEQ ID NO: 139083 - DNA, 25 bp, Artificial
  Probe
cctgaagggataaactcaaacatta

SEQ ID NO: 139084 - DNA, 25 bp, Artificial
  Probe
acagttccaggaaagagaagaaatt

SEQ ID NO: 139085 - DNA, 25 bp, Artificial
  Probe
aacagttccaggaaagagaagaaat

SEQ ID NO: 139086 - DNA, 25 bp, Artificial
  Probe
gtattgtgagctatgttatgagaag

SEQ ID NO: 139087 - DNA, 25 bp, Artificial
  Probe
gttatgagaagttctttgctcctga

SEQ ID NO: 139088 - DNA, 25 bp, Artificial
  Probe
aaatcaacagttccaggaaagagaa

SEQ ID NO: 139089 - DNA, 25 bp, Artificial
  Probe
tgttatgagaagttctttgctcctg

SEQ ID NO: 139090 - DNA, 25 bp, Artificial
  Probe
tatgttatgagaagttctttgctcc

SEQ ID NO: 139091 - DNA, 25 bp, Artificial
  Probe
aatcaacagttccaggaaagagaag

SEQ ID NO: 139092 - DNA, 25 bp, Artificial
  Probe
caacagttccaggaaagagaagaaa

SEQ ID NO: 139093 - DNA, 25 bp, Artificial
  Probe
atgagaagttctttgctcctgaatg

SEQ ID NO: 139094 - DNA, 25 bp, Artificial
  Probe
agcactgtattgtgagctatgttat

SEQ ID NO: 139095 - DNA, 25 bp, Artificial
  Probe
gagcactgtattgtgagctatgtta

SEQ ID NO: 139096 - DNA, 25 bp, Artificial
  Probe
atcaacagttccaggaaagagaaga

SEQ ID NO: 139097 - DNA, 25 bp, Artificial
  Probe
agctatgttatgagaagttctttgc

SEQ ID NO: 139098 - DNA, 25 bp, Artificial
  Probe
atgctcattctgtgaatttctgaaa

SEQ ID NO: 139099 - DNA, 25 bp, Artificial
  Probe
tcaacagttccaggaaagagaagaa

SEQ ID NO: 139100 - DNA, 25 bp, Artificial
  Probe
gttccaggaaagagaagaaatttga

SEQ ID NO: 139101 - DNA, 25 bp, Artificial
  Probe
agttccaggaaagagaagaaatttg

SEQ ID NO: 139102 - DNA, 25 bp, Artificial
  Probe
cagttccaggaaagagaagaaattt

SEQ ID NO: 139103 - DNA, 25 bp, Artificial
  Probe
gagaagttctttgctcctgaatgtg

SEQ ID NO: 139104 - DNA, 25 bp, Artificial
  Probe
catgctcattctgtgaatttctgaa

SEQ ID NO: 139105 - DNA, 25 bp, Artificial
  Probe
aacatgctcattctgtgaatttctg

SEQ ID NO: 139106 - DNA, 25 bp, Artificial
  Probe
aaacatgctcattctgtgaatttct

SEQ ID NO: 139107 - DNA, 25 bp, Artificial
  Probe
ctatgttatgagaagttctttgctc

SEQ ID NO: 139108 - DNA, 25 bp, Artificial
  Probe
ttccaggaaagagaagaaatttgaa

SEQ ID NO: 139109 - DNA, 25 bp, Artificial
  Probe
ctgaagggataaactcaaacattaa

SEQ ID NO: 139110 - DNA, 25 bp, Artificial
  Probe
tgagaagttctttgctcctgaatgt

SEQ ID NO: 139111 - DNA, 25 bp, Artificial
  Probe
acatgctcattctgtgaatttctga

SEQ ID NO: 139112 - DNA, 25 bp, Artificial
  Probe
tgaaagtttggaagggcagacattt

SEQ ID NO: 139113 - DNA, 25 bp, Artificial
  Probe
aattatgagagaatgttggtatgcc

SEQ ID NO: 139114 - DNA, 25 bp, Artificial
  Probe
tgccttactatgatcttgtaccttc

SEQ ID NO: 139115 - DNA, 25 bp, Artificial
  Probe
gttgccttactatgatcttgtacct

SEQ ID NO: 139116 - DNA, 25 bp, Artificial
  Probe
agactaccagttgccttactatgat

SEQ ID NO: 139117 - DNA, 25 bp, Artificial
  Probe
gaagactaccagttgccttactatg

SEQ ID NO: 139118 - DNA, 25 bp, Artificial
  Probe
gccttactatgatcttgtaccttct

SEQ ID NO: 139119 - DNA, 25 bp, Artificial
  Probe
ttgccttactatgatcttgtacctt

SEQ ID NO: 139120 - DNA, 25 bp, Artificial
  Probe
aagactaccagttgccttactatga

SEQ ID NO: 139121 - DNA, 25 bp, Artificial
  Probe
agttgccttactatgatcttgtacc

SEQ ID NO: 139122 - DNA, 25 bp, Artificial
  Probe
ccagttgccttactatgatcttgta

SEQ ID NO: 139123 - DNA, 25 bp, Artificial
  Probe
taccagttgccttactatgatcttg

SEQ ID NO: 139124 - DNA, 25 bp, Artificial
  Probe
ctaccagttgccttactatgatctt

SEQ ID NO: 139125 - DNA, 25 bp, Artificial
  Probe
gactaccagttgccttactatgatc

SEQ ID NO: 139126 - DNA, 25 bp, Artificial
  Probe
cagttgccttactatgatcttgtac

SEQ ID NO: 139127 - DNA, 25 bp, Artificial
  Probe
actaccagttgccttactatgatct

SEQ ID NO: 139128 - DNA, 25 bp, Artificial
  Probe
cgaagactaccagttgccttactat

SEQ ID NO: 139129 - DNA, 25 bp, Artificial
  Probe
ccttactatgatcttgtaccttctg

SEQ ID NO: 139130 - DNA, 25 bp, Artificial
  Probe
attatgagagaatgttggtatgcca

SEQ ID NO: 139131 - DNA, 25 bp, Artificial
  Probe
accagttgccttactatgatcttgt

SEQ ID NO: 139132 - DNA, 25 bp, Artificial
  Probe
aatgggcttagtattctgggaaatc

SEQ ID NO: 139133 - DNA, 25 bp, Artificial
  Probe
atccatccgttgaagaaatgagaaa

SEQ ID NO: 139134 - DNA, 25 bp, Artificial
  Probe
caatgggcttagtattctgggaaat

SEQ ID NO: 139135 - DNA, 25 bp, Artificial
  Probe
cttactatgatcttgtaccttctga

SEQ ID NO: 139136 - DNA, 25 bp, Artificial
  Probe
gtagtttgtgaacagaagttaaggc

SEQ ID NO: 139137 - DNA, 25 bp, Artificial
  Probe
acgaagactaccagttgccttacta

SEQ ID NO: 139138 - DNA, 25 bp, Artificial
  Probe
agtagtttgtgaacagaagttaagg

SEQ ID NO: 139139 - DNA, 25 bp, Artificial
  Probe
aattgatattgctccaaaccacaga

SEQ ID NO: 139140 - DNA, 25 bp, Artificial
  Probe
atcttcacatggagattgttggtac

SEQ ID NO: 139141 - DNA, 25 bp, Artificial
  Probe
catcttcacatggagattgttggta

SEQ ID NO: 139142 - DNA, 25 bp, Artificial
  Probe
gctattgcccatagagatttgaaat

SEQ ID NO: 139143 - DNA, 25 bp, Artificial
  Probe
atcttgtaccttctgatccatccgt

SEQ ID NO: 139144 - DNA, 25 bp, Artificial
  Probe
cttgtaccttctgatccatccgttg

SEQ ID NO: 139145 - DNA, 25 bp, Artificial
  Probe
gatattgctccaaaccacagagtag

SEQ ID NO: 139146 - DNA, 25 bp, Artificial
  Probe
gatccatccgttgaagaaatgagaa

SEQ ID NO: 139147 - DNA, 25 bp, Artificial
  Probe
attgatattgctccaaaccacagag

SEQ ID NO: 139148 - DNA, 25 bp, Artificial
  Probe
aatggaacctgttgtattgcagatt

SEQ ID NO: 139149 - DNA, 25 bp, Artificial
  Probe
atgatcttgtaccttctgatccatc

SEQ ID NO: 139150 - DNA, 25 bp, Artificial
  Probe
tcttgtaccttctgatccatccgtt

SEQ ID NO: 139151 - DNA, 25 bp, Artificial
  Probe
ctatgatcttgtaccttctgatcca

SEQ ID NO: 139152 - DNA, 25 bp, Artificial
  Probe
actatgatcttgtaccttctgatcc

SEQ ID NO: 139153 - DNA, 25 bp, Artificial
  Probe
tgatattgctccaaaccacagagta

SEQ ID NO: 139154 - DNA, 25 bp, Artificial
  Probe
ttactatgatcttgtaccttctgat

SEQ ID NO: 139155 - DNA, 25 bp, Artificial
  Probe
aaattatgagagaatgttggtatgc

SEQ ID NO: 139156 - DNA, 25 bp, Artificial
  Probe
ctgatccatccgttgaagaaatgag

SEQ ID NO: 139157 - DNA, 25 bp, Artificial
  Probe
tatgatcttgtaccttctgatccat

SEQ ID NO: 139158 - DNA, 25 bp, Artificial
  Probe
tcaactttactgtgtcacttcttct

SEQ ID NO: 139159 - DNA, 25 bp, Artificial
  Probe
atcaactttactgtgtcacttcttc

SEQ ID NO: 139160 - DNA, 25 bp, Artificial
  Probe
caactttactgtgtcacttcttcta

SEQ ID NO: 139161 - DNA, 25 bp, Artificial
  Probe
ggatcaactttactgtgtcacttct

SEQ ID NO: 139162 - DNA, 25 bp, Artificial
  Probe
aggatcaactttactgtgtcacttc

SEQ ID NO: 139163 - DNA, 25 bp, Artificial
  Probe
gatcaactttactgtgtcacttctt

SEQ ID NO: 139164 - DNA, 25 bp, Artificial
  Probe
ttactgtgtcacttcttctatttca

SEQ ID NO: 139165 - DNA, 25 bp, Artificial
  Probe
actttactgtgtcacttcttctatt

SEQ ID NO: 139166 - DNA, 25 bp, Artificial
  Probe
aactttactgtgtcacttcttctat

SEQ ID NO: 139167 - DNA, 25 bp, Artificial
  Probe
caggatcaactttactgtgtcactt

SEQ ID NO: 139168 - DNA, 25 bp, Artificial
  Probe
tactgtgtcacttcttctatttcac

SEQ ID NO: 139169 - DNA, 25 bp, Artificial
  Probe
ctcaggatcaactttactgtgtcac

SEQ ID NO: 139170 - DNA, 25 bp, Artificial
  Probe
cctaagcatgtgactgacaaatcat

SEQ ID NO: 139171 - DNA, 25 bp, Artificial
  Probe
cggtggagtttgcatgattaaatag

SEQ ID NO: 139172 - DNA, 25 bp, Artificial
  Probe
ggtggagtttgcatgattaaatagc

SEQ ID NO: 139173 - DNA, 25 bp, Artificial
  Probe
tcaggatcaactttactgtgtcact

SEQ ID NO: 139174 - DNA, 25 bp, Artificial
  Probe
atcctgtcttccgtacaacatggta

SEQ ID NO: 139175 - DNA, 25 bp, Artificial
  Probe
tttactgtgtcacttcttctatttc

SEQ ID NO: 139176 - DNA, 25 bp, Artificial
  Probe
ctttactgtgtcacttcttctattt

SEQ ID NO: 139177 - DNA, 25 bp, Artificial
  Probe
cacctaagcatgtgactgacaaatc

SEQ ID NO: 139178 - DNA, 25 bp, Artificial
  Probe
acctaagcatgtgactgacaaatca

SEQ ID NO: 139179 - DNA, 25 bp, Artificial
  Probe
gcggtggagtttgcatgattaaata

SEQ ID NO: 139180 - DNA, 25 bp, Artificial
  Probe
gctcaggatcaactttactgtgtca

SEQ ID NO: 139181 - DNA, 25 bp, Artificial
  Probe
ggctcaggatcaactttactgtgtc

SEQ ID NO: 139182 - DNA, 25 bp, Artificial
  Probe
ctaagcatgtgactgacaaatcatg

SEQ ID NO: 139183 - DNA, 25 bp, Artificial
  Probe
gtggagtttgcatgattaaatagca

SEQ ID NO: 139184 - DNA, 25 bp, Artificial
  Probe
tggagtttgcatgattaaatagcat

SEQ ID NO: 139185 - DNA, 25 bp, Artificial
  Probe
catcctgtcttccgtacaacatggt

SEQ ID NO: 139186 - DNA, 25 bp, Artificial
  Probe
gcacctaagcatgtgactgacaaat

SEQ ID NO: 139187 - DNA, 25 bp, Artificial
  Probe
ggagtttgcatgattaaatagcata

SEQ ID NO: 139188 - DNA, 25 bp, Artificial
  Probe
gggctcaggatcaactttactgtgt

SEQ ID NO: 139189 - DNA, 25 bp, Artificial
  Probe
ggcggtggagtttgcatgattaaat

SEQ ID NO: 139190 - DNA, 25 bp, Artificial
  Probe
atgtgactgacaaatcatgactgca

SEQ ID NO: 139191 - DNA, 25 bp, Artificial
  Probe
taagcatgtgactgacaaatcatga

SEQ ID NO: 139192 - DNA, 25 bp, Artificial
  Probe
gagtttgcatgattaaatagcataa

SEQ ID NO: 139193 - DNA, 25 bp, Artificial
  Probe
ttggagcacttttgcagcaatatta

SEQ ID NO: 139194 - DNA, 25 bp, Artificial
  Probe
ctgacaaatcatgactgcacctgag

SEQ ID NO: 139195 - DNA, 25 bp, Artificial
  Probe
aagcatgtgactgacaaatcatgac

SEQ ID NO: 139196 - DNA, 25 bp, Artificial
  Probe
tggagcacttttgcagcaatattag

SEQ ID NO: 139197 - DNA, 25 bp, Artificial
  Probe
gactgacaaatcatgactgcacctg

SEQ ID NO: 139198 - DNA, 25 bp, Artificial
  Probe
tgtgactgacaaatcatgactgcac

SEQ ID NO: 139199 - DNA, 25 bp, Artificial
  Probe
tttggagcacttttgcagcaatatt

SEQ ID NO: 139200 - DNA, 25 bp, Artificial
  Probe
ttttggagcacttttgcagcaatat

SEQ ID NO: 139201 - DNA, 25 bp, Artificial
  Probe
agtttgcatgattaaatagcataaa

SEQ ID NO: 139202 - DNA, 25 bp, Artificial
  Probe
cacttttgcagcaatattagcagct

SEQ ID NO: 139203 - DNA, 25 bp, Artificial
  Probe
ttgattagttgtagtgttccaagca

SEQ ID NO: 139204 - DNA, 25 bp, Artificial
  Probe
caatcaatgaaggatctacttacca

SEQ ID NO: 139205 - DNA, 25 bp, Artificial
  Probe
tgattagttgtagtgttccaagcac

SEQ ID NO: 139206 - DNA, 25 bp, Artificial
  Probe
tcaatcaatgaaggatctacttacc

SEQ ID NO: 139207 - DNA, 25 bp, Artificial
  Probe
acatcaacaccaacagttacctctc

SEQ ID NO: 139208 - DNA, 25 bp, Artificial
  Probe
gattagttgtagtgttccaagcacc

SEQ ID NO: 139209 - DNA, 25 bp, Artificial
  Probe
ctgttagggatgaagagtctgaatc

SEQ ID NO: 139210 - DNA, 25 bp, Artificial
  Probe
atagaagttgctcctttggtagaag

SEQ ID NO: 139211 - DNA, 25 bp, Artificial
  Probe
catagaagttgctcctttggtagaa

SEQ ID NO: 139212 - DNA, 25 bp, Artificial
  Probe
ggagaaagacaataaaggaacaaga

SEQ ID NO: 139213 - DNA, 25 bp, Artificial
  Probe
aggagaaagacaataaaggaacaag

SEQ ID NO: 139214 - DNA, 25 bp, Artificial
  Probe
aatcaatgaaggatctacttaccat

SEQ ID NO: 139215 - DNA, 25 bp, Artificial
  Probe
tttgattagttgtagtgttccaagc

SEQ ID NO: 139216 - DNA, 25 bp, Artificial
  Probe
ctcctttggtagaagacaagatgat

SEQ ID NO: 139217 - DNA, 25 bp, Artificial
  Probe
cacatcaacaccaacagttacctct

SEQ ID NO: 139218 - DNA, 25 bp, Artificial
  Probe
tcctttggtagaagacaagatgatt

SEQ ID NO: 139219 - DNA, 25 bp, Artificial
  Probe
tagaagttgctcctttggtagaaga

SEQ ID NO: 139220 - DNA, 25 bp, Artificial
  Probe
tcaatgaaggatctacttaccatag

SEQ ID NO: 139221 - DNA, 25 bp, Artificial
  Probe
aaggagaaagacaataaaggaacaa

SEQ ID NO: 139222 - DNA, 25 bp, Artificial
  Probe
aaaggagaaagacaataaaggaaca

SEQ ID NO: 139223 - DNA, 25 bp, Artificial
  Probe
attagttgtagtgttccaagcacca

SEQ ID NO: 139224 - DNA, 25 bp, Artificial
  Probe
tgatttgattagttgtagtgttcca

SEQ ID NO: 139225 - DNA, 25 bp, Artificial
  Probe
cctttggtagaagacaagatgattt

SEQ ID NO: 139226 - DNA, 25 bp, Artificial
  Probe
tacgtctgacattgaagagaaggaa

SEQ ID NO: 139227 - DNA, 25 bp, Artificial
  Probe
agaaagacaataaaggaacaagact

SEQ ID NO: 139228 - DNA, 25 bp, Artificial
  Probe
tctacgagaaccagagaacaagaaa

SEQ ID NO: 139229 - DNA, 25 bp, Artificial
  Probe
gagaaagacaataaaggaacaagac

SEQ ID NO: 139230 - DNA, 25 bp, Artificial
  Probe
catcaacaccaacagttacctctcc

SEQ ID NO: 139231 - DNA, 25 bp, Artificial
  Probe
ttctacgagaaccagagaacaagaa

SEQ ID NO: 139232 - DNA, 25 bp, Artificial
  Probe
tttggtagaagacaagatgatttga

SEQ ID NO: 139233 - DNA, 25 bp, Artificial
  Probe
aagacaataggaagaagccgttcta

SEQ ID NO: 139234 - DNA, 25 bp, Artificial
  Probe
cagtacgtctgacattgaagagaag

SEQ ID NO: 139235 - DNA, 25 bp, Artificial
  Probe
ctacttaccatagaagttgctcctt

SEQ ID NO: 139236 - DNA, 25 bp, Artificial
  Probe
gtacgtctgacattgaagagaagga

SEQ ID NO: 139237 - DNA, 25 bp, Artificial
  Probe
agtacgtctgacattgaagagaagg

SEQ ID NO: 139238 - DNA, 25 bp, Artificial
  Probe
aagacaataaaggaacaagacttgc

SEQ ID NO: 139239 - DNA, 25 bp, Artificial
  Probe
tggtagaagacaagatgatttgatt

SEQ ID NO: 139240 - DNA, 25 bp, Artificial
  Probe
ttggtagaagacaagatgatttgat

SEQ ID NO: 139241 - DNA, 25 bp, Artificial
  Probe
ctttggtagaagacaagatgatttg

SEQ ID NO: 139242 - DNA, 25 bp, Artificial
  Probe
tctacttaccatagaagttgctcct

SEQ ID NO: 139243 - DNA, 25 bp, Artificial
  Probe
atctacttaccatagaagttgctcc

SEQ ID NO: 139244 - DNA, 25 bp, Artificial
  Probe
ggatctacttaccatagaagttgct

SEQ ID NO: 139245 - DNA, 25 bp, Artificial
  Probe
aggatctacttaccatagaagttgc

SEQ ID NO: 139246 - DNA, 25 bp, Artificial
  Probe
ttgctcctttggtagaagacaagat

SEQ ID NO: 139247 - DNA, 25 bp, Artificial
  Probe
atcaacaccaacagttacctctcca

SEQ ID NO: 139248 - DNA, 25 bp, Artificial
  Probe
ctatgcctgctctgtagtggtagat

SEQ ID NO: 139249 - DNA, 25 bp, Artificial
  Probe
tatgcctgctctgtagtggtagatg

SEQ ID NO: 139250 - DNA, 25 bp, Artificial
  Probe
aaacacagaagaccaatactcactg

SEQ ID NO: 139251 - DNA, 25 bp, Artificial
  Probe
gtcacactagcatacccagtatatg

SEQ ID NO: 139252 - DNA, 25 bp, Artificial
  Probe
tgtcacactagcatacccagtatat

SEQ ID NO: 139253 - DNA, 25 bp, Artificial
  Probe
atgtcacactagcatacccagtata

SEQ ID NO: 139254 - DNA, 25 bp, Artificial
  Probe
aatgtcacactagcatacccagtat

SEQ ID NO: 139255 - DNA, 25 bp, Artificial
  Probe
aagtcaaacattgcgtcatcaacaa

SEQ ID NO: 139256 - DNA, 25 bp, Artificial
  Probe
caatgtcacactagcatacccagta

SEQ ID NO: 139257 - DNA, 25 bp, Artificial
  Probe
ctgtagtggtagatggcgaagtcaa

SEQ ID NO: 139258 - DNA, 25 bp, Artificial
  Probe
tatatgcacaacagaggcgatgaag

SEQ ID NO: 139259 - DNA, 25 bp, Artificial
  Probe
ctccctcaatgtcacactagcatac

SEQ ID NO: 139260 - DNA, 25 bp, Artificial
  Probe
gtcaaacattgcgtcatcaacaaga

SEQ ID NO: 139261 - DNA, 25 bp, Artificial
  Probe
agtcaaacattgcgtcatcaacaag

SEQ ID NO: 139262 - DNA, 25 bp, Artificial
  Probe
gaagtcaaacattgcgtcatcaaca

SEQ ID NO: 139263 - DNA, 25 bp, Artificial
  Probe
gatacagttcctcaccttcaagcca

SEQ ID NO: 139264 - DNA, 25 bp, Artificial
  Probe
gtatatgcacaacagaggcgatgaa

SEQ ID NO: 139265 - DNA, 25 bp, Artificial
  Probe
ctcaatgtcacactagcatacccag

SEQ ID NO: 139266 - DNA, 25 bp, Artificial
  Probe
aaaacacagaagaccaatactcact

SEQ ID NO: 139267 - DNA, 25 bp, Artificial
  Probe
gaaaacacagaagaccaatactcac

SEQ ID NO: 139268 - DNA, 25 bp, Artificial
  Probe
aaacgaaaacacagaagaccaatac

SEQ ID NO: 139269 - DNA, 25 bp, Artificial
  Probe
gaaacgaaaacacagaagaccaata

SEQ ID NO: 139270 - DNA, 25 bp, Artificial
  Probe
ctctgtagtggtagatggcgaagtc

SEQ ID NO: 139271 - DNA, 25 bp, Artificial
  Probe
actccctcaatgtcacactagcata

SEQ ID NO: 139272 - DNA, 25 bp, Artificial
  Probe
gtagtggtagatggcgaagtcaaac

SEQ ID NO: 139273 - DNA, 25 bp, Artificial
  Probe
atacagttcctcaccttcaagccac

SEQ ID NO: 139274 - DNA, 25 bp, Artificial
  Probe
tcggatacagttcctcaccttcaag

SEQ ID NO: 139275 - DNA, 25 bp, Artificial
  Probe
ctcggatacagttcctcaccttcaa

SEQ ID NO: 139276 - DNA, 25 bp, Artificial
  Probe
aacgaaaacacagaagaccaatact

SEQ ID NO: 139277 - DNA, 25 bp, Artificial
  Probe
aaacattgcgtcatcaacaagactg

SEQ ID NO: 139278 - DNA, 25 bp, Artificial
  Probe
caaacattgcgtcatcaacaagact

SEQ ID NO: 139279 - DNA, 25 bp, Artificial
  Probe
tcaaacattgcgtcatcaacaagac

SEQ ID NO: 139280 - DNA, 25 bp, Artificial
  Probe
catacccagtatatgcacaacagag

SEQ ID NO: 139281 - DNA, 25 bp, Artificial
  Probe
cgaaaacacagaagaccaatactca

SEQ ID NO: 139282 - DNA, 25 bp, Artificial
  Probe
acgaaaacacagaagaccaatactc

SEQ ID NO: 139283 - DNA, 25 bp, Artificial
  Probe
gtggtagatggcgaagtcaaacatt

SEQ ID NO: 139284 - DNA, 25 bp, Artificial
  Probe
tagtggtagatggcgaagtcaaaca

SEQ ID NO: 139285 - DNA, 25 bp, Artificial
  Probe
tgtagtggtagatggcgaagtcaaa

SEQ ID NO: 139286 - DNA, 25 bp, Artificial
  Probe
tggtagatggcgaagtcaaacattg

SEQ ID NO: 139287 - DNA, 25 bp, Artificial
  Probe
agtatatgcacaacagaggcgatga

SEQ ID NO: 139288 - DNA, 25 bp, Artificial
  Probe
cagtatatgcacaacagaggcgatg

SEQ ID NO: 139289 - DNA, 25 bp, Artificial
  Probe
cgaagtcaaacattgcgtcatcaac

SEQ ID NO: 139290 - DNA, 25 bp, Artificial
  Probe
tcaatgtcacactagcatacccagt

SEQ ID NO: 139291 - DNA, 25 bp, Artificial
  Probe
atacccagtatatgcacaacagagg

SEQ ID NO: 139292 - DNA, 25 bp, Artificial
  Probe
tctgtagtggtagatggcgaagtca

SEQ ID NO: 139293 - DNA, 25 bp, Artificial
  Probe
ctgtctgtacctctcctattcctac

SEQ ID NO: 139294 - DNA, 25 bp, Artificial
  Probe
cctgtctgtacctctcctattccta

SEQ ID NO: 139295 - DNA, 25 bp, Artificial
  Probe
tctgacttgaagaatgagagtggtc

SEQ ID NO: 139296 - DNA, 25 bp, Artificial
  Probe
cttgaagaatgagagtggtcaggag

SEQ ID NO: 139297 - DNA, 25 bp, Artificial
  Probe
tgacctgtctgtacctctcctattc

SEQ ID NO: 139298 - DNA, 25 bp, Artificial
  Probe
ctgacctgtctgtacctctcctatt

SEQ ID NO: 139299 - DNA, 25 bp, Artificial
  Probe
gtctgtacctctcctattcctacat

SEQ ID NO: 139300 - DNA, 25 bp, Artificial
  Probe
agtgttctctgacttgaagaatgag

SEQ ID NO: 139301 - DNA, 25 bp, Artificial
  Probe
tctgtacctctcctattcctacatg

SEQ ID NO: 139302 - DNA, 25 bp, Artificial
  Probe
ttgcctctcagttatcaacctcatg

SEQ ID NO: 139303 - DNA, 25 bp, Artificial
  Probe
tgtctgtacctctcctattcctaca

SEQ ID NO: 139304 - DNA, 25 bp, Artificial
  Probe
acttgaagaatgagagtggtcagga

SEQ ID NO: 139305 - DNA, 25 bp, Artificial
  Probe
tattcctacatgggcaatgaaatct

SEQ ID NO: 139306 - DNA, 25 bp, Artificial
  Probe
ctattcctacatgggcaatgaaatc

SEQ ID NO: 139307 - DNA, 25 bp, Artificial
  Probe
ctgtacctctcctattcctacatgg

SEQ ID NO: 139308 - DNA, 25 bp, Artificial
  Probe
gacttgaagaatgagagtggtcagg

SEQ ID NO: 139309 - DNA, 25 bp, Artificial
  Probe
gacctgtctgtacctctcctattcc

SEQ ID NO: 139310 - DNA, 25 bp, Artificial
  Probe
aagtgttctctgacttgaagaatga

SEQ ID NO: 139311 - DNA, 25 bp, Artificial
  Probe
cctattcctacatgggcaatgaaat

SEQ ID NO: 139312 - DNA, 25 bp, Artificial
  Probe
attcctacatgggcaatgaaatctc

SEQ ID NO: 139313 - DNA, 25 bp, Artificial
  Probe
ctacatgggcaatgaaatctcctac

SEQ ID NO: 139314 - DNA, 25 bp, Artificial
  Probe
acctgtctgtacctctcctattcct

SEQ ID NO: 139315 - DNA, 25 bp, Artificial
  Probe
tcctattcctacatgggcaatgaaa

SEQ ID NO: 139316 - DNA, 25 bp, Artificial
  Probe
gatcaatgctgacccacactatttc

SEQ ID NO: 139317 - DNA, 25 bp, Artificial
  Probe
atcaatgctgacccacactatttca

SEQ ID NO: 139318 - DNA, 25 bp, Artificial
  Probe
ttgaagaatgagagtggtcaggagg

SEQ ID NO: 139319 - DNA, 25 bp, Artificial
  Probe
cctacatgggcaatgaaatctccta

SEQ ID NO: 139320 - DNA, 25 bp, Artificial
  Probe
ctcctattcctacatgggcaatgaa

SEQ ID NO: 139321 - DNA, 25 bp, Artificial
  Probe
tatttcacacaagtgttctctgact

SEQ ID NO: 139322 - DNA, 25 bp, Artificial
  Probe
ctatttcacacaagtgttctctgac

SEQ ID NO: 139323 - DNA, 25 bp, Artificial
  Probe
actatttcacacaagtgttctctga

SEQ ID NO: 139324 - DNA, 25 bp, Artificial
  Probe
ttctctgacttgaagaatgagagtg

SEQ ID NO: 139325 - DNA, 25 bp, Artificial
  Probe
gttctctgacttgaagaatgagagt

SEQ ID NO: 139326 - DNA, 25 bp, Artificial
  Probe
tgttctctgacttgaagaatgagag

SEQ ID NO: 139327 - DNA, 25 bp, Artificial
  Probe
agatcaatgctgacccacactattt

SEQ ID NO: 139328 - DNA, 25 bp, Artificial
  Probe
gtgttctctgacttgaagaatgaga

SEQ ID NO: 139329 - DNA, 25 bp, Artificial
  Probe
tacatgggcaatgaaatctcctacc

SEQ ID NO: 139330 - DNA, 25 bp, Artificial
  Probe
ctctcctattcctacatgggcaatg

SEQ ID NO: 139331 - DNA, 25 bp, Artificial
  Probe
ctgacccacactatttcacacaagt

SEQ ID NO: 139332 - DNA, 25 bp, Artificial
  Probe
ctctgacttgaagaatgagagtggt

SEQ ID NO: 139333 - DNA, 25 bp, Artificial
  Probe
ttgtgtacagtatgtgtctagcaga

SEQ ID NO: 139334 - DNA, 25 bp, Artificial
  Probe
tctctgacttgaagaatgagagtgg

SEQ ID NO: 139335 - DNA, 25 bp, Artificial
  Probe
ttcctacatgggcaatgaaatctcc

SEQ ID NO: 139336 - DNA, 25 bp, Artificial
  Probe
tctcctattcctacatgggcaatga

SEQ ID NO: 139337 - DNA, 25 bp, Artificial
  Probe
gaagaatgagagtggtcaggaggac

SEQ ID NO: 139338 - DNA, 25 bp, Artificial
  Probe
ctgaagagaagacaaatgaagccta

SEQ ID NO: 139339 - DNA, 25 bp, Artificial
  Probe
atttgctctatattacccacgcttt

SEQ ID NO: 139340 - DNA, 25 bp, Artificial
  Probe
gaggaggataaagagatggaagaat

SEQ ID NO: 139341 - DNA, 25 bp, Artificial
  Probe
gaggataaagagatggaagaattgc

SEQ ID NO: 139342 - DNA, 25 bp, Artificial
  Probe
aatttgctctatattacccacgctt

SEQ ID NO: 139343 - DNA, 25 bp, Artificial
  Probe
ggaggaggataaagagatggaagaa

SEQ ID NO: 139344 - DNA, 25 bp, Artificial
  Probe
ggaggataaagagatggaagaattg

SEQ ID NO: 139345 - DNA, 25 bp, Artificial
  Probe
tgaagagaagacaaatgaagcctag

SEQ ID NO: 139346 - DNA, 25 bp, Artificial
  Probe
gagagaaagtttgacaagggaagag

SEQ ID NO: 139347 - DNA, 25 bp, Artificial
  Probe
gagagagaaagtttgacaagggaag

SEQ ID NO: 139348 - DNA, 25 bp, Artificial
  Probe
aggaggataaagagatggaagaatt

SEQ ID NO: 139349 - DNA, 25 bp, Artificial
  Probe
gaggaggaggataaagagatggaag

SEQ ID NO: 139350 - DNA, 25 bp, Artificial
  Probe
agagagaaagtttgacaagggaaga

SEQ ID NO: 139351 - DNA, 25 bp, Artificial
  Probe
aggaggaggataaagagatggaaga

SEQ ID NO: 139352 - DNA, 25 bp, Artificial
  Probe
gaaagtttgacaagggaagaggatg

SEQ ID NO: 139353 - DNA, 25 bp, Artificial
  Probe
gaagaattgcaggaagacaaggaat

SEQ ID NO: 139354 - DNA, 25 bp, Artificial
  Probe
aagagatggaagaattgcaggaaga

SEQ ID NO: 139355 - DNA, 25 bp, Artificial
  Probe
agaaagtttgacaagggaagaggat

SEQ ID NO: 139356 - DNA, 25 bp, Artificial
  Probe
aagaattgcaggaagacaaggaatg

SEQ ID NO: 139357 - DNA, 25 bp, Artificial
  Probe
ggaagtcctgcttggtaatgaaatt

SEQ ID NO: 139358 - DNA, 25 bp, Artificial
  Probe
aagtttgacaagggaagaggatgaa

SEQ ID NO: 139359 - DNA, 25 bp, Artificial
  Probe
aaagtttgacaagggaagaggatga

SEQ ID NO: 139360 - DNA, 25 bp, Artificial
  Probe
tatggttcctgctcactactgtgta

SEQ ID NO: 139361 - DNA, 25 bp, Artificial
  Probe
tctgaagagaagacaaatgaagcct

SEQ ID NO: 139362 - DNA, 25 bp, Artificial
  Probe
gatggaagaattgcaggaagacaag

SEQ ID NO: 139363 - DNA, 25 bp, Artificial
  Probe
gagaaagtttgacaagggaagagga

SEQ ID NO: 139364 - DNA, 25 bp, Artificial
  Probe
agagaaagtttgacaagggaagagg

SEQ ID NO: 139365 - DNA, 25 bp, Artificial
  Probe
agagatggaagaattgcaggaagac

SEQ ID NO: 139366 - DNA, 25 bp, Artificial
  Probe
tttgacaagggaagaggatgaagac

SEQ ID NO: 139367 - DNA, 25 bp, Artificial
  Probe
gtttgacaagggaagaggatgaaga

SEQ ID NO: 139368 - DNA, 25 bp, Artificial
  Probe
agtttgacaagggaagaggatgaag

SEQ ID NO: 139369 - DNA, 25 bp, Artificial
  Probe
ggaggaggaggataaagagatggaa

SEQ ID NO: 139370 - DNA, 25 bp, Artificial
  Probe
agatggaagaattgcaggaagacaa

SEQ ID NO: 139371 - DNA, 25 bp, Artificial
  Probe
ctgcttggtaatgaaatttgctcta

SEQ ID NO: 139372 - DNA, 25 bp, Artificial
  Probe
gaaatttgctctatattacccacgc

SEQ ID NO: 139373 - DNA, 25 bp, Artificial
  Probe
aaatttgctctatattacccacgct

SEQ ID NO: 139374 - DNA, 25 bp, Artificial
  Probe
tgcttggtaatgaaatttgctctat

SEQ ID NO: 139375 - DNA, 25 bp, Artificial
  Probe
gagatggaagaattgcaggaagaca

SEQ ID NO: 139376 - DNA, 25 bp, Artificial
  Probe
taaagagatggaagaattgcaggaa

SEQ ID NO: 139377 - DNA, 25 bp, Artificial
  Probe
ataaagagatggaagaattgcagga

SEQ ID NO: 139378 - DNA, 25 bp, Artificial
  Probe
aggataaagagatggaagaattgca

SEQ ID NO: 139379 - DNA, 25 bp, Artificial
  Probe
cgagagagaaagtttgacaagggaa

SEQ ID NO: 139380 - DNA, 25 bp, Artificial
  Probe
gataaagagatggaagaattgcagg

SEQ ID NO: 139381 - DNA, 25 bp, Artificial
  Probe
ggataaagagatggaagaattgcag

SEQ ID NO: 139382 - DNA, 25 bp, Artificial
  Probe
tgaaatttgctctatattacccacg

SEQ ID NO: 139383 - DNA, 25 bp, Artificial
  Probe
cctgactatgaaggacaactgattc

SEQ ID NO: 139384 - DNA, 25 bp, Artificial
  Probe
aaggacaactgattccatctactac

SEQ ID NO: 139385 - DNA, 25 bp, Artificial
  Probe
ctatgaaggacaactgattccatct

SEQ ID NO: 139386 - DNA, 25 bp, Artificial
  Probe
atgaaggacaactgattccatctac

SEQ ID NO: 139387 - DNA, 25 bp, Artificial
  Probe
actatgaaggacaactgattccatc

SEQ ID NO: 139388 - DNA, 25 bp, Artificial
  Probe
gactatgaaggacaactgattccat

SEQ ID NO: 139389 - DNA, 25 bp, Artificial
  Probe
gaaggacaactgattccatctacta

SEQ ID NO: 139390 - DNA, 25 bp, Artificial
  Probe
ctgactatgaaggacaactgattcc

SEQ ID NO: 139391 - DNA, 25 bp, Artificial
  Probe
tatgaaggacaactgattccatcta

SEQ ID NO: 139392 - DNA, 25 bp, Artificial
  Probe
tgaaggacaactgattccatctact

SEQ ID NO: 139393 - DNA, 25 bp, Artificial
  Probe
aggacaactgattccatctactacc

SEQ ID NO: 139394 - DNA, 25 bp, Artificial
  Probe
tgactatgaaggacaactgattcca

SEQ ID NO: 139395 - DNA, 25 bp, Artificial
  Probe
tgatgtcagggattagagaaatgtt

SEQ ID NO: 139396 - DNA, 25 bp, Artificial
  Probe
caactgattccatctactacccata

SEQ ID NO: 139397 - DNA, 25 bp, Artificial
  Probe
acaactgattccatctactacccat

SEQ ID NO: 139398 - DNA, 25 bp, Artificial
  Probe
aacaaggtgaagaaactctccatag

SEQ ID NO: 139399 - DNA, 25 bp, Artificial
  Probe
gatgtcagggattagagaaatgttc

SEQ ID NO: 139400 - DNA, 25 bp, Artificial
  Probe
caacaaggtgaagaaactctccata

SEQ ID NO: 139401 - DNA, 25 bp, Artificial
  Probe
gacaactgattccatctactaccca

SEQ ID NO: 139402 - DNA, 25 bp, Artificial
  Probe
aactgattccatctactacccatat

SEQ ID NO: 139403 - DNA, 25 bp, Artificial
  Probe
caaggtgaagaaactctccatagtc

SEQ ID NO: 139404 - DNA, 25 bp, Artificial
  Probe
tatatcagagatcaacactaagggc

SEQ ID NO: 139405 - DNA, 25 bp, Artificial
  Probe
caagtgcctgtaacctgtgtagatg

SEQ ID NO: 139406 - DNA, 25 bp, Artificial
  Probe
gaccgaggtctacatctatgagtac

SEQ ID NO: 139407 - DNA, 25 bp, Artificial
  Probe
tcaagtgcctgtaacctgtgtagat

SEQ ID NO: 139408 - DNA, 25 bp, Artificial
  Probe
acaaggtgaagaaactctccatagt

SEQ ID NO: 139409 - DNA, 25 bp, Artificial
  Probe
tgcctgtaacctgtgtagatgtctt

SEQ ID NO: 139410 - DNA, 25 bp, Artificial
  Probe
caggtgaaatccaggctaatgaaac

SEQ ID NO: 139411 - DNA, 25 bp, Artificial
  Probe
actgattccatctactacccatata

SEQ ID NO: 139412 - DNA, 25 bp, Artificial
  Probe
aagtgcctgtaacctgtgtagatgt

SEQ ID NO: 139413 - DNA, 25 bp, Artificial
  Probe
tgactgaaatccatgagtacaatca

SEQ ID NO: 139414 - DNA, 25 bp, Artificial
  Probe
aagaaactctccatagtcgtgtctc

SEQ ID NO: 139415 - DNA, 25 bp, Artificial
  Probe
gaagaaactctccatagtcgtgtct

SEQ ID NO: 139416 - DNA, 25 bp, Artificial
  Probe
atcaggtgaaatccaggctaatgaa

SEQ ID NO: 139417 - DNA, 25 bp, Artificial
  Probe
accgaggtctacatctatgagtacc

SEQ ID NO: 139418 - DNA, 25 bp, Artificial
  Probe
atgtcagggattagagaaatgttcc

SEQ ID NO: 139419 - DNA, 25 bp, Artificial
  Probe
acccatatatcagagatcaacacta

SEQ ID NO: 139420 - DNA, 25 bp, Artificial
  Probe
tacccatatatcagagatcaacact

SEQ ID NO: 139421 - DNA, 25 bp, Artificial
  Probe
actacccatatatcagagatcaaca

SEQ ID NO: 139422 - DNA, 25 bp, Artificial
  Probe
tccatgagtacaatcaggatatgat

SEQ ID NO: 139423 - DNA, 25 bp, Artificial
  Probe
tgaagaaactctccatagtcgtgtc

SEQ ID NO: 139424 - DNA, 25 bp, Artificial
  Probe
aaggtgaagaaactctccatagtcg

SEQ ID NO: 139425 - DNA, 25 bp, Artificial
  Probe
atgactgaaatccatgagtacaatc

SEQ ID NO: 139426 - DNA, 25 bp, Artificial
  Probe
gcctgtaacctgtgtagatgtcttt

SEQ ID NO: 139427 - DNA, 25 bp, Artificial
  Probe
ccatgagtacaatcaggatatgatc

SEQ ID NO: 139428 - DNA, 25 bp, Artificial
  Probe
cattctctgactatgtctataagcg

SEQ ID NO: 139429 - DNA, 25 bp, Artificial
  Probe
ccattctctgactatgtctataagc

SEQ ID NO: 139430 - DNA, 25 bp, Artificial
  Probe
caagatcatgctggaagatggtaac

SEQ ID NO: 139431 - DNA, 25 bp, Artificial
  Probe
cggaatacaacatctttgaagggat

SEQ ID NO: 139432 - DNA, 25 bp, Artificial
  Probe
aagatcatgctggaagatggtaacc

SEQ ID NO: 139433 - DNA, 25 bp, Artificial
  Probe
agcccattctctgactatgtctata

SEQ ID NO: 139434 - DNA, 25 bp, Artificial
  Probe
gcccattctctgactatgtctataa

SEQ ID NO: 139435 - DNA, 25 bp, Artificial
  Probe
ttgcggaatacaacatctttgaagg

SEQ ID NO: 139436 - DNA, 25 bp, Artificial
  Probe
cagcccattctctgactatgtctat

SEQ ID NO: 139437 - DNA, 25 bp, Artificial
  Probe
gtatgatggaccagtgtttgacttg

SEQ ID NO: 139438 - DNA, 25 bp, Artificial
  Probe
gatcatgctggaagatggtaacctg

SEQ ID NO: 139439 - DNA, 25 bp, Artificial
  Probe
agatcatgctggaagatggtaacct

SEQ ID NO: 139440 - DNA, 25 bp, Artificial
  Probe
tatgatggaccagtgtttgacttga

SEQ ID NO: 139441 - DNA, 25 bp, Artificial
  Probe
atgtatgatggaccagtgtttgact

SEQ ID NO: 139442 - DNA, 25 bp, Artificial
  Probe
tgtatgatggaccagtgtttgactt

SEQ ID NO: 139443 - DNA, 25 bp, Artificial
  Probe
catgtatgatggaccagtgtttgac

SEQ ID NO: 139444 - DNA, 25 bp, Artificial
  Probe
cccattctctgactatgtctataag

SEQ ID NO: 139445 - DNA, 25 bp, Artificial
  Probe
catcagtcgggatttagtctgtcag

SEQ ID NO: 139446 - DNA, 25 bp, Artificial
  Probe
gcggaatacaacatctttgaaggga

SEQ ID NO: 139447 - DNA, 25 bp, Artificial
  Probe
atgatggaccagtgtttgacttgac

SEQ ID NO: 139448 - DNA, 25 bp, Artificial
  Probe
ctctgactatgtctataagcgcatt

SEQ ID NO: 139449 - DNA, 25 bp, Artificial
  Probe
attctctgactatgtctataagcgc

SEQ ID NO: 139450 - DNA, 25 bp, Artificial
  Probe
aatacaacatctttgaagggatgga

SEQ ID NO: 139451 - DNA, 25 bp, Artificial
  Probe
gaatacaacatctttgaagggatgg

SEQ ID NO: 139452 - DNA, 25 bp, Artificial
  Probe
ggaatacaacatctttgaagggatg

SEQ ID NO: 139453 - DNA, 25 bp, Artificial
  Probe
tgcggaatacaacatctttgaaggg

SEQ ID NO: 139454 - DNA, 25 bp, Artificial
  Probe
atacaacatctttgaagggatggag

SEQ ID NO: 139455 - DNA, 25 bp, Artificial
  Probe
tctgactatgtctataagcgcatta

SEQ ID NO: 139456 - DNA, 25 bp, Artificial
  Probe
tctctgactatgtctataagcgcat

SEQ ID NO: 139457 - DNA, 25 bp, Artificial
  Probe
aagaggcatgtatgatggaccagtg

SEQ ID NO: 139458 - DNA, 25 bp, Artificial
  Probe
caagaggcatgtatgatggaccagt

SEQ ID NO: 139459 - DNA, 25 bp, Artificial
  Probe
gcatgtatgatggaccagtgtttga

SEQ ID NO: 139460 - DNA, 25 bp, Artificial
  Probe
ttctctgactatgtctataagcgca

SEQ ID NO: 139461 - DNA, 25 bp, Artificial
  Probe
gcaagatcatgctggaagatggtaa

SEQ ID NO: 139462 - DNA, 25 bp, Artificial
  Probe
ctgactatgtctataagcgcattaa

SEQ ID NO: 139463 - DNA, 25 bp, Artificial
  Probe
gaggcatgtatgatggaccagtgtt

SEQ ID NO: 139464 - DNA, 25 bp, Artificial
  Probe
atcagtcgggatttagtctgtcagg

SEQ ID NO: 139465 - DNA, 25 bp, Artificial
  Probe
gcagcccattctctgactatgtcta

SEQ ID NO: 139466 - DNA, 25 bp, Artificial
  Probe
ccatcagtcgggatttagtctgtca

SEQ ID NO: 139467 - DNA, 25 bp, Artificial
  Probe
cattaaagcaaggaggaagatggcg

SEQ ID NO: 139468 - DNA, 25 bp, Artificial
  Probe
cgcattaaagcaaggaggaagatgg

SEQ ID NO: 139469 - DNA, 25 bp, Artificial
  Probe
atgtctataagcgcattaaagcaag

SEQ ID NO: 139470 - DNA, 25 bp, Artificial
  Probe
tccatcagtcgggatttagtctgtc

SEQ ID NO: 139471 - DNA, 25 bp, Artificial
  Probe
ctccatcagtcgggatttagtctgt

SEQ ID NO: 139472 - DNA, 25 bp, Artificial
  Probe
ctatgtctataagcgcattaaagca

SEQ ID NO: 139473 - DNA, 25 bp, Artificial
  Probe
atgagcaggtttatggtttagcaaa

SEQ ID NO: 139474 - DNA, 25 bp, Artificial
  Probe
aagtgtggacagagagcagtagatt

SEQ ID NO: 139475 - DNA, 25 bp, Artificial
  Probe
gatgagcaggtttatggtttagcaa

SEQ ID NO: 139476 - DNA, 25 bp, Artificial
  Probe
cagaaatgaaagtgtggacagagag

SEQ ID NO: 139477 - DNA, 25 bp, Artificial
  Probe
cagatgagcaggtttatggtttagc

SEQ ID NO: 139478 - DNA, 25 bp, Artificial
  Probe
agatgagcaggtttatggtttagca

SEQ ID NO: 139479 - DNA, 25 bp, Artificial
  Probe
aacagaaatgaaagtgtggacagag

SEQ ID NO: 139480 - DNA, 25 bp, Artificial
  Probe
caacagaaatgaaagtgtggacaga

SEQ ID NO: 139481 - DNA, 25 bp, Artificial
  Probe
agtgtggacagagagcagtagattg

SEQ ID NO: 139482 - DNA, 25 bp, Artificial
  Probe
acagaaatgaaagtgtggacagaga

SEQ ID NO: 139483 - DNA, 25 bp, Artificial
  Probe
ccagatgagcaggtttatggtttag

SEQ ID NO: 139484 - DNA, 25 bp, Artificial
  Probe
atgtggaggctttggtttaaggaaa

SEQ ID NO: 139485 - DNA, 25 bp, Artificial
  Probe
agaaatgaaagtgtggacagagagc

SEQ ID NO: 139486 - DNA, 25 bp, Artificial
  Probe
aaagtgtggacagagagcagtagat

SEQ ID NO: 139487 - DNA, 25 bp, Artificial
  Probe
gatgtggaggctttggtttaaggaa

SEQ ID NO: 139488 - DNA, 25 bp, Artificial
  Probe
aaatgaaagtgtggacagagagcag

SEQ ID NO: 139489 - DNA, 25 bp, Artificial
  Probe
gaaatgaaagtgtggacagagagca

SEQ ID NO: 139490 - DNA, 25 bp, Artificial
  Probe
ggtttatggtttagcaaaaggagaa

SEQ ID NO: 139491 - DNA, 25 bp, Artificial
  Probe
aggtttatggtttagcaaaaggaga

SEQ ID NO: 139492 - DNA, 25 bp, Artificial
  Probe
caggtttatggtttagcaaaaggag

SEQ ID NO: 139493 - DNA, 25 bp, Artificial
  Probe
gagcaggtttatggtttagcaaaag

SEQ ID NO: 139494 - DNA, 25 bp, Artificial
  Probe
aaacttttcggaggttatttgtgac

SEQ ID NO: 139495 - DNA, 25 bp, Artificial
  Probe
atgaaagtgtggacagagagcagta

SEQ ID NO: 139496 - DNA, 25 bp, Artificial
  Probe
acagagagcagtagattggcatgag

SEQ ID NO: 139497 - DNA, 25 bp, Artificial
  Probe
gacagagagcagtagattggcatga

SEQ ID NO: 139498 - DNA, 25 bp, Artificial
  Probe
tgagcaggtttatggtttagcaaaa

SEQ ID NO: 139499 - DNA, 25 bp, Artificial
  Probe
ccaacagaaatgaaagtgtggacag

SEQ ID NO: 139500 - DNA, 25 bp, Artificial
  Probe
gtgtggacagagagcagtagattgg

SEQ ID NO: 139501 - DNA, 25 bp, Artificial
  Probe
tttcacatactgggcaagtgttcat

SEQ ID NO: 139502 - DNA, 25 bp, Artificial
  Probe
gaaagtgtggacagagagcagtaga

SEQ ID NO: 139503 - DNA, 25 bp, Artificial
  Probe
agcaggtttatggtttagcaaaagg

SEQ ID NO: 139504 - DNA, 25 bp, Artificial
  Probe
taaggctttctctaaaatggaactt

SEQ ID NO: 139505 - DNA, 25 bp, Artificial
  Probe
tggaatcttaccaccaccagatgag

SEQ ID NO: 139506 - DNA, 25 bp, Artificial
  Probe
tttatggtttagcaaaaggagaatg

SEQ ID NO: 139507 - DNA, 25 bp, Artificial
  Probe
gtttatggtttagcaaaaggagaat

SEQ ID NO: 139508 - DNA, 25 bp, Artificial
  Probe
gcaggtttatggtttagcaaaagga

SEQ ID NO: 139509 - DNA, 25 bp, Artificial
  Probe
gagagcagtagattggcatgaggag

SEQ ID NO: 139510 - DNA, 25 bp, Artificial
  Probe
ttcacatactgggcaagtgttcatc

SEQ ID NO: 139511 - DNA, 25 bp, Artificial
  Probe
ataaggctttctctaaaatggaact

SEQ ID NO: 139512 - DNA, 25 bp, Artificial
  Probe
tgaaagtgtggacagagagcagtag

SEQ ID NO: 139513 - DNA, 25 bp, Artificial
  Probe
tatttgtgacccctaagtctccttt

SEQ ID NO: 139514 - DNA, 25 bp, Artificial
  Probe
ttatttgtgacccctaagtctcctt

SEQ ID NO: 139515 - DNA, 25 bp, Artificial
  Probe
ttgtgacccctaagtctccttttaa

SEQ ID NO: 139516 - DNA, 25 bp, Artificial
  Probe
tttgtgacccctaagtctcctttta

SEQ ID NO: 139517 - DNA, 25 bp, Artificial
  Probe
gtggatgtggaggctttggtttaag

SEQ ID NO: 139518 - DNA, 25 bp, Artificial
  Probe
tctcatcatagtcggttattgctac

SEQ ID NO: 139519 - DNA, 25 bp, Artificial
  Probe
ctctcatcatagtcggttattgcta

SEQ ID NO: 139520 - DNA, 25 bp, Artificial
  Probe
ctcatcatagtcggttattgctaca

SEQ ID NO: 139521 - DNA, 25 bp, Artificial
  Probe
tcatcatagtcggttattgctacac

SEQ ID NO: 139522 - DNA, 25 bp, Artificial
  Probe
catcatagtcggttattgctacaca

SEQ ID NO: 139523 - DNA, 25 bp, Artificial
  Probe
atcatagtcggttattgctacacaa

SEQ ID NO: 139524 - DNA, 25 bp, Artificial
  Probe
acctacacctgctacttcaactatg

SEQ ID NO: 139525 - DNA, 25 bp, Artificial
  Probe
cacctacacctgctacttcaactat

SEQ ID NO: 139526 - DNA, 25 bp, Artificial
  Probe
cctctcatcatagtcggttattgct

SEQ ID NO: 139527 - DNA, 25 bp, Artificial
  Probe
ctacacctgctacttcaactatgtg

SEQ ID NO: 139528 - DNA, 25 bp, Artificial
  Probe
tacacctgctacttcaactatgtga

SEQ ID NO: 139529 - DNA, 25 bp, Artificial
  Probe
cctacacctgctacttcaactatgt

SEQ ID NO: 139530 - DNA, 25 bp, Artificial
  Probe
gtacattggcaccattgagtatgac

SEQ ID NO: 139531 - DNA, 25 bp, Artificial
  Probe
ctccctctcatcatagtcggttatt

SEQ ID NO: 139532 - DNA, 25 bp, Artificial
  Probe
tcatagtcggttattgctacacaaa

SEQ ID NO: 139533 - DNA, 25 bp, Artificial
  Probe
tccctctcatcatagtcggttattg

SEQ ID NO: 139534 - DNA, 25 bp, Artificial
  Probe
tacattggcaccattgagtatgacc

SEQ ID NO: 139535 - DNA, 25 bp, Artificial
  Probe
ctaacacttgcatctatctggttgt

SEQ ID NO: 139536 - DNA, 25 bp, Artificial
  Probe
ttctggatgtcctgcctaatgtgta

SEQ ID NO: 139537 - DNA, 25 bp, Artificial
  Probe
acacttgcatctatctggttgttac

SEQ ID NO: 139538 - DNA, 25 bp, Artificial
  Probe
ttctaaccatgtttgtgatcttcct

SEQ ID NO: 139539 - DNA, 25 bp, Artificial
  Probe
tctaaccatgtttgtgatcttcctc

SEQ ID NO: 139540 - DNA, 25 bp, Artificial
  Probe
tttctaaccatgtttgtgatcttcc

SEQ ID NO: 139541 - DNA, 25 bp, Artificial
  Probe
ctgctacttcaactatgtgaacaac

SEQ ID NO: 139542 - DNA, 25 bp, Artificial
  Probe
gctaacacttgcatctatctggttg

SEQ ID NO: 139543 - DNA, 25 bp, Artificial
  Probe
cctgctacttcaactatgtgaacaa

SEQ ID NO: 139544 - DNA, 25 bp, Artificial
  Probe
aactatgtgaacaaccctgccttta

SEQ ID NO: 139545 - DNA, 25 bp, Artificial
  Probe
ctaaccatgtttgtgatcttcctcc

SEQ ID NO: 139546 - DNA, 25 bp, Artificial
  Probe
tgctacttcaactatgtgaacaacc

SEQ ID NO: 139547 - DNA, 25 bp, Artificial
  Probe
taaccatgtttgtgatcttcctcct

SEQ ID NO: 139548 - DNA, 25 bp, Artificial
  Probe
cttgcatctatctggttgttacctg

SEQ ID NO: 139549 - DNA, 25 bp, Artificial
  Probe
cctccctctcatcatagtcggttat

SEQ ID NO: 139550 - DNA, 25 bp, Artificial
  Probe
cacctgctacttcaactatgtgaac

SEQ ID NO: 139551 - DNA, 25 bp, Artificial
  Probe
ccctctcatcatagtcggttattgc

SEQ ID NO: 139552 - DNA, 25 bp, Artificial
  Probe
ctatgtgaacaaccctgcctttact

SEQ ID NO: 139553 - DNA, 25 bp, Artificial
  Probe
acttgcatctatctggttgttacct

SEQ ID NO: 139554 - DNA, 25 bp, Artificial
  Probe
cacttgcatctatctggttgttacc

SEQ ID NO: 139555 - DNA, 25 bp, Artificial
  Probe
acctgctacttcaactatgtgaaca

SEQ ID NO: 139556 - DNA, 25 bp, Artificial
  Probe
acacctgctacttcaactatgtgaa

SEQ ID NO: 139557 - DNA, 25 bp, Artificial
  Probe
tatgtgaacaaccctgcctttactg

SEQ ID NO: 139558 - DNA, 25 bp, Artificial
  Probe
actatgtgaacaaccctgcctttac

SEQ ID NO: 139559 - DNA, 25 bp, Artificial
  Probe
tctggatgtcctgcctaatgtgtac

SEQ ID NO: 139560 - DNA, 25 bp, Artificial
  Probe
aaccatgtttgtgatcttcctcctt

SEQ ID NO: 139561 - DNA, 25 bp, Artificial
  Probe
ctgttctggatgtcctgcctaatgt

SEQ ID NO: 139562 - DNA, 25 bp, Artificial
  Probe
actgttctggatgtcctgcctaatg

SEQ ID NO: 139563 - DNA, 25 bp, Artificial
  Probe
aagaagaagagagaggagagagaag

SEQ ID NO: 139564 - DNA, 25 bp, Artificial
  Probe
ctaatgaagaatcggcagtgagata

SEQ ID NO: 139565 - DNA, 25 bp, Artificial
  Probe
taatgaagaatcggcagtgagatat

SEQ ID NO: 139566 - DNA, 25 bp, Artificial
  Probe
gaagaagagagaggagagagaagag

SEQ ID NO: 139567 - DNA, 25 bp, Artificial
  Probe
aagaagagagaggagagagaagaga

SEQ ID NO: 139568 - DNA, 25 bp, Artificial
  Probe
agaagaagagagaggagagagaaga

SEQ ID NO: 139569 - DNA, 25 bp, Artificial
  Probe
aatgaagaatcggcagtgagatatg

SEQ ID NO: 139570 - DNA, 25 bp, Artificial
  Probe
gagaggagagagaagagagagagaa

SEQ ID NO: 139571 - DNA, 25 bp, Artificial
  Probe
aagagagaggagagagaagagagag

SEQ ID NO: 139572 - DNA, 25 bp, Artificial
  Probe
gaagagagaggagagagaagagaga

SEQ ID NO: 139573 - DNA, 25 bp, Artificial
  Probe
agaagagagaggagagagaagagag

SEQ ID NO: 139574 - DNA, 25 bp, Artificial
  Probe
gagagaggagagagaagagagagag

SEQ ID NO: 139575 - DNA, 25 bp, Artificial
  Probe
agagaggagagagaagagagagaga

SEQ ID NO: 139576 - DNA, 25 bp, Artificial
  Probe
agagagaggagagagaagagagaga

SEQ ID NO: 139577 - DNA, 25 bp, Artificial
  Probe
cctaatgaagaatcggcagtgagat

SEQ ID NO: 139578 - DNA, 25 bp, Artificial
  Probe
aaagaagaagagagaggagagagaa

SEQ ID NO: 139579 - DNA, 25 bp, Artificial
  Probe
tgcgaaatcagtaaacaaagatagc

SEQ ID NO: 139580 - DNA, 25 bp, Artificial
  Probe
tttatccctaatgaagaatcggcag

SEQ ID NO: 139581 - DNA, 25 bp, Artificial
  Probe
cctctttaatgcctataatgcttcc

SEQ ID NO: 139582 - DNA, 25 bp, Artificial
  Probe
ccctctttaatgcctataatgcttc

SEQ ID NO: 139583 - DNA, 25 bp, Artificial
  Probe
cgaaatcagtaaacaaagatagcct

SEQ ID NO: 139584 - DNA, 25 bp, Artificial
  Probe
tacgcaaagaaacagaatatggaaa

SEQ ID NO: 139585 - DNA, 25 bp, Artificial
  Probe
gcgaaatcagtaaacaaagatagcc

SEQ ID NO: 139586 - DNA, 25 bp, Artificial
  Probe
atacgcaaagaaacagaatatggaa

SEQ ID NO: 139587 - DNA, 25 bp, Artificial
  Probe
agaggagagagaagagagagagaaa

SEQ ID NO: 139588 - DNA, 25 bp, Artificial
  Probe
ctctttaatgcctataatgcttcca

SEQ ID NO: 139589 - DNA, 25 bp, Artificial
  Probe
agtaaacaaagatagccttcaggaa

SEQ ID NO: 139590 - DNA, 25 bp, Artificial
  Probe
caaagatagccttcaggaaacaaag

SEQ ID NO: 139591 - DNA, 25 bp, Artificial
  Probe
cagtaaacaaagatagccttcagga

SEQ ID NO: 139592 - DNA, 25 bp, Artificial
  Probe
tcagtaaacaaagatagccttcagg

SEQ ID NO: 139593 - DNA, 25 bp, Artificial
  Probe
ctttccaacttagcatcctacccta

SEQ ID NO: 139594 - DNA, 25 bp, Artificial
  Probe
atcagtaaacaaagatagccttcag

SEQ ID NO: 139595 - DNA, 25 bp, Artificial
  Probe
acaaagatagccttcaggaaacaaa

SEQ ID NO: 139596 - DNA, 25 bp, Artificial
  Probe
aacaaagatagccttcaggaaacaa

SEQ ID NO: 139597 - DNA, 25 bp, Artificial
  Probe
aaacaaagatagccttcaggaaaca

SEQ ID NO: 139598 - DNA, 25 bp, Artificial
  Probe
taaacaaagatagccttcaggaaac

SEQ ID NO: 139599 - DNA, 25 bp, Artificial
  Probe
gtaaacaaagatagccttcaggaaa

SEQ ID NO: 139600 - DNA, 25 bp, Artificial
  Probe
ttatccctaatgaagaatcggcagt

SEQ ID NO: 139601 - DNA, 25 bp, Artificial
  Probe
aatcagtaaacaaagatagccttca

SEQ ID NO: 139602 - DNA, 25 bp, Artificial
  Probe
tttccaacttagcatcctaccctag

SEQ ID NO: 139603 - DNA, 25 bp, Artificial
  Probe
tctttaatgcctataatgcttccat

SEQ ID NO: 139604 - DNA, 25 bp, Artificial
  Probe
cctgcgaaatcagtaaacaaagata

SEQ ID NO: 139605 - DNA, 25 bp, Artificial
  Probe
aaagatagccttcaggaaacaaagc

SEQ ID NO: 139606 - DNA, 25 bp, Artificial
  Probe
tatccctaatgaagaatcggcagtg

SEQ ID NO: 139607 - DNA, 25 bp, Artificial
  Probe
catacgcaaagaaacagaatatgga

SEQ ID NO: 139608 - DNA, 25 bp, Artificial
  Probe
caagtaacagtgtatgaagtcaacc

SEQ ID NO: 139609 - DNA, 25 bp, Artificial
  Probe
aagtaacagtgtatgaagtcaacct

SEQ ID NO: 139610 - DNA, 25 bp, Artificial
  Probe
gcaagtaacagtgtatgaagtcaac

SEQ ID NO: 139611 - DNA, 25 bp, Artificial
  Probe
caacatcaacagacaaggtagaagg

SEQ ID NO: 139612 - DNA, 25 bp, Artificial
  Probe
ccaacatcaacagacaaggtagaag

SEQ ID NO: 139613 - DNA, 25 bp, Artificial
  Probe
acatcaacagacaaggtagaaggat

SEQ ID NO: 139614 - DNA, 25 bp, Artificial
  Probe
aacatcaacagacaaggtagaagga

SEQ ID NO: 139615 - DNA, 25 bp, Artificial
  Probe
actcatacagagaaggtcacaagta

SEQ ID NO: 139616 - DNA, 25 bp, Artificial
  Probe
cctaatgacagagaccttgccttaa

SEQ ID NO: 139617 - DNA, 25 bp, Artificial
  Probe
gtaacagtgtatgaagtcaacctga

SEQ ID NO: 139618 - DNA, 25 bp, Artificial
  Probe
agtaacagtgtatgaagtcaacctg

SEQ ID NO: 139619 - DNA, 25 bp, Artificial
  Probe
ctcatacagagaaggtcacaagtac

SEQ ID NO: 139620 - DNA, 25 bp, Artificial
  Probe
atcaacagacaaggtagaaggatgt

SEQ ID NO: 139621 - DNA, 25 bp, Artificial
  Probe
ccactaactgtgattgttactccat

SEQ ID NO: 139622 - DNA, 25 bp, Artificial
  Probe
agactcatacagagaaggtcacaag

SEQ ID NO: 139623 - DNA, 25 bp, Artificial
  Probe
cactaactgtgattgttactccatt

SEQ ID NO: 139624 - DNA, 25 bp, Artificial
  Probe
gactcatacagagaaggtcacaagt

SEQ ID NO: 139625 - DNA, 25 bp, Artificial
  Probe
cagactcatacagagaaggtcacaa

SEQ ID NO: 139626 - DNA, 25 bp, Artificial
  Probe
atcctccatcttctcctctcaaata

SEQ ID NO: 139627 - DNA, 25 bp, Artificial
  Probe
tgcaagtaacagtgtatgaagtcaa

SEQ ID NO: 139628 - DNA, 25 bp, Artificial
  Probe
ctaatgacagagaccttgccttaaa

SEQ ID NO: 139629 - DNA, 25 bp, Artificial
  Probe
tcctccatcttctcctctcaaatac

SEQ ID NO: 139630 - DNA, 25 bp, Artificial
  Probe
ctttcaattccatagagttgttcct

SEQ ID NO: 139631 - DNA, 25 bp, Artificial
  Probe
actttcaattccatagagttgttcc

SEQ ID NO: 139632 - DNA, 25 bp, Artificial
  Probe
ctccatcttctcctctcaaataccc

SEQ ID NO: 139633 - DNA, 25 bp, Artificial
  Probe
cctccatcttctcctctcaaatacc

SEQ ID NO: 139634 - DNA, 25 bp, Artificial
  Probe
tttcaattccatagagttgttcctc

SEQ ID NO: 139635 - DNA, 25 bp, Artificial
  Probe
ctgcaagtaacagtgtatgaagtca

SEQ ID NO: 139636 - DNA, 25 bp, Artificial
  Probe
agataagttcagggctctttctagg

SEQ ID NO: 139637 - DNA, 25 bp, Artificial
  Probe
ccatcttctcctctcaaatacccag

SEQ ID NO: 139638 - DNA, 25 bp, Artificial
  Probe
gatcctccatcttctcctctcaaat

SEQ ID NO: 139639 - DNA, 25 bp, Artificial
  Probe
tcactttcaattccatagagttgtt

SEQ ID NO: 139640 - DNA, 25 bp, Artificial
  Probe
cttaaacacatggaagttacttggc

SEQ ID NO: 139641 - DNA, 25 bp, Artificial
  Probe
tcttaaacacatggaagttacttgg

SEQ ID NO: 139642 - DNA, 25 bp, Artificial
  Probe
cactttcaattccatagagttgttc

SEQ ID NO: 139643 - DNA, 25 bp, Artificial
  Probe
atcactttcaattccatagagttgt

SEQ ID NO: 139644 - DNA, 25 bp, Artificial
  Probe
cgatccagaagtactagacatcatt

SEQ ID NO: 139645 - DNA, 25 bp, Artificial
  Probe
tacaacgatccagaagtactagaca

SEQ ID NO: 139646 - DNA, 25 bp, Artificial
  Probe
catacaacgatccagaagtactaga

SEQ ID NO: 139647 - DNA, 25 bp, Artificial
  Probe
tcatacaacgatccagaagtactag

SEQ ID NO: 139648 - DNA, 25 bp, Artificial
  Probe
caacgatccagaagtactagacatc

SEQ ID NO: 139649 - DNA, 25 bp, Artificial
  Probe
atacaacgatccagaagtactagac

SEQ ID NO: 139650 - DNA, 25 bp, Artificial
  Probe
tcatacagagaaggtcacaagtact

SEQ ID NO: 139651 - DNA, 25 bp, Artificial
  Probe
acgatccagaagtactagacatcat

SEQ ID NO: 139652 - DNA, 25 bp, Artificial
  Probe
ttaaacacatggaagttacttggca

SEQ ID NO: 139653 - DNA, 25 bp, Artificial
  Probe
tattccaatcagatgacatcctatg

SEQ ID NO: 139654 - DNA, 25 bp, Artificial
  Probe
catattccaatcagatgacatccta

SEQ ID NO: 139655 - DNA, 25 bp, Artificial
  Probe
atgaaattgcctattgttctatgcc

SEQ ID NO: 139656 - DNA, 25 bp, Artificial
  Probe
cggatgaaattgcctattgttctat

SEQ ID NO: 139657 - DNA, 25 bp, Artificial
  Probe
gagatgtccatcaatggtactatgt

SEQ ID NO: 139658 - DNA, 25 bp, Artificial
  Probe
agatgtccatcaatggtactatgtt

SEQ ID NO: 139659 - DNA, 25 bp, Artificial
  Probe
ggagatgtccatcaatggtactatg

SEQ ID NO: 139660 - DNA, 25 bp, Artificial
  Probe
gatgaaattgcctattgttctatgc

SEQ ID NO: 139661 - DNA, 25 bp, Artificial
  Probe
atattccaatcagatgacatcctat

SEQ ID NO: 139662 - DNA, 25 bp, Artificial
  Probe
ggatgaaattgcctattgttctatg

SEQ ID NO: 139663 - DNA, 25 bp, Artificial
  Probe
tcatattccaatcagatgacatcct

SEQ ID NO: 139664 - DNA, 25 bp, Artificial
  Probe
gatgtccatcaatggtactatgtta

SEQ ID NO: 139665 - DNA, 25 bp, Artificial
  Probe
tgaaattgcctattgttctatgccg

SEQ ID NO: 139666 - DNA, 25 bp, Artificial
  Probe
tccaatcagatgacatcctatgttc

SEQ ID NO: 139667 - DNA, 25 bp, Artificial
  Probe
ttccaatcagatgacatcctatgtt

SEQ ID NO: 139668 - DNA, 25 bp, Artificial
  Probe
attccaatcagatgacatcctatgt

SEQ ID NO: 139669 - DNA, 25 bp, Artificial
  Probe
ttcatattccaatcagatgacatcc

SEQ ID NO: 139670 - DNA, 25 bp, Artificial
  Probe
tgtccatcaatggtactatgttatt

SEQ ID NO: 139671 - DNA, 25 bp, Artificial
  Probe
atgtccatcaatggtactatgttat

SEQ ID NO: 139672 - DNA, 25 bp, Artificial
  Probe
tcattctcttcagagctaaggtttg

SEQ ID NO: 139673 - DNA, 25 bp, Artificial
  Probe
tattcacatacattgggactagaaa

SEQ ID NO: 139674 - DNA, 25 bp, Artificial
  Probe
atattcacatacattgggactagaa

SEQ ID NO: 139675 - DNA, 25 bp, Artificial
  Probe
gaaattgcctattgttctatgccgc

SEQ ID NO: 139676 - DNA, 25 bp, Artificial
  Probe
cattctcttcagagctaaggtttgc

SEQ ID NO: 139677 - DNA, 25 bp, Artificial
  Probe
tatattcacatacattgggactaga

SEQ ID NO: 139678 - DNA, 25 bp, Artificial
  Probe
ccggatgaaattgcctattgttcta

SEQ ID NO: 139679 - DNA, 25 bp, Artificial
  Probe
tggtactatgttattagagaaatgc

SEQ ID NO: 139680 - DNA, 25 bp, Artificial
  Probe
aattgcctattgttctatgccgcct

SEQ ID NO: 139681 - DNA, 25 bp, Artificial
  Probe
gtccatcaatggtactatgttatta

SEQ ID NO: 139682 - DNA, 25 bp, Artificial
  Probe
ttaaaccaaaaccatgttgtgctac

SEQ ID NO: 139683 - DNA, 25 bp, Artificial
  Probe
gttaaaccaaaaccatgttgtgcta

SEQ ID NO: 139684 - DNA, 25 bp, Artificial
  Probe
attcacatacattgggactagaaaa

SEQ ID NO: 139685 - DNA, 25 bp, Artificial
  Probe
ggtactatgttattagagaaatgct

SEQ ID NO: 139686 - DNA, 25 bp, Artificial
  Probe
taaaccaaaaccatgttgtgctact

SEQ ID NO: 139687 - DNA, 25 bp, Artificial
  Probe
aaattgcctattgttctatgccgcc

SEQ ID NO: 139688 - DNA, 25 bp, Artificial
  Probe
tggagatgtccatcaatggtactat

SEQ ID NO: 139689 - DNA, 25 bp, Artificial
  Probe
ccatcaatggtactatgttattaga

SEQ ID NO: 139690 - DNA, 25 bp, Artificial
  Probe
tccatcaatggtactatgttattag

SEQ ID NO: 139691 - DNA, 25 bp, Artificial
  Probe
ctgctgttaaaccaaaaccatgttg

SEQ ID NO: 139692 - DNA, 25 bp, Artificial
  Probe
ctgttaaaccaaaaccatgttgtgc

SEQ ID NO: 139693 - DNA, 25 bp, Artificial
  Probe
gctgttaaaccaaaaccatgttgtg

SEQ ID NO: 139694 - DNA, 25 bp, Artificial
  Probe
tttcatattccaatcagatgacatc

SEQ ID NO: 139695 - DNA, 25 bp, Artificial
  Probe
tcaatggtactatgttattagagaa

SEQ ID NO: 139696 - DNA, 25 bp, Artificial
  Probe
taagctgctgttaaaccaaaaccat

SEQ ID NO: 139697 - DNA, 25 bp, Artificial
  Probe
tgttaaaccaaaaccatgttgtgct

SEQ ID NO: 139698 - DNA, 25 bp, Artificial
  Probe
ctcaggagtttctctacacatctgt

SEQ ID NO: 139699 - DNA, 25 bp, Artificial
  Probe
gtttgacactcaggagtttctctac

SEQ ID NO: 139700 - DNA, 25 bp, Artificial
  Probe
tttgacactcaggagtttctctaca

SEQ ID NO: 139701 - DNA, 25 bp, Artificial
  Probe
cactcaggagtttctctacacatct

SEQ ID NO: 139702 - DNA, 25 bp, Artificial
  Probe
acactcaggagtttctctacacatc

SEQ ID NO: 139703 - DNA, 25 bp, Artificial
  Probe
gacactcaggagtttctctacacat

SEQ ID NO: 139704 - DNA, 25 bp, Artificial
  Probe
actcaggagtttctctacacatctg

SEQ ID NO: 139705 - DNA, 25 bp, Artificial
  Probe
ttgacactcaggagtttctctacac

SEQ ID NO: 139706 - DNA, 25 bp, Artificial
  Probe
ggtttgacactcaggagtttctcta

SEQ ID NO: 139707 - DNA, 25 bp, Artificial
  Probe
tcaggagtttctctacacatctgtg

SEQ ID NO: 139708 - DNA, 25 bp, Artificial
  Probe
cttggtttgacactcaggagtttct

SEQ ID NO: 139709 - DNA, 25 bp, Artificial
  Probe
tgacactcaggagtttctctacaca

SEQ ID NO: 139710 - DNA, 25 bp, Artificial
  Probe
ttggtttgacactcaggagtttctc

SEQ ID NO: 139711 - DNA, 25 bp, Artificial
  Probe
caaggatgatgacaggaaggttcga

SEQ ID NO: 139712 - DNA, 25 bp, Artificial
  Probe
cttcacgaggaacatgagagtctgg

SEQ ID NO: 139713 - DNA, 25 bp, Artificial
  Probe
atgatgacaggaaggttcgaagaag

SEQ ID NO: 139714 - DNA, 25 bp, Artificial
  Probe
gatgatgacaggaaggttcgaagaa

SEQ ID NO: 139715 - DNA, 25 bp, Artificial
  Probe
tggtttgacactcaggagtttctct

SEQ ID NO: 139716 - DNA, 25 bp, Artificial
  Probe
gatgacaggaaggttcgaagaagag

SEQ ID NO: 139717 - DNA, 25 bp, Artificial
  Probe
ccttggtttgacactcaggagtttc

SEQ ID NO: 139718 - DNA, 25 bp, Artificial
  Probe
ttcacgaggaacatgagagtctgga

SEQ ID NO: 139719 - DNA, 25 bp, Artificial
  Probe
acaggaaggttcgaagaagagagaa

SEQ ID NO: 139720 - DNA, 25 bp, Artificial
  Probe
atgacaggaaggttcgaagaagaga

SEQ ID NO: 139721 - DNA, 25 bp, Artificial
  Probe
ctcttttatctggctcggaaccttg

SEQ ID NO: 139722 - DNA, 25 bp, Artificial
  Probe
aacatgagagtctggagcaggagaa

SEQ ID NO: 139723 - DNA, 25 bp, Artificial
  Probe
tgatgacaggaaggttcgaagaaga

SEQ ID NO: 139724 - DNA, 25 bp, Artificial
  Probe
cccaaggatgatgacaggaaggttc

SEQ ID NO: 139725 - DNA, 25 bp, Artificial
  Probe
gacaggaaggttcgaagaagagaga

SEQ ID NO: 139726 - DNA, 25 bp, Artificial
  Probe
caggaaggttcgaagaagagagaaa

SEQ ID NO: 139727 - DNA, 25 bp, Artificial
  Probe
tttatctggctcggaaccttggttt

SEQ ID NO: 139728 - DNA, 25 bp, Artificial
  Probe
aaggatgatgacaggaaggttcgaa

SEQ ID NO: 139729 - DNA, 25 bp, Artificial
  Probe
accttggtttgacactcaggagttt

SEQ ID NO: 139730 - DNA, 25 bp, Artificial
  Probe
tgacaggaaggttcgaagaagagag

SEQ ID NO: 139731 - DNA, 25 bp, Artificial
  Probe
aaccttggtttgacactcaggagtt

SEQ ID NO: 139732 - DNA, 25 bp, Artificial
  Probe
ggatgatgacaggaaggttcgaaga

SEQ ID NO: 139733 - DNA, 25 bp, Artificial
  Probe
aggatgatgacaggaaggttcgaag

SEQ ID NO: 139734 - DNA, 25 bp, Artificial
  Probe
gaaccttggtttgacactcaggagt

SEQ ID NO: 139735 - DNA, 25 bp, Artificial
  Probe
cctcttttatctggctcggaacctt

SEQ ID NO: 139736 - DNA, 25 bp, Artificial
  Probe
ttatctggctcggaaccttggtttg

SEQ ID NO: 139737 - DNA, 25 bp, Artificial
  Probe
tcttttatctggctcggaaccttgg

SEQ ID NO: 139738 - DNA, 25 bp, Artificial
  Probe
aagcttcacgaggaacatgagagtc

SEQ ID NO: 139739 - DNA, 25 bp, Artificial
  Probe
agatcacccctcttttatctggctc

SEQ ID NO: 139740 - DNA, 25 bp, Artificial
  Probe
aggaaggttcgaagaagagagaaaa

SEQ ID NO: 139741 - DNA, 25 bp, Artificial
  Probe
aggagtttctctacacatctgtgtc

SEQ ID NO: 139742 - DNA, 25 bp, Artificial
  Probe
caagcttcacgaggaacatgagagt

SEQ ID NO: 139743 - DNA, 25 bp, Artificial
  Probe
gattccgaacaattacaacagcata

SEQ ID NO: 139744 - DNA, 25 bp, Artificial
  Probe
attccgaacaattacaacagcatac

SEQ ID NO: 139745 - DNA, 25 bp, Artificial
  Probe
tccgaacaattacaacagcatacta

SEQ ID NO: 139746 - DNA, 25 bp, Artificial
  Probe
ccgaacaattacaacagcatactat

SEQ ID NO: 139747 - DNA, 25 bp, Artificial
  Probe
ttccgaacaattacaacagcatact

SEQ ID NO: 139748 - DNA, 25 bp, Artificial
  Probe
agattccgaacaattacaacagcat

SEQ ID NO: 139749 - DNA, 25 bp, Artificial
  Probe
aagattccgaacaattacaacagca

SEQ ID NO: 139750 - DNA, 25 bp, Artificial
  Probe
gaattatgctggtctatgacatcac

SEQ ID NO: 139751 - DNA, 25 bp, Artificial
  Probe
ggaattatgctggtctatgacatca

SEQ ID NO: 139752 - DNA, 25 bp, Artificial
  Probe
ttacaacagcatactatagaggagc

SEQ ID NO: 139753 - DNA, 25 bp, Artificial
  Probe
aattatgctggtctatgacatcacc

SEQ ID NO: 139754 - DNA, 25 bp, Artificial
  Probe
cgaacaattacaacagcatactata

SEQ ID NO: 139755 - DNA, 25 bp, Artificial
  Probe
cctgggtaacaaatgtgatatgaac

SEQ ID NO: 139756 - DNA, 25 bp, Artificial
  Probe
tcctgggtaacaaatgtgatatgaa

SEQ ID NO: 139757 - DNA, 25 bp, Artificial
  Probe
tacaacagcatactatagaggagcc

SEQ ID NO: 139758 - DNA, 25 bp, Artificial
  Probe
attaaacttcagatatgggacacgg

SEQ ID NO: 139759 - DNA, 25 bp, Artificial
  Probe
gggtaacaaatgtgatatgaacgac

SEQ ID NO: 139760 - DNA, 25 bp, Artificial
  Probe
ctgggtaacaaatgtgatatgaacg

SEQ ID NO: 139761 - DNA, 25 bp, Artificial
  Probe
tgggtaacaaatgtgatatgaacga

SEQ ID NO: 139762 - DNA, 25 bp, Artificial
  Probe
atcctgggtaacaaatgtgatatga

SEQ ID NO: 139763 - DNA, 25 bp, Artificial
  Probe
ttggataagaaacattgaagagcat

SEQ ID NO: 139764 - DNA, 25 bp, Artificial
  Probe
attggataagaaacattgaagagca

SEQ ID NO: 139765 - DNA, 25 bp, Artificial
  Probe
aaagattccgaacaattacaacagc

SEQ ID NO: 139766 - DNA, 25 bp, Artificial
  Probe
aattaaacttcagatatgggacacg

SEQ ID NO: 139767 - DNA, 25 bp, Artificial
  Probe
caacagcatactatagaggagccat

SEQ ID NO: 139768 - DNA, 25 bp, Artificial
  Probe
gaaagattccgaacaattacaacag

SEQ ID NO: 139769 - DNA, 25 bp, Artificial
  Probe
tgaaagaatgatcctgggtaacaaa

SEQ ID NO: 139770 - DNA, 25 bp, Artificial
  Probe
aagaatgatcctgggtaacaaatgt

SEQ ID NO: 139771 - DNA, 25 bp, Artificial
  Probe
aaagaatgatcctgggtaacaaatg

SEQ ID NO: 139772 - DNA, 25 bp, Artificial
  Probe
tgatcctgggtaacaaatgtgatat

SEQ ID NO: 139773 - DNA, 25 bp, Artificial
  Probe
atgatcctgggtaacaaatgtgata

SEQ ID NO: 139774 - DNA, 25 bp, Artificial
  Probe
aacagcatactatagaggagccatg

SEQ ID NO: 139775 - DNA, 25 bp, Artificial
  Probe
aatgatcctgggtaacaaatgtgat

SEQ ID NO: 139776 - DNA, 25 bp, Artificial
  Probe
gatcctgggtaacaaatgtgatatg

SEQ ID NO: 139777 - DNA, 25 bp, Artificial
  Probe
gaaagaatgatcctgggtaacaaat

SEQ ID NO: 139778 - DNA, 25 bp, Artificial
  Probe
ggtaacaaatgtgatatgaacgaca

SEQ ID NO: 139779 - DNA, 25 bp, Artificial
  Probe
gaatgatcctgggtaacaaatgtga

SEQ ID NO: 139780 - DNA, 25 bp, Artificial
  Probe
agaatgatcctgggtaacaaatgtg

SEQ ID NO: 139781 - DNA, 25 bp, Artificial
  Probe
tggataagaaacattgaagagcatg

SEQ ID NO: 139782 - DNA, 25 bp, Artificial
  Probe
aattggataagaaacattgaagagc

SEQ ID NO: 139783 - DNA, 25 bp, Artificial
  Probe
gggaattatgctggtctatgacatc

SEQ ID NO: 139784 - DNA, 25 bp, Artificial
  Probe
attacaacagcatactatagaggag

SEQ ID NO: 139785 - DNA, 25 bp, Artificial
  Probe
tgggaattatgctggtctatgacat

SEQ ID NO: 139786 - DNA, 25 bp, Artificial
  Probe
atgggaattatgctggtctatgaca

SEQ ID NO: 139787 - DNA, 25 bp, Artificial
  Probe
gtaacaaatgtgatatgaacgacaa

SEQ ID NO: 139788 - DNA, 25 bp, Artificial
  Probe
tcaagtacctctggaacaacattaa

SEQ ID NO: 139789 - DNA, 25 bp, Artificial
  Probe
ttcaagtacctctggaacaacatta

SEQ ID NO: 139790 - DNA, 25 bp, Artificial
  Probe
ctgaatcagcatatctacagcatga

SEQ ID NO: 139791 - DNA, 25 bp, Artificial
  Probe
atgaatatcctcaacaaggtcgtga

SEQ ID NO: 139792 - DNA, 25 bp, Artificial
  Probe
ttccacctgaatcagcatatctaca

SEQ ID NO: 139793 - DNA, 25 bp, Artificial
  Probe
cctgaatcagcatatctacagcatg

SEQ ID NO: 139794 - DNA, 25 bp, Artificial
  Probe
attccacctgaatcagcatatctac

SEQ ID NO: 139795 - DNA, 25 bp, Artificial
  Probe
acctgaatcagcatatctacagcat

SEQ ID NO: 139796 - DNA, 25 bp, Artificial
  Probe
tccacctgaatcagcatatctacag

SEQ ID NO: 139797 - DNA, 25 bp, Artificial
  Probe
catgaatatcctcaacaaggtcgtg

SEQ ID NO: 139798 - DNA, 25 bp, Artificial
  Probe
caagtacctctggaacaacattaaa

SEQ ID NO: 139799 - DNA, 25 bp, Artificial
  Probe
tgaatatcctcaacaaggtcgtgac

SEQ ID NO: 139800 - DNA, 25 bp, Artificial
  Probe
tgaatcagcatatctacagcatgat

SEQ ID NO: 139801 - DNA, 25 bp, Artificial
  Probe
gaatcagcatatctacagcatgatc

SEQ ID NO: 139802 - DNA, 25 bp, Artificial
  Probe
cacctgaatcagcatatctacagca

SEQ ID NO: 139803 - DNA, 25 bp, Artificial
  Probe
ggaacatggatttcgataacttcat

SEQ ID NO: 139804 - DNA, 25 bp, Artificial
  Probe
gggaacatggatttcgataacttca

SEQ ID NO: 139805 - DNA, 25 bp, Artificial
  Probe
ccacctgaatcagcatatctacagc

SEQ ID NO: 139806 - DNA, 25 bp, Artificial
  Probe
aacatggatttcgataacttcatca

SEQ ID NO: 139807 - DNA, 25 bp, Artificial
  Probe
cgctacagaactcatgaatatcctc

SEQ ID NO: 139808 - DNA, 25 bp, Artificial
  Probe
gctacagaactcatgaatatcctca

SEQ ID NO: 139809 - DNA, 25 bp, Artificial
  Probe
acagaactcatgaatatcctcaaca

SEQ ID NO: 139810 - DNA, 25 bp, Artificial
  Probe
gaacatggatttcgataacttcatc

SEQ ID NO: 139811 - DNA, 25 bp, Artificial
  Probe
gttcaagtacctctggaacaacatt

SEQ ID NO: 139812 - DNA, 25 bp, Artificial
  Probe
cagaactcatgaatatcctcaacaa

SEQ ID NO: 139813 - DNA, 25 bp, Artificial
  Probe
cgggaacatggatttcgataacttc

SEQ ID NO: 139814 - DNA, 25 bp, Artificial
  Probe
agaactcatgaatatcctcaacaag

SEQ ID NO: 139815 - DNA, 25 bp, Artificial
  Probe
aactcatgaatatcctcaacaaggt

SEQ ID NO: 139816 - DNA, 25 bp, Artificial
  Probe
actcatgaatatcctcaacaaggtc

SEQ ID NO: 139817 - DNA, 25 bp, Artificial
  Probe
atatacaaacgctttgatactgacc

SEQ ID NO: 139818 - DNA, 25 bp, Artificial
  Probe
gaactcatgaatatcctcaacaagg

SEQ ID NO: 139819 - DNA, 25 bp, Artificial
  Probe
agttcaagtacctctggaacaacat

SEQ ID NO: 139820 - DNA, 25 bp, Artificial
  Probe
tatacaaacgctttgatactgaccg

SEQ ID NO: 139821 - DNA, 25 bp, Artificial
  Probe
tacagaactcatgaatatcctcaac

SEQ ID NO: 139822 - DNA, 25 bp, Artificial
  Probe
ctcatgaatatcctcaacaaggtcg

SEQ ID NO: 139823 - DNA, 25 bp, Artificial
  Probe
gaatatcctcaacaaggtcgtgacc

SEQ ID NO: 139824 - DNA, 25 bp, Artificial
  Probe
ctacagaactcatgaatatcctcaa

SEQ ID NO: 139825 - DNA, 25 bp, Artificial
  Probe
gagttcaagtacctctggaacaaca

SEQ ID NO: 139826 - DNA, 25 bp, Artificial
  Probe
tcatgaatatcctcaacaaggtcgt

SEQ ID NO: 139827 - DNA, 25 bp, Artificial
  Probe
aagtacctctggaacaacattaaaa

SEQ ID NO: 139828 - DNA, 25 bp, Artificial
  Probe
gcgctacagaactcatgaatatcct

SEQ ID NO: 139829 - DNA, 25 bp, Artificial
  Probe
aatcagcatatctacagcatgatca

SEQ ID NO: 139830 - DNA, 25 bp, Artificial
  Probe
ggagttcaagtacctctggaacaac

SEQ ID NO: 139831 - DNA, 25 bp, Artificial
  Probe
tacaaacgctttgatactgaccgat

SEQ ID NO: 139832 - DNA, 25 bp, Artificial
  Probe
atacaaacgctttgatactgaccga

SEQ ID NO: 139833 - DNA, 25 bp, Artificial
  Probe
ctgctcctattagtgaagattggta

SEQ ID NO: 139834 - DNA, 25 bp, Artificial
  Probe
tgctcctattagtgaagattggtaa

SEQ ID NO: 139835 - DNA, 25 bp, Artificial
  Probe
tctgctcctattagtgaagattggt

SEQ ID NO: 139836 - DNA, 25 bp, Artificial
  Probe
gtatattaggtatcgtgttgtctca

SEQ ID NO: 139837 - DNA, 25 bp, Artificial
  Probe
tgtatattaggtatcgtgttgtctc

SEQ ID NO: 139838 - DNA, 25 bp, Artificial
  Probe
gtcgtatgtatattaggtatcgtgt

SEQ ID NO: 139839 - DNA, 25 bp, Artificial
  Probe
tgtcgtatgtatattaggtatcgtg

SEQ ID NO: 139840 - DNA, 25 bp, Artificial
  Probe
attaggtatcgtgttgtctcactaa

SEQ ID NO: 139841 - DNA, 25 bp, Artificial
  Probe
atattaggtatcgtgttgtctcact

SEQ ID NO: 139842 - DNA, 25 bp, Artificial
  Probe
aagtctgtagatggtatggatagct

SEQ ID NO: 139843 - DNA, 25 bp, Artificial
  Probe
tcagaactctattacagatgtatgc

SEQ ID NO: 139844 - DNA, 25 bp, Artificial
  Probe
tattaggtatcgtgttgtctcacta

SEQ ID NO: 139845 - DNA, 25 bp, Artificial
  Probe
atgtatattaggtatcgtgttgtct

SEQ ID NO: 139846 - DNA, 25 bp, Artificial
  Probe
tgtgaagtctaaatggtgtctgtat

SEQ ID NO: 139847 - DNA, 25 bp, Artificial
  Probe
atgtgaagtctaaatggtgtctgta

SEQ ID NO: 139848 - DNA, 25 bp, Artificial
  Probe
aatgtgaagtctaaatggtgtctgt

SEQ ID NO: 139849 - DNA, 25 bp, Artificial
  Probe
aaatgtgaagtctaaatggtgtctg

SEQ ID NO: 139850 - DNA, 25 bp, Artificial
  Probe
aaagtctgtagatggtatggatagc

SEQ ID NO: 139851 - DNA, 25 bp, Artificial
  Probe
tcccaaagagcatttaactacagat

SEQ ID NO: 139852 - DNA, 25 bp, Artificial
  Probe
cttcatttctatttcacaggcttct

SEQ ID NO: 139853 - DNA, 25 bp, Artificial
  Probe
tcttcatttctatttcacaggcttc

SEQ ID NO: 139854 - DNA, 25 bp, Artificial
  Probe
cgtatgtatattaggtatcgtgttg

SEQ ID NO: 139855 - DNA, 25 bp, Artificial
  Probe
tcgtatgtatattaggtatcgtgtt

SEQ ID NO: 139856 - DNA, 25 bp, Artificial
  Probe
cccaaagagcatttaactacagatt

SEQ ID NO: 139857 - DNA, 25 bp, Artificial
  Probe
gtcccaaagagcatttaactacaga

SEQ ID NO: 139858 - DNA, 25 bp, Artificial
  Probe
atctgctcctattagtgaagattgg

SEQ ID NO: 139859 - DNA, 25 bp, Artificial
  Probe
ttcatttctatttcacaggcttctt

SEQ ID NO: 139860 - DNA, 25 bp, Artificial
  Probe
gtgaagtctaaatggtgtctgtatt

SEQ ID NO: 139861 - DNA, 25 bp, Artificial
  Probe
atcttcatttctatttcacaggctt

SEQ ID NO: 139862 - DNA, 25 bp, Artificial
  Probe
atgtcgtatgtatattaggtatcgt

SEQ ID NO: 139863 - DNA, 25 bp, Artificial
  Probe
gttgtcccaaagagcatttaactac

SEQ ID NO: 139864 - DNA, 25 bp, Artificial
  Probe
tatattaggtatcgtgttgtctcac

SEQ ID NO: 139865 - DNA, 25 bp, Artificial
  Probe
tttctatttcacaggcttcttaaca

SEQ ID NO: 139866 - DNA, 25 bp, Artificial
  Probe
gctgatttatgttgtacctatgtcg

SEQ ID NO: 139867 - DNA, 25 bp, Artificial
  Probe
gctcctattagtgaagattggtaaa

SEQ ID NO: 139868 - DNA, 25 bp, Artificial
  Probe
caagttgtcccaaagagcatttaac

SEQ ID NO: 139869 - DNA, 25 bp, Artificial
  Probe
tctatttcacaggcttcttaacatt

SEQ ID NO: 139870 - DNA, 25 bp, Artificial
  Probe
ttctatttcacaggcttcttaacat

SEQ ID NO: 139871 - DNA, 25 bp, Artificial
  Probe
ttatgttgtacctatgtcgtatgta

SEQ ID NO: 139872 - DNA, 25 bp, Artificial
  Probe
gatctgctcctattagtgaagattg

SEQ ID NO: 139873 - DNA, 25 bp, Artificial
  Probe
tcatttctatttcacaggcttctta

SEQ ID NO: 139874 - DNA, 25 bp, Artificial
  Probe
attaaacactgtcaaataaaggctg

SEQ ID NO: 139875 - DNA, 25 bp, Artificial
  Probe
cattaaacactgtcaaataaaggct

SEQ ID NO: 139876 - DNA, 25 bp, Artificial
  Probe
gtatcttcatttctatttcacaggc

SEQ ID NO: 139877 - DNA, 25 bp, Artificial
  Probe
ttgtcccaaagagcatttaactaca

SEQ ID NO: 139878 - DNA, 25 bp, Artificial
  Probe
gctgagtctatgtttgggtttatta

SEQ ID NO: 139879 - DNA, 25 bp, Artificial
  Probe
ttaatgcctgctcgattatatagaa

SEQ ID NO: 139880 - DNA, 25 bp, Artificial
  Probe
agctgagtctatgtttgggtttatt

SEQ ID NO: 139881 - DNA, 25 bp, Artificial
  Probe
aagctgagtctatgtttgggtttat

SEQ ID NO: 139882 - DNA, 25 bp, Artificial
  Probe
ttgtttaactttagcatgttgttga

SEQ ID NO: 139883 - DNA, 25 bp, Artificial
  Probe
caagctgagtctatgtttgggttta

SEQ ID NO: 139884 - DNA, 25 bp, Artificial
  Probe
tgtttaactttagcatgttgttgat

SEQ ID NO: 139885 - DNA, 25 bp, Artificial
  Probe
cttgtttaactttagcatgttgttg

SEQ ID NO: 139886 - DNA, 25 bp, Artificial
  Probe
tcttgtttaactttagcatgttgtt

SEQ ID NO: 139887 - DNA, 25 bp, Artificial
  Probe
ttcttgtttaactttagcatgttgt

SEQ ID NO: 139888 - DNA, 25 bp, Artificial
  Probe
gtttaactttagcatgttgttgatc

SEQ ID NO: 139889 - DNA, 25 bp, Artificial
  Probe
taatgcctgctcgattatatagaaa

SEQ ID NO: 139890 - DNA, 25 bp, Artificial
  Probe
tttaatgcctgctcgattatataga

SEQ ID NO: 139891 - DNA, 25 bp, Artificial
  Probe
atgctggacatgtatggtaataatt

SEQ ID NO: 139892 - DNA, 25 bp, Artificial
  Probe
tttcttgtttaactttagcatgttg

SEQ ID NO: 139893 - DNA, 25 bp, Artificial
  Probe
tctgtccagagtatggtgaacactg

SEQ ID NO: 139894 - DNA, 25 bp, Artificial
  Probe
gtctgtccagagtatggtgaacact

SEQ ID NO: 139895 - DNA, 25 bp, Artificial
  Probe
ctgtctgtccagagtatggtgaaca

SEQ ID NO: 139896 - DNA, 25 bp, Artificial
  Probe
aaatctcatcagttttaatgcctgc

SEQ ID NO: 139897 - DNA, 25 bp, Artificial
  Probe
aatctcatcagttttaatgcctgct

SEQ ID NO: 139898 - DNA, 25 bp, Artificial
  Probe
tgtctgtccagagtatggtgaacac

SEQ ID NO: 139899 - DNA, 25 bp, Artificial
  Probe
gagtatggtgaacactggctctcag

SEQ ID NO: 139900 - DNA, 25 bp, Artificial
  Probe
atctcatcagttttaatgcctgctc

SEQ ID NO: 139901 - DNA, 25 bp, Artificial
  Probe
aaaatctcatcagttttaatgcctg

SEQ ID NO: 139902 - DNA, 25 bp, Artificial
  Probe
aatgcctgctcgattatatagaaaa

SEQ ID NO: 139903 - DNA, 25 bp, Artificial
  Probe
tgctggacatgtatggtaataattt

SEQ ID NO: 139904 - DNA, 25 bp, Artificial
  Probe
agttttaatgcctgctcgattatat

SEQ ID NO: 139905 - DNA, 25 bp, Artificial
  Probe
cagttttaatgcctgctcgattata

SEQ ID NO: 139906 - DNA, 25 bp, Artificial
  Probe
gcaagctgagtctatgtttgggttt

SEQ ID NO: 139907 - DNA, 25 bp, Artificial
  Probe
gctggacatgtatggtaataatttc

SEQ ID NO: 139908 - DNA, 25 bp, Artificial
  Probe
ttagcatgttgttgatcatgaatca

SEQ ID NO: 139909 - DNA, 25 bp, Artificial
  Probe
tcagttttaatgcctgctcgattat

SEQ ID NO: 139910 - DNA, 25 bp, Artificial
  Probe
atcagttttaatgcctgctcgatta

SEQ ID NO: 139911 - DNA, 25 bp, Artificial
  Probe
tttaactttagcatgttgttgatca

SEQ ID NO: 139912 - DNA, 25 bp, Artificial
  Probe
agcatgttgttgatcatgaatcata

SEQ ID NO: 139913 - DNA, 25 bp, Artificial
  Probe
tagcatgttgttgatcatgaatcat

SEQ ID NO: 139914 - DNA, 25 bp, Artificial
  Probe
tctgtctgtccagagtatggtgaac

SEQ ID NO: 139915 - DNA, 25 bp, Artificial
  Probe
ttaactttagcatgttgttgatcat

SEQ ID NO: 139916 - DNA, 25 bp, Artificial
  Probe
gcatgttgttgatcatgaatcataa

SEQ ID NO: 139917 - DNA, 25 bp, Artificial
  Probe
catgctggacatgtatggtaataat

SEQ ID NO: 139918 - DNA, 25 bp, Artificial
  Probe
gttttaatgcctgctcgattatata

SEQ ID NO: 139919 - DNA, 25 bp, Artificial
  Probe
gaaggtagcagcaagctgagtctat

SEQ ID NO: 139920 - DNA, 25 bp, Artificial
  Probe
catcagttttaatgcctgctcgatt

SEQ ID NO: 139921 - DNA, 25 bp, Artificial
  Probe
tagcagcaagctgagtctatgtttg

SEQ ID NO: 139922 - DNA, 25 bp, Artificial
  Probe
gtagcagcaagctgagtctatgttt

SEQ ID NO: 139923 - DNA, 25 bp, Artificial
  Probe
cttgtgcctcagtttctcctttatt

SEQ ID NO: 139924 - DNA, 25 bp, Artificial
  Probe
ttgtgcctcagtttctcctttattg

SEQ ID NO: 139925 - DNA, 25 bp, Artificial
  Probe
ccttgtgcctcagtttctcctttat

SEQ ID NO: 139926 - DNA, 25 bp, Artificial
  Probe
gtgcctcagtttctcctttattgct

SEQ ID NO: 139927 - DNA, 25 bp, Artificial
  Probe
tgtgcctcagtttctcctttattgc

SEQ ID NO: 139928 - DNA, 25 bp, Artificial
  Probe
gagagtcaagacaacgccacatcta

SEQ ID NO: 139929 - DNA, 25 bp, Artificial
  Probe
ctagcagcatctctggctatgatat

SEQ ID NO: 139930 - DNA, 25 bp, Artificial
  Probe
tagcagcatctctggctatgatatc

SEQ ID NO: 139931 - DNA, 25 bp, Artificial
  Probe
agcagcatctctggctatgatatcc

SEQ ID NO: 139932 - DNA, 25 bp, Artificial
  Probe
gtcaagggaggagagtcaagacaac

SEQ ID NO: 139933 - DNA, 25 bp, Artificial
  Probe
gttgtcaagggaggagagtcaagac

SEQ ID NO: 139934 - DNA, 25 bp, Artificial
  Probe
gccttgtgcctcagtttctccttta

SEQ ID NO: 139935 - DNA, 25 bp, Artificial
  Probe
gcagcatctctggctatgatatccc

SEQ ID NO: 139936 - DNA, 25 bp, Artificial
  Probe
tgtcaagggaggagagtcaagacaa

SEQ ID NO: 139937 - DNA, 25 bp, Artificial
  Probe
ttgtcaagggaggagagtcaagaca

SEQ ID NO: 139938 - DNA, 25 bp, Artificial
  Probe
tctagttatctgtctactacccaca

SEQ ID NO: 139939 - DNA, 25 bp, Artificial
  Probe
ctctagttatctgtctactacccac

SEQ ID NO: 139940 - DNA, 25 bp, Artificial
  Probe
tcctcagcatctctggctatgatat

SEQ ID NO: 139941 - DNA, 25 bp, Artificial
  Probe
cttctctagttatctgtctactacc

SEQ ID NO: 139942 - DNA, 25 bp, Artificial
  Probe
tctctagttatctgtctactaccca

SEQ ID NO: 139943 - DNA, 25 bp, Artificial
  Probe
ttcctcagcatctctggctatgata

SEQ ID NO: 139944 - DNA, 25 bp, Artificial
  Probe
ttctctagttatctgtctactaccc

SEQ ID NO: 139945 - DNA, 25 bp, Artificial
  Probe
acttctctagttatctgtctactac

SEQ ID NO: 139946 - DNA, 25 bp, Artificial
  Probe
gggacaaacttctctagttatctgt

SEQ ID NO: 139947 - DNA, 25 bp, Artificial
  Probe
tgggacaaacttctctagttatctg

SEQ ID NO: 139948 - DNA, 25 bp, Artificial
  Probe
ctgggacaaacttctctagttatct

SEQ ID NO: 139949 - DNA, 25 bp, Artificial
  Probe
ctcagcatctctggctatgatatcc

SEQ ID NO: 139950 - DNA, 25 bp, Artificial
  Probe
cctcagcatctctggctatgatatc

SEQ ID NO: 139951 - DNA, 25 bp, Artificial
  Probe
gctgggacaaacttctctagttatc

SEQ ID NO: 139952 - DNA, 25 bp, Artificial
  Probe
tgctgggacaaacttctctagttat

SEQ ID NO: 139953 - DNA, 25 bp, Artificial
  Probe
tatgaagcagaagggaaagggagtg

SEQ ID NO: 139954 - DNA, 25 bp, Artificial
  Probe
gtatgaagcagaagggaaagggagt

SEQ ID NO: 139955 - DNA, 25 bp, Artificial
  Probe
cttcctcagcatctctggctatgat

SEQ ID NO: 139956 - DNA, 25 bp, Artificial
  Probe
ctgctgggacaaacttctctagtta

SEQ ID NO: 139957 - DNA, 25 bp, Artificial
  Probe
ctctgctgggacaaacttctctagt

SEQ ID NO: 139958 - DNA, 25 bp, Artificial
  Probe
cagggtaagggttgagaaaggaagg

SEQ ID NO: 139959 - DNA, 25 bp, Artificial
  Probe
ccagggtaagggttgagaaaggaag

SEQ ID NO: 139960 - DNA, 25 bp, Artificial
  Probe
cctctgctgggacaaacttctctag

SEQ ID NO: 139961 - DNA, 25 bp, Artificial
  Probe
ggtatgaagcagaagggaaagggag

SEQ ID NO: 139962 - DNA, 25 bp, Artificial
  Probe
ataaacggtcttttcaagattccca

SEQ ID NO: 139963 - DNA, 25 bp, Artificial
  Probe
taaacggtcttttcaagattcccaa

SEQ ID NO: 139964 - DNA, 25 bp, Artificial
  Probe
ctagttatctgtctactacccacag

SEQ ID NO: 139965 - DNA, 25 bp, Artificial
  Probe
aacttctctagttatctgtctacta

SEQ ID NO: 139966 - DNA, 25 bp, Artificial
  Probe
ggacaaacttctctagttatctgtc

SEQ ID NO: 139967 - DNA, 25 bp, Artificial
  Probe
acaaacttctctagttatctgtcta

SEQ ID NO: 139968 - DNA, 25 bp, Artificial
  Probe
tctgctgggacaaacttctctagtt

SEQ ID NO: 139969 - DNA, 25 bp, Artificial
  Probe
aaacggtcttttcaagattcccaag

SEQ ID NO: 139970 - DNA, 25 bp, Artificial
  Probe
caaacttctctagttatctgtctac

SEQ ID NO: 139971 - DNA, 25 bp, Artificial
  Probe
aaacttctctagttatctgtctact

SEQ ID NO: 139972 - DNA, 25 bp, Artificial
  Probe
gacaaacttctctagttatctgtct

SEQ ID NO: 139973 - DNA, 25 bp, Artificial
  Probe
ctggtatgaagcagaagggaaaggg

SEQ ID NO: 139974 - DNA, 25 bp, Artificial
  Probe
tcagcatctctggctatgatatccc

SEQ ID NO: 139975 - DNA, 25 bp, Artificial
  Probe
cctggtatgaagcagaagggaaagg

SEQ ID NO: 139976 - DNA, 25 bp, Artificial
  Probe
aacggtcttttcaagattcccaagc

SEQ ID NO: 139977 - DNA, 25 bp, Artificial
  Probe
ctgtctactacccacagatcgcttc

SEQ ID NO: 139978 - DNA, 25 bp, Artificial
  Probe
attccccagggtaagggttgagaaa

SEQ ID NO: 139979 - DNA, 25 bp, Artificial
  Probe
gggactttcagatggtttatttccg

SEQ ID NO: 139980 - DNA, 25 bp, Artificial
  Probe
taaacttcactcgctccatccacta

SEQ ID NO: 139981 - DNA, 25 bp, Artificial
  Probe
ttgtcagtgtggtgttcatcaagga

SEQ ID NO: 139982 - DNA, 25 bp, Artificial
  Probe
gttgtcagtgtggtgttcatcaagg

SEQ ID NO: 139983 - DNA, 25 bp, Artificial
  Probe
ggttgtcagtgtggtgttcatcaag

SEQ ID NO: 139984 - DNA, 25 bp, Artificial
  Probe
tggggactttcagatggtttatttc

SEQ ID NO: 139985 - DNA, 25 bp, Artificial
  Probe
gtggggactttcagatggtttattt

SEQ ID NO: 139986 - DNA, 25 bp, Artificial
  Probe
tgtcagtgtggtgttcatcaaggag

SEQ ID NO: 139987 - DNA, 25 bp, Artificial
  Probe
aggttgtcagtgtggtgttcatcaa

SEQ ID NO: 139988 - DNA, 25 bp, Artificial
  Probe
gactttcagatggtttatttccggg

SEQ ID NO: 139989 - DNA, 25 bp, Artificial
  Probe
agtggggactttcagatggtttatt

SEQ ID NO: 139990 - DNA, 25 bp, Artificial
  Probe
cagtggggactttcagatggtttat

SEQ ID NO: 139991 - DNA, 25 bp, Artificial
  Probe
ggggactttcagatggtttatttcc

SEQ ID NO: 139992 - DNA, 25 bp, Artificial
  Probe
aaacttcactcgctccatccactac

SEQ ID NO: 139993 - DNA, 25 bp, Artificial
  Probe
gtaaacttcactcgctccatccact

SEQ ID NO: 139994 - DNA, 25 bp, Artificial
  Probe
ggactttcagatggtttatttccgg

SEQ ID NO: 139995 - DNA, 25 bp, Artificial
  Probe
tcgagtcggagtacttgaagattcc

SEQ ID NO: 139996 - DNA, 25 bp, Artificial
  Probe
actttcagatggtttatttccgggc

SEQ ID NO: 139997 - DNA, 25 bp, Artificial
  Probe
ctcgagtcggagtacttgaagattc

SEQ ID NO: 139998 - DNA, 25 bp, Artificial
  Probe
gagtacttgaagattcccggagacc

SEQ ID NO: 139999 - DNA, 25 bp, Artificial
  Probe
ctttcagatggtttatttccgggcc

SEQ ID NO: 140000 - DNA, 25 bp, Artificial
  Probe
gtacttgaagattcccggagaccag

SEQ ID NO: 140001 - DNA, 25 bp, Artificial
  Probe
agtacttgaagattcccggagacca

SEQ ID NO: 140002 - DNA, 25 bp, Artificial
  Probe
ggagtacttgaagattcccggagac

SEQ ID NO: 140003 - DNA, 25 bp, Artificial
  Probe
gcagtggggactttcagatggttta

SEQ ID NO: 140004 - DNA, 25 bp, Artificial
  Probe
gctcgagtcggagtacttgaagatt

SEQ ID NO: 140005 - DNA, 25 bp, Artificial
  Probe
cgagtcggagtacttgaagattccc

SEQ ID NO: 140006 - DNA, 25 bp, Artificial
  Probe
agacctctctgatgacgaggacttg

SEQ ID NO: 140007 - DNA, 25 bp, Artificial
  Probe
cagacctctctgatgacgaggactt

SEQ ID NO: 140008 - DNA, 25 bp, Artificial
  Probe
gagtcggagtacttgaagattcccg

SEQ ID NO: 140009 - DNA, 25 bp, Artificial
  Probe
gtcctcctggatattgtgattcatc

SEQ ID NO: 140010 - DNA, 25 bp, Artificial
  Probe
caagacaagtgtgtgaacaactgat

SEQ ID NO: 140011 - DNA, 25 bp, Artificial
  Probe
tcagattcccaacgattattactca

SEQ ID NO: 140012 - DNA, 25 bp, Artificial
  Probe
aagacaagtgtgtgaacaactgatc

SEQ ID NO: 140013 - DNA, 25 bp, Artificial
  Probe
cagattcccaacgattattactcaa

SEQ ID NO: 140014 - DNA, 25 bp, Artificial
  Probe
ggtcctcctggatattgtgattcat

SEQ ID NO: 140015 - DNA, 25 bp, Artificial
  Probe
atcagattcccaacgattattactc

SEQ ID NO: 140016 - DNA, 25 bp, Artificial
  Probe
agattcccaacgattattactcaaa

SEQ ID NO: 140017 - DNA, 25 bp, Artificial
  Probe
gtttgaatactgagaatcctgtttc

SEQ ID NO: 140018 - DNA, 25 bp, Artificial
  Probe
gatattgtgattcatcccagtgtgc

SEQ ID NO: 140019 - DNA, 25 bp, Artificial
  Probe
agtttgaatactgagaatcctgttt

SEQ ID NO: 140020 - DNA, 25 bp, Artificial
  Probe
aggtcctcctggatattgtgattca

SEQ ID NO: 140021 - DNA, 25 bp, Artificial
  Probe
ccagatgagcagattcaaccagatg

SEQ ID NO: 140022 - DNA, 25 bp, Artificial
  Probe
gattcccaacgattattactcaaat

SEQ ID NO: 140023 - DNA, 25 bp, Artificial
  Probe
attattactcaaatcgaaaccagcc

SEQ ID NO: 140024 - DNA, 25 bp, Artificial
  Probe
cagtgctgcttacagtttgaatact

SEQ ID NO: 140025 - DNA, 25 bp, Artificial
  Probe
ttattactcaaatcgaaaccagcct

SEQ ID NO: 140026 - DNA, 25 bp, Artificial
  Probe
tattactcaaatcgaaaccagcctg

SEQ ID NO: 140027 - DNA, 25 bp, Artificial
  Probe
ttctaagtctccagtgctgcttaca

SEQ ID NO: 140028 - DNA, 25 bp, Artificial
  Probe
taagtctccagtgctgcttacagtt

SEQ ID NO: 140029 - DNA, 25 bp, Artificial
  Probe
ctttctaagtctccagtgctgctta

SEQ ID NO: 140030 - DNA, 25 bp, Artificial
  Probe
ccagtgctgcttacagtttgaatac

SEQ ID NO: 140031 - DNA, 25 bp, Artificial
  Probe
tccagtgctgcttacagtttgaata

SEQ ID NO: 140032 - DNA, 25 bp, Artificial
  Probe
tctaagtctccagtgctgcttacag

SEQ ID NO: 140033 - DNA, 25 bp, Artificial
  Probe
atattgtgattcatcccagtgtgcc

SEQ ID NO: 140034 - DNA, 25 bp, Artificial
  Probe
ttcaaccagatgctgaatcagattc

SEQ ID NO: 140035 - DNA, 25 bp, Artificial
  Probe
tgaatactgagaatcctgtttctga

SEQ ID NO: 140036 - DNA, 25 bp, Artificial
  Probe
aatcagattcccaacgattattact

SEQ ID NO: 140037 - DNA, 25 bp, Artificial
  Probe
tttctaagtctccagtgctgcttac

SEQ ID NO: 140038 - DNA, 25 bp, Artificial
  Probe
ttgaatactgagaatcctgtttctg

SEQ ID NO: 140039 - DNA, 25 bp, Artificial
  Probe
tcctcctggatattgtgattcatcc

SEQ ID NO: 140040 - DNA, 25 bp, Artificial
  Probe
tcaaccagatgctgaatcagattcc

SEQ ID NO: 140041 - DNA, 25 bp, Artificial
  Probe
gcaagacaagtgtgtgaacaactga

SEQ ID NO: 140042 - DNA, 25 bp, Artificial
  Probe
gaatactgagaatcctgtttctgaa

SEQ ID NO: 140043 - DNA, 25 bp, Artificial
  Probe
ctgaatcagattcccaacgattatt

SEQ ID NO: 140044 - DNA, 25 bp, Artificial
  Probe
ctaagtctccagtgctgcttacagt

SEQ ID NO: 140045 - DNA, 25 bp, Artificial
  Probe
gctaacaaactttctaagtctccag

SEQ ID NO: 140046 - DNA, 25 bp, Artificial
  Probe
ggctaacaaactttctaagtctcca

SEQ ID NO: 140047 - DNA, 25 bp, Artificial
  Probe
attcccaacgattattactcaaatc

SEQ ID NO: 140048 - DNA, 25 bp, Artificial
  Probe
gagacattgcttcccagaacatgat

SEQ ID NO: 140049 - DNA, 25 bp, Artificial
  Probe
gctgaatcagattcccaacgattat

SEQ ID NO: 140050 - DNA, 25 bp, Artificial
  Probe
aatactgagaatcctgtttctgaaa

SEQ ID NO: 140051 - DNA, 25 bp, Artificial
  Probe
tttgaatactgagaatcctgtttct

SEQ ID NO: 140052 - DNA, 25 bp, Artificial
  Probe
gattattactcaaatcgaaaccagc

SEQ ID NO: 140053 - DNA, 25 bp, Artificial
  Probe
taacaaactttctaagtctccagtg

SEQ ID NO: 140054 - DNA, 25 bp, Artificial
  Probe
aacattattgtcacactgaagagca

SEQ ID NO: 140055 - DNA, 25 bp, Artificial
  Probe
cattattgtcacactgaagagcaca

SEQ ID NO: 140056 - DNA, 25 bp, Artificial
  Probe
acattattgtcacactgaagagcac

SEQ ID NO: 140057 - DNA, 25 bp, Artificial
  Probe
attattgtcacactgaagagcacag

SEQ ID NO: 140058 - DNA, 25 bp, Artificial
  Probe
tattgtcacactgaagagcacagaa

SEQ ID NO: 140059 - DNA, 25 bp, Artificial
  Probe
ttattgtcacactgaagagcacaga

SEQ ID NO: 140060 - DNA, 25 bp, Artificial
  Probe
aatgagaggacagtgatccagtatc

SEQ ID NO: 140061 - DNA, 25 bp, Artificial
  Probe
gaatgagaggacagtgatccagtat

SEQ ID NO: 140062 - DNA, 25 bp, Artificial
  Probe
ttgaagatttctggaggatgatttg

SEQ ID NO: 140063 - DNA, 25 bp, Artificial
  Probe
tgaagatttctggaggatgatttgg

SEQ ID NO: 140064 - DNA, 25 bp, Artificial
  Probe
ctttgaagatttctggaggatgatt

SEQ ID NO: 140065 - DNA, 25 bp, Artificial
  Probe
aacactgaggagtatggaaacatta

SEQ ID NO: 140066 - DNA, 25 bp, Artificial
  Probe
acactgaggagtatggaaacattat

SEQ ID NO: 140067 - DNA, 25 bp, Artificial
  Probe
gaacactgaggagtatggaaacatt

SEQ ID NO: 140068 - DNA, 25 bp, Artificial
  Probe
aagatttctggaggatgatttggga

SEQ ID NO: 140069 - DNA, 25 bp, Artificial
  Probe
gaagatttctggaggatgatttggg

SEQ ID NO: 140070 - DNA, 25 bp, Artificial
  Probe
tttgaagatttctggaggatgattt

SEQ ID NO: 140071 - DNA, 25 bp, Artificial
  Probe
aaacattattgtcacactgaagagc

SEQ ID NO: 140072 - DNA, 25 bp, Artificial
  Probe
gatttctggaggatgatttgggaac

SEQ ID NO: 140073 - DNA, 25 bp, Artificial
  Probe
tggaaacattattgtcacactgaag

SEQ ID NO: 140074 - DNA, 25 bp, Artificial
  Probe
agatttctggaggatgatttgggaa

SEQ ID NO: 140075 - DNA, 25 bp, Artificial
  Probe
ggaaacattattgtcacactgaaga

SEQ ID NO: 140076 - DNA, 25 bp, Artificial
  Probe
atggaaacattattgtcacactgaa

SEQ ID NO: 140077 - DNA, 25 bp, Artificial
  Probe
agaatgagaggacagtgatccagta

SEQ ID NO: 140078 - DNA, 25 bp, Artificial
  Probe
actgaggagtatggaaacattattg

SEQ ID NO: 140079 - DNA, 25 bp, Artificial
  Probe
cactgaggagtatggaaacattatt

SEQ ID NO: 140080 - DNA, 25 bp, Artificial
  Probe
agaacactgaggagtatggaaacat

SEQ ID NO: 140081 - DNA, 25 bp, Artificial
  Probe
ggagtatggaaacattattgtcaca

SEQ ID NO: 140082 - DNA, 25 bp, Artificial
  Probe
ttacaacaaagcgaaagcctacatc

SEQ ID NO: 140083 - DNA, 25 bp, Artificial
  Probe
aggagtatggaaacattattgtcac

SEQ ID NO: 140084 - DNA, 25 bp, Artificial
  Probe
atttctggaggatgatttgggaaca

SEQ ID NO: 140085 - DNA, 25 bp, Artificial
  Probe
cctttgaagatttctggaggatgat

SEQ ID NO: 140086 - DNA, 25 bp, Artificial
  Probe
gaggagtatggaaacattattgtca

SEQ ID NO: 140087 - DNA, 25 bp, Artificial
  Probe
tgaggagtatggaaacattattgtc

SEQ ID NO: 140088 - DNA, 25 bp, Artificial
  Probe
ctgaggagtatggaaacattattgt

SEQ ID NO: 140089 - DNA, 25 bp, Artificial
  Probe
gttacaacaaagcgaaagcctacat

SEQ ID NO: 140090 - DNA, 25 bp, Artificial
  Probe
gaaacattattgtcacactgaagag

SEQ ID NO: 140091 - DNA, 25 bp, Artificial
  Probe
gtatggaaacattattgtcacactg

SEQ ID NO: 140092 - DNA, 25 bp, Artificial
  Probe
gagaacactgaggagtatggaaaca

SEQ ID NO: 140093 - DNA, 25 bp, Artificial
  Probe
tatggaaacattattgtcacactga

SEQ ID NO: 140094 - DNA, 25 bp, Artificial
  Probe
agtatggaaacattattgtcacact

SEQ ID NO: 140095 - DNA, 25 bp, Artificial
  Probe
gagtatggaaacattattgtcacac

SEQ ID NO: 140096 - DNA, 25 bp, Artificial
  Probe
attgtcacactgaagagcacagaag

SEQ ID NO: 140097 - DNA, 25 bp, Artificial
  Probe
tttctggaggatgatttgggaacaa

SEQ ID NO: 140098 - DNA, 25 bp, Artificial
  Probe
acctttgaagatttctggaggatga

SEQ ID NO: 140099 - DNA, 25 bp, Artificial
  Probe
tgaatacaacatgcctcagtacatc

SEQ ID NO: 140100 - DNA, 25 bp, Artificial
  Probe
gaatacaacatgcctcagtacatcc

SEQ ID NO: 140101 - DNA, 25 bp, Artificial
  Probe
tccttgatggatatagacaacagaa

SEQ ID NO: 140102 - DNA, 25 bp, Artificial
  Probe
ttccttgatggatatagacaacaga

SEQ ID NO: 140103 - DNA, 25 bp, Artificial
  Probe
aatacaacatgcctcagtacatcct

SEQ ID NO: 140104 - DNA, 25 bp, Artificial
  Probe
ggatatagacaacagaaagcctaca

SEQ ID NO: 140105 - DNA, 25 bp, Artificial
  Probe
tggatatagacaacagaaagcctac

SEQ ID NO: 140106 - DNA, 25 bp, Artificial
  Probe
gatggatatagacaacagaaagcct

SEQ ID NO: 140107 - DNA, 25 bp, Artificial
  Probe
tgatggatatagacaacagaaagcc

SEQ ID NO: 140108 - DNA, 25 bp, Artificial
  Probe
atggatatagacaacagaaagccta

SEQ ID NO: 140109 - DNA, 25 bp, Artificial
  Probe
aactccactattgttgtgatgctca

SEQ ID NO: 140110 - DNA, 25 bp, Artificial
  Probe
ttgatggatatagacaacagaaagc

SEQ ID NO: 140111 - DNA, 25 bp, Artificial
  Probe
caaagtctggagaaggatttattga

SEQ ID NO: 140112 - DNA, 25 bp, Artificial
  Probe
atagacaacagaaagcctacattgc

SEQ ID NO: 140113 - DNA, 25 bp, Artificial
  Probe
gatatagacaacagaaagcctacat

SEQ ID NO: 140114 - DNA, 25 bp, Artificial
  Probe
tatagacaacagaaagcctacattg

SEQ ID NO: 140115 - DNA, 25 bp, Artificial
  Probe
atacaacatgcctcagtacatcctg

SEQ ID NO: 140116 - DNA, 25 bp, Artificial
  Probe
ccttgatggatatagacaacagaaa

SEQ ID NO: 140117 - DNA, 25 bp, Artificial
  Probe
atatagacaacagaaagcctacatt

SEQ ID NO: 140118 - DNA, 25 bp, Artificial
  Probe
aaagtctggagaaggatttattgac

SEQ ID NO: 140119 - DNA, 25 bp, Artificial
  Probe
agagaaatgggcagagagaaatgtc

SEQ ID NO: 140120 - DNA, 25 bp, Artificial
  Probe
gagagaaatgggcagagagaaatgt

SEQ ID NO: 140121 - DNA, 25 bp, Artificial
  Probe
tgagagaaatgggcagagagaaatg

SEQ ID NO: 140122 - DNA, 25 bp, Artificial
  Probe
ccaaagtctggagaaggatttattg

SEQ ID NO: 140123 - DNA, 25 bp, Artificial
  Probe
gaacgatctgcaagataccagtatt

SEQ ID NO: 140124 - DNA, 25 bp, Artificial
  Probe
gccaaagtctggagaaggatttatt

SEQ ID NO: 140125 - DNA, 25 bp, Artificial
  Probe
gtttccttgatggatatagacaaca

SEQ ID NO: 140126 - DNA, 25 bp, Artificial
  Probe
gagaaatgggcagagagaaatgtca

SEQ ID NO: 140127 - DNA, 25 bp, Artificial
  Probe
tttccttgatggatatagacaacag

SEQ ID NO: 140128 - DNA, 25 bp, Artificial
  Probe
agtttccttgatggatatagacaac

SEQ ID NO: 140129 - DNA, 25 bp, Artificial
  Probe
cagtttccttgatggatatagacaa

SEQ ID NO: 140130 - DNA, 25 bp, Artificial
  Probe
agaaatgggcagagagaaatgtcac

SEQ ID NO: 140131 - DNA, 25 bp, Artificial
  Probe
cttgatggatatagacaacagaaag

SEQ ID NO: 140132 - DNA, 25 bp, Artificial
  Probe
ctgagagaaatgggcagagagaaat

SEQ ID NO: 140133 - DNA, 25 bp, Artificial
  Probe
tgccaaagtctggagaaggatttat

SEQ ID NO: 140134 - DNA, 25 bp, Artificial
  Probe
ctttgggaacacaactccactattg

SEQ ID NO: 140135 - DNA, 25 bp, Artificial
  Probe
ctgaatacaacatgcctcagtacat

SEQ ID NO: 140136 - DNA, 25 bp, Artificial
  Probe
cttagctgagacgactgaagacttt

SEQ ID NO: 140137 - DNA, 25 bp, Artificial
  Probe
ccttagctgagacgactgaagactt

SEQ ID NO: 140138 - DNA, 25 bp, Artificial
  Probe
cgaacgatctgcaagataccagtat

SEQ ID NO: 140139 - DNA, 25 bp, Artificial
  Probe
accagtattttgttgtagatcccat

SEQ ID NO: 140140 - DNA, 25 bp, Artificial
  Probe
taccagtattttgttgtagatccca

SEQ ID NO: 140141 - DNA, 25 bp, Artificial
  Probe
gagaaggatttattgacttcatcgg

SEQ ID NO: 140142 - DNA, 25 bp, Artificial
  Probe
ggagaaggatttattgacttcatcg

SEQ ID NO: 140143 - DNA, 25 bp, Artificial
  Probe
gtgccaaagtctggagaaggattta

SEQ ID NO: 140144 - DNA, 25 bp, Artificial
  Probe
cggtaagtgttgtagttattggact

SEQ ID NO: 140145 - DNA, 25 bp, Artificial
  Probe
ggtaagtgttgtagttattggactc

SEQ ID NO: 140146 - DNA, 25 bp, Artificial
  Probe
aacactcttctgtaacacacttaga

SEQ ID NO: 140147 - DNA, 25 bp, Artificial
  Probe
gtaagtgttgtagttattggactcc

SEQ ID NO: 140148 - DNA, 25 bp, Artificial
  Probe
acactcttctgtaacacacttagaa

SEQ ID NO: 140149 - DNA, 25 bp, Artificial
  Probe
aagtgttgtagttattggactccag

SEQ ID NO: 140150 - DNA, 25 bp, Artificial
  Probe
taagtgttgtagttattggactcca

SEQ ID NO: 140151 - DNA, 25 bp, Artificial
  Probe
aaacactcttctgtaacacacttag

SEQ ID NO: 140152 - DNA, 25 bp, Artificial
  Probe
gaaacactcttctgtaacacactta

SEQ ID NO: 140153 - DNA, 25 bp, Artificial
  Probe
agtgttgtagttattggactccagg

SEQ ID NO: 140154 - DNA, 25 bp, Artificial
  Probe
ccggtaagtgttgtagttattggac

SEQ ID NO: 140155 - DNA, 25 bp, Artificial
  Probe
gacacaactcctctctcttctgctt

SEQ ID NO: 140156 - DNA, 25 bp, Artificial
  Probe
ttgatggacacaactcctctctctt

SEQ ID NO: 140157 - DNA, 25 bp, Artificial
  Probe
gtccatcttccttcatagccaggta

SEQ ID NO: 140158 - DNA, 25 bp, Artificial
  Probe
gatggacacaactcctctctcttct

SEQ ID NO: 140159 - DNA, 25 bp, Artificial
  Probe
ctgtaacacacttagaagccagcag

SEQ ID NO: 140160 - DNA, 25 bp, Artificial
  Probe
atggacacaactcctctctcttctg

SEQ ID NO: 140161 - DNA, 25 bp, Artificial
  Probe
tgatggacacaactcctctctcttc

SEQ ID NO: 140162 - DNA, 25 bp, Artificial
  Probe
cttgatggacacaactcctctctct

SEQ ID NO: 140163 - DNA, 25 bp, Artificial
  Probe
tccatcttccttcatagccaggtac

SEQ ID NO: 140164 - DNA, 25 bp, Artificial
  Probe
agaaacactcttctgtaacacactt

SEQ ID NO: 140165 - DNA, 25 bp, Artificial
  Probe
aagaaacactcttctgtaacacact

SEQ ID NO: 140166 - DNA, 25 bp, Artificial
  Probe
ttctgtaacacacttagaagccagc

SEQ ID NO: 140167 - DNA, 25 bp, Artificial
  Probe
acacaactcctctctcttctgcttg

SEQ ID NO: 140168 - DNA, 25 bp, Artificial
  Probe
tctgtaacacacttagaagccagca

SEQ ID NO: 140169 - DNA, 25 bp, Artificial
  Probe
gtgttgtagttattggactccaggc

SEQ ID NO: 140170 - DNA, 25 bp, Artificial
  Probe
caggcgttcaaagaagaaacactct

SEQ ID NO: 140171 - DNA, 25 bp, Artificial
  Probe
cacaactcctctctcttctgcttgg

SEQ ID NO: 140172 - DNA, 25 bp, Artificial
  Probe
tagttattggactccaggcgttcaa

SEQ ID NO: 140173 - DNA, 25 bp, Artificial
  Probe
ccttgatggacacaactcctctctc

SEQ ID NO: 140174 - DNA, 25 bp, Artificial
  Probe
ttgtagttattggactccaggcgtt

SEQ ID NO: 140175 - DNA, 25 bp, Artificial
  Probe
gactccaggcgttcaaagaagaaac

SEQ ID NO: 140176 - DNA, 25 bp, Artificial
  Probe
aggcgttcaaagaagaaacactctt

SEQ ID NO: 140177 - DNA, 25 bp, Artificial
  Probe
ccaggcgttcaaagaagaaacactc

SEQ ID NO: 140178 - DNA, 25 bp, Artificial
  Probe
ctccaggcgttcaaagaagaaacac

SEQ ID NO: 140179 - DNA, 25 bp, Artificial
  Probe
acaactcctctctcttctgcttgga

SEQ ID NO: 140180 - DNA, 25 bp, Artificial
  Probe
gtagttattggactccaggcgttca

SEQ ID NO: 140181 - DNA, 25 bp, Artificial
  Probe
tgtagttattggactccaggcgttc

SEQ ID NO: 140182 - DNA, 25 bp, Artificial
  Probe
ctctcttctgcttggagctgtagtt

SEQ ID NO: 140183 - DNA, 25 bp, Artificial
  Probe
ctctctcttctgcttggagctgtag

SEQ ID NO: 140184 - DNA, 25 bp, Artificial
  Probe
gttgtagttattggactccaggcgt

SEQ ID NO: 140185 - DNA, 25 bp, Artificial
  Probe
tgttgtagttattggactccaggcg

SEQ ID NO: 140186 - DNA, 25 bp, Artificial
  Probe
tccaggcgttcaaagaagaaacact

SEQ ID NO: 140187 - DNA, 25 bp, Artificial
  Probe
actccaggcgttcaaagaagaaaca

SEQ ID NO: 140188 - DNA, 25 bp, Artificial
  Probe
ctcttctgcttggagctgtagtttg

SEQ ID NO: 140189 - DNA, 25 bp, Artificial
  Probe
gcattcgtgtgtatattcaatctct

SEQ ID NO: 140190 - DNA, 25 bp, Artificial
  Probe
agcattcgtgtgtatattcaatctc

SEQ ID NO: 140191 - DNA, 25 bp, Artificial
  Probe
tattcaatctcttcttgtgtgtgtg

SEQ ID NO: 140192 - DNA, 25 bp, Artificial
  Probe
attcaatctcttcttgtgtgtgtga

SEQ ID NO: 140193 - DNA, 25 bp, Artificial
  Probe
tagcattcgtgtgtatattcaatct

SEQ ID NO: 140194 - DNA, 25 bp, Artificial
  Probe
atattcaatctcttcttgtgtgtgt

SEQ ID NO: 140195 - DNA, 25 bp, Artificial
  Probe
ttcaatctcttcttgtgtgtgtgac

SEQ ID NO: 140196 - DNA, 25 bp, Artificial
  Probe
tcgtgtgtatattcaatctcttctt

SEQ ID NO: 140197 - DNA, 25 bp, Artificial
  Probe
ttcgtgtgtatattcaatctcttct

SEQ ID NO: 140198 - DNA, 25 bp, Artificial
  Probe
actcttatcatggtactgtaactgt

SEQ ID NO: 140199 - DNA, 25 bp, Artificial
  Probe
ttagcattcgtgtgtatattcaatc

SEQ ID NO: 140200 - DNA, 25 bp, Artificial
  Probe
cgtgtgtatattcaatctcttcttg

SEQ ID NO: 140201 - DNA, 25 bp, Artificial
  Probe
cattcgtgtgtatattcaatctctt

SEQ ID NO: 140202 - DNA, 25 bp, Artificial
  Probe
aatctcttcttgtgtgtgtgaccaa

SEQ ID NO: 140203 - DNA, 25 bp, Artificial
  Probe
attcgtgtgtatattcaatctcttc

SEQ ID NO: 140204 - DNA, 25 bp, Artificial
  Probe
ttatcatggtactgtaactgtatcc

SEQ ID NO: 140205 - DNA, 25 bp, Artificial
  Probe
tgtgtgtgtgaccaagtatttatac

SEQ ID NO: 140206 - DNA, 25 bp, Artificial
  Probe
ttatactctggtgcgactaagtacc

SEQ ID NO: 140207 - DNA, 25 bp, Artificial
  Probe
gtatttatactctggtgcgactaag

SEQ ID NO: 140208 - DNA, 25 bp, Artificial
  Probe
ctcttatcatggtactgtaactgta

SEQ ID NO: 140209 - DNA, 25 bp, Artificial
  Probe
tactcttatcatggtactgtaactg

SEQ ID NO: 140210 - DNA, 25 bp, Artificial
  Probe
tcaatctcttcttgtgtgtgtgacc

SEQ ID NO: 140211 - DNA, 25 bp, Artificial
  Probe
tatttatactctggtgcgactaagt

SEQ ID NO: 140212 - DNA, 25 bp, Artificial
  Probe
tatcatggtactgtaactgtatcca

SEQ ID NO: 140213 - DNA, 25 bp, Artificial
  Probe
caatctcttcttgtgtgtgtgacca

SEQ ID NO: 140214 - DNA, 25 bp, Artificial
  Probe
tatattcaatctcttcttgtgtgtg

SEQ ID NO: 140215 - DNA, 25 bp, Artificial
  Probe
gtatattcaatctcttcttgtgtgt

SEQ ID NO: 140216 - DNA, 25 bp, Artificial
  Probe
tgtatattcaatctcttcttgtgtg

SEQ ID NO: 140217 - DNA, 25 bp, Artificial
  Probe
gtgtatattcaatctcttcttgtgt

SEQ ID NO: 140218 - DNA, 25 bp, Artificial
  Probe
tgtgtatattcaatctcttcttgtg

SEQ ID NO: 140219 - DNA, 25 bp, Artificial
  Probe
gtgtgtatattcaatctcttcttgt

SEQ ID NO: 140220 - DNA, 25 bp, Artificial
  Probe
ttgtgtgtgtgaccaagtatttata

SEQ ID NO: 140221 - DNA, 25 bp, Artificial
  Probe
tcttatcatggtactgtaactgtat

SEQ ID NO: 140222 - DNA, 25 bp, Artificial
  Probe
cttatcatggtactgtaactgtatc

SEQ ID NO: 140223 - DNA, 25 bp, Artificial
  Probe
atttatactctggtgcgactaagta

SEQ ID NO: 140224 - DNA, 25 bp, Artificial
  Probe
atactcttatcatggtactgtaact

SEQ ID NO: 140225 - DNA, 25 bp, Artificial
  Probe
attgagttgatgatttattgggaaa

SEQ ID NO: 140226 - DNA, 25 bp, Artificial
  Probe
tttatactctggtgcgactaagtac

SEQ ID NO: 140227 - DNA, 25 bp, Artificial
  Probe
tttagcattcgtgtgtatattcaat

SEQ ID NO: 140228 - DNA, 25 bp, Artificial
  Probe
atttagcattcgtgtgtatattcaa

SEQ ID NO: 140229 - DNA, 25 bp, Artificial
  Probe
aatttagcattcgtgtgtatattca

SEQ ID NO: 140230 - DNA, 25 bp, Artificial
  Probe
ttatgtgccgtgtgtctgtctgtaa

SEQ ID NO: 140231 - DNA, 25 bp, Artificial
  Probe
caagtatttatactctggtgcgact

SEQ ID NO: 140232 - DNA, 25 bp, Artificial
  Probe
agtatttatactctggtgcgactaa

SEQ ID NO: 140233 - DNA, 25 bp, Artificial
  Probe
aagtatttatactctggtgcgacta

SEQ ID NO: 140234 - DNA, 25 bp, Artificial
  Probe
cactaatgacatcaacaaggctctc

SEQ ID NO: 140235 - DNA, 25 bp, Artificial
  Probe
atggtcatgtatctattgccttctc

SEQ ID NO: 140236 - DNA, 25 bp, Artificial
  Probe
ggtcatgtatctattgccttctcta

SEQ ID NO: 140237 - DNA, 25 bp, Artificial
  Probe
ttcactaatgacatcaacaaggctc

SEQ ID NO: 140238 - DNA, 25 bp, Artificial
  Probe
cttcactaatgacatcaacaaggct

SEQ ID NO: 140239 - DNA, 25 bp, Artificial
  Probe
tcttcactaatgacatcaacaaggc

SEQ ID NO: 140240 - DNA, 25 bp, Artificial
  Probe
tatggtcatgtatctattgccttct

SEQ ID NO: 140241 - DNA, 25 bp, Artificial
  Probe
gtcttcactaatgacatcaacaagg

SEQ ID NO: 140242 - DNA, 25 bp, Artificial
  Probe
tggtcatgtatctattgccttctct

SEQ ID NO: 140243 - DNA, 25 bp, Artificial
  Probe
actaatgacatcaacaaggctctca

SEQ ID NO: 140244 - DNA, 25 bp, Artificial
  Probe
tcactaatgacatcaacaaggctct

SEQ ID NO: 140245 - DNA, 25 bp, Artificial
  Probe
atatggtcatgtatctattgccttc

SEQ ID NO: 140246 - DNA, 25 bp, Artificial
  Probe
aggtgtagaatatggtcatgtatct

SEQ ID NO: 140247 - DNA, 25 bp, Artificial
  Probe
gaatatggtcatgtatctattgcct

SEQ ID NO: 140248 - DNA, 25 bp, Artificial
  Probe
agaatatggtcatgtatctattgcc

SEQ ID NO: 140249 - DNA, 25 bp, Artificial
  Probe
gtcatgtatctattgccttctctat

SEQ ID NO: 140250 - DNA, 25 bp, Artificial
  Probe
aatatggtcatgtatctattgcctt

SEQ ID NO: 140251 - DNA, 25 bp, Artificial
  Probe
ggtcctcagattgataagaagcaat

SEQ ID NO: 140252 - DNA, 25 bp, Artificial
  Probe
ggatgaagttatagaaagagccaat

SEQ ID NO: 140253 - DNA, 25 bp, Artificial
  Probe
cctcagattgataagaagcaataca

SEQ ID NO: 140254 - DNA, 25 bp, Artificial
  Probe
agaaagagccaataactcagacttc

SEQ ID NO: 140255 - DNA, 25 bp, Artificial
  Probe
tgaggtttaagactatggatgaagt

SEQ ID NO: 140256 - DNA, 25 bp, Artificial
  Probe
ctcccttcaacccacagtatagaat

SEQ ID NO: 140257 - DNA, 25 bp, Artificial
  Probe
gatgtctggaaatgggagagaaatg

SEQ ID NO: 140258 - DNA, 25 bp, Artificial
  Probe
agatgtctggaaatgggagagaaat

SEQ ID NO: 140259 - DNA, 25 bp, Artificial
  Probe
tagaaagagccaataactcagactt

SEQ ID NO: 140260 - DNA, 25 bp, Artificial
  Probe
ttgaggtttaagactatggatgaag

SEQ ID NO: 140261 - DNA, 25 bp, Artificial
  Probe
taggtgtagaatatggtcatgtatc

SEQ ID NO: 140262 - DNA, 25 bp, Artificial
  Probe
atagaaagagccaataactcagact

SEQ ID NO: 140263 - DNA, 25 bp, Artificial
  Probe
tactgttactgacaaatgaggacaa

SEQ ID NO: 140264 - DNA, 25 bp, Artificial
  Probe
atactgttactgacaaatgaggaca

SEQ ID NO: 140265 - DNA, 25 bp, Artificial
  Probe
ccatactgttactgacaaatgagga

SEQ ID NO: 140266 - DNA, 25 bp, Artificial
  Probe
tccatactgttactgacaaatgagg

SEQ ID NO: 140267 - DNA, 25 bp, Artificial
  Probe
tcctcagattgataagaagcaatac

SEQ ID NO: 140268 - DNA, 25 bp, Artificial
  Probe
gtcctcagattgataagaagcaata

SEQ ID NO: 140269 - DNA, 25 bp, Artificial
  Probe
tcccttcaacccacagtatagaatg

SEQ ID NO: 140270 - DNA, 25 bp, Artificial
  Probe
aagatgtctggaaatgggagagaaa

SEQ ID NO: 140271 - DNA, 25 bp, Artificial
  Probe
catactgttactgacaaatgaggac

SEQ ID NO: 140272 - DNA, 25 bp, Artificial
  Probe
tcatgtatctattgccttctctatt

SEQ ID NO: 140273 - DNA, 25 bp, Artificial
  Probe
ctccatactgttactgacaaatgag

SEQ ID NO: 140274 - DNA, 25 bp, Artificial
  Probe
ctaatgacatcaacaaggctctcat

SEQ ID NO: 140275 - DNA, 25 bp, Artificial
  Probe
tatggatgaagttatagaaagagcc

SEQ ID NO: 140276 - DNA, 25 bp, Artificial
  Probe
tttgaggtttaagactatggatgaa

SEQ ID NO: 140277 - DNA, 25 bp, Artificial
  Probe
actgttactgacaaatgaggacaac

SEQ ID NO: 140278 - DNA, 25 bp, Artificial
  Probe
gaggtttaagactatggatgaagtt

SEQ ID NO: 140279 - DNA, 25 bp, Artificial
  Probe
gagcaaattgtcattcaaacattcg

SEQ ID NO: 140280 - DNA, 25 bp, Artificial
  Probe
caaattgtcattcaaacattcgcac

SEQ ID NO: 140281 - DNA, 25 bp, Artificial
  Probe
tgagcaaattgtcattcaaacattc

SEQ ID NO: 140282 - DNA, 25 bp, Artificial
  Probe
aaattgtcattcaaacattcgcaca

SEQ ID NO: 140283 - DNA, 25 bp, Artificial
  Probe
aatattcaagtcaaccatgtccctg

SEQ ID NO: 140284 - DNA, 25 bp, Artificial
  Probe
atattcaagtcaaccatgtccctgt

SEQ ID NO: 140285 - DNA, 25 bp, Artificial
  Probe
agcaaattgtcattcaaacattcgc

SEQ ID NO: 140286 - DNA, 25 bp, Artificial
  Probe
gcaaattgtcattcaaacattcgca

SEQ ID NO: 140287 - DNA, 25 bp, Artificial
  Probe
tttccactaagaattaaatgccttt

SEQ ID NO: 140288 - DNA, 25 bp, Artificial
  Probe
tattcaagtcaaccatgtccctgtc

SEQ ID NO: 140289 - DNA, 25 bp, Artificial
  Probe
aaattgaaaatgcttacactccctg

SEQ ID NO: 140290 - DNA, 25 bp, Artificial
  Probe
caaattgaaaatgcttacactccct

SEQ ID NO: 140291 - DNA, 25 bp, Artificial
  Probe
ccagacaaattgaaaatgcttacac

SEQ ID NO: 140292 - DNA, 25 bp, Artificial
  Probe
tcccagacaaattgaaaatgcttac

SEQ ID NO: 140293 - DNA, 25 bp, Artificial
  Probe
gcattttctatcaaaccccaattca

SEQ ID NO: 140294 - DNA, 25 bp, Artificial
  Probe
acaaattgaaaatgcttacactccc

SEQ ID NO: 140295 - DNA, 25 bp, Artificial
  Probe
cccagacaaattgaaaatgcttaca

SEQ ID NO: 140296 - DNA, 25 bp, Artificial
  Probe
gacaaattgaaaatgcttacactcc

SEQ ID NO: 140297 - DNA, 25 bp, Artificial
  Probe
cattcaaacattcgcacaaggcttt

SEQ ID NO: 140298 - DNA, 25 bp, Artificial
  Probe
atgagcaaattgtcattcaaacatt

SEQ ID NO: 140299 - DNA, 25 bp, Artificial
  Probe
cagacaaattgaaaatgcttacact

SEQ ID NO: 140300 - DNA, 25 bp, Artificial
  Probe
agacaaattgaaaatgcttacactc

SEQ ID NO: 140301 - DNA, 25 bp, Artificial
  Probe
cttgtttagagcactttatgaatac

SEQ ID NO: 140302 - DNA, 25 bp, Artificial
  Probe
atcacagaagccacagaagtccaag

SEQ ID NO: 140303 - DNA, 25 bp, Artificial
  Probe
tgtttagagcactttatgaatacaa

SEQ ID NO: 140304 - DNA, 25 bp, Artificial
  Probe
ttgtttagagcactttatgaataca

SEQ ID NO: 140305 - DNA, 25 bp, Artificial
  Probe
gtcccagacaaattgaaaatgctta

SEQ ID NO: 140306 - DNA, 25 bp, Artificial
  Probe
aagaatattcaagtcaaccatgtcc

SEQ ID NO: 140307 - DNA, 25 bp, Artificial
  Probe
aattgaaaatgcttacactccctgt

SEQ ID NO: 140308 - DNA, 25 bp, Artificial
  Probe
cattttctatcaaaccccaattcat

SEQ ID NO: 140309 - DNA, 25 bp, Artificial
  Probe
catcacagaagccacagaagtccaa

SEQ ID NO: 140310 - DNA, 25 bp, Artificial
  Probe
aattgtcattcaaacattcgcacaa

SEQ ID NO: 140311 - DNA, 25 bp, Artificial
  Probe
gtttagagcactttatgaatacaaa

SEQ ID NO: 140312 - DNA, 25 bp, Artificial
  Probe
catgaagaaaatgagcaaattgtca

SEQ ID NO: 140313 - DNA, 25 bp, Artificial
  Probe
tcattcaaacattcgcacaaggctt

SEQ ID NO: 140314 - DNA, 25 bp, Artificial
  Probe
attgtcattcaaacattcgcacaag

SEQ ID NO: 140315 - DNA, 25 bp, Artificial
  Probe
attttctatcaaaccccaattcatg

SEQ ID NO: 140316 - DNA, 25 bp, Artificial
  Probe
tgcattttctatcaaaccccaattc

SEQ ID NO: 140317 - DNA, 25 bp, Artificial
  Probe
gaagaatattcaagtcaaccatgtc

SEQ ID NO: 140318 - DNA, 25 bp, Artificial
  Probe
agagcactttatgaatacaaaactt

SEQ ID NO: 140319 - DNA, 25 bp, Artificial
  Probe
attgaaaatgcttacactccctgtg

SEQ ID NO: 140320 - DNA, 25 bp, Artificial
  Probe
ttccactaagaattaaatgcctttt

SEQ ID NO: 140321 - DNA, 25 bp, Artificial
  Probe
ttttccactaagaattaaatgcctt

SEQ ID NO: 140322 - DNA, 25 bp, Artificial
  Probe
gaattaaatgccttttagagaacct

SEQ ID NO: 140323 - DNA, 25 bp, Artificial
  Probe
agaattaaatgccttttagagaacc

SEQ ID NO: 140324 - DNA, 25 bp, Artificial
  Probe
ctgatgatgatgatgtatgtgtgtg

SEQ ID NO: 140325 - DNA, 25 bp, Artificial
  Probe
gatgctgatgatgatgatgtatgtg

SEQ ID NO: 140326 - DNA, 25 bp, Artificial
  Probe
tgatgatgctgatgatgatgatgta

SEQ ID NO: 140327 - DNA, 25 bp, Artificial
  Probe
tgatgctgatgatgatgatgtatgt

SEQ ID NO: 140328 - DNA, 25 bp, Artificial
  Probe
atgctgatgatgatgatgtatgtgt

SEQ ID NO: 140329 - DNA, 25 bp, Artificial
  Probe
atgatgctgatgatgatgatgtatg

SEQ ID NO: 140330 - DNA, 25 bp, Artificial
  Probe
ctgatgatgctgatgatgatgatgt

SEQ ID NO: 140331 - DNA, 25 bp, Artificial
  Probe
gatgatgctgatgatgatgatgtat

SEQ ID NO: 140332 - DNA, 25 bp, Artificial
  Probe
gctgatgatgatgatgtatgtgtgt

SEQ ID NO: 140333 - DNA, 25 bp, Artificial
  Probe
tgctgatgatgatgatgtatgtgtg

SEQ ID NO: 140334 - DNA, 25 bp, Artificial
  Probe
tgatgatgatgatgtatgtgtgtgc

SEQ ID NO: 140335 - DNA, 25 bp, Artificial
  Probe
tgatgatgatgatgatggtgatgat

SEQ ID NO: 140336 - DNA, 25 bp, Artificial
  Probe
atgatgatgatgatgatggtgatga

SEQ ID NO: 140337 - DNA, 25 bp, Artificial
  Probe
tgatgatgatgatgatgatggtgat

SEQ ID NO: 140338 - DNA, 25 bp, Artificial
  Probe
atgatgatgatgatgatgatggtga

SEQ ID NO: 140339 - DNA, 25 bp, Artificial
  Probe
tgatgatgatgatgatgatgatggt

SEQ ID NO: 140340 - DNA, 25 bp, Artificial
  Probe
tggtgatgatgatgatgatgatgat

SEQ ID NO: 140341 - DNA, 25 bp, Artificial
  Probe
gatgatgatgatgatggtgatgatg

SEQ ID NO: 140342 - DNA, 25 bp, Artificial
  Probe
gatgatgatgatgatgatggtgatg

SEQ ID NO: 140343 - DNA, 25 bp, Artificial
  Probe
gatgatgatgatgatgatgatggtg

SEQ ID NO: 140344 - DNA, 25 bp, Artificial
  Probe
gtgatgatgatgatgatgatgatgg

SEQ ID NO: 140345 - DNA, 25 bp, Artificial
  Probe
ggtgatgatgatgatgatgatgatg

SEQ ID NO: 140346 - DNA, 25 bp, Artificial
  Probe
gctgatgatgctgatgatgatgatg

SEQ ID NO: 140347 - DNA, 25 bp, Artificial
  Probe
gatgctgatgatgctgatgatgatg

SEQ ID NO: 140348 - DNA, 25 bp, Artificial
  Probe
ctggtgatgatgatgatgatgatga

SEQ ID NO: 140349 - DNA, 25 bp, Artificial
  Probe
tgctgatgatgctgatgatgatgat

SEQ ID NO: 140350 - DNA, 25 bp, Artificial
  Probe
atgctgatgatgctgatgatgatga

SEQ ID NO: 140351 - DNA, 25 bp, Artificial
  Probe
tgatgctgatgatgctgatgatgat

SEQ ID NO: 140352 - DNA, 25 bp, Artificial
  Probe
atgatgctgatgatgctgatgatga

SEQ ID NO: 140353 - DNA, 25 bp, Artificial
  Probe
atgatgatgatgatggtgatgatgc

SEQ ID NO: 140354 - DNA, 25 bp, Artificial
  Probe
gatgatggtgatgatgctgatgatg

SEQ ID NO: 140355 - DNA, 25 bp, Artificial
  Probe
gatgatgatggtgatgatgctgatg

SEQ ID NO: 140356 - DNA, 25 bp, Artificial
  Probe
gatgatgatgatggtgatgatgctg

SEQ ID NO: 140357 - DNA, 25 bp, Artificial
  Probe
gctggtgatgatgatgatgatgatg

SEQ ID NO: 140358 - DNA, 25 bp, Artificial
  Probe
gatgctggtgatgatgatgatgatg

SEQ ID NO: 140359 - DNA, 25 bp, Artificial
  Probe
gatgatgctggtgatgatgatgatg

SEQ ID NO: 140360 - DNA, 25 bp, Artificial
  Probe
gatgatgatgctggtgatgatgatg

SEQ ID NO: 140361 - DNA, 25 bp, Artificial
  Probe
tgatgatggtgatgatgctgatgat

SEQ ID NO: 140362 - DNA, 25 bp, Artificial
  Probe
atgatgatggtgatgatgctgatga

SEQ ID NO: 140363 - DNA, 25 bp, Artificial
  Probe
tgatgatgatggtgatgatgctgat

SEQ ID NO: 140364 - DNA, 25 bp, Artificial
  Probe
atgatgatgatggtgatgatgctga

SEQ ID NO: 140365 - DNA, 25 bp, Artificial
  Probe
tgatgatgatgatggtgatgatgct

SEQ ID NO: 140366 - DNA, 25 bp, Artificial
  Probe
tgctggtgatgatgatgatgatgat

SEQ ID NO: 140367 - DNA, 25 bp, Artificial
  Probe
atgctggtgatgatgatgatgatga

SEQ ID NO: 140368 - DNA, 25 bp, Artificial
  Probe
tgatgctggtgatgatgatgatgat

SEQ ID NO: 140369 - DNA, 25 bp, Artificial
  Probe
cttcatcctacagtcctctctccag

SEQ ID NO: 140370 - DNA, 25 bp, Artificial
  Probe
gctattatcataccatagatgccca

SEQ ID NO: 140371 - DNA, 25 bp, Artificial
  Probe
tatcataccatagatgcccatgttc

SEQ ID NO: 140372 - DNA, 25 bp, Artificial
  Probe
cgctattatcataccatagatgccc

SEQ ID NO: 140373 - DNA, 25 bp, Artificial
  Probe
ttatcataccatagatgcccatgtt

SEQ ID NO: 140374 - DNA, 25 bp, Artificial
  Probe
ctggcaactataacatcgaggactt

SEQ ID NO: 140375 - DNA, 25 bp, Artificial
  Probe
attatcataccatagatgcccatgt

SEQ ID NO: 140376 - DNA, 25 bp, Artificial
  Probe
ataccatagatgcccatgttcaaag

SEQ ID NO: 140377 - DNA, 25 bp, Artificial
  Probe
cataccatagatgcccatgttcaaa

SEQ ID NO: 140378 - DNA, 25 bp, Artificial
  Probe
atcataccatagatgcccatgttca

SEQ ID NO: 140379 - DNA, 25 bp, Artificial
  Probe
taccatagatgcccatgttcaaaga

SEQ ID NO: 140380 - DNA, 25 bp, Artificial
  Probe
aactataacatcgaggactttgctg

SEQ ID NO: 140381 - DNA, 25 bp, Artificial
  Probe
tcataccatagatgcccatgttcaa

SEQ ID NO: 140382 - DNA, 25 bp, Artificial
  Probe
gactggcaactataacatcgaggac

SEQ ID NO: 140383 - DNA, 25 bp, Artificial
  Probe
catagatgcccatgttcaaagagtg

SEQ ID NO: 140384 - DNA, 25 bp, Artificial
  Probe
ctataacatcgaggactttgctgac

SEQ ID NO: 140385 - DNA, 25 bp, Artificial
  Probe
caactataacatcgaggactttgct

SEQ ID NO: 140386 - DNA, 25 bp, Artificial
  Probe
actataacatcgaggactttgctga

SEQ ID NO: 140387 - DNA, 25 bp, Artificial
  Probe
tattatcataccatagatgcccatg

SEQ ID NO: 140388 - DNA, 25 bp, Artificial
  Probe
ctattatcataccatagatgcccat

SEQ ID NO: 140389 - DNA, 25 bp, Artificial
  Probe
actggcaactataacatcgaggact

SEQ ID NO: 140390 - DNA, 25 bp, Artificial
  Probe
ccttcatcctacagtcctctctcca

SEQ ID NO: 140391 - DNA, 25 bp, Artificial
  Probe
tggcaactataacatcgaggacttt

SEQ ID NO: 140392 - DNA, 25 bp, Artificial
  Probe
ggcaactataacatcgaggactttg

SEQ ID NO: 140393 - DNA, 25 bp, Artificial
  Probe
catctgccttcggaattggatcaag

SEQ ID NO: 140394 - DNA, 25 bp, Artificial
  Probe
ccatagatgcccatgttcaaagagt

SEQ ID NO: 140395 - DNA, 25 bp, Artificial
  Probe
accatagatgcccatgttcaaagag

SEQ ID NO: 140396 - DNA, 25 bp, Artificial
  Probe
tataacatcgaggactttgctgacc

SEQ ID NO: 140397 - DNA, 25 bp, Artificial
  Probe
ggactggcaactataacatcgagga

SEQ ID NO: 140398 - DNA, 25 bp, Artificial
  Probe
aggcgctattatcataccatagatg

SEQ ID NO: 140399 - DNA, 25 bp, Artificial
  Probe
caggcgctattatcataccatagat

SEQ ID NO: 140400 - DNA, 25 bp, Artificial
  Probe
tcatctgccttcggaattggatcaa

SEQ ID NO: 140401 - DNA, 25 bp, Artificial
  Probe
atagatgcccatgttcaaagagtgc

SEQ ID NO: 140402 - DNA, 25 bp, Artificial
  Probe
gcgctattatcataccatagatgcc

SEQ ID NO: 140403 - DNA, 25 bp, Artificial
  Probe
ggcgctattatcataccatagatgc

SEQ ID NO: 140404 - DNA, 25 bp, Artificial
  Probe
ttcatcctacagtcctctctccagc

SEQ ID NO: 140405 - DNA, 25 bp, Artificial
  Probe
ccaggcgctattatcataccataga

SEQ ID NO: 140406 - DNA, 25 bp, Artificial
  Probe
agtcatctgccttcggaattggatc

SEQ ID NO: 140407 - DNA, 25 bp, Artificial
  Probe
gactgaagtgttccaggacatgcta

SEQ ID NO: 140408 - DNA, 25 bp, Artificial
  Probe
acccttcatcctacagtcctctctc

SEQ ID NO: 140409 - DNA, 25 bp, Artificial
  Probe
catgttccctccattttctgagtag

SEQ ID NO: 140410 - DNA, 25 bp, Artificial
  Probe
gtcatctgccttcggaattggatca

SEQ ID NO: 140411 - DNA, 25 bp, Artificial
  Probe
actgaagtgttccaggacatgctac

SEQ ID NO: 140412 - DNA, 25 bp, Artificial
  Probe
cagtcatctgccttcggaattggat

SEQ ID NO: 140413 - DNA, 25 bp, Artificial
  Probe
atgttccctccattttctgagtagc

SEQ ID NO: 140414 - DNA, 25 bp, Artificial
  Probe
gccacattgaattatctacatctcc

SEQ ID NO: 140415 - DNA, 25 bp, Artificial
  Probe
tctaagtgataccttcatctctgga

SEQ ID NO: 140416 - DNA, 25 bp, Artificial
  Probe
ctaagtgataccttcatctctggag

SEQ ID NO: 140417 - DNA, 25 bp, Artificial
  Probe
ttctaagtgataccttcatctctgg

SEQ ID NO: 140418 - DNA, 25 bp, Artificial
  Probe
cctcactcatctgacagttattcta

SEQ ID NO: 140419 - DNA, 25 bp, Artificial
  Probe
ccacattgaattatctacatctcca

SEQ ID NO: 140420 - DNA, 25 bp, Artificial
  Probe
ttagtgtcttaatctcttgacgacc

SEQ ID NO: 140421 - DNA, 25 bp, Artificial
  Probe
tagtgtcttaatctcttgacgacct

SEQ ID NO: 140422 - DNA, 25 bp, Artificial
  Probe
gttagtgtcttaatctcttgacgac

SEQ ID NO: 140423 - DNA, 25 bp, Artificial
  Probe
agttagtgtcttaatctcttgacga

SEQ ID NO: 140424 - DNA, 25 bp, Artificial
  Probe
taagtgataccttcatctctggaga

SEQ ID NO: 140425 - DNA, 25 bp, Artificial
  Probe
aagtgataccttcatctctggagaa

SEQ ID NO: 140426 - DNA, 25 bp, Artificial
  Probe
gataccttcatctctggagaactgt

SEQ ID NO: 140427 - DNA, 25 bp, Artificial
  Probe
aagttagtgtcttaatctcttgacg

SEQ ID NO: 140428 - DNA, 25 bp, Artificial
  Probe
cactcatctgacagttattctaagt

SEQ ID NO: 140429 - DNA, 25 bp, Artificial
  Probe
ataccttcatctctggagaactgtg

SEQ ID NO: 140430 - DNA, 25 bp, Artificial
  Probe
ctgacagttattctaagtcttctcc

SEQ ID NO: 140431 - DNA, 25 bp, Artificial
  Probe
tgataccttcatctctggagaactg

SEQ ID NO: 140432 - DNA, 25 bp, Artificial
  Probe
gtgataccttcatctctggagaact

SEQ ID NO: 140433 - DNA, 25 bp, Artificial
  Probe
agtgataccttcatctctggagaac

SEQ ID NO: 140434 - DNA, 25 bp, Artificial
  Probe
tcactcatctgacagttattctaag

SEQ ID NO: 140435 - DNA, 25 bp, Artificial
  Probe
ctcactcatctgacagttattctaa

SEQ ID NO: 140436 - DNA, 25 bp, Artificial
  Probe
agtgtcttaatctcttgacgacctc

SEQ ID NO: 140437 - DNA, 25 bp, Artificial
  Probe
gctgtgtgttgattaaagttagtgt

SEQ ID NO: 140438 - DNA, 25 bp, Artificial
  Probe
gtgtcttaatctcttgacgacctca

SEQ ID NO: 140439 - DNA, 25 bp, Artificial
  Probe
actcatctgacagttattctaagtc

SEQ ID NO: 140440 - DNA, 25 bp, Artificial
  Probe
ccatttcaacagtcacagtttctaa

SEQ ID NO: 140441 - DNA, 25 bp, Artificial
  Probe
tctgacagttattctaagtcttctc

SEQ ID NO: 140442 - DNA, 25 bp, Artificial
  Probe
ctcatctgacagttattctaagtct

SEQ ID NO: 140443 - DNA, 25 bp, Artificial
  Probe
tgtgtgttgattaaagttagtgtct

SEQ ID NO: 140444 - DNA, 25 bp, Artificial
  Probe
atttcaacagtcacagtttctaagt

SEQ ID NO: 140445 - DNA, 25 bp, Artificial
  Probe
ctgtgtgttgattaaagttagtgtc

SEQ ID NO: 140446 - DNA, 25 bp, Artificial
  Probe
taccttcatctctggagaactgtga

SEQ ID NO: 140447 - DNA, 25 bp, Artificial
  Probe
catttcaacagtcacagtttctaag

SEQ ID NO: 140448 - DNA, 25 bp, Artificial
  Probe
attaacaatgtagggaacagacagg

SEQ ID NO: 140449 - DNA, 25 bp, Artificial
  Probe
cacattgaattatctacatctccat

SEQ ID NO: 140450 - DNA, 25 bp, Artificial
  Probe
gccatttcaacagtcacagtttcta

SEQ ID NO: 140451 - DNA, 25 bp, Artificial
  Probe
tcatctgacagttattctaagtctt

SEQ ID NO: 140452 - DNA, 25 bp, Artificial
  Probe
tgacagttattctaagtcttctccc

SEQ ID NO: 140453 - DNA, 25 bp, Artificial
  Probe
acagtttctaagtgataccttcatc

SEQ ID NO: 140454 - DNA, 25 bp, Artificial
  Probe
tttcaacagtcacagtttctaagtg

SEQ ID NO: 140455 - DNA, 25 bp, Artificial
  Probe
ttaacaatgtagggaacagacagga

SEQ ID NO: 140456 - DNA, 25 bp, Artificial
  Probe
ggccacattgaattatctacatctc

SEQ ID NO: 140457 - DNA, 25 bp, Artificial
  Probe
catctgacagttattctaagtcttc

SEQ ID NO: 140458 - DNA, 25 bp, Artificial
  Probe
gtgtgttgattaaagttagtgtctt

SEQ ID NO: 140459 - DNA, 25 bp, Artificial
  Probe
ttcttaactatacctgtctgctgtc

SEQ ID NO: 140460 - DNA, 25 bp, Artificial
  Probe
tcttaactatacctgtctgctgtct

SEQ ID NO: 140461 - DNA, 25 bp, Artificial
  Probe
taactatacctgtctgctgtctacc

SEQ ID NO: 140462 - DNA, 25 bp, Artificial
  Probe
ggattgctgaattgagttgttgtat

SEQ ID NO: 140463 - DNA, 25 bp, Artificial
  Probe
ttaactatacctgtctgctgtctac

SEQ ID NO: 140464 - DNA, 25 bp, Artificial
  Probe
cttaactatacctgtctgctgtcta

SEQ ID NO: 140465 - DNA, 25 bp, Artificial
  Probe
gattgctgaattgagttgttgtatt

SEQ ID NO: 140466 - DNA, 25 bp, Artificial
  Probe
tatacctgtctgctgtctacctgta

SEQ ID NO: 140467 - DNA, 25 bp, Artificial
  Probe
aactatacctgtctgctgtctacct

SEQ ID NO: 140468 - DNA, 25 bp, Artificial
  Probe
acgcttggtctcatacatgatagaa

SEQ ID NO: 140469 - DNA, 25 bp, Artificial
  Probe
ctatacctgtctgctgtctacctgt

SEQ ID NO: 140470 - DNA, 25 bp, Artificial
  Probe
actatacctgtctgctgtctacctg

SEQ ID NO: 140471 - DNA, 25 bp, Artificial
  Probe
gaatagggattgctgaattgagttg

SEQ ID NO: 140472 - DNA, 25 bp, Artificial
  Probe
gaaattaaatgaatgcctgacctga

SEQ ID NO: 140473 - DNA, 25 bp, Artificial
  Probe
agaaattaaatgaatgcctgacctg

SEQ ID NO: 140474 - DNA, 25 bp, Artificial
  Probe
tttcttaactatacctgtctgctgt

SEQ ID NO: 140475 - DNA, 25 bp, Artificial
  Probe
tgaatagggattgctgaattgagtt

SEQ ID NO: 140476 - DNA, 25 bp, Artificial
  Probe
aaattaaatgaatgcctgacctgaa

SEQ ID NO: 140477 - DNA, 25 bp, Artificial
  Probe
atagggattgctgaattgagttgtt

SEQ ID NO: 140478 - DNA, 25 bp, Artificial
  Probe
aatagggattgctgaattgagttgt

SEQ ID NO: 140479 - DNA, 25 bp, Artificial
  Probe
ttaaatgaatgcctgacctgaatag

SEQ ID NO: 140480 - DNA, 25 bp, Artificial
  Probe
ctgaatagggattgctgaattgagt

SEQ ID NO: 140481 - DNA, 25 bp, Artificial
  Probe
aattaaatgaatgcctgacctgaat

SEQ ID NO: 140482 - DNA, 25 bp, Artificial
  Probe
aagaaattaaatgaatgcctgacct

SEQ ID NO: 140483 - DNA, 25 bp, Artificial
  Probe
tctggtaagagttgttggatttagt

SEQ ID NO: 140484 - DNA, 25 bp, Artificial
  Probe
aagagttgttggatttagtaatgct

SEQ ID NO: 140485 - DNA, 25 bp, Artificial
  Probe
tgctgaattgagttgttgtatttgc

SEQ ID NO: 140486 - DNA, 25 bp, Artificial
  Probe
ttgctgaattgagttgttgtatttg

SEQ ID NO: 140487 - DNA, 25 bp, Artificial
  Probe
tgtttcttaactatacctgtctgct

SEQ ID NO: 140488 - DNA, 25 bp, Artificial
  Probe
gtttcttaactatacctgtctgctg

SEQ ID NO: 140489 - DNA, 25 bp, Artificial
  Probe
atacctgtctgctgtctacctgtag

SEQ ID NO: 140490 - DNA, 25 bp, Artificial
  Probe
attaaatgaatgcctgacctgaata

SEQ ID NO: 140491 - DNA, 25 bp, Artificial
  Probe
aaagaaattaaatgaatgcctgacc

SEQ ID NO: 140492 - DNA, 25 bp, Artificial
  Probe
ttgtttcttaactatacctgtctgc

SEQ ID NO: 140493 - DNA, 25 bp, Artificial
  Probe
tagggattgctgaattgagttgttg

SEQ ID NO: 140494 - DNA, 25 bp, Artificial
  Probe
gacgcttggtctcatacatgataga

SEQ ID NO: 140495 - DNA, 25 bp, Artificial
  Probe
ttactacaatatggctgctcagtgc

SEQ ID NO: 140496 - DNA, 25 bp, Artificial
  Probe
ctggtaagagttgttggatttagta

SEQ ID NO: 140497 - DNA, 25 bp, Artificial
  Probe
tttactacaatatggctgctcagtg

SEQ ID NO: 140498 - DNA, 25 bp, Artificial
  Probe
gggattgctgaattgagttgttgta

SEQ ID NO: 140499 - DNA, 25 bp, Artificial
  Probe
attgctgaattgagttgttgtattt

SEQ ID NO: 140500 - DNA, 25 bp, Artificial
  Probe
agagttgttggatttagtaatgcta

SEQ ID NO: 140501 - DNA, 25 bp, Artificial
  Probe
tggtaagagttgttggatttagtaa

SEQ ID NO: 140502 - DNA, 25 bp, Artificial
  Probe
taaatgaatgcctgacctgaatagg

SEQ ID NO: 140503 - DNA, 25 bp, Artificial
  Probe
accagaaggaaagagatgtcatcat

SEQ ID NO: 140504 - DNA, 25 bp, Artificial
  Probe
tctaagaactccttcactgttatgt

SEQ ID NO: 140505 - DNA, 25 bp, Artificial
  Probe
taagaactccttcactgttatgtgc

SEQ ID NO: 140506 - DNA, 25 bp, Artificial
  Probe
ctaagaactccttcactgttatgtg

SEQ ID NO: 140507 - DNA, 25 bp, Artificial
  Probe
ttctaagaactccttcactgttatg

SEQ ID NO: 140508 - DNA, 25 bp, Artificial
  Probe
tcttcaaccttgtgttcctgttctc

SEQ ID NO: 140509 - DNA, 25 bp, Artificial
  Probe
ctcttcaaccttgtgttcctgttct

SEQ ID NO: 140510 - DNA, 25 bp, Artificial
  Probe
cctctaaacccactctgtactctat

SEQ ID NO: 140511 - DNA, 25 bp, Artificial
  Probe
ctctaaacccactctgtactctatt

SEQ ID NO: 140512 - DNA, 25 bp, Artificial
  Probe
tctaaacccactctgtactctattt

SEQ ID NO: 140513 - DNA, 25 bp, Artificial
  Probe
actctgtactctatttataacgcca

SEQ ID NO: 140514 - DNA, 25 bp, Artificial
  Probe
ccttcactgttatgtgccagagatt

SEQ ID NO: 140515 - DNA, 25 bp, Artificial
  Probe
tcactgttatgtgccagagatttaa

SEQ ID NO: 140516 - DNA, 25 bp, Artificial
  Probe
ttcactgttatgtgccagagattta

SEQ ID NO: 140517 - DNA, 25 bp, Artificial
  Probe
cactctgtactctatttataacgcc

SEQ ID NO: 140518 - DNA, 25 bp, Artificial
  Probe
ccactctgtactctatttataacgc

SEQ ID NO: 140519 - DNA, 25 bp, Artificial
  Probe
aagaactccttcactgttatgtgcc

SEQ ID NO: 140520 - DNA, 25 bp, Artificial
  Probe
aatttctaagaactccttcactgtt

SEQ ID NO: 140521 - DNA, 25 bp, Artificial
  Probe
cttcaaccttgtgttcctgttctcc

SEQ ID NO: 140522 - DNA, 25 bp, Artificial
  Probe
cttcactgttatgtgccagagattt

SEQ ID NO: 140523 - DNA, 25 bp, Artificial
  Probe
ctctgtactctatttataacgccaa

SEQ ID NO: 140524 - DNA, 25 bp, Artificial
  Probe
cccactctgtactctatttataacg

SEQ ID NO: 140525 - DNA, 25 bp, Artificial
  Probe
ctcaatgaaatgttaccgcagcaat

SEQ ID NO: 140526 - DNA, 25 bp, Artificial
  Probe
gatgtttctgctcttcaaccttgtg

SEQ ID NO: 140527 - DNA, 25 bp, Artificial
  Probe
agatgtttctgctcttcaaccttgt

SEQ ID NO: 140528 - DNA, 25 bp, Artificial
  Probe
taatttctaagaactccttcactgt

SEQ ID NO: 140529 - DNA, 25 bp, Artificial
  Probe
gtttctgctcttcaaccttgtgttc

SEQ ID NO: 140530 - DNA, 25 bp, Artificial
  Probe
tccttcactgttatgtgccagagat

SEQ ID NO: 140531 - DNA, 25 bp, Artificial
  Probe
tttctaagaactccttcactgttat

SEQ ID NO: 140532 - DNA, 25 bp, Artificial
  Probe
atttctaagaactccttcactgtta

SEQ ID NO: 140533 - DNA, 25 bp, Artificial
  Probe
ctgcatgtcctcaatgaaatgttac

SEQ ID NO: 140534 - DNA, 25 bp, Artificial
  Probe
tctgcatgtcctcaatgaaatgtta

SEQ ID NO: 140535 - DNA, 25 bp, Artificial
  Probe
ttcaaccttgtgttcctgttctcct

SEQ ID NO: 140536 - DNA, 25 bp, Artificial
  Probe
tcaatgaaatgttaccgcagcaatg

SEQ ID NO: 140537 - DNA, 25 bp, Artificial
  Probe
gaactccttcactgttatgtgccag

SEQ ID NO: 140538 - DNA, 25 bp, Artificial
  Probe
atgtcctcaatgaaatgttaccgca

SEQ ID NO: 140539 - DNA, 25 bp, Artificial
  Probe
tgtctaatttctaagaactccttca

SEQ ID NO: 140540 - DNA, 25 bp, Artificial
  Probe
tctgtactctatttataacgccaat

SEQ ID NO: 140541 - DNA, 25 bp, Artificial
  Probe
gcctctaaacccactctgtactcta

SEQ ID NO: 140542 - DNA, 25 bp, Artificial
  Probe
cactgttatgtgccagagatttaaa

SEQ ID NO: 140543 - DNA, 25 bp, Artificial
  Probe
atcaactcaaacccaccaaacactt

SEQ ID NO: 140544 - DNA, 25 bp, Artificial
  Probe
ttctgcatgtcctcaatgaaatgtt

SEQ ID NO: 140545 - DNA, 25 bp, Artificial
  Probe
atgtttctgctcttcaaccttgtgt

SEQ ID NO: 140546 - DNA, 25 bp, Artificial
  Probe
ctaatttctaagaactccttcactg

SEQ ID NO: 140547 - DNA, 25 bp, Artificial
  Probe
gtctaatttctaagaactccttcac

SEQ ID NO: 140548 - DNA, 25 bp, Artificial
  Probe
ctaaacccactctgtactctattta

SEQ ID NO: 140549 - DNA, 25 bp, Artificial
  Probe
gaagaagataaagtgaatgttgccg

SEQ ID NO: 140550 - DNA, 25 bp, Artificial
  Probe
cgaagaagataaagtgaatgttgcc

SEQ ID NO: 140551 - DNA, 25 bp, Artificial
  Probe
ccgaagaagataaagtgaatgttgc

SEQ ID NO: 140552 - DNA, 25 bp, Artificial
  Probe
gccgaagaagataaagtgaatgttg

SEQ ID NO: 140553 - DNA, 25 bp, Artificial
  Probe
agccgaagaagataaagtgaatgtt

SEQ ID NO: 140554 - DNA, 25 bp, Artificial
  Probe
aagaagataaagtgaatgttgccga

SEQ ID NO: 140555 - DNA, 25 bp, Artificial
  Probe
cagccgaagaagataaagtgaatgt

SEQ ID NO: 140556 - DNA, 25 bp, Artificial
  Probe
agaagataaagtgaatgttgccgac

SEQ ID NO: 140557 - DNA, 25 bp, Artificial
  Probe
gatgtttctgatgaagagggtgatg

SEQ ID NO: 140558 - DNA, 25 bp, Artificial
  Probe
gaagtcctggatgtttctgatgaag

SEQ ID NO: 140559 - DNA, 25 bp, Artificial
  Probe
atgtttctgatgaagagggtgatga

SEQ ID NO: 140560 - DNA, 25 bp, Artificial
  Probe
aagtcctggatgtttctgatgaaga

SEQ ID NO: 140561 - DNA, 25 bp, Artificial
  Probe
agtcctggatgtttctgatgaagag

SEQ ID NO: 140562 - DNA, 25 bp, Artificial
  Probe
aaatggtcaactttcttctgaagca

SEQ ID NO: 140563 - DNA, 25 bp, Artificial
  Probe
gcagccgaagaagataaagtgaatg

SEQ ID NO: 140564 - DNA, 25 bp, Artificial
  Probe
ggatgtttctgatgaagagggtgat

SEQ ID NO: 140565 - DNA, 25 bp, Artificial
  Probe
gaagataaagtgaatgttgccgaca

SEQ ID NO: 140566 - DNA, 25 bp, Artificial
  Probe
aaaccaagaatggctatacaccttt

SEQ ID NO: 140567 - DNA, 25 bp, Artificial
  Probe
gtttctgatgaagagggtgatgaca

SEQ ID NO: 140568 - DNA, 25 bp, Artificial
  Probe
tgtttctgatgaagagggtgatgac

SEQ ID NO: 140569 - DNA, 25 bp, Artificial
  Probe
ggaagtcctggatgtttctgatgaa

SEQ ID NO: 140570 - DNA, 25 bp, Artificial
  Probe
aaccaagaatggctatacacctttg

SEQ ID NO: 140571 - DNA, 25 bp, Artificial
  Probe
aatggtcaactttcttctgaagcag

SEQ ID NO: 140572 - DNA, 25 bp, Artificial
  Probe
ctggatgtttctgatgaagagggtg

SEQ ID NO: 140573 - DNA, 25 bp, Artificial
  Probe
cttggttacacacctttaatcgtgg

SEQ ID NO: 140574 - DNA, 25 bp, Artificial
  Probe
tttctgatgaagagggtgatgacac

SEQ ID NO: 140575 - DNA, 25 bp, Artificial
  Probe
ctaaatgctcctgagacaatgacgg

SEQ ID NO: 140576 - DNA, 25 bp, Artificial
  Probe
ttctgaagcagggagcaaatgttaa

SEQ ID NO: 140577 - DNA, 25 bp, Artificial
  Probe
tggatgtttctgatgaagagggtga

SEQ ID NO: 140578 - DNA, 25 bp, Artificial
  Probe
aaacctaatgctaccactgcgaatg

SEQ ID NO: 140579 - DNA, 25 bp, Artificial
  Probe
caaacctaatgctaccactgcgaat

SEQ ID NO: 140580 - DNA, 25 bp, Artificial
  Probe
cgcagccgaagaagataaagtgaat

SEQ ID NO: 140581 - DNA, 25 bp, Artificial
  Probe
gtcctggatgtttctgatgaagagg

SEQ ID NO: 140582 - DNA, 25 bp, Artificial
  Probe
aatatctcaggccagaagatctcaa

SEQ ID NO: 140583 - DNA, 25 bp, Artificial
  Probe
tggaaatgtgaaaatggtcaacttt

SEQ ID NO: 140584 - DNA, 25 bp, Artificial
  Probe
atggaaatgtgaaaatggtcaactt

SEQ ID NO: 140585 - DNA, 25 bp, Artificial
  Probe
agaatatctcaggccagaagatctc

SEQ ID NO: 140586 - DNA, 25 bp, Artificial
  Probe
gcttggttacacacctttaatcgtg

SEQ ID NO: 140587 - DNA, 25 bp, Artificial
  Probe
ataagctaaatgctcctgagacaat

SEQ ID NO: 140588 - DNA, 25 bp, Artificial
  Probe
aaacataagctaaatgctcctgaga

SEQ ID NO: 140589 - DNA, 25 bp, Artificial
  Probe
tatggaaatgtgaaaatggtcaact

SEQ ID NO: 140590 - DNA, 25 bp, Artificial
  Probe
actatggaaatgtgaaaatggtcaa

SEQ ID NO: 140591 - DNA, 25 bp, Artificial
  Probe
atatctcaggccagaagatctcaag

SEQ ID NO: 140592 - DNA, 25 bp, Artificial
  Probe
gaatatctcaggccagaagatctca

SEQ ID NO: 140593 - DNA, 25 bp, Artificial
  Probe
aagataaagtgaatgttgccgacat

SEQ ID NO: 140594 - DNA, 25 bp, Artificial
  Probe
gacgagatatgagctagacacacag

SEQ ID NO: 140595 - DNA, 25 bp, Artificial
  Probe
cgacgagatatgagctagacacaca

SEQ ID NO: 140596 - DNA, 25 bp, Artificial
  Probe
acgacgagatatgagctagacacac

SEQ ID NO: 140597 - DNA, 25 bp, Artificial
  Probe
aacgacgagatatgagctagacaca

SEQ ID NO: 140598 - DNA, 25 bp, Artificial
  Probe
acgagatatgagctagacacacagg

SEQ ID NO: 140599 - DNA, 25 bp, Artificial
  Probe
aaacgacgagatatgagctagacac

SEQ ID NO: 140600 - DNA, 25 bp, Artificial
  Probe
tcaggatctcagtgcagaacagaag

SEQ ID NO: 140601 - DNA, 25 bp, Artificial
  Probe
ctcaggatctcagtgcagaacagaa

SEQ ID NO: 140602 - DNA, 25 bp, Artificial
  Probe
gagatatgagctagacacacaggct

SEQ ID NO: 140603 - DNA, 25 bp, Artificial
  Probe
cgagatatgagctagacacacaggc

SEQ ID NO: 140604 - DNA, 25 bp, Artificial
  Probe
gaaaacgacgagatatgagctagac

SEQ ID NO: 140605 - DNA, 25 bp, Artificial
  Probe
aaaacgacgagatatgagctagaca

SEQ ID NO: 140606 - DNA, 25 bp, Artificial
  Probe
aagtgtgaatacagtgggtctggag

SEQ ID NO: 140607 - DNA, 25 bp, Artificial
  Probe
ggaaaacgacgagatatgagctaga

SEQ ID NO: 140608 - DNA, 25 bp, Artificial
  Probe
tggaaaacgacgagatatgagctag

SEQ ID NO: 140609 - DNA, 25 bp, Artificial
  Probe
atttcaggccccaaacaatcaataa

SEQ ID NO: 140610 - DNA, 25 bp, Artificial
  Probe
ttcaggccccaaacaatcaataaaa

SEQ ID NO: 140611 - DNA, 25 bp, Artificial
  Probe
tttcaggccccaaacaatcaataaa

SEQ ID NO: 140612 - DNA, 25 bp, Artificial
  Probe
ctgtcttgaggaggggaaaagaaac

SEQ ID NO: 140613 - DNA, 25 bp, Artificial
  Probe
gatttcaggccccaaacaatcaata

SEQ ID NO: 140614 - DNA, 25 bp, Artificial
  Probe
ggatctcagtgcagaacagaagcat

SEQ ID NO: 140615 - DNA, 25 bp, Artificial
  Probe
cctgtcttgaggaggggaaaagaaa

SEQ ID NO: 140616 - DNA, 25 bp, Artificial
  Probe
agatttcaggccccaaacaatcaat

SEQ ID NO: 140617 - DNA, 25 bp, Artificial
  Probe
tgtcttgaggaggggaaaagaaacg

SEQ ID NO: 140618 - DNA, 25 bp, Artificial
  Probe
cagatttcaggccccaaacaatcaa

SEQ ID NO: 140619 - DNA, 25 bp, Artificial
  Probe
gaccgaggaacaatacatcttcatc

SEQ ID NO: 140620 - DNA, 25 bp, Artificial
  Probe
agaccgaggaacaatacatcttcat

SEQ ID NO: 140621 - DNA, 25 bp, Artificial
  Probe
cagaccgaggaacaatacatcttca

SEQ ID NO: 140622 - DNA, 25 bp, Artificial
  Probe
ggaacaatacatcttcatccacgat

SEQ ID NO: 140623 - DNA, 25 bp, Artificial
  Probe
gaggaacaatacatcttcatccacg

SEQ ID NO: 140624 - DNA, 25 bp, Artificial
  Probe
cgaggaacaatacatcttcatccac

SEQ ID NO: 140625 - DNA, 25 bp, Artificial
  Probe
aggaacaatacatcttcatccacga

SEQ ID NO: 140626 - DNA, 25 bp, Artificial
  Probe
ccagaccgaggaacaatacatcttc

SEQ ID NO: 140627 - DNA, 25 bp, Artificial
  Probe
aagcctgagatgatctacgacttct

SEQ ID NO: 140628 - DNA, 25 bp, Artificial
  Probe
ccgaggaacaatacatcttcatcca

SEQ ID NO: 140629 - DNA, 25 bp, Artificial
  Probe
accgaggaacaatacatcttcatcc

SEQ ID NO: 140630 - DNA, 25 bp, Artificial
  Probe
gaacaatacatcttcatccacgatg

SEQ ID NO: 140631 - DNA, 25 bp, Artificial
  Probe
gatccagaccgaggaacaatacatc

SEQ ID NO: 140632 - DNA, 25 bp, Artificial
  Probe
atccagaccgaggaacaatacatct

SEQ ID NO: 140633 - DNA, 25 bp, Artificial
  Probe
agcctgagatgatctacgacttctg

SEQ ID NO: 140634 - DNA, 25 bp, Artificial
  Probe
aaagcctgagatgatctacgacttc

SEQ ID NO: 140635 - DNA, 25 bp, Artificial
  Probe
tccagaccgaggaacaatacatctt

SEQ ID NO: 140636 - DNA, 25 bp, Artificial
  Probe
aacaatacatcttcatccacgatgc

SEQ ID NO: 140637 - DNA, 25 bp, Artificial
  Probe
catgatccagaccgaggaacaatac

SEQ ID NO: 140638 - DNA, 25 bp, Artificial
  Probe
caaagcctgagatgatctacgactt

SEQ ID NO: 140639 - DNA, 25 bp, Artificial
  Probe
tgatccagaccgaggaacaatacat

SEQ ID NO: 140640 - DNA, 25 bp, Artificial
  Probe
atgatccagaccgaggaacaataca

SEQ ID NO: 140641 - DNA, 25 bp, Artificial
  Probe
gacatcaagatcacgctggtaaaga

SEQ ID NO: 140642 - DNA, 25 bp, Artificial
  Probe
taaagacagagacactggctgagta

SEQ ID NO: 140643 - DNA, 25 bp, Artificial
  Probe
acatgatccagaccgaggaacaata

SEQ ID NO: 140644 - DNA, 25 bp, Artificial
  Probe
caactacatagacggctaccacagg

SEQ ID NO: 140645 - DNA, 25 bp, Artificial
  Probe
ccaactacatagacggctaccacag

SEQ ID NO: 140646 - DNA, 25 bp, Artificial
  Probe
catcaagatcacgctggtaaagaca

SEQ ID NO: 140647 - DNA, 25 bp, Artificial
  Probe
acatcaagatcacgctggtaaagac

SEQ ID NO: 140648 - DNA, 25 bp, Artificial
  Probe
atacatcttcatccacgatgcgatt

SEQ ID NO: 140649 - DNA, 25 bp, Artificial
  Probe
aatacatcttcatccacgatgcgat

SEQ ID NO: 140650 - DNA, 25 bp, Artificial
  Probe
cctgagatgatctacgacttctggc

SEQ ID NO: 140651 - DNA, 25 bp, Artificial
  Probe
gcctgagatgatctacgacttctgg

SEQ ID NO: 140652 - DNA, 25 bp, Artificial
  Probe
tggacatttacaactgcgtgaagac

SEQ ID NO: 140653 - DNA, 25 bp, Artificial
  Probe
gtggacatttacaactgcgtgaaga

SEQ ID NO: 140654 - DNA, 25 bp, Artificial
  Probe
atcaagatcacgctggtaaagacag

SEQ ID NO: 140655 - DNA, 25 bp, Artificial
  Probe
caaaccacttcatagccactcaagg

SEQ ID NO: 140656 - DNA, 25 bp, Artificial
  Probe
ccaaaccacttcatagccactcaag

SEQ ID NO: 140657 - DNA, 25 bp, Artificial
  Probe
tacatcttcatccacgatgcgattc

SEQ ID NO: 140658 - DNA, 25 bp, Artificial
  Probe
aacatgatccagaccgaggaacaat

SEQ ID NO: 140659 - DNA, 25 bp, Artificial
  Probe
ggacatcaagatcacgctggtaaag

SEQ ID NO: 140660 - DNA, 25 bp, Artificial
  Probe
ctgagatgatctacgacttctggcg

SEQ ID NO: 140661 - DNA, 25 bp, Artificial
  Probe
catttacaactgcgtgaagaccctc

SEQ ID NO: 140662 - DNA, 25 bp, Artificial
  Probe
caatacatcttcatccacgatgcga

SEQ ID NO: 140663 - DNA, 25 bp, Artificial
  Probe
aagatcacgctggtaaagacagaga

SEQ ID NO: 140664 - DNA, 25 bp, Artificial
  Probe
tggcagaatatgtgataagaacctt

SEQ ID NO: 140665 - DNA, 25 bp, Artificial
  Probe
ctggcagaatatgtgataagaacct

SEQ ID NO: 140666 - DNA, 25 bp, Artificial
  Probe
tgctggcagaatatgtgataagaac

SEQ ID NO: 140667 - DNA, 25 bp, Artificial
  Probe
gctggcagaatatgtgataagaacc

SEQ ID NO: 140668 - DNA, 25 bp, Artificial
  Probe
aatacgagagatcagacagttccac

SEQ ID NO: 140669 - DNA, 25 bp, Artificial
  Probe
gaatatgtgataagaacctttgccg

SEQ ID NO: 140670 - DNA, 25 bp, Artificial
  Probe
aatatgtgataagaacctttgccgt

SEQ ID NO: 140671 - DNA, 25 bp, Artificial
  Probe
agaatatgtgataagaacctttgcc

SEQ ID NO: 140672 - DNA, 25 bp, Artificial
  Probe
ggcagaatatgtgataagaaccttt

SEQ ID NO: 140673 - DNA, 25 bp, Artificial
  Probe
atacgagagatcagacagttccact

SEQ ID NO: 140674 - DNA, 25 bp, Artificial
  Probe
atatgtgataagaacctttgccgtg

SEQ ID NO: 140675 - DNA, 25 bp, Artificial
  Probe
gagagatcagacagttccacttcac

SEQ ID NO: 140676 - DNA, 25 bp, Artificial
  Probe
tacgagagatcagacagttccactt

SEQ ID NO: 140677 - DNA, 25 bp, Artificial
  Probe
cagaatatgtgataagaacctttgc

SEQ ID NO: 140678 - DNA, 25 bp, Artificial
  Probe
gcagaatatgtgataagaacctttg

SEQ ID NO: 140679 - DNA, 25 bp, Artificial
  Probe
gaaatacgagagatcagacagttcc

SEQ ID NO: 140680 - DNA, 25 bp, Artificial
  Probe
aaatacgagagatcagacagttcca

SEQ ID NO: 140681 - DNA, 25 bp, Artificial
  Probe
agagatcagacagttccacttcact

SEQ ID NO: 140682 - DNA, 25 bp, Artificial
  Probe
tgaaatacgagagatcagacagttc

SEQ ID NO: 140683 - DNA, 25 bp, Artificial
  Probe
ctgctggcagaatatgtgataagaa

SEQ ID NO: 140684 - DNA, 25 bp, Artificial
  Probe
atgaaatacgagagatcagacagtt

SEQ ID NO: 140685 - DNA, 25 bp, Artificial
  Probe
catgaaatacgagagatcagacagt

SEQ ID NO: 140686 - DNA, 25 bp, Artificial
  Probe
cgagagatcagacagttccacttca

SEQ ID NO: 140687 - DNA, 25 bp, Artificial
  Probe
acgagagatcagacagttccacttc

SEQ ID NO: 140688 - DNA, 25 bp, Artificial
  Probe
tatgtgataagaacctttgccgtgg

SEQ ID NO: 140689 - DNA, 25 bp, Artificial
  Probe
gctgctggcagaatatgtgataaga

SEQ ID NO: 140690 - DNA, 25 bp, Artificial
  Probe
agctgctggcagaatatgtgataag

SEQ ID NO: 140691 - DNA, 25 bp, Artificial
  Probe
gagctgctggcagaatatgtgataa

SEQ ID NO: 140692 - DNA, 25 bp, Artificial
  Probe
gataagaacctttgccgtggagaag

SEQ ID NO: 140693 - DNA, 25 bp, Artificial
  Probe
cgacacggagatctataaagacata

SEQ ID NO: 140694 - DNA, 25 bp, Artificial
  Probe
taaaagtcacgctaatagacacaga

SEQ ID NO: 140695 - DNA, 25 bp, Artificial
  Probe
acgacacggagatctataaagacat

SEQ ID NO: 140696 - DNA, 25 bp, Artificial
  Probe
cataaaagtcacgctaatagacaca

SEQ ID NO: 140697 - DNA, 25 bp, Artificial
  Probe
acataaaagtcacgctaatagacac

SEQ ID NO: 140698 - DNA, 25 bp, Artificial
  Probe
aaaagtcacgctaatagacacagag

SEQ ID NO: 140699 - DNA, 25 bp, Artificial
  Probe
ataagaacctttgccgtggagaaga

SEQ ID NO: 140700 - DNA, 25 bp, Artificial
  Probe
ataaaagtcacgctaatagacacag

SEQ ID NO: 140701 - DNA, 25 bp, Artificial
  Probe
gacataaaagtcacgctaatagaca

SEQ ID NO: 140702 - DNA, 25 bp, Artificial
  Probe
agagctgctggcagaatatgtgata

SEQ ID NO: 140703 - DNA, 25 bp, Artificial
  Probe
agacataaaagtcacgctaatagac

SEQ ID NO: 140704 - DNA, 25 bp, Artificial
  Probe
gacgacacggagatctataaagaca

SEQ ID NO: 140705 - DNA, 25 bp, Artificial
  Probe
tcatgaaatacgagagatcagacag

SEQ ID NO: 140706 - DNA, 25 bp, Artificial
  Probe
tgataagaacctttgccgtggagaa

SEQ ID NO: 140707 - DNA, 25 bp, Artificial
  Probe
tgccgtggagaagagaggtattcat

SEQ ID NO: 140708 - DNA, 25 bp, Artificial
  Probe
aagtcacgctaatagacacagagct

SEQ ID NO: 140709 - DNA, 25 bp, Artificial
  Probe
acacagtagacctagttattcaacg

SEQ ID NO: 140710 - DNA, 25 bp, Artificial
  Probe
tccagaacacagtagacctagttat

SEQ ID NO: 140711 - DNA, 25 bp, Artificial
  Probe
ttccagaacacagtagacctagtta

SEQ ID NO: 140712 - DNA, 25 bp, Artificial
  Probe
ccagaacacagtagacctagttatt

SEQ ID NO: 140713 - DNA, 25 bp, Artificial
  Probe
aacatcagtgccaggtgtataatat

SEQ ID NO: 140714 - DNA, 25 bp, Artificial
  Probe
agaacacagtagacctagttattca

SEQ ID NO: 140715 - DNA, 25 bp, Artificial
  Probe
cttccagaacacagtagacctagtt

SEQ ID NO: 140716 - DNA, 25 bp, Artificial
  Probe
atcagtgccaggtgtataatattgt

SEQ ID NO: 140717 - DNA, 25 bp, Artificial
  Probe
cagaacacagtagacctagttattc

SEQ ID NO: 140718 - DNA, 25 bp, Artificial
  Probe
catcagtgccaggtgtataatattg

SEQ ID NO: 140719 - DNA, 25 bp, Artificial
  Probe
agtgccaggtgtataatattgtacg

SEQ ID NO: 140720 - DNA, 25 bp, Artificial
  Probe
tcagtgccaggtgtataatattgta

SEQ ID NO: 140721 - DNA, 25 bp, Artificial
  Probe
cagtgccaggtgtataatattgtac

SEQ ID NO: 140722 - DNA, 25 bp, Artificial
  Probe
aacacagtagacctagttattcaac

SEQ ID NO: 140723 - DNA, 25 bp, Artificial
  Probe
gaacacagtagacctagttattcaa

SEQ ID NO: 140724 - DNA, 25 bp, Artificial
  Probe
acatcagtgccaggtgtataatatt

SEQ ID NO: 140725 - DNA, 25 bp, Artificial
  Probe
tctagcacaaggtatatgttggcat

SEQ ID NO: 140726 - DNA, 25 bp, Artificial
  Probe
taatattgtacgttagccttgacca

SEQ ID NO: 140727 - DNA, 25 bp, Artificial
  Probe
tgccaggtgtataatattgtacgtt

SEQ ID NO: 140728 - DNA, 25 bp, Artificial
  Probe
gtgccaggtgtataatattgtacgt

SEQ ID NO: 140729 - DNA, 25 bp, Artificial
  Probe
ttctagcacaaggtatatgttggca

SEQ ID NO: 140730 - DNA, 25 bp, Artificial
  Probe
acagtagacctagttattcaacgtg

SEQ ID NO: 140731 - DNA, 25 bp, Artificial
  Probe
cacagtagacctagttattcaacgt

SEQ ID NO: 140732 - DNA, 25 bp, Artificial
  Probe
tctttacaagttatgctctccatca

SEQ ID NO: 140733 - DNA, 25 bp, Artificial
  Probe
aatattgtacgttagccttgaccac

SEQ ID NO: 140734 - DNA, 25 bp, Artificial
  Probe
ctttacaagttatgctctccatcag

SEQ ID NO: 140735 - DNA, 25 bp, Artificial
  Probe
ataatattgtacgttagccttgacc

SEQ ID NO: 140736 - DNA, 25 bp, Artificial
  Probe
tttacaagttatgctctccatcaga

SEQ ID NO: 140737 - DNA, 25 bp, Artificial
  Probe
ctctttacaagttatgctctccatc

SEQ ID NO: 140738 - DNA, 25 bp, Artificial
  Probe
cagtagacctagttattcaacgtga

SEQ ID NO: 140739 - DNA, 25 bp, Artificial
  Probe
gctctttacaagttatgctctccat

SEQ ID NO: 140740 - DNA, 25 bp, Artificial
  Probe
agtagacctagttattcaacgtgag

SEQ ID NO: 140741 - DNA, 25 bp, Artificial
  Probe
aagttgtcttctcaaagtggatttc

SEQ ID NO: 140742 - DNA, 25 bp, Artificial
  Probe
cccataaagtatttctagcacaagg

SEQ ID NO: 140743 - DNA, 25 bp, Artificial
  Probe
tgtcttctcaaagtggatttcctat

SEQ ID NO: 140744 - DNA, 25 bp, Artificial
  Probe
gccaggtgtataatattgtacgtta

SEQ ID NO: 140745 - DNA, 25 bp, Artificial
  Probe
tcttctcaaagtggatttcctatca

SEQ ID NO: 140746 - DNA, 25 bp, Artificial
  Probe
gtcttctcaaagtggatttcctatc

SEQ ID NO: 140747 - DNA, 25 bp, Artificial
  Probe
ttgtcttctcaaagtggatttccta

SEQ ID NO: 140748 - DNA, 25 bp, Artificial
  Probe
tagacctagttattcaacgtgagct

SEQ ID NO: 140749 - DNA, 25 bp, Artificial
  Probe
gtagacctagttattcaacgtgagc

SEQ ID NO: 140750 - DNA, 25 bp, Artificial
  Probe
ttactactgaagagcttccagaaca

SEQ ID NO: 140751 - DNA, 25 bp, Artificial
  Probe
ggtgtataatattgtacgttagcct

SEQ ID NO: 140752 - DNA, 25 bp, Artificial
  Probe
aggtgtataatattgtacgttagcc

SEQ ID NO: 140753 - DNA, 25 bp, Artificial
  Probe
ccataaagtatttctagcacaaggt

SEQ ID NO: 140754 - DNA, 25 bp, Artificial
  Probe
aatcaagatcgttatcagagtccag

SEQ ID NO: 140755 - DNA, 25 bp, Artificial
  Probe
atcaagatcgttatcagagtccaga

SEQ ID NO: 140756 - DNA, 25 bp, Artificial
  Probe
acagtgttatgctacaagacttcat

SEQ ID NO: 140757 - DNA, 25 bp, Artificial
  Probe
tcaagatcgttatcagagtccagaa

SEQ ID NO: 140758 - DNA, 25 bp, Artificial
  Probe
gaacagtgttatgctacaagacttc

SEQ ID NO: 140759 - DNA, 25 bp, Artificial
  Probe
aacagtgttatgctacaagacttca

SEQ ID NO: 140760 - DNA, 25 bp, Artificial
  Probe
cagtgttatgctacaagacttcata

SEQ ID NO: 140761 - DNA, 25 bp, Artificial
  Probe
ggaacagtgttatgctacaagactt

SEQ ID NO: 140762 - DNA, 25 bp, Artificial
  Probe
gtgactactttgacggaaatgtata

SEQ ID NO: 140763 - DNA, 25 bp, Artificial
  Probe
aaatcaagatcgttatcagagtcca

SEQ ID NO: 140764 - DNA, 25 bp, Artificial
  Probe
caagatcgttatcagagtccagaaa

SEQ ID NO: 140765 - DNA, 25 bp, Artificial
  Probe
caaatcaagatcgttatcagagtcc

SEQ ID NO: 140766 - DNA, 25 bp, Artificial
  Probe
acaaatcaagatcgttatcagagtc

SEQ ID NO: 140767 - DNA, 25 bp, Artificial
  Probe
atataaagcaggctgtgagaggaat

SEQ ID NO: 140768 - DNA, 25 bp, Artificial
  Probe
catagtgtgatttcccatgtaatgt

SEQ ID NO: 140769 - DNA, 25 bp, Artificial
  Probe
tataaagcaggctgtgagaggaatt

SEQ ID NO: 140770 - DNA, 25 bp, Artificial
  Probe
aatataaagcaggctgtgagaggaa

SEQ ID NO: 140771 - DNA, 25 bp, Artificial
  Probe
aaatataaagcaggctgtgagagga

SEQ ID NO: 140772 - DNA, 25 bp, Artificial
  Probe
cggaacagtgttatgctacaagact

SEQ ID NO: 140773 - DNA, 25 bp, Artificial
  Probe
tcggaacagtgttatgctacaagac

SEQ ID NO: 140774 - DNA, 25 bp, Artificial
  Probe
gtcggaacagtgttatgctacaaga

SEQ ID NO: 140775 - DNA, 25 bp, Artificial
  Probe
atagtgtgatttcccatgtaatgtt

SEQ ID NO: 140776 - DNA, 25 bp, Artificial
  Probe
tcatataagctgacatagtgtgatt

SEQ ID NO: 140777 - DNA, 25 bp, Artificial
  Probe
ttcatataagctgacatagtgtgat

SEQ ID NO: 140778 - DNA, 25 bp, Artificial
  Probe
tgtcggaacagtgttatgctacaag

SEQ ID NO: 140779 - DNA, 25 bp, Artificial
  Probe
tacaaatcaagatcgttatcagagt

SEQ ID NO: 140780 - DNA, 25 bp, Artificial
  Probe
tttgatgcttacgtgactactttga

SEQ ID NO: 140781 - DNA, 25 bp, Artificial
  Probe
cttgctgctgtaacttaccagaaag

SEQ ID NO: 140782 - DNA, 25 bp, Artificial
  Probe
ataagctgacatagtgtgatttccc

SEQ ID NO: 140783 - DNA, 25 bp, Artificial
  Probe
ttgatgcttacgtgactactttgac

SEQ ID NO: 140784 - DNA, 25 bp, Artificial
  Probe
tgactactttgacggaaatgtatac

SEQ ID NO: 140785 - DNA, 25 bp, Artificial
  Probe
tatcagagtccagaaaataaagccc

SEQ ID NO: 140786 - DNA, 25 bp, Artificial
  Probe
aagccctactggaaaatataaagca

SEQ ID NO: 140787 - DNA, 25 bp, Artificial
  Probe
tataagctgacatagtgtgatttcc

SEQ ID NO: 140788 - DNA, 25 bp, Artificial
  Probe
taagctgacatagtgtgatttccca

SEQ ID NO: 140789 - DNA, 25 bp, Artificial
  Probe
aaagccctactggaaaatataaagc

SEQ ID NO: 140790 - DNA, 25 bp, Artificial
  Probe
cagagtccagaaaataaagccctac

SEQ ID NO: 140791 - DNA, 25 bp, Artificial
  Probe
tcagagtccagaaaataaagcccta

SEQ ID NO: 140792 - DNA, 25 bp, Artificial
  Probe
tgctgtaacttaccagaaagtgtta

SEQ ID NO: 140793 - DNA, 25 bp, Artificial
  Probe
gaaaatataaagcaggctgtgagag

SEQ ID NO: 140794 - DNA, 25 bp, Artificial
  Probe
agaaaataaagccctactggaaaat

SEQ ID NO: 140795 - DNA, 25 bp, Artificial
  Probe
atacaaatcaagatcgttatcagag

SEQ ID NO: 140796 - DNA, 25 bp, Artificial
  Probe
tgacatagtgtgatttcccatgtaa

SEQ ID NO: 140797 - DNA, 25 bp, Artificial
  Probe
ctgacatagtgtgatttcccatgta

SEQ ID NO: 140798 - DNA, 25 bp, Artificial
  Probe
aagctgacatagtgtgatttcccat

SEQ ID NO: 140799 - DNA, 25 bp, Artificial
  Probe
tgtgatgagtgtggcagatattatt

SEQ ID NO: 140800 - DNA, 25 bp, Artificial
  Probe
gatgagtgtggcagatattattcct

SEQ ID NO: 140801 - DNA, 25 bp, Artificial
  Probe
tgatgagtgtggcagatattattcc

SEQ ID NO: 140802 - DNA, 25 bp, Artificial
  Probe
gtgatgagtgtggcagatattattc

SEQ ID NO: 140803 - DNA, 25 bp, Artificial
  Probe
agtgtggcagatattattcctcatc

SEQ ID NO: 140804 - DNA, 25 bp, Artificial
  Probe
agtgtgaagaatgtggcagattatt

SEQ ID NO: 140805 - DNA, 25 bp, Artificial
  Probe
aagtgtgaagaatgtggcagattat

SEQ ID NO: 140806 - DNA, 25 bp, Artificial
  Probe
gtgtgatgagtgtggcagatattat

SEQ ID NO: 140807 - DNA, 25 bp, Artificial
  Probe
gttattcctcaacttcctgccttaa

SEQ ID NO: 140808 - DNA, 25 bp, Artificial
  Probe
caagtgtgaagaatgtggcagatta

SEQ ID NO: 140809 - DNA, 25 bp, Artificial
  Probe
agtgtgatgagtgtggcagatatta

SEQ ID NO: 140810 - DNA, 25 bp, Artificial
  Probe
atagcactcaatgatcctaactgtt

SEQ ID NO: 140811 - DNA, 25 bp, Artificial
  Probe
aatagcactcaatgatcctaactgt

SEQ ID NO: 140812 - DNA, 25 bp, Artificial
  Probe
gagtgtggcagatattattcctcat

SEQ ID NO: 140813 - DNA, 25 bp, Artificial
  Probe
atgagtgtggcagatattattcctc

SEQ ID NO: 140814 - DNA, 25 bp, Artificial
  Probe
agcactcaatgatcctaactgttac

SEQ ID NO: 140815 - DNA, 25 bp, Artificial
  Probe
gaatagcactcaatgatcctaactg

SEQ ID NO: 140816 - DNA, 25 bp, Artificial
  Probe
gcactcaatgatcctaactgttaca

SEQ ID NO: 140817 - DNA, 25 bp, Artificial
  Probe
tagcactcaatgatcctaactgtta

SEQ ID NO: 140818 - DNA, 25 bp, Artificial
  Probe
tacaagtcctacaagtgtgaacatt

SEQ ID NO: 140819 - DNA, 25 bp, Artificial
  Probe
atacaagtcctacaagtgtgaacat

SEQ ID NO: 140820 - DNA, 25 bp, Artificial
  Probe
aatacaagtcctacaagtgtgaaca

SEQ ID NO: 140821 - DNA, 25 bp, Artificial
  Probe
ctacaagtgtgaagaatgtggtaag

SEQ ID NO: 140822 - DNA, 25 bp, Artificial
  Probe
tgttattcctcaacttcctgcctta

SEQ ID NO: 140823 - DNA, 25 bp, Artificial
  Probe
tacaagtgtgaagaatgtggtaagg

SEQ ID NO: 140824 - DNA, 25 bp, Artificial
  Probe
cctacaagtgtgaagaatgtggtaa

SEQ ID NO: 140825 - DNA, 25 bp, Artificial
  Probe
attgtggcagatgttattcctcaac

SEQ ID NO: 140826 - DNA, 25 bp, Artificial
  Probe
cattgtggcagatgttattcctcaa

SEQ ID NO: 140827 - DNA, 25 bp, Artificial
  Probe
ttctatacaccagagacttcatact

SEQ ID NO: 140828 - DNA, 25 bp, Artificial
  Probe
gtggcagatgttattcctcaacttc

SEQ ID NO: 140829 - DNA, 25 bp, Artificial
  Probe
aagtgtgatgagtgtggcagatatt

SEQ ID NO: 140830 - DNA, 25 bp, Artificial
  Probe
acaagtcctacaagtgtgaacattg

SEQ ID NO: 140831 - DNA, 25 bp, Artificial
  Probe
tctatacaccagagacttcatactg

SEQ ID NO: 140832 - DNA, 25 bp, Artificial
  Probe
atgttattcctcaacttcctgcctt

SEQ ID NO: 140833 - DNA, 25 bp, Artificial
  Probe
cagatgttattcctcaacttcctgc

SEQ ID NO: 140834 - DNA, 25 bp, Artificial
  Probe
gcagatgttattcctcaacttcctg

SEQ ID NO: 140835 - DNA, 25 bp, Artificial
  Probe
tgtggcagatgttattcctcaactt

SEQ ID NO: 140836 - DNA, 25 bp, Artificial
  Probe
ggaatagcactcaatgatcctaact

SEQ ID NO: 140837 - DNA, 25 bp, Artificial
  Probe
gatgttattcctcaacttcctgcct

SEQ ID NO: 140838 - DNA, 25 bp, Artificial
  Probe
agatgttattcctcaacttcctgcc

SEQ ID NO: 140839 - DNA, 25 bp, Artificial
  Probe
ggcagatgttattcctcaacttcct

SEQ ID NO: 140840 - DNA, 25 bp, Artificial
  Probe
ttgtggcagatgttattcctcaact

SEQ ID NO: 140841 - DNA, 25 bp, Artificial
  Probe
aatgatcctaactgttacagcaaga

SEQ ID NO: 140842 - DNA, 25 bp, Artificial
  Probe
caatgatcctaactgttacagcaag

SEQ ID NO: 140843 - DNA, 25 bp, Artificial
  Probe
tcaatgatcctaactgttacagcaa

SEQ ID NO: 140844 - DNA, 25 bp, Artificial
  Probe
tattgagtcaggcagaggaagttaa

SEQ ID NO: 140845 - DNA, 25 bp, Artificial
  Probe
gtattgagtcaggcagaggaagtta

SEQ ID NO: 140846 - DNA, 25 bp, Artificial
  Probe
gaatgctatcgagttgtctgtagaa

SEQ ID NO: 140847 - DNA, 25 bp, Artificial
  Probe
aagaatgctatcgagttgtctgtag

SEQ ID NO: 140848 - DNA, 25 bp, Artificial
  Probe
aatgctatcgagttgtctgtagaac

SEQ ID NO: 140849 - DNA, 25 bp, Artificial
  Probe
caagaatgctatcgagttgtctgta

SEQ ID NO: 140850 - DNA, 25 bp, Artificial
  Probe
atctgaaagtaaatggagttgatgc

SEQ ID NO: 140851 - DNA, 25 bp, Artificial
  Probe
agaatgctatcgagttgtctgtaga

SEQ ID NO: 140852 - DNA, 25 bp, Artificial
  Probe
tgctattatcataacagacactgaa

SEQ ID NO: 140853 - DNA, 25 bp, Artificial
  Probe
ttgctattatcataacagacactga

SEQ ID NO: 140854 - DNA, 25 bp, Artificial
  Probe
aagctatagttggtcacacagagaa

SEQ ID NO: 140855 - DNA, 25 bp, Artificial
  Probe
gaaaccaagatcagaagaaagcaaa

SEQ ID NO: 140856 - DNA, 25 bp, Artificial
  Probe
gaagctatagttggtcacacagaga

SEQ ID NO: 140857 - DNA, 25 bp, Artificial
  Probe
agatagaagaacctgcaattagcca

SEQ ID NO: 140858 - DNA, 25 bp, Artificial
  Probe
cagagaaaccaagatcagaagaaag

SEQ ID NO: 140859 - DNA, 25 bp, Artificial
  Probe
gtcaagaatgctatcgagttgtctg

SEQ ID NO: 140860 - DNA, 25 bp, Artificial
  Probe
agaaaccaagatcagaagaaagcaa

SEQ ID NO: 140861 - DNA, 25 bp, Artificial
  Probe
tccctaagcaattcctaatttccat

SEQ ID NO: 140862 - DNA, 25 bp, Artificial
  Probe
agagaaaccaagatcagaagaaagc

SEQ ID NO: 140863 - DNA, 25 bp, Artificial
  Probe
atgctatcgagttgtctgtagaaca

SEQ ID NO: 140864 - DNA, 25 bp, Artificial
  Probe
tcaagaatgctatcgagttgtctgt

SEQ ID NO: 140865 - DNA, 25 bp, Artificial
  Probe
gagaaaccaagatcagaagaaagca

SEQ ID NO: 140866 - DNA, 25 bp, Artificial
  Probe
gcagagaaaccaagatcagaagaaa

SEQ ID NO: 140867 - DNA, 25 bp, Artificial
  Probe
attgagtcaggcagaggaagttaaa

SEQ ID NO: 140868 - DNA, 25 bp, Artificial
  Probe
gtccctaagcaattcctaatttcca

SEQ ID NO: 140869 - DNA, 25 bp, Artificial
  Probe
tgtccctaagcaattcctaatttcc

SEQ ID NO: 140870 - DNA, 25 bp, Artificial
  Probe
atcaaataaatacgctgttccagtg

SEQ ID NO: 140871 - DNA, 25 bp, Artificial
  Probe
tgtattgagtcaggcagaggaagtt

SEQ ID NO: 140872 - DNA, 25 bp, Artificial
  Probe
atgtccctaagcaattcctaatttc

SEQ ID NO: 140873 - DNA, 25 bp, Artificial
  Probe
ttaaactgagccagatagaagaacc

SEQ ID NO: 140874 - DNA, 25 bp, Artificial
  Probe
gttaaactgagccagatagaagaac

SEQ ID NO: 140875 - DNA, 25 bp, Artificial
  Probe
aaataaatacgctgttccagtgact

SEQ ID NO: 140876 - DNA, 25 bp, Artificial
  Probe
caaataaatacgctgttccagtgac

SEQ ID NO: 140877 - DNA, 25 bp, Artificial
  Probe
aatcaaataaatacgctgttccagt

SEQ ID NO: 140878 - DNA, 25 bp, Artificial
  Probe
tcaaataaatacgctgttccagtga

SEQ ID NO: 140879 - DNA, 25 bp, Artificial
  Probe
tatagttggtcacacagagaaagcc

SEQ ID NO: 140880 - DNA, 25 bp, Artificial
  Probe
taaactgagccagatagaagaacct

SEQ ID NO: 140881 - DNA, 25 bp, Artificial
  Probe
aatgtccctaagcaattcctaattt

SEQ ID NO: 140882 - DNA, 25 bp, Artificial
  Probe
aaatgtccctaagcaattcctaatt

SEQ ID NO: 140883 - DNA, 25 bp, Artificial
  Probe
gatagaagaacctgcaattagccag

SEQ ID NO: 140884 - DNA, 25 bp, Artificial
  Probe
cagatagaagaacctgcaattagcc

SEQ ID NO: 140885 - DNA, 25 bp, Artificial
  Probe
ccagatagaagaacctgcaattagc

SEQ ID NO: 140886 - DNA, 25 bp, Artificial
  Probe
gccagatagaagaacctgcaattag

SEQ ID NO: 140887 - DNA, 25 bp, Artificial
  Probe
aataaatacgctgttccagtgactc

SEQ ID NO: 140888 - DNA, 25 bp, Artificial
  Probe
attgctattatcataacagacactg

SEQ ID NO: 140889 - DNA, 25 bp, Artificial
  Probe
aatcaactcttcttgtactctgtgt

SEQ ID NO: 140890 - DNA, 25 bp, Artificial
  Probe
tcaactcttcttgtactctgtgtat

SEQ ID NO: 140891 - DNA, 25 bp, Artificial
  Probe
atcaactcttcttgtactctgtgta

SEQ ID NO: 140892 - DNA, 25 bp, Artificial
  Probe
caactcttcttgtactctgtgtatt

SEQ ID NO: 140893 - DNA, 25 bp, Artificial
  Probe
aatgctacacatccgtctagttcaa

SEQ ID NO: 140894 - DNA, 25 bp, Artificial
  Probe
ttgaatgctacacatccgtctagtt

SEQ ID NO: 140895 - DNA, 25 bp, Artificial
  Probe
taatcaactcttcttgtactctgtg

SEQ ID NO: 140896 - DNA, 25 bp, Artificial
  Probe
gaatgctacacatccgtctagttca

SEQ ID NO: 140897 - DNA, 25 bp, Artificial
  Probe
tgaatgctacacatccgtctagttc

SEQ ID NO: 140898 - DNA, 25 bp, Artificial
  Probe
atgctacacatccgtctagttcaac

SEQ ID NO: 140899 - DNA, 25 bp, Artificial
  Probe
ttaatcaactcttcttgtactctgt

SEQ ID NO: 140900 - DNA, 25 bp, Artificial
  Probe
tggttctgttagtttcgtgttcatc

SEQ ID NO: 140901 - DNA, 25 bp, Artificial
  Probe
aactcttcttgtactctgtgtatta

SEQ ID NO: 140902 - DNA, 25 bp, Artificial
  Probe
actcttcttgtactctgtgtattat

SEQ ID NO: 140903 - DNA, 25 bp, Artificial
  Probe
ggttctgttagtttcgtgttcatcc

SEQ ID NO: 140904 - DNA, 25 bp, Artificial
  Probe
ctttgaatgctacacatccgtctag

SEQ ID NO: 140905 - DNA, 25 bp, Artificial
  Probe
ctgtgtattataatggcatggcaat

SEQ ID NO: 140906 - DNA, 25 bp, Artificial
  Probe
tctgtgtattataatggcatggcaa

SEQ ID NO: 140907 - DNA, 25 bp, Artificial
  Probe
actttgaatgctacacatccgtcta

SEQ ID NO: 140908 - DNA, 25 bp, Artificial
  Probe
gtgtattataatggcatggcaatga

SEQ ID NO: 140909 - DNA, 25 bp, Artificial
  Probe
tgtgtattataatggcatggcaatg

SEQ ID NO: 140910 - DNA, 25 bp, Artificial
  Probe
ctctgtgtattataatggcatggca

SEQ ID NO: 140911 - DNA, 25 bp, Artificial
  Probe
actctgtgtattataatggcatggc

SEQ ID NO: 140912 - DNA, 25 bp, Artificial
  Probe
tttgaatgctacacatccgtctagt

SEQ ID NO: 140913 - DNA, 25 bp, Artificial
  Probe
tgtattataatggcatggcaatgat

SEQ ID NO: 140914 - DNA, 25 bp, Artificial
  Probe
cggtggtttaagatcctctataagg

SEQ ID NO: 140915 - DNA, 25 bp, Artificial
  Probe
tactctgtgtattataatggcatgg

SEQ ID NO: 140916 - DNA, 25 bp, Artificial
  Probe
gtattataatggcatggcaatgatt

SEQ ID NO: 140917 - DNA, 25 bp, Artificial
  Probe
ttgtactctgtgtattataatggca

SEQ ID NO: 140918 - DNA, 25 bp, Artificial
  Probe
gggaaattaatctattctgaaaggc

SEQ ID NO: 140919 - DNA, 25 bp, Artificial
  Probe
tgtactctgtgtattataatggcat

SEQ ID NO: 140920 - DNA, 25 bp, Artificial
  Probe
tgaaaggcaataaaacgaagaaagt

SEQ ID NO: 140921 - DNA, 25 bp, Artificial
  Probe
ctgaaaggcaataaaacgaagaaag

SEQ ID NO: 140922 - DNA, 25 bp, Artificial
  Probe
gtactctgtgtattataatggcatg

SEQ ID NO: 140923 - DNA, 25 bp, Artificial
  Probe
cttgtactctgtgtattataatggc

SEQ ID NO: 140924 - DNA, 25 bp, Artificial
  Probe
cgaagaaagttaaggcaaaaggaaa

SEQ ID NO: 140925 - DNA, 25 bp, Artificial
  Probe
cactttgaatgctacacatccgtct

SEQ ID NO: 140926 - DNA, 25 bp, Artificial
  Probe
ggaaattaatctattctgaaaggca

SEQ ID NO: 140927 - DNA, 25 bp, Artificial
  Probe
tgctacacatccgtctagttcaacc

SEQ ID NO: 140928 - DNA, 25 bp, Artificial
  Probe
gcaataaaacgaagaaagttaaggc

SEQ ID NO: 140929 - DNA, 25 bp, Artificial
  Probe
tctgaaaggcaataaaacgaagaaa

SEQ ID NO: 140930 - DNA, 25 bp, Artificial
  Probe
agaaagttaaggcaaaaggaaacac

SEQ ID NO: 140931 - DNA, 25 bp, Artificial
  Probe
aagaaagttaaggcaaaaggaaaca

SEQ ID NO: 140932 - DNA, 25 bp, Artificial
  Probe
attctgaaaggcaataaaacgaaga

SEQ ID NO: 140933 - DNA, 25 bp, Artificial
  Probe
gaagaaagttaaggcaaaaggaaac

SEQ ID NO: 140934 - DNA, 25 bp, Artificial
  Probe
ctcaatgactggaagataatggagt

SEQ ID NO: 140935 - DNA, 25 bp, Artificial
  Probe
gctcaatgactggaagataatggag

SEQ ID NO: 140936 - DNA, 25 bp, Artificial
  Probe
gaagctcaatgactggaagataatg

SEQ ID NO: 140937 - DNA, 25 bp, Artificial
  Probe
aagctcaatgactggaagataatgg

SEQ ID NO: 140938 - DNA, 25 bp, Artificial
  Probe
tgaagctcaatgactggaagataat

SEQ ID NO: 140939 - DNA, 25 bp, Artificial
  Probe
ctgaagctcaatgactggaagataa

SEQ ID NO: 140940 - DNA, 25 bp, Artificial
  Probe
agctcaatgactggaagataatgga

SEQ ID NO: 140941 - DNA, 25 bp, Artificial
  Probe
cgagagaaaggaagaaaggaagatc

SEQ ID NO: 140942 - DNA, 25 bp, Artificial
  Probe
ccgagagaaaggaagaaaggaagat

SEQ ID NO: 140943 - DNA, 25 bp, Artificial
  Probe
gaagatgtcagcatgaagttcgatg

SEQ ID NO: 140944 - DNA, 25 bp, Artificial
  Probe
agatgtcagcatgaagttcgatgaa

SEQ ID NO: 140945 - DNA, 25 bp, Artificial
  Probe
aagatgtcagcatgaagttcgatga

SEQ ID NO: 140946 - DNA, 25 bp, Artificial
  Probe
gctgaagctcaatgactggaagata

SEQ ID NO: 140947 - DNA, 25 bp, Artificial
  Probe
gagagaaaggaagaaaggaagatcc

SEQ ID NO: 140948 - DNA, 25 bp, Artificial
  Probe
tgtggaagatgtcagcatgaagttc

SEQ ID NO: 140949 - DNA, 25 bp, Artificial
  Probe
ctgtggaagatgtcagcatgaagtt

SEQ ID NO: 140950 - DNA, 25 bp, Artificial
  Probe
ggaagatgtcagcatgaagttcgat

SEQ ID NO: 140951 - DNA, 25 bp, Artificial
  Probe
agagaaaggaagaaaggaagatccc

SEQ ID NO: 140952 - DNA, 25 bp, Artificial
  Probe
tcaatgactggaagataatggagtc

SEQ ID NO: 140953 - DNA, 25 bp, Artificial
  Probe
gtctgtggaagatgtcagcatgaag

SEQ ID NO: 140954 - DNA, 25 bp, Artificial
  Probe
caatgactggaagataatggagtcg

SEQ ID NO: 140955 - DNA, 25 bp, Artificial
  Probe
caagactgactctgaaggacatcgg

SEQ ID NO: 140956 - DNA, 25 bp, Artificial
  Probe
cccgagagaaaggaagaaaggaaga

SEQ ID NO: 140957 - DNA, 25 bp, Artificial
  Probe
gtggaagatgtcagcatgaagttcg

SEQ ID NO: 140958 - DNA, 25 bp, Artificial
  Probe
tctgtggaagatgtcagcatgaagt

SEQ ID NO: 140959 - DNA, 25 bp, Artificial
  Probe
aatgcttgtacagtttattgcctac

SEQ ID NO: 140960 - DNA, 25 bp, Artificial
  Probe
tgtctgtggaagatgtcagcatgaa

SEQ ID NO: 140961 - DNA, 25 bp, Artificial
  Probe
aaatgcttgtacagtttattgccta

SEQ ID NO: 140962 - DNA, 25 bp, Artificial
  Probe
ggcaagactgactctgaaggacatc

SEQ ID NO: 140963 - DNA, 25 bp, Artificial
  Probe
atgcttgtacagtttattgcctacc

SEQ ID NO: 140964 - DNA, 25 bp, Artificial
  Probe
tttattgcctacctggtagtttctg

SEQ ID NO: 140965 - DNA, 25 bp, Artificial
  Probe
gtttattgcctacctggtagtttct

SEQ ID NO: 140966 - DNA, 25 bp, Artificial
  Probe
agtttattgcctacctggtagtttc

SEQ ID NO: 140967 - DNA, 25 bp, Artificial
  Probe
cagtttattgcctacctggtagttt

SEQ ID NO: 140968 - DNA, 25 bp, Artificial
  Probe
gtacagtttattgcctacctggtag

SEQ ID NO: 140969 - DNA, 25 bp, Artificial
  Probe
tacagtttattgcctacctggtagt

SEQ ID NO: 140970 - DNA, 25 bp, Artificial
  Probe
aatgactggaagataatggagtcgc

SEQ ID NO: 140971 - DNA, 25 bp, Artificial
  Probe
tggaagatgtcagcatgaagttcga

SEQ ID NO: 140972 - DNA, 25 bp, Artificial
  Probe
gatgtcagcatgaagttcgatgaac

SEQ ID NO: 140973 - DNA, 25 bp, Artificial
  Probe
ttattgcctacctggtagtttctgt

SEQ ID NO: 140974 - DNA, 25 bp, Artificial
  Probe
ctgtctgtggaagatgtcagcatga

SEQ ID NO: 140975 - DNA, 25 bp, Artificial
  Probe
acagtttattgcctacctggtagtt

SEQ ID NO: 140976 - DNA, 25 bp, Artificial
  Probe
tgtacagtttattgcctacctggta

SEQ ID NO: 140977 - DNA, 25 bp, Artificial
  Probe
tattgcctacctggtagtttctgtc

SEQ ID NO: 140978 - DNA, 25 bp, Artificial
  Probe
cttgtacagtttattgcctacctgg

SEQ ID NO: 140979 - DNA, 25 bp, Artificial
  Probe
gttcctggagctacaacaactcaag

SEQ ID NO: 140980 - DNA, 25 bp, Artificial
  Probe
ctcaagttcctggagctacaacaac

SEQ ID NO: 140981 - DNA, 25 bp, Artificial
  Probe
cctcaagttcctggagctacaacaa

SEQ ID NO: 140982 - DNA, 25 bp, Artificial
  Probe
caagttcctggagctacaacaactc

SEQ ID NO: 140983 - DNA, 25 bp, Artificial
  Probe
ttcctggagctacaacaactcaagg

SEQ ID NO: 140984 - DNA, 25 bp, Artificial
  Probe
agttcctggagctacaacaactcaa

SEQ ID NO: 140985 - DNA, 25 bp, Artificial
  Probe
aagttcctggagctacaacaactca

SEQ ID NO: 140986 - DNA, 25 bp, Artificial
  Probe
tcaagttcctggagctacaacaact

SEQ ID NO: 140987 - DNA, 25 bp, Artificial
  Probe
gcacacaacttctcctgtctcagaa

SEQ ID NO: 140988 - DNA, 25 bp, Artificial
  Probe
ggaggagatcttagagaagattcga

SEQ ID NO: 140989 - DNA, 25 bp, Artificial
  Probe
ccggaggagatcttagagaagattc

SEQ ID NO: 140990 - DNA, 25 bp, Artificial
  Probe
ctcagaaggtccagcagttcttcag

SEQ ID NO: 140991 - DNA, 25 bp, Artificial
  Probe
gtctcagaaggtccagcagttcttc

SEQ ID NO: 140992 - DNA, 25 bp, Artificial
  Probe
cggaggagatcttagagaagattcg

SEQ ID NO: 140993 - DNA, 25 bp, Artificial
  Probe
tatgagctgccggaggagatcttag

SEQ ID NO: 140994 - DNA, 25 bp, Artificial
  Probe
ctatgagctgccggaggagatctta

SEQ ID NO: 140995 - DNA, 25 bp, Artificial
  Probe
cagaggtggagaaactggaacactg

SEQ ID NO: 140996 - DNA, 25 bp, Artificial
  Probe
tctcagaaggtccagcagttcttca

SEQ ID NO: 140997 - DNA, 25 bp, Artificial
  Probe
ggagatcttagagaagattcgaagc

SEQ ID NO: 140998 - DNA, 25 bp, Artificial
  Probe
aggagatcttagagaagattcgaag

SEQ ID NO: 140999 - DNA, 25 bp, Artificial
  Probe
gaggagatcttagagaagattcgaa

SEQ ID NO: 141000 - DNA, 25 bp, Artificial
  Probe
gagatcttagagaagattcgaagcg

SEQ ID NO: 141001 - DNA, 25 bp, Artificial
  Probe
ctgccggaggagatcttagagaaga

SEQ ID NO: 141002 - DNA, 25 bp, Artificial
  Probe
gccggaggagatcttagagaagatt

SEQ ID NO: 141003 - DNA, 25 bp, Artificial
  Probe
agatcttagagaagattcgaagcgc

SEQ ID NO: 141004 - DNA, 25 bp, Artificial
  Probe
gttttctacccgtactgtacaccca

SEQ ID NO: 141005 - DNA, 25 bp, Artificial
  Probe
gatcttagagaagattcgaagcgcc

SEQ ID NO: 141006 - DNA, 25 bp, Artificial
  Probe
tgccggaggagatcttagagaagat

SEQ ID NO: 141007 - DNA, 25 bp, Artificial
  Probe
ttttctacccgtactgtacacccag

SEQ ID NO: 141008 - DNA, 25 bp, Artificial
  Probe
cctaaggaggagaagaaggtccctc

SEQ ID NO: 141009 - DNA, 25 bp, Artificial
  Probe
ggttttctacccgtactgtacaccc

SEQ ID NO: 141010 - DNA, 25 bp, Artificial
  Probe
atcttagagaagattcgaagcgccg

SEQ ID NO: 141011 - DNA, 25 bp, Artificial
  Probe
cggttttctacccgtactgtacacc

SEQ ID NO: 141012 - DNA, 25 bp, Artificial
  Probe
ctttaggttatgaagacttgactca

SEQ ID NO: 141013 - DNA, 25 bp, Artificial
  Probe
ttaggttatgaagacttgactcaaa

SEQ ID NO: 141014 - DNA, 25 bp, Artificial
  Probe
tttaggttatgaagacttgactcaa

SEQ ID NO: 141015 - DNA, 25 bp, Artificial
  Probe
cacaaaggagaaagcactcatttta

SEQ ID NO: 141016 - DNA, 25 bp, Artificial
  Probe
acaaaggagaaagcactcattttaa

SEQ ID NO: 141017 - DNA, 25 bp, Artificial
  Probe
caactttccaattgacacgtacaag

SEQ ID NO: 141018 - DNA, 25 bp, Artificial
  Probe
ccacaaaggagaaagcactcatttt

SEQ ID NO: 141019 - DNA, 25 bp, Artificial
  Probe
aactttccaattgacacgtacaagg

SEQ ID NO: 141020 - DNA, 25 bp, Artificial
  Probe
cagcatcgagatttatgtccctgag

SEQ ID NO: 141021 - DNA, 25 bp, Artificial
  Probe
ccaactttccaattgacacgtacaa

SEQ ID NO: 141022 - DNA, 25 bp, Artificial
  Probe
gccacaaaggagaaagcactcattt

SEQ ID NO: 141023 - DNA, 25 bp, Artificial
  Probe
taggttatgaagacttgactcaaaa

SEQ ID NO: 141024 - DNA, 25 bp, Artificial
  Probe
aggagaaagcactcattttaaatca

SEQ ID NO: 141025 - DNA, 25 bp, Artificial
  Probe
caaaggagaaagcactcattttaaa

SEQ ID NO: 141026 - DNA, 25 bp, Artificial
  Probe
acagcatcgagatttatgtccctga

SEQ ID NO: 141027 - DNA, 25 bp, Artificial
  Probe
agcatcgagatttatgtccctgagg

SEQ ID NO: 141028 - DNA, 25 bp, Artificial
  Probe
ggagaaagcactcattttaaatcat

SEQ ID NO: 141029 - DNA, 25 bp, Artificial
  Probe
aaggagaaagcactcattttaaatc

SEQ ID NO: 141030 - DNA, 25 bp, Artificial
  Probe
ggacatcagcatgaagttcgatgag

SEQ ID NO: 141031 - DNA, 25 bp, Artificial
  Probe
gaggacatcagcatgaagttcgatg

SEQ ID NO: 141032 - DNA, 25 bp, Artificial
  Probe
gagaccctgagccaactttccaatt

SEQ ID NO: 141033 - DNA, 25 bp, Artificial
  Probe
aaaggagaaagcactcattttaaat

SEQ ID NO: 141034 - DNA, 25 bp, Artificial
  Probe
tagagaccctgagccaactttccaa

SEQ ID NO: 141035 - DNA, 25 bp, Artificial
  Probe
aggacatcagcatgaagttcgatga

SEQ ID NO: 141036 - DNA, 25 bp, Artificial
  Probe
actttccaattgacacgtacaaggg

SEQ ID NO: 141037 - DNA, 25 bp, Artificial
  Probe
gagtgcagacagcatcgagatttat

SEQ ID NO: 141038 - DNA, 25 bp, Artificial
  Probe
gacatcagcatgaagttcgatgagc

SEQ ID NO: 141039 - DNA, 25 bp, Artificial
  Probe
agtgcagacagcatcgagatttatg

SEQ ID NO: 141040 - DNA, 25 bp, Artificial
  Probe
gagccaactttccaattgacacgta

SEQ ID NO: 141041 - DNA, 25 bp, Artificial
  Probe
gtgcagacagcatcgagatttatgt

SEQ ID NO: 141042 - DNA, 25 bp, Artificial
  Probe
acatcagcatgaagttcgatgagct

SEQ ID NO: 141043 - DNA, 25 bp, Artificial
  Probe
agccaactttccaattgacacgtac

SEQ ID NO: 141044 - DNA, 25 bp, Artificial
  Probe
gagaaagcactcattttaaatcatt

SEQ ID NO: 141045 - DNA, 25 bp, Artificial
  Probe
agagtgcagacagcatcgagattta

SEQ ID NO: 141046 - DNA, 25 bp, Artificial
  Probe
aattgacacgtacaagggctcacaa

SEQ ID NO: 141047 - DNA, 25 bp, Artificial
  Probe
gccaactttccaattgacacgtaca

SEQ ID NO: 141048 - DNA, 25 bp, Artificial
  Probe
gacagcatcgagatttatgtccctg

SEQ ID NO: 141049 - DNA, 25 bp, Artificial
  Probe
cagacagcatcgagatttatgtccc

SEQ ID NO: 141050 - DNA, 25 bp, Artificial
  Probe
cctgagccaactttccaattgacac

SEQ ID NO: 141051 - DNA, 25 bp, Artificial
  Probe
agacagcatcgagatttatgtccct

SEQ ID NO: 141052 - DNA, 25 bp, Artificial
  Probe
ctttccaattgacacgtacaagggc

SEQ ID NO: 141053 - DNA, 25 bp, Artificial
  Probe
tgcagacagcatcgagatttatgtc

SEQ ID NO: 141054 - DNA, 25 bp, Artificial
  Probe
catcgagatttatgtccctgaggcc

SEQ ID NO: 141055 - DNA, 25 bp, Artificial
  Probe
ctgagccaactttccaattgacacg

SEQ ID NO: 141056 - DNA, 25 bp, Artificial
  Probe
agaaagcactcattttaaatcatta

SEQ ID NO: 141057 - DNA, 25 bp, Artificial
  Probe
tactgtatagtgctttggttggaaa

SEQ ID NO: 141058 - DNA, 25 bp, Artificial
  Probe
ctactgtatagtgctttggttggaa

SEQ ID NO: 141059 - DNA, 25 bp, Artificial
  Probe
ctctactgtatagtgctttggttgg

SEQ ID NO: 141060 - DNA, 25 bp, Artificial
  Probe
cctctactgtatagtgctttggttg

SEQ ID NO: 141061 - DNA, 25 bp, Artificial
  Probe
tcaaagagatcatctgtttctaccc

SEQ ID NO: 141062 - DNA, 25 bp, Artificial
  Probe
accttcaaagagatcatctgtttct

SEQ ID NO: 141063 - DNA, 25 bp, Artificial
  Probe
tctactgtatagtgctttggttgga

SEQ ID NO: 141064 - DNA, 25 bp, Artificial
  Probe
gacagagtgcatactaggtagagac

SEQ ID NO: 141065 - DNA, 25 bp, Artificial
  Probe
aaccttcaaagagatcatctgtttc

SEQ ID NO: 141066 - DNA, 25 bp, Artificial
  Probe
tgttatttatcaagagtcaaccctt

SEQ ID NO: 141067 - DNA, 25 bp, Artificial
  Probe
cgtgttatgtttattgaccttactt

SEQ ID NO: 141068 - DNA, 25 bp, Artificial
  Probe
ttcaaagagatcatctgtttctacc

SEQ ID NO: 141069 - DNA, 25 bp, Artificial
  Probe
atgttatttatcaagagtcaaccct

SEQ ID NO: 141070 - DNA, 25 bp, Artificial
  Probe
ccttcaaagagatcatctgtttcta

SEQ ID NO: 141071 - DNA, 25 bp, Artificial
  Probe
tatttaaacactggatgctcgatca

SEQ ID NO: 141072 - DNA, 25 bp, Artificial
  Probe
ggacagagtgcatactaggtagaga

SEQ ID NO: 141073 - DNA, 25 bp, Artificial
  Probe
atatttaaacactggatgctcgatc

SEQ ID NO: 141074 - DNA, 25 bp, Artificial
  Probe
aatatttaaacactggatgctcgat

SEQ ID NO: 141075 - DNA, 25 bp, Artificial
  Probe
cttatttatgttctacagcgtgggc

SEQ ID NO: 141076 - DNA, 25 bp, Artificial
  Probe
gcctctactgtatagtgctttggtt

SEQ ID NO: 141077 - DNA, 25 bp, Artificial
  Probe
aacactggatgctcgatcatttaat

SEQ ID NO: 141078 - DNA, 25 bp, Artificial
  Probe
atttaaacactggatgctcgatcat

SEQ ID NO: 141079 - DNA, 25 bp, Artificial
  Probe
taaacactggatgctcgatcattta

SEQ ID NO: 141080 - DNA, 25 bp, Artificial
  Probe
cagaagcctgattccactgtttatg

SEQ ID NO: 141081 - DNA, 25 bp, Artificial
  Probe
aaacactggatgctcgatcatttaa

SEQ ID NO: 141082 - DNA, 25 bp, Artificial
  Probe
ttaaacactggatgctcgatcattt

SEQ ID NO: 141083 - DNA, 25 bp, Artificial
  Probe
tttaaacactggatgctcgatcatt

SEQ ID NO: 141084 - DNA, 25 bp, Artificial
  Probe
tgtgtgtaaactgcttatttatgtt

SEQ ID NO: 141085 - DNA, 25 bp, Artificial
  Probe
ttgtgtgtaaactgcttatttatgt

SEQ ID NO: 141086 - DNA, 25 bp, Artificial
  Probe
catgttatttatcaagagtcaaccc

SEQ ID NO: 141087 - DNA, 25 bp, Artificial
  Probe
ccatgttatttatcaagagtcaacc

SEQ ID NO: 141088 - DNA, 25 bp, Artificial
  Probe
acactggatgctcgatcatttaatg

SEQ ID NO: 141089 - DNA, 25 bp, Artificial
  Probe
agagtcaacccttgttctttctgtg

SEQ ID NO: 141090 - DNA, 25 bp, Artificial
  Probe
ctgcctctactgtatagtgctttgg

SEQ ID NO: 141091 - DNA, 25 bp, Artificial
  Probe
acgtgttatgtttattgaccttact

SEQ ID NO: 141092 - DNA, 25 bp, Artificial
  Probe
cttcaaagagatcatctgtttctac

SEQ ID NO: 141093 - DNA, 25 bp, Artificial
  Probe
aactgcttatttatgttctacagcg

SEQ ID NO: 141094 - DNA, 25 bp, Artificial
  Probe
gtgtgtaaactgcttatttatgttc

SEQ ID NO: 141095 - DNA, 25 bp, Artificial
  Probe
ctgcttatttatgttctacagcgtg

SEQ ID NO: 141096 - DNA, 25 bp, Artificial
  Probe
actgcttatttatgttctacagcgt

SEQ ID NO: 141097 - DNA, 25 bp, Artificial
  Probe
tgtgtaaactgcttatttatgttct

SEQ ID NO: 141098 - DNA, 25 bp, Artificial
  Probe
ctgtatagtgctttggttggaaaat

SEQ ID NO: 141099 - DNA, 25 bp, Artificial
  Probe
gctttggttggaaaatatctactgt

SEQ ID NO: 141100 - DNA, 25 bp, Artificial
  Probe
tgctttggttggaaaatatctactg

SEQ ID NO: 141101 - DNA, 25 bp, Artificial
  Probe
gtgctttggttggaaaatatctact

SEQ ID NO: 141102 - DNA, 25 bp, Artificial
  Probe
atatcaccttccattcctactctca

SEQ ID NO: 141103 - DNA, 25 bp, Artificial
  Probe
gcttatatcaccttccattcctact

SEQ ID NO: 141104 - DNA, 25 bp, Artificial
  Probe
ggcttatatcaccttccattcctac

SEQ ID NO: 141105 - DNA, 25 bp, Artificial
  Probe
gaactcaatcaaggcttatatcacc

SEQ ID NO: 141106 - DNA, 25 bp, Artificial
  Probe
tatcaccttccattcctactctcag

SEQ ID NO: 141107 - DNA, 25 bp, Artificial
  Probe
atgacctacaagaagagatagacaa

SEQ ID NO: 141108 - DNA, 25 bp, Artificial
  Probe
aatgacctacaagaagagatagaca

SEQ ID NO: 141109 - DNA, 25 bp, Artificial
  Probe
attgctgttaatatgactgtggatt

SEQ ID NO: 141110 - DNA, 25 bp, Artificial
  Probe
tatatcaccttccattcctactctc

SEQ ID NO: 141111 - DNA, 25 bp, Artificial
  Probe
tcatctgaactcaatcaaggcttat

SEQ ID NO: 141112 - DNA, 25 bp, Artificial
  Probe
ccactgatgttctctcaagtagata

SEQ ID NO: 141113 - DNA, 25 bp, Artificial
  Probe
gtcatctgaactcaatcaaggctta

SEQ ID NO: 141114 - DNA, 25 bp, Artificial
  Probe
ttatatcaccttccattcctactct

SEQ ID NO: 141115 - DNA, 25 bp, Artificial
  Probe
tgaactcaatcaaggcttatatcac

SEQ ID NO: 141116 - DNA, 25 bp, Artificial
  Probe
ctgaactcaatcaaggcttatatca

SEQ ID NO: 141117 - DNA, 25 bp, Artificial
  Probe
catctgaactcaatcaaggcttata

SEQ ID NO: 141118 - DNA, 25 bp, Artificial
  Probe
cttatatcaccttccattcctactc

SEQ ID NO: 141119 - DNA, 25 bp, Artificial
  Probe
cattcctactctcagatgctgttat

SEQ ID NO: 141120 - DNA, 25 bp, Artificial
  Probe
attcctactctcagatgctgttatt

SEQ ID NO: 141121 - DNA, 25 bp, Artificial
  Probe
tctgaactcaatcaaggcttatatc

SEQ ID NO: 141122 - DNA, 25 bp, Artificial
  Probe
tattgctgttaatatgactgtggat

SEQ ID NO: 141123 - DNA, 25 bp, Artificial
  Probe
tcaccttccattcctactctcagat

SEQ ID NO: 141124 - DNA, 25 bp, Artificial
  Probe
atcaccttccattcctactctcaga

SEQ ID NO: 141125 - DNA, 25 bp, Artificial
  Probe
aactcaatcaaggcttatatcacct

SEQ ID NO: 141126 - DNA, 25 bp, Artificial
  Probe
cgaagtcatctgaactcaatcaagg

SEQ ID NO: 141127 - DNA, 25 bp, Artificial
  Probe
atcctcaagcatacttcctaataag

SEQ ID NO: 141128 - DNA, 25 bp, Artificial
  Probe
aggcttatatcaccttccattccta

SEQ ID NO: 141129 - DNA, 25 bp, Artificial
  Probe
caccttccattcctactctcagatg

SEQ ID NO: 141130 - DNA, 25 bp, Artificial
  Probe
attgccactgatgttctctcaagta

SEQ ID NO: 141131 - DNA, 25 bp, Artificial
  Probe
gaagtcatctgaactcaatcaaggc

SEQ ID NO: 141132 - DNA, 25 bp, Artificial
  Probe
agatgctatccatgatattgctgtt

SEQ ID NO: 141133 - DNA, 25 bp, Artificial
  Probe
atccagatgctatccatgatattgc

SEQ ID NO: 141134 - DNA, 25 bp, Artificial
  Probe
gccactgatgttctctcaagtagat

SEQ ID NO: 141135 - DNA, 25 bp, Artificial
  Probe
ggtatccagatgctatccatgatat

SEQ ID NO: 141136 - DNA, 25 bp, Artificial
  Probe
ccattcctactctcagatgctgtta

SEQ ID NO: 141137 - DNA, 25 bp, Artificial
  Probe
atctgaactcaatcaaggcttatat

SEQ ID NO: 141138 - DNA, 25 bp, Artificial
  Probe
agtcatctgaactcaatcaaggctt

SEQ ID NO: 141139 - DNA, 25 bp, Artificial
  Probe
aagtcatctgaactcaatcaaggct

SEQ ID NO: 141140 - DNA, 25 bp, Artificial
  Probe
cagatgctatccatgatattgctgt

SEQ ID NO: 141141 - DNA, 25 bp, Artificial
  Probe
actgatgttctctcaagtagatatg

SEQ ID NO: 141142 - DNA, 25 bp, Artificial
  Probe
cactgatgttctctcaagtagatat

SEQ ID NO: 141143 - DNA, 25 bp, Artificial
  Probe
gatgctatccatgatattgctgtta

SEQ ID NO: 141144 - DNA, 25 bp, Artificial
  Probe
gatgctgttatttccttatggctac

SEQ ID NO: 141145 - DNA, 25 bp, Artificial
  Probe
agatgctgttatttccttatggcta

SEQ ID NO: 141146 - DNA, 25 bp, Artificial
  Probe
tttccttatggctacacaatcaaac

SEQ ID NO: 141147 - DNA, 25 bp, Artificial
  Probe
ttatggagtgtagacattggcatta

SEQ ID NO: 141148 - DNA, 25 bp, Artificial
  Probe
tatggagtgtagacattggcattat

SEQ ID NO: 141149 - DNA, 25 bp, Artificial
  Probe
atggagtgtagacattggcattatg

SEQ ID NO: 141150 - DNA, 25 bp, Artificial
  Probe
tttatggagtgtagacattggcatt

SEQ ID NO: 141151 - DNA, 25 bp, Artificial
  Probe
tgtgtcagagaagaggcaagaagta

SEQ ID NO: 141152 - DNA, 25 bp, Artificial
  Probe
tttacttaaacactatcagagccag

SEQ ID NO: 141153 - DNA, 25 bp, Artificial
  Probe
gtgtcagagaagaggcaagaagtac

SEQ ID NO: 141154 - DNA, 25 bp, Artificial
  Probe
ttacttaaacactatcagagccagt

SEQ ID NO: 141155 - DNA, 25 bp, Artificial
  Probe
gaagtcttggaactgaaccttgaaa

SEQ ID NO: 141156 - DNA, 25 bp, Artificial
  Probe
cgaagtcttggaactgaaccttgaa

SEQ ID NO: 141157 - DNA, 25 bp, Artificial
  Probe
atttacttaaacactatcagagcca

SEQ ID NO: 141158 - DNA, 25 bp, Artificial
  Probe
gagtgtagacattggcattatgtac

SEQ ID NO: 141159 - DNA, 25 bp, Artificial
  Probe
ggagtgtagacattggcattatgta

SEQ ID NO: 141160 - DNA, 25 bp, Artificial
  Probe
tcagagaagaggcaagaagtacgac

SEQ ID NO: 141161 - DNA, 25 bp, Artificial
  Probe
gtcagagaagaggcaagaagtacga

SEQ ID NO: 141162 - DNA, 25 bp, Artificial
  Probe
ttgtgtcagagaagaggcaagaagt

SEQ ID NO: 141163 - DNA, 25 bp, Artificial
  Probe
atgaaggacctaaatgccatcacaa

SEQ ID NO: 141164 - DNA, 25 bp, Artificial
  Probe
tggagtgtagacattggcattatgt

SEQ ID NO: 141165 - DNA, 25 bp, Artificial
  Probe
aagtctgagtctcgaagtcttggaa

SEQ ID NO: 141166 - DNA, 25 bp, Artificial
  Probe
gagtctcgaagtcttggaactgaac

SEQ ID NO: 141167 - DNA, 25 bp, Artificial
  Probe
cgagagtagctatgaaccagatgag

SEQ ID NO: 141168 - DNA, 25 bp, Artificial
  Probe
tttgtgtcagagaagaggcaagaag

SEQ ID NO: 141169 - DNA, 25 bp, Artificial
  Probe
agagaagaggcaagaagtacgactg

SEQ ID NO: 141170 - DNA, 25 bp, Artificial
  Probe
cagagaagaggcaagaagtacgact

SEQ ID NO: 141171 - DNA, 25 bp, Artificial
  Probe
gttcccagttccttacgaagtcatc

SEQ ID NO: 141172 - DNA, 25 bp, Artificial
  Probe
tgtcagagaagaggcaagaagtacg

SEQ ID NO: 141173 - DNA, 25 bp, Artificial
  Probe
tgagtctcgaagtcttggaactgaa

SEQ ID NO: 141174 - DNA, 25 bp, Artificial
  Probe
agtctgagtctcgaagtcttggaac

SEQ ID NO: 141175 - DNA, 25 bp, Artificial
  Probe
ctcgaagtcttggaactgaaccttg

SEQ ID NO: 141176 - DNA, 25 bp, Artificial
  Probe
ttttatggagtgtagacattggcat

SEQ ID NO: 141177 - DNA, 25 bp, Artificial
  Probe
ctccaagtctgagtctcgaagtctt

SEQ ID NO: 141178 - DNA, 25 bp, Artificial
  Probe
tgaaggacctaaatgccatcacaac

SEQ ID NO: 141179 - DNA, 25 bp, Artificial
  Probe
tctcgaagtcttggaactgaacctt

SEQ ID NO: 141180 - DNA, 25 bp, Artificial
  Probe
tatttacttaaacactatcagagcc

SEQ ID NO: 141181 - DNA, 25 bp, Artificial
  Probe
cttttatggagtgtagacattggca

SEQ ID NO: 141182 - DNA, 25 bp, Artificial
  Probe
tgttcccagttccttacgaagtcat

SEQ ID NO: 141183 - DNA, 25 bp, Artificial
  Probe
ctgagtctcgaagtcttggaactga

SEQ ID NO: 141184 - DNA, 25 bp, Artificial
  Probe
tctgagtctcgaagtcttggaactg

SEQ ID NO: 141185 - DNA, 25 bp, Artificial
  Probe
gtctgagtctcgaagtcttggaact

SEQ ID NO: 141186 - DNA, 25 bp, Artificial
  Probe
aagtcttggaactgaaccttgaaaa

SEQ ID NO: 141187 - DNA, 25 bp, Artificial
  Probe
tcttggaactgaaccttgaaaacaa

SEQ ID NO: 141188 - DNA, 25 bp, Artificial
  Probe
gtcttggaactgaaccttgaaaaca

SEQ ID NO: 141189 - DNA, 25 bp, Artificial
  Probe
catgaaggacctaaatgccatcaca

SEQ ID NO: 141190 - DNA, 25 bp, Artificial
  Probe
acttttatggagtgtagacattggc

SEQ ID NO: 141191 - DNA, 25 bp, Artificial
  Probe
tcgaagtcttggaactgaaccttga

SEQ ID NO: 141192 - DNA, 25 bp, Artificial
  Probe
ctgtatcaatgactacctggatgtt

SEQ ID NO: 141193 - DNA, 25 bp, Artificial
  Probe
tctgtatcaatgactacctggatgt

SEQ ID NO: 141194 - DNA, 25 bp, Artificial
  Probe
gtctgtatcaatgactacctggatg

SEQ ID NO: 141195 - DNA, 25 bp, Artificial
  Probe
gatgtctgtatcaatgactacctgg

SEQ ID NO: 141196 - DNA, 25 bp, Artificial
  Probe
tgtctgtatcaatgactacctggat

SEQ ID NO: 141197 - DNA, 25 bp, Artificial
  Probe
atgtctgtatcaatgactacctgga

SEQ ID NO: 141198 - DNA, 25 bp, Artificial
  Probe
cgatgtctgtatcaatgactacctg

SEQ ID NO: 141199 - DNA, 25 bp, Artificial
  Probe
ttgacattatagcacagtctcctcc

SEQ ID NO: 141200 - DNA, 25 bp, Artificial
  Probe
tgtatcaatgactacctggatgttt

SEQ ID NO: 141201 - DNA, 25 bp, Artificial
  Probe
tcgatgtctgtatcaatgactacct

SEQ ID NO: 141202 - DNA, 25 bp, Artificial
  Probe
aagggttcaagagatgggaatgtaa

SEQ ID NO: 141203 - DNA, 25 bp, Artificial
  Probe
aaagggttcaagagatgggaatgta

SEQ ID NO: 141204 - DNA, 25 bp, Artificial
  Probe
aattcattagaaccagcagatgaca

SEQ ID NO: 141205 - DNA, 25 bp, Artificial
  Probe
aactataggtgttcgtgatcgtgtt

SEQ ID NO: 141206 - DNA, 25 bp, Artificial
  Probe
tttgacattatagcacagtctcctc

SEQ ID NO: 141207 - DNA, 25 bp, Artificial
  Probe
attagaaccagcagatgacaccgta

SEQ ID NO: 141208 - DNA, 25 bp, Artificial
  Probe
attcattagaaccagcagatgacac

SEQ ID NO: 141209 - DNA, 25 bp, Artificial
  Probe
gacaatggaagaagatcctgcctaa

SEQ ID NO: 141210 - DNA, 25 bp, Artificial
  Probe
agggttcaagagatgggaatgtaac

SEQ ID NO: 141211 - DNA, 25 bp, Artificial
  Probe
tatttctacatctcctctgcaatcc

SEQ ID NO: 141212 - DNA, 25 bp, Artificial
  Probe
agacaatggaagaagatcctgccta

SEQ ID NO: 141213 - DNA, 25 bp, Artificial
  Probe
agtatttctacatctcctctgcaat

SEQ ID NO: 141214 - DNA, 25 bp, Artificial
  Probe
gtatttctacatctcctctgcaatc

SEQ ID NO: 141215 - DNA, 25 bp, Artificial
  Probe
cacacatccaaagggttcaagagat

SEQ ID NO: 141216 - DNA, 25 bp, Artificial
  Probe
caatggaagaagatcctgcctaaag

SEQ ID NO: 141217 - DNA, 25 bp, Artificial
  Probe
caaagggttcaagagatgggaatgt

SEQ ID NO: 141218 - DNA, 25 bp, Artificial
  Probe
gagtatttctacatctcctctgcaa

SEQ ID NO: 141219 - DNA, 25 bp, Artificial
  Probe
caatcccagacaatggaagaagatc

SEQ ID NO: 141220 - DNA, 25 bp, Artificial
  Probe
aagaagatcctgcctaaagctcaaa

SEQ ID NO: 141221 - DNA, 25 bp, Artificial
  Probe
acaatggaagaagatcctgcctaaa

SEQ ID NO: 141222 - DNA, 25 bp, Artificial
  Probe
actataggtgttcgtgatcgtgttt

SEQ ID NO: 141223 - DNA, 25 bp, Artificial
  Probe
ttcattagaaccagcagatgacacc

SEQ ID NO: 141224 - DNA, 25 bp, Artificial
  Probe
aaattcattagaaccagcagatgac

SEQ ID NO: 141225 - DNA, 25 bp, Artificial
  Probe
atcaatgactacctggatgttttct

SEQ ID NO: 141226 - DNA, 25 bp, Artificial
  Probe
tcaatgactacctggatgttttctg

SEQ ID NO: 141227 - DNA, 25 bp, Artificial
  Probe
atttctacatctcctctgcaatccc

SEQ ID NO: 141228 - DNA, 25 bp, Artificial
  Probe
aaactataggtgttcgtgatcgtgt

SEQ ID NO: 141229 - DNA, 25 bp, Artificial
  Probe
agaagatcctgcctaaagctcaaag

SEQ ID NO: 141230 - DNA, 25 bp, Artificial
  Probe
gaagaagatcctgcctaaagctcaa

SEQ ID NO: 141231 - DNA, 25 bp, Artificial
  Probe
atcgatgtctgtatcaatgactacc

SEQ ID NO: 141232 - DNA, 25 bp, Artificial
  Probe
gtatcaatgactacctggatgtttt

SEQ ID NO: 141233 - DNA, 25 bp, Artificial
  Probe
ttagaaccagcagatgacaccgtac

SEQ ID NO: 141234 - DNA, 25 bp, Artificial
  Probe
aatcccagacaatggaagaagatcc

SEQ ID NO: 141235 - DNA, 25 bp, Artificial
  Probe
ctgtaccagaggataagactgagcg

SEQ ID NO: 141236 - DNA, 25 bp, Artificial
  Probe
tatcaatgactacctggatgttttc

SEQ ID NO: 141237 - DNA, 25 bp, Artificial
  Probe
ctgtgtgctgtcttatgtatgagtg

SEQ ID NO: 141238 - DNA, 25 bp, Artificial
  Probe
gatgcctatgaggaagtaacagatg

SEQ ID NO: 141239 - DNA, 25 bp, Artificial
  Probe
tgatgcctatgaggaagtaacagat

SEQ ID NO: 141240 - DNA, 25 bp, Artificial
  Probe
tgtgtgctgtcttatgtatgagtgg

SEQ ID NO: 141241 - DNA, 25 bp, Artificial
  Probe
ctatgaggaagtaacagatggagcg

SEQ ID NO: 141242 - DNA, 25 bp, Artificial
  Probe
ctgatgcctatgaggaagtaacaga

SEQ ID NO: 141243 - DNA, 25 bp, Artificial
  Probe
gctgtgtgctgtcttatgtatgagt

SEQ ID NO: 141244 - DNA, 25 bp, Artificial
  Probe
tgctgtgtgctgtcttatgtatgag

SEQ ID NO: 141245 - DNA, 25 bp, Artificial
  Probe
ctgctgtgtgctgtcttatgtatga

SEQ ID NO: 141246 - DNA, 25 bp, Artificial
  Probe
tcacaaacaagtcagggtctatatg

SEQ ID NO: 141247 - DNA, 25 bp, Artificial
  Probe
gtcacaaacaagtcagggtctatat

SEQ ID NO: 141248 - DNA, 25 bp, Artificial
  Probe
atgcctatgaggaagtaacagatgg

SEQ ID NO: 141249 - DNA, 25 bp, Artificial
  Probe
gtaaatagtgtgccatccagaagac

SEQ ID NO: 141250 - DNA, 25 bp, Artificial
  Probe
ctagtcaggtaaatagtgtgccatc

SEQ ID NO: 141251 - DNA, 25 bp, Artificial
  Probe
cctatgaggaagtaacagatggagc

SEQ ID NO: 141252 - DNA, 25 bp, Artificial
  Probe
gcctatgaggaagtaacagatggag

SEQ ID NO: 141253 - DNA, 25 bp, Artificial
  Probe
cacaaacaagtcagggtctatatga

SEQ ID NO: 141254 - DNA, 25 bp, Artificial
  Probe
cagacagagtcctaacttgacagtg

SEQ ID NO: 141255 - DNA, 25 bp, Artificial
  Probe
cctgatgcctatgaggaagtaacag

SEQ ID NO: 141256 - DNA, 25 bp, Artificial
  Probe
tagtcaggtaaatagtgtgccatcc

SEQ ID NO: 141257 - DNA, 25 bp, Artificial
  Probe
tgcctatgaggaagtaacagatgga

SEQ ID NO: 141258 - DNA, 25 bp, Artificial
  Probe
ataatgtcacaaacaagtcagggtc

SEQ ID NO: 141259 - DNA, 25 bp, Artificial
  Probe
tgtcacaaacaagtcagggtctata

SEQ ID NO: 141260 - DNA, 25 bp, Artificial
  Probe
ggtaaatagtgtgccatccagaaga

SEQ ID NO: 141261 - DNA, 25 bp, Artificial
  Probe
aggtaaatagtgtgccatccagaag

SEQ ID NO: 141262 - DNA, 25 bp, Artificial
  Probe
atccagaagacagaactgcaagata

SEQ ID NO: 141263 - DNA, 25 bp, Artificial
  Probe
cataatgtcacaaacaagtcagggt

SEQ ID NO: 141264 - DNA, 25 bp, Artificial
  Probe
caggtaaatagtgtgccatccagaa

SEQ ID NO: 141265 - DNA, 25 bp, Artificial
  Probe
taaatagtgtgccatccagaagaca

SEQ ID NO: 141266 - DNA, 25 bp, Artificial
  Probe
atgtcacaaacaagtcagggtctat

SEQ ID NO: 141267 - DNA, 25 bp, Artificial
  Probe
atagtgtgccatccagaagacagaa

SEQ ID NO: 141268 - DNA, 25 bp, Artificial
  Probe
aatagtgtgccatccagaagacaga

SEQ ID NO: 141269 - DNA, 25 bp, Artificial
  Probe
aatgtcacaaacaagtcagggtcta

SEQ ID NO: 141270 - DNA, 25 bp, Artificial
  Probe
taatgtcacaaacaagtcagggtct

SEQ ID NO: 141271 - DNA, 25 bp, Artificial
  Probe
ccataatgtcacaaacaagtcaggg

SEQ ID NO: 141272 - DNA, 25 bp, Artificial
  Probe
tgccataatgtcacaaacaagtcag

SEQ ID NO: 141273 - DNA, 25 bp, Artificial
  Probe
ctgccataatgtcacaaacaagtca

SEQ ID NO: 141274 - DNA, 25 bp, Artificial
  Probe
actgccataatgtcacaaacaagtc

SEQ ID NO: 141275 - DNA, 25 bp, Artificial
  Probe
tcactgccataatgtcacaaacaag

SEQ ID NO: 141276 - DNA, 25 bp, Artificial
  Probe
ctcactgccataatgtcacaaacaa

SEQ ID NO: 141277 - DNA, 25 bp, Artificial
  Probe
gtaatgagtgctgtaccagttccag

SEQ ID NO: 141278 - DNA, 25 bp, Artificial
  Probe
ccagacagagtcctaacttgacagt

SEQ ID NO: 141279 - DNA, 25 bp, Artificial
  Probe
cactgccataatgtcacaaacaagt

SEQ ID NO: 141280 - DNA, 25 bp, Artificial
  Probe
tccagaagacagaactgcaagatac

SEQ ID NO: 141281 - DNA, 25 bp, Artificial
  Probe
cctagtcaggtaaatagtgtgccat

SEQ ID NO: 141282 - DNA, 25 bp, Artificial
  Probe
agagtaccagttgccttattatgac

SEQ ID NO: 141283 - DNA, 25 bp, Artificial
  Probe
agtaccagttgccttattatgacat

SEQ ID NO: 141284 - DNA, 25 bp, Artificial
  Probe
gagtaccagttgccttattatgaca

SEQ ID NO: 141285 - DNA, 25 bp, Artificial
  Probe
gtaccagttgccttattatgacatg

SEQ ID NO: 141286 - DNA, 25 bp, Artificial
  Probe
ttgaagagtaccagttgccttatta

SEQ ID NO: 141287 - DNA, 25 bp, Artificial
  Probe
aagagtaccagttgccttattatga

SEQ ID NO: 141288 - DNA, 25 bp, Artificial
  Probe
tgaagagtaccagttgccttattat

SEQ ID NO: 141289 - DNA, 25 bp, Artificial
  Probe
gaagagtaccagttgccttattatg

SEQ ID NO: 141290 - DNA, 25 bp, Artificial
  Probe
gttgaagagtaccagttgccttatt

SEQ ID NO: 141291 - DNA, 25 bp, Artificial
  Probe
ttattatgacatggtgccttcagat

SEQ ID NO: 141292 - DNA, 25 bp, Artificial
  Probe
tattatgacatggtgccttcagatc

SEQ ID NO: 141293 - DNA, 25 bp, Artificial
  Probe
cttattatgacatggtgccttcaga

SEQ ID NO: 141294 - DNA, 25 bp, Artificial
  Probe
cagttggaggacttgttgaagagta

SEQ ID NO: 141295 - DNA, 25 bp, Artificial
  Probe
tgttgaagagtaccagttgccttat

SEQ ID NO: 141296 - DNA, 25 bp, Artificial
  Probe
ttgttgaagagtaccagttgcctta

SEQ ID NO: 141297 - DNA, 25 bp, Artificial
  Probe
ccttattatgacatggtgccttcag

SEQ ID NO: 141298 - DNA, 25 bp, Artificial
  Probe
gaggacttgttgaagagtaccagtt

SEQ ID NO: 141299 - DNA, 25 bp, Artificial
  Probe
agttggaggacttgttgaagagtac

SEQ ID NO: 141300 - DNA, 25 bp, Artificial
  Probe
atgtctcctgctttgtgtaaatgtt

SEQ ID NO: 141301 - DNA, 25 bp, Artificial
  Probe
taccagttgccttattatgacatgg

SEQ ID NO: 141302 - DNA, 25 bp, Artificial
  Probe
tgtctcctgctttgtgtaaatgttt

SEQ ID NO: 141303 - DNA, 25 bp, Artificial
  Probe
cagttgccttattatgacatggtgc

SEQ ID NO: 141304 - DNA, 25 bp, Artificial
  Probe
atagaggaaatgaggaaggtcgttt

SEQ ID NO: 141305 - DNA, 25 bp, Artificial
  Probe
aggacttgttgaagagtaccagttg

SEQ ID NO: 141306 - DNA, 25 bp, Artificial
  Probe
agttctacctcaaagatgattcact

SEQ ID NO: 141307 - DNA, 25 bp, Artificial
  Probe
tacctcaaagatgattcactacagt

SEQ ID NO: 141308 - DNA, 25 bp, Artificial
  Probe
ttgccttattatgacatggtgcctt

SEQ ID NO: 141309 - DNA, 25 bp, Artificial
  Probe
tctacctcaaagatgattcactaca

SEQ ID NO: 141310 - DNA, 25 bp, Artificial
  Probe
ctacctcaaagatgattcactacag

SEQ ID NO: 141311 - DNA, 25 bp, Artificial
  Probe
attatgacatggtgccttcagatcc

SEQ ID NO: 141312 - DNA, 25 bp, Artificial
  Probe
ttcatgtctcctgctttgtgtaaat

SEQ ID NO: 141313 - DNA, 25 bp, Artificial
  Probe
tttcatgtctcctgctttgtgtaaa

SEQ ID NO: 141314 - DNA, 25 bp, Artificial
  Probe
ccagttgccttattatgacatggtg

SEQ ID NO: 141315 - DNA, 25 bp, Artificial
  Probe
tagaggaaatgaggaaggtcgtttg

SEQ ID NO: 141316 - DNA, 25 bp, Artificial
  Probe
gttggaggacttgttgaagagtacc

SEQ ID NO: 141317 - DNA, 25 bp, Artificial
  Probe
cttgttgaagagtaccagttgcctt

SEQ ID NO: 141318 - DNA, 25 bp, Artificial
  Probe
tgccttattatgacatggtgccttc

SEQ ID NO: 141319 - DNA, 25 bp, Artificial
  Probe
catagaggaaatgaggaaggtcgtt

SEQ ID NO: 141320 - DNA, 25 bp, Artificial
  Probe
ctgtgtgtcaaggaagactgtaagg

SEQ ID NO: 141321 - DNA, 25 bp, Artificial
  Probe
ctttcatgtctcctgctttgtgtaa

SEQ ID NO: 141322 - DNA, 25 bp, Artificial
  Probe
ttctacctcaaagatgattcactac

SEQ ID NO: 141323 - DNA, 25 bp, Artificial
  Probe
gttctacctcaaagatgattcacta

SEQ ID NO: 141324 - DNA, 25 bp, Artificial
  Probe
tagttctacctcaaagatgattcac

SEQ ID NO: 141325 - DNA, 25 bp, Artificial
  Probe
tcatgtctcctgctttgtgtaaatg

SEQ ID NO: 141326 - DNA, 25 bp, Artificial
  Probe
gttgccttattatgacatggtgcct

SEQ ID NO: 141327 - DNA, 25 bp, Artificial
  Probe
agaagttcctctcacacaaattcac

SEQ ID NO: 141328 - DNA, 25 bp, Artificial
  Probe
ttcctctcacacaaattcaccaaag

SEQ ID NO: 141329 - DNA, 25 bp, Artificial
  Probe
accttgtataaattattcagtggct

SEQ ID NO: 141330 - DNA, 25 bp, Artificial
  Probe
gttcctctcacacaaattcaccaaa

SEQ ID NO: 141331 - DNA, 25 bp, Artificial
  Probe
gaagttcctctcacacaaattcacc

SEQ ID NO: 141332 - DNA, 25 bp, Artificial
  Probe
gtactctaccagtgcaagaacttca

SEQ ID NO: 141333 - DNA, 25 bp, Artificial
  Probe
aaccttgtataaattattcagtggc

SEQ ID NO: 141334 - DNA, 25 bp, Artificial
  Probe
ctctcacacaaattcaccaaagacc

SEQ ID NO: 141335 - DNA, 25 bp, Artificial
  Probe
cctctcacacaaattcaccaaagac

SEQ ID NO: 141336 - DNA, 25 bp, Artificial
  Probe
tcctctcacacaaattcaccaaaga

SEQ ID NO: 141337 - DNA, 25 bp, Artificial
  Probe
agttcctctcacacaaattcaccaa

SEQ ID NO: 141338 - DNA, 25 bp, Artificial
  Probe
aagttcctctcacacaaattcacca

SEQ ID NO: 141339 - DNA, 25 bp, Artificial
  Probe
tgtataaattattcagtggctgtca

SEQ ID NO: 141340 - DNA, 25 bp, Artificial
  Probe
ccttgtataaattattcagtggctg

SEQ ID NO: 141341 - DNA, 25 bp, Artificial
  Probe
tactctaccagtgcaagaacttcac

SEQ ID NO: 141342 - DNA, 25 bp, Artificial
  Probe
tataaattattcagtggctgtcaac

SEQ ID NO: 141343 - DNA, 25 bp, Artificial
  Probe
gtataaattattcagtggctgtcaa

SEQ ID NO: 141344 - DNA, 25 bp, Artificial
  Probe
ttgtataaattattcagtggctgtc

SEQ ID NO: 141345 - DNA, 25 bp, Artificial
  Probe
cttgtataaattattcagtggctgt

SEQ ID NO: 141346 - DNA, 25 bp, Artificial
  Probe
cgtactctaccagtgcaagaacttc

SEQ ID NO: 141347 - DNA, 25 bp, Artificial
  Probe
tctcacacaaattcaccaaagaccc

SEQ ID NO: 141348 - DNA, 25 bp, Artificial
  Probe
acgtactctaccagtgcaagaactt

SEQ ID NO: 141349 - DNA, 25 bp, Artificial
  Probe
ctctaccagtgcaagaacttcacac

SEQ ID NO: 141350 - DNA, 25 bp, Artificial
  Probe
agagaagttcctctcacacaaattc

SEQ ID NO: 141351 - DNA, 25 bp, Artificial
  Probe
gacgtactctaccagtgcaagaact

SEQ ID NO: 141352 - DNA, 25 bp, Artificial
  Probe
gagaagttcctctcacacaaattca

SEQ ID NO: 141353 - DNA, 25 bp, Artificial
  Probe
cagagaagttcctctcacacaaatt

SEQ ID NO: 141354 - DNA, 25 bp, Artificial
  Probe
ggccgtgtgcatagtttctttattt

SEQ ID NO: 141355 - DNA, 25 bp, Artificial
  Probe
actctaccagtgcaagaacttcaca

SEQ ID NO: 141356 - DNA, 25 bp, Artificial
  Probe
ccgtgtgcatagtttctttattttg

SEQ ID NO: 141357 - DNA, 25 bp, Artificial
  Probe
gccgtgtgcatagtttctttatttt

SEQ ID NO: 141358 - DNA, 25 bp, Artificial
  Probe
cgtgtgcatagtttctttattttgt

SEQ ID NO: 141359 - DNA, 25 bp, Artificial
  Probe
agactctccagaagcagagaagttc

SEQ ID NO: 141360 - DNA, 25 bp, Artificial
  Probe
gagactctccagaagcagagaagtt

SEQ ID NO: 141361 - DNA, 25 bp, Artificial
  Probe
aggccgtgtgcatagtttctttatt

SEQ ID NO: 141362 - DNA, 25 bp, Artificial
  Probe
aaggccgtgtgcatagtttctttat

SEQ ID NO: 141363 - DNA, 25 bp, Artificial
  Probe
tgtgcatagtttctttattttgtgt

SEQ ID NO: 141364 - DNA, 25 bp, Artificial
  Probe
gtgtgcatagtttctttattttgtg

SEQ ID NO: 141365 - DNA, 25 bp, Artificial
  Probe
aagcagagaagttcctctcacacaa

SEQ ID NO: 141366 - DNA, 25 bp, Artificial
  Probe
agaagcagagaagttcctctcacac

SEQ ID NO: 141367 - DNA, 25 bp, Artificial
  Probe
cagaagcagagaagttcctctcaca

SEQ ID NO: 141368 - DNA, 25 bp, Artificial
  Probe
ggacgtactctaccagtgcaagaac

SEQ ID NO: 141369 - DNA, 25 bp, Artificial
  Probe
caaggacgtactctaccagtgcaag

SEQ ID NO: 141370 - DNA, 25 bp, Artificial
  Probe
ctccagaagcagagaagttcctctc

SEQ ID NO: 141371 - DNA, 25 bp, Artificial
  Probe
ctctccagaagcagagaagttcctc

SEQ ID NO: 141372 - DNA, 25 bp, Artificial
  Probe
tatgtgtgctgtgtgtatgtatgat

SEQ ID NO: 141373 - DNA, 25 bp, Artificial
  Probe
atgtatgtgtgctgtgtgtatgtat

SEQ ID NO: 141374 - DNA, 25 bp, Artificial
  Probe
gtatgtgtgctgtgtgtatgtatga

SEQ ID NO: 141375 - DNA, 25 bp, Artificial
  Probe
tgtatgtgtgctgtgtgtatgtatg

SEQ ID NO: 141376 - DNA, 25 bp, Artificial
  Probe
atgtgtgctgtgtgtatgtatgatg

SEQ ID NO: 141377 - DNA, 25 bp, Artificial
  Probe
catgtatgtgtgctgtgtgtatgta

SEQ ID NO: 141378 - DNA, 25 bp, Artificial
  Probe
gtgctgtgtgtatgtatgatggatg

SEQ ID NO: 141379 - DNA, 25 bp, Artificial
  Probe
tgtgctgtgtgtatgtatgatggat

SEQ ID NO: 141380 - DNA, 25 bp, Artificial
  Probe
gtgtgctgtgtgtatgtatgatgga

SEQ ID NO: 141381 - DNA, 25 bp, Artificial
  Probe
cacgtctctcaccactatctattaa

SEQ ID NO: 141382 - DNA, 25 bp, Artificial
  Probe
gccttgtatattaccgagatcctgg

SEQ ID NO: 141383 - DNA, 25 bp, Artificial
  Probe
gataactattgtgccaatgtgttgt

SEQ ID NO: 141384 - DNA, 25 bp, Artificial
  Probe
gaaggataactattgtgccaatgtg

SEQ ID NO: 141385 - DNA, 25 bp, Artificial
  Probe
ataactattgtgccaatgtgttgtg

SEQ ID NO: 141386 - DNA, 25 bp, Artificial
  Probe
ggataactattgtgccaatgtgttg

SEQ ID NO: 141387 - DNA, 25 bp, Artificial
  Probe
aggataactattgtgccaatgtgtt

SEQ ID NO: 141388 - DNA, 25 bp, Artificial
  Probe
aaggataactattgtgccaatgtgt

SEQ ID NO: 141389 - DNA, 25 bp, Artificial
  Probe
tgtgtgctgtgtgtatgtatgatgg

SEQ ID NO: 141390 - DNA, 25 bp, Artificial
  Probe
gcacgtctctcaccactatctatta

SEQ ID NO: 141391 - DNA, 25 bp, Artificial
  Probe
ggaaggataactattgtgccaatgt

SEQ ID NO: 141392 - DNA, 25 bp, Artificial
  Probe
cgtctctcaccactatctattaaac

SEQ ID NO: 141393 - DNA, 25 bp, Artificial
  Probe
tcaaagggaaggataactattgtgc

SEQ ID NO: 141394 - DNA, 25 bp, Artificial
  Probe
tgctgtgtgtatgtatgatggatgc

SEQ ID NO: 141395 - DNA, 25 bp, Artificial
  Probe
ctcaaagggaaggataactattgtg

SEQ ID NO: 141396 - DNA, 25 bp, Artificial
  Probe
taactattgtgccaatgtgttgtgt

SEQ ID NO: 141397 - DNA, 25 bp, Artificial
  Probe
gagaattaccagagagtgatcgctc

SEQ ID NO: 141398 - DNA, 25 bp, Artificial
  Probe
aaagggaaggataactattgtgcca

SEQ ID NO: 141399 - DNA, 25 bp, Artificial
  Probe
tgagaattaccagagagtgatcgct

SEQ ID NO: 141400 - DNA, 25 bp, Artificial
  Probe
caaagggaaggataactattgtgcc

SEQ ID NO: 141401 - DNA, 25 bp, Artificial
  Probe
cctcaaagggaaggataactattgt

SEQ ID NO: 141402 - DNA, 25 bp, Artificial
  Probe
aagggaaggataactattgtgccaa

SEQ ID NO: 141403 - DNA, 25 bp, Artificial
  Probe
ctgagaattaccagagagtgatcgc

SEQ ID NO: 141404 - DNA, 25 bp, Artificial
  Probe
gtatattaccgagatcctgggcttt

SEQ ID NO: 141405 - DNA, 25 bp, Artificial
  Probe
ccttgtatattaccgagatcctggg

SEQ ID NO: 141406 - DNA, 25 bp, Artificial
  Probe
gtctctcaccactatctattaaact

SEQ ID NO: 141407 - DNA, 25 bp, Artificial
  Probe
cttgtatattaccgagatcctgggc

SEQ ID NO: 141408 - DNA, 25 bp, Artificial
  Probe
aactattgtgccaatgtgttgtgtg

SEQ ID NO: 141409 - DNA, 25 bp, Artificial
  Probe
ctattgtgccaatgtgttgtgtgag

SEQ ID NO: 141410 - DNA, 25 bp, Artificial
  Probe
acgtctctcaccactatctattaaa

SEQ ID NO: 141411 - DNA, 25 bp, Artificial
  Probe
gttctgctctcggacactctcttag

SEQ ID NO: 141412 - DNA, 25 bp, Artificial
  Probe
tgtatattaccgagatcctgggctt

SEQ ID NO: 141413 - DNA, 25 bp, Artificial
  Probe
ttgtatattaccgagatcctgggct

SEQ ID NO: 141414 - DNA, 25 bp, Artificial
  Probe
gctgtgtgtatgtatgatggatgca

SEQ ID NO: 141415 - DNA, 25 bp, Artificial
  Probe
ggccttgtatattaccgagatcctg

SEQ ID NO: 141416 - DNA, 25 bp, Artificial
  Probe
gatctttgctgttgtgttggtcttc

SEQ ID NO: 141417 - DNA, 25 bp, Artificial
  Probe
ccagagagtatcaggatattcagga

SEQ ID NO: 141418 - DNA, 25 bp, Artificial
  Probe
gaccagagagtatcaggatattcag

SEQ ID NO: 141419 - DNA, 25 bp, Artificial
  Probe
accagagagtatcaggatattcagg

SEQ ID NO: 141420 - DNA, 25 bp, Artificial
  Probe
agagagtatcaggatattcaggaga

SEQ ID NO: 141421 - DNA, 25 bp, Artificial
  Probe
cagagagtatcaggatattcaggag

SEQ ID NO: 141422 - DNA, 25 bp, Artificial
  Probe
tgaccagagagtatcaggatattca

SEQ ID NO: 141423 - DNA, 25 bp, Artificial
  Probe
agagtatcaggatattcaggagatg

SEQ ID NO: 141424 - DNA, 25 bp, Artificial
  Probe
gagagtatcaggatattcaggagat

SEQ ID NO: 141425 - DNA, 25 bp, Artificial
  Probe
gagtatcaggatattcaggagatga

SEQ ID NO: 141426 - DNA, 25 bp, Artificial
  Probe
cttagagcttctggtagatcacaag

SEQ ID NO: 141427 - DNA, 25 bp, Artificial
  Probe
ttggcatatattacaatctctcagg

SEQ ID NO: 141428 - DNA, 25 bp, Artificial
  Probe
ttagagcttctggtagatcacaagg

SEQ ID NO: 141429 - DNA, 25 bp, Artificial
  Probe
tggcatatattacaatctctcaggg

SEQ ID NO: 141430 - DNA, 25 bp, Artificial
  Probe
attcaggagatgatctttcacagag

SEQ ID NO: 141431 - DNA, 25 bp, Artificial
  Probe
cacctggtttggcatatattacaat

SEQ ID NO: 141432 - DNA, 25 bp, Artificial
  Probe
acctggtttggcatatattacaatc

SEQ ID NO: 141433 - DNA, 25 bp, Artificial
  Probe
ttcaggagatgatctttcacagaga

SEQ ID NO: 141434 - DNA, 25 bp, Artificial
  Probe
tattcaggagatgatctttcacaga

SEQ ID NO: 141435 - DNA, 25 bp, Artificial
  Probe
cctggtttggcatatattacaatct

SEQ ID NO: 141436 - DNA, 25 bp, Artificial
  Probe
tattctaccaaggccgttactatga

SEQ ID NO: 141437 - DNA, 25 bp, Artificial
  Probe
ggatattcaggagatgatctttcac

SEQ ID NO: 141438 - DNA, 25 bp, Artificial
  Probe
aggatattcaggagatgatctttca

SEQ ID NO: 141439 - DNA, 25 bp, Artificial
  Probe
tcaggatattcaggagatgatcttt

SEQ ID NO: 141440 - DNA, 25 bp, Artificial
  Probe
atcaggatattcaggagatgatctt

SEQ ID NO: 141441 - DNA, 25 bp, Artificial
  Probe
gtattctaccaaggccgttactatg

SEQ ID NO: 141442 - DNA, 25 bp, Artificial
  Probe
tctcctccatcactgttgcttctac

SEQ ID NO: 141443 - DNA, 25 bp, Artificial
  Probe
gtctcctccatcactgttgcttcta

SEQ ID NO: 141444 - DNA, 25 bp, Artificial
  Probe
tcaggagatgatctttcacagagag

SEQ ID NO: 141445 - DNA, 25 bp, Artificial
  Probe
caggatattcaggagatgatctttc

SEQ ID NO: 141446 - DNA, 25 bp, Artificial
  Probe
agtatcaggatattcaggagatgat

SEQ ID NO: 141447 - DNA, 25 bp, Artificial
  Probe
atattcaggagatgatctttcacag

SEQ ID NO: 141448 - DNA, 25 bp, Artificial
  Probe
gatattcaggagatgatctttcaca

SEQ ID NO: 141449 - DNA, 25 bp, Artificial
  Probe
ctccatcactgttgcttctacaaac

SEQ ID NO: 141450 - DNA, 25 bp, Artificial
  Probe
gtatcaggatattcaggagatgatc

SEQ ID NO: 141451 - DNA, 25 bp, Artificial
  Probe
tggtttggcatatattacaatctct

SEQ ID NO: 141452 - DNA, 25 bp, Artificial
  Probe
ctggtttggcatatattacaatctc

SEQ ID NO: 141453 - DNA, 25 bp, Artificial
  Probe
tatcaggatattcaggagatgatct

SEQ ID NO: 141454 - DNA, 25 bp, Artificial
  Probe
attctaccaaggccgttactatgag

SEQ ID NO: 141455 - DNA, 25 bp, Artificial
  Probe
tcctccatcactgttgcttctacaa

SEQ ID NO: 141456 - DNA, 25 bp, Artificial
  Probe
ccacctggtttggcatatattacaa

SEQ ID NO: 141457 - DNA, 25 bp, Artificial
  Probe
accatccagaaggtattctaccaag

SEQ ID NO: 141458 - DNA, 25 bp, Artificial
  Probe
gaccatccagaaggtattctaccaa

SEQ ID NO: 141459 - DNA, 25 bp, Artificial
  Probe
attggcttagagcttctggtagatc

SEQ ID NO: 141460 - DNA, 25 bp, Artificial
  Probe
ggtttggcatatattacaatctctc

SEQ ID NO: 141461 - DNA, 25 bp, Artificial
  Probe
gcttagagcttctggtagatcacaa

SEQ ID NO: 141462 - DNA, 25 bp, Artificial
  Probe
agtctcattaccttctcttcctaca

SEQ ID NO: 141463 - DNA, 25 bp, Artificial
  Probe
gtctcattaccttctcttcctacaa

SEQ ID NO: 141464 - DNA, 25 bp, Artificial
  Probe
cactcttacacaacctcatatccta

SEQ ID NO: 141465 - DNA, 25 bp, Artificial
  Probe
acactcttacacaacctcatatcct

SEQ ID NO: 141466 - DNA, 25 bp, Artificial
  Probe
cacactcttacacaacctcatatcc

SEQ ID NO: 141467 - DNA, 25 bp, Artificial
  Probe
ccacactcttacacaacctcatatc

SEQ ID NO: 141468 - DNA, 25 bp, Artificial
  Probe
attaccttctcttcctacaatagca

SEQ ID NO: 141469 - DNA, 25 bp, Artificial
  Probe
cattaccttctcttcctacaatagc

SEQ ID NO: 141470 - DNA, 25 bp, Artificial
  Probe
ctattctgtgttgtgtctcttctcg

SEQ ID NO: 141471 - DNA, 25 bp, Artificial
  Probe
tctcattaccttctcttcctacaat

SEQ ID NO: 141472 - DNA, 25 bp, Artificial
  Probe
gctattctgtgttgtgtctcttctc

SEQ ID NO: 141473 - DNA, 25 bp, Artificial
  Probe
tagtctcattaccttctcttcctac

SEQ ID NO: 141474 - DNA, 25 bp, Artificial
  Probe
actcttacacaacctcatatcctat

SEQ ID NO: 141475 - DNA, 25 bp, Artificial
  Probe
ctgctattctgtgttgtgtctcttc

SEQ ID NO: 141476 - DNA, 25 bp, Artificial
  Probe
gctagtctcattaccttctcttcct

SEQ ID NO: 141477 - DNA, 25 bp, Artificial
  Probe
ttctgtgttgtgtctcttctcgtat

SEQ ID NO: 141478 - DNA, 25 bp, Artificial
  Probe
attctgtgttgtgtctcttctcgta

SEQ ID NO: 141479 - DNA, 25 bp, Artificial
  Probe
tattctgtgttgtgtctcttctcgt

SEQ ID NO: 141480 - DNA, 25 bp, Artificial
  Probe
atctgctattctgtgttgtgtctct

SEQ ID NO: 141481 - DNA, 25 bp, Artificial
  Probe
tgctattctgtgttgtgtctcttct

SEQ ID NO: 141482 - DNA, 25 bp, Artificial
  Probe
tctgctattctgtgttgtgtctctt

SEQ ID NO: 141483 - DNA, 25 bp, Artificial
  Probe
ttatgtctgagtgtgtccttgtgtt

SEQ ID NO: 141484 - DNA, 25 bp, Artificial
  Probe
ctagtctcattaccttctcttccta

SEQ ID NO: 141485 - DNA, 25 bp, Artificial
  Probe
gatctgctattctgtgttgtgtctc

SEQ ID NO: 141486 - DNA, 25 bp, Artificial
  Probe
tatcctatatgctcctgatgaaggt

SEQ ID NO: 141487 - DNA, 25 bp, Artificial
  Probe
tctgtgttgtgtctcttctcgtatg

SEQ ID NO: 141488 - DNA, 25 bp, Artificial
  Probe
ctatatgctcctgatgaaggtgaac

SEQ ID NO: 141489 - DNA, 25 bp, Artificial
  Probe
tatgtctgagtgtgtccttgtgttc

SEQ ID NO: 141490 - DNA, 25 bp, Artificial
  Probe
atatcctatatgctcctgatgaagg

SEQ ID NO: 141491 - DNA, 25 bp, Artificial
  Probe
ctgtgttgtgtctcttctcgtatgt

SEQ ID NO: 141492 - DNA, 25 bp, Artificial
  Probe
gccacactcttacacaacctcatat

SEQ ID NO: 141493 - DNA, 25 bp, Artificial
  Probe
gctaagctagtctcattaccttctc

SEQ ID NO: 141494 - DNA, 25 bp, Artificial
  Probe
aagctagtctcattaccttctcttc

SEQ ID NO: 141495 - DNA, 25 bp, Artificial
  Probe
tatatgctcctgatgaaggtgaaca

SEQ ID NO: 141496 - DNA, 25 bp, Artificial
  Probe
atcctatatgctcctgatgaaggtg

SEQ ID NO: 141497 - DNA, 25 bp, Artificial
  Probe
agctagtctcattaccttctcttcc

SEQ ID NO: 141498 - DNA, 25 bp, Artificial
  Probe
cagctcaacaagttctataccaaga

SEQ ID NO: 141499 - DNA, 25 bp, Artificial
  Probe
gtaagccagcgagtctatctctatg

SEQ ID NO: 141500 - DNA, 25 bp, Artificial
  Probe
tcattaccttctcttcctacaatag

SEQ ID NO: 141501 - DNA, 25 bp, Artificial
  Probe
ctcattaccttctcttcctacaata

SEQ ID NO: 141502 - DNA, 25 bp, Artificial
  Probe
tgtgttgtgtctcttctcgtatgtg

SEQ ID NO: 141503 - DNA, 25 bp, Artificial
  Probe
cctatatgctcctgatgaaggtgaa

SEQ ID NO: 141504 - DNA, 25 bp, Artificial
  Probe
tgatgaaggtgaacaagaacgacat

SEQ ID NO: 141505 - DNA, 25 bp, Artificial
  Probe
taagccagcgagtctatctctatga

SEQ ID NO: 141506 - DNA, 25 bp, Artificial
  Probe
ctaagctagtctcattaccttctct

SEQ ID NO: 141507 - DNA, 25 bp, Artificial
  Probe
gaagatgaagccgtccataagtatg

SEQ ID NO: 141508 - DNA, 25 bp, Artificial
  Probe
tgaagatgaagccgtccataagtat

SEQ ID NO: 141509 - DNA, 25 bp, Artificial
  Probe
ctgaagatgaagccgtccataagta

SEQ ID NO: 141510 - DNA, 25 bp, Artificial
  Probe
taatcaggaacttctggtggtgtaa

SEQ ID NO: 141511 - DNA, 25 bp, Artificial
  Probe
ttaatcaggaacttctggtggtgta

SEQ ID NO: 141512 - DNA, 25 bp, Artificial
  Probe
taagtatggcaaagacaatgtgaaa

SEQ ID NO: 141513 - DNA, 25 bp, Artificial
  Probe
ataagtatggcaaagacaatgtgaa

SEQ ID NO: 141514 - DNA, 25 bp, Artificial
  Probe
cataagtatggcaaagacaatgtga

SEQ ID NO: 141515 - DNA, 25 bp, Artificial
  Probe
aatcgaggtcttaagtgtctaatca

SEQ ID NO: 141516 - DNA, 25 bp, Artificial
  Probe
atcgaggtcttaagtgtctaatcat

SEQ ID NO: 141517 - DNA, 25 bp, Artificial
  Probe
tcgaggtcttaagtgtctaatcata

SEQ ID NO: 141518 - DNA, 25 bp, Artificial
  Probe
cactgaagatgaagccgtccataag

SEQ ID NO: 141519 - DNA, 25 bp, Artificial
  Probe
cgaggtcttaagtgtctaatcataa

SEQ ID NO: 141520 - DNA, 25 bp, Artificial
  Probe
gaaatgcgtgatgaagatggtttgt

SEQ ID NO: 141521 - DNA, 25 bp, Artificial
  Probe
atcaggaacttctggtggtgtaaat

SEQ ID NO: 141522 - DNA, 25 bp, Artificial
  Probe
ggtggtgtaaatttctagttaagca

SEQ ID NO: 141523 - DNA, 25 bp, Artificial
  Probe
tggtggtgtaaatttctagttaagc

SEQ ID NO: 141524 - DNA, 25 bp, Artificial
  Probe
ttaagtgtctaatcataaggttgtt

SEQ ID NO: 141525 - DNA, 25 bp, Artificial
  Probe
aaatgcgtgatgaagatggtttgtg

SEQ ID NO: 141526 - DNA, 25 bp, Artificial
  Probe
actgaagatgaagccgtccataagt

SEQ ID NO: 141527 - DNA, 25 bp, Artificial
  Probe
tcactgaagatgaagccgtccataa

SEQ ID NO: 141528 - DNA, 25 bp, Artificial
  Probe
tcaggaacttctggtggtgtaaatt

SEQ ID NO: 141529 - DNA, 25 bp, Artificial
  Probe
aatcaggaacttctggtggtgtaaa

SEQ ID NO: 141530 - DNA, 25 bp, Artificial
  Probe
tttaatcaggaacttctggtggtgt

SEQ ID NO: 141531 - DNA, 25 bp, Artificial
  Probe
cttctggtggtgtaaatttctagtt

SEQ ID NO: 141532 - DNA, 25 bp, Artificial
  Probe
aacttctggtggtgtaaatttctag

SEQ ID NO: 141533 - DNA, 25 bp, Artificial
  Probe
gaacttctggtggtgtaaatttcta

SEQ ID NO: 141534 - DNA, 25 bp, Artificial
  Probe
acttctggtggtgtaaatttctagt

SEQ ID NO: 141535 - DNA, 25 bp, Artificial
  Probe
ggaacttctggtggtgtaaatttct

SEQ ID NO: 141536 - DNA, 25 bp, Artificial
  Probe
aggaacttctggtggtgtaaatttc

SEQ ID NO: 141537 - DNA, 25 bp, Artificial
  Probe
cgccagctttatagatttctgtatt

SEQ ID NO: 141538 - DNA, 25 bp, Artificial
  Probe
ggtcttaagtgtctaatcataaggt

SEQ ID NO: 141539 - DNA, 25 bp, Artificial
  Probe
ctctgggaggaaccaatcaagttta

SEQ ID NO: 141540 - DNA, 25 bp, Artificial
  Probe
ctcactgaagatgaagccgtccata

SEQ ID NO: 141541 - DNA, 25 bp, Artificial
  Probe
aggtcttaagtgtctaatcataagg

SEQ ID NO: 141542 - DNA, 25 bp, Artificial
  Probe
aagtatggcaaagacaatgtgaaaa

SEQ ID NO: 141543 - DNA, 25 bp, Artificial
  Probe
agtatggcaaagacaatgtgaaaat

SEQ ID NO: 141544 - DNA, 25 bp, Artificial
  Probe
gtatggcaaagacaatgtgaaaatc

SEQ ID NO: 141545 - DNA, 25 bp, Artificial
  Probe
gtggtgtaaatttctagttaagcaa

SEQ ID NO: 141546 - DNA, 25 bp, Artificial
  Probe
tctggtggtgtaaatttctagttaa

SEQ ID NO: 141547 - DNA, 25 bp, Artificial
  Probe
ttctggtggtgtaaatttctagtta

SEQ ID NO: 141548 - DNA, 25 bp, Artificial
  Probe
cgaaatgcgtgatgaagatggtttg

SEQ ID NO: 141549 - DNA, 25 bp, Artificial
  Probe
caggaacttctggtggtgtaaattt

SEQ ID NO: 141550 - DNA, 25 bp, Artificial
  Probe
aaatcgaggtcttaagtgtctaatc

SEQ ID NO: 141551 - DNA, 25 bp, Artificial
  Probe
tctgggaggaaccaatcaagtttac

SEQ ID NO: 141552 - DNA, 25 bp, Artificial
  Probe
atgcgaaaacaggagatcattaaga

SEQ ID NO: 141553 - DNA, 25 bp, Artificial
  Probe
catgcgaaaacaggagatcattaag

SEQ ID NO: 141554 - DNA, 25 bp, Artificial
  Probe
ccatgcgaaaacaggagatcattaa

SEQ ID NO: 141555 - DNA, 25 bp, Artificial
  Probe
cacagaagacgaagatctcaaagct

SEQ ID NO: 141556 - DNA, 25 bp, Artificial
  Probe
acagaagacgaagatctcaaagctg

SEQ ID NO: 141557 - DNA, 25 bp, Artificial
  Probe
ccacagaagacgaagatctcaaagc

SEQ ID NO: 141558 - DNA, 25 bp, Artificial
  Probe
gccatgcgaaaacaggagatcatta

SEQ ID NO: 141559 - DNA, 25 bp, Artificial
  Probe
cagaagacgaagatctcaaagctgc

SEQ ID NO: 141560 - DNA, 25 bp, Artificial
  Probe
agaagacgaagatctcaaagctgcc

SEQ ID NO: 141561 - DNA, 25 bp, Artificial
  Probe
agccatgcgaaaacaggagatcatt

SEQ ID NO: 141562 - DNA, 25 bp, Artificial
  Probe
aagaacagtatgccttcctctacaa

SEQ ID NO: 141563 - DNA, 25 bp, Artificial
  Probe
agaacagtatgccttcctctacaag

SEQ ID NO: 141564 - DNA, 25 bp, Artificial
  Probe
aatcaaggacagcaacaacaacatc

SEQ ID NO: 141565 - DNA, 25 bp, Artificial
  Probe
atgactatcaggatggagacacaga

SEQ ID NO: 141566 - DNA, 25 bp, Artificial
  Probe
aatacctctaccatgactatcagga

SEQ ID NO: 141567 - DNA, 25 bp, Artificial
  Probe
tacctctaccatgactatcaggatg

SEQ ID NO: 141568 - DNA, 25 bp, Artificial
  Probe
atacctctaccatgactatcaggat

SEQ ID NO: 141569 - DNA, 25 bp, Artificial
  Probe
acatacaactacgtgattagctctc

SEQ ID NO: 141570 - DNA, 25 bp, Artificial
  Probe
gacatacaactacgtgattagctct

SEQ ID NO: 141571 - DNA, 25 bp, Artificial
  Probe
cttatgagttgtctgaagaggaggc

SEQ ID NO: 141572 - DNA, 25 bp, Artificial
  Probe
gcttatgagttgtctgaagaggagg

SEQ ID NO: 141573 - DNA, 25 bp, Artificial
  Probe
gctaactcattgtcttcatttcctt

SEQ ID NO: 141574 - DNA, 25 bp, Artificial
  Probe
aactcattgtcttcatttccttggt

SEQ ID NO: 141575 - DNA, 25 bp, Artificial
  Probe
taactcattgtcttcatttccttgg

SEQ ID NO: 141576 - DNA, 25 bp, Artificial
  Probe
ggctaactcattgtcttcatttcct

SEQ ID NO: 141577 - DNA, 25 bp, Artificial
  Probe
aggctaactcattgtcttcatttcc

SEQ ID NO: 141578 - DNA, 25 bp, Artificial
  Probe
aaggctaactcattgtcttcatttc

SEQ ID NO: 141579 - DNA, 25 bp, Artificial
  Probe
catacaactacgtgattagctctcg

SEQ ID NO: 141580 - DNA, 25 bp, Artificial
  Probe
aggaattaagactggctaagctgtt

SEQ ID NO: 141581 - DNA, 25 bp, Artificial
  Probe
aaaggctaactcattgtcttcattt

SEQ ID NO: 141582 - DNA, 25 bp, Artificial
  Probe
cgacatacaactacgtgattagctc

SEQ ID NO: 141583 - DNA, 25 bp, Artificial
  Probe
acgaagaagcacgacatacaactac

SEQ ID NO: 141584 - DNA, 25 bp, Artificial
  Probe
cacgaagaagcacgacatacaacta

SEQ ID NO: 141585 - DNA, 25 bp, Artificial
  Probe
atcaaggacagcaacaacaacatct

SEQ ID NO: 141586 - DNA, 25 bp, Artificial
  Probe
agcttatgagttgtctgaagaggag

SEQ ID NO: 141587 - DNA, 25 bp, Artificial
  Probe
actcattgtcttcatttccttggtg

SEQ ID NO: 141588 - DNA, 25 bp, Artificial
  Probe
catgactatcaggatggagacacag

SEQ ID NO: 141589 - DNA, 25 bp, Artificial
  Probe
attgtcttcatttccttggtgattg

SEQ ID NO: 141590 - DNA, 25 bp, Artificial
  Probe
cattgtcttcatttccttggtgatt

SEQ ID NO: 141591 - DNA, 25 bp, Artificial
  Probe
ctaaaggctaactcattgtcttcat

SEQ ID NO: 141592 - DNA, 25 bp, Artificial
  Probe
tcattgtcttcatttccttggtgat

SEQ ID NO: 141593 - DNA, 25 bp, Artificial
  Probe
ctgaaacctccgttaaagagataga

SEQ ID NO: 141594 - DNA, 25 bp, Artificial
  Probe
ttgtcttcatttccttggtgattga

SEQ ID NO: 141595 - DNA, 25 bp, Artificial
  Probe
aacctccgttaaagagatagatgag

SEQ ID NO: 141596 - DNA, 25 bp, Artificial
  Probe
cctgaaacctccgttaaagagatag

SEQ ID NO: 141597 - DNA, 25 bp, Artificial
  Probe
ctaactcattgtcttcatttccttg

SEQ ID NO: 141598 - DNA, 25 bp, Artificial
  Probe
aaacctccgttaaagagatagatga

SEQ ID NO: 141599 - DNA, 25 bp, Artificial
  Probe
tgaaacctccgttaaagagatagat

SEQ ID NO: 141600 - DNA, 25 bp, Artificial
  Probe
tgactatcaggatggagacacagac

SEQ ID NO: 141601 - DNA, 25 bp, Artificial
  Probe
taaaggctaactcattgtcttcatt

SEQ ID NO: 141602 - DNA, 25 bp, Artificial
  Probe
tcctgaaacctccgttaaagagata

SEQ ID NO: 141603 - DNA, 25 bp, Artificial
  Probe
ctcattgtcttcatttccttggtga

SEQ ID NO: 141604 - DNA, 25 bp, Artificial
  Probe
agtctattccataataaatgcgtgt

SEQ ID NO: 141605 - DNA, 25 bp, Artificial
  Probe
gaaacctccgttaaagagatagatg

SEQ ID NO: 141606 - DNA, 25 bp, Artificial
  Probe
atacaactacgtgattagctctcgg

SEQ ID NO: 141607 - DNA, 25 bp, Artificial
  Probe
cattgccttgaagaaagtgaaattc

SEQ ID NO: 141608 - DNA, 25 bp, Artificial
  Probe
attgccttgaagaaagtgaaattcc

SEQ ID NO: 141609 - DNA, 25 bp, Artificial
  Probe
ccattgccttgaagaaagtgaaatt

SEQ ID NO: 141610 - DNA, 25 bp, Artificial
  Probe
tccattgccttgaagaaagtgaaat

SEQ ID NO: 141611 - DNA, 25 bp, Artificial
  Probe
gctagaacatgaatatatccagaac

SEQ ID NO: 141612 - DNA, 25 bp, Artificial
  Probe
ctccattgccttgaagaaagtgaaa

SEQ ID NO: 141613 - DNA, 25 bp, Artificial
  Probe
agctagaacatgaatatatccagaa

SEQ ID NO: 141614 - DNA, 25 bp, Artificial
  Probe
aagctagaacatgaatatatccaga

SEQ ID NO: 141615 - DNA, 25 bp, Artificial
  Probe
gctaagctagaacatgaatatatcc

SEQ ID NO: 141616 - DNA, 25 bp, Artificial
  Probe
ggctaagctagaacatgaatatatc

SEQ ID NO: 141617 - DNA, 25 bp, Artificial
  Probe
atgctggcttggatcaatgaatctc

SEQ ID NO: 141618 - DNA, 25 bp, Artificial
  Probe
agaacatgaatatatccagaacttc

SEQ ID NO: 141619 - DNA, 25 bp, Artificial
  Probe
ttgaatctgacaaagatagaacagc

SEQ ID NO: 141620 - DNA, 25 bp, Artificial
  Probe
gcagttgaatctgacaaagatagaa

SEQ ID NO: 141621 - DNA, 25 bp, Artificial
  Probe
tctgacaaagatagaacagctatgt

SEQ ID NO: 141622 - DNA, 25 bp, Artificial
  Probe
catgctggcttggatcaatgaatct

SEQ ID NO: 141623 - DNA, 25 bp, Artificial
  Probe
tcagtcaccagtgataacctcagtc

SEQ ID NO: 141624 - DNA, 25 bp, Artificial
  Probe
gaagatggcagtgaatgtgtactcg

SEQ ID NO: 141625 - DNA, 25 bp, Artificial
  Probe
cgaagatggcagtgaatgtgtactc

SEQ ID NO: 141626 - DNA, 25 bp, Artificial
  Probe
ctggcttggatcaatgaatctctgc

SEQ ID NO: 141627 - DNA, 25 bp, Artificial
  Probe
gctggcttggatcaatgaatctctg

SEQ ID NO: 141628 - DNA, 25 bp, Artificial
  Probe
acatgctggcttggatcaatgaatc

SEQ ID NO: 141629 - DNA, 25 bp, Artificial
  Probe
gacatgctggcttggatcaatgaat

SEQ ID NO: 141630 - DNA, 25 bp, Artificial
  Probe
ccagaacttcaaaatactacaagcc

SEQ ID NO: 141631 - DNA, 25 bp, Artificial
  Probe
gtcagtcaccagtgataacctcagt

SEQ ID NO: 141632 - DNA, 25 bp, Artificial
  Probe
gatgggcttgacaaaataattcctg

SEQ ID NO: 141633 - DNA, 25 bp, Artificial
  Probe
agatgggcttgacaaaataattcct

SEQ ID NO: 141634 - DNA, 25 bp, Artificial
  Probe
cagaacttcaaaatactacaagccg

SEQ ID NO: 141635 - DNA, 25 bp, Artificial
  Probe
agttgaatctgacaaagatagaaca

SEQ ID NO: 141636 - DNA, 25 bp, Artificial
  Probe
aagatgggcttgacaaaataattcc

SEQ ID NO: 141637 - DNA, 25 bp, Artificial
  Probe
tccagaacttcaaaatactacaagc

SEQ ID NO: 141638 - DNA, 25 bp, Artificial
  Probe
aagaagatgggcttgacaaaataat

SEQ ID NO: 141639 - DNA, 25 bp, Artificial
  Probe
agaagatgggcttgacaaaataatt

SEQ ID NO: 141640 - DNA, 25 bp, Artificial
  Probe
tgaatctgacaaagatagaacagct

SEQ ID NO: 141641 - DNA, 25 bp, Artificial
  Probe
gttgaatctgacaaagatagaacag

SEQ ID NO: 141642 - DNA, 25 bp, Artificial
  Probe
cagttgaatctgacaaagatagaac

SEQ ID NO: 141643 - DNA, 25 bp, Artificial
  Probe
gaagatgggcttgacaaaataattc

SEQ ID NO: 141644 - DNA, 25 bp, Artificial
  Probe
tgctggcttggatcaatgaatctct

SEQ ID NO: 141645 - DNA, 25 bp, Artificial
  Probe
ctagaacatgaatatatccagaact

SEQ ID NO: 141646 - DNA, 25 bp, Artificial
  Probe
tgcagttgaatctgacaaagataga

SEQ ID NO: 141647 - DNA, 25 bp, Artificial
  Probe
atctgacaaagatagaacagctatg

SEQ ID NO: 141648 - DNA, 25 bp, Artificial
  Probe
gaatctgacaaagatagaacagcta

SEQ ID NO: 141649 - DNA, 25 bp, Artificial
  Probe
atgggcttgacaaaataattcctgt

SEQ ID NO: 141650 - DNA, 25 bp, Artificial
  Probe
taagctagaacatgaatatatccag

SEQ ID NO: 141651 - DNA, 25 bp, Artificial
  Probe
ctaagctagaacatgaatatatcca

SEQ ID NO: 141652 - DNA, 25 bp, Artificial
  Probe
cttctaagtaatgctcacctctgtt

SEQ ID NO: 141653 - DNA, 25 bp, Artificial
  Probe
gtatccttctaagtaatgctcacct

SEQ ID NO: 141654 - DNA, 25 bp, Artificial
  Probe
agtatccttctaagtaatgctcacc

SEQ ID NO: 141655 - DNA, 25 bp, Artificial
  Probe
tatccttctaagtaatgctcacctc

SEQ ID NO: 141656 - DNA, 25 bp, Artificial
  Probe
cctgagtatccttctaagtaatgct

SEQ ID NO: 141657 - DNA, 25 bp, Artificial
  Probe
tcctgagtatccttctaagtaatgc

SEQ ID NO: 141658 - DNA, 25 bp, Artificial
  Probe
atccttctaagtaatgctcacctct

SEQ ID NO: 141659 - DNA, 25 bp, Artificial
  Probe
agttcctcctgagtatccttctaag

SEQ ID NO: 141660 - DNA, 25 bp, Artificial
  Probe
tcctcctgagtatccttctaagtaa

SEQ ID NO: 141661 - DNA, 25 bp, Artificial
  Probe
ttcctcctgagtatccttctaagta

SEQ ID NO: 141662 - DNA, 25 bp, Artificial
  Probe
gttcctcctgagtatccttctaagt

SEQ ID NO: 141663 - DNA, 25 bp, Artificial
  Probe
aagttcctcctgagtatccttctaa

SEQ ID NO: 141664 - DNA, 25 bp, Artificial
  Probe
gtctaactatgtcttcgtgagcatt

SEQ ID NO: 141665 - DNA, 25 bp, Artificial
  Probe
aagtattatggaccttgttacacgg

SEQ ID NO: 141666 - DNA, 25 bp, Artificial
  Probe
tccttctaagtaatgctcacctctg

SEQ ID NO: 141667 - DNA, 25 bp, Artificial
  Probe
cctcctgagtatccttctaagtaat

SEQ ID NO: 141668 - DNA, 25 bp, Artificial
  Probe
ccttctaagtaatgctcacctctgt

SEQ ID NO: 141669 - DNA, 25 bp, Artificial
  Probe
aagaatgtcactaacagtccagaat

SEQ ID NO: 141670 - DNA, 25 bp, Artificial
  Probe
ctatctcaagaacatagttgtggct

SEQ ID NO: 141671 - DNA, 25 bp, Artificial
  Probe
tctatctcaagaacatagttgtggc

SEQ ID NO: 141672 - DNA, 25 bp, Artificial
  Probe
gaatgtcactaacagtccagaatga

SEQ ID NO: 141673 - DNA, 25 bp, Artificial
  Probe
agaatgtcactaacagtccagaatg

SEQ ID NO: 141674 - DNA, 25 bp, Artificial
  Probe
taagaatgtcactaacagtccagaa

SEQ ID NO: 141675 - DNA, 25 bp, Artificial
  Probe
ttaagaatgtcactaacagtccaga

SEQ ID NO: 141676 - DNA, 25 bp, Artificial
  Probe
tatctcaagaacatagttgtggctg

SEQ ID NO: 141677 - DNA, 25 bp, Artificial
  Probe
gagtatccttctaagtaatgctcac

SEQ ID NO: 141678 - DNA, 25 bp, Artificial
  Probe
ctaacagtccagaatgacctagaga

SEQ ID NO: 141679 - DNA, 25 bp, Artificial
  Probe
ctgagtatccttctaagtaatgctc

SEQ ID NO: 141680 - DNA, 25 bp, Artificial
  Probe
ctcctgagtatccttctaagtaatg

SEQ ID NO: 141681 - DNA, 25 bp, Artificial
  Probe
taacagtccagaatgacctagagac

SEQ ID NO: 141682 - DNA, 25 bp, Artificial
  Probe
actaacagtccagaatgacctagag

SEQ ID NO: 141683 - DNA, 25 bp, Artificial
  Probe
agttaagaatgtcactaacagtcca

SEQ ID NO: 141684 - DNA, 25 bp, Artificial
  Probe
gttaagaatgtcactaacagtccag

SEQ ID NO: 141685 - DNA, 25 bp, Artificial
  Probe
cactaacagtccagaatgacctaga

SEQ ID NO: 141686 - DNA, 25 bp, Artificial
  Probe
tcactaacagtccagaatgacctag

SEQ ID NO: 141687 - DNA, 25 bp, Artificial
  Probe
attatggaccttgttacacggtaat

SEQ ID NO: 141688 - DNA, 25 bp, Artificial
  Probe
gtattatggaccttgttacacggta

SEQ ID NO: 141689 - DNA, 25 bp, Artificial
  Probe
ttatggaccttgttacacggtaatt

SEQ ID NO: 141690 - DNA, 25 bp, Artificial
  Probe
tattatggaccttgttacacggtaa

SEQ ID NO: 141691 - DNA, 25 bp, Artificial
  Probe
ctatcgtccagtcagtgaactacag

SEQ ID NO: 141692 - DNA, 25 bp, Artificial
  Probe
gtctatcgtccagtcagtgaactac

SEQ ID NO: 141693 - DNA, 25 bp, Artificial
  Probe
cgtctaactatgtcttcgtgagcat

SEQ ID NO: 141694 - DNA, 25 bp, Artificial
  Probe
atctcaagaacatagttgtggctga

SEQ ID NO: 141695 - DNA, 25 bp, Artificial
  Probe
atctatctcaagaacatagttgtgg

SEQ ID NO: 141696 - DNA, 25 bp, Artificial
  Probe
catgttgtactgtgtggtcttcatc

SEQ ID NO: 141697 - DNA, 25 bp, Artificial
  Probe
ttgtggtggtagacttcttaattgg

SEQ ID NO: 141698 - DNA, 25 bp, Artificial
  Probe
agttatcagaagaagtagaacgcaa

SEQ ID NO: 141699 - DNA, 25 bp, Artificial
  Probe
gtggtggtagacttcttaattggag

SEQ ID NO: 141700 - DNA, 25 bp, Artificial
  Probe
cagttatcagaagaagtagaacgca

SEQ ID NO: 141701 - DNA, 25 bp, Artificial
  Probe
acagttatcagaagaagtagaacgc

SEQ ID NO: 141702 - DNA, 25 bp, Artificial
  Probe
agacacagttatcagaagaagtaga

SEQ ID NO: 141703 - DNA, 25 bp, Artificial
  Probe
cacagttatcagaagaagtagaacg

SEQ ID NO: 141704 - DNA, 25 bp, Artificial
  Probe
gttatcagaagaagtagaacgcaat

SEQ ID NO: 141705 - DNA, 25 bp, Artificial
  Probe
gagacacagttatcagaagaagtag

SEQ ID NO: 141706 - DNA, 25 bp, Artificial
  Probe
ttgagacacagttatcagaagaagt

SEQ ID NO: 141707 - DNA, 25 bp, Artificial
  Probe
tgtggtggtagacttcttaattgga

SEQ ID NO: 141708 - DNA, 25 bp, Artificial
  Probe
ggtggtagacttcttaattggagtt

SEQ ID NO: 141709 - DNA, 25 bp, Artificial
  Probe
cttgagacacagttatcagaagaag

SEQ ID NO: 141710 - DNA, 25 bp, Artificial
  Probe
gcttgagacacagttatcagaagaa

SEQ ID NO: 141711 - DNA, 25 bp, Artificial
  Probe
atgagagagaagttctgagatacct

SEQ ID NO: 141712 - DNA, 25 bp, Artificial
  Probe
cgatgagagagaagttctgagatac

SEQ ID NO: 141713 - DNA, 25 bp, Artificial
  Probe
gatgagagagaagttctgagatacc

SEQ ID NO: 141714 - DNA, 25 bp, Artificial
  Probe
tgagacacagttatcagaagaagta

SEQ ID NO: 141715 - DNA, 25 bp, Artificial
  Probe
gacacagttatcagaagaagtagaa

SEQ ID NO: 141716 - DNA, 25 bp, Artificial
  Probe
tggtggtagacttcttaattggagt

SEQ ID NO: 141717 - DNA, 25 bp, Artificial
  Probe
acacagttatcagaagaagtagaac

SEQ ID NO: 141718 - DNA, 25 bp, Artificial
  Probe
tatcagaagaagtagaacgcaataa

SEQ ID NO: 141719 - DNA, 25 bp, Artificial
  Probe
ttatcagaagaagtagaacgcaata

SEQ ID NO: 141720 - DNA, 25 bp, Artificial
  Probe
tgagagagaagttctgagatacctc

SEQ ID NO: 141721 - DNA, 25 bp, Artificial
  Probe
tgcttgagacacagttatcagaaga

SEQ ID NO: 141722 - DNA, 25 bp, Artificial
  Probe
gagagagaagttctgagatacctcc

SEQ ID NO: 141723 - DNA, 25 bp, Artificial
  Probe
gcgagatcagcattcttaacatcaa

SEQ ID NO: 141724 - DNA, 25 bp, Artificial
  Probe
tcgatgagagagaagttctgagata

SEQ ID NO: 141725 - DNA, 25 bp, Artificial
  Probe
tgaattgattaatgtgtctgtgtca

SEQ ID NO: 141726 - DNA, 25 bp, Artificial
  Probe
gtgcttgagacacagttatcagaag

SEQ ID NO: 141727 - DNA, 25 bp, Artificial
  Probe
ttgattaatgtgtctgtgtcaggat

SEQ ID NO: 141728 - DNA, 25 bp, Artificial
  Probe
attgattaatgtgtctgtgtcagga

SEQ ID NO: 141729 - DNA, 25 bp, Artificial
  Probe
gaagaagtagaacgcaataaagtga

SEQ ID NO: 141730 - DNA, 25 bp, Artificial
  Probe
agaagaagtagaacgcaataaagtg

SEQ ID NO: 141731 - DNA, 25 bp, Artificial
  Probe
cagaagaagtagaacgcaataaagt

SEQ ID NO: 141732 - DNA, 25 bp, Artificial
  Probe
cagaaactcaagcaaagattaacca

SEQ ID NO: 141733 - DNA, 25 bp, Artificial
  Probe
ggtctactggatataaacattgcga

SEQ ID NO: 141734 - DNA, 25 bp, Artificial
  Probe
aattgattaatgtgtctgtgtcagg

SEQ ID NO: 141735 - DNA, 25 bp, Artificial
  Probe
aaactcaagcaaagattaaccaagg

SEQ ID NO: 141736 - DNA, 25 bp, Artificial
  Probe
agcagaaactcaagcaaagattaac

SEQ ID NO: 141737 - DNA, 25 bp, Artificial
  Probe
cagcagaaactcaagcaaagattaa

SEQ ID NO: 141738 - DNA, 25 bp, Artificial
  Probe
tcagaagaagtagaacgcaataaag

SEQ ID NO: 141739 - DNA, 25 bp, Artificial
  Probe
tgattaatgtgtctgtgtcaggatc

SEQ ID NO: 141740 - DNA, 25 bp, Artificial
  Probe
acggtctactggatataaacattgc

SEQ ID NO: 141741 - DNA, 25 bp, Artificial
  Probe
tggatataaacattgcgaatttggg

SEQ ID NO: 141742 - DNA, 25 bp, Artificial
  Probe
cggatgagaactctaagacctacat

SEQ ID NO: 141743 - DNA, 25 bp, Artificial
  Probe
atgagaactctaagacctacatcgc

SEQ ID NO: 141744 - DNA, 25 bp, Artificial
  Probe
agaaggaagagaaagtaaagaagca

SEQ ID NO: 141745 - DNA, 25 bp, Artificial
  Probe
gaaggaagagaaagtaaagaagcag

SEQ ID NO: 141746 - DNA, 25 bp, Artificial
  Probe
ctctactctgtgaccaactgtaaag

SEQ ID NO: 141747 - DNA, 25 bp, Artificial
  Probe
atcgtcattgatatgctcatggaga

SEQ ID NO: 141748 - DNA, 25 bp, Artificial
  Probe
catcgtcattgatatgctcatggag

SEQ ID NO: 141749 - DNA, 25 bp, Artificial
  Probe
tacatcaatgccaactacgttaaga

SEQ ID NO: 141750 - DNA, 25 bp, Artificial
  Probe
ttacatcaatgccaactacgttaag

SEQ ID NO: 141751 - DNA, 25 bp, Artificial
  Probe
tcatcgtcattgatatgctcatgga

SEQ ID NO: 141752 - DNA, 25 bp, Artificial
  Probe
ccttctcttcttgtaaataaagccc

SEQ ID NO: 141753 - DNA, 25 bp, Artificial
  Probe
cccttctcttcttgtaaataaagcc

SEQ ID NO: 141754 - DNA, 25 bp, Artificial
  Probe
aagaaggaagagaaagtaaagaagc

SEQ ID NO: 141755 - DNA, 25 bp, Artificial
  Probe
gattacatcaatgccaactacgtta

SEQ ID NO: 141756 - DNA, 25 bp, Artificial
  Probe
catcaatgccaactacgttaagaac

SEQ ID NO: 141757 - DNA, 25 bp, Artificial
  Probe
tcttgttgtaatttaagtgaccgtg

SEQ ID NO: 141758 - DNA, 25 bp, Artificial
  Probe
aaggaagagaaagtaaagaagcagc

SEQ ID NO: 141759 - DNA, 25 bp, Artificial
  Probe
attacatcaatgccaactacgttaa

SEQ ID NO: 141760 - DNA, 25 bp, Artificial
  Probe
caagaacaagaaggaagagaaagta

SEQ ID NO: 141761 - DNA, 25 bp, Artificial
  Probe
cttgttgtaatttaagtgaccgtgg

SEQ ID NO: 141762 - DNA, 25 bp, Artificial
  Probe
acatcaatgccaactacgttaagaa

SEQ ID NO: 141763 - DNA, 25 bp, Artificial
  Probe
acccttctcttcttgtaaataaagc

SEQ ID NO: 141764 - DNA, 25 bp, Artificial
  Probe
gtcagacccttctcttcttgtaaat

SEQ ID NO: 141765 - DNA, 25 bp, Artificial
  Probe
tctactctgtgaccaactgtaaaga

SEQ ID NO: 141766 - DNA, 25 bp, Artificial
  Probe
gaagagaaagtaaagaagcagcgat

SEQ ID NO: 141767 - DNA, 25 bp, Artificial
  Probe
gcaagaacaagaaggaagagaaagt

SEQ ID NO: 141768 - DNA, 25 bp, Artificial
  Probe
atcttgttgtaatttaagtgaccgt

SEQ ID NO: 141769 - DNA, 25 bp, Artificial
  Probe
ttgttgtaatttaagtgaccgtggt

SEQ ID NO: 141770 - DNA, 25 bp, Artificial
  Probe
tcagacccttctcttcttgtaaata

SEQ ID NO: 141771 - DNA, 25 bp, Artificial
  Probe
agtcagacccttctcttcttgtaaa

SEQ ID NO: 141772 - DNA, 25 bp, Artificial
  Probe
catcttgttgtaatttaagtgaccg

SEQ ID NO: 141773 - DNA, 25 bp, Artificial
  Probe
tcgtcattgatatgctcatggagag

SEQ ID NO: 141774 - DNA, 25 bp, Artificial
  Probe
atcaatgccaactacgttaagaacc

SEQ ID NO: 141775 - DNA, 25 bp, Artificial
  Probe
agaactctaagacctacatcgccag

SEQ ID NO: 141776 - DNA, 25 bp, Artificial
  Probe
gtctgattacatcaatgccaactac

SEQ ID NO: 141777 - DNA, 25 bp, Artificial
  Probe
gagaactctaagacctacatcgcca

SEQ ID NO: 141778 - DNA, 25 bp, Artificial
  Probe
tgagaactctaagacctacatcgcc

SEQ ID NO: 141779 - DNA, 25 bp, Artificial
  Probe
ccatcttgttgtaatttaagtgacc

SEQ ID NO: 141780 - DNA, 25 bp, Artificial
  Probe
cccatcttgttgtaatttaagtgac

SEQ ID NO: 141781 - DNA, 25 bp, Artificial
  Probe
ctcaagaggaacatcagccttactc

SEQ ID NO: 141782 - DNA, 25 bp, Artificial
  Probe
caagaagaaactggagatcatacaa

SEQ ID NO: 141783 - DNA, 25 bp, Artificial
  Probe
acaagaaggaagagaaagtaaagaa

SEQ ID NO: 141784 - DNA, 25 bp, Artificial
  Probe
aacaagaaggaagagaaagtaaaga

SEQ ID NO: 141785 - DNA, 25 bp, Artificial
  Probe
agaacaagaaggaagagaaagtaaa

SEQ ID NO: 141786 - DNA, 25 bp, Artificial
  Probe
aagaacaagaaggaagagaaagtaa

SEQ ID NO: 141787 - DNA, 25 bp, Artificial
  Probe
agaagaaggatgagaccatgactag

SEQ ID NO: 141788 - DNA, 25 bp, Artificial
  Probe
gagaagaaggatgagaccatgacta

SEQ ID NO: 141789 - DNA, 25 bp, Artificial
  Probe
ttcaggctacttaaatcaggtcttt

SEQ ID NO: 141790 - DNA, 25 bp, Artificial
  Probe
attcaggctacttaaatcaggtctt

SEQ ID NO: 141791 - DNA, 25 bp, Artificial
  Probe
ggctacttaaatcaggtctttgtct

SEQ ID NO: 141792 - DNA, 25 bp, Artificial
  Probe
aggctacttaaatcaggtctttgtc

SEQ ID NO: 141793 - DNA, 25 bp, Artificial
  Probe
tcaggctacttaaatcaggtctttg

SEQ ID NO: 141794 - DNA, 25 bp, Artificial
  Probe
aattcaggctacttaaatcaggtct

SEQ ID NO: 141795 - DNA, 25 bp, Artificial
  Probe
tacttaaatcaggtctttgtcttgc

SEQ ID NO: 141796 - DNA, 25 bp, Artificial
  Probe
caggctacttaaatcaggtctttgt

SEQ ID NO: 141797 - DNA, 25 bp, Artificial
  Probe
gctacttaaatcaggtctttgtctt

SEQ ID NO: 141798 - DNA, 25 bp, Artificial
  Probe
aaattcaggctacttaaatcaggtc

SEQ ID NO: 141799 - DNA, 25 bp, Artificial
  Probe
ctgagaagaaggatgagaccatgac

SEQ ID NO: 141800 - DNA, 25 bp, Artificial
  Probe
acttaaatcaggtctttgtcttgcc

SEQ ID NO: 141801 - DNA, 25 bp, Artificial
  Probe
agaaggctgggaacaagtctttata

SEQ ID NO: 141802 - DNA, 25 bp, Artificial
  Probe
tgagaagaaggatgagaccatgact

SEQ ID NO: 141803 - DNA, 25 bp, Artificial
  Probe
tctactggtttatgaactaggttga

SEQ ID NO: 141804 - DNA, 25 bp, Artificial
  Probe
tactggtttatgaactaggttgagt

SEQ ID NO: 141805 - DNA, 25 bp, Artificial
  Probe
ctactggtttatgaactaggttgag

SEQ ID NO: 141806 - DNA, 25 bp, Artificial
  Probe
cttaaatcaggtctttgtcttgccc

SEQ ID NO: 141807 - DNA, 25 bp, Artificial
  Probe
aggttgagtttgtgtatcacttagt

SEQ ID NO: 141808 - DNA, 25 bp, Artificial
  Probe
gaaggctgggaacaagtctttataa

SEQ ID NO: 141809 - DNA, 25 bp, Artificial
  Probe
ggttgagtttgtgtatcacttagtt

SEQ ID NO: 141810 - DNA, 25 bp, Artificial
  Probe
actaggttgagtttgtgtatcactt

SEQ ID NO: 141811 - DNA, 25 bp, Artificial
  Probe
gaaggatgagaccatgactagttag

SEQ ID NO: 141812 - DNA, 25 bp, Artificial
  Probe
ctacttaaatcaggtctttgtcttg

SEQ ID NO: 141813 - DNA, 25 bp, Artificial
  Probe
agaaggatgagaccatgactagtta

SEQ ID NO: 141814 - DNA, 25 bp, Artificial
  Probe
ttctactggtttatgaactaggttg

SEQ ID NO: 141815 - DNA, 25 bp, Artificial
  Probe
gtttctactggtttatgaactaggt

SEQ ID NO: 141816 - DNA, 25 bp, Artificial
  Probe
tttatgtagcttgagggtagagatg

SEQ ID NO: 141817 - DNA, 25 bp, Artificial
  Probe
aagaaggatgagaccatgactagtt

SEQ ID NO: 141818 - DNA, 25 bp, Artificial
  Probe
aaggatgagaccatgactagttagg

SEQ ID NO: 141819 - DNA, 25 bp, Artificial
  Probe
ttatgtagcttgagggtagagatgg

SEQ ID NO: 141820 - DNA, 25 bp, Artificial
  Probe
tttagagcttgagtatctgaccaaa

SEQ ID NO: 141821 - DNA, 25 bp, Artificial
  Probe
gaagaaggatgagaccatgactagt

SEQ ID NO: 141822 - DNA, 25 bp, Artificial
  Probe
gagaaggctgggaacaagtctttat

SEQ ID NO: 141823 - DNA, 25 bp, Artificial
  Probe
taggttgagtttgtgtatcacttag

SEQ ID NO: 141824 - DNA, 25 bp, Artificial
  Probe
tttctactggtttatgaactaggtt

SEQ ID NO: 141825 - DNA, 25 bp, Artificial
  Probe
ctaggttgagtttgtgtatcactta

SEQ ID NO: 141826 - DNA, 25 bp, Artificial
  Probe
tcttctttagccacaaagtcactat

SEQ ID NO: 141827 - DNA, 25 bp, Artificial
  Probe
ctagttagggaatagataaccaagc

SEQ ID NO: 141828 - DNA, 25 bp, Artificial
  Probe
ctcttctttagccacaaagtcacta

SEQ ID NO: 141829 - DNA, 25 bp, Artificial
  Probe
caaactcttctttagccacaaagtc

SEQ ID NO: 141830 - DNA, 25 bp, Artificial
  Probe
cttctttagccacaaagtcactatt

SEQ ID NO: 141831 - DNA, 25 bp, Artificial
  Probe
aaactcttctttagccacaaagtca

SEQ ID NO: 141832 - DNA, 25 bp, Artificial
  Probe
ggcgtcactgtaataagttattcct

SEQ ID NO: 141833 - DNA, 25 bp, Artificial
  Probe
gcgtcactgtaataagttattcctt

SEQ ID NO: 141834 - DNA, 25 bp, Artificial
  Probe
attgggcgtcactgtaataagttat

SEQ ID NO: 141835 - DNA, 25 bp, Artificial
  Probe
tattgggcgtcactgtaataagtta

SEQ ID NO: 141836 - DNA, 25 bp, Artificial
  Probe
gtattgggcgtcactgtaataagtt

SEQ ID NO: 141837 - DNA, 25 bp, Artificial
  Probe
ttgggcgtcactgtaataagttatt

SEQ ID NO: 141838 - DNA, 25 bp, Artificial
  Probe
tgggcgtcactgtaataagttattc

SEQ ID NO: 141839 - DNA, 25 bp, Artificial
  Probe
gggcgtcactgtaataagttattcc

SEQ ID NO: 141840 - DNA, 25 bp, Artificial
  Probe
cgtcactgtaataagttattcctta

SEQ ID NO: 141841 - DNA, 25 bp, Artificial
  Probe
aagttattccttattgattttggtt

SEQ ID NO: 141842 - DNA, 25 bp, Artificial
  Probe
ccatctttctcaggattaaaccagt

SEQ ID NO: 141843 - DNA, 25 bp, Artificial
  Probe
catctttctcaggattaaaccagtt

SEQ ID NO: 141844 - DNA, 25 bp, Artificial
  Probe
cccatctttctcaggattaaaccag

SEQ ID NO: 141845 - DNA, 25 bp, Artificial
  Probe
gacccatctttctcaggattaaacc

SEQ ID NO: 141846 - DNA, 25 bp, Artificial
  Probe
ggacccatctttctcaggattaaac

SEQ ID NO: 141847 - DNA, 25 bp, Artificial
  Probe
aggacccatctttctcaggattaaa

SEQ ID NO: 141848 - DNA, 25 bp, Artificial
  Probe
acccatctttctcaggattaaacca

SEQ ID NO: 141849 - DNA, 25 bp, Artificial
  Probe
caggacccatctttctcaggattaa

SEQ ID NO: 141850 - DNA, 25 bp, Artificial
  Probe
tcaggacccatctttctcaggatta

SEQ ID NO: 141851 - DNA, 25 bp, Artificial
  Probe
tctttctcaggattaaaccagttat

SEQ ID NO: 141852 - DNA, 25 bp, Artificial
  Probe
atctttctcaggattaaaccagtta

SEQ ID NO: 141853 - DNA, 25 bp, Artificial
  Probe
ttctcaggattaaaccagttattcc

SEQ ID NO: 141854 - DNA, 25 bp, Artificial
  Probe
ctaaaggctgcaacaaagaaacaaa

SEQ ID NO: 141855 - DNA, 25 bp, Artificial
  Probe
tttctcaggattaaaccagttattc

SEQ ID NO: 141856 - DNA, 25 bp, Artificial
  Probe
ctttctcaggattaaaccagttatt

SEQ ID NO: 141857 - DNA, 25 bp, Artificial
  Probe
ctcaggacccatctttctcaggatt

SEQ ID NO: 141858 - DNA, 25 bp, Artificial
  Probe
aagaggaaaagaagcatgactgtta

SEQ ID NO: 141859 - DNA, 25 bp, Artificial
  Probe
agaggaaaagaagcatgactgttag

SEQ ID NO: 141860 - DNA, 25 bp, Artificial
  Probe
aagcatgactgttagtccttctcag

SEQ ID NO: 141861 - DNA, 25 bp, Artificial
  Probe
gaagcatgactgttagtccttctca

SEQ ID NO: 141862 - DNA, 25 bp, Artificial
  Probe
cttctcaggacccatctttctcagg

SEQ ID NO: 141863 - DNA, 25 bp, Artificial
  Probe
gaagaggaaaagaagcatgactgtt

SEQ ID NO: 141864 - DNA, 25 bp, Artificial
  Probe
gaggaaaagaagcatgactgttagt

SEQ ID NO: 141865 - DNA, 25 bp, Artificial
  Probe
gctaaaggctgcaacaaagaaacaa

SEQ ID NO: 141866 - DNA, 25 bp, Artificial
  Probe
tctcaggacccatctttctcaggat

SEQ ID NO: 141867 - DNA, 25 bp, Artificial
  Probe
ttctcaggacccatctttctcagga

SEQ ID NO: 141868 - DNA, 25 bp, Artificial
  Probe
taaaggctgcaacaaagaaacaaaa

SEQ ID NO: 141869 - DNA, 25 bp, Artificial
  Probe
aaagaagcatgactgttagtccttc

SEQ ID NO: 141870 - DNA, 25 bp, Artificial
  Probe
ccttctcaggacccatctttctcag

SEQ ID NO: 141871 - DNA, 25 bp, Artificial
  Probe
ggattaaaccagttattccttattg

SEQ ID NO: 141872 - DNA, 25 bp, Artificial
  Probe
tctcaggattaaaccagttattcct

SEQ ID NO: 141873 - DNA, 25 bp, Artificial
  Probe
ggaagaggaaaagaagcatgactgt

SEQ ID NO: 141874 - DNA, 25 bp, Artificial
  Probe
ccagttattccttattgattttggt

SEQ ID NO: 141875 - DNA, 25 bp, Artificial
  Probe
accagttattccttattgattttgg

SEQ ID NO: 141876 - DNA, 25 bp, Artificial
  Probe
ctcaggattaaaccagttattcctt

SEQ ID NO: 141877 - DNA, 25 bp, Artificial
  Probe
agcatgactgttagtccttctcagg

SEQ ID NO: 141878 - DNA, 25 bp, Artificial
  Probe
gattaaaccagttattccttattga

SEQ ID NO: 141879 - DNA, 25 bp, Artificial
  Probe
cagttattccttattgattttggtt

SEQ ID NO: 141880 - DNA, 25 bp, Artificial
  Probe
aaccagttattccttattgattttg

SEQ ID NO: 141881 - DNA, 25 bp, Artificial
  Probe
gcatgactgttagtccttctcagga

SEQ ID NO: 141882 - DNA, 25 bp, Artificial
  Probe
ggctaaaggctgcaacaaagaaaca

SEQ ID NO: 141883 - DNA, 25 bp, Artificial
  Probe
tcaggattaaaccagttattcctta

SEQ ID NO: 141884 - DNA, 25 bp, Artificial
  Probe
aaaagaagcatgactgttagtcctt

SEQ ID NO: 141885 - DNA, 25 bp, Artificial
  Probe
gaaaagaagcatgactgttagtcct

SEQ ID NO: 141886 - DNA, 25 bp, Artificial
  Probe
aggaaaagaagcatgactgttagtc

SEQ ID NO: 141887 - DNA, 25 bp, Artificial
  Probe
atgaagttacgatctccatcctgtc

SEQ ID NO: 141888 - DNA, 25 bp, Artificial
  Probe
cagagacatggaataccagtgtata

SEQ ID NO: 141889 - DNA, 25 bp, Artificial
  Probe
agagacatggaataccagtgtatag

SEQ ID NO: 141890 - DNA, 25 bp, Artificial
  Probe
tctaacagtcagagtctttcttgct

SEQ ID NO: 141891 - DNA, 25 bp, Artificial
  Probe
ccagagacatggaataccagtgtat

SEQ ID NO: 141892 - DNA, 25 bp, Artificial
  Probe
ctaacagtcagagtctttcttgctc

SEQ ID NO: 141893 - DNA, 25 bp, Artificial
  Probe
taacagtcagagtctttcttgctcc

SEQ ID NO: 141894 - DNA, 25 bp, Artificial
  Probe
ctaagagcaaagagcaacttccaga

SEQ ID NO: 141895 - DNA, 25 bp, Artificial
  Probe
accagagacatggaataccagtgta

SEQ ID NO: 141896 - DNA, 25 bp, Artificial
  Probe
gagatcctgagggtcaaggtaatag

SEQ ID NO: 141897 - DNA, 25 bp, Artificial
  Probe
taagagcaaagagcaacttccagac

SEQ ID NO: 141898 - DNA, 25 bp, Artificial
  Probe
gatgaagttacgatctccatcctgt

SEQ ID NO: 141899 - DNA, 25 bp, Artificial
  Probe
gtcgttgtcattggagtggtcattg

SEQ ID NO: 141900 - DNA, 25 bp, Artificial
  Probe
tactattgtacagcgttcaacagag

SEQ ID NO: 141901 - DNA, 25 bp, Artificial
  Probe
agtcgttgtcattggagtggtcatt

SEQ ID NO: 141902 - DNA, 25 bp, Artificial
  Probe
gatagttgcagccaaatactacttc

SEQ ID NO: 141903 - DNA, 25 bp, Artificial
  Probe
tgatagttgcagccaaatactactt

SEQ ID NO: 141904 - DNA, 25 bp, Artificial
  Probe
ttgatagttgcagccaaatactact

SEQ ID NO: 141905 - DNA, 25 bp, Artificial
  Probe
cttgatagttgcagccaaatactac

SEQ ID NO: 141906 - DNA, 25 bp, Artificial
  Probe
cctaagagcaaagagcaacttccag

SEQ ID NO: 141907 - DNA, 25 bp, Artificial
  Probe
ctcctaagagcaaagagcaacttcc

SEQ ID NO: 141908 - DNA, 25 bp, Artificial
  Probe
cctcctaagagcaaagagcaacttc

SEQ ID NO: 141909 - DNA, 25 bp, Artificial
  Probe
atagttgcagccaaatactacttcc

SEQ ID NO: 141910 - DNA, 25 bp, Artificial
  Probe
ccttgatagttgcagccaaatacta

SEQ ID NO: 141911 - DNA, 25 bp, Artificial
  Probe
cgagatcctgagggtcaaggtaata

SEQ ID NO: 141912 - DNA, 25 bp, Artificial
  Probe
tcctaagagcaaagagcaacttcca

SEQ ID NO: 141913 - DNA, 25 bp, Artificial
  Probe
tagttgcagccaaatactacttcct

SEQ ID NO: 141914 - DNA, 25 bp, Artificial
  Probe
gaacaaactagcaaggagcaggaag

SEQ ID NO: 141915 - DNA, 25 bp, Artificial
  Probe
ttcagttttacaaagaaaaggaggg

SEQ ID NO: 141916 - DNA, 25 bp, Artificial
  Probe
agatcctgagggtcaaggtaatagc

SEQ ID NO: 141917 - DNA, 25 bp, Artificial
  Probe
cagtcgttgtcattggagtggtcat

SEQ ID NO: 141918 - DNA, 25 bp, Artificial
  Probe
aagaactccaatgacccagtgacat

SEQ ID NO: 141919 - DNA, 25 bp, Artificial
  Probe
caccagagacatggaataccagtgt

SEQ ID NO: 141920 - DNA, 25 bp, Artificial
  Probe
tgaagttacgatctccatcctgtcg

SEQ ID NO: 141921 - DNA, 25 bp, Artificial
  Probe
cagaccgtccagaagaactccaatg

SEQ ID NO: 141922 - DNA, 25 bp, Artificial
  Probe
gagcaggaaggccagtactattgta

SEQ ID NO: 141923 - DNA, 25 bp, Artificial
  Probe
gtactattgtacagcgttcaacaga

SEQ ID NO: 141924 - DNA, 25 bp, Artificial
  Probe
agtactattgtacagcgttcaacag

SEQ ID NO: 141925 - DNA, 25 bp, Artificial
  Probe
atgaacaaactagcaaggagcagga

SEQ ID NO: 141926 - DNA, 25 bp, Artificial
  Probe
ttttacaaagaaaaggagggcagac

SEQ ID NO: 141927 - DNA, 25 bp, Artificial
  Probe
gttttacaaagaaaaggagggcaga

SEQ ID NO: 141928 - DNA, 25 bp, Artificial
  Probe
agttttacaaagaaaaggagggcag

SEQ ID NO: 141929 - DNA, 25 bp, Artificial
  Probe
tcagttttacaaagaaaaggagggc

SEQ ID NO: 141930 - DNA, 25 bp, Artificial
  Probe
ttgcagccaaatactacttcctgag

SEQ ID NO: 141931 - DNA, 25 bp, Artificial
  Probe
cagtactattgtacagcgttcaaca

SEQ ID NO: 141932 - DNA, 25 bp, Artificial
  Probe
ggttggcttgtgaagactataagaa

SEQ ID NO: 141933 - DNA, 25 bp, Artificial
  Probe
ctggttggcttgtgaagactataag

SEQ ID NO: 141934 - DNA, 25 bp, Artificial
  Probe
tggttggcttgtgaagactataaga

SEQ ID NO: 141935 - DNA, 25 bp, Artificial
  Probe
tctggttggcttgtgaagactataa

SEQ ID NO: 141936 - DNA, 25 bp, Artificial
  Probe
ttctggttggcttgtgaagactata

SEQ ID NO: 141937 - DNA, 25 bp, Artificial
  Probe
attctggttggcttgtgaagactat

SEQ ID NO: 141938 - DNA, 25 bp, Artificial
  Probe
aattctggttggcttgtgaagacta

SEQ ID NO: 141939 - DNA, 25 bp, Artificial
  Probe
gttggcttgtgaagactataagaaa

SEQ ID NO: 141940 - DNA, 25 bp, Artificial
  Probe
tattgactttcatactcgggaatcg

SEQ ID NO: 141941 - DNA, 25 bp, Artificial
  Probe
caaagcagagcatatatacaaagca

SEQ ID NO: 141942 - DNA, 25 bp, Artificial
  Probe
acaaagcagagcatatatacaaagc

SEQ ID NO: 141943 - DNA, 25 bp, Artificial
  Probe
aagcagagcatatatacaaagcatt

SEQ ID NO: 141944 - DNA, 25 bp, Artificial
  Probe
aaagcagagcatatatacaaagcat

SEQ ID NO: 141945 - DNA, 25 bp, Artificial
  Probe
agcagagcatatatacaaagcattt

SEQ ID NO: 141946 - DNA, 25 bp, Artificial
  Probe
ctcagatgctgtgaaacaaatcaat

SEQ ID NO: 141947 - DNA, 25 bp, Artificial
  Probe
atattgactttcatactcgggaatc

SEQ ID NO: 141948 - DNA, 25 bp, Artificial
  Probe
tcagatgctgtgaaacaaatcaata

SEQ ID NO: 141949 - DNA, 25 bp, Artificial
  Probe
gcataacaaagcagagcatatatac

SEQ ID NO: 141950 - DNA, 25 bp, Artificial
  Probe
actcagatgctgtgaaacaaatcaa

SEQ ID NO: 141951 - DNA, 25 bp, Artificial
  Probe
cagatgctgtgaaacaaatcaatat

SEQ ID NO: 141952 - DNA, 25 bp, Artificial
  Probe
aacaaagcagagcatatatacaaag

SEQ ID NO: 141953 - DNA, 25 bp, Artificial
  Probe
cactcagatgctgtgaaacaaatca

SEQ ID NO: 141954 - DNA, 25 bp, Artificial
  Probe
attgaattctggttggcttgtgaag

SEQ ID NO: 141955 - DNA, 25 bp, Artificial
  Probe
aatattgactttcatactcgggaat

SEQ ID NO: 141956 - DNA, 25 bp, Artificial
  Probe
cattgaattctggttggcttgtgaa

SEQ ID NO: 141957 - DNA, 25 bp, Artificial
  Probe
tgtctttgggaaattcctaaagtct

SEQ ID NO: 141958 - DNA, 25 bp, Artificial
  Probe
cataacaaagcagagcatatataca

SEQ ID NO: 141959 - DNA, 25 bp, Artificial
  Probe
tctttgggaaattcctaaagtctga

SEQ ID NO: 141960 - DNA, 25 bp, Artificial
  Probe
gtctttgggaaattcctaaagtctg

SEQ ID NO: 141961 - DNA, 25 bp, Artificial
  Probe
tttgggaaattcctaaagtctgaat

SEQ ID NO: 141962 - DNA, 25 bp, Artificial
  Probe
atgtctttgggaaattcctaaagtc

SEQ ID NO: 141963 - DNA, 25 bp, Artificial
  Probe
cagtgaagagaacattgaattctgg

SEQ ID NO: 141964 - DNA, 25 bp, Artificial
  Probe
ctttgggaaattcctaaagtctgaa

SEQ ID NO: 141965 - DNA, 25 bp, Artificial
  Probe
gaagagaacattgaattctggttgg

SEQ ID NO: 141966 - DNA, 25 bp, Artificial
  Probe
tgaagagaacattgaattctggttg

SEQ ID NO: 141967 - DNA, 25 bp, Artificial
  Probe
gtgaagagaacattgaattctggtt

SEQ ID NO: 141968 - DNA, 25 bp, Artificial
  Probe
agtgaagagaacattgaattctggt

SEQ ID NO: 141969 - DNA, 25 bp, Artificial
  Probe
agatgctgtgaaacaaatcaatatt

SEQ ID NO: 141970 - DNA, 25 bp, Artificial
  Probe
tggcttgtgaagactataagaaaac

SEQ ID NO: 141971 - DNA, 25 bp, Artificial
  Probe
gaacattgaattctggttggcttgt

SEQ ID NO: 141972 - DNA, 25 bp, Artificial
  Probe
tcagtgaagagaacattgaattctg

SEQ ID NO: 141973 - DNA, 25 bp, Artificial
  Probe
aatgtctttgggaaattcctaaagt

SEQ ID NO: 141974 - DNA, 25 bp, Artificial
  Probe
gcagagcatatatacaaagcatttg

SEQ ID NO: 141975 - DNA, 25 bp, Artificial
  Probe
ttggcttgtgaagactataagaaaa

SEQ ID NO: 141976 - DNA, 25 bp, Artificial
  Probe
ttgaattctggttggcttgtgaaga

SEQ ID NO: 141977 - DNA, 25 bp, Artificial
  Probe
ctgtttctccgagttctgaaccttt

SEQ ID NO: 141978 - DNA, 25 bp, Artificial
  Probe
tgtttctccgagttctgaacctttg

SEQ ID NO: 141979 - DNA, 25 bp, Artificial
  Probe
gcttatggcaatggtgtaaaataat

SEQ ID NO: 141980 - DNA, 25 bp, Artificial
  Probe
tggcaatggtgtaaaataatacttt

SEQ ID NO: 141981 - DNA, 25 bp, Artificial
  Probe
gtttctccgagttctgaacctttgg

SEQ ID NO: 141982 - DNA, 25 bp, Artificial
  Probe
atggcaatggtgtaaaataatactt

SEQ ID NO: 141983 - DNA, 25 bp, Artificial
  Probe
actgtttctccgagttctgaacctt

SEQ ID NO: 141984 - DNA, 25 bp, Artificial
  Probe
tatggcaatggtgtaaaataatact

SEQ ID NO: 141985 - DNA, 25 bp, Artificial
  Probe
cactgtttctccgagttctgaacct

SEQ ID NO: 141986 - DNA, 25 bp, Artificial
  Probe
tttctccgagttctgaacctttggg

SEQ ID NO: 141987 - DNA, 25 bp, Artificial
  Probe
agaaacaaagattattttccagtgt

SEQ ID NO: 141988 - DNA, 25 bp, Artificial
  Probe
ggcaatggtgtaaaataatactttt

SEQ ID NO: 141989 - DNA, 25 bp, Artificial
  Probe
ttatggcaatggtgtaaaataatac

SEQ ID NO: 141990 - DNA, 25 bp, Artificial
  Probe
tgagaaacaaagattattttccagt

SEQ ID NO: 141991 - DNA, 25 bp, Artificial
  Probe
gagaaacaaagattattttccagtg

SEQ ID NO: 141992 - DNA, 25 bp, Artificial
  Probe
attttccagtgtatatccatttaga

SEQ ID NO: 141993 - DNA, 25 bp, Artificial
  Probe
aagattattttccagtgtatatcca

SEQ ID NO: 141994 - DNA, 25 bp, Artificial
  Probe
cttatggcaatggtgtaaaataata

SEQ ID NO: 141995 - DNA, 25 bp, Artificial
  Probe
agattattttccagtgtatatccat

SEQ ID NO: 141996 - DNA, 25 bp, Artificial
  Probe
ttgagaaacaaagattattttccag

SEQ ID NO: 141997 - DNA, 25 bp, Artificial
  Probe
gcaatggtgtaaaataatacttttc

SEQ ID NO: 141998 - DNA, 25 bp, Artificial
  Probe
aaacaaagattattttccagtgtat

SEQ ID NO: 141999 - DNA, 25 bp, Artificial
  Probe
gaaacaaagattattttccagtgta

SEQ ID NO: 142000 - DNA, 25 bp, Artificial
  Probe
ttctgcctattaatatttggaattt

SEQ ID NO: 142001 - DNA, 25 bp, Artificial
  Probe
tttctgcctattaatatttggaatt

SEQ ID NO: 142002 - DNA, 25 bp, Artificial
  Probe
tggtgtaaaataatacttttcaaca

SEQ ID NO: 142003 - DNA, 25 bp, Artificial
  Probe
tctgcctattaatatttggaatttt

SEQ ID NO: 142004 - DNA, 25 bp, Artificial
  Probe
ttaaccataatgcacatcttacagt

SEQ ID NO: 142005 - DNA, 25 bp, Artificial
  Probe
taaccataatgcacatcttacagtg

SEQ ID NO: 142006 - DNA, 25 bp, Artificial
  Probe
gtcgtttaaccataatgcacatctt

SEQ ID NO: 142007 - DNA, 25 bp, Artificial
  Probe
aagtcgtttaaccataatgcacatc

SEQ ID NO: 142008 - DNA, 25 bp, Artificial
  Probe
gaagtcgtttaaccataatgcacat

SEQ ID NO: 142009 - DNA, 25 bp, Artificial
  Probe
agtcgtttaaccataatgcacatct

SEQ ID NO: 142010 - DNA, 25 bp, Artificial
  Probe
gaatccatacgggagaaagacctta

SEQ ID NO: 142011 - DNA, 25 bp, Artificial
  Probe
tgtgggaagtcgtttaaccataatg

SEQ ID NO: 142012 - DNA, 25 bp, Artificial
  Probe
gtgtgggaagtcgtttaaccataat

SEQ ID NO: 142013 - DNA, 25 bp, Artificial
  Probe
cgtttaaccataatgcacatcttac

SEQ ID NO: 142014 - DNA, 25 bp, Artificial
  Probe
tcgtttaaccataatgcacatctta

SEQ ID NO: 142015 - DNA, 25 bp, Artificial
  Probe
aatccatacgggagaaagaccttac

SEQ ID NO: 142016 - DNA, 25 bp, Artificial
  Probe
aagagaatccatacgggagaaagac

SEQ ID NO: 142017 - DNA, 25 bp, Artificial
  Probe
caagagaatccatacgggagaaaga

SEQ ID NO: 142018 - DNA, 25 bp, Artificial
  Probe
acaagagaatccatacgggagaaag

SEQ ID NO: 142019 - DNA, 25 bp, Artificial
  Probe
ggaagtcgtttaaccataatgcaca

SEQ ID NO: 142020 - DNA, 25 bp, Artificial
  Probe
cacaagagaatccatacgggagaaa

SEQ ID NO: 142021 - DNA, 25 bp, Artificial
  Probe
agtgtgggaagtcgtttaaccataa

SEQ ID NO: 142022 - DNA, 25 bp, Artificial
  Probe
ccatacgggagaaagaccttacatg

SEQ ID NO: 142023 - DNA, 25 bp, Artificial
  Probe
gtttaaccataatgcacatcttaca

SEQ ID NO: 142024 - DNA, 25 bp, Artificial
  Probe
gtgggaagtcgtttaaccataatgc

SEQ ID NO: 142025 - DNA, 25 bp, Artificial
  Probe
tttaaccataatgcacatcttacag

SEQ ID NO: 142026 - DNA, 25 bp, Artificial
  Probe
gagtgtgggaagtcgtttaaccata

SEQ ID NO: 142027 - DNA, 25 bp, Artificial
  Probe
tccatacgggagaaagaccttacat

SEQ ID NO: 142028 - DNA, 25 bp, Artificial
  Probe
atccatacgggagaaagaccttaca

SEQ ID NO: 142029 - DNA, 25 bp, Artificial
  Probe
gggaagtcgtttaaccataatgcac

SEQ ID NO: 142030 - DNA, 25 bp, Artificial
  Probe
agaatccatacgggagaaagacctt

SEQ ID NO: 142031 - DNA, 25 bp, Artificial
  Probe
gagaatccatacgggagaaagacct

SEQ ID NO: 142032 - DNA, 25 bp, Artificial
  Probe
agagaatccatacgggagaaagacc

SEQ ID NO: 142033 - DNA, 25 bp, Artificial
  Probe
tgggaagtcgtttaaccataatgca

SEQ ID NO: 142034 - DNA, 25 bp, Artificial
  Probe
atacgggagaaagaccttacatgtg

SEQ ID NO: 142035 - DNA, 25 bp, Artificial
  Probe
catacgggagaaagaccttacatgt

SEQ ID NO: 142036 - DNA, 25 bp, Artificial
  Probe
gcacaagagaatccatacgggagaa

SEQ ID NO: 142037 - DNA, 25 bp, Artificial
  Probe
agaaagaccttacatgtgccaagag

SEQ ID NO: 142038 - DNA, 25 bp, Artificial
  Probe
gagaaagaccttacatgtgccaaga

SEQ ID NO: 142039 - DNA, 25 bp, Artificial
  Probe
gaaagaccttacatgtgccaagagt

SEQ ID NO: 142040 - DNA, 25 bp, Artificial
  Probe
aaagaccttacatgtgccaagagtg

SEQ ID NO: 142041 - DNA, 25 bp, Artificial
  Probe
ggagtgtgggaagtcgtttaaccat

SEQ ID NO: 142042 - DNA, 25 bp, Artificial
  Probe
aagaccttacatgtgccaagagtgt

SEQ ID NO: 142043 - DNA, 25 bp, Artificial
  Probe
ggagaaagaccttacatgtgccaag

SEQ ID NO: 142044 - DNA, 25 bp, Artificial
  Probe
cttacatgtgccaagagtgtggaaa

SEQ ID NO: 142045 - DNA, 25 bp, Artificial
  Probe
agaccttacatgtgccaagagtgtg

SEQ ID NO: 142046 - DNA, 25 bp, Artificial
  Probe
tacgggagaaagaccttacatgtgc

SEQ ID NO: 142047 - DNA, 25 bp, Artificial
  Probe
gggagaaagaccttacatgtgccaa

SEQ ID NO: 142048 - DNA, 25 bp, Artificial
  Probe
ccttacatgtgccaagagtgtggaa

SEQ ID NO: 142049 - DNA, 25 bp, Artificial
  Probe
aagttcacacctcatcagacatcag

SEQ ID NO: 142050 - DNA, 25 bp, Artificial
  Probe
gttcacacctcatcagacatcagaa

SEQ ID NO: 142051 - DNA, 25 bp, Artificial
  Probe
agttcacacctcatcagacatcaga

SEQ ID NO: 142052 - DNA, 25 bp, Artificial
  Probe
gaaagttcacacctcatcagacatc

SEQ ID NO: 142053 - DNA, 25 bp, Artificial
  Probe
agaaagttcacacctcatcagacat

SEQ ID NO: 142054 - DNA, 25 bp, Artificial
  Probe
aaagttcacacctcatcagacatca

SEQ ID NO: 142055 - DNA, 25 bp, Artificial
  Probe
ttcacacctcatcagacatcagaaa

SEQ ID NO: 142056 - DNA, 25 bp, Artificial
  Probe
gaagtcgttcagagaaagttcacac

SEQ ID NO: 142057 - DNA, 25 bp, Artificial
  Probe
aatccatcttggtgagaagccttac

SEQ ID NO: 142058 - DNA, 25 bp, Artificial
  Probe
gttcagagaaagttcacacctcatc

SEQ ID NO: 142059 - DNA, 25 bp, Artificial
  Probe
ttcagagaaagttcacacctcatca

SEQ ID NO: 142060 - DNA, 25 bp, Artificial
  Probe
agagaaagttcacacctcatcagac

SEQ ID NO: 142061 - DNA, 25 bp, Artificial
  Probe
cagagaaagttcacacctcatcaga

SEQ ID NO: 142062 - DNA, 25 bp, Artificial
  Probe
tcagagaaagttcacacctcatcag

SEQ ID NO: 142063 - DNA, 25 bp, Artificial
  Probe
gagaaagttcacacctcatcagaca

SEQ ID NO: 142064 - DNA, 25 bp, Artificial
  Probe
ggaagtcgttcagagaaagttcaca

SEQ ID NO: 142065 - DNA, 25 bp, Artificial
  Probe
aaatccatcttggtgagaagcctta

SEQ ID NO: 142066 - DNA, 25 bp, Artificial
  Probe
aagtcgttcagagaaagttcacacc

SEQ ID NO: 142067 - DNA, 25 bp, Artificial
  Probe
ctcatcagacatcagaaaatccatc

SEQ ID NO: 142068 - DNA, 25 bp, Artificial
  Probe
cctcatcagacatcagaaaatccat

SEQ ID NO: 142069 - DNA, 25 bp, Artificial
  Probe
acacctcatcagacatcagaaaatc

SEQ ID NO: 142070 - DNA, 25 bp, Artificial
  Probe
cgttcagagaaagttcacacctcat

SEQ ID NO: 142071 - DNA, 25 bp, Artificial
  Probe
cacacctcatcagacatcagaaaat

SEQ ID NO: 142072 - DNA, 25 bp, Artificial
  Probe
tcatcagacatcagaaaatccatct

SEQ ID NO: 142073 - DNA, 25 bp, Artificial
  Probe
cacctcatcagacatcagaaaatcc

SEQ ID NO: 142074 - DNA, 25 bp, Artificial
  Probe
atcagacatcagaaaatccatcttg

SEQ ID NO: 142075 - DNA, 25 bp, Artificial
  Probe
catcagacatcagaaaatccatctt

SEQ ID NO: 142076 - DNA, 25 bp, Artificial
  Probe
gggaagtcgttcagagaaagttcac

SEQ ID NO: 142077 - DNA, 25 bp, Artificial
  Probe
acctcatcagacatcagaaaatcca

SEQ ID NO: 142078 - DNA, 25 bp, Artificial
  Probe
tcacacctcatcagacatcagaaaa

SEQ ID NO: 142079 - DNA, 25 bp, Artificial
  Probe
atccatcttggtgagaagccttacc

SEQ ID NO: 142080 - DNA, 25 bp, Artificial
  Probe
gtcgttcagagaaagttcacacctc

SEQ ID NO: 142081 - DNA, 25 bp, Artificial
  Probe
agtcgttcagagaaagttcacacct

SEQ ID NO: 142082 - DNA, 25 bp, Artificial
  Probe
tcgttcagagaaagttcacacctca

SEQ ID NO: 142083 - DNA, 25 bp, Artificial
  Probe
atcagaaaatccatcttggtgagaa

SEQ ID NO: 142084 - DNA, 25 bp, Artificial
  Probe
tcagaaaatccatcttggtgagaag

SEQ ID NO: 142085 - DNA, 25 bp, Artificial
  Probe
catcagaaaatccatcttggtgaga

SEQ ID NO: 142086 - DNA, 25 bp, Artificial
  Probe
tcagacatcagaaaatccatcttgg

SEQ ID NO: 142087 - DNA, 25 bp, Artificial
  Probe
acatcagaaaatccatcttggtgag

SEQ ID NO: 142088 - DNA, 25 bp, Artificial
  Probe
gacatcagaaaatccatcttggtga

SEQ ID NO: 142089 - DNA, 25 bp, Artificial
  Probe
agacatcagaaaatccatcttggtg

SEQ ID NO: 142090 - DNA, 25 bp, Artificial
  Probe
cagacatcagaaaatccatcttggt

SEQ ID NO: 142091 - DNA, 25 bp, Artificial
  Probe
cagaaaatccatcttggtgagaagc

SEQ ID NO: 142092 - DNA, 25 bp, Artificial
  Probe
cgggaagtcgttcagagaaagttca

SEQ ID NO: 142093 - DNA, 25 bp, Artificial
  Probe
aaaatccatcttggtgagaagcctt

SEQ ID NO: 142094 - DNA, 25 bp, Artificial
  Probe
attcccagctaagtcttcatcagag

SEQ ID NO: 142095 - DNA, 25 bp, Artificial
  Probe
gattcccagctaagtcttcatcaga

SEQ ID NO: 142096 - DNA, 25 bp, Artificial
  Probe
cagcatcacactattcacactggtg

SEQ ID NO: 142097 - DNA, 25 bp, Artificial
  Probe
acactggtgagaaaccctatgaatg

SEQ ID NO: 142098 - DNA, 25 bp, Artificial
  Probe
cacactggtgagaaaccctatgaat

SEQ ID NO: 142099 - DNA, 25 bp, Artificial
  Probe
ttcccagctaagtcttcatcagaga

SEQ ID NO: 142100 - DNA, 25 bp, Artificial
  Probe
tttagtcgtgattcccagctaagtc

SEQ ID NO: 142101 - DNA, 25 bp, Artificial
  Probe
ctttagtcgtgattcccagctaagt

SEQ ID NO: 142102 - DNA, 25 bp, Artificial
  Probe
tagtcgtgattcccagctaagtctt

SEQ ID NO: 142103 - DNA, 25 bp, Artificial
  Probe
atcacactattcacactggtgagaa

SEQ ID NO: 142104 - DNA, 25 bp, Artificial
  Probe
cctttagtcgtgattcccagctaag

SEQ ID NO: 142105 - DNA, 25 bp, Artificial
  Probe
cgtgattcccagctaagtcttcatc

SEQ ID NO: 142106 - DNA, 25 bp, Artificial
  Probe
ttagtcgtgattcccagctaagtct

SEQ ID NO: 142107 - DNA, 25 bp, Artificial
  Probe
gagaaaccctatgaatgcaagcagt

SEQ ID NO: 142108 - DNA, 25 bp, Artificial
  Probe
tgagaaaccctatgaatgcaagcag

SEQ ID NO: 142109 - DNA, 25 bp, Artificial
  Probe
catcacactattcacactggtgaga

SEQ ID NO: 142110 - DNA, 25 bp, Artificial
  Probe
tgattcccagctaagtcttcatcag

SEQ ID NO: 142111 - DNA, 25 bp, Artificial
  Probe
agaaaccctatgaatgcaagcagtg

SEQ ID NO: 142112 - DNA, 25 bp, Artificial
  Probe
gtgagaaaccctatgaatgcaagca

SEQ ID NO: 142113 - DNA, 25 bp, Artificial
  Probe
cactggtgagaaaccctatgaatgc

SEQ ID NO: 142114 - DNA, 25 bp, Artificial
  Probe
tcgtgattcccagctaagtcttcat

SEQ ID NO: 142115 - DNA, 25 bp, Artificial
  Probe
gtgattcccagctaagtcttcatca

SEQ ID NO: 142116 - DNA, 25 bp, Artificial
  Probe
gtcccagcatcacactattcacact

SEQ ID NO: 142117 - DNA, 25 bp, Artificial
  Probe
gaaaccctatgaatgcaagcagtgt

SEQ ID NO: 142118 - DNA, 25 bp, Artificial
  Probe
agtcgtgattcccagctaagtcttc

SEQ ID NO: 142119 - DNA, 25 bp, Artificial
  Probe
tggtgagaaaccctatgaatgcaag

SEQ ID NO: 142120 - DNA, 25 bp, Artificial
  Probe
ctggtgagaaaccctatgaatgcaa

SEQ ID NO: 142121 - DNA, 25 bp, Artificial
  Probe
tattcacactggtgagaaaccctat

SEQ ID NO: 142122 - DNA, 25 bp, Artificial
  Probe
aaaccctatgaatgcaagcagtgtg

SEQ ID NO: 142123 - DNA, 25 bp, Artificial
  Probe
ctatgaatgcaagcagtgtgggaag

SEQ ID NO: 142124 - DNA, 25 bp, Artificial
  Probe
tcccagcatcacactattcacactg

SEQ ID NO: 142125 - DNA, 25 bp, Artificial
  Probe
ctgtcccagcatcacactattcaca

SEQ ID NO: 142126 - DNA, 25 bp, Artificial
  Probe
ctattcacactggtgagaaacccta

SEQ ID NO: 142127 - DNA, 25 bp, Artificial
  Probe
cacactattcacactggtgagaaac

SEQ ID NO: 142128 - DNA, 25 bp, Artificial
  Probe
tcacactattcacactggtgagaaa

SEQ ID NO: 142129 - DNA, 25 bp, Artificial
  Probe
tgtcccagcatcacactattcacac

SEQ ID NO: 142130 - DNA, 25 bp, Artificial
  Probe
gtcgtgattcccagctaagtcttca

SEQ ID NO: 142131 - DNA, 25 bp, Artificial
  Probe
gcatcacactattcacactggtgag

SEQ ID NO: 142132 - DNA, 25 bp, Artificial
  Probe
tttgtccagagtgtgggaaatcgtt

SEQ ID NO: 142133 - DNA, 25 bp, Artificial
  Probe
attcacactggtgagaaaccctatg

SEQ ID NO: 142134 - DNA, 25 bp, Artificial
  Probe
actggtgagaaaccctatgaatgca

SEQ ID NO: 142135 - DNA, 25 bp, Artificial
  Probe
acactattcacactggtgagaaacc

SEQ ID NO: 142136 - DNA, 25 bp, Artificial
  Probe
agcatcacactattcacactggtga

SEQ ID NO: 142137 - DNA, 25 bp, Artificial
  Probe
gcctttagtcgtgattcccagctaa

SEQ ID NO: 142138 - DNA, 25 bp, Artificial
  Probe
ggtgagaaaccctatgaatgcaagc

SEQ ID NO: 142139 - DNA, 25 bp, Artificial
  Probe
ttcatactggagagaagccttacaa

SEQ ID NO: 142140 - DNA, 25 bp, Artificial
  Probe
gagaagccttacaagtgtgaagaat

SEQ ID NO: 142141 - DNA, 25 bp, Artificial
  Probe
agaagccttacaagtgtgaagaatg

SEQ ID NO: 142142 - DNA, 25 bp, Artificial
  Probe
gttcatactggagagaagccttaca

SEQ ID NO: 142143 - DNA, 25 bp, Artificial
  Probe
gaagccttacaagtgtgaagaatgt

SEQ ID NO: 142144 - DNA, 25 bp, Artificial
  Probe
aagccttacaagtgtgaagaatgtg

SEQ ID NO: 142145 - DNA, 25 bp, Artificial
  Probe
ggttcatactggagagaagccttac

SEQ ID NO: 142146 - DNA, 25 bp, Artificial
  Probe
cttacaagtgtgaagaatgtggcaa

SEQ ID NO: 142147 - DNA, 25 bp, Artificial
  Probe
gcaaacacttcaatcaaacttcaaa

SEQ ID NO: 142148 - DNA, 25 bp, Artificial
  Probe
atactggagagaagccttacaaatg

SEQ ID NO: 142149 - DNA, 25 bp, Artificial
  Probe
catactggagagaagccttacaaat

SEQ ID NO: 142150 - DNA, 25 bp, Artificial
  Probe
ggagaagccttacaagtgtgaagaa

SEQ ID NO: 142151 - DNA, 25 bp, Artificial
  Probe
ggcaaacacttcaatcaaacttcaa

SEQ ID NO: 142152 - DNA, 25 bp, Artificial
  Probe
tcatactggagagaagccttacaaa

SEQ ID NO: 142153 - DNA, 25 bp, Artificial
  Probe
acttcaatcaaacttcaaatcttgc

SEQ ID NO: 142154 - DNA, 25 bp, Artificial
  Probe
tggcaaacacttcaatcaaacttca

SEQ ID NO: 142155 - DNA, 25 bp, Artificial
  Probe
acacttcaatcaaacttcaaatctt

SEQ ID NO: 142156 - DNA, 25 bp, Artificial
  Probe
aacacttcaatcaaacttcaaatct

SEQ ID NO: 142157 - DNA, 25 bp, Artificial
  Probe
agccttacaagtgtgaagaatgtgg

SEQ ID NO: 142158 - DNA, 25 bp, Artificial
  Probe
ttacaagtgtgaagaatgtggcaaa

SEQ ID NO: 142159 - DNA, 25 bp, Artificial
  Probe
caaacacttcaatcaaacttcaaat

SEQ ID NO: 142160 - DNA, 25 bp, Artificial
  Probe
ccatcaagtaatccacactggtgaa

SEQ ID NO: 142161 - DNA, 25 bp, Artificial
  Probe
tactggagagaagccttacaaatgc

SEQ ID NO: 142162 - DNA, 25 bp, Artificial
  Probe
gaatgtggcaaacacttcaatcaaa

SEQ ID NO: 142163 - DNA, 25 bp, Artificial
  Probe
cacttcaatcaaacttcaaatcttg

SEQ ID NO: 142164 - DNA, 25 bp, Artificial
  Probe
aatgtggcaaacacttcaatcaaac

SEQ ID NO: 142165 - DNA, 25 bp, Artificial
  Probe
ccttacaagtgtgaagaatgtggca

SEQ ID NO: 142166 - DNA, 25 bp, Artificial
  Probe
aaacacttcaatcaaacttcaaatc

SEQ ID NO: 142167 - DNA, 25 bp, Artificial
  Probe
attggagggttcatactggagagaa

SEQ ID NO: 142168 - DNA, 25 bp, Artificial
  Probe
catcaagtaatccacactggtgaaa

SEQ ID NO: 142169 - DNA, 25 bp, Artificial
  Probe
gtggcaaacacttcaatcaaacttc

SEQ ID NO: 142170 - DNA, 25 bp, Artificial
  Probe
agaatgtggcaaacacttcaatcaa

SEQ ID NO: 142171 - DNA, 25 bp, Artificial
  Probe
aagaatgtggcaaacacttcaatca

SEQ ID NO: 142172 - DNA, 25 bp, Artificial
  Probe
tacaagtgtgaagaatgtggcaaac

SEQ ID NO: 142173 - DNA, 25 bp, Artificial
  Probe
atgtggcaaacacttcaatcaaact

SEQ ID NO: 142174 - DNA, 25 bp, Artificial
  Probe
aagacattggagggttcatactgga

SEQ ID NO: 142175 - DNA, 25 bp, Artificial
  Probe
tgtggcaaacacttcaatcaaactt

SEQ ID NO: 142176 - DNA, 25 bp, Artificial
  Probe
cttcaatcaaacttcaaatcttgca

SEQ ID NO: 142177 - DNA, 25 bp, Artificial
  Probe
cattggagggttcatactggagaga

SEQ ID NO: 142178 - DNA, 25 bp, Artificial
  Probe
caagacattggagggttcatactgg

SEQ ID NO: 142179 - DNA, 25 bp, Artificial
  Probe
gagaagccttacaaatgcagtgaat

SEQ ID NO: 142180 - DNA, 25 bp, Artificial
  Probe
gggttcatactggagagaagcctta

SEQ ID NO: 142181 - DNA, 25 bp, Artificial
  Probe
ttggagggttcatactggagagaag

SEQ ID NO: 142182 - DNA, 25 bp, Artificial
  Probe
agaagccttacaaatgcagtgaatg

SEQ ID NO: 142183 - DNA, 25 bp, Artificial
  Probe
acattggagggttcatactggagag

SEQ ID NO: 142184 - DNA, 25 bp, Artificial
  Probe
gttagtcagagtgcaaatcttgttg

SEQ ID NO: 142185 - DNA, 25 bp, Artificial
  Probe
ttagtcagagtgcaaatcttgttgt

SEQ ID NO: 142186 - DNA, 25 bp, Artificial
  Probe
tagtcagagtgcaaatcttgttgtg

SEQ ID NO: 142187 - DNA, 25 bp, Artificial
  Probe
gaagtcgttagtcagagtgcaaatc

SEQ ID NO: 142188 - DNA, 25 bp, Artificial
  Probe
cgttagtcagagtgcaaatcttgtt

SEQ ID NO: 142189 - DNA, 25 bp, Artificial
  Probe
agtcgttagtcagagtgcaaatctt

SEQ ID NO: 142190 - DNA, 25 bp, Artificial
  Probe
aagtcgttagtcagagtgcaaatct

SEQ ID NO: 142191 - DNA, 25 bp, Artificial
  Probe
ccttcattcagagtgcaaccttgtt

SEQ ID NO: 142192 - DNA, 25 bp, Artificial
  Probe
gtcgttagtcagagtgcaaatcttg

SEQ ID NO: 142193 - DNA, 25 bp, Artificial
  Probe
tcgttagtcagagtgcaaatcttgt

SEQ ID NO: 142194 - DNA, 25 bp, Artificial
  Probe
ggaagtcgttagtcagagtgcaaat

SEQ ID NO: 142195 - DNA, 25 bp, Artificial
  Probe
aatcttgttgtgccatcaacgaatc

SEQ ID NO: 142196 - DNA, 25 bp, Artificial
  Probe
gagtgtgggaagtcgttagtcagag

SEQ ID NO: 142197 - DNA, 25 bp, Artificial
  Probe
cagagtgtgggaagtcgttagtcag

SEQ ID NO: 142198 - DNA, 25 bp, Artificial
  Probe
agagtgtgggaagtcgttagtcaga

SEQ ID NO: 142199 - DNA, 25 bp, Artificial
  Probe
cttcattcagagtgcaaccttgttg

SEQ ID NO: 142200 - DNA, 25 bp, Artificial
  Probe
gtgtgggaagtcgttagtcagagtg

SEQ ID NO: 142201 - DNA, 25 bp, Artificial
  Probe
agtgtgggaagtcgttagtcagagt

SEQ ID NO: 142202 - DNA, 25 bp, Artificial
  Probe
aaatcttgttgtgccatcaacgaat

SEQ ID NO: 142203 - DNA, 25 bp, Artificial
  Probe
ttcattcagagtgcaaccttgttgt

SEQ ID NO: 142204 - DNA, 25 bp, Artificial
  Probe
atcttgttgtgccatcaacgaatcc

SEQ ID NO: 142205 - DNA, 25 bp, Artificial
  Probe
caaatcttgttgtgccatcaacgaa

SEQ ID NO: 142206 - DNA, 25 bp, Artificial
  Probe
ctttgagtgtcatgagtgtgggaag

SEQ ID NO: 142207 - DNA, 25 bp, Artificial
  Probe
tcattcagagtgcaaccttgttgtg

SEQ ID NO: 142208 - DNA, 25 bp, Artificial
  Probe
gggaagtcgttagtcagagtgcaaa

SEQ ID NO: 142209 - DNA, 25 bp, Artificial
  Probe
caaccttgttgtgcatcagaggatc

SEQ ID NO: 142210 - DNA, 25 bp, Artificial
  Probe
agtgcaaatcttgttgtgccatcaa

SEQ ID NO: 142211 - DNA, 25 bp, Artificial
  Probe
agagtgcaaatcttgttgtgccatc

SEQ ID NO: 142212 - DNA, 25 bp, Artificial
  Probe
agtcagagtgcaaatcttgttgtgc

SEQ ID NO: 142213 - DNA, 25 bp, Artificial
  Probe
cttgttgtgccatcaacgaatccac

SEQ ID NO: 142214 - DNA, 25 bp, Artificial
  Probe
gagaagccctttgagtgtcatgagt

SEQ ID NO: 142215 - DNA, 25 bp, Artificial
  Probe
gagtgcaaatcttgttgtgccatca

SEQ ID NO: 142216 - DNA, 25 bp, Artificial
  Probe
cagagtgcaaatcttgttgtgccat

SEQ ID NO: 142217 - DNA, 25 bp, Artificial
  Probe
tttgagtgtcatgagtgtgggaagg

SEQ ID NO: 142218 - DNA, 25 bp, Artificial
  Probe
cctttgagtgtcatgagtgtgggaa

SEQ ID NO: 142219 - DNA, 25 bp, Artificial
  Probe
gtgcaaatcttgttgtgccatcaac

SEQ ID NO: 142220 - DNA, 25 bp, Artificial
  Probe
agaagccctttgagtgtcatgagtg

SEQ ID NO: 142221 - DNA, 25 bp, Artificial
  Probe
gaagccctttgagtgtcatgagtgt

SEQ ID NO: 142222 - DNA, 25 bp, Artificial
  Probe
gtcagagtgcaaatcttgttgtgcc

SEQ ID NO: 142223 - DNA, 25 bp, Artificial
  Probe
ggagaagccctttgagtgtcatgag

SEQ ID NO: 142224 - DNA, 25 bp, Artificial
  Probe
gcaaatcttgttgtgccatcaacga

SEQ ID NO: 142225 - DNA, 25 bp, Artificial
  Probe
aaccttgttgtgcatcagaggatcc

SEQ ID NO: 142226 - DNA, 25 bp, Artificial
  Probe
cttgttgtgcatcagaggatccaca

SEQ ID NO: 142227 - DNA, 25 bp, Artificial
  Probe
gaatggaacctcatcacaacactat

SEQ ID NO: 142228 - DNA, 25 bp, Artificial
  Probe
aatggaacctcatcacaacactatg

SEQ ID NO: 142229 - DNA, 25 bp, Artificial
  Probe
tgctacataatagacattgtgccaa

SEQ ID NO: 142230 - DNA, 25 bp, Artificial
  Probe
ttgctacataatagacattgtgcca

SEQ ID NO: 142231 - DNA, 25 bp, Artificial
  Probe
ggaatggaacctcatcacaacacta

SEQ ID NO: 142232 - DNA, 25 bp, Artificial
  Probe
aatcaggattacacacatgagaatt

SEQ ID NO: 142233 - DNA, 25 bp, Artificial
  Probe
aggttatgcagtcaatggtatagaa

SEQ ID NO: 142234 - DNA, 25 bp, Artificial
  Probe
taatatcgccagcgttaagatagaa

SEQ ID NO: 142235 - DNA, 25 bp, Artificial
  Probe
ttaatatcgccagcgttaagataga

SEQ ID NO: 142236 - DNA, 25 bp, Artificial
  Probe
aaagtaacatttcagaagagcacaa

SEQ ID NO: 142237 - DNA, 25 bp, Artificial
  Probe
aagtaacatttcagaagagcacaat

SEQ ID NO: 142238 - DNA, 25 bp, Artificial
  Probe
aacaccaaggttcttaatatcgcca

SEQ ID NO: 142239 - DNA, 25 bp, Artificial
  Probe
taggttatgcagtcaatggtataga

SEQ ID NO: 142240 - DNA, 25 bp, Artificial
  Probe
ggttatgcagtcaatggtatagaat

SEQ ID NO: 142241 - DNA, 25 bp, Artificial
  Probe
ctgttcagtctgtaatttcggaatg

SEQ ID NO: 142242 - DNA, 25 bp, Artificial
  Probe
ttcagaagagcacaatatacacaaa

SEQ ID NO: 142243 - DNA, 25 bp, Artificial
  Probe
tttcagaagagcacaatatacacaa

SEQ ID NO: 142244 - DNA, 25 bp, Artificial
  Probe
acaccaaggttcttaatatcgccag

SEQ ID NO: 142245 - DNA, 25 bp, Artificial
  Probe
agacattgtgccaaataattccttt

SEQ ID NO: 142246 - DNA, 25 bp, Artificial
  Probe
atttcagaagagcacaatatacaca

SEQ ID NO: 142247 - DNA, 25 bp, Artificial
  Probe
acatttcagaagagcacaatataca

SEQ ID NO: 142248 - DNA, 25 bp, Artificial
  Probe
agtaacatttcagaagagcacaata

SEQ ID NO: 142249 - DNA, 25 bp, Artificial
  Probe
gaaacaccaaggttcttaatatcgc

SEQ ID NO: 142250 - DNA, 25 bp, Artificial
  Probe
aattccactaagaaacaccaaggtt

SEQ ID NO: 142251 - DNA, 25 bp, Artificial
  Probe
tgttcagtctgtaatttcggaatga

SEQ ID NO: 142252 - DNA, 25 bp, Artificial
  Probe
gttcagtctgtaatttcggaatgat

SEQ ID NO: 142253 - DNA, 25 bp, Artificial
  Probe
catttcagaagagcacaatatacac

SEQ ID NO: 142254 - DNA, 25 bp, Artificial
  Probe
tagacattgtgccaaataattcctt

SEQ ID NO: 142255 - DNA, 25 bp, Artificial
  Probe
aacttacaaatcaggattacacaca

SEQ ID NO: 142256 - DNA, 25 bp, Artificial
  Probe
gctacataatagacattgtgccaaa

SEQ ID NO: 142257 - DNA, 25 bp, Artificial
  Probe
tttgctacataatagacattgtgcc

SEQ ID NO: 142258 - DNA, 25 bp, Artificial
  Probe
attccactaagaaacaccaaggttc

SEQ ID NO: 142259 - DNA, 25 bp, Artificial
  Probe
atagacattgtgccaaataattcct

SEQ ID NO: 142260 - DNA, 25 bp, Artificial
  Probe
ataggttatgcagtcaatggtatag

SEQ ID NO: 142261 - DNA, 25 bp, Artificial
  Probe
acttacaaatcaggattacacacat

SEQ ID NO: 142262 - DNA, 25 bp, Artificial
  Probe
aaggttcttaatatcgccagcgtta

SEQ ID NO: 142263 - DNA, 25 bp, Artificial
  Probe
tacacacatgagaattccactaaga

SEQ ID NO: 142264 - DNA, 25 bp, Artificial
  Probe
tcagtctgtaatttcggaatgatct

SEQ ID NO: 142265 - DNA, 25 bp, Artificial
  Probe
acacacatgagaattccactaagaa

SEQ ID NO: 142266 - DNA, 25 bp, Artificial
  Probe
aggttcttaatatcgccagcgttaa

SEQ ID NO: 142267 - DNA, 25 bp, Artificial
  Probe
cagtctgtaatttcggaatgatcta

SEQ ID NO: 142268 - DNA, 25 bp, Artificial
  Probe
aaacaccaaggttcttaatatcgcc

SEQ ID NO: 142269 - DNA, 25 bp, Artificial
  Probe
ttcagtctgtaatttcggaatgatc

SEQ ID NO: 142270 - DNA, 25 bp, Artificial
  Probe
acaaatcaggattacacacatgaga

SEQ ID NO: 142271 - DNA, 25 bp, Artificial
  Probe
ttacacacatgagaattccactaag

SEQ ID NO: 142272 - DNA, 25 bp, Artificial
  Probe
actccttcattacttgcttcctgta

SEQ ID NO: 142273 - DNA, 25 bp, Artificial
  Probe
ctcaacattgtagaaggaaccactt

SEQ ID NO: 142274 - DNA, 25 bp, Artificial
  Probe
ataactcttatggtggtagtctggt

SEQ ID NO: 142275 - DNA, 25 bp, Artificial
  Probe
ccgtaattctccactgaactatcat

SEQ ID NO: 142276 - DNA, 25 bp, Artificial
  Probe
taactcttatggtggtagtctggtg

SEQ ID NO: 142277 - DNA, 25 bp, Artificial
  Probe
tataactcttatggtggtagtctgg

SEQ ID NO: 142278 - DNA, 25 bp, Artificial
  Probe
gaacactccttcattacttgcttcc

SEQ ID NO: 142279 - DNA, 25 bp, Artificial
  Probe
aacactccttcattacttgcttcct

SEQ ID NO: 142280 - DNA, 25 bp, Artificial
  Probe
ctcttatggtggtagtctggtgatg

SEQ ID NO: 142281 - DNA, 25 bp, Artificial
  Probe
cgtaattctccactgaactatcatg

SEQ ID NO: 142282 - DNA, 25 bp, Artificial
  Probe
ctccttcattacttgcttcctgtaa

SEQ ID NO: 142283 - DNA, 25 bp, Artificial
  Probe
cactccttcattacttgcttcctgt

SEQ ID NO: 142284 - DNA, 25 bp, Artificial
  Probe
acactccttcattacttgcttcctg

SEQ ID NO: 142285 - DNA, 25 bp, Artificial
  Probe
ctttcggtttgagagtagagtagtt

SEQ ID NO: 142286 - DNA, 25 bp, Artificial
  Probe
tttcggtttgagagtagagtagttg

SEQ ID NO: 142287 - DNA, 25 bp, Artificial
  Probe
gggaaatatgaataaacgacggaaa

SEQ ID NO: 142288 - DNA, 25 bp, Artificial
  Probe
actcttatggtggtagtctggtgat

SEQ ID NO: 142289 - DNA, 25 bp, Artificial
  Probe
gccgtaattctccactgaactatca

SEQ ID NO: 142290 - DNA, 25 bp, Artificial
  Probe
tcggtttgagagtagagtagttgaa

SEQ ID NO: 142291 - DNA, 25 bp, Artificial
  Probe
ttcggtttgagagtagagtagttga

SEQ ID NO: 142292 - DNA, 25 bp, Artificial
  Probe
ctgtttgcctatctttgagtattga

SEQ ID NO: 142293 - DNA, 25 bp, Artificial
  Probe
aactcttatggtggtagtctggtga

SEQ ID NO: 142294 - DNA, 25 bp, Artificial
  Probe
ggtttgagagtagagtagttgaaca

SEQ ID NO: 142295 - DNA, 25 bp, Artificial
  Probe
tgcttcctgtaaatcaattctgtag

SEQ ID NO: 142296 - DNA, 25 bp, Artificial
  Probe
tcaacattgtagaaggaaccacttt

SEQ ID NO: 142297 - DNA, 25 bp, Artificial
  Probe
tgtttgcctatctttgagtattgaa

SEQ ID NO: 142298 - DNA, 25 bp, Artificial
  Probe
tctttcggtttgagagtagagtagt

SEQ ID NO: 142299 - DNA, 25 bp, Artificial
  Probe
gtagaaggaaccactttatttgtca

SEQ ID NO: 142300 - DNA, 25 bp, Artificial
  Probe
tgtagaaggaaccactttatttgtc

SEQ ID NO: 142301 - DNA, 25 bp, Artificial
  Probe
gcttcctgtaaatcaattctgtaga

SEQ ID NO: 142302 - DNA, 25 bp, Artificial
  Probe
caacattgtagaaggaaccacttta

SEQ ID NO: 142303 - DNA, 25 bp, Artificial
  Probe
gtttgagagtagagtagttgaacac

SEQ ID NO: 142304 - DNA, 25 bp, Artificial
  Probe
cggtttgagagtagagtagttgaac

SEQ ID NO: 142305 - DNA, 25 bp, Artificial
  Probe
cttgcttcctgtaaatcaattctgt

SEQ ID NO: 142306 - DNA, 25 bp, Artificial
  Probe
acttgcttcctgtaaatcaattctg

SEQ ID NO: 142307 - DNA, 25 bp, Artificial
  Probe
tgactgtttgcctatctttgagtat

SEQ ID NO: 142308 - DNA, 25 bp, Artificial
  Probe
atgactgtttgcctatctttgagta

SEQ ID NO: 142309 - DNA, 25 bp, Artificial
  Probe
tgtgaattgttccaaactgttagaa

SEQ ID NO: 142310 - DNA, 25 bp, Artificial
  Probe
actgtttgcctatctttgagtattg

SEQ ID NO: 142311 - DNA, 25 bp, Artificial
  Probe
atataactcttatggtggtagtctg

SEQ ID NO: 142312 - DNA, 25 bp, Artificial
  Probe
atgtgaattgttccaaactgttaga

SEQ ID NO: 142313 - DNA, 25 bp, Artificial
  Probe
cctcaacattgtagaaggaaccact

SEQ ID NO: 142314 - DNA, 25 bp, Artificial
  Probe
tttgagagtagagtagttgaacact

SEQ ID NO: 142315 - DNA, 25 bp, Artificial
  Probe
gactgtttgcctatctttgagtatt

SEQ ID NO: 142316 - DNA, 25 bp, Artificial
  Probe
ttgtagaaggaaccactttatttgt

SEQ ID NO: 142317 - DNA, 25 bp, Artificial
  Probe
tctaaatggtgaagggaaatctgag

SEQ ID NO: 142318 - DNA, 25 bp, Artificial
  Probe
ctaaatggtgaagggaaatctgaga

SEQ ID NO: 142319 - DNA, 25 bp, Artificial
  Probe
gtctaaatggtgaagggaaatctga

SEQ ID NO: 142320 - DNA, 25 bp, Artificial
  Probe
atctgagatagctgttgaccaagaa

SEQ ID NO: 142321 - DNA, 25 bp, Artificial
  Probe
aatctgagatagctgttgaccaaga

SEQ ID NO: 142322 - DNA, 25 bp, Artificial
  Probe
ggtctaaatggtgaagggaaatctg

SEQ ID NO: 142323 - DNA, 25 bp, Artificial
  Probe
aatggtgaagggaaatctgagatag

SEQ ID NO: 142324 - DNA, 25 bp, Artificial
  Probe
aaatggtgaagggaaatctgagata

SEQ ID NO: 142325 - DNA, 25 bp, Artificial
  Probe
taaatggtgaagggaaatctgagat

SEQ ID NO: 142326 - DNA, 25 bp, Artificial
  Probe
tctgagatagctgttgaccaagaag

SEQ ID NO: 142327 - DNA, 25 bp, Artificial
  Probe
aacagagaagaccaagacaggaaat

SEQ ID NO: 142328 - DNA, 25 bp, Artificial
  Probe
agaagaccaagacaggaaatgagag

SEQ ID NO: 142329 - DNA, 25 bp, Artificial
  Probe
gagaagaccaagacaggaaatgaga

SEQ ID NO: 142330 - DNA, 25 bp, Artificial
  Probe
agagaagaccaagacaggaaatgag

SEQ ID NO: 142331 - DNA, 25 bp, Artificial
  Probe
gggtctaaatggtgaagggaaatct

SEQ ID NO: 142332 - DNA, 25 bp, Artificial
  Probe
cagagaagaccaagacaggaaatga

SEQ ID NO: 142333 - DNA, 25 bp, Artificial
  Probe
acagagaagaccaagacaggaaatg

SEQ ID NO: 142334 - DNA, 25 bp, Artificial
  Probe
ctgagatagctgttgaccaagaagg

SEQ ID NO: 142335 - DNA, 25 bp, Artificial
  Probe
atggtgaagggaaatctgagatagc

SEQ ID NO: 142336 - DNA, 25 bp, Artificial
  Probe
aaatctgagatagctgttgaccaag

SEQ ID NO: 142337 - DNA, 25 bp, Artificial
  Probe
gaaatctgagatagctgttgaccaa

SEQ ID NO: 142338 - DNA, 25 bp, Artificial
  Probe
caacagagaagaccaagacaggaaa

SEQ ID NO: 142339 - DNA, 25 bp, Artificial
  Probe
gaagggaaatctgagatagctgttg

SEQ ID NO: 142340 - DNA, 25 bp, Artificial
  Probe
gaagaccaagacaggaaatgagagg

SEQ ID NO: 142341 - DNA, 25 bp, Artificial
  Probe
aagggaaatctgagatagctgttga

SEQ ID NO: 142342 - DNA, 25 bp, Artificial
  Probe
tgaagggaaatctgagatagctgtt

SEQ ID NO: 142343 - DNA, 25 bp, Artificial
  Probe
ctttagaagagtagccaggaacagc

SEQ ID NO: 142344 - DNA, 25 bp, Artificial
  Probe
agggaaatctgagatagctgttgac

SEQ ID NO: 142345 - DNA, 25 bp, Artificial
  Probe
gtgaagggaaatctgagatagctgt

SEQ ID NO: 142346 - DNA, 25 bp, Artificial
  Probe
ggaaatctgagatagctgttgacca

SEQ ID NO: 142347 - DNA, 25 bp, Artificial
  Probe
ggtgaagggaaatctgagatagctg

SEQ ID NO: 142348 - DNA, 25 bp, Artificial
  Probe
gcaacagagaagaccaagacaggaa

SEQ ID NO: 142349 - DNA, 25 bp, Artificial
  Probe
gatagctgttgaccaagaaggcaag

SEQ ID NO: 142350 - DNA, 25 bp, Artificial
  Probe
gggaaatctgagatagctgttgacc

SEQ ID NO: 142351 - DNA, 25 bp, Artificial
  Probe
tggtgaagggaaatctgagatagct

SEQ ID NO: 142352 - DNA, 25 bp, Artificial
  Probe
ttcccacaactggttacctcatcta

SEQ ID NO: 142353 - DNA, 25 bp, Artificial
  Probe
agatagctgttgaccaagaaggcaa

SEQ ID NO: 142354 - DNA, 25 bp, Artificial
  Probe
ctttctctacaaggaccagggctac

SEQ ID NO: 142355 - DNA, 25 bp, Artificial
  Probe
tctttctctacaaggaccagggcta

SEQ ID NO: 142356 - DNA, 25 bp, Artificial
  Probe
gctttagaagagtagccaggaacag

SEQ ID NO: 142357 - DNA, 25 bp, Artificial
  Probe
gagatagctgttgaccaagaaggca

SEQ ID NO: 142358 - DNA, 25 bp, Artificial
  Probe
tgagatagctgttgaccaagaaggc

SEQ ID NO: 142359 - DNA, 25 bp, Artificial
  Probe
tcccacaactggttacctcatctac

SEQ ID NO: 142360 - DNA, 25 bp, Artificial
  Probe
ccacaactggttacctcatctaccg

SEQ ID NO: 142361 - DNA, 25 bp, Artificial
  Probe
aagaccaagacaggaaatgagaggc

SEQ ID NO: 142362 - DNA, 25 bp, Artificial
  Probe
agcaagaacataactcagtcagatg

SEQ ID NO: 142363 - DNA, 25 bp, Artificial
  Probe
gaacataactcagtcagatgatacg

SEQ ID NO: 142364 - DNA, 25 bp, Artificial
  Probe
gcaagaacataactcagtcagatga

SEQ ID NO: 142365 - DNA, 25 bp, Artificial
  Probe
aagaacagagcaagaacataactca

SEQ ID NO: 142366 - DNA, 25 bp, Artificial
  Probe
gagcaagaacataactcagtcagat

SEQ ID NO: 142367 - DNA, 25 bp, Artificial
  Probe
ataagaacagagcaagaacataact

SEQ ID NO: 142368 - DNA, 25 bp, Artificial
  Probe
agaacagagcaagaacataactcag

SEQ ID NO: 142369 - DNA, 25 bp, Artificial
  Probe
aacagagcaagaacataactcagtc

SEQ ID NO: 142370 - DNA, 25 bp, Artificial
  Probe
gaacagagcaagaacataactcagt

SEQ ID NO: 142371 - DNA, 25 bp, Artificial
  Probe
caagaacataactcagtcagatgat

SEQ ID NO: 142372 - DNA, 25 bp, Artificial
  Probe
taagaacagagcaagaacataactc

SEQ ID NO: 142373 - DNA, 25 bp, Artificial
  Probe
agagcaagaacataactcagtcaga

SEQ ID NO: 142374 - DNA, 25 bp, Artificial
  Probe
cagagcaagaacataactcagtcag

SEQ ID NO: 142375 - DNA, 25 bp, Artificial
  Probe
acagagcaagaacataactcagtca

SEQ ID NO: 142376 - DNA, 25 bp, Artificial
  Probe
agaacataactcagtcagatgatac

SEQ ID NO: 142377 - DNA, 25 bp, Artificial
  Probe
gtgcaggatacagttcaataagatg

SEQ ID NO: 142378 - DNA, 25 bp, Artificial
  Probe
acataactcagtcagatgatacgtt

SEQ ID NO: 142379 - DNA, 25 bp, Artificial
  Probe
aacataactcagtcagatgatacgt

SEQ ID NO: 142380 - DNA, 25 bp, Artificial
  Probe
aagaacataactcagtcagatgata

SEQ ID NO: 142381 - DNA, 25 bp, Artificial
  Probe
tataagaacagagcaagaacataac

SEQ ID NO: 142382 - DNA, 25 bp, Artificial
  Probe
ggtacttcgttgacactatcctcag

SEQ ID NO: 142383 - DNA, 25 bp, Artificial
  Probe
tgtgcaggatacagttcaataagat

SEQ ID NO: 142384 - DNA, 25 bp, Artificial
  Probe
tgagtattataagaacagagcaaga

SEQ ID NO: 142385 - DNA, 25 bp, Artificial
  Probe
gtattataagaacagagcaagaaca

SEQ ID NO: 142386 - DNA, 25 bp, Artificial
  Probe
tttctcaatttccttggaactgatt

SEQ ID NO: 142387 - DNA, 25 bp, Artificial
  Probe
agtattataagaacagagcaagaac

SEQ ID NO: 142388 - DNA, 25 bp, Artificial
  Probe
aactcagtcagatgatacgttaata

SEQ ID NO: 142389 - DNA, 25 bp, Artificial
  Probe
cataactcagtcagatgatacgtta

SEQ ID NO: 142390 - DNA, 25 bp, Artificial
  Probe
atgagtattataagaacagagcaag

SEQ ID NO: 142391 - DNA, 25 bp, Artificial
  Probe
tctcaatttccttggaactgattaa

SEQ ID NO: 142392 - DNA, 25 bp, Artificial
  Probe
ttctcaatttccttggaactgatta

SEQ ID NO: 142393 - DNA, 25 bp, Artificial
  Probe
gagtattataagaacagagcaagaa

SEQ ID NO: 142394 - DNA, 25 bp, Artificial
  Probe
cagatgatacgttaatatgaactgg

SEQ ID NO: 142395 - DNA, 25 bp, Artificial
  Probe
tcagtcagatgatacgttaatatga

SEQ ID NO: 142396 - DNA, 25 bp, Artificial
  Probe
actcagtcagatgatacgttaatat

SEQ ID NO: 142397 - DNA, 25 bp, Artificial
  Probe
tctgcggtatatgagtattataaga

SEQ ID NO: 142398 - DNA, 25 bp, Artificial
  Probe
ctcagtcagatgatacgttaatatg

SEQ ID NO: 142399 - DNA, 25 bp, Artificial
  Probe
gcggtatatgagtattataagaaca

SEQ ID NO: 142400 - DNA, 25 bp, Artificial
  Probe
tgcggtatatgagtattataagaac

SEQ ID NO: 142401 - DNA, 25 bp, Artificial
  Probe
ctcaatttccttggaactgattaaa

SEQ ID NO: 142402 - DNA, 25 bp, Artificial
  Probe
gcaggatacagttcaataagatgca

SEQ ID NO: 142403 - DNA, 25 bp, Artificial
  Probe
tgcaggatacagttcaataagatgc

SEQ ID NO: 142404 - DNA, 25 bp, Artificial
  Probe
taactcagtcagatgatacgttaat

SEQ ID NO: 142405 - DNA, 25 bp, Artificial
  Probe
ataactcagtcagatgatacgttaa

SEQ ID NO: 142406 - DNA, 25 bp, Artificial
  Probe
agatgatacgttaatatgaactggg

SEQ ID NO: 142407 - DNA, 25 bp, Artificial
  Probe
ctacattctgagatgacaacacttc

SEQ ID NO: 142408 - DNA, 25 bp, Artificial
  Probe
cctacattctgagatgacaacactt

SEQ ID NO: 142409 - DNA, 25 bp, Artificial
  Probe
agtgaagtctgaattgagattgtga

SEQ ID NO: 142410 - DNA, 25 bp, Artificial
  Probe
aagtgaagtctgaattgagattgtg

SEQ ID NO: 142411 - DNA, 25 bp, Artificial
  Probe
gtgaagtctgaattgagattgtgat

SEQ ID NO: 142412 - DNA, 25 bp, Artificial
  Probe
tacattctgagatgacaacacttca

SEQ ID NO: 142413 - DNA, 25 bp, Artificial
  Probe
tcctacattctgagatgacaacact

SEQ ID NO: 142414 - DNA, 25 bp, Artificial
  Probe
tgaagtctgaattgagattgtgatt

SEQ ID NO: 142415 - DNA, 25 bp, Artificial
  Probe
cattctgagatgacaacacttcaca

SEQ ID NO: 142416 - DNA, 25 bp, Artificial
  Probe
acattctgagatgacaacacttcac

SEQ ID NO: 142417 - DNA, 25 bp, Artificial
  Probe
attctgagatgacaacacttcacag

SEQ ID NO: 142418 - DNA, 25 bp, Artificial
  Probe
agaacattaagtggatctggacctt

SEQ ID NO: 142419 - DNA, 25 bp, Artificial
  Probe
gtcctacattctgagatgacaacac

SEQ ID NO: 142420 - DNA, 25 bp, Artificial
  Probe
gagaacattaagtggatctggacct

SEQ ID NO: 142421 - DNA, 25 bp, Artificial
  Probe
agagaacattaagtggatctggacc

SEQ ID NO: 142422 - DNA, 25 bp, Artificial
  Probe
tagagacgcatttcaagttcctaat

SEQ ID NO: 142423 - DNA, 25 bp, Artificial
  Probe
tttagagacgcatttcaagttccta

SEQ ID NO: 142424 - DNA, 25 bp, Artificial
  Probe
aagaaagagcatagtggaaagttga

SEQ ID NO: 142425 - DNA, 25 bp, Artificial
  Probe
caacaagaaagagcatagtggaaag

SEQ ID NO: 142426 - DNA, 25 bp, Artificial
  Probe
acaagaaagagcatagtggaaagtt

SEQ ID NO: 142427 - DNA, 25 bp, Artificial
  Probe
aacaagaaagagcatagtggaaagt

SEQ ID NO: 142428 - DNA, 25 bp, Artificial
  Probe
ggtcctacattctgagatgacaaca

SEQ ID NO: 142429 - DNA, 25 bp, Artificial
  Probe
tggtcctacattctgagatgacaac

SEQ ID NO: 142430 - DNA, 25 bp, Artificial
  Probe
gtggtcctacattctgagatgacaa

SEQ ID NO: 142431 - DNA, 25 bp, Artificial
  Probe
aaagagcatagtggaaagttgagag

SEQ ID NO: 142432 - DNA, 25 bp, Artificial
  Probe
gaaagagcatagtggaaagttgaga

SEQ ID NO: 142433 - DNA, 25 bp, Artificial
  Probe
agaaagagcatagtggaaagttgag

SEQ ID NO: 142434 - DNA, 25 bp, Artificial
  Probe
ctgtgaaagtgaagtctgaattgag

SEQ ID NO: 142435 - DNA, 25 bp, Artificial
  Probe
ttctgagatgacaacacttcacagt

SEQ ID NO: 142436 - DNA, 25 bp, Artificial
  Probe
cacaagaagaagcaagctgttataa

SEQ ID NO: 142437 - DNA, 25 bp, Artificial
  Probe
agagacgcatttcaagttcctaatc

SEQ ID NO: 142438 - DNA, 25 bp, Artificial
  Probe
ctcagactgttccttacacaatggt

SEQ ID NO: 142439 - DNA, 25 bp, Artificial
  Probe
tgtgaaagtgaagtctgaattgaga

SEQ ID NO: 142440 - DNA, 25 bp, Artificial
  Probe
caagaaagagcatagtggaaagttg

SEQ ID NO: 142441 - DNA, 25 bp, Artificial
  Probe
tacagccagaagaaaggatgagaat

SEQ ID NO: 142442 - DNA, 25 bp, Artificial
  Probe
agacgcatttcaagttcctaatcag

SEQ ID NO: 142443 - DNA, 25 bp, Artificial
  Probe
gagacgcatttcaagttcctaatca

SEQ ID NO: 142444 - DNA, 25 bp, Artificial
  Probe
tcagactgttccttacacaatggtc

SEQ ID NO: 142445 - DNA, 25 bp, Artificial
  Probe
agatgacaacacttcacagtctcag

SEQ ID NO: 142446 - DNA, 25 bp, Artificial
  Probe
ctgagatgacaacacttcacagtct

SEQ ID NO: 142447 - DNA, 25 bp, Artificial
  Probe
tctgagatgacaacacttcacagtc

SEQ ID NO: 142448 - DNA, 25 bp, Artificial
  Probe
ctgtggtcctacattctgagatgac

SEQ ID NO: 142449 - DNA, 25 bp, Artificial
  Probe
gtgaaagtgaagtctgaattgagat

SEQ ID NO: 142450 - DNA, 25 bp, Artificial
  Probe
ccacaagaagaagcaagctgttata

SEQ ID NO: 142451 - DNA, 25 bp, Artificial
  Probe
cactgtggtcctacattctgagatg

SEQ ID NO: 142452 - DNA, 25 bp, Artificial
  Probe
aaagaacttcattatcaccaaaggg

SEQ ID NO: 142453 - DNA, 25 bp, Artificial
  Probe
gaaagaacttcattatcaccaaagg

SEQ ID NO: 142454 - DNA, 25 bp, Artificial
  Probe
aacaagagttcaagtccaaggaaag

SEQ ID NO: 142455 - DNA, 25 bp, Artificial
  Probe
caagagttcaagtccaaggaaagtg

SEQ ID NO: 142456 - DNA, 25 bp, Artificial
  Probe
aaatatactcaagagcatttgtgga

SEQ ID NO: 142457 - DNA, 25 bp, Artificial
  Probe
acaagagttcaagtccaaggaaagt

SEQ ID NO: 142458 - DNA, 25 bp, Artificial
  Probe
aagaacttcattatcaccaaagggt

SEQ ID NO: 142459 - DNA, 25 bp, Artificial
  Probe
aagagttcaagtccaaggaaagtga

SEQ ID NO: 142460 - DNA, 25 bp, Artificial
  Probe
agaacttcattatcaccaaagggtc

SEQ ID NO: 142461 - DNA, 25 bp, Artificial
  Probe
aattctacctacctgctgcttcctc

SEQ ID NO: 142462 - DNA, 25 bp, Artificial
  Probe
agagttcaagtccaaggaaagtgag

SEQ ID NO: 142463 - DNA, 25 bp, Artificial
  Probe
gaacttcattatcaccaaagggtcc

SEQ ID NO: 142464 - DNA, 25 bp, Artificial
  Probe
cttgaattctacctacctgctgctt

SEQ ID NO: 142465 - DNA, 25 bp, Artificial
  Probe
ttgaattctacctacctgctgcttc

SEQ ID NO: 142466 - DNA, 25 bp, Artificial
  Probe
taaatatactcaagagcatttgtgg

SEQ ID NO: 142467 - DNA, 25 bp, Artificial
  Probe
ctcagaacaagagttcaagtccaag

SEQ ID NO: 142468 - DNA, 25 bp, Artificial
  Probe
cccaggaaatgaccaatatgtttta

SEQ ID NO: 142469 - DNA, 25 bp, Artificial
  Probe
attctacctacctgctgcttcctct

SEQ ID NO: 142470 - DNA, 25 bp, Artificial
  Probe
agagtcctcagaacaagagttcaag

SEQ ID NO: 142471 - DNA, 25 bp, Artificial
  Probe
ccccaggaaatgaccaatatgtttt

SEQ ID NO: 142472 - DNA, 25 bp, Artificial
  Probe
agaacaagagttcaagtccaaggaa

SEQ ID NO: 142473 - DNA, 25 bp, Artificial
  Probe
gagttcaagtccaaggaaagtgagg

SEQ ID NO: 142474 - DNA, 25 bp, Artificial
  Probe
ttctacctacctgctgcttcctctt

SEQ ID NO: 142475 - DNA, 25 bp, Artificial
  Probe
agtcctcagaacaagagttcaagtc

SEQ ID NO: 142476 - DNA, 25 bp, Artificial
  Probe
gagtcctcagaacaagagttcaagt

SEQ ID NO: 142477 - DNA, 25 bp, Artificial
  Probe
cagagtcctcagaacaagagttcaa

SEQ ID NO: 142478 - DNA, 25 bp, Artificial
  Probe
ttcaagtccaaggaaagtgaggaac

SEQ ID NO: 142479 - DNA, 25 bp, Artificial
  Probe
gttcaagtccaaggaaagtgaggaa

SEQ ID NO: 142480 - DNA, 25 bp, Artificial
  Probe
ccactcagagtcctcagaacaagag

SEQ ID NO: 142481 - DNA, 25 bp, Artificial
  Probe
ctcagagtcctcagaacaagagttc

SEQ ID NO: 142482 - DNA, 25 bp, Artificial
  Probe
aacttcattatcaccaaagggtccc

SEQ ID NO: 142483 - DNA, 25 bp, Artificial
  Probe
cagaacaagagttcaagtccaagga

SEQ ID NO: 142484 - DNA, 25 bp, Artificial
  Probe
tcagaacaagagttcaagtccaagg

SEQ ID NO: 142485 - DNA, 25 bp, Artificial
  Probe
cctcagaacaagagttcaagtccaa

SEQ ID NO: 142486 - DNA, 25 bp, Artificial
  Probe
tacctacctgctgcttcctcttcaa

SEQ ID NO: 142487 - DNA, 25 bp, Artificial
  Probe
ccaggaaatgaccaatatgttttat

SEQ ID NO: 142488 - DNA, 25 bp, Artificial
  Probe
tcagagtcctcagaacaagagttca

SEQ ID NO: 142489 - DNA, 25 bp, Artificial
  Probe
cttcattatcaccaaagggtcccag

SEQ ID NO: 142490 - DNA, 25 bp, Artificial
  Probe
tctacctacctgctgcttcctcttc

SEQ ID NO: 142491 - DNA, 25 bp, Artificial
  Probe
tgaaagaacttcattatcaccaaag

SEQ ID NO: 142492 - DNA, 25 bp, Artificial
  Probe
acagtcacttggatgcaggtatcag

SEQ ID NO: 142493 - DNA, 25 bp, Artificial
  Probe
gtcctcagaacaagagttcaagtcc

SEQ ID NO: 142494 - DNA, 25 bp, Artificial
  Probe
agttcaagtccaaggaaagtgagga

SEQ ID NO: 142495 - DNA, 25 bp, Artificial
  Probe
actcagagtcctcagaacaagagtt

SEQ ID NO: 142496 - DNA, 25 bp, Artificial
  Probe
gacagtcacttggatgcaggtatca

SEQ ID NO: 142497 - DNA, 25 bp, Artificial
  Probe
tctcagtgtaggaagagtgtatgtg

SEQ ID NO: 142498 - DNA, 25 bp, Artificial
  Probe
gtctcagtgtaggaagagtgtatgt

SEQ ID NO: 142499 - DNA, 25 bp, Artificial
  Probe
cgtctcagtgtaggaagagtgtatg

SEQ ID NO: 142500 - DNA, 25 bp, Artificial
  Probe
tcgtctcagtgtaggaagagtgtat

SEQ ID NO: 142501 - DNA, 25 bp, Artificial
  Probe
taatgcctctttgtcttagaatgga

SEQ ID NO: 142502 - DNA, 25 bp, Artificial
  Probe
ggctaaaggttaatgcgatgattta

SEQ ID NO: 142503 - DNA, 25 bp, Artificial
  Probe
ctcagtgtaggaagagtgtatgtgc

SEQ ID NO: 142504 - DNA, 25 bp, Artificial
  Probe
tggctaaaggttaatgcgatgattt

SEQ ID NO: 142505 - DNA, 25 bp, Artificial
  Probe
ttaatgcctctttgtcttagaatgg

SEQ ID NO: 142506 - DNA, 25 bp, Artificial
  Probe
gcgatgatttatctcactgtttctc

SEQ ID NO: 142507 - DNA, 25 bp, Artificial
  Probe
atgcgatgatttatctcactgtttc

SEQ ID NO: 142508 - DNA, 25 bp, Artificial
  Probe
tgcgatgatttatctcactgtttct

SEQ ID NO: 142509 - DNA, 25 bp, Artificial
  Probe
aatgcgatgatttatctcactgttt

SEQ ID NO: 142510 - DNA, 25 bp, Artificial
  Probe
tgatgactatttaatgcctctttgt

SEQ ID NO: 142511 - DNA, 25 bp, Artificial
  Probe
ggttaatgcgatgatttatctcact

SEQ ID NO: 142512 - DNA, 25 bp, Artificial
  Probe
aggttaatgcgatgatttatctcac

SEQ ID NO: 142513 - DNA, 25 bp, Artificial
  Probe
cctctttgtcttagaatggagaagt

SEQ ID NO: 142514 - DNA, 25 bp, Artificial
  Probe
aaatagtgcttgttctgtttccctg

SEQ ID NO: 142515 - DNA, 25 bp, Artificial
  Probe
cgatgatttatctcactgtttctca

SEQ ID NO: 142516 - DNA, 25 bp, Artificial
  Probe
ttaaatcacagtctaagtcatggct

SEQ ID NO: 142517 - DNA, 25 bp, Artificial
  Probe
aatgcctctttgtcttagaatggag

SEQ ID NO: 142518 - DNA, 25 bp, Artificial
  Probe
taaatcacagtctaagtcatggctc

SEQ ID NO: 142519 - DNA, 25 bp, Artificial
  Probe
taatgcgatgatttatctcactgtt

SEQ ID NO: 142520 - DNA, 25 bp, Artificial
  Probe
ttaatgcgatgatttatctcactgt

SEQ ID NO: 142521 - DNA, 25 bp, Artificial
  Probe
gtggctaaaggttaatgcgatgatt

SEQ ID NO: 142522 - DNA, 25 bp, Artificial
  Probe
gcctctttgtcttagaatggagaag

SEQ ID NO: 142523 - DNA, 25 bp, Artificial
  Probe
gtcgtctcagtgtaggaagagtgta

SEQ ID NO: 142524 - DNA, 25 bp, Artificial
  Probe
cagtctaagtcatggctctgttcat

SEQ ID NO: 142525 - DNA, 25 bp, Artificial
  Probe
aatcacagtctaagtcatggctctg

SEQ ID NO: 142526 - DNA, 25 bp, Artificial
  Probe
attaaatcacagtctaagtcatggc

SEQ ID NO: 142527 - DNA, 25 bp, Artificial
  Probe
aaggttaatgcgatgatttatctca

SEQ ID NO: 142528 - DNA, 25 bp, Artificial
  Probe
gttaatgcgatgatttatctcactg

SEQ ID NO: 142529 - DNA, 25 bp, Artificial
  Probe
atgcctctttgtcttagaatggaga

SEQ ID NO: 142530 - DNA, 25 bp, Artificial
  Probe
tctttgtcttagaatggagaagttt

SEQ ID NO: 142531 - DNA, 25 bp, Artificial
  Probe
ctctttgtcttagaatggagaagtt

SEQ ID NO: 142532 - DNA, 25 bp, Artificial
  Probe
aatagtgcttgttctgtttccctga

SEQ ID NO: 142533 - DNA, 25 bp, Artificial
  Probe
gctaaaggttaatgcgatgatttat

SEQ ID NO: 142534 - DNA, 25 bp, Artificial
  Probe
tgcctctttgtcttagaatggagaa

SEQ ID NO: 142535 - DNA, 25 bp, Artificial
  Probe
agctctaagaattgtgatgtactat

SEQ ID NO: 142536 - DNA, 25 bp, Artificial
  Probe
tgatttatctcactgtttctcaagt

SEQ ID NO: 142537 - DNA, 25 bp, Artificial
  Probe
aaaggttaatgcgatgatttatctc

SEQ ID NO: 142538 - DNA, 25 bp, Artificial
  Probe
gtagtcaggaaacagacaaagaagg

SEQ ID NO: 142539 - DNA, 25 bp, Artificial
  Probe
ggtagtcaggaaacagacaaagaag

SEQ ID NO: 142540 - DNA, 25 bp, Artificial
  Probe
aagaaggtcgtctcagtgtaggaag

SEQ ID NO: 142541 - DNA, 25 bp, Artificial
  Probe
gacatgatgactatttaatgcctct

SEQ ID NO: 142542 - DNA, 25 bp, Artificial
  Probe
tttactactttgaatacaccacgga

SEQ ID NO: 142543 - DNA, 25 bp, Artificial
  Probe
gcctttactactttgaatacaccac

SEQ ID NO: 142544 - DNA, 25 bp, Artificial
  Probe
tgcctttactactttgaatacacca

SEQ ID NO: 142545 - DNA, 25 bp, Artificial
  Probe
ctttactactttgaatacaccacgg

SEQ ID NO: 142546 - DNA, 25 bp, Artificial
  Probe
cctttactactttgaatacaccacg

SEQ ID NO: 142547 - DNA, 25 bp, Artificial
  Probe
ctgcctttactactttgaatacacc

SEQ ID NO: 142548 - DNA, 25 bp, Artificial
  Probe
ttactactttgaatacaccacggac

SEQ ID NO: 142549 - DNA, 25 bp, Artificial
  Probe
atctcactcacactttcttcaatcc

SEQ ID NO: 142550 - DNA, 25 bp, Artificial
  Probe
gactgacaactgcctttactacttt

SEQ ID NO: 142551 - DNA, 25 bp, Artificial
  Probe
actgcctttactactttgaatacac

SEQ ID NO: 142552 - DNA, 25 bp, Artificial
  Probe
gacaataaagaccaggtgattaagg

SEQ ID NO: 142553 - DNA, 25 bp, Artificial
  Probe
tactactttgaatacaccacggaca

SEQ ID NO: 142554 - DNA, 25 bp, Artificial
  Probe
gacaactgcctttactactttgaat

SEQ ID NO: 142555 - DNA, 25 bp, Artificial
  Probe
tgacaactgcctttactactttgaa

SEQ ID NO: 142556 - DNA, 25 bp, Artificial
  Probe
ctcactcacactttcttcaatccag

SEQ ID NO: 142557 - DNA, 25 bp, Artificial
  Probe
acaataaagaccaggtgattaaggc

SEQ ID NO: 142558 - DNA, 25 bp, Artificial
  Probe
aactgcctttactactttgaataca

SEQ ID NO: 142559 - DNA, 25 bp, Artificial
  Probe
ctgacaactgcctttactactttga

SEQ ID NO: 142560 - DNA, 25 bp, Artificial
  Probe
ttctgactgacaactgcctttacta

SEQ ID NO: 142561 - DNA, 25 bp, Artificial
  Probe
tgacaataaagaccaggtgattaag

SEQ ID NO: 142562 - DNA, 25 bp, Artificial
  Probe
gatctcactcacactttcttcaatc

SEQ ID NO: 142563 - DNA, 25 bp, Artificial
  Probe
actgacaactgcctttactactttg

SEQ ID NO: 142564 - DNA, 25 bp, Artificial
  Probe
tgactgacaactgcctttactactt

SEQ ID NO: 142565 - DNA, 25 bp, Artificial
  Probe
tctcactcacactttcttcaatcca

SEQ ID NO: 142566 - DNA, 25 bp, Artificial
  Probe
acaactgcctttactactttgaata

SEQ ID NO: 142567 - DNA, 25 bp, Artificial
  Probe
tgatctcactcacactttcttcaat

SEQ ID NO: 142568 - DNA, 25 bp, Artificial
  Probe
atgatctcactcacactttcttcaa

SEQ ID NO: 142569 - DNA, 25 bp, Artificial
  Probe
aatgatctcactcacactttcttca

SEQ ID NO: 142570 - DNA, 25 bp, Artificial
  Probe
caatgatctcactcacactttcttc

SEQ ID NO: 142571 - DNA, 25 bp, Artificial
  Probe
attctgactgacaactgcctttact

SEQ ID NO: 142572 - DNA, 25 bp, Artificial
  Probe
cattctgactgacaactgcctttac

SEQ ID NO: 142573 - DNA, 25 bp, Artificial
  Probe
cactcacactttcttcaatccagac

SEQ ID NO: 142574 - DNA, 25 bp, Artificial
  Probe
tcactcacactttcttcaatccaga

SEQ ID NO: 142575 - DNA, 25 bp, Artificial
  Probe
ctgactgacaactgcctttactact

SEQ ID NO: 142576 - DNA, 25 bp, Artificial
  Probe
tctgactgacaactgcctttactac

SEQ ID NO: 142577 - DNA, 25 bp, Artificial
  Probe
caactgcctttactactttgaatac

SEQ ID NO: 142578 - DNA, 25 bp, Artificial
  Probe
gttcattctgactgacaactgcctt

SEQ ID NO: 142579 - DNA, 25 bp, Artificial
  Probe
ctgacaataaagaccaggtgattaa

SEQ ID NO: 142580 - DNA, 25 bp, Artificial
  Probe
actactttgaatacaccacggacaa

SEQ ID NO: 142581 - DNA, 25 bp, Artificial
  Probe
gcaatgatctcactcacactttctt

SEQ ID NO: 142582 - DNA, 25 bp, Artificial
  Probe
tcattctgactgacaactgccttta

SEQ ID NO: 142583 - DNA, 25 bp, Artificial
  Probe
gaggagaaggaagactggatcaagt

SEQ ID NO: 142584 - DNA, 25 bp, Artificial
  Probe
tgaggagaaggaagactggatcaag

SEQ ID NO: 142585 - DNA, 25 bp, Artificial
  Probe
ctgaggagaaggaagactggatcaa

SEQ ID NO: 142586 - DNA, 25 bp, Artificial
  Probe
actcacactttcttcaatccagacc

SEQ ID NO: 142587 - DNA, 25 bp, Artificial
  Probe
ggaagaggaggattgccaataagaa

SEQ ID NO: 142588 - DNA, 25 bp, Artificial
  Probe
aaggaagaggaggattgccaataag

SEQ ID NO: 142589 - DNA, 25 bp, Artificial
  Probe
caaggaagaggaggattgccaataa

SEQ ID NO: 142590 - DNA, 25 bp, Artificial
  Probe
aggattgccaataagaaatagggaa

SEQ ID NO: 142591 - DNA, 25 bp, Artificial
  Probe
aagaggaggattgccaataagaaat

SEQ ID NO: 142592 - DNA, 25 bp, Artificial
  Probe
gaggattgccaataagaaataggga

SEQ ID NO: 142593 - DNA, 25 bp, Artificial
  Probe
aggaggattgccaataagaaatagg

SEQ ID NO: 142594 - DNA, 25 bp, Artificial
  Probe
agaggaggattgccaataagaaata

SEQ ID NO: 142595 - DNA, 25 bp, Artificial
  Probe
ggattgccaataagaaatagggaaa

SEQ ID NO: 142596 - DNA, 25 bp, Artificial
  Probe
gaggaggattgccaataagaaatag

SEQ ID NO: 142597 - DNA, 25 bp, Artificial
  Probe
aggaagaggaggattgccaataaga

SEQ ID NO: 142598 - DNA, 25 bp, Artificial
  Probe
gaagaggaggattgccaataagaaa

SEQ ID NO: 142599 - DNA, 25 bp, Artificial
  Probe
ggaggattgccaataagaaataggg

SEQ ID NO: 142600 - DNA, 25 bp, Artificial
  Probe
agtcacaaagggcaagtcattaaag

SEQ ID NO: 142601 - DNA, 25 bp, Artificial
  Probe
cagtcacaaagggcaagtcattaaa

SEQ ID NO: 142602 - DNA, 25 bp, Artificial
  Probe
acaaggaagaggaggattgccaata

SEQ ID NO: 142603 - DNA, 25 bp, Artificial
  Probe
gaaccatgttgtataccggatctct

SEQ ID NO: 142604 - DNA, 25 bp, Artificial
  Probe
gtcacaaagggcaagtcattaaagc

SEQ ID NO: 142605 - DNA, 25 bp, Artificial
  Probe
aaccatgttgtataccggatctctg

SEQ ID NO: 142606 - DNA, 25 bp, Artificial
  Probe
gccaataagaaatagggaaaagtca

SEQ ID NO: 142607 - DNA, 25 bp, Artificial
  Probe
tgccaataagaaatagggaaaagtc

SEQ ID NO: 142608 - DNA, 25 bp, Artificial
  Probe
ccagtcacaaagggcaagtcattaa

SEQ ID NO: 142609 - DNA, 25 bp, Artificial
  Probe
ttgccaataagaaatagggaaaagt

SEQ ID NO: 142610 - DNA, 25 bp, Artificial
  Probe
ggaaccatgttgtataccggatctc

SEQ ID NO: 142611 - DNA, 25 bp, Artificial
  Probe
aggagaaggaggagtggatgaagtc

SEQ ID NO: 142612 - DNA, 25 bp, Artificial
  Probe
gaggagaaggaggagtggatgaagt

SEQ ID NO: 142613 - DNA, 25 bp, Artificial
  Probe
tgaggagaaggaggagtggatgaag

SEQ ID NO: 142614 - DNA, 25 bp, Artificial
  Probe
ctgaggagaaggaggagtggatgaa

SEQ ID NO: 142615 - DNA, 25 bp, Artificial
  Probe
cacaaggaagaggaggattgccaat

SEQ ID NO: 142616 - DNA, 25 bp, Artificial
  Probe
attgccaataagaaatagggaaaag

SEQ ID NO: 142617 - DNA, 25 bp, Artificial
  Probe
gattgccaataagaaatagggaaaa

SEQ ID NO: 142618 - DNA, 25 bp, Artificial
  Probe
aatagggaaaagtcaagatccagac

SEQ ID NO: 142619 - DNA, 25 bp, Artificial
  Probe
aaatagggaaaagtcaagatccaga

SEQ ID NO: 142620 - DNA, 25 bp, Artificial
  Probe
agaaatagggaaaagtcaagatcca

SEQ ID NO: 142621 - DNA, 25 bp, Artificial
  Probe
gaaatagggaaaagtcaagatccag

SEQ ID NO: 142622 - DNA, 25 bp, Artificial
  Probe
aagtccatcaaagcgagcatcagta

SEQ ID NO: 142623 - DNA, 25 bp, Artificial
  Probe
ccaataagaaatagggaaaagtcaa

SEQ ID NO: 142624 - DNA, 25 bp, Artificial
  Probe
catcagtagggacccgttctatgac

SEQ ID NO: 142625 - DNA, 25 bp, Artificial
  Probe
cgaactgctttgagctttataaccc

SEQ ID NO: 142626 - DNA, 25 bp, Artificial
  Probe
ccgaactgctttgagctttataacc

SEQ ID NO: 142627 - DNA, 25 bp, Artificial
  Probe
aagaaatagggaaaagtcaagatcc

SEQ ID NO: 142628 - DNA, 25 bp, Artificial
  Probe
cagtagggacccgttctatgacatg

SEQ ID NO: 142629 - DNA, 25 bp, Artificial
  Probe
agtccatcaaagcgagcatcagtag

SEQ ID NO: 142630 - DNA, 25 bp, Artificial
  Probe
ctttgagctttataaccccagtcac

SEQ ID NO: 142631 - DNA, 25 bp, Artificial
  Probe
accatgttgtataccggatctctgc

SEQ ID NO: 142632 - DNA, 25 bp, Artificial
  Probe
tggttactgaagaaggatgattaca

SEQ ID NO: 142633 - DNA, 25 bp, Artificial
  Probe
attacatcagcaaccaacttcagag

SEQ ID NO: 142634 - DNA, 25 bp, Artificial
  Probe
cattggttactgaagaaggatgatt

SEQ ID NO: 142635 - DNA, 25 bp, Artificial
  Probe
gattacatcagcaaccaacttcaga

SEQ ID NO: 142636 - DNA, 25 bp, Artificial
  Probe
ttggttactgaagaaggatgattac

SEQ ID NO: 142637 - DNA, 25 bp, Artificial
  Probe
ggttactgaagaaggatgattacat

SEQ ID NO: 142638 - DNA, 25 bp, Artificial
  Probe
catcagcaaccaacttcagagaatt

SEQ ID NO: 142639 - DNA, 25 bp, Artificial
  Probe
ttacatcagcaaccaacttcagaga

SEQ ID NO: 142640 - DNA, 25 bp, Artificial
  Probe
tacatcagcaaccaacttcagagaa

SEQ ID NO: 142641 - DNA, 25 bp, Artificial
  Probe
attggttactgaagaaggatgatta

SEQ ID NO: 142642 - DNA, 25 bp, Artificial
  Probe
acatcagcaaccaacttcagagaat

SEQ ID NO: 142643 - DNA, 25 bp, Artificial
  Probe
catttagacttgagtgtgaaaccaa

SEQ ID NO: 142644 - DNA, 25 bp, Artificial
  Probe
tttagacttgagtgtgaaaccaaag

SEQ ID NO: 142645 - DNA, 25 bp, Artificial
  Probe
atttagacttgagtgtgaaaccaaa

SEQ ID NO: 142646 - DNA, 25 bp, Artificial
  Probe
tcattggttactgaagaaggatgat

SEQ ID NO: 142647 - DNA, 25 bp, Artificial
  Probe
acatttagacttgagtgtgaaacca

SEQ ID NO: 142648 - DNA, 25 bp, Artificial
  Probe
agaagaaactgtttgttaattgtgc

SEQ ID NO: 142649 - DNA, 25 bp, Artificial
  Probe
ttagacttgagtgtgaaaccaaagc

SEQ ID NO: 142650 - DNA, 25 bp, Artificial
  Probe
atgattacatcagcaaccaacttca

SEQ ID NO: 142651 - DNA, 25 bp, Artificial
  Probe
ttcattggttactgaagaaggatga

SEQ ID NO: 142652 - DNA, 25 bp, Artificial
  Probe
tgattacatcagcaaccaacttcag

SEQ ID NO: 142653 - DNA, 25 bp, Artificial
  Probe
gaagaaggatgattacatcagcaac

SEQ ID NO: 142654 - DNA, 25 bp, Artificial
  Probe
tgaagaaggatgattacatcagcaa

SEQ ID NO: 142655 - DNA, 25 bp, Artificial
  Probe
gatgattacatcagcaaccaacttc

SEQ ID NO: 142656 - DNA, 25 bp, Artificial
  Probe
atcagcaaccaacttcagagaattc

SEQ ID NO: 142657 - DNA, 25 bp, Artificial
  Probe
aagaaggatgattacatcagcaacc

SEQ ID NO: 142658 - DNA, 25 bp, Artificial
  Probe
gaaggatgattacatcagcaaccaa

SEQ ID NO: 142659 - DNA, 25 bp, Artificial
  Probe
ggatgattacatcagcaaccaactt

SEQ ID NO: 142660 - DNA, 25 bp, Artificial
  Probe
aaggatgattacatcagcaaccaac

SEQ ID NO: 142661 - DNA, 25 bp, Artificial
  Probe
atccattacggaacctcctttgtta

SEQ ID NO: 142662 - DNA, 25 bp, Artificial
  Probe
gaagaaactgtttgttaattgtgca

SEQ ID NO: 142663 - DNA, 25 bp, Artificial
  Probe
gaatttcccatctttcctgtaggag

SEQ ID NO: 142664 - DNA, 25 bp, Artificial
  Probe
agaaggatgattacatcagcaacca

SEQ ID NO: 142665 - DNA, 25 bp, Artificial
  Probe
aagaatttcccatctttcctgtagg

SEQ ID NO: 142666 - DNA, 25 bp, Artificial
  Probe
agaatttcccatctttcctgtagga

SEQ ID NO: 142667 - DNA, 25 bp, Artificial
  Probe
tataaccacatttagacttgagtgt

SEQ ID NO: 142668 - DNA, 25 bp, Artificial
  Probe
agaaactgtttgttaattgtgcatt

SEQ ID NO: 142669 - DNA, 25 bp, Artificial
  Probe
aagaaactgtttgttaattgtgcat

SEQ ID NO: 142670 - DNA, 25 bp, Artificial
  Probe
aggatgattacatcagcaaccaact

SEQ ID NO: 142671 - DNA, 25 bp, Artificial
  Probe
ctgaagaaggatgattacatcagca

SEQ ID NO: 142672 - DNA, 25 bp, Artificial
  Probe
actgaagaaggatgattacatcagc

SEQ ID NO: 142673 - DNA, 25 bp, Artificial
  Probe
ctttgggtgtgtttctggttgtttg

SEQ ID NO: 142674 - DNA, 25 bp, Artificial
  Probe
aagaagaaactgtttgttaattgtg

SEQ ID NO: 142675 - DNA, 25 bp, Artificial
  Probe
tccattacggaacctcctttgttac

SEQ ID NO: 142676 - DNA, 25 bp, Artificial
  Probe
ttactgaagaaggatgattacatca

SEQ ID NO: 142677 - DNA, 25 bp, Artificial
  Probe
ctcctgactatgatagaagccaatg

SEQ ID NO: 142678 - DNA, 25 bp, Artificial
  Probe
caagatgccaatcaacaacaagatg

SEQ ID NO: 142679 - DNA, 25 bp, Artificial
  Probe
tcaagatgccaatcaacaacaagat

SEQ ID NO: 142680 - DNA, 25 bp, Artificial
  Probe
cttcaagatgccaatcaacaacaag

SEQ ID NO: 142681 - DNA, 25 bp, Artificial
  Probe
ttcaagatgccaatcaacaacaaga

SEQ ID NO: 142682 - DNA, 25 bp, Artificial
  Probe
tcctgactatgatagaagccaatgg

SEQ ID NO: 142683 - DNA, 25 bp, Artificial
  Probe
ctatggttctgggttactgggatat

SEQ ID NO: 142684 - DNA, 25 bp, Artificial
  Probe
gcttcaagatgccaatcaacaacaa

SEQ ID NO: 142685 - DNA, 25 bp, Artificial
  Probe
tctgctacaattctaaccacgaaag

SEQ ID NO: 142686 - DNA, 25 bp, Artificial
  Probe
ctctgctacaattctaaccacgaaa

SEQ ID NO: 142687 - DNA, 25 bp, Artificial
  Probe
ttactgataccagctatgaagagaa

SEQ ID NO: 142688 - DNA, 25 bp, Artificial
  Probe
gctctgctacaattctaaccacgaa

SEQ ID NO: 142689 - DNA, 25 bp, Artificial
  Probe
ctgcttcaagatgccaatcaacaac

SEQ ID NO: 142690 - DNA, 25 bp, Artificial
  Probe
tctatggttctgggttactgggata

SEQ ID NO: 142691 - DNA, 25 bp, Artificial
  Probe
gaagaacaagatcacccagagtaac

SEQ ID NO: 142692 - DNA, 25 bp, Artificial
  Probe
aagatgccaatcaacaacaagatgg

SEQ ID NO: 142693 - DNA, 25 bp, Artificial
  Probe
ctgtctcctctgctccttccaataa

SEQ ID NO: 142694 - DNA, 25 bp, Artificial
  Probe
ctacaattctaaccacgaaagcctg

SEQ ID NO: 142695 - DNA, 25 bp, Artificial
  Probe
gctcctgactatgatagaagccaat

SEQ ID NO: 142696 - DNA, 25 bp, Artificial
  Probe
gataccagctatgaagagaaacagt

SEQ ID NO: 142697 - DNA, 25 bp, Artificial
  Probe
tgataccagctatgaagagaaacag

SEQ ID NO: 142698 - DNA, 25 bp, Artificial
  Probe
taccagctatgaagagaaacagtac

SEQ ID NO: 142699 - DNA, 25 bp, Artificial
  Probe
ggaagaacaagatcacccagagtaa

SEQ ID NO: 142700 - DNA, 25 bp, Artificial
  Probe
tacaattctaaccacgaaagcctga

SEQ ID NO: 142701 - DNA, 25 bp, Artificial
  Probe
ataccagctatgaagagaaacagta

SEQ ID NO: 142702 - DNA, 25 bp, Artificial
  Probe
tgcttcaagatgccaatcaacaaca

SEQ ID NO: 142703 - DNA, 25 bp, Artificial
  Probe
caattctaaccacgaaagcctgaag

SEQ ID NO: 142704 - DNA, 25 bp, Artificial
  Probe
ccagctatgaagagaaacagtacac

SEQ ID NO: 142705 - DNA, 25 bp, Artificial
  Probe
tgaagcctcagtatttggaacaact

SEQ ID NO: 142706 - DNA, 25 bp, Artificial
  Probe
atgagttcccaaatctgaaggcttt

SEQ ID NO: 142707 - DNA, 25 bp, Artificial
  Probe
gttcggctctgctacaattctaacc

SEQ ID NO: 142708 - DNA, 25 bp, Artificial
  Probe
ggttcggctctgctacaattctaac

SEQ ID NO: 142709 - DNA, 25 bp, Artificial
  Probe
ctaccttatggacgggaagaacaag

SEQ ID NO: 142710 - DNA, 25 bp, Artificial
  Probe
accagctatgaagagaaacagtaca

SEQ ID NO: 142711 - DNA, 25 bp, Artificial
  Probe
gtctcctctgctccttccaataaac

SEQ ID NO: 142712 - DNA, 25 bp, Artificial
  Probe
cagctatgaagagaaacagtacacg

SEQ ID NO: 142713 - DNA, 25 bp, Artificial
  Probe
cttatggacgggaagaacaagatca

SEQ ID NO: 142714 - DNA, 25 bp, Artificial
  Probe
caagtctatggttctgggttactgg

SEQ ID NO: 142715 - DNA, 25 bp, Artificial
  Probe
aagaacaagatcacccagagtaacg

SEQ ID NO: 142716 - DNA, 25 bp, Artificial
  Probe
ttatggacgggaagaacaagatcac

SEQ ID NO: 142717 - DNA, 25 bp, Artificial
  Probe
ttcggctctgctacaattctaacca

SEQ ID NO: 142718 - DNA, 25 bp, Artificial
  Probe
tggttcggctctgctacaattctaa

SEQ ID NO: 142719 - DNA, 25 bp, Artificial
  Probe
ctgataccagctatgaagagaaaca

SEQ ID NO: 142720 - DNA, 25 bp, Artificial
  Probe
actgataccagctatgaagagaaac

SEQ ID NO: 142721 - DNA, 25 bp, Artificial
  Probe
ggagtttactgataccagctatgaa

SEQ ID NO: 142722 - DNA, 25 bp, Artificial
  Probe
ggaggaggagaagaaggtaataatg

SEQ ID NO: 142723 - DNA, 25 bp, Artificial
  Probe
aggaggaggagaagaaggtaataat

SEQ ID NO: 142724 - DNA, 25 bp, Artificial
  Probe
ggaggagaagaaggtaataatgagt

SEQ ID NO: 142725 - DNA, 25 bp, Artificial
  Probe
caggaggaggagaagaaggtaataa

SEQ ID NO: 142726 - DNA, 25 bp, Artificial
  Probe
agaaggtaataatgagtgactgtgt

SEQ ID NO: 142727 - DNA, 25 bp, Artificial
  Probe
aggaggagaagaaggtaataatgag

SEQ ID NO: 142728 - DNA, 25 bp, Artificial
  Probe
gaggaggagaagaaggtaataatga

SEQ ID NO: 142729 - DNA, 25 bp, Artificial
  Probe
ggagaagaaggtaataatgagtgac

SEQ ID NO: 142730 - DNA, 25 bp, Artificial
  Probe
aggagaagaaggtaataatgagtga

SEQ ID NO: 142731 - DNA, 25 bp, Artificial
  Probe
gaggagaagaaggtaataatgagtg

SEQ ID NO: 142732 - DNA, 25 bp, Artificial
  Probe
aagaaggtaataatgagtgactgtg

SEQ ID NO: 142733 - DNA, 25 bp, Artificial
  Probe
gaagaaggtaataatgagtgactgt

SEQ ID NO: 142734 - DNA, 25 bp, Artificial
  Probe
agaagaaggtaataatgagtgactg

SEQ ID NO: 142735 - DNA, 25 bp, Artificial
  Probe
aaggtaataatgagtgactgtgtct

SEQ ID NO: 142736 - DNA, 25 bp, Artificial
  Probe
gaaggtaataatgagtgactgtgtc

SEQ ID NO: 142737 - DNA, 25 bp, Artificial
  Probe
ccaggaggaggagaagaaggtaata

SEQ ID NO: 142738 - DNA, 25 bp, Artificial
  Probe
gagaagaaggtaataatgagtgact

SEQ ID NO: 142739 - DNA, 25 bp, Artificial
  Probe
ggtaataatgagtgactgtgtctac

SEQ ID NO: 142740 - DNA, 25 bp, Artificial
  Probe
aggtaataatgagtgactgtgtcta

SEQ ID NO: 142741 - DNA, 25 bp, Artificial
  Probe
gtaataatgagtgactgtgtctaca

SEQ ID NO: 142742 - DNA, 25 bp, Artificial
  Probe
aataatgagtgactgtgtctacatg

SEQ ID NO: 142743 - DNA, 25 bp, Artificial
  Probe
taataatgagtgactgtgtctacat

SEQ ID NO: 142744 - DNA, 25 bp, Artificial
  Probe
tgctgggaaaggaatattggtaaat

SEQ ID NO: 142745 - DNA, 25 bp, Artificial
  Probe
gctgggaaaggaatattggtaaatt

SEQ ID NO: 142746 - DNA, 25 bp, Artificial
  Probe
ttgctgggaaaggaatattggtaaa

SEQ ID NO: 142747 - DNA, 25 bp, Artificial
  Probe
tttgctgggaaaggaatattggtaa

SEQ ID NO: 142748 - DNA, 25 bp, Artificial
  Probe
gtttgctgggaaaggaatattggta

SEQ ID NO: 142749 - DNA, 25 bp, Artificial
  Probe
gaggagtttgctgggaaaggaatat

SEQ ID NO: 142750 - DNA, 25 bp, Artificial
  Probe
gagtttgctgggaaaggaatattgg

SEQ ID NO: 142751 - DNA, 25 bp, Artificial
  Probe
ggagtttgctgggaaaggaatattg

SEQ ID NO: 142752 - DNA, 25 bp, Artificial
  Probe
aggagtttgctgggaaaggaatatt

SEQ ID NO: 142753 - DNA, 25 bp, Artificial
  Probe
agtttgctgggaaaggaatattggt

SEQ ID NO: 142754 - DNA, 25 bp, Artificial
  Probe
taatgagtgactgtgtctacatgtg

SEQ ID NO: 142755 - DNA, 25 bp, Artificial
  Probe
ataatgagtgactgtgtctacatgt

SEQ ID NO: 142756 - DNA, 25 bp, Artificial
  Probe
ctgggaaaggaatattggtaaattt

SEQ ID NO: 142757 - DNA, 25 bp, Artificial
  Probe
accaggaggaggagaagaaggtaat

SEQ ID NO: 142758 - DNA, 25 bp, Artificial
  Probe
atgagtgactgtgtctacatgtgtg

SEQ ID NO: 142759 - DNA, 25 bp, Artificial
  Probe
aatgagtgactgtgtctacatgtgt

SEQ ID NO: 142760 - DNA, 25 bp, Artificial
  Probe
ggaggagtttgctgggaaaggaata

SEQ ID NO: 142761 - DNA, 25 bp, Artificial
  Probe
ttggtaaatttagtactgagaggtg

SEQ ID NO: 142762 - DNA, 25 bp, Artificial
  Probe
caccaggaggaggagaagaaggtaa

SEQ ID NO: 142763 - DNA, 25 bp, Artificial
  Probe
attggtaaatttagtactgagaggt

SEQ ID NO: 142764 - DNA, 25 bp, Artificial
  Probe
tgggaaaggaatattggtaaattta

SEQ ID NO: 142765 - DNA, 25 bp, Artificial
  Probe
tgagtgactgtgtctacatgtgtgg

SEQ ID NO: 142766 - DNA, 25 bp, Artificial
  Probe
gggaaaggaatattggtaaatttag

SEQ ID NO: 142767 - DNA, 25 bp, Artificial
  Probe
atcttatctctgagcagcaatacct

SEQ ID NO: 142768 - DNA, 25 bp, Artificial
  Probe
tcattgagaagaagacgattgatgg

SEQ ID NO: 142769 - DNA, 25 bp, Artificial
  Probe
gatcttatctctgagcagcaatacc

SEQ ID NO: 142770 - DNA, 25 bp, Artificial
  Probe
gtcattgagaagaagacgattgatg

SEQ ID NO: 142771 - DNA, 25 bp, Artificial
  Probe
tgtcattgagaagaagacgattgat

SEQ ID NO: 142772 - DNA, 25 bp, Artificial
  Probe
atgtcattgagaagaagacgattga

SEQ ID NO: 142773 - DNA, 25 bp, Artificial
  Probe
aaggctatgtcattgagaagaagac

SEQ ID NO: 142774 - DNA, 25 bp, Artificial
  Probe
gctatgtcattgagaagaagacgat

SEQ ID NO: 142775 - DNA, 25 bp, Artificial
  Probe
ttatctctgagcagcaatacctctt

SEQ ID NO: 142776 - DNA, 25 bp, Artificial
  Probe
tatgtcattgagaagaagacgattg

SEQ ID NO: 142777 - DNA, 25 bp, Artificial
  Probe
ctatgtcattgagaagaagacgatt

SEQ ID NO: 142778 - DNA, 25 bp, Artificial
  Probe
tatctctgagcagcaatacctcttc

SEQ ID NO: 142779 - DNA, 25 bp, Artificial
  Probe
cttatctctgagcagcaatacctct

SEQ ID NO: 142780 - DNA, 25 bp, Artificial
  Probe
tcttatctctgagcagcaatacctc

SEQ ID NO: 142781 - DNA, 25 bp, Artificial
  Probe
aaaggctatgtcattgagaagaaga

SEQ ID NO: 142782 - DNA, 25 bp, Artificial
  Probe
caaaggctatgtcattgagaagaag

SEQ ID NO: 142783 - DNA, 25 bp, Artificial
  Probe
gagaagaagacgattgatgggaaag

SEQ ID NO: 142784 - DNA, 25 bp, Artificial
  Probe
ggctatgtcattgagaagaagacga

SEQ ID NO: 142785 - DNA, 25 bp, Artificial
  Probe
aggctatgtcattgagaagaagacg

SEQ ID NO: 142786 - DNA, 25 bp, Artificial
  Probe
attgagaagaagacgattgatggga

SEQ ID NO: 142787 - DNA, 25 bp, Artificial
  Probe
tgagaagaagacgattgatgggaaa

SEQ ID NO: 142788 - DNA, 25 bp, Artificial
  Probe
ttgagaagaagacgattgatgggaa

SEQ ID NO: 142789 - DNA, 25 bp, Artificial
  Probe
cattgagaagaagacgattgatggg

SEQ ID NO: 142790 - DNA, 25 bp, Artificial
  Probe
atctctgagcagcaatacctcttca

SEQ ID NO: 142791 - DNA, 25 bp, Artificial
  Probe
agaagaagacgattgatgggaaagc

SEQ ID NO: 142792 - DNA, 25 bp, Artificial
  Probe
atttgaaggtcagtgacatcacaag

SEQ ID NO: 142793 - DNA, 25 bp, Artificial
  Probe
gatttgaaggtcagtgacatcacaa

SEQ ID NO: 142794 - DNA, 25 bp, Artificial
  Probe
agatcttatctctgagcagcaatac

SEQ ID NO: 142795 - DNA, 25 bp, Artificial
  Probe
atcaaaggctatgtcattgagaaga

SEQ ID NO: 142796 - DNA, 25 bp, Artificial
  Probe
tcaaaggctatgtcattgagaagaa

SEQ ID NO: 142797 - DNA, 25 bp, Artificial
  Probe
gatcaaaggctatgtcattgagaag

SEQ ID NO: 142798 - DNA, 25 bp, Artificial
  Probe
ggatcaaaggctatgtcattgagaa

SEQ ID NO: 142799 - DNA, 25 bp, Artificial
  Probe
aggatcaaaggctatgtcattgaga

SEQ ID NO: 142800 - DNA, 25 bp, Artificial
  Probe
caggatcaaaggctatgtcattgag

SEQ ID NO: 142801 - DNA, 25 bp, Artificial
  Probe
gaagaagacgattgatgggaaagcc

SEQ ID NO: 142802 - DNA, 25 bp, Artificial
  Probe
acaggatcaaaggctatgtcattga

SEQ ID NO: 142803 - DNA, 25 bp, Artificial
  Probe
aagaagacgattgatgggaaagcct

SEQ ID NO: 142804 - DNA, 25 bp, Artificial
  Probe
tttgaaggtcagtgacatcacaagg

SEQ ID NO: 142805 - DNA, 25 bp, Artificial
  Probe
cagatcttatctctgagcagcaata

SEQ ID NO: 142806 - DNA, 25 bp, Artificial
  Probe
ctctcgtggaagatgccagatgatg

SEQ ID NO: 142807 - DNA, 25 bp, Artificial
  Probe
agaagacgattgatgggaaagcctg

SEQ ID NO: 142808 - DNA, 25 bp, Artificial
  Probe
ggaccaaagtcaatccaaactgtgg

SEQ ID NO: 142809 - DNA, 25 bp, Artificial
  Probe
ccagatcttatctctgagcagcaat

SEQ ID NO: 142810 - DNA, 25 bp, Artificial
  Probe
gacaggatcaaaggctatgtcattg

SEQ ID NO: 142811 - DNA, 25 bp, Artificial
  Probe
tctctgagcagcaatacctcttcag

SEQ ID NO: 142812 - DNA, 25 bp, Artificial
  Probe
ataagagactaacatccagcaagag

SEQ ID NO: 142813 - DNA, 25 bp, Artificial
  Probe
ctaactactctcttctctgatgtgc

SEQ ID NO: 142814 - DNA, 25 bp, Artificial
  Probe
ccacatctaactactctcttctctg

SEQ ID NO: 142815 - DNA, 25 bp, Artificial
  Probe
taactactctcttctctgatgtgct

SEQ ID NO: 142816 - DNA, 25 bp, Artificial
  Probe
gataagagactaacatccagcaaga

SEQ ID NO: 142817 - DNA, 25 bp, Artificial
  Probe
agataagagactaacatccagcaag

SEQ ID NO: 142818 - DNA, 25 bp, Artificial
  Probe
gagataagagactaacatccagcaa

SEQ ID NO: 142819 - DNA, 25 bp, Artificial
  Probe
ctgctgagataagagactaacatcc

SEQ ID NO: 142820 - DNA, 25 bp, Artificial
  Probe
cctgctgagataagagactaacatc

SEQ ID NO: 142821 - DNA, 25 bp, Artificial
  Probe
acctgctgagataagagactaacat

SEQ ID NO: 142822 - DNA, 25 bp, Artificial
  Probe
tgagataagagactaacatccagca

SEQ ID NO: 142823 - DNA, 25 bp, Artificial
  Probe
tgctgagataagagactaacatcca

SEQ ID NO: 142824 - DNA, 25 bp, Artificial
  Probe
gccacatctaactactctcttctct

SEQ ID NO: 142825 - DNA, 25 bp, Artificial
  Probe
tctaactactctcttctctgatgtg

SEQ ID NO: 142826 - DNA, 25 bp, Artificial
  Probe
cacatctaactactctcttctctga

SEQ ID NO: 142827 - DNA, 25 bp, Artificial
  Probe
gacctgctgagataagagactaaca

SEQ ID NO: 142828 - DNA, 25 bp, Artificial
  Probe
aactactctcttctctgatgtgctc

SEQ ID NO: 142829 - DNA, 25 bp, Artificial
  Probe
ggacctgctgagataagagactaac

SEQ ID NO: 142830 - DNA, 25 bp, Artificial
  Probe
ctgagataagagactaacatccagc

SEQ ID NO: 142831 - DNA, 25 bp, Artificial
  Probe
gctgagataagagactaacatccag

SEQ ID NO: 142832 - DNA, 25 bp, Artificial
  Probe
atctaactactctcttctctgatgt

SEQ ID NO: 142833 - DNA, 25 bp, Artificial
  Probe
acatctaactactctcttctctgat

SEQ ID NO: 142834 - DNA, 25 bp, Artificial
  Probe
taagagactaacatccagcaagagc

SEQ ID NO: 142835 - DNA, 25 bp, Artificial
  Probe
tggacctgctgagataagagactaa

SEQ ID NO: 142836 - DNA, 25 bp, Artificial
  Probe
ctggacctgctgagataagagacta

SEQ ID NO: 142837 - DNA, 25 bp, Artificial
  Probe
atctatgctctcagaccgaatctca

SEQ ID NO: 142838 - DNA, 25 bp, Artificial
  Probe
aacaaagagatagcacaaacactac

SEQ ID NO: 142839 - DNA, 25 bp, Artificial
  Probe
caacaaagagatagcacaaacacta

SEQ ID NO: 142840 - DNA, 25 bp, Artificial
  Probe
gtttctcttctctttggttgtgttg

SEQ ID NO: 142841 - DNA, 25 bp, Artificial
  Probe
agtttctcttctctttggttgtgtt

SEQ ID NO: 142842 - DNA, 25 bp, Artificial
  Probe
acaaagagatagcacaaacactacc

SEQ ID NO: 142843 - DNA, 25 bp, Artificial
  Probe
accctcaactctaatttagcctcta

SEQ ID NO: 142844 - DNA, 25 bp, Artificial
  Probe
actactctcttctctgatgtgctcc

SEQ ID NO: 142845 - DNA, 25 bp, Artificial
  Probe
ctcaactctaatttagcctctaggg

SEQ ID NO: 142846 - DNA, 25 bp, Artificial
  Probe
ccctcaactctaatttagcctctag

SEQ ID NO: 142847 - DNA, 25 bp, Artificial
  Probe
gaaccctcaactctaatttagcctc

SEQ ID NO: 142848 - DNA, 25 bp, Artificial
  Probe
aaccctcaactctaatttagcctct

SEQ ID NO: 142849 - DNA, 25 bp, Artificial
  Probe
ccttctttattcttgggaactcctt

SEQ ID NO: 142850 - DNA, 25 bp, Artificial
  Probe
cttctttattcttgggaactccttc

SEQ ID NO: 142851 - DNA, 25 bp, Artificial
  Probe
aaagagatagcacaaacactaccct

SEQ ID NO: 142852 - DNA, 25 bp, Artificial
  Probe
caaagagatagcacaaacactaccc

SEQ ID NO: 142853 - DNA, 25 bp, Artificial
  Probe
ccaacaaagagatagcacaaacact

SEQ ID NO: 142854 - DNA, 25 bp, Artificial
  Probe
agaaccctcaactctaatttagcct

SEQ ID NO: 142855 - DNA, 25 bp, Artificial
  Probe
gagaaccctcaactctaatttagcc

SEQ ID NO: 142856 - DNA, 25 bp, Artificial
  Probe
gagtttctcttctctttggttgtgt

SEQ ID NO: 142857 - DNA, 25 bp, Artificial
  Probe
cattaccatgaatccatcagttgtg

SEQ ID NO: 142858 - DNA, 25 bp, Artificial
  Probe
tatccatcactgagactcattcatg

SEQ ID NO: 142859 - DNA, 25 bp, Artificial
  Probe
ctatccatcactgagactcattcat

SEQ ID NO: 142860 - DNA, 25 bp, Artificial
  Probe
ttgtcataaggtgtaatctagctcc

SEQ ID NO: 142861 - DNA, 25 bp, Artificial
  Probe
cctatccatcactgagactcattca

SEQ ID NO: 142862 - DNA, 25 bp, Artificial
  Probe
attaccatgaatccatcagttgtgc

SEQ ID NO: 142863 - DNA, 25 bp, Artificial
  Probe
gacgaaattcacctgtatggattct

SEQ ID NO: 142864 - DNA, 25 bp, Artificial
  Probe
acgaaattcacctgtatggattctg

SEQ ID NO: 142865 - DNA, 25 bp, Artificial
  Probe
agaataaactgaaagtgaggactgc

SEQ ID NO: 142866 - DNA, 25 bp, Artificial
  Probe
aagaataaactgaaagtgaggactg

SEQ ID NO: 142867 - DNA, 25 bp, Artificial
  Probe
tgacgaaattcacctgtatggattc

SEQ ID NO: 142868 - DNA, 25 bp, Artificial
  Probe
gcctatccatcactgagactcattc

SEQ ID NO: 142869 - DNA, 25 bp, Artificial
  Probe
actttgtcataaggtgtaatctagc

SEQ ID NO: 142870 - DNA, 25 bp, Artificial
  Probe
cgaaattcacctgtatggattctgg

SEQ ID NO: 142871 - DNA, 25 bp, Artificial
  Probe
atccatcactgagactcattcatgc

SEQ ID NO: 142872 - DNA, 25 bp, Artificial
  Probe
tcattaccatgaatccatcagttgt

SEQ ID NO: 142873 - DNA, 25 bp, Artificial
  Probe
gaaattcacctgtatggattctggc

SEQ ID NO: 142874 - DNA, 25 bp, Artificial
  Probe
gctgaccaacaaagttcctatcaaa

SEQ ID NO: 142875 - DNA, 25 bp, Artificial
  Probe
gaataaactgaaagtgaggactgcc

SEQ ID NO: 142876 - DNA, 25 bp, Artificial
  Probe
cgggaaagctgtcaaatatcattac

SEQ ID NO: 142877 - DNA, 25 bp, Artificial
  Probe
acgggaaagctgtcaaatatcatta

SEQ ID NO: 142878 - DNA, 25 bp, Artificial
  Probe
ctttcggaatgagagtgacagagaa

SEQ ID NO: 142879 - DNA, 25 bp, Artificial
  Probe
gggaaagctgtcaaatatcattact

SEQ ID NO: 142880 - DNA, 25 bp, Artificial
  Probe
tgcctatccatcactgagactcatt

SEQ ID NO: 142881 - DNA, 25 bp, Artificial
  Probe
taaactgaaagtgaggactgcctat

SEQ ID NO: 142882 - DNA, 25 bp, Artificial
  Probe
ataaactgaaagtgaggactgccta

SEQ ID NO: 142883 - DNA, 25 bp, Artificial
  Probe
gggactaagtcagatttcattacca

SEQ ID NO: 142884 - DNA, 25 bp, Artificial
  Probe
aacgggaaagctgtcaaatatcatt

SEQ ID NO: 142885 - DNA, 25 bp, Artificial
  Probe
ccacaactttgtcataaggtgtaat

SEQ ID NO: 142886 - DNA, 25 bp, Artificial
  Probe
tgtcataaggtgtaatctagctccc

SEQ ID NO: 142887 - DNA, 25 bp, Artificial
  Probe
gactgcctatccatcactgagactc

SEQ ID NO: 142888 - DNA, 25 bp, Artificial
  Probe
taagaataaactgaaagtgaggact

SEQ ID NO: 142889 - DNA, 25 bp, Artificial
  Probe
gaacgggaaagctgtcaaatatcat

SEQ ID NO: 142890 - DNA, 25 bp, Artificial
  Probe
tttgtcataaggtgtaatctagctc

SEQ ID NO: 142891 - DNA, 25 bp, Artificial
  Probe
acaactttgtcataaggtgtaatct

SEQ ID NO: 142892 - DNA, 25 bp, Artificial
  Probe
taccatgaatccatcagttgtgcaa

SEQ ID NO: 142893 - DNA, 25 bp, Artificial
  Probe
ttaccatgaatccatcagttgtgca

SEQ ID NO: 142894 - DNA, 25 bp, Artificial
  Probe
ctttgtcataaggtgtaatctagct

SEQ ID NO: 142895 - DNA, 25 bp, Artificial
  Probe
ctgcctatccatcactgagactcat

SEQ ID NO: 142896 - DNA, 25 bp, Artificial
  Probe
aataaactgaaagtgaggactgcct

SEQ ID NO: 142897 - DNA, 25 bp, Artificial
  Probe
cacaactttgtcataaggtgtaatc

SEQ ID NO: 142898 - DNA, 25 bp, Artificial
  Probe
ggactaagtcagatttcattaccat

SEQ ID NO: 142899 - DNA, 25 bp, Artificial
  Probe
gccacaactttgtcataaggtgtaa

SEQ ID NO: 142900 - DNA, 25 bp, Artificial
  Probe
aaagttcctatcaaaagacccatca

SEQ ID NO: 142901 - DNA, 25 bp, Artificial
  Probe
caaagttcctatcaaaagacccatc

SEQ ID NO: 142902 - DNA, 25 bp, Artificial
  Probe
tgttactgacttgagaaactgaact

SEQ ID NO: 142903 - DNA, 25 bp, Artificial
  Probe
ctgttactgacttgagaaactgaac

SEQ ID NO: 142904 - DNA, 25 bp, Artificial
  Probe
actgttactgacttgagaaactgaa

SEQ ID NO: 142905 - DNA, 25 bp, Artificial
  Probe
cactgttactgacttgagaaactga

SEQ ID NO: 142906 - DNA, 25 bp, Artificial
  Probe
cactgaccagatgggaaataaatta

SEQ ID NO: 142907 - DNA, 25 bp, Artificial
  Probe
gttactgacttgagaaactgaacta

SEQ ID NO: 142908 - DNA, 25 bp, Artificial
  Probe
gcactgaccagatgggaaataaatt

SEQ ID NO: 142909 - DNA, 25 bp, Artificial
  Probe
gatgatgtttgtaacctacgagcag

SEQ ID NO: 142910 - DNA, 25 bp, Artificial
  Probe
tactgacttgagaaactgaactaaa

SEQ ID NO: 142911 - DNA, 25 bp, Artificial
  Probe
ttactgacttgagaaactgaactaa

SEQ ID NO: 142912 - DNA, 25 bp, Artificial
  Probe
gcactgttactgacttgagaaactg

SEQ ID NO: 142913 - DNA, 25 bp, Artificial
  Probe
gtgatgatgtttgtaacctacgagc

SEQ ID NO: 142914 - DNA, 25 bp, Artificial
  Probe
actgaccagatgggaaataaattat

SEQ ID NO: 142915 - DNA, 25 bp, Artificial
  Probe
ctctcacctgttcactgacaacttc

SEQ ID NO: 142916 - DNA, 25 bp, Artificial
  Probe
tgatgatgtttgtaacctacgagca

SEQ ID NO: 142917 - DNA, 25 bp, Artificial
  Probe
gaacgtgatgatgtttgtaacctac

SEQ ID NO: 142918 - DNA, 25 bp, Artificial
  Probe
actctcacctgttcactgacaactt

SEQ ID NO: 142919 - DNA, 25 bp, Artificial
  Probe
ggaacgtgatgatgtttgtaaccta

SEQ ID NO: 142920 - DNA, 25 bp, Artificial
  Probe
ttgagaaactgaactaaaagagggg

SEQ ID NO: 142921 - DNA, 25 bp, Artificial
  Probe
cttgagaaactgaactaaaagaggg

SEQ ID NO: 142922 - DNA, 25 bp, Artificial
  Probe
ctgcactgttactgacttgagaaac

SEQ ID NO: 142923 - DNA, 25 bp, Artificial
  Probe
gactctcacctgttcactgacaact

SEQ ID NO: 142924 - DNA, 25 bp, Artificial
  Probe
atgatgtttgtaacctacgagcagc

SEQ ID NO: 142925 - DNA, 25 bp, Artificial
  Probe
acttgagaaactgaactaaaagagg

SEQ ID NO: 142926 - DNA, 25 bp, Artificial
  Probe
actgacttgagaaactgaactaaaa

SEQ ID NO: 142927 - DNA, 25 bp, Artificial
  Probe
tgcactgaccagatgggaaataaat

SEQ ID NO: 142928 - DNA, 25 bp, Artificial
  Probe
atcctggaacgtgatgatgtttgta

SEQ ID NO: 142929 - DNA, 25 bp, Artificial
  Probe
tgcactgttactgacttgagaaact

SEQ ID NO: 142930 - DNA, 25 bp, Artificial
  Probe
gaatctccattttgaacaaggcaag

SEQ ID NO: 142931 - DNA, 25 bp, Artificial
  Probe
tctcacctgttcactgacaacttcc

SEQ ID NO: 142932 - DNA, 25 bp, Artificial
  Probe
ctgaccagatgggaaataaattata

SEQ ID NO: 142933 - DNA, 25 bp, Artificial
  Probe
ttgcactgaccagatgggaaataaa

SEQ ID NO: 142934 - DNA, 25 bp, Artificial
  Probe
ctggaacgtgatgatgtttgtaacc

SEQ ID NO: 142935 - DNA, 25 bp, Artificial
  Probe
cctggaacgtgatgatgtttgtaac

SEQ ID NO: 142936 - DNA, 25 bp, Artificial
  Probe
tcctggaacgtgatgatgtttgtaa

SEQ ID NO: 142937 - DNA, 25 bp, Artificial
  Probe
tttgcactgaccagatgggaaataa

SEQ ID NO: 142938 - DNA, 25 bp, Artificial
  Probe
tgacttgagaaactgaactaaaaga

SEQ ID NO: 142939 - DNA, 25 bp, Artificial
  Probe
gccgcttggtactttcctcattaaa

SEQ ID NO: 142940 - DNA, 25 bp, Artificial
  Probe
tgtggtaaagacccgatacatgaac

SEQ ID NO: 142941 - DNA, 25 bp, Artificial
  Probe
ctgacttgagaaactgaactaaaag

SEQ ID NO: 142942 - DNA, 25 bp, Artificial
  Probe
tggaacgtgatgatgtttgtaacct

SEQ ID NO: 142943 - DNA, 25 bp, Artificial
  Probe
ccgcttggtactttcctcattaaaa

SEQ ID NO: 142944 - DNA, 25 bp, Artificial
  Probe
gtaaagacccgatacatgaacgctc

SEQ ID NO: 142945 - DNA, 25 bp, Artificial
  Probe
cgtgatgatgtttgtaacctacgag

SEQ ID NO: 142946 - DNA, 25 bp, Artificial
  Probe
cctgcactgttactgacttgagaaa

SEQ ID NO: 142947 - DNA, 25 bp, Artificial
  Probe
caacaacagtatagcagaaggaagg

SEQ ID NO: 142948 - DNA, 25 bp, Artificial
  Probe
aacaacagtatagcagaaggaaggt

SEQ ID NO: 142949 - DNA, 25 bp, Artificial
  Probe
cagagcaacaacagtatagcagaag

SEQ ID NO: 142950 - DNA, 25 bp, Artificial
  Probe
gcaacaacagtatagcagaaggaag

SEQ ID NO: 142951 - DNA, 25 bp, Artificial
  Probe
acaacagtatagcagaaggaaggtc

SEQ ID NO: 142952 - DNA, 25 bp, Artificial
  Probe
agcaacaacagtatagcagaaggaa

SEQ ID NO: 142953 - DNA, 25 bp, Artificial
  Probe
acagagcaacaacagtatagcagaa

SEQ ID NO: 142954 - DNA, 25 bp, Artificial
  Probe
aagagtatccatgatgttcagtgtg

SEQ ID NO: 142955 - DNA, 25 bp, Artificial
  Probe
gagcaacaacagtatagcagaagga

SEQ ID NO: 142956 - DNA, 25 bp, Artificial
  Probe
agagcaacaacagtatagcagaagg

SEQ ID NO: 142957 - DNA, 25 bp, Artificial
  Probe
cacagagcaacaacagtatagcaga

SEQ ID NO: 142958 - DNA, 25 bp, Artificial
  Probe
agagtatccatgatgttcagtgtgc

SEQ ID NO: 142959 - DNA, 25 bp, Artificial
  Probe
caacagtatagcagaaggaaggtcc

SEQ ID NO: 142960 - DNA, 25 bp, Artificial
  Probe
aaagagtatccatgatgttcagtgt

SEQ ID NO: 142961 - DNA, 25 bp, Artificial
  Probe
caaagagtatccatgatgttcagtg

SEQ ID NO: 142962 - DNA, 25 bp, Artificial
  Probe
tcaaagagtatccatgatgttcagt

SEQ ID NO: 142963 - DNA, 25 bp, Artificial
  Probe
agtctttaagtcaggctatttgatt

SEQ ID NO: 142964 - DNA, 25 bp, Artificial
  Probe
aagtctttaagtcaggctatttgat

SEQ ID NO: 142965 - DNA, 25 bp, Artificial
  Probe
gtaacagcccacctctctattcttc

SEQ ID NO: 142966 - DNA, 25 bp, Artificial
  Probe
ttcaaagagtatccatgatgttcag

SEQ ID NO: 142967 - DNA, 25 bp, Artificial
  Probe
cttcaaagagtatccatgatgttca

SEQ ID NO: 142968 - DNA, 25 bp, Artificial
  Probe
agtaacagcccacctctctattctt

SEQ ID NO: 142969 - DNA, 25 bp, Artificial
  Probe
aagtaacagcccacctctctattct

SEQ ID NO: 142970 - DNA, 25 bp, Artificial
  Probe
caagtaacagcccacctctctattc

SEQ ID NO: 142971 - DNA, 25 bp, Artificial
  Probe
ataagctatctcttggttgtgtttg

SEQ ID NO: 142972 - DNA, 25 bp, Artificial
  Probe
tcttcaaagagtatccatgatgttc

SEQ ID NO: 142973 - DNA, 25 bp, Artificial
  Probe
taacagcccacctctctattcttca

SEQ ID NO: 142974 - DNA, 25 bp, Artificial
  Probe
taagtctttaagtcaggctatttga

SEQ ID NO: 142975 - DNA, 25 bp, Artificial
  Probe
tatctcttggttgtgtttgcagtta

SEQ ID NO: 142976 - DNA, 25 bp, Artificial
  Probe
gtctttaagtcaggctatttgattt

SEQ ID NO: 142977 - DNA, 25 bp, Artificial
  Probe
cagcccacctctctattcttcaaag

SEQ ID NO: 142978 - DNA, 25 bp, Artificial
  Probe
ctgctctctcttcctctacacacac

SEQ ID NO: 142979 - DNA, 25 bp, Artificial
  Probe
ttcttcaaagagtatccatgatgtt

SEQ ID NO: 142980 - DNA, 25 bp, Artificial
  Probe
tcaagtaacagcccacctctctatt

SEQ ID NO: 142981 - DNA, 25 bp, Artificial
  Probe
taagctatctcttggttgtgtttgc

SEQ ID NO: 142982 - DNA, 25 bp, Artificial
  Probe
gagtatccatgatgttcagtgtgcc

SEQ ID NO: 142983 - DNA, 25 bp, Artificial
  Probe
gcacagagcaacaacagtatagcag

SEQ ID NO: 142984 - DNA, 25 bp, Artificial
  Probe
attcttcaaagagtatccatgatgt

SEQ ID NO: 142985 - DNA, 25 bp, Artificial
  Probe
gataagctatctcttggttgtgttt

SEQ ID NO: 142986 - DNA, 25 bp, Artificial
  Probe
ttaagtctttaagtcaggctatttg

SEQ ID NO: 142987 - DNA, 25 bp, Artificial
  Probe
ctatctcttggttgtgtttgcagtt

SEQ ID NO: 142988 - DNA, 25 bp, Artificial
  Probe
ctcaagtaacagcccacctctctat

SEQ ID NO: 142989 - DNA, 25 bp, Artificial
  Probe
atctcttggttgtgtttgcagttac

SEQ ID NO: 142990 - DNA, 25 bp, Artificial
  Probe
agcccacctctctattcttcaaaga

SEQ ID NO: 142991 - DNA, 25 bp, Artificial
  Probe
attgagcagataagctatctcttgg

SEQ ID NO: 142992 - DNA, 25 bp, Artificial
  Probe
gattgcttggctattgtctgaatat

SEQ ID NO: 142993 - DNA, 25 bp, Artificial
  Probe
tgattgcttggctattgtctgaata

SEQ ID NO: 142994 - DNA, 25 bp, Artificial
  Probe
gtgattgcttggctattgtctgaat

SEQ ID NO: 142995 - DNA, 25 bp, Artificial
  Probe
gatgtgattgcttggctattgtctg

SEQ ID NO: 142996 - DNA, 25 bp, Artificial
  Probe
attgcttggctattgtctgaatatt

SEQ ID NO: 142997 - DNA, 25 bp, Artificial
  Probe
atgtgattgcttggctattgtctga

SEQ ID NO: 142998 - DNA, 25 bp, Artificial
  Probe
tgatgtgattgcttggctattgtct

SEQ ID NO: 142999 - DNA, 25 bp, Artificial
  Probe
gtgatgtgattgcttggctattgtc

SEQ ID NO: 143000 - DNA, 25 bp, Artificial
  Probe
tgtgattgcttggctattgtctgaa

SEQ ID NO: 143001 - DNA, 25 bp, Artificial
  Probe
atcgtgatgtgattgcttggctatt

SEQ ID NO: 143002 - DNA, 25 bp, Artificial
  Probe
gtaattgtgcatcgtgatgtgattg

SEQ ID NO: 143003 - DNA, 25 bp, Artificial
  Probe
gccatttgaacattacatccaatca

SEQ ID NO: 143004 - DNA, 25 bp, Artificial
  Probe
aacattacatccaatcaaagtgtca

SEQ ID NO: 143005 - DNA, 25 bp, Artificial
  Probe
tgaacattacatccaatcaaagtgt

SEQ ID NO: 143006 - DNA, 25 bp, Artificial
  Probe
acattacatccaatcaaagtgtcat

SEQ ID NO: 143007 - DNA, 25 bp, Artificial
  Probe
attgtcctttgttccttcatgtatt

SEQ ID NO: 143008 - DNA, 25 bp, Artificial
  Probe
ctattgtcctttgttccttcatgta

SEQ ID NO: 143009 - DNA, 25 bp, Artificial
  Probe
gaacattacatccaatcaaagtgtc

SEQ ID NO: 143010 - DNA, 25 bp, Artificial
  Probe
gagaacgagagagagatccagatcc

SEQ ID NO: 143011 - DNA, 25 bp, Artificial
  Probe
ggtaattgtgcatcgtgatgtgatt

SEQ ID NO: 143012 - DNA, 25 bp, Artificial
  Probe
gctattgtcctttgttccttcatgt

SEQ ID NO: 143013 - DNA, 25 bp, Artificial
  Probe
taggtaattgtgcatcgtgatgtga

SEQ ID NO: 143014 - DNA, 25 bp, Artificial
  Probe
gcttggctattgtctgaatatttcc

SEQ ID NO: 143015 - DNA, 25 bp, Artificial
  Probe
tgcttggctattgtctgaatatttc

SEQ ID NO: 143016 - DNA, 25 bp, Artificial
  Probe
tttaaatgtgacttgatctgactgc

SEQ ID NO: 143017 - DNA, 25 bp, Artificial
  Probe
ttgtcctttgttccttcatgtatta

SEQ ID NO: 143018 - DNA, 25 bp, Artificial
  Probe
ttgcttggctattgtctgaatattt

SEQ ID NO: 143019 - DNA, 25 bp, Artificial
  Probe
tagttcagctcaataaagggaatcc

SEQ ID NO: 143020 - DNA, 25 bp, Artificial
  Probe
tgtcctttgttccttcatgtattat

SEQ ID NO: 143021 - DNA, 25 bp, Artificial
  Probe
tattgtcctttgttccttcatgtat

SEQ ID NO: 143022 - DNA, 25 bp, Artificial
  Probe
cttggctattgtctgaatatttcct

SEQ ID NO: 143023 - DNA, 25 bp, Artificial
  Probe
cattacatccaatcaaagtgtcatt

SEQ ID NO: 143024 - DNA, 25 bp, Artificial
  Probe
ctagttcagctcaataaagggaatc

SEQ ID NO: 143025 - DNA, 25 bp, Artificial
  Probe
cgagaacgagagagagatccagatc

SEQ ID NO: 143026 - DNA, 25 bp, Artificial
  Probe
tcgtgatgtgattgcttggctattg

SEQ ID NO: 143027 - DNA, 25 bp, Artificial
  Probe
tggaaatgaatattaatggcagaga

SEQ ID NO: 143028 - DNA, 25 bp, Artificial
  Probe
ttcagctcaataaagggaatccatg

SEQ ID NO: 143029 - DNA, 25 bp, Artificial
  Probe
gttcagctcaataaagggaatccat

SEQ ID NO: 143030 - DNA, 25 bp, Artificial
  Probe
ggctattgtcctttgttccttcatg

SEQ ID NO: 143031 - DNA, 25 bp, Artificial
  Probe
tggctattgtctgaatatttccttt

SEQ ID NO: 143032 - DNA, 25 bp, Artificial
  Probe
ttggctattgtctgaatatttcctt

SEQ ID NO: 143033 - DNA, 25 bp, Artificial
  Probe
ttaaatgtgacttgatctgactgca

SEQ ID NO: 143034 - DNA, 25 bp, Artificial
  Probe
gctggaaatgaatattaatggcaga

SEQ ID NO: 143035 - DNA, 25 bp, Artificial
  Probe
aggtaattgtgcatcgtgatgtgat

SEQ ID NO: 143036 - DNA, 25 bp, Artificial
  Probe
gaacgagagagagatccagatccac

SEQ ID NO: 143037 - DNA, 25 bp, Artificial
  Probe
cagtggtccttgtcttcttcatctg

SEQ ID NO: 143038 - DNA, 25 bp, Artificial
  Probe
cagtcagatgtcaagttcagcagtg

SEQ ID NO: 143039 - DNA, 25 bp, Artificial
  Probe
tggtccttgtcttcttcatctgctg

SEQ ID NO: 143040 - DNA, 25 bp, Artificial
  Probe
gtggtccttgtcttcttcatctgct

SEQ ID NO: 143041 - DNA, 25 bp, Artificial
  Probe
agtggtccttgtcttcttcatctgc

SEQ ID NO: 143042 - DNA, 25 bp, Artificial
  Probe
gcagtggtccttgtcttcttcatct

SEQ ID NO: 143043 - DNA, 25 bp, Artificial
  Probe
gagctgagccatgtcatactctaaa

SEQ ID NO: 143044 - DNA, 25 bp, Artificial
  Probe
ctgagccatgtcatactctaaaccc

SEQ ID NO: 143045 - DNA, 25 bp, Artificial
  Probe
ctcatctatagcttcctgggagaga

SEQ ID NO: 143046 - DNA, 25 bp, Artificial
  Probe
agctgagccatgtcatactctaaac

SEQ ID NO: 143047 - DNA, 25 bp, Artificial
  Probe
tcatctatagcttcctgggagagac

SEQ ID NO: 143048 - DNA, 25 bp, Artificial
  Probe
cgagctgagccatgtcatactctaa

SEQ ID NO: 143049 - DNA, 25 bp, Artificial
  Probe
gctgagccatgtcatactctaaacc

SEQ ID NO: 143050 - DNA, 25 bp, Artificial
  Probe
agcagtcagatgtcaagttcagcag

SEQ ID NO: 143051 - DNA, 25 bp, Artificial
  Probe
gagcagtcagatgtcaagttcagca

SEQ ID NO: 143052 - DNA, 25 bp, Artificial
  Probe
ctatagcttcctgggagagaccttc

SEQ ID NO: 143053 - DNA, 25 bp, Artificial
  Probe
ggtccttgtcttcttcatctgctgg

SEQ ID NO: 143054 - DNA, 25 bp, Artificial
  Probe
catctatagcttcctgggagagacc

SEQ ID NO: 143055 - DNA, 25 bp, Artificial
  Probe
cctcatctatagcttcctgggagag

SEQ ID NO: 143056 - DNA, 25 bp, Artificial
  Probe
atctatagcttcctgggagagacct

SEQ ID NO: 143057 - DNA, 25 bp, Artificial
  Probe
tatagcttcctgggagagaccttca

SEQ ID NO: 143058 - DNA, 25 bp, Artificial
  Probe
tctatagcttcctgggagagacctt

SEQ ID NO: 143059 - DNA, 25 bp, Artificial
  Probe
cagaaagccctgaggatgatcttcg

SEQ ID NO: 143060 - DNA, 25 bp, Artificial
  Probe
gagtcccctcatctatagcttcctg

SEQ ID NO: 143061 - DNA, 25 bp, Artificial
  Probe
tgagccatgtcatactctaaacccc

SEQ ID NO: 143062 - DNA, 25 bp, Artificial
  Probe
atagcttcctgggagagaccttcag

SEQ ID NO: 143063 - DNA, 25 bp, Artificial
  Probe
ccctcatctatagcttcctgggaga

SEQ ID NO: 143064 - DNA, 25 bp, Artificial
  Probe
agtcccctcatctatagcttcctgg

SEQ ID NO: 143065 - DNA, 25 bp, Artificial
  Probe
ctgagtcccctcatctatagcttcc

SEQ ID NO: 143066 - DNA, 25 bp, Artificial
  Probe
cctgagtcccctcatctatagcttc

SEQ ID NO: 143067 - DNA, 25 bp, Artificial
  Probe
tgagtcccctcatctatagcttcct

SEQ ID NO: 143068 - DNA, 25 bp, Artificial
  Probe
cccctcatctatagcttcctgggag

SEQ ID NO: 143069 - DNA, 25 bp, Artificial
  Probe
gtacctcctagaggaaaacggacag

SEQ ID NO: 143070 - DNA, 25 bp, Artificial
  Probe
gcctgagtcccctcatctatagctt

SEQ ID NO: 143071 - DNA, 25 bp, Artificial
  Probe
tacctcctagaggaaaacggacagg

SEQ ID NO: 143072 - DNA, 25 bp, Artificial
  Probe
ggtacctcctagaggaaaacggaca

SEQ ID NO: 143073 - DNA, 25 bp, Artificial
  Probe
actatatgttgcaggtgacagagag

SEQ ID NO: 143074 - DNA, 25 bp, Artificial
  Probe
gactatatgttgcaggtgacagaga

SEQ ID NO: 143075 - DNA, 25 bp, Artificial
  Probe
ctctatgccttctccagtcacagtt

SEQ ID NO: 143076 - DNA, 25 bp, Artificial
  Probe
ctatgccttctccagtcacagtttc

SEQ ID NO: 143077 - DNA, 25 bp, Artificial
  Probe
ggactatatgttgcaggtgacagag

SEQ ID NO: 143078 - DNA, 25 bp, Artificial
  Probe
ctatatgttgcaggtgacagagagc

SEQ ID NO: 143079 - DNA, 25 bp, Artificial
  Probe
ctggactatatgttgcaggtgacag

SEQ ID NO: 143080 - DNA, 25 bp, Artificial
  Probe
gtctggactatatgttgcaggtgac

SEQ ID NO: 143081 - DNA, 25 bp, Artificial
  Probe
tctatgccttctccagtcacagttt

SEQ ID NO: 143082 - DNA, 25 bp, Artificial
  Probe
tggactatatgttgcaggtgacaga

SEQ ID NO: 143083 - DNA, 25 bp, Artificial
  Probe
tctggactatatgttgcaggtgaca

SEQ ID NO: 143084 - DNA, 25 bp, Artificial
  Probe
atctgcatgtctttgggaactgtaa

SEQ ID NO: 143085 - DNA, 25 bp, Artificial
  Probe
aatcagccaccgtctggactatatg

SEQ ID NO: 143086 - DNA, 25 bp, Artificial
  Probe
gtagtcttcttcctgctgtggttcc

SEQ ID NO: 143087 - DNA, 25 bp, Artificial
  Probe
ggtagtcttcttcctgctgtggttc

SEQ ID NO: 143088 - DNA, 25 bp, Artificial
  Probe
catgtctttgggaactgtaaaatca

SEQ ID NO: 143089 - DNA, 25 bp, Artificial
  Probe
tctgcatgtctttgggaactgtaaa

SEQ ID NO: 143090 - DNA, 25 bp, Artificial
  Probe
gcatgtctttgggaactgtaaaatc

SEQ ID NO: 143091 - DNA, 25 bp, Artificial
  Probe
atgtctttgggaactgtaaaatcag

SEQ ID NO: 143092 - DNA, 25 bp, Artificial
  Probe
gatctgcatgtctttgggaactgta

SEQ ID NO: 143093 - DNA, 25 bp, Artificial
  Probe
atgattttcttttactcccgcatcg

SEQ ID NO: 143094 - DNA, 25 bp, Artificial
  Probe
catgattttcttttactcccgcatc

SEQ ID NO: 143095 - DNA, 25 bp, Artificial
  Probe
cacagtttccgccagtaccttaaag

SEQ ID NO: 143096 - DNA, 25 bp, Artificial
  Probe
tcctctatgccttctccagtcacag

SEQ ID NO: 143097 - DNA, 25 bp, Artificial
  Probe
agtcctctatgccttctccagtcac

SEQ ID NO: 143098 - DNA, 25 bp, Artificial
  Probe
cagtcctctatgccttctccagtca

SEQ ID NO: 143099 - DNA, 25 bp, Artificial
  Probe
tatgccttctccagtcacagtttcc

SEQ ID NO: 143100 - DNA, 25 bp, Artificial
  Probe
aaatcagccaccgtctggactatat

SEQ ID NO: 143101 - DNA, 25 bp, Artificial
  Probe
tgtctttgggaactgtaaaatcagc

SEQ ID NO: 143102 - DNA, 25 bp, Artificial
  Probe
ccatgattttcttttactcccgcat

SEQ ID NO: 143103 - DNA, 25 bp, Artificial
  Probe
tcacagtttccgccagtaccttaaa

SEQ ID NO: 143104 - DNA, 25 bp, Artificial
  Probe
tatatgttgcaggtgacagagagcc

SEQ ID NO: 143105 - DNA, 25 bp, Artificial
  Probe
cgtctggactatatgttgcaggtga

SEQ ID NO: 143106 - DNA, 25 bp, Artificial
  Probe
tgcatgtctttgggaactgtaaaat

SEQ ID NO: 143107 - DNA, 25 bp, Artificial
  Probe
gtctttgggaactgtaaaatcagcc

SEQ ID NO: 143108 - DNA, 25 bp, Artificial
  Probe
atcagccaccgtctggactatatgt

SEQ ID NO: 143109 - DNA, 25 bp, Artificial
  Probe
ctgcatgtctttgggaactgtaaaa

SEQ ID NO: 143110 - DNA, 25 bp, Artificial
  Probe
ggagataggaaataattaatccccg

SEQ ID NO: 143111 - DNA, 25 bp, Artificial
  Probe
cagccaccgtctggactatatgttg

SEQ ID NO: 143112 - DNA, 25 bp, Artificial
  Probe
tcagccaccgtctggactatatgtt

SEQ ID NO: 143113 - DNA, 25 bp, Artificial
  Probe
ctttgggaactgtaaaatcagccac

SEQ ID NO: 143114 - DNA, 25 bp, Artificial
  Probe
tctttgggaactgtaaaatcagcca

SEQ ID NO: 143115 - DNA, 25 bp, Artificial
  Probe
gtcacagtttccgccagtaccttaa

SEQ ID NO: 143116 - DNA, 25 bp, Artificial
  Probe
ccgtctggactatatgttgcaggtg

SEQ ID NO: 143117 - DNA, 25 bp, Artificial
  Probe
caccgtctggactatatgttgcagg

SEQ ID NO: 143118 - DNA, 25 bp, Artificial
  Probe
cagagaagttgaagatgaatgttga

SEQ ID NO: 143119 - DNA, 25 bp, Artificial
  Probe
tccaatcagagaagttgaagatgaa

SEQ ID NO: 143120 - DNA, 25 bp, Artificial
  Probe
agagaagttgaagatgaatgttgat

SEQ ID NO: 143121 - DNA, 25 bp, Artificial
  Probe
tcagagaagttgaagatgaatgttg

SEQ ID NO: 143122 - DNA, 25 bp, Artificial
  Probe
ctccaatcagagaagttgaagatga

SEQ ID NO: 143123 - DNA, 25 bp, Artificial
  Probe
ccaatcagagaagttgaagatgaat

SEQ ID NO: 143124 - DNA, 25 bp, Artificial
  Probe
cctccaatcagagaagttgaagatg

SEQ ID NO: 143125 - DNA, 25 bp, Artificial
  Probe
atcagagaagttgaagatgaatgtt

SEQ ID NO: 143126 - DNA, 25 bp, Artificial
  Probe
aatcagagaagttgaagatgaatgt

SEQ ID NO: 143127 - DNA, 25 bp, Artificial
  Probe
gagaagttgaagatgaatgttgatt

SEQ ID NO: 143128 - DNA, 25 bp, Artificial
  Probe
caatcagagaagttgaagatgaatg

SEQ ID NO: 143129 - DNA, 25 bp, Artificial
  Probe
aacacaacctcttacatgctgaatc

SEQ ID NO: 143130 - DNA, 25 bp, Artificial
  Probe
caacacaacctcttacatgctgaat

SEQ ID NO: 143131 - DNA, 25 bp, Artificial
  Probe
caacctcttacatgctgaatcactg

SEQ ID NO: 143132 - DNA, 25 bp, Artificial
  Probe
cacaacctcttacatgctgaatcac

SEQ ID NO: 143133 - DNA, 25 bp, Artificial
  Probe
acaacctcttacatgctgaatcact

SEQ ID NO: 143134 - DNA, 25 bp, Artificial
  Probe
gaagttgaagatgaatgttgattcc

SEQ ID NO: 143135 - DNA, 25 bp, Artificial
  Probe
ggctaaccagatgcaaccaatataa

SEQ ID NO: 143136 - DNA, 25 bp, Artificial
  Probe
tatcccagaaacattcaaatcaagc

SEQ ID NO: 143137 - DNA, 25 bp, Artificial
  Probe
gcaaccaatataaatccacaagcag

SEQ ID NO: 143138 - DNA, 25 bp, Artificial
  Probe
acacaacctcttacatgctgaatca

SEQ ID NO: 143139 - DNA, 25 bp, Artificial
  Probe
cctatcccagaaacattcaaatcaa

SEQ ID NO: 143140 - DNA, 25 bp, Artificial
  Probe
tgattcccagagaccagaactattt

SEQ ID NO: 143141 - DNA, 25 bp, Artificial
  Probe
ttgattcccagagaccagaactatt

SEQ ID NO: 143142 - DNA, 25 bp, Artificial
  Probe
gcctatcccagaaacattcaaatca

SEQ ID NO: 143143 - DNA, 25 bp, Artificial
  Probe
aacctcttacatgctgaatcactgg

SEQ ID NO: 143144 - DNA, 25 bp, Artificial
  Probe
acaacacaacctcttacatgctgaa

SEQ ID NO: 143145 - DNA, 25 bp, Artificial
  Probe
agaagttgaagatgaatgttgattc

SEQ ID NO: 143146 - DNA, 25 bp, Artificial
  Probe
gttgattcccagagaccagaactat

SEQ ID NO: 143147 - DNA, 25 bp, Artificial
  Probe
ctatcccagaaacattcaaatcaag

SEQ ID NO: 143148 - DNA, 25 bp, Artificial
  Probe
atcccagaaacattcaaatcaagcc

SEQ ID NO: 143149 - DNA, 25 bp, Artificial
  Probe
ccagaaacattcaaatcaagcccat

SEQ ID NO: 143150 - DNA, 25 bp, Artificial
  Probe
gacaacacaacctcttacatgctga

SEQ ID NO: 143151 - DNA, 25 bp, Artificial
  Probe
aacattcaaatcaagcccatgagta

SEQ ID NO: 143152 - DNA, 25 bp, Artificial
  Probe
cagaaacattcaaatcaagcccatg

SEQ ID NO: 143153 - DNA, 25 bp, Artificial
  Probe
gaaacattcaaatcaagcccatgag

SEQ ID NO: 143154 - DNA, 25 bp, Artificial
  Probe
ccctccaatcagagaagttgaagat

SEQ ID NO: 143155 - DNA, 25 bp, Artificial
  Probe
atccctccaatcagagaagttgaag

SEQ ID NO: 143156 - DNA, 25 bp, Artificial
  Probe
aagttgaagatgaatgttgattccc

SEQ ID NO: 143157 - DNA, 25 bp, Artificial
  Probe
ttgaagatgaatgttgattcccaga

SEQ ID NO: 143158 - DNA, 25 bp, Artificial
  Probe
gttgaagatgaatgttgattcccag

SEQ ID NO: 143159 - DNA, 25 bp, Artificial
  Probe
tgacaacacaacctcttacatgctg

SEQ ID NO: 143160 - DNA, 25 bp, Artificial
  Probe
gaagatgaatgttgattcccagaga

SEQ ID NO: 143161 - DNA, 25 bp, Artificial
  Probe
agttgaagatgaatgttgattccca

SEQ ID NO: 143162 - DNA, 25 bp, Artificial
  Probe
agaaacattcaaatcaagcccatga

SEQ ID NO: 143163 - DNA, 25 bp, Artificial
  Probe
atagccaaggtctgataacatctac

SEQ ID NO: 143164 - DNA, 25 bp, Artificial
  Probe
tagccaaggtctgataacatctact

SEQ ID NO: 143165 - DNA, 25 bp, Artificial
  Probe
gataatgtgagtgtgtccttgttct

SEQ ID NO: 143166 - DNA, 25 bp, Artificial
  Probe
agataatgtgagtgtgtccttgttc

SEQ ID NO: 143167 - DNA, 25 bp, Artificial
  Probe
gagataatgtgagtgtgtccttgtt

SEQ ID NO: 143168 - DNA, 25 bp, Artificial
  Probe
cagagataatgtgagtgtgtccttg

SEQ ID NO: 143169 - DNA, 25 bp, Artificial
  Probe
gtgtgtccttgttctctgttcttag

SEQ ID NO: 143170 - DNA, 25 bp, Artificial
  Probe
agagataatgtgagtgtgtccttgt

SEQ ID NO: 143171 - DNA, 25 bp, Artificial
  Probe
agtgtgtccttgttctctgttctta

SEQ ID NO: 143172 - DNA, 25 bp, Artificial
  Probe
ttatagccaaggtctgataacatct

SEQ ID NO: 143173 - DNA, 25 bp, Artificial
  Probe
aatcagagataatgtgagtgtgtcc

SEQ ID NO: 143174 - DNA, 25 bp, Artificial
  Probe
ggaatcagagataatgtgagtgtgt

SEQ ID NO: 143175 - DNA, 25 bp, Artificial
  Probe
gaatcagagataatgtgagtgtgtc

SEQ ID NO: 143176 - DNA, 25 bp, Artificial
  Probe
atcagagataatgtgagtgtgtcct

SEQ ID NO: 143177 - DNA, 25 bp, Artificial
  Probe
tatagccaaggtctgataacatcta

SEQ ID NO: 143178 - DNA, 25 bp, Artificial
  Probe
ataatgtgagtgtgtccttgttctc

SEQ ID NO: 143179 - DNA, 25 bp, Artificial
  Probe
atcagtattatgtagcacgacagag

SEQ ID NO: 143180 - DNA, 25 bp, Artificial
  Probe
agccaaggtctgataacatctactg

SEQ ID NO: 143181 - DNA, 25 bp, Artificial
  Probe
tcagagataatgtgagtgtgtcctt

SEQ ID NO: 143182 - DNA, 25 bp, Artificial
  Probe
agtattatgtagcacgacagagact

SEQ ID NO: 143183 - DNA, 25 bp, Artificial
  Probe
cagtattatgtagcacgacagagac

SEQ ID NO: 143184 - DNA, 25 bp, Artificial
  Probe
tcagtattatgtagcacgacagaga

SEQ ID NO: 143185 - DNA, 25 bp, Artificial
  Probe
tatcagtattatgtagcacgacaga

SEQ ID NO: 143186 - DNA, 25 bp, Artificial
  Probe
gtatcagtattatgtagcacgacag

SEQ ID NO: 143187 - DNA, 25 bp, Artificial
  Probe
gtattatgtagcacgacagagactg

SEQ ID NO: 143188 - DNA, 25 bp, Artificial
  Probe
taatgtgagtgtgtccttgttctct

SEQ ID NO: 143189 - DNA, 25 bp, Artificial
  Probe
tgtgtccttgttctctgttcttagg

SEQ ID NO: 143190 - DNA, 25 bp, Artificial
  Probe
actttatagccaaggtctgataaca

SEQ ID NO: 143191 - DNA, 25 bp, Artificial
  Probe
gagtgtgtccttgttctctgttctt

SEQ ID NO: 143192 - DNA, 25 bp, Artificial
  Probe
cgaaattactttatagccaaggtct

SEQ ID NO: 143193 - DNA, 25 bp, Artificial
  Probe
gggaatcagagataatgtgagtgtg

SEQ ID NO: 143194 - DNA, 25 bp, Artificial
  Probe
aatgtgagtgtgtccttgttctctg

SEQ ID NO: 143195 - DNA, 25 bp, Artificial
  Probe
tttatagccaaggtctgataacatc

SEQ ID NO: 143196 - DNA, 25 bp, Artificial
  Probe
ctttatagccaaggtctgataacat

SEQ ID NO: 143197 - DNA, 25 bp, Artificial
  Probe
atggcagaaggtcttaattggttgg

SEQ ID NO: 143198 - DNA, 25 bp, Artificial
  Probe
cgtatcagtattatgtagcacgaca

SEQ ID NO: 143199 - DNA, 25 bp, Artificial
  Probe
gcagaaggtcttaattggttggttt

SEQ ID NO: 143200 - DNA, 25 bp, Artificial
  Probe
ggcagaaggtcttaattggttggtt

SEQ ID NO: 143201 - DNA, 25 bp, Artificial
  Probe
tactttatagccaaggtctgataac

SEQ ID NO: 143202 - DNA, 25 bp, Artificial
  Probe
aaattactttatagccaaggtctga

SEQ ID NO: 143203 - DNA, 25 bp, Artificial
  Probe
gtgagtgtgtccttgttctctgttc

SEQ ID NO: 143204 - DNA, 25 bp, Artificial
  Probe
aattactttatagccaaggtctgat

SEQ ID NO: 143205 - DNA, 25 bp, Artificial
  Probe
gaaattactttatagccaaggtctg

SEQ ID NO: 143206 - DNA, 25 bp, Artificial
  Probe
catataaagctgtgtctactggttt

SEQ ID NO: 143207 - DNA, 25 bp, Artificial
  Probe
tgagtgtgtccttgttctctgttct

SEQ ID NO: 143208 - DNA, 25 bp, Artificial
  Probe
tcagtcaatcacaaagcagagtaat

SEQ ID NO: 143209 - DNA, 25 bp, Artificial
  Probe
gtgttaaagagcaagagatgatgtt

SEQ ID NO: 143210 - DNA, 25 bp, Artificial
  Probe
ttaaagatgtgaagtgatttgtgct

SEQ ID NO: 143211 - DNA, 25 bp, Artificial
  Probe
cagtcaatcacaaagcagagtaatt

SEQ ID NO: 143212 - DNA, 25 bp, Artificial
  Probe
taaagatgtgaagtgatttgtgctt

SEQ ID NO: 143213 - DNA, 25 bp, Artificial
  Probe
aagatgtgaagtgatttgtgctttg

SEQ ID NO: 143214 - DNA, 25 bp, Artificial
  Probe
tgttaaagagcaagagatgatgttt

SEQ ID NO: 143215 - DNA, 25 bp, Artificial
  Probe
cttgctgtgtgctatagtgttagac

SEQ ID NO: 143216 - DNA, 25 bp, Artificial
  Probe
gtcttgctgtgtgctatagtgttag

SEQ ID NO: 143217 - DNA, 25 bp, Artificial
  Probe
cttaaagatgtgaagtgatttgtgc

SEQ ID NO: 143218 - DNA, 25 bp, Artificial
  Probe
gtcagtcaatcacaaagcagagtaa

SEQ ID NO: 143219 - DNA, 25 bp, Artificial
  Probe
taaagagcaagagatgatgtttgtc

SEQ ID NO: 143220 - DNA, 25 bp, Artificial
  Probe
agtcttgctgtgtgctatagtgtta

SEQ ID NO: 143221 - DNA, 25 bp, Artificial
  Probe
cgtgttaaagagcaagagatgatgt

SEQ ID NO: 143222 - DNA, 25 bp, Artificial
  Probe
tcttgctgtgtgctatagtgttaga

SEQ ID NO: 143223 - DNA, 25 bp, Artificial
  Probe
agcaagagatgatgtttgtcagtag

SEQ ID NO: 143224 - DNA, 25 bp, Artificial
  Probe
gagcaagagatgatgtttgtcagta

SEQ ID NO: 143225 - DNA, 25 bp, Artificial
  Probe
ttaaagagcaagagatgatgtttgt

SEQ ID NO: 143226 - DNA, 25 bp, Artificial
  Probe
aaagagcaagagatgatgtttgtca

SEQ ID NO: 143227 - DNA, 25 bp, Artificial
  Probe
gttaaagagcaagagatgatgtttg

SEQ ID NO: 143228 - DNA, 25 bp, Artificial
  Probe
aagagcaagagatgatgtttgtcag

SEQ ID NO: 143229 - DNA, 25 bp, Artificial
  Probe
ccgtgttaaagagcaagagatgatg

SEQ ID NO: 143230 - DNA, 25 bp, Artificial
  Probe
caacggaggcagtatttataaggag

SEQ ID NO: 143231 - DNA, 25 bp, Artificial
  Probe
agagatgatgtttgtcagtaggcat

SEQ ID NO: 143232 - DNA, 25 bp, Artificial
  Probe
caagagatgatgtttgtcagtaggc

SEQ ID NO: 143233 - DNA, 25 bp, Artificial
  Probe
gcaagagatgatgtttgtcagtagg

SEQ ID NO: 143234 - DNA, 25 bp, Artificial
  Probe
ttgctgtgtgctatagtgttagacc

SEQ ID NO: 143235 - DNA, 25 bp, Artificial
  Probe
aagagatgatgtttgtcagtaggca

SEQ ID NO: 143236 - DNA, 25 bp, Artificial
  Probe
tttcccgtgttaaagagcaagagat

SEQ ID NO: 143237 - DNA, 25 bp, Artificial
  Probe
agtatttataaggagggcagggttc

SEQ ID NO: 143238 - DNA, 25 bp, Artificial
  Probe
agtcaatcacaaagcagagtaatta

SEQ ID NO: 143239 - DNA, 25 bp, Artificial
  Probe
agagcaagagatgatgtttgtcagt

SEQ ID NO: 143240 - DNA, 25 bp, Artificial
  Probe
ctcagtgaagattgttagcggttgg

SEQ ID NO: 143241 - DNA, 25 bp, Artificial
  Probe
cagtatttataaggagggcagggtt

SEQ ID NO: 143242 - DNA, 25 bp, Artificial
  Probe
aacggaggcagtatttataaggagg

SEQ ID NO: 143243 - DNA, 25 bp, Artificial
  Probe
tgtcagtcaatcacaaagcagagta

SEQ ID NO: 143244 - DNA, 25 bp, Artificial
  Probe
gagatgatgtttgtcagtaggcatg

SEQ ID NO: 143245 - DNA, 25 bp, Artificial
  Probe
agatgtgaagtgatttgtgctttgc

SEQ ID NO: 143246 - DNA, 25 bp, Artificial
  Probe
cccgtgttaaagagcaagagatgat

SEQ ID NO: 143247 - DNA, 25 bp, Artificial
  Probe
cagtgaagattgttagcggttggtc

SEQ ID NO: 143248 - DNA, 25 bp, Artificial
  Probe
ccaacggaggcagtatttataagga

SEQ ID NO: 143249 - DNA, 25 bp, Artificial
  Probe
gaagattgttagcggttggtctgac

SEQ ID NO: 143250 - DNA, 25 bp, Artificial
  Probe
gttccatgtttcccgtgttaaagag

SEQ ID NO: 143251 - DNA, 25 bp, Artificial
  Probe
atgtttcccgtgttaaagagcaaga

SEQ ID NO: 143252 - DNA, 25 bp, Artificial
  Probe
aaagatgtgaagtgatttgtgcttt

SEQ ID NO: 143253 - DNA, 25 bp, Artificial
  Probe
gtgtctttgaaatgcctgttgaata

SEQ ID NO: 143254 - DNA, 25 bp, Artificial
  Probe
tgtctttgaaatgcctgttgaatat

SEQ ID NO: 143255 - DNA, 25 bp, Artificial
  Probe
tctttgaaatgcctgttgaatatct

SEQ ID NO: 143256 - DNA, 25 bp, Artificial
  Probe
gtctttgaaatgcctgttgaatatc

SEQ ID NO: 143257 - DNA, 25 bp, Artificial
  Probe
ctttgaaatgcctgttgaatatcta

SEQ ID NO: 143258 - DNA, 25 bp, Artificial
  Probe
agagtttagtacctccttctacaaa

SEQ ID NO: 143259 - DNA, 25 bp, Artificial
  Probe
tttgaaatgcctgttgaatatctag

SEQ ID NO: 143260 - DNA, 25 bp, Artificial
  Probe
cgtgtctttgaaatgcctgttgaat

SEQ ID NO: 143261 - DNA, 25 bp, Artificial
  Probe
ctagagtttagtacctccttctaca

SEQ ID NO: 143262 - DNA, 25 bp, Artificial
  Probe
tttagtacctccttctacaaacttt

SEQ ID NO: 143263 - DNA, 25 bp, Artificial
  Probe
tagagtttagtacctccttctacaa

SEQ ID NO: 143264 - DNA, 25 bp, Artificial
  Probe
gagtttagtacctccttctacaaac

SEQ ID NO: 143265 - DNA, 25 bp, Artificial
  Probe
tcgtgtctttgaaatgcctgttgaa

SEQ ID NO: 143266 - DNA, 25 bp, Artificial
  Probe
gaaatgcctgttgaatatctagagt

SEQ ID NO: 143267 - DNA, 25 bp, Artificial
  Probe
tgaaatgcctgttgaatatctagag

SEQ ID NO: 143268 - DNA, 25 bp, Artificial
  Probe
gtttagtacctccttctacaaactt

SEQ ID NO: 143269 - DNA, 25 bp, Artificial
  Probe
ttcgtgtctttgaaatgcctgttga

SEQ ID NO: 143270 - DNA, 25 bp, Artificial
  Probe
ttgaaatgcctgttgaatatctaga

SEQ ID NO: 143271 - DNA, 25 bp, Artificial
  Probe
aatgcctgttgaatatctagagttt

SEQ ID NO: 143272 - DNA, 25 bp, Artificial
  Probe
aaatgcctgttgaatatctagagtt

SEQ ID NO: 143273 - DNA, 25 bp, Artificial
  Probe
gcctgttgaatatctagagtttagt

SEQ ID NO: 143274 - DNA, 25 bp, Artificial
  Probe
tgcctgttgaatatctagagtttag

SEQ ID NO: 143275 - DNA, 25 bp, Artificial
  Probe
tttcgtgtctttgaaatgcctgttg

SEQ ID NO: 143276 - DNA, 25 bp, Artificial
  Probe
atgcctgttgaatatctagagttta

SEQ ID NO: 143277 - DNA, 25 bp, Artificial
  Probe
tctagagtttagtacctccttctac

SEQ ID NO: 143278 - DNA, 25 bp, Artificial
  Probe
ttagtacctccttctacaaactttt

SEQ ID NO: 143279 - DNA, 25 bp, Artificial
  Probe
aatgttttcgtgtctttgaaatgcc

SEQ ID NO: 143280 - DNA, 25 bp, Artificial
  Probe
tatctagagtttagtacctccttct

SEQ ID NO: 143281 - DNA, 25 bp, Artificial
  Probe
atgttttcgtgtctttgaaatgcct

SEQ ID NO: 143282 - DNA, 25 bp, Artificial
  Probe
atctagagtttagtacctccttcta

SEQ ID NO: 143283 - DNA, 25 bp, Artificial
  Probe
ttttcgtgtctttgaaatgcctgtt

SEQ ID NO: 143284 - DNA, 25 bp, Artificial
  Probe
tgaatatctagagtttagtacctcc

SEQ ID NO: 143285 - DNA, 25 bp, Artificial
  Probe
atatctagagtttagtacctccttc

SEQ ID NO: 143286 - DNA, 25 bp, Artificial
  Probe
gaatatctagagtttagtacctcct

SEQ ID NO: 143287 - DNA, 25 bp, Artificial
  Probe
gttttcgtgtctttgaaatgcctgt

SEQ ID NO: 143288 - DNA, 25 bp, Artificial
  Probe
tgttttcgtgtctttgaaatgcctg

SEQ ID NO: 143289 - DNA, 25 bp, Artificial
  Probe
aatatctagagtttagtacctcctt

SEQ ID NO: 143290 - DNA, 25 bp, Artificial
  Probe
tgttgaatatctagagtttagtacc

SEQ ID NO: 143291 - DNA, 25 bp, Artificial
  Probe
agtttagtacctccttctacaaact

SEQ ID NO: 143292 - DNA, 25 bp, Artificial
  Probe
gttgaatatctagagtttagtacct

SEQ ID NO: 143293 - DNA, 25 bp, Artificial
  Probe
cctgttgaatatctagagtttagta

SEQ ID NO: 143294 - DNA, 25 bp, Artificial
  Probe
ttgaatatctagagtttagtacctc

SEQ ID NO: 143295 - DNA, 25 bp, Artificial
  Probe
ctgaatctccagtgttagtcaatga

SEQ ID NO: 143296 - DNA, 25 bp, Artificial
  Probe
agcagaatctggtaacataagtcaa

SEQ ID NO: 143297 - DNA, 25 bp, Artificial
  Probe
aagcagaatctggtaacataagtca

SEQ ID NO: 143298 - DNA, 25 bp, Artificial
  Probe
tacgaagcagaatctggtaacataa

SEQ ID NO: 143299 - DNA, 25 bp, Artificial
  Probe
ctacgaagcagaatctggtaacata

SEQ ID NO: 143300 - DNA, 25 bp, Artificial
  Probe
gaagcagaatctggtaacataagtc

SEQ ID NO: 143301 - DNA, 25 bp, Artificial
  Probe
cgaagcagaatctggtaacataagt

SEQ ID NO: 143302 - DNA, 25 bp, Artificial
  Probe
acgaagcagaatctggtaacataag

SEQ ID NO: 143303 - DNA, 25 bp, Artificial
  Probe
tgaatctccagtgttagtcaatgac

SEQ ID NO: 143304 - DNA, 25 bp, Artificial
  Probe
ctgttcattaattcaggtgcttctt

SEQ ID NO: 143305 - DNA, 25 bp, Artificial
  Probe
tagtctgttcattaattcaggtgct

SEQ ID NO: 143306 - DNA, 25 bp, Artificial
  Probe
tctgttcattaattcaggtgcttct

SEQ ID NO: 143307 - DNA, 25 bp, Artificial
  Probe
gtctgttcattaattcaggtgcttc

SEQ ID NO: 143308 - DNA, 25 bp, Artificial
  Probe
agtctgttcattaattcaggtgctt

SEQ ID NO: 143309 - DNA, 25 bp, Artificial
  Probe
atagtctgttcattaattcaggtgc

SEQ ID NO: 143310 - DNA, 25 bp, Artificial
  Probe
tgggataggagatagtctgttcatt

SEQ ID NO: 143311 - DNA, 25 bp, Artificial
  Probe
ttgggataggagatagtctgttcat

SEQ ID NO: 143312 - DNA, 25 bp, Artificial
  Probe
attgggataggagatagtctgttca

SEQ ID NO: 143313 - DNA, 25 bp, Artificial
  Probe
atgactacgaagcagaatctggtaa

SEQ ID NO: 143314 - DNA, 25 bp, Artificial
  Probe
aatgactacgaagcagaatctggta

SEQ ID NO: 143315 - DNA, 25 bp, Artificial
  Probe
agtgcctagagtcaaagaagttaaa

SEQ ID NO: 143316 - DNA, 25 bp, Artificial
  Probe
aaagaagttaaatctgctcaggaga

SEQ ID NO: 143317 - DNA, 25 bp, Artificial
  Probe
caaagaagttaaatctgctcaggag

SEQ ID NO: 143318 - DNA, 25 bp, Artificial
  Probe
tcaaagaagttaaatctgctcagga

SEQ ID NO: 143319 - DNA, 25 bp, Artificial
  Probe
gtcaaagaagttaaatctgctcagg

SEQ ID NO: 143320 - DNA, 25 bp, Artificial
  Probe
ggataggagatagtctgttcattaa

SEQ ID NO: 143321 - DNA, 25 bp, Artificial
  Probe
aagaagttaaatctgctcaggagac

SEQ ID NO: 143322 - DNA, 25 bp, Artificial
  Probe
agtcaaagaagttaaatctgctcag

SEQ ID NO: 143323 - DNA, 25 bp, Artificial
  Probe
tagtgcctagagtcaaagaagttaa

SEQ ID NO: 143324 - DNA, 25 bp, Artificial
  Probe
actacgaagcagaatctggtaacat

SEQ ID NO: 143325 - DNA, 25 bp, Artificial
  Probe
gtgcctagagtcaaagaagttaaat

SEQ ID NO: 143326 - DNA, 25 bp, Artificial
  Probe
tgcctagagtcaaagaagttaaatc

SEQ ID NO: 143327 - DNA, 25 bp, Artificial
  Probe
gtcaatgactacgaagcagaatctg

SEQ ID NO: 143328 - DNA, 25 bp, Artificial
  Probe
gggataggagatagtctgttcatta

SEQ ID NO: 143329 - DNA, 25 bp, Artificial
  Probe
tattgggataggagatagtctgttc

SEQ ID NO: 143330 - DNA, 25 bp, Artificial
  Probe
gagtcaaagaagttaaatctgctca

SEQ ID NO: 143331 - DNA, 25 bp, Artificial
  Probe
gaagttaaatctgctcaggagactc

SEQ ID NO: 143332 - DNA, 25 bp, Artificial
  Probe
agagtcaaagaagttaaatctgctc

SEQ ID NO: 143333 - DNA, 25 bp, Artificial
  Probe
agaagttaaatctgctcaggagact

SEQ ID NO: 143334 - DNA, 25 bp, Artificial
  Probe
aaacctaagcctactattgggatag

SEQ ID NO: 143335 - DNA, 25 bp, Artificial
  Probe
gactacgaagcagaatctggtaaca

SEQ ID NO: 143336 - DNA, 25 bp, Artificial
  Probe
tgactacgaagcagaatctggtaac

SEQ ID NO: 143337 - DNA, 25 bp, Artificial
  Probe
gcctagagtcaaagaagttaaatct

SEQ ID NO: 143338 - DNA, 25 bp, Artificial
  Probe
tgttcattaattcaggtgcttcttt

SEQ ID NO: 143339 - DNA, 25 bp, Artificial
  Probe
ctattgggataggagatagtctgtt

SEQ ID NO: 143340 - DNA, 25 bp, Artificial
  Probe
cttcttgtcagttcacatctgctag

SEQ ID NO: 143341 - DNA, 25 bp, Artificial
  Probe
tcttactctgttcctaatcatccct

SEQ ID NO: 143342 - DNA, 25 bp, Artificial
  Probe
cttactctgttcctaatcatccctt

SEQ ID NO: 143343 - DNA, 25 bp, Artificial
  Probe
ttcttactctgttcctaatcatccc

SEQ ID NO: 143344 - DNA, 25 bp, Artificial
  Probe
tattgtttgggttgatttggctttc

SEQ ID NO: 143345 - DNA, 25 bp, Artificial
  Probe
ctattgtttgggttgatttggcttt

SEQ ID NO: 143346 - DNA, 25 bp, Artificial
  Probe
tcctaatcatcccttacccattcat

SEQ ID NO: 143347 - DNA, 25 bp, Artificial
  Probe
gttcctaatcatcccttacccattc

SEQ ID NO: 143348 - DNA, 25 bp, Artificial
  Probe
ccttattcctagaactgcatcctta

SEQ ID NO: 143349 - DNA, 25 bp, Artificial
  Probe
cttgtcagttcacatctgctagttg

SEQ ID NO: 143350 - DNA, 25 bp, Artificial
  Probe
tcttgtcagttcacatctgctagtt

SEQ ID NO: 143351 - DNA, 25 bp, Artificial
  Probe
ttcttgtcagttcacatctgctagt

SEQ ID NO: 143352 - DNA, 25 bp, Artificial
  Probe
ttcctaatcatcccttacccattca

SEQ ID NO: 143353 - DNA, 25 bp, Artificial
  Probe
tactctgttcctaatcatcccttac

SEQ ID NO: 143354 - DNA, 25 bp, Artificial
  Probe
catatctttccgaaggcaataatgg

SEQ ID NO: 143355 - DNA, 25 bp, Artificial
  Probe
atctttccgaaggcaataatggtat

SEQ ID NO: 143356 - DNA, 25 bp, Artificial
  Probe
tatctttccgaaggcaataatggta

SEQ ID NO: 143357 - DNA, 25 bp, Artificial
  Probe
atatctttccgaaggcaataatggt

SEQ ID NO: 143358 - DNA, 25 bp, Artificial
  Probe
acttaatcatatctttccgaaggca

SEQ ID NO: 143359 - DNA, 25 bp, Artificial
  Probe
tgttcctaatcatcccttacccatt

SEQ ID NO: 143360 - DNA, 25 bp, Artificial
  Probe
taactattgtttgggttgatttggc

SEQ ID NO: 143361 - DNA, 25 bp, Artificial
  Probe
cctgtttgtaactattgtttgggtt

SEQ ID NO: 143362 - DNA, 25 bp, Artificial
  Probe
aacctgtttgtaactattgtttggg

SEQ ID NO: 143363 - DNA, 25 bp, Artificial
  Probe
tcatatctttccgaaggcaataatg

SEQ ID NO: 143364 - DNA, 25 bp, Artificial
  Probe
tctttccgaaggcaataatggtatt

SEQ ID NO: 143365 - DNA, 25 bp, Artificial
  Probe
cttaatcatatctttccgaaggcaa

SEQ ID NO: 143366 - DNA, 25 bp, Artificial
  Probe
aacttaatcatatctttccgaaggc

SEQ ID NO: 143367 - DNA, 25 bp, Artificial
  Probe
actctgttcctaatcatcccttacc

SEQ ID NO: 143368 - DNA, 25 bp, Artificial
  Probe
tgtttgtaactattgtttgggttga

SEQ ID NO: 143369 - DNA, 25 bp, Artificial
  Probe
gactttctttccactgtgctaatat

SEQ ID NO: 143370 - DNA, 25 bp, Artificial
  Probe
taaagtaaagttgtattgtggagca

SEQ ID NO: 143371 - DNA, 25 bp, Artificial
  Probe
agtaagacaaagaatagaatcctgc

SEQ ID NO: 143372 - DNA, 25 bp, Artificial
  Probe
ctgtttgtaactattgtttgggttg

SEQ ID NO: 143373 - DNA, 25 bp, Artificial
  Probe
agactttctttccactgtgctaata

SEQ ID NO: 143374 - DNA, 25 bp, Artificial
  Probe
aagtaaagttgtattgtggagcaaa

SEQ ID NO: 143375 - DNA, 25 bp, Artificial
  Probe
aaagtaaagttgtattgtggagcaa

SEQ ID NO: 143376 - DNA, 25 bp, Artificial
  Probe
gttgatttggctttcagactacttt

SEQ ID NO: 143377 - DNA, 25 bp, Artificial
  Probe
atgtgcttaaccttctttgtcaagt

SEQ ID NO: 143378 - DNA, 25 bp, Artificial
  Probe
ctgttcctaatcatcccttacccat

SEQ ID NO: 143379 - DNA, 25 bp, Artificial
  Probe
atattaacagagttgccgtcagcta

SEQ ID NO: 143380 - DNA, 25 bp, Artificial
  Probe
gaagaagaaatgtttgaattgtggt

SEQ ID NO: 143381 - DNA, 25 bp, Artificial
  Probe
tttaacttgctgtctttggagtaag

SEQ ID NO: 143382 - DNA, 25 bp, Artificial
  Probe
agtaaagttgtattgtggagcaaat

SEQ ID NO: 143383 - DNA, 25 bp, Artificial
  Probe
actattgtttgggttgatttggctt

SEQ ID NO: 143384 - DNA, 25 bp, Artificial
  Probe
ttactctgttcctaatcatccctta

SEQ ID NO: 143385 - DNA, 25 bp, Artificial
  Probe
atactgtgacaaggaatatgtgagc

SEQ ID NO: 143386 - DNA, 25 bp, Artificial
  Probe
aatactgtgacaaggaatatgtgag

SEQ ID NO: 143387 - DNA, 25 bp, Artificial
  Probe
cattagtgacgaagaggagagactc

SEQ ID NO: 143388 - DNA, 25 bp, Artificial
  Probe
cttcatctgacacttcatccaagga

SEQ ID NO: 143389 - DNA, 25 bp, Artificial
  Probe
ttcatctgacacttcatccaaggat

SEQ ID NO: 143390 - DNA, 25 bp, Artificial
  Probe
tactgtgacaaggaatatgtgagcc

SEQ ID NO: 143391 - DNA, 25 bp, Artificial
  Probe
tcatctgacacttcatccaaggatc

SEQ ID NO: 143392 - DNA, 25 bp, Artificial
  Probe
atctgacacttcatccaaggatcac

SEQ ID NO: 143393 - DNA, 25 bp, Artificial
  Probe
catctgacacttcatccaaggatca

SEQ ID NO: 143394 - DNA, 25 bp, Artificial
  Probe
cttcctcgtcaagaaacatttcaac

SEQ ID NO: 143395 - DNA, 25 bp, Artificial
  Probe
ccattagtgacgaagaggagagact

SEQ ID NO: 143396 - DNA, 25 bp, Artificial
  Probe
gcaaatactgtgacaaggaatatgt

SEQ ID NO: 143397 - DNA, 25 bp, Artificial
  Probe
cctattctactttctctggtctggc

SEQ ID NO: 143398 - DNA, 25 bp, Artificial
  Probe
gatcatttctccatacctctgtgag

SEQ ID NO: 143399 - DNA, 25 bp, Artificial
  Probe
ccttcctcgtcaagaaacatttcaa

SEQ ID NO: 143400 - DNA, 25 bp, Artificial
  Probe
ctccttcctcgtcaagaaacatttc

SEQ ID NO: 143401 - DNA, 25 bp, Artificial
  Probe
caaatactgtgacaaggaatatgtg

SEQ ID NO: 143402 - DNA, 25 bp, Artificial
  Probe
aaatactgtgacaaggaatatgtga

SEQ ID NO: 143403 - DNA, 25 bp, Artificial
  Probe
gccttcatctgacacttcatccaag

SEQ ID NO: 143404 - DNA, 25 bp, Artificial
  Probe
tgcaaatactgtgacaaggaatatg

SEQ ID NO: 143405 - DNA, 25 bp, Artificial
  Probe
acctattctactttctctggtctgg

SEQ ID NO: 143406 - DNA, 25 bp, Artificial
  Probe
ttcagaaagtcccattagtgacgaa

SEQ ID NO: 143407 - DNA, 25 bp, Artificial
  Probe
tccttcctcgtcaagaaacatttca

SEQ ID NO: 143408 - DNA, 25 bp, Artificial
  Probe
ctgcaaatactgtgacaaggaatat

SEQ ID NO: 143409 - DNA, 25 bp, Artificial
  Probe
agaaagtcccattagtgacgaagag

SEQ ID NO: 143410 - DNA, 25 bp, Artificial
  Probe
ctgacacttcatccaaggatcacag

SEQ ID NO: 143411 - DNA, 25 bp, Artificial
  Probe
ctgtgacaaggaatatgtgagcctg

SEQ ID NO: 143412 - DNA, 25 bp, Artificial
  Probe
tctgacacttcatccaaggatcaca

SEQ ID NO: 143413 - DNA, 25 bp, Artificial
  Probe
aaggatcacagtggttcagaaagtc

SEQ ID NO: 143414 - DNA, 25 bp, Artificial
  Probe
cagaaagtcccattagtgacgaaga

SEQ ID NO: 143415 - DNA, 25 bp, Artificial
  Probe
tcagaaagtcccattagtgacgaag

SEQ ID NO: 143416 - DNA, 25 bp, Artificial
  Probe
ataagacctattctactttctctgg

SEQ ID NO: 143417 - DNA, 25 bp, Artificial
  Probe
gcaataagacctattctactttctc

SEQ ID NO: 143418 - DNA, 25 bp, Artificial
  Probe
gctgcaaatactgtgacaaggaata

SEQ ID NO: 143419 - DNA, 25 bp, Artificial
  Probe
tgacacttcatccaaggatcacagt

SEQ ID NO: 143420 - DNA, 25 bp, Artificial
  Probe
taagacctattctactttctctggt

SEQ ID NO: 143421 - DNA, 25 bp, Artificial
  Probe
gttcagaaagtcccattagtgacga

SEQ ID NO: 143422 - DNA, 25 bp, Artificial
  Probe
actgtgacaaggaatatgtgagcct

SEQ ID NO: 143423 - DNA, 25 bp, Artificial
  Probe
caaggatcacagtggttcagaaagt

SEQ ID NO: 143424 - DNA, 25 bp, Artificial
  Probe
tgccttcatctgacacttcatccaa

SEQ ID NO: 143425 - DNA, 25 bp, Artificial
  Probe
cttcatccaaggatcacagtggttc

SEQ ID NO: 143426 - DNA, 25 bp, Artificial
  Probe
gaaagtcccattagtgacgaagagg

SEQ ID NO: 143427 - DNA, 25 bp, Artificial
  Probe
tggttcagaaagtcccattagtgac

SEQ ID NO: 143428 - DNA, 25 bp, Artificial
  Probe
gtggttcagaaagtcccattagtga

SEQ ID NO: 143429 - DNA, 25 bp, Artificial
  Probe
agtggttcagaaagtcccattagtg

SEQ ID NO: 143430 - DNA, 25 bp, Artificial
  Probe
gaaatggctctcagacaaatggttt

SEQ ID NO: 143431 - DNA, 25 bp, Artificial
  Probe
tgaaatggctctcagacaaatggtt

SEQ ID NO: 143432 - DNA, 25 bp, Artificial
  Probe
aatggctctcagacaaatggtttta

SEQ ID NO: 143433 - DNA, 25 bp, Artificial
  Probe
atggctctcagacaaatggttttac

SEQ ID NO: 143434 - DNA, 25 bp, Artificial
  Probe
aaatggctctcagacaaatggtttt

SEQ ID NO: 143435 - DNA, 25 bp, Artificial
  Probe
ggctctcagacaaatggttttacat

SEQ ID NO: 143436 - DNA, 25 bp, Artificial
  Probe
cagacgaccagtgtgtctataactt

SEQ ID NO: 143437 - DNA, 25 bp, Artificial
  Probe
attaccaatgagaccctgaaatggc

SEQ ID NO: 143438 - DNA, 25 bp, Artificial
  Probe
tggctctcagacaaatggttttaca

SEQ ID NO: 143439 - DNA, 25 bp, Artificial
  Probe
acagacgaccagtgtgtctataact

SEQ ID NO: 143440 - DNA, 25 bp, Artificial
  Probe
ctggacaaaggataagtgcagtgag

SEQ ID NO: 143441 - DNA, 25 bp, Artificial
  Probe
ttaccaatgagaccctgaaatggct

SEQ ID NO: 143442 - DNA, 25 bp, Artificial
  Probe
taccaatgagaccctgaaatggctc

SEQ ID NO: 143443 - DNA, 25 bp, Artificial
  Probe
cacagacgaccagtgtgtctataac

SEQ ID NO: 143444 - DNA, 25 bp, Artificial
  Probe
agaatgggaccttatccaagtgtgc

SEQ ID NO: 143445 - DNA, 25 bp, Artificial
  Probe
ctgaaatggctctcagacaaatggt

SEQ ID NO: 143446 - DNA, 25 bp, Artificial
  Probe
tcgactggacaaaggataagtgcag

SEQ ID NO: 143447 - DNA, 25 bp, Artificial
  Probe
ccacagacgaccagtgtgtctataa

SEQ ID NO: 143448 - DNA, 25 bp, Artificial
  Probe
tggacaaaggataagtgcagtgagc

SEQ ID NO: 143449 - DNA, 25 bp, Artificial
  Probe
cctgaaatggctctcagacaaatgg

SEQ ID NO: 143450 - DNA, 25 bp, Artificial
  Probe
ccctgaaatggctctcagacaaatg

SEQ ID NO: 143451 - DNA, 25 bp, Artificial
  Probe
aatgggaccttatccaagtgtgcag

SEQ ID NO: 143452 - DNA, 25 bp, Artificial
  Probe
gaatgggaccttatccaagtgtgca

SEQ ID NO: 143453 - DNA, 25 bp, Artificial
  Probe
accctgaaatggctctcagacaaat

SEQ ID NO: 143454 - DNA, 25 bp, Artificial
  Probe
gactggacaaaggataagtgcagtg

SEQ ID NO: 143455 - DNA, 25 bp, Artificial
  Probe
accacagacgaccagtgtgtctata

SEQ ID NO: 143456 - DNA, 25 bp, Artificial
  Probe
actggacaaaggataagtgcagtga

SEQ ID NO: 143457 - DNA, 25 bp, Artificial
  Probe
gaccctgaaatggctctcagacaaa

SEQ ID NO: 143458 - DNA, 25 bp, Artificial
  Probe
ggacaaaggataagtgcagtgagca

SEQ ID NO: 143459 - DNA, 25 bp, Artificial
  Probe
tgtgcaggagcagtgaaaatctttg

SEQ ID NO: 143460 - DNA, 25 bp, Artificial
  Probe
gtgtgcaggagcagtgaaaatcttt

SEQ ID NO: 143461 - DNA, 25 bp, Artificial
  Probe
cgactggacaaaggataagtgcagt

SEQ ID NO: 143462 - DNA, 25 bp, Artificial
  Probe
caagtgtgcaggagcagtgaaaatc

SEQ ID NO: 143463 - DNA, 25 bp, Artificial
  Probe
agtgtgcaggagcagtgaaaatctt

SEQ ID NO: 143464 - DNA, 25 bp, Artificial
  Probe
aagtgtgcaggagcagtgaaaatct

SEQ ID NO: 143465 - DNA, 25 bp, Artificial
  Probe
tgatgtcaagaagaatagtccaatg

SEQ ID NO: 143466 - DNA, 25 bp, Artificial
  Probe
ccatgatgtcaagaagaatagtcca

SEQ ID NO: 143467 - DNA, 25 bp, Artificial
  Probe
accatgatgtcaagaagaatagtcc

SEQ ID NO: 143468 - DNA, 25 bp, Artificial
  Probe
actgtgattatgaagttgtatctgg

SEQ ID NO: 143469 - DNA, 25 bp, Artificial
  Probe
gatgtcaagaagaatagtccaatga

SEQ ID NO: 143470 - DNA, 25 bp, Artificial
  Probe
atgatgtcaagaagaatagtccaat

SEQ ID NO: 143471 - DNA, 25 bp, Artificial
  Probe
ccagactgtgattatgaagttgtat

SEQ ID NO: 143472 - DNA, 25 bp, Artificial
  Probe
catgatgtcaagaagaatagtccaa

SEQ ID NO: 143473 - DNA, 25 bp, Artificial
  Probe
tctctgtgtccttaattattcctct

SEQ ID NO: 143474 - DNA, 25 bp, Artificial
  Probe
gaccatgatgtcaagaagaatagtc

SEQ ID NO: 143475 - DNA, 25 bp, Artificial
  Probe
gactgtgattatgaagttgtatctg

SEQ ID NO: 143476 - DNA, 25 bp, Artificial
  Probe
ctctgtgtccttaattattcctctt

SEQ ID NO: 143477 - DNA, 25 bp, Artificial
  Probe
cagactgtgattatgaagttgtatc

SEQ ID NO: 143478 - DNA, 25 bp, Artificial
  Probe
agactgtgattatgaagttgtatct

SEQ ID NO: 143479 - DNA, 25 bp, Artificial
  Probe
atctctgtgtccttaattattcctc

SEQ ID NO: 143480 - DNA, 25 bp, Artificial
  Probe
ctgtgattatgaagttgtatctggg

SEQ ID NO: 143481 - DNA, 25 bp, Artificial
  Probe
ctgctgaccagaggaatgtctatac

SEQ ID NO: 143482 - DNA, 25 bp, Artificial
  Probe
cctctttgaccaatcattctttctg

SEQ ID NO: 143483 - DNA, 25 bp, Artificial
  Probe
tcctctttgaccaatcattctttct

SEQ ID NO: 143484 - DNA, 25 bp, Artificial
  Probe
ctttgaccaatcattctttctgact

SEQ ID NO: 143485 - DNA, 25 bp, Artificial
  Probe
tctttgaccaatcattctttctgac

SEQ ID NO: 143486 - DNA, 25 bp, Artificial
  Probe
ttcctctttgaccaatcattctttc

SEQ ID NO: 143487 - DNA, 25 bp, Artificial
  Probe
cccagactgtgattatgaagttgta

SEQ ID NO: 143488 - DNA, 25 bp, Artificial
  Probe
ctctttgaccaatcattctttctga

SEQ ID NO: 143489 - DNA, 25 bp, Artificial
  Probe
taacccagactgtgattatgaagtt

SEQ ID NO: 143490 - DNA, 25 bp, Artificial
  Probe
ttaacccagactgtgattatgaagt

SEQ ID NO: 143491 - DNA, 25 bp, Artificial
  Probe
attaacccagactgtgattatgaag

SEQ ID NO: 143492 - DNA, 25 bp, Artificial
  Probe
aatctctgtgtccttaattattcct

SEQ ID NO: 143493 - DNA, 25 bp, Artificial
  Probe
attcctctttgaccaatcattcttt

SEQ ID NO: 143494 - DNA, 25 bp, Artificial
  Probe
aacccagactgtgattatgaagttg

SEQ ID NO: 143495 - DNA, 25 bp, Artificial
  Probe
tgctgaccagaggaatgtctataca

SEQ ID NO: 143496 - DNA, 25 bp, Artificial
  Probe
aattaacccagactgtgattatgaa

SEQ ID NO: 143497 - DNA, 25 bp, Artificial
  Probe
tgactaattaacccagactgtgatt

SEQ ID NO: 143498 - DNA, 25 bp, Artificial
  Probe
ctgaccagaggaatgtctatacatc

SEQ ID NO: 143499 - DNA, 25 bp, Artificial
  Probe
ttgaccaatcattctttctgactaa

SEQ ID NO: 143500 - DNA, 25 bp, Artificial
  Probe
tttgaccaatcattctttctgacta

SEQ ID NO: 143501 - DNA, 25 bp, Artificial
  Probe
agactcatcaaccaaagaagtattt

SEQ ID NO: 143502 - DNA, 25 bp, Artificial
  Probe
tgaccaatcattctttctgactaat

SEQ ID NO: 143503 - DNA, 25 bp, Artificial
  Probe
tattcctctttgaccaatcattctt

SEQ ID NO: 143504 - DNA, 25 bp, Artificial
  Probe
ttattcctctttgaccaatcattct

SEQ ID NO: 143505 - DNA, 25 bp, Artificial
  Probe
acccagactgtgattatgaagttgt

SEQ ID NO: 143506 - DNA, 25 bp, Artificial
  Probe
tgaccagaggaatgtctatacatcg

SEQ ID NO: 143507 - DNA, 25 bp, Artificial
  Probe
tttagactcatcaaccaaagaagta

SEQ ID NO: 143508 - DNA, 25 bp, Artificial
  Probe
gctgaccagaggaatgtctatacat

SEQ ID NO: 143509 - DNA, 25 bp, Artificial
  Probe
ctgactaattaacccagactgtgat

SEQ ID NO: 143510 - DNA, 25 bp, Artificial
  Probe
tcaacagagcagaacagataatcag

SEQ ID NO: 143511 - DNA, 25 bp, Artificial
  Probe
aacagagcagaacagataatcagtg

SEQ ID NO: 143512 - DNA, 25 bp, Artificial
  Probe
caacagagcagaacagataatcagt

SEQ ID NO: 143513 - DNA, 25 bp, Artificial
  Probe
ttcaacagagcagaacagataatca

SEQ ID NO: 143514 - DNA, 25 bp, Artificial
  Probe
aactattcaacagagcagaacagat

SEQ ID NO: 143515 - DNA, 25 bp, Artificial
  Probe
taactattcaacagagcagaacaga

SEQ ID NO: 143516 - DNA, 25 bp, Artificial
  Probe
actattcaacagagcagaacagata

SEQ ID NO: 143517 - DNA, 25 bp, Artificial
  Probe
attcaacagagcagaacagataatc

SEQ ID NO: 143518 - DNA, 25 bp, Artificial
  Probe
acaaccaagtgattacattatgagt

SEQ ID NO: 143519 - DNA, 25 bp, Artificial
  Probe
ctattcaacagagcagaacagataa

SEQ ID NO: 143520 - DNA, 25 bp, Artificial
  Probe
agaacagataatcagtgtgaccaag

SEQ ID NO: 143521 - DNA, 25 bp, Artificial
  Probe
gaacagataatcagtgtgaccaagt

SEQ ID NO: 143522 - DNA, 25 bp, Artificial
  Probe
cagaacagataatcagtgtgaccaa

SEQ ID NO: 143523 - DNA, 25 bp, Artificial
  Probe
accaagtgattacattatgagttct

SEQ ID NO: 143524 - DNA, 25 bp, Artificial
  Probe
tattcaacagagcagaacagataat

SEQ ID NO: 143525 - DNA, 25 bp, Artificial
  Probe
cagagcagaacagataatcagtgtg

SEQ ID NO: 143526 - DNA, 25 bp, Artificial
  Probe
gagcagaacagataatcagtgtgac

SEQ ID NO: 143527 - DNA, 25 bp, Artificial
  Probe
agagcagaacagataatcagtgtga

SEQ ID NO: 143528 - DNA, 25 bp, Artificial
  Probe
aacaaccaagtgattacattatgag

SEQ ID NO: 143529 - DNA, 25 bp, Artificial
  Probe
acagagcagaacagataatcagtgt

SEQ ID NO: 143530 - DNA, 25 bp, Artificial
  Probe
caaccaagtgattacattatgagtt

SEQ ID NO: 143531 - DNA, 25 bp, Artificial
  Probe
ctattatgatgtgtccagaaatgcc

SEQ ID NO: 143532 - DNA, 25 bp, Artificial
  Probe
cctattatgatgtgtccagaaatgc

SEQ ID NO: 143533 - DNA, 25 bp, Artificial
  Probe
tattatgatgtgtccagaaatgcca

SEQ ID NO: 143534 - DNA, 25 bp, Artificial
  Probe
aaccaagtgattacattatgagttc

SEQ ID NO: 143535 - DNA, 25 bp, Artificial
  Probe
gccctattatgatgtgtccagaaat

SEQ ID NO: 143536 - DNA, 25 bp, Artificial
  Probe
ccctattatgatgtgtccagaaatg

SEQ ID NO: 143537 - DNA, 25 bp, Artificial
  Probe
aatggctgtgaagaaatacttgaac

SEQ ID NO: 143538 - DNA, 25 bp, Artificial
  Probe
atggctgtgaagaaatacttgaact

SEQ ID NO: 143539 - DNA, 25 bp, Artificial
  Probe
aaatggctgtgaagaaatacttgaa

SEQ ID NO: 143540 - DNA, 25 bp, Artificial
  Probe
aaatactctttccgtaatcactcac

SEQ ID NO: 143541 - DNA, 25 bp, Artificial
  Probe
gatgcagtcttcacagataactaca

SEQ ID NO: 143542 - DNA, 25 bp, Artificial
  Probe
tgatgcagtcttcacagataactac

SEQ ID NO: 143543 - DNA, 25 bp, Artificial
  Probe
caaatggctgtgaagaaatacttga

SEQ ID NO: 143544 - DNA, 25 bp, Artificial
  Probe
agcagaacagataatcagtgtgacc

SEQ ID NO: 143545 - DNA, 25 bp, Artificial
  Probe
ctgtgaagaaatacttgaactccat

SEQ ID NO: 143546 - DNA, 25 bp, Artificial
  Probe
atgcagtcttcacagataactacac

SEQ ID NO: 143547 - DNA, 25 bp, Artificial
  Probe
attatgatgtgtccagaaatgccag

SEQ ID NO: 143548 - DNA, 25 bp, Artificial
  Probe
gagaatgacacgccctattatgatg

SEQ ID NO: 143549 - DNA, 25 bp, Artificial
  Probe
gctgtgaagaaatacttgaactcca

SEQ ID NO: 143550 - DNA, 25 bp, Artificial
  Probe
tggctgtgaagaaatacttgaactc

SEQ ID NO: 143551 - DNA, 25 bp, Artificial
  Probe
ctagagaaatgatgagaagggtcct

SEQ ID NO: 143552 - DNA, 25 bp, Artificial
  Probe
ttgctgaaagtacatttgtagacac

SEQ ID NO: 143553 - DNA, 25 bp, Artificial
  Probe
atggattcatctctccgactaggat

SEQ ID NO: 143554 - DNA, 25 bp, Artificial
  Probe
tgtgaagaaatacttgaactccatt

SEQ ID NO: 143555 - DNA, 25 bp, Artificial
  Probe
caagtaactgtctctgtgtagatgg

SEQ ID NO: 143556 - DNA, 25 bp, Artificial
  Probe
agtaactgtctctgtgtagatggtt

SEQ ID NO: 143557 - DNA, 25 bp, Artificial
  Probe
aagtaactgtctctgtgtagatggt

SEQ ID NO: 143558 - DNA, 25 bp, Artificial
  Probe
acaagtaactgtctctgtgtagatg

SEQ ID NO: 143559 - DNA, 25 bp, Artificial
  Probe
atttgggtttctttacttcttcagc

SEQ ID NO: 143560 - DNA, 25 bp, Artificial
  Probe
gcatttgggtttctttacttcttca

SEQ ID NO: 143561 - DNA, 25 bp, Artificial
  Probe
agcatttgggtttctttacttcttc

SEQ ID NO: 143562 - DNA, 25 bp, Artificial
  Probe
ttgaagcatttgggtttctttactt

SEQ ID NO: 143563 - DNA, 25 bp, Artificial
  Probe
tttgaagcatttgggtttctttact

SEQ ID NO: 143564 - DNA, 25 bp, Artificial
  Probe
ctttgaagcatttgggtttctttac

SEQ ID NO: 143565 - DNA, 25 bp, Artificial
  Probe
aagcatttgggtttctttacttctt

SEQ ID NO: 143566 - DNA, 25 bp, Artificial
  Probe
tctttgaagcatttgggtttcttta

SEQ ID NO: 143567 - DNA, 25 bp, Artificial
  Probe
taactgtctctgtgtagatggtttg

SEQ ID NO: 143568 - DNA, 25 bp, Artificial
  Probe
gtaactgtctctgtgtagatggttt

SEQ ID NO: 143569 - DNA, 25 bp, Artificial
  Probe
tctggagatttgatgagaagaaaca

SEQ ID NO: 143570 - DNA, 25 bp, Artificial
  Probe
ttacttcttcagcggatcttcacag

SEQ ID NO: 143571 - DNA, 25 bp, Artificial
  Probe
gtctttgaagcatttgggtttcttt

SEQ ID NO: 143572 - DNA, 25 bp, Artificial
  Probe
catttgggtttctttacttcttcag

SEQ ID NO: 143573 - DNA, 25 bp, Artificial
  Probe
ctgtctctgtgtagatggtttgttt

SEQ ID NO: 143574 - DNA, 25 bp, Artificial
  Probe
ctggagatttgatgagaagaaacaa

SEQ ID NO: 143575 - DNA, 25 bp, Artificial
  Probe
tttctttacttcttcagcggatctt

SEQ ID NO: 143576 - DNA, 25 bp, Artificial
  Probe
ttctttacttcttcagcggatcttc

SEQ ID NO: 143577 - DNA, 25 bp, Artificial
  Probe
tggagatttgatgagaagaaacaat

SEQ ID NO: 143578 - DNA, 25 bp, Artificial
  Probe
tttgggtttctttacttcttcagcg

SEQ ID NO: 143579 - DNA, 25 bp, Artificial
  Probe
tgtagaggacaaattctggagattt

SEQ ID NO: 143580 - DNA, 25 bp, Artificial
  Probe
gtttctttacttcttcagcggatct

SEQ ID NO: 143581 - DNA, 25 bp, Artificial
  Probe
tgtctttgaagcatttgggtttctt

SEQ ID NO: 143582 - DNA, 25 bp, Artificial
  Probe
actgtctctgtgtagatggtttgtt

SEQ ID NO: 143583 - DNA, 25 bp, Artificial
  Probe
aactgtctctgtgtagatggtttgt

SEQ ID NO: 143584 - DNA, 25 bp, Artificial
  Probe
ctgtctttgaagcatttgggtttct

SEQ ID NO: 143585 - DNA, 25 bp, Artificial
  Probe
ctttacttcttcagcggatcttcac

SEQ ID NO: 143586 - DNA, 25 bp, Artificial
  Probe
tctttacttcttcagcggatcttca

SEQ ID NO: 143587 - DNA, 25 bp, Artificial
  Probe
gctggtttaattgttaagaagatcc

SEQ ID NO: 143588 - DNA, 25 bp, Artificial
  Probe
ggtttctttacttcttcagcggatc

SEQ ID NO: 143589 - DNA, 25 bp, Artificial
  Probe
tttacttcttcagcggatcttcaca

SEQ ID NO: 143590 - DNA, 25 bp, Artificial
  Probe
tacttcttcagcggatcttcacagt

SEQ ID NO: 143591 - DNA, 25 bp, Artificial
  Probe
atttgatgagaagaaacaatccatg

SEQ ID NO: 143592 - DNA, 25 bp, Artificial
  Probe
agatttgatgagaagaaacaatcca

SEQ ID NO: 143593 - DNA, 25 bp, Artificial
  Probe
gggtttctttacttcttcagcggat

SEQ ID NO: 143594 - DNA, 25 bp, Artificial
  Probe
cttcttcagcggatcttcacagttg

SEQ ID NO: 143595 - DNA, 25 bp, Artificial
  Probe
gagatttgatgagaagaaacaatcc

SEQ ID NO: 143596 - DNA, 25 bp, Artificial
  Probe
ggagatttgatgagaagaaacaatc

SEQ ID NO: 143597 - DNA, 25 bp, Artificial
  Probe
ttctggagatttgatgagaagaaac

SEQ ID NO: 143598 - DNA, 25 bp, Artificial
  Probe
gatttgatgagaagaaacaatccat

SEQ ID NO: 143599 - DNA, 25 bp, Artificial
  Probe
atatggcaccagtcaacctcaagtt

SEQ ID NO: 143600 - DNA, 25 bp, Artificial
  Probe
tccagaagtaatttatcacgactcc

SEQ ID NO: 143601 - DNA, 25 bp, Artificial
  Probe
atccagaagtaatttatcacgactc

SEQ ID NO: 143602 - DNA, 25 bp, Artificial
  Probe
ttccttcctatcagcatatgtactg

SEQ ID NO: 143603 - DNA, 25 bp, Artificial
  Probe
aatccagaagtaatttatcacgact

SEQ ID NO: 143604 - DNA, 25 bp, Artificial
  Probe
tttccttcctatcagcatatgtact

SEQ ID NO: 143605 - DNA, 25 bp, Artificial
  Probe
acaagatgtgtcttagtttgcttcc

SEQ ID NO: 143606 - DNA, 25 bp, Artificial
  Probe
atttccttcctatcagcatatgtac

SEQ ID NO: 143607 - DNA, 25 bp, Artificial
  Probe
ctatcagcatatgtactgacatcag

SEQ ID NO: 143608 - DNA, 25 bp, Artificial
  Probe
actataccccagacttcctgattta

SEQ ID NO: 143609 - DNA, 25 bp, Artificial
  Probe
accccagacttcctgatttatttta

SEQ ID NO: 143610 - DNA, 25 bp, Artificial
  Probe
taccccagacttcctgatttatttt

SEQ ID NO: 143611 - DNA, 25 bp, Artificial
  Probe
aatccaagatcctcatgcattcaga

SEQ ID NO: 143612 - DNA, 25 bp, Artificial
  Probe
ataccccagacttcctgatttattt

SEQ ID NO: 143613 - DNA, 25 bp, Artificial
  Probe
ctataccccagacttcctgatttat

SEQ ID NO: 143614 - DNA, 25 bp, Artificial
  Probe
aactataccccagacttcctgattt

SEQ ID NO: 143615 - DNA, 25 bp, Artificial
  Probe
ttatttccttcctatcagcatatgt

SEQ ID NO: 143616 - DNA, 25 bp, Artificial
  Probe
tataccccagacttcctgatttatt

SEQ ID NO: 143617 - DNA, 25 bp, Artificial
  Probe
gaactataccccagacttcctgatt

SEQ ID NO: 143618 - DNA, 25 bp, Artificial
  Probe
tatcagcatatgtactgacatcagg

SEQ ID NO: 143619 - DNA, 25 bp, Artificial
  Probe
cctatcagcatatgtactgacatca

SEQ ID NO: 143620 - DNA, 25 bp, Artificial
  Probe
cttcctatcagcatatgtactgaca

SEQ ID NO: 143621 - DNA, 25 bp, Artificial
  Probe
ccttcctatcagcatatgtactgac

SEQ ID NO: 143622 - DNA, 25 bp, Artificial
  Probe
tccttcctatcagcatatgtactga

SEQ ID NO: 143623 - DNA, 25 bp, Artificial
  Probe
tcctatcagcatatgtactgacatc

SEQ ID NO: 143624 - DNA, 25 bp, Artificial
  Probe
ggtattttatttccttcctatcagc

SEQ ID NO: 143625 - DNA, 25 bp, Artificial
  Probe
ccccagacttcctgatttattttat

SEQ ID NO: 143626 - DNA, 25 bp, Artificial
  Probe
ttcctatcagcatatgtactgacat

SEQ ID NO: 143627 - DNA, 25 bp, Artificial
  Probe
aggcttgagaaaagggtattttatt

SEQ ID NO: 143628 - DNA, 25 bp, Artificial
  Probe
tgtactgacatcaggtggttttata

SEQ ID NO: 143629 - DNA, 25 bp, Artificial
  Probe
atcagcatatgtactgacatcaggt

SEQ ID NO: 143630 - DNA, 25 bp, Artificial
  Probe
atccaagatcctcatgcattcagag

SEQ ID NO: 143631 - DNA, 25 bp, Artificial
  Probe
gcatatgtactgacatcaggtggtt

SEQ ID NO: 143632 - DNA, 25 bp, Artificial
  Probe
gaatccaagatcctcatgcattcag

SEQ ID NO: 143633 - DNA, 25 bp, Artificial
  Probe
tgaactataccccagacttcctgat

SEQ ID NO: 143634 - DNA, 25 bp, Artificial
  Probe
ggcttgagaaaagggtattttattt

SEQ ID NO: 143635 - DNA, 25 bp, Artificial
  Probe
tatttccttcctatcagcatatgta

SEQ ID NO: 143636 - DNA, 25 bp, Artificial
  Probe
catatgtactgacatcaggtggttt

SEQ ID NO: 143637 - DNA, 25 bp, Artificial
  Probe
gtactgacatcaggtggttttataa

SEQ ID NO: 143638 - DNA, 25 bp, Artificial
  Probe
gtattttatttccttcctatcagca

SEQ ID NO: 143639 - DNA, 25 bp, Artificial
  Probe
gggtattttatttccttcctatcag

SEQ ID NO: 143640 - DNA, 25 bp, Artificial
  Probe
actgacatcaggtggttttataatt

SEQ ID NO: 143641 - DNA, 25 bp, Artificial
  Probe
tttatttccttcctatcagcatatg

SEQ ID NO: 143642 - DNA, 25 bp, Artificial
  Probe
cagcatatgtactgacatcaggtgg

SEQ ID NO: 143643 - DNA, 25 bp, Artificial
  Probe
tcagcatatgtactgacatcaggtg

SEQ ID NO: 143644 - DNA, 25 bp, Artificial
  Probe
tttgacaagatgtgtcttagtttgc

SEQ ID NO: 143645 - DNA, 25 bp, Artificial
  Probe
ccacttcctcaatagcactatactt

SEQ ID NO: 143646 - DNA, 25 bp, Artificial
  Probe
gccacttcctcaatagcactatact

SEQ ID NO: 143647 - DNA, 25 bp, Artificial
  Probe
ctagtctgttcaagttcctaattca

SEQ ID NO: 143648 - DNA, 25 bp, Artificial
  Probe
actctagtctgttcaagttcctaat

SEQ ID NO: 143649 - DNA, 25 bp, Artificial
  Probe
ctactctagtctgttcaagttccta

SEQ ID NO: 143650 - DNA, 25 bp, Artificial
  Probe
tctagtctgttcaagttcctaattc

SEQ ID NO: 143651 - DNA, 25 bp, Artificial
  Probe
ctctagtctgttcaagttcctaatt

SEQ ID NO: 143652 - DNA, 25 bp, Artificial
  Probe
tactctagtctgttcaagttcctaa

SEQ ID NO: 143653 - DNA, 25 bp, Artificial
  Probe
ctggtctcacactcactgttagtaa

SEQ ID NO: 143654 - DNA, 25 bp, Artificial
  Probe
tagtctgttcaagttcctaattcag

SEQ ID NO: 143655 - DNA, 25 bp, Artificial
  Probe
actactctagtctgttcaagttcct

SEQ ID NO: 143656 - DNA, 25 bp, Artificial
  Probe
acttccgttctttactatctttcca

SEQ ID NO: 143657 - DNA, 25 bp, Artificial
  Probe
catttctcagcccataaacttcttg

SEQ ID NO: 143658 - DNA, 25 bp, Artificial
  Probe
tcatttctcagcccataaacttctt

SEQ ID NO: 143659 - DNA, 25 bp, Artificial
  Probe
gcccataaacttcttgaaatcgtag

SEQ ID NO: 143660 - DNA, 25 bp, Artificial
  Probe
agcccataaacttcttgaaatcgta

SEQ ID NO: 143661 - DNA, 25 bp, Artificial
  Probe
aactcatttctcagcccataaactt

SEQ ID NO: 143662 - DNA, 25 bp, Artificial
  Probe
aaactcatttctcagcccataaact

SEQ ID NO: 143663 - DNA, 25 bp, Artificial
  Probe
ccataaactcatttctcagcccata

SEQ ID NO: 143664 - DNA, 25 bp, Artificial
  Probe
atctccataaactcatttctcagcc

SEQ ID NO: 143665 - DNA, 25 bp, Artificial
  Probe
taaactcatttctcagcccataaac

SEQ ID NO: 143666 - DNA, 25 bp, Artificial
  Probe
ctcatttctcagcccataaacttct

SEQ ID NO: 143667 - DNA, 25 bp, Artificial
  Probe
cataaactcatttctcagcccataa

SEQ ID NO: 143668 - DNA, 25 bp, Artificial
  Probe
actcatttctcagcccataaacttc

SEQ ID NO: 143669 - DNA, 25 bp, Artificial
  Probe
tggagtttgctatttcaagggttat

SEQ ID NO: 143670 - DNA, 25 bp, Artificial
  Probe
cttccgttctttactatctttccat

SEQ ID NO: 143671 - DNA, 25 bp, Artificial
  Probe
ggagtttgctatttcaagggttatt

SEQ ID NO: 143672 - DNA, 25 bp, Artificial
  Probe
ttggagtttgctatttcaagggtta

SEQ ID NO: 143673 - DNA, 25 bp, Artificial
  Probe
ctcagcccataaacttcttgaaatc

SEQ ID NO: 143674 - DNA, 25 bp, Artificial
  Probe
ataaactcatttctcagcccataaa

SEQ ID NO: 143675 - DNA, 25 bp, Artificial
  Probe
tctcagcccataaacttcttgaaat

SEQ ID NO: 143676 - DNA, 25 bp, Artificial
  Probe
atttctcagcccataaacttcttga

SEQ ID NO: 143677 - DNA, 25 bp, Artificial
  Probe
ttctcagcccataaacttcttgaaa

SEQ ID NO: 143678 - DNA, 25 bp, Artificial
  Probe
tttctcagcccataaacttcttgaa

SEQ ID NO: 143679 - DNA, 25 bp, Artificial
  Probe
gatctccataaactcatttctcagc

SEQ ID NO: 143680 - DNA, 25 bp, Artificial
  Probe
gcaggatctccataaactcatttct

SEQ ID NO: 143681 - DNA, 25 bp, Artificial
  Probe
cccataaacttcttgaaatcgtagt

SEQ ID NO: 143682 - DNA, 25 bp, Artificial
  Probe
aggatctccataaactcatttctca

SEQ ID NO: 143683 - DNA, 25 bp, Artificial
  Probe
cacttcctcaatagcactatacttt

SEQ ID NO: 143684 - DNA, 25 bp, Artificial
  Probe
tccgttctttactatctttccatgt

SEQ ID NO: 143685 - DNA, 25 bp, Artificial
  Probe
cagcccataaacttcttgaaatcgt

SEQ ID NO: 143686 - DNA, 25 bp, Artificial
  Probe
gtctcacactcactgttagtaaact

SEQ ID NO: 143687 - DNA, 25 bp, Artificial
  Probe
ggatctccataaactcatttctcag

SEQ ID NO: 143688 - DNA, 25 bp, Artificial
  Probe
caggatctccataaactcatttctc

SEQ ID NO: 143689 - DNA, 25 bp, Artificial
  Probe
tccataaactcatttctcagcccat

SEQ ID NO: 143690 - DNA, 25 bp, Artificial
  Probe
tgatgacaagacatatacaacactg

SEQ ID NO: 143691 - DNA, 25 bp, Artificial
  Probe
ttcttaatgaaccacagagcatcac

SEQ ID NO: 143692 - DNA, 25 bp, Artificial
  Probe
gatgacaagacatatacaacactgt

SEQ ID NO: 143693 - DNA, 25 bp, Artificial
  Probe
atgatgacaagacatatacaacact

SEQ ID NO: 143694 - DNA, 25 bp, Artificial
  Probe
gatgagacaagacagcttatggata

SEQ ID NO: 143695 - DNA, 25 bp, Artificial
  Probe
atgagacaagacagcttatggataa

SEQ ID NO: 143696 - DNA, 25 bp, Artificial
  Probe
catgatgacaagacatatacaacac

SEQ ID NO: 143697 - DNA, 25 bp, Artificial
  Probe
tatgaggcaaataacaaggacagag

SEQ ID NO: 143698 - DNA, 25 bp, Artificial
  Probe
ctatgaggcaaataacaaggacaga

SEQ ID NO: 143699 - DNA, 25 bp, Artificial
  Probe
taatgatgaattgttcctgcatgtg

SEQ ID NO: 143700 - DNA, 25 bp, Artificial
  Probe
ataatgatgaattgttcctgcatgt

SEQ ID NO: 143701 - DNA, 25 bp, Artificial
  Probe
tgatgagacaagacagcttatggat

SEQ ID NO: 143702 - DNA, 25 bp, Artificial
  Probe
cataatgatgaattgttcctgcatg

SEQ ID NO: 143703 - DNA, 25 bp, Artificial
  Probe
tcactcaaacaacaaagaatctctg

SEQ ID NO: 143704 - DNA, 25 bp, Artificial
  Probe
ctttcttaatgaaccacagagcatc

SEQ ID NO: 143705 - DNA, 25 bp, Artificial
  Probe
tctttcttaatgaaccacagagcat

SEQ ID NO: 143706 - DNA, 25 bp, Artificial
  Probe
tactggagatttgatgagacaagac

SEQ ID NO: 143707 - DNA, 25 bp, Artificial
  Probe
ttcactcaaacaacaaagaatctct

SEQ ID NO: 143708 - DNA, 25 bp, Artificial
  Probe
cttaatgaaccacagagcatcacct

SEQ ID NO: 143709 - DNA, 25 bp, Artificial
  Probe
tcttaatgaaccacagagcatcacc

SEQ ID NO: 143710 - DNA, 25 bp, Artificial
  Probe
caggatgatatagagggcattcaat

SEQ ID NO: 143711 - DNA, 25 bp, Artificial
  Probe
ttgatgagacaagacagcttatgga

SEQ ID NO: 143712 - DNA, 25 bp, Artificial
  Probe
aggatgatatagagggcattcaatc

SEQ ID NO: 143713 - DNA, 25 bp, Artificial
  Probe
cactcaaacaacaaagaatctctga

SEQ ID NO: 143714 - DNA, 25 bp, Artificial
  Probe
atactggagatttgatgagacaaga

SEQ ID NO: 143715 - DNA, 25 bp, Artificial
  Probe
ccgagactgataacagatgacttcc

SEQ ID NO: 143716 - DNA, 25 bp, Artificial
  Probe
tttcttaatgaaccacagagcatca

SEQ ID NO: 143717 - DNA, 25 bp, Artificial
  Probe
gtctttcttaatgaaccacagagca

SEQ ID NO: 143718 - DNA, 25 bp, Artificial
  Probe
tcaggatgatatagagggcattcaa

SEQ ID NO: 143719 - DNA, 25 bp, Artificial
  Probe
ttctcaggatgatatagagggcatt

SEQ ID NO: 143720 - DNA, 25 bp, Artificial
  Probe
tttctcaggatgatatagagggcat

SEQ ID NO: 143721 - DNA, 25 bp, Artificial
  Probe
tttcactcaaacaacaaagaatctc

SEQ ID NO: 143722 - DNA, 25 bp, Artificial
  Probe
ttctcgcctaatttattatgtgtca

SEQ ID NO: 143723 - DNA, 25 bp, Artificial
  Probe
gggtctctttcactcaaacaacaaa

SEQ ID NO: 143724 - DNA, 25 bp, Artificial
  Probe
ttatggagatgctcacttcgatgat

SEQ ID NO: 143725 - DNA, 25 bp, Artificial
  Probe
tgtcataatgatgaattgttcctgc

SEQ ID NO: 143726 - DNA, 25 bp, Artificial
  Probe
actcaaacaacaaagaatctctgat

SEQ ID NO: 143727 - DNA, 25 bp, Artificial
  Probe
tgtaggtgacaaatactggagattt

SEQ ID NO: 143728 - DNA, 25 bp, Artificial
  Probe
aatactggagatttgatgagacaag

SEQ ID NO: 143729 - DNA, 25 bp, Artificial
  Probe
gataaaggcttcccgagactgataa

SEQ ID NO: 143730 - DNA, 25 bp, Artificial
  Probe
tctcaggatgatatagagggcattc

SEQ ID NO: 143731 - DNA, 25 bp, Artificial
  Probe
ctcaaacaacaaagaatctctgatg

SEQ ID NO: 143732 - DNA, 25 bp, Artificial
  Probe
actggagatttgatgagacaagaca

SEQ ID NO: 143733 - DNA, 25 bp, Artificial
  Probe
ctcaggatgatatagagggcattca

SEQ ID NO: 143734 - DNA, 25 bp, Artificial
  Probe
ctttctcaggatgatatagagggca

SEQ ID NO: 143735 - DNA, 25 bp, Artificial
  Probe
agccaatcattactatacccacttt

SEQ ID NO: 143736 - DNA, 25 bp, Artificial
  Probe
aaagccaatcattactatacccact

SEQ ID NO: 143737 - DNA, 25 bp, Artificial
  Probe
aagccaatcattactatacccactt

SEQ ID NO: 143738 - DNA, 25 bp, Artificial
  Probe
gccaatcattactatacccacttta

SEQ ID NO: 143739 - DNA, 25 bp, Artificial
  Probe
tactatacccactttacaaatggca

SEQ ID NO: 143740 - DNA, 25 bp, Artificial
  Probe
actatacccactttacaaatggcaa

SEQ ID NO: 143741 - DNA, 25 bp, Artificial
  Probe
ctatacccactttacaaatggcaaa

SEQ ID NO: 143742 - DNA, 25 bp, Artificial
  Probe
ttactatacccactttacaaatggc

SEQ ID NO: 143743 - DNA, 25 bp, Artificial
  Probe
ccaatcattactatacccactttac

SEQ ID NO: 143744 - DNA, 25 bp, Artificial
  Probe
tatacccactttacaaatggcaaag

SEQ ID NO: 143745 - DNA, 25 bp, Artificial
  Probe
ccaaaagccaatcattactataccc

SEQ ID NO: 143746 - DNA, 25 bp, Artificial
  Probe
aaaagccaatcattactatacccac

SEQ ID NO: 143747 - DNA, 25 bp, Artificial
  Probe
caaaagccaatcattactataccca

SEQ ID NO: 143748 - DNA, 25 bp, Artificial
  Probe
accaaaagccaatcattactatacc

SEQ ID NO: 143749 - DNA, 25 bp, Artificial
  Probe
caatcattactatacccactttaca

SEQ ID NO: 143750 - DNA, 25 bp, Artificial
  Probe
atacccactttacaaatggcaaagc

SEQ ID NO: 143751 - DNA, 25 bp, Artificial
  Probe
tctaccaaaagccaatcattactat

SEQ ID NO: 143752 - DNA, 25 bp, Artificial
  Probe
atctaccaaaagccaatcattacta

SEQ ID NO: 143753 - DNA, 25 bp, Artificial
  Probe
tatctaccaaaagccaatcattact

SEQ ID NO: 143754 - DNA, 25 bp, Artificial
  Probe
tcttaaaattgaaggtgtttatgcc

SEQ ID NO: 143755 - DNA, 25 bp, Artificial
  Probe
ttatctaccaaaagccaatcattac

SEQ ID NO: 143756 - DNA, 25 bp, Artificial
  Probe
attactatacccactttacaaatgg

SEQ ID NO: 143757 - DNA, 25 bp, Artificial
  Probe
tcattactatacccactttacaaat

SEQ ID NO: 143758 - DNA, 25 bp, Artificial
  Probe
atcattactatacccactttacaaa

SEQ ID NO: 143759 - DNA, 25 bp, Artificial
  Probe
aatcattactatacccactttacaa

SEQ ID NO: 143760 - DNA, 25 bp, Artificial
  Probe
caaggtccaataacccttagagatg

SEQ ID NO: 143761 - DNA, 25 bp, Artificial
  Probe
taccaaaagccaatcattactatac

SEQ ID NO: 143762 - DNA, 25 bp, Artificial
  Probe
acaaggtccaataacccttagagat

SEQ ID NO: 143763 - DNA, 25 bp, Artificial
  Probe
ctttacaaatggcaaagcctctttc

SEQ ID NO: 143764 - DNA, 25 bp, Artificial
  Probe
ctaccaaaagccaatcattactata

SEQ ID NO: 143765 - DNA, 25 bp, Artificial
  Probe
gacaaggtccaataacccttagaga

SEQ ID NO: 143766 - DNA, 25 bp, Artificial
  Probe
agacaaggtccaataacccttagag

SEQ ID NO: 143767 - DNA, 25 bp, Artificial
  Probe
gagacaaggtccaataacccttaga

SEQ ID NO: 143768 - DNA, 25 bp, Artificial
  Probe
ttcttaaaattgaaggtgtttatgc

SEQ ID NO: 143769 - DNA, 25 bp, Artificial
  Probe
actttacaaatggcaaagcctcttt

SEQ ID NO: 143770 - DNA, 25 bp, Artificial
  Probe
ggagacaaggtccaataacccttag

SEQ ID NO: 143771 - DNA, 25 bp, Artificial
  Probe
cactttacaaatggcaaagcctctt

SEQ ID NO: 143772 - DNA, 25 bp, Artificial
  Probe
cattactatacccactttacaaatg

SEQ ID NO: 143773 - DNA, 25 bp, Artificial
  Probe
tggagacaaggtccaataaccctta

SEQ ID NO: 143774 - DNA, 25 bp, Artificial
  Probe
ctttgttgaaggccacacagtgaat

SEQ ID NO: 143775 - DNA, 25 bp, Artificial
  Probe
gaagactttgttgaaggccacacag

SEQ ID NO: 143776 - DNA, 25 bp, Artificial
  Probe
cagaagactttgttgaaggccacac

SEQ ID NO: 143777 - DNA, 25 bp, Artificial
  Probe
ccactttacaaatggcaaagcctct

SEQ ID NO: 143778 - DNA, 25 bp, Artificial
  Probe
tacccactttacaaatggcaaagcc

SEQ ID NO: 143779 - DNA, 25 bp, Artificial
  Probe
tttgttgaaggccacacagtgaatg

SEQ ID NO: 143780 - DNA, 25 bp, Artificial
  Probe
ttctccttagtcttctcatagcatt

SEQ ID NO: 143781 - DNA, 25 bp, Artificial
  Probe
cattattggaattaacctggtgctg

SEQ ID NO: 143782 - DNA, 25 bp, Artificial
  Probe
tcattattggaattaacctggtgct

SEQ ID NO: 143783 - DNA, 25 bp, Artificial
  Probe
aatacctactgtgttcctggcaata

SEQ ID NO: 143784 - DNA, 25 bp, Artificial
  Probe
ttcattattggaattaacctggtgc

SEQ ID NO: 143785 - DNA, 25 bp, Artificial
  Probe
tctccttagtcttctcatagcatta

SEQ ID NO: 143786 - DNA, 25 bp, Artificial
  Probe
attattggaattaacctggtgctgg

SEQ ID NO: 143787 - DNA, 25 bp, Artificial
  Probe
atacctactgtgttcctggcaatag

SEQ ID NO: 143788 - DNA, 25 bp, Artificial
  Probe
tccttagtcttctcatagcattaac

SEQ ID NO: 143789 - DNA, 25 bp, Artificial
  Probe
gttcattattggaattaacctggtg

SEQ ID NO: 143790 - DNA, 25 bp, Artificial
  Probe
tggaattaacctggtgctggatatt

SEQ ID NO: 143791 - DNA, 25 bp, Artificial
  Probe
ttggaattaacctggtgctggatat

SEQ ID NO: 143792 - DNA, 25 bp, Artificial
  Probe
attggaattaacctggtgctggata

SEQ ID NO: 143793 - DNA, 25 bp, Artificial
  Probe
tattggaattaacctggtgctggat

SEQ ID NO: 143794 - DNA, 25 bp, Artificial
  Probe
attgttgaggtggtctgaatgttct

SEQ ID NO: 143795 - DNA, 25 bp, Artificial
  Probe
ctccttagtcttctcatagcattaa

SEQ ID NO: 143796 - DNA, 25 bp, Artificial
  Probe
ttattggaattaacctggtgctgga

SEQ ID NO: 143797 - DNA, 25 bp, Artificial
  Probe
ccttagtcttctcatagcattaact

SEQ ID NO: 143798 - DNA, 25 bp, Artificial
  Probe
ctcatagcattaactaatctgttgg

SEQ ID NO: 143799 - DNA, 25 bp, Artificial
  Probe
caatacctactgtgttcctggcaat

SEQ ID NO: 143800 - DNA, 25 bp, Artificial
  Probe
ctatatccacgtactgtagctcttc

SEQ ID NO: 143801 - DNA, 25 bp, Artificial
  Probe
tatatccacgtactgtagctcttca

SEQ ID NO: 143802 - DNA, 25 bp, Artificial
  Probe
gcttattgttccaagacattgtcaa

SEQ ID NO: 143803 - DNA, 25 bp, Artificial
  Probe
ttgcttattgttccaagacattgtc

SEQ ID NO: 143804 - DNA, 25 bp, Artificial
  Probe
ctttctccttagtcttctcatagca

SEQ ID NO: 143805 - DNA, 25 bp, Artificial
  Probe
tctttctccttagtcttctcatagc

SEQ ID NO: 143806 - DNA, 25 bp, Artificial
  Probe
tttctccttagtcttctcatagcat

SEQ ID NO: 143807 - DNA, 25 bp, Artificial
  Probe
tgcttattgttccaagacattgtca

SEQ ID NO: 143808 - DNA, 25 bp, Artificial
  Probe
gtgtgttccaatttagaaatgacca

SEQ ID NO: 143809 - DNA, 25 bp, Artificial
  Probe
ggcaatagtgtgttccaatttagaa

SEQ ID NO: 143810 - DNA, 25 bp, Artificial
  Probe
tttctctttctccttagtcttctca

SEQ ID NO: 143811 - DNA, 25 bp, Artificial
  Probe
agtgtgttccaatttagaaatgacc

SEQ ID NO: 143812 - DNA, 25 bp, Artificial
  Probe
gcattaactaatctgttgggttcat

SEQ ID NO: 143813 - DNA, 25 bp, Artificial
  Probe
agcattaactaatctgttgggttca

SEQ ID NO: 143814 - DNA, 25 bp, Artificial
  Probe
gaaccctttgatgacttcttgtttc

SEQ ID NO: 143815 - DNA, 25 bp, Artificial
  Probe
cattgtttgcttattgttccaagac

SEQ ID NO: 143816 - DNA, 25 bp, Artificial
  Probe
tgtgttccaatttagaaatgaccaa

SEQ ID NO: 143817 - DNA, 25 bp, Artificial
  Probe
ttgttgaggtggtctgaatgttctg

SEQ ID NO: 143818 - DNA, 25 bp, Artificial
  Probe
ttctctttctccttagtcttctcat

SEQ ID NO: 143819 - DNA, 25 bp, Artificial
  Probe
aatctgttgggttcattattggaat

SEQ ID NO: 143820 - DNA, 25 bp, Artificial
  Probe
actaatctgttgggttcattattgg

SEQ ID NO: 143821 - DNA, 25 bp, Artificial
  Probe
tgaaccctttgatgacttcttgttt

SEQ ID NO: 143822 - DNA, 25 bp, Artificial
  Probe
ggaattaacctggtgctggatattt

SEQ ID NO: 143823 - DNA, 25 bp, Artificial
  Probe
catagcattaactaatctgttgggt

SEQ ID NO: 143824 - DNA, 25 bp, Artificial
  Probe
atctgttgggttcattattggaatt

SEQ ID NO: 143825 - DNA, 25 bp, Artificial
  Probe
gttctcacttctattcaggctacaa

SEQ ID NO: 143826 - DNA, 25 bp, Artificial
  Probe
ttctcacttctattcaggctacaag

SEQ ID NO: 143827 - DNA, 25 bp, Artificial
  Probe
gacactgtagagaagagagaggatt

SEQ ID NO: 143828 - DNA, 25 bp, Artificial
  Probe
tctcacttctattcaggctacaaga

SEQ ID NO: 143829 - DNA, 25 bp, Artificial
  Probe
ccgagaactcctgactattaagata

SEQ ID NO: 143830 - DNA, 25 bp, Artificial
  Probe
acactgtagagaagagagaggattc

SEQ ID NO: 143831 - DNA, 25 bp, Artificial
  Probe
cagttctcacttctattcaggctac

SEQ ID NO: 143832 - DNA, 25 bp, Artificial
  Probe
catccagttctcacttctattcagg

SEQ ID NO: 143833 - DNA, 25 bp, Artificial
  Probe
agttctcacttctattcaggctaca

SEQ ID NO: 143834 - DNA, 25 bp, Artificial
  Probe
caaggacactgtagagaagagagag

SEQ ID NO: 143835 - DNA, 25 bp, Artificial
  Probe
gccgagaactcctgactattaagat

SEQ ID NO: 143836 - DNA, 25 bp, Artificial
  Probe
ctattcaggctacaagaagatccag

SEQ ID NO: 143837 - DNA, 25 bp, Artificial
  Probe
tattcaggctacaagaagatccaga

SEQ ID NO: 143838 - DNA, 25 bp, Artificial
  Probe
gcatccagttctcacttctattcag

SEQ ID NO: 143839 - DNA, 25 bp, Artificial
  Probe
cagcatccagttctcacttctattc

SEQ ID NO: 143840 - DNA, 25 bp, Artificial
  Probe
aagccgagaactcctgactattaag

SEQ ID NO: 143841 - DNA, 25 bp, Artificial
  Probe
tctattcaggctacaagaagatcca

SEQ ID NO: 143842 - DNA, 25 bp, Artificial
  Probe
ccagttctcacttctattcaggcta

SEQ ID NO: 143843 - DNA, 25 bp, Artificial
  Probe
agcatccagttctcacttctattca

SEQ ID NO: 143844 - DNA, 25 bp, Artificial
  Probe
attcaggctacaagaagatccagaa

SEQ ID NO: 143845 - DNA, 25 bp, Artificial
  Probe
ggacactgtagagaagagagaggat

SEQ ID NO: 143846 - DNA, 25 bp, Artificial
  Probe
aaggacactgtagagaagagagagg

SEQ ID NO: 143847 - DNA, 25 bp, Artificial
  Probe
atccagttctcacttctattcaggc

SEQ ID NO: 143848 - DNA, 25 bp, Artificial
  Probe
agccgagaactcctgactattaaga

SEQ ID NO: 143849 - DNA, 25 bp, Artificial
  Probe
cgagaactcctgactattaagatat

SEQ ID NO: 143850 - DNA, 25 bp, Artificial
  Probe
gtttctcttccaccttctaatccat

SEQ ID NO: 143851 - DNA, 25 bp, Artificial
  Probe
ccaaggacactgtagagaagagaga

SEQ ID NO: 143852 - DNA, 25 bp, Artificial
  Probe
tccaaggacactgtagagaagagag

SEQ ID NO: 143853 - DNA, 25 bp, Artificial
  Probe
aagtttctcttccaccttctaatcc

SEQ ID NO: 143854 - DNA, 25 bp, Artificial
  Probe
agtttctcttccaccttctaatcca

SEQ ID NO: 143855 - DNA, 25 bp, Artificial
  Probe
ctcacttctattcaggctacaagaa

SEQ ID NO: 143856 - DNA, 25 bp, Artificial
  Probe
gcagcatccagttctcacttctatt

SEQ ID NO: 143857 - DNA, 25 bp, Artificial
  Probe
tctatgatgggaaacagtcaatctc

SEQ ID NO: 143858 - DNA, 25 bp, Artificial
  Probe
ctctatgatgggaaacagtcaatct

SEQ ID NO: 143859 - DNA, 25 bp, Artificial
  Probe
tagagaagagagaggattctgacaa

SEQ ID NO: 143860 - DNA, 25 bp, Artificial
  Probe
ctgtagagaagagagaggattctga

SEQ ID NO: 143861 - DNA, 25 bp, Artificial
  Probe
gtagagaagagagaggattctgaca

SEQ ID NO: 143862 - DNA, 25 bp, Artificial
  Probe
tgtagagaagagagaggattctgac

SEQ ID NO: 143863 - DNA, 25 bp, Artificial
  Probe
actgtagagaagagagaggattctg

SEQ ID NO: 143864 - DNA, 25 bp, Artificial
  Probe
cactgtagagaagagagaggattct

SEQ ID NO: 143865 - DNA, 25 bp, Artificial
  Probe
aggacactgtagagaagagagagga

SEQ ID NO: 143866 - DNA, 25 bp, Artificial
  Probe
aaagccgagaactcctgactattaa

SEQ ID NO: 143867 - DNA, 25 bp, Artificial
  Probe
ttctattcaggctacaagaagatcc

SEQ ID NO: 143868 - DNA, 25 bp, Artificial
  Probe
tccagttctcacttctattcaggct

SEQ ID NO: 143869 - DNA, 25 bp, Artificial
  Probe
acaagaagatccagaaagatgatga

SEQ ID NO: 143870 - DNA, 25 bp, Artificial
  Probe
ccaatcatcatagcacaaccatagt

SEQ ID NO: 143871 - DNA, 25 bp, Artificial
  Probe
tcacatctggcttcaagttaattct

SEQ ID NO: 143872 - DNA, 25 bp, Artificial
  Probe
gtcacatctggcttcaagttaattc

SEQ ID NO: 143873 - DNA, 25 bp, Artificial
  Probe
agtcacatctggcttcaagttaatt

SEQ ID NO: 143874 - DNA, 25 bp, Artificial
  Probe
aagtcacatctggcttcaagttaat

SEQ ID NO: 143875 - DNA, 25 bp, Artificial
  Probe
cacatctggcttcaagttaattctt

SEQ ID NO: 143876 - DNA, 25 bp, Artificial
  Probe
tattcaagacctcgttgcttctatt

SEQ ID NO: 143877 - DNA, 25 bp, Artificial
  Probe
atattcaagacctcgttgcttctat

SEQ ID NO: 143878 - DNA, 25 bp, Artificial
  Probe
tatattcaagacctcgttgcttcta

SEQ ID NO: 143879 - DNA, 25 bp, Artificial
  Probe
catatattcaagacctcgttgcttc

SEQ ID NO: 143880 - DNA, 25 bp, Artificial
  Probe
tcatatattcaagacctcgttgctt

SEQ ID NO: 143881 - DNA, 25 bp, Artificial
  Probe
atatattcaagacctcgttgcttct

SEQ ID NO: 143882 - DNA, 25 bp, Artificial
  Probe
ctcatatattcaagacctcgttgct

SEQ ID NO: 143883 - DNA, 25 bp, Artificial
  Probe
tctcatatattcaagacctcgttgc

SEQ ID NO: 143884 - DNA, 25 bp, Artificial
  Probe
cagttctaattgaatggcacacatg

SEQ ID NO: 143885 - DNA, 25 bp, Artificial
  Probe
caatcatcatagcacaaccatagtg

SEQ ID NO: 143886 - DNA, 25 bp, Artificial
  Probe
gaggcagagtctcatatattcaaga

SEQ ID NO: 143887 - DNA, 25 bp, Artificial
  Probe
agaggcagagtctcatatattcaag

SEQ ID NO: 143888 - DNA, 25 bp, Artificial
  Probe
aacattatcttagtggatgatgaca

SEQ ID NO: 143889 - DNA, 25 bp, Artificial
  Probe
ttctaattgaatggcacacatggag

SEQ ID NO: 143890 - DNA, 25 bp, Artificial
  Probe
acattatcttagtggatgatgacat

SEQ ID NO: 143891 - DNA, 25 bp, Artificial
  Probe
atcgctaacatagaccagtctgatt

SEQ ID NO: 143892 - DNA, 25 bp, Artificial
  Probe
gttctaattgaatggcacacatgga

SEQ ID NO: 143893 - DNA, 25 bp, Artificial
  Probe
agttctaattgaatggcacacatgg

SEQ ID NO: 143894 - DNA, 25 bp, Artificial
  Probe
tttcactatccaaatcaccagagat

SEQ ID NO: 143895 - DNA, 25 bp, Artificial
  Probe
cggttgataactatctcgataactc

SEQ ID NO: 143896 - DNA, 25 bp, Artificial
  Probe
catcgctaacatagaccagtctgat

SEQ ID NO: 143897 - DNA, 25 bp, Artificial
  Probe
agacagatgttcgttgaatctatca

SEQ ID NO: 143898 - DNA, 25 bp, Artificial
  Probe
tcagacagatgttcgttgaatctat

SEQ ID NO: 143899 - DNA, 25 bp, Artificial
  Probe
cagacagatgttcgttgaatctatc

SEQ ID NO: 143900 - DNA, 25 bp, Artificial
  Probe
gaattaaagaacaggaagcccaaac

SEQ ID NO: 143901 - DNA, 25 bp, Artificial
  Probe
aaacaaagagacttggaccctattt

SEQ ID NO: 143902 - DNA, 25 bp, Artificial
  Probe
gacagatgttcgttgaatctatcat

SEQ ID NO: 143903 - DNA, 25 bp, Artificial
  Probe
ccagttctaattgaatggcacacat

SEQ ID NO: 143904 - DNA, 25 bp, Artificial
  Probe
cccaatcatcatagcacaaccatag

SEQ ID NO: 143905 - DNA, 25 bp, Artificial
  Probe
attcaagacctcgttgcttctattt

SEQ ID NO: 143906 - DNA, 25 bp, Artificial
  Probe
gaaacaaagagacttggaccctatt

SEQ ID NO: 143907 - DNA, 25 bp, Artificial
  Probe
acatctggcttcaagttaattcttt

SEQ ID NO: 143908 - DNA, 25 bp, Artificial
  Probe
atttaataagccgcagtgtcgttta

SEQ ID NO: 143909 - DNA, 25 bp, Artificial
  Probe
tatttaataagccgcagtgtcgttt

SEQ ID NO: 143910 - DNA, 25 bp, Artificial
  Probe
aattaaagaacaggaagcccaaaca

SEQ ID NO: 143911 - DNA, 25 bp, Artificial
  Probe
aatcatctaaggactttgctaaaca

SEQ ID NO: 143912 - DNA, 25 bp, Artificial
  Probe
tctggcttcaagttaattctttctt

SEQ ID NO: 143913 - DNA, 25 bp, Artificial
  Probe
ctgaactcaagggatggaaacattt

SEQ ID NO: 143914 - DNA, 25 bp, Artificial
  Probe
cttaggaaacaaagagacttggacc

SEQ ID NO: 143915 - DNA, 25 bp, Artificial
  Probe
aaagaaagccaagaagaggttagag

SEQ ID NO: 143916 - DNA, 25 bp, Artificial
  Probe
caaagaaagccaagaagaggttaga

SEQ ID NO: 143917 - DNA, 25 bp, Artificial
  Probe
ccaaagaaagccaagaagaggttag

SEQ ID NO: 143918 - DNA, 25 bp, Artificial
  Probe
aagaaagccaagaagaggttagagg

SEQ ID NO: 143919 - DNA, 25 bp, Artificial
  Probe
atgtcaccaaagaaagccaagaaga

SEQ ID NO: 143920 - DNA, 25 bp, Artificial
  Probe
catgtcaccaaagaaagccaagaag

SEQ ID NO: 143921 - DNA, 25 bp, Artificial
  Probe
tgtcaccaaagaaagccaagaagag

SEQ ID NO: 143922 - DNA, 25 bp, Artificial
  Probe
accaaagaaagccaagaagaggtta

SEQ ID NO: 143923 - DNA, 25 bp, Artificial
  Probe
agaaagccaagaagaggttagaggg

SEQ ID NO: 143924 - DNA, 25 bp, Artificial
  Probe
gtcaccaaagaaagccaagaagagg

SEQ ID NO: 143925 - DNA, 25 bp, Artificial
  Probe
ccatgtcaccaaagaaagccaagaa

SEQ ID NO: 143926 - DNA, 25 bp, Artificial
  Probe
caccaaagaaagccaagaagaggtt

SEQ ID NO: 143927 - DNA, 25 bp, Artificial
  Probe
tcaccaaagaaagccaagaagaggt

SEQ ID NO: 143928 - DNA, 25 bp, Artificial
  Probe
caccatgtcaccaaagaaagccaag

SEQ ID NO: 143929 - DNA, 25 bp, Artificial
  Probe
ctccaacgtgttctccatgtttgag

SEQ ID NO: 143930 - DNA, 25 bp, Artificial
  Probe
accatgtcaccaaagaaagccaaga

SEQ ID NO: 143931 - DNA, 25 bp, Artificial
  Probe
tcagacaccatgtcaccaaagaaag

SEQ ID NO: 143932 - DNA, 25 bp, Artificial
  Probe
ctcagacaccatgtcaccaaagaaa

SEQ ID NO: 143933 - DNA, 25 bp, Artificial
  Probe
caacgtgttctccatgtttgagcag

SEQ ID NO: 143934 - DNA, 25 bp, Artificial
  Probe
aacgtgttctccatgtttgagcaga

SEQ ID NO: 143935 - DNA, 25 bp, Artificial
  Probe
cagacaccatgtcaccaaagaaagc

SEQ ID NO: 143936 - DNA, 25 bp, Artificial
  Probe
cctcagacaccatgtcaccaaagaa

SEQ ID NO: 143937 - DNA, 25 bp, Artificial
  Probe
gaaagccaagaagaggttagagggc

SEQ ID NO: 143938 - DNA, 25 bp, Artificial
  Probe
ttgtcatagcaacagtgattgtcat

SEQ ID NO: 143939 - DNA, 25 bp, Artificial
  Probe
tgtcatagcaacagtgattgtcatc

SEQ ID NO: 143940 - DNA, 25 bp, Artificial
  Probe
atgcagcagaatggatatgagaatc

SEQ ID NO: 143941 - DNA, 25 bp, Artificial
  Probe
atgagaatccaacatacaagttctt

SEQ ID NO: 143942 - DNA, 25 bp, Artificial
  Probe
atatgagaatccaacatacaagttc

SEQ ID NO: 143943 - DNA, 25 bp, Artificial
  Probe
gatatgagaatccaacatacaagtt

SEQ ID NO: 143944 - DNA, 25 bp, Artificial
  Probe
tatgagaatccaacatacaagttct

SEQ ID NO: 143945 - DNA, 25 bp, Artificial
  Probe
ggatatgagaatccaacatacaagt

SEQ ID NO: 143946 - DNA, 25 bp, Artificial
  Probe
tgagaatccaacatacaagttcttt

SEQ ID NO: 143947 - DNA, 25 bp, Artificial
  Probe
gagaatccaacatacaagttctttg

SEQ ID NO: 143948 - DNA, 25 bp, Artificial
  Probe
cagccaatacagaaaatgaagttga

SEQ ID NO: 143949 - DNA, 25 bp, Artificial
  Probe
caatacagaaaatgaagttgagcct

SEQ ID NO: 143950 - DNA, 25 bp, Artificial
  Probe
agccaatacagaaaatgaagttgag

SEQ ID NO: 143951 - DNA, 25 bp, Artificial
  Probe
ccaatacagaaaatgaagttgagcc

SEQ ID NO: 143952 - DNA, 25 bp, Artificial
  Probe
agaagtgaagatggatgcggagttc

SEQ ID NO: 143953 - DNA, 25 bp, Artificial
  Probe
ccagccaatacagaaaatgaagttg

SEQ ID NO: 143954 - DNA, 25 bp, Artificial
  Probe
gttgtcatagcaacagtgattgtca

SEQ ID NO: 143955 - DNA, 25 bp, Artificial
  Probe
ggttcaaacaaaggtgccatcattg

SEQ ID NO: 143956 - DNA, 25 bp, Artificial
  Probe
gccaatacagaaaatgaagttgagc

SEQ ID NO: 143957 - DNA, 25 bp, Artificial
  Probe
aatacagaaaatgaagttgagcctg

SEQ ID NO: 143958 - DNA, 25 bp, Artificial
  Probe
cagaagtgaagatggatgcggagtt

SEQ ID NO: 143959 - DNA, 25 bp, Artificial
  Probe
gccagccaatacagaaaatgaagtt

SEQ ID NO: 143960 - DNA, 25 bp, Artificial
  Probe
cgttgtcatagcaacagtgattgtc

SEQ ID NO: 143961 - DNA, 25 bp, Artificial
  Probe
ttcaaacaaaggtgccatcattgga

SEQ ID NO: 143962 - DNA, 25 bp, Artificial
  Probe
gttcaaacaaaggtgccatcattgg

SEQ ID NO: 143963 - DNA, 25 bp, Artificial
  Probe
ctcagaagtgaagatggatgcggag

SEQ ID NO: 143964 - DNA, 25 bp, Artificial
  Probe
gtgccagccaatacagaaaatgaag

SEQ ID NO: 143965 - DNA, 25 bp, Artificial
  Probe
gggttcaaacaaaggtgccatcatt

SEQ ID NO: 143966 - DNA, 25 bp, Artificial
  Probe
tgcagcagaatggatatgagaatcc

SEQ ID NO: 143967 - DNA, 25 bp, Artificial
  Probe
tgccagccaatacagaaaatgaagt

SEQ ID NO: 143968 - DNA, 25 bp, Artificial
  Probe
aaacaaaggtgccatcattggactc

SEQ ID NO: 143969 - DNA, 25 bp, Artificial
  Probe
caaacaaaggtgccatcattggact

SEQ ID NO: 143970 - DNA, 25 bp, Artificial
  Probe
tcaaacaaaggtgccatcattggac

SEQ ID NO: 143971 - DNA, 25 bp, Artificial
  Probe
tgtgccagccaatacagaaaatgaa

SEQ ID NO: 143972 - DNA, 25 bp, Artificial
  Probe
caaaggtgccatcattggactcatg

SEQ ID NO: 143973 - DNA, 25 bp, Artificial
  Probe
acaaaggtgccatcattggactcat

SEQ ID NO: 143974 - DNA, 25 bp, Artificial
  Probe
gcgttgtcatagcaacagtgattgt

SEQ ID NO: 143975 - DNA, 25 bp, Artificial
  Probe
gtctgggttgacaaacatcaagaca

SEQ ID NO: 143976 - DNA, 25 bp, Artificial
  Probe
aacaaaggtgccatcattggactca

SEQ ID NO: 143977 - DNA, 25 bp, Artificial
  Probe
cagaaaatgaagttgagcctgtcga

SEQ ID NO: 143978 - DNA, 25 bp, Artificial
  Probe
atacagaaaatgaagttgagcctgt

SEQ ID NO: 143979 - DNA, 25 bp, Artificial
  Probe
ggcgttgtcatagcaacagtgattg

SEQ ID NO: 143980 - DNA, 25 bp, Artificial
  Probe
ggtctgggttgacaaacatcaagac

SEQ ID NO: 143981 - DNA, 25 bp, Artificial
  Probe
tacagaaaatgaagttgagcctgtc

SEQ ID NO: 143982 - DNA, 25 bp, Artificial
  Probe
cggtgttcatttataaaataacgtg

SEQ ID NO: 143983 - DNA, 25 bp, Artificial
  Probe
gctccagcattaattgttgtgataa

SEQ ID NO: 143984 - DNA, 25 bp, Artificial
  Probe
ggctccagcattaattgttgtgata

SEQ ID NO: 143985 - DNA, 25 bp, Artificial
  Probe
aggctccagcattaattgttgtgat

SEQ ID NO: 143986 - DNA, 25 bp, Artificial
  Probe
ctccagcattaattgttgtgataaa

SEQ ID NO: 143987 - DNA, 25 bp, Artificial
  Probe
tatacaatgaagagctggtgagcat

SEQ ID NO: 143988 - DNA, 25 bp, Artificial
  Probe
caggctccagcattaattgttgtga

SEQ ID NO: 143989 - DNA, 25 bp, Artificial
  Probe
tccagcattaattgttgtgataaat

SEQ ID NO: 143990 - DNA, 25 bp, Artificial
  Probe
ctatacaatgaagagctggtgagca

SEQ ID NO: 143991 - DNA, 25 bp, Artificial
  Probe
actatacaatgaagagctggtgagc

SEQ ID NO: 143992 - DNA, 25 bp, Artificial
  Probe
atacaatgaagagctggtgagcatg

SEQ ID NO: 143993 - DNA, 25 bp, Artificial
  Probe
ccagcattaattgttgtgataaatt

SEQ ID NO: 143994 - DNA, 25 bp, Artificial
  Probe
ccaggctccagcattaattgttgtg

SEQ ID NO: 143995 - DNA, 25 bp, Artificial
  Probe
cctatagcctacaaaagtggtcatc

SEQ ID NO: 143996 - DNA, 25 bp, Artificial
  Probe
tatagcctacaaaagtggtcatcga

SEQ ID NO: 143997 - DNA, 25 bp, Artificial
  Probe
ctatagcctacaaaagtggtcatcg

SEQ ID NO: 143998 - DNA, 25 bp, Artificial
  Probe
atagcctacaaaagtggtcatcgaa

SEQ ID NO: 143999 - DNA, 25 bp, Artificial
  Probe
ccctatagcctacaaaagtggtcat

SEQ ID NO: 144000 - DNA, 25 bp, Artificial
  Probe
tacaatgaagagctggtgagcatga

SEQ ID NO: 144001 - DNA, 25 bp, Artificial
  Probe
tagcctacaaaagtggtcatcgaag

SEQ ID NO: 144002 - DNA, 25 bp, Artificial
  Probe
tacaaaagtggtcatcgaagggaag

SEQ ID NO: 144003 - DNA, 25 bp, Artificial
  Probe
ctacaaaagtggtcatcgaagggaa

SEQ ID NO: 144004 - DNA, 25 bp, Artificial
  Probe
caatgaagagctggtgagcatgaac

SEQ ID NO: 144005 - DNA, 25 bp, Artificial
  Probe
acaatgaagagctggtgagcatgaa

SEQ ID NO: 144006 - DNA, 25 bp, Artificial
  Probe
tcccctatagcctacaaaagtggtc

SEQ ID NO: 144007 - DNA, 25 bp, Artificial
  Probe
ctggtcccctatagcctacaaaagt

SEQ ID NO: 144008 - DNA, 25 bp, Artificial
  Probe
gcattaattgttgtgataaatttgt

SEQ ID NO: 144009 - DNA, 25 bp, Artificial
  Probe
ctcccaggctccagcattaattgtt

SEQ ID NO: 144010 - DNA, 25 bp, Artificial
  Probe
agcattaattgttgtgataaatttg

SEQ ID NO: 144011 - DNA, 25 bp, Artificial
  Probe
cagcattaattgttgtgataaattt

SEQ ID NO: 144012 - DNA, 25 bp, Artificial
  Probe
cccctatagcctacaaaagtggtca

SEQ ID NO: 144013 - DNA, 25 bp, Artificial
  Probe
gtcccctatagcctacaaaagtggt

SEQ ID NO: 144014 - DNA, 25 bp, Artificial
  Probe
tggtcccctatagcctacaaaagtg

SEQ ID NO: 144015 - DNA, 25 bp, Artificial
  Probe
cctggtcccctatagcctacaaaag

SEQ ID NO: 144016 - DNA, 25 bp, Artificial
  Probe
ggtcccctatagcctacaaaagtgg

SEQ ID NO: 144017 - DNA, 25 bp, Artificial
  Probe
cctacaaaagtggtcatcgaaggga

SEQ ID NO: 144018 - DNA, 25 bp, Artificial
  Probe
acaaaagtggtcatcgaagggaagg

SEQ ID NO: 144019 - DNA, 25 bp, Artificial
  Probe
ccctggtcccctatagcctacaaaa

SEQ ID NO: 144020 - DNA, 25 bp, Artificial
  Probe
agcctacaaaagtggtcatcgaagg

SEQ ID NO: 144021 - DNA, 25 bp, Artificial
  Probe
ttaggatgtaagtgataacgctgac

SEQ ID NO: 144022 - DNA, 25 bp, Artificial
  Probe
taggatgtaagtgataacgctgacc

SEQ ID NO: 144023 - DNA, 25 bp, Artificial
  Probe
atgtaagtgataacgctgacctctt

SEQ ID NO: 144024 - DNA, 25 bp, Artificial
  Probe
cttaggatgtaagtgataacgctga

SEQ ID NO: 144025 - DNA, 25 bp, Artificial
  Probe
tcttaggatgtaagtgataacgctg

SEQ ID NO: 144026 - DNA, 25 bp, Artificial
  Probe
ttcttaggatgtaagtgataacgct

SEQ ID NO: 144027 - DNA, 25 bp, Artificial
  Probe
taagtgataacgctgacctcttcat

SEQ ID NO: 144028 - DNA, 25 bp, Artificial
  Probe
gatgtaagtgataacgctgacctct

SEQ ID NO: 144029 - DNA, 25 bp, Artificial
  Probe
attcttaggatgtaagtgataacgc

SEQ ID NO: 144030 - DNA, 25 bp, Artificial
  Probe
tgtaagtgataacgctgacctcttc

SEQ ID NO: 144031 - DNA, 25 bp, Artificial
  Probe
ctgactctggatatgaactgagacc

SEQ ID NO: 144032 - DNA, 25 bp, Artificial
  Probe
cctgactctggatatgaactgagac

SEQ ID NO: 144033 - DNA, 25 bp, Artificial
  Probe
gtaagtgataacgctgacctcttca

SEQ ID NO: 144034 - DNA, 25 bp, Artificial
  Probe
agaagagagagagagagagagaaag

SEQ ID NO: 144035 - DNA, 25 bp, Artificial
  Probe
caaagaagagagagagagagagaga

SEQ ID NO: 144036 - DNA, 25 bp, Artificial
  Probe
aagaagagagagagagagagagaaa

SEQ ID NO: 144037 - DNA, 25 bp, Artificial
  Probe
aaagaagagagagagagagagagaa

SEQ ID NO: 144038 - DNA, 25 bp, Artificial
  Probe
ttcttggtgcattcttaggatgtaa

SEQ ID NO: 144039 - DNA, 25 bp, Artificial
  Probe
ccaaagaagagagagagagagagag

SEQ ID NO: 144040 - DNA, 25 bp, Artificial
  Probe
ggatgtaagtgataacgctgacctc

SEQ ID NO: 144041 - DNA, 25 bp, Artificial
  Probe
gatatgaactgagacccatctttga

SEQ ID NO: 144042 - DNA, 25 bp, Artificial
  Probe
tatgaactgagacccatctttgaag

SEQ ID NO: 144043 - DNA, 25 bp, Artificial
  Probe
atatgaactgagacccatctttgaa

SEQ ID NO: 144044 - DNA, 25 bp, Artificial
  Probe
ttatttaacagaagggaggaagggt

SEQ ID NO: 144045 - DNA, 25 bp, Artificial
  Probe
gaagagagagagagagagagaaagc

SEQ ID NO: 144046 - DNA, 25 bp, Artificial
  Probe
ggatatgaactgagacccatctttg

SEQ ID NO: 144047 - DNA, 25 bp, Artificial
  Probe
gcattcttaggatgtaagtgataac

SEQ ID NO: 144048 - DNA, 25 bp, Artificial
  Probe
agttatttaacagaagggaggaagg

SEQ ID NO: 144049 - DNA, 25 bp, Artificial
  Probe
ggaagttatttaacagaagggagga

SEQ ID NO: 144050 - DNA, 25 bp, Artificial
  Probe
tgggaagttatttaacagaagggag

SEQ ID NO: 144051 - DNA, 25 bp, Artificial
  Probe
atacttgcttagtgcctttatctgt

SEQ ID NO: 144052 - DNA, 25 bp, Artificial
  Probe
tatttaacagaagggaggaagggtt

SEQ ID NO: 144053 - DNA, 25 bp, Artificial
  Probe
tacttgcttagtgcctttatctgta

SEQ ID NO: 144054 - DNA, 25 bp, Artificial
  Probe
gttatttaacagaagggaggaaggg

SEQ ID NO: 144055 - DNA, 25 bp, Artificial
  Probe
gggaagttatttaacagaagggagg

SEQ ID NO: 144056 - DNA, 25 bp, Artificial
  Probe
aatacttgcttagtgcctttatctg

SEQ ID NO: 144057 - DNA, 25 bp, Artificial
  Probe
cattcttaggatgtaagtgataacg

SEQ ID NO: 144058 - DNA, 25 bp, Artificial
  Probe
ggtgcattcttaggatgtaagtgat

SEQ ID NO: 144059 - DNA, 25 bp, Artificial
  Probe
tcttggtgcattcttaggatgtaag

SEQ ID NO: 144060 - DNA, 25 bp, Artificial
  Probe
aagagagagagagagagagaaagca

SEQ ID NO: 144061 - DNA, 25 bp, Artificial
  Probe
cttggtgcattcttaggatgtaagt

SEQ ID NO: 144062 - DNA, 25 bp, Artificial
  Probe
tgatttaatacttgcttagtgcctt

SEQ ID NO: 144063 - DNA, 25 bp, Artificial
  Probe
ttgatttaatacttgcttagtgcct

SEQ ID NO: 144064 - DNA, 25 bp, Artificial
  Probe
ttggtgcattcttaggatgtaagtg

SEQ ID NO: 144065 - DNA, 25 bp, Artificial
  Probe
cttgcttagtgcctttatctgtacc

SEQ ID NO: 144066 - DNA, 25 bp, Artificial
  Probe
aagtgtgttattgttatctgtgctg

SEQ ID NO: 144067 - DNA, 25 bp, Artificial
  Probe
tgtgttattgttatctgtgctggtt

SEQ ID NO: 144068 - DNA, 25 bp, Artificial
  Probe
agtgtgttattgttatctgtgctgg

SEQ ID NO: 144069 - DNA, 25 bp, Artificial
  Probe
gtgtgttattgttatctgtgctggt

SEQ ID NO: 144070 - DNA, 25 bp, Artificial
  Probe
tatggagtaagcacaggacctagta

SEQ ID NO: 144071 - DNA, 25 bp, Artificial
  Probe
tgtggctatcttatactaatgttgt

SEQ ID NO: 144072 - DNA, 25 bp, Artificial
  Probe
gttattgttatctgtgctggtttga

SEQ ID NO: 144073 - DNA, 25 bp, Artificial
  Probe
tgttattgttatctgtgctggtttg

SEQ ID NO: 144074 - DNA, 25 bp, Artificial
  Probe
gtgttattgttatctgtgctggttt

SEQ ID NO: 144075 - DNA, 25 bp, Artificial
  Probe
attgttatctgtgctggtttgaatg

SEQ ID NO: 144076 - DNA, 25 bp, Artificial
  Probe
tctatggagtaagcacaggacctag

SEQ ID NO: 144077 - DNA, 25 bp, Artificial
  Probe
ttattgttatctgtgctggtttgaa

SEQ ID NO: 144078 - DNA, 25 bp, Artificial
  Probe
aaagtgtgttattgttatctgtgct

SEQ ID NO: 144079 - DNA, 25 bp, Artificial
  Probe
tgtgactatatcatgctaatgttgt

SEQ ID NO: 144080 - DNA, 25 bp, Artificial
  Probe
tattgttatctgtgctggtttgaat

SEQ ID NO: 144081 - DNA, 25 bp, Artificial
  Probe
gaaagtgtgttattgttatctgtgc

SEQ ID NO: 144082 - DNA, 25 bp, Artificial
  Probe
ctatggagtaagcacaggacctagt

SEQ ID NO: 144083 - DNA, 25 bp, Artificial
  Probe
gagcaaaggaaagtgtgttattgtt

SEQ ID NO: 144084 - DNA, 25 bp, Artificial
  Probe
ctctatggagtaagcacaggaccta

SEQ ID NO: 144085 - DNA, 25 bp, Artificial
  Probe
agcaaaggaaagtgtgttattgtta

SEQ ID NO: 144086 - DNA, 25 bp, Artificial
  Probe
ggaaagtgtgttattgttatctgtg

SEQ ID NO: 144087 - DNA, 25 bp, Artificial
  Probe
aggaaagtgtgttattgttatctgt

SEQ ID NO: 144088 - DNA, 25 bp, Artificial
  Probe
gtggctatcttatactaatgttgtt

SEQ ID NO: 144089 - DNA, 25 bp, Artificial
  Probe
gtggagcaaaggaaagtgtgttatt

SEQ ID NO: 144090 - DNA, 25 bp, Artificial
  Probe
caggacctagtacagtgctacatca

SEQ ID NO: 144091 - DNA, 25 bp, Artificial
  Probe
acaggacctagtacagtgctacatc

SEQ ID NO: 144092 - DNA, 25 bp, Artificial
  Probe
gagtaagcacaggacctagtacagt

SEQ ID NO: 144093 - DNA, 25 bp, Artificial
  Probe
atggagtaagcacaggacctagtac

SEQ ID NO: 144094 - DNA, 25 bp, Artificial
  Probe
gcaaaggaaagtgtgttattgttat

SEQ ID NO: 144095 - DNA, 25 bp, Artificial
  Probe
tgctacatcactgatctttacaaag

SEQ ID NO: 144096 - DNA, 25 bp, Artificial
  Probe
tgctaatgttgtttatatcactcct

SEQ ID NO: 144097 - DNA, 25 bp, Artificial
  Probe
atgtggctatcttatactaatgttg

SEQ ID NO: 144098 - DNA, 25 bp, Artificial
  Probe
gtgactatatcatgctaatgttgtt

SEQ ID NO: 144099 - DNA, 25 bp, Artificial
  Probe
ggagcaaaggaaagtgtgttattgt

SEQ ID NO: 144100 - DNA, 25 bp, Artificial
  Probe
tggagcaaaggaaagtgtgttattg

SEQ ID NO: 144101 - DNA, 25 bp, Artificial
  Probe
atgtgactatatcatgctaatgttg

SEQ ID NO: 144102 - DNA, 25 bp, Artificial
  Probe
ttgttatctgtgctggtttgaatgc

SEQ ID NO: 144103 - DNA, 25 bp, Artificial
  Probe
aaggaaagtgtgttattgttatctg

SEQ ID NO: 144104 - DNA, 25 bp, Artificial
  Probe
gtgctacatcactgatctttacaaa

SEQ ID NO: 144105 - DNA, 25 bp, Artificial
  Probe
aggacctagtacagtgctacatcac

SEQ ID NO: 144106 - DNA, 25 bp, Artificial
  Probe
ggagtaagcacaggacctagtacag

SEQ ID NO: 144107 - DNA, 25 bp, Artificial
  Probe
gctaatgttgtttatatcactcctt

SEQ ID NO: 144108 - DNA, 25 bp, Artificial
  Probe
atgctaatgttgtttatatcactcc

SEQ ID NO: 144109 - DNA, 25 bp, Artificial
  Probe
agtaagcacaggacctagtacagtg

SEQ ID NO: 144110 - DNA, 25 bp, Artificial
  Probe
cacaggacctagtacagtgctacat

SEQ ID NO: 144111 - DNA, 25 bp, Artificial
  Probe
ggagtgtattcatcttctggcttaa

SEQ ID NO: 144112 - DNA, 25 bp, Artificial
  Probe
tgtctacatcattatggaactggtc

SEQ ID NO: 144113 - DNA, 25 bp, Artificial
  Probe
ctgtctacatcattatggaactggt

SEQ ID NO: 144114 - DNA, 25 bp, Artificial
  Probe
tggagtgtattcatcttctggctta

SEQ ID NO: 144115 - DNA, 25 bp, Artificial
  Probe
cctgtctacatcattatggaactgg

SEQ ID NO: 144116 - DNA, 25 bp, Artificial
  Probe
cctcaacttatagatcaccacttca

SEQ ID NO: 144117 - DNA, 25 bp, Artificial
  Probe
gcctgtctacatcattatggaactg

SEQ ID NO: 144118 - DNA, 25 bp, Artificial
  Probe
cagcctgtctacatcattatggaac

SEQ ID NO: 144119 - DNA, 25 bp, Artificial
  Probe
agcctgtctacatcattatggaact

SEQ ID NO: 144120 - DNA, 25 bp, Artificial
  Probe
ctcaacttatagatcaccacttcaa

SEQ ID NO: 144121 - DNA, 25 bp, Artificial
  Probe
aagaagacggtggagtgtattcatc

SEQ ID NO: 144122 - DNA, 25 bp, Artificial
  Probe
gtggagtgtattcatcttctggctt

SEQ ID NO: 144123 - DNA, 25 bp, Artificial
  Probe
gtctacatcattatggaactggtcc

SEQ ID NO: 144124 - DNA, 25 bp, Artificial
  Probe
caagaagacggtggagtgtattcat

SEQ ID NO: 144125 - DNA, 25 bp, Artificial
  Probe
tcaacttatagatcaccacttcaat

SEQ ID NO: 144126 - DNA, 25 bp, Artificial
  Probe
atattgtcaaacttataggcgtgtg

SEQ ID NO: 144127 - DNA, 25 bp, Artificial
  Probe
gacggtggagtgtattcatcttctg

SEQ ID NO: 144128 - DNA, 25 bp, Artificial
  Probe
agaagcactgaattatgggagatac

SEQ ID NO: 144129 - DNA, 25 bp, Artificial
  Probe
atacaaagcaagtcatcaccaagaa

SEQ ID NO: 144130 - DNA, 25 bp, Artificial
  Probe
aatacaaagcaagtcatcaccaaga

SEQ ID NO: 144131 - DNA, 25 bp, Artificial
  Probe
caatacaaagcaagtcatcaccaag

SEQ ID NO: 144132 - DNA, 25 bp, Artificial
  Probe
gaagcactgaattatgggagataca

SEQ ID NO: 144133 - DNA, 25 bp, Artificial
  Probe
tcaatacaaagcaagtcatcaccaa

SEQ ID NO: 144134 - DNA, 25 bp, Artificial
  Probe
ttcaatacaaagcaagtcatcacca

SEQ ID NO: 144135 - DNA, 25 bp, Artificial
  Probe
cttcaatacaaagcaagtcatcacc

SEQ ID NO: 144136 - DNA, 25 bp, Artificial
  Probe
gatgtttcattgggagaattactgg

SEQ ID NO: 144137 - DNA, 25 bp, Artificial
  Probe
gagtgtattcatcttctggcttaaa

SEQ ID NO: 144138 - DNA, 25 bp, Artificial
  Probe
acagcctgtctacatcattatggaa

SEQ ID NO: 144139 - DNA, 25 bp, Artificial
  Probe
tacaaagcaagtcatcaccaagaag

SEQ ID NO: 144140 - DNA, 25 bp, Artificial
  Probe
aaggaggcactttatcatacagttt

SEQ ID NO: 144141 - DNA, 25 bp, Artificial
  Probe
atgtttcattgggagaattactggg

SEQ ID NO: 144142 - DNA, 25 bp, Artificial
  Probe
agatgtttcattgggagaattactg

SEQ ID NO: 144143 - DNA, 25 bp, Artificial
  Probe
agtgtattcatcttctggcttaaag

SEQ ID NO: 144144 - DNA, 25 bp, Artificial
  Probe
agacggtggagtgtattcatcttct

SEQ ID NO: 144145 - DNA, 25 bp, Artificial
  Probe
agaagacggtggagtgtattcatct

SEQ ID NO: 144146 - DNA, 25 bp, Artificial
  Probe
acttatagatcaccacttcaataca

SEQ ID NO: 144147 - DNA, 25 bp, Artificial
  Probe
ccctcaacttatagatcaccacttc

SEQ ID NO: 144148 - DNA, 25 bp, Artificial
  Probe
tccctcaacttatagatcaccactt

SEQ ID NO: 144149 - DNA, 25 bp, Artificial
  Probe
aggaggcactttatcatacagtttg

SEQ ID NO: 144150 - DNA, 25 bp, Artificial
  Probe
atccctcaacttatagatcaccact

SEQ ID NO: 144151 - DNA, 25 bp, Artificial
  Probe
tattgtcaaacttataggcgtgtgc

SEQ ID NO: 144152 - DNA, 25 bp, Artificial
  Probe
tagatcaccacttcaatacaaagca

SEQ ID NO: 144153 - DNA, 25 bp, Artificial
  Probe
tatccctcaacttatagatcaccac

SEQ ID NO: 144154 - DNA, 25 bp, Artificial
  Probe
ggcactttatcatacagtttgttga

SEQ ID NO: 144155 - DNA, 25 bp, Artificial
  Probe
aggcactttatcatacagtttgttg

SEQ ID NO: 144156 - DNA, 25 bp, Artificial
  Probe
ttaacagcataaactttgacaaccc

SEQ ID NO: 144157 - DNA, 25 bp, Artificial
  Probe
taacagcataaactttgacaaccca

SEQ ID NO: 144158 - DNA, 25 bp, Artificial
  Probe
tgaggaacattaacagcataaactt

SEQ ID NO: 144159 - DNA, 25 bp, Artificial
  Probe
attaacagcataaactttgacaacc

SEQ ID NO: 144160 - DNA, 25 bp, Artificial
  Probe
ggaacattaacagcataaactttga

SEQ ID NO: 144161 - DNA, 25 bp, Artificial
  Probe
aggaacattaacagcataaactttg

SEQ ID NO: 144162 - DNA, 25 bp, Artificial
  Probe
gaggaacattaacagcataaacttt

SEQ ID NO: 144163 - DNA, 25 bp, Artificial
  Probe
cataaactttgacaacccagtctac

SEQ ID NO: 144164 - DNA, 25 bp, Artificial
  Probe
ataaactttgacaacccagtctacc

SEQ ID NO: 144165 - DNA, 25 bp, Artificial
  Probe
aacagcataaactttgacaacccag

SEQ ID NO: 144166 - DNA, 25 bp, Artificial
  Probe
acattaacagcataaactttgacaa

SEQ ID NO: 144167 - DNA, 25 bp, Artificial
  Probe
aacattaacagcataaactttgaca

SEQ ID NO: 144168 - DNA, 25 bp, Artificial
  Probe
ctgaggaacattaacagcataaact

SEQ ID NO: 144169 - DNA, 25 bp, Artificial
  Probe
cattaacagcataaactttgacaac

SEQ ID NO: 144170 - DNA, 25 bp, Artificial
  Probe
gcataaactttgacaacccagtcta

SEQ ID NO: 144171 - DNA, 25 bp, Artificial
  Probe
gaacattaacagcataaactttgac

SEQ ID NO: 144172 - DNA, 25 bp, Artificial
  Probe
taaactttgacaacccagtctacca

SEQ ID NO: 144173 - DNA, 25 bp, Artificial
  Probe
cagcataaactttgacaacccagtc

SEQ ID NO: 144174 - DNA, 25 bp, Artificial
  Probe
tcaaagcaagataagagcaaaactg

SEQ ID NO: 144175 - DNA, 25 bp, Artificial
  Probe
agcataaactttgacaacccagtct

SEQ ID NO: 144176 - DNA, 25 bp, Artificial
  Probe
acagcataaactttgacaacccagt

SEQ ID NO: 144177 - DNA, 25 bp, Artificial
  Probe
aaactttgacaacccagtctaccag

SEQ ID NO: 144178 - DNA, 25 bp, Artificial
  Probe
caaagcaagataagagcaaaactgg

SEQ ID NO: 144179 - DNA, 25 bp, Artificial
  Probe
ctttgacaacccagtctaccagaag

SEQ ID NO: 144180 - DNA, 25 bp, Artificial
  Probe
ctcaaagcaagataagagcaaaact

SEQ ID NO: 144181 - DNA, 25 bp, Artificial
  Probe
gccctgggtcctgttttatatattt

SEQ ID NO: 144182 - DNA, 25 bp, Artificial
  Probe
tttgacaacccagtctaccagaaga

SEQ ID NO: 144183 - DNA, 25 bp, Artificial
  Probe
aaagcaagataagagcaaaactggg

SEQ ID NO: 144184 - DNA, 25 bp, Artificial
  Probe
tgccctgggtcctgttttatatatt

SEQ ID NO: 144185 - DNA, 25 bp, Artificial
  Probe
actttgacaacccagtctaccagaa

SEQ ID NO: 144186 - DNA, 25 bp, Artificial
  Probe
aactttgacaacccagtctaccaga

SEQ ID NO: 144187 - DNA, 25 bp, Artificial
  Probe
ctgccctgggtcctgttttatatat

SEQ ID NO: 144188 - DNA, 25 bp, Artificial
  Probe
ccctgggtcctgttttatatattta

SEQ ID NO: 144189 - DNA, 25 bp, Artificial
  Probe
tctgccctgggtcctgttttatata

SEQ ID NO: 144190 - DNA, 25 bp, Artificial
  Probe
aagcaagataagagcaaaactgggc

SEQ ID NO: 144191 - DNA, 25 bp, Artificial
  Probe
tcagtggtctctgtgttgctcaaag

SEQ ID NO: 144192 - DNA, 25 bp, Artificial
  Probe
ctcagtggtctctgtgttgctcaaa

SEQ ID NO: 144193 - DNA, 25 bp, Artificial
  Probe
ttcttgtccatcttcctccccattg

SEQ ID NO: 144194 - DNA, 25 bp, Artificial
  Probe
gttcttgtccatcttcctccccatt

SEQ ID NO: 144195 - DNA, 25 bp, Artificial
  Probe
cctgggtcctgttttatatatttat

SEQ ID NO: 144196 - DNA, 25 bp, Artificial
  Probe
gtctgccctgggtcctgttttatat

SEQ ID NO: 144197 - DNA, 25 bp, Artificial
  Probe
ttgacaacccagtctaccagaagac

SEQ ID NO: 144198 - DNA, 25 bp, Artificial
  Probe
atttattgtctggggacagaaaagg

SEQ ID NO: 144199 - DNA, 25 bp, Artificial
  Probe
tatttattgtctggggacagaaaag

SEQ ID NO: 144200 - DNA, 25 bp, Artificial
  Probe
atatttattgtctggggacagaaaa

SEQ ID NO: 144201 - DNA, 25 bp, Artificial
  Probe
atcccaagagtgtgaagatagactt

SEQ ID NO: 144202 - DNA, 25 bp, Artificial
  Probe
tttgatcccaagagtgtgaagatag

SEQ ID NO: 144203 - DNA, 25 bp, Artificial
  Probe
ctttgatcccaagagtgtgaagata

SEQ ID NO: 144204 - DNA, 25 bp, Artificial
  Probe
ttgatcccaagagtgtgaagataga

SEQ ID NO: 144205 - DNA, 25 bp, Artificial
  Probe
tgatcccaagagtgtgaagatagac

SEQ ID NO: 144206 - DNA, 25 bp, Artificial
  Probe
gatcccaagagtgtgaagatagact

SEQ ID NO: 144207 - DNA, 25 bp, Artificial
  Probe
cctttgatcccaagagtgtgaagat

SEQ ID NO: 144208 - DNA, 25 bp, Artificial
  Probe
gaccagatcgaagaattcaaagagg

SEQ ID NO: 144209 - DNA, 25 bp, Artificial
  Probe
gatagacttcagtgccgaccagatc

SEQ ID NO: 144210 - DNA, 25 bp, Artificial
  Probe
agatagacttcagtgccgaccagat

SEQ ID NO: 144211 - DNA, 25 bp, Artificial
  Probe
tcccaagagtgtgaagatagacttc

SEQ ID NO: 144212 - DNA, 25 bp, Artificial
  Probe
aagatagacttcagtgccgaccaga

SEQ ID NO: 144213 - DNA, 25 bp, Artificial
  Probe
accagatcgaagaattcaaagaggc

SEQ ID NO: 144214 - DNA, 25 bp, Artificial
  Probe
cgaccagatcgaagaattcaaagag

SEQ ID NO: 144215 - DNA, 25 bp, Artificial
  Probe
gcctttgatcccaagagtgtgaaga

SEQ ID NO: 144216 - DNA, 25 bp, Artificial
  Probe
ccagatcgaagaattcaaagaggcc

SEQ ID NO: 144217 - DNA, 25 bp, Artificial
  Probe
gaagatagacttcagtgccgaccag

SEQ ID NO: 144218 - DNA, 25 bp, Artificial
  Probe
ccgaccagatcgaagaattcaaaga

SEQ ID NO: 144219 - DNA, 25 bp, Artificial
  Probe
tgcctttgatcccaagagtgtgaag

SEQ ID NO: 144220 - DNA, 25 bp, Artificial
  Probe
ctgcctttgatcccaagagtgtgaa

SEQ ID NO: 144221 - DNA, 25 bp, Artificial
  Probe
tttcattgtttgaccggactccaac

SEQ ID NO: 144222 - DNA, 25 bp, Artificial
  Probe
ttcattgtttgaccggactccaact

SEQ ID NO: 144223 - DNA, 25 bp, Artificial
  Probe
ttttcattgtttgaccggactccaa

SEQ ID NO: 144224 - DNA, 25 bp, Artificial
  Probe
gccgaccagatcgaagaattcaaag

SEQ ID NO: 144225 - DNA, 25 bp, Artificial
  Probe
cttttcattgtttgaccggactcca

SEQ ID NO: 144226 - DNA, 25 bp, Artificial
  Probe
tgaaaatcacctatgggcagtgtgg

SEQ ID NO: 144227 - DNA, 25 bp, Artificial
  Probe
tgccgaccagatcgaagaattcaaa

SEQ ID NO: 144228 - DNA, 25 bp, Artificial
  Probe
ccttttcattgtttgaccggactcc

SEQ ID NO: 144229 - DNA, 25 bp, Artificial
  Probe
gccttttcattgtttgaccggactc

SEQ ID NO: 144230 - DNA, 25 bp, Artificial
  Probe
gagagaagaagaagttcctgaagag

SEQ ID NO: 144231 - DNA, 25 bp, Artificial
  Probe
agagagaagaagaagttcctgaaga

SEQ ID NO: 144232 - DNA, 25 bp, Artificial
  Probe
ctcacaagtagttcttaggcaagtt

SEQ ID NO: 144233 - DNA, 25 bp, Artificial
  Probe
cagcaacctcacaagtagttcttag

SEQ ID NO: 144234 - DNA, 25 bp, Artificial
  Probe
ttaatcaggcttgctatgtgacttc

SEQ ID NO: 144235 - DNA, 25 bp, Artificial
  Probe
tcagcaacctcacaagtagttctta

SEQ ID NO: 144236 - DNA, 25 bp, Artificial
  Probe
ttaccttatgttagtatgttgcctt

SEQ ID NO: 144237 - DNA, 25 bp, Artificial
  Probe
cagagagaagaagaagttcctgaag

SEQ ID NO: 144238 - DNA, 25 bp, Artificial
  Probe
atggagagtcattctacttcagcag

SEQ ID NO: 144239 - DNA, 25 bp, Artificial
  Probe
tgacagcagagagaagaagaagttc

SEQ ID NO: 144240 - DNA, 25 bp, Artificial
  Probe
gtgacagcagagagaagaagaagtt

SEQ ID NO: 144241 - DNA, 25 bp, Artificial
  Probe
ttctccaattaatcaggcttgctat

SEQ ID NO: 144242 - DNA, 25 bp, Artificial
  Probe
attctccaattaatcaggcttgcta

SEQ ID NO: 144243 - DNA, 25 bp, Artificial
  Probe
attaatcaggcttgctatgtgactt

SEQ ID NO: 144244 - DNA, 25 bp, Artificial
  Probe
aattaatcaggcttgctatgtgact

SEQ ID NO: 144245 - DNA, 25 bp, Artificial
  Probe
caattaatcaggcttgctatgtgac

SEQ ID NO: 144246 - DNA, 25 bp, Artificial
  Probe
gagtgacagcagagagaagaagaag

SEQ ID NO: 144247 - DNA, 25 bp, Artificial
  Probe
agtcattctacttcagcagtaagac

SEQ ID NO: 144248 - DNA, 25 bp, Artificial
  Probe
tcattctacttcagcagtaagacac

SEQ ID NO: 144249 - DNA, 25 bp, Artificial
  Probe
gtcattctacttcagcagtaagaca

SEQ ID NO: 144250 - DNA, 25 bp, Artificial
  Probe
gagtcattctacttcagcagtaaga

SEQ ID NO: 144251 - DNA, 25 bp, Artificial
  Probe
agagtcattctacttcagcagtaag

SEQ ID NO: 144252 - DNA, 25 bp, Artificial
  Probe
gagagtcattctacttcagcagtaa

SEQ ID NO: 144253 - DNA, 25 bp, Artificial
  Probe
tctccaattaatcaggcttgctatg

SEQ ID NO: 144254 - DNA, 25 bp, Artificial
  Probe
agagaagaagaagttcctgaagagg

SEQ ID NO: 144255 - DNA, 25 bp, Artificial
  Probe
ctccaattaatcaggcttgctatgt

SEQ ID NO: 144256 - DNA, 25 bp, Artificial
  Probe
tccaattaatcaggcttgctatgtg

SEQ ID NO: 144257 - DNA, 25 bp, Artificial
  Probe
acaaacaccaaataagactcagaag

SEQ ID NO: 144258 - DNA, 25 bp, Artificial
  Probe
gcagcataacaaacaccaaataaga

SEQ ID NO: 144259 - DNA, 25 bp, Artificial
  Probe
aacctcacaagtagttcttaggcaa

SEQ ID NO: 144260 - DNA, 25 bp, Artificial
  Probe
cagcataacaaacaccaaataagac

SEQ ID NO: 144261 - DNA, 25 bp, Artificial
  Probe
ccaattaatcaggcttgctatgtga

SEQ ID NO: 144262 - DNA, 25 bp, Artificial
  Probe
aattctccaattaatcaggcttgct

SEQ ID NO: 144263 - DNA, 25 bp, Artificial
  Probe
agagtgacagcagagagaagaagaa

SEQ ID NO: 144264 - DNA, 25 bp, Artificial
  Probe
ctcagcaacctcacaagtagttctt

SEQ ID NO: 144265 - DNA, 25 bp, Artificial
  Probe
ggagagtcattctacttcagcagta

SEQ ID NO: 144266 - DNA, 25 bp, Artificial
  Probe
agcataacaaacaccaaataagact

SEQ ID NO: 144267 - DNA, 25 bp, Artificial
  Probe
acaagtagttcttaggcaagtttct

SEQ ID NO: 144268 - DNA, 25 bp, Artificial
  Probe
cacaagtagttcttaggcaagtttc

SEQ ID NO: 144269 - DNA, 25 bp, Artificial
  Probe
gacagcagagagaagaagaagttcc

SEQ ID NO: 144270 - DNA, 25 bp, Artificial
  Probe
tcacaagtagttcttaggcaagttt

SEQ ID NO: 144271 - DNA, 25 bp, Artificial
  Probe
agtagttcttaggcaagtttcttct

SEQ ID NO: 144272 - DNA, 25 bp, Artificial
  Probe
aacaaacaccaaataagactcagaa

SEQ ID NO: 144273 - DNA, 25 bp, Artificial
  Probe
gcataacaaacaccaaataagactc

SEQ ID NO: 144274 - DNA, 25 bp, Artificial
  Probe
gcaagtttcttctaatggtagtgtt

SEQ ID NO: 144275 - DNA, 25 bp, Artificial
  Probe
cacccaactggaaatatgagtcatc

SEQ ID NO: 144276 - DNA, 25 bp, Artificial
  Probe
gaaatatgagtcatccacagcctct

SEQ ID NO: 144277 - DNA, 25 bp, Artificial
  Probe
aaatatgagtcatccacagcctctg

SEQ ID NO: 144278 - DNA, 25 bp, Artificial
  Probe
acccaactggaaatatgagtcatcc

SEQ ID NO: 144279 - DNA, 25 bp, Artificial
  Probe
acaagcaataaaatcactttgggtt

SEQ ID NO: 144280 - DNA, 25 bp, Artificial
  Probe
cacaagcaataaaatcactttgggt

SEQ ID NO: 144281 - DNA, 25 bp, Artificial
  Probe
acacaagcaataaaatcactttggg

SEQ ID NO: 144282 - DNA, 25 bp, Artificial
  Probe
tacacaagcaataaaatcactttgg

SEQ ID NO: 144283 - DNA, 25 bp, Artificial
  Probe
caagcaataaaatcactttgggtta

SEQ ID NO: 144284 - DNA, 25 bp, Artificial
  Probe
gcgtacacaagcaataaaatcactt

SEQ ID NO: 144285 - DNA, 25 bp, Artificial
  Probe
cgtacacaagcaataaaatcacttt

SEQ ID NO: 144286 - DNA, 25 bp, Artificial
  Probe
ggaaatatgagtcatccacagcctc

SEQ ID NO: 144287 - DNA, 25 bp, Artificial
  Probe
agcaataaaatcactttgggttaaa

SEQ ID NO: 144288 - DNA, 25 bp, Artificial
  Probe
aagcaataaaatcactttgggttaa

SEQ ID NO: 144289 - DNA, 25 bp, Artificial
  Probe
aatatgagtcatccacagcctctgc

SEQ ID NO: 144290 - DNA, 25 bp, Artificial
  Probe
gtacacaagcaataaaatcactttg

SEQ ID NO: 144291 - DNA, 25 bp, Artificial
  Probe
gcaataaaatcactttgggttaaaa

SEQ ID NO: 144292 - DNA, 25 bp, Artificial
  Probe
cataaatgctgttgcgtacacaagc

SEQ ID NO: 144293 - DNA, 25 bp, Artificial
  Probe
aactggaaatatgagtcatccacag

SEQ ID NO: 144294 - DNA, 25 bp, Artificial
  Probe
caactggaaatatgagtcatccaca

SEQ ID NO: 144295 - DNA, 25 bp, Artificial
  Probe
tgcgtacacaagcaataaaatcact

SEQ ID NO: 144296 - DNA, 25 bp, Artificial
  Probe
ccaactggaaatatgagtcatccac

SEQ ID NO: 144297 - DNA, 25 bp, Artificial
  Probe
atatgagtcatccacagcctctgct

SEQ ID NO: 144298 - DNA, 25 bp, Artificial
  Probe
gcataaatgctgttgcgtacacaag

SEQ ID NO: 144299 - DNA, 25 bp, Artificial
  Probe
cccaactggaaatatgagtcatcca

SEQ ID NO: 144300 - DNA, 25 bp, Artificial
  Probe
actggaaatatgagtcatccacagc

SEQ ID NO: 144301 - DNA, 25 bp, Artificial
  Probe
ctggaaatatgagtcatccacagcc

SEQ ID NO: 144302 - DNA, 25 bp, Artificial
  Probe
tggaaatatgagtcatccacagcct

SEQ ID NO: 144303 - DNA, 25 bp, Artificial
  Probe
ggcataaatgctgttgcgtacacaa

SEQ ID NO: 144304 - DNA, 25 bp, Artificial
  Probe
ttgcgtacacaagcaataaaatcac

SEQ ID NO: 144305 - DNA, 25 bp, Artificial
  Probe
gttgcgtacacaagcaataaaatca

SEQ ID NO: 144306 - DNA, 25 bp, Artificial
  Probe
tgttgcgtacacaagcaataaaatc

SEQ ID NO: 144307 - DNA, 25 bp, Artificial
  Probe
ctgttgcgtacacaagcaataaaat

SEQ ID NO: 144308 - DNA, 25 bp, Artificial
  Probe
gctgttgcgtacacaagcaataaaa

SEQ ID NO: 144309 - DNA, 25 bp, Artificial
  Probe
tctgataacggaatgagttacttct

SEQ ID NO: 144310 - DNA, 25 bp, Artificial
  Probe
gcttctgataacggaatgagttact

SEQ ID NO: 144311 - DNA, 25 bp, Artificial
  Probe
ctagcttctgataacggaatgagtt

SEQ ID NO: 144312 - DNA, 25 bp, Artificial
  Probe
tgataacggaatgagttacttcttc

SEQ ID NO: 144313 - DNA, 25 bp, Artificial
  Probe
ctgataacggaatgagttacttctt

SEQ ID NO: 144314 - DNA, 25 bp, Artificial
  Probe
ttctgataacggaatgagttacttc

SEQ ID NO: 144315 - DNA, 25 bp, Artificial
  Probe
cttctgataacggaatgagttactt

SEQ ID NO: 144316 - DNA, 25 bp, Artificial
  Probe
cctagcttctgataacggaatgagt

SEQ ID NO: 144317 - DNA, 25 bp, Artificial
  Probe
agcttctgataacggaatgagttac

SEQ ID NO: 144318 - DNA, 25 bp, Artificial
  Probe
tagcttctgataacggaatgagtta

SEQ ID NO: 144319 - DNA, 25 bp, Artificial
  Probe
ttgatgtgagcattgaattcctaac

SEQ ID NO: 144320 - DNA, 25 bp, Artificial
  Probe
cttgatgtgagcattgaattcctaa

SEQ ID NO: 144321 - DNA, 25 bp, Artificial
  Probe
gatgtgagcattgaattcctaacct

SEQ ID NO: 144322 - DNA, 25 bp, Artificial
  Probe
ccttgatgtgagcattgaattccta

SEQ ID NO: 144323 - DNA, 25 bp, Artificial
  Probe
gtcagacccgtataataaagattct

SEQ ID NO: 144324 - DNA, 25 bp, Artificial
  Probe
atgtgagcattgaattcctaacctg

SEQ ID NO: 144325 - DNA, 25 bp, Artificial
  Probe
tgatgtgagcattgaattcctaacc

SEQ ID NO: 144326 - DNA, 25 bp, Artificial
  Probe
cagacccgtataataaagattctct

SEQ ID NO: 144327 - DNA, 25 bp, Artificial
  Probe
tcagacccgtataataaagattctc

SEQ ID NO: 144328 - DNA, 25 bp, Artificial
  Probe
tgaaataccctagcttctgataacg

SEQ ID NO: 144329 - DNA, 25 bp, Artificial
  Probe
aaataccctagcttctgataacgga

SEQ ID NO: 144330 - DNA, 25 bp, Artificial
  Probe
ataccctagcttctgataacggaat

SEQ ID NO: 144331 - DNA, 25 bp, Artificial
  Probe
gaaataccctagcttctgataacgg

SEQ ID NO: 144332 - DNA, 25 bp, Artificial
  Probe
aataccctagcttctgataacggaa

SEQ ID NO: 144333 - DNA, 25 bp, Artificial
  Probe
gtgagcattgaattcctaacctgtg

SEQ ID NO: 144334 - DNA, 25 bp, Artificial
  Probe
taccctagcttctgataacggaatg

SEQ ID NO: 144335 - DNA, 25 bp, Artificial
  Probe
tgtgagcattgaattcctaacctgt

SEQ ID NO: 144336 - DNA, 25 bp, Artificial
  Probe
cagcatcacgtcagaactcatactc

SEQ ID NO: 144337 - DNA, 25 bp, Artificial
  Probe
ctcagcatcacgtcagaactcatac

SEQ ID NO: 144338 - DNA, 25 bp, Artificial
  Probe
ccagttgtgaaataccctagcttct

SEQ ID NO: 144339 - DNA, 25 bp, Artificial
  Probe
tcagcatcacgtcagaactcatact

SEQ ID NO: 144340 - DNA, 25 bp, Artificial
  Probe
gaccagttgtgaaataccctagctt

SEQ ID NO: 144341 - DNA, 25 bp, Artificial
  Probe
gataacggaatgagttacttcttcc

SEQ ID NO: 144342 - DNA, 25 bp, Artificial
  Probe
tgagcattgaattcctaacctgtgg

SEQ ID NO: 144343 - DNA, 25 bp, Artificial
  Probe
ccctagcttctgataacggaatgag

SEQ ID NO: 144344 - DNA, 25 bp, Artificial
  Probe
accagttgtgaaataccctagcttc

SEQ ID NO: 144345 - DNA, 25 bp, Artificial
  Probe
ggtcagacccgtataataaagattc

SEQ ID NO: 144346 - DNA, 25 bp, Artificial
  Probe
gatttctacccagcccagatcaaag

SEQ ID NO: 144347 - DNA, 25 bp, Artificial
  Probe
agatttctacccagcccagatcaaa

SEQ ID NO: 144348 - DNA, 25 bp, Artificial
  Probe
accctagcttctgataacggaatga

SEQ ID NO: 144349 - DNA, 25 bp, Artificial
  Probe
gagcattgaattcctaacctgtgga

SEQ ID NO: 144350 - DNA, 25 bp, Artificial
  Probe
tcgtgtccacacagcttattaggaa

SEQ ID NO: 144351 - DNA, 25 bp, Artificial
  Probe
atttctacccagcccagatcaaagt

SEQ ID NO: 144352 - DNA, 25 bp, Artificial
  Probe
tgctcagtgacagatttctacccag

SEQ ID NO: 144353 - DNA, 25 bp, Artificial
  Probe
agcatcacgtcagaactcatactcc

SEQ ID NO: 144354 - DNA, 25 bp, Artificial
  Probe
tttatgatggtgtgtttgtgtgtgt

SEQ ID NO: 144355 - DNA, 25 bp, Artificial
  Probe
ttatgatggtgtgtttgtgtgtgtg

SEQ ID NO: 144356 - DNA, 25 bp, Artificial
  Probe
tatgatggtgtgtttgtgtgtgtgt

SEQ ID NO: 144357 - DNA, 25 bp, Artificial
  Probe
ttttatgatggtgtgtttgtgtgtg

SEQ ID NO: 144358 - DNA, 25 bp, Artificial
  Probe
atgatggtgtgtttgtgtgtgtgtg

SEQ ID NO: 144359 - DNA, 25 bp, Artificial
  Probe
gttttctccttgactcttgggctac

SEQ ID NO: 144360 - DNA, 25 bp, Artificial
  Probe
ttctccttgactcttgggctacgat

SEQ ID NO: 144361 - DNA, 25 bp, Artificial
  Probe
ggttttctccttgactcttgggcta

SEQ ID NO: 144362 - DNA, 25 bp, Artificial
  Probe
ttttctccttgactcttgggctacg

SEQ ID NO: 144363 - DNA, 25 bp, Artificial
  Probe
ctgggttttctccttgactcttggg

SEQ ID NO: 144364 - DNA, 25 bp, Artificial
  Probe
cctgggttttctccttgactcttgg

SEQ ID NO: 144365 - DNA, 25 bp, Artificial
  Probe
ccctgggttttctccttgactcttg

SEQ ID NO: 144366 - DNA, 25 bp, Artificial
  Probe
ctctaaacttgtggatgtccctttc

SEQ ID NO: 144367 - DNA, 25 bp, Artificial
  Probe
gcagaagtttcaagtctattaccta

SEQ ID NO: 144368 - DNA, 25 bp, Artificial
  Probe
actctaaacttgtggatgtcccttt

SEQ ID NO: 144369 - DNA, 25 bp, Artificial
  Probe
aacaatctacatgatccgatgtctg

SEQ ID NO: 144370 - DNA, 25 bp, Artificial
  Probe
aatctacatgatccgatgtctggag

SEQ ID NO: 144371 - DNA, 25 bp, Artificial
  Probe
tgcagaagtttcaagtctattacct

SEQ ID NO: 144372 - DNA, 25 bp, Artificial
  Probe
gtgcagaagtttcaagtctattacc

SEQ ID NO: 144373 - DNA, 25 bp, Artificial
  Probe
ggtgcagaagtttcaagtctattac

SEQ ID NO: 144374 - DNA, 25 bp, Artificial
  Probe
tggtgcagaagtttcaagtctatta

SEQ ID NO: 144375 - DNA, 25 bp, Artificial
  Probe
gagtcagtcctgtcttccagtagtc

SEQ ID NO: 144376 - DNA, 25 bp, Artificial
  Probe
atctgctccaagatcatgtctgaac

SEQ ID NO: 144377 - DNA, 25 bp, Artificial
  Probe
caatctacatgatccgatgtctgga

SEQ ID NO: 144378 - DNA, 25 bp, Artificial
  Probe
acaatctacatgatccgatgtctgg

SEQ ID NO: 144379 - DNA, 25 bp, Artificial
  Probe
cactctaaacttgtggatgtccctt

SEQ ID NO: 144380 - DNA, 25 bp, Artificial
  Probe
tctaaacttgtggatgtccctttcc

SEQ ID NO: 144381 - DNA, 25 bp, Artificial
  Probe
gtagatgtgattaatggagccctgg

SEQ ID NO: 144382 - DNA, 25 bp, Artificial
  Probe
ggtagatgtgattaatggagccctg

SEQ ID NO: 144383 - DNA, 25 bp, Artificial
  Probe
ctggtgcagaagtttcaagtctatt

SEQ ID NO: 144384 - DNA, 25 bp, Artificial
  Probe
tagatgtgattaatggagccctgga

SEQ ID NO: 144385 - DNA, 25 bp, Artificial
  Probe
cagaagtttcaagtctattacctag

SEQ ID NO: 144386 - DNA, 25 bp, Artificial
  Probe
aaacaatctacatgatccgatgtct

SEQ ID NO: 144387 - DNA, 25 bp, Artificial
  Probe
actggtgcagaagtttcaagtctat

SEQ ID NO: 144388 - DNA, 25 bp, Artificial
  Probe
atctacatgatccgatgtctggagg

SEQ ID NO: 144389 - DNA, 25 bp, Artificial
  Probe
aattgaattccttcacagaagtcat

SEQ ID NO: 144390 - DNA, 25 bp, Artificial
  Probe
gttggggtagatgtgattaatggag

SEQ ID NO: 144391 - DNA, 25 bp, Artificial
  Probe
aattcccagcaccaaagaatgaact

SEQ ID NO: 144392 - DNA, 25 bp, Artificial
  Probe
ctctccctggaccactctaaacttg

SEQ ID NO: 144393 - DNA, 25 bp, Artificial
  Probe
tctgctccaagatcatgtctgaacg

SEQ ID NO: 144394 - DNA, 25 bp, Artificial
  Probe
ggagtcagtcctgtcttccagtagt

SEQ ID NO: 144395 - DNA, 25 bp, Artificial
  Probe
agatgtgattaatggagccctggag

SEQ ID NO: 144396 - DNA, 25 bp, Artificial
  Probe
aaagaatgaactggtgcagaagttt

SEQ ID NO: 144397 - DNA, 25 bp, Artificial
  Probe
actctccctggaccactctaaactt

SEQ ID NO: 144398 - DNA, 25 bp, Artificial
  Probe
gacagtggaagagagagggactttg

SEQ ID NO: 144399 - DNA, 25 bp, Artificial
  Probe
tttcaagtctattacctagggaacg

SEQ ID NO: 144400 - DNA, 25 bp, Artificial
  Probe
agtcctgtcttccagtagtcgtgag

SEQ ID NO: 144401 - DNA, 25 bp, Artificial
  Probe
agtcagtcctgtcttccagtagtcg

SEQ ID NO: 144402 - DNA, 25 bp, Artificial
  Probe
attcccagcaccaaagaatgaactg

SEQ ID NO: 144403 - DNA, 25 bp, Artificial
  Probe
ttcaagtctattacctagggaacgt

SEQ ID NO: 144404 - DNA, 25 bp, Artificial
  Probe
ttggggtagatgtgattaatggagc

SEQ ID NO: 144405 - DNA, 25 bp, Artificial
  Probe
cgttggggtagatgtgattaatgga

SEQ ID NO: 144406 - DNA, 25 bp, Artificial
  Probe
tcaagtctattacctagggaacgtg

SEQ ID NO: 144407 - DNA, 25 bp, Artificial
  Probe
aagaatgaactggtgcagaagtttc

SEQ ID NO: 144408 - DNA, 25 bp, Artificial
  Probe
aagtttcaagtctattacctaggga

SEQ ID NO: 144409 - DNA, 25 bp, Artificial
  Probe
atgtgattaatggagccctggagtc

SEQ ID NO: 144410 - DNA, 25 bp, Artificial
  Probe
gatgtgattaatggagccctggagt

SEQ ID NO: 144411 - DNA, 25 bp, Artificial
  Probe
gacagagacaagaggaacatgaatt

SEQ ID NO: 144412 - DNA, 25 bp, Artificial
  Probe
acactcagcagacattacagacatt

SEQ ID NO: 144413 - DNA, 25 bp, Artificial
  Probe
aacactcagcagacattacagacat

SEQ ID NO: 144414 - DNA, 25 bp, Artificial
  Probe
agacagagacaagaggaacatgaat

SEQ ID NO: 144415 - DNA, 25 bp, Artificial
  Probe
tgtgttagtattcacctacaatgtg

SEQ ID NO: 144416 - DNA, 25 bp, Artificial
  Probe
gtgtgttagtattcacctacaatgt

SEQ ID NO: 144417 - DNA, 25 bp, Artificial
  Probe
gaacactcagcagacattacagaca

SEQ ID NO: 144418 - DNA, 25 bp, Artificial
  Probe
agacagacagagacaagaggaacat

SEQ ID NO: 144419 - DNA, 25 bp, Artificial
  Probe
acattacagacatttcagacagaca

SEQ ID NO: 144420 - DNA, 25 bp, Artificial
  Probe
ttacagacatttcagacagacagag

SEQ ID NO: 144421 - DNA, 25 bp, Artificial
  Probe
attacagacatttcagacagacaga

SEQ ID NO: 144422 - DNA, 25 bp, Artificial
  Probe
cattacagacatttcagacagacag

SEQ ID NO: 144423 - DNA, 25 bp, Artificial
  Probe
gacattacagacatttcagacagac

SEQ ID NO: 144424 - DNA, 25 bp, Artificial
  Probe
agacattacagacatttcagacaga

SEQ ID NO: 144425 - DNA, 25 bp, Artificial
  Probe
cagacattacagacatttcagacag

SEQ ID NO: 144426 - DNA, 25 bp, Artificial
  Probe
tctttactgaaatggactctacctg

SEQ ID NO: 144427 - DNA, 25 bp, Artificial
  Probe
tgctctttactgaaatggactctac

SEQ ID NO: 144428 - DNA, 25 bp, Artificial
  Probe
ctctttactgaaatggactctacct

SEQ ID NO: 144429 - DNA, 25 bp, Artificial
  Probe
atgctctttactgaaatggactcta

SEQ ID NO: 144430 - DNA, 25 bp, Artificial
  Probe
cagacagagacaagaggaacatgaa

SEQ ID NO: 144431 - DNA, 25 bp, Artificial
  Probe
tacagacatttcagacagacagaga

SEQ ID NO: 144432 - DNA, 25 bp, Artificial
  Probe
ttcagacagacagagacaagaggaa

SEQ ID NO: 144433 - DNA, 25 bp, Artificial
  Probe
gctctttactgaaatggactctacc

SEQ ID NO: 144434 - DNA, 25 bp, Artificial
  Probe
catttcagacagacagagacaagag

SEQ ID NO: 144435 - DNA, 25 bp, Artificial
  Probe
agcagacattacagacatttcagac

SEQ ID NO: 144436 - DNA, 25 bp, Artificial
  Probe
cagcagacattacagacatttcaga

SEQ ID NO: 144437 - DNA, 25 bp, Artificial
  Probe
tcagcagacattacagacatttcag

SEQ ID NO: 144438 - DNA, 25 bp, Artificial
  Probe
ctcagcagacattacagacatttca

SEQ ID NO: 144439 - DNA, 25 bp, Artificial
  Probe
actcagcagacattacagacatttc

SEQ ID NO: 144440 - DNA, 25 bp, Artificial
  Probe
ctttactgaaatggactctacctgc

SEQ ID NO: 144441 - DNA, 25 bp, Artificial
  Probe
gacatttcagacagacagagacaag

SEQ ID NO: 144442 - DNA, 25 bp, Artificial
  Probe
gcagacattacagacatttcagaca

SEQ ID NO: 144443 - DNA, 25 bp, Artificial
  Probe
cactcagcagacattacagacattt

SEQ ID NO: 144444 - DNA, 25 bp, Artificial
  Probe
tgaacactcagcagacattacagac

SEQ ID NO: 144445 - DNA, 25 bp, Artificial
  Probe
gtgaacactcagcagacattacaga

SEQ ID NO: 144446 - DNA, 25 bp, Artificial
  Probe
acatttcagacagacagagacaaga

SEQ ID NO: 144447 - DNA, 25 bp, Artificial
  Probe
agacatttcagacagacagagacaa

SEQ ID NO: 144448 - DNA, 25 bp, Artificial
  Probe
gacagacagagacaagaggaacatg

SEQ ID NO: 144449 - DNA, 25 bp, Artificial
  Probe
ttctgatctcttcctcctctttctc

SEQ ID NO: 144450 - DNA, 25 bp, Artificial
  Probe
cttctgatctcttcctcctctttct

SEQ ID NO: 144451 - DNA, 25 bp, Artificial
  Probe
tcagacagacagagacaagaggaac

SEQ ID NO: 144452 - DNA, 25 bp, Artificial
  Probe
atttcagacagacagagacaagagg

SEQ ID NO: 144453 - DNA, 25 bp, Artificial
  Probe
tggtcacaagcaaacatacattctg

SEQ ID NO: 144454 - DNA, 25 bp, Artificial
  Probe
catgctctttactgaaatggactct

SEQ ID NO: 144455 - DNA, 25 bp, Artificial
  Probe
cagacatttcagacagacagagaca

SEQ ID NO: 144456 - DNA, 25 bp, Artificial
  Probe
atcagcaacattcctacaattaaga

SEQ ID NO: 144457 - DNA, 25 bp, Artificial
  Probe
agcaacattcctacaattaagaagt

SEQ ID NO: 144458 - DNA, 25 bp, Artificial
  Probe
tcagcaacattcctacaattaagaa

SEQ ID NO: 144459 - DNA, 25 bp, Artificial
  Probe
cagcaacattcctacaattaagaag

SEQ ID NO: 144460 - DNA, 25 bp, Artificial
  Probe
aatcagcaacattcctacaattaag

SEQ ID NO: 144461 - DNA, 25 bp, Artificial
  Probe
gcaacattcctacaattaagaagtt

SEQ ID NO: 144462 - DNA, 25 bp, Artificial
  Probe
caagaatcagcaacattcctacaat

SEQ ID NO: 144463 - DNA, 25 bp, Artificial
  Probe
ttaagacaagaatcagcaacattcc

SEQ ID NO: 144464 - DNA, 25 bp, Artificial
  Probe
aagacaagaatcagcaacattccta

SEQ ID NO: 144465 - DNA, 25 bp, Artificial
  Probe
taagacaagaatcagcaacattcct

SEQ ID NO: 144466 - DNA, 25 bp, Artificial
  Probe
aagaatcagcaacattcctacaatt

SEQ ID NO: 144467 - DNA, 25 bp, Artificial
  Probe
acaagaatcagcaacattcctacaa

SEQ ID NO: 144468 - DNA, 25 bp, Artificial
  Probe
agacaagaatcagcaacattcctac

SEQ ID NO: 144469 - DNA, 25 bp, Artificial
  Probe
tccaacaatgacaaatgccaattaa

SEQ ID NO: 144470 - DNA, 25 bp, Artificial
  Probe
gacaagaatcagcaacattcctaca

SEQ ID NO: 144471 - DNA, 25 bp, Artificial
  Probe
gcatttaagacaagaatcagcaaca

SEQ ID NO: 144472 - DNA, 25 bp, Artificial
  Probe
ccaacaatgacaaatgccaattaaa

SEQ ID NO: 144473 - DNA, 25 bp, Artificial
  Probe
aacattcctacaattaagaagttcc

SEQ ID NO: 144474 - DNA, 25 bp, Artificial
  Probe
agaatcagcaacattcctacaatta

SEQ ID NO: 144475 - DNA, 25 bp, Artificial
  Probe
ggcatttaagacaagaatcagcaac

SEQ ID NO: 144476 - DNA, 25 bp, Artificial
  Probe
catttaagacaagaatcagcaacat

SEQ ID NO: 144477 - DNA, 25 bp, Artificial
  Probe
gaatcagcaacattcctacaattaa

SEQ ID NO: 144478 - DNA, 25 bp, Artificial
  Probe
tgacaaatgccaattaaatagagtg

SEQ ID NO: 144479 - DNA, 25 bp, Artificial
  Probe
gtccaacaatgacaaatgccaatta

SEQ ID NO: 144480 - DNA, 25 bp, Artificial
  Probe
gacaaatgccaattaaatagagtga

SEQ ID NO: 144481 - DNA, 25 bp, Artificial
  Probe
caacaatgacaaatgccaattaaat

SEQ ID NO: 144482 - DNA, 25 bp, Artificial
  Probe
atttaagacaagaatcagcaacatt

SEQ ID NO: 144483 - DNA, 25 bp, Artificial
  Probe
caacattcctacaattaagaagttc

SEQ ID NO: 144484 - DNA, 25 bp, Artificial
  Probe
acaaatgccaattaaatagagtgaa

SEQ ID NO: 144485 - DNA, 25 bp, Artificial
  Probe
atgacaaatgccaattaaatagagt

SEQ ID NO: 144486 - DNA, 25 bp, Artificial
  Probe
tttaagacaagaatcagcaacattc

SEQ ID NO: 144487 - DNA, 25 bp, Artificial
  Probe
acaatgacaaatgccaattaaatag

SEQ ID NO: 144488 - DNA, 25 bp, Artificial
  Probe
caatgacaaatgccaattaaataga

SEQ ID NO: 144489 - DNA, 25 bp, Artificial
  Probe
caaatgccaattaaatagagtgaaa

SEQ ID NO: 144490 - DNA, 25 bp, Artificial
  Probe
aacaatgacaaatgccaattaaata

SEQ ID NO: 144491 - DNA, 25 bp, Artificial
  Probe
aatgacaaatgccaattaaatagag

SEQ ID NO: 144492 - DNA, 25 bp, Artificial
  Probe
tgtccaacaatgacaaatgccaatt

SEQ ID NO: 144493 - DNA, 25 bp, Artificial
  Probe
ccactctgtccaacaatgacaaatg

SEQ ID NO: 144494 - DNA, 25 bp, Artificial
  Probe
aaatgccaattaaatagagtgaaaa

SEQ ID NO: 144495 - DNA, 25 bp, Artificial
  Probe
ctgtccaacaatgacaaatgccaat

SEQ ID NO: 144496 - DNA, 25 bp, Artificial
  Probe
cactctgtccaacaatgacaaatgc

SEQ ID NO: 144497 - DNA, 25 bp, Artificial
  Probe
tctgtccaacaatgacaaatgccaa

SEQ ID NO: 144498 - DNA, 25 bp, Artificial
  Probe
ctctgtccaacaatgacaaatgcca

SEQ ID NO: 144499 - DNA, 25 bp, Artificial
  Probe
actctgtccaacaatgacaaatgcc

SEQ ID NO: 144500 - DNA, 25 bp, Artificial
  Probe
gctgtgaattaacttgttctgtgta

SEQ ID NO: 144501 - DNA, 25 bp, Artificial
  Probe
ctctgctgtgaattaacttgttctg

SEQ ID NO: 144502 - DNA, 25 bp, Artificial
  Probe
ctgctgtgaattaacttgttctgtg

SEQ ID NO: 144503 - DNA, 25 bp, Artificial
  Probe
tctgctgtgaattaacttgttctgt

SEQ ID NO: 144504 - DNA, 25 bp, Artificial
  Probe
cctctgctgtgaattaacttgttct

SEQ ID NO: 144505 - DNA, 25 bp, Artificial
  Probe
tgctgtgaattaacttgttctgtgt

SEQ ID NO: 144506 - DNA, 25 bp, Artificial
  Probe
ctgtgaattaacttgttctgtgtat

SEQ ID NO: 144507 - DNA, 25 bp, Artificial
  Probe
gcctctgctgtgaattaacttgttc

SEQ ID NO: 144508 - DNA, 25 bp, Artificial
  Probe
tttctttctttctcccttctcaacc

SEQ ID NO: 144509 - DNA, 25 bp, Artificial
  Probe
tgtgaattaacttgttctgtgtatt

SEQ ID NO: 144510 - DNA, 25 bp, Artificial
  Probe
aacttgttctgtgtattaaactggg

SEQ ID NO: 144511 - DNA, 25 bp, Artificial
  Probe
tgcctctgctgtgaattaacttgtt

SEQ ID NO: 144512 - DNA, 25 bp, Artificial
  Probe
acttgttctgtgtattaaactgggc

SEQ ID NO: 144513 - DNA, 25 bp, Artificial
  Probe
tttctttctcccttctcaacccttt

SEQ ID NO: 144514 - DNA, 25 bp, Artificial
  Probe
ctgcctctgctgtgaattaacttgt

SEQ ID NO: 144515 - DNA, 25 bp, Artificial
  Probe
ttctttctcccttctcaaccctttc

SEQ ID NO: 144516 - DNA, 25 bp, Artificial
  Probe
ctttctttctcccttctcaaccctt

SEQ ID NO: 144517 - DNA, 25 bp, Artificial
  Probe
ttctttctttctcccttctcaaccc

SEQ ID NO: 144518 - DNA, 25 bp, Artificial
  Probe
taacttgttctgtgtattaaactgg

SEQ ID NO: 144519 - DNA, 25 bp, Artificial
  Probe
cctgcctctgctgtgaattaacttg

SEQ ID NO: 144520 - DNA, 25 bp, Artificial
  Probe
tctttctttctcccttctcaaccct

SEQ ID NO: 144521 - DNA, 25 bp, Artificial
  Probe
tattgcctgcctctgctgtgaatta

SEQ ID NO: 144522 - DNA, 25 bp, Artificial
  Probe
ttttctttctttctcccttctcaac

SEQ ID NO: 144523 - DNA, 25 bp, Artificial
  Probe
tttctcccttctcaaccctttcctt

SEQ ID NO: 144524 - DNA, 25 bp, Artificial
  Probe
gtgaattaacttgttctgtgtatta

SEQ ID NO: 144525 - DNA, 25 bp, Artificial
  Probe
ttctcccttctcaaccctttccttc

SEQ ID NO: 144526 - DNA, 25 bp, Artificial
  Probe
ctttctcccttctcaaccctttcct

SEQ ID NO: 144527 - DNA, 25 bp, Artificial
  Probe
tctttctcccttctcaaccctttcc

SEQ ID NO: 144528 - DNA, 25 bp, Artificial
  Probe
ctgcaatgagaagaagcacagattg

SEQ ID NO: 144529 - DNA, 25 bp, Artificial
  Probe
attgcctgcctctgctgtgaattaa

SEQ ID NO: 144530 - DNA, 25 bp, Artificial
  Probe
ttattgcctgcctctgctgtgaatt

SEQ ID NO: 144531 - DNA, 25 bp, Artificial
  Probe
cttgttctgtgtattaaactgggcc

SEQ ID NO: 144532 - DNA, 25 bp, Artificial
  Probe
ttaacttgttctgtgtattaaactg

SEQ ID NO: 144533 - DNA, 25 bp, Artificial
  Probe
aagtctcctttattgcctgcctctg

SEQ ID NO: 144534 - DNA, 25 bp, Artificial
  Probe
caagtctcctttattgcctgcctct

SEQ ID NO: 144535 - DNA, 25 bp, Artificial
  Probe
tttattgcctgcctctgctgtgaat

SEQ ID NO: 144536 - DNA, 25 bp, Artificial
  Probe
gctgcaatgagaagaagcacagatt

SEQ ID NO: 144537 - DNA, 25 bp, Artificial
  Probe
ttgttctgtgtattaaactgggccg

SEQ ID NO: 144538 - DNA, 25 bp, Artificial
  Probe
caatgagaagaagcacagattgcaa

SEQ ID NO: 144539 - DNA, 25 bp, Artificial
  Probe
ccttgccaccaagtctcctttattg

SEQ ID NO: 144540 - DNA, 25 bp, Artificial
  Probe
ttctgtgtattaaactgggccggac

SEQ ID NO: 144541 - DNA, 25 bp, Artificial
  Probe
cttgccaccaagtctcctttattgc

SEQ ID NO: 144542 - DNA, 25 bp, Artificial
  Probe
gttctgtgtattaaactgggccgga

SEQ ID NO: 144543 - DNA, 25 bp, Artificial
  Probe
tgttctgtgtattaaactgggccgg

SEQ ID NO: 144544 - DNA, 25 bp, Artificial
  Probe
cccttgccaccaagtctcctttatt

SEQ ID NO: 144545 - DNA, 25 bp, Artificial
  Probe
ttgttggactgatacacctaatgat

SEQ ID NO: 144546 - DNA, 25 bp, Artificial
  Probe
attgttggactgatacacctaatga

SEQ ID NO: 144547 - DNA, 25 bp, Artificial
  Probe
tcattgttggactgatacacctaat

SEQ ID NO: 144548 - DNA, 25 bp, Artificial
  Probe
gatgagaataagaggacccacaatg

SEQ ID NO: 144549 - DNA, 25 bp, Artificial
  Probe
cattgttggactgatacacctaatg

SEQ ID NO: 144550 - DNA, 25 bp, Artificial
  Probe
atgagaataagaggacccacaatga

SEQ ID NO: 144551 - DNA, 25 bp, Artificial
  Probe
gaataagaggacccacaatgacatc

SEQ ID NO: 144552 - DNA, 25 bp, Artificial
  Probe
agaataagaggacccacaatgacat

SEQ ID NO: 144553 - DNA, 25 bp, Artificial
  Probe
ggatgagaataagaggacccacaat

SEQ ID NO: 144554 - DNA, 25 bp, Artificial
  Probe
aataagaggacccacaatgacatca

SEQ ID NO: 144555 - DNA, 25 bp, Artificial
  Probe
tttcagtttgtcttccttccttgag

SEQ ID NO: 144556 - DNA, 25 bp, Artificial
  Probe
atgacatcatccacaatgagaacat

SEQ ID NO: 144557 - DNA, 25 bp, Artificial
  Probe
caatgacatcatccacaatgagaac

SEQ ID NO: 144558 - DNA, 25 bp, Artificial
  Probe
ggataataatagcactgtggctcac

SEQ ID NO: 144559 - DNA, 25 bp, Artificial
  Probe
aatgacatcatccacaatgagaaca

SEQ ID NO: 144560 - DNA, 25 bp, Artificial
  Probe
acaatgacatcatccacaatgagaa

SEQ ID NO: 144561 - DNA, 25 bp, Artificial
  Probe
gagaataagaggacccacaatgaca

SEQ ID NO: 144562 - DNA, 25 bp, Artificial
  Probe
tgagaataagaggacccacaatgac

SEQ ID NO: 144563 - DNA, 25 bp, Artificial
  Probe
ccaatagtatcacatagtgccaaac

SEQ ID NO: 144564 - DNA, 25 bp, Artificial
  Probe
atagtatcacatagtgccaaacagg

SEQ ID NO: 144565 - DNA, 25 bp, Artificial
  Probe
cacaatgacatcatccacaatgaga

SEQ ID NO: 144566 - DNA, 25 bp, Artificial
  Probe
ataagaggacccacaatgacatcat

SEQ ID NO: 144567 - DNA, 25 bp, Artificial
  Probe
ttatgacagttgccgaatcacttcc

SEQ ID NO: 144568 - DNA, 25 bp, Artificial
  Probe
tttatgacagttgccgaatcacttc

SEQ ID NO: 144569 - DNA, 25 bp, Artificial
  Probe
caatagtatcacatagtgccaaaca

SEQ ID NO: 144570 - DNA, 25 bp, Artificial
  Probe
ccgcaccagatttacacacaataaa

SEQ ID NO: 144571 - DNA, 25 bp, Artificial
  Probe
aatagtatcacatagtgccaaacag

SEQ ID NO: 144572 - DNA, 25 bp, Artificial
  Probe
tgacatcatccacaatgagaacatg

SEQ ID NO: 144573 - DNA, 25 bp, Artificial
  Probe
taagaggacccacaatgacatcatc

SEQ ID NO: 144574 - DNA, 25 bp, Artificial
  Probe
tccgcaccagatttacacacaataa

SEQ ID NO: 144575 - DNA, 25 bp, Artificial
  Probe
ccacaatgacatcatccacaatgag

SEQ ID NO: 144576 - DNA, 25 bp, Artificial
  Probe
ctccgcaccagatttacacacaata

SEQ ID NO: 144577 - DNA, 25 bp, Artificial
  Probe
aggtgtcactcttggctctttagta

SEQ ID NO: 144578 - DNA, 25 bp, Artificial
  Probe
gacatcatccacaatgagaacatgc

SEQ ID NO: 144579 - DNA, 25 bp, Artificial
  Probe
gttttcagtttgtcttccttccttg

SEQ ID NO: 144580 - DNA, 25 bp, Artificial
  Probe
ttcagtttgtcttccttccttgagc

SEQ ID NO: 144581 - DNA, 25 bp, Artificial
  Probe
tgttttcagtttgtcttccttcctt

SEQ ID NO: 144582 - DNA, 25 bp, Artificial
  Probe
ggtgtcactcttggctctttagtac

SEQ ID NO: 144583 - DNA, 25 bp, Artificial
  Probe
cgcaccagatttacacacaataaaa

SEQ ID NO: 144584 - DNA, 25 bp, Artificial
  Probe
gcaccagatttacacacaataaaag

SEQ ID NO: 144585 - DNA, 25 bp, Artificial
  Probe
ttttcagtttgtcttccttccttga

SEQ ID NO: 144586 - DNA, 25 bp, Artificial
  Probe
gacccacaatgacatcatccacaat

SEQ ID NO: 144587 - DNA, 25 bp, Artificial
  Probe
tcactcttggctctttagtactcta

SEQ ID NO: 144588 - DNA, 25 bp, Artificial
  Probe
gggataataatagcactgtggctca

SEQ ID NO: 144589 - DNA, 25 bp, Artificial
  Probe
ttttatgacagttgccgaatcactt

SEQ ID NO: 144590 - DNA, 25 bp, Artificial
  Probe
gcaacatatcaacaagaaggagtcc

SEQ ID NO: 144591 - DNA, 25 bp, Artificial
  Probe
tctgtgactgaggctaggattatgt

SEQ ID NO: 144592 - DNA, 25 bp, Artificial
  Probe
ctctgtgactgaggctaggattatg

SEQ ID NO: 144593 - DNA, 25 bp, Artificial
  Probe
tctctgtgactgaggctaggattat

SEQ ID NO: 144594 - DNA, 25 bp, Artificial
  Probe
ctgactaagttctgtgcttcctctc

SEQ ID NO: 144595 - DNA, 25 bp, Artificial
  Probe
gatgcaacatatcaacaagaaggag

SEQ ID NO: 144596 - DNA, 25 bp, Artificial
  Probe
aacatatcaacaagaaggagtcctg

SEQ ID NO: 144597 - DNA, 25 bp, Artificial
  Probe
caacatatcaacaagaaggagtcct

SEQ ID NO: 144598 - DNA, 25 bp, Artificial
  Probe
atgcaacatatcaacaagaaggagt

SEQ ID NO: 144599 - DNA, 25 bp, Artificial
  Probe
atatcaacaagaaggagtcctggat

SEQ ID NO: 144600 - DNA, 25 bp, Artificial
  Probe
tgcaacatatcaacaagaaggagtc

SEQ ID NO: 144601 - DNA, 25 bp, Artificial
  Probe
tatcaacaagaaggagtcctggatt

SEQ ID NO: 144602 - DNA, 25 bp, Artificial
  Probe
ctgtgactgaggctaggattatgtc

SEQ ID NO: 144603 - DNA, 25 bp, Artificial
  Probe
ctctctgtgactgaggctaggatta

SEQ ID NO: 144604 - DNA, 25 bp, Artificial
  Probe
catatcaacaagaaggagtcctgga

SEQ ID NO: 144605 - DNA, 25 bp, Artificial
  Probe
gatttctcctctacctttgtcatgg

SEQ ID NO: 144606 - DNA, 25 bp, Artificial
  Probe
acatatcaacaagaaggagtcctgg

SEQ ID NO: 144607 - DNA, 25 bp, Artificial
  Probe
gactaagttctgtgcttcctctcct

SEQ ID NO: 144608 - DNA, 25 bp, Artificial
  Probe
gattatgtccctcccaaactgaagt

SEQ ID NO: 144609 - DNA, 25 bp, Artificial
  Probe
attatgtccctcccaaactgaagtg

SEQ ID NO: 144610 - DNA, 25 bp, Artificial
  Probe
atcaacaagaaggagtcctggattg

SEQ ID NO: 144611 - DNA, 25 bp, Artificial
  Probe
tggatttctcctctacctttgtcat

SEQ ID NO: 144612 - DNA, 25 bp, Artificial
  Probe
actaagttctgtgcttcctctcctg

SEQ ID NO: 144613 - DNA, 25 bp, Artificial
  Probe
tgactaagttctgtgcttcctctcc

SEQ ID NO: 144614 - DNA, 25 bp, Artificial
  Probe
cctgactaagttctgtgcttcctct

SEQ ID NO: 144615 - DNA, 25 bp, Artificial
  Probe
cccaagaatgaaccctgactaagtt

SEQ ID NO: 144616 - DNA, 25 bp, Artificial
  Probe
ctggatttctcctctacctttgtca

SEQ ID NO: 144617 - DNA, 25 bp, Artificial
  Probe
ggatttctcctctacctttgtcatg

SEQ ID NO: 144618 - DNA, 25 bp, Artificial
  Probe
ctgatgcaacatatcaacaagaagg

SEQ ID NO: 144619 - DNA, 25 bp, Artificial
  Probe
cctgatgcaacatatcaacaagaag

SEQ ID NO: 144620 - DNA, 25 bp, Artificial
  Probe
cttcctgatgcaacatatcaacaag

SEQ ID NO: 144621 - DNA, 25 bp, Artificial
  Probe
tgatgcaacatatcaacaagaagga

SEQ ID NO: 144622 - DNA, 25 bp, Artificial
  Probe
tcctgatgcaacatatcaacaagaa

SEQ ID NO: 144623 - DNA, 25 bp, Artificial
  Probe
ttcctgatgcaacatatcaacaaga

SEQ ID NO: 144624 - DNA, 25 bp, Artificial
  Probe
tgtgactgaggctaggattatgtcc

SEQ ID NO: 144625 - DNA, 25 bp, Artificial
  Probe
atttctcctctacctttgtcatgga

SEQ ID NO: 144626 - DNA, 25 bp, Artificial
  Probe
gattggtctccaggatctcaacatg

SEQ ID NO: 144627 - DNA, 25 bp, Artificial
  Probe
ttctcctctacctttgtcatggaaa

SEQ ID NO: 144628 - DNA, 25 bp, Artificial
  Probe
tttctcctctacctttgtcatggaa

SEQ ID NO: 144629 - DNA, 25 bp, Artificial
  Probe
acttcctgatgcaacatatcaacaa

SEQ ID NO: 144630 - DNA, 25 bp, Artificial
  Probe
ctcctggatttctcctctacctttg

SEQ ID NO: 144631 - DNA, 25 bp, Artificial
  Probe
tctcctggatttctcctctaccttt

SEQ ID NO: 144632 - DNA, 25 bp, Artificial
  Probe
gacttcctgatgcaacatatcaaca

SEQ ID NO: 144633 - DNA, 25 bp, Artificial
  Probe
ctaggattatgtccctcccaaactg

SEQ ID NO: 144634 - DNA, 25 bp, Artificial
  Probe
cttcctctcctggatttctcctcta

SEQ ID NO: 144635 - DNA, 25 bp, Artificial
  Probe
taatatgcagaagggatgggtgata

SEQ ID NO: 144636 - DNA, 25 bp, Artificial
  Probe
tgaagatacaagttttagccacagt

SEQ ID NO: 144637 - DNA, 25 bp, Artificial
  Probe
gaagatacaagttttagccacagtg

SEQ ID NO: 144638 - DNA, 25 bp, Artificial
  Probe
gttgaagatacaagttttagccaca

SEQ ID NO: 144639 - DNA, 25 bp, Artificial
  Probe
aggttgaagatacaagttttagcca

SEQ ID NO: 144640 - DNA, 25 bp, Artificial
  Probe
ggttgaagatacaagttttagccac

SEQ ID NO: 144641 - DNA, 25 bp, Artificial
  Probe
ttgaagatacaagttttagccacag

SEQ ID NO: 144642 - DNA, 25 bp, Artificial
  Probe
aaggttgaagatacaagttttagcc

SEQ ID NO: 144643 - DNA, 25 bp, Artificial
  Probe
aagatacaagttttagccacagtgt

SEQ ID NO: 144644 - DNA, 25 bp, Artificial
  Probe
aaaggttgaagatacaagttttagc

SEQ ID NO: 144645 - DNA, 25 bp, Artificial
  Probe
agcttttcattgtgtttggtcttac

SEQ ID NO: 144646 - DNA, 25 bp, Artificial
  Probe
tgcaataaaactggttatgacttga

SEQ ID NO: 144647 - DNA, 25 bp, Artificial
  Probe
atgcatgtttctgtatgttaatgac

SEQ ID NO: 144648 - DNA, 25 bp, Artificial
  Probe
tgatgcatgtttctgtatgttaatg

SEQ ID NO: 144649 - DNA, 25 bp, Artificial
  Probe
catcatgcccaaagacatccagttg

SEQ ID NO: 144650 - DNA, 25 bp, Artificial
  Probe
gatgcatgtttctgtatgttaatga

SEQ ID NO: 144651 - DNA, 25 bp, Artificial
  Probe
caaaggttgaagatacaagttttag

SEQ ID NO: 144652 - DNA, 25 bp, Artificial
  Probe
aagagagtcaccatcatgcccaaag

SEQ ID NO: 144653 - DNA, 25 bp, Artificial
  Probe
atgatgcatgtttctgtatgttaat

SEQ ID NO: 144654 - DNA, 25 bp, Artificial
  Probe
caagagagtcaccatcatgcccaaa

SEQ ID NO: 144655 - DNA, 25 bp, Artificial
  Probe
tgcttttccttgtggagtttataaa

SEQ ID NO: 144656 - DNA, 25 bp, Artificial
  Probe
agtcaccatcatgcccaaagacatc

SEQ ID NO: 144657 - DNA, 25 bp, Artificial
  Probe
gagtcaccatcatgcccaaagacat

SEQ ID NO: 144658 - DNA, 25 bp, Artificial
  Probe
ctcatgatgcatgtttctgtatgtt

SEQ ID NO: 144659 - DNA, 25 bp, Artificial
  Probe
tcatgatgcatgtttctgtatgtta

SEQ ID NO: 144660 - DNA, 25 bp, Artificial
  Probe
ttgcaataaaactggttatgacttg

SEQ ID NO: 144661 - DNA, 25 bp, Artificial
  Probe
catgatgcatgtttctgtatgttaa

SEQ ID NO: 144662 - DNA, 25 bp, Artificial
  Probe
tttgcaataaaactggttatgactt

SEQ ID NO: 144663 - DNA, 25 bp, Artificial
  Probe
ttttgcaataaaactggttatgact

SEQ ID NO: 144664 - DNA, 25 bp, Artificial
  Probe
cttttgcaataaaactggttatgac

SEQ ID NO: 144665 - DNA, 25 bp, Artificial
  Probe
gtgatgcctaatctctatggtaaca

SEQ ID NO: 144666 - DNA, 25 bp, Artificial
  Probe
ggtgatgcctaatctctatggtaac

SEQ ID NO: 144667 - DNA, 25 bp, Artificial
  Probe
atggtgatgcctaatctctatggta

SEQ ID NO: 144668 - DNA, 25 bp, Artificial
  Probe
tggtgatgcctaatctctatggtaa

SEQ ID NO: 144669 - DNA, 25 bp, Artificial
  Probe
tgcctaatctctatggtaacattgt

SEQ ID NO: 144670 - DNA, 25 bp, Artificial
  Probe
tgatgcctaatctctatggtaacat

SEQ ID NO: 144671 - DNA, 25 bp, Artificial
  Probe
gcctaatctctatggtaacattgtc

SEQ ID NO: 144672 - DNA, 25 bp, Artificial
  Probe
atgcctaatctctatggtaacattg

SEQ ID NO: 144673 - DNA, 25 bp, Artificial
  Probe
gatgcctaatctctatggtaacatt

SEQ ID NO: 144674 - DNA, 25 bp, Artificial
  Probe
ctctatggtaacattgtcaacaacg

SEQ ID NO: 144675 - DNA, 25 bp, Artificial
  Probe
aatctctatggtaacattgtcaaca

SEQ ID NO: 144676 - DNA, 25 bp, Artificial
  Probe
tctctatggtaacattgtcaacaac

SEQ ID NO: 144677 - DNA, 25 bp, Artificial
  Probe
gtcatggtgatgcctaatctctatg

SEQ ID NO: 144678 - DNA, 25 bp, Artificial
  Probe
cctaatctctatggtaacattgtca

SEQ ID NO: 144679 - DNA, 25 bp, Artificial
  Probe
tgtcatggtgatgcctaatctctat

SEQ ID NO: 144680 - DNA, 25 bp, Artificial
  Probe
atgtcatggtgatgcctaatctcta

SEQ ID NO: 144681 - DNA, 25 bp, Artificial
  Probe
atctctatggtaacattgtcaacaa

SEQ ID NO: 144682 - DNA, 25 bp, Artificial
  Probe
catggtgatgcctaatctctatggt

SEQ ID NO: 144683 - DNA, 25 bp, Artificial
  Probe
tcatggtgatgcctaatctctatgg

SEQ ID NO: 144684 - DNA, 25 bp, Artificial
  Probe
ttgatgtcatggtgatgcctaatct

SEQ ID NO: 144685 - DNA, 25 bp, Artificial
  Probe
atgttgcatgttaagtcggtattca

SEQ ID NO: 144686 - DNA, 25 bp, Artificial
  Probe
tctatggtaacattgtcaacaacgt

SEQ ID NO: 144687 - DNA, 25 bp, Artificial
  Probe
gatgtcatggtgatgcctaatctct

SEQ ID NO: 144688 - DNA, 25 bp, Artificial
  Probe
tgttgcatgttaagtcggtattcag

SEQ ID NO: 144689 - DNA, 25 bp, Artificial
  Probe
agtggtggagagcttgaagattatc

SEQ ID NO: 144690 - DNA, 25 bp, Artificial
  Probe
gagtggtggagagcttgaagattat

SEQ ID NO: 144691 - DNA, 25 bp, Artificial
  Probe
tgatgtcatggtgatgcctaatctc

SEQ ID NO: 144692 - DNA, 25 bp, Artificial
  Probe
taatctctatggtaacattgtcaac

SEQ ID NO: 144693 - DNA, 25 bp, Artificial
  Probe
ggcatacagtgactatgattccagg

SEQ ID NO: 144694 - DNA, 25 bp, Artificial
  Probe
gttgcatgttaagtcggtattcagg

SEQ ID NO: 144695 - DNA, 25 bp, Artificial
  Probe
gtggtggagagcttgaagattatca

SEQ ID NO: 144696 - DNA, 25 bp, Artificial
  Probe
cggcatacagtgactatgattccag

SEQ ID NO: 144697 - DNA, 25 bp, Artificial
  Probe
ctaatctctatggtaacattgtcaa

SEQ ID NO: 144698 - DNA, 25 bp, Artificial
  Probe
cttcgtaccagcctagacctctatg

SEQ ID NO: 144699 - DNA, 25 bp, Artificial
  Probe
tttgatgtcatggtgatgcctaatc

SEQ ID NO: 144700 - DNA, 25 bp, Artificial
  Probe
tggtggagagcttgaagattatcac

SEQ ID NO: 144701 - DNA, 25 bp, Artificial
  Probe
gtttgatgtcatggtgatgcctaat

SEQ ID NO: 144702 - DNA, 25 bp, Artificial
  Probe
ctaaagggcaacatcgaaacaaatc

SEQ ID NO: 144703 - DNA, 25 bp, Artificial
  Probe
gcatgttaagtcggtattcaggcat

SEQ ID NO: 144704 - DNA, 25 bp, Artificial
  Probe
tctaaagggcaacatcgaaacaaat

SEQ ID NO: 144705 - DNA, 25 bp, Artificial
  Probe
gtggagagcttgaagattatcacca

SEQ ID NO: 144706 - DNA, 25 bp, Artificial
  Probe
acctttgatagcatgattgtggaca

SEQ ID NO: 144707 - DNA, 25 bp, Artificial
  Probe
taaagggcaacatcgaaacaaatca

SEQ ID NO: 144708 - DNA, 25 bp, Artificial
  Probe
ctctaaagggcaacatcgaaacaaa

SEQ ID NO: 144709 - DNA, 25 bp, Artificial
  Probe
agtttgatgtcatggtgatgcctaa

SEQ ID NO: 144710 - DNA, 25 bp, Artificial
  Probe
ctctcttccatacctgatacattcc

SEQ ID NO: 144711 - DNA, 25 bp, Artificial
  Probe
cctctcttccatacctgatacattc

SEQ ID NO: 144712 - DNA, 25 bp, Artificial
  Probe
cattcctctcttccatacctgatac

SEQ ID NO: 144713 - DNA, 25 bp, Artificial
  Probe
ttcattcattcctctcttccatacc

SEQ ID NO: 144714 - DNA, 25 bp, Artificial
  Probe
tctcttccatacctgatacattcct

SEQ ID NO: 144715 - DNA, 25 bp, Artificial
  Probe
tcctctcttccatacctgatacatt

SEQ ID NO: 144716 - DNA, 25 bp, Artificial
  Probe
ttcctctcttccatacctgatacat

SEQ ID NO: 144717 - DNA, 25 bp, Artificial
  Probe
attcctctcttccatacctgataca

SEQ ID NO: 144718 - DNA, 25 bp, Artificial
  Probe
ctcttccatacctgatacattcctt

SEQ ID NO: 144719 - DNA, 25 bp, Artificial
  Probe
cattcattcctctcttccatacctg

SEQ ID NO: 144720 - DNA, 25 bp, Artificial
  Probe
tcattcattcctctcttccatacct

SEQ ID NO: 144721 - DNA, 25 bp, Artificial
  Probe
tcattcctctcttccatacctgata

SEQ ID NO: 144722 - DNA, 25 bp, Artificial
  Probe
ttcattcctctcttccatacctgat

SEQ ID NO: 144723 - DNA, 25 bp, Artificial
  Probe
attcattcctctcttccatacctga

SEQ ID NO: 144724 - DNA, 25 bp, Artificial
  Probe
ttcctaacaactatgtcaccaagat

SEQ ID NO: 144725 - DNA, 25 bp, Artificial
  Probe
tcctaacaactatgtcaccaagatc

SEQ ID NO: 144726 - DNA, 25 bp, Artificial
  Probe
tccatacctgatacattcctttctg

SEQ ID NO: 144727 - DNA, 25 bp, Artificial
  Probe
catacctgatacattcctttctgct

SEQ ID NO: 144728 - DNA, 25 bp, Artificial
  Probe
acctgatacattcctttctgctaac

SEQ ID NO: 144729 - DNA, 25 bp, Artificial
  Probe
ctactccaaggtctgaagctattct

SEQ ID NO: 144730 - DNA, 25 bp, Artificial
  Probe
cctacctcctcaataaatgtaacgg

SEQ ID NO: 144731 - DNA, 25 bp, Artificial
  Probe
ccctacctcctcaataaatgtaacg

SEQ ID NO: 144732 - DNA, 25 bp, Artificial
  Probe
tacctgatacattcctttctgctaa

SEQ ID NO: 144733 - DNA, 25 bp, Artificial
  Probe
ttccatacctgatacattcctttct

SEQ ID NO: 144734 - DNA, 25 bp, Artificial
  Probe
tcttccatacctgatacattccttt

SEQ ID NO: 144735 - DNA, 25 bp, Artificial
  Probe
gatacattcctttctgctaaccctc

SEQ ID NO: 144736 - DNA, 25 bp, Artificial
  Probe
tactccaaggtctgaagctattctg

SEQ ID NO: 144737 - DNA, 25 bp, Artificial
  Probe
atacctgatacattcctttctgcta

SEQ ID NO: 144738 - DNA, 25 bp, Artificial
  Probe
cttccatacctgatacattcctttc

SEQ ID NO: 144739 - DNA, 25 bp, Artificial
  Probe
cgtttcattcattcctctcttccat

SEQ ID NO: 144740 - DNA, 25 bp, Artificial
  Probe
ctgatacattcctttctgctaaccc

SEQ ID NO: 144741 - DNA, 25 bp, Artificial
  Probe
cctgatacattcctttctgctaacc

SEQ ID NO: 144742 - DNA, 25 bp, Artificial
  Probe
ccatacctgatacattcctttctgc

SEQ ID NO: 144743 - DNA, 25 bp, Artificial
  Probe
aacaaccacccactaagatttattt

SEQ ID NO: 144744 - DNA, 25 bp, Artificial
  Probe
aaacaaccacccactaagatttatt

SEQ ID NO: 144745 - DNA, 25 bp, Artificial
  Probe
tgatacattcctttctgctaaccct

SEQ ID NO: 144746 - DNA, 25 bp, Artificial
  Probe
tttcattcattcctctcttccatac

SEQ ID NO: 144747 - DNA, 25 bp, Artificial
  Probe
gtttcattcattcctctcttccata

SEQ ID NO: 144748 - DNA, 25 bp, Artificial
  Probe
ctttcccttggtctttgcttgtaat

SEQ ID NO: 144749 - DNA, 25 bp, Artificial
  Probe
tttcctaacaactatgtcaccaaga

SEQ ID NO: 144750 - DNA, 25 bp, Artificial
  Probe
gtttcctaacaactatgtcaccaag

SEQ ID NO: 144751 - DNA, 25 bp, Artificial
  Probe
tttcccttggtctttgcttgtaatg

SEQ ID NO: 144752 - DNA, 25 bp, Artificial
  Probe
acaaccacccactaagatttattta

SEQ ID NO: 144753 - DNA, 25 bp, Artificial
  Probe
atacattcctttctgctaaccctcc

SEQ ID NO: 144754 - DNA, 25 bp, Artificial
  Probe
agtttcactccgtaaatgatcctaa

SEQ ID NO: 144755 - DNA, 25 bp, Artificial
  Probe
cttcggattcctcttggtgatattc

SEQ ID NO: 144756 - DNA, 25 bp, Artificial
  Probe
tcttcggattcctcttggtgatatt

SEQ ID NO: 144757 - DNA, 25 bp, Artificial
  Probe
ttcttcggattcctcttggtgatat

SEQ ID NO: 144758 - DNA, 25 bp, Artificial
  Probe
gttcttcggattcctcttggtgata

SEQ ID NO: 144759 - DNA, 25 bp, Artificial
  Probe
aactaatcattccagcttctacaca

SEQ ID NO: 144760 - DNA, 25 bp, Artificial
  Probe
actaatcattccagcttctacacag

SEQ ID NO: 144761 - DNA, 25 bp, Artificial
  Probe
ctaatcattccagcttctacacagg

SEQ ID NO: 144762 - DNA, 25 bp, Artificial
  Probe
ttcggattcctcttggtgatattcg

SEQ ID NO: 144763 - DNA, 25 bp, Artificial
  Probe
tacctgctctttggatttaacttca

SEQ ID NO: 144764 - DNA, 25 bp, Artificial
  Probe
tttggatttaacttcatcttctggc

SEQ ID NO: 144765 - DNA, 25 bp, Artificial
  Probe
cctgctctttggatttaacttcatc

SEQ ID NO: 144766 - DNA, 25 bp, Artificial
  Probe
ttggatttaacttcatcttctggct

SEQ ID NO: 144767 - DNA, 25 bp, Artificial
  Probe
acctgctctttggatttaacttcat

SEQ ID NO: 144768 - DNA, 25 bp, Artificial
  Probe
ctgctctttggatttaacttcatct

SEQ ID NO: 144769 - DNA, 25 bp, Artificial
  Probe
gattgttcttcggattcctcttggt

SEQ ID NO: 144770 - DNA, 25 bp, Artificial
  Probe
atacctgctctttggatttaacttc

SEQ ID NO: 144771 - DNA, 25 bp, Artificial
  Probe
tggatttaacttcatcttctggctc

SEQ ID NO: 144772 - DNA, 25 bp, Artificial
  Probe
tgctctttggatttaacttcatctt

SEQ ID NO: 144773 - DNA, 25 bp, Artificial
  Probe
aatacctgctctttggatttaactt

SEQ ID NO: 144774 - DNA, 25 bp, Artificial
  Probe
attgttcttcggattcctcttggtg

SEQ ID NO: 144775 - DNA, 25 bp, Artificial
  Probe
gctctttggatttaacttcatcttc

SEQ ID NO: 144776 - DNA, 25 bp, Artificial
  Probe
cttggtgatattcgccattgagatc

SEQ ID NO: 144777 - DNA, 25 bp, Artificial
  Probe
tcttggtgatattcgccattgagat

SEQ ID NO: 144778 - DNA, 25 bp, Artificial
  Probe
ggatttaacttcatcttctggctcg

SEQ ID NO: 144779 - DNA, 25 bp, Artificial
  Probe
taatcattccagcttctacacagga

SEQ ID NO: 144780 - DNA, 25 bp, Artificial
  Probe
ctttggatttaacttcatcttctgg

SEQ ID NO: 144781 - DNA, 25 bp, Artificial
  Probe
attcctcttggtgatattcgccatt

SEQ ID NO: 144782 - DNA, 25 bp, Artificial
  Probe
aaatacctgctctttggatttaact

SEQ ID NO: 144783 - DNA, 25 bp, Artificial
  Probe
caggttgtaagttatattgaagaca

SEQ ID NO: 144784 - DNA, 25 bp, Artificial
  Probe
gatttaacttcatcttctggctcgc

SEQ ID NO: 144785 - DNA, 25 bp, Artificial
  Probe
tcaggttgtaagttatattgaagac

SEQ ID NO: 144786 - DNA, 25 bp, Artificial
  Probe
aatgaaaggtactgtatttgccaga

SEQ ID NO: 144787 - DNA, 25 bp, Artificial
  Probe
caatgaaaggtactgtatttgccag

SEQ ID NO: 144788 - DNA, 25 bp, Artificial
  Probe
ctcttggtgatattcgccattgaga

SEQ ID NO: 144789 - DNA, 25 bp, Artificial
  Probe
gattcctcttggtgatattcgccat

SEQ ID NO: 144790 - DNA, 25 bp, Artificial
  Probe
aaactaatcattccagcttctacac

SEQ ID NO: 144791 - DNA, 25 bp, Artificial
  Probe
atgaaaggtactgtatttgccagac

SEQ ID NO: 144792 - DNA, 25 bp, Artificial
  Probe
tgttcttcggattcctcttggtgat

SEQ ID NO: 144793 - DNA, 25 bp, Artificial
  Probe
gcaagaaactaatcattccagcttc

SEQ ID NO: 144794 - DNA, 25 bp, Artificial
  Probe
cttcgagcaagaaactaatcattcc

SEQ ID NO: 144795 - DNA, 25 bp, Artificial
  Probe
cgagcaagaaactaatcattccagc

SEQ ID NO: 144796 - DNA, 25 bp, Artificial
  Probe
ttcgagcaagaaactaatcattcca

SEQ ID NO: 144797 - DNA, 25 bp, Artificial
  Probe
gaaaggtactgtatttgccagactc

SEQ ID NO: 144798 - DNA, 25 bp, Artificial
  Probe
ttgttcttcggattcctcttggtga

SEQ ID NO: 144799 - DNA, 25 bp, Artificial
  Probe
gaaactaatcattccagcttctaca

SEQ ID NO: 144800 - DNA, 25 bp, Artificial
  Probe
agagtgtgtgtatgaatgtgtgtat

SEQ ID NO: 144801 - DNA, 25 bp, Artificial
  Probe
gagagtgtgtgtatgaatgtgtgta

SEQ ID NO: 144802 - DNA, 25 bp, Artificial
  Probe
ccaacactcataacttccagaataa

SEQ ID NO: 144803 - DNA, 25 bp, Artificial
  Probe
aacactcataacttccagaataagc

SEQ ID NO: 144804 - DNA, 25 bp, Artificial
  Probe
gagtgtgtgtatgaatgtgtgtata

SEQ ID NO: 144805 - DNA, 25 bp, Artificial
  Probe
tcattgacttcttctctatcatcgc

SEQ ID NO: 144806 - DNA, 25 bp, Artificial
  Probe
tgtgtgtatgaatgtgtgtatatgt

SEQ ID NO: 144807 - DNA, 25 bp, Artificial
  Probe
tcagttgaccaatgagttgtaagac

SEQ ID NO: 144808 - DNA, 25 bp, Artificial
  Probe
gtgagagtgtgtgtatgaatgtgtg

SEQ ID NO: 144809 - DNA, 25 bp, Artificial
  Probe
atgtgtgtatatgtctgtatgtgtt

SEQ ID NO: 144810 - DNA, 25 bp, Artificial
  Probe
aatgtgtgtatatgtctgtatgtgt

SEQ ID NO: 144811 - DNA, 25 bp, Artificial
  Probe
gtgtgtgtatgaatgtgtgtatatg

SEQ ID NO: 144812 - DNA, 25 bp, Artificial
  Probe
agtgtgtgtatgaatgtgtgtatat

SEQ ID NO: 144813 - DNA, 25 bp, Artificial
  Probe
cattgacttcttctctatcatcgcc

SEQ ID NO: 144814 - DNA, 25 bp, Artificial
  Probe
gaccaatgagttgtaagacaggatt

SEQ ID NO: 144815 - DNA, 25 bp, Artificial
  Probe
agttgaccaatgagttgtaagacag

SEQ ID NO: 144816 - DNA, 25 bp, Artificial
  Probe
tgagagtgtgtgtatgaatgtgtgt

SEQ ID NO: 144817 - DNA, 25 bp, Artificial
  Probe
tatgcgtgagagtgtgtgtatgaat

SEQ ID NO: 144818 - DNA, 25 bp, Artificial
  Probe
ttcattgacttcttctctatcatcg

SEQ ID NO: 144819 - DNA, 25 bp, Artificial
  Probe
gtgtgtatgaatgtgtgtatatgtc

SEQ ID NO: 144820 - DNA, 25 bp, Artificial
  Probe
tgaatgtgtgtatatgtctgtatgt

SEQ ID NO: 144821 - DNA, 25 bp, Artificial
  Probe
tgtatgaatgtgtgtatatgtctgt

SEQ ID NO: 144822 - DNA, 25 bp, Artificial
  Probe
tgtgtatgaatgtgtgtatatgtct

SEQ ID NO: 144823 - DNA, 25 bp, Artificial
  Probe
cagttgaccaatgagttgtaagaca

SEQ ID NO: 144824 - DNA, 25 bp, Artificial
  Probe
gaatgtgtgtatatgtctgtatgtg

SEQ ID NO: 144825 - DNA, 25 bp, Artificial
  Probe
gtgtatgaatgtgtgtatatgtctg

SEQ ID NO: 144826 - DNA, 25 bp, Artificial
  Probe
tgaccaatgagttgtaagacaggat

SEQ ID NO: 144827 - DNA, 25 bp, Artificial
  Probe
caacactcataacttccagaataag

SEQ ID NO: 144828 - DNA, 25 bp, Artificial
  Probe
atgagaatccacagaagaacctgat

SEQ ID NO: 144829 - DNA, 25 bp, Artificial
  Probe
acactcataacttccagaataagct

SEQ ID NO: 144830 - DNA, 25 bp, Artificial
  Probe
ttgaccaatgagttgtaagacagga

SEQ ID NO: 144831 - DNA, 25 bp, Artificial
  Probe
gttgaccaatgagttgtaagacagg

SEQ ID NO: 144832 - DNA, 25 bp, Artificial
  Probe
gtcttcttcattgacttcttctcta

SEQ ID NO: 144833 - DNA, 25 bp, Artificial
  Probe
cccaacactcataacttccagaata

SEQ ID NO: 144834 - DNA, 25 bp, Artificial
  Probe
tcttcttcattgacttcttctctat

SEQ ID NO: 144835 - DNA, 25 bp, Artificial
  Probe
gtatgcgtgagagtgtgtgtatgaa

SEQ ID NO: 144836 - DNA, 25 bp, Artificial
  Probe
gatcctgagagagaatcatgcttca

SEQ ID NO: 144837 - DNA, 25 bp, Artificial
  Probe
cgtgagagtgtgtgtatgaatgtgt

SEQ ID NO: 144838 - DNA, 25 bp, Artificial
  Probe
tgatagaagaaattagcaccatcct

SEQ ID NO: 144839 - DNA, 25 bp, Artificial
  Probe
ttcttcattgacttcttctctatca

SEQ ID NO: 144840 - DNA, 25 bp, Artificial
  Probe
tgagaatccacagaagaacctgatg

SEQ ID NO: 144841 - DNA, 25 bp, Artificial
  Probe
gtattgagatgctcctgtccaactt

SEQ ID NO: 144842 - DNA, 25 bp, Artificial
  Probe
ttctacaaagacctgaaccaaagat

SEQ ID NO: 144843 - DNA, 25 bp, Artificial
  Probe
attctacaaagacctgaaccaaaga

SEQ ID NO: 144844 - DNA, 25 bp, Artificial
  Probe
gtcgtctgtgtcattgaaatcattg

SEQ ID NO: 144845 - DNA, 25 bp, Artificial
  Probe
cattaactgtctgatgagagcaatt

SEQ ID NO: 144846 - DNA, 25 bp, Artificial
  Probe
ccattaactgtctgatgagagcaat

SEQ ID NO: 144847 - DNA, 25 bp, Artificial
  Probe
atctatgagacagaactggtggatg

SEQ ID NO: 144848 - DNA, 25 bp, Artificial
  Probe
gatctatgagacagaactggtggat

SEQ ID NO: 144849 - DNA, 25 bp, Artificial
  Probe
tatgagacagaactggtggatgtag

SEQ ID NO: 144850 - DNA, 25 bp, Artificial
  Probe
ctatgagacagaactggtggatgta

SEQ ID NO: 144851 - DNA, 25 bp, Artificial
  Probe
tctacgaatcaagaagaccattcag

SEQ ID NO: 144852 - DNA, 25 bp, Artificial
  Probe
gaaggaatatgactccatctccaga

SEQ ID NO: 144853 - DNA, 25 bp, Artificial
  Probe
aaggaatatgactccatctccagac

SEQ ID NO: 144854 - DNA, 25 bp, Artificial
  Probe
tgaaggaatatgactccatctccag

SEQ ID NO: 144855 - DNA, 25 bp, Artificial
  Probe
ctacacagagtcggtgaaggaatat

SEQ ID NO: 144856 - DNA, 25 bp, Artificial
  Probe
ctacgaatcaagaagaccattcagg

SEQ ID NO: 144857 - DNA, 25 bp, Artificial
  Probe
gtgaaggaatatgactccatctcca

SEQ ID NO: 144858 - DNA, 25 bp, Artificial
  Probe
tacacagagtcggtgaaggaatatg

SEQ ID NO: 144859 - DNA, 25 bp, Artificial
  Probe
ttaccaccatgcttctacgaatcaa

SEQ ID NO: 144860 - DNA, 25 bp, Artificial
  Probe
taccagaaggctatcgacatctatg

SEQ ID NO: 144861 - DNA, 25 bp, Artificial
  Probe
gtaccagaaggctatcgacatctat

SEQ ID NO: 144862 - DNA, 25 bp, Artificial
  Probe
gacagaactggtggatgtagagaag

SEQ ID NO: 144863 - DNA, 25 bp, Artificial
  Probe
ggaatatgactccatctccagactg

SEQ ID NO: 144864 - DNA, 25 bp, Artificial
  Probe
aggaatatgactccatctccagact

SEQ ID NO: 144865 - DNA, 25 bp, Artificial
  Probe
ttctacgaatcaagaagaccattca

SEQ ID NO: 144866 - DNA, 25 bp, Artificial
  Probe
agacagaactggtggatgtagagaa

SEQ ID NO: 144867 - DNA, 25 bp, Artificial
  Probe
ggtgaaggaatatgactccatctcc

SEQ ID NO: 144868 - DNA, 25 bp, Artificial
  Probe
taccaccatgcttctacgaatcaag

SEQ ID NO: 144869 - DNA, 25 bp, Artificial
  Probe
cttaccaccatgcttctacgaatca

SEQ ID NO: 144870 - DNA, 25 bp, Artificial
  Probe
atgagacagaactggtggatgtaga

SEQ ID NO: 144871 - DNA, 25 bp, Artificial
  Probe
tctatgagacagaactggtggatgt

SEQ ID NO: 144872 - DNA, 25 bp, Artificial
  Probe
gccattaactgtctgatgagagcaa

SEQ ID NO: 144873 - DNA, 25 bp, Artificial
  Probe
ccagaaggctatcgacatctatgag

SEQ ID NO: 144874 - DNA, 25 bp, Artificial
  Probe
agtaccagaaggctatcgacatcta

SEQ ID NO: 144875 - DNA, 25 bp, Artificial
  Probe
cggtgaaggaatatgactccatctc

SEQ ID NO: 144876 - DNA, 25 bp, Artificial
  Probe
gcagactactacaaaggagaagagt

SEQ ID NO: 144877 - DNA, 25 bp, Artificial
  Probe
gagacagaactggtggatgtagaga

SEQ ID NO: 144878 - DNA, 25 bp, Artificial
  Probe
gtcggtgaaggaatatgactccatc

SEQ ID NO: 144879 - DNA, 25 bp, Artificial
  Probe
cacagagtcggtgaaggaatatgac

SEQ ID NO: 144880 - DNA, 25 bp, Artificial
  Probe
tcggtgaaggaatatgactccatct

SEQ ID NO: 144881 - DNA, 25 bp, Artificial
  Probe
ctactacaaaggagaagagtccaac

SEQ ID NO: 144882 - DNA, 25 bp, Artificial
  Probe
tgagacagaactggtggatgtagag

SEQ ID NO: 144883 - DNA, 25 bp, Artificial
  Probe
ctgttcagaagtatgaggagctgtt

SEQ ID NO: 144884 - DNA, 25 bp, Artificial
  Probe
accagaaggctatcgacatctatga

SEQ ID NO: 144885 - DNA, 25 bp, Artificial
  Probe
actactacaaaggagaagagtccaa

SEQ ID NO: 144886 - DNA, 25 bp, Artificial
  Probe
tatacagacatgggcagattcacaa

SEQ ID NO: 144887 - DNA, 25 bp, Artificial
  Probe
gcttgctgttcagaagtatgaggag

SEQ ID NO: 144888 - DNA, 25 bp, Artificial
  Probe
tactacaaaggagaagagtccaaca

SEQ ID NO: 144889 - DNA, 25 bp, Artificial
  Probe
tgttcagaagtatgaggagctgttc

SEQ ID NO: 144890 - DNA, 25 bp, Artificial
  Probe
ttctgttccttgtgtaattgtgttg

SEQ ID NO: 144891 - DNA, 25 bp, Artificial
  Probe
gttctgttccttgtgtaattgtgtt

SEQ ID NO: 144892 - DNA, 25 bp, Artificial
  Probe
gactgttctgttccttgtgtaattg

SEQ ID NO: 144893 - DNA, 25 bp, Artificial
  Probe
ctgttctgttccttgtgtaattgtg

SEQ ID NO: 144894 - DNA, 25 bp, Artificial
  Probe
actgttctgttccttgtgtaattgt

SEQ ID NO: 144895 - DNA, 25 bp, Artificial
  Probe
tgttctgttccttgtgtaattgtgt

SEQ ID NO: 144896 - DNA, 25 bp, Artificial
  Probe
gagactgttctgttccttgtgtaat

SEQ ID NO: 144897 - DNA, 25 bp, Artificial
  Probe
agactgttctgttccttgtgtaatt

SEQ ID NO: 144898 - DNA, 25 bp, Artificial
  Probe
agagactgttctgttccttgtgtaa

SEQ ID NO: 144899 - DNA, 25 bp, Artificial
  Probe
gactattgaaggagcctaaccatct

SEQ ID NO: 144900 - DNA, 25 bp, Artificial
  Probe
ttccttgtgtaattgtgttgctgaa

SEQ ID NO: 144901 - DNA, 25 bp, Artificial
  Probe
actattgaaggagcctaaccatctg

SEQ ID NO: 144902 - DNA, 25 bp, Artificial
  Probe
gagagactgttctgttccttgtgta

SEQ ID NO: 144903 - DNA, 25 bp, Artificial
  Probe
gttccttgtgtaattgtgttgctga

SEQ ID NO: 144904 - DNA, 25 bp, Artificial
  Probe
ctgttccttgtgtaattgtgttgct

SEQ ID NO: 144905 - DNA, 25 bp, Artificial
  Probe
tctgttccttgtgtaattgtgttgc

SEQ ID NO: 144906 - DNA, 25 bp, Artificial
  Probe
tgttccttgtgtaattgtgttgctg

SEQ ID NO: 144907 - DNA, 25 bp, Artificial
  Probe
ggactattgaaggagcctaaccatc

SEQ ID NO: 144908 - DNA, 25 bp, Artificial
  Probe
ctattgaaggagcctaaccatctgg

SEQ ID NO: 144909 - DNA, 25 bp, Artificial
  Probe
ttgtgtaattgtgttgctgaaagac

SEQ ID NO: 144910 - DNA, 25 bp, Artificial
  Probe
cttgtgtaattgtgttgctgaaaga

SEQ ID NO: 144911 - DNA, 25 bp, Artificial
  Probe
tgtgtaattgtgttgctgaaagact

SEQ ID NO: 144912 - DNA, 25 bp, Artificial
  Probe
ttctcggactattgaaggagcctaa

SEQ ID NO: 144913 - DNA, 25 bp, Artificial
  Probe
ccttgtgtaattgtgttgctgaaag

SEQ ID NO: 144914 - DNA, 25 bp, Artificial
  Probe
tccttgtgtaattgtgttgctgaaa

SEQ ID NO: 144915 - DNA, 25 bp, Artificial
  Probe
agacaatttcacatggactttggaa

SEQ ID NO: 144916 - DNA, 25 bp, Artificial
  Probe
tctcggactattgaaggagcctaac

SEQ ID NO: 144917 - DNA, 25 bp, Artificial
  Probe
gttctcggactattgaaggagccta

SEQ ID NO: 144918 - DNA, 25 bp, Artificial
  Probe
ttgaagacctatgtgggtataagtc

SEQ ID NO: 144919 - DNA, 25 bp, Artificial
  Probe
cttgaagacctatgtgggtataagt

SEQ ID NO: 144920 - DNA, 25 bp, Artificial
  Probe
acattgggttctcggactattgaag

SEQ ID NO: 144921 - DNA, 25 bp, Artificial
  Probe
gacattgggttctcggactattgaa

SEQ ID NO: 144922 - DNA, 25 bp, Artificial
  Probe
gcttgaagacctatgtgggtataag

SEQ ID NO: 144923 - DNA, 25 bp, Artificial
  Probe
cggactattgaaggagcctaaccat

SEQ ID NO: 144924 - DNA, 25 bp, Artificial
  Probe
tgaagacctatgtgggtataagtcc

SEQ ID NO: 144925 - DNA, 25 bp, Artificial
  Probe
tgcttgaagacctatgtgggtataa

SEQ ID NO: 144926 - DNA, 25 bp, Artificial
  Probe
ttgcttgaagacctatgtgggtata

SEQ ID NO: 144927 - DNA, 25 bp, Artificial
  Probe
tttatctttgaccaactgaacgtga

SEQ ID NO: 144928 - DNA, 25 bp, Artificial
  Probe
ttatctttgaccaactgaacgtgac

SEQ ID NO: 144929 - DNA, 25 bp, Artificial
  Probe
ttgcattcatctctcaaacttagtt

SEQ ID NO: 144930 - DNA, 25 bp, Artificial
  Probe
cattgggttctcggactattgaagg

SEQ ID NO: 144931 - DNA, 25 bp, Artificial
  Probe
gacaatttcacatggactttggaaa

SEQ ID NO: 144932 - DNA, 25 bp, Artificial
  Probe
attgggttctcggactattgaagga

SEQ ID NO: 144933 - DNA, 25 bp, Artificial
  Probe
gtcctcttgcttgaagacctatgtg

SEQ ID NO: 144934 - DNA, 25 bp, Artificial
  Probe
cttgcttgaagacctatgtgggtat

SEQ ID NO: 144935 - DNA, 25 bp, Artificial
  Probe
ccagcaccatgaagatcaagattat

SEQ ID NO: 144936 - DNA, 25 bp, Artificial
  Probe
ctattccttcgtgactactgctgag

SEQ ID NO: 144937 - DNA, 25 bp, Artificial
  Probe
gatctggcaccactccttctataac

SEQ ID NO: 144938 - DNA, 25 bp, Artificial
  Probe
ctgaccctgaagtatccgatagaac

SEQ ID NO: 144939 - DNA, 25 bp, Artificial
  Probe
acgaaaccacctataacagcatcat

SEQ ID NO: 144940 - DNA, 25 bp, Artificial
  Probe
gaccctgaagtatccgatagaacac

SEQ ID NO: 144941 - DNA, 25 bp, Artificial
  Probe
ctatgtgtgaagaggaagacagcac

SEQ ID NO: 144942 - DNA, 25 bp, Artificial
  Probe
tgaccctgaagtatccgatagaaca

SEQ ID NO: 144943 - DNA, 25 bp, Artificial
  Probe
cgaaaccacctataacagcatcatg

SEQ ID NO: 144944 - DNA, 25 bp, Artificial
  Probe
gatagaacacggcatcatcaccaac

SEQ ID NO: 144945 - DNA, 25 bp, Artificial
  Probe
atctggcaccactccttctataacg

SEQ ID NO: 144946 - DNA, 25 bp, Artificial
  Probe
ctctatgcttctggacgtacaactg

SEQ ID NO: 144947 - DNA, 25 bp, Artificial
  Probe
atcctgaccctgaagtatccgatag

SEQ ID NO: 144948 - DNA, 25 bp, Artificial
  Probe
cagctatgtgtgaagaggaagacag

SEQ ID NO: 144949 - DNA, 25 bp, Artificial
  Probe
gctattccttcgtgactactgctga

SEQ ID NO: 144950 - DNA, 25 bp, Artificial
  Probe
cctgaccctgaagtatccgatagaa

SEQ ID NO: 144951 - DNA, 25 bp, Artificial
  Probe
catgtatgtggctattcaggctgtg

SEQ ID NO: 144952 - DNA, 25 bp, Artificial
  Probe
cacgaaaccacctataacagcatca

SEQ ID NO: 144953 - DNA, 25 bp, Artificial
  Probe
atagaacacggcatcatcaccaact

SEQ ID NO: 144954 - DNA, 25 bp, Artificial
  Probe
tatgcttctggacgtacaactggta

SEQ ID NO: 144955 - DNA, 25 bp, Artificial
  Probe
gatcctgaccctgaagtatccgata

SEQ ID NO: 144956 - DNA, 25 bp, Artificial
  Probe
tattccttcgtgactactgctgagc

SEQ ID NO: 144957 - DNA, 25 bp, Artificial
  Probe
cccagcaccatgaagatcaagatta

SEQ ID NO: 144958 - DNA, 25 bp, Artificial
  Probe
agatctggcaccactccttctataa

SEQ ID NO: 144959 - DNA, 25 bp, Artificial
  Probe
aagatctggcaccactccttctata

SEQ ID NO: 144960 - DNA, 25 bp, Artificial
  Probe
ccacgaaaccacctataacagcatc

SEQ ID NO: 144961 - DNA, 25 bp, Artificial
  Probe
catccacgaaaccacctataacagc

SEQ ID NO: 144962 - DNA, 25 bp, Artificial
  Probe
tcctgaccctgaagtatccgataga

SEQ ID NO: 144963 - DNA, 25 bp, Artificial
  Probe
attatgtttgagaccttcaatgtcc

SEQ ID NO: 144964 - DNA, 25 bp, Artificial
  Probe
cccagattatgtttgagaccttcaa

SEQ ID NO: 144965 - DNA, 25 bp, Artificial
  Probe
atgcttctggacgtacaactggtat

SEQ ID NO: 144966 - DNA, 25 bp, Artificial
  Probe
ttatgtttgagaccttcaatgtccc

SEQ ID NO: 144967 - DNA, 25 bp, Artificial
  Probe
ccagattatgtttgagaccttcaat

SEQ ID NO: 144968 - DNA, 25 bp, Artificial
  Probe
accctgaagtatccgatagaacacg

SEQ ID NO: 144969 - DNA, 25 bp, Artificial
  Probe
gtgactcacaacgtgcctatctatg

SEQ ID NO: 144970 - DNA, 25 bp, Artificial
  Probe
gcttctggacgtacaactggtattg

SEQ ID NO: 144971 - DNA, 25 bp, Artificial
  Probe
cctctatgcttctggacgtacaact

SEQ ID NO: 144972 - DNA, 25 bp, Artificial
  Probe
tgactcacaacgtgcctatctatga

SEQ ID NO: 144973 - DNA, 25 bp, Artificial
  Probe
ctccagctatgtgtgaagaggaaga

SEQ ID NO: 144974 - DNA, 25 bp, Artificial
  Probe
tgcttctggacgtacaactggtatt

SEQ ID NO: 144975 - DNA, 25 bp, Artificial
  Probe
tatgtttgagaccttcaatgtccct

SEQ ID NO: 144976 - DNA, 25 bp, Artificial
  Probe
agattatgtttgagaccttcaatgt

SEQ ID NO: 144977 - DNA, 25 bp, Artificial
  Probe
ctggcaccactccttctataacgag

SEQ ID NO: 144978 - DNA, 25 bp, Artificial
  Probe
tctggcaccactccttctataacga

SEQ ID NO: 144979 - DNA, 25 bp, Artificial
  Probe
tctatgcttctggacgtacaactgg

SEQ ID NO: 144980 - DNA, 25 bp, Artificial
  Probe
tctacatagtgacttcctggacaac

SEQ ID NO: 144981 - DNA, 25 bp, Artificial
  Probe
taacctgtctacatagtgacttcct

SEQ ID NO: 144982 - DNA, 25 bp, Artificial
  Probe
ctaacctgtctacatagtgacttcc

SEQ ID NO: 144983 - DNA, 25 bp, Artificial
  Probe
cctaacctgtctacatagtgacttc

SEQ ID NO: 144984 - DNA, 25 bp, Artificial
  Probe
ctacatagtgacttcctggacaacc

SEQ ID NO: 144985 - DNA, 25 bp, Artificial
  Probe
aacctgtctacatagtgacttcctg

SEQ ID NO: 144986 - DNA, 25 bp, Artificial
  Probe
gcctaacctgtctacatagtgactt

SEQ ID NO: 144987 - DNA, 25 bp, Artificial
  Probe
gtctacatagtgacttcctggacaa

SEQ ID NO: 144988 - DNA, 25 bp, Artificial
  Probe
ctgtctacatagtgacttcctggac

SEQ ID NO: 144989 - DNA, 25 bp, Artificial
  Probe
gacaaccaaggctatacagagaaac

SEQ ID NO: 144990 - DNA, 25 bp, Artificial
  Probe
cctgtctacatagtgacttcctgga

SEQ ID NO: 144991 - DNA, 25 bp, Artificial
  Probe
ggacaaccaaggctatacagagaaa

SEQ ID NO: 144992 - DNA, 25 bp, Artificial
  Probe
acctgtctacatagtgacttcctgg

SEQ ID NO: 144993 - DNA, 25 bp, Artificial
  Probe
acaaccaaggctatacagagaaacc

SEQ ID NO: 144994 - DNA, 25 bp, Artificial
  Probe
tacatagtgacttcctggacaacca

SEQ ID NO: 144995 - DNA, 25 bp, Artificial
  Probe
catagtgacttcctggacaaccaag

SEQ ID NO: 144996 - DNA, 25 bp, Artificial
  Probe
tatacagagaaaccgtgcctcaatc

SEQ ID NO: 144997 - DNA, 25 bp, Artificial
  Probe
ctatacagagaaaccgtgcctcaat

SEQ ID NO: 144998 - DNA, 25 bp, Artificial
  Probe
tggacaaccaaggctatacagagaa

SEQ ID NO: 144999 - DNA, 25 bp, Artificial
  Probe
ctggacaaccaaggctatacagaga

SEQ ID NO: 145000 - DNA, 25 bp, Artificial
  Probe
acatagtgacttcctggacaaccaa

SEQ ID NO: 145001 - DNA, 25 bp, Artificial
  Probe
caaccaaggctatacagagaaaccg

SEQ ID NO: 145002 - DNA, 25 bp, Artificial
  Probe
gacttcctggacaaccaaggctata

SEQ ID NO: 145003 - DNA, 25 bp, Artificial
  Probe
aaccaaggctatacagagaaaccgt

SEQ ID NO: 145004 - DNA, 25 bp, Artificial
  Probe
atagtgacttcctggacaaccaagg

SEQ ID NO: 145005 - DNA, 25 bp, Artificial
  Probe
ttcctggacaaccaaggctatacag

SEQ ID NO: 145006 - DNA, 25 bp, Artificial
  Probe
cttcctggacaaccaaggctataca

SEQ ID NO: 145007 - DNA, 25 bp, Artificial
  Probe
acttcctggacaaccaaggctatac

SEQ ID NO: 145008 - DNA, 25 bp, Artificial
  Probe
ggcctaacctgtctacatagtgact

SEQ ID NO: 145009 - DNA, 25 bp, Artificial
  Probe
cctggacaaccaaggctatacagag

SEQ ID NO: 145010 - DNA, 25 bp, Artificial
  Probe
accaaggctatacagagaaaccgtg

SEQ ID NO: 145011 - DNA, 25 bp, Artificial
  Probe
tgtctacatagtgacttcctggaca

SEQ ID NO: 145012 - DNA, 25 bp, Artificial
  Probe
tcctggacaaccaaggctatacaga

SEQ ID NO: 145013 - DNA, 25 bp, Artificial
  Probe
gctatacagagaaaccgtgcctcaa

SEQ ID NO: 145014 - DNA, 25 bp, Artificial
  Probe
atacagagaaaccgtgcctcaatcg

SEQ ID NO: 145015 - DNA, 25 bp, Artificial
  Probe
aaccgtgcctcaatcgaaaacaaaa

SEQ ID NO: 145016 - DNA, 25 bp, Artificial
  Probe
aaaccgtgcctcaatcgaaaacaaa

SEQ ID NO: 145017 - DNA, 25 bp, Artificial
  Probe
gaaaccgtgcctcaatcgaaaacaa

SEQ ID NO: 145018 - DNA, 25 bp, Artificial
  Probe
gagaaaccgtgcctcaatcgaaaac

SEQ ID NO: 145019 - DNA, 25 bp, Artificial
  Probe
agagaaaccgtgcctcaatcgaaaa

SEQ ID NO: 145020 - DNA, 25 bp, Artificial
  Probe
gagaatgtcaataaactgctggtag

SEQ ID NO: 145021 - DNA, 25 bp, Artificial
  Probe
agaatgtcaataaactgctggtagg

SEQ ID NO: 145022 - DNA, 25 bp, Artificial
  Probe
tgagaatgtcaataaactgctggta

SEQ ID NO: 145023 - DNA, 25 bp, Artificial
  Probe
ctacgccagtgagaatgtcaataaa

SEQ ID NO: 145024 - DNA, 25 bp, Artificial
  Probe
agtgagaatgtcaataaactgctgg

SEQ ID NO: 145025 - DNA, 25 bp, Artificial
  Probe
gctacgccagtgagaatgtcaataa

SEQ ID NO: 145026 - DNA, 25 bp, Artificial
  Probe
tacgccagtgagaatgtcaataaac

SEQ ID NO: 145027 - DNA, 25 bp, Artificial
  Probe
gtgagaatgtcaataaactgctggt

SEQ ID NO: 145028 - DNA, 25 bp, Artificial
  Probe
gaatcctacgctaatgtgaaacagt

SEQ ID NO: 145029 - DNA, 25 bp, Artificial
  Probe
gaatgtcaataaactgctggtaggc

SEQ ID NO: 145030 - DNA, 25 bp, Artificial
  Probe
aatcctacgctaatgtgaaacagtg

SEQ ID NO: 145031 - DNA, 25 bp, Artificial
  Probe
atgacacgtacacagagagctacat

SEQ ID NO: 145032 - DNA, 25 bp, Artificial
  Probe
ggaatcctacgctaatgtgaaacag

SEQ ID NO: 145033 - DNA, 25 bp, Artificial
  Probe
aatagatcgctacgccagtgagaat

SEQ ID NO: 145034 - DNA, 25 bp, Artificial
  Probe
gacaataccacagccaaggaatttg

SEQ ID NO: 145035 - DNA, 25 bp, Artificial
  Probe
caagaatgccaccaatgttgaacag

SEQ ID NO: 145036 - DNA, 25 bp, Artificial
  Probe
acgccagtgagaatgtcaataaact

SEQ ID NO: 145037 - DNA, 25 bp, Artificial
  Probe
acacgtacacagagagctacatcag

SEQ ID NO: 145038 - DNA, 25 bp, Artificial
  Probe
gacacgtacacagagagctacatca

SEQ ID NO: 145039 - DNA, 25 bp, Artificial
  Probe
tgacacgtacacagagagctacatc

SEQ ID NO: 145040 - DNA, 25 bp, Artificial
  Probe
gatgacacgtacacagagagctaca

SEQ ID NO: 145041 - DNA, 25 bp, Artificial
  Probe
tgatgacacgtacacagagagctac

SEQ ID NO: 145042 - DNA, 25 bp, Artificial
  Probe
caggaatcctacgctaatgtgaaac

SEQ ID NO: 145043 - DNA, 25 bp, Artificial
  Probe
atcctacgctaatgtgaaacagtgg

SEQ ID NO: 145044 - DNA, 25 bp, Artificial
  Probe
ctgatgacacgtacacagagagcta

SEQ ID NO: 145045 - DNA, 25 bp, Artificial
  Probe
ggcaaaaccatcaaactacagattt

SEQ ID NO: 145046 - DNA, 25 bp, Artificial
  Probe
aaaccatcaaactacagatttggga

SEQ ID NO: 145047 - DNA, 25 bp, Artificial
  Probe
aggacagtcacttccagctactatc

SEQ ID NO: 145048 - DNA, 25 bp, Artificial
  Probe
ggacaataccacagccaaggaattt

SEQ ID NO: 145049 - DNA, 25 bp, Artificial
  Probe
atcaaactacagatttgggacacag

SEQ ID NO: 145050 - DNA, 25 bp, Artificial
  Probe
aggaatcctacgctaatgtgaaaca

SEQ ID NO: 145051 - DNA, 25 bp, Artificial
  Probe
catcaaactacagatttgggacaca

SEQ ID NO: 145052 - DNA, 25 bp, Artificial
  Probe
aaccatcaaactacagatttgggac

SEQ ID NO: 145053 - DNA, 25 bp, Artificial
  Probe
accaggaatcctacgctaatgtgaa

SEQ ID NO: 145054 - DNA, 25 bp, Artificial
  Probe
atagatcgctacgccagtgagaatg

SEQ ID NO: 145055 - DNA, 25 bp, Artificial
  Probe
caggacagtcacttccagctactat

SEQ ID NO: 145056 - DNA, 25 bp, Artificial
  Probe
ctcatggcatcattgtggtgtatga

SEQ ID NO: 145057 - DNA, 25 bp, Artificial
  Probe
ccatcaaactacagatttgggacac

SEQ ID NO: 145058 - DNA, 25 bp, Artificial
  Probe
aagaatgccaccaatgttgaacagg

SEQ ID NO: 145059 - DNA, 25 bp, Artificial
  Probe
gaccaggaatcctacgctaatgtga

SEQ ID NO: 145060 - DNA, 25 bp, Artificial
  Probe
ctgaccaggaatcctacgctaatgt

SEQ ID NO: 145061 - DNA, 25 bp, Artificial
  Probe
actgaccaggaatcctacgctaatg

SEQ ID NO: 145062 - DNA, 25 bp, Artificial
  Probe
cactgaccaggaatcctacgctaat

SEQ ID NO: 145063 - DNA, 25 bp, Artificial
  Probe
ccaggaatcctacgctaatgtgaaa

SEQ ID NO: 145064 - DNA, 25 bp, Artificial
  Probe
tcatggcatcattgtggtgtatgac

SEQ ID NO: 145065 - DNA, 25 bp, Artificial
  Probe
ttgtatattattctgctgccgatga

SEQ ID NO: 145066 - DNA, 25 bp, Artificial
  Probe
attgtatattattctgctgccgatg

SEQ ID NO: 145067 - DNA, 25 bp, Artificial
  Probe
cattgtatattattctgctgccgat

SEQ ID NO: 145068 - DNA, 25 bp, Artificial
  Probe
ccacattgtatattattctgctgcc

SEQ ID NO: 145069 - DNA, 25 bp, Artificial
  Probe
tgtatattattctgctgccgatgac

SEQ ID NO: 145070 - DNA, 25 bp, Artificial
  Probe
acattgtatattattctgctgccga

SEQ ID NO: 145071 - DNA, 25 bp, Artificial
  Probe
cacattgtatattattctgctgccg

SEQ ID NO: 145072 - DNA, 25 bp, Artificial
  Probe
gccacattgtatattattctgctgc

SEQ ID NO: 145073 - DNA, 25 bp, Artificial
  Probe
tgagccacattgtatattattctgc

SEQ ID NO: 145074 - DNA, 25 bp, Artificial
  Probe
gtatattattctgctgccgatgacg

SEQ ID NO: 145075 - DNA, 25 bp, Artificial
  Probe
ttgagccacattgtatattattctg

SEQ ID NO: 145076 - DNA, 25 bp, Artificial
  Probe
agccacattgtatattattctgctg

SEQ ID NO: 145077 - DNA, 25 bp, Artificial
  Probe
gagccacattgtatattattctgct

SEQ ID NO: 145078 - DNA, 25 bp, Artificial
  Probe
tatattattctgctgccgatgacgt

SEQ ID NO: 145079 - DNA, 25 bp, Artificial
  Probe
gctttgaaacagatatgaacctaaa

SEQ ID NO: 145080 - DNA, 25 bp, Artificial
  Probe
gtgtattgagccacattgtatatta

SEQ ID NO: 145081 - DNA, 25 bp, Artificial
  Probe
attgagccacattgtatattattct

SEQ ID NO: 145082 - DNA, 25 bp, Artificial
  Probe
attactctttcatcaaggtgtagaa

SEQ ID NO: 145083 - DNA, 25 bp, Artificial
  Probe
gacctcctctcccatgatagatttc

SEQ ID NO: 145084 - DNA, 25 bp, Artificial
  Probe
acatattactctttcatcaaggtgt

SEQ ID NO: 145085 - DNA, 25 bp, Artificial
  Probe
aggtgtagaaattatctcattgtct

SEQ ID NO: 145086 - DNA, 25 bp, Artificial
  Probe
tcatcaaggtgtagaaattatctca

SEQ ID NO: 145087 - DNA, 25 bp, Artificial
  Probe
tgtggtccagttgagattgaaagag

SEQ ID NO: 145088 - DNA, 25 bp, Artificial
  Probe
agacctcctctcccatgatagattt

SEQ ID NO: 145089 - DNA, 25 bp, Artificial
  Probe
aagacctcctctcccatgatagatt

SEQ ID NO: 145090 - DNA, 25 bp, Artificial
  Probe
agctttgaaacagatatgaacctaa

SEQ ID NO: 145091 - DNA, 25 bp, Artificial
  Probe
gatttcccagcagaatctcttagag

SEQ ID NO: 145092 - DNA, 25 bp, Artificial
  Probe
cccatgatagatttcccagcagaat

SEQ ID NO: 145093 - DNA, 25 bp, Artificial
  Probe
gaagacctcctctcccatgatagat

SEQ ID NO: 145094 - DNA, 25 bp, Artificial
  Probe
caaggtgtagaaattatctcattgt

SEQ ID NO: 145095 - DNA, 25 bp, Artificial
  Probe
ccatgatagatttcccagcagaatc

SEQ ID NO: 145096 - DNA, 25 bp, Artificial
  Probe
tgtattgagccacattgtatattat

SEQ ID NO: 145097 - DNA, 25 bp, Artificial
  Probe
tattactctttcatcaaggtgtaga

SEQ ID NO: 145098 - DNA, 25 bp, Artificial
  Probe
atctgtgaagaaggttgctggagag

SEQ ID NO: 145099 - DNA, 25 bp, Artificial
  Probe
aaggtgtagaaattatctcattgtc

SEQ ID NO: 145100 - DNA, 25 bp, Artificial
  Probe
actctttcatcaaggtgtagaaatt

SEQ ID NO: 145101 - DNA, 25 bp, Artificial
  Probe
ctgtggtccagttgagattgaaaga

SEQ ID NO: 145102 - DNA, 25 bp, Artificial
  Probe
tcaaggtgtagaaattatctcattg

SEQ ID NO: 145103 - DNA, 25 bp, Artificial
  Probe
tgaaacagatatgaacctaaacttt

SEQ ID NO: 145104 - DNA, 25 bp, Artificial
  Probe
ttgaaacagatatgaacctaaactt

SEQ ID NO: 145105 - DNA, 25 bp, Artificial
  Probe
tttgaaacagatatgaacctaaact

SEQ ID NO: 145106 - DNA, 25 bp, Artificial
  Probe
agttgagattgaaagagcgtgactc

SEQ ID NO: 145107 - DNA, 25 bp, Artificial
  Probe
aacctaaactttcaaaacctgtcag

SEQ ID NO: 145108 - DNA, 25 bp, Artificial
  Probe
gaacctaaactttcaaaacctgtca

SEQ ID NO: 145109 - DNA, 25 bp, Artificial
  Probe
tcctctcccatgatagatttcccag

SEQ ID NO: 145110 - DNA, 25 bp, Artificial
  Probe
ccacaataggacgacctttacaaag

SEQ ID NO: 145111 - DNA, 25 bp, Artificial
  Probe
aaatagcaagccacaataggacgac

SEQ ID NO: 145112 - DNA, 25 bp, Artificial
  Probe
caaatagcaagccacaataggacga

SEQ ID NO: 145113 - DNA, 25 bp, Artificial
  Probe
gccacaataggacgacctttacaaa

SEQ ID NO: 145114 - DNA, 25 bp, Artificial
  Probe
aatagcaagccacaataggacgacc

SEQ ID NO: 145115 - DNA, 25 bp, Artificial
  Probe
caagccacaataggacgacctttac

SEQ ID NO: 145116 - DNA, 25 bp, Artificial
  Probe
agccacaataggacgacctttacaa

SEQ ID NO: 145117 - DNA, 25 bp, Artificial
  Probe
aagccacaataggacgacctttaca

SEQ ID NO: 145118 - DNA, 25 bp, Artificial
  Probe
ctttacaccaagaaggtcgggaaag

SEQ ID NO: 145119 - DNA, 25 bp, Artificial
  Probe
gcaaatagcaagccacaataggacg

SEQ ID NO: 145120 - DNA, 25 bp, Artificial
  Probe
cgcaaatagcaagccacaataggac

SEQ ID NO: 145121 - DNA, 25 bp, Artificial
  Probe
gacgcaaatagcaagccacaatagg

SEQ ID NO: 145122 - DNA, 25 bp, Artificial
  Probe
cgacgcaaatagcaagccacaatag

SEQ ID NO: 145123 - DNA, 25 bp, Artificial
  Probe
acgcaaatagcaagccacaatagga

SEQ ID NO: 145124 - DNA, 25 bp, Artificial
  Probe
gcaagccacaataggacgaccttta

SEQ ID NO: 145125 - DNA, 25 bp, Artificial
  Probe
cctttacaccaagaaggtcgggaaa

SEQ ID NO: 145126 - DNA, 25 bp, Artificial
  Probe
aagaaggtcgggaaagcacctaaat

SEQ ID NO: 145127 - DNA, 25 bp, Artificial
  Probe
agaaggtcgggaaagcacctaaatc

SEQ ID NO: 145128 - DNA, 25 bp, Artificial
  Probe
caagaaggtcgggaaagcacctaaa

SEQ ID NO: 145129 - DNA, 25 bp, Artificial
  Probe
attatctctgtgttctttgctcctg

SEQ ID NO: 145130 - DNA, 25 bp, Artificial
  Probe
cattatctctgtgttctttgctcct

SEQ ID NO: 145131 - DNA, 25 bp, Artificial
  Probe
tttatcacagaagggcagcattatc

SEQ ID NO: 145132 - DNA, 25 bp, Artificial
  Probe
tatctctgtgttctttgctcctgta

SEQ ID NO: 145133 - DNA, 25 bp, Artificial
  Probe
ggattggaaaccctctgactttatc

SEQ ID NO: 145134 - DNA, 25 bp, Artificial
  Probe
ctttatcacagaagggcagcattat

SEQ ID NO: 145135 - DNA, 25 bp, Artificial
  Probe
gattggaaaccctctgactttatca

SEQ ID NO: 145136 - DNA, 25 bp, Artificial
  Probe
attggaaaccctctgactttatcac

SEQ ID NO: 145137 - DNA, 25 bp, Artificial
  Probe
ttatctctgtgttctttgctcctgt

SEQ ID NO: 145138 - DNA, 25 bp, Artificial
  Probe
ttatcacagaagggcagcattatct

SEQ ID NO: 145139 - DNA, 25 bp, Artificial
  Probe
atctctgtgttctttgctcctgtag

SEQ ID NO: 145140 - DNA, 25 bp, Artificial
  Probe
ttggaaaccctctgactttatcaca

SEQ ID NO: 145141 - DNA, 25 bp, Artificial
  Probe
actttatcacagaagggcagcatta

SEQ ID NO: 145142 - DNA, 25 bp, Artificial
  Probe
tatcacagaagggcagcattatctc

SEQ ID NO: 145143 - DNA, 25 bp, Artificial
  Probe
aggattggaaaccctctgactttat

SEQ ID NO: 145144 - DNA, 25 bp, Artificial
  Probe
atgatcctctggagcttctcttcta

SEQ ID NO: 145145 - DNA, 25 bp, Artificial
  Probe
tggaaaccctctgactttatcacag

SEQ ID NO: 145146 - DNA, 25 bp, Artificial
  Probe
caggattggaaaccctctgacttta

SEQ ID NO: 145147 - DNA, 25 bp, Artificial
  Probe
tgatcctctggagcttctcttctag

SEQ ID NO: 145148 - DNA, 25 bp, Artificial
  Probe
ggcagcattatctctgtgttctttg

SEQ ID NO: 145149 - DNA, 25 bp, Artificial
  Probe
atgatgatcctctggagcttctctt

SEQ ID NO: 145150 - DNA, 25 bp, Artificial
  Probe
tgttctttgctcctgtagaaagttt

SEQ ID NO: 145151 - DNA, 25 bp, Artificial
  Probe
tctctgtgttctttgctcctgtaga

SEQ ID NO: 145152 - DNA, 25 bp, Artificial
  Probe
gactttatcacagaagggcagcatt

SEQ ID NO: 145153 - DNA, 25 bp, Artificial
  Probe
gtgttctttgctcctgtagaaagtt

SEQ ID NO: 145154 - DNA, 25 bp, Artificial
  Probe
gatgatcctctggagcttctcttct

SEQ ID NO: 145155 - DNA, 25 bp, Artificial
  Probe
ctgtgttctttgctcctgtagaaag

SEQ ID NO: 145156 - DNA, 25 bp, Artificial
  Probe
atcacagaagggcagcattatctct

SEQ ID NO: 145157 - DNA, 25 bp, Artificial
  Probe
tgatgatcctctggagcttctcttc

SEQ ID NO: 145158 - DNA, 25 bp, Artificial
  Probe
catgatgatcctctggagcttctct

SEQ ID NO: 145159 - DNA, 25 bp, Artificial
  Probe
tctgtgttctttgctcctgtagaaa

SEQ ID NO: 145160 - DNA, 25 bp, Artificial
  Probe
gggcagcattatctctgtgttcttt

SEQ ID NO: 145161 - DNA, 25 bp, Artificial
  Probe
tgtgttctttgctcctgtagaaagt

SEQ ID NO: 145162 - DNA, 25 bp, Artificial
  Probe
ctctgtgttctttgctcctgtagaa

SEQ ID NO: 145163 - DNA, 25 bp, Artificial
  Probe
gaagggcagcattatctctgtgttc

SEQ ID NO: 145164 - DNA, 25 bp, Artificial
  Probe
gcattatctctgtgttctttgctcc

SEQ ID NO: 145165 - DNA, 25 bp, Artificial
  Probe
ttaatgcctctgaaacatgcaatag

SEQ ID NO: 145166 - DNA, 25 bp, Artificial
  Probe
aattaatgcctctgaaacatgcaat

SEQ ID NO: 145167 - DNA, 25 bp, Artificial
  Probe
aaattaatgcctctgaaacatgcaa

SEQ ID NO: 145168 - DNA, 25 bp, Artificial
  Probe
taatgcctctgaaacatgcaataga

SEQ ID NO: 145169 - DNA, 25 bp, Artificial
  Probe
tttgctcctgtagaaagttttccag

SEQ ID NO: 145170 - DNA, 25 bp, Artificial
  Probe
attaatgcctctgaaacatgcaata

SEQ ID NO: 145171 - DNA, 25 bp, Artificial
  Probe
ccagggttcccatgtagatgacttt

SEQ ID NO: 145172 - DNA, 25 bp, Artificial
  Probe
agggcagcattatctctgtgttctt

SEQ ID NO: 145173 - DNA, 25 bp, Artificial
  Probe
aagggcagcattatctctgtgttct

SEQ ID NO: 145174 - DNA, 25 bp, Artificial
  Probe
gcctctaccataagtaagtctgatt

SEQ ID NO: 145175 - DNA, 25 bp, Artificial
  Probe
gaagtgcctctaccataagtaagtc

SEQ ID NO: 145176 - DNA, 25 bp, Artificial
  Probe
tgcctctaccataagtaagtctgat

SEQ ID NO: 145177 - DNA, 25 bp, Artificial
  Probe
aagtgcctctaccataagtaagtct

SEQ ID NO: 145178 - DNA, 25 bp, Artificial
  Probe
caccatatcaacaccacctatcttc

SEQ ID NO: 145179 - DNA, 25 bp, Artificial
  Probe
agaagtgcctctaccataagtaagt

SEQ ID NO: 145180 - DNA, 25 bp, Artificial
  Probe
gtgcctctaccataagtaagtctga

SEQ ID NO: 145181 - DNA, 25 bp, Artificial
  Probe
agtgcctctaccataagtaagtctg

SEQ ID NO: 145182 - DNA, 25 bp, Artificial
  Probe
acaccatatcaacaccacctatctt

SEQ ID NO: 145183 - DNA, 25 bp, Artificial
  Probe
accatatcaacaccacctatcttcc

SEQ ID NO: 145184 - DNA, 25 bp, Artificial
  Probe
cacaccatatcaacaccacctatct

SEQ ID NO: 145185 - DNA, 25 bp, Artificial
  Probe
tagaagtgcctctaccataagtaag

SEQ ID NO: 145186 - DNA, 25 bp, Artificial
  Probe
gtctgattacatggagatacaggag

SEQ ID NO: 145187 - DNA, 25 bp, Artificial
  Probe
agtctgattacatggagatacagga

SEQ ID NO: 145188 - DNA, 25 bp, Artificial
  Probe
aagtctgattacatggagatacagg

SEQ ID NO: 145189 - DNA, 25 bp, Artificial
  Probe
tctgattacatggagatacaggagg

SEQ ID NO: 145190 - DNA, 25 bp, Artificial
  Probe
tgaggactttagagaggagaactta

SEQ ID NO: 145191 - DNA, 25 bp, Artificial
  Probe
ttacaggtttccaaagatgagagtc

SEQ ID NO: 145192 - DNA, 25 bp, Artificial
  Probe
atgaggactttagagaggagaactt

SEQ ID NO: 145193 - DNA, 25 bp, Artificial
  Probe
aatgaggactttagagaggagaact

SEQ ID NO: 145194 - DNA, 25 bp, Artificial
  Probe
gaaatctttatcaccgacttacagg

SEQ ID NO: 145195 - DNA, 25 bp, Artificial
  Probe
atacaggagggagtaaacaacagta

SEQ ID NO: 145196 - DNA, 25 bp, Artificial
  Probe
gctcaacaggactaatgcagatatt

SEQ ID NO: 145197 - DNA, 25 bp, Artificial
  Probe
gagggagtaaacaacagtaatgagg

SEQ ID NO: 145198 - DNA, 25 bp, Artificial
  Probe
ggagggagtaaacaacagtaatgag

SEQ ID NO: 145199 - DNA, 25 bp, Artificial
  Probe
ccacaccatatcaacaccacctatc

SEQ ID NO: 145200 - DNA, 25 bp, Artificial
  Probe
tacaggagggagtaaacaacagtaa

SEQ ID NO: 145201 - DNA, 25 bp, Artificial
  Probe
cttacaggtttccaaagatgagagt

SEQ ID NO: 145202 - DNA, 25 bp, Artificial
  Probe
acttacaggtttccaaagatgagag

SEQ ID NO: 145203 - DNA, 25 bp, Artificial
  Probe
gacttacaggtttccaaagatgaga

SEQ ID NO: 145204 - DNA, 25 bp, Artificial
  Probe
acctattaatgtactcacagctcaa

SEQ ID NO: 145205 - DNA, 25 bp, Artificial
  Probe
aacctattaatgtactcacagctca

SEQ ID NO: 145206 - DNA, 25 bp, Artificial
  Probe
taatgaggactttagagaggagaac

SEQ ID NO: 145207 - DNA, 25 bp, Artificial
  Probe
gtaatgaggactttagagaggagaa

SEQ ID NO: 145208 - DNA, 25 bp, Artificial
  Probe
gggagtaaacaacagtaatgaggac

SEQ ID NO: 145209 - DNA, 25 bp, Artificial
  Probe
agggagtaaacaacagtaatgagga

SEQ ID NO: 145210 - DNA, 25 bp, Artificial
  Probe
aggagggagtaaacaacagtaatga

SEQ ID NO: 145211 - DNA, 25 bp, Artificial
  Probe
caggagggagtaaacaacagtaatg

SEQ ID NO: 145212 - DNA, 25 bp, Artificial
  Probe
ctcaacaggactaatgcagatattg

SEQ ID NO: 145213 - DNA, 25 bp, Artificial
  Probe
cctattaatgtactcacagctcaac

SEQ ID NO: 145214 - DNA, 25 bp, Artificial
  Probe
gaggactttagagaggagaacttaa

SEQ ID NO: 145215 - DNA, 25 bp, Artificial
  Probe
attaatgtactcacagctcaacagg

SEQ ID NO: 145216 - DNA, 25 bp, Artificial
  Probe
acaggagggagtaaacaacagtaat

SEQ ID NO: 145217 - DNA, 25 bp, Artificial
  Probe
tactcacagctcaacaggactaatg

SEQ ID NO: 145218 - DNA, 25 bp, Artificial
  Probe
gtactcacagctcaacaggactaat

SEQ ID NO: 145219 - DNA, 25 bp, Artificial
  Probe
ctaccaaatatactctccagaccct

SEQ ID NO: 145220 - DNA, 25 bp, Artificial
  Probe
tctaccaaatatactctccagaccc

SEQ ID NO: 145221 - DNA, 25 bp, Artificial
  Probe
ttctaccaaatatactctccagacc

SEQ ID NO: 145222 - DNA, 25 bp, Artificial
  Probe
cgttgtttctctattcactgccttt

SEQ ID NO: 145223 - DNA, 25 bp, Artificial
  Probe
taccaaatatactctccagaccctg

SEQ ID NO: 145224 - DNA, 25 bp, Artificial
  Probe
tttctaccaaatatactctccagac

SEQ ID NO: 145225 - DNA, 25 bp, Artificial
  Probe
ctctgccgttgtttctctattcact

SEQ ID NO: 145226 - DNA, 25 bp, Artificial
  Probe
tctgccgttgtttctctattcactg

SEQ ID NO: 145227 - DNA, 25 bp, Artificial
  Probe
aagatatttctgacctacagctcac

SEQ ID NO: 145228 - DNA, 25 bp, Artificial
  Probe
gatatttctgacctacagctcacaa

SEQ ID NO: 145229 - DNA, 25 bp, Artificial
  Probe
aaagatatttctgacctacagctca

SEQ ID NO: 145230 - DNA, 25 bp, Artificial
  Probe
atatttctgacctacagctcacaac

SEQ ID NO: 145231 - DNA, 25 bp, Artificial
  Probe
ccgttgtttctctattcactgcctt

SEQ ID NO: 145232 - DNA, 25 bp, Artificial
  Probe
agatatttctgacctacagctcaca

SEQ ID NO: 145233 - DNA, 25 bp, Artificial
  Probe
ctgacctacagctcacaacaactac

SEQ ID NO: 145234 - DNA, 25 bp, Artificial
  Probe
ttgtttctctattcactgccttttg

SEQ ID NO: 145235 - DNA, 25 bp, Artificial
  Probe
gttgtttctctattcactgcctttt

SEQ ID NO: 145236 - DNA, 25 bp, Artificial
  Probe
tctgacctacagctcacaacaacta

SEQ ID NO: 145237 - DNA, 25 bp, Artificial
  Probe
caggcaggcacttaaaagatatttc

SEQ ID NO: 145238 - DNA, 25 bp, Artificial
  Probe
tatttctgacctacagctcacaaca

SEQ ID NO: 145239 - DNA, 25 bp, Artificial
  Probe
tcaggcaggcacttaaaagatattt

SEQ ID NO: 145240 - DNA, 25 bp, Artificial
  Probe
ttcaggcaggcacttaaaagatatt

SEQ ID NO: 145241 - DNA, 25 bp, Artificial
  Probe
aggcaggcacttaaaagatatttct

SEQ ID NO: 145242 - DNA, 25 bp, Artificial
  Probe
tgtttctctattcactgccttttgg

SEQ ID NO: 145243 - DNA, 25 bp, Artificial
  Probe
gttcaggcaggcacttaaaagatat

SEQ ID NO: 145244 - DNA, 25 bp, Artificial
  Probe
ggcacttaaaagatatttctgacct

SEQ ID NO: 145245 - DNA, 25 bp, Artificial
  Probe
aggcacttaaaagatatttctgacc

SEQ ID NO: 145246 - DNA, 25 bp, Artificial
  Probe
atttctgacctacagctcacaacaa

SEQ ID NO: 145247 - DNA, 25 bp, Artificial
  Probe
acctacagctcacaacaactaccag

SEQ ID NO: 145248 - DNA, 25 bp, Artificial
  Probe
gacctacagctcacaacaactacca

SEQ ID NO: 145249 - DNA, 25 bp, Artificial
  Probe
aaatatactctccagaccctgcaac

SEQ ID NO: 145250 - DNA, 25 bp, Artificial
  Probe
caaatatactctccagaccctgcaa

SEQ ID NO: 145251 - DNA, 25 bp, Artificial
  Probe
gcaggcacttaaaagatatttctga

SEQ ID NO: 145252 - DNA, 25 bp, Artificial
  Probe
ggcaggcacttaaaagatatttctg

SEQ ID NO: 145253 - DNA, 25 bp, Artificial
  Probe
ttctgacctacagctcacaacaact

SEQ ID NO: 145254 - DNA, 25 bp, Artificial
  Probe
accaaatatactctccagaccctgc

SEQ ID NO: 145255 - DNA, 25 bp, Artificial
  Probe
tgacctacagctcacaacaactacc

SEQ ID NO: 145256 - DNA, 25 bp, Artificial
  Probe
gcagattcccaaagcaccttatttt

SEQ ID NO: 145257 - DNA, 25 bp, Artificial
  Probe
cgcagattcccaaagcaccttattt

SEQ ID NO: 145258 - DNA, 25 bp, Artificial
  Probe
caggcacttaaaagatatttctgac

SEQ ID NO: 145259 - DNA, 25 bp, Artificial
  Probe
ctgccgttgtttctctattcactgc

SEQ ID NO: 145260 - DNA, 25 bp, Artificial
  Probe
tttctgacctacagctcacaacaac

SEQ ID NO: 145261 - DNA, 25 bp, Artificial
  Probe
ggttcaggcaggcacttaaaagata

SEQ ID NO: 145262 - DNA, 25 bp, Artificial
  Probe
ttttctaccaaatatactctccaga

SEQ ID NO: 145263 - DNA, 25 bp, Artificial
  Probe
gcacttaaaagatatttctgaccta

SEQ ID NO: 145264 - DNA, 25 bp, Artificial
  Probe
cactgactgtagagagctattgatg

SEQ ID NO: 145265 - DNA, 25 bp, Artificial
  Probe
actgactgtagagagctattgatgg

SEQ ID NO: 145266 - DNA, 25 bp, Artificial
  Probe
tcactgactgtagagagctattgat

SEQ ID NO: 145267 - DNA, 25 bp, Artificial
  Probe
gtcactgactgtagagagctattga

SEQ ID NO: 145268 - DNA, 25 bp, Artificial
  Probe
tctgagagagatcatcaacactttg

SEQ ID NO: 145269 - DNA, 25 bp, Artificial
  Probe
gtcaccctgttctgctttctcatat

SEQ ID NO: 145270 - DNA, 25 bp, Artificial
  Probe
cgtcactgactgtagagagctattg

SEQ ID NO: 145271 - DNA, 25 bp, Artificial
  Probe
cctctgagagagatcatcaacactt

SEQ ID NO: 145272 - DNA, 25 bp, Artificial
  Probe
ctgactgtagagagctattgatggg

SEQ ID NO: 145273 - DNA, 25 bp, Artificial
  Probe
cacgtcactgactgtagagagctat

SEQ ID NO: 145274 - DNA, 25 bp, Artificial
  Probe
gaactgaggaaactctgtagaggtg

SEQ ID NO: 145275 - DNA, 25 bp, Artificial
  Probe
gtgaactgaggaaactctgtagagg

SEQ ID NO: 145276 - DNA, 25 bp, Artificial
  Probe
ggtgaactgaggaaactctgtagag

SEQ ID NO: 145277 - DNA, 25 bp, Artificial
  Probe
acgtcactgactgtagagagctatt

SEQ ID NO: 145278 - DNA, 25 bp, Artificial
  Probe
cctgttctgctttctcatatgtacc

SEQ ID NO: 145279 - DNA, 25 bp, Artificial
  Probe
ccctgttctgctttctcatatgtac

SEQ ID NO: 145280 - DNA, 25 bp, Artificial
  Probe
tgaactgaggaaactctgtagaggt

SEQ ID NO: 145281 - DNA, 25 bp, Artificial
  Probe
aacactttgaaccaggtcacagaaa

SEQ ID NO: 145282 - DNA, 25 bp, Artificial
  Probe
actgtagagagctattgatgggtct

SEQ ID NO: 145283 - DNA, 25 bp, Artificial
  Probe
accctgttctgctttctcatatgta

SEQ ID NO: 145284 - DNA, 25 bp, Artificial
  Probe
tgactgtagagagctattgatgggt

SEQ ID NO: 145285 - DNA, 25 bp, Artificial
  Probe
ctgttctgctttctcatatgtaccg

SEQ ID NO: 145286 - DNA, 25 bp, Artificial
  Probe
tgagagagatcatcaacactttgaa

SEQ ID NO: 145287 - DNA, 25 bp, Artificial
  Probe
gagagagatcatcaacactttgaac

SEQ ID NO: 145288 - DNA, 25 bp, Artificial
  Probe
ctgagagagatcatcaacactttga

SEQ ID NO: 145289 - DNA, 25 bp, Artificial
  Probe
tgtcaccctgttctgctttctcata

SEQ ID NO: 145290 - DNA, 25 bp, Artificial
  Probe
aactgaggaaactctgtagaggtgt

SEQ ID NO: 145291 - DNA, 25 bp, Artificial
  Probe
agagagatcatcaacactttgaacc

SEQ ID NO: 145292 - DNA, 25 bp, Artificial
  Probe
gactgtagagagctattgatgggtc

SEQ ID NO: 145293 - DNA, 25 bp, Artificial
  Probe
agagatcatcaacactttgaaccag

SEQ ID NO: 145294 - DNA, 25 bp, Artificial
  Probe
gagagatcatcaacactttgaacca

SEQ ID NO: 145295 - DNA, 25 bp, Artificial
  Probe
caacactttgaaccaggtcacagaa

SEQ ID NO: 145296 - DNA, 25 bp, Artificial
  Probe
ctctgagagagatcatcaacacttt

SEQ ID NO: 145297 - DNA, 25 bp, Artificial
  Probe
ctgaggaaactctgtagaggtgtca

SEQ ID NO: 145298 - DNA, 25 bp, Artificial
  Probe
actgaggaaactctgtagaggtgtc

SEQ ID NO: 145299 - DNA, 25 bp, Artificial
  Probe
gagatcatcaacactttgaaccagg

SEQ ID NO: 145300 - DNA, 25 bp, Artificial
  Probe
tcacgtcactgactgtagagagcta

SEQ ID NO: 145301 - DNA, 25 bp, Artificial
  Probe
tcaccctgttctgctttctcatatg

SEQ ID NO: 145302 - DNA, 25 bp, Artificial
  Probe
cggtgaactgaggaaactctgtaga

SEQ ID NO: 145303 - DNA, 25 bp, Artificial
  Probe
tcggtgaactgaggaaactctgtag

SEQ ID NO: 145304 - DNA, 25 bp, Artificial
  Probe
ctcggtgaactgaggaaactctgta

SEQ ID NO: 145305 - DNA, 25 bp, Artificial
  Probe
tgaggaaactctgtagaggtgtcag

SEQ ID NO: 145306 - DNA, 25 bp, Artificial
  Probe
atgtacctccgtgcttgaagaacaa

SEQ ID NO: 145307 - DNA, 25 bp, Artificial
  Probe
tgatgtacctccgtgcttgaagaac

SEQ ID NO: 145308 - DNA, 25 bp, Artificial
  Probe
gtgatgtacctccgtgcttgaagaa

SEQ ID NO: 145309 - DNA, 25 bp, Artificial
  Probe
gtgagaggtgaggagtgttactaag

SEQ ID NO: 145310 - DNA, 25 bp, Artificial
  Probe
gccatgatatgagagaagaagactc

SEQ ID NO: 145311 - DNA, 25 bp, Artificial
  Probe
agacttgcttgaatattaaggctcc

SEQ ID NO: 145312 - DNA, 25 bp, Artificial
  Probe
ctgactccttagtgattctggaata

SEQ ID NO: 145313 - DNA, 25 bp, Artificial
  Probe
ccatgaggtcatcagagaattgaag

SEQ ID NO: 145314 - DNA, 25 bp, Artificial
  Probe
cgagacttgcttgaatattaaggct

SEQ ID NO: 145315 - DNA, 25 bp, Artificial
  Probe
gagacttgcttgaatattaaggctc

SEQ ID NO: 145316 - DNA, 25 bp, Artificial
  Probe
gtcgagacttgcttgaatattaagg

SEQ ID NO: 145317 - DNA, 25 bp, Artificial
  Probe
tgactccttagtgattctggaataa

SEQ ID NO: 145318 - DNA, 25 bp, Artificial
  Probe
tgtgagaggtgaggagtgttactaa

SEQ ID NO: 145319 - DNA, 25 bp, Artificial
  Probe
ttgtgagaggtgaggagtgttacta

SEQ ID NO: 145320 - DNA, 25 bp, Artificial
  Probe
catgaggtcatcagagaattgaagc

SEQ ID NO: 145321 - DNA, 25 bp, Artificial
  Probe
tcagtcgagacttgcttgaatatta

SEQ ID NO: 145322 - DNA, 25 bp, Artificial
  Probe
tactctatgaggttacagtaccgag

SEQ ID NO: 145323 - DNA, 25 bp, Artificial
  Probe
agtattctgtgagcactgaagtacc

SEQ ID NO: 145324 - DNA, 25 bp, Artificial
  Probe
ggagtgttggaggaattagacagtt

SEQ ID NO: 145325 - DNA, 25 bp, Artificial
  Probe
cctgactccttagtgattctggaat

SEQ ID NO: 145326 - DNA, 25 bp, Artificial
  Probe
tcgagacttgcttgaatattaaggc

SEQ ID NO: 145327 - DNA, 25 bp, Artificial
  Probe
gagagaagaagactcatctattgaa

SEQ ID NO: 145328 - DNA, 25 bp, Artificial
  Probe
cagtcgagacttgcttgaatattaa

SEQ ID NO: 145329 - DNA, 25 bp, Artificial
  Probe
ctctatgaggttacagtaccgagaa

SEQ ID NO: 145330 - DNA, 25 bp, Artificial
  Probe
agtcgagacttgcttgaatattaag

SEQ ID NO: 145331 - DNA, 25 bp, Artificial
  Probe
ctatgaggttacagtaccgagaact

SEQ ID NO: 145332 - DNA, 25 bp, Artificial
  Probe
tctatgaggttacagtaccgagaac

SEQ ID NO: 145333 - DNA, 25 bp, Artificial
  Probe
tgagaggtgaggagtgttactaagg

SEQ ID NO: 145334 - DNA, 25 bp, Artificial
  Probe
ttctggaataatttggagacactgg

SEQ ID NO: 145335 - DNA, 25 bp, Artificial
  Probe
tagacagtttctcacttggtaaagg

SEQ ID NO: 145336 - DNA, 25 bp, Artificial
  Probe
aagagcctgactccttagtgattct

SEQ ID NO: 145337 - DNA, 25 bp, Artificial
  Probe
gacagtttctcacttggtaaaggta

SEQ ID NO: 145338 - DNA, 25 bp, Artificial
  Probe
gagtagagcaggagaggtaggaatg

SEQ ID NO: 145339 - DNA, 25 bp, Artificial
  Probe
aggaattagacagtttctcacttgg

SEQ ID NO: 145340 - DNA, 25 bp, Artificial
  Probe
gactccttagtgattctggaataat

SEQ ID NO: 145341 - DNA, 25 bp, Artificial
  Probe
atgaggtcatcagagaattgaagcc

SEQ ID NO: 145342 - DNA, 25 bp, Artificial
  Probe
ggaattagacagtttctcacttggt

SEQ ID NO: 145343 - DNA, 25 bp, Artificial
  Probe
ggaggaattagacagtttctcactt

SEQ ID NO: 145344 - DNA, 25 bp, Artificial
  Probe
actctatgaggttacagtaccgaga

SEQ ID NO: 145345 - DNA, 25 bp, Artificial
  Probe
ttggaggaattagacagtttctcac

SEQ ID NO: 145346 - DNA, 25 bp, Artificial
  Probe
gttggaggaattagacagtttctca

SEQ ID NO: 145347 - DNA, 25 bp, Artificial
  Probe
tgattctggaataatttggagacac

SEQ ID NO: 145348 - DNA, 25 bp, Artificial
  Probe
gtgattctggaataatttggagaca

SEQ ID NO: 145349 - DNA, 25 bp, Artificial
  Probe
gtttctcacttggtaaaggtactct

SEQ ID NO: 145350 - DNA, 25 bp, Artificial
  Probe
gaggaattagacagtttctcacttg

SEQ ID NO: 145351 - DNA, 25 bp, Artificial
  Probe
attctggaataatttggagacactg

SEQ ID NO: 145352 - DNA, 25 bp, Artificial
  Probe
tgttggaggaattagacagtttctc

SEQ ID NO: 145353 - DNA, 25 bp, Artificial
  Probe
tctcacttggtaaaggtactctatg

SEQ ID NO: 145354 - DNA, 25 bp, Artificial
  Probe
tttgaagattcatttgaagtggctc

SEQ ID NO: 145355 - DNA, 25 bp, Artificial
  Probe
atttgaagattcatttgaagtggct

SEQ ID NO: 145356 - DNA, 25 bp, Artificial
  Probe
aatttgaagattcatttgaagtggc

SEQ ID NO: 145357 - DNA, 25 bp, Artificial
  Probe
aaccatactaaattattccacttgc

SEQ ID NO: 145358 - DNA, 25 bp, Artificial
  Probe
ttgaagattcatttgaagtggctcc

SEQ ID NO: 145359 - DNA, 25 bp, Artificial
  Probe
gaagattcatttgaagtggctcctg

SEQ ID NO: 145360 - DNA, 25 bp, Artificial
  Probe
caatttgaagattcatttgaagtgg

SEQ ID NO: 145361 - DNA, 25 bp, Artificial
  Probe
ccaatttgaagattcatttgaagtg

SEQ ID NO: 145362 - DNA, 25 bp, Artificial
  Probe
tgaatgggaaagtcattgatcctaa

SEQ ID NO: 145363 - DNA, 25 bp, Artificial
  Probe
ttgaatgggaaagtcattgatccta

SEQ ID NO: 145364 - DNA, 25 bp, Artificial
  Probe
aattgaatgggaaagtcattgatcc

SEQ ID NO: 145365 - DNA, 25 bp, Artificial
  Probe
accatactaaattattccacttgca

SEQ ID NO: 145366 - DNA, 25 bp, Artificial
  Probe
attgaatgggaaagtcattgatcct

SEQ ID NO: 145367 - DNA, 25 bp, Artificial
  Probe
tgaagattcatttgaagtggctcct

SEQ ID NO: 145368 - DNA, 25 bp, Artificial
  Probe
tccaatttgaagattcatttgaagt

SEQ ID NO: 145369 - DNA, 25 bp, Artificial
  Probe
gaatgggaaagtcattgatcctaaa

SEQ ID NO: 145370 - DNA, 25 bp, Artificial
  Probe
gatcagcagagtggttatgggaaag

SEQ ID NO: 145371 - DNA, 25 bp, Artificial
  Probe
aaattgaatgggaaagtcattgatc

SEQ ID NO: 145372 - DNA, 25 bp, Artificial
  Probe
acaaaccatactaaattattccact

SEQ ID NO: 145373 - DNA, 25 bp, Artificial
  Probe
taaattgaatgggaaagtcattgat

SEQ ID NO: 145374 - DNA, 25 bp, Artificial
  Probe
ataaattgaatgggaaagtcattga

SEQ ID NO: 145375 - DNA, 25 bp, Artificial
  Probe
cataaattgaatgggaaagtcattg

SEQ ID NO: 145376 - DNA, 25 bp, Artificial
  Probe
aagattcatttgaagtggctcctgc

SEQ ID NO: 145377 - DNA, 25 bp, Artificial
  Probe
tgggaaagtcattgatcctaaaagg

SEQ ID NO: 145378 - DNA, 25 bp, Artificial
  Probe
atgggaaagtcattgatcctaaaag

SEQ ID NO: 145379 - DNA, 25 bp, Artificial
  Probe
gggaaagtcattgatcctaaaaggg

SEQ ID NO: 145380 - DNA, 25 bp, Artificial
  Probe
ctatcaagttcccgaatggaagtat

SEQ ID NO: 145381 - DNA, 25 bp, Artificial
  Probe
tatcaagttcccgaatggaagtatg

SEQ ID NO: 145382 - DNA, 25 bp, Artificial
  Probe
aaaccatactaaattattccacttg

SEQ ID NO: 145383 - DNA, 25 bp, Artificial
  Probe
caaaccatactaaattattccactt

SEQ ID NO: 145384 - DNA, 25 bp, Artificial
  Probe
tttctatcaagttcccgaatggaag

SEQ ID NO: 145385 - DNA, 25 bp, Artificial
  Probe
tctatcaagttcccgaatggaagta

SEQ ID NO: 145386 - DNA, 25 bp, Artificial
  Probe
aattattccacttgcaacttatccc

SEQ ID NO: 145387 - DNA, 25 bp, Artificial
  Probe
ggaaagtcattgatcctaaaagggc

SEQ ID NO: 145388 - DNA, 25 bp, Artificial
  Probe
tttggtggttttggtgaggttgaat

SEQ ID NO: 145389 - DNA, 25 bp, Artificial
  Probe
aatgggaaagtcattgatcctaaaa

SEQ ID NO: 145390 - DNA, 25 bp, Artificial
  Probe
atcaagttcccgaatggaagtatga

SEQ ID NO: 145391 - DNA, 25 bp, Artificial
  Probe
ttctatcaagttcccgaatggaagt

SEQ ID NO: 145392 - DNA, 25 bp, Artificial
  Probe
tggttttggtgaggttgaatccata

SEQ ID NO: 145393 - DNA, 25 bp, Artificial
  Probe
tactttggtggttttggtgaggttg

SEQ ID NO: 145394 - DNA, 25 bp, Artificial
  Probe
aaattattccacttgcaacttatcc

SEQ ID NO: 145395 - DNA, 25 bp, Artificial
  Probe
tacaaaccatactaaattattccac

SEQ ID NO: 145396 - DNA, 25 bp, Artificial
  Probe
ttggtggttttggtgaggttgaatc

SEQ ID NO: 145397 - DNA, 25 bp, Artificial
  Probe
gtactttggtggttttggtgaggtt

SEQ ID NO: 145398 - DNA, 25 bp, Artificial
  Probe
tcaagttcccgaatggaagtatgac

SEQ ID NO: 145399 - DNA, 25 bp, Artificial
  Probe
actattatttggatgtggagatggg

SEQ ID NO: 145400 - DNA, 25 bp, Artificial
  Probe
ctattatttggatgtggagatgggc

SEQ ID NO: 145401 - DNA, 25 bp, Artificial
  Probe
tattatttggatgtggagatgggcc

SEQ ID NO: 145402 - DNA, 25 bp, Artificial
  Probe
gaaaccctggcgtaccaaacttatc

SEQ ID NO: 145403 - DNA, 25 bp, Artificial
  Probe
gcctatagtgagcggatacaatcac

SEQ ID NO: 145404 - DNA, 25 bp, Artificial
  Probe
ggaaaccctggcgtaccaaacttat

SEQ ID NO: 145405 - DNA, 25 bp, Artificial
  Probe
attatttggatgtggagatgggccg

SEQ ID NO: 145406 - DNA, 25 bp, Artificial
  Probe
cgcctatagtgagcggatacaatca

SEQ ID NO: 145407 - DNA, 25 bp, Artificial
  Probe
gtgacaccaatagaataggaagcag

SEQ ID NO: 145408 - DNA, 25 bp, Artificial
  Probe
gtaatatctctaggaatggtgacac

SEQ ID NO: 145409 - DNA, 25 bp, Artificial
  Probe
ggtcttgtaatatctctaggaatgg

SEQ ID NO: 145410 - DNA, 25 bp, Artificial
  Probe
aatagaataggaagcagctacactc

SEQ ID NO: 145411 - DNA, 25 bp, Artificial
  Probe
caatagaataggaagcagctacact

SEQ ID NO: 145412 - DNA, 25 bp, Artificial
  Probe
atagaataggaagcagctacactca

SEQ ID NO: 145413 - DNA, 25 bp, Artificial
  Probe
tgtaatatctctaggaatggtgaca

SEQ ID NO: 145414 - DNA, 25 bp, Artificial
  Probe
tgacaccaatagaataggaagcagc

SEQ ID NO: 145415 - DNA, 25 bp, Artificial
  Probe
ccaatagaataggaagcagctacac

SEQ ID NO: 145416 - DNA, 25 bp, Artificial
  Probe
caccaatagaataggaagcagctac

SEQ ID NO: 145417 - DNA, 25 bp, Artificial
  Probe
ttgtaatatctctaggaatggtgac

SEQ ID NO: 145418 - DNA, 25 bp, Artificial
  Probe
accaatagaataggaagcagctaca

SEQ ID NO: 145419 - DNA, 25 bp, Artificial
  Probe
acaccaatagaataggaagcagcta

SEQ ID NO: 145420 - DNA, 25 bp, Artificial
  Probe
tagaataggaagcagctacactcag

SEQ ID NO: 145421 - DNA, 25 bp, Artificial
  Probe
aggtttctccatcttagtgacattt

SEQ ID NO: 145422 - DNA, 25 bp, Artificial
  Probe
atgcctgggtcttgtaatatctcta

SEQ ID NO: 145423 - DNA, 25 bp, Artificial
  Probe
cttgtaatatctctaggaatggtga

SEQ ID NO: 145424 - DNA, 25 bp, Artificial
  Probe
tcttgtaatatctctaggaatggtg

SEQ ID NO: 145425 - DNA, 25 bp, Artificial
  Probe
gtcttgtaatatctctaggaatggt

SEQ ID NO: 145426 - DNA, 25 bp, Artificial
  Probe
atatctggactatagactgttgctc

SEQ ID NO: 145427 - DNA, 25 bp, Artificial
  Probe
aactggattatttgaaggacacgag

SEQ ID NO: 145428 - DNA, 25 bp, Artificial
  Probe
agactctggactatggaagatttca

SEQ ID NO: 145429 - DNA, 25 bp, Artificial
  Probe
tatctggactatagactgttgctcg

SEQ ID NO: 145430 - DNA, 25 bp, Artificial
  Probe
aatatctggactatagactgttgct

SEQ ID NO: 145431 - DNA, 25 bp, Artificial
  Probe
ctacccaactggattatttgaagga

SEQ ID NO: 145432 - DNA, 25 bp, Artificial
  Probe
tgcctgggtcttgtaatatctctag

SEQ ID NO: 145433 - DNA, 25 bp, Artificial
  Probe
gaggtttctccatcttagtgacatt

SEQ ID NO: 145434 - DNA, 25 bp, Artificial
  Probe
tacccaactggattatttgaaggac

SEQ ID NO: 145435 - DNA, 25 bp, Artificial
  Probe
actacccaactggattatttgaagg

SEQ ID NO: 145436 - DNA, 25 bp, Artificial
  Probe
ctgggtcttgtaatatctctaggaa

SEQ ID NO: 145437 - DNA, 25 bp, Artificial
  Probe
cttctttagagtcctttgctttggg

SEQ ID NO: 145438 - DNA, 25 bp, Artificial
  Probe
ccttctttagagtcctttgctttgg

SEQ ID NO: 145439 - DNA, 25 bp, Artificial
  Probe
cccttctttagagtcctttgctttg

SEQ ID NO: 145440 - DNA, 25 bp, Artificial
  Probe
gacaccaatagaataggaagcagct

SEQ ID NO: 145441 - DNA, 25 bp, Artificial
  Probe
caactggattatttgaaggacacga

SEQ ID NO: 145442 - DNA, 25 bp, Artificial
  Probe
tcccttctttagagtcctttgcttt

SEQ ID NO: 145443 - DNA, 25 bp, Artificial
  Probe
gactctggactatggaagatttcag

SEQ ID NO: 145444 - DNA, 25 bp, Artificial
  Probe
tgggtcttgtaatatctctaggaat

SEQ ID NO: 145445 - DNA, 25 bp, Artificial
  Probe
taatatctctaggaatggtgacacc

SEQ ID NO: 145446 - DNA, 25 bp, Artificial
  Probe
tttagagtcctttgctttgggtcat

SEQ ID NO: 145447 - DNA, 25 bp, Artificial
  Probe
ttctttagagtcctttgctttgggt

SEQ ID NO: 145448 - DNA, 25 bp, Artificial
  Probe
ctacactcaggtcccttctttagag

SEQ ID NO: 145449 - DNA, 25 bp, Artificial
  Probe
tactacccaactggattatttgaag

SEQ ID NO: 145450 - DNA, 25 bp, Artificial
  Probe
gggtcttgtaatatctctaggaatg

SEQ ID NO: 145451 - DNA, 25 bp, Artificial
  Probe
ttctcatgcctgggtcttgtaatat

SEQ ID NO: 145452 - DNA, 25 bp, Artificial
  Probe
ttgtgtaagaggcagataggttatg

SEQ ID NO: 145453 - DNA, 25 bp, Artificial
  Probe
ctactgtattcatccttaggtgtgc

SEQ ID NO: 145454 - DNA, 25 bp, Artificial
  Probe
tactgtattcatccttaggtgtgct

SEQ ID NO: 145455 - DNA, 25 bp, Artificial
  Probe
caagttgaaccttagcattgtcatt

SEQ ID NO: 145456 - DNA, 25 bp, Artificial
  Probe
tattcatccttaggtgtgctgagta

SEQ ID NO: 145457 - DNA, 25 bp, Artificial
  Probe
aacctgtgcttagttatcagagttc

SEQ ID NO: 145458 - DNA, 25 bp, Artificial
  Probe
caacctgtgcttagttatcagagtt

SEQ ID NO: 145459 - DNA, 25 bp, Artificial
  Probe
cctgtgcttagttatcagagttcag

SEQ ID NO: 145460 - DNA, 25 bp, Artificial
  Probe
taggacaagttgaaccttagcattg

SEQ ID NO: 145461 - DNA, 25 bp, Artificial
  Probe
ttgtgatgtgagcatggtgtataac

SEQ ID NO: 145462 - DNA, 25 bp, Artificial
  Probe
ttagttatcagagttcagctaccag

SEQ ID NO: 145463 - DNA, 25 bp, Artificial
  Probe
cttagttatcagagttcagctacca

SEQ ID NO: 145464 - DNA, 25 bp, Artificial
  Probe
acctgtgcttagttatcagagttca

SEQ ID NO: 145465 - DNA, 25 bp, Artificial
  Probe
actgtattcatccttaggtgtgctg

SEQ ID NO: 145466 - DNA, 25 bp, Artificial
  Probe
gtattcatccttaggtgtgctgagt

SEQ ID NO: 145467 - DNA, 25 bp, Artificial
  Probe
tgtattcatccttaggtgtgctgag

SEQ ID NO: 145468 - DNA, 25 bp, Artificial
  Probe
ctgtattcatccttaggtgtgctga

SEQ ID NO: 145469 - DNA, 25 bp, Artificial
  Probe
tttgtgtaagaggcagataggttat

SEQ ID NO: 145470 - DNA, 25 bp, Artificial
  Probe
ctggtgtgactatgctttaggatac

SEQ ID NO: 145471 - DNA, 25 bp, Artificial
  Probe
attcatccttaggtgtgctgagtac

SEQ ID NO: 145472 - DNA, 25 bp, Artificial
  Probe
atctcacattgtttctcttcctctg

SEQ ID NO: 145473 - DNA, 25 bp, Artificial
  Probe
gggaagccattctgtaacaataaat

SEQ ID NO: 145474 - DNA, 25 bp, Artificial
  Probe
atgctttaggatacattcacagttt

SEQ ID NO: 145475 - DNA, 25 bp, Artificial
  Probe
gatctcacattgtttctcttcctct

SEQ ID NO: 145476 - DNA, 25 bp, Artificial
  Probe
ccagttaagggtaaagaatcttcgt

SEQ ID NO: 145477 - DNA, 25 bp, Artificial
  Probe
aaagggatctcacattgtttctctt

SEQ ID NO: 145478 - DNA, 25 bp, Artificial
  Probe
tgctttaggatacattcacagttta

SEQ ID NO: 145479 - DNA, 25 bp, Artificial
  Probe
ctatttcagaggttcggtttgtgat

SEQ ID NO: 145480 - DNA, 25 bp, Artificial
  Probe
ctatgctttaggatacattcacagt

SEQ ID NO: 145481 - DNA, 25 bp, Artificial
  Probe
actatgctttaggatacattcacag

SEQ ID NO: 145482 - DNA, 25 bp, Artificial
  Probe
gactatgctttaggatacattcaca

SEQ ID NO: 145483 - DNA, 25 bp, Artificial
  Probe
ggtgtgactatgctttaggatacat

SEQ ID NO: 145484 - DNA, 25 bp, Artificial
  Probe
cagttaagggtaaagaatcttcgtt

SEQ ID NO: 145485 - DNA, 25 bp, Artificial
  Probe
aagggatctcacattgtttctcttc

SEQ ID NO: 145486 - DNA, 25 bp, Artificial
  Probe
tatttcagaggttcggtttgtgatg

SEQ ID NO: 145487 - DNA, 25 bp, Artificial
  Probe
agttaagggtaaagaatcttcgttc

SEQ ID NO: 145488 - DNA, 25 bp, Artificial
  Probe
tctcacattgtttctcttcctctga

SEQ ID NO: 145489 - DNA, 25 bp, Artificial
  Probe
gctggtgtgactatgctttaggata

SEQ ID NO: 145490 - DNA, 25 bp, Artificial
  Probe
ctgtgcttagttatcagagttcagc

SEQ ID NO: 145491 - DNA, 25 bp, Artificial
  Probe
tttgtgatgtgagcatggtgtataa

SEQ ID NO: 145492 - DNA, 25 bp, Artificial
  Probe
cctactgtattcatccttaggtgtg

SEQ ID NO: 145493 - DNA, 25 bp, Artificial
  Probe
tgcctgtattaatgggttctaaagt

SEQ ID NO: 145494 - DNA, 25 bp, Artificial
  Probe
gcccaattctatgcctgtattaatg

SEQ ID NO: 145495 - DNA, 25 bp, Artificial
  Probe
tgactatgctttaggatacattcac

SEQ ID NO: 145496 - DNA, 25 bp, Artificial
  Probe
gtgactatgctttaggatacattca

SEQ ID NO: 145497 - DNA, 25 bp, Artificial
  Probe
ataaccaagaccgaatacagacaga

SEQ ID NO: 145498 - DNA, 25 bp, Artificial
  Probe
cataaccaagaccgaatacagacag

SEQ ID NO: 145499 - DNA, 25 bp, Artificial
  Probe
taaccaagaccgaatacagacagaa

SEQ ID NO: 145500 - DNA, 25 bp, Artificial
  Probe
aatacagacagaaacagagacacaa

SEQ ID NO: 145501 - DNA, 25 bp, Artificial
  Probe
gcataaccaagaccgaatacagaca

SEQ ID NO: 145502 - DNA, 25 bp, Artificial
  Probe
aacacaagacaaacaacacaaagaa

SEQ ID NO: 145503 - DNA, 25 bp, Artificial
  Probe
aaacacaagacaaacaacacaaaga

SEQ ID NO: 145504 - DNA, 25 bp, Artificial
  Probe
gaatacagacagaaacagagacaca

SEQ ID NO: 145505 - DNA, 25 bp, Artificial
  Probe
atacagacagaaacagagacacaac

SEQ ID NO: 145506 - DNA, 25 bp, Artificial
  Probe
acaagacaaacaacacaaagaacac

SEQ ID NO: 145507 - DNA, 25 bp, Artificial
  Probe
cacaagacaaacaacacaaagaaca

SEQ ID NO: 145508 - DNA, 25 bp, Artificial
  Probe
acacaagacaaacaacacaaagaac

SEQ ID NO: 145509 - DNA, 25 bp, Artificial
  Probe
aaacaacacaaagaacaccaaacag

SEQ ID NO: 145510 - DNA, 25 bp, Artificial
  Probe
gacaaacaacacaaagaacaccaaa

SEQ ID NO: 145511 - DNA, 25 bp, Artificial
  Probe
cgaatacagacagaaacagagacac

SEQ ID NO: 145512 - DNA, 25 bp, Artificial
  Probe
caaacaacacaaagaacaccaaaca

SEQ ID NO: 145513 - DNA, 25 bp, Artificial
  Probe
acaaacaacacaaagaacaccaaac

SEQ ID NO: 145514 - DNA, 25 bp, Artificial
  Probe
gaggcataaccaagaccgaatacag

SEQ ID NO: 145515 - DNA, 25 bp, Artificial
  Probe
caagaccgaatacagacagaaacag

SEQ ID NO: 145516 - DNA, 25 bp, Artificial
  Probe
caagacaaacaacacaaagaacacc

SEQ ID NO: 145517 - DNA, 25 bp, Artificial
  Probe
aagaccgaatacagacagaaacaga

SEQ ID NO: 145518 - DNA, 25 bp, Artificial
  Probe
agacaaacaacacaaagaacaccaa

SEQ ID NO: 145519 - DNA, 25 bp, Artificial
  Probe
aagacaaacaacacaaagaacacca

SEQ ID NO: 145520 - DNA, 25 bp, Artificial
  Probe
ggcataaccaagaccgaatacagac

SEQ ID NO: 145521 - DNA, 25 bp, Artificial
  Probe
gaccgaatacagacagaaacagaga

SEQ ID NO: 145522 - DNA, 25 bp, Artificial
  Probe
agaccgaatacagacagaaacagag

SEQ ID NO: 145523 - DNA, 25 bp, Artificial
  Probe
aaccaagaccgaatacagacagaaa

SEQ ID NO: 145524 - DNA, 25 bp, Artificial
  Probe
aggcataaccaagaccgaatacaga

SEQ ID NO: 145525 - DNA, 25 bp, Artificial
  Probe
aaggaggcataaccaagaccgaata

SEQ ID NO: 145526 - DNA, 25 bp, Artificial
  Probe
aacaccaaacagcacaaacactaaa

SEQ ID NO: 145527 - DNA, 25 bp, Artificial
  Probe
ccgaatacagacagaaacagagaca

SEQ ID NO: 145528 - DNA, 25 bp, Artificial
  Probe
accgaatacagacagaaacagagac

SEQ ID NO: 145529 - DNA, 25 bp, Artificial
  Probe
tacagacagaaacagagacacaacc

SEQ ID NO: 145530 - DNA, 25 bp, Artificial
  Probe
aaacaccaccaaagaacaaagacac

SEQ ID NO: 145531 - DNA, 25 bp, Artificial
  Probe
caaacaccaccaaagaacaaagaca

SEQ ID NO: 145532 - DNA, 25 bp, Artificial
  Probe
gaacaccaaacagcacaaacactaa

SEQ ID NO: 145533 - DNA, 25 bp, Artificial
  Probe
ccaagaccgaatacagacagaaaca

SEQ ID NO: 145534 - DNA, 25 bp, Artificial
  Probe
accaagaccgaatacagacagaaac

SEQ ID NO: 145535 - DNA, 25 bp, Artificial
  Probe
ttgaaggaaatgatattgaacttgt

SEQ ID NO: 145536 - DNA, 25 bp, Artificial
  Probe
tgaaggaaatgatattgaacttgtt

SEQ ID NO: 145537 - DNA, 25 bp, Artificial
  Probe
aggaggcataaccaagaccgaatac

SEQ ID NO: 145538 - DNA, 25 bp, Artificial
  Probe
ccaaacaccaccaaagaacaaagac

SEQ ID NO: 145539 - DNA, 25 bp, Artificial
  Probe
agaacaccaaacagcacaaacacta

SEQ ID NO: 145540 - DNA, 25 bp, Artificial
  Probe
aaagaacaccaaacagcacaaacac

SEQ ID NO: 145541 - DNA, 25 bp, Artificial
  Probe
caaagaacaccaaacagcacaaaca

SEQ ID NO: 145542 - DNA, 25 bp, Artificial
  Probe
tagaaactgcttgtagtcctggttg

SEQ ID NO: 145543 - DNA, 25 bp, Artificial
  Probe
ttggacatacatcccaagggacaga

SEQ ID NO: 145544 - DNA, 25 bp, Artificial
  Probe
gcatgaactgacattaagaagtaga

SEQ ID NO: 145545 - DNA, 25 bp, Artificial
  Probe
actgacattaagaagtagataagca

SEQ ID NO: 145546 - DNA, 25 bp, Artificial
  Probe
caagcccatagtgtcttagattagt

SEQ ID NO: 145547 - DNA, 25 bp, Artificial
  Probe
gaagagcaaactgtggacatttaag

SEQ ID NO: 145548 - DNA, 25 bp, Artificial
  Probe
cccaacacctttacaaccttaataa

SEQ ID NO: 145549 - DNA, 25 bp, Artificial
  Probe
tactgcatgaactgacattaagaag

SEQ ID NO: 145550 - DNA, 25 bp, Artificial
  Probe
agcccatagtgtcttagattagtag

SEQ ID NO: 145551 - DNA, 25 bp, Artificial
  Probe
tgaagagcaaactgtggacatttaa

SEQ ID NO: 145552 - DNA, 25 bp, Artificial
  Probe
actgcatgaactgacattaagaagt

SEQ ID NO: 145553 - DNA, 25 bp, Artificial
  Probe
atgaagagcaaactgtggacattta

SEQ ID NO: 145554 - DNA, 25 bp, Artificial
  Probe
tgcatgaactgacattaagaagtag

SEQ ID NO: 145555 - DNA, 25 bp, Artificial
  Probe
ctgcatgaactgacattaagaagta

SEQ ID NO: 145556 - DNA, 25 bp, Artificial
  Probe
gcccatagtgtcttagattagtaga

SEQ ID NO: 145557 - DNA, 25 bp, Artificial
  Probe
atactgcatgaactgacattaagaa

SEQ ID NO: 145558 - DNA, 25 bp, Artificial
  Probe
aatactgcatgaactgacattaaga

SEQ ID NO: 145559 - DNA, 25 bp, Artificial
  Probe
aagcccatagtgtcttagattagta

SEQ ID NO: 145560 - DNA, 25 bp, Artificial
  Probe
taagtccagtacgaattgcctttaa

SEQ ID NO: 145561 - DNA, 25 bp, Artificial
  Probe
ttaagtccagtacgaattgccttta

SEQ ID NO: 145562 - DNA, 25 bp, Artificial
  Probe
ctgacattaagaagtagataagcaa

SEQ ID NO: 145563 - DNA, 25 bp, Artificial
  Probe
acaagcccatagtgtcttagattag

SEQ ID NO: 145564 - DNA, 25 bp, Artificial
  Probe
atttaagtccagtacgaattgcctt

SEQ ID NO: 145565 - DNA, 25 bp, Artificial
  Probe
aagagcaaactgtggacatttaagt

SEQ ID NO: 145566 - DNA, 25 bp, Artificial
  Probe
tttaagtccagtacgaattgccttt

SEQ ID NO: 145567 - DNA, 25 bp, Artificial
  Probe
catttaagtccagtacgaattgcct

SEQ ID NO: 145568 - DNA, 25 bp, Artificial
  Probe
cgctgagaaattgtaattgagttat

SEQ ID NO: 145569 - DNA, 25 bp, Artificial
  Probe
acatttaagtccagtacgaattgcc

SEQ ID NO: 145570 - DNA, 25 bp, Artificial
  Probe
aactgacattaagaagtagataagc

SEQ ID NO: 145571 - DNA, 25 bp, Artificial
  Probe
aagtccagtacgaattgcctttaac

SEQ ID NO: 145572 - DNA, 25 bp, Artificial
  Probe
gacatttaagtccagtacgaattgc

SEQ ID NO: 145573 - DNA, 25 bp, Artificial
  Probe
agagcaaactgtggacatttaagtc

SEQ ID NO: 145574 - DNA, 25 bp, Artificial
  Probe
ccaacacctttacaaccttaataat

SEQ ID NO: 145575 - DNA, 25 bp, Artificial
  Probe
gtccagtacgaattgcctttaacaa

SEQ ID NO: 145576 - DNA, 25 bp, Artificial
  Probe
acacctttacaaccttaataatgac

SEQ ID NO: 145577 - DNA, 25 bp, Artificial
  Probe
cagacaaatttaatgacaagcccat

SEQ ID NO: 145578 - DNA, 25 bp, Artificial
  Probe
atgcagacaaatttaatgacaagcc

SEQ ID NO: 145579 - DNA, 25 bp, Artificial
  Probe
catgaactgacattaagaagtagat

SEQ ID NO: 145580 - DNA, 25 bp, Artificial
  Probe
agtccagtacgaattgcctttaaca

SEQ ID NO: 145581 - DNA, 25 bp, Artificial
  Probe
acaaatttaatgacaagcccatagt

SEQ ID NO: 145582 - DNA, 25 bp, Artificial
  Probe
caaatttaatgacaagcccatagtg

SEQ ID NO: 145583 - DNA, 25 bp, Artificial
  Probe
catgaagagcaaactgtggacattt

SEQ ID NO: 145584 - DNA, 25 bp, Artificial
  Probe
agacaaatttaatgacaagcccata

SEQ ID NO: 145585 - DNA, 25 bp, Artificial
  Probe
tatgcagacaaatttaatgacaagc

SEQ ID NO: 145586 - DNA, 25 bp, Artificial
  Probe
cacctttacaaccttaataatgact

SEQ ID NO: 145587 - DNA, 25 bp, Artificial
  Probe
gacaaatttaatgacaagcccatag

SEQ ID NO: 145588 - DNA, 25 bp, Artificial
  Probe
aaatttaatgacaagcccatagtgt

SEQ ID NO: 145589 - DNA, 25 bp, Artificial
  Probe
tcaacttactccgtagtgatattgt

SEQ ID NO: 145590 - DNA, 25 bp, Artificial
  Probe
tactatatcattctcttgtgagccg

SEQ ID NO: 145591 - DNA, 25 bp, Artificial
  Probe
actcaacttactccgtagtgatatt

SEQ ID NO: 145592 - DNA, 25 bp, Artificial
  Probe
gagagaccatcttcacatctaccaa

SEQ ID NO: 145593 - DNA, 25 bp, Artificial
  Probe
ctcaacttactccgtagtgatattg

SEQ ID NO: 145594 - DNA, 25 bp, Artificial
  Probe
gatagcactcaacttactccgtagt

SEQ ID NO: 145595 - DNA, 25 bp, Artificial
  Probe
tatacttactgcctgcttgagtgtt

SEQ ID NO: 145596 - DNA, 25 bp, Artificial
  Probe
tgaccaagatccatcctctgataag

SEQ ID NO: 145597 - DNA, 25 bp, Artificial
  Probe
caacttactccgtagtgatattgta

SEQ ID NO: 145598 - DNA, 25 bp, Artificial
  Probe
gtactatatcattctcttgtgagcc

SEQ ID NO: 145599 - DNA, 25 bp, Artificial
  Probe
ggtactatatcattctcttgtgagc

SEQ ID NO: 145600 - DNA, 25 bp, Artificial
  Probe
ggattgtcaccatagagttagttgg

SEQ ID NO: 145601 - DNA, 25 bp, Artificial
  Probe
taacaatactgccattccctcttac

SEQ ID NO: 145602 - DNA, 25 bp, Artificial
  Probe
cttgagtgtttctatgtgtggattt

SEQ ID NO: 145603 - DNA, 25 bp, Artificial
  Probe
tagcacaaacagttctcattcctaa

SEQ ID NO: 145604 - DNA, 25 bp, Artificial
  Probe
gtaacaatactgccattccctctta

SEQ ID NO: 145605 - DNA, 25 bp, Artificial
  Probe
ataggacagaaagatacatagaccg

SEQ ID NO: 145606 - DNA, 25 bp, Artificial
  Probe
gggattgtcaccatagagttagttg

SEQ ID NO: 145607 - DNA, 25 bp, Artificial
  Probe
ccacagatgataggaaacacatact

SEQ ID NO: 145608 - DNA, 25 bp, Artificial
  Probe
gtagcacaaacagttctcattccta

SEQ ID NO: 145609 - DNA, 25 bp, Artificial
  Probe
accacagatgataggaaacacatac

SEQ ID NO: 145610 - DNA, 25 bp, Artificial
  Probe
aaccacagatgataggaaacacata

SEQ ID NO: 145611 - DNA, 25 bp, Artificial
  Probe
tttaatttcatcatctcccgacttg

SEQ ID NO: 145612 - DNA, 25 bp, Artificial
  Probe
acatttaatttcatcatctcccgac

SEQ ID NO: 145613 - DNA, 25 bp, Artificial
  Probe
aaaccacagatgataggaaacacat

SEQ ID NO: 145614 - DNA, 25 bp, Artificial
  Probe
ctcattcctaaggaccaattcagaa

SEQ ID NO: 145615 - DNA, 25 bp, Artificial
  Probe
ttctcattcctaaggaccaattcag

SEQ ID NO: 145616 - DNA, 25 bp, Artificial
  Probe
agttctcattcctaaggaccaattc

SEQ ID NO: 145617 - DNA, 25 bp, Artificial
  Probe
catttaatttcatcatctcccgact

SEQ ID NO: 145618 - DNA, 25 bp, Artificial
  Probe
gacatttaatttcatcatctcccga

SEQ ID NO: 145619 - DNA, 25 bp, Artificial
  Probe
attcctaaggaccaattcagaactg

SEQ ID NO: 145620 - DNA, 25 bp, Artificial
  Probe
cattcctaaggaccaattcagaact

SEQ ID NO: 145621 - DNA, 25 bp, Artificial
  Probe
tcattcctaaggaccaattcagaac

SEQ ID NO: 145622 - DNA, 25 bp, Artificial
  Probe
gttctcattcctaaggaccaattca

SEQ ID NO: 145623 - DNA, 25 bp, Artificial
  Probe
cagttctcattcctaaggaccaatt

SEQ ID NO: 145624 - DNA, 25 bp, Artificial
  Probe
agcacaaacagttctcattcctaag

SEQ ID NO: 145625 - DNA, 25 bp, Artificial
  Probe
cacagatgataggaaacacatactc

SEQ ID NO: 145626 - DNA, 25 bp, Artificial
  Probe
gaccaagatccatcctctgataagc

SEQ ID NO: 145627 - DNA, 25 bp, Artificial
  Probe
gcataggacagaaagatacatagac

SEQ ID NO: 145628 - DNA, 25 bp, Artificial
  Probe
tctcattcctaaggaccaattcaga

SEQ ID NO: 145629 - DNA, 25 bp, Artificial
  Probe
cttactccgtagtgatattgtaaca

SEQ ID NO: 145630 - DNA, 25 bp, Artificial
  Probe
acttactccgtagtgatattgtaac

SEQ ID NO: 145631 - DNA, 25 bp, Artificial
  Probe
gcttgagtgtttctatgtgtggatt

SEQ ID NO: 145632 - DNA, 25 bp, Artificial
  Probe
acaatgatactagcacattctcttg

SEQ ID NO: 145633 - DNA, 25 bp, Artificial
  Probe
ttaatttcatcatctcccgacttga

SEQ ID NO: 145634 - DNA, 25 bp, Artificial
  Probe
cagattgtgaagaatttctcccttg

SEQ ID NO: 145635 - DNA, 25 bp, Artificial
  Probe
agattgtgaagaatttctcccttgg

SEQ ID NO: 145636 - DNA, 25 bp, Artificial
  Probe
acagattgtgaagaatttctccctt

SEQ ID NO: 145637 - DNA, 25 bp, Artificial
  Probe
gacagattgtgaagaatttctccct

SEQ ID NO: 145638 - DNA, 25 bp, Artificial
  Probe
atgacagattgtgaagaatttctcc

SEQ ID NO: 145639 - DNA, 25 bp, Artificial
  Probe
tgacagattgtgaagaatttctccc

SEQ ID NO: 145640 - DNA, 25 bp, Artificial
  Probe
gcatgacagattgtgaagaatttct

SEQ ID NO: 145641 - DNA, 25 bp, Artificial
  Probe
gattgtgaagaatttctcccttggg

SEQ ID NO: 145642 - DNA, 25 bp, Artificial
  Probe
tatgccttcaacggaggtactgtat

SEQ ID NO: 145643 - DNA, 25 bp, Artificial
  Probe
catgacagattgtgaagaatttctc

SEQ ID NO: 145644 - DNA, 25 bp, Artificial
  Probe
ttatgccttcaacggaggtactgta

SEQ ID NO: 145645 - DNA, 25 bp, Artificial
  Probe
gcacatgcccacatacaagtatatg

SEQ ID NO: 145646 - DNA, 25 bp, Artificial
  Probe
ccttactatgtctacaacatcattg

SEQ ID NO: 145647 - DNA, 25 bp, Artificial
  Probe
atgccttcaacggaggtactgtatt

SEQ ID NO: 145648 - DNA, 25 bp, Artificial
  Probe
tgcacatgcccacatacaagtatat

SEQ ID NO: 145649 - DNA, 25 bp, Artificial
  Probe
cttatgccttcaacggaggtactgt

SEQ ID NO: 145650 - DNA, 25 bp, Artificial
  Probe
tgccttcaacggaggtactgtattg

SEQ ID NO: 145651 - DNA, 25 bp, Artificial
  Probe
ccttatgccttcaacggaggtactg

SEQ ID NO: 145652 - DNA, 25 bp, Artificial
  Probe
acatgcccacatacaagtatatgta

SEQ ID NO: 145653 - DNA, 25 bp, Artificial
  Probe
cacatgcccacatacaagtatatgt

SEQ ID NO: 145654 - DNA, 25 bp, Artificial
  Probe
ttttccatcgttgcttcagacactc

SEQ ID NO: 145655 - DNA, 25 bp, Artificial
  Probe
catgcccacatacaagtatatgtat

SEQ ID NO: 145656 - DNA, 25 bp, Artificial
  Probe
tgcccacatacaagtatatgtataa

SEQ ID NO: 145657 - DNA, 25 bp, Artificial
  Probe
atgcccacatacaagtatatgtata

SEQ ID NO: 145658 - DNA, 25 bp, Artificial
  Probe
attgtgaagaatttctcccttgggg

SEQ ID NO: 145659 - DNA, 25 bp, Artificial
  Probe
gcccacatacaagtatatgtataat

SEQ ID NO: 145660 - DNA, 25 bp, Artificial
  Probe
ccagcacaatgaagattaagatcat

SEQ ID NO: 145661 - DNA, 25 bp, Artificial
  Probe
catcgacacctgtaaatgtattcat

SEQ ID NO: 145662 - DNA, 25 bp, Artificial
  Probe
gcatcgacacctgtaaatgtattca

SEQ ID NO: 145663 - DNA, 25 bp, Artificial
  Probe
caatttaatcgccttggagcacatc

SEQ ID NO: 145664 - DNA, 25 bp, Artificial
  Probe
tgcatcgacacctgtaaatgtattc

SEQ ID NO: 145665 - DNA, 25 bp, Artificial
  Probe
atggacatttgaaagcgttaaaatt

SEQ ID NO: 145666 - DNA, 25 bp, Artificial
  Probe
aatggacatttgaaagcgttaaaat

SEQ ID NO: 145667 - DNA, 25 bp, Artificial
  Probe
tatgtttaataccctgtgcatatct

SEQ ID NO: 145668 - DNA, 25 bp, Artificial
  Probe
aaatggacatttgaaagcgttaaaa

SEQ ID NO: 145669 - DNA, 25 bp, Artificial
  Probe
aaaccctggcgtacccaatttaatc

SEQ ID NO: 145670 - DNA, 25 bp, Artificial
  Probe
aatttaatcgccttggagcacatcc

SEQ ID NO: 145671 - DNA, 25 bp, Artificial
  Probe
tggacatttgaaagcgttaaaattt

SEQ ID NO: 145672 - DNA, 25 bp, Artificial
  Probe
cagcacaatgaagattaagatcatt

SEQ ID NO: 145673 - DNA, 25 bp, Artificial
  Probe
gagtcgtattacaattcactggccc

SEQ ID NO: 145674 - DNA, 25 bp, Artificial
  Probe
aaaaccctggcgtacccaatttaat

SEQ ID NO: 145675 - DNA, 25 bp, Artificial
  Probe
atatgtttaataccctgtgcatatc

SEQ ID NO: 145676 - DNA, 25 bp, Artificial
  Probe
gaaaaccctggcgtacccaatttaa

SEQ ID NO: 145677 - DNA, 25 bp, Artificial
  Probe
actcaattctttaagaaatgacaaa

SEQ ID NO: 145678 - DNA, 25 bp, Artificial
  Probe
gtactcaattctttaagaaatgaca

SEQ ID NO: 145679 - DNA, 25 bp, Artificial
  Probe
tttacaacgtggtgactgggaaaac

SEQ ID NO: 145680 - DNA, 25 bp, Artificial
  Probe
cagataagggttggaggggttgttc

SEQ ID NO: 145681 - DNA, 25 bp, Artificial
  Probe
taacccaaattcacttaatacaaaa

SEQ ID NO: 145682 - DNA, 25 bp, Artificial
  Probe
caaatggacatttgaaagcgttaaa

SEQ ID NO: 145683 - DNA, 25 bp, Artificial
  Probe
gtttacaacgtggtgactgggaaaa

SEQ ID NO: 145684 - DNA, 25 bp, Artificial
  Probe
ccaaatggacatttgaaagcgttaa

SEQ ID NO: 145685 - DNA, 25 bp, Artificial
  Probe
catttgaaagcgttaaaattttggt

SEQ ID NO: 145686 - DNA, 25 bp, Artificial
  Probe
acatttgaaagcgttaaaattttgg

SEQ ID NO: 145687 - DNA, 25 bp, Artificial
  Probe
cgtacccaatttaatcgccttggag

SEQ ID NO: 145688 - DNA, 25 bp, Artificial
  Probe
ggacatttgaaagcgttaaaatttt

SEQ ID NO: 145689 - DNA, 25 bp, Artificial
  Probe
agtcgtattacaattcactggcccg

SEQ ID NO: 145690 - DNA, 25 bp, Artificial
  Probe
ccaatttaatcgccttggagcacat

SEQ ID NO: 145691 - DNA, 25 bp, Artificial
  Probe
gtacccaatttaatcgccttggagc

SEQ ID NO: 145692 - DNA, 25 bp, Artificial
  Probe
ttgaaagcgttaaaattttggtaaa

SEQ ID NO: 145693 - DNA, 25 bp, Artificial
  Probe
tttgaaagcgttaaaattttggtaa

SEQ ID NO: 145694 - DNA, 25 bp, Artificial
  Probe
tatatgtttaataccctgtgcatat

SEQ ID NO: 145695 - DNA, 25 bp, Artificial
  Probe
gacatttgaaagcgttaaaattttg

SEQ ID NO: 145696 - DNA, 25 bp, Artificial
  Probe
tacccaatttaatcgccttggagca

SEQ ID NO: 145697 - DNA, 25 bp, Artificial
  Probe
gccaaatggacatttgaaagcgtta

SEQ ID NO: 145698 - DNA, 25 bp, Artificial
  Probe
atttgaaagcgttaaaattttggta

SEQ ID NO: 145699 - DNA, 25 bp, Artificial
  Probe
tgaaagcgttaaaattttggtaaaa

SEQ ID NO: 145700 - DNA, 25 bp, Artificial
  Probe
ttcctgaataatgtaacagtgcctt

SEQ ID NO: 145701 - DNA, 25 bp, Artificial
  Probe
aacataattgtatccagcagaagga

SEQ ID NO: 145702 - DNA, 25 bp, Artificial
  Probe
ttcctgtgtaaatgctctgatgatt

SEQ ID NO: 145703 - DNA, 25 bp, Artificial
  Probe
tacttcctgtgtaaatgctctgatg

SEQ ID NO: 145704 - DNA, 25 bp, Artificial
  Probe
gctctgatgatttcctgaataatgt

SEQ ID NO: 145705 - DNA, 25 bp, Artificial
  Probe
tgctctgatgatttcctgaataatg

SEQ ID NO: 145706 - DNA, 25 bp, Artificial
  Probe
cttcctgtgtaaatgctctgatgat

SEQ ID NO: 145707 - DNA, 25 bp, Artificial
  Probe
aatgctctgatgatttcctgaataa

SEQ ID NO: 145708 - DNA, 25 bp, Artificial
  Probe
atgctctgatgatttcctgaataat

SEQ ID NO: 145709 - DNA, 25 bp, Artificial
  Probe
tgtaaatgctctgatgatttcctga

SEQ ID NO: 145710 - DNA, 25 bp, Artificial
  Probe
gtgtaaatgctctgatgatttcctg

SEQ ID NO: 145711 - DNA, 25 bp, Artificial
  Probe
ctgtgtaaatgctctgatgatttcc

SEQ ID NO: 145712 - DNA, 25 bp, Artificial
  Probe
cctgtgtaaatgctctgatgatttc

SEQ ID NO: 145713 - DNA, 25 bp, Artificial
  Probe
aataatgtaacagtgcctttgccat

SEQ ID NO: 145714 - DNA, 25 bp, Artificial
  Probe
acttcctgtgtaaatgctctgatga

SEQ ID NO: 145715 - DNA, 25 bp, Artificial
  Probe
tgtgtaaatgctctgatgatttcct

SEQ ID NO: 145716 - DNA, 25 bp, Artificial
  Probe
tcctgtgtaaatgctctgatgattt

SEQ ID NO: 145717 - DNA, 25 bp, Artificial
  Probe
actcaaacataattgtatccagcag

SEQ ID NO: 145718 - DNA, 25 bp, Artificial
  Probe
gtaaatgctctgatgatttcctgaa

SEQ ID NO: 145719 - DNA, 25 bp, Artificial
  Probe
aaacataattgtatccagcagaagg

SEQ ID NO: 145720 - DNA, 25 bp, Artificial
  Probe
ctgtgcttgctgtgtttgtaaattc

SEQ ID NO: 145721 - DNA, 25 bp, Artificial
  Probe
ctcaaacataattgtatccagcaga

SEQ ID NO: 145722 - DNA, 25 bp, Artificial
  Probe
cctgaataatgtaacagtgcctttg

SEQ ID NO: 145723 - DNA, 25 bp, Artificial
  Probe
tcctgaataatgtaacagtgccttt

SEQ ID NO: 145724 - DNA, 25 bp, Artificial
  Probe
tttcctgaataatgtaacagtgcct

SEQ ID NO: 145725 - DNA, 25 bp, Artificial
  Probe
atttcctgaataatgtaacagtgcc

SEQ ID NO: 145726 - DNA, 25 bp, Artificial
  Probe
aactcaaacataattgtatccagca

SEQ ID NO: 145727 - DNA, 25 bp, Artificial
  Probe
gaataatgtaacagtgcctttgcca

SEQ ID NO: 145728 - DNA, 25 bp, Artificial
  Probe
tgaataatgtaacagtgcctttgcc

SEQ ID NO: 145729 - DNA, 25 bp, Artificial
  Probe
ctgaataatgtaacagtgcctttgc

SEQ ID NO: 145730 - DNA, 25 bp, Artificial
  Probe
tgtgcttgctgtgtttgtaaattct

SEQ ID NO: 145731 - DNA, 25 bp, Artificial
  Probe
tcaaacataattgtatccagcagaa

SEQ ID NO: 145732 - DNA, 25 bp, Artificial
  Probe
caaacataattgtatccagcagaag

SEQ ID NO: 145733 - DNA, 25 bp, Artificial
  Probe
aaatgctctgatgatttcctgaata

SEQ ID NO: 145734 - DNA, 25 bp, Artificial
  Probe
taaatgctctgatgatttcctgaat

SEQ ID NO: 145735 - DNA, 25 bp, Artificial
  Probe
ttacttcctgtgtaaatgctctgat

SEQ ID NO: 145736 - DNA, 25 bp, Artificial
  Probe
gatttcctgaataatgtaacagtgc

SEQ ID NO: 145737 - DNA, 25 bp, Artificial
  Probe
cgtgctttaaactgagtgttgataa

SEQ ID NO: 145738 - DNA, 25 bp, Artificial
  Probe
aaactcaaacataattgtatccagc

SEQ ID NO: 145739 - DNA, 25 bp, Artificial
  Probe
ttctaagacgtgctttaaactgagt

SEQ ID NO: 145740 - DNA, 25 bp, Artificial
  Probe
attctaagacgtgctttaaactgag

SEQ ID NO: 145741 - DNA, 25 bp, Artificial
  Probe
acataattgtatccagcagaaggat

SEQ ID NO: 145742 - DNA, 25 bp, Artificial
  Probe
cctgtgcttgctgtgtttgtaaatt

SEQ ID NO: 145743 - DNA, 25 bp, Artificial
  Probe
tctaagacgtgctttaaactgagtg

SEQ ID NO: 145744 - DNA, 25 bp, Artificial
  Probe
taagacgtgctttaaactgagtgtt

SEQ ID NO: 145745 - DNA, 25 bp, Artificial
  Probe
ctggacttcttcttcttcttcttct

SEQ ID NO: 145746 - DNA, 25 bp, Artificial
  Probe
tgcttcttcttcttcttcttcttct

SEQ ID NO: 145747 - DNA, 25 bp, Artificial
  Probe
ttcttcttcttcttcttcttctgct

SEQ ID NO: 145748 - DNA, 25 bp, Artificial
  Probe
cttcttcttcttcctcttcttcctc

SEQ ID NO: 145749 - DNA, 25 bp, Artificial
  Probe
ctgcttcttcttcttcttcttcttc

SEQ ID NO: 145750 - DNA, 25 bp, Artificial
  Probe
cttcttcttcttcttcttcttctgc

SEQ ID NO: 145751 - DNA, 25 bp, Artificial
  Probe
tcttcttcttcttcttcttctgctg

SEQ ID NO: 145752 - DNA, 25 bp, Artificial
  Probe
tggacttcttcttcttcttcttctt

SEQ ID NO: 145753 - DNA, 25 bp, Artificial
  Probe
tcttcttcttcttctccttcttctt

SEQ ID NO: 145754 - DNA, 25 bp, Artificial
  Probe
ttcttcttcttcttctccttcttct

SEQ ID NO: 145755 - DNA, 25 bp, Artificial
  Probe
tcttcttcttcttcttctccttctt

SEQ ID NO: 145756 - DNA, 25 bp, Artificial
  Probe
ttcttcttcttcttcttctccttct

SEQ ID NO: 145757 - DNA, 25 bp, Artificial
  Probe
tcttcttcttcttcttcttctcctt

SEQ ID NO: 145758 - DNA, 25 bp, Artificial
  Probe
ttcttcttcttcttcttcttctcct

SEQ ID NO: 145759 - DNA, 25 bp, Artificial
  Probe
gcttcttcttcttcttcttcttctt

SEQ ID NO: 145760 - DNA, 25 bp, Artificial
  Probe
ctgcttcttcttcttcctcttcttc

SEQ ID NO: 145761 - DNA, 25 bp, Artificial
  Probe
cttcttcttcttcttctccttcttc

SEQ ID NO: 145762 - DNA, 25 bp, Artificial
  Probe
cttcttcttcttcttcttctccttc

SEQ ID NO: 145763 - DNA, 25 bp, Artificial
  Probe
cttcttcttcttcttcttcttctcc

SEQ ID NO: 145764 - DNA, 25 bp, Artificial
  Probe
gctgcttcttcttcttcttcttctt

SEQ ID NO: 145765 - DNA, 25 bp, Artificial
  Probe
tctgcttcttcttcttcctcttctt

SEQ ID NO: 145766 - DNA, 25 bp, Artificial
  Probe
ttctgcttcttcttcttcctcttct

SEQ ID NO: 145767 - DNA, 25 bp, Artificial
  Probe
gctggacttcttcttcttcttcttc

SEQ ID NO: 145768 - DNA, 25 bp, Artificial
  Probe
tctctagcctatctcatctgaactc

SEQ ID NO: 145769 - DNA, 25 bp, Artificial
  Probe
ttcttcttcttcctcttcttcctcc

SEQ ID NO: 145770 - DNA, 25 bp, Artificial
  Probe
gtctctagcctatctcatctgaact

SEQ ID NO: 145771 - DNA, 25 bp, Artificial
  Probe
tagcctatctcatctgaactcctct

SEQ ID NO: 145772 - DNA, 25 bp, Artificial
  Probe
cttcttcttcctcttcttcctcctc

SEQ ID NO: 145773 - DNA, 25 bp, Artificial
  Probe
ctgctgcttcttcttcttcttcttc

SEQ ID NO: 145774 - DNA, 25 bp, Artificial
  Probe
cttcttcttcttcttcttctgctgc

SEQ ID NO: 145775 - DNA, 25 bp, Artificial
  Probe
tcttcttcttcttcttcttcttctg

SEQ ID NO: 145776 - DNA, 25 bp, Artificial
  Probe
tgctggacttcttcttcttcttctt

SEQ ID NO: 145777 - DNA, 25 bp, Artificial
  Probe
ctagcctatctcatctgaactcctc

SEQ ID NO: 145778 - DNA, 25 bp, Artificial
  Probe
ctctagcctatctcatctgaactcc

SEQ ID NO: 145779 - DNA, 25 bp, Artificial
  Probe
gcttcttcttcttcctcttcttcct

SEQ ID NO: 145780 - DNA, 25 bp, Artificial
  Probe
tctagcctatctcatctgaactcct

SEQ ID NO: 145781 - DNA, 25 bp, Artificial
  Probe
ggtctctagcctatctcatctgaac

SEQ ID NO: 145782 - DNA, 25 bp, Artificial
  Probe
tcttcttcttcctcttcttcctcct

SEQ ID NO: 145783 - DNA, 25 bp, Artificial
  Probe
tcttcttcttcttcttcttcttctc

SEQ ID NO: 145784 - DNA, 25 bp, Artificial
  Probe
aactgctggacttcttcttcttctt

SEQ ID NO: 145785 - DNA, 25 bp, Artificial
  Probe
tgctgcttcttcttcttcttcttct

SEQ ID NO: 145786 - DNA, 25 bp, Artificial
  Probe
ttcttcttcttcttcttctgctgct

SEQ ID NO: 145787 - DNA, 25 bp, Artificial
  Probe
tgcttcttcttcttcctcttcttcc

SEQ ID NO: 145788 - DNA, 25 bp, Artificial
  Probe
ctgctggacttcttcttcttcttct

SEQ ID NO: 145789 - DNA, 25 bp, Artificial
  Probe
actgctggacttcttcttcttcttc

SEQ ID NO: 145790 - DNA, 25 bp, Artificial
  Probe
ctcaggcactaacttatacagctaa

SEQ ID NO: 145791 - DNA, 25 bp, Artificial
  Probe
cctcaggcactaacttatacagcta

SEQ ID NO: 145792 - DNA, 25 bp, Artificial
  Probe
gattacattcatgtggtggatctgg

SEQ ID NO: 145793 - DNA, 25 bp, Artificial
  Probe
ggattacattcatgtggtggatctg

SEQ ID NO: 145794 - DNA, 25 bp, Artificial
  Probe
caggcactaacttatacagctaaga

SEQ ID NO: 145795 - DNA, 25 bp, Artificial
  Probe
tcaggcactaacttatacagctaag

SEQ ID NO: 145796 - DNA, 25 bp, Artificial
  Probe
aggcactaacttatacagctaagat

SEQ ID NO: 145797 - DNA, 25 bp, Artificial
  Probe
ctacggcaagtccaagttcttcatt

SEQ ID NO: 145798 - DNA, 25 bp, Artificial
  Probe
ggcactaacttatacagctaagatt

SEQ ID NO: 145799 - DNA, 25 bp, Artificial
  Probe
ctccctcaggcactaacttatacag

SEQ ID NO: 145800 - DNA, 25 bp, Artificial
  Probe
agcacctctttaagaagcacaattt

SEQ ID NO: 145801 - DNA, 25 bp, Artificial
  Probe
cctgaatgtctttggtgatgactac

SEQ ID NO: 145802 - DNA, 25 bp, Artificial
  Probe
tacggcaagtccaagttcttcattg

SEQ ID NO: 145803 - DNA, 25 bp, Artificial
  Probe
ctgaatgtctttggtgatgactacg

SEQ ID NO: 145804 - DNA, 25 bp, Artificial
  Probe
cagcacctctttaagaagcacaatt

SEQ ID NO: 145805 - DNA, 25 bp, Artificial
  Probe
gcactaacttatacagctaagattg

SEQ ID NO: 145806 - DNA, 25 bp, Artificial
  Probe
ttcattgaagagatgatccaggacc

SEQ ID NO: 145807 - DNA, 25 bp, Artificial
  Probe
attacattcatgtggtggatctggc

SEQ ID NO: 145808 - DNA, 25 bp, Artificial
  Probe
aatgtctttggtgatgactacgcta

SEQ ID NO: 145809 - DNA, 25 bp, Artificial
  Probe
cattgaagagatgatccaggacctg

SEQ ID NO: 145810 - DNA, 25 bp, Artificial
  Probe
tacagcacctctttaagaagcacaa

SEQ ID NO: 145811 - DNA, 25 bp, Artificial
  Probe
gacaggtgtgagggattacattcat

SEQ ID NO: 145812 - DNA, 25 bp, Artificial
  Probe
ccctgaatgtctttggtgatgacta

SEQ ID NO: 145813 - DNA, 25 bp, Artificial
  Probe
attgaagagatgatccaggacctgt

SEQ ID NO: 145814 - DNA, 25 bp, Artificial
  Probe
ctacagcacctctttaagaagcaca

SEQ ID NO: 145815 - DNA, 25 bp, Artificial
  Probe
atgtctttggtgatgactacgctac

SEQ ID NO: 145816 - DNA, 25 bp, Artificial
  Probe
tcattgaagagatgatccaggacct

SEQ ID NO: 145817 - DNA, 25 bp, Artificial
  Probe
cggcaagtccaagttcttcattgaa

SEQ ID NO: 145818 - DNA, 25 bp, Artificial
  Probe
gggattacattcatgtggtggatct

SEQ ID NO: 145819 - DNA, 25 bp, Artificial
  Probe
agggattacattcatgtggtggatc

SEQ ID NO: 145820 - DNA, 25 bp, Artificial
  Probe
gagggattacattcatgtggtggat

SEQ ID NO: 145821 - DNA, 25 bp, Artificial
  Probe
acagcacctctttaagaagcacaat

SEQ ID NO: 145822 - DNA, 25 bp, Artificial
  Probe
cttcattgaagagatgatccaggac

SEQ ID NO: 145823 - DNA, 25 bp, Artificial
  Probe
aggtgtgagggattacattcatgtg

SEQ ID NO: 145824 - DNA, 25 bp, Artificial
  Probe
caggtgtgagggattacattcatgt

SEQ ID NO: 145825 - DNA, 25 bp, Artificial
  Probe
acaggtgtgagggattacattcatg

SEQ ID NO: 145826 - DNA, 25 bp, Artificial
  Probe
aattttaaggctgtcatccactttg

SEQ ID NO: 145827 - DNA, 25 bp, Artificial
  Probe
caattttaaggctgtcatccacttt

SEQ ID NO: 145828 - DNA, 25 bp, Artificial
  Probe
tgtgagggattacattcatgtggtg

SEQ ID NO: 145829 - DNA, 25 bp, Artificial
  Probe
gtgtgagggattacattcatgtggt

SEQ ID NO: 145830 - DNA, 25 bp, Artificial
  Probe
gaatgtctttggtgatgactacgct

SEQ ID NO: 145831 - DNA, 25 bp, Artificial
  Probe
ctaacttatacagctaagattgagc

SEQ ID NO: 145832 - DNA, 25 bp, Artificial
  Probe
cctacagcacctctttaagaagcac

SEQ ID NO: 145833 - DNA, 25 bp, Artificial
  Probe
tccctcaggcactaacttatacagc

SEQ ID NO: 145834 - DNA, 25 bp, Artificial
  Probe
cctccctcaggcactaacttataca

SEQ ID NO: 145835 - DNA, 25 bp, Artificial
  Probe
ttcctgctcctatctaacttcaatg

SEQ ID NO: 145836 - DNA, 25 bp, Artificial
  Probe
cttcctgctcctatctaacttcaat

SEQ ID NO: 145837 - DNA, 25 bp, Artificial
  Probe
cctgctcctatctaacttcaatgta

SEQ ID NO: 145838 - DNA, 25 bp, Artificial
  Probe
tcctgctcctatctaacttcaatgt

SEQ ID NO: 145839 - DNA, 25 bp, Artificial
  Probe
ctgctcctatctaacttcaatgtaa

SEQ ID NO: 145840 - DNA, 25 bp, Artificial
  Probe
gattatgccatgattgtctctctgt

SEQ ID NO: 145841 - DNA, 25 bp, Artificial
  Probe
attatgccatgattgtctctctgtg

SEQ ID NO: 145842 - DNA, 25 bp, Artificial
  Probe
gcttcctgctcctatctaacttcaa

SEQ ID NO: 145843 - DNA, 25 bp, Artificial
  Probe
ttagatagacggtactcaatggctc

SEQ ID NO: 145844 - DNA, 25 bp, Artificial
  Probe
agattatgccatgattgtctctctg

SEQ ID NO: 145845 - DNA, 25 bp, Artificial
  Probe
cagattatgccatgattgtctctct

SEQ ID NO: 145846 - DNA, 25 bp, Artificial
  Probe
tcagattatgccatgattgtctctc

SEQ ID NO: 145847 - DNA, 25 bp, Artificial
  Probe
tgctcctatctaacttcaatgtaat

SEQ ID NO: 145848 - DNA, 25 bp, Artificial
  Probe
tcaaatgggaggttattcaggtatc

SEQ ID NO: 145849 - DNA, 25 bp, Artificial
  Probe
cacttctatttctacagggttgact

SEQ ID NO: 145850 - DNA, 25 bp, Artificial
  Probe
ttcctcaactctctgctactctctc

SEQ ID NO: 145851 - DNA, 25 bp, Artificial
  Probe
tagatagacggtactcaatggctct

SEQ ID NO: 145852 - DNA, 25 bp, Artificial
  Probe
cccactaatcaatctttcctcaact

SEQ ID NO: 145853 - DNA, 25 bp, Artificial
  Probe
atcaaatgggaggttattcaggtat

SEQ ID NO: 145854 - DNA, 25 bp, Artificial
  Probe
ccactaatcaatctttcctcaactc

SEQ ID NO: 145855 - DNA, 25 bp, Artificial
  Probe
tacccactaatcaatctttcctcaa

SEQ ID NO: 145856 - DNA, 25 bp, Artificial
  Probe
acttctatttctacagggttgactt

SEQ ID NO: 145857 - DNA, 25 bp, Artificial
  Probe
acccactaatcaatctttcctcaac

SEQ ID NO: 145858 - DNA, 25 bp, Artificial
  Probe
atgtatgaatcagattatgccatga

SEQ ID NO: 145859 - DNA, 25 bp, Artificial
  Probe
ccacttctatttctacagggttgac

SEQ ID NO: 145860 - DNA, 25 bp, Artificial
  Probe
atacccactaatcaatctttcctca

SEQ ID NO: 145861 - DNA, 25 bp, Artificial
  Probe
catcaaatgggaggttattcaggta

SEQ ID NO: 145862 - DNA, 25 bp, Artificial
  Probe
gaaagcatcaaatgggaggttattc

SEQ ID NO: 145863 - DNA, 25 bp, Artificial
  Probe
aatcaatctttcctcaactctctgc

SEQ ID NO: 145864 - DNA, 25 bp, Artificial
  Probe
cacatagacagaaagcatcaaatgg

SEQ ID NO: 145865 - DNA, 25 bp, Artificial
  Probe
ccacatagacagaaagcatcaaatg

SEQ ID NO: 145866 - DNA, 25 bp, Artificial
  Probe
aatctttcctcaactctctgctact

SEQ ID NO: 145867 - DNA, 25 bp, Artificial
  Probe
caatctttcctcaactctctgctac

SEQ ID NO: 145868 - DNA, 25 bp, Artificial
  Probe
agaaagcatcaaatgggaggttatt

SEQ ID NO: 145869 - DNA, 25 bp, Artificial
  Probe
tctatgtatgaatcagattatgcca

SEQ ID NO: 145870 - DNA, 25 bp, Artificial
  Probe
ctcagtgtgtatccaaggatgactt

SEQ ID NO: 145871 - DNA, 25 bp, Artificial
  Probe
gaactcagtgtgtatccaaggatga

SEQ ID NO: 145872 - DNA, 25 bp, Artificial
  Probe
caaatgggaggttattcaggtatcg

SEQ ID NO: 145873 - DNA, 25 bp, Artificial
  Probe
tcaatctttcctcaactctctgcta

SEQ ID NO: 145874 - DNA, 25 bp, Artificial
  Probe
atagacagaaagcatcaaatgggag

SEQ ID NO: 145875 - DNA, 25 bp, Artificial
  Probe
aaagcatcaaatgggaggttattca

SEQ ID NO: 145876 - DNA, 25 bp, Artificial
  Probe
cccacatagacagaaagcatcaaat

SEQ ID NO: 145877 - DNA, 25 bp, Artificial
  Probe
catagacagaaagcatcaaatggga

SEQ ID NO: 145878 - DNA, 25 bp, Artificial
  Probe
aactcagtgtgtatccaaggatgac

SEQ ID NO: 145879 - DNA, 25 bp, Artificial
  Probe
cttctatttctacagggttgacttt

SEQ ID NO: 145880 - DNA, 25 bp, Artificial
  Probe
gaacatcttctccttctacctgaac

SEQ ID NO: 145881 - DNA, 25 bp, Artificial
  Probe
aacatcttctccttctacctgaaca

SEQ ID NO: 145882 - DNA, 25 bp, Artificial
  Probe
acatcttctccttctacctgaacag

SEQ ID NO: 145883 - DNA, 25 bp, Artificial
  Probe
gtcagacttaggaggtatcaaggtg

SEQ ID NO: 145884 - DNA, 25 bp, Artificial
  Probe
acttaggaggtatcaaggtggagaa

SEQ ID NO: 145885 - DNA, 25 bp, Artificial
  Probe
gacttaggaggtatcaaggtggaga

SEQ ID NO: 145886 - DNA, 25 bp, Artificial
  Probe
agacttaggaggtatcaaggtggag

SEQ ID NO: 145887 - DNA, 25 bp, Artificial
  Probe
cagacttaggaggtatcaaggtgga

SEQ ID NO: 145888 - DNA, 25 bp, Artificial
  Probe
tcagacttaggaggtatcaaggtgg

SEQ ID NO: 145889 - DNA, 25 bp, Artificial
  Probe
agtcagacttaggaggtatcaaggt

SEQ ID NO: 145890 - DNA, 25 bp, Artificial
  Probe
ttaggaggtatcaaggtggagaaac

SEQ ID NO: 145891 - DNA, 25 bp, Artificial
  Probe
cttaggaggtatcaaggtggagaaa

SEQ ID NO: 145892 - DNA, 25 bp, Artificial
  Probe
cgatgtctttattggctgctactac

SEQ ID NO: 145893 - DNA, 25 bp, Artificial
  Probe
agaacatcttctccttctacctgaa

SEQ ID NO: 145894 - DNA, 25 bp, Artificial
  Probe
aagaacatcttctccttctacctga

SEQ ID NO: 145895 - DNA, 25 bp, Artificial
  Probe
gggagccaaagttgatatacaaata

SEQ ID NO: 145896 - DNA, 25 bp, Artificial
  Probe
gaggtatcaaggtggagaaacagat

SEQ ID NO: 145897 - DNA, 25 bp, Artificial
  Probe
cgagtatatgatcccttgtgagaag

SEQ ID NO: 145898 - DNA, 25 bp, Artificial
  Probe
gatgtctttattggctgctactaca

SEQ ID NO: 145899 - DNA, 25 bp, Artificial
  Probe
atgtctttattggctgctactacac

SEQ ID NO: 145900 - DNA, 25 bp, Artificial
  Probe
taggaggtatcaaggtggagaaaca

SEQ ID NO: 145901 - DNA, 25 bp, Artificial
  Probe
caacctggaggagaactaatgcttg

SEQ ID NO: 145902 - DNA, 25 bp, Artificial
  Probe
aggtatcaaggtggagaaacagatc

SEQ ID NO: 145903 - DNA, 25 bp, Artificial
  Probe
catcttctccttctacctgaacagg

SEQ ID NO: 145904 - DNA, 25 bp, Artificial
  Probe
gcgagtatatgatcccttgtgagaa

SEQ ID NO: 145905 - DNA, 25 bp, Artificial
  Probe
tgggagccaaagttgatatacaaat

SEQ ID NO: 145906 - DNA, 25 bp, Artificial
  Probe
atgggagccaaagttgatatacaaa

SEQ ID NO: 145907 - DNA, 25 bp, Artificial
  Probe
gatgggagccaaagttgatatacaa

SEQ ID NO: 145908 - DNA, 25 bp, Artificial
  Probe
cagatgggagccaaagttgatatac

SEQ ID NO: 145909 - DNA, 25 bp, Artificial
  Probe
tcagatgggagccaaagttgatata

SEQ ID NO: 145910 - DNA, 25 bp, Artificial
  Probe
ggagccaaagttgatatacaaataa

SEQ ID NO: 145911 - DNA, 25 bp, Artificial
  Probe
agatgggagccaaagttgatataca

SEQ ID NO: 145912 - DNA, 25 bp, Artificial
  Probe
gcgatgtctttattggctgctacta

SEQ ID NO: 145913 - DNA, 25 bp, Artificial
  Probe
ctacaccgtgtttgacagagaatac

SEQ ID NO: 145914 - DNA, 25 bp, Artificial
  Probe
tgtctttattggctgctactacacc

SEQ ID NO: 145915 - DNA, 25 bp, Artificial
  Probe
aaagaacatcttctccttctacctg

SEQ ID NO: 145916 - DNA, 25 bp, Artificial
  Probe
actacaccgtgtttgacagagaata

SEQ ID NO: 145917 - DNA, 25 bp, Artificial
  Probe
tactacaccgtgtttgacagagaat

SEQ ID NO: 145918 - DNA, 25 bp, Artificial
  Probe
aacctggaggagaactaatgcttgg

SEQ ID NO: 145919 - DNA, 25 bp, Artificial
  Probe
ggacagaagcaaaactatatgaacc

SEQ ID NO: 145920 - DNA, 25 bp, Artificial
  Probe
tacaccgtgtttgacagagaataca

SEQ ID NO: 145921 - DNA, 25 bp, Artificial
  Probe
agaggacagaagcaaaactatatga

SEQ ID NO: 145922 - DNA, 25 bp, Artificial
  Probe
aagtcagacttaggaggtatcaagg

SEQ ID NO: 145923 - DNA, 25 bp, Artificial
  Probe
gtctttattggctgctactacaccg

SEQ ID NO: 145924 - DNA, 25 bp, Artificial
  Probe
ggaggtatcaaggtggagaaacaga

SEQ ID NO: 145925 - DNA, 25 bp, Artificial
  Probe
tcccttaactttcttttccgtatgt

SEQ ID NO: 145926 - DNA, 25 bp, Artificial
  Probe
ttcccttaactttcttttccgtatg

SEQ ID NO: 145927 - DNA, 25 bp, Artificial
  Probe
ttcttttccgtatgttttgtaagca

SEQ ID NO: 145928 - DNA, 25 bp, Artificial
  Probe
gtagacaaaagttagcaagaacgag

SEQ ID NO: 145929 - DNA, 25 bp, Artificial
  Probe
cccttaactttcttttccgtatgtt

SEQ ID NO: 145930 - DNA, 25 bp, Artificial
  Probe
atgtagacaaaagttagcaagaacg

SEQ ID NO: 145931 - DNA, 25 bp, Artificial
  Probe
cttttccgtatgttttgtaagcaac

SEQ ID NO: 145932 - DNA, 25 bp, Artificial
  Probe
tcttttccgtatgttttgtaagcaa

SEQ ID NO: 145933 - DNA, 25 bp, Artificial
  Probe
ttttcccttaactttcttttccgta

SEQ ID NO: 145934 - DNA, 25 bp, Artificial
  Probe
tagacaaaagttagcaagaacgagg

SEQ ID NO: 145935 - DNA, 25 bp, Artificial
  Probe
tgtagacaaaagttagcaagaacga

SEQ ID NO: 145936 - DNA, 25 bp, Artificial
  Probe
tttcttttccgtatgttttgtaagc

SEQ ID NO: 145937 - DNA, 25 bp, Artificial
  Probe
tttcccttaactttcttttccgtat

SEQ ID NO: 145938 - DNA, 25 bp, Artificial
  Probe
aaggagaataaaggaacattagttt

SEQ ID NO: 145939 - DNA, 25 bp, Artificial
  Probe
aaaggagaataaaggaacattagtt

SEQ ID NO: 145940 - DNA, 25 bp, Artificial
  Probe
ccttaactttcttttccgtatgttt

SEQ ID NO: 145941 - DNA, 25 bp, Artificial
  Probe
aatgtagacaaaagttagcaagaac

SEQ ID NO: 145942 - DNA, 25 bp, Artificial
  Probe
actttcttttccgtatgttttgtaa

SEQ ID NO: 145943 - DNA, 25 bp, Artificial
  Probe
aactttcttttccgtatgttttgta

SEQ ID NO: 145944 - DNA, 25 bp, Artificial
  Probe
taactttcttttccgtatgttttgt

SEQ ID NO: 145945 - DNA, 25 bp, Artificial
  Probe
cgattagcgggaactggaaacaaag

SEQ ID NO: 145946 - DNA, 25 bp, Artificial
  Probe
ctttcttttccgtatgttttgtaag

SEQ ID NO: 145947 - DNA, 25 bp, Artificial
  Probe
gattagcgggaactggaaacaaagc

SEQ ID NO: 145948 - DNA, 25 bp, Artificial
  Probe
ttaactttcttttccgtatgttttg

SEQ ID NO: 145949 - DNA, 25 bp, Artificial
  Probe
taatgtagacaaaagttagcaagaa

SEQ ID NO: 145950 - DNA, 25 bp, Artificial
  Probe
ttaatgtagacaaaagttagcaaga

SEQ ID NO: 145951 - DNA, 25 bp, Artificial
  Probe
cttaactttcttttccgtatgtttt

SEQ ID NO: 145952 - DNA, 25 bp, Artificial
  Probe
aaaaggagaataaaggaacattagt

SEQ ID NO: 145953 - DNA, 25 bp, Artificial
  Probe
agacaaaagttagcaagaacgaggc

SEQ ID NO: 145954 - DNA, 25 bp, Artificial
  Probe
aggagaataaaggaacattagtttt

SEQ ID NO: 145955 - DNA, 25 bp, Artificial
  Probe
tttccgtatgttttgtaagcaacaa

SEQ ID NO: 145956 - DNA, 25 bp, Artificial
  Probe
ttttccgtatgttttgtaagcaaca

SEQ ID NO: 145957 - DNA, 25 bp, Artificial
  Probe
ggagaataaaggaacattagttttc

SEQ ID NO: 145958 - DNA, 25 bp, Artificial
  Probe
tttaatgtagacaaaagttagcaag

SEQ ID NO: 145959 - DNA, 25 bp, Artificial
  Probe
tcgattagcgggaactggaaacaaa

SEQ ID NO: 145960 - DNA, 25 bp, Artificial
  Probe
aaaggaacattagttttcagatttt

SEQ ID NO: 145961 - DNA, 25 bp, Artificial
  Probe
ctcgattagcgggaactggaaacaa

SEQ ID NO: 145962 - DNA, 25 bp, Artificial
  Probe
gaataaaggaacattagttttcaga

SEQ ID NO: 145963 - DNA, 25 bp, Artificial
  Probe
gagaataaaggaacattagttttca

SEQ ID NO: 145964 - DNA, 25 bp, Artificial
  Probe
agaataaaggaacattagttttcag

SEQ ID NO: 145965 - DNA, 25 bp, Artificial
  Probe
ttttaatgtagacaaaagttagcaa

SEQ ID NO: 145966 - DNA, 25 bp, Artificial
  Probe
taaaggaacattagttttcagattt

SEQ ID NO: 145967 - DNA, 25 bp, Artificial
  Probe
tttaaaaggagaataaaggaacatt

SEQ ID NO: 145968 - DNA, 25 bp, Artificial
  Probe
gacaaaagttagcaagaacgaggcc

SEQ ID NO: 145969 - DNA, 25 bp, Artificial
  Probe
ttttaaaaggagaataaaggaacat

SEQ ID NO: 145970 - DNA, 25 bp, Artificial
  Probe
agaattacgctacatacagagaagg

SEQ ID NO: 145971 - DNA, 25 bp, Artificial
  Probe
aacactcagaattacgctacataca

SEQ ID NO: 145972 - DNA, 25 bp, Artificial
  Probe
caacactcagaattacgctacatac

SEQ ID NO: 145973 - DNA, 25 bp, Artificial
  Probe
cactcagaattacgctacatacaga

SEQ ID NO: 145974 - DNA, 25 bp, Artificial
  Probe
attacgctacatacagagaaggcta

SEQ ID NO: 145975 - DNA, 25 bp, Artificial
  Probe
acactcagaattacgctacatacag

SEQ ID NO: 145976 - DNA, 25 bp, Artificial
  Probe
tcagaattacgctacatacagagaa

SEQ ID NO: 145977 - DNA, 25 bp, Artificial
  Probe
ccaacactcagaattacgctacata

SEQ ID NO: 145978 - DNA, 25 bp, Artificial
  Probe
cagaattacgctacatacagagaag

SEQ ID NO: 145979 - DNA, 25 bp, Artificial
  Probe
tcagtgtagttctcttcctagtcag

SEQ ID NO: 145980 - DNA, 25 bp, Artificial
  Probe
agtcagtgtagttctcttcctagtc

SEQ ID NO: 145981 - DNA, 25 bp, Artificial
  Probe
gttctatatacttgtcggaggtctg

SEQ ID NO: 145982 - DNA, 25 bp, Artificial
  Probe
tgttctatatacttgtcggaggtct

SEQ ID NO: 145983 - DNA, 25 bp, Artificial
  Probe
gtgttctatatacttgtcggaggtc

SEQ ID NO: 145984 - DNA, 25 bp, Artificial
  Probe
cacttggaagacaacaatgaagaac

SEQ ID NO: 145985 - DNA, 25 bp, Artificial
  Probe
gaattacgctacatacagagaaggc

SEQ ID NO: 145986 - DNA, 25 bp, Artificial
  Probe
gtcagtgtagttctcttcctagtca

SEQ ID NO: 145987 - DNA, 25 bp, Artificial
  Probe
tagttctcttcctagtcagcagatt

SEQ ID NO: 145988 - DNA, 25 bp, Artificial
  Probe
ttacgctacatacagagaaggctac

SEQ ID NO: 145989 - DNA, 25 bp, Artificial
  Probe
actcagaattacgctacatacagag

SEQ ID NO: 145990 - DNA, 25 bp, Artificial
  Probe
ctcagaattacgctacatacagaga

SEQ ID NO: 145991 - DNA, 25 bp, Artificial
  Probe
ttctatatacttgtcggaggtctgg

SEQ ID NO: 145992 - DNA, 25 bp, Artificial
  Probe
aattacgctacatacagagaaggct

SEQ ID NO: 145993 - DNA, 25 bp, Artificial
  Probe
cattggagtcagtgtagttctcttc

SEQ ID NO: 145994 - DNA, 25 bp, Artificial
  Probe
ttggaagacaacaatgaagaacctc

SEQ ID NO: 145995 - DNA, 25 bp, Artificial
  Probe
cttggaagacaacaatgaagaacct

SEQ ID NO: 145996 - DNA, 25 bp, Artificial
  Probe
gtagttctcttcctagtcagcagat

SEQ ID NO: 145997 - DNA, 25 bp, Artificial
  Probe
cttatgaatggcacttggaagacaa

SEQ ID NO: 145998 - DNA, 25 bp, Artificial
  Probe
acttggaagacaacaatgaagaacc

SEQ ID NO: 145999 - DNA, 25 bp, Artificial
  Probe
gagtcagtgtagttctcttcctagt

SEQ ID NO: 146000 - DNA, 25 bp, Artificial
  Probe
ttatgaatggcacttggaagacaac

SEQ ID NO: 146001 - DNA, 25 bp, Artificial
  Probe
cgtgttctatatacttgtcggaggt

SEQ ID NO: 146002 - DNA, 25 bp, Artificial
  Probe
acattggagtcagtgtagttctctt

SEQ ID NO: 146003 - DNA, 25 bp, Artificial
  Probe
gaagacaacaatgaagaacctcgtg

SEQ ID NO: 146004 - DNA, 25 bp, Artificial
  Probe
accaacactcagaattacgctacat

SEQ ID NO: 146005 - DNA, 25 bp, Artificial
  Probe
gtgtagttctcttcctagtcagcag

SEQ ID NO: 146006 - DNA, 25 bp, Artificial
  Probe
cagtgtagttctcttcctagtcagc

SEQ ID NO: 146007 - DNA, 25 bp, Artificial
  Probe
gcacttggaagacaacaatgaagaa

SEQ ID NO: 146008 - DNA, 25 bp, Artificial
  Probe
tacgctacatacagagaaggctaca

SEQ ID NO: 146009 - DNA, 25 bp, Artificial
  Probe
aagacaacaatgaagaacctcgtga

SEQ ID NO: 146010 - DNA, 25 bp, Artificial
  Probe
tgtagttctcttcctagtcagcaga

SEQ ID NO: 146011 - DNA, 25 bp, Artificial
  Probe
atgaacgagtacattgagcagagaa

SEQ ID NO: 146012 - DNA, 25 bp, Artificial
  Probe
agtgtagttctcttcctagtcagca

SEQ ID NO: 146013 - DNA, 25 bp, Artificial
  Probe
atcataatctcttcctacactgcaa

SEQ ID NO: 146014 - DNA, 25 bp, Artificial
  Probe
gatcataatctcttcctacactgca

SEQ ID NO: 146015 - DNA, 25 bp, Artificial
  Probe
gaggagatcaggatgtctggagaat

SEQ ID NO: 146016 - DNA, 25 bp, Artificial
  Probe
aacttctggaaggagaggagatcag

SEQ ID NO: 146017 - DNA, 25 bp, Artificial
  Probe
aggagatcaggatgtctggagaatg

SEQ ID NO: 146018 - DNA, 25 bp, Artificial
  Probe
gaaacttctggaaggagaggagatc

SEQ ID NO: 146019 - DNA, 25 bp, Artificial
  Probe
gaaggagaggagatcaggatgtctg

SEQ ID NO: 146020 - DNA, 25 bp, Artificial
  Probe
ctacaggaaacttctggaaggagag

SEQ ID NO: 146021 - DNA, 25 bp, Artificial
  Probe
aaacttctggaaggagaggagatca

SEQ ID NO: 146022 - DNA, 25 bp, Artificial
  Probe
agaggagatcaggatgtctggagaa

SEQ ID NO: 146023 - DNA, 25 bp, Artificial
  Probe
ttctggaaggagaggagatcaggat

SEQ ID NO: 146024 - DNA, 25 bp, Artificial
  Probe
ggaaacttctggaaggagaggagat

SEQ ID NO: 146025 - DNA, 25 bp, Artificial
  Probe
ggaaggagaggagatcaggatgtct

SEQ ID NO: 146026 - DNA, 25 bp, Artificial
  Probe
gagaggagatcaggatgtctggaga

SEQ ID NO: 146027 - DNA, 25 bp, Artificial
  Probe
tggaaggagaggagatcaggatgtc

SEQ ID NO: 146028 - DNA, 25 bp, Artificial
  Probe
tacaggaaacttctggaaggagagg

SEQ ID NO: 146029 - DNA, 25 bp, Artificial
  Probe
cttctggaaggagaggagatcagga

SEQ ID NO: 146030 - DNA, 25 bp, Artificial
  Probe
cctacaggaaacttctggaaggaga

SEQ ID NO: 146031 - DNA, 25 bp, Artificial
  Probe
tctggaaggagaggagatcaggatg

SEQ ID NO: 146032 - DNA, 25 bp, Artificial
  Probe
ggagatcaggatgtctggagaatgc

SEQ ID NO: 146033 - DNA, 25 bp, Artificial
  Probe
gagatcaggatgtctggagaatgca

SEQ ID NO: 146034 - DNA, 25 bp, Artificial
  Probe
aaggagaggagatcaggatgtctgg

SEQ ID NO: 146035 - DNA, 25 bp, Artificial
  Probe
ctggaaggagaggagatcaggatgt

SEQ ID NO: 146036 - DNA, 25 bp, Artificial
  Probe
acctacaggaaacttctggaaggag

SEQ ID NO: 146037 - DNA, 25 bp, Artificial
  Probe
acttctggaaggagaggagatcagg

SEQ ID NO: 146038 - DNA, 25 bp, Artificial
  Probe
aggaaacttctggaaggagaggaga

SEQ ID NO: 146039 - DNA, 25 bp, Artificial
  Probe
cacctacaggaaacttctggaagga

SEQ ID NO: 146040 - DNA, 25 bp, Artificial
  Probe
agatcaggatgtctggagaatgcac

SEQ ID NO: 146041 - DNA, 25 bp, Artificial
  Probe
ggagaggagatcaggatgtctggag

SEQ ID NO: 146042 - DNA, 25 bp, Artificial
  Probe
caggaaacttctggaaggagaggag

SEQ ID NO: 146043 - DNA, 25 bp, Artificial
  Probe
ctaccaggagctgatgaacaccaag

SEQ ID NO: 146044 - DNA, 25 bp, Artificial
  Probe
gtgactaccaggagctgatgaacac

SEQ ID NO: 146045 - DNA, 25 bp, Artificial
  Probe
gagatcgccacctacaggaaacttc

SEQ ID NO: 146046 - DNA, 25 bp, Artificial
  Probe
acaggaaacttctggaaggagagga

SEQ ID NO: 146047 - DNA, 25 bp, Artificial
  Probe
gatcaggatgtctggagaatgcacc

SEQ ID NO: 146048 - DNA, 25 bp, Artificial
  Probe
ccacctacaggaaacttctggaagg

SEQ ID NO: 146049 - DNA, 25 bp, Artificial
  Probe
gccacctacaggaaacttctggaag

SEQ ID NO: 146050 - DNA, 25 bp, Artificial
  Probe
ttagtggagaaggaattgtgtatgg

SEQ ID NO: 146051 - DNA, 25 bp, Artificial
  Probe
tagtggagaaggaattgtgtatgga

SEQ ID NO: 146052 - DNA, 25 bp, Artificial
  Probe
gtggagaaggaattgtgtatggaac

SEQ ID NO: 146053 - DNA, 25 bp, Artificial
  Probe
agtggagaaggaattgtgtatggaa

SEQ ID NO: 146054 - DNA, 25 bp, Artificial
  Probe
ggagaaggaattgtgtatggaacat

SEQ ID NO: 146055 - DNA, 25 bp, Artificial
  Probe
tggagaaggaattgtgtatggaaca

SEQ ID NO: 146056 - DNA, 25 bp, Artificial
  Probe
gagaaggaattgtgtatggaacata

SEQ ID NO: 146057 - DNA, 25 bp, Artificial
  Probe
cctatttgatgtgtttgtggaagag

SEQ ID NO: 146058 - DNA, 25 bp, Artificial
  Probe
tgctaacgatacctatttgatgtgt

SEQ ID NO: 146059 - DNA, 25 bp, Artificial
  Probe
cgatacctatttgatgtgtttgtgg

SEQ ID NO: 146060 - DNA, 25 bp, Artificial
  Probe
acgatacctatttgatgtgtttgtg

SEQ ID NO: 146061 - DNA, 25 bp, Artificial
  Probe
acctatttgatgtgtttgtggaaga

SEQ ID NO: 146062 - DNA, 25 bp, Artificial
  Probe
tatttgatgtgtttgtggaagagag

SEQ ID NO: 146063 - DNA, 25 bp, Artificial
  Probe
ctatttgatgtgtttgtggaagaga

SEQ ID NO: 146064 - DNA, 25 bp, Artificial
  Probe
aactcaatcaagaaacatagatgcc

SEQ ID NO: 146065 - DNA, 25 bp, Artificial
  Probe
actcaatcaagaaacatagatgcca

SEQ ID NO: 146066 - DNA, 25 bp, Artificial
  Probe
aactgtaggaactcaatcaagaaac

SEQ ID NO: 146067 - DNA, 25 bp, Artificial
  Probe
tacctatttgatgtgtttgtggaag

SEQ ID NO: 146068 - DNA, 25 bp, Artificial
  Probe
ctcaatcaagaaacatagatgccat

SEQ ID NO: 146069 - DNA, 25 bp, Artificial
  Probe
gatacctatttgatgtgtttgtgga

SEQ ID NO: 146070 - DNA, 25 bp, Artificial
  Probe
atgctaacgatacctatttgatgtg

SEQ ID NO: 146071 - DNA, 25 bp, Artificial
  Probe
agaaggaattgtgtatggaacatat

SEQ ID NO: 146072 - DNA, 25 bp, Artificial
  Probe
gctaacgatacctatttgatgtgtt

SEQ ID NO: 146073 - DNA, 25 bp, Artificial
  Probe
aaactgtaggaactcaatcaagaaa

SEQ ID NO: 146074 - DNA, 25 bp, Artificial
  Probe
atttgatgtgtttgtggaagagagg

SEQ ID NO: 146075 - DNA, 25 bp, Artificial
  Probe
atacctatttgatgtgtttgtggaa

SEQ ID NO: 146076 - DNA, 25 bp, Artificial
  Probe
tttagtggagaaggaattgtgtatg

SEQ ID NO: 146077 - DNA, 25 bp, Artificial
  Probe
aacgatacctatttgatgtgtttgt

SEQ ID NO: 146078 - DNA, 25 bp, Artificial
  Probe
gaactcaatcaagaaacatagatgc

SEQ ID NO: 146079 - DNA, 25 bp, Artificial
  Probe
actgtaggaactcaatcaagaaaca

SEQ ID NO: 146080 - DNA, 25 bp, Artificial
  Probe
tcaatcaagaaacatagatgccatg

SEQ ID NO: 146081 - DNA, 25 bp, Artificial
  Probe
ggaactcaatcaagaaacatagatg

SEQ ID NO: 146082 - DNA, 25 bp, Artificial
  Probe
ctgtaggaactcaatcaagaaacat

SEQ ID NO: 146083 - DNA, 25 bp, Artificial
  Probe
aggaactcaatcaagaaacatagat

SEQ ID NO: 146084 - DNA, 25 bp, Artificial
  Probe
atttagtggagaaggaattgtgtat

SEQ ID NO: 146085 - DNA, 25 bp, Artificial
  Probe
ttgatgtgtttgtggaagagaggaa

SEQ ID NO: 146086 - DNA, 25 bp, Artificial
  Probe
tttgatgtgtttgtggaagagagga

SEQ ID NO: 146087 - DNA, 25 bp, Artificial
  Probe
tatgctaacgatacctatttgatgt

SEQ ID NO: 146088 - DNA, 25 bp, Artificial
  Probe
gatgtgtttgtggaagagaggaaga

SEQ ID NO: 146089 - DNA, 25 bp, Artificial
  Probe
gtaggaactcaatcaagaaacatag

SEQ ID NO: 146090 - DNA, 25 bp, Artificial
  Probe
taggaactcaatcaagaaacataga

SEQ ID NO: 146091 - DNA, 25 bp, Artificial
  Probe
atgtgtttgtggaagagaggaagac

SEQ ID NO: 146092 - DNA, 25 bp, Artificial
  Probe
tgatgtgtttgtggaagagaggaag

SEQ ID NO: 146093 - DNA, 25 bp, Artificial
  Probe
aatttagtggagaaggaattgtgta

SEQ ID NO: 146094 - DNA, 25 bp, Artificial
  Probe
taaagctgggaaagagttctcaaag

SEQ ID NO: 146095 - DNA, 25 bp, Artificial
  Probe
tctggttcatctgtgttctgtattg

SEQ ID NO: 146096 - DNA, 25 bp, Artificial
  Probe
gtctggttcatctgtgttctgtatt

SEQ ID NO: 146097 - DNA, 25 bp, Artificial
  Probe
acagagacttcacagaatacaacaa

SEQ ID NO: 146098 - DNA, 25 bp, Artificial
  Probe
ccaactacagagacttcacagaata

SEQ ID NO: 146099 - DNA, 25 bp, Artificial
  Probe
tacagagacttcacagaatacaaca

SEQ ID NO: 146100 - DNA, 25 bp, Artificial
  Probe
actacagagacttcacagaatacaa

SEQ ID NO: 146101 - DNA, 25 bp, Artificial
  Probe
aactacagagacttcacagaataca

SEQ ID NO: 146102 - DNA, 25 bp, Artificial
  Probe
ctacagagacttcacagaatacaac

SEQ ID NO: 146103 - DNA, 25 bp, Artificial
  Probe
caactacagagacttcacagaatac

SEQ ID NO: 146104 - DNA, 25 bp, Artificial
  Probe
ttaagcgatgacttccttcttgatg

SEQ ID NO: 146105 - DNA, 25 bp, Artificial
  Probe
tgtctggttcatctgtgttctgtat

SEQ ID NO: 146106 - DNA, 25 bp, Artificial
  Probe
ggttcatctgtgttctgtattgagt

SEQ ID NO: 146107 - DNA, 25 bp, Artificial
  Probe
tggttcatctgtgttctgtattgag

SEQ ID NO: 146108 - DNA, 25 bp, Artificial
  Probe
ctggttcatctgtgttctgtattga

SEQ ID NO: 146109 - DNA, 25 bp, Artificial
  Probe
ttgtctggttcatctgtgttctgta

SEQ ID NO: 146110 - DNA, 25 bp, Artificial
  Probe
gttcatctgtgttctgtattgagta

SEQ ID NO: 146111 - DNA, 25 bp, Artificial
  Probe
catctgtgttctgtattgagtattg

SEQ ID NO: 146112 - DNA, 25 bp, Artificial
  Probe
tctgtgttctgtattgagtattgat

SEQ ID NO: 146113 - DNA, 25 bp, Artificial
  Probe
atctgtgttctgtattgagtattga

SEQ ID NO: 146114 - DNA, 25 bp, Artificial
  Probe
cctgaatataggcatctcctggata

SEQ ID NO: 146115 - DNA, 25 bp, Artificial
  Probe
ctgaatataggcatctcctggataa

SEQ ID NO: 146116 - DNA, 25 bp, Artificial
  Probe
acaattcctcctgattatcgactag

SEQ ID NO: 146117 - DNA, 25 bp, Artificial
  Probe
aacaattcctcctgattatcgacta

SEQ ID NO: 146118 - DNA, 25 bp, Artificial
  Probe
aatataggcatctcctggataatga

SEQ ID NO: 146119 - DNA, 25 bp, Artificial
  Probe
tgaatataggcatctcctggataat

SEQ ID NO: 146120 - DNA, 25 bp, Artificial
  Probe
tcatctgtgttctgtattgagtatt

SEQ ID NO: 146121 - DNA, 25 bp, Artificial
  Probe
ttcatctgtgttctgtattgagtat

SEQ ID NO: 146122 - DNA, 25 bp, Artificial
  Probe
atataggcatctcctggataatgat

SEQ ID NO: 146123 - DNA, 25 bp, Artificial
  Probe
gaatataggcatctcctggataatg

SEQ ID NO: 146124 - DNA, 25 bp, Artificial
  Probe
tttcttgggctttgatgtatctttg

SEQ ID NO: 146125 - DNA, 25 bp, Artificial
  Probe
tactttgggtgtataactcctttgg

SEQ ID NO: 146126 - DNA, 25 bp, Artificial
  Probe
tacaacaaaggagaagggtaagaag

SEQ ID NO: 146127 - DNA, 25 bp, Artificial
  Probe
cagaatacaacaaaggagaagggta

SEQ ID NO: 146128 - DNA, 25 bp, Artificial
  Probe
atacaacaaaggagaagggtaagaa

SEQ ID NO: 146129 - DNA, 25 bp, Artificial
  Probe
aatacaacaaaggagaagggtaaga

SEQ ID NO: 146130 - DNA, 25 bp, Artificial
  Probe
agaatacaacaaaggagaagggtaa

SEQ ID NO: 146131 - DNA, 25 bp, Artificial
  Probe
ggctttgatgtatctttgggttaat

SEQ ID NO: 146132 - DNA, 25 bp, Artificial
  Probe
tcacagaatacaacaaaggagaagg

SEQ ID NO: 146133 - DNA, 25 bp, Artificial
  Probe
gaatacaacaaaggagaagggtaag

SEQ ID NO: 146134 - DNA, 25 bp, Artificial
  Probe
acttcacagaatacaacaaaggaga

SEQ ID NO: 146135 - DNA, 25 bp, Artificial
  Probe
agacttcacagaatacaacaaagga

SEQ ID NO: 146136 - DNA, 25 bp, Artificial
  Probe
gacttcacagaatacaacaaaggag

SEQ ID NO: 146137 - DNA, 25 bp, Artificial
  Probe
gagacttcacagaatacaacaaagg

SEQ ID NO: 146138 - DNA, 25 bp, Artificial
  Probe
aatttgtctggttcatctgtgttct

SEQ ID NO: 146139 - DNA, 25 bp, Artificial
  Probe
aacaaaggagaagggtaagaagact

SEQ ID NO: 146140 - DNA, 25 bp, Artificial
  Probe
tgccgtttatttattgattgcttct

SEQ ID NO: 146141 - DNA, 25 bp, Artificial
  Probe
gccgtttatttattgattgcttctt

SEQ ID NO: 146142 - DNA, 25 bp, Artificial
  Probe
atgccgtttatttattgattgcttc

SEQ ID NO: 146143 - DNA, 25 bp, Artificial
  Probe
aatgccgtttatttattgattgctt

SEQ ID NO: 146144 - DNA, 25 bp, Artificial
  Probe
gaacttacaaatccagcctcagaac

SEQ ID NO: 146145 - DNA, 25 bp, Artificial
  Probe
gcatttaagtaaacagagatgtggg

SEQ ID NO: 146146 - DNA, 25 bp, Artificial
  Probe
ggcatttaagtaaacagagatgtgg

SEQ ID NO: 146147 - DNA, 25 bp, Artificial
  Probe
agaacttacaaatccagcctcagaa

SEQ ID NO: 146148 - DNA, 25 bp, Artificial
  Probe
aagtaaacagagatgtgggatgaag

SEQ ID NO: 146149 - DNA, 25 bp, Artificial
  Probe
taagtaaacagagatgtgggatgaa

SEQ ID NO: 146150 - DNA, 25 bp, Artificial
  Probe
ttaagtaaacagagatgtgggatga

SEQ ID NO: 146151 - DNA, 25 bp, Artificial
  Probe
aggcatttaagtaaacagagatgtg

SEQ ID NO: 146152 - DNA, 25 bp, Artificial
  Probe
tttaagtaaacagagatgtgggatg

SEQ ID NO: 146153 - DNA, 25 bp, Artificial
  Probe
catttaagtaaacagagatgtggga

SEQ ID NO: 146154 - DNA, 25 bp, Artificial
  Probe
aaatgccgtttatttattgattgct

SEQ ID NO: 146155 - DNA, 25 bp, Artificial
  Probe
cagaacttacaaatccagcctcaga

SEQ ID NO: 146156 - DNA, 25 bp, Artificial
  Probe
aatcgtcgagaaagaaagaaagaaa

SEQ ID NO: 146157 - DNA, 25 bp, Artificial
  Probe
aaatcgtcgagaaagaaagaaagaa

SEQ ID NO: 146158 - DNA, 25 bp, Artificial
  Probe
acagaacttacaaatccagcctcag

SEQ ID NO: 146159 - DNA, 25 bp, Artificial
  Probe
taaacagagatgtgggatgaaggac

SEQ ID NO: 146160 - DNA, 25 bp, Artificial
  Probe
gtaaacagagatgtgggatgaagga

SEQ ID NO: 146161 - DNA, 25 bp, Artificial
  Probe
agtaaacagagatgtgggatgaagg

SEQ ID NO: 146162 - DNA, 25 bp, Artificial
  Probe
atttaagtaaacagagatgtgggat

SEQ ID NO: 146163 - DNA, 25 bp, Artificial
  Probe
aacttacaaatccagcctcagaacc

SEQ ID NO: 146164 - DNA, 25 bp, Artificial
  Probe
cacagaacttacaaatccagcctca

SEQ ID NO: 146165 - DNA, 25 bp, Artificial
  Probe
ccgtttatttattgattgcttcttt

SEQ ID NO: 146166 - DNA, 25 bp, Artificial
  Probe
agttccctgtgtgtttgtaaaatac

SEQ ID NO: 146167 - DNA, 25 bp, Artificial
  Probe
gaagttccctgtgtgtttgtaaaat

SEQ ID NO: 146168 - DNA, 25 bp, Artificial
  Probe
tccctgtgtgtttgtaaaatacgaa

SEQ ID NO: 146169 - DNA, 25 bp, Artificial
  Probe
ttccctgtgtgtttgtaaaatacga

SEQ ID NO: 146170 - DNA, 25 bp, Artificial
  Probe
gttccctgtgtgtttgtaaaatacg

SEQ ID NO: 146171 - DNA, 25 bp, Artificial
  Probe
aagttccctgtgtgtttgtaaaata

SEQ ID NO: 146172 - DNA, 25 bp, Artificial
  Probe
ccacagaacttacaaatccagcctc

SEQ ID NO: 146173 - DNA, 25 bp, Artificial
  Probe
catgatttgtaaatgccgtttattt

SEQ ID NO: 146174 - DNA, 25 bp, Artificial
  Probe
tgaagttccctgtgtgtttgtaaaa

SEQ ID NO: 146175 - DNA, 25 bp, Artificial
  Probe
tgtattgttttctatggcactaggg

SEQ ID NO: 146176 - DNA, 25 bp, Artificial
  Probe
acttacaaatccagcctcagaacct

SEQ ID NO: 146177 - DNA, 25 bp, Artificial
  Probe
aataccttgtccccgattatctacc

SEQ ID NO: 146178 - DNA, 25 bp, Artificial
  Probe
caataccttgtccccgattatctac

SEQ ID NO: 146179 - DNA, 25 bp, Artificial
  Probe
ccctgtgtgtttgtaaaatacgaac

SEQ ID NO: 146180 - DNA, 25 bp, Artificial
  Probe
atgtattgttttctatggcactagg

SEQ ID NO: 146181 - DNA, 25 bp, Artificial
  Probe
tattgttttctatggcactagggga

SEQ ID NO: 146182 - DNA, 25 bp, Artificial
  Probe
gtattgttttctatggcactagggg

SEQ ID NO: 146183 - DNA, 25 bp, Artificial
  Probe
ccaataccttgtccccgattatcta

SEQ ID NO: 146184 - DNA, 25 bp, Artificial
  Probe
cttacaaatccagcctcagaacctg

SEQ ID NO: 146185 - DNA, 25 bp, Artificial
  Probe
aatgctaccttcaactccataactt

SEQ ID NO: 146186 - DNA, 25 bp, Artificial
  Probe
gaatgctaccttcaactccataact

SEQ ID NO: 146187 - DNA, 25 bp, Artificial
  Probe
agaatgctaccttcaactccataac

SEQ ID NO: 146188 - DNA, 25 bp, Artificial
  Probe
cagaatgctaccttcaactccataa

SEQ ID NO: 146189 - DNA, 25 bp, Artificial
  Probe
ggcttagtccaatataatcacttcg

SEQ ID NO: 146190 - DNA, 25 bp, Artificial
  Probe
catggagtacacgatagacatcatt

SEQ ID NO: 146191 - DNA, 25 bp, Artificial
  Probe
acatggagtacacgatagacatcat

SEQ ID NO: 146192 - DNA, 25 bp, Artificial
  Probe
ttcacaattcagacctacattccgt

SEQ ID NO: 146193 - DNA, 25 bp, Artificial
  Probe
aacatggagtacacgatagacatca

SEQ ID NO: 146194 - DNA, 25 bp, Artificial
  Probe
tctggcttagtccaatataatcact

SEQ ID NO: 146195 - DNA, 25 bp, Artificial
  Probe
ctctttgtctctgtgtgtttcattt

SEQ ID NO: 146196 - DNA, 25 bp, Artificial
  Probe
ctaccttcaactccataactttcct

SEQ ID NO: 146197 - DNA, 25 bp, Artificial
  Probe
atctctttgtctctgtgtgtttcat

SEQ ID NO: 146198 - DNA, 25 bp, Artificial
  Probe
tctctttgtctctgtgtgtttcatt

SEQ ID NO: 146199 - DNA, 25 bp, Artificial
  Probe
atggagtatggaaccttgcattatt

SEQ ID NO: 146200 - DNA, 25 bp, Artificial
  Probe
accttcaactccataactttcctat

SEQ ID NO: 146201 - DNA, 25 bp, Artificial
  Probe
tgctaccttcaactccataactttc

SEQ ID NO: 146202 - DNA, 25 bp, Artificial
  Probe
agattgtatcagtttgcctttgtag

SEQ ID NO: 146203 - DNA, 25 bp, Artificial
  Probe
gagattgtatcagtttgcctttgta

SEQ ID NO: 146204 - DNA, 25 bp, Artificial
  Probe
atgctaccttcaactccataacttt

SEQ ID NO: 146205 - DNA, 25 bp, Artificial
  Probe
atttcacaattcagacctacattcc

SEQ ID NO: 146206 - DNA, 25 bp, Artificial
  Probe
catggagtatggaaccttgcattat

SEQ ID NO: 146207 - DNA, 25 bp, Artificial
  Probe
ggctatttcacaattcagacctaca

SEQ ID NO: 146208 - DNA, 25 bp, Artificial
  Probe
taccttcaactccataactttccta

SEQ ID NO: 146209 - DNA, 25 bp, Artificial
  Probe
gctatttcacaattcagacctacat

SEQ ID NO: 146210 - DNA, 25 bp, Artificial
  Probe
tggcttagtccaatataatcacttc

SEQ ID NO: 146211 - DNA, 25 bp, Artificial
  Probe
ctggcttagtccaatataatcactt

SEQ ID NO: 146212 - DNA, 25 bp, Artificial
  Probe
gctaccttcaactccataactttcc

SEQ ID NO: 146213 - DNA, 25 bp, Artificial
  Probe
ctacattccgtgcattctaacagtt

SEQ ID NO: 146214 - DNA, 25 bp, Artificial
  Probe
aagaaattcaaccgaaatctctcac

SEQ ID NO: 146215 - DNA, 25 bp, Artificial
  Probe
attcaaccgaaatctctcacacaat

SEQ ID NO: 146216 - DNA, 25 bp, Artificial
  Probe
gaaattcaaccgaaatctctcacac

SEQ ID NO: 146217 - DNA, 25 bp, Artificial
  Probe
caatctggtttactgggttggatat

SEQ ID NO: 146218 - DNA, 25 bp, Artificial
  Probe
ttcctatggatgaacattcctgtcc

SEQ ID NO: 146219 - DNA, 25 bp, Artificial
  Probe
atctggcttagtccaatataatcac

SEQ ID NO: 146220 - DNA, 25 bp, Artificial
  Probe
agaaattcaaccgaaatctctcaca

SEQ ID NO: 146221 - DNA, 25 bp, Artificial
  Probe
cttgttcaatctggtttactgggtt

SEQ ID NO: 146222 - DNA, 25 bp, Artificial
  Probe
atgaacaacatttctatgcctcaag

SEQ ID NO: 146223 - DNA, 25 bp, Artificial
  Probe
tacattccgtgcattctaacagttg

SEQ ID NO: 146224 - DNA, 25 bp, Artificial
  Probe
tttcacaattcagacctacattccg

SEQ ID NO: 146225 - DNA, 25 bp, Artificial
  Probe
gcttagtccaatataatcacttcga

SEQ ID NO: 146226 - DNA, 25 bp, Artificial
  Probe
ggagattgtatcagtttgcctttgt

SEQ ID NO: 146227 - DNA, 25 bp, Artificial
  Probe
tggagattgtatcagtttgcctttg

SEQ ID NO: 146228 - DNA, 25 bp, Artificial
  Probe
gggctatttcacaattcagacctac

SEQ ID NO: 146229 - DNA, 25 bp, Artificial
  Probe
aattcaaccgaaatctctcacacaa

SEQ ID NO: 146230 - DNA, 25 bp, Artificial
  Probe
cacaggcacacactagagtatagag

SEQ ID NO: 146231 - DNA, 25 bp, Artificial
  Probe
acaggcacacactagagtatagagt

SEQ ID NO: 146232 - DNA, 25 bp, Artificial
  Probe
ctagatccagttcctaagaaggctt

SEQ ID NO: 146233 - DNA, 25 bp, Artificial
  Probe
tagatccagttcctaagaaggcttc

SEQ ID NO: 146234 - DNA, 25 bp, Artificial
  Probe
ccaaatacaatgacagccaaacaaa

SEQ ID NO: 146235 - DNA, 25 bp, Artificial
  Probe
aacggttaaagggtttgggtatatg

SEQ ID NO: 146236 - DNA, 25 bp, Artificial
  Probe
gttactgagagtgtttgccaaatac

SEQ ID NO: 146237 - DNA, 25 bp, Artificial
  Probe
gtggctagatccagttcctaagaag

SEQ ID NO: 146238 - DNA, 25 bp, Artificial
  Probe
tactgagagtgtttgccaaatacaa

SEQ ID NO: 146239 - DNA, 25 bp, Artificial
  Probe
ttactgagagtgtttgccaaataca

SEQ ID NO: 146240 - DNA, 25 bp, Artificial
  Probe
ggttactgagagtgtttgccaaata

SEQ ID NO: 146241 - DNA, 25 bp, Artificial
  Probe
gagagtgtttgccaaatacaatgac

SEQ ID NO: 146242 - DNA, 25 bp, Artificial
  Probe
ctgagagtgtttgccaaatacaatg

SEQ ID NO: 146243 - DNA, 25 bp, Artificial
  Probe
gagtgtttgccaaatacaatgacag

SEQ ID NO: 146244 - DNA, 25 bp, Artificial
  Probe
tgagagtgtttgccaaatacaatga

SEQ ID NO: 146245 - DNA, 25 bp, Artificial
  Probe
actgagagtgtttgccaaatacaat

SEQ ID NO: 146246 - DNA, 25 bp, Artificial
  Probe
gatagcacaggcaatctctggttac

SEQ ID NO: 146247 - DNA, 25 bp, Artificial
  Probe
gcacaggcacacactagagtataga

SEQ ID NO: 146248 - DNA, 25 bp, Artificial
  Probe
agagtgtttgccaaatacaatgaca

SEQ ID NO: 146249 - DNA, 25 bp, Artificial
  Probe
tgtggctagatccagttcctaagaa

SEQ ID NO: 146250 - DNA, 25 bp, Artificial
  Probe
atagcacaggcaatctctggttact

SEQ ID NO: 146251 - DNA, 25 bp, Artificial
  Probe
gccaaatacaatgacagccaaacaa

SEQ ID NO: 146252 - DNA, 25 bp, Artificial
  Probe
tggctagatccagttcctaagaagg

SEQ ID NO: 146253 - DNA, 25 bp, Artificial
  Probe
ctgtggctagatccagttcctaaga

SEQ ID NO: 146254 - DNA, 25 bp, Artificial
  Probe
acggttaaagggtttgggtatatgc

SEQ ID NO: 146255 - DNA, 25 bp, Artificial
  Probe
cacactagagtatagagtgctctga

SEQ ID NO: 146256 - DNA, 25 bp, Artificial
  Probe
gctagatccagttcctaagaaggct

SEQ ID NO: 146257 - DNA, 25 bp, Artificial
  Probe
acacactagagtatagagtgctctg

SEQ ID NO: 146258 - DNA, 25 bp, Artificial
  Probe
cacacactagagtatagagtgctct

SEQ ID NO: 146259 - DNA, 25 bp, Artificial
  Probe
taaacggttaaagggtttgggtata

SEQ ID NO: 146260 - DNA, 25 bp, Artificial
  Probe
aaacggttaaagggtttgggtatat

SEQ ID NO: 146261 - DNA, 25 bp, Artificial
  Probe
ggttaaagggtttgggtatatgcaa

SEQ ID NO: 146262 - DNA, 25 bp, Artificial
  Probe
ttaaacggttaaagggtttgggtat

SEQ ID NO: 146263 - DNA, 25 bp, Artificial
  Probe
ttgccaaatacaatgacagccaaac

SEQ ID NO: 146264 - DNA, 25 bp, Artificial
  Probe
aaatacaatgacagccaaacaaaac

SEQ ID NO: 146265 - DNA, 25 bp, Artificial
  Probe
caaatacaatgacagccaaacaaaa

SEQ ID NO: 146266 - DNA, 25 bp, Artificial
  Probe
agatagcacaggcaatctctggtta

SEQ ID NO: 146267 - DNA, 25 bp, Artificial
  Probe
aatacaatgacagccaaacaaaacc

SEQ ID NO: 146268 - DNA, 25 bp, Artificial
  Probe
agtgtttgccaaatacaatgacagc

SEQ ID NO: 146269 - DNA, 25 bp, Artificial
  Probe
gtttgccaaatacaatgacagccaa

SEQ ID NO: 146270 - DNA, 25 bp, Artificial
  Probe
acactagagtatagagtgctctgaa

SEQ ID NO: 146271 - DNA, 25 bp, Artificial
  Probe
gatccagttcctaagaaggcttctg

SEQ ID NO: 146272 - DNA, 25 bp, Artificial
  Probe
agatccagttcctaagaaggcttct

SEQ ID NO: 146273 - DNA, 25 bp, Artificial
  Probe
atacaatgacagccaaacaaaacca

SEQ ID NO: 146274 - DNA, 25 bp, Artificial
  Probe
tgccaaatacaatgacagccaaaca

SEQ ID NO: 146275 - DNA, 25 bp, Artificial
  Probe
agtcatactcaatcttgctggtgta

SEQ ID NO: 146276 - DNA, 25 bp, Artificial
  Probe
tcatactcaatcttgctggtgtatc

SEQ ID NO: 146277 - DNA, 25 bp, Artificial
  Probe
ttgacgactatgaggaggaagagat

SEQ ID NO: 146278 - DNA, 25 bp, Artificial
  Probe
gtcatactcaatcttgctggtgtat

SEQ ID NO: 146279 - DNA, 25 bp, Artificial
  Probe
catactcaatcttgctggtgtatcc

SEQ ID NO: 146280 - DNA, 25 bp, Artificial
  Probe
ttagctccagtcatactcaatcttg

SEQ ID NO: 146281 - DNA, 25 bp, Artificial
  Probe
gcatctaatttaacatccactccac

SEQ ID NO: 146282 - DNA, 25 bp, Artificial
  Probe
taactttgacgactatgaggaggaa

SEQ ID NO: 146283 - DNA, 25 bp, Artificial
  Probe
ttaaggagagcaggaaagtcagata

SEQ ID NO: 146284 - DNA, 25 bp, Artificial
  Probe
aatgagaaatgtggcaaggagttta

SEQ ID NO: 146285 - DNA, 25 bp, Artificial
  Probe
tctaatttaacatccactccacacc

SEQ ID NO: 146286 - DNA, 25 bp, Artificial
  Probe
atactcaatcttgctggtgtatcca

SEQ ID NO: 146287 - DNA, 25 bp, Artificial
  Probe
tgacgactatgaggaggaagagatc

SEQ ID NO: 146288 - DNA, 25 bp, Artificial
  Probe
taaggagagcaggaaagtcagatac

SEQ ID NO: 146289 - DNA, 25 bp, Artificial
  Probe
atctaatttaacatccactccacac

SEQ ID NO: 146290 - DNA, 25 bp, Artificial
  Probe
catctaatttaacatccactccaca

SEQ ID NO: 146291 - DNA, 25 bp, Artificial
  Probe
atgagaaatgtggcaaggagtttac

SEQ ID NO: 146292 - DNA, 25 bp, Artificial
  Probe
ctaatttaacatccactccacaccc

SEQ ID NO: 146293 - DNA, 25 bp, Artificial
  Probe
gagtaactttgacgactatgaggag

SEQ ID NO: 146294 - DNA, 25 bp, Artificial
  Probe
ctaaggatgaacagtaaagccaacc

SEQ ID NO: 146295 - DNA, 25 bp, Artificial
  Probe
gtaactttgacgactatgaggagga

SEQ ID NO: 146296 - DNA, 25 bp, Artificial
  Probe
actaaggatgaacagtaaagccaac

SEQ ID NO: 146297 - DNA, 25 bp, Artificial
  Probe
cacgagtaactttgacgactatgag

SEQ ID NO: 146298 - DNA, 25 bp, Artificial
  Probe
cagtcatactcaatcttgctggtgt

SEQ ID NO: 146299 - DNA, 25 bp, Artificial
  Probe
tagctccagtcatactcaatcttgc

SEQ ID NO: 146300 - DNA, 25 bp, Artificial
  Probe
gttaaggagagcaggaaagtcagat

SEQ ID NO: 146301 - DNA, 25 bp, Artificial
  Probe
gacacgagtaactttgacgactatg

SEQ ID NO: 146302 - DNA, 25 bp, Artificial
  Probe
agtaactttgacgactatgaggagg

SEQ ID NO: 146303 - DNA, 25 bp, Artificial
  Probe
gaaatgtggcaaggagtttactgag

SEQ ID NO: 146304 - DNA, 25 bp, Artificial
  Probe
gagaaatgtggcaaggagtttactg

SEQ ID NO: 146305 - DNA, 25 bp, Artificial
  Probe
caatgagaaatgtggcaaggagttt

SEQ ID NO: 146306 - DNA, 25 bp, Artificial
  Probe
aactttgacgactatgaggaggaag

SEQ ID NO: 146307 - DNA, 25 bp, Artificial
  Probe
acacgagtaactttgacgactatga

SEQ ID NO: 146308 - DNA, 25 bp, Artificial
  Probe
ctttgacgactatgaggaggaagag

SEQ ID NO: 146309 - DNA, 25 bp, Artificial
  Probe
agaaatgtggcaaggagtttactga

SEQ ID NO: 146310 - DNA, 25 bp, Artificial
  Probe
tgagaaatgtggcaaggagtttact

SEQ ID NO: 146311 - DNA, 25 bp, Artificial
  Probe
tttgacgactatgaggaggaagaga

SEQ ID NO: 146312 - DNA, 25 bp, Artificial
  Probe
cgagtaactttgacgactatgagga

SEQ ID NO: 146313 - DNA, 25 bp, Artificial
  Probe
gctcccttcataccaaagtttaaag

SEQ ID NO: 146314 - DNA, 25 bp, Artificial
  Probe
acgagtaactttgacgactatgagg

SEQ ID NO: 146315 - DNA, 25 bp, Artificial
  Probe
agctcccttcataccaaagtttaaa

SEQ ID NO: 146316 - DNA, 25 bp, Artificial
  Probe
aagctcccttcataccaaagtttaa

SEQ ID NO: 146317 - DNA, 25 bp, Artificial
  Probe
catcaatgagaaatgtggcaaggag

SEQ ID NO: 146318 - DNA, 25 bp, Artificial
  Probe
tactaaggatgaacagtaaagccaa

SEQ ID NO: 146319 - DNA, 25 bp, Artificial
  Probe
atactaaggatgaacagtaaagcca

SEQ ID NO: 146320 - DNA, 25 bp, Artificial
  Probe
gccttgtgagatggaatcgtaataa

SEQ ID NO: 146321 - DNA, 25 bp, Artificial
  Probe
cgcagtctatgatgttatgaagaac

SEQ ID NO: 146322 - DNA, 25 bp, Artificial
  Probe
ctatgatgttatgaagaactgctgg

SEQ ID NO: 146323 - DNA, 25 bp, Artificial
  Probe
ccgcagtctatgatgttatgaagaa

SEQ ID NO: 146324 - DNA, 25 bp, Artificial
  Probe
tatgatgttatgaagaactgctggc

SEQ ID NO: 146325 - DNA, 25 bp, Artificial
  Probe
tctatgatgttatgaagaactgctg

SEQ ID NO: 146326 - DNA, 25 bp, Artificial
  Probe
gtctatgatgttatgaagaactgct

SEQ ID NO: 146327 - DNA, 25 bp, Artificial
  Probe
tgccttgtgagatggaatcgtaata

SEQ ID NO: 146328 - DNA, 25 bp, Artificial
  Probe
agtctatgatgttatgaagaactgc

SEQ ID NO: 146329 - DNA, 25 bp, Artificial
  Probe
gcagtctatgatgttatgaagaact

SEQ ID NO: 146330 - DNA, 25 bp, Artificial
  Probe
ttgtgagatggaatcgtaataaacc

SEQ ID NO: 146331 - DNA, 25 bp, Artificial
  Probe
ctgccttgtgagatggaatcgtaat

SEQ ID NO: 146332 - DNA, 25 bp, Artificial
  Probe
ccttgtgagatggaatcgtaataaa

SEQ ID NO: 146333 - DNA, 25 bp, Artificial
  Probe
gactgtctcctcaaattctcactag

SEQ ID NO: 146334 - DNA, 25 bp, Artificial
  Probe
ctgaagccttgagagagaagaaatt

SEQ ID NO: 146335 - DNA, 25 bp, Artificial
  Probe
acataaggagaaagaaagtacccag

SEQ ID NO: 146336 - DNA, 25 bp, Artificial
  Probe
aacataaggagaaagaaagtaccca

SEQ ID NO: 146337 - DNA, 25 bp, Artificial
  Probe
atgatgttatgaagaactgctggca

SEQ ID NO: 146338 - DNA, 25 bp, Artificial
  Probe
actgtctcctcaaattctcactaga

SEQ ID NO: 146339 - DNA, 25 bp, Artificial
  Probe
caacataaggagaaagaaagtaccc

SEQ ID NO: 146340 - DNA, 25 bp, Artificial
  Probe
cataaggagaaagaaagtacccagc

SEQ ID NO: 146341 - DNA, 25 bp, Artificial
  Probe
cttgtgagatggaatcgtaataaac

SEQ ID NO: 146342 - DNA, 25 bp, Artificial
  Probe
ataaggagaaagaaagtacccagca

SEQ ID NO: 146343 - DNA, 25 bp, Artificial
  Probe
taaggagaaagaaagtacccagcaa

SEQ ID NO: 146344 - DNA, 25 bp, Artificial
  Probe
agactgtctcctcaaattctcacta

SEQ ID NO: 146345 - DNA, 25 bp, Artificial
  Probe
cctgaagccttgagagagaagaaat

SEQ ID NO: 146346 - DNA, 25 bp, Artificial
  Probe
gaatcgtaataaaccactccatgag

SEQ ID NO: 146347 - DNA, 25 bp, Artificial
  Probe
acccgcagtctatgatgttatgaag

SEQ ID NO: 146348 - DNA, 25 bp, Artificial
  Probe
ggaatccttctctgggaaatctatt

SEQ ID NO: 146349 - DNA, 25 bp, Artificial
  Probe
aatcgtaataaaccactccatgagg

SEQ ID NO: 146350 - DNA, 25 bp, Artificial
  Probe
cccgcagtctatgatgttatgaaga

SEQ ID NO: 146351 - DNA, 25 bp, Artificial
  Probe
ggagaaagaaagtacccagcaaatg

SEQ ID NO: 146352 - DNA, 25 bp, Artificial
  Probe
ctcctgaagccttgagagagaagaa

SEQ ID NO: 146353 - DNA, 25 bp, Artificial
  Probe
tgtgagatggaatcgtaataaacca

SEQ ID NO: 146354 - DNA, 25 bp, Artificial
  Probe
tgagatggaatcgtaataaaccact

SEQ ID NO: 146355 - DNA, 25 bp, Artificial
  Probe
gtgagatggaatcgtaataaaccac

SEQ ID NO: 146356 - DNA, 25 bp, Artificial
  Probe
agatggaatcgtaataaaccactcc

SEQ ID NO: 146357 - DNA, 25 bp, Artificial
  Probe
aggagaaagaaagtacccagcaaat

SEQ ID NO: 146358 - DNA, 25 bp, Artificial
  Probe
gagatggaatcgtaataaaccactc

SEQ ID NO: 146359 - DNA, 25 bp, Artificial
  Probe
cacccgcagtctatgatgttatgaa

SEQ ID NO: 146360 - DNA, 25 bp, Artificial
  Probe
aaggagaaagaaagtacccagcaaa

SEQ ID NO: 146361 - DNA, 25 bp, Artificial
  Probe
tgaagccttgagagagaagaaattt

SEQ ID NO: 146362 - DNA, 25 bp, Artificial
  Probe
tgatgttatgaagaactgctggcac

SEQ ID NO: 146363 - DNA, 25 bp, Artificial
  Probe
ggaatcgtaataaaccactccatga

SEQ ID NO: 146364 - DNA, 25 bp, Artificial
  Probe
gaatccttctctgggaaatctattc

SEQ ID NO: 146365 - DNA, 25 bp, Artificial
  Probe
cttctctcttgtagatacctgtctc

SEQ ID NO: 146366 - DNA, 25 bp, Artificial
  Probe
ccttctctcttgtagatacctgtct

SEQ ID NO: 146367 - DNA, 25 bp, Artificial
  Probe
ttgtagatacctgtctcgttctgat

SEQ ID NO: 146368 - DNA, 25 bp, Artificial
  Probe
accttctctcttgtagatacctgtc

SEQ ID NO: 146369 - DNA, 25 bp, Artificial
  Probe
cttagttgacatagaagaggcacaa

SEQ ID NO: 146370 - DNA, 25 bp, Artificial
  Probe
ttctctcttgtagatacctgtctcg

SEQ ID NO: 146371 - DNA, 25 bp, Artificial
  Probe
caccttctctcttgtagatacctgt

SEQ ID NO: 146372 - DNA, 25 bp, Artificial
  Probe
ctcttgtagatacctgtctcgttct

SEQ ID NO: 146373 - DNA, 25 bp, Artificial
  Probe
tctcttgtagatacctgtctcgttc

SEQ ID NO: 146374 - DNA, 25 bp, Artificial
  Probe
ctctcttgtagatacctgtctcgtt

SEQ ID NO: 146375 - DNA, 25 bp, Artificial
  Probe
cttgtagatacctgtctcgttctga

SEQ ID NO: 146376 - DNA, 25 bp, Artificial
  Probe
tcttgtagatacctgtctcgttctg

SEQ ID NO: 146377 - DNA, 25 bp, Artificial
  Probe
tgtagatacctgtctcgttctgatg

SEQ ID NO: 146378 - DNA, 25 bp, Artificial
  Probe
tacagaacagaacaatgactgagaa

SEQ ID NO: 146379 - DNA, 25 bp, Artificial
  Probe
atacagaacagaacaatgactgaga

SEQ ID NO: 146380 - DNA, 25 bp, Artificial
  Probe
agaacagaacaatgactgagaagta

SEQ ID NO: 146381 - DNA, 25 bp, Artificial
  Probe
tctctcttgtagatacctgtctcgt

SEQ ID NO: 146382 - DNA, 25 bp, Artificial
  Probe
cagaacagaacaatgactgagaagt

SEQ ID NO: 146383 - DNA, 25 bp, Artificial
  Probe
acagaacagaacaatgactgagaag

SEQ ID NO: 146384 - DNA, 25 bp, Artificial
  Probe
agaacaatgactgagaagtacaacg

SEQ ID NO: 146385 - DNA, 25 bp, Artificial
  Probe
tagatacctgtctcgttctgatgga

SEQ ID NO: 146386 - DNA, 25 bp, Artificial
  Probe
gtagatacctgtctcgttctgatgg

SEQ ID NO: 146387 - DNA, 25 bp, Artificial
  Probe
gcaccttctctcttgtagatacctg

SEQ ID NO: 146388 - DNA, 25 bp, Artificial
  Probe
ctggcaccttctctcttgtagatac

SEQ ID NO: 146389 - DNA, 25 bp, Artificial
  Probe
cagaacaatgactgagaagtacaac

SEQ ID NO: 146390 - DNA, 25 bp, Artificial
  Probe
acagaacaatgactgagaagtacaa

SEQ ID NO: 146391 - DNA, 25 bp, Artificial
  Probe
aacagaacaatgactgagaagtaca

SEQ ID NO: 146392 - DNA, 25 bp, Artificial
  Probe
gaacagaacaatgactgagaagtac

SEQ ID NO: 146393 - DNA, 25 bp, Artificial
  Probe
tctggcaccttctctcttgtagata

SEQ ID NO: 146394 - DNA, 25 bp, Artificial
  Probe
taatgccagcttagttgacatagaa

SEQ ID NO: 146395 - DNA, 25 bp, Artificial
  Probe
ttaatgccagcttagttgacataga

SEQ ID NO: 146396 - DNA, 25 bp, Artificial
  Probe
gtggaagagagcagtgagagtattc

SEQ ID NO: 146397 - DNA, 25 bp, Artificial
  Probe
tatacagaacagaacaatgactgag

SEQ ID NO: 146398 - DNA, 25 bp, Artificial
  Probe
tggaagagagcagtgagagtattct

SEQ ID NO: 146399 - DNA, 25 bp, Artificial
  Probe
gcttagttgacatagaagaggcaca

SEQ ID NO: 146400 - DNA, 25 bp, Artificial
  Probe
attaatgccagcttagttgacatag

SEQ ID NO: 146401 - DNA, 25 bp, Artificial
  Probe
aatgccagcttagttgacatagaag

SEQ ID NO: 146402 - DNA, 25 bp, Artificial
  Probe
tagaagaggcacaaagaagttacat

SEQ ID NO: 146403 - DNA, 25 bp, Artificial
  Probe
atagaagaggcacaaagaagttaca

SEQ ID NO: 146404 - DNA, 25 bp, Artificial
  Probe
acatagaagaggcacaaagaagtta

SEQ ID NO: 146405 - DNA, 25 bp, Artificial
  Probe
gaacaatgactgagaagtacaacgg

SEQ ID NO: 146406 - DNA, 25 bp, Artificial
  Probe
catagaagaggcacaaagaagttac

SEQ ID NO: 146407 - DNA, 25 bp, Artificial
  Probe
gagaaaggagaggatgttaatgtga

SEQ ID NO: 146408 - DNA, 25 bp, Artificial
  Probe
atggagaaaggagaggatgttaatg

SEQ ID NO: 146409 - DNA, 25 bp, Artificial
  Probe
gatggagaaaggagaggatgttaat

SEQ ID NO: 146410 - DNA, 25 bp, Artificial
  Probe
taaagcagaagtccacaaacagaag

SEQ ID NO: 146411 - DNA, 25 bp, Artificial
  Probe
tagatggactgtactttgtggtaga

SEQ ID NO: 146412 - DNA, 25 bp, Artificial
  Probe
gtagatggactgtactttgtggtag

SEQ ID NO: 146413 - DNA, 25 bp, Artificial
  Probe
ctacattagcattccacggttcagg

SEQ ID NO: 146414 - DNA, 25 bp, Artificial
  Probe
cctacattagcattccacggttcag

SEQ ID NO: 146415 - DNA, 25 bp, Artificial
  Probe
ctcacagaattccttactagaacca

SEQ ID NO: 146416 - DNA, 25 bp, Artificial
  Probe
actcacagaattccttactagaacc

SEQ ID NO: 146417 - DNA, 25 bp, Artificial
  Probe
agatggactgtactttgtggtagag

SEQ ID NO: 146418 - DNA, 25 bp, Artificial
  Probe
tcacagaattccttactagaaccaa

SEQ ID NO: 146419 - DNA, 25 bp, Artificial
  Probe
ccttactcacagaattccttactag

SEQ ID NO: 146420 - DNA, 25 bp, Artificial
  Probe
ctagaaccaaagtagatggactgta

SEQ ID NO: 146421 - DNA, 25 bp, Artificial
  Probe
tactagaaccaaagtagatggactg

SEQ ID NO: 146422 - DNA, 25 bp, Artificial
  Probe
actagaaccaaagtagatggactgt

SEQ ID NO: 146423 - DNA, 25 bp, Artificial
  Probe
ccttactagaaccaaagtagatgga

SEQ ID NO: 146424 - DNA, 25 bp, Artificial
  Probe
tccttactagaaccaaagtagatgg

SEQ ID NO: 146425 - DNA, 25 bp, Artificial
  Probe
tagaaccaaagtagatggactgtac

SEQ ID NO: 146426 - DNA, 25 bp, Artificial
  Probe
agtagatggactgtactttgtggta

SEQ ID NO: 146427 - DNA, 25 bp, Artificial
  Probe
agaaccaaagtagatggactgtact

SEQ ID NO: 146428 - DNA, 25 bp, Artificial
  Probe
caatcatgtactgggaaaccaattt

SEQ ID NO: 146429 - DNA, 25 bp, Artificial
  Probe
ttactagaaccaaagtagatggact

SEQ ID NO: 146430 - DNA, 25 bp, Artificial
  Probe
acaatcatgtactgggaaaccaatt

SEQ ID NO: 146431 - DNA, 25 bp, Artificial
  Probe
cttactagaaccaaagtagatggac

SEQ ID NO: 146432 - DNA, 25 bp, Artificial
  Probe
tactcacagaattccttactagaac

SEQ ID NO: 146433 - DNA, 25 bp, Artificial
  Probe
gatggactgtactttgtggtagagc

SEQ ID NO: 146434 - DNA, 25 bp, Artificial
  Probe
aatcatgtactgggaaaccaatttc

SEQ ID NO: 146435 - DNA, 25 bp, Artificial
  Probe
cacaatcatgtactgggaaaccaat

SEQ ID NO: 146436 - DNA, 25 bp, Artificial
  Probe
tttcccttttccctacattagcatt

SEQ ID NO: 146437 - DNA, 25 bp, Artificial
  Probe
ttttcccttttccctacattagcat

SEQ ID NO: 146438 - DNA, 25 bp, Artificial
  Probe
atttaaaccacggaacagcagaatg

SEQ ID NO: 146439 - DNA, 25 bp, Artificial
  Probe
catttaaaccacggaacagcagaat

SEQ ID NO: 146440 - DNA, 25 bp, Artificial
  Probe
cttactcacagaattccttactaga

SEQ ID NO: 146441 - DNA, 25 bp, Artificial
  Probe
ttcccttttccctacattagcattc

SEQ ID NO: 146442 - DNA, 25 bp, Artificial
  Probe
ttccttactagaaccaaagtagatg

SEQ ID NO: 146443 - DNA, 25 bp, Artificial
  Probe
taaaccaaaaccaccatttcctctt

SEQ ID NO: 146444 - DNA, 25 bp, Artificial
  Probe
gtagccttcatttaaaccacggaac

SEQ ID NO: 146445 - DNA, 25 bp, Artificial
  Probe
agtagccttcatttaaaccacggaa

SEQ ID NO: 146446 - DNA, 25 bp, Artificial
  Probe
tttcacaatcatgtactgggaaacc

SEQ ID NO: 146447 - DNA, 25 bp, Artificial
  Probe
aaagcagaagtccacaaacagaagg

SEQ ID NO: 146448 - DNA, 25 bp, Artificial
  Probe
tagccttcatttaaaccacggaaca

SEQ ID NO: 146449 - DNA, 25 bp, Artificial
  Probe
ccttttccctacattagcattccac

SEQ ID NO: 146450 - DNA, 25 bp, Artificial
  Probe
gtaaaccaaaaccaccatttcctct

SEQ ID NO: 146451 - DNA, 25 bp, Artificial
  Probe
tcacaatcatgtactgggaaaccaa

SEQ ID NO: 146452 - DNA, 25 bp, Artificial
  Probe
ttcacaatcatgtactgggaaacca

SEQ ID NO: 146453 - DNA, 25 bp, Artificial
  Probe
cacagaattccttactagaaccaaa

SEQ ID NO: 146454 - DNA, 25 bp, Artificial
  Probe
tgtaaaccaaaaccaccatttcctc

SEQ ID NO: 146455 - DNA, 25 bp, Artificial
  Probe
ctggtaaggttgaatttgtgatgag

SEQ ID NO: 146456 - DNA, 25 bp, Artificial
  Probe
gtaaggttgaatttgtgatgaggga

SEQ ID NO: 146457 - DNA, 25 bp, Artificial
  Probe
tggtaaggttgaatttgtgatgagg

SEQ ID NO: 146458 - DNA, 25 bp, Artificial
  Probe
ggtaaggttgaatttgtgatgaggg

SEQ ID NO: 146459 - DNA, 25 bp, Artificial
  Probe
ttcctggtaaggttgaatttgtgat

SEQ ID NO: 146460 - DNA, 25 bp, Artificial
  Probe
aacttcctggtaaggttgaatttgt

SEQ ID NO: 146461 - DNA, 25 bp, Artificial
  Probe
cttcctggtaaggttgaatttgtga

SEQ ID NO: 146462 - DNA, 25 bp, Artificial
  Probe
cctggtaaggttgaatttgtgatga

SEQ ID NO: 146463 - DNA, 25 bp, Artificial
  Probe
tcctggtaaggttgaatttgtgatg

SEQ ID NO: 146464 - DNA, 25 bp, Artificial
  Probe
acttcctggtaaggttgaatttgtg

SEQ ID NO: 146465 - DNA, 25 bp, Artificial
  Probe
caaaggagaacaggataccatcagg

SEQ ID NO: 146466 - DNA, 25 bp, Artificial
  Probe
ccaaaggagaacaggataccatcag

SEQ ID NO: 146467 - DNA, 25 bp, Artificial
  Probe
aaaggagaacaggataccatcaggg

SEQ ID NO: 146468 - DNA, 25 bp, Artificial
  Probe
gagaacaggataccatcagggagac

SEQ ID NO: 146469 - DNA, 25 bp, Artificial
  Probe
cccaaaggagaacaggataccatca

SEQ ID NO: 146470 - DNA, 25 bp, Artificial
  Probe
gaacaggataccatcagggagacag

SEQ ID NO: 146471 - DNA, 25 bp, Artificial
  Probe
agaacaggataccatcagggagaca

SEQ ID NO: 146472 - DNA, 25 bp, Artificial
  Probe
aaggagaacaggataccatcaggga

SEQ ID NO: 146473 - DNA, 25 bp, Artificial
  Probe
caacttcctggtaaggttgaatttg

SEQ ID NO: 146474 - DNA, 25 bp, Artificial
  Probe
ggagaacaggataccatcagggaga

SEQ ID NO: 146475 - DNA, 25 bp, Artificial
  Probe
aggagaacaggataccatcagggag

SEQ ID NO: 146476 - DNA, 25 bp, Artificial
  Probe
gcgacatcaacttcctggtaaggtt

SEQ ID NO: 146477 - DNA, 25 bp, Artificial
  Probe
cgacatcaacttcctggtaaggttg

SEQ ID NO: 146478 - DNA, 25 bp, Artificial
  Probe
aacaggataccatcagggagacagg

SEQ ID NO: 146479 - DNA, 25 bp, Artificial
  Probe
gcattcttctttccaacagcccatg

SEQ ID NO: 146480 - DNA, 25 bp, Artificial
  Probe
ccccaaaggagaacaggataccatc

SEQ ID NO: 146481 - DNA, 25 bp, Artificial
  Probe
tccccaaaggagaacaggataccat

SEQ ID NO: 146482 - DNA, 25 bp, Artificial
  Probe
cattcttctttccaacagcccatgg

SEQ ID NO: 146483 - DNA, 25 bp, Artificial
  Probe
gactccccaaaggagaacaggatac

SEQ ID NO: 146484 - DNA, 25 bp, Artificial
  Probe
ggactccccaaaggagaacaggata

SEQ ID NO: 146485 - DNA, 25 bp, Artificial
  Probe
ctactggaacatgaccaatcaggat

SEQ ID NO: 146486 - DNA, 25 bp, Artificial
  Probe
tactggaacatgaccaatcaggatg

SEQ ID NO: 146487 - DNA, 25 bp, Artificial
  Probe
caatcaggatgtcatcagctctgtg

SEQ ID NO: 146488 - DNA, 25 bp, Artificial
  Probe
cctactggaacatgaccaatcagga

SEQ ID NO: 146489 - DNA, 25 bp, Artificial
  Probe
ctggaacatgaccaatcaggatgtc

SEQ ID NO: 146490 - DNA, 25 bp, Artificial
  Probe
gaccaatcaggatgtcatcagctct

SEQ ID NO: 146491 - DNA, 25 bp, Artificial
  Probe
aatcaggatgtcatcagctctgtgg

SEQ ID NO: 146492 - DNA, 25 bp, Artificial
  Probe
ccaatcaggatgtcatcagctctgt

SEQ ID NO: 146493 - DNA, 25 bp, Artificial
  Probe
accaatcaggatgtcatcagctctg

SEQ ID NO: 146494 - DNA, 25 bp, Artificial
  Probe
actggaacatgaccaatcaggatgt

SEQ ID NO: 146495 - DNA, 25 bp, Artificial
  Probe
cagaagaaaatccttggaagcatcc

SEQ ID NO: 146496 - DNA, 25 bp, Artificial
  Probe
ccagaagaaaatccttggaagcatc

SEQ ID NO: 146497 - DNA, 25 bp, Artificial
  Probe
aggatgtcatcagctctgtggaaga

SEQ ID NO: 146498 - DNA, 25 bp, Artificial
  Probe
tctgtggaagagggttataggcttc

SEQ ID NO: 146499 - DNA, 25 bp, Artificial
  Probe
atcagctctgtggaagagggttata

SEQ ID NO: 146500 - DNA, 25 bp, Artificial
  Probe
accagaagaaaatccttggaagcat

SEQ ID NO: 146501 - DNA, 25 bp, Artificial
  Probe
caggatgtcatcagctctgtggaag

SEQ ID NO: 146502 - DNA, 25 bp, Artificial
  Probe
ctctgtggaagagggttataggctt

SEQ ID NO: 146503 - DNA, 25 bp, Artificial
  Probe
atcaggatgtcatcagctctgtgga

SEQ ID NO: 146504 - DNA, 25 bp, Artificial
  Probe
tcagctctgtggaagagggttatag

SEQ ID NO: 146505 - DNA, 25 bp, Artificial
  Probe
aatccttggaagcatccagacaatg

SEQ ID NO: 146506 - DNA, 25 bp, Artificial
  Probe
tggaacatgaccaatcaggatgtca

SEQ ID NO: 146507 - DNA, 25 bp, Artificial
  Probe
ccctactggaacatgaccaatcagg

SEQ ID NO: 146508 - DNA, 25 bp, Artificial
  Probe
caccagaagaaaatccttggaagca

SEQ ID NO: 146509 - DNA, 25 bp, Artificial
  Probe
gatgtcatcagctctgtggaagagg

SEQ ID NO: 146510 - DNA, 25 bp, Artificial
  Probe
ggatgtcatcagctctgtggaagag

SEQ ID NO: 146511 - DNA, 25 bp, Artificial
  Probe
gagattggctggattccatccgaat

SEQ ID NO: 146512 - DNA, 25 bp, Artificial
  Probe
aaatccttggaagcatccagacaat

SEQ ID NO: 146513 - DNA, 25 bp, Artificial
  Probe
cagctctgtggaagagggttatagg

SEQ ID NO: 146514 - DNA, 25 bp, Artificial
  Probe
catcagctctgtggaagagggttat

SEQ ID NO: 146515 - DNA, 25 bp, Artificial
  Probe
atccttggaagcatccagacaatga

SEQ ID NO: 146516 - DNA, 25 bp, Artificial
  Probe
ccaccagaagaaaatccttggaagc

SEQ ID NO: 146517 - DNA, 25 bp, Artificial
  Probe
gccaccagaagaaaatccttggaag

SEQ ID NO: 146518 - DNA, 25 bp, Artificial
  Probe
tgaccaatcaggatgtcatcagctc

SEQ ID NO: 146519 - DNA, 25 bp, Artificial
  Probe
agattggctggattccatccgaatg

SEQ ID NO: 146520 - DNA, 25 bp, Artificial
  Probe
tccttggaagcatccagacaatgag

SEQ ID NO: 146521 - DNA, 25 bp, Artificial
  Probe
tcatcagctctgtggaagagggtta

SEQ ID NO: 146522 - DNA, 25 bp, Artificial
  Probe
ttggaagcatccagacaatgaggtc

SEQ ID NO: 146523 - DNA, 25 bp, Artificial
  Probe
cttggaagcatccagacaatgaggt

SEQ ID NO: 146524 - DNA, 25 bp, Artificial
  Probe
gaagaaaatccttggaagcatccag

SEQ ID NO: 146525 - DNA, 25 bp, Artificial
  Probe
aagaaaatccttggaagcatccaga

SEQ ID NO: 146526 - DNA, 25 bp, Artificial
  Probe
agaagaaaatccttggaagcatcca

SEQ ID NO: 146527 - DNA, 25 bp, Artificial
  Probe
aaaatccttggaagcatccagacaa

SEQ ID NO: 146528 - DNA, 25 bp, Artificial
  Probe
agaaaatccttggaagcatccagac

SEQ ID NO: 146529 - DNA, 25 bp, Artificial
  Probe
gaaaatccttggaagcatccagaca

SEQ ID NO: 146530 - DNA, 25 bp, Artificial
  Probe
ttgaatgaatatgtgtgtgtggatg

SEQ ID NO: 146531 - DNA, 25 bp, Artificial
  Probe
gaatgaatatgtgtgtgtggatgac

SEQ ID NO: 146532 - DNA, 25 bp, Artificial
  Probe
tgaatgaatatgtgtgtgtggatga

SEQ ID NO: 146533 - DNA, 25 bp, Artificial
  Probe
tctgtgccttaacttcatctattca

SEQ ID NO: 146534 - DNA, 25 bp, Artificial
  Probe
ttatggcttcagtattcctaagacg

SEQ ID NO: 146535 - DNA, 25 bp, Artificial
  Probe
ctgtgccttaacttcatctattcaa

SEQ ID NO: 146536 - DNA, 25 bp, Artificial
  Probe
ttctgtgccttaacttcatctattc

SEQ ID NO: 146537 - DNA, 25 bp, Artificial
  Probe
ttaagaagttctacagtgaagccag

SEQ ID NO: 146538 - DNA, 25 bp, Artificial
  Probe
tatggcttcagtattcctaagacgg

SEQ ID NO: 146539 - DNA, 25 bp, Artificial
  Probe
aatgaatatgtgtgtgtggatgaca

SEQ ID NO: 146540 - DNA, 25 bp, Artificial
  Probe
gcttatggcttcagtattcctaaga

SEQ ID NO: 146541 - DNA, 25 bp, Artificial
  Probe
tgcttatggcttcagtattcctaag

SEQ ID NO: 146542 - DNA, 25 bp, Artificial
  Probe
ctgcttatggcttcagtattcctaa

SEQ ID NO: 146543 - DNA, 25 bp, Artificial
  Probe
tatgtgtgtgtggatgacaggtata

SEQ ID NO: 146544 - DNA, 25 bp, Artificial
  Probe
atgaatatgtgtgtgtggatgacag

SEQ ID NO: 146545 - DNA, 25 bp, Artificial
  Probe
ggtcagtggactctaatctcttatt

SEQ ID NO: 146546 - DNA, 25 bp, Artificial
  Probe
cggtcagtggactctaatctcttat

SEQ ID NO: 146547 - DNA, 25 bp, Artificial
  Probe
cttatggcttcagtattcctaagac

SEQ ID NO: 146548 - DNA, 25 bp, Artificial
  Probe
atgtgtgtgtggatgacaggtatat

SEQ ID NO: 146549 - DNA, 25 bp, Artificial
  Probe
atatgtgtgtgtggatgacaggtat

SEQ ID NO: 146550 - DNA, 25 bp, Artificial
  Probe
tgtgtgtgtggatgacaggtatata

SEQ ID NO: 146551 - DNA, 25 bp, Artificial
  Probe
aatatgtgtgtgtggatgacaggta

SEQ ID NO: 146552 - DNA, 25 bp, Artificial
  Probe
tattcctaagacggcgaacttcaag

SEQ ID NO: 146553 - DNA, 25 bp, Artificial
  Probe
tcaatcctcagcactactaaacaat

SEQ ID NO: 146554 - DNA, 25 bp, Artificial
  Probe
ttcaatcctcagcactactaaacaa

SEQ ID NO: 146555 - DNA, 25 bp, Artificial
  Probe
cgtttattatactcggtttcgttca

SEQ ID NO: 146556 - DNA, 25 bp, Artificial
  Probe
tttgaatgaatatgtgtgtgtggat

SEQ ID NO: 146557 - DNA, 25 bp, Artificial
  Probe
atttgaatgaatatgtgtgtgtgga

SEQ ID NO: 146558 - DNA, 25 bp, Artificial
  Probe
atgtttactaagcccattactcagg

SEQ ID NO: 146559 - DNA, 25 bp, Artificial
  Probe
ctatgctttaattgtctcagtggga

SEQ ID NO: 146560 - DNA, 25 bp, Artificial
  Probe
gcgttaattcccgtttacatttcat

SEQ ID NO: 146561 - DNA, 25 bp, Artificial
  Probe
aaatgtaatcatagggctttctgtg

SEQ ID NO: 146562 - DNA, 25 bp, Artificial
  Probe
taagaagttctacagtgaagccagc

SEQ ID NO: 146563 - DNA, 25 bp, Artificial
  Probe
gatgtttactaagcccattactcag

SEQ ID NO: 146564 - DNA, 25 bp, Artificial
  Probe
gtattcctaagacggcgaacttcaa

SEQ ID NO: 146565 - DNA, 25 bp, Artificial
  Probe
gctttctgtgccttaacttcatcta

SEQ ID NO: 146566 - DNA, 25 bp, Artificial
  Probe
ctttctgtgccttaacttcatctat

SEQ ID NO: 146567 - DNA, 25 bp, Artificial
  Probe
gttcaatcctcagcactactaaaca

SEQ ID NO: 146568 - DNA, 25 bp, Artificial
  Probe
caatcctcagcactactaaacaata

SEQ ID NO: 146569 - DNA, 25 bp, Artificial
  Probe
tgtgccttaacttcatctattcaaa

SEQ ID NO: 146570 - DNA, 25 bp, Artificial
  Probe
gctgcttatggcttcagtattccta

SEQ ID NO: 146571 - DNA, 25 bp, Artificial
  Probe
tgatgtttactaagcccattactca

SEQ ID NO: 146572 - DNA, 25 bp, Artificial
  Probe
cagcgttaattcccgtttacatttc

SEQ ID NO: 146573 - DNA, 25 bp, Artificial
  Probe
cattgttggaaattagagagtgtct

SEQ ID NO: 146574 - DNA, 25 bp, Artificial
  Probe
gccttaacttcatctattcaaatcg

SEQ ID NO: 146575 - DNA, 25 bp, Artificial
  Probe
caccaagtatctgaaggatgtcact

SEQ ID NO: 146576 - DNA, 25 bp, Artificial
  Probe
caaaccttcgtgttcactttaagaa

SEQ ID NO: 146577 - DNA, 25 bp, Artificial
  Probe
ccaccaagtatctgaaggatgtcac

SEQ ID NO: 146578 - DNA, 25 bp, Artificial
  Probe
ctcaaaccttcgtgttcactttaag

SEQ ID NO: 146579 - DNA, 25 bp, Artificial
  Probe
tcaaaccttcgtgttcactttaaga

SEQ ID NO: 146580 - DNA, 25 bp, Artificial
  Probe
cattgaacacatccaggtgaacaag

SEQ ID NO: 146581 - DNA, 25 bp, Artificial
  Probe
aagccaccaagtatctgaaggatgt

SEQ ID NO: 146582 - DNA, 25 bp, Artificial
  Probe
accaagtatctgaaggatgtcactt

SEQ ID NO: 146583 - DNA, 25 bp, Artificial
  Probe
gctcaaaccttcgtgttcactttaa

SEQ ID NO: 146584 - DNA, 25 bp, Artificial
  Probe
caatctctcgctgtaggacatcatg

SEQ ID NO: 146585 - DNA, 25 bp, Artificial
  Probe
aaagccaccaagtatctgaaggatg

SEQ ID NO: 146586 - DNA, 25 bp, Artificial
  Probe
caaagccaccaagtatctgaaggat

SEQ ID NO: 146587 - DNA, 25 bp, Artificial
  Probe
gatggcattgtccttgaagatgtcc

SEQ ID NO: 146588 - DNA, 25 bp, Artificial
  Probe
agacaaagaggtaaaggaagcctag

SEQ ID NO: 146589 - DNA, 25 bp, Artificial
  Probe
agccaccaagtatctgaaggatgtc

SEQ ID NO: 146590 - DNA, 25 bp, Artificial
  Probe
cagacaaagaggtaaaggaagccta

SEQ ID NO: 146591 - DNA, 25 bp, Artificial
  Probe
attgaacacatccaggtgaacaagg

SEQ ID NO: 146592 - DNA, 25 bp, Artificial
  Probe
ggagcagacaaagaggtaaaggaag

SEQ ID NO: 146593 - DNA, 25 bp, Artificial
  Probe
ccaatctctcgctgtaggacatcat

SEQ ID NO: 146594 - DNA, 25 bp, Artificial
  Probe
aaagaggtaaaggaagcctagcatc

SEQ ID NO: 146595 - DNA, 25 bp, Artificial
  Probe
caaagaggtaaaggaagcctagcat

SEQ ID NO: 146596 - DNA, 25 bp, Artificial
  Probe
gccaccaagtatctgaaggatgtca

SEQ ID NO: 146597 - DNA, 25 bp, Artificial
  Probe
gagcagacaaagaggtaaaggaagc

SEQ ID NO: 146598 - DNA, 25 bp, Artificial
  Probe
ccaagtatctgaaggatgtcacttt

SEQ ID NO: 146599 - DNA, 25 bp, Artificial
  Probe
ggatggcattgtccttgaagatgtc

SEQ ID NO: 146600 - DNA, 25 bp, Artificial
  Probe
agtatctgaaggatgtcactttaaa

SEQ ID NO: 146601 - DNA, 25 bp, Artificial
  Probe
acagattgttccaaagccagaagag

SEQ ID NO: 146602 - DNA, 25 bp, Artificial
  Probe
cctcactgagaaggaacagattgtt

SEQ ID NO: 146603 - DNA, 25 bp, Artificial
  Probe
ggctcaaaccttcgtgttcacttta

SEQ ID NO: 146604 - DNA, 25 bp, Artificial
  Probe
gaggtaaaggaagcctagcatcaac

SEQ ID NO: 146605 - DNA, 25 bp, Artificial
  Probe
gacaaagaggtaaaggaagcctagc

SEQ ID NO: 146606 - DNA, 25 bp, Artificial
  Probe
cagattgttccaaagccagaagagg

SEQ ID NO: 146607 - DNA, 25 bp, Artificial
  Probe
caagtatctgaaggatgtcacttta

SEQ ID NO: 146608 - DNA, 25 bp, Artificial
  Probe
agaggtaaaggaagcctagcatcaa

SEQ ID NO: 146609 - DNA, 25 bp, Artificial
  Probe
aagaggtaaaggaagcctagcatca

SEQ ID NO: 146610 - DNA, 25 bp, Artificial
  Probe
catatccgcaaagccaccaagtatc

SEQ ID NO: 146611 - DNA, 25 bp, Artificial
  Probe
gggagcagacaaagaggtaaaggaa

SEQ ID NO: 146612 - DNA, 25 bp, Artificial
  Probe
aaaccttcgtgttcactttaagaac

SEQ ID NO: 146613 - DNA, 25 bp, Artificial
  Probe
atatccgcaaagccaccaagtatct

SEQ ID NO: 146614 - DNA, 25 bp, Artificial
  Probe
gatcctcactgagaaggaacagatt

SEQ ID NO: 146615 - DNA, 25 bp, Artificial
  Probe
aatcatgcaagtcaagaggctcaaa

SEQ ID NO: 146616 - DNA, 25 bp, Artificial
  Probe
aaatcatgcaagtcaagaggctcaa

SEQ ID NO: 146617 - DNA, 25 bp, Artificial
  Probe
atcctcactgagaaggaacagattg

SEQ ID NO: 146618 - DNA, 25 bp, Artificial
  Probe
gattgttccaaagccagaagaggag

SEQ ID NO: 146619 - DNA, 25 bp, Artificial
  Probe
aagtatctgaaggatgtcactttaa

SEQ ID NO: 146620 - DNA, 25 bp, Artificial
  Probe
ccaaggacttaggattatgttcact

SEQ ID NO: 146621 - DNA, 25 bp, Artificial
  Probe
aaggacttaggattatgttcactgt

SEQ ID NO: 146622 - DNA, 25 bp, Artificial
  Probe
caaggacttaggattatgttcactg

SEQ ID NO: 146623 - DNA, 25 bp, Artificial
  Probe
aggacttaggattatgttcactgtg

SEQ ID NO: 146624 - DNA, 25 bp, Artificial
  Probe
tccaaggacttaggattatgttcac

SEQ ID NO: 146625 - DNA, 25 bp, Artificial
  Probe
ggacttaggattatgttcactgtga

SEQ ID NO: 146626 - DNA, 25 bp, Artificial
  Probe
gatgctatacagtgtcatggtgatg

SEQ ID NO: 146627 - DNA, 25 bp, Artificial
  Probe
agatgctatacagtgtcatggtgat

SEQ ID NO: 146628 - DNA, 25 bp, Artificial
  Probe
atctaattacgtcactgaacaagga

SEQ ID NO: 146629 - DNA, 25 bp, Artificial
  Probe
catctaattacgtcactgaacaagg

SEQ ID NO: 146630 - DNA, 25 bp, Artificial
  Probe
gtccattcatctaattacgtcactg

SEQ ID NO: 146631 - DNA, 25 bp, Artificial
  Probe
cccacaatagatttcaagttactgc

SEQ ID NO: 146632 - DNA, 25 bp, Artificial
  Probe
gaccgctaaggaaagtaaccatatt

SEQ ID NO: 146633 - DNA, 25 bp, Artificial
  Probe
accgctaaggaaagtaaccatattc

SEQ ID NO: 146634 - DNA, 25 bp, Artificial
  Probe
tccattcatctaattacgtcactga

SEQ ID NO: 146635 - DNA, 25 bp, Artificial
  Probe
cagatgctatacagtgtcatggtga

SEQ ID NO: 146636 - DNA, 25 bp, Artificial
  Probe
tcccacaatagatttcaagttactg

SEQ ID NO: 146637 - DNA, 25 bp, Artificial
  Probe
gcaaattaacaagtagggtgagaca

SEQ ID NO: 146638 - DNA, 25 bp, Artificial
  Probe
tcatctaattacgtcactgaacaag

SEQ ID NO: 146639 - DNA, 25 bp, Artificial
  Probe
tactactgcttgctaggaccatgat

SEQ ID NO: 146640 - DNA, 25 bp, Artificial
  Probe
tctaattacgtcactgaacaaggac

SEQ ID NO: 146641 - DNA, 25 bp, Artificial
  Probe
ggcaaattaacaagtagggtgagac

SEQ ID NO: 146642 - DNA, 25 bp, Artificial
  Probe
ttcccacaatagatttcaagttact

SEQ ID NO: 146643 - DNA, 25 bp, Artificial
  Probe
accatattcccacaatagatttcaa

SEQ ID NO: 146644 - DNA, 25 bp, Artificial
  Probe
aaccatattcccacaatagatttca

SEQ ID NO: 146645 - DNA, 25 bp, Artificial
  Probe
atgaccactgtactactgcttgcta

SEQ ID NO: 146646 - DNA, 25 bp, Artificial
  Probe
aaattaacaagtagggtgagacact

SEQ ID NO: 146647 - DNA, 25 bp, Artificial
  Probe
caaattaacaagtagggtgagacac

SEQ ID NO: 146648 - DNA, 25 bp, Artificial
  Probe
ctaattacgtcactgaacaaggacc

SEQ ID NO: 146649 - DNA, 25 bp, Artificial
  Probe
agtagggtgagacactttgaattta

SEQ ID NO: 146650 - DNA, 25 bp, Artificial
  Probe
taattacgtcactgaacaaggacct

SEQ ID NO: 146651 - DNA, 25 bp, Artificial
  Probe
atgctatacagtgtcatggtgatgc

SEQ ID NO: 146652 - DNA, 25 bp, Artificial
  Probe
cgaccgctaaggaaagtaaccatat

SEQ ID NO: 146653 - DNA, 25 bp, Artificial
  Probe
gtagggtgagacactttgaatttaa

SEQ ID NO: 146654 - DNA, 25 bp, Artificial
  Probe
ccatattcccacaatagatttcaag

SEQ ID NO: 146655 - DNA, 25 bp, Artificial
  Probe
aaagtaaccatattcccacaataga

SEQ ID NO: 146656 - DNA, 25 bp, Artificial
  Probe
attcccacaatagatttcaagttac

SEQ ID NO: 146657 - DNA, 25 bp, Artificial
  Probe
gaaagtaaccatattcccacaatag

SEQ ID NO: 146658 - DNA, 25 bp, Artificial
  Probe
ctgtactactgcttgctaggaccat

SEQ ID NO: 146659 - DNA, 25 bp, Artificial
  Probe
ccacaatagatttcaagttactgca

SEQ ID NO: 146660 - DNA, 25 bp, Artificial
  Probe
gggcaaattaacaagtagggtgaga

SEQ ID NO: 146661 - DNA, 25 bp, Artificial
  Probe
agtaaccatattcccacaatagatt

SEQ ID NO: 146662 - DNA, 25 bp, Artificial
  Probe
aagtaaccatattcccacaatagat

SEQ ID NO: 146663 - DNA, 25 bp, Artificial
  Probe
tgaccactgtactactgcttgctag

SEQ ID NO: 146664 - DNA, 25 bp, Artificial
  Probe
gtactactgcttgctaggaccatga

SEQ ID NO: 146665 - DNA, 25 bp, Artificial
  Probe
agaaggctgaattcctgtaacttaa

SEQ ID NO: 146666 - DNA, 25 bp, Artificial
  Probe
gaaggctgaattcctgtaacttaag

SEQ ID NO: 146667 - DNA, 25 bp, Artificial
  Probe
ctgtctagcagagtcctgagaacat

SEQ ID NO: 146668 - DNA, 25 bp, Artificial
  Probe
cagaaggctgaattcctgtaactta

SEQ ID NO: 146669 - DNA, 25 bp, Artificial
  Probe
tagagagactgagcagcttcatcaa

SEQ ID NO: 146670 - DNA, 25 bp, Artificial
  Probe
ttagagagactgagcagcttcatca

SEQ ID NO: 146671 - DNA, 25 bp, Artificial
  Probe
tgtctagcagagtcctgagaacatg

SEQ ID NO: 146672 - DNA, 25 bp, Artificial
  Probe
aaggctgaattcctgtaacttaagc

SEQ ID NO: 146673 - DNA, 25 bp, Artificial
  Probe
catactgccctcatagctctcaaac

SEQ ID NO: 146674 - DNA, 25 bp, Artificial
  Probe
aggctgaattcctgtaacttaagct

SEQ ID NO: 146675 - DNA, 25 bp, Artificial
  Probe
agagagactgagcagcttcatcaag

SEQ ID NO: 146676 - DNA, 25 bp, Artificial
  Probe
atactgccctcatagctctcaaaca

SEQ ID NO: 146677 - DNA, 25 bp, Artificial
  Probe
gatctcacgagaactgacttttacc

SEQ ID NO: 146678 - DNA, 25 bp, Artificial
  Probe
gcagaaggctgaattcctgtaactt

SEQ ID NO: 146679 - DNA, 25 bp, Artificial
  Probe
atctcacgagaactgacttttacca

SEQ ID NO: 146680 - DNA, 25 bp, Artificial
  Probe
ctcacacttatgcagtctgaatgct

SEQ ID NO: 146681 - DNA, 25 bp, Artificial
  Probe
ggctgaattcctgtaacttaagctt

SEQ ID NO: 146682 - DNA, 25 bp, Artificial
  Probe
tcacacttatgcagtctgaatgctg

SEQ ID NO: 146683 - DNA, 25 bp, Artificial
  Probe
ccaagatctcacgagaactgacttt

SEQ ID NO: 146684 - DNA, 25 bp, Artificial
  Probe
tatgtgatgtagaagcttgggtctt

SEQ ID NO: 146685 - DNA, 25 bp, Artificial
  Probe
acgagaactgacttttaccaggtag

SEQ ID NO: 146686 - DNA, 25 bp, Artificial
  Probe
tactgccctcatagctctcaaacac

SEQ ID NO: 146687 - DNA, 25 bp, Artificial
  Probe
cacgagaactgacttttaccaggta

SEQ ID NO: 146688 - DNA, 25 bp, Artificial
  Probe
tctcacgagaactgacttttaccag

SEQ ID NO: 146689 - DNA, 25 bp, Artificial
  Probe
gagactgagcagcttcatcaaggag

SEQ ID NO: 146690 - DNA, 25 bp, Artificial
  Probe
gagagactgagcagcttcatcaagg

SEQ ID NO: 146691 - DNA, 25 bp, Artificial
  Probe
gtgcagaaggctgaattcctgtaac

SEQ ID NO: 146692 - DNA, 25 bp, Artificial
  Probe
ctagcagagtcctgagaacatgtct

SEQ ID NO: 146693 - DNA, 25 bp, Artificial
  Probe
tctagcagagtcctgagaacatgtc

SEQ ID NO: 146694 - DNA, 25 bp, Artificial
  Probe
ctcacgagaactgacttttaccagg

SEQ ID NO: 146695 - DNA, 25 bp, Artificial
  Probe
tgcagaaggctgaattcctgtaact

SEQ ID NO: 146696 - DNA, 25 bp, Artificial
  Probe
agacaccttgcatctgccttaactg

SEQ ID NO: 146697 - DNA, 25 bp, Artificial
  Probe
gtctgtctagcagagtcctgagaac

SEQ ID NO: 146698 - DNA, 25 bp, Artificial
  Probe
cctcacacttatgcagtctgaatgc

SEQ ID NO: 146699 - DNA, 25 bp, Artificial
  Probe
gtctagcagagtcctgagaacatgt

SEQ ID NO: 146700 - DNA, 25 bp, Artificial
  Probe
gagaactgacttttaccaggtagcc

SEQ ID NO: 146701 - DNA, 25 bp, Artificial
  Probe
agatctcacgagaactgacttttac

SEQ ID NO: 146702 - DNA, 25 bp, Artificial
  Probe
aagatctcacgagaactgactttta

SEQ ID NO: 146703 - DNA, 25 bp, Artificial
  Probe
gctgaattcctgtaacttaagcttt

SEQ ID NO: 146704 - DNA, 25 bp, Artificial
  Probe
ctgaattcctgtaacttaagcttta

SEQ ID NO: 146705 - DNA, 25 bp, Artificial
  Probe
caagatctcacgagaactgactttt

SEQ ID NO: 146706 - DNA, 25 bp, Artificial
  Probe
cgagaactgacttttaccaggtagc

SEQ ID NO: 146707 - DNA, 25 bp, Artificial
  Probe
tgtgcagaaggctgaattcctgtaa

SEQ ID NO: 146708 - DNA, 25 bp, Artificial
  Probe
tctgtctagcagagtcctgagaaca

SEQ ID NO: 146709 - DNA, 25 bp, Artificial
  Probe
tgtctgtctagcagagtcctgagaa

SEQ ID NO: 146710 - DNA, 25 bp, Artificial
  Probe
ctattcttccaagtagagtgccata

SEQ ID NO: 146711 - DNA, 25 bp, Artificial
  Probe
tattcttccaagtagagtgccataa

SEQ ID NO: 146712 - DNA, 25 bp, Artificial
  Probe
aattggagtcatctgttgaacatct

SEQ ID NO: 146713 - DNA, 25 bp, Artificial
  Probe
tatctattcttccaagtagagtgcc

SEQ ID NO: 146714 - DNA, 25 bp, Artificial
  Probe
gagtcatctgttgaacatctgaatt

SEQ ID NO: 146715 - DNA, 25 bp, Artificial
  Probe
ggagtcatctgttgaacatctgaat

SEQ ID NO: 146716 - DNA, 25 bp, Artificial
  Probe
taattggagtcatctgttgaacatc

SEQ ID NO: 146717 - DNA, 25 bp, Artificial
  Probe
attggagtcatctgttgaacatctg

SEQ ID NO: 146718 - DNA, 25 bp, Artificial
  Probe
tctattcttccaagtagagtgccat

SEQ ID NO: 146719 - DNA, 25 bp, Artificial
  Probe
atctattcttccaagtagagtgcca

SEQ ID NO: 146720 - DNA, 25 bp, Artificial
  Probe
gggagtatttgaggtgctaagtatt

SEQ ID NO: 146721 - DNA, 25 bp, Artificial
  Probe
ataattggagtcatctgttgaacat

SEQ ID NO: 146722 - DNA, 25 bp, Artificial
  Probe
tgggagtatttgaggtgctaagtat

SEQ ID NO: 146723 - DNA, 25 bp, Artificial
  Probe
tcatataattggagtcatctgttga

SEQ ID NO: 146724 - DNA, 25 bp, Artificial
  Probe
ttcttccaagtagagtgccataaat

SEQ ID NO: 146725 - DNA, 25 bp, Artificial
  Probe
attcttccaagtagagtgccataaa

SEQ ID NO: 146726 - DNA, 25 bp, Artificial
  Probe
aagccttcagagacttcataattaa

SEQ ID NO: 146727 - DNA, 25 bp, Artificial
  Probe
tggagtcatctgttgaacatctgaa

SEQ ID NO: 146728 - DNA, 25 bp, Artificial
  Probe
ttggagtcatctgttgaacatctga

SEQ ID NO: 146729 - DNA, 25 bp, Artificial
  Probe
taatttcatcaagacgagaagcctt

SEQ ID NO: 146730 - DNA, 25 bp, Artificial
  Probe
tcttccaagtagagtgccataaata

SEQ ID NO: 146731 - DNA, 25 bp, Artificial
  Probe
agcactgttaaaggtaatttcatca

SEQ ID NO: 146732 - DNA, 25 bp, Artificial
  Probe
ggagtatttgaggtgctaagtattt

SEQ ID NO: 146733 - DNA, 25 bp, Artificial
  Probe
ttgtgggatggttaagcaatttaag

SEQ ID NO: 146734 - DNA, 25 bp, Artificial
  Probe
tataattggagtcatctgttgaaca

SEQ ID NO: 146735 - DNA, 25 bp, Artificial
  Probe
cttccaagtagagtgccataaataa

SEQ ID NO: 146736 - DNA, 25 bp, Artificial
  Probe
tttgtgggatggttaagcaatttaa

SEQ ID NO: 146737 - DNA, 25 bp, Artificial
  Probe
aaggtaatttcatcaagacgagaag

SEQ ID NO: 146738 - DNA, 25 bp, Artificial
  Probe
ctgggagtatttgaggtgctaagta

SEQ ID NO: 146739 - DNA, 25 bp, Artificial
  Probe
ttatctattcttccaagtagagtgc

SEQ ID NO: 146740 - DNA, 25 bp, Artificial
  Probe
ttcatataattggagtcatctgttg

SEQ ID NO: 146741 - DNA, 25 bp, Artificial
  Probe
gtgggatggttaagcaatttaagta

SEQ ID NO: 146742 - DNA, 25 bp, Artificial
  Probe
gtaatttcatcaagacgagaagcct

SEQ ID NO: 146743 - DNA, 25 bp, Artificial
  Probe
aggtaatttcatcaagacgagaagc

SEQ ID NO: 146744 - DNA, 25 bp, Artificial
  Probe
tgtgggatggttaagcaatttaagt

SEQ ID NO: 146745 - DNA, 25 bp, Artificial
  Probe
aaaggtaatttcatcaagacgagaa

SEQ ID NO: 146746 - DNA, 25 bp, Artificial
  Probe
gtagagtgccataaataatttcagc

SEQ ID NO: 146747 - DNA, 25 bp, Artificial
  Probe
gcactgttaaaggtaatttcatcaa

SEQ ID NO: 146748 - DNA, 25 bp, Artificial
  Probe
tgggatggttaagcaatttaagtaa

SEQ ID NO: 146749 - DNA, 25 bp, Artificial
  Probe
ttccaagtagagtgccataaataat

SEQ ID NO: 146750 - DNA, 25 bp, Artificial
  Probe
atataattggagtcatctgttgaac

SEQ ID NO: 146751 - DNA, 25 bp, Artificial
  Probe
catataattggagtcatctgttgaa

SEQ ID NO: 146752 - DNA, 25 bp, Artificial
  Probe
aagcactgttaaaggtaatttcatc

SEQ ID NO: 146753 - DNA, 25 bp, Artificial
  Probe
tccaagtagagtgccataaataatt

SEQ ID NO: 146754 - DNA, 25 bp, Artificial
  Probe
taaaggtaatttcatcaagacgaga

SEQ ID NO: 146755 - DNA, 25 bp, Artificial
  Probe
tcgtcctcattaactgtcaacatta

SEQ ID NO: 146756 - DNA, 25 bp, Artificial
  Probe
ctcgtcctcattaactgtcaacatt

SEQ ID NO: 146757 - DNA, 25 bp, Artificial
  Probe
cgtcctcattaactgtcaacattaa

SEQ ID NO: 146758 - DNA, 25 bp, Artificial
  Probe
actcttgaccttcactctgtctata

SEQ ID NO: 146759 - DNA, 25 bp, Artificial
  Probe
actcgtcctcattaactgtcaacat

SEQ ID NO: 146760 - DNA, 25 bp, Artificial
  Probe
agatgcttagactacaggcttcttg

SEQ ID NO: 146761 - DNA, 25 bp, Artificial
  Probe
cagatgcttagactacaggcttctt

SEQ ID NO: 146762 - DNA, 25 bp, Artificial
  Probe
cactcttgaccttcactctgtctat

SEQ ID NO: 146763 - DNA, 25 bp, Artificial
  Probe
gacagatgcttagactacaggcttc

SEQ ID NO: 146764 - DNA, 25 bp, Artificial
  Probe
ctctttctccatcctattcccattt

SEQ ID NO: 146765 - DNA, 25 bp, Artificial
  Probe
aagactgactcgtcctcattaactg

SEQ ID NO: 146766 - DNA, 25 bp, Artificial
  Probe
caagactgactcgtcctcattaact

SEQ ID NO: 146767 - DNA, 25 bp, Artificial
  Probe
tctctttctccatcctattcccatt

SEQ ID NO: 146768 - DNA, 25 bp, Artificial
  Probe
ttctctttctccatcctattcccat

SEQ ID NO: 146769 - DNA, 25 bp, Artificial
  Probe
gcctctatatttactatgccaactg

SEQ ID NO: 146770 - DNA, 25 bp, Artificial
  Probe
agcctctatatttactatgccaact

SEQ ID NO: 146771 - DNA, 25 bp, Artificial
  Probe
tagttctctttctccatcctattcc

SEQ ID NO: 146772 - DNA, 25 bp, Artificial
  Probe
agttctctttctccatcctattccc

SEQ ID NO: 146773 - DNA, 25 bp, Artificial
  Probe
ctatatttactatgccaactggtgc

SEQ ID NO: 146774 - DNA, 25 bp, Artificial
  Probe
gatgcttagactacaggcttcttgg

SEQ ID NO: 146775 - DNA, 25 bp, Artificial
  Probe
ccctagttctctttctccatcctat

SEQ ID NO: 146776 - DNA, 25 bp, Artificial
  Probe
gttctctttctccatcctattccca

SEQ ID NO: 146777 - DNA, 25 bp, Artificial
  Probe
acagatgcttagactacaggcttct

SEQ ID NO: 146778 - DNA, 25 bp, Artificial
  Probe
tgacagatgcttagactacaggctt

SEQ ID NO: 146779 - DNA, 25 bp, Artificial
  Probe
cctagttctctttctccatcctatt

SEQ ID NO: 146780 - DNA, 25 bp, Artificial
  Probe
gactcgtcctcattaactgtcaaca

SEQ ID NO: 146781 - DNA, 25 bp, Artificial
  Probe
cttgaccttcactctgtctatagtc

SEQ ID NO: 146782 - DNA, 25 bp, Artificial
  Probe
tcttgaccttcactctgtctatagt

SEQ ID NO: 146783 - DNA, 25 bp, Artificial
  Probe
ctcttgaccttcactctgtctatag

SEQ ID NO: 146784 - DNA, 25 bp, Artificial
  Probe
gactgactcgtcctcattaactgtc

SEQ ID NO: 146785 - DNA, 25 bp, Artificial
  Probe
cctctatatttactatgccaactgg

SEQ ID NO: 146786 - DNA, 25 bp, Artificial
  Probe
ttgaccttcactctgtctatagtcc

SEQ ID NO: 146787 - DNA, 25 bp, Artificial
  Probe
tctatatttactatgccaactggtg

SEQ ID NO: 146788 - DNA, 25 bp, Artificial
  Probe
agactgactcgtcctcattaactgt

SEQ ID NO: 146789 - DNA, 25 bp, Artificial
  Probe
ccaagactgactcgtcctcattaac

SEQ ID NO: 146790 - DNA, 25 bp, Artificial
  Probe
tccaagactgactcgtcctcattaa

SEQ ID NO: 146791 - DNA, 25 bp, Artificial
  Probe
tagcctctatatttactatgccaac

SEQ ID NO: 146792 - DNA, 25 bp, Artificial
  Probe
ctagttctctttctccatcctattc

SEQ ID NO: 146793 - DNA, 25 bp, Artificial
  Probe
ctctatatttactatgccaactggt

SEQ ID NO: 146794 - DNA, 25 bp, Artificial
  Probe
ccactcttgaccttcactctgtcta

SEQ ID NO: 146795 - DNA, 25 bp, Artificial
  Probe
ctccaagactgactcgtcctcatta

SEQ ID NO: 146796 - DNA, 25 bp, Artificial
  Probe
ctagcctctatatttactatgccaa

SEQ ID NO: 146797 - DNA, 25 bp, Artificial
  Probe
acattaaactaacagcattaacaca

SEQ ID NO: 146798 - DNA, 25 bp, Artificial
  Probe
cctcattaactgtcaacattaaact

SEQ ID NO: 146799 - DNA, 25 bp, Artificial
  Probe
tcctcattaactgtcaacattaaac

SEQ ID NO: 146800 - DNA, 25 bp, Artificial
  Probe
ggtctgatactctgttctactgtac

SEQ ID NO: 146801 - DNA, 25 bp, Artificial
  Probe
tgtcttcatcgttaggctatgtctc

SEQ ID NO: 146802 - DNA, 25 bp, Artificial
  Probe
ctgtcttcatcgttaggctatgtct

SEQ ID NO: 146803 - DNA, 25 bp, Artificial
  Probe
tctgtcttcatcgttaggctatgtc

SEQ ID NO: 146804 - DNA, 25 bp, Artificial
  Probe
gtctgtcttcatcgttaggctatgt

SEQ ID NO: 146805 - DNA, 25 bp, Artificial
  Probe
gtcttcatcgttaggctatgtctcc

SEQ ID NO: 146806 - DNA, 25 bp, Artificial
  Probe
ggtctgtcttcatcgttaggctatg

SEQ ID NO: 146807 - DNA, 25 bp, Artificial
  Probe
gggtctgatactctgttctactgta

SEQ ID NO: 146808 - DNA, 25 bp, Artificial
  Probe
tactggtggtctgtcttcatcgtta

SEQ ID NO: 146809 - DNA, 25 bp, Artificial
  Probe
atctgggtctgatactctgttctac

SEQ ID NO: 146810 - DNA, 25 bp, Artificial
  Probe
catctgggtctgatactctgttcta

SEQ ID NO: 146811 - DNA, 25 bp, Artificial
  Probe
tggtctgtcttcatcgttaggctat

SEQ ID NO: 146812 - DNA, 25 bp, Artificial
  Probe
gtgagaaagacagacagacagaaag

SEQ ID NO: 146813 - DNA, 25 bp, Artificial
  Probe
ctgggtctgatactctgttctactg

SEQ ID NO: 146814 - DNA, 25 bp, Artificial
  Probe
tctgggtctgatactctgttctact

SEQ ID NO: 146815 - DNA, 25 bp, Artificial
  Probe
tgggtctgatactctgttctactgt

SEQ ID NO: 146816 - DNA, 25 bp, Artificial
  Probe
tactatatactcttgtgtgtagtgc

SEQ ID NO: 146817 - DNA, 25 bp, Artificial
  Probe
actatatactcttgtgtgtagtgca

SEQ ID NO: 146818 - DNA, 25 bp, Artificial
  Probe
gtggtctgtcttcatcgttaggcta

SEQ ID NO: 146819 - DNA, 25 bp, Artificial
  Probe
tgagaaagacagacagacagaaagc

SEQ ID NO: 146820 - DNA, 25 bp, Artificial
  Probe
cgtgagaaagacagacagacagaaa

SEQ ID NO: 146821 - DNA, 25 bp, Artificial
  Probe
cttccttcatggattgtttcttctg

SEQ ID NO: 146822 - DNA, 25 bp, Artificial
  Probe
tcttccttcatggattgtttcttct

SEQ ID NO: 146823 - DNA, 25 bp, Artificial
  Probe
ctcttccttcatggattgtttcttc

SEQ ID NO: 146824 - DNA, 25 bp, Artificial
  Probe
ttccttcatggattgtttcttctga

SEQ ID NO: 146825 - DNA, 25 bp, Artificial
  Probe
actggtggtctgtcttcatcgttag

SEQ ID NO: 146826 - DNA, 25 bp, Artificial
  Probe
ctactggtggtctgtcttcatcgtt

SEQ ID NO: 146827 - DNA, 25 bp, Artificial
  Probe
ccttcatggattgtttcttctgacc

SEQ ID NO: 146828 - DNA, 25 bp, Artificial
  Probe
cctcttccttcatggattgtttctt

SEQ ID NO: 146829 - DNA, 25 bp, Artificial
  Probe
tccttcatggattgtttcttctgac

SEQ ID NO: 146830 - DNA, 25 bp, Artificial
  Probe
tggattgtttcttctgaccatgttt

SEQ ID NO: 146831 - DNA, 25 bp, Artificial
  Probe
gagaaagacagacagacagaaagcc

SEQ ID NO: 146832 - DNA, 25 bp, Artificial
  Probe
cttcatggattgtttcttctgacca

SEQ ID NO: 146833 - DNA, 25 bp, Artificial
  Probe
ccatctgggtctgatactctgttct

SEQ ID NO: 146834 - DNA, 25 bp, Artificial
  Probe
tgttctactgtacattgaagagaca

SEQ ID NO: 146835 - DNA, 25 bp, Artificial
  Probe
actctgttctactgtacattgaaga

SEQ ID NO: 146836 - DNA, 25 bp, Artificial
  Probe
gtctgatactctgttctactgtaca

SEQ ID NO: 146837 - DNA, 25 bp, Artificial
  Probe
ctgttctactgtacattgaagagac

SEQ ID NO: 146838 - DNA, 25 bp, Artificial
  Probe
tctgttctactgtacattgaagaga

SEQ ID NO: 146839 - DNA, 25 bp, Artificial
  Probe
ttcatcgttaggctatgtctcccaa

SEQ ID NO: 146840 - DNA, 25 bp, Artificial
  Probe
gaaagacagacagacagaaagccag

SEQ ID NO: 146841 - DNA, 25 bp, Artificial
  Probe
tcttcatcgttaggctatgtctccc

SEQ ID NO: 146842 - DNA, 25 bp, Artificial
  Probe
ctggtggtctgtcttcatcgttagg

SEQ ID NO: 146843 - DNA, 25 bp, Artificial
  Probe
gttctactgtacattgaagagacat

SEQ ID NO: 146844 - DNA, 25 bp, Artificial
  Probe
atcgttaggctatgtctcccaagtc

SEQ ID NO: 146845 - DNA, 25 bp, Artificial
  Probe
attgtgtctgtccattatcgtctgt

SEQ ID NO: 146846 - DNA, 25 bp, Artificial
  Probe
ttgtgtctgtccattatcgtctgtg

SEQ ID NO: 146847 - DNA, 25 bp, Artificial
  Probe
gtgtctgtccattatcgtctgtgag

SEQ ID NO: 146848 - DNA, 25 bp, Artificial
  Probe
caatactccaggtccatttcaaact

SEQ ID NO: 146849 - DNA, 25 bp, Artificial
  Probe
ggctaacaaccatctgtaatgagat

SEQ ID NO: 146850 - DNA, 25 bp, Artificial
  Probe
tggctaacaaccatctgtaatgaga

SEQ ID NO: 146851 - DNA, 25 bp, Artificial
  Probe
gtggctaacaaccatctgtaatgag

SEQ ID NO: 146852 - DNA, 25 bp, Artificial
  Probe
gctaacaaccatctgtaatgagatc

SEQ ID NO: 146853 - DNA, 25 bp, Artificial
  Probe
gctctatttctaaagttctgggact

SEQ ID NO: 146854 - DNA, 25 bp, Artificial
  Probe
tctatttctaaagttctgggactcc

SEQ ID NO: 146855 - DNA, 25 bp, Artificial
  Probe
ccaatactccaggtccatttcaaac

SEQ ID NO: 146856 - DNA, 25 bp, Artificial
  Probe
tgtgtctgtccattatcgtctgtga

SEQ ID NO: 146857 - DNA, 25 bp, Artificial
  Probe
tccaggtccatttcaaactgtataa

SEQ ID NO: 146858 - DNA, 25 bp, Artificial
  Probe
ctccaggtccatttcaaactgtata

SEQ ID NO: 146859 - DNA, 25 bp, Artificial
  Probe
tgtatatgaagtcagggacagtgta

SEQ ID NO: 146860 - DNA, 25 bp, Artificial
  Probe
gatgccctcttctggtgtatatgaa

SEQ ID NO: 146861 - DNA, 25 bp, Artificial
  Probe
ctctatttctaaagttctgggactc

SEQ ID NO: 146862 - DNA, 25 bp, Artificial
  Probe
ccaggtccatttcaaactgtataaa

SEQ ID NO: 146863 - DNA, 25 bp, Artificial
  Probe
aatactccaggtccatttcaaactg

SEQ ID NO: 146864 - DNA, 25 bp, Artificial
  Probe
tagaagccatacagtgttaacctct

SEQ ID NO: 146865 - DNA, 25 bp, Artificial
  Probe
gtatatgaagtcagggacagtgtac

SEQ ID NO: 146866 - DNA, 25 bp, Artificial
  Probe
agctctatttctaaagttctgggac

SEQ ID NO: 146867 - DNA, 25 bp, Artificial
  Probe
tactccaggtccatttcaaactgta

SEQ ID NO: 146868 - DNA, 25 bp, Artificial
  Probe
ctcttctggtgtatatgaagtcagg

SEQ ID NO: 146869 - DNA, 25 bp, Artificial
  Probe
cctcttctggtgtatatgaagtcag

SEQ ID NO: 146870 - DNA, 25 bp, Artificial
  Probe
aagctctatttctaaagttctggga

SEQ ID NO: 146871 - DNA, 25 bp, Artificial
  Probe
ctgatgccctcttctggtgtatatg

SEQ ID NO: 146872 - DNA, 25 bp, Artificial
  Probe
tctgatgccctcttctggtgtatat

SEQ ID NO: 146873 - DNA, 25 bp, Artificial
  Probe
atctgatgccctcttctggtgtata

SEQ ID NO: 146874 - DNA, 25 bp, Artificial
  Probe
ttctggtgtatatgaagtcagggac

SEQ ID NO: 146875 - DNA, 25 bp, Artificial
  Probe
tatttctaaagttctgggactccac

SEQ ID NO: 146876 - DNA, 25 bp, Artificial
  Probe
ctgttaagcattcaggagaaaggtc

SEQ ID NO: 146877 - DNA, 25 bp, Artificial
  Probe
ggtggctaacaaccatctgtaatga

SEQ ID NO: 146878 - DNA, 25 bp, Artificial
  Probe
acactggactttactctttaaccat

SEQ ID NO: 146879 - DNA, 25 bp, Artificial
  Probe
ctatttctaaagttctgggactcca

SEQ ID NO: 146880 - DNA, 25 bp, Artificial
  Probe
tatatgaagtcagggacagtgtacc

SEQ ID NO: 146881 - DNA, 25 bp, Artificial
  Probe
cccagtgtaagctctatttctaaag

SEQ ID NO: 146882 - DNA, 25 bp, Artificial
  Probe
cacactggactttactctttaacca

SEQ ID NO: 146883 - DNA, 25 bp, Artificial
  Probe
cccaatactccaggtccatttcaaa

SEQ ID NO: 146884 - DNA, 25 bp, Artificial
  Probe
gtgtatatgaagtcagggacagtgt

SEQ ID NO: 146885 - DNA, 25 bp, Artificial
  Probe
actccaggtccatttcaaactgtat

SEQ ID NO: 146886 - DNA, 25 bp, Artificial
  Probe
atactccaggtccatttcaaactgt

SEQ ID NO: 146887 - DNA, 25 bp, Artificial
  Probe
tgatgccctcttctggtgtatatga

SEQ ID NO: 146888 - DNA, 25 bp, Artificial
  Probe
cactggactttactctttaaccatt

SEQ ID NO: 146889 - DNA, 25 bp, Artificial
  Probe
ccacactggactttactctttaacc

SEQ ID NO: 146890 - DNA, 25 bp, Artificial
  Probe
attccacagattacaaccagctatt

SEQ ID NO: 146891 - DNA, 25 bp, Artificial
  Probe
gattccacagattacaaccagctat

SEQ ID NO: 146892 - DNA, 25 bp, Artificial
  Probe
ggcaaagttctgtgtttaatgtttc

SEQ ID NO: 146893 - DNA, 25 bp, Artificial
  Probe
atggcaaagttctgtgtttaatgtt

SEQ ID NO: 146894 - DNA, 25 bp, Artificial
  Probe
aatggcaaagttctgtgtttaatgt

SEQ ID NO: 146895 - DNA, 25 bp, Artificial
  Probe
tggcaaagttctgtgtttaatgttt

SEQ ID NO: 146896 - DNA, 25 bp, Artificial
  Probe
agagggataaatggatttgtggatt

SEQ ID NO: 146897 - DNA, 25 bp, Artificial
  Probe
gagggataaatggatttgtggattc

SEQ ID NO: 146898 - DNA, 25 bp, Artificial
  Probe
aaatggcaaagttctgtgtttaatg

SEQ ID NO: 146899 - DNA, 25 bp, Artificial
  Probe
tagagggataaatggatttgtggat

SEQ ID NO: 146900 - DNA, 25 bp, Artificial
  Probe
gcaaagttctgtgtttaatgtttct

SEQ ID NO: 146901 - DNA, 25 bp, Artificial
  Probe
ctagagggataaatggatttgtgga

SEQ ID NO: 146902 - DNA, 25 bp, Artificial
  Probe
gctagagggataaatggatttgtgg

SEQ ID NO: 146903 - DNA, 25 bp, Artificial
  Probe
ggattccacagattacaaccagcta

SEQ ID NO: 146904 - DNA, 25 bp, Artificial
  Probe
ttccacagattacaaccagctattt

SEQ ID NO: 146905 - DNA, 25 bp, Artificial
  Probe
agctagagggataaatggatttgtg

SEQ ID NO: 146906 - DNA, 25 bp, Artificial
  Probe
agttctgtgtttaatgtttcttcaa

SEQ ID NO: 146907 - DNA, 25 bp, Artificial
  Probe
agcactttgaaatacctcatgttta

SEQ ID NO: 146908 - DNA, 25 bp, Artificial
  Probe
agggataaatggatttgtggattcc

SEQ ID NO: 146909 - DNA, 25 bp, Artificial
  Probe
aagttctgtgtttaatgtttcttca

SEQ ID NO: 146910 - DNA, 25 bp, Artificial
  Probe
ctagcctgtttctcgttccttgtta

SEQ ID NO: 146911 - DNA, 25 bp, Artificial
  Probe
atttgttcatgtttggtgcatagaa

SEQ ID NO: 146912 - DNA, 25 bp, Artificial
  Probe
aatttgttcatgtttggtgcataga

SEQ ID NO: 146913 - DNA, 25 bp, Artificial
  Probe
tgtaatttgttcatgtttggtgcat

SEQ ID NO: 146914 - DNA, 25 bp, Artificial
  Probe
gcactttgaaatacctcatgtttat

SEQ ID NO: 146915 - DNA, 25 bp, Artificial
  Probe
gttctgtgtttaatgtttcttcaaa

SEQ ID NO: 146916 - DNA, 25 bp, Artificial
  Probe
atgtttggtgcatagaactggtaaa

SEQ ID NO: 146917 - DNA, 25 bp, Artificial
  Probe
gtaatttgttcatgtttggtgcata

SEQ ID NO: 146918 - DNA, 25 bp, Artificial
  Probe
caaagttctgtgtttaatgtttctt

SEQ ID NO: 146919 - DNA, 25 bp, Artificial
  Probe
taatttgttcatgtttggtgcatag

SEQ ID NO: 146920 - DNA, 25 bp, Artificial
  Probe
catgtttggtgcatagaactggtaa

SEQ ID NO: 146921 - DNA, 25 bp, Artificial
  Probe
ccatgcaaatagtccattccttacc

SEQ ID NO: 146922 - DNA, 25 bp, Artificial
  Probe
aaagttctgtgtttaatgtttcttc

SEQ ID NO: 146923 - DNA, 25 bp, Artificial
  Probe
catgcaaatagtccattccttaccg

SEQ ID NO: 146924 - DNA, 25 bp, Artificial
  Probe
gccatgcaaatagtccattccttac

SEQ ID NO: 146925 - DNA, 25 bp, Artificial
  Probe
aaaatggcaaagttctgtgtttaat

SEQ ID NO: 146926 - DNA, 25 bp, Artificial
  Probe
tcatgtttggtgcatagaactggta

SEQ ID NO: 146927 - DNA, 25 bp, Artificial
  Probe
tagctagagggataaatggatttgt

SEQ ID NO: 146928 - DNA, 25 bp, Artificial
  Probe
cactttgaaatacctcatgtttatg

SEQ ID NO: 146929 - DNA, 25 bp, Artificial
  Probe
tttcctagcctgtttctcgttcctt

SEQ ID NO: 146930 - DNA, 25 bp, Artificial
  Probe
ccacagattacaaccagctattttc

SEQ ID NO: 146931 - DNA, 25 bp, Artificial
  Probe
cacagattacaaccagctattttca

SEQ ID NO: 146932 - DNA, 25 bp, Artificial
  Probe
tccacagattacaaccagctatttt

SEQ ID NO: 146933 - DNA, 25 bp, Artificial
  Probe
ttcatgtttggtgcatagaactggt

SEQ ID NO: 146934 - DNA, 25 bp, Artificial
  Probe
acagattacaaccagctattttcaa

SEQ ID NO: 146935 - DNA, 25 bp, Artificial
  Probe
atcttctattcacctcaagcctctt

SEQ ID NO: 146936 - DNA, 25 bp, Artificial
  Probe
gatcttctattcacctcaagcctct

SEQ ID NO: 146937 - DNA, 25 bp, Artificial
  Probe
aagctggatcttctattcacctcaa

SEQ ID NO: 146938 - DNA, 25 bp, Artificial
  Probe
ggatcttctattcacctcaagcctc

SEQ ID NO: 146939 - DNA, 25 bp, Artificial
  Probe
agctggatcttctattcacctcaag

SEQ ID NO: 146940 - DNA, 25 bp, Artificial
  Probe
ctggatcttctattcacctcaagcc

SEQ ID NO: 146941 - DNA, 25 bp, Artificial
  Probe
gatgtagagactaacaggctgtcat

SEQ ID NO: 146942 - DNA, 25 bp, Artificial
  Probe
atgtagagactaacaggctgtcatg

SEQ ID NO: 146943 - DNA, 25 bp, Artificial
  Probe
tggatcttctattcacctcaagcct

SEQ ID NO: 146944 - DNA, 25 bp, Artificial
  Probe
cctacgtgtgactggtcttctaatt

SEQ ID NO: 146945 - DNA, 25 bp, Artificial
  Probe
agttctccagtctgttagaatccag

SEQ ID NO: 146946 - DNA, 25 bp, Artificial
  Probe
cgcctcagtatcctcatcatagtga

SEQ ID NO: 146947 - DNA, 25 bp, Artificial
  Probe
ctgatgtagagactaacaggctgtc

SEQ ID NO: 146948 - DNA, 25 bp, Artificial
  Probe
gaagagaacagaactttgtggtgat

SEQ ID NO: 146949 - DNA, 25 bp, Artificial
  Probe
cagttctccagtctgttagaatcca

SEQ ID NO: 146950 - DNA, 25 bp, Artificial
  Probe
gaactttgtggtgatcttgagtcaa

SEQ ID NO: 146951 - DNA, 25 bp, Artificial
  Probe
gagaagagaacagaactttgtggtg

SEQ ID NO: 146952 - DNA, 25 bp, Artificial
  Probe
gagaacagaactttgtggtgatctt

SEQ ID NO: 146953 - DNA, 25 bp, Artificial
  Probe
aagagaacagaactttgtggtgatc

SEQ ID NO: 146954 - DNA, 25 bp, Artificial
  Probe
aactttgtggtgatcttgagtcaac

SEQ ID NO: 146955 - DNA, 25 bp, Artificial
  Probe
tgatgtagagactaacaggctgtca

SEQ ID NO: 146956 - DNA, 25 bp, Artificial
  Probe
aacagaactttgtggtgatcttgag

SEQ ID NO: 146957 - DNA, 25 bp, Artificial
  Probe
gaacagaactttgtggtgatcttga

SEQ ID NO: 146958 - DNA, 25 bp, Artificial
  Probe
agaacagaactttgtggtgatcttg

SEQ ID NO: 146959 - DNA, 25 bp, Artificial
  Probe
gaaagctggatcttctattcacctc

SEQ ID NO: 146960 - DNA, 25 bp, Artificial
  Probe
gttctccagtctgttagaatccagg

SEQ ID NO: 146961 - DNA, 25 bp, Artificial
  Probe
ccagttctccagtctgttagaatcc

SEQ ID NO: 146962 - DNA, 25 bp, Artificial
  Probe
cccacaaatccagatgttgagaaag

SEQ ID NO: 146963 - DNA, 25 bp, Artificial
  Probe
cagaactttgtggtgatcttgagtc

SEQ ID NO: 146964 - DNA, 25 bp, Artificial
  Probe
agaagagaacagaactttgtggtga

SEQ ID NO: 146965 - DNA, 25 bp, Artificial
  Probe
gagggagaagagaacagaactttgt

SEQ ID NO: 146966 - DNA, 25 bp, Artificial
  Probe
ctacgtgtgactggtcttctaattt

SEQ ID NO: 146967 - DNA, 25 bp, Artificial
  Probe
ttctccagtctgttagaatccagga

SEQ ID NO: 146968 - DNA, 25 bp, Artificial
  Probe
ggagggagaagagaacagaactttg

SEQ ID NO: 146969 - DNA, 25 bp, Artificial
  Probe
agaactttgtggtgatcttgagtca

SEQ ID NO: 146970 - DNA, 25 bp, Artificial
  Probe
aaagctggatcttctattcacctca

SEQ ID NO: 146971 - DNA, 25 bp, Artificial
  Probe
ttgtggtgatcttgagtcaaccttc

SEQ ID NO: 146972 - DNA, 25 bp, Artificial
  Probe
agagaacagaactttgtggtgatct

SEQ ID NO: 146973 - DNA, 25 bp, Artificial
  Probe
agggagaagagaacagaactttgtg

SEQ ID NO: 146974 - DNA, 25 bp, Artificial
  Probe
gtggtgatcttgagtcaaccttctc

SEQ ID NO: 146975 - DNA, 25 bp, Artificial
  Probe
acccacaaatccagatgttgagaaa

SEQ ID NO: 146976 - DNA, 25 bp, Artificial
  Probe
aacccacaaatccagatgttgagaa

SEQ ID NO: 146977 - DNA, 25 bp, Artificial
  Probe
ccacaaatccagatgttgagaaagc

SEQ ID NO: 146978 - DNA, 25 bp, Artificial
  Probe
ggagaagagaacagaactttgtggt

SEQ ID NO: 146979 - DNA, 25 bp, Artificial
  Probe
acagaactttgtggtgatcttgagt

SEQ ID NO: 146980 - DNA, 25 bp, Artificial
  Probe
cgagcattctattgtggtgattcag

SEQ ID NO: 146981 - DNA, 25 bp, Artificial
  Probe
gagcattctattgtggtgattcagc

SEQ ID NO: 146982 - DNA, 25 bp, Artificial
  Probe
ccgagcattctattgtggtgattca

SEQ ID NO: 146983 - DNA, 25 bp, Artificial
  Probe
caggtcgatagtggtatgtgcttaa

SEQ ID NO: 146984 - DNA, 25 bp, Artificial
  Probe
tgtaccactttcttgtaaatgttgt

SEQ ID NO: 146985 - DNA, 25 bp, Artificial
  Probe
aatgtctcctaaggttcatgtttgt

SEQ ID NO: 146986 - DNA, 25 bp, Artificial
  Probe
taagaaaggatacttagcaccacag

SEQ ID NO: 146987 - DNA, 25 bp, Artificial
  Probe
aaatgtctcctaaggttcatgtttg

SEQ ID NO: 146988 - DNA, 25 bp, Artificial
  Probe
ataagaaaggatacttagcaccaca

SEQ ID NO: 146989 - DNA, 25 bp, Artificial
  Probe
gaaatgtctcctaaggttcatgttt

SEQ ID NO: 146990 - DNA, 25 bp, Artificial
  Probe
atgtctcctaaggttcatgtttgtg

SEQ ID NO: 146991 - DNA, 25 bp, Artificial
  Probe
ctgagatttgtaccactttcttgta

SEQ ID NO: 146992 - DNA, 25 bp, Artificial
  Probe
cctaaggttcatgtttgtgggattt

SEQ ID NO: 146993 - DNA, 25 bp, Artificial
  Probe
gctgagatttgtaccactttcttgt

SEQ ID NO: 146994 - DNA, 25 bp, Artificial
  Probe
ttgtaccactttcttgtaaatgttg

SEQ ID NO: 146995 - DNA, 25 bp, Artificial
  Probe
aggtcgatagtggtatgtgcttaag

SEQ ID NO: 146996 - DNA, 25 bp, Artificial
  Probe
aataagaaaggatacttagcaccac

SEQ ID NO: 146997 - DNA, 25 bp, Artificial
  Probe
tgagatttgtaccactttcttgtaa

SEQ ID NO: 146998 - DNA, 25 bp, Artificial
  Probe
agctgagatttgtaccactttcttg

SEQ ID NO: 146999 - DNA, 25 bp, Artificial
  Probe
ggaaatgtctcctaaggttcatgtt

SEQ ID NO: 147000 - DNA, 25 bp, Artificial
  Probe
aaataagaaaggatacttagcacca

SEQ ID NO: 147001 - DNA, 25 bp, Artificial
  Probe
aagaaaggatacttagcaccacagc

SEQ ID NO: 147002 - DNA, 25 bp, Artificial
  Probe
gtaccactttcttgtaaatgttgta

SEQ ID NO: 147003 - DNA, 25 bp, Artificial
  Probe
tttgtaccactttcttgtaaatgtt

SEQ ID NO: 147004 - DNA, 25 bp, Artificial
  Probe
gagatttgtaccactttcttgtaaa

SEQ ID NO: 147005 - DNA, 25 bp, Artificial
  Probe
tgtctcctaaggttcatgtttgtgg

SEQ ID NO: 147006 - DNA, 25 bp, Artificial
  Probe
ctctacgtaagaaccaggtcgatag

SEQ ID NO: 147007 - DNA, 25 bp, Artificial
  Probe
accactttcttgtaaatgttgtata

SEQ ID NO: 147008 - DNA, 25 bp, Artificial
  Probe
taccactttcttgtaaatgttgtat

SEQ ID NO: 147009 - DNA, 25 bp, Artificial
  Probe
ctacgtaagaaccaggtcgatagtg

SEQ ID NO: 147010 - DNA, 25 bp, Artificial
  Probe
agcattctattgtggtgattcagct

SEQ ID NO: 147011 - DNA, 25 bp, Artificial
  Probe
tcctaaggttcatgtttgtgggatt

SEQ ID NO: 147012 - DNA, 25 bp, Artificial
  Probe
atttgtaccactttcttgtaaatgt

SEQ ID NO: 147013 - DNA, 25 bp, Artificial
  Probe
tctacgtaagaaccaggtcgatagt

SEQ ID NO: 147014 - DNA, 25 bp, Artificial
  Probe
gtctcctaaggttcatgtttgtggg

SEQ ID NO: 147015 - DNA, 25 bp, Artificial
  Probe
tttggggaaacagatcattgaaatt

SEQ ID NO: 147016 - DNA, 25 bp, Artificial
  Probe
aatttggggaaacagatcattgaaa

SEQ ID NO: 147017 - DNA, 25 bp, Artificial
  Probe
cccgagcattctattgtggtgattc

SEQ ID NO: 147018 - DNA, 25 bp, Artificial
  Probe
tcttgtaaatgttgtatatggatgt

SEQ ID NO: 147019 - DNA, 25 bp, Artificial
  Probe
agaatctgataaaaggaccacattt

SEQ ID NO: 147020 - DNA, 25 bp, Artificial
  Probe
ctcctaaggttcatgtttgtgggat

SEQ ID NO: 147021 - DNA, 25 bp, Artificial
  Probe
gaaaggatacttagcaccacagcac

SEQ ID NO: 147022 - DNA, 25 bp, Artificial
  Probe
ttggggaaacagatcattgaaattc

SEQ ID NO: 147023 - DNA, 25 bp, Artificial
  Probe
gatttgtaccactttcttgtaaatg

SEQ ID NO: 147024 - DNA, 25 bp, Artificial
  Probe
ctaaggttcatgtttgtgggatttt

SEQ ID NO: 147025 - DNA, 25 bp, Artificial
  Probe
aacgccaaagattcagaaattcatt

SEQ ID NO: 147026 - DNA, 25 bp, Artificial
  Probe
caacgccaaagattcagaaattcat

SEQ ID NO: 147027 - DNA, 25 bp, Artificial
  Probe
acgccaaagattcagaaattcattc

SEQ ID NO: 147028 - DNA, 25 bp, Artificial
  Probe
ccaaagattcagaaattcattcggg

SEQ ID NO: 147029 - DNA, 25 bp, Artificial
  Probe
ctcaacgccaaagattcagaaattc

SEQ ID NO: 147030 - DNA, 25 bp, Artificial
  Probe
caaagattcagaaattcattcgggc

SEQ ID NO: 147031 - DNA, 25 bp, Artificial
  Probe
gccaaagattcagaaattcattcgg

SEQ ID NO: 147032 - DNA, 25 bp, Artificial
  Probe
agaaattcattcgggcaaaccttta

SEQ ID NO: 147033 - DNA, 25 bp, Artificial
  Probe
gattcagaaattcattcgggcaaac

SEQ ID NO: 147034 - DNA, 25 bp, Artificial
  Probe
agattcagaaattcattcgggcaaa

SEQ ID NO: 147035 - DNA, 25 bp, Artificial
  Probe
aagattcagaaattcattcgggcaa

SEQ ID NO: 147036 - DNA, 25 bp, Artificial
  Probe
aaagattcagaaattcattcgggca

SEQ ID NO: 147037 - DNA, 25 bp, Artificial
  Probe
tcaacgccaaagattcagaaattca

SEQ ID NO: 147038 - DNA, 25 bp, Artificial
  Probe
tctcaacgccaaagattcagaaatt

SEQ ID NO: 147039 - DNA, 25 bp, Artificial
  Probe
cgccaaagattcagaaattcattcg

SEQ ID NO: 147040 - DNA, 25 bp, Artificial
  Probe
attcagaaattcattcgggcaaacc

SEQ ID NO: 147041 - DNA, 25 bp, Artificial
  Probe
cagaaattcattcgggcaaaccttt

SEQ ID NO: 147042 - DNA, 25 bp, Artificial
  Probe
tgatgaacaacttggacagcaacag

SEQ ID NO: 147043 - DNA, 25 bp, Artificial
  Probe
ttctcaacgccaaagattcagaaat

SEQ ID NO: 147044 - DNA, 25 bp, Artificial
  Probe
tcagaaattcattcgggcaaacctt

SEQ ID NO: 147045 - DNA, 25 bp, Artificial
  Probe
ttcagaaattcattcgggcaaacct

SEQ ID NO: 147046 - DNA, 25 bp, Artificial
  Probe
caatgaagttgacttccaggagtac

SEQ ID NO: 147047 - DNA, 25 bp, Artificial
  Probe
atgatgtgcaatgaattctttgagg

SEQ ID NO: 147048 - DNA, 25 bp, Artificial
  Probe
catgatgtgcaatgaattctttgag

SEQ ID NO: 147049 - DNA, 25 bp, Artificial
  Probe
gatgaacaacttggacagcaacagg

SEQ ID NO: 147050 - DNA, 25 bp, Artificial
  Probe
ccatgatgtgcaatgaattctttga

SEQ ID NO: 147051 - DNA, 25 bp, Artificial
  Probe
cttctcaacgccaaagattcagaaa

SEQ ID NO: 147052 - DNA, 25 bp, Artificial
  Probe
tcttctcaacgccaaagattcagaa

SEQ ID NO: 147053 - DNA, 25 bp, Artificial
  Probe
tgatgtgcaatgaattctttgaggg

SEQ ID NO: 147054 - DNA, 25 bp, Artificial
  Probe
ttgacttccaggagtactgtgtctt

SEQ ID NO: 147055 - DNA, 25 bp, Artificial
  Probe
aatgaagttgacttccaggagtact

SEQ ID NO: 147056 - DNA, 25 bp, Artificial
  Probe
aagttgacttccaggagtactgtgt

SEQ ID NO: 147057 - DNA, 25 bp, Artificial
  Probe
gtactgtgtcttcctgtcctgcatt

SEQ ID NO: 147058 - DNA, 25 bp, Artificial
  Probe
atgaagttgacttccaggagtactg

SEQ ID NO: 147059 - DNA, 25 bp, Artificial
  Probe
tgacttccaggagtactgtgtcttc

SEQ ID NO: 147060 - DNA, 25 bp, Artificial
  Probe
gttgacttccaggagtactgtgtct

SEQ ID NO: 147061 - DNA, 25 bp, Artificial
  Probe
agttgacttccaggagtactgtgtc

SEQ ID NO: 147062 - DNA, 25 bp, Artificial
  Probe
gatgtgcaatgaattctttgagggc

SEQ ID NO: 147063 - DNA, 25 bp, Artificial
  Probe
ctggatgtaatagtgtccaccttcc

SEQ ID NO: 147064 - DNA, 25 bp, Artificial
  Probe
cctggatgtaatagtgtccaccttc

SEQ ID NO: 147065 - DNA, 25 bp, Artificial
  Probe
gaagttgacttccaggagtactgtg

SEQ ID NO: 147066 - DNA, 25 bp, Artificial
  Probe
atgtgcaatgaattctttgagggct

SEQ ID NO: 147067 - DNA, 25 bp, Artificial
  Probe
tgaagttgacttccaggagtactgt

SEQ ID NO: 147068 - DNA, 25 bp, Artificial
  Probe
gacttccaggagtactgtgtcttcc

SEQ ID NO: 147069 - DNA, 25 bp, Artificial
  Probe
actctggcttcttcatacatgtgca

SEQ ID NO: 147070 - DNA, 25 bp, Artificial
  Probe
aatggaaggtcatattgaaggttct

SEQ ID NO: 147071 - DNA, 25 bp, Artificial
  Probe
atggaaggtcatattgaaggttctg

SEQ ID NO: 147072 - DNA, 25 bp, Artificial
  Probe
aacctgtgttagcataatcagcatc

SEQ ID NO: 147073 - DNA, 25 bp, Artificial
  Probe
tggaaggtcatattgaaggttctgg

SEQ ID NO: 147074 - DNA, 25 bp, Artificial
  Probe
ctgtgttagcataatcagcatcgtt

SEQ ID NO: 147075 - DNA, 25 bp, Artificial
  Probe
gaagtaaagaaatcccatcaggtca

SEQ ID NO: 147076 - DNA, 25 bp, Artificial
  Probe
caagttgtgtttaggaaggaaagag

SEQ ID NO: 147077 - DNA, 25 bp, Artificial
  Probe
ttaaagggcatagagtgtgattgaa

SEQ ID NO: 147078 - DNA, 25 bp, Artificial
  Probe
aagtaaagaaatcccatcaggtcac

SEQ ID NO: 147079 - DNA, 25 bp, Artificial
  Probe
taaagggcatagagtgtgattgaac

SEQ ID NO: 147080 - DNA, 25 bp, Artificial
  Probe
aagttgtgtttaggaaggaaagagg

SEQ ID NO: 147081 - DNA, 25 bp, Artificial
  Probe
ttccatctgtgttcttcaatttgtg

SEQ ID NO: 147082 - DNA, 25 bp, Artificial
  Probe
attccatctgtgttcttcaatttgt

SEQ ID NO: 147083 - DNA, 25 bp, Artificial
  Probe
atgagataataccttggactaggaa

SEQ ID NO: 147084 - DNA, 25 bp, Artificial
  Probe
aatgagataataccttggactagga

SEQ ID NO: 147085 - DNA, 25 bp, Artificial
  Probe
attgaaggttctgggttctaatgag

SEQ ID NO: 147086 - DNA, 25 bp, Artificial
  Probe
tattgaaggttctgggttctaatga

SEQ ID NO: 147087 - DNA, 25 bp, Artificial
  Probe
gaaggttctgggttctaatgagata

SEQ ID NO: 147088 - DNA, 25 bp, Artificial
  Probe
ccttaggtgaagtaaagaaatccca

SEQ ID NO: 147089 - DNA, 25 bp, Artificial
  Probe
tgtgttagcataatcagcatcgttt

SEQ ID NO: 147090 - DNA, 25 bp, Artificial
  Probe
aaggttctgggttctaatgagataa

SEQ ID NO: 147091 - DNA, 25 bp, Artificial
  Probe
ttaggtgaagtaaagaaatcccatc

SEQ ID NO: 147092 - DNA, 25 bp, Artificial
  Probe
gtcatattgaaggttctgggttcta

SEQ ID NO: 147093 - DNA, 25 bp, Artificial
  Probe
tgaagtaaagaaatcccatcaggtc

SEQ ID NO: 147094 - DNA, 25 bp, Artificial
  Probe
aggtgaagtaaagaaatcccatcag

SEQ ID NO: 147095 - DNA, 25 bp, Artificial
  Probe
ccatctgtgttcttcaatttgtgat

SEQ ID NO: 147096 - DNA, 25 bp, Artificial
  Probe
aggttctgggttctaatgagataat

SEQ ID NO: 147097 - DNA, 25 bp, Artificial
  Probe
tgaaggttctgggttctaatgagat

SEQ ID NO: 147098 - DNA, 25 bp, Artificial
  Probe
taggtgaagtaaagaaatcccatca

SEQ ID NO: 147099 - DNA, 25 bp, Artificial
  Probe
tcatattgaaggttctgggttctaa

SEQ ID NO: 147100 - DNA, 25 bp, Artificial
  Probe
gtgaagtaaagaaatcccatcaggt

SEQ ID NO: 147101 - DNA, 25 bp, Artificial
  Probe
aaatggaaggtcatattgaaggttc

SEQ ID NO: 147102 - DNA, 25 bp, Artificial
  Probe
gttgtgtttaggaaggaaagaggtg

SEQ ID NO: 147103 - DNA, 25 bp, Artificial
  Probe
agttgtgtttaggaaggaaagaggt

SEQ ID NO: 147104 - DNA, 25 bp, Artificial
  Probe
ttgaaggttctgggttctaatgaga

SEQ ID NO: 147105 - DNA, 25 bp, Artificial
  Probe
cttaggtgaagtaaagaaatcccat

SEQ ID NO: 147106 - DNA, 25 bp, Artificial
  Probe
tccatctgtgttcttcaatttgtga

SEQ ID NO: 147107 - DNA, 25 bp, Artificial
  Probe
atattgaaggttctgggttctaatg

SEQ ID NO: 147108 - DNA, 25 bp, Artificial
  Probe
catattgaaggttctgggttctaat

SEQ ID NO: 147109 - DNA, 25 bp, Artificial
  Probe
tgtttaggaaggaaagaggtggttt

SEQ ID NO: 147110 - DNA, 25 bp, Artificial
  Probe
gcttattggatgagcattatctgta

SEQ ID NO: 147111 - DNA, 25 bp, Artificial
  Probe
gttctaatgagataataccttggac

SEQ ID NO: 147112 - DNA, 25 bp, Artificial
  Probe
ggtgaagtaaagaaatcccatcagg

SEQ ID NO: 147113 - DNA, 25 bp, Artificial
  Probe
ttattggatgagcattatctgtatc

SEQ ID NO: 147114 - DNA, 25 bp, Artificial
  Probe
ttctaatgagataataccttggact

SEQ ID NO: 147115 - DNA, 25 bp, Artificial
  Probe
tgttcttaattggaaggtaggatgt

SEQ ID NO: 147116 - DNA, 25 bp, Artificial
  Probe
tcttaattggaaggtaggatgttca

SEQ ID NO: 147117 - DNA, 25 bp, Artificial
  Probe
gttcttaattggaaggtaggatgtt

SEQ ID NO: 147118 - DNA, 25 bp, Artificial
  Probe
ttgttcttaattggaaggtaggatg

SEQ ID NO: 147119 - DNA, 25 bp, Artificial
  Probe
ttcttaattggaaggtaggatgttc

SEQ ID NO: 147120 - DNA, 25 bp, Artificial
  Probe
cttaattggaaggtaggatgttcaa

SEQ ID NO: 147121 - DNA, 25 bp, Artificial
  Probe
ccttatcatgtagtcatctgcctag

SEQ ID NO: 147122 - DNA, 25 bp, Artificial
  Probe
tgtgtccttatcatgtagtcatctg

SEQ ID NO: 147123 - DNA, 25 bp, Artificial
  Probe
gtgtgtccttatcatgtagtcatct

SEQ ID NO: 147124 - DNA, 25 bp, Artificial
  Probe
tgtgtgtccttatcatgtagtcatc

SEQ ID NO: 147125 - DNA, 25 bp, Artificial
  Probe
tccttatcatgtagtcatctgccta

SEQ ID NO: 147126 - DNA, 25 bp, Artificial
  Probe
ttgtgtgtccttatcatgtagtcat

SEQ ID NO: 147127 - DNA, 25 bp, Artificial
  Probe
cttatcatgtagtcatctgcctagc

SEQ ID NO: 147128 - DNA, 25 bp, Artificial
  Probe
gtgtccttatcatgtagtcatctgc

SEQ ID NO: 147129 - DNA, 25 bp, Artificial
  Probe
gtccttatcatgtagtcatctgcct

SEQ ID NO: 147130 - DNA, 25 bp, Artificial
  Probe
ttatcatgtagtcatctgcctagct

SEQ ID NO: 147131 - DNA, 25 bp, Artificial
  Probe
tgtccttatcatgtagtcatctgcc

SEQ ID NO: 147132 - DNA, 25 bp, Artificial
  Probe
tatcatgtagtcatctgcctagctc

SEQ ID NO: 147133 - DNA, 25 bp, Artificial
  Probe
ctgcttaacgctgtttaataccttg

SEQ ID NO: 147134 - DNA, 25 bp, Artificial
  Probe
aatgctgcttaacgctgtttaatac

SEQ ID NO: 147135 - DNA, 25 bp, Artificial
  Probe
caatgctgcttaacgctgtttaata

SEQ ID NO: 147136 - DNA, 25 bp, Artificial
  Probe
tgggttcatttatcaacagtattcc

SEQ ID NO: 147137 - DNA, 25 bp, Artificial
  Probe
gggttcatttatcaacagtattcct

SEQ ID NO: 147138 - DNA, 25 bp, Artificial
  Probe
tttgtgtgtccttatcatgtagtca

SEQ ID NO: 147139 - DNA, 25 bp, Artificial
  Probe
ccaacagataagggtgtattcttgt

SEQ ID NO: 147140 - DNA, 25 bp, Artificial
  Probe
ctttgtgtgtccttatcatgtagtc

SEQ ID NO: 147141 - DNA, 25 bp, Artificial
  Probe
cttaacgctgtttaataccttgcct

SEQ ID NO: 147142 - DNA, 25 bp, Artificial
  Probe
ttaacgctgtttaataccttgcctg

SEQ ID NO: 147143 - DNA, 25 bp, Artificial
  Probe
ttaattggaaggtaggatgttcaaa

SEQ ID NO: 147144 - DNA, 25 bp, Artificial
  Probe
tttgttcttaattggaaggtaggat

SEQ ID NO: 147145 - DNA, 25 bp, Artificial
  Probe
atttgttcttaattggaaggtagga

SEQ ID NO: 147146 - DNA, 25 bp, Artificial
  Probe
actttgtgtgtccttatcatgtagt

SEQ ID NO: 147147 - DNA, 25 bp, Artificial
  Probe
atcatgtagtcatctgcctagctct

SEQ ID NO: 147148 - DNA, 25 bp, Artificial
  Probe
aagtctcagtaccaacagataaggg

SEQ ID NO: 147149 - DNA, 25 bp, Artificial
  Probe
gctgcttaacgctgtttaatacctt

SEQ ID NO: 147150 - DNA, 25 bp, Artificial
  Probe
aagggtgtattcttgtatatcctgt

SEQ ID NO: 147151 - DNA, 25 bp, Artificial
  Probe
caacagataagggtgtattcttgta

SEQ ID NO: 147152 - DNA, 25 bp, Artificial
  Probe
atgctgcttaacgctgtttaatacc

SEQ ID NO: 147153 - DNA, 25 bp, Artificial
  Probe
gggtgtattcttgtatatcctgtat

SEQ ID NO: 147154 - DNA, 25 bp, Artificial
  Probe
accaacagataagggtgtattcttg

SEQ ID NO: 147155 - DNA, 25 bp, Artificial
  Probe
gcttcactttgtgtgtccttatcat

SEQ ID NO: 147156 - DNA, 25 bp, Artificial
  Probe
tgcttaacgctgtttaataccttgc

SEQ ID NO: 147157 - DNA, 25 bp, Artificial
  Probe
cactttgtgtgtccttatcatgtag

SEQ ID NO: 147158 - DNA, 25 bp, Artificial
  Probe
tcactttgtgtgtccttatcatgta

SEQ ID NO: 147159 - DNA, 25 bp, Artificial
  Probe
cttcactttgtgtgtccttatcatg

SEQ ID NO: 147160 - DNA, 25 bp, Artificial
  Probe
attaagaacttgctgctcagagatg

SEQ ID NO: 147161 - DNA, 25 bp, Artificial
  Probe
cattaagaacttgctgctcagagat

SEQ ID NO: 147162 - DNA, 25 bp, Artificial
  Probe
aatcctccattaagaacttgctgct

SEQ ID NO: 147163 - DNA, 25 bp, Artificial
  Probe
atcctccattaagaacttgctgctc

SEQ ID NO: 147164 - DNA, 25 bp, Artificial
  Probe
gaaatcctccattaagaacttgctg

SEQ ID NO: 147165 - DNA, 25 bp, Artificial
  Probe
tgaaatcctccattaagaacttgct

SEQ ID NO: 147166 - DNA, 25 bp, Artificial
  Probe
gtgaaatcctccattaagaacttgc

SEQ ID NO: 147167 - DNA, 25 bp, Artificial
  Probe
ccattaagaacttgctgctcagaga

SEQ ID NO: 147168 - DNA, 25 bp, Artificial
  Probe
tccattaagaacttgctgctcagag

SEQ ID NO: 147169 - DNA, 25 bp, Artificial
  Probe
ctccattaagaacttgctgctcaga

SEQ ID NO: 147170 - DNA, 25 bp, Artificial
  Probe
cacagtgaaatcctccattaagaac

SEQ ID NO: 147171 - DNA, 25 bp, Artificial
  Probe
acagtgaaatcctccattaagaact

SEQ ID NO: 147172 - DNA, 25 bp, Artificial
  Probe
cccagcggatcttgtctatttatta

SEQ ID NO: 147173 - DNA, 25 bp, Artificial
  Probe
agtgaaatcctccattaagaacttg

SEQ ID NO: 147174 - DNA, 25 bp, Artificial
  Probe
cagtgaaatcctccattaagaactt

SEQ ID NO: 147175 - DNA, 25 bp, Artificial
  Probe
aaatcctccattaagaacttgctgc

SEQ ID NO: 147176 - DNA, 25 bp, Artificial
  Probe
ttaagaacttgctgctcagagatgc

SEQ ID NO: 147177 - DNA, 25 bp, Artificial
  Probe
ccagcggatcttgtctatttattaa

SEQ ID NO: 147178 - DNA, 25 bp, Artificial
  Probe
cctccattaagaacttgctgctcag

SEQ ID NO: 147179 - DNA, 25 bp, Artificial
  Probe
tcacagtgaaatcctccattaagaa

SEQ ID NO: 147180 - DNA, 25 bp, Artificial
  Probe
acatcacagtgaaatcctccattaa

SEQ ID NO: 147181 - DNA, 25 bp, Artificial
  Probe
aacatcacagtgaaatcctccatta

SEQ ID NO: 147182 - DNA, 25 bp, Artificial
  Probe
atcacagtgaaatcctccattaaga

SEQ ID NO: 147183 - DNA, 25 bp, Artificial
  Probe
catcacagtgaaatcctccattaag

SEQ ID NO: 147184 - DNA, 25 bp, Artificial
  Probe
tcctccattaagaacttgctgctca

SEQ ID NO: 147185 - DNA, 25 bp, Artificial
  Probe
caacatcacagtgaaatcctccatt

SEQ ID NO: 147186 - DNA, 25 bp, Artificial
  Probe
tcatgttgaaataaggcaggttctg

SEQ ID NO: 147187 - DNA, 25 bp, Artificial
  Probe
gtggagatagtggagtaggttgctg

SEQ ID NO: 147188 - DNA, 25 bp, Artificial
  Probe
cagcggatcttgtctatttattaaa

SEQ ID NO: 147189 - DNA, 25 bp, Artificial
  Probe
gcccagcggatcttgtctatttatt

SEQ ID NO: 147190 - DNA, 25 bp, Artificial
  Probe
aatcaaggccagtcactcaatactc

SEQ ID NO: 147191 - DNA, 25 bp, Artificial
  Probe
gatagtggagtaggttgctggcttc

SEQ ID NO: 147192 - DNA, 25 bp, Artificial
  Probe
cttcatgttgaaataaggcaggttc

SEQ ID NO: 147193 - DNA, 25 bp, Artificial
  Probe
ttcatgttgaaataaggcaggttct

SEQ ID NO: 147194 - DNA, 25 bp, Artificial
  Probe
caatcaaggccagtcactcaatact

SEQ ID NO: 147195 - DNA, 25 bp, Artificial
  Probe
cagcagttcaaggaggagaagacag

SEQ ID NO: 147196 - DNA, 25 bp, Artificial
  Probe
ccaacatcacagtgaaatcctccat

SEQ ID NO: 147197 - DNA, 25 bp, Artificial
  Probe
gacaggcaccattcagaggagtaac

SEQ ID NO: 147198 - DNA, 25 bp, Artificial
  Probe
gttgctggcttcatgttgaaataag

SEQ ID NO: 147199 - DNA, 25 bp, Artificial
  Probe
agcccagcggatcttgtctatttat

SEQ ID NO: 147200 - DNA, 25 bp, Artificial
  Probe
agatagtggagtaggttgctggctt

SEQ ID NO: 147201 - DNA, 25 bp, Artificial
  Probe
agacaggcaccattcagaggagtaa

SEQ ID NO: 147202 - DNA, 25 bp, Artificial
  Probe
aagacaggcaccattcagaggagta

SEQ ID NO: 147203 - DNA, 25 bp, Artificial
  Probe
agtgatcccagtgatggtatacttg

SEQ ID NO: 147204 - DNA, 25 bp, Artificial
  Probe
cagtgatcccagtgatggtatactt

SEQ ID NO: 147205 - DNA, 25 bp, Artificial
  Probe
acttctttcggtattctatgtcgtg

SEQ ID NO: 147206 - DNA, 25 bp, Artificial
  Probe
cacttctttcggtattctatgtcgt

SEQ ID NO: 147207 - DNA, 25 bp, Artificial
  Probe
cccacttctttcggtattctatgtc

SEQ ID NO: 147208 - DNA, 25 bp, Artificial
  Probe
gtcccacttctttcggtattctatg

SEQ ID NO: 147209 - DNA, 25 bp, Artificial
  Probe
tcccacttctttcggtattctatgt

SEQ ID NO: 147210 - DNA, 25 bp, Artificial
  Probe
tgtcccacttctttcggtattctat

SEQ ID NO: 147211 - DNA, 25 bp, Artificial
  Probe
ccacttctttcggtattctatgtcg

SEQ ID NO: 147212 - DNA, 25 bp, Artificial
  Probe
attactgtcccacttctttcggtat

SEQ ID NO: 147213 - DNA, 25 bp, Artificial
  Probe
ttactgtcccacttctttcggtatt

SEQ ID NO: 147214 - DNA, 25 bp, Artificial
  Probe
cttctttcggtattctatgtcgtgc

SEQ ID NO: 147215 - DNA, 25 bp, Artificial
  Probe
ctgtcccacttctttcggtattcta

SEQ ID NO: 147216 - DNA, 25 bp, Artificial
  Probe
tactgtcccacttctttcggtattc

SEQ ID NO: 147217 - DNA, 25 bp, Artificial
  Probe
cattactgtcccacttctttcggta

SEQ ID NO: 147218 - DNA, 25 bp, Artificial
  Probe
cacttgttgacaatttcatggatgc

SEQ ID NO: 147219 - DNA, 25 bp, Artificial
  Probe
ccacttgttgacaatttcatggatg

SEQ ID NO: 147220 - DNA, 25 bp, Artificial
  Probe
cattccatcctgcacttgatcttgt

SEQ ID NO: 147221 - DNA, 25 bp, Artificial
  Probe
acttgttgacaatttcatggatgcc

SEQ ID NO: 147222 - DNA, 25 bp, Artificial
  Probe
actgtcccacttctttcggtattct

SEQ ID NO: 147223 - DNA, 25 bp, Artificial
  Probe
ttcaactcacctccaggagtaatat

SEQ ID NO: 147224 - DNA, 25 bp, Artificial
  Probe
ttctttcggtattctatgtcgtgca

SEQ ID NO: 147225 - DNA, 25 bp, Artificial
  Probe
tcaactcacctccaggagtaatatc

SEQ ID NO: 147226 - DNA, 25 bp, Artificial
  Probe
gagtaatatcctacgtcagcgttga

SEQ ID NO: 147227 - DNA, 25 bp, Artificial
  Probe
attccatcctgcacttgatcttgtg

SEQ ID NO: 147228 - DNA, 25 bp, Artificial
  Probe
gttcaactcacctccaggagtaata

SEQ ID NO: 147229 - DNA, 25 bp, Artificial
  Probe
cttgttgacaatttcatggatgccc

SEQ ID NO: 147230 - DNA, 25 bp, Artificial
  Probe
tctttcggtattctatgtcgtgcag

SEQ ID NO: 147231 - DNA, 25 bp, Artificial
  Probe
gccacttgttgacaatttcatggat

SEQ ID NO: 147232 - DNA, 25 bp, Artificial
  Probe
ctcacctccaggagtaatatcctac

SEQ ID NO: 147233 - DNA, 25 bp, Artificial
  Probe
caactcacctccaggagtaatatcc

SEQ ID NO: 147234 - DNA, 25 bp, Artificial
  Probe
actcacctccaggagtaatatccta

SEQ ID NO: 147235 - DNA, 25 bp, Artificial
  Probe
ggagtaatatcctacgtcagcgttg

SEQ ID NO: 147236 - DNA, 25 bp, Artificial
  Probe
acattactgtcccacttctttcggt

SEQ ID NO: 147237 - DNA, 25 bp, Artificial
  Probe
aactcacctccaggagtaatatcct

SEQ ID NO: 147238 - DNA, 25 bp, Artificial
  Probe
ctccaggagtaatatcctacgtcag

SEQ ID NO: 147239 - DNA, 25 bp, Artificial
  Probe
ctttcggtattctatgtcgtgcagg

SEQ ID NO: 147240 - DNA, 25 bp, Artificial
  Probe
tcacctccaggagtaatatcctacg

SEQ ID NO: 147241 - DNA, 25 bp, Artificial
  Probe
tttcggtattctatgtcgtgcagga

SEQ ID NO: 147242 - DNA, 25 bp, Artificial
  Probe
taatatcctacgtcagcgttgacag

SEQ ID NO: 147243 - DNA, 25 bp, Artificial
  Probe
agtaatatcctacgtcagcgttgac

SEQ ID NO: 147244 - DNA, 25 bp, Artificial
  Probe
atgacattactgtcccacttctttc

SEQ ID NO: 147245 - DNA, 25 bp, Artificial
  Probe
gatgacattactgtcccacttcttt

SEQ ID NO: 147246 - DNA, 25 bp, Artificial
  Probe
ttcggtattctatgtcgtgcaggac

SEQ ID NO: 147247 - DNA, 25 bp, Artificial
  Probe
cctccaggagtaatatcctacgtca

SEQ ID NO: 147248 - DNA, 25 bp, Artificial
  Probe
acctccaggagtaatatcctacgtc

SEQ ID NO: 147249 - DNA, 25 bp, Artificial
  Probe
gtaatatcctacgtcagcgttgaca

SEQ ID NO: 147250 - DNA, 25 bp, Artificial
  Probe
gtagaagatgaagaggtgaacagaa

SEQ ID NO: 147251 - DNA, 25 bp, Artificial
  Probe
agaagatgaagaggtgaacagaatg

SEQ ID NO: 147252 - DNA, 25 bp, Artificial
  Probe
ttatgtcaatccgagaagtagagag

SEQ ID NO: 147253 - DNA, 25 bp, Artificial
  Probe
tagaagatgaagaggtgaacagaat

SEQ ID NO: 147254 - DNA, 25 bp, Artificial
  Probe
tatgtcaatccgagaagtagagagg

SEQ ID NO: 147255 - DNA, 25 bp, Artificial
  Probe
acttgtagaagatgaagaggtgaac

SEQ ID NO: 147256 - DNA, 25 bp, Artificial
  Probe
attatgtcaatccgagaagtagaga

SEQ ID NO: 147257 - DNA, 25 bp, Artificial
  Probe
tacttgtagaagatgaagaggtgaa

SEQ ID NO: 147258 - DNA, 25 bp, Artificial
  Probe
atctgatgtatctggtaactgtcac

SEQ ID NO: 147259 - DNA, 25 bp, Artificial
  Probe
taatgacttagatagactcacagcc

SEQ ID NO: 147260 - DNA, 25 bp, Artificial
  Probe
aatctgatgtatctggtaactgtca

SEQ ID NO: 147261 - DNA, 25 bp, Artificial
  Probe
ttgatgccgtgacagatataataat

SEQ ID NO: 147262 - DNA, 25 bp, Artificial
  Probe
ggtacttgtagaagatgaagaggtg

SEQ ID NO: 147263 - DNA, 25 bp, Artificial
  Probe
gtacttgtagaagatgaagaggtga

SEQ ID NO: 147264 - DNA, 25 bp, Artificial
  Probe
atggtacttgtagaagatgaagagg

SEQ ID NO: 147265 - DNA, 25 bp, Artificial
  Probe
ttgtagaagatgaagaggtgaacag

SEQ ID NO: 147266 - DNA, 25 bp, Artificial
  Probe
cttgtagaagatgaagaggtgaaca

SEQ ID NO: 147267 - DNA, 25 bp, Artificial
  Probe
tgatgtatctggtaactgtcacaat

SEQ ID NO: 147268 - DNA, 25 bp, Artificial
  Probe
ctgatgtatctggtaactgtcacaa

SEQ ID NO: 147269 - DNA, 25 bp, Artificial
  Probe
tggtacttgtagaagatgaagaggt

SEQ ID NO: 147270 - DNA, 25 bp, Artificial
  Probe
gaagatgaagaggtgaacagaatgc

SEQ ID NO: 147271 - DNA, 25 bp, Artificial
  Probe
ctacatcaagaaccagttcctagac

SEQ ID NO: 147272 - DNA, 25 bp, Artificial
  Probe
tctgatgtatctggtaactgtcaca

SEQ ID NO: 147273 - DNA, 25 bp, Artificial
  Probe
tgtagaagatgaagaggtgaacaga

SEQ ID NO: 147274 - DNA, 25 bp, Artificial
  Probe
actacatcaagaaccagttcctaga

SEQ ID NO: 147275 - DNA, 25 bp, Artificial
  Probe
catggtacttgtagaagatgaagag

SEQ ID NO: 147276 - DNA, 25 bp, Artificial
  Probe
tacgacatggtacttgtagaagatg

SEQ ID NO: 147277 - DNA, 25 bp, Artificial
  Probe
tacatcaagaaccagttcctagacc

SEQ ID NO: 147278 - DNA, 25 bp, Artificial
  Probe
cgacatggtacttgtagaagatgaa

SEQ ID NO: 147279 - DNA, 25 bp, Artificial
  Probe
tgatgccgtgacagatataataata

SEQ ID NO: 147280 - DNA, 25 bp, Artificial
  Probe
ttaatgacttagatagactcacagc

SEQ ID NO: 147281 - DNA, 25 bp, Artificial
  Probe
gatgtatctggtaactgtcacaata

SEQ ID NO: 147282 - DNA, 25 bp, Artificial
  Probe
acatggtacttgtagaagatgaaga

SEQ ID NO: 147283 - DNA, 25 bp, Artificial
  Probe
gcagcttactaccttaatgacttag

SEQ ID NO: 147284 - DNA, 25 bp, Artificial
  Probe
gacatggtacttgtagaagatgaag

SEQ ID NO: 147285 - DNA, 25 bp, Artificial
  Probe
tggtaactgtcacaatatacattca

SEQ ID NO: 147286 - DNA, 25 bp, Artificial
  Probe
gagaagtagagaggaccaacaactg

SEQ ID NO: 147287 - DNA, 25 bp, Artificial
  Probe
aactgtcacaatatacattcatgct

SEQ ID NO: 147288 - DNA, 25 bp, Artificial
  Probe
tgattatgtcaatccgagaagtaga

SEQ ID NO: 147289 - DNA, 25 bp, Artificial
  Probe
acgacatggtacttgtagaagatga

SEQ ID NO: 147290 - DNA, 25 bp, Artificial
  Probe
tgcagcttactaccttaatgactta

SEQ ID NO: 147291 - DNA, 25 bp, Artificial
  Probe
ttgaaggagtgacgtgcattatatt

SEQ ID NO: 147292 - DNA, 25 bp, Artificial
  Probe
gattatgtcaatccgagaagtagag

SEQ ID NO: 147293 - DNA, 25 bp, Artificial
  Probe
tctggtaactgtcacaatatacatt

SEQ ID NO: 147294 - DNA, 25 bp, Artificial
  Probe
gtttgatgccgtgacagatataata

SEQ ID NO: 147295 - DNA, 25 bp, Artificial
  Probe
gagaagaagaatgtttgattgtccg

SEQ ID NO: 147296 - DNA, 25 bp, Artificial
  Probe
agagaagaagaatgtttgattgtcc

SEQ ID NO: 147297 - DNA, 25 bp, Artificial
  Probe
aagagaagaagaatgtttgattgtc

SEQ ID NO: 147298 - DNA, 25 bp, Artificial
  Probe
caagagaagaagaatgtttgattgt

SEQ ID NO: 147299 - DNA, 25 bp, Artificial
  Probe
atctgctagttcaccctctctacaa

SEQ ID NO: 147300 - DNA, 25 bp, Artificial
  Probe
acaagagaagaagaatgtttgattg

SEQ ID NO: 147301 - DNA, 25 bp, Artificial
  Probe
tctacaagagaagaagaatgtttga

SEQ ID NO: 147302 - DNA, 25 bp, Artificial
  Probe
gacatctgctagttcaccctctcta

SEQ ID NO: 147303 - DNA, 25 bp, Artificial
  Probe
tatagctgagtccaggattgctcta

SEQ ID NO: 147304 - DNA, 25 bp, Artificial
  Probe
tctgctagttcaccctctctacaag

SEQ ID NO: 147305 - DNA, 25 bp, Artificial
  Probe
catctgctagttcaccctctctaca

SEQ ID NO: 147306 - DNA, 25 bp, Artificial
  Probe
acatctgctagttcaccctctctac

SEQ ID NO: 147307 - DNA, 25 bp, Artificial
  Probe
ggtttcatgtccattcacagtgatc

SEQ ID NO: 147308 - DNA, 25 bp, Artificial
  Probe
ctgctagttcaccctctctacaaga

SEQ ID NO: 147309 - DNA, 25 bp, Artificial
  Probe
ctacaagagaagaagaatgtttgat

SEQ ID NO: 147310 - DNA, 25 bp, Artificial
  Probe
ttcatgtccattcacagtgatcaac

SEQ ID NO: 147311 - DNA, 25 bp, Artificial
  Probe
ctgtccttggcagatgaatggaatg

SEQ ID NO: 147312 - DNA, 25 bp, Artificial
  Probe
atgaatggaatgcttctgccacaag

SEQ ID NO: 147313 - DNA, 25 bp, Artificial
  Probe
gatgaatggaatgcttctgccacaa

SEQ ID NO: 147314 - DNA, 25 bp, Artificial
  Probe
tacaagagaagaagaatgtttgatt

SEQ ID NO: 147315 - DNA, 25 bp, Artificial
  Probe
atagctgagtccaggattgctctag

SEQ ID NO: 147316 - DNA, 25 bp, Artificial
  Probe
tggtttcatgtccattcacagtgat

SEQ ID NO: 147317 - DNA, 25 bp, Artificial
  Probe
ctatagctgagtccaggattgctct

SEQ ID NO: 147318 - DNA, 25 bp, Artificial
  Probe
cttggcagatgaatggaatgcttct

SEQ ID NO: 147319 - DNA, 25 bp, Artificial
  Probe
atggcagcaactgaataaagcactt

SEQ ID NO: 147320 - DNA, 25 bp, Artificial
  Probe
tttcatgtccattcacagtgatcaa

SEQ ID NO: 147321 - DNA, 25 bp, Artificial
  Probe
tcatgtccattcacagtgatcaacc

SEQ ID NO: 147322 - DNA, 25 bp, Artificial
  Probe
tggcagcaactgaataaagcacttt

SEQ ID NO: 147323 - DNA, 25 bp, Artificial
  Probe
ctggtttcatgtccattcacagtga

SEQ ID NO: 147324 - DNA, 25 bp, Artificial
  Probe
ctgacatctgctagttcaccctctc

SEQ ID NO: 147325 - DNA, 25 bp, Artificial
  Probe
gatggcagcaactgaataaagcact

SEQ ID NO: 147326 - DNA, 25 bp, Artificial
  Probe
agatggcagcaactgaataaagcac

SEQ ID NO: 147327 - DNA, 25 bp, Artificial
  Probe
gtttcatgtccattcacagtgatca

SEQ ID NO: 147328 - DNA, 25 bp, Artificial
  Probe
ctctacaagagaagaagaatgtttg

SEQ ID NO: 147329 - DNA, 25 bp, Artificial
  Probe
agatgaatggaatgcttctgccaca

SEQ ID NO: 147330 - DNA, 25 bp, Artificial
  Probe
cctgtccttggcagatgaatggaat

SEQ ID NO: 147331 - DNA, 25 bp, Artificial
  Probe
tgacatctgctagttcaccctctct

SEQ ID NO: 147332 - DNA, 25 bp, Artificial
  Probe
cctatagctgagtccaggattgctc

SEQ ID NO: 147333 - DNA, 25 bp, Artificial
  Probe
ccttggcagatgaatggaatgcttc

SEQ ID NO: 147334 - DNA, 25 bp, Artificial
  Probe
tgctagttcaccctctctacaagag

SEQ ID NO: 147335 - DNA, 25 bp, Artificial
  Probe
ttggcagatgaatggaatgcttctg

SEQ ID NO: 147336 - DNA, 25 bp, Artificial
  Probe
ggcagcaactgaataaagcactttt

SEQ ID NO: 147337 - DNA, 25 bp, Artificial
  Probe
tccttggcagatgaatggaatgctt

SEQ ID NO: 147338 - DNA, 25 bp, Artificial
  Probe
tagctgagtccaggattgctctagg

SEQ ID NO: 147339 - DNA, 25 bp, Artificial
  Probe
cagatgaatggaatgcttctgccac

SEQ ID NO: 147340 - DNA, 25 bp, Artificial
  Probe
tgagaagaacaagaaggagatgaat

SEQ ID NO: 147341 - DNA, 25 bp, Artificial
  Probe
atgagaagaacaagaaggagatgaa

SEQ ID NO: 147342 - DNA, 25 bp, Artificial
  Probe
cggcttgctaatgatataactgtct

SEQ ID NO: 147343 - DNA, 25 bp, Artificial
  Probe
gtatgagaagaacaagaaggagatg

SEQ ID NO: 147344 - DNA, 25 bp, Artificial
  Probe
ggcttgctaatgatataactgtctt

SEQ ID NO: 147345 - DNA, 25 bp, Artificial
  Probe
tatgagaagaacaagaaggagatga

SEQ ID NO: 147346 - DNA, 25 bp, Artificial
  Probe
ttcttgtgttcttgacttgtgtgtt

SEQ ID NO: 147347 - DNA, 25 bp, Artificial
  Probe
ctcttcttgtgttcttgacttgtgt

SEQ ID NO: 147348 - DNA, 25 bp, Artificial
  Probe
ttcacattctatgacaaggatggaa

SEQ ID NO: 147349 - DNA, 25 bp, Artificial
  Probe
tcacattctatgacaaggatggaag

SEQ ID NO: 147350 - DNA, 25 bp, Artificial
  Probe
cttcacattctatgacaaggatgga

SEQ ID NO: 147351 - DNA, 25 bp, Artificial
  Probe
tcttcacattctatgacaaggatgg

SEQ ID NO: 147352 - DNA, 25 bp, Artificial
  Probe
ccatcttcacattctatgacaagga

SEQ ID NO: 147353 - DNA, 25 bp, Artificial
  Probe
atgccatcttcacattctatgacaa

SEQ ID NO: 147354 - DNA, 25 bp, Artificial
  Probe
tcttcttgtgttcttgacttgtgtg

SEQ ID NO: 147355 - DNA, 25 bp, Artificial
  Probe
tcttgtgttcttgacttgtgtgttc

SEQ ID NO: 147356 - DNA, 25 bp, Artificial
  Probe
cttcttgtgttcttgacttgtgtgt

SEQ ID NO: 147357 - DNA, 25 bp, Artificial
  Probe
tgccatcttcacattctatgacaag

SEQ ID NO: 147358 - DNA, 25 bp, Artificial
  Probe
ctgtatgagaagaacaagaaggaga

SEQ ID NO: 147359 - DNA, 25 bp, Artificial
  Probe
tctgtatgagaagaacaagaaggag

SEQ ID NO: 147360 - DNA, 25 bp, Artificial
  Probe
gagaagaacaagaaggagatgaata

SEQ ID NO: 147361 - DNA, 25 bp, Artificial
  Probe
cctgaaggatctgtatgagaagaac

SEQ ID NO: 147362 - DNA, 25 bp, Artificial
  Probe
cacattctatgacaaggatggaagc

SEQ ID NO: 147363 - DNA, 25 bp, Artificial
  Probe
atcttcacattctatgacaaggatg

SEQ ID NO: 147364 - DNA, 25 bp, Artificial
  Probe
catcttcacattctatgacaaggat

SEQ ID NO: 147365 - DNA, 25 bp, Artificial
  Probe
cctcttcttgtgttcttgacttgtg

SEQ ID NO: 147366 - DNA, 25 bp, Artificial
  Probe
tgtatgagaagaacaagaaggagat

SEQ ID NO: 147367 - DNA, 25 bp, Artificial
  Probe
atctgtatgagaagaacaagaagga

SEQ ID NO: 147368 - DNA, 25 bp, Artificial
  Probe
gcttgctaatgatataactgtcttc

SEQ ID NO: 147369 - DNA, 25 bp, Artificial
  Probe
gccatcttcacattctatgacaagg

SEQ ID NO: 147370 - DNA, 25 bp, Artificial
  Probe
ctgaaggatctgtatgagaagaaca

SEQ ID NO: 147371 - DNA, 25 bp, Artificial
  Probe
gcagaagtatgataagaactcagat

SEQ ID NO: 147372 - DNA, 25 bp, Artificial
  Probe
tgaaggatctgtatgagaagaacaa

SEQ ID NO: 147373 - DNA, 25 bp, Artificial
  Probe
aggatctgtatgagaagaacaagaa

SEQ ID NO: 147374 - DNA, 25 bp, Artificial
  Probe
aaggatctgtatgagaagaacaaga

SEQ ID NO: 147375 - DNA, 25 bp, Artificial
  Probe
aacaagaaggagatgaatatccagc

SEQ ID NO: 147376 - DNA, 25 bp, Artificial
  Probe
gatctgtatgagaagaacaagaagg

SEQ ID NO: 147377 - DNA, 25 bp, Artificial
  Probe
ggatctgtatgagaagaacaagaag

SEQ ID NO: 147378 - DNA, 25 bp, Artificial
  Probe
gaaggatctgtatgagaagaacaag

SEQ ID NO: 147379 - DNA, 25 bp, Artificial
  Probe
agaacaagaaggagatgaatatcca

SEQ ID NO: 147380 - DNA, 25 bp, Artificial
  Probe
cttgtgttcttgacttgtgtgttcc

SEQ ID NO: 147381 - DNA, 25 bp, Artificial
  Probe
caagaaggagatgaatatccagcag

SEQ ID NO: 147382 - DNA, 25 bp, Artificial
  Probe
gaacaagaaggagatgaatatccag

SEQ ID NO: 147383 - DNA, 25 bp, Artificial
  Probe
agaagaacaagaaggagatgaatat

SEQ ID NO: 147384 - DNA, 25 bp, Artificial
  Probe
aatgatataactgtcttctcagagc

SEQ ID NO: 147385 - DNA, 25 bp, Artificial
  Probe
tcaacttctccaagatgaggatgat

SEQ ID NO: 147386 - DNA, 25 bp, Artificial
  Probe
caacttctccaagatgaggatgatc

SEQ ID NO: 147387 - DNA, 25 bp, Artificial
  Probe
accagacatttcaaccatatcagta

SEQ ID NO: 147388 - DNA, 25 bp, Artificial
  Probe
tacttagtggatgaaacctttgtgt

SEQ ID NO: 147389 - DNA, 25 bp, Artificial
  Probe
aaaccaccagacatttcaaccatat

SEQ ID NO: 147390 - DNA, 25 bp, Artificial
  Probe
ccgatttaagaacctcagagaaact

SEQ ID NO: 147391 - DNA, 25 bp, Artificial
  Probe
caccagacatttcaaccatatcagt

SEQ ID NO: 147392 - DNA, 25 bp, Artificial
  Probe
cagagaaactttgcgaaattgtgat

SEQ ID NO: 147393 - DNA, 25 bp, Artificial
  Probe
tttaagaacctcagagaaactttgc

SEQ ID NO: 147394 - DNA, 25 bp, Artificial
  Probe
cttagtggatgaaacctttgtgttg

SEQ ID NO: 147395 - DNA, 25 bp, Artificial
  Probe
ccagacatttcaaccatatcagtaa

SEQ ID NO: 147396 - DNA, 25 bp, Artificial
  Probe
aaccaccagacatttcaaccatatc

SEQ ID NO: 147397 - DNA, 25 bp, Artificial
  Probe
acttagtggatgaaacctttgtgtt

SEQ ID NO: 147398 - DNA, 25 bp, Artificial
  Probe
gtcaacttctccaagatgaggatga

SEQ ID NO: 147399 - DNA, 25 bp, Artificial
  Probe
cgatttaagaacctcagagaaactt

SEQ ID NO: 147400 - DNA, 25 bp, Artificial
  Probe
gtacttagtggatgaaacctttgtg

SEQ ID NO: 147401 - DNA, 25 bp, Artificial
  Probe
aacttctccaagatgaggatgatct

SEQ ID NO: 147402 - DNA, 25 bp, Artificial
  Probe
ctcagagaaactttgcgaaattgtg

SEQ ID NO: 147403 - DNA, 25 bp, Artificial
  Probe
ccaccagacatttcaaccatatcag

SEQ ID NO: 147404 - DNA, 25 bp, Artificial
  Probe
agagaaactttgcgaaattgtgatc

SEQ ID NO: 147405 - DNA, 25 bp, Artificial
  Probe
ccagtttcagcagactacttacaaa

SEQ ID NO: 147406 - DNA, 25 bp, Artificial
  Probe
aacctcagagaaactttgcgaaatt

SEQ ID NO: 147407 - DNA, 25 bp, Artificial
  Probe
acttctccaagatgaggatgatctc

SEQ ID NO: 147408 - DNA, 25 bp, Artificial
  Probe
ttaagaacctcagagaaactttgcg

SEQ ID NO: 147409 - DNA, 25 bp, Artificial
  Probe
ttagtggatgaaacctttgtgttgg

SEQ ID NO: 147410 - DNA, 25 bp, Artificial
  Probe
catatcagtaacttgatcgcttcag

SEQ ID NO: 147411 - DNA, 25 bp, Artificial
  Probe
aaccatatcagtaacttgatcgctt

SEQ ID NO: 147412 - DNA, 25 bp, Artificial
  Probe
cagacatttcaaccatatcagtaac

SEQ ID NO: 147413 - DNA, 25 bp, Artificial
  Probe
gccgatttaagaacctcagagaaac

SEQ ID NO: 147414 - DNA, 25 bp, Artificial
  Probe
ccatatcagtaacttgatcgcttca

SEQ ID NO: 147415 - DNA, 25 bp, Artificial
  Probe
accatatcagtaacttgatcgcttc

SEQ ID NO: 147416 - DNA, 25 bp, Artificial
  Probe
gaagacatggctcaaagtttctaag

SEQ ID NO: 147417 - DNA, 25 bp, Artificial
  Probe
gagaaactttgcgaaattgtgatcc

SEQ ID NO: 147418 - DNA, 25 bp, Artificial
  Probe
gaacctcagagaaactttgcgaaat

SEQ ID NO: 147419 - DNA, 25 bp, Artificial
  Probe
accaccagacatttcaaccatatca

SEQ ID NO: 147420 - DNA, 25 bp, Artificial
  Probe
caaccatatcagtaacttgatcgct

SEQ ID NO: 147421 - DNA, 25 bp, Artificial
  Probe
agacatttcaaccatatcagtaact

SEQ ID NO: 147422 - DNA, 25 bp, Artificial
  Probe
tcagagaaactttgcgaaattgtga

SEQ ID NO: 147423 - DNA, 25 bp, Artificial
  Probe
cttctccaagatgaggatgatctcc

SEQ ID NO: 147424 - DNA, 25 bp, Artificial
  Probe
cctcagagaaactttgcgaaattgt

SEQ ID NO: 147425 - DNA, 25 bp, Artificial
  Probe
acctcagagaaactttgcgaaattg

SEQ ID NO: 147426 - DNA, 25 bp, Artificial
  Probe
taagaacctcagagaaactttgcga

SEQ ID NO: 147427 - DNA, 25 bp, Artificial
  Probe
tcaaccatatcagtaacttgatcgc

SEQ ID NO: 147428 - DNA, 25 bp, Artificial
  Probe
ttcaaccatatcagtaacttgatcg

SEQ ID NO: 147429 - DNA, 25 bp, Artificial
  Probe
ggtcaacttctccaagatgaggatg

SEQ ID NO: 147430 - DNA, 25 bp, Artificial
  Probe
acaagtataaggttcctgaccactg

SEQ ID NO: 147431 - DNA, 25 bp, Artificial
  Probe
cacaagtataaggttcctgaccact

SEQ ID NO: 147432 - DNA, 25 bp, Artificial
  Probe
caagtataaggttcctgaccactgg

SEQ ID NO: 147433 - DNA, 25 bp, Artificial
  Probe
gtataaggttcctgaccactggtac

SEQ ID NO: 147434 - DNA, 25 bp, Artificial
  Probe
agtataaggttcctgaccactggta

SEQ ID NO: 147435 - DNA, 25 bp, Artificial
  Probe
gcacaagtataaggttcctgaccac

SEQ ID NO: 147436 - DNA, 25 bp, Artificial
  Probe
aagtataaggttcctgaccactggt

SEQ ID NO: 147437 - DNA, 25 bp, Artificial
  Probe
aactacaaccactacttttcccttt

SEQ ID NO: 147438 - DNA, 25 bp, Artificial
  Probe
gtcacaactacaaccactacttttc

SEQ ID NO: 147439 - DNA, 25 bp, Artificial
  Probe
caactacaaccactacttttccctt

SEQ ID NO: 147440 - DNA, 25 bp, Artificial
  Probe
tcacaactacaaccactacttttcc

SEQ ID NO: 147441 - DNA, 25 bp, Artificial
  Probe
gtcatcctgaaggtgagagactgtc

SEQ ID NO: 147442 - DNA, 25 bp, Artificial
  Probe
agatctggatgttaacgtacaggtg

SEQ ID NO: 147443 - DNA, 25 bp, Artificial
  Probe
tacaaccactacttttccctttgag

SEQ ID NO: 147444 - DNA, 25 bp, Artificial
  Probe
ctacaaccactacttttccctttga

SEQ ID NO: 147445 - DNA, 25 bp, Artificial
  Probe
actacaaccactacttttccctttg

SEQ ID NO: 147446 - DNA, 25 bp, Artificial
  Probe
aaccactacttttccctttgagttt

SEQ ID NO: 147447 - DNA, 25 bp, Artificial
  Probe
acaactacaaccactacttttccct

SEQ ID NO: 147448 - DNA, 25 bp, Artificial
  Probe
cacaactacaaccactacttttccc

SEQ ID NO: 147449 - DNA, 25 bp, Artificial
  Probe
cgctatttatatcttcgccaagaag

SEQ ID NO: 147450 - DNA, 25 bp, Artificial
  Probe
tttccctttgagtttgggcaataaa

SEQ ID NO: 147451 - DNA, 25 bp, Artificial
  Probe
accactacttttccctttgagtttg

SEQ ID NO: 147452 - DNA, 25 bp, Artificial
  Probe
caaccactacttttccctttgagtt

SEQ ID NO: 147453 - DNA, 25 bp, Artificial
  Probe
atgaggtcatcctgaaggtgagaga

SEQ ID NO: 147454 - DNA, 25 bp, Artificial
  Probe
catgaggtcatcctgaaggtgagag

SEQ ID NO: 147455 - DNA, 25 bp, Artificial
  Probe
ttccctttgagtttgggcaataaac

SEQ ID NO: 147456 - DNA, 25 bp, Artificial
  Probe
ctttgagtttgggcaataaaccgag

SEQ ID NO: 147457 - DNA, 25 bp, Artificial
  Probe
acaaccactacttttccctttgagt

SEQ ID NO: 147458 - DNA, 25 bp, Artificial
  Probe
gatctggatgttaacgtacaggtgc

SEQ ID NO: 147459 - DNA, 25 bp, Artificial
  Probe
ggtcacaactacaaccactactttt

SEQ ID NO: 147460 - DNA, 25 bp, Artificial
  Probe
tcatcctgaaggtgagagactgtcc

SEQ ID NO: 147461 - DNA, 25 bp, Artificial
  Probe
gaagaacaatatcccgttccagatg

SEQ ID NO: 147462 - DNA, 25 bp, Artificial
  Probe
agaagaacaatatcccgttccagat

SEQ ID NO: 147463 - DNA, 25 bp, Artificial
  Probe
gaggtcatcctgaaggtgagagact

SEQ ID NO: 147464 - DNA, 25 bp, Artificial
  Probe
cgcacaagtataaggttcctgacca

SEQ ID NO: 147465 - DNA, 25 bp, Artificial
  Probe
aagaagaacaatatcccgttccaga

SEQ ID NO: 147466 - DNA, 25 bp, Artificial
  Probe
caagaagaacaatatcccgttccag

SEQ ID NO: 147467 - DNA, 25 bp, Artificial
  Probe
gatgttaacgtacaggtgctggaag

SEQ ID NO: 147468 - DNA, 25 bp, Artificial
  Probe
atctggatgttaacgtacaggtgct

SEQ ID NO: 147469 - DNA, 25 bp, Artificial
  Probe
aggtcatcctgaaggtgagagactg

SEQ ID NO: 147470 - DNA, 25 bp, Artificial
  Probe
tgaggtcatcctgaaggtgagagac

SEQ ID NO: 147471 - DNA, 25 bp, Artificial
  Probe
ttcgccaagaagaacaatatcccgt

SEQ ID NO: 147472 - DNA, 25 bp, Artificial
  Probe
ccactacttttccctttgagtttgg

SEQ ID NO: 147473 - DNA, 25 bp, Artificial
  Probe
tcgccaagaagaacaatatcccgtt

SEQ ID NO: 147474 - DNA, 25 bp, Artificial
  Probe
atgttaacgtacaggtgctggaaga

SEQ ID NO: 147475 - DNA, 25 bp, Artificial
  Probe
gttcacttaacctgctgatggaatc

SEQ ID NO: 147476 - DNA, 25 bp, Artificial
  Probe
tgttcacttaacctgctgatggaat

SEQ ID NO: 147477 - DNA, 25 bp, Artificial
  Probe
atgttcacttaacctgctgatggaa

SEQ ID NO: 147478 - DNA, 25 bp, Artificial
  Probe
aaaggcttctaaaggaacaatcaag

SEQ ID NO: 147479 - DNA, 25 bp, Artificial
  Probe
aggcttctaaaggaacaatcaagat

SEQ ID NO: 147480 - DNA, 25 bp, Artificial
  Probe
aaggcttctaaaggaacaatcaaga

SEQ ID NO: 147481 - DNA, 25 bp, Artificial
  Probe
gtcatgttcacttaacctgctgatg

SEQ ID NO: 147482 - DNA, 25 bp, Artificial
  Probe
ttcacttaacctgctgatggaatcc

SEQ ID NO: 147483 - DNA, 25 bp, Artificial
  Probe
ttctctgtcactctcttcaccattt

SEQ ID NO: 147484 - DNA, 25 bp, Artificial
  Probe
tttctctgtcactctcttcaccatt

SEQ ID NO: 147485 - DNA, 25 bp, Artificial
  Probe
ggcttctaaaggaacaatcaagata

SEQ ID NO: 147486 - DNA, 25 bp, Artificial
  Probe
tgtcatgttcacttaacctgctgat

SEQ ID NO: 147487 - DNA, 25 bp, Artificial
  Probe
ctttctctgtcactctcttcaccat

SEQ ID NO: 147488 - DNA, 25 bp, Artificial
  Probe
ttgtcatgttcacttaacctgctga

SEQ ID NO: 147489 - DNA, 25 bp, Artificial
  Probe
atgaacagaggaaactgacatttgt

SEQ ID NO: 147490 - DNA, 25 bp, Artificial
  Probe
atttgtcatgttcacttaacctgct

SEQ ID NO: 147491 - DNA, 25 bp, Artificial
  Probe
catttgtcatgttcacttaacctgc

SEQ ID NO: 147492 - DNA, 25 bp, Artificial
  Probe
gtataatgaacagaggaaactgaca

SEQ ID NO: 147493 - DNA, 25 bp, Artificial
  Probe
tgtataatgaacagaggaaactgac

SEQ ID NO: 147494 - DNA, 25 bp, Artificial
  Probe
catgttcacttaacctgctgatgga

SEQ ID NO: 147495 - DNA, 25 bp, Artificial
  Probe
tcatgttcacttaacctgctgatgg

SEQ ID NO: 147496 - DNA, 25 bp, Artificial
  Probe
gaatccagcttcaagaacgtactct

SEQ ID NO: 147497 - DNA, 25 bp, Artificial
  Probe
tttgtcatgttcacttaacctgctg

SEQ ID NO: 147498 - DNA, 25 bp, Artificial
  Probe
ctagctttctctgtcactctcttca

SEQ ID NO: 147499 - DNA, 25 bp, Artificial
  Probe
tagctttctctgtcactctcttcac

SEQ ID NO: 147500 - DNA, 25 bp, Artificial
  Probe
aatgaacagaggaaactgacatttg

SEQ ID NO: 147501 - DNA, 25 bp, Artificial
  Probe
gcttctaaaggaacaatcaagatat

SEQ ID NO: 147502 - DNA, 25 bp, Artificial
  Probe
tataatgaacagaggaaactgacat

SEQ ID NO: 147503 - DNA, 25 bp, Artificial
  Probe
atgtataatgaacagaggaaactga

SEQ ID NO: 147504 - DNA, 25 bp, Artificial
  Probe
tgaacagaggaaactgacatttgtc

SEQ ID NO: 147505 - DNA, 25 bp, Artificial
  Probe
cttcaagaacgtactctgtactagg

SEQ ID NO: 147506 - DNA, 25 bp, Artificial
  Probe
gcttcaagaacgtactctgtactag

SEQ ID NO: 147507 - DNA, 25 bp, Artificial
  Probe
agcttcaagaacgtactctgtacta

SEQ ID NO: 147508 - DNA, 25 bp, Artificial
  Probe
taatgaacagaggaaactgacattt

SEQ ID NO: 147509 - DNA, 25 bp, Artificial
  Probe
aatccagcttcaagaacgtactctg

SEQ ID NO: 147510 - DNA, 25 bp, Artificial
  Probe
ataatgaacagaggaaactgacatt

SEQ ID NO: 147511 - DNA, 25 bp, Artificial
  Probe
ccacataaaaggcttctaaaggaac

SEQ ID NO: 147512 - DNA, 25 bp, Artificial
  Probe
ggaatccagcttcaagaacgtactc

SEQ ID NO: 147513 - DNA, 25 bp, Artificial
  Probe
cacataaaaggcttctaaaggaaca

SEQ ID NO: 147514 - DNA, 25 bp, Artificial
  Probe
aaaaggcttctaaaggaacaatcaa

SEQ ID NO: 147515 - DNA, 25 bp, Artificial
  Probe
ttcaagaacgtactctgtactaggc

SEQ ID NO: 147516 - DNA, 25 bp, Artificial
  Probe
gatggaatccagcttcaagaacgta

SEQ ID NO: 147517 - DNA, 25 bp, Artificial
  Probe
acataaaaggcttctaaaggaacaa

SEQ ID NO: 147518 - DNA, 25 bp, Artificial
  Probe
tccagcttcaagaacgtactctgta

SEQ ID NO: 147519 - DNA, 25 bp, Artificial
  Probe
acatttgtcatgttcacttaacctg

SEQ ID NO: 147520 - DNA, 25 bp, Artificial
  Probe
ctaaccatgtcagagtgagatgttg

SEQ ID NO: 147521 - DNA, 25 bp, Artificial
  Probe
actaaccatgtcagagtgagatgtt

SEQ ID NO: 147522 - DNA, 25 bp, Artificial
  Probe
aactaaccatgtcagagtgagatgt

SEQ ID NO: 147523 - DNA, 25 bp, Artificial
  Probe
gtgtttgtatggaagactgggataa

SEQ ID NO: 147524 - DNA, 25 bp, Artificial
  Probe
caacctatgacaccctgaatatctc

SEQ ID NO: 147525 - DNA, 25 bp, Artificial
  Probe
tgtttgtatggaagactgggataac

SEQ ID NO: 147526 - DNA, 25 bp, Artificial
  Probe
aacctatgacaccctgaatatctcc

SEQ ID NO: 147527 - DNA, 25 bp, Artificial
  Probe
ctatgacaccctgaatatctcctgg

SEQ ID NO: 147528 - DNA, 25 bp, Artificial
  Probe
cctatgacaccctgaatatctcctg

SEQ ID NO: 147529 - DNA, 25 bp, Artificial
  Probe
ggataacaggaaggaatttgtatgc

SEQ ID NO: 147530 - DNA, 25 bp, Artificial
  Probe
agtgtttgtatggaagactgggata

SEQ ID NO: 147531 - DNA, 25 bp, Artificial
  Probe
tagtgtttgtatggaagactgggat

SEQ ID NO: 147532 - DNA, 25 bp, Artificial
  Probe
cataagcacactgaccatcactgaa

SEQ ID NO: 147533 - DNA, 25 bp, Artificial
  Probe
tgggataacaggaaggaatttgtat

SEQ ID NO: 147534 - DNA, 25 bp, Artificial
  Probe
gtttgtatggaagactgggataaca

SEQ ID NO: 147535 - DNA, 25 bp, Artificial
  Probe
gggataacaggaaggaatttgtatg

SEQ ID NO: 147536 - DNA, 25 bp, Artificial
  Probe
acctatgacaccctgaatatctcct

SEQ ID NO: 147537 - DNA, 25 bp, Artificial
  Probe
ctgggataacaggaaggaatttgta

SEQ ID NO: 147538 - DNA, 25 bp, Artificial
  Probe
tttgtatggaagactgggataacag

SEQ ID NO: 147539 - DNA, 25 bp, Artificial
  Probe
gcaacctatgacaccctgaatatct

SEQ ID NO: 147540 - DNA, 25 bp, Artificial
  Probe
taaccatgtcagagtgagatgttgc

SEQ ID NO: 147541 - DNA, 25 bp, Artificial
  Probe
aaactaaccatgtcagagtgagatg

SEQ ID NO: 147542 - DNA, 25 bp, Artificial
  Probe
caaactaaccatgtcagagtgagat

SEQ ID NO: 147543 - DNA, 25 bp, Artificial
  Probe
gactgggataacaggaaggaatttg

SEQ ID NO: 147544 - DNA, 25 bp, Artificial
  Probe
agactgggataacaggaaggaattt

SEQ ID NO: 147545 - DNA, 25 bp, Artificial
  Probe
aagactgggataacaggaaggaatt

SEQ ID NO: 147546 - DNA, 25 bp, Artificial
  Probe
tatggaagactgggataacaggaag

SEQ ID NO: 147547 - DNA, 25 bp, Artificial
  Probe
ctagtgtttgtatggaagactggga

SEQ ID NO: 147548 - DNA, 25 bp, Artificial
  Probe
gtatggaagactgggataacaggaa

SEQ ID NO: 147549 - DNA, 25 bp, Artificial
  Probe
gaagactgggataacaggaaggaat

SEQ ID NO: 147550 - DNA, 25 bp, Artificial
  Probe
ttgtatggaagactgggataacagg

SEQ ID NO: 147551 - DNA, 25 bp, Artificial
  Probe
actgggataacaggaaggaatttgt

SEQ ID NO: 147552 - DNA, 25 bp, Artificial
  Probe
ataagcacactgaccatcactgaaa

SEQ ID NO: 147553 - DNA, 25 bp, Artificial
  Probe
tcataagcacactgaccatcactga

SEQ ID NO: 147554 - DNA, 25 bp, Artificial
  Probe
ggcaacctatgacaccctgaatatc

SEQ ID NO: 147555 - DNA, 25 bp, Artificial
  Probe
tgtggctagtgtttgtatggaagac

SEQ ID NO: 147556 - DNA, 25 bp, Artificial
  Probe
gtgtggctagtgtttgtatggaaga

SEQ ID NO: 147557 - DNA, 25 bp, Artificial
  Probe
tgtatgcaaactaaccatgtcagag

SEQ ID NO: 147558 - DNA, 25 bp, Artificial
  Probe
tggctagtgtttgtatggaagactg

SEQ ID NO: 147559 - DNA, 25 bp, Artificial
  Probe
gtggctagtgtttgtatggaagact

SEQ ID NO: 147560 - DNA, 25 bp, Artificial
  Probe
cctgaatatctcctggtcttccaaa

SEQ ID NO: 147561 - DNA, 25 bp, Artificial
  Probe
aaggaatttgtatgcactgtgactc

SEQ ID NO: 147562 - DNA, 25 bp, Artificial
  Probe
gaaggaatttgtatgcactgtgact

SEQ ID NO: 147563 - DNA, 25 bp, Artificial
  Probe
gtgtatgcaaactaaccatgtcaga

SEQ ID NO: 147564 - DNA, 25 bp, Artificial
  Probe
tctgtgtatgcaaactaaccatgtc

SEQ ID NO: 147565 - DNA, 25 bp, Artificial
  Probe
gacttagagtgtgtgagttggtaac

SEQ ID NO: 147566 - DNA, 25 bp, Artificial
  Probe
aataagtgttctaagacctctgaca

SEQ ID NO: 147567 - DNA, 25 bp, Artificial
  Probe
ggacttagagtgtgtgagttggtaa

SEQ ID NO: 147568 - DNA, 25 bp, Artificial
  Probe
ttgttcacaccattggagagtatga

SEQ ID NO: 147569 - DNA, 25 bp, Artificial
  Probe
gttctaagacctctgacaccgaatc

SEQ ID NO: 147570 - DNA, 25 bp, Artificial
  Probe
aggacttagagtgtgtgagttggta

SEQ ID NO: 147571 - DNA, 25 bp, Artificial
  Probe
cgaatccgtgtaaacctgttaaatg

SEQ ID NO: 147572 - DNA, 25 bp, Artificial
  Probe
gaatccgtgtaaacctgttaaatgc

SEQ ID NO: 147573 - DNA, 25 bp, Artificial
  Probe
atctggtttacctcaaagtcacaaa

SEQ ID NO: 147574 - DNA, 25 bp, Artificial
  Probe
ctttgttcacaccattggagagtat

SEQ ID NO: 147575 - DNA, 25 bp, Artificial
  Probe
tctggtttacctcaaagtcacaaag

SEQ ID NO: 147576 - DNA, 25 bp, Artificial
  Probe
ccgaatccgtgtaaacctgttaaat

SEQ ID NO: 147577 - DNA, 25 bp, Artificial
  Probe
aaataagtgttctaagacctctgac

SEQ ID NO: 147578 - DNA, 25 bp, Artificial
  Probe
gatctggtttacctcaaagtcacaa

SEQ ID NO: 147579 - DNA, 25 bp, Artificial
  Probe
tttgttcacaccattggagagtatg

SEQ ID NO: 147580 - DNA, 25 bp, Artificial
  Probe
ttccaggacttagagtgtgtgagtt

SEQ ID NO: 147581 - DNA, 25 bp, Artificial
  Probe
aatccgtgtaaacctgttaaatgcc

SEQ ID NO: 147582 - DNA, 25 bp, Artificial
  Probe
taaacctgttaaatgccatgtgttc

SEQ ID NO: 147583 - DNA, 25 bp, Artificial
  Probe
gtgtaaacctgttaaatgccatgtg

SEQ ID NO: 147584 - DNA, 25 bp, Artificial
  Probe
gtaaacctgttaaatgccatgtgtt

SEQ ID NO: 147585 - DNA, 25 bp, Artificial
  Probe
tgttctaagacctctgacaccgaat

SEQ ID NO: 147586 - DNA, 25 bp, Artificial
  Probe
tgtaaacctgttaaatgccatgtgt

SEQ ID NO: 147587 - DNA, 25 bp, Artificial
  Probe
ttaaactgctgtgaactttgtcatg

SEQ ID NO: 147588 - DNA, 25 bp, Artificial
  Probe
ttctaagacctctgacaccgaatcc

SEQ ID NO: 147589 - DNA, 25 bp, Artificial
  Probe
atgtgttccaggacttagagtgtgt

SEQ ID NO: 147590 - DNA, 25 bp, Artificial
  Probe
catgtgttccaggacttagagtgtg

SEQ ID NO: 147591 - DNA, 25 bp, Artificial
  Probe
acttagagtgtgtgagttggtaact

SEQ ID NO: 147592 - DNA, 25 bp, Artificial
  Probe
agagcataattagtgaagatctggt

SEQ ID NO: 147593 - DNA, 25 bp, Artificial
  Probe
ttgaccatatccatgtgtgtgtgtg

SEQ ID NO: 147594 - DNA, 25 bp, Artificial
  Probe
gagcataattagtgaagatctggtt

SEQ ID NO: 147595 - DNA, 25 bp, Artificial
  Probe
cctttaaactgctgtgaactttgtc

SEQ ID NO: 147596 - DNA, 25 bp, Artificial
  Probe
accgaatccgtgtaaacctgttaaa

SEQ ID NO: 147597 - DNA, 25 bp, Artificial
  Probe
gagagcataattagtgaagatctgg

SEQ ID NO: 147598 - DNA, 25 bp, Artificial
  Probe
ctggtttacctcaaagtcacaaagc

SEQ ID NO: 147599 - DNA, 25 bp, Artificial
  Probe
tttaaactgctgtgaactttgtcat

SEQ ID NO: 147600 - DNA, 25 bp, Artificial
  Probe
ctttaaactgctgtgaactttgtca

SEQ ID NO: 147601 - DNA, 25 bp, Artificial
  Probe
taaatgccatgtgttccaggactta

SEQ ID NO: 147602 - DNA, 25 bp, Artificial
  Probe
atatccatgtgtgtgtgtgtgtgtg

SEQ ID NO: 147603 - DNA, 25 bp, Artificial
  Probe
tccaggacttagagtgtgtgagttg

SEQ ID NO: 147604 - DNA, 25 bp, Artificial
  Probe
gttccaggacttagagtgtgtgagt

SEQ ID NO: 147605 - DNA, 25 bp, Artificial
  Probe
tgttccaggacttagagtgtgtgag

SEQ ID NO: 147606 - DNA, 25 bp, Artificial
  Probe
tgttcacaccattggagagtatgaa

SEQ ID NO: 147607 - DNA, 25 bp, Artificial
  Probe
catatccatgtgtgtgtgtgtgtgt

SEQ ID NO: 147608 - DNA, 25 bp, Artificial
  Probe
cgtgtaaacctgttaaatgccatgt

SEQ ID NO: 147609 - DNA, 25 bp, Artificial
  Probe
tccgtgtaaacctgttaaatgccat

SEQ ID NO: 147610 - DNA, 25 bp, Artificial
  Probe
tatgtatgtgtgtctgtagttggtc

SEQ ID NO: 147611 - DNA, 25 bp, Artificial
  Probe
atatgtatgtgtgtctgtagttggt

SEQ ID NO: 147612 - DNA, 25 bp, Artificial
  Probe
atgtatgtgtgtctgtagttggtct

SEQ ID NO: 147613 - DNA, 25 bp, Artificial
  Probe
tatatgtatgtgtgtctgtagttgg

SEQ ID NO: 147614 - DNA, 25 bp, Artificial
  Probe
cattcctaagtaaacttctgccttt

SEQ ID NO: 147615 - DNA, 25 bp, Artificial
  Probe
ctgtgtgtgtgtgtgtgtgtatgtg

SEQ ID NO: 147616 - DNA, 25 bp, Artificial
  Probe
ttggtttacctcaaagtcacaaagc

SEQ ID NO: 147617 - DNA, 25 bp, Artificial
  Probe
atatatgtatgtgtgtctgtagttg

SEQ ID NO: 147618 - DNA, 25 bp, Artificial
  Probe
ttggcacaacagtgacaaacttaaa

SEQ ID NO: 147619 - DNA, 25 bp, Artificial
  Probe
atcagaagagggaagaaacatatgc

SEQ ID NO: 147620 - DNA, 25 bp, Artificial
  Probe
atatgctgtgctcctcagtgctaat

SEQ ID NO: 147621 - DNA, 25 bp, Artificial
  Probe
tttggtttacctcaaagtcacaaag

SEQ ID NO: 147622 - DNA, 25 bp, Artificial
  Probe
gatttggtttacctcaaagtcacaa

SEQ ID NO: 147623 - DNA, 25 bp, Artificial
  Probe
aagatttggtttacctcaaagtcac

SEQ ID NO: 147624 - DNA, 25 bp, Artificial
  Probe
atttggtttacctcaaagtcacaaa

SEQ ID NO: 147625 - DNA, 25 bp, Artificial
  Probe
agatttggtttacctcaaagtcaca

SEQ ID NO: 147626 - DNA, 25 bp, Artificial
  Probe
gaagatttggtttacctcaaagtca

SEQ ID NO: 147627 - DNA, 25 bp, Artificial
  Probe
tgaagatttggtttacctcaaagtc

SEQ ID NO: 147628 - DNA, 25 bp, Artificial
  Probe
tttacaacatggctcagtcatcctc

SEQ ID NO: 147629 - DNA, 25 bp, Artificial
  Probe
tcagaagagggaagaaacatatgct

SEQ ID NO: 147630 - DNA, 25 bp, Artificial
  Probe
atgaagatttggtttacctcaaagt

SEQ ID NO: 147631 - DNA, 25 bp, Artificial
  Probe
aattggtgtggtatcaaagtgtttt

SEQ ID NO: 147632 - DNA, 25 bp, Artificial
  Probe
tattgttaagcaaattccccatcac

SEQ ID NO: 147633 - DNA, 25 bp, Artificial
  Probe
acagtgacaaacttaaaagccaaat

SEQ ID NO: 147634 - DNA, 25 bp, Artificial
  Probe
aacagtgacaaacttaaaagccaaa

SEQ ID NO: 147635 - DNA, 25 bp, Artificial
  Probe
ttaatgaagatttggtttacctcaa

SEQ ID NO: 147636 - DNA, 25 bp, Artificial
  Probe
aattccccatcaccttgaaactaat

SEQ ID NO: 147637 - DNA, 25 bp, Artificial
  Probe
attccccatcaccttgaaactaatc

SEQ ID NO: 147638 - DNA, 25 bp, Artificial
  Probe
aaattccccatcaccttgaaactaa

SEQ ID NO: 147639 - DNA, 25 bp, Artificial
  Probe
ttattgttaagcaaattccccatca

SEQ ID NO: 147640 - DNA, 25 bp, Artificial
  Probe
ttacaacatggctcagtcatcctcc

SEQ ID NO: 147641 - DNA, 25 bp, Artificial
  Probe
caacagtgacaaacttaaaagccaa

SEQ ID NO: 147642 - DNA, 25 bp, Artificial
  Probe
gcattcctaagtaaacttctgcctt

SEQ ID NO: 147643 - DNA, 25 bp, Artificial
  Probe
caaattccccatcaccttgaaacta

SEQ ID NO: 147644 - DNA, 25 bp, Artificial
  Probe
caattggtgtggtatcaaagtgttt

SEQ ID NO: 147645 - DNA, 25 bp, Artificial
  Probe
aatgaagatttggtttacctcaaag

SEQ ID NO: 147646 - DNA, 25 bp, Artificial
  Probe
tttggcacaacagtgacaaacttaa

SEQ ID NO: 147647 - DNA, 25 bp, Artificial
  Probe
cagtgacaaacttaaaagccaaata

SEQ ID NO: 147648 - DNA, 25 bp, Artificial
  Probe
aaatttatcaaactccagttaggga

SEQ ID NO: 147649 - DNA, 25 bp, Artificial
  Probe
gaagagggaagaaacatatgctgtg

SEQ ID NO: 147650 - DNA, 25 bp, Artificial
  Probe
cagaagagggaagaaacatatgctg

SEQ ID NO: 147651 - DNA, 25 bp, Artificial
  Probe
agagcataattaatgaagatttggt

SEQ ID NO: 147652 - DNA, 25 bp, Artificial
  Probe
taaacttctgccttttacaacatgg

SEQ ID NO: 147653 - DNA, 25 bp, Artificial
  Probe
gggtttgcattcctaagtaaacttc

SEQ ID NO: 147654 - DNA, 25 bp, Artificial
  Probe
agaagagggaagaaacatatgctgt

SEQ ID NO: 147655 - DNA, 25 bp, Artificial
  Probe
atctctctcttatccacacttccta

SEQ ID NO: 147656 - DNA, 25 bp, Artificial
  Probe
catctctctcttatccacacttcct

SEQ ID NO: 147657 - DNA, 25 bp, Artificial
  Probe
tccatctctctcttatccacacttc

SEQ ID NO: 147658 - DNA, 25 bp, Artificial
  Probe
ctgaagtccatctctctcttatcca

SEQ ID NO: 147659 - DNA, 25 bp, Artificial
  Probe
tctctctcttatccacacttcctag

SEQ ID NO: 147660 - DNA, 25 bp, Artificial
  Probe
gtccatctctctcttatccacactt

SEQ ID NO: 147661 - DNA, 25 bp, Artificial
  Probe
actgaagtccatctctctcttatcc

SEQ ID NO: 147662 - DNA, 25 bp, Artificial
  Probe
gaagtccatctctctcttatccaca

SEQ ID NO: 147663 - DNA, 25 bp, Artificial
  Probe
tgaagtccatctctctcttatccac

SEQ ID NO: 147664 - DNA, 25 bp, Artificial
  Probe
aagtccatctctctcttatccacac

SEQ ID NO: 147665 - DNA, 25 bp, Artificial
  Probe
ccatctctctcttatccacacttcc

SEQ ID NO: 147666 - DNA, 25 bp, Artificial
  Probe
ctctctcttatccacacttcctagc

SEQ ID NO: 147667 - DNA, 25 bp, Artificial
  Probe
catactgtctccaagagcaattctg

SEQ ID NO: 147668 - DNA, 25 bp, Artificial
  Probe
atactgtctccaagagcaattctgt

SEQ ID NO: 147669 - DNA, 25 bp, Artificial
  Probe
agtccatctctctcttatccacact

SEQ ID NO: 147670 - DNA, 25 bp, Artificial
  Probe
agactgaagtccatctctctcttat

SEQ ID NO: 147671 - DNA, 25 bp, Artificial
  Probe
gactgaagtccatctctctcttatc

SEQ ID NO: 147672 - DNA, 25 bp, Artificial
  Probe
tactgtctccaagagcaattctgtc

SEQ ID NO: 147673 - DNA, 25 bp, Artificial
  Probe
tccctctgtttaatgaatctgactt

SEQ ID NO: 147674 - DNA, 25 bp, Artificial
  Probe
atccctctgtttaatgaatctgact

SEQ ID NO: 147675 - DNA, 25 bp, Artificial
  Probe
atgttacagttcctctttacctcag

SEQ ID NO: 147676 - DNA, 25 bp, Artificial
  Probe
ttcccaatgttacagttcctcttta

SEQ ID NO: 147677 - DNA, 25 bp, Artificial
  Probe
aatgttacagttcctctttacctca

SEQ ID NO: 147678 - DNA, 25 bp, Artificial
  Probe
ccaatgttacagttcctctttacct

SEQ ID NO: 147679 - DNA, 25 bp, Artificial
  Probe
tcccaatgttacagttcctctttac

SEQ ID NO: 147680 - DNA, 25 bp, Artificial
  Probe
caatgttacagttcctctttacctc

SEQ ID NO: 147681 - DNA, 25 bp, Artificial
  Probe
aaagaaagaagtgcttaatgcttgt

SEQ ID NO: 147682 - DNA, 25 bp, Artificial
  Probe
agaaagaagtgcttaatgcttgtag

SEQ ID NO: 147683 - DNA, 25 bp, Artificial
  Probe
ccctctgtttaatgaatctgacttt

SEQ ID NO: 147684 - DNA, 25 bp, Artificial
  Probe
cttcccaatgttacagttcctcttt

SEQ ID NO: 147685 - DNA, 25 bp, Artificial
  Probe
agggaattgaaccacagatgtaaag

SEQ ID NO: 147686 - DNA, 25 bp, Artificial
  Probe
aagaaagaagtgcttaatgcttgta

SEQ ID NO: 147687 - DNA, 25 bp, Artificial
  Probe
ctctcttatccacacttcctagctg

SEQ ID NO: 147688 - DNA, 25 bp, Artificial
  Probe
tctctcttatccacacttcctagct

SEQ ID NO: 147689 - DNA, 25 bp, Artificial
  Probe
gagggaattgaaccacagatgtaaa

SEQ ID NO: 147690 - DNA, 25 bp, Artificial
  Probe
aatccctctgtttaatgaatctgac

SEQ ID NO: 147691 - DNA, 25 bp, Artificial
  Probe
caatccctctgtttaatgaatctga

SEQ ID NO: 147692 - DNA, 25 bp, Artificial
  Probe
cccaatgttacagttcctctttacc

SEQ ID NO: 147693 - DNA, 25 bp, Artificial
  Probe
cccatcaatccctctgtttaatgaa

SEQ ID NO: 147694 - DNA, 25 bp, Artificial
  Probe
ccatcaatccctctgtttaatgaat

SEQ ID NO: 147695 - DNA, 25 bp, Artificial
  Probe
agagggaattgaaccacagatgtaa

SEQ ID NO: 147696 - DNA, 25 bp, Artificial
  Probe
gaattgaaccacagatgtaaaggca

SEQ ID NO: 147697 - DNA, 25 bp, Artificial
  Probe
tcaatccctctgtttaatgaatctg

SEQ ID NO: 147698 - DNA, 25 bp, Artificial
  Probe
gggaattgaaccacagatgtaaagg

SEQ ID NO: 147699 - DNA, 25 bp, Artificial
  Probe
aattgaaccacagatgtaaaggcac

SEQ ID NO: 147700 - DNA, 25 bp, Artificial
  Probe
ttattactggctggtgctctaaatc

SEQ ID NO: 147701 - DNA, 25 bp, Artificial
  Probe
gttattactggctggtgctctaaat

SEQ ID NO: 147702 - DNA, 25 bp, Artificial
  Probe
tattactggctggtgctctaaatcc

SEQ ID NO: 147703 - DNA, 25 bp, Artificial
  Probe
attactggctggtgctctaaatccc

SEQ ID NO: 147704 - DNA, 25 bp, Artificial
  Probe
gaagttctcaggttcaatctcacag

SEQ ID NO: 147705 - DNA, 25 bp, Artificial
  Probe
tagaagttctcaggttcaatctcac

SEQ ID NO: 147706 - DNA, 25 bp, Artificial
  Probe
ctagaagttctcaggttcaatctca

SEQ ID NO: 147707 - DNA, 25 bp, Artificial
  Probe
aagttctcaggttcaatctcacaga

SEQ ID NO: 147708 - DNA, 25 bp, Artificial
  Probe
aattgaggaactgactacaccttac

SEQ ID NO: 147709 - DNA, 25 bp, Artificial
  Probe
agaagttctcaggttcaatctcaca

SEQ ID NO: 147710 - DNA, 25 bp, Artificial
  Probe
attgaggaactgactacaccttact

SEQ ID NO: 147711 - DNA, 25 bp, Artificial
  Probe
tagacagtgacatcgactatctctg

SEQ ID NO: 147712 - DNA, 25 bp, Artificial
  Probe
ttgaggaactgactacaccttactt

SEQ ID NO: 147713 - DNA, 25 bp, Artificial
  Probe
cacagagagctatgagacagacatc

SEQ ID NO: 147714 - DNA, 25 bp, Artificial
  Probe
agttctcaggttcaatctcacagag

SEQ ID NO: 147715 - DNA, 25 bp, Artificial
  Probe
tgaggaactgactacaccttacttc

SEQ ID NO: 147716 - DNA, 25 bp, Artificial
  Probe
ctttgaccctgattacacatttgag

SEQ ID NO: 147717 - DNA, 25 bp, Artificial
  Probe
tacacatttgagtctgagttctacg

SEQ ID NO: 147718 - DNA, 25 bp, Artificial
  Probe
cttagacagtgacatcgactatctc

SEQ ID NO: 147719 - DNA, 25 bp, Artificial
  Probe
cctgattacacatttgagtctgagt

SEQ ID NO: 147720 - DNA, 25 bp, Artificial
  Probe
ttagacagtgacatcgactatctct

SEQ ID NO: 147721 - DNA, 25 bp, Artificial
  Probe
tttgaccctgattacacatttgagt

SEQ ID NO: 147722 - DNA, 25 bp, Artificial
  Probe
tgtataacccaaccttcaaactctg

SEQ ID NO: 147723 - DNA, 25 bp, Artificial
  Probe
gtgtataacccaaccttcaaactct

SEQ ID NO: 147724 - DNA, 25 bp, Artificial
  Probe
ctctgtgtataacccaaccttcaaa

SEQ ID NO: 147725 - DNA, 25 bp, Artificial
  Probe
tgtgtataacccaaccttcaaactc

SEQ ID NO: 147726 - DNA, 25 bp, Artificial
  Probe
ctgtgtataacccaaccttcaaact

SEQ ID NO: 147727 - DNA, 25 bp, Artificial
  Probe
tctgtgtataacccaaccttcaaac

SEQ ID NO: 147728 - DNA, 25 bp, Artificial
  Probe
tgattacacatttgagtctgagttc

SEQ ID NO: 147729 - DNA, 25 bp, Artificial
  Probe
ctgattacacatttgagtctgagtt

SEQ ID NO: 147730 - DNA, 25 bp, Artificial
  Probe
atctctgtgtataacccaaccttca

SEQ ID NO: 147731 - DNA, 25 bp, Artificial
  Probe
ccctgattacacatttgagtctgag

SEQ ID NO: 147732 - DNA, 25 bp, Artificial
  Probe
ttggactgtaatgtcaggttctcag

SEQ ID NO: 147733 - DNA, 25 bp, Artificial
  Probe
atctaatagttctacccaggtccat

SEQ ID NO: 147734 - DNA, 25 bp, Artificial
  Probe
tcacagagagctatgagacagacat

SEQ ID NO: 147735 - DNA, 25 bp, Artificial
  Probe
ctgcatgtggatctctgtgtataac

SEQ ID NO: 147736 - DNA, 25 bp, Artificial
  Probe
gattacacatttgagtctgagttct

SEQ ID NO: 147737 - DNA, 25 bp, Artificial
  Probe
cctttgaccctgattacacatttga

SEQ ID NO: 147738 - DNA, 25 bp, Artificial
  Probe
tctctgtgtataacccaaccttcaa

SEQ ID NO: 147739 - DNA, 25 bp, Artificial
  Probe
tatctaatagttctacccaggtcca

SEQ ID NO: 147740 - DNA, 25 bp, Artificial
  Probe
aggttatccatttccactgactata

SEQ ID NO: 147741 - DNA, 25 bp, Artificial
  Probe
ttacacatttgagtctgagttctac

SEQ ID NO: 147742 - DNA, 25 bp, Artificial
  Probe
ataacccaaccttcaaactctgatt

SEQ ID NO: 147743 - DNA, 25 bp, Artificial
  Probe
tataacccaaccttcaaactctgat

SEQ ID NO: 147744 - DNA, 25 bp, Artificial
  Probe
gtataacccaaccttcaaactctga

SEQ ID NO: 147745 - DNA, 25 bp, Artificial
  Probe
gtttctgaacctggaatctgtcttt

SEQ ID NO: 147746 - DNA, 25 bp, Artificial
  Probe
accctgattacacatttgagtctga

SEQ ID NO: 147747 - DNA, 25 bp, Artificial
  Probe
atcaatgacagtgtgagaaatcaga

SEQ ID NO: 147748 - DNA, 25 bp, Artificial
  Probe
catcaatgacagtgtgagaaatcag

SEQ ID NO: 147749 - DNA, 25 bp, Artificial
  Probe
cttcctgaagatgtccttgatgtac

SEQ ID NO: 147750 - DNA, 25 bp, Artificial
  Probe
agatcatgtcttcactcaagtctgt

SEQ ID NO: 147751 - DNA, 25 bp, Artificial
  Probe
gagatcatgtcttcactcaagtctg

SEQ ID NO: 147752 - DNA, 25 bp, Artificial
  Probe
ctatggcaatcctgatcttcctgaa

SEQ ID NO: 147753 - DNA, 25 bp, Artificial
  Probe
tatggcaatcctgatcttcctgaag

SEQ ID NO: 147754 - DNA, 25 bp, Artificial
  Probe
ttggtttggagaatctatgaatggt

SEQ ID NO: 147755 - DNA, 25 bp, Artificial
  Probe
atcaacactgaggagatcatgtctt

SEQ ID NO: 147756 - DNA, 25 bp, Artificial
  Probe
tttggtttggagaatctatgaatgg

SEQ ID NO: 147757 - DNA, 25 bp, Artificial
  Probe
tggtttggagaatctatgaatggtg

SEQ ID NO: 147758 - DNA, 25 bp, Artificial
  Probe
ggagatcatgtcttcactcaagtct

SEQ ID NO: 147759 - DNA, 25 bp, Artificial
  Probe
aggagatcatgtcttcactcaagtc

SEQ ID NO: 147760 - DNA, 25 bp, Artificial
  Probe
gaggagatcatgtcttcactcaagt

SEQ ID NO: 147761 - DNA, 25 bp, Artificial
  Probe
ggtttggagaatctatgaatggtgg

SEQ ID NO: 147762 - DNA, 25 bp, Artificial
  Probe
tgtttggtttggagaatctatgaat

SEQ ID NO: 147763 - DNA, 25 bp, Artificial
  Probe
atgtttggtttggagaatctatgaa

SEQ ID NO: 147764 - DNA, 25 bp, Artificial
  Probe
tcaacactgaggagatcatgtcttc

SEQ ID NO: 147765 - DNA, 25 bp, Artificial
  Probe
gtttggtttggagaatctatgaatg

SEQ ID NO: 147766 - DNA, 25 bp, Artificial
  Probe
ccaatggatttcaagatcaacactg

SEQ ID NO: 147767 - DNA, 25 bp, Artificial
  Probe
aacactgaggagatcatgtcttcac

SEQ ID NO: 147768 - DNA, 25 bp, Artificial
  Probe
caacactgaggagatcatgtcttca

SEQ ID NO: 147769 - DNA, 25 bp, Artificial
  Probe
cactgaggagatcatgtcttcactc

SEQ ID NO: 147770 - DNA, 25 bp, Artificial
  Probe
atttcaagatcaacactgaggagat

SEQ ID NO: 147771 - DNA, 25 bp, Artificial
  Probe
caatggatttcaagatcaacactga

SEQ ID NO: 147772 - DNA, 25 bp, Artificial
  Probe
catgtttggtttggagaatctatga

SEQ ID NO: 147773 - DNA, 25 bp, Artificial
  Probe
gatttcaagatcaacactgaggaga

SEQ ID NO: 147774 - DNA, 25 bp, Artificial
  Probe
aatggatttcaagatcaacactgag

SEQ ID NO: 147775 - DNA, 25 bp, Artificial
  Probe
atggatttcaagatcaacactgagg

SEQ ID NO: 147776 - DNA, 25 bp, Artificial
  Probe
tcaagatcaacactgaggagatcat

SEQ ID NO: 147777 - DNA, 25 bp, Artificial
  Probe
ggatttcaagatcaacactgaggag

SEQ ID NO: 147778 - DNA, 25 bp, Artificial
  Probe
ttcaagatcaacactgaggagatca

SEQ ID NO: 147779 - DNA, 25 bp, Artificial
  Probe
acactgaggagatcatgtcttcact

SEQ ID NO: 147780 - DNA, 25 bp, Artificial
  Probe
caagatcaacactgaggagatcatg

SEQ ID NO: 147781 - DNA, 25 bp, Artificial
  Probe
aagatcaacactgaggagatcatgt

SEQ ID NO: 147782 - DNA, 25 bp, Artificial
  Probe
tggatttcaagatcaacactgagga

SEQ ID NO: 147783 - DNA, 25 bp, Artificial
  Probe
tcttcctgaagatgtccttgatgta

SEQ ID NO: 147784 - DNA, 25 bp, Artificial
  Probe
gatcaacactgaggagatcatgtct

SEQ ID NO: 147785 - DNA, 25 bp, Artificial
  Probe
agatcaacactgaggagatcatgtc

SEQ ID NO: 147786 - DNA, 25 bp, Artificial
  Probe
tttaccaattccaacttcataatgt

SEQ ID NO: 147787 - DNA, 25 bp, Artificial
  Probe
tccaatggatttcaagatcaacact

SEQ ID NO: 147788 - DNA, 25 bp, Artificial
  Probe
gctatggcaatcctgatcttcctga

SEQ ID NO: 147789 - DNA, 25 bp, Artificial
  Probe
gatggatgctataaaagtgttctgt

SEQ ID NO: 147790 - DNA, 25 bp, Artificial
  Probe
ttcctgaagatgtccttgatgtaca

SEQ ID NO: 147791 - DNA, 25 bp, Artificial
  Probe
tttcaagatcaacactgaggagatc

SEQ ID NO: 147792 - DNA, 25 bp, Artificial
  Probe
agatggatgctataaaagtgttctg

SEQ ID NO: 147793 - DNA, 25 bp, Artificial
  Probe
cttttcaccatattacggggatgat

SEQ ID NO: 147794 - DNA, 25 bp, Artificial
  Probe
ttctcatcatgtgcaactctgtcat

SEQ ID NO: 147795 - DNA, 25 bp, Artificial
  Probe
cttcaacacctacctggttctcatc

SEQ ID NO: 147796 - DNA, 25 bp, Artificial
  Probe
ggaacaccttcaaggagattctctg

SEQ ID NO: 147797 - DNA, 25 bp, Artificial
  Probe
tctcatcatgtgcaactctgtcatc

SEQ ID NO: 147798 - DNA, 25 bp, Artificial
  Probe
tcaacacctacctggttctcatcat

SEQ ID NO: 147799 - DNA, 25 bp, Artificial
  Probe
ttcaacacctacctggttctcatca

SEQ ID NO: 147800 - DNA, 25 bp, Artificial
  Probe
acttcaacacctacctggttctcat

SEQ ID NO: 147801 - DNA, 25 bp, Artificial
  Probe
caacacctacctggttctcatcatg

SEQ ID NO: 147802 - DNA, 25 bp, Artificial
  Probe
gttctcatcatgtgcaactctgtca

SEQ ID NO: 147803 - DNA, 25 bp, Artificial
  Probe
gaacaccttcaaggagattctctgc

SEQ ID NO: 147804 - DNA, 25 bp, Artificial
  Probe
aacacctacctggttctcatcatgt

SEQ ID NO: 147805 - DNA, 25 bp, Artificial
  Probe
ctacctggttctcatcatgtgcaac

SEQ ID NO: 147806 - DNA, 25 bp, Artificial
  Probe
tgatgttcatcgtctactccgagag

SEQ ID NO: 147807 - DNA, 25 bp, Artificial
  Probe
ctactccgagagcaagatggtcatc

SEQ ID NO: 147808 - DNA, 25 bp, Artificial
  Probe
ggttctcatcatgtgcaactctgtc

SEQ ID NO: 147809 - DNA, 25 bp, Artificial
  Probe
ctggttctcatcatgtgcaactctg

SEQ ID NO: 147810 - DNA, 25 bp, Artificial
  Probe
tctactccgagagcaagatggtcat

SEQ ID NO: 147811 - DNA, 25 bp, Artificial
  Probe
ctcatcatgtgcaactctgtcatcg

SEQ ID NO: 147812 - DNA, 25 bp, Artificial
  Probe
cacttcaacacctacctggttctca

SEQ ID NO: 147813 - DNA, 25 bp, Artificial
  Probe
tacctggttctcatcatgtgcaact

SEQ ID NO: 147814 - DNA, 25 bp, Artificial
  Probe
gtgatgttcatcgtctactccgaga

SEQ ID NO: 147815 - DNA, 25 bp, Artificial
  Probe
cggaacaccttcaaggagattctct

SEQ ID NO: 147816 - DNA, 25 bp, Artificial
  Probe
acacctacctggttctcatcatgtg

SEQ ID NO: 147817 - DNA, 25 bp, Artificial
  Probe
tcatcatgtgcaactctgtcatcga

SEQ ID NO: 147818 - DNA, 25 bp, Artificial
  Probe
cctacctggttctcatcatgtgcaa

SEQ ID NO: 147819 - DNA, 25 bp, Artificial
  Probe
tggttctcatcatgtgcaactctgt

SEQ ID NO: 147820 - DNA, 25 bp, Artificial
  Probe
catcatgtgcaactctgtcatcgac

SEQ ID NO: 147821 - DNA, 25 bp, Artificial
  Probe
aacaccttcaaggagattctctgcg

SEQ ID NO: 147822 - DNA, 25 bp, Artificial
  Probe
cctggttctcatcatgtgcaactct

SEQ ID NO: 147823 - DNA, 25 bp, Artificial
  Probe
gatgttcatcgtctactccgagagc

SEQ ID NO: 147824 - DNA, 25 bp, Artificial
  Probe
tcatcgtctactccgagagcaagat

SEQ ID NO: 147825 - DNA, 25 bp, Artificial
  Probe
gttcatcgtctactccgagagcaag

SEQ ID NO: 147826 - DNA, 25 bp, Artificial
  Probe
acctggttctcatcatgtgcaactc

SEQ ID NO: 147827 - DNA, 25 bp, Artificial
  Probe
cgtgatgttcatcgtctactccgag

SEQ ID NO: 147828 - DNA, 25 bp, Artificial
  Probe
ttcatcgtctactccgagagcaaga

SEQ ID NO: 147829 - DNA, 25 bp, Artificial
  Probe
catcgtctactccgagagcaagatg

SEQ ID NO: 147830 - DNA, 25 bp, Artificial
  Probe
gttaccacagcatcatgacggttag

SEQ ID NO: 147831 - DNA, 25 bp, Artificial
  Probe
cctgtacatccacatgttcctcttc

SEQ ID NO: 147832 - DNA, 25 bp, Artificial
  Probe
ctgtacatccacatgttcctcttcg

SEQ ID NO: 147833 - DNA, 25 bp, Artificial
  Probe
cacagcatcatgacggttaggaaag

SEQ ID NO: 147834 - DNA, 25 bp, Artificial
  Probe
ttaccacagcatcatgacggttagg

SEQ ID NO: 147835 - DNA, 25 bp, Artificial
  Probe
tagccaagagagaaaagcaatgctc

SEQ ID NO: 147836 - DNA, 25 bp, Artificial
  Probe
ctagccaagagagaaaagcaatgct

SEQ ID NO: 147837 - DNA, 25 bp, Artificial
  Probe
aagagagaaaagcaatgctcaggtg

SEQ ID NO: 147838 - DNA, 25 bp, Artificial
  Probe
caagagagaaaagcaatgctcaggt

SEQ ID NO: 147839 - DNA, 25 bp, Artificial
  Probe
tagaagaataggagccagagtgtat

SEQ ID NO: 147840 - DNA, 25 bp, Artificial
  Probe
aacagaagaagacaagcacaataac

SEQ ID NO: 147841 - DNA, 25 bp, Artificial
  Probe
ctaacagaagaagacaagcacaata

SEQ ID NO: 147842 - DNA, 25 bp, Artificial
  Probe
ttaactatgaccttgtgaagactgg

SEQ ID NO: 147843 - DNA, 25 bp, Artificial
  Probe
gcattaactatgaccttgtgaagac

SEQ ID NO: 147844 - DNA, 25 bp, Artificial
  Probe
tctaacagaagaagacaagcacaat

SEQ ID NO: 147845 - DNA, 25 bp, Artificial
  Probe
atctaacagaagaagacaagcacaa

SEQ ID NO: 147846 - DNA, 25 bp, Artificial
  Probe
aatctaacagaagaagacaagcaca

SEQ ID NO: 147847 - DNA, 25 bp, Artificial
  Probe
agaagaataggagccagagtgtatg

SEQ ID NO: 147848 - DNA, 25 bp, Artificial
  Probe
taacagaagaagacaagcacaataa

SEQ ID NO: 147849 - DNA, 25 bp, Artificial
  Probe
taactatgaccttgtgaagactgga

SEQ ID NO: 147850 - DNA, 25 bp, Artificial
  Probe
ctagaagaataggagccagagtgta

SEQ ID NO: 147851 - DNA, 25 bp, Artificial
  Probe
attaactatgaccttgtgaagactg

SEQ ID NO: 147852 - DNA, 25 bp, Artificial
  Probe
cattaactatgaccttgtgaagact

SEQ ID NO: 147853 - DNA, 25 bp, Artificial
  Probe
acagaagaagacaagcacaataacg

SEQ ID NO: 147854 - DNA, 25 bp, Artificial
  Probe
aactatgaccttgtgaagactggaa

SEQ ID NO: 147855 - DNA, 25 bp, Artificial
  Probe
attggaggacaagacttgaatgatg

SEQ ID NO: 147856 - DNA, 25 bp, Artificial
  Probe
gaagaataggagccagagtgtatgc

SEQ ID NO: 147857 - DNA, 25 bp, Artificial
  Probe
ctgcattaactatgaccttgtgaag

SEQ ID NO: 147858 - DNA, 25 bp, Artificial
  Probe
tgcattaactatgaccttgtgaaga

SEQ ID NO: 147859 - DNA, 25 bp, Artificial
  Probe
gacaagcacaataacgccaagtatg

SEQ ID NO: 147860 - DNA, 25 bp, Artificial
  Probe
cagaagaagacaagcacaataacgc

SEQ ID NO: 147861 - DNA, 25 bp, Artificial
  Probe
tttggcagttgtggatttaattgat

SEQ ID NO: 147862 - DNA, 25 bp, Artificial
  Probe
ttggcagttgtggatttaattgatg

SEQ ID NO: 147863 - DNA, 25 bp, Artificial
  Probe
tatgaccttgtgaagactggaaatc

SEQ ID NO: 147864 - DNA, 25 bp, Artificial
  Probe
ctatgaccttgtgaagactggaaat

SEQ ID NO: 147865 - DNA, 25 bp, Artificial
  Probe
agacaagcacaataacgccaagtat

SEQ ID NO: 147866 - DNA, 25 bp, Artificial
  Probe
gtttggcagttgtggatttaattga

SEQ ID NO: 147867 - DNA, 25 bp, Artificial
  Probe
agtttggcagttgtggatttaattg

SEQ ID NO: 147868 - DNA, 25 bp, Artificial
  Probe
cagtttggcagttgtggatttaatt

SEQ ID NO: 147869 - DNA, 25 bp, Artificial
  Probe
ggaaatctaacagaagaagacaagc

SEQ ID NO: 147870 - DNA, 25 bp, Artificial
  Probe
gaccttgtgaagactggaaatctaa

SEQ ID NO: 147871 - DNA, 25 bp, Artificial
  Probe
aaatctaacagaagaagacaagcac

SEQ ID NO: 147872 - DNA, 25 bp, Artificial
  Probe
gaaatctaacagaagaagacaagca

SEQ ID NO: 147873 - DNA, 25 bp, Artificial
  Probe
accttgtgaagactggaaatctaac

SEQ ID NO: 147874 - DNA, 25 bp, Artificial
  Probe
aagacaagcacaataacgccaagta

SEQ ID NO: 147875 - DNA, 25 bp, Artificial
  Probe
gttgaattagggaagaatcaggcta

SEQ ID NO: 147876 - DNA, 25 bp, Artificial
  Probe
tggaaatctaacagaagaagacaag

SEQ ID NO: 147877 - DNA, 25 bp, Artificial
  Probe
tgaccttgtgaagactggaaatcta

SEQ ID NO: 147878 - DNA, 25 bp, Artificial
  Probe
gctgcattaactatgaccttgtgaa

SEQ ID NO: 147879 - DNA, 25 bp, Artificial
  Probe
gctgtatgagagaattaaagttcct

SEQ ID NO: 147880 - DNA, 25 bp, Artificial
  Probe
actatgaccttgtgaagactggaaa

SEQ ID NO: 147881 - DNA, 25 bp, Artificial
  Probe
gtgtcgatggctagaagaataggag

SEQ ID NO: 147882 - DNA, 25 bp, Artificial
  Probe
cattggaggacaagacttgaatgat

SEQ ID NO: 147883 - DNA, 25 bp, Artificial
  Probe
ccttgtgaagactggaaatctaaca

SEQ ID NO: 147884 - DNA, 25 bp, Artificial
  Probe
gaccatactacctactgtgttactg

SEQ ID NO: 147885 - DNA, 25 bp, Artificial
  Probe
tgaccatactacctactgtgttact

SEQ ID NO: 147886 - DNA, 25 bp, Artificial
  Probe
tactacctactgtgttactggcata

SEQ ID NO: 147887 - DNA, 25 bp, Artificial
  Probe
attgtgatgaccatactacctactg

SEQ ID NO: 147888 - DNA, 25 bp, Artificial
  Probe
atactacctactgtgttactggcat

SEQ ID NO: 147889 - DNA, 25 bp, Artificial
  Probe
atgaccatactacctactgtgttac

SEQ ID NO: 147890 - DNA, 25 bp, Artificial
  Probe
tgatgaccatactacctactgtgtt

SEQ ID NO: 147891 - DNA, 25 bp, Artificial
  Probe
ttgtgatgaccatactacctactgt

SEQ ID NO: 147892 - DNA, 25 bp, Artificial
  Probe
actacctactgtgttactggcataa

SEQ ID NO: 147893 - DNA, 25 bp, Artificial
  Probe
gatgaccatactacctactgtgtta

SEQ ID NO: 147894 - DNA, 25 bp, Artificial
  Probe
cattgtgatgaccatactacctact

SEQ ID NO: 147895 - DNA, 25 bp, Artificial
  Probe
gtgatgaccatactacctactgtgt

SEQ ID NO: 147896 - DNA, 25 bp, Artificial
  Probe
tgtgatgaccatactacctactgtg

SEQ ID NO: 147897 - DNA, 25 bp, Artificial
  Probe
catactacctactgtgttactggca

SEQ ID NO: 147898 - DNA, 25 bp, Artificial
  Probe
agagcagcattatacagcatctact

SEQ ID NO: 147899 - DNA, 25 bp, Artificial
  Probe
cagagcagcattatacagcatctac

SEQ ID NO: 147900 - DNA, 25 bp, Artificial
  Probe
attactcatcatagaacatggtggt

SEQ ID NO: 147901 - DNA, 25 bp, Artificial
  Probe
ttactcatcatagaacatggtggta

SEQ ID NO: 147902 - DNA, 25 bp, Artificial
  Probe
ttctaccatgattccttcaaccaat

SEQ ID NO: 147903 - DNA, 25 bp, Artificial
  Probe
actcatcatagaacatggtggtata

SEQ ID NO: 147904 - DNA, 25 bp, Artificial
  Probe
tactcatcatagaacatggtggtat

SEQ ID NO: 147905 - DNA, 25 bp, Artificial
  Probe
aattactcatcatagaacatggtgg

SEQ ID NO: 147906 - DNA, 25 bp, Artificial
  Probe
gagcagcattatacagcatctactg

SEQ ID NO: 147907 - DNA, 25 bp, Artificial
  Probe
atgattccttcaaccaatctactcg

SEQ ID NO: 147908 - DNA, 25 bp, Artificial
  Probe
ctacctactgtgttactggcataaa

SEQ ID NO: 147909 - DNA, 25 bp, Artificial
  Probe
accatactacctactgtgttactgg

SEQ ID NO: 147910 - DNA, 25 bp, Artificial
  Probe
atctactgctgtcctcattgtgatg

SEQ ID NO: 147911 - DNA, 25 bp, Artificial
  Probe
catctactgctgtcctcattgtgat

SEQ ID NO: 147912 - DNA, 25 bp, Artificial
  Probe
taaagagcagagcagcattatacag

SEQ ID NO: 147913 - DNA, 25 bp, Artificial
  Probe
catgattccttcaaccaatctactc

SEQ ID NO: 147914 - DNA, 25 bp, Artificial
  Probe
ccatgattccttcaaccaatctact

SEQ ID NO: 147915 - DNA, 25 bp, Artificial
  Probe
ctaccatgattccttcaaccaatct

SEQ ID NO: 147916 - DNA, 25 bp, Artificial
  Probe
tctaccatgattccttcaaccaatc

SEQ ID NO: 147917 - DNA, 25 bp, Artificial
  Probe
gcagagcagcattatacagcatcta

SEQ ID NO: 147918 - DNA, 25 bp, Artificial
  Probe
ataaagagcagagcagcattataca

SEQ ID NO: 147919 - DNA, 25 bp, Artificial
  Probe
taccatgattccttcaaccaatcta

SEQ ID NO: 147920 - DNA, 25 bp, Artificial
  Probe
aacaacctttacccaagaattatgc

SEQ ID NO: 147921 - DNA, 25 bp, Artificial
  Probe
ctcatcatagaacatggtggtatat

SEQ ID NO: 147922 - DNA, 25 bp, Artificial
  Probe
accatgattccttcaaccaatctac

SEQ ID NO: 147923 - DNA, 25 bp, Artificial
  Probe
aataaagagcagagcagcattatac

SEQ ID NO: 147924 - DNA, 25 bp, Artificial
  Probe
caataaagagcagagcagcattata

SEQ ID NO: 147925 - DNA, 25 bp, Artificial
  Probe
acaataaagagcagagcagcattat

SEQ ID NO: 147926 - DNA, 25 bp, Artificial
  Probe
gacaataaagagcagagcagcatta

SEQ ID NO: 147927 - DNA, 25 bp, Artificial
  Probe
aagaaacaacctttacccaagaatt

SEQ ID NO: 147928 - DNA, 25 bp, Artificial
  Probe
ttaagaaacaacctttacccaagaa

SEQ ID NO: 147929 - DNA, 25 bp, Artificial
  Probe
gtagagacagtgatggttcctaaat

SEQ ID NO: 147930 - DNA, 25 bp, Artificial
  Probe
gagacagtgatggttcctaaataga

SEQ ID NO: 147931 - DNA, 25 bp, Artificial
  Probe
agagacagtgatggttcctaaatag

SEQ ID NO: 147932 - DNA, 25 bp, Artificial
  Probe
tataggtgtttctaagactctgagc

SEQ ID NO: 147933 - DNA, 25 bp, Artificial
  Probe
aggtagagacagtgatggttcctaa

SEQ ID NO: 147934 - DNA, 25 bp, Artificial
  Probe
agacagtgatggttcctaaatagaa

SEQ ID NO: 147935 - DNA, 25 bp, Artificial
  Probe
ggtagagacagtgatggttcctaaa

SEQ ID NO: 147936 - DNA, 25 bp, Artificial
  Probe
tagagacagtgatggttcctaaata

SEQ ID NO: 147937 - DNA, 25 bp, Artificial
  Probe
gaactcacactccatagactaggct

SEQ ID NO: 147938 - DNA, 25 bp, Artificial
  Probe
gacagtgatggttcctaaatagaat

SEQ ID NO: 147939 - DNA, 25 bp, Artificial
  Probe
caggtagagacagtgatggttccta

SEQ ID NO: 147940 - DNA, 25 bp, Artificial
  Probe
aactcacactccatagactaggctg

SEQ ID NO: 147941 - DNA, 25 bp, Artificial
  Probe
cctgttgtgacatataggtgtttct

SEQ ID NO: 147942 - DNA, 25 bp, Artificial
  Probe
acagtgatggttcctaaatagaatt

SEQ ID NO: 147943 - DNA, 25 bp, Artificial
  Probe
ggtgtttctaagactctgagctatt

SEQ ID NO: 147944 - DNA, 25 bp, Artificial
  Probe
taggtgtttctaagactctgagcta

SEQ ID NO: 147945 - DNA, 25 bp, Artificial
  Probe
aggtgtttctaagactctgagctat

SEQ ID NO: 147946 - DNA, 25 bp, Artificial
  Probe
ataggtgtttctaagactctgagct

SEQ ID NO: 147947 - DNA, 25 bp, Artificial
  Probe
ctgttgtgacatataggtgtttcta

SEQ ID NO: 147948 - DNA, 25 bp, Artificial
  Probe
ccctgttgtgacatataggtgtttc

SEQ ID NO: 147949 - DNA, 25 bp, Artificial
  Probe
catataggtgtttctaagactctga

SEQ ID NO: 147950 - DNA, 25 bp, Artificial
  Probe
tgtgacatataggtgtttctaagac

SEQ ID NO: 147951 - DNA, 25 bp, Artificial
  Probe
gtgtttctaagactctgagctattt

SEQ ID NO: 147952 - DNA, 25 bp, Artificial
  Probe
tgttgtgacatataggtgtttctaa

SEQ ID NO: 147953 - DNA, 25 bp, Artificial
  Probe
gtgacatataggtgtttctaagact

SEQ ID NO: 147954 - DNA, 25 bp, Artificial
  Probe
atataggtgtttctaagactctgag

SEQ ID NO: 147955 - DNA, 25 bp, Artificial
  Probe
acatataggtgtttctaagactctg

SEQ ID NO: 147956 - DNA, 25 bp, Artificial
  Probe
tgacatataggtgtttctaagactc

SEQ ID NO: 147957 - DNA, 25 bp, Artificial
  Probe
ctcaggtagagacagtgatggttcc

SEQ ID NO: 147958 - DNA, 25 bp, Artificial
  Probe
gttgtgacatataggtgtttctaag

SEQ ID NO: 147959 - DNA, 25 bp, Artificial
  Probe
gacatataggtgtttctaagactct

SEQ ID NO: 147960 - DNA, 25 bp, Artificial
  Probe
ttgtgacatataggtgtttctaaga

SEQ ID NO: 147961 - DNA, 25 bp, Artificial
  Probe
gctgatttgattttctgcttttgtt

SEQ ID NO: 147962 - DNA, 25 bp, Artificial
  Probe
attttgaaggtgctaagggagtttt

SEQ ID NO: 147963 - DNA, 25 bp, Artificial
  Probe
ggctgatttgattttctgcttttgt

SEQ ID NO: 147964 - DNA, 25 bp, Artificial
  Probe
tggttcctaaatagaattcctcctg

SEQ ID NO: 147965 - DNA, 25 bp, Artificial
  Probe
ggttcctaaatagaattcctcctgg

SEQ ID NO: 147966 - DNA, 25 bp, Artificial
  Probe
gattttgaaggtgctaagggagttt

SEQ ID NO: 147967 - DNA, 25 bp, Artificial
  Probe
atggttcctaaatagaattcctcct

SEQ ID NO: 147968 - DNA, 25 bp, Artificial
  Probe
ggaactcacactccatagactaggc

SEQ ID NO: 147969 - DNA, 25 bp, Artificial
  Probe
tcaggtagagacagtgatggttcct

SEQ ID NO: 147970 - DNA, 25 bp, Artificial
  Probe
caataaacctcaacctcagggaagg

SEQ ID NO: 147971 - DNA, 25 bp, Artificial
  Probe
gatggttcctaaatagaattcctcc

SEQ ID NO: 147972 - DNA, 25 bp, Artificial
  Probe
gggctgatttgattttctgcttttg

SEQ ID NO: 147973 - DNA, 25 bp, Artificial
  Probe
ttttgaaggtgctaagggagttttc

SEQ ID NO: 147974 - DNA, 25 bp, Artificial
  Probe
aacctaacattctccacactgacag

SEQ ID NO: 147975 - DNA, 25 bp, Artificial
  Probe
agtgtctatttctgtagttctggaa

SEQ ID NO: 147976 - DNA, 25 bp, Artificial
  Probe
aaatccagtgtgttgttgatagtca

SEQ ID NO: 147977 - DNA, 25 bp, Artificial
  Probe
caaacctaacattctccacactgac

SEQ ID NO: 147978 - DNA, 25 bp, Artificial
  Probe
aaacctaacattctccacactgaca

SEQ ID NO: 147979 - DNA, 25 bp, Artificial
  Probe
cagtgtctatttctgtagttctgga

SEQ ID NO: 147980 - DNA, 25 bp, Artificial
  Probe
agcagtgtctatttctgtagttctg

SEQ ID NO: 147981 - DNA, 25 bp, Artificial
  Probe
cagcagtgtctatttctgtagttct

SEQ ID NO: 147982 - DNA, 25 bp, Artificial
  Probe
tgtctatttctgtagttctggaacc

SEQ ID NO: 147983 - DNA, 25 bp, Artificial
  Probe
gtgtctatttctgtagttctggaac

SEQ ID NO: 147984 - DNA, 25 bp, Artificial
  Probe
cagtgtgttgttgatagtcaagttg

SEQ ID NO: 147985 - DNA, 25 bp, Artificial
  Probe
aatccagtgtgttgttgatagtcaa

SEQ ID NO: 147986 - DNA, 25 bp, Artificial
  Probe
gtctatttctgtagttctggaaccg

SEQ ID NO: 147987 - DNA, 25 bp, Artificial
  Probe
gcagtgtctatttctgtagttctgg

SEQ ID NO: 147988 - DNA, 25 bp, Artificial
  Probe
atccagtgtgttgttgatagtcaag

SEQ ID NO: 147989 - DNA, 25 bp, Artificial
  Probe
tgtgttgttgatagtcaagttgctt

SEQ ID NO: 147990 - DNA, 25 bp, Artificial
  Probe
ccagtgtgttgttgatagtcaagtt

SEQ ID NO: 147991 - DNA, 25 bp, Artificial
  Probe
ccaaacctaacattctccacactga

SEQ ID NO: 147992 - DNA, 25 bp, Artificial
  Probe
gtgtgttgttgatagtcaagttgct

SEQ ID NO: 147993 - DNA, 25 bp, Artificial
  Probe
agtgtgttgttgatagtcaagttgc

SEQ ID NO: 147994 - DNA, 25 bp, Artificial
  Probe
tccagtgtgttgttgatagtcaagt

SEQ ID NO: 147995 - DNA, 25 bp, Artificial
  Probe
acctaacattctccacactgacagt

SEQ ID NO: 147996 - DNA, 25 bp, Artificial
  Probe
aaaatccagtgtgttgttgatagtc

SEQ ID NO: 147997 - DNA, 25 bp, Artificial
  Probe
gaaaatccagtgtgttgttgatagt

SEQ ID NO: 147998 - DNA, 25 bp, Artificial
  Probe
tgaaaatccagtgtgttgttgatag

SEQ ID NO: 147999 - DNA, 25 bp, Artificial
  Probe
cccaaacctaacattctccacactg

SEQ ID NO: 148000 - DNA, 25 bp, Artificial
  Probe
gttgatagtcaagttgctttgatgt

SEQ ID NO: 148001 - DNA, 25 bp, Artificial
  Probe
tgttgatagtcaagttgctttgatg

SEQ ID NO: 148002 - DNA, 25 bp, Artificial
  Probe
atagtcaagttgctttgatgttctg

SEQ ID NO: 148003 - DNA, 25 bp, Artificial
  Probe
tgatagtcaagttgctttgatgttc

SEQ ID NO: 148004 - DNA, 25 bp, Artificial
  Probe
gttgttgatagtcaagttgctttga

SEQ ID NO: 148005 - DNA, 25 bp, Artificial
  Probe
gatagtcaagttgctttgatgttct

SEQ ID NO: 148006 - DNA, 25 bp, Artificial
  Probe
tgttgttgatagtcaagttgctttg

SEQ ID NO: 148007 - DNA, 25 bp, Artificial
  Probe
gtgttgttgatagtcaagttgcttt

SEQ ID NO: 148008 - DNA, 25 bp, Artificial
  Probe
ttgatagtcaagttgctttgatgtt

SEQ ID NO: 148009 - DNA, 25 bp, Artificial
  Probe
ttgttgatagtcaagttgctttgat

SEQ ID NO: 148010 - DNA, 25 bp, Artificial
  Probe
taatagaggatctgaaaacggtgac

SEQ ID NO: 148011 - DNA, 25 bp, Artificial
  Probe
gtaatagaggatctgaaaacggtga

SEQ ID NO: 148012 - DNA, 25 bp, Artificial
  Probe
ttggtaatagaggatctgaaaacgg

SEQ ID NO: 148013 - DNA, 25 bp, Artificial
  Probe
ggcttttggtaatagaggatctgaa

SEQ ID NO: 148014 - DNA, 25 bp, Artificial
  Probe
tagtcaagttgctttgatgttctgg

SEQ ID NO: 148015 - DNA, 25 bp, Artificial
  Probe
aggcttttggtaatagaggatctga

SEQ ID NO: 148016 - DNA, 25 bp, Artificial
  Probe
ctgaaaatccagtgtgttgttgata

SEQ ID NO: 148017 - DNA, 25 bp, Artificial
  Probe
tcaagttgctttgatgttctggtac

SEQ ID NO: 148018 - DNA, 25 bp, Artificial
  Probe
gtcaagttgctttgatgttctggta

SEQ ID NO: 148019 - DNA, 25 bp, Artificial
  Probe
ttgtactaagtcgccatattctctc

SEQ ID NO: 148020 - DNA, 25 bp, Artificial
  Probe
caacaacatgctcttatccatcaag

SEQ ID NO: 148021 - DNA, 25 bp, Artificial
  Probe
tgtactaagtcgccatattctctcg

SEQ ID NO: 148022 - DNA, 25 bp, Artificial
  Probe
tactaagtcgccatattctctcggt

SEQ ID NO: 148023 - DNA, 25 bp, Artificial
  Probe
cgccatattctctcggttcatacaa

SEQ ID NO: 148024 - DNA, 25 bp, Artificial
  Probe
ggtgtaagagatgtagaaagggatt

SEQ ID NO: 148025 - DNA, 25 bp, Artificial
  Probe
taggtgtaagagatgtagaaaggga

SEQ ID NO: 148026 - DNA, 25 bp, Artificial
  Probe
tattctctcggttcatacaaaggac

SEQ ID NO: 148027 - DNA, 25 bp, Artificial
  Probe
ctaagtcgccatattctctcggttc

SEQ ID NO: 148028 - DNA, 25 bp, Artificial
  Probe
aggtgtaagagatgtagaaagggat

SEQ ID NO: 148029 - DNA, 25 bp, Artificial
  Probe
gtactaagtcgccatattctctcgg

SEQ ID NO: 148030 - DNA, 25 bp, Artificial
  Probe
ggactatcctcataagtgtgacatg

SEQ ID NO: 148031 - DNA, 25 bp, Artificial
  Probe
ttaggtgtaagagatgtagaaaggg

SEQ ID NO: 148032 - DNA, 25 bp, Artificial
  Probe
atattctctcggttcatacaaagga

SEQ ID NO: 148033 - DNA, 25 bp, Artificial
  Probe
catattctctcggttcatacaaagg

SEQ ID NO: 148034 - DNA, 25 bp, Artificial
  Probe
ccatattctctcggttcatacaaag

SEQ ID NO: 148035 - DNA, 25 bp, Artificial
  Probe
agcgacacataatttcagttcatac

SEQ ID NO: 148036 - DNA, 25 bp, Artificial
  Probe
attcatacgaaagactatcctcacc

SEQ ID NO: 148037 - DNA, 25 bp, Artificial
  Probe
ccattcatacgaaagactatcctca

SEQ ID NO: 148038 - DNA, 25 bp, Artificial
  Probe
taatgcgacatcataaagaagttgg

SEQ ID NO: 148039 - DNA, 25 bp, Artificial
  Probe
tccattcatacgaaagactatcctc

SEQ ID NO: 148040 - DNA, 25 bp, Artificial
  Probe
ctccattcatacgaaagactatcct

SEQ ID NO: 148041 - DNA, 25 bp, Artificial
  Probe
gccatattctctcggttcatacaaa

SEQ ID NO: 148042 - DNA, 25 bp, Artificial
  Probe
tctccattcatacgaaagactatcc

SEQ ID NO: 148043 - DNA, 25 bp, Artificial
  Probe
gaagcgacacataatttcagttcat

SEQ ID NO: 148044 - DNA, 25 bp, Artificial
  Probe
aagcgacacataatttcagttcata

SEQ ID NO: 148045 - DNA, 25 bp, Artificial
  Probe
cattcatacgaaagactatcctcac

SEQ ID NO: 148046 - DNA, 25 bp, Artificial
  Probe
gtcgccatattctctcggttcatac

SEQ ID NO: 148047 - DNA, 25 bp, Artificial
  Probe
acataatgcgacatcataaagaagt

SEQ ID NO: 148048 - DNA, 25 bp, Artificial
  Probe
accagtgtagacattgtgactttaa

SEQ ID NO: 148049 - DNA, 25 bp, Artificial
  Probe
cacataatgcgacatcataaagaag

SEQ ID NO: 148050 - DNA, 25 bp, Artificial
  Probe
agtcgccatattctctcggttcata

SEQ ID NO: 148051 - DNA, 25 bp, Artificial
  Probe
gcgacacataatttcagttcatact

SEQ ID NO: 148052 - DNA, 25 bp, Artificial
  Probe
ccagtgtagacattgtgactttaag

SEQ ID NO: 148053 - DNA, 25 bp, Artificial
  Probe
tttgtactaagtcgccatattctct

SEQ ID NO: 148054 - DNA, 25 bp, Artificial
  Probe
gtttgtactaagtcgccatattctc

SEQ ID NO: 148055 - DNA, 25 bp, Artificial
  Probe
gtgtaagagatgtagaaagggattt

SEQ ID NO: 148056 - DNA, 25 bp, Artificial
  Probe
gtagacattgtgactttaagattgc

SEQ ID NO: 148057 - DNA, 25 bp, Artificial
  Probe
taagtcgccatattctctcggttca

SEQ ID NO: 148058 - DNA, 25 bp, Artificial
  Probe
tccatttaggtgtaagagatgtaga

SEQ ID NO: 148059 - DNA, 25 bp, Artificial
  Probe
gttatctccattcatacgaaagact

SEQ ID NO: 148060 - DNA, 25 bp, Artificial
  Probe
actaagtcgccatattctctcggtt

SEQ ID NO: 148061 - DNA, 25 bp, Artificial
  Probe
cgtttgtactaagtcgccatattct

SEQ ID NO: 148062 - DNA, 25 bp, Artificial
  Probe
tcgccatattctctcggttcataca

SEQ ID NO: 148063 - DNA, 25 bp, Artificial
  Probe
aacaacatgctcttatccatcaaga

SEQ ID NO: 148064 - DNA, 25 bp, Artificial
  Probe
cttcatttgatctgggacatagcat

SEQ ID NO: 148065 - DNA, 25 bp, Artificial
  Probe
ttcatttgatctgggacatagcatc

SEQ ID NO: 148066 - DNA, 25 bp, Artificial
  Probe
gttggctttgtgtattctggttgac

SEQ ID NO: 148067 - DNA, 25 bp, Artificial
  Probe
ccttcatttgatctgggacatagca

SEQ ID NO: 148068 - DNA, 25 bp, Artificial
  Probe
actgtgttctgttagttatcaatat

SEQ ID NO: 148069 - DNA, 25 bp, Artificial
  Probe
caactgtgttctgttagttatcaat

SEQ ID NO: 148070 - DNA, 25 bp, Artificial
  Probe
atattgttacttgtagcggcctgtt

SEQ ID NO: 148071 - DNA, 25 bp, Artificial
  Probe
aatattgttacttgtagcggcctgt

SEQ ID NO: 148072 - DNA, 25 bp, Artificial
  Probe
ttggctttgtgtattctggttgaca

SEQ ID NO: 148073 - DNA, 25 bp, Artificial
  Probe
ggttggctttgtgtattctggttga

SEQ ID NO: 148074 - DNA, 25 bp, Artificial
  Probe
aggttggctttgtgtattctggttg

SEQ ID NO: 148075 - DNA, 25 bp, Artificial
  Probe
catttgatctgggacatagcatcac

SEQ ID NO: 148076 - DNA, 25 bp, Artificial
  Probe
tcatttgatctgggacatagcatca

SEQ ID NO: 148077 - DNA, 25 bp, Artificial
  Probe
tattgttacttgtagcggcctgttg

SEQ ID NO: 148078 - DNA, 25 bp, Artificial
  Probe
gccttcatttgatctgggacatagc

SEQ ID NO: 148079 - DNA, 25 bp, Artificial
  Probe
caggttggctttgtgtattctggtt

SEQ ID NO: 148080 - DNA, 25 bp, Artificial
  Probe
gtggtcaggttggctttgtgtattc

SEQ ID NO: 148081 - DNA, 25 bp, Artificial
  Probe
tggtcaggttggctttgtgtattct

SEQ ID NO: 148082 - DNA, 25 bp, Artificial
  Probe
tatcaatattgttacttgtagcggc

SEQ ID NO: 148083 - DNA, 25 bp, Artificial
  Probe
aactgtgttctgttagttatcaata

SEQ ID NO: 148084 - DNA, 25 bp, Artificial
  Probe
ctgtgttctgttagttatcaatatt

SEQ ID NO: 148085 - DNA, 25 bp, Artificial
  Probe
gtcaggttggctttgtgtattctgg

SEQ ID NO: 148086 - DNA, 25 bp, Artificial
  Probe
ggtcaggttggctttgtgtattctg

SEQ ID NO: 148087 - DNA, 25 bp, Artificial
  Probe
atcaatattgttacttgtagcggcc

SEQ ID NO: 148088 - DNA, 25 bp, Artificial
  Probe
tcaggttggctttgtgtattctggt

SEQ ID NO: 148089 - DNA, 25 bp, Artificial
  Probe
ggccttcatttgatctgggacatag

SEQ ID NO: 148090 - DNA, 25 bp, Artificial
  Probe
caatattgttacttgtagcggcctg

SEQ ID NO: 148091 - DNA, 25 bp, Artificial
  Probe
tcaatattgttacttgtagcggcct

SEQ ID NO: 148092 - DNA, 25 bp, Artificial
  Probe
ttatcaatattgttacttgtagcgg

SEQ ID NO: 148093 - DNA, 25 bp, Artificial
  Probe
attgttacttgtagcggcctgttgt

SEQ ID NO: 148094 - DNA, 25 bp, Artificial
  Probe
gttatcaatattgttacttgtagcg

SEQ ID NO: 148095 - DNA, 25 bp, Artificial
  Probe
gggccttcatttgatctgggacata

SEQ ID NO: 148096 - DNA, 25 bp, Artificial
  Probe
tggctttgtgtattctggttgacac

SEQ ID NO: 148097 - DNA, 25 bp, Artificial
  Probe
gtgttctgttagttatcaatattgt

SEQ ID NO: 148098 - DNA, 25 bp, Artificial
  Probe
tgtgttctgttagttatcaatattg

SEQ ID NO: 148099 - DNA, 25 bp, Artificial
  Probe
agttatcaatattgttacttgtagc

SEQ ID NO: 148100 - DNA, 25 bp, Artificial
  Probe
gtgtattctggttgacacaccatgg

SEQ ID NO: 148101 - DNA, 25 bp, Artificial
  Probe
ctaccttgtcgtatctcacatactg

SEQ ID NO: 148102 - DNA, 25 bp, Artificial
  Probe
caaagagagaaaggaaagtgaagtc

SEQ ID NO: 148103 - DNA, 25 bp, Artificial
  Probe
atatggcaaagagagaaaggaaagt

SEQ ID NO: 148104 - DNA, 25 bp, Artificial
  Probe
gctaccttgtcgtatctcacatact

SEQ ID NO: 148105 - DNA, 25 bp, Artificial
  Probe
taccttgtcgtatctcacatactgc

SEQ ID NO: 148106 - DNA, 25 bp, Artificial
  Probe
tatggcaaagagagaaaggaaagtg

SEQ ID NO: 148107 - DNA, 25 bp, Artificial
  Probe
tatctcacatactgctttcattctg

SEQ ID NO: 148108 - DNA, 25 bp, Artificial
  Probe
gcaaagagagaaaggaaagtgaagt

SEQ ID NO: 148109 - DNA, 25 bp, Artificial
  Probe
ctcacatactgctttcattctgatg

SEQ ID NO: 148110 - DNA, 25 bp, Artificial
  Probe
tctcacatactgctttcattctgat

SEQ ID NO: 148111 - DNA, 25 bp, Artificial
  Probe
atctcacatactgctttcattctga

SEQ ID NO: 148112 - DNA, 25 bp, Artificial
  Probe
ccttgtcgtatctcacatactgctt

SEQ ID NO: 148113 - DNA, 25 bp, Artificial
  Probe
cagctaccttgtcgtatctcacata

SEQ ID NO: 148114 - DNA, 25 bp, Artificial
  Probe
ggcaaagagagaaaggaaagtgaag

SEQ ID NO: 148115 - DNA, 25 bp, Artificial
  Probe
gaactcagctaccttgtcgtatctc

SEQ ID NO: 148116 - DNA, 25 bp, Artificial
  Probe
agctaccttgtcgtatctcacatac

SEQ ID NO: 148117 - DNA, 25 bp, Artificial
  Probe
cgtatctcacatactgctttcattc

SEQ ID NO: 148118 - DNA, 25 bp, Artificial
  Probe
tcgtatctcacatactgctttcatt

SEQ ID NO: 148119 - DNA, 25 bp, Artificial
  Probe
atggcaaagagagaaaggaaagtga

SEQ ID NO: 148120 - DNA, 25 bp, Artificial
  Probe
gtcgtatctcacatactgctttcat

SEQ ID NO: 148121 - DNA, 25 bp, Artificial
  Probe
ttgtcgtatctcacatactgctttc

SEQ ID NO: 148122 - DNA, 25 bp, Artificial
  Probe
cttgtcgtatctcacatactgcttt

SEQ ID NO: 148123 - DNA, 25 bp, Artificial
  Probe
aaagagagaaaggaaagtgaagtcc

SEQ ID NO: 148124 - DNA, 25 bp, Artificial
  Probe
tggcaaagagagaaaggaaagtgaa

SEQ ID NO: 148125 - DNA, 25 bp, Artificial
  Probe
gtatctcacatactgctttcattct

SEQ ID NO: 148126 - DNA, 25 bp, Artificial
  Probe
aactcagctaccttgtcgtatctca

SEQ ID NO: 148127 - DNA, 25 bp, Artificial
  Probe
accttgtcgtatctcacatactgct

SEQ ID NO: 148128 - DNA, 25 bp, Artificial
  Probe
gtgactacattccaggcagaagaaa

SEQ ID NO: 148129 - DNA, 25 bp, Artificial
  Probe
tgtcgtatctcacatactgctttca

SEQ ID NO: 148130 - DNA, 25 bp, Artificial
  Probe
tcagctaccttgtcgtatctcacat

SEQ ID NO: 148131 - DNA, 25 bp, Artificial
  Probe
catatggcaaagagagaaaggaaag

SEQ ID NO: 148132 - DNA, 25 bp, Artificial
  Probe
atcatatggcaaagagagaaaggaa

SEQ ID NO: 148133 - DNA, 25 bp, Artificial
  Probe
tcatatggcaaagagagaaaggaaa

SEQ ID NO: 148134 - DNA, 25 bp, Artificial
  Probe
tatcatatggcaaagagagaaagga

SEQ ID NO: 148135 - DNA, 25 bp, Artificial
  Probe
ggtgactacattccaggcagaagaa

SEQ ID NO: 148136 - DNA, 25 bp, Artificial
  Probe
gaagaaaagaggaaagaaacccaaa

SEQ ID NO: 148137 - DNA, 25 bp, Artificial
  Probe
agaagaaaagaggaaagaaacccaa

SEQ ID NO: 148138 - DNA, 25 bp, Artificial
  Probe
actcagctaccttgtcgtatctcac

SEQ ID NO: 148139 - DNA, 25 bp, Artificial
  Probe
ggaactcagctaccttgtcgtatct

SEQ ID NO: 148140 - DNA, 25 bp, Artificial
  Probe
aagaaaagaggaaagaaacccaaaa

SEQ ID NO: 148141 - DNA, 25 bp, Artificial
  Probe
catactgctttcattctgatgactg

SEQ ID NO: 148142 - DNA, 25 bp, Artificial
  Probe
acatactgctttcattctgatgact

SEQ ID NO: 148143 - DNA, 25 bp, Artificial
  Probe
cacatactgctttcattctgatgac

SEQ ID NO: 148144 - DNA, 25 bp, Artificial
  Probe
tcacatactgctttcattctgatga

SEQ ID NO: 148145 - DNA, 25 bp, Artificial
  Probe
tggaagttcagagtcactggatcag

SEQ ID NO: 148146 - DNA, 25 bp, Artificial
  Probe
ctcattaagaacggcaagaagatca

SEQ ID NO: 148147 - DNA, 25 bp, Artificial
  Probe
attaagaacggcaagaagatcacag

SEQ ID NO: 148148 - DNA, 25 bp, Artificial
  Probe
tcattaagaacggcaagaagatcac

SEQ ID NO: 148149 - DNA, 25 bp, Artificial
  Probe
cattaagaacggcaagaagatcaca

SEQ ID NO: 148150 - DNA, 25 bp, Artificial
  Probe
gctcattaagaacggcaagaagatc

SEQ ID NO: 148151 - DNA, 25 bp, Artificial
  Probe
agctcattaagaacggcaagaagat

SEQ ID NO: 148152 - DNA, 25 bp, Artificial
  Probe
ttaaggtggttaaagtagccaatgt

SEQ ID NO: 148153 - DNA, 25 bp, Artificial
  Probe
ttaagaacggcaagaagatcacagc

SEQ ID NO: 148154 - DNA, 25 bp, Artificial
  Probe
taaggtggttaaagtagccaatgtg

SEQ ID NO: 148155 - DNA, 25 bp, Artificial
  Probe
ggttgcttgaacttcattgaggaaa

SEQ ID NO: 148156 - DNA, 25 bp, Artificial
  Probe
cagctcattaagaacggcaagaaga

SEQ ID NO: 148157 - DNA, 25 bp, Artificial
  Probe
tttaaggtggttaaagtagccaatg

SEQ ID NO: 148158 - DNA, 25 bp, Artificial
  Probe
cggttgcttgaacttcattgaggaa

SEQ ID NO: 148159 - DNA, 25 bp, Artificial
  Probe
tgacggttgcttgaacttcattgag

SEQ ID NO: 148160 - DNA, 25 bp, Artificial
  Probe
aaggtggttaaagtagccaatgtgt

SEQ ID NO: 148161 - DNA, 25 bp, Artificial
  Probe
ttgcttgaacttcattgaggaaaat

SEQ ID NO: 148162 - DNA, 25 bp, Artificial
  Probe
atgacggttgcttgaacttcattga

SEQ ID NO: 148163 - DNA, 25 bp, Artificial
  Probe
gttgcttgaacttcattgaggaaaa

SEQ ID NO: 148164 - DNA, 25 bp, Artificial
  Probe
gacggttgcttgaacttcattgagg

SEQ ID NO: 148165 - DNA, 25 bp, Artificial
  Probe
gcagctcattaagaacggcaagaag

SEQ ID NO: 148166 - DNA, 25 bp, Artificial
  Probe
acggttgcttgaacttcattgagga

SEQ ID NO: 148167 - DNA, 25 bp, Artificial
  Probe
tgcttgaacttcattgaggaaaatg

SEQ ID NO: 148168 - DNA, 25 bp, Artificial
  Probe
ccaatgacggttgcttgaacttcat

SEQ ID NO: 148169 - DNA, 25 bp, Artificial
  Probe
aaaagtaggggttgaagccaaacag

SEQ ID NO: 148170 - DNA, 25 bp, Artificial
  Probe
aatgacggttgcttgaacttcattg

SEQ ID NO: 148171 - DNA, 25 bp, Artificial
  Probe
caatgacggttgcttgaacttcatt

SEQ ID NO: 148172 - DNA, 25 bp, Artificial
  Probe
gcttgaacttcattgaggaaaatga

SEQ ID NO: 148173 - DNA, 25 bp, Artificial
  Probe
tgaacttcattgaggaaaatgatga

SEQ ID NO: 148174 - DNA, 25 bp, Artificial
  Probe
ttgaacttcattgaggaaaatgatg

SEQ ID NO: 148175 - DNA, 25 bp, Artificial
  Probe
gaacttcattgaggaaaatgatgaa

SEQ ID NO: 148176 - DNA, 25 bp, Artificial
  Probe
cttgaacttcattgaggaaaatgat

SEQ ID NO: 148177 - DNA, 25 bp, Artificial
  Probe
cttttggctctgtacaaaggcaaga

SEQ ID NO: 148178 - DNA, 25 bp, Artificial
  Probe
tcttttggctctgtacaaaggcaag

SEQ ID NO: 148179 - DNA, 25 bp, Artificial
  Probe
ctacattggtgaattcgagatcatt

SEQ ID NO: 148180 - DNA, 25 bp, Artificial
  Probe
gctacattggtgaattcgagatcat

SEQ ID NO: 148181 - DNA, 25 bp, Artificial
  Probe
aagtcatcgttcggttcctaactgt

SEQ ID NO: 148182 - DNA, 25 bp, Artificial
  Probe
atggctacattggtgaattcgagat

SEQ ID NO: 148183 - DNA, 25 bp, Artificial
  Probe
aaagtcatcgttcggttcctaactg

SEQ ID NO: 148184 - DNA, 25 bp, Artificial
  Probe
caaagtcatcgttcggttcctaact

SEQ ID NO: 148185 - DNA, 25 bp, Artificial
  Probe
tggctacattggtgaattcgagatc

SEQ ID NO: 148186 - DNA, 25 bp, Artificial
  Probe
atgaagcatggctacattggtgaat

SEQ ID NO: 148187 - DNA, 25 bp, Artificial
  Probe
tgaagcatggctacattggtgaatt

SEQ ID NO: 148188 - DNA, 25 bp, Artificial
  Probe
ggctacattggtgaattcgagatca

SEQ ID NO: 148189 - DNA, 25 bp, Artificial
  Probe
catggctacattggtgaattcgaga

SEQ ID NO: 148190 - DNA, 25 bp, Artificial
  Probe
gtcatcgttcggttcctaactgtga

SEQ ID NO: 148191 - DNA, 25 bp, Artificial
  Probe
agtcatcgttcggttcctaactgtg

SEQ ID NO: 148192 - DNA, 25 bp, Artificial
  Probe
tccaaagtcatcgttcggttcctaa

SEQ ID NO: 148193 - DNA, 25 bp, Artificial
  Probe
ttccaaagtcatcgttcggttccta

SEQ ID NO: 148194 - DNA, 25 bp, Artificial
  Probe
ccaaagtcatcgttcggttcctaac

SEQ ID NO: 148195 - DNA, 25 bp, Artificial
  Probe
gaagcatggctacattggtgaattc

SEQ ID NO: 148196 - DNA, 25 bp, Artificial
  Probe
gtgttccaaagtcatcgttcggttc

SEQ ID NO: 148197 - DNA, 25 bp, Artificial
  Probe
gcatggctacattggtgaattcgag

SEQ ID NO: 148198 - DNA, 25 bp, Artificial
  Probe
aagcatggctacattggtgaattcg

SEQ ID NO: 148199 - DNA, 25 bp, Artificial
  Probe
ccctagatttgatgttcaactcaaa

SEQ ID NO: 148200 - DNA, 25 bp, Artificial
  Probe
cctagatttgatgttcaactcaaag

SEQ ID NO: 148201 - DNA, 25 bp, Artificial
  Probe
agcatggctacattggtgaattcga

SEQ ID NO: 148202 - DNA, 25 bp, Artificial
  Probe
tacaagattgactactcacacttcc

SEQ ID NO: 148203 - DNA, 25 bp, Artificial
  Probe
agagaagaaccagtacaagattgac

SEQ ID NO: 148204 - DNA, 25 bp, Artificial
  Probe
aagagaagaaccagtacaagattga

SEQ ID NO: 148205 - DNA, 25 bp, Artificial
  Probe
gaagagaagaaccagtacaagattg

SEQ ID NO: 148206 - DNA, 25 bp, Artificial
  Probe
cgaagagaagaaccagtacaagatt

SEQ ID NO: 148207 - DNA, 25 bp, Artificial
  Probe
ctactcacacttccacaagacctat

SEQ ID NO: 148208 - DNA, 25 bp, Artificial
  Probe
tactcacacttccacaagacctatg

SEQ ID NO: 148209 - DNA, 25 bp, Artificial
  Probe
gattgactactcacacttccacaag

SEQ ID NO: 148210 - DNA, 25 bp, Artificial
  Probe
caagattgactactcacacttccac

SEQ ID NO: 148211 - DNA, 25 bp, Artificial
  Probe
gtcacagactcagtaacatcttagt

SEQ ID NO: 148212 - DNA, 25 bp, Artificial
  Probe
ggtcacagactcagtaacatcttag

SEQ ID NO: 148213 - DNA, 25 bp, Artificial
  Probe
gagaagaaccagtacaagattgact

SEQ ID NO: 148214 - DNA, 25 bp, Artificial
  Probe
attgactactcacacttccacaaga

SEQ ID NO: 148215 - DNA, 25 bp, Artificial
  Probe
agattgactactcacacttccacaa

SEQ ID NO: 148216 - DNA, 25 bp, Artificial
  Probe
aagattgactactcacacttccaca

SEQ ID NO: 148217 - DNA, 25 bp, Artificial
  Probe
acaagattgactactcacacttcca

SEQ ID NO: 148218 - DNA, 25 bp, Artificial
  Probe
gtacaagattgactactcacacttc

SEQ ID NO: 148219 - DNA, 25 bp, Artificial
  Probe
gaagaaccagtacaagattgactac

SEQ ID NO: 148220 - DNA, 25 bp, Artificial
  Probe
agaagaaccagtacaagattgacta

SEQ ID NO: 148221 - DNA, 25 bp, Artificial
  Probe
actactcacacttccacaagaccta

SEQ ID NO: 148222 - DNA, 25 bp, Artificial
  Probe
tcgaagagaagaaccagtacaagat

SEQ ID NO: 148223 - DNA, 25 bp, Artificial
  Probe
cagtacaagattgactactcacact

SEQ ID NO: 148224 - DNA, 25 bp, Artificial
  Probe
gaaccagtacaagattgactactca

SEQ ID NO: 148225 - DNA, 25 bp, Artificial
  Probe
ttgactactcacacttccacaagac

SEQ ID NO: 148226 - DNA, 25 bp, Artificial
  Probe
aaccagtacaagattgactactcac

SEQ ID NO: 148227 - DNA, 25 bp, Artificial
  Probe
agaaccagtacaagattgactactc

SEQ ID NO: 148228 - DNA, 25 bp, Artificial
  Probe
agtacaagattgactactcacactt

SEQ ID NO: 148229 - DNA, 25 bp, Artificial
  Probe
aagaaccagtacaagattgactact

SEQ ID NO: 148230 - DNA, 25 bp, Artificial
  Probe
tttaatttgggcaagactgtttaca

SEQ ID NO: 148231 - DNA, 25 bp, Artificial
  Probe
ccagtacaagattgactactcacac

SEQ ID NO: 148232 - DNA, 25 bp, Artificial
  Probe
accagtacaagattgactactcaca

SEQ ID NO: 148233 - DNA, 25 bp, Artificial
  Probe
cctggatcgtatcttcctagtatcg

SEQ ID NO: 148234 - DNA, 25 bp, Artificial
  Probe
gcctggatcgtatcttcctagtatc

SEQ ID NO: 148235 - DNA, 25 bp, Artificial
  Probe
ttaatttgggcaagactgtttacaa

SEQ ID NO: 148236 - DNA, 25 bp, Artificial
  Probe
ctggatcgtatcttcctagtatcgc

SEQ ID NO: 148237 - DNA, 25 bp, Artificial
  Probe
actcacacttccacaagacctatga

SEQ ID NO: 148238 - DNA, 25 bp, Artificial
  Probe
gtatcttcctagtatcgcccatcac

SEQ ID NO: 148239 - DNA, 25 bp, Artificial
  Probe
gactactcacacttccacaagacct

SEQ ID NO: 148240 - DNA, 25 bp, Artificial
  Probe
gggtcacagactcagtaacatctta

SEQ ID NO: 148241 - DNA, 25 bp, Artificial
  Probe
atcgtatcttcctagtatcgcccat

SEQ ID NO: 148242 - DNA, 25 bp, Artificial
  Probe
tgactactcacacttccacaagacc

SEQ ID NO: 148243 - DNA, 25 bp, Artificial
  Probe
tggatcgtatcttcctagtatcgcc

SEQ ID NO: 148244 - DNA, 25 bp, Artificial
  Probe
caactctttctgctatgagaatgag

SEQ ID NO: 148245 - DNA, 25 bp, Artificial
  Probe
ccaactctttctgctatgagaatga

SEQ ID NO: 148246 - DNA, 25 bp, Artificial
  Probe
tatcttcctagtatcgcccatcacc

SEQ ID NO: 148247 - DNA, 25 bp, Artificial
  Probe
atcacataagcaccttcatcctcac

SEQ ID NO: 148248 - DNA, 25 bp, Artificial
  Probe
catcacataagcaccttcatcctca

SEQ ID NO: 148249 - DNA, 25 bp, Artificial
  Probe
acatcacataagcaccttcatcctc

SEQ ID NO: 148250 - DNA, 25 bp, Artificial
  Probe
gacatcacataagcaccttcatcct

SEQ ID NO: 148251 - DNA, 25 bp, Artificial
  Probe
cataagcaccttcatcctcacagtc

SEQ ID NO: 148252 - DNA, 25 bp, Artificial
  Probe
cacataagcaccttcatcctcacag

SEQ ID NO: 148253 - DNA, 25 bp, Artificial
  Probe
acataagcaccttcatcctcacagt

SEQ ID NO: 148254 - DNA, 25 bp, Artificial
  Probe
tcacataagcaccttcatcctcaca

SEQ ID NO: 148255 - DNA, 25 bp, Artificial
  Probe
aaagaggcatttgagaaggtggttt

SEQ ID NO: 148256 - DNA, 25 bp, Artificial
  Probe
gatgaggagaggctgtcagaatcaa

SEQ ID NO: 148257 - DNA, 25 bp, Artificial
  Probe
aagaggcatttgagaaggtggtttc

SEQ ID NO: 148258 - DNA, 25 bp, Artificial
  Probe
attagagccctccttacaggtcaaa

SEQ ID NO: 148259 - DNA, 25 bp, Artificial
  Probe
atttgagaaggtggtttcgagtgaa

SEQ ID NO: 148260 - DNA, 25 bp, Artificial
  Probe
atgaggagaggctgtcagaatcaaa

SEQ ID NO: 148261 - DNA, 25 bp, Artificial
  Probe
gattagagccctccttacaggtcaa

SEQ ID NO: 148262 - DNA, 25 bp, Artificial
  Probe
tttgagaaggtggtttcgagtgaag

SEQ ID NO: 148263 - DNA, 25 bp, Artificial
  Probe
catttgagaaggtggtttcgagtga

SEQ ID NO: 148264 - DNA, 25 bp, Artificial
  Probe
gctgtcagaatcaaaagaggcattt

SEQ ID NO: 148265 - DNA, 25 bp, Artificial
  Probe
cagattagagccctccttacaggtc

SEQ ID NO: 148266 - DNA, 25 bp, Artificial
  Probe
catcccctagtgttggaagagtatt

SEQ ID NO: 148267 - DNA, 25 bp, Artificial
  Probe
aaaagaggcatttgagaaggtggtt

SEQ ID NO: 148268 - DNA, 25 bp, Artificial
  Probe
agattagagccctccttacaggtca

SEQ ID NO: 148269 - DNA, 25 bp, Artificial
  Probe
gagaggctgtcagaatcaaaagagg

SEQ ID NO: 148270 - DNA, 25 bp, Artificial
  Probe
ggagaggctgtcagaatcaaaagag

SEQ ID NO: 148271 - DNA, 25 bp, Artificial
  Probe
gaggagaggctgtcagaatcaaaag

SEQ ID NO: 148272 - DNA, 25 bp, Artificial
  Probe
ctgtcagaatcaaaagaggcatttg

SEQ ID NO: 148273 - DNA, 25 bp, Artificial
  Probe
aggagaggctgtcagaatcaaaaga

SEQ ID NO: 148274 - DNA, 25 bp, Artificial
  Probe
acccagattagagccctccttacag

SEQ ID NO: 148275 - DNA, 25 bp, Artificial
  Probe
gacccagattagagccctccttaca

SEQ ID NO: 148276 - DNA, 25 bp, Artificial
  Probe
tgacccagattagagccctccttac

SEQ ID NO: 148277 - DNA, 25 bp, Artificial
  Probe
ctgacccagattagagccctcctta

SEQ ID NO: 148278 - DNA, 25 bp, Artificial
  Probe
ggctgtcagaatcaaaagaggcatt

SEQ ID NO: 148279 - DNA, 25 bp, Artificial
  Probe
ttagagccctccttacaggtcaaaa

SEQ ID NO: 148280 - DNA, 25 bp, Artificial
  Probe
tgatgaggagaggctgtcagaatca

SEQ ID NO: 148281 - DNA, 25 bp, Artificial
  Probe
tgaggagaggctgtcagaatcaaaa

SEQ ID NO: 148282 - DNA, 25 bp, Artificial
  Probe
gcatttgagaaggtggtttcgagtg

SEQ ID NO: 148283 - DNA, 25 bp, Artificial
  Probe
ctgatgaggagaggctgtcagaatc

SEQ ID NO: 148284 - DNA, 25 bp, Artificial
  Probe
ccagattagagccctccttacaggt

SEQ ID NO: 148285 - DNA, 25 bp, Artificial
  Probe
gagctacatgccctacacttccatc

SEQ ID NO: 148286 - DNA, 25 bp, Artificial
  Probe
aggctgtcagaatcaaaagaggcat

SEQ ID NO: 148287 - DNA, 25 bp, Artificial
  Probe
agagctacatgccctacacttccat

SEQ ID NO: 148288 - DNA, 25 bp, Artificial
  Probe
actgatgaggagaggctgtcagaat

SEQ ID NO: 148289 - DNA, 25 bp, Artificial
  Probe
agaggctgtcagaatcaaaagaggc

SEQ ID NO: 148290 - DNA, 25 bp, Artificial
  Probe
caaaagaggcatttgagaaggtggt

SEQ ID NO: 148291 - DNA, 25 bp, Artificial
  Probe
gaggctgtcagaatcaaaagaggca

SEQ ID NO: 148292 - DNA, 25 bp, Artificial
  Probe
gtattgatagttctggctgctcttc

SEQ ID NO: 148293 - DNA, 25 bp, Artificial
  Probe
tgtattgatagttctggctgctctt

SEQ ID NO: 148294 - DNA, 25 bp, Artificial
  Probe
gagcacacactgtattgatagttct

SEQ ID NO: 148295 - DNA, 25 bp, Artificial
  Probe
agcacacactgtattgatagttctg

SEQ ID NO: 148296 - DNA, 25 bp, Artificial
  Probe
tgagcacacactgtattgatagttc

SEQ ID NO: 148297 - DNA, 25 bp, Artificial
  Probe
tattgatagttctggctgctcttcc

SEQ ID NO: 148298 - DNA, 25 bp, Artificial
  Probe
ctgtattgatagttctggctgctct

SEQ ID NO: 148299 - DNA, 25 bp, Artificial
  Probe
cacactgtattgatagttctggctg

SEQ ID NO: 148300 - DNA, 25 bp, Artificial
  Probe
gtatgagagtgcttccagatgagtc

SEQ ID NO: 148301 - DNA, 25 bp, Artificial
  Probe
gtgagcacacactgtattgatagtt

SEQ ID NO: 148302 - DNA, 25 bp, Artificial
  Probe
acacactgtattgatagttctggct

SEQ ID NO: 148303 - DNA, 25 bp, Artificial
  Probe
cacacactgtattgatagttctggc

SEQ ID NO: 148304 - DNA, 25 bp, Artificial
  Probe
gcacacactgtattgatagttctgg

SEQ ID NO: 148305 - DNA, 25 bp, Artificial
  Probe
actgtattgatagttctggctgctc

SEQ ID NO: 148306 - DNA, 25 bp, Artificial
  Probe
ataaatacatctatggagcacaggg

SEQ ID NO: 148307 - DNA, 25 bp, Artificial
  Probe
gggaatcaagttaaacaaagcagaa

SEQ ID NO: 148308 - DNA, 25 bp, Artificial
  Probe
taaatacatctatggagcacaggga

SEQ ID NO: 148309 - DNA, 25 bp, Artificial
  Probe
tggataaatacatctatggagcaca

SEQ ID NO: 148310 - DNA, 25 bp, Artificial
  Probe
tgtatgagagtgcttccagatgagt

SEQ ID NO: 148311 - DNA, 25 bp, Artificial
  Probe
cactgtattgatagttctggctgct

SEQ ID NO: 148312 - DNA, 25 bp, Artificial
  Probe
gctttgagaatttggaagattggta

SEQ ID NO: 148313 - DNA, 25 bp, Artificial
  Probe
tgggaatcaagttaaacaaagcaga

SEQ ID NO: 148314 - DNA, 25 bp, Artificial
  Probe
gaagacagtaagcgaagagtcagaa

SEQ ID NO: 148315 - DNA, 25 bp, Artificial
  Probe
gataaatacatctatggagcacagg

SEQ ID NO: 148316 - DNA, 25 bp, Artificial
  Probe
ggataaatacatctatggagcacag

SEQ ID NO: 148317 - DNA, 25 bp, Artificial
  Probe
tatgagagtgcttccagatgagtca

SEQ ID NO: 148318 - DNA, 25 bp, Artificial
  Probe
tcttcaagtttgggatataggaggg

SEQ ID NO: 148319 - DNA, 25 bp, Artificial
  Probe
aatacatctatggagcacagggaat

SEQ ID NO: 148320 - DNA, 25 bp, Artificial
  Probe
ggaatcaagttaaacaaagcagaaa

SEQ ID NO: 148321 - DNA, 25 bp, Artificial
  Probe
ctgtatgagagtgcttccagatgag

SEQ ID NO: 148322 - DNA, 25 bp, Artificial
  Probe
aaatacatctatggagcacagggaa

SEQ ID NO: 148323 - DNA, 25 bp, Artificial
  Probe
ctcaagagacatttgggaaacagta

SEQ ID NO: 148324 - DNA, 25 bp, Artificial
  Probe
acactgtattgatagttctggctgc

SEQ ID NO: 148325 - DNA, 25 bp, Artificial
  Probe
ttggataaatacatctatggagcac

SEQ ID NO: 148326 - DNA, 25 bp, Artificial
  Probe
gttggataaatacatctatggagca

SEQ ID NO: 148327 - DNA, 25 bp, Artificial
  Probe
ctcttcaagtttgggatataggagg

SEQ ID NO: 148328 - DNA, 25 bp, Artificial
  Probe
gaatgttactcttcaagtttgggat

SEQ ID NO: 148329 - DNA, 25 bp, Artificial
  Probe
atacatctatggagcacagggaatc

SEQ ID NO: 148330 - DNA, 25 bp, Artificial
  Probe
actcttcaagtttgggatataggag

SEQ ID NO: 148331 - DNA, 25 bp, Artificial
  Probe
aagagacatttgggaaacagtacaa

SEQ ID NO: 148332 - DNA, 25 bp, Artificial
  Probe
agagacatttgggaaacagtacaag

SEQ ID NO: 148333 - DNA, 25 bp, Artificial
  Probe
tcaagagacatttgggaaacagtac

SEQ ID NO: 148334 - DNA, 25 bp, Artificial
  Probe
taaacaaagcagaaatagaacagtc

SEQ ID NO: 148335 - DNA, 25 bp, Artificial
  Probe
ctgggaatcaagttaaacaaagcag

SEQ ID NO: 148336 - DNA, 25 bp, Artificial
  Probe
tactcttcaagtttgggatatagga

SEQ ID NO: 148337 - DNA, 25 bp, Artificial
  Probe
tatattcagacaacagagtggatgc

SEQ ID NO: 148338 - DNA, 25 bp, Artificial
  Probe
aagtatattcagacaacagagtgga

SEQ ID NO: 148339 - DNA, 25 bp, Artificial
  Probe
aattggtgtggttagtcttgtgtaa

SEQ ID NO: 148340 - DNA, 25 bp, Artificial
  Probe
gtatattcagacaacagagtggatg

SEQ ID NO: 148341 - DNA, 25 bp, Artificial
  Probe
agtatattcagacaacagagtggat

SEQ ID NO: 148342 - DNA, 25 bp, Artificial
  Probe
tacagatcagtaggtgaatggctag

SEQ ID NO: 148343 - DNA, 25 bp, Artificial
  Probe
agatcagtaggtgaatggctagaag

SEQ ID NO: 148344 - DNA, 25 bp, Artificial
  Probe
cagatcagtaggtgaatggctagaa

SEQ ID NO: 148345 - DNA, 25 bp, Artificial
  Probe
attggtgtggttagtcttgtgtaac

SEQ ID NO: 148346 - DNA, 25 bp, Artificial
  Probe
tcttgtgtccagtatctttgctatt

SEQ ID NO: 148347 - DNA, 25 bp, Artificial
  Probe
ttcttgtgtccagtatctttgctat

SEQ ID NO: 148348 - DNA, 25 bp, Artificial
  Probe
cttcttgtgtccagtatctttgcta

SEQ ID NO: 148349 - DNA, 25 bp, Artificial
  Probe
cttgtgtccagtatctttgctattt

SEQ ID NO: 148350 - DNA, 25 bp, Artificial
  Probe
aaagtatattcagacaacagagtgg

SEQ ID NO: 148351 - DNA, 25 bp, Artificial
  Probe
tggataattggattacaacccttgg

SEQ ID NO: 148352 - DNA, 25 bp, Artificial
  Probe
ttggataattggattacaacccttg

SEQ ID NO: 148353 - DNA, 25 bp, Artificial
  Probe
gtttggataattggattacaaccct

SEQ ID NO: 148354 - DNA, 25 bp, Artificial
  Probe
agtttggataattggattacaaccc

SEQ ID NO: 148355 - DNA, 25 bp, Artificial
  Probe
acagatcagtaggtgaatggctaga

SEQ ID NO: 148356 - DNA, 25 bp, Artificial
  Probe
ttggtgtggttagtcttgtgtaaca

SEQ ID NO: 148357 - DNA, 25 bp, Artificial
  Probe
ataattggattacaacccttggcaa

SEQ ID NO: 148358 - DNA, 25 bp, Artificial
  Probe
taattggattacaacccttggcaaa

SEQ ID NO: 148359 - DNA, 25 bp, Artificial
  Probe
gataattggattacaacccttggca

SEQ ID NO: 148360 - DNA, 25 bp, Artificial
  Probe
atattcagacaacagagtggatgca

SEQ ID NO: 148361 - DNA, 25 bp, Artificial
  Probe
ctacagatcagtaggtgaatggcta

SEQ ID NO: 148362 - DNA, 25 bp, Artificial
  Probe
tttggataattggattacaaccctt

SEQ ID NO: 148363 - DNA, 25 bp, Artificial
  Probe
tattcagacaacagagtggatgcaa

SEQ ID NO: 148364 - DNA, 25 bp, Artificial
  Probe
gagtttggataattggattacaacc

SEQ ID NO: 148365 - DNA, 25 bp, Artificial
  Probe
ggataattggattacaacccttggc

SEQ ID NO: 148366 - DNA, 25 bp, Artificial
  Probe
taggtgaatggctagaagcaatcaa

SEQ ID NO: 148367 - DNA, 25 bp, Artificial
  Probe
aattggattacaacccttggcaaag

SEQ ID NO: 148368 - DNA, 25 bp, Artificial
  Probe
attcagacaacagagtggatgcaat

SEQ ID NO: 148369 - DNA, 25 bp, Artificial
  Probe
gttcctgcttcttgtgtccagtatc

SEQ ID NO: 148370 - DNA, 25 bp, Artificial
  Probe
aatggatacagttcaatggacgctg

SEQ ID NO: 148371 - DNA, 25 bp, Artificial
  Probe
aaatggatacagttcaatggacgct

SEQ ID NO: 148372 - DNA, 25 bp, Artificial
  Probe
ctgcttcttgtgtccagtatctttg

SEQ ID NO: 148373 - DNA, 25 bp, Artificial
  Probe
agtaggtgaatggctagaagcaatc

SEQ ID NO: 148374 - DNA, 25 bp, Artificial
  Probe
ttggattacaacccttggcaaagta

SEQ ID NO: 148375 - DNA, 25 bp, Artificial
  Probe
tcctgcttcttgtgtccagtatctt

SEQ ID NO: 148376 - DNA, 25 bp, Artificial
  Probe
ttcctgcttcttgtgtccagtatct

SEQ ID NO: 148377 - DNA, 25 bp, Artificial
  Probe
caattggtgtggttagtcttgtgta

SEQ ID NO: 148378 - DNA, 25 bp, Artificial
  Probe
gtaggtgaatggctagaagcaatca

SEQ ID NO: 148379 - DNA, 25 bp, Artificial
  Probe
cagtaggtgaatggctagaagcaat

SEQ ID NO: 148380 - DNA, 25 bp, Artificial
  Probe
gatcagtaggtgaatggctagaagc

SEQ ID NO: 148381 - DNA, 25 bp, Artificial
  Probe
gcttcttgtgtccagtatctttgct

SEQ ID NO: 148382 - DNA, 25 bp, Artificial
  Probe
tacagattccagttagttccatcag

SEQ ID NO: 148383 - DNA, 25 bp, Artificial
  Probe
gattccagttagttccatcagttct

SEQ ID NO: 148384 - DNA, 25 bp, Artificial
  Probe
agattccagttagttccatcagttc

SEQ ID NO: 148385 - DNA, 25 bp, Artificial
  Probe
cagattccagttagttccatcagtt

SEQ ID NO: 148386 - DNA, 25 bp, Artificial
  Probe
atacagattccagttagttccatca

SEQ ID NO: 148387 - DNA, 25 bp, Artificial
  Probe
ggactgtagttacgataccaatcta

SEQ ID NO: 148388 - DNA, 25 bp, Artificial
  Probe
acagattccagttagttccatcagt

SEQ ID NO: 148389 - DNA, 25 bp, Artificial
  Probe
tgatgatgaatactcagaactccaa

SEQ ID NO: 148390 - DNA, 25 bp, Artificial
  Probe
attaactcaatggtagatgtggagg

SEQ ID NO: 148391 - DNA, 25 bp, Artificial
  Probe
aactccagaatgagattgatagagc

SEQ ID NO: 148392 - DNA, 25 bp, Artificial
  Probe
gataccaatctatcctcttcatcgg

SEQ ID NO: 148393 - DNA, 25 bp, Artificial
  Probe
acgataccaatctatcctcttcatc

SEQ ID NO: 148394 - DNA, 25 bp, Artificial
  Probe
gttagttccatcagttctgtattct

SEQ ID NO: 148395 - DNA, 25 bp, Artificial
  Probe
agttagttccatcagttctgtattc

SEQ ID NO: 148396 - DNA, 25 bp, Artificial
  Probe
tctatacagattccagttagttcca

SEQ ID NO: 148397 - DNA, 25 bp, Artificial
  Probe
taactcaatggtagatgtggaggtt

SEQ ID NO: 148398 - DNA, 25 bp, Artificial
  Probe
ttaactcaatggtagatgtggaggt

SEQ ID NO: 148399 - DNA, 25 bp, Artificial
  Probe
tgattcttgtggaccatctatacag

SEQ ID NO: 148400 - DNA, 25 bp, Artificial
  Probe
ccagttagttccatcagttctgtat

SEQ ID NO: 148401 - DNA, 25 bp, Artificial
  Probe
gattcttgtggaccatctatacaga

SEQ ID NO: 148402 - DNA, 25 bp, Artificial
  Probe
attccagttagttccatcagttctg

SEQ ID NO: 148403 - DNA, 25 bp, Artificial
  Probe
atgattcttgtggaccatctataca

SEQ ID NO: 148404 - DNA, 25 bp, Artificial
  Probe
agttccatcagttctgtattctaac

SEQ ID NO: 148405 - DNA, 25 bp, Artificial
  Probe
gaacttcaatatccagccttgtgag

SEQ ID NO: 148406 - DNA, 25 bp, Artificial
  Probe
tccagttagttccatcagttctgta

SEQ ID NO: 148407 - DNA, 25 bp, Artificial
  Probe
ttcaatatccagccttgtgagaaga

SEQ ID NO: 148408 - DNA, 25 bp, Artificial
  Probe
cagaacttcaatatccagccttgtg

SEQ ID NO: 148409 - DNA, 25 bp, Artificial
  Probe
ttacgataccaatctatcctcttca

SEQ ID NO: 148410 - DNA, 25 bp, Artificial
  Probe
agttacgataccaatctatcctctt

SEQ ID NO: 148411 - DNA, 25 bp, Artificial
  Probe
ctatacagattccagttagttccat

SEQ ID NO: 148412 - DNA, 25 bp, Artificial
  Probe
acttcaatatccagccttgtgagaa

SEQ ID NO: 148413 - DNA, 25 bp, Artificial
  Probe
aacttcaatatccagccttgtgaga

SEQ ID NO: 148414 - DNA, 25 bp, Artificial
  Probe
agaacttcaatatccagccttgtga

SEQ ID NO: 148415 - DNA, 25 bp, Artificial
  Probe
cctcaggaaccatgttataatcttc

SEQ ID NO: 148416 - DNA, 25 bp, Artificial
  Probe
ataccaatctatcctcttcatcgga

SEQ ID NO: 148417 - DNA, 25 bp, Artificial
  Probe
tacgataccaatctatcctcttcat

SEQ ID NO: 148418 - DNA, 25 bp, Artificial
  Probe
gttacgataccaatctatcctcttc

SEQ ID NO: 148419 - DNA, 25 bp, Artificial
  Probe
tatacagattccagttagttccatc

SEQ ID NO: 148420 - DNA, 25 bp, Artificial
  Probe
cagttagttccatcagttctgtatt

SEQ ID NO: 148421 - DNA, 25 bp, Artificial
  Probe
taccaatctatcctcttcatcggaa

SEQ ID NO: 148422 - DNA, 25 bp, Artificial
  Probe
tgtagttacgataccaatctatcct

SEQ ID NO: 148423 - DNA, 25 bp, Artificial
  Probe
ttccagttagttccatcagttctgt

SEQ ID NO: 148424 - DNA, 25 bp, Artificial
  Probe
ctgtagttacgataccaatctatcc

SEQ ID NO: 148425 - DNA, 25 bp, Artificial
  Probe
ctcaatggtagatgtggaggttcat

SEQ ID NO: 148426 - DNA, 25 bp, Artificial
  Probe
ggaaccatgttataatcttcaagga

SEQ ID NO: 148427 - DNA, 25 bp, Artificial
  Probe
ttctgttgccttgttctatctgtaa

SEQ ID NO: 148428 - DNA, 25 bp, Artificial
  Probe
tcagagaacattagtccaagaagaa

SEQ ID NO: 148429 - DNA, 25 bp, Artificial
  Probe
atcagagaacattagtccaagaaga

SEQ ID NO: 148430 - DNA, 25 bp, Artificial
  Probe
agagaacattagtccaagaagaaga

SEQ ID NO: 148431 - DNA, 25 bp, Artificial
  Probe
cagagaacattagtccaagaagaag

SEQ ID NO: 148432 - DNA, 25 bp, Artificial
  Probe
aatcagagaacattagtccaagaag

SEQ ID NO: 148433 - DNA, 25 bp, Artificial
  Probe
gagaacattagtccaagaagaagat

SEQ ID NO: 148434 - DNA, 25 bp, Artificial
  Probe
tctgttgccttgttctatctgtaaa

SEQ ID NO: 148435 - DNA, 25 bp, Artificial
  Probe
tttctgttgccttgttctatctgta

SEQ ID NO: 148436 - DNA, 25 bp, Artificial
  Probe
agaacattagtccaagaagaagata

SEQ ID NO: 148437 - DNA, 25 bp, Artificial
  Probe
gttgatacagatgttagtcccgaat

SEQ ID NO: 148438 - DNA, 25 bp, Artificial
  Probe
ttgatacagatgttagtcccgaatc

SEQ ID NO: 148439 - DNA, 25 bp, Artificial
  Probe
gagtttctgttgccttgttctatct

SEQ ID NO: 148440 - DNA, 25 bp, Artificial
  Probe
aaggaagcattgaaagacagactta

SEQ ID NO: 148441 - DNA, 25 bp, Artificial
  Probe
ggaagcattgaaagacagacttaaa

SEQ ID NO: 148442 - DNA, 25 bp, Artificial
  Probe
gagatcaagactggatgtgcatatc

SEQ ID NO: 148443 - DNA, 25 bp, Artificial
  Probe
aggaagcattgaaagacagacttaa

SEQ ID NO: 148444 - DNA, 25 bp, Artificial
  Probe
ccttgttctatctgtaaactgtgga

SEQ ID NO: 148445 - DNA, 25 bp, Artificial
  Probe
gttgccttgttctatctgtaaactg

SEQ ID NO: 148446 - DNA, 25 bp, Artificial
  Probe
ctgttgccttgttctatctgtaaac

SEQ ID NO: 148447 - DNA, 25 bp, Artificial
  Probe
ttgccttgttctatctgtaaactgt

SEQ ID NO: 148448 - DNA, 25 bp, Artificial
  Probe
tgttgccttgttctatctgtaaact

SEQ ID NO: 148449 - DNA, 25 bp, Artificial
  Probe
agtttctgttgccttgttctatctg

SEQ ID NO: 148450 - DNA, 25 bp, Artificial
  Probe
aaaggaagcattgaaagacagactt

SEQ ID NO: 148451 - DNA, 25 bp, Artificial
  Probe
tgccttgttctatctgtaaactgtg

SEQ ID NO: 148452 - DNA, 25 bp, Artificial
  Probe
gtttctgttgccttgttctatctgt

SEQ ID NO: 148453 - DNA, 25 bp, Artificial
  Probe
agcattgaaagacagacttaaagaa

SEQ ID NO: 148454 - DNA, 25 bp, Artificial
  Probe
aagcattgaaagacagacttaaaga

SEQ ID NO: 148455 - DNA, 25 bp, Artificial
  Probe
tgagatcaagactggatgtgcatat

SEQ ID NO: 148456 - DNA, 25 bp, Artificial
  Probe
gaagcattgaaagacagacttaaag

SEQ ID NO: 148457 - DNA, 25 bp, Artificial
  Probe
cttgttctatctgtaaactgtggaa

SEQ ID NO: 148458 - DNA, 25 bp, Artificial
  Probe
ggcttcctaacatggttgtactaca

SEQ ID NO: 148459 - DNA, 25 bp, Artificial
  Probe
aagaagatataaagatcgcttgcct

SEQ ID NO: 148460 - DNA, 25 bp, Artificial
  Probe
gaagaagatataaagatcgcttgcc

SEQ ID NO: 148461 - DNA, 25 bp, Artificial
  Probe
agaagatataaagatcgcttgcctc

SEQ ID NO: 148462 - DNA, 25 bp, Artificial
  Probe
aaatcagagaacattagtccaagaa

SEQ ID NO: 148463 - DNA, 25 bp, Artificial
  Probe
gccttgttctatctgtaaactgtgg

SEQ ID NO: 148464 - DNA, 25 bp, Artificial
  Probe
agaagaagatataaagatcgcttgc

SEQ ID NO: 148465 - DNA, 25 bp, Artificial
  Probe
cgagtttctgttgccttgttctatc

SEQ ID NO: 148466 - DNA, 25 bp, Artificial
  Probe
caaaggaagcattgaaagacagact

SEQ ID NO: 148467 - DNA, 25 bp, Artificial
  Probe
gcattgaaagacagacttaaagaat

SEQ ID NO: 148468 - DNA, 25 bp, Artificial
  Probe
ccaagaagaagatataaagatcgct

SEQ ID NO: 148469 - DNA, 25 bp, Artificial
  Probe
tccaagaagaagatataaagatcgc

SEQ ID NO: 148470 - DNA, 25 bp, Artificial
  Probe
gaagatataaagatcgcttgcctcc

SEQ ID NO: 148471 - DNA, 25 bp, Artificial
  Probe
atagtgatatgatagcacccatctg

SEQ ID NO: 148472 - DNA, 25 bp, Artificial
  Probe
atcacaatagtagagcaacacgaag

SEQ ID NO: 148473 - DNA, 25 bp, Artificial
  Probe
ttagttgttaggttggttctgtgtg

SEQ ID NO: 148474 - DNA, 25 bp, Artificial
  Probe
catcacaatagtagagcaacacgaa

SEQ ID NO: 148475 - DNA, 25 bp, Artificial
  Probe
acctcactgactaccttatgaagat

SEQ ID NO: 148476 - DNA, 25 bp, Artificial
  Probe
cacaatagtagagcaacacgaagtt

SEQ ID NO: 148477 - DNA, 25 bp, Artificial
  Probe
cactgactaccttatgaagatcctc

SEQ ID NO: 148478 - DNA, 25 bp, Artificial
  Probe
gacctcactgactaccttatgaaga

SEQ ID NO: 148479 - DNA, 25 bp, Artificial
  Probe
tagttgttaggttggttctgtgtga

SEQ ID NO: 148480 - DNA, 25 bp, Artificial
  Probe
tcacaatagtagagcaacacgaagt

SEQ ID NO: 148481 - DNA, 25 bp, Artificial
  Probe
gactaccttatgaagatcctcactg

SEQ ID NO: 148482 - DNA, 25 bp, Artificial
  Probe
ctgactaccttatgaagatcctcac

SEQ ID NO: 148483 - DNA, 25 bp, Artificial
  Probe
ctcactgactaccttatgaagatcc

SEQ ID NO: 148484 - DNA, 25 bp, Artificial
  Probe
cctcactgactaccttatgaagatc

SEQ ID NO: 148485 - DNA, 25 bp, Artificial
  Probe
actaccttatgaagatcctcactga

SEQ ID NO: 148486 - DNA, 25 bp, Artificial
  Probe
tgactaccttatgaagatcctcact

SEQ ID NO: 148487 - DNA, 25 bp, Artificial
  Probe
actgactaccttatgaagatcctca

SEQ ID NO: 148488 - DNA, 25 bp, Artificial
  Probe
tcactgactaccttatgaagatcct

SEQ ID NO: 148489 - DNA, 25 bp, Artificial
  Probe
ggacctcactgactaccttatgaag

SEQ ID NO: 148490 - DNA, 25 bp, Artificial
  Probe
ctaccttatgaagatcctcactgag

SEQ ID NO: 148491 - DNA, 25 bp, Artificial
  Probe
agttgttaggttggttctgtgtgag

SEQ ID NO: 148492 - DNA, 25 bp, Artificial
  Probe
gtttagttgttaggttggttctgtg

SEQ ID NO: 148493 - DNA, 25 bp, Artificial
  Probe
gttctgtggtttagttgttaggttg

SEQ ID NO: 148494 - DNA, 25 bp, Artificial
  Probe
agttctgtggtttagttgttaggtt

SEQ ID NO: 148495 - DNA, 25 bp, Artificial
  Probe
taccttatgaagatcctcactgagc

SEQ ID NO: 148496 - DNA, 25 bp, Artificial
  Probe
tttagttgttaggttggttctgtgt

SEQ ID NO: 148497 - DNA, 25 bp, Artificial
  Probe
tagttctgtggtttagttgttaggt

SEQ ID NO: 148498 - DNA, 25 bp, Artificial
  Probe
acacgaagtttacccaatagattca

SEQ ID NO: 148499 - DNA, 25 bp, Artificial
  Probe
ggtttagttgttaggttggttctgt

SEQ ID NO: 148500 - DNA, 25 bp, Artificial
  Probe
tggtttagttgttaggttggttctg

SEQ ID NO: 148501 - DNA, 25 bp, Artificial
  Probe
gtggtttagttgttaggttggttct

SEQ ID NO: 148502 - DNA, 25 bp, Artificial
  Probe
ttctgtggtttagttgttaggttgg

SEQ ID NO: 148503 - DNA, 25 bp, Artificial
  Probe
gttctgtgtgagggataaagataga

SEQ ID NO: 148504 - DNA, 25 bp, Artificial
  Probe
ggttctgtgtgagggataaagatag

SEQ ID NO: 148505 - DNA, 25 bp, Artificial
  Probe
caacacgaagtttacccaatagatt

SEQ ID NO: 148506 - DNA, 25 bp, Artificial
  Probe
cacgaagtttacccaatagattcat

SEQ ID NO: 148507 - DNA, 25 bp, Artificial
  Probe
atagtagagcaacacgaagtttacc

SEQ ID NO: 148508 - DNA, 25 bp, Artificial
  Probe
tgtggtttagttgttaggttggttc

SEQ ID NO: 148509 - DNA, 25 bp, Artificial
  Probe
ctgtggtttagttgttaggttggtt

SEQ ID NO: 148510 - DNA, 25 bp, Artificial
  Probe
ttagttctgtggtttagttgttagg

SEQ ID NO: 148511 - DNA, 25 bp, Artificial
  Probe
aacacgaagtttacccaatagattc

SEQ ID NO: 148512 - DNA, 25 bp, Artificial
  Probe
acaatagtagagcaacacgaagttt

SEQ ID NO: 148513 - DNA, 25 bp, Artificial
  Probe
gcatcacaatagtagagcaacacga

SEQ ID NO: 148514 - DNA, 25 bp, Artificial
  Probe
aatagtagagcaacacgaagtttac

SEQ ID NO: 148515 - DNA, 25 bp, Artificial
  Probe
caatagtagagcaacacgaagttta

SEQ ID NO: 148516 - DNA, 25 bp, Artificial
  Probe
tggtaataagagggtcaaggctatt

SEQ ID NO: 148517 - DNA, 25 bp, Artificial
  Probe
ctttcagatgttcagatgtcagaga

SEQ ID NO: 148518 - DNA, 25 bp, Artificial
  Probe
ttcatccatcaaacaagacctcatt

SEQ ID NO: 148519 - DNA, 25 bp, Artificial
  Probe
tagtcatatacccatctgtccattc

SEQ ID NO: 148520 - DNA, 25 bp, Artificial
  Probe
tcatccatcaaacaagacctcattc

SEQ ID NO: 148521 - DNA, 25 bp, Artificial
  Probe
tctttcagatgttcagatgtcagag

SEQ ID NO: 148522 - DNA, 25 bp, Artificial
  Probe
ctctttcagatgttcagatgtcaga

SEQ ID NO: 148523 - DNA, 25 bp, Artificial
  Probe
ttcagatgttcagatgtcagagacg

SEQ ID NO: 148524 - DNA, 25 bp, Artificial
  Probe
caatgaggacactcttcacaaggaa

SEQ ID NO: 148525 - DNA, 25 bp, Artificial
  Probe
cattgcctagtcatatacccatctg

SEQ ID NO: 148526 - DNA, 25 bp, Artificial
  Probe
agtcatatacccatctgtccattcc

SEQ ID NO: 148527 - DNA, 25 bp, Artificial
  Probe
cctagtcatatacccatctgtccat

SEQ ID NO: 148528 - DNA, 25 bp, Artificial
  Probe
ctagtcatatacccatctgtccatt

SEQ ID NO: 148529 - DNA, 25 bp, Artificial
  Probe
attgcctagtcatatacccatctgt

SEQ ID NO: 148530 - DNA, 25 bp, Artificial
  Probe
atccatcaaacaagacctcattctg

SEQ ID NO: 148531 - DNA, 25 bp, Artificial
  Probe
catccatcaaacaagacctcattct

SEQ ID NO: 148532 - DNA, 25 bp, Artificial
  Probe
cctctttcagatgttcagatgtcag

SEQ ID NO: 148533 - DNA, 25 bp, Artificial
  Probe
gtcatatacccatctgtccattcca

SEQ ID NO: 148534 - DNA, 25 bp, Artificial
  Probe
gttcatccatcaaacaagacctcat

SEQ ID NO: 148535 - DNA, 25 bp, Artificial
  Probe
ccttatgtttcctgggtctttatta

SEQ ID NO: 148536 - DNA, 25 bp, Artificial
  Probe
aaacagcattgcctagtcatatacc

SEQ ID NO: 148537 - DNA, 25 bp, Artificial
  Probe
ttgcctagtcatatacccatctgtc

SEQ ID NO: 148538 - DNA, 25 bp, Artificial
  Probe
caaacagcattgcctagtcatatac

SEQ ID NO: 148539 - DNA, 25 bp, Artificial
  Probe
acaaacagcattgcctagtcatata

SEQ ID NO: 148540 - DNA, 25 bp, Artificial
  Probe
tttcagatgttcagatgtcagagac

SEQ ID NO: 148541 - DNA, 25 bp, Artificial
  Probe
atcaaacaagacctcattctgtgac

SEQ ID NO: 148542 - DNA, 25 bp, Artificial
  Probe
catcaaacaagacctcattctgtga

SEQ ID NO: 148543 - DNA, 25 bp, Artificial
  Probe
tccatgtttctgttcatccatcaaa

SEQ ID NO: 148544 - DNA, 25 bp, Artificial
  Probe
caagcctctttcagatgttcagatg

SEQ ID NO: 148545 - DNA, 25 bp, Artificial
  Probe
gatgggaatctctgtacttcacatt

SEQ ID NO: 148546 - DNA, 25 bp, Artificial
  Probe
ctccatgtttctgttcatccatcaa

SEQ ID NO: 148547 - DNA, 25 bp, Artificial
  Probe
tcaatgaggacactcttcacaagga

SEQ ID NO: 148548 - DNA, 25 bp, Artificial
  Probe
ctctccatgtttctgttcatccatc

SEQ ID NO: 148549 - DNA, 25 bp, Artificial
  Probe
aagcctctttcagatgttcagatgt

SEQ ID NO: 148550 - DNA, 25 bp, Artificial
  Probe
tcatatacccatctgtccattccag

SEQ ID NO: 148551 - DNA, 25 bp, Artificial
  Probe
cacaaacagcattgcctagtcatat

SEQ ID NO: 148552 - DNA, 25 bp, Artificial
  Probe
gcattgcctagtcatatacccatct

SEQ ID NO: 148553 - DNA, 25 bp, Artificial
  Probe
agcattgcctagtcatatacccatc

SEQ ID NO: 148554 - DNA, 25 bp, Artificial
  Probe
gtcaatgaggacactcttcacaagg

SEQ ID NO: 148555 - DNA, 25 bp, Artificial
  Probe
caaacaagacctcattctgtgactc

SEQ ID NO: 148556 - DNA, 25 bp, Artificial
  Probe
aatgaggacactcttcacaaggaaa

SEQ ID NO: 148557 - DNA, 25 bp, Artificial
  Probe
cttatgtttcctgggtctttattac

SEQ ID NO: 148558 - DNA, 25 bp, Artificial
  Probe
tatgtttcctgggtctttattaccg

SEQ ID NO: 148559 - DNA, 25 bp, Artificial
  Probe
attatatggagacgaaagaccagtg

SEQ ID NO: 148560 - DNA, 25 bp, Artificial
  Probe
cattatatggagacgaaagaccagt

SEQ ID NO: 148561 - DNA, 25 bp, Artificial
  Probe
cagcattgcctagtcatatacccat

SEQ ID NO: 148562 - DNA, 25 bp, Artificial
  Probe
ttatgtgatctgctctcctaagtcc

SEQ ID NO: 148563 - DNA, 25 bp, Artificial
  Probe
tatgtgatctgctctcctaagtcca

SEQ ID NO: 148564 - DNA, 25 bp, Artificial
  Probe
ttctgaggtaatgactttggaattg

SEQ ID NO: 148565 - DNA, 25 bp, Artificial
  Probe
aggtaatgactttggaattgctgag

SEQ ID NO: 148566 - DNA, 25 bp, Artificial
  Probe
gaggtaatgactttggaattgctga

SEQ ID NO: 148567 - DNA, 25 bp, Artificial
  Probe
ctgaggtaatgactttggaattgct

SEQ ID NO: 148568 - DNA, 25 bp, Artificial
  Probe
tctgaggtaatgactttggaattgc

SEQ ID NO: 148569 - DNA, 25 bp, Artificial
  Probe
tttatgtgatctgctctcctaagtc

SEQ ID NO: 148570 - DNA, 25 bp, Artificial
  Probe
tgaggtaatgactttggaattgctg

SEQ ID NO: 148571 - DNA, 25 bp, Artificial
  Probe
ctttatgtgatctgctctcctaagt

SEQ ID NO: 148572 - DNA, 25 bp, Artificial
  Probe
actttatgtgatctgctctcctaag

SEQ ID NO: 148573 - DNA, 25 bp, Artificial
  Probe
atgtgatctgctctcctaagtccaa

SEQ ID NO: 148574 - DNA, 25 bp, Artificial
  Probe
tactttatgtgatctgctctcctaa

SEQ ID NO: 148575 - DNA, 25 bp, Artificial
  Probe
atactttatgtgatctgctctccta

SEQ ID NO: 148576 - DNA, 25 bp, Artificial
  Probe
tatactttatgtgatctgctctcct

SEQ ID NO: 148577 - DNA, 25 bp, Artificial
  Probe
ctatactttatgtgatctgctctcc

SEQ ID NO: 148578 - DNA, 25 bp, Artificial
  Probe
gtaatgactttggaattgctgaggg

SEQ ID NO: 148579 - DNA, 25 bp, Artificial
  Probe
ggtaatgactttggaattgctgagg

SEQ ID NO: 148580 - DNA, 25 bp, Artificial
  Probe
tgactatactttatgtgatctgctc

SEQ ID NO: 148581 - DNA, 25 bp, Artificial
  Probe
actatactttatgtgatctgctctc

SEQ ID NO: 148582 - DNA, 25 bp, Artificial
  Probe
gactatactttatgtgatctgctct

SEQ ID NO: 148583 - DNA, 25 bp, Artificial
  Probe
ttgactatactttatgtgatctgct

SEQ ID NO: 148584 - DNA, 25 bp, Artificial
  Probe
tgtgatctgctctcctaagtccaac

SEQ ID NO: 148585 - DNA, 25 bp, Artificial
  Probe
caaccggctcgaagatacaataatg

SEQ ID NO: 148586 - DNA, 25 bp, Artificial
  Probe
cttgactatactttatgtgatctgc

SEQ ID NO: 148587 - DNA, 25 bp, Artificial
  Probe
attctgaggtaatgactttggaatt

SEQ ID NO: 148588 - DNA, 25 bp, Artificial
  Probe
aattctgaggtaatgactttggaat

SEQ ID NO: 148589 - DNA, 25 bp, Artificial
  Probe
acaaccggctcgaagatacaataat

SEQ ID NO: 148590 - DNA, 25 bp, Artificial
  Probe
atgtttgtaactggaattaaaggat

SEQ ID NO: 148591 - DNA, 25 bp, Artificial
  Probe
gtgcggacaattccacactttattt

SEQ ID NO: 148592 - DNA, 25 bp, Artificial
  Probe
aaccggctcgaagatacaataatgg

SEQ ID NO: 148593 - DNA, 25 bp, Artificial
  Probe
taatgactttggaattgctgagggc

SEQ ID NO: 148594 - DNA, 25 bp, Artificial
  Probe
cttactaactaaaggggcattgtcc

SEQ ID NO: 148595 - DNA, 25 bp, Artificial
  Probe
gtgatctgctctcctaagtccaacc

SEQ ID NO: 148596 - DNA, 25 bp, Artificial
  Probe
gaattctgaggtaatgactttggaa

SEQ ID NO: 148597 - DNA, 25 bp, Artificial
  Probe
ttactaactaaaggggcattgtcca

SEQ ID NO: 148598 - DNA, 25 bp, Artificial
  Probe
tgatctgctctcctaagtccaacct

SEQ ID NO: 148599 - DNA, 25 bp, Artificial
  Probe
cacaaccggctcgaagatacaataa

SEQ ID NO: 148600 - DNA, 25 bp, Artificial
  Probe
gcttactaactaaaggggcattgtc

SEQ ID NO: 148601 - DNA, 25 bp, Artificial
  Probe
tgtttgtaactggaattaaaggata

SEQ ID NO: 148602 - DNA, 25 bp, Artificial
  Probe
tatgtttgtaactggaattaaagga

SEQ ID NO: 148603 - DNA, 25 bp, Artificial
  Probe
tactaactaaaggggcattgtccac

SEQ ID NO: 148604 - DNA, 25 bp, Artificial
  Probe
cggacaattccacactttattttct

SEQ ID NO: 148605 - DNA, 25 bp, Artificial
  Probe
tttgaccccagcttactaactaaag

SEQ ID NO: 148606 - DNA, 25 bp, Artificial
  Probe
tttgtaactggaattaaaggatagt

SEQ ID NO: 148607 - DNA, 25 bp, Artificial
  Probe
aatcttcgtatcaagtctgtagagc

SEQ ID NO: 148608 - DNA, 25 bp, Artificial
  Probe
gtactggtacaagcaagactctaag

SEQ ID NO: 148609 - DNA, 25 bp, Artificial
  Probe
tgaatcttcgtatcaagtctgtaga

SEQ ID NO: 148610 - DNA, 25 bp, Artificial
  Probe
gaatcttcgtatcaagtctgtagag

SEQ ID NO: 148611 - DNA, 25 bp, Artificial
  Probe
atcttcgtatcaagtctgtagagcc

SEQ ID NO: 148612 - DNA, 25 bp, Artificial
  Probe
ggtacaagcaagactctaagcaatt

SEQ ID NO: 148613 - DNA, 25 bp, Artificial
  Probe
tactggtacaagcaagactctaagc

SEQ ID NO: 148614 - DNA, 25 bp, Artificial
  Probe
tggtacaagcaagactctaagcaat

SEQ ID NO: 148615 - DNA, 25 bp, Artificial
  Probe
gcttcttgcctcagtcttcagataa

SEQ ID NO: 148616 - DNA, 25 bp, Artificial
  Probe
ttcttgcctcagtcttcagataaag

SEQ ID NO: 148617 - DNA, 25 bp, Artificial
  Probe
cttcttgcctcagtcttcagataaa

SEQ ID NO: 148618 - DNA, 25 bp, Artificial
  Probe
ctggtacaagcaagactctaagcaa

SEQ ID NO: 148619 - DNA, 25 bp, Artificial
  Probe
tcttcgtatcaagtctgtagagccg

SEQ ID NO: 148620 - DNA, 25 bp, Artificial
  Probe
cctcagtcttcagataaagctcatt

SEQ ID NO: 148621 - DNA, 25 bp, Artificial
  Probe
tactatgtactggtacaagcaagac

SEQ ID NO: 148622 - DNA, 25 bp, Artificial
  Probe
ttgaatcttcgtatcaagtctgtag

SEQ ID NO: 148623 - DNA, 25 bp, Artificial
  Probe
gccacaatactatgtactggtacaa

SEQ ID NO: 148624 - DNA, 25 bp, Artificial
  Probe
gtacaagcaagactctaagcaattg

SEQ ID NO: 148625 - DNA, 25 bp, Artificial
  Probe
acaatactatgtactggtacaagca

SEQ ID NO: 148626 - DNA, 25 bp, Artificial
  Probe
tcagtcttcagataaagctcatttg

SEQ ID NO: 148627 - DNA, 25 bp, Artificial
  Probe
ctatgtactggtacaagcaagactc

SEQ ID NO: 148628 - DNA, 25 bp, Artificial
  Probe
cacaatactatgtactggtacaagc

SEQ ID NO: 148629 - DNA, 25 bp, Artificial
  Probe
tcttgcctcagtcttcagataaagc

SEQ ID NO: 148630 - DNA, 25 bp, Artificial
  Probe
actggtacaagcaagactctaagca

SEQ ID NO: 148631 - DNA, 25 bp, Artificial
  Probe
atgtactggtacaagcaagactcta

SEQ ID NO: 148632 - DNA, 25 bp, Artificial
  Probe
tatgtactggtacaagcaagactct

SEQ ID NO: 148633 - DNA, 25 bp, Artificial
  Probe
ctcagtcttcagataaagctcattt

SEQ ID NO: 148634 - DNA, 25 bp, Artificial
  Probe
atactatgtactggtacaagcaaga

SEQ ID NO: 148635 - DNA, 25 bp, Artificial
  Probe
tgtactggtacaagcaagactctaa

SEQ ID NO: 148636 - DNA, 25 bp, Artificial
  Probe
actatgtactggtacaagcaagact

SEQ ID NO: 148637 - DNA, 25 bp, Artificial
  Probe
aaagctcatttgaatcttcgtatca

SEQ ID NO: 148638 - DNA, 25 bp, Artificial
  Probe
cagtcttcagataaagctcatttga

SEQ ID NO: 148639 - DNA, 25 bp, Artificial
  Probe
ccacaatactatgtactggtacaag

SEQ ID NO: 148640 - DNA, 25 bp, Artificial
  Probe
caatactatgtactggtacaagcaa

SEQ ID NO: 148641 - DNA, 25 bp, Artificial
  Probe
aatactatgtactggtacaagcaag

SEQ ID NO: 148642 - DNA, 25 bp, Artificial
  Probe
tttccagactccaaagtatcgtgtc

SEQ ID NO: 148643 - DNA, 25 bp, Artificial
  Probe
aagtgttcttcaagtgtgatcagac

SEQ ID NO: 148644 - DNA, 25 bp, Artificial
  Probe
cgcttcttgcctcagtcttcagata

SEQ ID NO: 148645 - DNA, 25 bp, Artificial
  Probe
ctacaacaataagcaacgcatttta

SEQ ID NO: 148646 - DNA, 25 bp, Artificial
  Probe
tgttcttcaagtgtgatcagactct

SEQ ID NO: 148647 - DNA, 25 bp, Artificial
  Probe
gtgttcttcaagtgtgatcagactc

SEQ ID NO: 148648 - DNA, 25 bp, Artificial
  Probe
taaagctcatttgaatcttcgtatc

SEQ ID NO: 148649 - DNA, 25 bp, Artificial
  Probe
gataaagctcatttgaatcttcgta

SEQ ID NO: 148650 - DNA, 25 bp, Artificial
  Probe
gcctcagtcttcagataaagctcat

SEQ ID NO: 148651 - DNA, 25 bp, Artificial
  Probe
ggtgactctgctgtgtatctctgtg

SEQ ID NO: 148652 - DNA, 25 bp, Artificial
  Probe
tctactactcaataactgaaagcga

SEQ ID NO: 148653 - DNA, 25 bp, Artificial
  Probe
gctgaccttgaaatgtaaacagaat

SEQ ID NO: 148654 - DNA, 25 bp, Artificial
  Probe
actactcaataactgaaagcgatct

SEQ ID NO: 148655 - DNA, 25 bp, Artificial
  Probe
gactgatctactactcaataactga

SEQ ID NO: 148656 - DNA, 25 bp, Artificial
  Probe
agactgatctactactcaataactg

SEQ ID NO: 148657 - DNA, 25 bp, Artificial
  Probe
ctactactcaataactgaaagcgat

SEQ ID NO: 148658 - DNA, 25 bp, Artificial
  Probe
atctactactcaataactgaaagcg

SEQ ID NO: 148659 - DNA, 25 bp, Artificial
  Probe
tactcaataactgaaagcgatcttc

SEQ ID NO: 148660 - DNA, 25 bp, Artificial
  Probe
ctactcaataactgaaagcgatctt

SEQ ID NO: 148661 - DNA, 25 bp, Artificial
  Probe
tactactcaataactgaaagcgatc

SEQ ID NO: 148662 - DNA, 25 bp, Artificial
  Probe
ccattactcagacacccaaattcct

SEQ ID NO: 148663 - DNA, 25 bp, Artificial
  Probe
cattactcagacacccaaattcctg

SEQ ID NO: 148664 - DNA, 25 bp, Artificial
  Probe
aagagctgaccttgaaatgtaaaca

SEQ ID NO: 148665 - DNA, 25 bp, Artificial
  Probe
actgatctactactcaataactgaa

SEQ ID NO: 148666 - DNA, 25 bp, Artificial
  Probe
ctgaccttgaaatgtaaacagaatt

SEQ ID NO: 148667 - DNA, 25 bp, Artificial
  Probe
tgaccttgaaatgtaaacagaattt

SEQ ID NO: 148668 - DNA, 25 bp, Artificial
  Probe
agctgaccttgaaatgtaaacagaa

SEQ ID NO: 148669 - DNA, 25 bp, Artificial
  Probe
gagctgaccttgaaatgtaaacaga

SEQ ID NO: 148670 - DNA, 25 bp, Artificial
  Probe
agagctgaccttgaaatgtaaacag

SEQ ID NO: 148671 - DNA, 25 bp, Artificial
  Probe
tgccattactcagacacccaaattc

SEQ ID NO: 148672 - DNA, 25 bp, Artificial
  Probe
ctcaataactgaaagcgatcttcaa

SEQ ID NO: 148673 - DNA, 25 bp, Artificial
  Probe
gatctactactcaataactgaaagc

SEQ ID NO: 148674 - DNA, 25 bp, Artificial
  Probe
actcaataactgaaagcgatcttca

SEQ ID NO: 148675 - DNA, 25 bp, Artificial
  Probe
tcaataactgaaagcgatcttcaaa

SEQ ID NO: 148676 - DNA, 25 bp, Artificial
  Probe
gccattactcagacacccaaattcc

SEQ ID NO: 148677 - DNA, 25 bp, Artificial
  Probe
gtgccattactcagacacccaaatt

SEQ ID NO: 148678 - DNA, 25 bp, Artificial
  Probe
catgattcaatgttctggtaccgac

SEQ ID NO: 148679 - DNA, 25 bp, Artificial
  Probe
tcatgattcaatgttctggtaccga

SEQ ID NO: 148680 - DNA, 25 bp, Artificial
  Probe
caagagctgaccttgaaatgtaaac

SEQ ID NO: 148681 - DNA, 25 bp, Artificial
  Probe
tactcagacacccaaattcctgatt

SEQ ID NO: 148682 - DNA, 25 bp, Artificial
  Probe
ttactcagacacccaaattcctgat

SEQ ID NO: 148683 - DNA, 25 bp, Artificial
  Probe
attactcagacacccaaattcctga

SEQ ID NO: 148684 - DNA, 25 bp, Artificial
  Probe
tgatctactactcaataactgaaag

SEQ ID NO: 148685 - DNA, 25 bp, Artificial
  Probe
ctgatctactactcaataactgaaa

SEQ ID NO: 148686 - DNA, 25 bp, Artificial
  Probe
gattcaatgttctggtaccgacaag

SEQ ID NO: 148687 - DNA, 25 bp, Artificial
  Probe
ttcaatgttctggtaccgacaagat

SEQ ID NO: 148688 - DNA, 25 bp, Artificial
  Probe
attcaatgttctggtaccgacaaga

SEQ ID NO: 148689 - DNA, 25 bp, Artificial
  Probe
atgattcaatgttctggtaccgaca

SEQ ID NO: 148690 - DNA, 25 bp, Artificial
  Probe
tgattcaatgttctggtaccgacaa

SEQ ID NO: 148691 - DNA, 25 bp, Artificial
  Probe
gcaagagctgaccttgaaatgtaaa

SEQ ID NO: 148692 - DNA, 25 bp, Artificial
  Probe
caaattcctgattggtcatgaaggg

SEQ ID NO: 148693 - DNA, 25 bp, Artificial
  Probe
tcaatgttctggtaccgacaagatc

SEQ ID NO: 148694 - DNA, 25 bp, Artificial
  Probe
caataactgaaagcgatcttcaaaa

SEQ ID NO: 148695 - DNA, 25 bp, Artificial
  Probe
actcagacacccaaattcctgattg

SEQ ID NO: 148696 - DNA, 25 bp, Artificial
  Probe
tcactgtgaaatctgcccagaagag

SEQ ID NO: 148697 - DNA, 25 bp, Artificial
  Probe
atgtatagccttcaagaagcagatg

SEQ ID NO: 148698 - DNA, 25 bp, Artificial
  Probe
catgtatagccttcaagaagcagat

SEQ ID NO: 148699 - DNA, 25 bp, Artificial
  Probe
gtatagccttcaagaagcagatgtg

SEQ ID NO: 148700 - DNA, 25 bp, Artificial
  Probe
tgtatagccttcaagaagcagatgt

SEQ ID NO: 148701 - DNA, 25 bp, Artificial
  Probe
tgctccttgaaattcactaacatat

SEQ ID NO: 148702 - DNA, 25 bp, Artificial
  Probe
gatttcaaacctagaaggctgacat

SEQ ID NO: 148703 - DNA, 25 bp, Artificial
  Probe
atgatttcaaacctagaaggctgac

SEQ ID NO: 148704 - DNA, 25 bp, Artificial
  Probe
gatgtgctccttgaaattcactaac

SEQ ID NO: 148705 - DNA, 25 bp, Artificial
  Probe
agatgtgctccttgaaattcactaa

SEQ ID NO: 148706 - DNA, 25 bp, Artificial
  Probe
gtgctccttgaaattcactaacata

SEQ ID NO: 148707 - DNA, 25 bp, Artificial
  Probe
tgtgctccttgaaattcactaacat

SEQ ID NO: 148708 - DNA, 25 bp, Artificial
  Probe
atgtgctccttgaaattcactaaca

SEQ ID NO: 148709 - DNA, 25 bp, Artificial
  Probe
cagatgtgctccttgaaattcacta

SEQ ID NO: 148710 - DNA, 25 bp, Artificial
  Probe
aacatgatttcaaacctagaaggct

SEQ ID NO: 148711 - DNA, 25 bp, Artificial
  Probe
taacatgatttcaaacctagaaggc

SEQ ID NO: 148712 - DNA, 25 bp, Artificial
  Probe
catgatttcaaacctagaaggctga

SEQ ID NO: 148713 - DNA, 25 bp, Artificial
  Probe
atttcaaacctagaaggctgacatg

SEQ ID NO: 148714 - DNA, 25 bp, Artificial
  Probe
acatgatttcaaacctagaaggctg

SEQ ID NO: 148715 - DNA, 25 bp, Artificial
  Probe
tgatttcaaacctagaaggctgaca

SEQ ID NO: 148716 - DNA, 25 bp, Artificial
  Probe
ttcactaacatatacttttgctggg

SEQ ID NO: 148717 - DNA, 25 bp, Artificial
  Probe
tcactaacatatacttttgctgggc

SEQ ID NO: 148718 - DNA, 25 bp, Artificial
  Probe
gacatgtatagccttcaagaagcag

SEQ ID NO: 148719 - DNA, 25 bp, Artificial
  Probe
acatgtatagccttcaagaagcaga

SEQ ID NO: 148720 - DNA, 25 bp, Artificial
  Probe
tatagccttcaagaagcagatgtgc

SEQ ID NO: 148721 - DNA, 25 bp, Artificial
  Probe
ctgacatgtatagccttcaagaagc

SEQ ID NO: 148722 - DNA, 25 bp, Artificial
  Probe
gctccttgaaattcactaacatata

SEQ ID NO: 148723 - DNA, 25 bp, Artificial
  Probe
tttcatcttgggtattattatctcc

SEQ ID NO: 148724 - DNA, 25 bp, Artificial
  Probe
tgacatgtatagccttcaagaagca

SEQ ID NO: 148725 - DNA, 25 bp, Artificial
  Probe
ataacatgatttcaaacctagaagg

SEQ ID NO: 148726 - DNA, 25 bp, Artificial
  Probe
ttcatcttgggtattattatctcca

SEQ ID NO: 148727 - DNA, 25 bp, Artificial
  Probe
gccttactttcttttgttttatgtg

SEQ ID NO: 148728 - DNA, 25 bp, Artificial
  Probe
tcatcttgggtattattatctccat

SEQ ID NO: 148729 - DNA, 25 bp, Artificial
  Probe
attcactaacatatacttttgctgg

SEQ ID NO: 148730 - DNA, 25 bp, Artificial
  Probe
atcttgggtattattatctccatgt

SEQ ID NO: 148731 - DNA, 25 bp, Artificial
  Probe
tttccttatagtctttgaagtttca

SEQ ID NO: 148732 - DNA, 25 bp, Artificial
  Probe
catcttgggtattattatctccatg

SEQ ID NO: 148733 - DNA, 25 bp, Artificial
  Probe
ctccatgtaacttgtaaatataacg

SEQ ID NO: 148734 - DNA, 25 bp, Artificial
  Probe
ggtattattatctccatgtaacttg

SEQ ID NO: 148735 - DNA, 25 bp, Artificial
  Probe
tgggtattattatctccatgtaact

SEQ ID NO: 148736 - DNA, 25 bp, Artificial
  Probe
gctgacatgtatagccttcaagaag

SEQ ID NO: 148737 - DNA, 25 bp, Artificial
  Probe
gggtattattatctccatgtaactt

SEQ ID NO: 148738 - DNA, 25 bp, Artificial
  Probe
tcttgggtattattatctccatgta

SEQ ID NO: 148739 - DNA, 25 bp, Artificial
  Probe
aacctagaaggctgacatgtatagc

SEQ ID NO: 148740 - DNA, 25 bp, Artificial
  Probe
tccatgtaacttgtaaatataacgt

SEQ ID NO: 148741 - DNA, 25 bp, Artificial
  Probe
aaacctagaaggctgacatgtatag

SEQ ID NO: 148742 - DNA, 25 bp, Artificial
  Probe
ttagagtcaagtatgagacggaact

SEQ ID NO: 148743 - DNA, 25 bp, Artificial
  Probe
tagagtcaagtatgagacggaactg

SEQ ID NO: 148744 - DNA, 25 bp, Artificial
  Probe
tttagagtcaagtatgagacggaac

SEQ ID NO: 148745 - DNA, 25 bp, Artificial
  Probe
ctttagagtcaagtatgagacggaa

SEQ ID NO: 148746 - DNA, 25 bp, Artificial
  Probe
gaagaagaatcatgaggaggaagtc

SEQ ID NO: 148747 - DNA, 25 bp, Artificial
  Probe
cagtctgtggagagtgacattcatg

SEQ ID NO: 148748 - DNA, 25 bp, Artificial
  Probe
agagtcaagtatgagacggaactgg

SEQ ID NO: 148749 - DNA, 25 bp, Artificial
  Probe
tgaagaagaatcatgaggaggaagt

SEQ ID NO: 148750 - DNA, 25 bp, Artificial
  Probe
actttagagtcaagtatgagacgga

SEQ ID NO: 148751 - DNA, 25 bp, Artificial
  Probe
ctgtggagagtgacattcatggact

SEQ ID NO: 148752 - DNA, 25 bp, Artificial
  Probe
tctgtggagagtgacattcatggac

SEQ ID NO: 148753 - DNA, 25 bp, Artificial
  Probe
gtctgtggagagtgacattcatgga

SEQ ID NO: 148754 - DNA, 25 bp, Artificial
  Probe
agtctgtggagagtgacattcatgg

SEQ ID NO: 148755 - DNA, 25 bp, Artificial
  Probe
ccagtctgtggagagtgacattcat

SEQ ID NO: 148756 - DNA, 25 bp, Artificial
  Probe
aagaagaatcatgaggaggaagtcc

SEQ ID NO: 148757 - DNA, 25 bp, Artificial
  Probe
aagaatcatgaggaggaagtccaag

SEQ ID NO: 148758 - DNA, 25 bp, Artificial
  Probe
gaagaatcatgaggaggaagtccaa

SEQ ID NO: 148759 - DNA, 25 bp, Artificial
  Probe
atgaagaagaatcatgaggaggaag

SEQ ID NO: 148760 - DNA, 25 bp, Artificial
  Probe
gatctttgcgaattctgtggacaat

SEQ ID NO: 148761 - DNA, 25 bp, Artificial
  Probe
atctttgcgaattctgtggacaatg

SEQ ID NO: 148762 - DNA, 25 bp, Artificial
  Probe
gactttagagtcaagtatgagacgg

SEQ ID NO: 148763 - DNA, 25 bp, Artificial
  Probe
agaagaatcatgaggaggaagtcca

SEQ ID NO: 148764 - DNA, 25 bp, Artificial
  Probe
agaaccgtgaggaactggacaagta

SEQ ID NO: 148765 - DNA, 25 bp, Artificial
  Probe
gagtcaagtatgagacggaactggc

SEQ ID NO: 148766 - DNA, 25 bp, Artificial
  Probe
gaaccgtgaggaactggacaagtac

SEQ ID NO: 148767 - DNA, 25 bp, Artificial
  Probe
agatctttgcgaattctgtggacaa

SEQ ID NO: 148768 - DNA, 25 bp, Artificial
  Probe
gaggaactggacaagtactggtctc

SEQ ID NO: 148769 - DNA, 25 bp, Artificial
  Probe
agaatcatgaggaggaagtccaagg

SEQ ID NO: 148770 - DNA, 25 bp, Artificial
  Probe
ggaactggacaagtactggtctcag

SEQ ID NO: 148771 - DNA, 25 bp, Artificial
  Probe
tgtggagagtgacattcatggactc

SEQ ID NO: 148772 - DNA, 25 bp, Artificial
  Probe
gtcttgccgctgatgactttagagt

SEQ ID NO: 148773 - DNA, 25 bp, Artificial
  Probe
gtactggtctcagcagattgaggag

SEQ ID NO: 148774 - DNA, 25 bp, Artificial
  Probe
caagtactggtctcagcagattgag

SEQ ID NO: 148775 - DNA, 25 bp, Artificial
  Probe
gtgaggaactggacaagtactggtc

SEQ ID NO: 148776 - DNA, 25 bp, Artificial
  Probe
tactggtctcagcagattgaggaga

SEQ ID NO: 148777 - DNA, 25 bp, Artificial
  Probe
aggaactggacaagtactggtctca

SEQ ID NO: 148778 - DNA, 25 bp, Artificial
  Probe
tgaggaactggacaagtactggtct

SEQ ID NO: 148779 - DNA, 25 bp, Artificial
  Probe
tctttgcgaattctgtggacaatgc

SEQ ID NO: 148780 - DNA, 25 bp, Artificial
  Probe
aagtactggtctcagcagattgagg

SEQ ID NO: 148781 - DNA, 25 bp, Artificial
  Probe
gaatcatgaggaggaagtccaaggc

SEQ ID NO: 148782 - DNA, 25 bp, Artificial
  Probe
gagggctcagatctttgcgaattct

SEQ ID NO: 148783 - DNA, 25 bp, Artificial
  Probe
ctcagatctttgcgaattctgtgga

SEQ ID NO: 148784 - DNA, 25 bp, Artificial
  Probe
tcagatctttgcgaattctgtggac

SEQ ID NO: 148785 - DNA, 25 bp, Artificial
  Probe
tcttgccgctgatgactttagagtc

SEQ ID NO: 148786 - DNA, 25 bp, Artificial
  Probe
agtactggtctcagcagattgagga

SEQ ID NO: 148787 - DNA, 25 bp, Artificial
  Probe
gagtgagatgagaagtcagtatgag

SEQ ID NO: 148788 - DNA, 25 bp, Artificial
  Probe
agaactccaagatagtcctacagat

SEQ ID NO: 148789 - DNA, 25 bp, Artificial
  Probe
tgagtgagatgagaagtcagtatga

SEQ ID NO: 148790 - DNA, 25 bp, Artificial
  Probe
ttgagaactccaagatagtcctaca

SEQ ID NO: 148791 - DNA, 25 bp, Artificial
  Probe
gagaactccaagatagtcctacaga

SEQ ID NO: 148792 - DNA, 25 bp, Artificial
  Probe
attgagaactccaagatagtcctac

SEQ ID NO: 148793 - DNA, 25 bp, Artificial
  Probe
cattgagaactccaagatagtccta

SEQ ID NO: 148794 - DNA, 25 bp, Artificial
  Probe
tgagaactccaagatagtcctacag

SEQ ID NO: 148795 - DNA, 25 bp, Artificial
  Probe
caccattgagaactccaagatagtc

SEQ ID NO: 148796 - DNA, 25 bp, Artificial
  Probe
gaactccaagatagtcctacagatc

SEQ ID NO: 148797 - DNA, 25 bp, Artificial
  Probe
aagatcctgagtgagatgagaagtc

SEQ ID NO: 148798 - DNA, 25 bp, Artificial
  Probe
ccattgagaactccaagatagtcct

SEQ ID NO: 148799 - DNA, 25 bp, Artificial
  Probe
caagatcctgagtgagatgagaagt

SEQ ID NO: 148800 - DNA, 25 bp, Artificial
  Probe
accattgagaactccaagatagtcc

SEQ ID NO: 148801 - DNA, 25 bp, Artificial
  Probe
aactccaagatagtcctacagatcg

SEQ ID NO: 148802 - DNA, 25 bp, Artificial
  Probe
ccaccattgagaactccaagatagt

SEQ ID NO: 148803 - DNA, 25 bp, Artificial
  Probe
ccaagatcctgagtgagatgagaag

SEQ ID NO: 148804 - DNA, 25 bp, Artificial
  Probe
agatcctgagtgagatgagaagtca

SEQ ID NO: 148805 - DNA, 25 bp, Artificial
  Probe
aagatagtcctacagatcgacaatg

SEQ ID NO: 148806 - DNA, 25 bp, Artificial
  Probe
caagatagtcctacagatcgacaat

SEQ ID NO: 148807 - DNA, 25 bp, Artificial
  Probe
aagaagaaccacgaggaggaaatta

SEQ ID NO: 148808 - DNA, 25 bp, Artificial
  Probe
actccaagatagtcctacagatcga

SEQ ID NO: 148809 - DNA, 25 bp, Artificial
  Probe
gccaccattgagaactccaagatag

SEQ ID NO: 148810 - DNA, 25 bp, Artificial
  Probe
ccaagatagtcctacagatcgacaa

SEQ ID NO: 148811 - DNA, 25 bp, Artificial
  Probe
ctccaagatagtcctacagatcgac

SEQ ID NO: 148812 - DNA, 25 bp, Artificial
  Probe
tacgcagatccagataaacaagact

SEQ ID NO: 148813 - DNA, 25 bp, Artificial
  Probe
agaagaaccacgaggaggaaattag

SEQ ID NO: 148814 - DNA, 25 bp, Artificial
  Probe
agatagtcctacagatcgacaatgc

SEQ ID NO: 148815 - DNA, 25 bp, Artificial
  Probe
atccagataaacaagactgaggtca

SEQ ID NO: 148816 - DNA, 25 bp, Artificial
  Probe
gaagaaccacgaggaggaaattagt

SEQ ID NO: 148817 - DNA, 25 bp, Artificial
  Probe
tccaagatagtcctacagatcgaca

SEQ ID NO: 148818 - DNA, 25 bp, Artificial
  Probe
gatccagataaacaagactgaggtc

SEQ ID NO: 148819 - DNA, 25 bp, Artificial
  Probe
cagatccagataaacaagactgagg

SEQ ID NO: 148820 - DNA, 25 bp, Artificial
  Probe
agatccagataaacaagactgaggt

SEQ ID NO: 148821 - DNA, 25 bp, Artificial
  Probe
caagattgatgagacgttgaacacc

SEQ ID NO: 148822 - DNA, 25 bp, Artificial
  Probe
gcagatccagataaacaagactgag

SEQ ID NO: 148823 - DNA, 25 bp, Artificial
  Probe
tccagataaacaagactgaggtcac

SEQ ID NO: 148824 - DNA, 25 bp, Artificial
  Probe
gaagaagaaccacgaggaggaaatt

SEQ ID NO: 148825 - DNA, 25 bp, Artificial
  Probe
gatgcagatagagaacctgaaggag

SEQ ID NO: 148826 - DNA, 25 bp, Artificial
  Probe
gagatgcagatagagaacctgaagg

SEQ ID NO: 148827 - DNA, 25 bp, Artificial
  Probe
ggagatgcagatagagaacctgaag

SEQ ID NO: 148828 - DNA, 25 bp, Artificial
  Probe
attacagccagtacttcaagaccat

SEQ ID NO: 148829 - DNA, 25 bp, Artificial
  Probe
gatagtcctacagatcgacaatgcc

SEQ ID NO: 148830 - DNA, 25 bp, Artificial
  Probe
gtgattacagccagtacttcaagac

SEQ ID NO: 148831 - DNA, 25 bp, Artificial
  Probe
agatgcagatagagaacctgaagga

SEQ ID NO: 148832 - DNA, 25 bp, Artificial
  Probe
gcgtattgaacagtataatggtgac

SEQ ID NO: 148833 - DNA, 25 bp, Artificial
  Probe
agcgtattgaacagtataatggtga

SEQ ID NO: 148834 - DNA, 25 bp, Artificial
  Probe
cagcgtattgaacagtataatggtg

SEQ ID NO: 148835 - DNA, 25 bp, Artificial
  Probe
ggaggaagaccacacattattatct

SEQ ID NO: 148836 - DNA, 25 bp, Artificial
  Probe
aggaagaccacacattattatctga

SEQ ID NO: 148837 - DNA, 25 bp, Artificial
  Probe
tcagcgtattgaacagtataatggt

SEQ ID NO: 148838 - DNA, 25 bp, Artificial
  Probe
gtcagcgtattgaacagtataatgg

SEQ ID NO: 148839 - DNA, 25 bp, Artificial
  Probe
gaagaccacacattattatctgagg

SEQ ID NO: 148840 - DNA, 25 bp, Artificial
  Probe
ggaagaccacacattattatctgag

SEQ ID NO: 148841 - DNA, 25 bp, Artificial
  Probe
gaggaagaccacacattattatctg

SEQ ID NO: 148842 - DNA, 25 bp, Artificial
  Probe
agtcagcgtattgaacagtataatg

SEQ ID NO: 148843 - DNA, 25 bp, Artificial
  Probe
cgtattgaacagtataatggtgact

SEQ ID NO: 148844 - DNA, 25 bp, Artificial
  Probe
aagtcagcgtattgaacagtataat

SEQ ID NO: 148845 - DNA, 25 bp, Artificial
  Probe
caaggcttacctacactagacatag

SEQ ID NO: 148846 - DNA, 25 bp, Artificial
  Probe
ccaaggcttacctacactagacata

SEQ ID NO: 148847 - DNA, 25 bp, Artificial
  Probe
tggaggaagaccacacattattatc

SEQ ID NO: 148848 - DNA, 25 bp, Artificial
  Probe
aggcttacctacactagacatagtt

SEQ ID NO: 148849 - DNA, 25 bp, Artificial
  Probe
aaggcttacctacactagacatagt

SEQ ID NO: 148850 - DNA, 25 bp, Artificial
  Probe
agaccacacattattatctgaggtt

SEQ ID NO: 148851 - DNA, 25 bp, Artificial
  Probe
aagaccacacattattatctgaggt

SEQ ID NO: 148852 - DNA, 25 bp, Artificial
  Probe
gaccacacattattatctgaggtta

SEQ ID NO: 148853 - DNA, 25 bp, Artificial
  Probe
atctagtcagtcacacagaccttga

SEQ ID NO: 148854 - DNA, 25 bp, Artificial
  Probe
catctagtcagtcacacagaccttg

SEQ ID NO: 148855 - DNA, 25 bp, Artificial
  Probe
aaagtcagcgtattgaacagtataa

SEQ ID NO: 148856 - DNA, 25 bp, Artificial
  Probe
ttaaagtcagcgtattgaacagtat

SEQ ID NO: 148857 - DNA, 25 bp, Artificial
  Probe
accacacattattatctgaggttaa

SEQ ID NO: 148858 - DNA, 25 bp, Artificial
  Probe
ctagtcagtcacacagaccttgaac

SEQ ID NO: 148859 - DNA, 25 bp, Artificial
  Probe
tagacatagtttcctctgcttccac

SEQ ID NO: 148860 - DNA, 25 bp, Artificial
  Probe
ctagacatagtttcctctgcttcca

SEQ ID NO: 148861 - DNA, 25 bp, Artificial
  Probe
tctagtcagtcacacagaccttgaa

SEQ ID NO: 148862 - DNA, 25 bp, Artificial
  Probe
ataactggtttgtccctaaagctag

SEQ ID NO: 148863 - DNA, 25 bp, Artificial
  Probe
cataactggtttgtccctaaagcta

SEQ ID NO: 148864 - DNA, 25 bp, Artificial
  Probe
taaagtcagcgtattgaacagtata

SEQ ID NO: 148865 - DNA, 25 bp, Artificial
  Probe
ctacactagacatagtttcctctgc

SEQ ID NO: 148866 - DNA, 25 bp, Artificial
  Probe
acctacactagacatagtttcctct

SEQ ID NO: 148867 - DNA, 25 bp, Artificial
  Probe
taactggtttgtccctaaagctaga

SEQ ID NO: 148868 - DNA, 25 bp, Artificial
  Probe
cctacactagacatagtttcctctg

SEQ ID NO: 148869 - DNA, 25 bp, Artificial
  Probe
ggcttacctacactagacatagttt

SEQ ID NO: 148870 - DNA, 25 bp, Artificial
  Probe
tacactagacatagtttcctctgct

SEQ ID NO: 148871 - DNA, 25 bp, Artificial
  Probe
ggtttgtccctaaagctagagttta

SEQ ID NO: 148872 - DNA, 25 bp, Artificial
  Probe
cactagacatagtttcctctgcttc

SEQ ID NO: 148873 - DNA, 25 bp, Artificial
  Probe
catcagaggagagaagggtcaaatg

SEQ ID NO: 148874 - DNA, 25 bp, Artificial
  Probe
gtttaaagtcagcgtattgaacagt

SEQ ID NO: 148875 - DNA, 25 bp, Artificial
  Probe
ctccataactggtttgtccctaaag

SEQ ID NO: 148876 - DNA, 25 bp, Artificial
  Probe
atctccataactggtttgtccctaa

SEQ ID NO: 148877 - DNA, 25 bp, Artificial
  Probe
agttctaacttgttgctacaggatt

SEQ ID NO: 148878 - DNA, 25 bp, Artificial
  Probe
tagttctaacttgttgctacaggat

SEQ ID NO: 148879 - DNA, 25 bp, Artificial
  Probe
gttagtgttgcttgtgatgcttgag

SEQ ID NO: 148880 - DNA, 25 bp, Artificial
  Probe
ctgttagtgttgcttgtgatgcttg

SEQ ID NO: 148881 - DNA, 25 bp, Artificial
  Probe
agtgttgcttgtgatgcttgagtta

SEQ ID NO: 148882 - DNA, 25 bp, Artificial
  Probe
tagtgttgcttgtgatgcttgagtt

SEQ ID NO: 148883 - DNA, 25 bp, Artificial
  Probe
ttagtgttgcttgtgatgcttgagt

SEQ ID NO: 148884 - DNA, 25 bp, Artificial
  Probe
tttacattcagtgggtatggctttc

SEQ ID NO: 148885 - DNA, 25 bp, Artificial
  Probe
gtagttctaacttgttgctacagga

SEQ ID NO: 148886 - DNA, 25 bp, Artificial
  Probe
tgttagtgttgcttgtgatgcttga

SEQ ID NO: 148887 - DNA, 25 bp, Artificial
  Probe
gtttacattcagtgggtatggcttt

SEQ ID NO: 148888 - DNA, 25 bp, Artificial
  Probe
ggaccataactgctgtttacattca

SEQ ID NO: 148889 - DNA, 25 bp, Artificial
  Probe
tgtggtacagttaagagagcttgaa

SEQ ID NO: 148890 - DNA, 25 bp, Artificial
  Probe
tctaacttgttgctacaggatttga

SEQ ID NO: 148891 - DNA, 25 bp, Artificial
  Probe
taacttgttgctacaggatttgaac

SEQ ID NO: 148892 - DNA, 25 bp, Artificial
  Probe
tagggaccataactgctgtttacat

SEQ ID NO: 148893 - DNA, 25 bp, Artificial
  Probe
ctaacttgttgctacaggatttgaa

SEQ ID NO: 148894 - DNA, 25 bp, Artificial
  Probe
ttctaacttgttgctacaggatttg

SEQ ID NO: 148895 - DNA, 25 bp, Artificial
  Probe
gttctaacttgttgctacaggattt

SEQ ID NO: 148896 - DNA, 25 bp, Artificial
  Probe
cttgttgctacaggatttgaacttc

SEQ ID NO: 148897 - DNA, 25 bp, Artificial
  Probe
ttgttgctacaggatttgaacttct

SEQ ID NO: 148898 - DNA, 25 bp, Artificial
  Probe
gaccataactgctgtttacattcag

SEQ ID NO: 148899 - DNA, 25 bp, Artificial
  Probe
acttgttgctacaggatttgaactt

SEQ ID NO: 148900 - DNA, 25 bp, Artificial
  Probe
aacttgttgctacaggatttgaact

SEQ ID NO: 148901 - DNA, 25 bp, Artificial
  Probe
gggaccataactgctgtttacattc

SEQ ID NO: 148902 - DNA, 25 bp, Artificial
  Probe
agggaccataactgctgtttacatt

SEQ ID NO: 148903 - DNA, 25 bp, Artificial
  Probe
agtagggaccataactgctgtttac

SEQ ID NO: 148904 - DNA, 25 bp, Artificial
  Probe
tgttgctacaggatttgaacttctg

SEQ ID NO: 148905 - DNA, 25 bp, Artificial
  Probe
gtagggaccataactgctgtttaca

SEQ ID NO: 148906 - DNA, 25 bp, Artificial
  Probe
gtggtacagttaagagagcttgaaa

SEQ ID NO: 148907 - DNA, 25 bp, Artificial
  Probe
tgtttacattcagtgggtatggctt

SEQ ID NO: 148908 - DNA, 25 bp, Artificial
  Probe
ctgctgtttacattcagtgggtatg

SEQ ID NO: 148909 - DNA, 25 bp, Artificial
  Probe
ttacattcagtgggtatggctttcg

SEQ ID NO: 148910 - DNA, 25 bp, Artificial
  Probe
ctgtttacattcagtgggtatggct

SEQ ID NO: 148911 - DNA, 25 bp, Artificial
  Probe
cagctagggtttgtgaattctttac

SEQ ID NO: 148912 - DNA, 25 bp, Artificial
  Probe
ctgttgtcgaagaagaaagctgatg

SEQ ID NO: 148913 - DNA, 25 bp, Artificial
  Probe
cctcaaaggttatgttgattcttca

SEQ ID NO: 148914 - DNA, 25 bp, Artificial
  Probe
tgctgtttacattcagtgggtatgg

SEQ ID NO: 148915 - DNA, 25 bp, Artificial
  Probe
caaaggttatgttgattcttcattt

SEQ ID NO: 148916 - DNA, 25 bp, Artificial
  Probe
aacttctgtggtacagttaagagag

SEQ ID NO: 148917 - DNA, 25 bp, Artificial
  Probe
gaacttctgtggtacagttaagaga

SEQ ID NO: 148918 - DNA, 25 bp, Artificial
  Probe
tgaacttctgtggtacagttaagag

SEQ ID NO: 148919 - DNA, 25 bp, Artificial
  Probe
ttgaacttctgtggtacagttaaga

SEQ ID NO: 148920 - DNA, 25 bp, Artificial
  Probe
agctagggtttgtgaattctttaca

SEQ ID NO: 148921 - DNA, 25 bp, Artificial
  Probe
acagctagggtttgtgaattcttta

SEQ ID NO: 148922 - DNA, 25 bp, Artificial
  Probe
tctcttgtgtcttcttagtgtcttc

SEQ ID NO: 148923 - DNA, 25 bp, Artificial
  Probe
gtctcttgtgtcttcttagtgtctt

SEQ ID NO: 148924 - DNA, 25 bp, Artificial
  Probe
aagatagcaatatggacgactgaat

SEQ ID NO: 148925 - DNA, 25 bp, Artificial
  Probe
ggtgataagatagcaatatggacga

SEQ ID NO: 148926 - DNA, 25 bp, Artificial
  Probe
aggtgataagatagcaatatggacg

SEQ ID NO: 148927 - DNA, 25 bp, Artificial
  Probe
agatagcaatatggacgactgaatg

SEQ ID NO: 148928 - DNA, 25 bp, Artificial
  Probe
taagatagcaatatggacgactgaa

SEQ ID NO: 148929 - DNA, 25 bp, Artificial
  Probe
ctcttgtgtcttcttagtgtcttcc

SEQ ID NO: 148930 - DNA, 25 bp, Artificial
  Probe
agtctcttgtgtcttcttagtgtct

SEQ ID NO: 148931 - DNA, 25 bp, Artificial
  Probe
cagtctcttgtgtcttcttagtgtc

SEQ ID NO: 148932 - DNA, 25 bp, Artificial
  Probe
tcctccgaagatagtgattggttat

SEQ ID NO: 148933 - DNA, 25 bp, Artificial
  Probe
gatagcaatatggacgactgaatgt

SEQ ID NO: 148934 - DNA, 25 bp, Artificial
  Probe
ataagatagcaatatggacgactga

SEQ ID NO: 148935 - DNA, 25 bp, Artificial
  Probe
tgataagatagcaatatggacgact

SEQ ID NO: 148936 - DNA, 25 bp, Artificial
  Probe
gtgataagatagcaatatggacgac

SEQ ID NO: 148937 - DNA, 25 bp, Artificial
  Probe
atagcaatatggacgactgaatgtg

SEQ ID NO: 148938 - DNA, 25 bp, Artificial
  Probe
gataagatagcaatatggacgactg

SEQ ID NO: 148939 - DNA, 25 bp, Artificial
  Probe
ctccatccaagtgttgctaagatat

SEQ ID NO: 148940 - DNA, 25 bp, Artificial
  Probe
ttcctccgaagatagtgattggtta

SEQ ID NO: 148941 - DNA, 25 bp, Artificial
  Probe
tccatccaagtgttgctaagatata

SEQ ID NO: 148942 - DNA, 25 bp, Artificial
  Probe
tgtcttgtacttctgtgttcattct

SEQ ID NO: 148943 - DNA, 25 bp, Artificial
  Probe
gtcttgtacttctgtgttcattctc

SEQ ID NO: 148944 - DNA, 25 bp, Artificial
  Probe
ttgtacttctgtgttcattctcctc

SEQ ID NO: 148945 - DNA, 25 bp, Artificial
  Probe
cttgtacttctgtgttcattctcct

SEQ ID NO: 148946 - DNA, 25 bp, Artificial
  Probe
tcttgtacttctgtgttcattctcc

SEQ ID NO: 148947 - DNA, 25 bp, Artificial
  Probe
ttgtcttgtacttctgtgttcattc

SEQ ID NO: 148948 - DNA, 25 bp, Artificial
  Probe
tagcaatatggacgactgaatgtga

SEQ ID NO: 148949 - DNA, 25 bp, Artificial
  Probe
aaggtgataagatagcaatatggac

SEQ ID NO: 148950 - DNA, 25 bp, Artificial
  Probe
cctccttgataacattagtgattct

SEQ ID NO: 148951 - DNA, 25 bp, Artificial
  Probe
ccatccaagtgttgctaagatataa

SEQ ID NO: 148952 - DNA, 25 bp, Artificial
  Probe
cctccgaagatagtgattggttatc

SEQ ID NO: 148953 - DNA, 25 bp, Artificial
  Probe
actccatccaagtgttgctaagata

SEQ ID NO: 148954 - DNA, 25 bp, Artificial
  Probe
ccaagtgttgctaagatataagaga

SEQ ID NO: 148955 - DNA, 25 bp, Artificial
  Probe
tccaagtgttgctaagatataagag

SEQ ID NO: 148956 - DNA, 25 bp, Artificial
  Probe
aaggcagtctcttgtgtcttcttag

SEQ ID NO: 148957 - DNA, 25 bp, Artificial
  Probe
gatataagagaagtctcattcgcct

SEQ ID NO: 148958 - DNA, 25 bp, Artificial
  Probe
agatataagagaagtctcattcgcc

SEQ ID NO: 148959 - DNA, 25 bp, Artificial
  Probe
gcagtctcttgtgtcttcttagtgt

SEQ ID NO: 148960 - DNA, 25 bp, Artificial
  Probe
atataagagaagtctcattcgcctt

SEQ ID NO: 148961 - DNA, 25 bp, Artificial
  Probe
tgtacttctgtgttcattctcctcc

SEQ ID NO: 148962 - DNA, 25 bp, Artificial
  Probe
tccttgataacattagtgattctga

SEQ ID NO: 148963 - DNA, 25 bp, Artificial
  Probe
agcaatatggacgactgaatgtgaa

SEQ ID NO: 148964 - DNA, 25 bp, Artificial
  Probe
ctccttgataacattagtgattctg

SEQ ID NO: 148965 - DNA, 25 bp, Artificial
  Probe
agtgttgctaagatataagagaagt

SEQ ID NO: 148966 - DNA, 25 bp, Artificial
  Probe
catccaagtgttgctaagatataag

SEQ ID NO: 148967 - DNA, 25 bp, Artificial
  Probe
gtactagaattacagcttcacaggc

SEQ ID NO: 148968 - DNA, 25 bp, Artificial
  Probe
catgtgtagtcttccagattacgtg

SEQ ID NO: 148969 - DNA, 25 bp, Artificial
  Probe
atgtgtagtcttccagattacgtga

SEQ ID NO: 148970 - DNA, 25 bp, Artificial
  Probe
tgaaagaaatgatccaaaggcaaat

SEQ ID NO: 148971 - DNA, 25 bp, Artificial
  Probe
agaaatgatccaaaggcaaataacg

SEQ ID NO: 148972 - DNA, 25 bp, Artificial
  Probe
ctgaaagaaatgatccaaaggcaaa

SEQ ID NO: 148973 - DNA, 25 bp, Artificial
  Probe
cactgctgaaagaaatgatccaaag

SEQ ID NO: 148974 - DNA, 25 bp, Artificial
  Probe
gaaatgatccaaaggcaaataacgg

SEQ ID NO: 148975 - DNA, 25 bp, Artificial
  Probe
aagaaatgatccaaaggcaaataac

SEQ ID NO: 148976 - DNA, 25 bp, Artificial
  Probe
tactagaattacagcttcacaggcg

SEQ ID NO: 148977 - DNA, 25 bp, Artificial
  Probe
gcttgttcttattcaacccatgtac

SEQ ID NO: 148978 - DNA, 25 bp, Artificial
  Probe
gaatatttgaaactctgggtacacc

SEQ ID NO: 148979 - DNA, 25 bp, Artificial
  Probe
tgtactagaattacagcttcacagg

SEQ ID NO: 148980 - DNA, 25 bp, Artificial
  Probe
gaaagaaatgatccaaaggcaaata

SEQ ID NO: 148981 - DNA, 25 bp, Artificial
  Probe
actgctgaaagaaatgatccaaagg

SEQ ID NO: 148982 - DNA, 25 bp, Artificial
  Probe
tcactgctgaaagaaatgatccaaa

SEQ ID NO: 148983 - DNA, 25 bp, Artificial
  Probe
ccatgtactagaattacagcttcac

SEQ ID NO: 148984 - DNA, 25 bp, Artificial
  Probe
cttgttcttattcaacccatgtact

SEQ ID NO: 148985 - DNA, 25 bp, Artificial
  Probe
ggaatattgcccaagaagctaattt

SEQ ID NO: 148986 - DNA, 25 bp, Artificial
  Probe
aggaatattgcccaagaagctaatt

SEQ ID NO: 148987 - DNA, 25 bp, Artificial
  Probe
aaggaatattgcccaagaagctaat

SEQ ID NO: 148988 - DNA, 25 bp, Artificial
  Probe
tagaacaaggaatattgcccaagaa

SEQ ID NO: 148989 - DNA, 25 bp, Artificial
  Probe
ttagaacaaggaatattgcccaaga

SEQ ID NO: 148990 - DNA, 25 bp, Artificial
  Probe
cttagaacaaggaatattgcccaag

SEQ ID NO: 148991 - DNA, 25 bp, Artificial
  Probe
ggcttgttcttattcaacccatgta

SEQ ID NO: 148992 - DNA, 25 bp, Artificial
  Probe
catgtactagaattacagcttcaca

SEQ ID NO: 148993 - DNA, 25 bp, Artificial
  Probe
aaagaaatgatccaaaggcaaataa

SEQ ID NO: 148994 - DNA, 25 bp, Artificial
  Probe
tgtgtagtcttccagattacgtgac

SEQ ID NO: 148995 - DNA, 25 bp, Artificial
  Probe
agaatatttgaaactctgggtacac

SEQ ID NO: 148996 - DNA, 25 bp, Artificial
  Probe
tgttcttattcaacccatgtactag

SEQ ID NO: 148997 - DNA, 25 bp, Artificial
  Probe
agaacaaggaatattgcccaagaag

SEQ ID NO: 148998 - DNA, 25 bp, Artificial
  Probe
aacaagaatatttgaaactctgggt

SEQ ID NO: 148999 - DNA, 25 bp, Artificial
  Probe
aaggcttgttcttattcaacccatg

SEQ ID NO: 149000 - DNA, 25 bp, Artificial
  Probe
caaggcttgttcttattcaacccat

SEQ ID NO: 149001 - DNA, 25 bp, Artificial
  Probe
atgtactagaattacagcttcacag

SEQ ID NO: 149002 - DNA, 25 bp, Artificial
  Probe
gttcttattcaacccatgtactaga

SEQ ID NO: 149003 - DNA, 25 bp, Artificial
  Probe
atatttgaaactctgggtacaccaa

SEQ ID NO: 149004 - DNA, 25 bp, Artificial
  Probe
ctagaattacagcttcacaggcgtt

SEQ ID NO: 149005 - DNA, 25 bp, Artificial
  Probe
gctgaaagaaatgatccaaaggcaa

SEQ ID NO: 149006 - DNA, 25 bp, Artificial
  Probe
tatttgaaactctgggtacaccaac

SEQ ID NO: 149007 - DNA, 25 bp, Artificial
  Probe
caaggaatattgcccaagaagctaa

SEQ ID NO: 149008 - DNA, 25 bp, Artificial
  Probe
ttgttcttattcaacccatgtacta

SEQ ID NO: 149009 - DNA, 25 bp, Artificial
  Probe
aagaatatttgaaactctgggtaca

SEQ ID NO: 149010 - DNA, 25 bp, Artificial
  Probe
atgatccaaaggcaaataacggaaa

SEQ ID NO: 149011 - DNA, 25 bp, Artificial
  Probe
aatgatccaaaggcaaataacggaa

SEQ ID NO: 149012 - DNA, 25 bp, Artificial
  Probe
tattaaccattcccgatgacataca

SEQ ID NO: 149013 - DNA, 25 bp, Artificial
  Probe
tatcttgtaaatagacccagagcag

SEQ ID NO: 149014 - DNA, 25 bp, Artificial
  Probe
agtattaaccattcccgatgacata

SEQ ID NO: 149015 - DNA, 25 bp, Artificial
  Probe
cagtattaaccattcccgatgacat

SEQ ID NO: 149016 - DNA, 25 bp, Artificial
  Probe
ctaccagtattaaccattcccgatg

SEQ ID NO: 149017 - DNA, 25 bp, Artificial
  Probe
attaaccattcccgatgacatacac

SEQ ID NO: 149018 - DNA, 25 bp, Artificial
  Probe
taccagtattaaccattcccgatga

SEQ ID NO: 149019 - DNA, 25 bp, Artificial
  Probe
cctaccagtattaaccattcccgat

SEQ ID NO: 149020 - DNA, 25 bp, Artificial
  Probe
ctatcttgtaaatagacccagagca

SEQ ID NO: 149021 - DNA, 25 bp, Artificial
  Probe
actatcttgtaaatagacccagagc

SEQ ID NO: 149022 - DNA, 25 bp, Artificial
  Probe
gtattaaccattcccgatgacatac

SEQ ID NO: 149023 - DNA, 25 bp, Artificial
  Probe
gagttcccaagcagtcataacaatg

SEQ ID NO: 149024 - DNA, 25 bp, Artificial
  Probe
ccagtattaaccattcccgatgaca

SEQ ID NO: 149025 - DNA, 25 bp, Artificial
  Probe
accagtattaaccattcccgatgac

SEQ ID NO: 149026 - DNA, 25 bp, Artificial
  Probe
acctaccagtattaaccattcccga

SEQ ID NO: 149027 - DNA, 25 bp, Artificial
  Probe
tgagttcccaagcagtcataacaat

SEQ ID NO: 149028 - DNA, 25 bp, Artificial
  Probe
ttatagactccatcaaggatgctgg

SEQ ID NO: 149029 - DNA, 25 bp, Artificial
  Probe
ttaaccattcccgatgacatacacg

SEQ ID NO: 149030 - DNA, 25 bp, Artificial
  Probe
tgtactatcttgtaaatagacccag

SEQ ID NO: 149031 - DNA, 25 bp, Artificial
  Probe
ctgagttcccaagcagtcataacaa

SEQ ID NO: 149032 - DNA, 25 bp, Artificial
  Probe
tactatcttgtaaatagacccagag

SEQ ID NO: 149033 - DNA, 25 bp, Artificial
  Probe
gtactatcttgtaaatagacccaga

SEQ ID NO: 149034 - DNA, 25 bp, Artificial
  Probe
tttatagactccatcaaggatgctg

SEQ ID NO: 149035 - DNA, 25 bp, Artificial
  Probe
aaaggactctgtttgagccagtttc

SEQ ID NO: 149036 - DNA, 25 bp, Artificial
  Probe
gaaaggactctgtttgagccagttt

SEQ ID NO: 149037 - DNA, 25 bp, Artificial
  Probe
cataacaatgacttgaccgcaagac

SEQ ID NO: 149038 - DNA, 25 bp, Artificial
  Probe
tcataacaatgacttgaccgcaaga

SEQ ID NO: 149039 - DNA, 25 bp, Artificial
  Probe
agttcccaagcagtcataacaatga

SEQ ID NO: 149040 - DNA, 25 bp, Artificial
  Probe
taacaatgacttgaccgcaagacat

SEQ ID NO: 149041 - DNA, 25 bp, Artificial
  Probe
ataacaatgacttgaccgcaagaca

SEQ ID NO: 149042 - DNA, 25 bp, Artificial
  Probe
gactctgtttgagccagtttcttcc

SEQ ID NO: 149043 - DNA, 25 bp, Artificial
  Probe
ggactctgtttgagccagtttcttc

SEQ ID NO: 149044 - DNA, 25 bp, Artificial
  Probe
ggtcactaccagtacaagagcatcc

SEQ ID NO: 149045 - DNA, 25 bp, Artificial
  Probe
aggactctgtttgagccagtttctt

SEQ ID NO: 149046 - DNA, 25 bp, Artificial
  Probe
aaggactctgtttgagccagtttct

SEQ ID NO: 149047 - DNA, 25 bp, Artificial
  Probe
ctgtttgagccagtttcttcccttg

SEQ ID NO: 149048 - DNA, 25 bp, Artificial
  Probe
tctgtttgagccagtttcttccctt

SEQ ID NO: 149049 - DNA, 25 bp, Artificial
  Probe
aacaatgacttgaccgcaagacatt

SEQ ID NO: 149050 - DNA, 25 bp, Artificial
  Probe
agaagggaaaggactctgtttgagc

SEQ ID NO: 149051 - DNA, 25 bp, Artificial
  Probe
taaccattcccgatgacatacacgt

SEQ ID NO: 149052 - DNA, 25 bp, Artificial
  Probe
tatagactccatcaaggatgctgga

SEQ ID NO: 149053 - DNA, 25 bp, Artificial
  Probe
gtcactaccagtacaagagcatccc

SEQ ID NO: 149054 - DNA, 25 bp, Artificial
  Probe
catgaggactaaccgagtgaagctg

SEQ ID NO: 149055 - DNA, 25 bp, Artificial
  Probe
tcactaccagtacaagagcatccct

SEQ ID NO: 149056 - DNA, 25 bp, Artificial
  Probe
ctaccagtacaagagcatccctgtg

SEQ ID NO: 149057 - DNA, 25 bp, Artificial
  Probe
gattattgaggctgatgaagttctg

SEQ ID NO: 149058 - DNA, 25 bp, Artificial
  Probe
agattattgaggctgatgaagttct

SEQ ID NO: 149059 - DNA, 25 bp, Artificial
  Probe
attattgaggctgatgaagttctgc

SEQ ID NO: 149060 - DNA, 25 bp, Artificial
  Probe
cagattattgaggctgatgaagttc

SEQ ID NO: 149061 - DNA, 25 bp, Artificial
  Probe
cattattatcagtcgtgtctggaag

SEQ ID NO: 149062 - DNA, 25 bp, Artificial
  Probe
attattatcagtcgtgtctggaagc

SEQ ID NO: 149063 - DNA, 25 bp, Artificial
  Probe
ccagattattgaggctgatgaagtt

SEQ ID NO: 149064 - DNA, 25 bp, Artificial
  Probe
ttattgaggctgatgaagttctgct

SEQ ID NO: 149065 - DNA, 25 bp, Artificial
  Probe
gcattattatcagtcgtgtctggaa

SEQ ID NO: 149066 - DNA, 25 bp, Artificial
  Probe
tgagaagatcagcaacatcatcaag

SEQ ID NO: 149067 - DNA, 25 bp, Artificial
  Probe
ctatccagtagagatcctcaagacg

SEQ ID NO: 149068 - DNA, 25 bp, Artificial
  Probe
ggtgtgttatggttacctggttata

SEQ ID NO: 149069 - DNA, 25 bp, Artificial
  Probe
gctatccagtagagatcctcaagac

SEQ ID NO: 149070 - DNA, 25 bp, Artificial
  Probe
gtgtgttatggttacctggttataa

SEQ ID NO: 149071 - DNA, 25 bp, Artificial
  Probe
gagaagatcagcaacatcatcaagc

SEQ ID NO: 149072 - DNA, 25 bp, Artificial
  Probe
tattgaggctgatgaagttctgctg

SEQ ID NO: 149073 - DNA, 25 bp, Artificial
  Probe
ccgtaatgtggaggttctgatctac

SEQ ID NO: 149074 - DNA, 25 bp, Artificial
  Probe
gacataatgccaaatgctctttagt

SEQ ID NO: 149075 - DNA, 25 bp, Artificial
  Probe
tgacataatgccaaatgctctttag

SEQ ID NO: 149076 - DNA, 25 bp, Artificial
  Probe
ctgacataatgccaaatgctcttta

SEQ ID NO: 149077 - DNA, 25 bp, Artificial
  Probe
gaagatcagcaacatcatcaagcag

SEQ ID NO: 149078 - DNA, 25 bp, Artificial
  Probe
tctaaatcctccttggtttcaatca

SEQ ID NO: 149079 - DNA, 25 bp, Artificial
  Probe
tatgtgatggtggtcatgtcagatc

SEQ ID NO: 149080 - DNA, 25 bp, Artificial
  Probe
ttattatcagtcgtgtctggaagcc

SEQ ID NO: 149081 - DNA, 25 bp, Artificial
  Probe
acataatgccaaatgctctttagta

SEQ ID NO: 149082 - DNA, 25 bp, Artificial
  Probe
tgtgttatggttacctggttataat

SEQ ID NO: 149083 - DNA, 25 bp, Artificial
  Probe
agctatccagtagagatcctcaaga

SEQ ID NO: 149084 - DNA, 25 bp, Artificial
  Probe
cagctatccagtagagatcctcaag

SEQ ID NO: 149085 - DNA, 25 bp, Artificial
  Probe
gtatgtgatggtggtcatgtcagat

SEQ ID NO: 149086 - DNA, 25 bp, Artificial
  Probe
ctaaatcctccttggtttcaatcat

SEQ ID NO: 149087 - DNA, 25 bp, Artificial
  Probe
ttctaaatcctccttggtttcaatc

SEQ ID NO: 149088 - DNA, 25 bp, Artificial
  Probe
tatccagtagagatcctcaagacgg

SEQ ID NO: 149089 - DNA, 25 bp, Artificial
  Probe
cagcaacatcatcaagcagtttaag

SEQ ID NO: 149090 - DNA, 25 bp, Artificial
  Probe
agaagatcagcaacatcatcaagca

SEQ ID NO: 149091 - DNA, 25 bp, Artificial
  Probe
atcagcaacatcatcaagcagttta

SEQ ID NO: 149092 - DNA, 25 bp, Artificial
  Probe
tcagcaacatcatcaagcagtttaa

SEQ ID NO: 149093 - DNA, 25 bp, Artificial
  Probe
taatgtggaggttctgatctacgtg

SEQ ID NO: 149094 - DNA, 25 bp, Artificial
  Probe
gtaatgtggaggttctgatctacgt

SEQ ID NO: 149095 - DNA, 25 bp, Artificial
  Probe
tcagctatccagtagagatcctcaa

SEQ ID NO: 149096 - DNA, 25 bp, Artificial
  Probe
tttctaaatcctccttggtttcaat

SEQ ID NO: 149097 - DNA, 25 bp, Artificial
  Probe
aagatcagcaacatcatcaagcagt

SEQ ID NO: 149098 - DNA, 25 bp, Artificial
  Probe
atttctaaatcctccttggtttcaa

SEQ ID NO: 149099 - DNA, 25 bp, Artificial
  Probe
tgtatttctaaatcctccttggttt

SEQ ID NO: 149100 - DNA, 25 bp, Artificial
  Probe
ctttgagaagatcagcaacatcatc

SEQ ID NO: 149101 - DNA, 25 bp, Artificial
  Probe
ttaaagagcgagaagaagacctgag

SEQ ID NO: 149102 - DNA, 25 bp, Artificial
  Probe
ccagaacctcttgtattcactatca

SEQ ID NO: 149103 - DNA, 25 bp, Artificial
  Probe
cagaacctcttgtattcactatcaa

SEQ ID NO: 149104 - DNA, 25 bp, Artificial
  Probe
ttgagaagcagagacaagaggattg

SEQ ID NO: 149105 - DNA, 25 bp, Artificial
  Probe
gttgagaagcagagacaagaggatt

SEQ ID NO: 149106 - DNA, 25 bp, Artificial
  Probe
gtgtaagagtgtttcatatcatcgg

SEQ ID NO: 149107 - DNA, 25 bp, Artificial
  Probe
ttggtgggagtatagatgagtgtag

SEQ ID NO: 149108 - DNA, 25 bp, Artificial
  Probe
cgtgtgtaagagtgtttcatatcat

SEQ ID NO: 149109 - DNA, 25 bp, Artificial
  Probe
tgaatcagctagtacacttcttagt

SEQ ID NO: 149110 - DNA, 25 bp, Artificial
  Probe
tgtaagagtgtttcatatcatcggc

SEQ ID NO: 149111 - DNA, 25 bp, Artificial
  Probe
tgtgtaagagtgtttcatatcatcg

SEQ ID NO: 149112 - DNA, 25 bp, Artificial
  Probe
gttggtgggagtatagatgagtgta

SEQ ID NO: 149113 - DNA, 25 bp, Artificial
  Probe
aacaagatacacacacacacacaca

SEQ ID NO: 149114 - DNA, 25 bp, Artificial
  Probe
catctgaatcagctagtacacttct

SEQ ID NO: 149115 - DNA, 25 bp, Artificial
  Probe
cccagaacctcttgtattcactatc

SEQ ID NO: 149116 - DNA, 25 bp, Artificial
  Probe
tcccagaacctcttgtattcactat

SEQ ID NO: 149117 - DNA, 25 bp, Artificial
  Probe
ccatctgaatcagctagtacacttc

SEQ ID NO: 149118 - DNA, 25 bp, Artificial
  Probe
atattccgtaactcaaccaggcaac

SEQ ID NO: 149119 - DNA, 25 bp, Artificial
  Probe
ttcccagaacctcttgtattcacta

SEQ ID NO: 149120 - DNA, 25 bp, Artificial
  Probe
atctgaatcagctagtacacttctt

SEQ ID NO: 149121 - DNA, 25 bp, Artificial
  Probe
gtctttcccagaacctcttgtattc

SEQ ID NO: 149122 - DNA, 25 bp, Artificial
  Probe
accatctgaatcagctagtacactt

SEQ ID NO: 149123 - DNA, 25 bp, Artificial
  Probe
ctttcccagaacctcttgtattcac

SEQ ID NO: 149124 - DNA, 25 bp, Artificial
  Probe
tctttcccagaacctcttgtattca

SEQ ID NO: 149125 - DNA, 25 bp, Artificial
  Probe
agtctttcccagaacctcttgtatt

SEQ ID NO: 149126 - DNA, 25 bp, Artificial
  Probe
aagtctttcccagaacctcttgtat

SEQ ID NO: 149127 - DNA, 25 bp, Artificial
  Probe
tcagctagtacacttcttagtatgt

SEQ ID NO: 149128 - DNA, 25 bp, Artificial
  Probe
tctgaatcagctagtacacttctta

SEQ ID NO: 149129 - DNA, 25 bp, Artificial
  Probe
aatattccgtaactcaaccaggcaa

SEQ ID NO: 149130 - DNA, 25 bp, Artificial
  Probe
gatccaccatctgaatcagctagta

SEQ ID NO: 149131 - DNA, 25 bp, Artificial
  Probe
agttgagaagcagagacaagaggat

SEQ ID NO: 149132 - DNA, 25 bp, Artificial
  Probe
tttcccagaacctcttgtattcact

SEQ ID NO: 149133 - DNA, 25 bp, Artificial
  Probe
ctgaatcagctagtacacttcttag

SEQ ID NO: 149134 - DNA, 25 bp, Artificial
  Probe
atccaccatctgaatcagctagtac

SEQ ID NO: 149135 - DNA, 25 bp, Artificial
  Probe
ctgttggtgggagtatagatgagtg

SEQ ID NO: 149136 - DNA, 25 bp, Artificial
  Probe
aaacaagatacacacacacacacac

SEQ ID NO: 149137 - DNA, 25 bp, Artificial
  Probe
caccatctgaatcagctagtacact

SEQ ID NO: 149138 - DNA, 25 bp, Artificial
  Probe
gtgtgtaagagtgtttcatatcatc

SEQ ID NO: 149139 - DNA, 25 bp, Artificial
  Probe
aaagtctttcccagaacctcttgta

SEQ ID NO: 149140 - DNA, 25 bp, Artificial
  Probe
aagatacacacacacacacacacac

SEQ ID NO: 149141 - DNA, 25 bp, Artificial
  Probe
caagatacacacacacacacacaca

SEQ ID NO: 149142 - DNA, 25 bp, Artificial
  Probe
acaagatacacacacacacacacac

SEQ ID NO: 149143 - DNA, 25 bp, Artificial
  Probe
atagatccaccatctgaatcagcta

SEQ ID NO: 149144 - DNA, 25 bp, Artificial
  Probe
ctctgttggtgggagtatagatgag

SEQ ID NO: 149145 - DNA, 25 bp, Artificial
  Probe
atcagctagtacacttcttagtatg

SEQ ID NO: 149146 - DNA, 25 bp, Artificial
  Probe
tctgttggtgggagtatagatgagt

SEQ ID NO: 149147 - DNA, 25 bp, Artificial
  Probe
taaatggaagagatggagacacaag

SEQ ID NO: 149148 - DNA, 25 bp, Artificial
  Probe
ataaatggaagagatggagacacaa

SEQ ID NO: 149149 - DNA, 25 bp, Artificial
  Probe
tataaatggaagagatggagacaca

SEQ ID NO: 149150 - DNA, 25 bp, Artificial
  Probe
aatggaagagatggagacacaagtc

SEQ ID NO: 149151 - DNA, 25 bp, Artificial
  Probe
attgatgatggcgtttggtaactat

SEQ ID NO: 149152 - DNA, 25 bp, Artificial
  Probe
catagtgcatgagattgatgaggac

SEQ ID NO: 149153 - DNA, 25 bp, Artificial
  Probe
tgatgatggcgtttggtaactattt

SEQ ID NO: 149154 - DNA, 25 bp, Artificial
  Probe
ttgatgatggcgtttggtaactatt

SEQ ID NO: 149155 - DNA, 25 bp, Artificial
  Probe
ctataaatggaagagatggagacac

SEQ ID NO: 149156 - DNA, 25 bp, Artificial
  Probe
atagtgcatgagattgatgaggaca

SEQ ID NO: 149157 - DNA, 25 bp, Artificial
  Probe
gattgatgatggcgtttggtaacta

SEQ ID NO: 149158 - DNA, 25 bp, Artificial
  Probe
aaatggaagagatggagacacaagt

SEQ ID NO: 149159 - DNA, 25 bp, Artificial
  Probe
tctataaatggaagagatggagaca

SEQ ID NO: 149160 - DNA, 25 bp, Artificial
  Probe
tagtgcatgagattgatgaggacag

SEQ ID NO: 149161 - DNA, 25 bp, Artificial
  Probe
gaggaagaagaaatggaagaggagg

SEQ ID NO: 149162 - DNA, 25 bp, Artificial
  Probe
ggaggaagaagaaatggaagaggag

SEQ ID NO: 149163 - DNA, 25 bp, Artificial
  Probe
gtatggtgttggattgggtagagag

SEQ ID NO: 149164 - DNA, 25 bp, Artificial
  Probe
caggaggaagaagaaatggaagagg

SEQ ID NO: 149165 - DNA, 25 bp, Artificial
  Probe
aggaggaagaagaaatggaagagga

SEQ ID NO: 149166 - DNA, 25 bp, Artificial
  Probe
gattgatgaggacagtccactctac

SEQ ID NO: 149167 - DNA, 25 bp, Artificial
  Probe
cttcctctggacaacatttcttacc

SEQ ID NO: 149168 - DNA, 25 bp, Artificial
  Probe
ccttcctctggacaacatttcttac

SEQ ID NO: 149169 - DNA, 25 bp, Artificial
  Probe
gtgtatggtgttggattgggtagag

SEQ ID NO: 149170 - DNA, 25 bp, Artificial
  Probe
cttaggacagagttgttcatggctc

SEQ ID NO: 149171 - DNA, 25 bp, Artificial
  Probe
agattgatgaggacagtccactcta

SEQ ID NO: 149172 - DNA, 25 bp, Artificial
  Probe
tgtatggtgttggattgggtagaga

SEQ ID NO: 149173 - DNA, 25 bp, Artificial
  Probe
agattgatgatggcgtttggtaact

SEQ ID NO: 149174 - DNA, 25 bp, Artificial
  Probe
cagattgatgatggcgtttggtaac

SEQ ID NO: 149175 - DNA, 25 bp, Artificial
  Probe
atcatagtgcatgagattgatgagg

SEQ ID NO: 149176 - DNA, 25 bp, Artificial
  Probe
ccatcatcatagtgcatgagattga

SEQ ID NO: 149177 - DNA, 25 bp, Artificial
  Probe
ttcgaggagaagagtcactacaagg

SEQ ID NO: 149178 - DNA, 25 bp, Artificial
  Probe
ctgtgtatggtgttggattgggtag

SEQ ID NO: 149179 - DNA, 25 bp, Artificial
  Probe
gaagaagaaatggaagaggaggctg

SEQ ID NO: 149180 - DNA, 25 bp, Artificial
  Probe
catcatcatagtgcatgagattgat

SEQ ID NO: 149181 - DNA, 25 bp, Artificial
  Probe
tcttaggacagagttgttcatggct

SEQ ID NO: 149182 - DNA, 25 bp, Artificial
  Probe
tatggtgttggattgggtagagagg

SEQ ID NO: 149183 - DNA, 25 bp, Artificial
  Probe
cccttcctctggacaacatttctta

SEQ ID NO: 149184 - DNA, 25 bp, Artificial
  Probe
tcatagtgcatgagattgatgagga

SEQ ID NO: 149185 - DNA, 25 bp, Artificial
  Probe
gaggagaagagtcactacaaggtgg

SEQ ID NO: 149186 - DNA, 25 bp, Artificial
  Probe
gtgctcttgactctcttttgtaaat

SEQ ID NO: 149187 - DNA, 25 bp, Artificial
  Probe
tgtgctcttgactctcttttgtaaa

SEQ ID NO: 149188 - DNA, 25 bp, Artificial
  Probe
tgtgtatggtgttggattgggtaga

SEQ ID NO: 149189 - DNA, 25 bp, Artificial
  Probe
atgagattgatgaggacagtccact

SEQ ID NO: 149190 - DNA, 25 bp, Artificial
  Probe
catgagattgatgaggacagtccac

SEQ ID NO: 149191 - DNA, 25 bp, Artificial
  Probe
atggaagagatggagacacaagtcc

SEQ ID NO: 149192 - DNA, 25 bp, Artificial
  Probe
attaaacacaaatctattgcccttt

SEQ ID NO: 149193 - DNA, 25 bp, Artificial
  Probe
gagattccctgagtaaaggcatttc

SEQ ID NO: 149194 - DNA, 25 bp, Artificial
  Probe
gattaaacacaaatctattgccctt

SEQ ID NO: 149195 - DNA, 25 bp, Artificial
  Probe
gattccctgagtaaaggcatttcct

SEQ ID NO: 149196 - DNA, 25 bp, Artificial
  Probe
agattccctgagtaaaggcatttcc

SEQ ID NO: 149197 - DNA, 25 bp, Artificial
  Probe
ctacccatgacttcagagaaaccac

SEQ ID NO: 149198 - DNA, 25 bp, Artificial
  Probe
cactacccatgacttcagagaaacc

SEQ ID NO: 149199 - DNA, 25 bp, Artificial
  Probe
atctattgcccttttggatttcaca

SEQ ID NO: 149200 - DNA, 25 bp, Artificial
  Probe
ggagattccctgagtaaaggcattt

SEQ ID NO: 149201 - DNA, 25 bp, Artificial
  Probe
tacccatgacttcagagaaaccact

SEQ ID NO: 149202 - DNA, 25 bp, Artificial
  Probe
actacccatgacttcagagaaacca

SEQ ID NO: 149203 - DNA, 25 bp, Artificial
  Probe
cttcagagaaaccacttggtgttac

SEQ ID NO: 149204 - DNA, 25 bp, Artificial
  Probe
acttcagagaaaccacttggtgtta

SEQ ID NO: 149205 - DNA, 25 bp, Artificial
  Probe
gcactacccatgacttcagagaaac

SEQ ID NO: 149206 - DNA, 25 bp, Artificial
  Probe
gtagtccattaaagtacagattgat

SEQ ID NO: 149207 - DNA, 25 bp, Artificial
  Probe
ttcagagaaaccacttggtgttaca

SEQ ID NO: 149208 - DNA, 25 bp, Artificial
  Probe
aggagattccctgagtaaaggcatt

SEQ ID NO: 149209 - DNA, 25 bp, Artificial
  Probe
cccatgacttcagagaaaccacttg

SEQ ID NO: 149210 - DNA, 25 bp, Artificial
  Probe
tagtccattaaagtacagattgatc

SEQ ID NO: 149211 - DNA, 25 bp, Artificial
  Probe
ttaaacacaaatctattgccctttt

SEQ ID NO: 149212 - DNA, 25 bp, Artificial
  Probe
aatctattgcccttttggatttcac

SEQ ID NO: 149213 - DNA, 25 bp, Artificial
  Probe
tcagagaaaccacttggtgttacag

SEQ ID NO: 149214 - DNA, 25 bp, Artificial
  Probe
acccatgacttcagagaaaccactt

SEQ ID NO: 149215 - DNA, 25 bp, Artificial
  Probe
atgacttcagagaaaccacttggtg

SEQ ID NO: 149216 - DNA, 25 bp, Artificial
  Probe
catgacttcagagaaaccacttggt

SEQ ID NO: 149217 - DNA, 25 bp, Artificial
  Probe
gacttcagagaaaccacttggtgtt

SEQ ID NO: 149218 - DNA, 25 bp, Artificial
  Probe
ccatgacttcagagaaaccacttgg

SEQ ID NO: 149219 - DNA, 25 bp, Artificial
  Probe
ggcactacccatgacttcagagaaa

SEQ ID NO: 149220 - DNA, 25 bp, Artificial
  Probe
cacaaatctattgcccttttggatt

SEQ ID NO: 149221 - DNA, 25 bp, Artificial
  Probe
cagagaaaccacttggtgttacagg

SEQ ID NO: 149222 - DNA, 25 bp, Artificial
  Probe
aaacacaaatctattgcccttttgg

SEQ ID NO: 149223 - DNA, 25 bp, Artificial
  Probe
acacaaatctattgcccttttggat

SEQ ID NO: 149224 - DNA, 25 bp, Artificial
  Probe
aacacaaatctattgcccttttgga

SEQ ID NO: 149225 - DNA, 25 bp, Artificial
  Probe
taaacacaaatctattgcccttttg

SEQ ID NO: 149226 - DNA, 25 bp, Artificial
  Probe
attccctgagtaaaggcatttcctt

SEQ ID NO: 149227 - DNA, 25 bp, Artificial
  Probe
cggcacagattaaacacaaatctat

SEQ ID NO: 149228 - DNA, 25 bp, Artificial
  Probe
tgacttcagagaaaccacttggtgt

SEQ ID NO: 149229 - DNA, 25 bp, Artificial
  Probe
agattaaacacaaatctattgccct

SEQ ID NO: 149230 - DNA, 25 bp, Artificial
  Probe
cagattaaacacaaatctattgccc

SEQ ID NO: 149231 - DNA, 25 bp, Artificial
  Probe
acagattaaacacaaatctattgcc

SEQ ID NO: 149232 - DNA, 25 bp, Artificial
  Probe
ggcacagattaaacacaaatctatt

SEQ ID NO: 149233 - DNA, 25 bp, Artificial
  Probe
gagacttctctaatttggtcttaaa

SEQ ID NO: 149234 - DNA, 25 bp, Artificial
  Probe
agagacttctctaatttggtcttaa

SEQ ID NO: 149235 - DNA, 25 bp, Artificial
  Probe
cacagattaaacacaaatctattgc

SEQ ID NO: 149236 - DNA, 25 bp, Artificial
  Probe
gcacagattaaacacaaatctattg

SEQ ID NO: 149237 - DNA, 25 bp, Artificial
  Probe
gcaacaatgatggagtaggagatat

SEQ ID NO: 149238 - DNA, 25 bp, Artificial
  Probe
aagatagcaacaatgatggagtagg

SEQ ID NO: 149239 - DNA, 25 bp, Artificial
  Probe
ggaagatagcaacaatgatggagta

SEQ ID NO: 149240 - DNA, 25 bp, Artificial
  Probe
gaagatagcaacaatgatggagtag

SEQ ID NO: 149241 - DNA, 25 bp, Artificial
  Probe
gatagcaacaatgatggagtaggag

SEQ ID NO: 149242 - DNA, 25 bp, Artificial
  Probe
agcaacaatgatggagtaggagata

SEQ ID NO: 149243 - DNA, 25 bp, Artificial
  Probe
tagcaacaatgatggagtaggagat

SEQ ID NO: 149244 - DNA, 25 bp, Artificial
  Probe
atagcaacaatgatggagtaggaga

SEQ ID NO: 149245 - DNA, 25 bp, Artificial
  Probe
agatagcaacaatgatggagtagga

SEQ ID NO: 149246 - DNA, 25 bp, Artificial
  Probe
caggaagatagcaacaatgatggag

SEQ ID NO: 149247 - DNA, 25 bp, Artificial
  Probe
aggaagatagcaacaatgatggagt

SEQ ID NO: 149248 - DNA, 25 bp, Artificial
  Probe
gaatgcgatgacgatgacgataatg

SEQ ID NO: 149249 - DNA, 25 bp, Artificial
  Probe
aatgcgatgacgatgacgataatga

SEQ ID NO: 149250 - DNA, 25 bp, Artificial
  Probe
tgaatgcgatgacgatgacgataat

SEQ ID NO: 149251 - DNA, 25 bp, Artificial
  Probe
atgaatgcgatgacgatgacgataa

SEQ ID NO: 149252 - DNA, 25 bp, Artificial
  Probe
tttaatggagttgactttgaaggga

SEQ ID NO: 149253 - DNA, 25 bp, Artificial
  Probe
cttctaaacgcaaaccaacatcttt

SEQ ID NO: 149254 - DNA, 25 bp, Artificial
  Probe
atttaatggagttgactttgaaggg

SEQ ID NO: 149255 - DNA, 25 bp, Artificial
  Probe
ttaatggagttgactttgaagggac

SEQ ID NO: 149256 - DNA, 25 bp, Artificial
  Probe
gatgaatgcgatgacgatgacgata

SEQ ID NO: 149257 - DNA, 25 bp, Artificial
  Probe
ggcatttaatggagttgactttgaa

SEQ ID NO: 149258 - DNA, 25 bp, Artificial
  Probe
caacaatgatggagtaggagatatc

SEQ ID NO: 149259 - DNA, 25 bp, Artificial
  Probe
gcatttaatggagttgactttgaag

SEQ ID NO: 149260 - DNA, 25 bp, Artificial
  Probe
atgcgatgacgatgacgataatgac

SEQ ID NO: 149261 - DNA, 25 bp, Artificial
  Probe
catttaatggagttgactttgaagg

SEQ ID NO: 149262 - DNA, 25 bp, Artificial
  Probe
ccttctaaacgcaaaccaacatctt

SEQ ID NO: 149263 - DNA, 25 bp, Artificial
  Probe
gtcattgatcgcattgatgtgtgtc

SEQ ID NO: 149264 - DNA, 25 bp, Artificial
  Probe
caaggtcattgatcgcattgatgtg

SEQ ID NO: 149265 - DNA, 25 bp, Artificial
  Probe
ccaggaagatagcaacaatgatgga

SEQ ID NO: 149266 - DNA, 25 bp, Artificial
  Probe
gacaaggtcattgatcgcattgatg

SEQ ID NO: 149267 - DNA, 25 bp, Artificial
  Probe
taatggagttgactttgaagggacc

SEQ ID NO: 149268 - DNA, 25 bp, Artificial
  Probe
cggcatttaatggagttgactttga

SEQ ID NO: 149269 - DNA, 25 bp, Artificial
  Probe
aaggtcattgatcgcattgatgtgt

SEQ ID NO: 149270 - DNA, 25 bp, Artificial
  Probe
acggcatttaatggagttgactttg

SEQ ID NO: 149271 - DNA, 25 bp, Artificial
  Probe
cacggcatttaatggagttgacttt

SEQ ID NO: 149272 - DNA, 25 bp, Artificial
  Probe
acaaggtcattgatcgcattgatgt

SEQ ID NO: 149273 - DNA, 25 bp, Artificial
  Probe
taaacacccagacagatgacgacta

SEQ ID NO: 149274 - DNA, 25 bp, Artificial
  Probe
tacacggcatttaatggagttgact

SEQ ID NO: 149275 - DNA, 25 bp, Artificial
  Probe
gtacacggcatttaatggagttgac

SEQ ID NO: 149276 - DNA, 25 bp, Artificial
  Probe
attgatcgcattgatgtgtgtcctg

SEQ ID NO: 149277 - DNA, 25 bp, Artificial
  Probe
cattgatcgcattgatgtgtgtcct

SEQ ID NO: 149278 - DNA, 25 bp, Artificial
  Probe
ggacaaggtcattgatcgcattgat

SEQ ID NO: 149279 - DNA, 25 bp, Artificial
  Probe
ttctaaacgcaaaccaacatctttt

SEQ ID NO: 149280 - DNA, 25 bp, Artificial
  Probe
aaacacccagacagatgacgactat

SEQ ID NO: 149281 - DNA, 25 bp, Artificial
  Probe
tcattgatcgcattgatgtgtgtcc

SEQ ID NO: 149282 - DNA, 25 bp, Artificial
  Probe
gcaaggctactgaacttagagatta

SEQ ID NO: 149283 - DNA, 25 bp, Artificial
  Probe
ggagacatctgatatgcgaagtata

SEQ ID NO: 149284 - DNA, 25 bp, Artificial
  Probe
ataagtctattgaattggtccaggc

SEQ ID NO: 149285 - DNA, 25 bp, Artificial
  Probe
aggagacatctgatatgcgaagtat

SEQ ID NO: 149286 - DNA, 25 bp, Artificial
  Probe
ttatgacaacacttgctcacatctt

SEQ ID NO: 149287 - DNA, 25 bp, Artificial
  Probe
gaggagacatctgatatgcgaagta

SEQ ID NO: 149288 - DNA, 25 bp, Artificial
  Probe
cttatgacaacacttgctcacatct

SEQ ID NO: 149289 - DNA, 25 bp, Artificial
  Probe
taagtctattgaattggtccaggca

SEQ ID NO: 149290 - DNA, 25 bp, Artificial
  Probe
tatgacaacacttgctcacatcttg

SEQ ID NO: 149291 - DNA, 25 bp, Artificial
  Probe
aataagtctattgaattggtccagg

SEQ ID NO: 149292 - DNA, 25 bp, Artificial
  Probe
atccagcaattaatatcacagaagc

SEQ ID NO: 149293 - DNA, 25 bp, Artificial
  Probe
caaggctactgaacttagagattat

SEQ ID NO: 149294 - DNA, 25 bp, Artificial
  Probe
acaggaataagtctattgaattggt

SEQ ID NO: 149295 - DNA, 25 bp, Artificial
  Probe
ccttatgacaacacttgctcacatc

SEQ ID NO: 149296 - DNA, 25 bp, Artificial
  Probe
agatgaatcgaatccagttccaatt

SEQ ID NO: 149297 - DNA, 25 bp, Artificial
  Probe
aagacaaccctgaatccatacatag

SEQ ID NO: 149298 - DNA, 25 bp, Artificial
  Probe
gaagacaaccctgaatccatacata

SEQ ID NO: 149299 - DNA, 25 bp, Artificial
  Probe
ctatcagagtgtccaaagtttcaga

SEQ ID NO: 149300 - DNA, 25 bp, Artificial
  Probe
caggaataagtctattgaattggtc

SEQ ID NO: 149301 - DNA, 25 bp, Artificial
  Probe
tccttatgacaacacttgctcacat

SEQ ID NO: 149302 - DNA, 25 bp, Artificial
  Probe
ggaataagtctattgaattggtcca

SEQ ID NO: 149303 - DNA, 25 bp, Artificial
  Probe
tatcagagtgtccaaagtttcagat

SEQ ID NO: 149304 - DNA, 25 bp, Artificial
  Probe
cagatgaatcgaatccagttccaat

SEQ ID NO: 149305 - DNA, 25 bp, Artificial
  Probe
gcctttacccatctgtctatttgaa

SEQ ID NO: 149306 - DNA, 25 bp, Artificial
  Probe
agacaaccctgaatccatacatagt

SEQ ID NO: 149307 - DNA, 25 bp, Artificial
  Probe
gaataagtctattgaattggtccag

SEQ ID NO: 149308 - DNA, 25 bp, Artificial
  Probe
aaggctactgaacttagagattatt

SEQ ID NO: 149309 - DNA, 25 bp, Artificial
  Probe
aagtctattgaattggtccaggcag

SEQ ID NO: 149310 - DNA, 25 bp, Artificial
  Probe
gtgaggagacatctgatatgcgaag

SEQ ID NO: 149311 - DNA, 25 bp, Artificial
  Probe
gatcatgtctctgaataccttctag

SEQ ID NO: 149312 - DNA, 25 bp, Artificial
  Probe
aggaataagtctattgaattggtcc

SEQ ID NO: 149313 - DNA, 25 bp, Artificial
  Probe
gagaaactggacacctaaggatatt

SEQ ID NO: 149314 - DNA, 25 bp, Artificial
  Probe
cttgcaccatctaccacatgatatt

SEQ ID NO: 149315 - DNA, 25 bp, Artificial
  Probe
ccgaggttaaagacttggaatactt

SEQ ID NO: 149316 - DNA, 25 bp, Artificial
  Probe
tctatcagagtgtccaaagtttcag

SEQ ID NO: 149317 - DNA, 25 bp, Artificial
  Probe
atcagagtgtccaaagtttcagatg

SEQ ID NO: 149318 - DNA, 25 bp, Artificial
  Probe
tgagaaactggacacctaaggatat

SEQ ID NO: 149319 - DNA, 25 bp, Artificial
  Probe
atgagaaactggacacctaaggata

SEQ ID NO: 149320 - DNA, 25 bp, Artificial
  Probe
atctatcagagtgtccaaagtttca

SEQ ID NO: 149321 - DNA, 25 bp, Artificial
  Probe
acccatctgtctatttgaagaaaga

SEQ ID NO: 149322 - DNA, 25 bp, Artificial
  Probe
agaaactggacacctaaggatattt

SEQ ID NO: 149323 - DNA, 25 bp, Artificial
  Probe
agaatctatcagagtgtccaaagtt

SEQ ID NO: 149324 - DNA, 25 bp, Artificial
  Probe
gatccagcaattaatatcacagaag

SEQ ID NO: 149325 - DNA, 25 bp, Artificial
  Probe
ccaatcctacgtcaatacatgaaga

SEQ ID NO: 149326 - DNA, 25 bp, Artificial
  Probe
cctttacccatctgtctatttgaag

SEQ ID NO: 149327 - DNA, 25 bp, Artificial
  Probe
ttgagtggctatgtgctagagtatt

SEQ ID NO: 149328 - DNA, 25 bp, Artificial
  Probe
aagatacagaatgttcagcaaccaa

SEQ ID NO: 149329 - DNA, 25 bp, Artificial
  Probe
agatacagaatgttcagcaaccaag

SEQ ID NO: 149330 - DNA, 25 bp, Artificial
  Probe
tgagtggctatgtgctagagtattg

SEQ ID NO: 149331 - DNA, 25 bp, Artificial
  Probe
caagatacagaatgttcagcaacca

SEQ ID NO: 149332 - DNA, 25 bp, Artificial
  Probe
aggctgtgactattgaagatgtgtg

SEQ ID NO: 149333 - DNA, 25 bp, Artificial
  Probe
gatacagaatgttcagcaaccaagg

SEQ ID NO: 149334 - DNA, 25 bp, Artificial
  Probe
ccaagatacagaatgttcagcaacc

SEQ ID NO: 149335 - DNA, 25 bp, Artificial
  Probe
cgattcatatttgcgagacttacag

SEQ ID NO: 149336 - DNA, 25 bp, Artificial
  Probe
atcaaataaacattcgcaactcaga

SEQ ID NO: 149337 - DNA, 25 bp, Artificial
  Probe
aaataaacattcgcaactcagagac

SEQ ID NO: 149338 - DNA, 25 bp, Artificial
  Probe
caaataaacattcgcaactcagaga

SEQ ID NO: 149339 - DNA, 25 bp, Artificial
  Probe
tcaaataaacattcgcaactcagag

SEQ ID NO: 149340 - DNA, 25 bp, Artificial
  Probe
acttacatccgtagagttggagaag

SEQ ID NO: 149341 - DNA, 25 bp, Artificial
  Probe
cctcctaaccttgaagaaagaaaga

SEQ ID NO: 149342 - DNA, 25 bp, Artificial
  Probe
tcctcctaaccttgaagaaagaaag

SEQ ID NO: 149343 - DNA, 25 bp, Artificial
  Probe
ctcctcctaaccttgaagaaagaaa

SEQ ID NO: 149344 - DNA, 25 bp, Artificial
  Probe
caggctgtgactattgaagatgtgt

SEQ ID NO: 149345 - DNA, 25 bp, Artificial
  Probe
aatcaaataaacattcgcaactcag

SEQ ID NO: 149346 - DNA, 25 bp, Artificial
  Probe
gtggctatgtgctagagtattgctt

SEQ ID NO: 149347 - DNA, 25 bp, Artificial
  Probe
aataaacattcgcaactcagagact

SEQ ID NO: 149348 - DNA, 25 bp, Artificial
  Probe
atacagaatgttcagcaaccaagga

SEQ ID NO: 149349 - DNA, 25 bp, Artificial
  Probe
tctcctcctaaccttgaagaaagaa

SEQ ID NO: 149350 - DNA, 25 bp, Artificial
  Probe
tcatattcattaggaaagcagagcg

SEQ ID NO: 149351 - DNA, 25 bp, Artificial
  Probe
atcatattcattaggaaagcagagc

SEQ ID NO: 149352 - DNA, 25 bp, Artificial
  Probe
accatcatattcattaggaaagcag

SEQ ID NO: 149353 - DNA, 25 bp, Artificial
  Probe
ccatcatattcattaggaaagcaga

SEQ ID NO: 149354 - DNA, 25 bp, Artificial
  Probe
gctatgtgctagagtattgctttga

SEQ ID NO: 149355 - DNA, 25 bp, Artificial
  Probe
ctctcctcctaaccttgaagaaaga

SEQ ID NO: 149356 - DNA, 25 bp, Artificial
  Probe
tctctcctcctaaccttgaagaaag

SEQ ID NO: 149357 - DNA, 25 bp, Artificial
  Probe
gattcatatttgcgagacttacagt

SEQ ID NO: 149358 - DNA, 25 bp, Artificial
  Probe
gtgctagagtattgctttgaaggaa

SEQ ID NO: 149359 - DNA, 25 bp, Artificial
  Probe
atgtgctagagtattgctttgaagg

SEQ ID NO: 149360 - DNA, 25 bp, Artificial
  Probe
tatgtgctagagtattgctttgaag

SEQ ID NO: 149361 - DNA, 25 bp, Artificial
  Probe
ctatgtgctagagtattgctttgaa

SEQ ID NO: 149362 - DNA, 25 bp, Artificial
  Probe
gagtggctatgtgctagagtattgc

SEQ ID NO: 149363 - DNA, 25 bp, Artificial
  Probe
ctcctaaccttgaagaaagaaagaa

SEQ ID NO: 149364 - DNA, 25 bp, Artificial
  Probe
gctagagtattgctttgaaggaagt

SEQ ID NO: 149365 - DNA, 25 bp, Artificial
  Probe
tgctagagtattgctttgaaggaag

SEQ ID NO: 149366 - DNA, 25 bp, Artificial
  Probe
ctgaagcaaacttacatccgtagag

SEQ ID NO: 149367 - DNA, 25 bp, Artificial
  Probe
agagtattgctttgaaggaagtaca

SEQ ID NO: 149368 - DNA, 25 bp, Artificial
  Probe
tttgagtggctatgtgctagagtat

SEQ ID NO: 149369 - DNA, 25 bp, Artificial
  Probe
atgacccaagatacagaatgttcag

SEQ ID NO: 149370 - DNA, 25 bp, Artificial
  Probe
gatgacccaagatacagaatgttca

SEQ ID NO: 149371 - DNA, 25 bp, Artificial
  Probe
tacagaatgttcagcaaccaaggag

SEQ ID NO: 149372 - DNA, 25 bp, Artificial
  Probe
gtgttgtactattgcggataagatc

SEQ ID NO: 149373 - DNA, 25 bp, Artificial
  Probe
agtgttgtactattgcggataagat

SEQ ID NO: 149374 - DNA, 25 bp, Artificial
  Probe
gagtgttgtactattgcggataaga

SEQ ID NO: 149375 - DNA, 25 bp, Artificial
  Probe
cgagtgttgtactattgcggataag

SEQ ID NO: 149376 - DNA, 25 bp, Artificial
  Probe
acgagtgttgtactattgcggataa

SEQ ID NO: 149377 - DNA, 25 bp, Artificial
  Probe
aacgagtgttgtactattgcggata

SEQ ID NO: 149378 - DNA, 25 bp, Artificial
  Probe
ggaagaacaagctgctaaatacaaa

SEQ ID NO: 149379 - DNA, 25 bp, Artificial
  Probe
agaacaagctgctaaatacaaacac

SEQ ID NO: 149380 - DNA, 25 bp, Artificial
  Probe
aagaacaagctgctaaatacaaaca

SEQ ID NO: 149381 - DNA, 25 bp, Artificial
  Probe
aagtggaagaacaagctgctaaata

SEQ ID NO: 149382 - DNA, 25 bp, Artificial
  Probe
gaagaacaagctgctaaatacaaac

SEQ ID NO: 149383 - DNA, 25 bp, Artificial
  Probe
tggaagaacaagctgctaaatacaa

SEQ ID NO: 149384 - DNA, 25 bp, Artificial
  Probe
gaacaagctgctaaatacaaacacc

SEQ ID NO: 149385 - DNA, 25 bp, Artificial
  Probe
agtggaagaacaagctgctaaatac

SEQ ID NO: 149386 - DNA, 25 bp, Artificial
  Probe
aaagtggaagaacaagctgctaaat

SEQ ID NO: 149387 - DNA, 25 bp, Artificial
  Probe
gtggaagaacaagctgctaaataca

SEQ ID NO: 149388 - DNA, 25 bp, Artificial
  Probe
gtgcccaagaaatgctgttatgatg

SEQ ID NO: 149389 - DNA, 25 bp, Artificial
  Probe
aaacaaatacgaaacctgtgagcag

SEQ ID NO: 149390 - DNA, 25 bp, Artificial
  Probe
tgttgtactattgcggataagatcc

SEQ ID NO: 149391 - DNA, 25 bp, Artificial
  Probe
gaaagtggaagaacaagctgctaaa

SEQ ID NO: 149392 - DNA, 25 bp, Artificial
  Probe
tgtgcccaagaaatgctgttatgat

SEQ ID NO: 149393 - DNA, 25 bp, Artificial
  Probe
cccaagaaatgctgttatgatggag

SEQ ID NO: 149394 - DNA, 25 bp, Artificial
  Probe
aacaagctgctaaatacaaacaccg

SEQ ID NO: 149395 - DNA, 25 bp, Artificial
  Probe
agaaagtggaagaacaagctgctaa

SEQ ID NO: 149396 - DNA, 25 bp, Artificial
  Probe
agaaaacaaatacgaaacctgtgag

SEQ ID NO: 149397 - DNA, 25 bp, Artificial
  Probe
gagaaaacaaatacgaaacctgtga

SEQ ID NO: 149398 - DNA, 25 bp, Artificial
  Probe
catcagaaagtggaagaacaagctg

SEQ ID NO: 149399 - DNA, 25 bp, Artificial
  Probe
ccttcaacgagtgttgtactattgc

SEQ ID NO: 149400 - DNA, 25 bp, Artificial
  Probe
gccttcaacgagtgttgtactattg

SEQ ID NO: 149401 - DNA, 25 bp, Artificial
  Probe
caagctgctaaatacaaacaccgtg

SEQ ID NO: 149402 - DNA, 25 bp, Artificial
  Probe
cgagaaaacaaatacgaaacctgtg

SEQ ID NO: 149403 - DNA, 25 bp, Artificial
  Probe
caagaaatgctgttatgatggagcc

SEQ ID NO: 149404 - DNA, 25 bp, Artificial
  Probe
ccaagaaatgctgttatgatggagc

SEQ ID NO: 149405 - DNA, 25 bp, Artificial
  Probe
gtgtgcccaagaaatgctgttatga

SEQ ID NO: 149406 - DNA, 25 bp, Artificial
  Probe
ctgcatcagaaagtggaagaacaag

SEQ ID NO: 149407 - DNA, 25 bp, Artificial
  Probe
gaaaacaaatacgaaacctgtgagc

SEQ ID NO: 149408 - DNA, 25 bp, Artificial
  Probe
cttcaacgagtgttgtactattgcg

SEQ ID NO: 149409 - DNA, 25 bp, Artificial
  Probe
atgatggagcccgagaaaacaaata

SEQ ID NO: 149410 - DNA, 25 bp, Artificial
  Probe
tatgatggagcccgagaaaacaaat

SEQ ID NO: 149411 - DNA, 25 bp, Artificial
  Probe
gataagatccgaaaagaaagccacc

SEQ ID NO: 149412 - DNA, 25 bp, Artificial
  Probe
acaagctgctaaatacaaacaccgt

SEQ ID NO: 149413 - DNA, 25 bp, Artificial
  Probe
cccgagaaaacaaatacgaaacctg

SEQ ID NO: 149414 - DNA, 25 bp, Artificial
  Probe
aaaacaaatacgaaacctgtgagca

SEQ ID NO: 149415 - DNA, 25 bp, Artificial
  Probe
ttatgatggagcccgagaaaacaaa

SEQ ID NO: 149416 - DNA, 25 bp, Artificial
  Probe
ccgagaaaacaaatacgaaacctgt

SEQ ID NO: 149417 - DNA, 25 bp, Artificial
  Probe
ctgtattagacaaggttgccaagtg

SEQ ID NO: 149418 - DNA, 25 bp, Artificial
  Probe
tctgtattagacaaggttgccaagt

SEQ ID NO: 149419 - DNA, 25 bp, Artificial
  Probe
tgtctcattccttcagtttctcttg

SEQ ID NO: 149420 - DNA, 25 bp, Artificial
  Probe
gtgtctcattccttcagtttctctt

SEQ ID NO: 149421 - DNA, 25 bp, Artificial
  Probe
attggttattacggagggagagatt

SEQ ID NO: 149422 - DNA, 25 bp, Artificial
  Probe
gaagactgattcaactttgcgtata

SEQ ID NO: 149423 - DNA, 25 bp, Artificial
  Probe
ttggttattacggagggagagattt

SEQ ID NO: 149424 - DNA, 25 bp, Artificial
  Probe
aagactgattcaactttgcgtatag

SEQ ID NO: 149425 - DNA, 25 bp, Artificial
  Probe
gtctcattccttcagtttctcttgg

SEQ ID NO: 149426 - DNA, 25 bp, Artificial
  Probe
agtgtctcattccttcagtttctct

SEQ ID NO: 149427 - DNA, 25 bp, Artificial
  Probe
aattggttattacggagggagagat

SEQ ID NO: 149428 - DNA, 25 bp, Artificial
  Probe
aaattggttattacggagggagaga

SEQ ID NO: 149429 - DNA, 25 bp, Artificial
  Probe
gactgattcaactttgcgtatagtg

SEQ ID NO: 149430 - DNA, 25 bp, Artificial
  Probe
agactgattcaactttgcgtatagt

SEQ ID NO: 149431 - DNA, 25 bp, Artificial
  Probe
tggttattacggagggagagatttg

SEQ ID NO: 149432 - DNA, 25 bp, Artificial
  Probe
tgattcaactttgcgtatagtggag

SEQ ID NO: 149433 - DNA, 25 bp, Artificial
  Probe
ctgattcaactttgcgtatagtgga

SEQ ID NO: 149434 - DNA, 25 bp, Artificial
  Probe
gagtgtctcattccttcagtttctc

SEQ ID NO: 149435 - DNA, 25 bp, Artificial
  Probe
actgattcaactttgcgtatagtgg

SEQ ID NO: 149436 - DNA, 25 bp, Artificial
  Probe
gttattacggagggagagatttgct

SEQ ID NO: 149437 - DNA, 25 bp, Artificial
  Probe
tctcattccttcagtttctcttggg

SEQ ID NO: 149438 - DNA, 25 bp, Artificial
  Probe
ttattacggagggagagatttgctc

SEQ ID NO: 149439 - DNA, 25 bp, Artificial
  Probe
gattcaactttgcgtatagtggagc

SEQ ID NO: 149440 - DNA, 25 bp, Artificial
  Probe
tgtattagacaaggttgccaagtgc

SEQ ID NO: 149441 - DNA, 25 bp, Artificial
  Probe
ggttattacggagggagagatttgc

SEQ ID NO: 149442 - DNA, 25 bp, Artificial
  Probe
gcgtatagtggagccaaagagattt

SEQ ID NO: 149443 - DNA, 25 bp, Artificial
  Probe
ggagtgtctcattccttcagtttct

SEQ ID NO: 149444 - DNA, 25 bp, Artificial
  Probe
aaaattggttattacggagggagag

SEQ ID NO: 149445 - DNA, 25 bp, Artificial
  Probe
ctcattccttcagtttctcttgggc

SEQ ID NO: 149446 - DNA, 25 bp, Artificial
  Probe
caaaattggttattacggagggaga

SEQ ID NO: 149447 - DNA, 25 bp, Artificial
  Probe
atagtggagccaaagagattttagc

SEQ ID NO: 149448 - DNA, 25 bp, Artificial
  Probe
cgtatagtggagccaaagagatttt

SEQ ID NO: 149449 - DNA, 25 bp, Artificial
  Probe
attcaactttgcgtatagtggagcc

SEQ ID NO: 149450 - DNA, 25 bp, Artificial
  Probe
gtctgtattagacaaggttgccaag

SEQ ID NO: 149451 - DNA, 25 bp, Artificial
  Probe
tgaagactgattcaactttgcgtat

SEQ ID NO: 149452 - DNA, 25 bp, Artificial
  Probe
cattccttcagtttctcttgggcag

SEQ ID NO: 149453 - DNA, 25 bp, Artificial
  Probe
gggagtgtctcattccttcagtttc

SEQ ID NO: 149454 - DNA, 25 bp, Artificial
  Probe
gtatagtggagccaaagagatttta

SEQ ID NO: 149455 - DNA, 25 bp, Artificial
  Probe
tgcgtatagtggagccaaagagatt

SEQ ID NO: 149456 - DNA, 25 bp, Artificial
  Probe
gtgaagactgattcaactttgcgta

SEQ ID NO: 149457 - DNA, 25 bp, Artificial
  Probe
tatagtggagccaaagagattttag

SEQ ID NO: 149458 - DNA, 25 bp, Artificial
  Probe
gcaaaattggttattacggagggag

SEQ ID NO: 149459 - DNA, 25 bp, Artificial
  Probe
tcattccttcagtttctcttgggca

SEQ ID NO: 149460 - DNA, 25 bp, Artificial
  Probe
ttgcgtatagtggagccaaagagat

SEQ ID NO: 149461 - DNA, 25 bp, Artificial
  Probe
aagtgcaaaattggttattacggag

SEQ ID NO: 149462 - DNA, 25 bp, Artificial
  Probe
taaagacatatccacaaacctgagt

SEQ ID NO: 149463 - DNA, 25 bp, Artificial
  Probe
aaagacatatccacaaacctgagtt

SEQ ID NO: 149464 - DNA, 25 bp, Artificial
  Probe
ttaaagacatatccacaaacctgag

SEQ ID NO: 149465 - DNA, 25 bp, Artificial
  Probe
tttaaagacatatccacaaacctga

SEQ ID NO: 149466 - DNA, 25 bp, Artificial
  Probe
caaccataacctgtttccgatcaac

SEQ ID NO: 149467 - DNA, 25 bp, Artificial
  Probe
aagacatatccacaaacctgagttt

SEQ ID NO: 149468 - DNA, 25 bp, Artificial
  Probe
ttcttttcttttccttccttccttg

SEQ ID NO: 149469 - DNA, 25 bp, Artificial
  Probe
tttcttttcttttccttccttcctt

SEQ ID NO: 149470 - DNA, 25 bp, Artificial
  Probe
ttttcttttcttttccttccttcct

SEQ ID NO: 149471 - DNA, 25 bp, Artificial
  Probe
tcttttcttttccttccttccttgc

SEQ ID NO: 149472 - DNA, 25 bp, Artificial
  Probe
ccaaccataacctgtttccgatcaa

SEQ ID NO: 149473 - DNA, 25 bp, Artificial
  Probe
ctacttttagcaggtaaatccgagc

SEQ ID NO: 149474 - DNA, 25 bp, Artificial
  Probe
cttttcttttccttccttccttgcc

SEQ ID NO: 149475 - DNA, 25 bp, Artificial
  Probe
agtgaacagctctacttctccacac

SEQ ID NO: 149476 - DNA, 25 bp, Artificial
  Probe
cagtgaacagctctacttctccaca

SEQ ID NO: 149477 - DNA, 25 bp, Artificial
  Probe
caccaaccataacctgtttccgatc

SEQ ID NO: 149478 - DNA, 25 bp, Artificial
  Probe
tttcttttccttccttccttgcctt

SEQ ID NO: 149479 - DNA, 25 bp, Artificial
  Probe
ttttcttttccttccttccttgcct

SEQ ID NO: 149480 - DNA, 25 bp, Artificial
  Probe
accaaccataacctgtttccgatca

SEQ ID NO: 149481 - DNA, 25 bp, Artificial
  Probe
ttcttttccttccttccttgccttc

SEQ ID NO: 149482 - DNA, 25 bp, Artificial
  Probe
cttgaagaacccacagatgtcacct

SEQ ID NO: 149483 - DNA, 25 bp, Artificial
  Probe
ttttaaagacatatccacaaacctg

SEQ ID NO: 149484 - DNA, 25 bp, Artificial
  Probe
aaccataacctgtttccgatcaaca

SEQ ID NO: 149485 - DNA, 25 bp, Artificial
  Probe
ccagtgaacagctctacttctccac

SEQ ID NO: 149486 - DNA, 25 bp, Artificial
  Probe
tacttctccacacccaccaaccata

SEQ ID NO: 149487 - DNA, 25 bp, Artificial
  Probe
gtgaacagctctacttctccacacc

SEQ ID NO: 149488 - DNA, 25 bp, Artificial
  Probe
ccaccaaccataacctgtttccgat

SEQ ID NO: 149489 - DNA, 25 bp, Artificial
  Probe
ttgaagaacccacagatgtcacctg

SEQ ID NO: 149490 - DNA, 25 bp, Artificial
  Probe
accataacctgtttccgatcaacac

SEQ ID NO: 149491 - DNA, 25 bp, Artificial
  Probe
tacttttagcaggtaaatccgagct

SEQ ID NO: 149492 - DNA, 25 bp, Artificial
  Probe
ttttccttccttccttgccttcctt

SEQ ID NO: 149493 - DNA, 25 bp, Artificial
  Probe
acacccaccaaccataacctgtttc

SEQ ID NO: 149494 - DNA, 25 bp, Artificial
  Probe
cacccagtgaacagctctacttctc

SEQ ID NO: 149495 - DNA, 25 bp, Artificial
  Probe
cttttccttccttccttgccttcct

SEQ ID NO: 149496 - DNA, 25 bp, Artificial
  Probe
tcttttccttccttccttgccttcc

SEQ ID NO: 149497 - DNA, 25 bp, Artificial
  Probe
ccataacctgtttccgatcaacacg

SEQ ID NO: 149498 - DNA, 25 bp, Artificial
  Probe
gattgcctcaagctttccaagacat

SEQ ID NO: 149499 - DNA, 25 bp, Artificial
  Probe
gctacttttagcaggtaaatccgag

SEQ ID NO: 149500 - DNA, 25 bp, Artificial
  Probe
cacacccagtgaacagctctacttc

SEQ ID NO: 149501 - DNA, 25 bp, Artificial
  Probe
acacccagtgaacagctctacttct

SEQ ID NO: 149502 - DNA, 25 bp, Artificial
  Probe
attgcctcaagctttccaagacatg

SEQ ID NO: 149503 - DNA, 25 bp, Artificial
  Probe
cataacctgtttccgatcaacacgc

SEQ ID NO: 149504 - DNA, 25 bp, Artificial
  Probe
ataacctgtttccgatcaacacgct

SEQ ID NO: 149505 - DNA, 25 bp, Artificial
  Probe
cagattgcctcaagctttccaagac

SEQ ID NO: 149506 - DNA, 25 bp, Artificial
  Probe
cttctggcttgaagaacccacagat

SEQ ID NO: 149507 - DNA, 25 bp, Artificial
  Probe
ctattatctgacacactggtgctat

SEQ ID NO: 149508 - DNA, 25 bp, Artificial
  Probe
ttatctgacacactggtgctattaa

SEQ ID NO: 149509 - DNA, 25 bp, Artificial
  Probe
attatctgacacactggtgctatta

SEQ ID NO: 149510 - DNA, 25 bp, Artificial
  Probe
tattatctgacacactggtgctatt

SEQ ID NO: 149511 - DNA, 25 bp, Artificial
  Probe
actattatctgacacactggtgcta

SEQ ID NO: 149512 - DNA, 25 bp, Artificial
  Probe
cggtatgattaggattccataagtg

SEQ ID NO: 149513 - DNA, 25 bp, Artificial
  Probe
aactattatctgacacactggtgct

SEQ ID NO: 149514 - DNA, 25 bp, Artificial
  Probe
tctacctgcctctgagattcgtatt

SEQ ID NO: 149515 - DNA, 25 bp, Artificial
  Probe
cctctgagattcgtatttagccttt

SEQ ID NO: 149516 - DNA, 25 bp, Artificial
  Probe
tcgtatttagcctttaacactatgc

SEQ ID NO: 149517 - DNA, 25 bp, Artificial
  Probe
tctgacacactggtgctattaatta

SEQ ID NO: 149518 - DNA, 25 bp, Artificial
  Probe
atctgacacactggtgctattaatt

SEQ ID NO: 149519 - DNA, 25 bp, Artificial
  Probe
tatctgacacactggtgctattaat

SEQ ID NO: 149520 - DNA, 25 bp, Artificial
  Probe
tacctgcctctgagattcgtattta

SEQ ID NO: 149521 - DNA, 25 bp, Artificial
  Probe
agtgaatttctctttctctgttgga

SEQ ID NO: 149522 - DNA, 25 bp, Artificial
  Probe
agaaactattatctgacacactggt

SEQ ID NO: 149523 - DNA, 25 bp, Artificial
  Probe
aagtgaatttctctttctctgttgg

SEQ ID NO: 149524 - DNA, 25 bp, Artificial
  Probe
ctgacacactggtgctattaattat

SEQ ID NO: 149525 - DNA, 25 bp, Artificial
  Probe
gtgaatttctctttctctgttggag

SEQ ID NO: 149526 - DNA, 25 bp, Artificial
  Probe
tgacacactggtgctattaattatt

SEQ ID NO: 149527 - DNA, 25 bp, Artificial
  Probe
ggtatgattaggattccataagtga

SEQ ID NO: 149528 - DNA, 25 bp, Artificial
  Probe
aagaaactattatctgacacactgg

SEQ ID NO: 149529 - DNA, 25 bp, Artificial
  Probe
agattcgtatttagcctttaacact

SEQ ID NO: 149530 - DNA, 25 bp, Artificial
  Probe
tgagattcgtatttagcctttaaca

SEQ ID NO: 149531 - DNA, 25 bp, Artificial
  Probe
ttagctccaagtctcttctgacatt

SEQ ID NO: 149532 - DNA, 25 bp, Artificial
  Probe
gggaaagaaactattatctgacaca

SEQ ID NO: 149533 - DNA, 25 bp, Artificial
  Probe
ctctgagattcgtatttagccttta

SEQ ID NO: 149534 - DNA, 25 bp, Artificial
  Probe
gagattcgtatttagcctttaacac

SEQ ID NO: 149535 - DNA, 25 bp, Artificial
  Probe
acctgcctctgagattcgtatttag

SEQ ID NO: 149536 - DNA, 25 bp, Artificial
  Probe
ctccaagtctcttctgacatttaca

SEQ ID NO: 149537 - DNA, 25 bp, Artificial
  Probe
ctacctgcctctgagattcgtattt

SEQ ID NO: 149538 - DNA, 25 bp, Artificial
  Probe
tccaagtctcttctgacatttacat

SEQ ID NO: 149539 - DNA, 25 bp, Artificial
  Probe
cttagctccaagtctcttctgacat

SEQ ID NO: 149540 - DNA, 25 bp, Artificial
  Probe
ctgagattcgtatttagcctttaac

SEQ ID NO: 149541 - DNA, 25 bp, Artificial
  Probe
tatctacctgcctctgagattcgta

SEQ ID NO: 149542 - DNA, 25 bp, Artificial
  Probe
tctgagattcgtatttagcctttaa

SEQ ID NO: 149543 - DNA, 25 bp, Artificial
  Probe
ccaagtctcttctgacatttacatt

SEQ ID NO: 149544 - DNA, 25 bp, Artificial
  Probe
gaaactattatctgacacactggtg

SEQ ID NO: 149545 - DNA, 25 bp, Artificial
  Probe
gctccaagtctcttctgacatttac

SEQ ID NO: 149546 - DNA, 25 bp, Artificial
  Probe
aaactattatctgacacactggtgc

SEQ ID NO: 149547 - DNA, 25 bp, Artificial
  Probe
gcctctgagattcgtatttagcctt

SEQ ID NO: 149548 - DNA, 25 bp, Artificial
  Probe
ggaaagaaactattatctgacacac

SEQ ID NO: 149549 - DNA, 25 bp, Artificial
  Probe
ccataagtgaatttctctttctctg

SEQ ID NO: 149550 - DNA, 25 bp, Artificial
  Probe
atctacctgcctctgagattcgtat

SEQ ID NO: 149551 - DNA, 25 bp, Artificial
  Probe
tcctatctacctgcctctgagattc

SEQ ID NO: 149552 - DNA, 25 bp, Artificial
  Probe
acacaatgaccaccaaggaatgttg

SEQ ID NO: 149553 - DNA, 25 bp, Artificial
  Probe
aaacacaatgaccaccaaggaatgt

SEQ ID NO: 149554 - DNA, 25 bp, Artificial
  Probe
aggttcttacgtttctcagagcttg

SEQ ID NO: 149555 - DNA, 25 bp, Artificial
  Probe
caggttcttacgtttctcagagctt

SEQ ID NO: 149556 - DNA, 25 bp, Artificial
  Probe
gtccaggttcttacgtttctcagag

SEQ ID NO: 149557 - DNA, 25 bp, Artificial
  Probe
aaaacacaatgaccaccaaggaatg

SEQ ID NO: 149558 - DNA, 25 bp, Artificial
  Probe
aacacaatgaccaccaaggaatgtt

SEQ ID NO: 149559 - DNA, 25 bp, Artificial
  Probe
tgtccaggttcttacgtttctcaga

SEQ ID NO: 149560 - DNA, 25 bp, Artificial
  Probe
cacaatgaccaccaaggaatgttgc

SEQ ID NO: 149561 - DNA, 25 bp, Artificial
  Probe
ctgtccaggttcttacgtttctcag

SEQ ID NO: 149562 - DNA, 25 bp, Artificial
  Probe
tttctcagagcttgcctctaaagtc

SEQ ID NO: 149563 - DNA, 25 bp, Artificial
  Probe
ctgctaatgaggaagccatcatgga

SEQ ID NO: 149564 - DNA, 25 bp, Artificial
  Probe
gtttctcagagcttgcctctaaagt

SEQ ID NO: 149565 - DNA, 25 bp, Artificial
  Probe
ttcttacgtttctcagagcttgcct

SEQ ID NO: 149566 - DNA, 25 bp, Artificial
  Probe
gttcttacgtttctcagagcttgcc

SEQ ID NO: 149567 - DNA, 25 bp, Artificial
  Probe
ggttcttacgtttctcagagcttgc

SEQ ID NO: 149568 - DNA, 25 bp, Artificial
  Probe
ccaggttcttacgtttctcagagct

SEQ ID NO: 149569 - DNA, 25 bp, Artificial
  Probe
tccaggttcttacgtttctcagagc

SEQ ID NO: 149570 - DNA, 25 bp, Artificial
  Probe
tgctaatgaggaagccatcatggac

SEQ ID NO: 149571 - DNA, 25 bp, Artificial
  Probe
gagcttgcctctaaagtccctcttc

SEQ ID NO: 149572 - DNA, 25 bp, Artificial
  Probe
ctaatgaggaagccatcatggacgg

SEQ ID NO: 149573 - DNA, 25 bp, Artificial
  Probe
gctgtccaggttcttacgtttctca

SEQ ID NO: 149574 - DNA, 25 bp, Artificial
  Probe
tcttacgtttctcagagcttgcctc

SEQ ID NO: 149575 - DNA, 25 bp, Artificial
  Probe
cgtttctcagagcttgcctctaaag

SEQ ID NO: 149576 - DNA, 25 bp, Artificial
  Probe
tacgtttctcagagcttgcctctaa

SEQ ID NO: 149577 - DNA, 25 bp, Artificial
  Probe
ttacgtttctcagagcttgcctcta

SEQ ID NO: 149578 - DNA, 25 bp, Artificial
  Probe
ttctcagagcttgcctctaaagtcc

SEQ ID NO: 149579 - DNA, 25 bp, Artificial
  Probe
acgtttctcagagcttgcctctaaa

SEQ ID NO: 149580 - DNA, 25 bp, Artificial
  Probe
cttacgtttctcagagcttgcctct

SEQ ID NO: 149581 - DNA, 25 bp, Artificial
  Probe
agagcttgcctctaaagtccctctt

SEQ ID NO: 149582 - DNA, 25 bp, Artificial
  Probe
ctcccatctttcacttgcacataaa

SEQ ID NO: 149583 - DNA, 25 bp, Artificial
  Probe
cctcccatctttcacttgcacataa

SEQ ID NO: 149584 - DNA, 25 bp, Artificial
  Probe
tcccatctttcacttgcacataaag

SEQ ID NO: 149585 - DNA, 25 bp, Artificial
  Probe
ccatctttcacttgcacataaagtc

SEQ ID NO: 149586 - DNA, 25 bp, Artificial
  Probe
ctgggagttagactcaaagaagtac

SEQ ID NO: 149587 - DNA, 25 bp, Artificial
  Probe
catctttcacttgcacataaagtcg

SEQ ID NO: 149588 - DNA, 25 bp, Artificial
  Probe
actgggagttagactcaaagaagta

SEQ ID NO: 149589 - DNA, 25 bp, Artificial
  Probe
agactgggagttagactcaaagaag

SEQ ID NO: 149590 - DNA, 25 bp, Artificial
  Probe
cccatctttcacttgcacataaagt

SEQ ID NO: 149591 - DNA, 25 bp, Artificial
  Probe
gactgggagttagactcaaagaagt

SEQ ID NO: 149592 - DNA, 25 bp, Artificial
  Probe
tttcacttgcacataaagtcgcttt

SEQ ID NO: 149593 - DNA, 25 bp, Artificial
  Probe
atctttcacttgcacataaagtcgc

SEQ ID NO: 149594 - DNA, 25 bp, Artificial
  Probe
ttcacttgcacataaagtcgctttc

SEQ ID NO: 149595 - DNA, 25 bp, Artificial
  Probe
ctttcacttgcacataaagtcgctt

SEQ ID NO: 149596 - DNA, 25 bp, Artificial
  Probe
gggagttagactcaaagaagtactg

SEQ ID NO: 149597 - DNA, 25 bp, Artificial
  Probe
ccctcccatctttcacttgcacata

SEQ ID NO: 149598 - DNA, 25 bp, Artificial
  Probe
tctttcacttgcacataaagtcgct

SEQ ID NO: 149599 - DNA, 25 bp, Artificial
  Probe
tgggagttagactcaaagaagtact

SEQ ID NO: 149600 - DNA, 25 bp, Artificial
  Probe
tcacttgcacataaagtcgctttcc

SEQ ID NO: 149601 - DNA, 25 bp, Artificial
  Probe
tataaggcaacgctaactcagaaca

SEQ ID NO: 149602 - DNA, 25 bp, Artificial
  Probe
ttataaggcaacgctaactcagaac

SEQ ID NO: 149603 - DNA, 25 bp, Artificial
  Probe
ctctataagtagtggtgccttaccg

SEQ ID NO: 149604 - DNA, 25 bp, Artificial
  Probe
ataaggcaacgctaactcagaacac

SEQ ID NO: 149605 - DNA, 25 bp, Artificial
  Probe
gctctataagtagtggtgccttacc

SEQ ID NO: 149606 - DNA, 25 bp, Artificial
  Probe
aaggcaacgctaactcagaacacta

SEQ ID NO: 149607 - DNA, 25 bp, Artificial
  Probe
taaggcaacgctaactcagaacact

SEQ ID NO: 149608 - DNA, 25 bp, Artificial
  Probe
ggtgaaggaggggtgtatgtaatat

SEQ ID NO: 149609 - DNA, 25 bp, Artificial
  Probe
cttataaggcaacgctaactcagaa

SEQ ID NO: 149610 - DNA, 25 bp, Artificial
  Probe
aggcaacgctaactcagaacactac

SEQ ID NO: 149611 - DNA, 25 bp, Artificial
  Probe
gacttataaggcaacgctaactcag

SEQ ID NO: 149612 - DNA, 25 bp, Artificial
  Probe
cggaacctttgggaacaactagatg

SEQ ID NO: 149613 - DNA, 25 bp, Artificial
  Probe
aggtgaaggaggggtgtatgtaata

SEQ ID NO: 149614 - DNA, 25 bp, Artificial
  Probe
taggtgaaggaggggtgtatgtaat

SEQ ID NO: 149615 - DNA, 25 bp, Artificial
  Probe
tcggactatgctctggatctcaaag

SEQ ID NO: 149616 - DNA, 25 bp, Artificial
  Probe
ctcggactatgctctggatctcaaa

SEQ ID NO: 149617 - DNA, 25 bp, Artificial
  Probe
acttataaggcaacgctaactcaga

SEQ ID NO: 149618 - DNA, 25 bp, Artificial
  Probe
ggaacctttgggaacaactagatgc

SEQ ID NO: 149619 - DNA, 25 bp, Artificial
  Probe
gttctgtgaacacgaataaacttga

SEQ ID NO: 149620 - DNA, 25 bp, Artificial
  Probe
ggctctataagtagtggtgccttac

SEQ ID NO: 149621 - DNA, 25 bp, Artificial
  Probe
gattttgatggctgaagaaggtgtg

SEQ ID NO: 149622 - DNA, 25 bp, Artificial
  Probe
agattttgatggctgaagaaggtgt

SEQ ID NO: 149623 - DNA, 25 bp, Artificial
  Probe
gaacctttgggaacaactagatgcg

SEQ ID NO: 149624 - DNA, 25 bp, Artificial
  Probe
ggacttataaggcaacgctaactca

SEQ ID NO: 149625 - DNA, 25 bp, Artificial
  Probe
gagtttcccggctctataagtagtg

SEQ ID NO: 149626 - DNA, 25 bp, Artificial
  Probe
tctataagtagtggtgccttaccgg

SEQ ID NO: 149627 - DNA, 25 bp, Artificial
  Probe
cagattttgatggctgaagaaggtg

SEQ ID NO: 149628 - DNA, 25 bp, Artificial
  Probe
attttgatggctgaagaaggtgtgt

SEQ ID NO: 149629 - DNA, 25 bp, Artificial
  Probe
agtttcccggctctataagtagtgg

SEQ ID NO: 149630 - DNA, 25 bp, Artificial
  Probe
cggctctataagtagtggtgcctta

SEQ ID NO: 149631 - DNA, 25 bp, Artificial
  Probe
ttttgatggctgaagaaggtgtgtc

SEQ ID NO: 149632 - DNA, 25 bp, Artificial
  Probe
tttcccggctctataagtagtggtg

SEQ ID NO: 149633 - DNA, 25 bp, Artificial
  Probe
gtttcccggctctataagtagtggt

SEQ ID NO: 149634 - DNA, 25 bp, Artificial
  Probe
ccatcatcttctgccagattttgat

SEQ ID NO: 149635 - DNA, 25 bp, Artificial
  Probe
ggagtttcccggctctataagtagt

SEQ ID NO: 149636 - DNA, 25 bp, Artificial
  Probe
atcatcttctgccagattttgatgg

SEQ ID NO: 149637 - DNA, 25 bp, Artificial
  Probe
ccagattttgatggctgaagaaggt

SEQ ID NO: 149638 - DNA, 25 bp, Artificial
  Probe
ggactatgctctggatctcaaagct

SEQ ID NO: 149639 - DNA, 25 bp, Artificial
  Probe
gtctgacgtttccctcttttctctg

SEQ ID NO: 149640 - DNA, 25 bp, Artificial
  Probe
gggacttataaggcaacgctaactc

SEQ ID NO: 149641 - DNA, 25 bp, Artificial
  Probe
tacattttgcttcctccttggaatt

SEQ ID NO: 149642 - DNA, 25 bp, Artificial
  Probe
ctgggacttataaggcaacgctaac

SEQ ID NO: 149643 - DNA, 25 bp, Artificial
  Probe
gactatgctctggatctcaaagctt

SEQ ID NO: 149644 - DNA, 25 bp, Artificial
  Probe
cattttgcttcctccttggaatttc

SEQ ID NO: 149645 - DNA, 25 bp, Artificial
  Probe
ctacattttgcttcctccttggaat

SEQ ID NO: 149646 - DNA, 25 bp, Artificial
  Probe
ctctcctagatgttacaactcaagt

SEQ ID NO: 149647 - DNA, 25 bp, Artificial
  Probe
gctctcctagatgttacaactcaag

SEQ ID NO: 149648 - DNA, 25 bp, Artificial
  Probe
tctcctagatgttacaactcaagtt

SEQ ID NO: 149649 - DNA, 25 bp, Artificial
  Probe
ggctctcctagatgttacaactcaa

SEQ ID NO: 149650 - DNA, 25 bp, Artificial
  Probe
aattccaactctgccactgacttag

SEQ ID NO: 149651 - DNA, 25 bp, Artificial
  Probe
tctattccaatttcccgagtttagg

SEQ ID NO: 149652 - DNA, 25 bp, Artificial
  Probe
ctattccaatttcccgagtttaggt

SEQ ID NO: 149653 - DNA, 25 bp, Artificial
  Probe
ggcatcagggactaatgtaaatgta

SEQ ID NO: 149654 - DNA, 25 bp, Artificial
  Probe
caattccaactctgccactgactta

SEQ ID NO: 149655 - DNA, 25 bp, Artificial
  Probe
tattccaatttcccgagtttaggtg

SEQ ID NO: 149656 - DNA, 25 bp, Artificial
  Probe
cccaataaatctactcgtcccttta

SEQ ID NO: 149657 - DNA, 25 bp, Artificial
  Probe
cagggttgttgtgaggatttaatga

SEQ ID NO: 149658 - DNA, 25 bp, Artificial
  Probe
gcatcagggactaatgtaaatgtaa

SEQ ID NO: 149659 - DNA, 25 bp, Artificial
  Probe
ttctattccaatttcccgagtttag

SEQ ID NO: 149660 - DNA, 25 bp, Artificial
  Probe
cttctattccaatttcccgagttta

SEQ ID NO: 149661 - DNA, 25 bp, Artificial
  Probe
gactatctctgtgtctctcctggaa

SEQ ID NO: 149662 - DNA, 25 bp, Artificial
  Probe
gcttctattccaatttcccgagttt

SEQ ID NO: 149663 - DNA, 25 bp, Artificial
  Probe
tccttagtgatgctctacgtgttac

SEQ ID NO: 149664 - DNA, 25 bp, Artificial
  Probe
gtccttagtgatgctctacgtgtta

SEQ ID NO: 149665 - DNA, 25 bp, Artificial
  Probe
ttcttctttcctacctgtacctgtt

SEQ ID NO: 149666 - DNA, 25 bp, Artificial
  Probe
tttcttctttcctacctgtacctgt

SEQ ID NO: 149667 - DNA, 25 bp, Artificial
  Probe
tgttacaactcaagtttcaattcca

SEQ ID NO: 149668 - DNA, 25 bp, Artificial
  Probe
ccaataaatctactcgtccctttaa

SEQ ID NO: 149669 - DNA, 25 bp, Artificial
  Probe
tcttctttcctacctgtacctgttc

SEQ ID NO: 149670 - DNA, 25 bp, Artificial
  Probe
cttctttgtattaatccacgcctac

SEQ ID NO: 149671 - DNA, 25 bp, Artificial
  Probe
ccttctttgtattaatccacgccta

SEQ ID NO: 149672 - DNA, 25 bp, Artificial
  Probe
attccaatttcccgagtttaggtga

SEQ ID NO: 149673 - DNA, 25 bp, Artificial
  Probe
tttgtgaacgagcgagtagaatttg

SEQ ID NO: 149674 - DNA, 25 bp, Artificial
  Probe
cctagatgttacaactcaagtttca

SEQ ID NO: 149675 - DNA, 25 bp, Artificial
  Probe
ttctttgtattaatccacgcctacc

SEQ ID NO: 149676 - DNA, 25 bp, Artificial
  Probe
actatctctgtgtctctcctggaaa

SEQ ID NO: 149677 - DNA, 25 bp, Artificial
  Probe
ccaatttcccgagtttaggtgaatg

SEQ ID NO: 149678 - DNA, 25 bp, Artificial
  Probe
tccaatttcccgagtttaggtgaat

SEQ ID NO: 149679 - DNA, 25 bp, Artificial
  Probe
tcctagatgttacaactcaagtttc

SEQ ID NO: 149680 - DNA, 25 bp, Artificial
  Probe
ctcctagatgttacaactcaagttt

SEQ ID NO: 149681 - DNA, 25 bp, Artificial
  Probe
ctgactatctctgtgtctctcctgg

SEQ ID NO: 149682 - DNA, 25 bp, Artificial
  Probe
cctgactatctctgtgtctctcctg

SEQ ID NO: 149683 - DNA, 25 bp, Artificial
  Probe
ttacaactcaagtttcaattccaac

SEQ ID NO: 149684 - DNA, 25 bp, Artificial
  Probe
gttacaactcaagtttcaattccaa

SEQ ID NO: 149685 - DNA, 25 bp, Artificial
  Probe
ttccaatttcccgagtttaggtgaa

SEQ ID NO: 149686 - DNA, 25 bp, Artificial
  Probe
gcccaataaatctactcgtcccttt

SEQ ID NO: 149687 - DNA, 25 bp, Artificial
  Probe
ctcagtttcctcatctgtcaaatgg

SEQ ID NO: 149688 - DNA, 25 bp, Artificial
  Probe
cctcagtttcctcatctgtcaaatg

SEQ ID NO: 149689 - DNA, 25 bp, Artificial
  Probe
atgttacaactcaagtttcaattcc

SEQ ID NO: 149690 - DNA, 25 bp, Artificial
  Probe
ccttagtgatgctctacgtgttacc

SEQ ID NO: 149691 - DNA, 25 bp, Artificial
  Probe
ctagtcttacttcaatctgtcgcca

SEQ ID NO: 149692 - DNA, 25 bp, Artificial
  Probe
tagtcttacttcaatctgtcgccag

SEQ ID NO: 149693 - DNA, 25 bp, Artificial
  Probe
cctagtcttacttcaatctgtcgcc

SEQ ID NO: 149694 - DNA, 25 bp, Artificial
  Probe
ctccctagtcttacttcaatctgtc

SEQ ID NO: 149695 - DNA, 25 bp, Artificial
  Probe
tccctagtcttacttcaatctgtcg

SEQ ID NO: 149696 - DNA, 25 bp, Artificial
  Probe
gctccctagtcttacttcaatctgt

SEQ ID NO: 149697 - DNA, 25 bp, Artificial
  Probe
agctccctagtcttacttcaatctg

SEQ ID NO: 149698 - DNA, 25 bp, Artificial
  Probe
ccctagtcttacttcaatctgtcgc

SEQ ID NO: 149699 - DNA, 25 bp, Artificial
  Probe
ctctctctctcccttcatgtcttcc

SEQ ID NO: 149700 - DNA, 25 bp, Artificial
  Probe
cctctctctctcccttcatgtcttc

SEQ ID NO: 149701 - DNA, 25 bp, Artificial
  Probe
gagatgtaggcgaaagaagtctggt

SEQ ID NO: 149702 - DNA, 25 bp, Artificial
  Probe
gtcttacttcaatctgtcgccagaa

SEQ ID NO: 149703 - DNA, 25 bp, Artificial
  Probe
agatgtaggcgaaagaagtctggtg

SEQ ID NO: 149704 - DNA, 25 bp, Artificial
  Probe
atgtaggcgaaagaagtctggtgtc

SEQ ID NO: 149705 - DNA, 25 bp, Artificial
  Probe
gatgtaggcgaaagaagtctggtgt

SEQ ID NO: 149706 - DNA, 25 bp, Artificial
  Probe
gaaagaagtctggtgtccaccttac

SEQ ID NO: 149707 - DNA, 25 bp, Artificial
  Probe
cttacttcaatctgtcgccagaaag

SEQ ID NO: 149708 - DNA, 25 bp, Artificial
  Probe
agtcttacttcaatctgtcgccaga

SEQ ID NO: 149709 - DNA, 25 bp, Artificial
  Probe
tcttacttcaatctgtcgccagaaa

SEQ ID NO: 149710 - DNA, 25 bp, Artificial
  Probe
ctctctctcccttcatgtcttccct

SEQ ID NO: 149711 - DNA, 25 bp, Artificial
  Probe
tctctctctcccttcatgtcttccc

SEQ ID NO: 149712 - DNA, 25 bp, Artificial
  Probe
cgagatgtaggcgaaagaagtctgg

SEQ ID NO: 149713 - DNA, 25 bp, Artificial
  Probe
tctctctcccttcatgtcttccctg

SEQ ID NO: 149714 - DNA, 25 bp, Artificial
  Probe
tctctcccttcatgtcttccctgtc

SEQ ID NO: 149715 - DNA, 25 bp, Artificial
  Probe
ctctctcccttcatgtcttccctgt

SEQ ID NO: 149716 - DNA, 25 bp, Artificial
  Probe
gagctccctagtcttacttcaatct

SEQ ID NO: 149717 - DNA, 25 bp, Artificial
  Probe
gcctctctctctcccttcatgtctt

SEQ ID NO: 149718 - DNA, 25 bp, Artificial
  Probe
aaagaagtctggtgtccaccttacc

SEQ ID NO: 149719 - DNA, 25 bp, Artificial
  Probe
cgaaagaagtctggtgtccacctta

SEQ ID NO: 149720 - DNA, 25 bp, Artificial
  Probe
ttacttcaatctgtcgccagaaagc

SEQ ID NO: 149721 - DNA, 25 bp, Artificial
  Probe
ccttcaagctgctaaccttgcttag

SEQ ID NO: 149722 - DNA, 25 bp, Artificial
  Probe
tttctctttccagaggtgagcagtg

SEQ ID NO: 149723 - DNA, 25 bp, Artificial
  Probe
gtctcatggcctcttttctctttcc

SEQ ID NO: 149724 - DNA, 25 bp, Artificial
  Probe
ggtctcatggcctcttttctctttc

SEQ ID NO: 149725 - DNA, 25 bp, Artificial
  Probe
ctcttttctctttccagaggtgagc

SEQ ID NO: 149726 - DNA, 25 bp, Artificial
  Probe
cttttctctttccagaggtgagcag

SEQ ID NO: 149727 - DNA, 25 bp, Artificial
  Probe
tggtcagccctaatggtgactaatg

SEQ ID NO: 149728 - DNA, 25 bp, Artificial
  Probe
gtggtcagccctaatggtgactaat

SEQ ID NO: 149729 - DNA, 25 bp, Artificial
  Probe
tacttcaatctgtcgccagaaagct

SEQ ID NO: 149730 - DNA, 25 bp, Artificial
  Probe
tggtctcatggcctcttttctcttt

SEQ ID NO: 149731 - DNA, 25 bp, Artificial
  Probe
tcttttctctttccagaggtgagca

SEQ ID NO: 149732 - DNA, 25 bp, Artificial
  Probe
ttcaatctgtcgccagaaagctgta

SEQ ID NO: 149733 - DNA, 25 bp, Artificial
  Probe
ctcatggcctcttttctctttccag

SEQ ID NO: 149734 - DNA, 25 bp, Artificial
  Probe
ttttctctttccagaggtgagcagt

SEQ ID NO: 149735 - DNA, 25 bp, Artificial
  Probe
ctggtctcatggcctcttttctctt

SEQ ID NO: 149736 - DNA, 25 bp, Artificial
  Probe
ttatattcttggctccgtatgctaa

SEQ ID NO: 149737 - DNA, 25 bp, Artificial
  Probe
attatattcttggctccgtatgcta

SEQ ID NO: 149738 - DNA, 25 bp, Artificial
  Probe
tattatattcttggctccgtatgct

SEQ ID NO: 149739 - DNA, 25 bp, Artificial
  Probe
ttaacaagtctcatctccgaatcag

SEQ ID NO: 149740 - DNA, 25 bp, Artificial
  Probe
ctattatattcttggctccgtatgc

SEQ ID NO: 149741 - DNA, 25 bp, Artificial
  Probe
tacgaagagactcagtaaggtatca

SEQ ID NO: 149742 - DNA, 25 bp, Artificial
  Probe
aagagactcagtaaggtatcaacag

SEQ ID NO: 149743 - DNA, 25 bp, Artificial
  Probe
gaagagactcagtaaggtatcaaca

SEQ ID NO: 149744 - DNA, 25 bp, Artificial
  Probe
cgaagagactcagtaaggtatcaac

SEQ ID NO: 149745 - DNA, 25 bp, Artificial
  Probe
tatattcttggctccgtatgctaag

SEQ ID NO: 149746 - DNA, 25 bp, Artificial
  Probe
acgaagagactcagtaaggtatcaa

SEQ ID NO: 149747 - DNA, 25 bp, Artificial
  Probe
ggtatcttcctcaatgacgaactaa

SEQ ID NO: 149748 - DNA, 25 bp, Artificial
  Probe
taacaagtctcatctccgaatcagt

SEQ ID NO: 149749 - DNA, 25 bp, Artificial
  Probe
cctattatattcttggctccgtatg

SEQ ID NO: 149750 - DNA, 25 bp, Artificial
  Probe
tggtatcttcctcaatgacgaacta

SEQ ID NO: 149751 - DNA, 25 bp, Artificial
  Probe
actcagtaaggtatcaacagcagaa

SEQ ID NO: 149752 - DNA, 25 bp, Artificial
  Probe
aaggagtggatgactataattcagc

SEQ ID NO: 149753 - DNA, 25 bp, Artificial
  Probe
gtacgaagagactcagtaaggtatc

SEQ ID NO: 149754 - DNA, 25 bp, Artificial
  Probe
agagactcagtaaggtatcaacagc

SEQ ID NO: 149755 - DNA, 25 bp, Artificial
  Probe
gttggctcaagacaagattcaagta

SEQ ID NO: 149756 - DNA, 25 bp, Artificial
  Probe
tcaagacaagattcaagtacgaaga

SEQ ID NO: 149757 - DNA, 25 bp, Artificial
  Probe
agacaagattcaagtacgaagagac

SEQ ID NO: 149758 - DNA, 25 bp, Artificial
  Probe
aagacaagattcaagtacgaagaga

SEQ ID NO: 149759 - DNA, 25 bp, Artificial
  Probe
caagacaagattcaagtacgaagag

SEQ ID NO: 149760 - DNA, 25 bp, Artificial
  Probe
ctcaagacaagattcaagtacgaag

SEQ ID NO: 149761 - DNA, 25 bp, Artificial
  Probe
gactcagtaaggtatcaacagcaga

SEQ ID NO: 149762 - DNA, 25 bp, Artificial
  Probe
agactcagtaaggtatcaacagcag

SEQ ID NO: 149763 - DNA, 25 bp, Artificial
  Probe
gagactcagtaaggtatcaacagca

SEQ ID NO: 149764 - DNA, 25 bp, Artificial
  Probe
aactggtatcttcctcaatgacgaa

SEQ ID NO: 149765 - DNA, 25 bp, Artificial
  Probe
gatagtcgtgttatcatcaggcatt

SEQ ID NO: 149766 - DNA, 25 bp, Artificial
  Probe
agtacgaagagactcagtaaggtat

SEQ ID NO: 149767 - DNA, 25 bp, Artificial
  Probe
aagattcaagtacgaagagactcag

SEQ ID NO: 149768 - DNA, 25 bp, Artificial
  Probe
aagtacgaagagactcagtaaggta

SEQ ID NO: 149769 - DNA, 25 bp, Artificial
  Probe
ttcaagtacgaagagactcagtaag

SEQ ID NO: 149770 - DNA, 25 bp, Artificial
  Probe
gattcaagtacgaagagactcagta

SEQ ID NO: 149771 - DNA, 25 bp, Artificial
  Probe
caagattcaagtacgaagagactca

SEQ ID NO: 149772 - DNA, 25 bp, Artificial
  Probe
acaagattcaagtacgaagagactc

SEQ ID NO: 149773 - DNA, 25 bp, Artificial
  Probe
gacaagattcaagtacgaagagact

SEQ ID NO: 149774 - DNA, 25 bp, Artificial
  Probe
gctcaagacaagattcaagtacgaa

SEQ ID NO: 149775 - DNA, 25 bp, Artificial
  Probe
attcaagtacgaagagactcagtaa

SEQ ID NO: 149776 - DNA, 25 bp, Artificial
  Probe
gtaaggttggctcaagacaagattc

SEQ ID NO: 149777 - DNA, 25 bp, Artificial
  Probe
cggtaggattaatagccaacactag

SEQ ID NO: 149778 - DNA, 25 bp, Artificial
  Probe
agattcaagtacgaagagactcagt

SEQ ID NO: 149779 - DNA, 25 bp, Artificial
  Probe
ggtaggattaatagccaacactagc

SEQ ID NO: 149780 - DNA, 25 bp, Artificial
  Probe
tcggtaggattaatagccaacacta

SEQ ID NO: 149781 - DNA, 25 bp, Artificial
  Probe
gagataggcagttgagaaagaagta

SEQ ID NO: 149782 - DNA, 25 bp, Artificial
  Probe
agataggcagttgagaaagaagtaa

SEQ ID NO: 149783 - DNA, 25 bp, Artificial
  Probe
agaaagaagtaaactgagcaggatt

SEQ ID NO: 149784 - DNA, 25 bp, Artificial
  Probe
gaaagaagtaaactgagcaggattt

SEQ ID NO: 149785 - DNA, 25 bp, Artificial
  Probe
gagaaagaagtaaactgagcaggat

SEQ ID NO: 149786 - DNA, 25 bp, Artificial
  Probe
gataggcagttgagaaagaagtaaa

SEQ ID NO: 149787 - DNA, 25 bp, Artificial
  Probe
ttgagaaagaagtaaactgagcagg

SEQ ID NO: 149788 - DNA, 25 bp, Artificial
  Probe
aaagaagtaaactgagcaggatttc

SEQ ID NO: 149789 - DNA, 25 bp, Artificial
  Probe
gttgagaaagaagtaaactgagcag

SEQ ID NO: 149790 - DNA, 25 bp, Artificial
  Probe
aaggagataggcagttgagaaagaa

SEQ ID NO: 149791 - DNA, 25 bp, Artificial
  Probe
aaaggagataggcagttgagaaaga

SEQ ID NO: 149792 - DNA, 25 bp, Artificial
  Probe
aggaagaaatgttactgtgtttgta

SEQ ID NO: 149793 - DNA, 25 bp, Artificial
  Probe
ataggcagttgagaaagaagtaaac

SEQ ID NO: 149794 - DNA, 25 bp, Artificial
  Probe
gataagctagtcaggactccagatg

SEQ ID NO: 149795 - DNA, 25 bp, Artificial
  Probe
ttgtcacttattgtttagaggttca

SEQ ID NO: 149796 - DNA, 25 bp, Artificial
  Probe
gaagtaaactgagcaggatttctta

SEQ ID NO: 149797 - DNA, 25 bp, Artificial
  Probe
aggagataggcagttgagaaagaag

SEQ ID NO: 149798 - DNA, 25 bp, Artificial
  Probe
tgagaaagaagtaaactgagcagga

SEQ ID NO: 149799 - DNA, 25 bp, Artificial
  Probe
ggagataggcagttgagaaagaagt

SEQ ID NO: 149800 - DNA, 25 bp, Artificial
  Probe
aagtaaactgagcaggatttcttaa

SEQ ID NO: 149801 - DNA, 25 bp, Artificial
  Probe
caggaagaaatgttactgtgtttgt

SEQ ID NO: 149802 - DNA, 25 bp, Artificial
  Probe
tgtcacttattgtttagaggttcaa

SEQ ID NO: 149803 - DNA, 25 bp, Artificial
  Probe
aattccgataagctagtcaggactc

SEQ ID NO: 149804 - DNA, 25 bp, Artificial
  Probe
agagaaattccgataagctagtcag

SEQ ID NO: 149805 - DNA, 25 bp, Artificial
  Probe
aagagaaattccgataagctagtca

SEQ ID NO: 149806 - DNA, 25 bp, Artificial
  Probe
tttgtcacttattgtttagaggttc

SEQ ID NO: 149807 - DNA, 25 bp, Artificial
  Probe
gagaaattccgataagctagtcagg

SEQ ID NO: 149808 - DNA, 25 bp, Artificial
  Probe
ataagctagtcaggactccagatgg

SEQ ID NO: 149809 - DNA, 25 bp, Artificial
  Probe
gtcacttattgtttagaggttcaaa

SEQ ID NO: 149810 - DNA, 25 bp, Artificial
  Probe
cgataagctagtcaggactccagat

SEQ ID NO: 149811 - DNA, 25 bp, Artificial
  Probe
taagagaaattccgataagctagtc

SEQ ID NO: 149812 - DNA, 25 bp, Artificial
  Probe
ggaagaaatgttactgtgtttgtaa

SEQ ID NO: 149813 - DNA, 25 bp, Artificial
  Probe
agaagtaaactgagcaggatttctt

SEQ ID NO: 149814 - DNA, 25 bp, Artificial
  Probe
aagaagtaaactgagcaggatttct

SEQ ID NO: 149815 - DNA, 25 bp, Artificial
  Probe
gtttaaatgagcctgaggttctgtg

SEQ ID NO: 149816 - DNA, 25 bp, Artificial
  Probe
tttagaggttcaaaaggagataggc

SEQ ID NO: 149817 - DNA, 25 bp, Artificial
  Probe
tgctctttgttttgtcacttattgt

SEQ ID NO: 149818 - DNA, 25 bp, Artificial
  Probe
aaaaggagataggcagttgagaaag

SEQ ID NO: 149819 - DNA, 25 bp, Artificial
  Probe
gaaattccgataagctagtcaggac

SEQ ID NO: 149820 - DNA, 25 bp, Artificial
  Probe
agaaattccgataagctagtcagga

SEQ ID NO: 149821 - DNA, 25 bp, Artificial
  Probe
agtaaactgagcaggatttcttaag

SEQ ID NO: 149822 - DNA, 25 bp, Artificial
  Probe
ttaagagaaattccgataagctagt

SEQ ID NO: 149823 - DNA, 25 bp, Artificial
  Probe
gctctttgttttgtcacttattgtt

SEQ ID NO: 149824 - DNA, 25 bp, Artificial
  Probe
ttgctctttgttttgtcacttattg

SEQ ID NO: 149825 - DNA, 25 bp, Artificial
  Probe
ttagaggttcaaaaggagataggca

SEQ ID NO: 149826 - DNA, 25 bp, Artificial
  Probe
tacaagccacatacacatagttaca

SEQ ID NO: 149827 - DNA, 25 bp, Artificial
  Probe
ttaggaagaatgtagtgaaggatgc

SEQ ID NO: 149828 - DNA, 25 bp, Artificial
  Probe
gttgttaggaagaatgtagtgaagg

SEQ ID NO: 149829 - DNA, 25 bp, Artificial
  Probe
ggttgttaggaagaatgtagtgaag

SEQ ID NO: 149830 - DNA, 25 bp, Artificial
  Probe
cgagatatacaagccacatacacat

SEQ ID NO: 149831 - DNA, 25 bp, Artificial
  Probe
ttgttaggaagaatgtagtgaagga

SEQ ID NO: 149832 - DNA, 25 bp, Artificial
  Probe
gccacatacacatagttacacagaa

SEQ ID NO: 149833 - DNA, 25 bp, Artificial
  Probe
aagccacatacacatagttacacag

SEQ ID NO: 149834 - DNA, 25 bp, Artificial
  Probe
cggttgttaggaagaatgtagtgaa

SEQ ID NO: 149835 - DNA, 25 bp, Artificial
  Probe
tgttaggaagaatgtagtgaaggat

SEQ ID NO: 149836 - DNA, 25 bp, Artificial
  Probe
taggaagaatgtagtgaaggatgct

SEQ ID NO: 149837 - DNA, 25 bp, Artificial
  Probe
caagccacatacacatagttacaca

SEQ ID NO: 149838 - DNA, 25 bp, Artificial
  Probe
acaagccacatacacatagttacac

SEQ ID NO: 149839 - DNA, 25 bp, Artificial
  Probe
gttaggaagaatgtagtgaaggatg

SEQ ID NO: 149840 - DNA, 25 bp, Artificial
  Probe
ttcggttgttaggaagaatgtagtg

SEQ ID NO: 149841 - DNA, 25 bp, Artificial
  Probe
gttcggttgttaggaagaatgtagt

SEQ ID NO: 149842 - DNA, 25 bp, Artificial
  Probe
atacaagccacatacacatagttac

SEQ ID NO: 149843 - DNA, 25 bp, Artificial
  Probe
tcggttgttaggaagaatgtagtga

SEQ ID NO: 149844 - DNA, 25 bp, Artificial
  Probe
agccacatacacatagttacacaga

SEQ ID NO: 149845 - DNA, 25 bp, Artificial
  Probe
ggttcggttgttaggaagaatgtag

SEQ ID NO: 149846 - DNA, 25 bp, Artificial
  Probe
gatatacaagccacatacacatagt

SEQ ID NO: 149847 - DNA, 25 bp, Artificial
  Probe
ggaagaatgtagtgaaggatgcttg

SEQ ID NO: 149848 - DNA, 25 bp, Artificial
  Probe
aggaagaatgtagtgaaggatgctt

SEQ ID NO: 149849 - DNA, 25 bp, Artificial
  Probe
agatatacaagccacatacacatag

SEQ ID NO: 149850 - DNA, 25 bp, Artificial
  Probe
gagatatacaagccacatacacata

SEQ ID NO: 149851 - DNA, 25 bp, Artificial
  Probe
tggttcggttgttaggaagaatgta

SEQ ID NO: 149852 - DNA, 25 bp, Artificial
  Probe
atatacaagccacatacacatagtt

SEQ ID NO: 149853 - DNA, 25 bp, Artificial
  Probe
gaagaatgtagtgaaggatgcttgc

SEQ ID NO: 149854 - DNA, 25 bp, Artificial
  Probe
aagaatgtagtgaaggatgcttgct

SEQ ID NO: 149855 - DNA, 25 bp, Artificial
  Probe
tatacaagccacatacacatagtta

SEQ ID NO: 149856 - DNA, 25 bp, Artificial
  Probe
gcgagatatacaagccacatacaca

SEQ ID NO: 149857 - DNA, 25 bp, Artificial
  Probe
atgtaatgtgaaatgaggcgagata

SEQ ID NO: 149858 - DNA, 25 bp, Artificial
  Probe
tggcaatgatgtaatgtgaaatgag

SEQ ID NO: 149859 - DNA, 25 bp, Artificial
  Probe
tgtaatgtgaaatgaggcgagatat

SEQ ID NO: 149860 - DNA, 25 bp, Artificial
  Probe
atggcaatgatgtaatgtgaaatga

SEQ ID NO: 149861 - DNA, 25 bp, Artificial
  Probe
ggcaatgatgtaatgtgaaatgagg

SEQ ID NO: 149862 - DNA, 25 bp, Artificial
  Probe
attacatatccactgtatgctcagg

SEQ ID NO: 149863 - DNA, 25 bp, Artificial
  Probe
aatgatgtaatgtgaaatgaggcga

SEQ ID NO: 149864 - DNA, 25 bp, Artificial
  Probe
caatgatgtaatgtgaaatgaggcg

SEQ ID NO: 149865 - DNA, 25 bp, Artificial
  Probe
ccacatacacatagttacacagaaa

SEQ ID NO: 149866 - DNA, 25 bp, Artificial
  Probe
gatgtaatgtgaaatgaggcgagat

SEQ ID NO: 149867 - DNA, 25 bp, Artificial
  Probe
ctggttcggttgttaggaagaatgt

SEQ ID NO: 149868 - DNA, 25 bp, Artificial
  Probe
gcaatgatgtaatgtgaaatgaggc

SEQ ID NO: 149869 - DNA, 25 bp, Artificial
  Probe
tacatcttccaaggagcctaccaat

SEQ ID NO: 149870 - DNA, 25 bp, Artificial
  Probe
taatgtgaaatgaggcgagatatac

SEQ ID NO: 149871 - DNA, 25 bp, Artificial
  Probe
gtagcgattacagatgaaccataga

SEQ ID NO: 149872 - DNA, 25 bp, Artificial
  Probe
agtagcgattacagatgaaccatag

SEQ ID NO: 149873 - DNA, 25 bp, Artificial
  Probe
agcgattacagatgaaccatagata

SEQ ID NO: 149874 - DNA, 25 bp, Artificial
  Probe
tagcgattacagatgaaccatagat

SEQ ID NO: 149875 - DNA, 25 bp, Artificial
  Probe
gcgattacagatgaaccatagatat

SEQ ID NO: 149876 - DNA, 25 bp, Artificial
  Probe
cagatgaaccatagatataaccaca

SEQ ID NO: 149877 - DNA, 25 bp, Artificial
  Probe
acagatgaaccatagatataaccac

SEQ ID NO: 149878 - DNA, 25 bp, Artificial
  Probe
gcatgtcgagagatgtagagaatac

SEQ ID NO: 149879 - DNA, 25 bp, Artificial
  Probe
agcatgtcgagagatgtagagaata

SEQ ID NO: 149880 - DNA, 25 bp, Artificial
  Probe
tgtgtaacccagtataacctcaaac

SEQ ID NO: 149881 - DNA, 25 bp, Artificial
  Probe
acatgaagattattctcagattgct

SEQ ID NO: 149882 - DNA, 25 bp, Artificial
  Probe
gtaacccagtataacctcaaaccag

SEQ ID NO: 149883 - DNA, 25 bp, Artificial
  Probe
gtgtaacccagtataacctcaaacc

SEQ ID NO: 149884 - DNA, 25 bp, Artificial
  Probe
tgaaccatagatataaccacattgg

SEQ ID NO: 149885 - DNA, 25 bp, Artificial
  Probe
tgtaacccagtataacctcaaacca

SEQ ID NO: 149886 - DNA, 25 bp, Artificial
  Probe
agatgaaccatagatataaccacat

SEQ ID NO: 149887 - DNA, 25 bp, Artificial
  Probe
aacatgaagattattctcagattgc

SEQ ID NO: 149888 - DNA, 25 bp, Artificial
  Probe
catgaagattattctcagattgctt

SEQ ID NO: 149889 - DNA, 25 bp, Artificial
  Probe
atgaaccatagatataaccacattg

SEQ ID NO: 149890 - DNA, 25 bp, Artificial
  Probe
ctgtgtaacccagtataacctcaaa

SEQ ID NO: 149891 - DNA, 25 bp, Artificial
  Probe
tctgtgtaacccagtataacctcaa

SEQ ID NO: 149892 - DNA, 25 bp, Artificial
  Probe
gtataacctcaaaccaggattacca

SEQ ID NO: 149893 - DNA, 25 bp, Artificial
  Probe
tataacctcaaaccaggattaccag

SEQ ID NO: 149894 - DNA, 25 bp, Artificial
  Probe
agtataacctcaaaccaggattacc

SEQ ID NO: 149895 - DNA, 25 bp, Artificial
  Probe
ccagtataacctcaaaccaggatta

SEQ ID NO: 149896 - DNA, 25 bp, Artificial
  Probe
tctctgtgtaacccagtataacctc

SEQ ID NO: 149897 - DNA, 25 bp, Artificial
  Probe
ctctctgtgtaacccagtataacct

SEQ ID NO: 149898 - DNA, 25 bp, Artificial
  Probe
gatgaaccatagatataaccacatt

SEQ ID NO: 149899 - DNA, 25 bp, Artificial
  Probe
tacagatgaaccatagatataacca

SEQ ID NO: 149900 - DNA, 25 bp, Artificial
  Probe
taacctcaaaccaggattaccagta

SEQ ID NO: 149901 - DNA, 25 bp, Artificial
  Probe
ctctgtgtaacccagtataacctca

SEQ ID NO: 149902 - DNA, 25 bp, Artificial
  Probe
catgtcgagagatgtagagaataca

SEQ ID NO: 149903 - DNA, 25 bp, Artificial
  Probe
gcacacataacttgattagattaag

SEQ ID NO: 149904 - DNA, 25 bp, Artificial
  Probe
cagtataacctcaaaccaggattac

SEQ ID NO: 149905 - DNA, 25 bp, Artificial
  Probe
aacctcaaaccaggattaccagtat

SEQ ID NO: 149906 - DNA, 25 bp, Artificial
  Probe
ataacctcaaaccaggattaccagt

SEQ ID NO: 149907 - DNA, 25 bp, Artificial
  Probe
attgcacacataacttgattagatt

SEQ ID NO: 149908 - DNA, 25 bp, Artificial
  Probe
aattgcacacataacttgattagat

SEQ ID NO: 149909 - DNA, 25 bp, Artificial
  Probe
gaaagttgggaaatttaagggaagg

SEQ ID NO: 149910 - DNA, 25 bp, Artificial
  Probe
aaccatagatataaccacattggga

SEQ ID NO: 149911 - DNA, 25 bp, Artificial
  Probe
agaaagttgggaaatttaagggaag

SEQ ID NO: 149912 - DNA, 25 bp, Artificial
  Probe
accatagatataaccacattgggat

SEQ ID NO: 149913 - DNA, 25 bp, Artificial
  Probe
gaaccatagatataaccacattggg

SEQ ID NO: 149914 - DNA, 25 bp, Artificial
  Probe
taacccagtataacctcaaaccagg

SEQ ID NO: 149915 - DNA, 25 bp, Artificial
  Probe
aagaaagttgggaaatttaagggaa

SEQ ID NO: 149916 - DNA, 25 bp, Artificial
  Probe
ttaagtgctggagtctgaacattga

SEQ ID NO: 149917 - DNA, 25 bp, Artificial
  Probe
catggatgatatgatgctggagatg

SEQ ID NO: 149918 - DNA, 25 bp, Artificial
  Probe
tcttatacagcttgctcactaatgc

SEQ ID NO: 149919 - DNA, 25 bp, Artificial
  Probe
atggatgatatgatgctggagatgc

SEQ ID NO: 149920 - DNA, 25 bp, Artificial
  Probe
gatgatatgatgctggagatgctct

SEQ ID NO: 149921 - DNA, 25 bp, Artificial
  Probe
atcttatacagcttgctcactaatg

SEQ ID NO: 149922 - DNA, 25 bp, Artificial
  Probe
catcttatacagcttgctcactaat

SEQ ID NO: 149923 - DNA, 25 bp, Artificial
  Probe
atgatatgatgctggagatgctctg

SEQ ID NO: 149924 - DNA, 25 bp, Artificial
  Probe
ctttccattaaccctgccaaataaa

SEQ ID NO: 149925 - DNA, 25 bp, Artificial
  Probe
tctttccattaaccctgccaaataa

SEQ ID NO: 149926 - DNA, 25 bp, Artificial
  Probe
taacatctctttccattaaccctgc

SEQ ID NO: 149927 - DNA, 25 bp, Artificial
  Probe
aatacatcgagagtcttcagtggag

SEQ ID NO: 149928 - DNA, 25 bp, Artificial
  Probe
cttatacagcttgctcactaatgcc

SEQ ID NO: 149929 - DNA, 25 bp, Artificial
  Probe
ctctttccattaaccctgccaaata

SEQ ID NO: 149930 - DNA, 25 bp, Artificial
  Probe
ataacatctctttccattaaccctg

SEQ ID NO: 149931 - DNA, 25 bp, Artificial
  Probe
tttaagtgctggagtctgaacattg

SEQ ID NO: 149932 - DNA, 25 bp, Artificial
  Probe
ggatgatatgatgctggagatgctc

SEQ ID NO: 149933 - DNA, 25 bp, Artificial
  Probe
taagtgctggagtctgaacattgac

SEQ ID NO: 149934 - DNA, 25 bp, Artificial
  Probe
tggatgatatgatgctggagatgct

SEQ ID NO: 149935 - DNA, 25 bp, Artificial
  Probe
gatatgatgctggagatgctctgtg

SEQ ID NO: 149936 - DNA, 25 bp, Artificial
  Probe
tctgaacattgacaccaaagagtac

SEQ ID NO: 149937 - DNA, 25 bp, Artificial
  Probe
aataacatctctttccattaaccct

SEQ ID NO: 149938 - DNA, 25 bp, Artificial
  Probe
atacatcgagagtcttcagtggaga

SEQ ID NO: 149939 - DNA, 25 bp, Artificial
  Probe
gtctgaacattgacaccaaagagta

SEQ ID NO: 149940 - DNA, 25 bp, Artificial
  Probe
tacatcgagagtcttcagtggagaa

SEQ ID NO: 149941 - DNA, 25 bp, Artificial
  Probe
tctctttccattaaccctgccaaat

SEQ ID NO: 149942 - DNA, 25 bp, Artificial
  Probe
atctctttccattaaccctgccaaa

SEQ ID NO: 149943 - DNA, 25 bp, Artificial
  Probe
tgatatgatgctggagatgctctgt

SEQ ID NO: 149944 - DNA, 25 bp, Artificial
  Probe
gagtctgaacattgacaccaaagag

SEQ ID NO: 149945 - DNA, 25 bp, Artificial
  Probe
caaagagagtaccagatcagatcgg

SEQ ID NO: 149946 - DNA, 25 bp, Artificial
  Probe
aaataacatctctttccattaaccc

SEQ ID NO: 149947 - DNA, 25 bp, Artificial
  Probe
aaatacatcgagagtcttcagtgga

SEQ ID NO: 149948 - DNA, 25 bp, Artificial
  Probe
gaaatacatcgagagtcttcagtgg

SEQ ID NO: 149949 - DNA, 25 bp, Artificial
  Probe
ctgaacattgacaccaaagagtacg

SEQ ID NO: 149950 - DNA, 25 bp, Artificial
  Probe
gcatcttatacagcttgctcactaa

SEQ ID NO: 149951 - DNA, 25 bp, Artificial
  Probe
atgcaaagagagtaccagatcagat

SEQ ID NO: 149952 - DNA, 25 bp, Artificial
  Probe
catctctttccattaaccctgccaa

SEQ ID NO: 149953 - DNA, 25 bp, Artificial
  Probe
aacatctctttccattaaccctgcc

SEQ ID NO: 149954 - DNA, 25 bp, Artificial
  Probe
agtctgaacattgacaccaaagagt

SEQ ID NO: 149955 - DNA, 25 bp, Artificial
  Probe
gcaaagagagtaccagatcagatcg

SEQ ID NO: 149956 - DNA, 25 bp, Artificial
  Probe
tcttcagtggagaactcagcagatc

SEQ ID NO: 149957 - DNA, 25 bp, Artificial
  Probe
gtcttcagtggagaactcagcagat

SEQ ID NO: 149958 - DNA, 25 bp, Artificial
  Probe
attgacaccaaagagtacgcctatc

SEQ ID NO: 149959 - DNA, 25 bp, Artificial
  Probe
tgcaaagagagtaccagatcagatc

SEQ ID NO: 149960 - DNA, 25 bp, Artificial
  Probe
gatgcaaagagagtaccagatcaga

SEQ ID NO: 149961 - DNA, 25 bp, Artificial
  Probe
gatgagaccgtcaaccagatgattg

SEQ ID NO: 149962 - DNA, 25 bp, Artificial
  Probe
atgatgagaccgtcaaccagatgat

SEQ ID NO: 149963 - DNA, 25 bp, Artificial
  Probe
gaagatgaggtgcctgatgatgaga

SEQ ID NO: 149964 - DNA, 25 bp, Artificial
  Probe
tgatgagaccgtcaaccagatgatt

SEQ ID NO: 149965 - DNA, 25 bp, Artificial
  Probe
tagactacagcgactcactgacaga

SEQ ID NO: 149966 - DNA, 25 bp, Artificial
  Probe
gtagactacagcgactcactgacag

SEQ ID NO: 149967 - DNA, 25 bp, Artificial
  Probe
aagatgaggtgcctgatgatgagac

SEQ ID NO: 149968 - DNA, 25 bp, Artificial
  Probe
atgtgaagaggaagaggaaaagatg

SEQ ID NO: 149969 - DNA, 25 bp, Artificial
  Probe
gtgaagaggaagaggaaaagatgtt

SEQ ID NO: 149970 - DNA, 25 bp, Artificial
  Probe
gatgatgagaccgtcaaccagatga

SEQ ID NO: 149971 - DNA, 25 bp, Artificial
  Probe
tgaagaggaagaggaaaagatgttc

SEQ ID NO: 149972 - DNA, 25 bp, Artificial
  Probe
ctgatgatgagaccgtcaaccagat

SEQ ID NO: 149973 - DNA, 25 bp, Artificial
  Probe
tgatgatgagaccgtcaaccagatg

SEQ ID NO: 149974 - DNA, 25 bp, Artificial
  Probe
tgtgaagaggaagaggaaaagatgt

SEQ ID NO: 149975 - DNA, 25 bp, Artificial
  Probe
gaagaggaagaggaaaagatgttcg

SEQ ID NO: 149976 - DNA, 25 bp, Artificial
  Probe
catgtgaagaggaagaggaaaagat

SEQ ID NO: 149977 - DNA, 25 bp, Artificial
  Probe
ctacagcgactcactgacagagaag

SEQ ID NO: 149978 - DNA, 25 bp, Artificial
  Probe
ggaagatgaggtgcctgatgatgag

SEQ ID NO: 149979 - DNA, 25 bp, Artificial
  Probe
aagaggaagaggaaaagatgttcgg

SEQ ID NO: 149980 - DNA, 25 bp, Artificial
  Probe
gaagaaatcttcacgtaagcgtaag

SEQ ID NO: 149981 - DNA, 25 bp, Artificial
  Probe
agaagaaatcttcacgtaagcgtaa

SEQ ID NO: 149982 - DNA, 25 bp, Artificial
  Probe
gaggaagatgaggtgcctgatgatg

SEQ ID NO: 149983 - DNA, 25 bp, Artificial
  Probe
cagaagaaatcttcacgtaagcgta

SEQ ID NO: 149984 - DNA, 25 bp, Artificial
  Probe
actacagcgactcactgacagagaa

SEQ ID NO: 149985 - DNA, 25 bp, Artificial
  Probe
gaggtagactacagcgactcactga

SEQ ID NO: 149986 - DNA, 25 bp, Artificial
  Probe
aagaaatcttcacgtaagcgtaagc

SEQ ID NO: 149987 - DNA, 25 bp, Artificial
  Probe
aaggaggtagactacagcgactcac

SEQ ID NO: 149988 - DNA, 25 bp, Artificial
  Probe
caaggaggtagactacagcgactca

SEQ ID NO: 149989 - DNA, 25 bp, Artificial
  Probe
aggaagatgaggtgcctgatgatga

SEQ ID NO: 149990 - DNA, 25 bp, Artificial
  Probe
ctgacatgtgaagaggaagaggaaa

SEQ ID NO: 149991 - DNA, 25 bp, Artificial
  Probe
ggcacgaagaagaatttgacctctt

SEQ ID NO: 149992 - DNA, 25 bp, Artificial
  Probe
aggtagactacagcgactcactgac

SEQ ID NO: 149993 - DNA, 25 bp, Artificial
  Probe
atcaaggatgatgcagaggtagagc

SEQ ID NO: 149994 - DNA, 25 bp, Artificial
  Probe
gctgacatgtgaagaggaagaggaa

SEQ ID NO: 149995 - DNA, 25 bp, Artificial
  Probe
aatcttcacgtaagcgtaagcgaga

SEQ ID NO: 149996 - DNA, 25 bp, Artificial
  Probe
gacatgtgaagaggaagaggaaaag

SEQ ID NO: 149997 - DNA, 25 bp, Artificial
  Probe
atgagcttccatcctggatcatcaa

SEQ ID NO: 149998 - DNA, 25 bp, Artificial
  Probe
acatgtgaagaggaagaggaaaaga

SEQ ID NO: 149999 - DNA, 25 bp, Artificial
  Probe
aaatcttcacgtaagcgtaagcgag

SEQ ID NO: 150000 - DNA, 25 bp, Artificial
  Probe
gaaatcttcacgtaagcgtaagcga

SEQ ID NO: 150001 - DNA, 25 bp, Artificial
  Probe
agaaatcttcacgtaagcgtaagcg

SEQ ID NO: 150002 - DNA, 25 bp, Artificial
  Probe
tgacatgtgaagaggaagaggaaaa

SEQ ID NO: 150003 - DNA, 25 bp, Artificial
  Probe
agaggaagaggaaaagatgttcggc

SEQ ID NO: 150004 - DNA, 25 bp, Artificial
  Probe
gcagaagaaatcttcacgtaagcgt

SEQ ID NO: 150005 - DNA, 25 bp, Artificial
  Probe
atcttcacgtaagcgtaagcgagac

SEQ ID NO: 150006 - DNA, 25 bp, Artificial
  Probe
gagagtatgtctgtgtgtgagagag

SEQ ID NO: 150007 - DNA, 25 bp, Artificial
  Probe
caataccagttcctctatgacatca

SEQ ID NO: 150008 - DNA, 25 bp, Artificial
  Probe
gcaataccagttcctctatgacatc

SEQ ID NO: 150009 - DNA, 25 bp, Artificial
  Probe
aagagtgtgtgtaggagagtatgtc

SEQ ID NO: 150010 - DNA, 25 bp, Artificial
  Probe
gagtatgtctgtgtgtgagagagtg

SEQ ID NO: 150011 - DNA, 25 bp, Artificial
  Probe
agcaataccagttcctctatgacat

SEQ ID NO: 150012 - DNA, 25 bp, Artificial
  Probe
caagagtgtgtgtaggagagtatgt

SEQ ID NO: 150013 - DNA, 25 bp, Artificial
  Probe
agagtatgtctgtgtgtgagagagt

SEQ ID NO: 150014 - DNA, 25 bp, Artificial
  Probe
aataccagttcctctatgacatcat

SEQ ID NO: 150015 - DNA, 25 bp, Artificial
  Probe
ataccagttcctctatgacatcatg

SEQ ID NO: 150016 - DNA, 25 bp, Artificial
  Probe
ttgagcaataccagttcctctatga

SEQ ID NO: 150017 - DNA, 25 bp, Artificial
  Probe
gtatgtctgtgtgtgagagagtgtg

SEQ ID NO: 150018 - DNA, 25 bp, Artificial
  Probe
taggagagtatgtctgtgtgtgaga

SEQ ID NO: 150019 - DNA, 25 bp, Artificial
  Probe
gtaggagagtatgtctgtgtgtgag

SEQ ID NO: 150020 - DNA, 25 bp, Artificial
  Probe
gagtgtgtgtaggagagtatgtctg

SEQ ID NO: 150021 - DNA, 25 bp, Artificial
  Probe
agagtgtgtgtaggagagtatgtct

SEQ ID NO: 150022 - DNA, 25 bp, Artificial
  Probe
tagcaagagtgtgtgtaggagagta

SEQ ID NO: 150023 - DNA, 25 bp, Artificial
  Probe
agtatgtctgtgtgtgagagagtgt

SEQ ID NO: 150024 - DNA, 25 bp, Artificial
  Probe
gagcaataccagttcctctatgaca

SEQ ID NO: 150025 - DNA, 25 bp, Artificial
  Probe
tgagcaataccagttcctctatgac

SEQ ID NO: 150026 - DNA, 25 bp, Artificial
  Probe
tatgtctgtgtgtgagagagtgtgt

SEQ ID NO: 150027 - DNA, 25 bp, Artificial
  Probe
gtgtaggagagtatgtctgtgtgtg

SEQ ID NO: 150028 - DNA, 25 bp, Artificial
  Probe
gtgtgtaggagagtatgtctgtgtg

SEQ ID NO: 150029 - DNA, 25 bp, Artificial
  Probe
gtgtgtgtaggagagtatgtctgtg

SEQ ID NO: 150030 - DNA, 25 bp, Artificial
  Probe
gcaagagtgtgtgtaggagagtatg

SEQ ID NO: 150031 - DNA, 25 bp, Artificial
  Probe
tgtaggagagtatgtctgtgtgtga

SEQ ID NO: 150032 - DNA, 25 bp, Artificial
  Probe
agtgtgtgtaggagagtatgtctgt

SEQ ID NO: 150033 - DNA, 25 bp, Artificial
  Probe
agcaagagtgtgtgtaggagagtat

SEQ ID NO: 150034 - DNA, 25 bp, Artificial
  Probe
tgtgtaggagagtatgtctgtgtgt

SEQ ID NO: 150035 - DNA, 25 bp, Artificial
  Probe
tgtgtgtaggagagtatgtctgtgt

SEQ ID NO: 150036 - DNA, 25 bp, Artificial
  Probe
ttagcaagagtgtgtgtaggagagt

SEQ ID NO: 150037 - DNA, 25 bp, Artificial
  Probe
atcatttagcaagagtgtgtgtagg

SEQ ID NO: 150038 - DNA, 25 bp, Artificial
  Probe
tatcatttagcaagagtgtgtgtag

SEQ ID NO: 150039 - DNA, 25 bp, Artificial
  Probe
gaatggacaagtgaagaaagcaaac

SEQ ID NO: 150040 - DNA, 25 bp, Artificial
  Probe
agaatggacaagtgaagaaagcaaa

SEQ ID NO: 150041 - DNA, 25 bp, Artificial
  Probe
atttagcaagagtgtgtgtaggaga

SEQ ID NO: 150042 - DNA, 25 bp, Artificial
  Probe
catttagcaagagtgtgtgtaggag

SEQ ID NO: 150043 - DNA, 25 bp, Artificial
  Probe
gagagagtgtgtgcttctgttagtg

SEQ ID NO: 150044 - DNA, 25 bp, Artificial
  Probe
gtgagagagtgtgtgcttctgttag

SEQ ID NO: 150045 - DNA, 25 bp, Artificial
  Probe
ggagagtatgtctgtgtgtgagaga

SEQ ID NO: 150046 - DNA, 25 bp, Artificial
  Probe
aggagagtatgtctgtgtgtgagag

SEQ ID NO: 150047 - DNA, 25 bp, Artificial
  Probe
tcatttagcaagagtgtgtgtagga

SEQ ID NO: 150048 - DNA, 25 bp, Artificial
  Probe
taccagttcctctatgacatcatgg

SEQ ID NO: 150049 - DNA, 25 bp, Artificial
  Probe
ctttgagcaataccagttcctctat

SEQ ID NO: 150050 - DNA, 25 bp, Artificial
  Probe
tttgagcaataccagttcctctatg

SEQ ID NO: 150051 - DNA, 25 bp, Artificial
  Probe
gacagatggatagatgaggtattgg

SEQ ID NO: 150052 - DNA, 25 bp, Artificial
  Probe
ggacagatggatagatgaggtattg

SEQ ID NO: 150053 - DNA, 25 bp, Artificial
  Probe
atggacagatggatagatgaggtat

SEQ ID NO: 150054 - DNA, 25 bp, Artificial
  Probe
tggacagatggatagatgaggtatt

SEQ ID NO: 150055 - DNA, 25 bp, Artificial
  Probe
aatggacagatggatagatgaggta

SEQ ID NO: 150056 - DNA, 25 bp, Artificial
  Probe
atgaatggacagatggatagatgag

SEQ ID NO: 150057 - DNA, 25 bp, Artificial
  Probe
gatgaatggacagatggatagatga

SEQ ID NO: 150058 - DNA, 25 bp, Artificial
  Probe
ggatgaatggacagatggatagatg

SEQ ID NO: 150059 - DNA, 25 bp, Artificial
  Probe
gatggatgaatggacagatggatag

SEQ ID NO: 150060 - DNA, 25 bp, Artificial
  Probe
tggatgaatggacagatggatagat

SEQ ID NO: 150061 - DNA, 25 bp, Artificial
  Probe
atggatgaatggacagatggataga

SEQ ID NO: 150062 - DNA, 25 bp, Artificial
  Probe
agatggatagatgaggtattggcag

SEQ ID NO: 150063 - DNA, 25 bp, Artificial
  Probe
gaatggacagatggatagatgaggt

SEQ ID NO: 150064 - DNA, 25 bp, Artificial
  Probe
tgaatggacagatggatagatgagg

SEQ ID NO: 150065 - DNA, 25 bp, Artificial
  Probe
cagatggatagatgaggtattggca

SEQ ID NO: 150066 - DNA, 25 bp, Artificial
  Probe
acagatggatagatgaggtattggc

SEQ ID NO: 150067 - DNA, 25 bp, Artificial
  Probe
aggcttagaggagaatgttaccaag

SEQ ID NO: 150068 - DNA, 25 bp, Artificial
  Probe
caggcttagaggagaatgttaccaa

SEQ ID NO: 150069 - DNA, 25 bp, Artificial
  Probe
ttcaggcttagaggagaatgttacc

SEQ ID NO: 150070 - DNA, 25 bp, Artificial
  Probe
aagaggctaggacatgattggtatt

SEQ ID NO: 150071 - DNA, 25 bp, Artificial
  Probe
ataagtgagtggaacagagatcatg

SEQ ID NO: 150072 - DNA, 25 bp, Artificial
  Probe
tataagtgagtggaacagagatcat

SEQ ID NO: 150073 - DNA, 25 bp, Artificial
  Probe
atataagtgagtggaacagagatca

SEQ ID NO: 150074 - DNA, 25 bp, Artificial
  Probe
agaggctaggacatgattggtattc

SEQ ID NO: 150075 - DNA, 25 bp, Artificial
  Probe
ttccactgacactcctgaggtatta

SEQ ID NO: 150076 - DNA, 25 bp, Artificial
  Probe
ttagaggagaatgttaccaagctga

SEQ ID NO: 150077 - DNA, 25 bp, Artificial
  Probe
cttagaggagaatgttaccaagctg

SEQ ID NO: 150078 - DNA, 25 bp, Artificial
  Probe
tcaggcttagaggagaatgttacca

SEQ ID NO: 150079 - DNA, 25 bp, Artificial
  Probe
gatggatagatgaggtattggcagc

SEQ ID NO: 150080 - DNA, 25 bp, Artificial
  Probe
tagaggagaatgttaccaagctgag

SEQ ID NO: 150081 - DNA, 25 bp, Artificial
  Probe
caagagagaaggcatttaacacaaa

SEQ ID NO: 150082 - DNA, 25 bp, Artificial
  Probe
aatgtgtaatgacttcagaaatgcc

SEQ ID NO: 150083 - DNA, 25 bp, Artificial
  Probe
aagagagaaggcatttaacacaaag

SEQ ID NO: 150084 - DNA, 25 bp, Artificial
  Probe
caagaggctaggacatgattggtat

SEQ ID NO: 150085 - DNA, 25 bp, Artificial
  Probe
taagtgagtggaacagagatcatgg

SEQ ID NO: 150086 - DNA, 25 bp, Artificial
  Probe
gagagaaggcatttaacacaaagat

SEQ ID NO: 150087 - DNA, 25 bp, Artificial
  Probe
agagagaaggcatttaacacaaaga

SEQ ID NO: 150088 - DNA, 25 bp, Artificial
  Probe
atgtgtaatgacttcagaaatgcct

SEQ ID NO: 150089 - DNA, 25 bp, Artificial
  Probe
cactgacactcctgaggtattacag

SEQ ID NO: 150090 - DNA, 25 bp, Artificial
  Probe
tttcaggcttagaggagaatgttac

SEQ ID NO: 150091 - DNA, 25 bp, Artificial
  Probe
ctatttcaggcttagaggagaatgt

SEQ ID NO: 150092 - DNA, 25 bp, Artificial
  Probe
agagaaggcatttaacacaaagatt

SEQ ID NO: 150093 - DNA, 25 bp, Artificial
  Probe
atttcaggcttagaggagaatgtta

SEQ ID NO: 150094 - DNA, 25 bp, Artificial
  Probe
tatttcaggcttagaggagaatgtt

SEQ ID NO: 150095 - DNA, 25 bp, Artificial
  Probe
tagcaagagagaaggcatttaacac

SEQ ID NO: 150096 - DNA, 25 bp, Artificial
  Probe
gaaactaaagagaatgtcctgtgtg

SEQ ID NO: 150097 - DNA, 25 bp, Artificial
  Probe
agaaactaaagagaatgtcctgtgt

SEQ ID NO: 150098 - DNA, 25 bp, Artificial
  Probe
aaactaaagagaatgtcctgtgtgt

SEQ ID NO: 150099 - DNA, 25 bp, Artificial
  Probe
tcccagaaactaaagagaatgtcct

SEQ ID NO: 150100 - DNA, 25 bp, Artificial
  Probe
actaaagagaatgtcctgtgtgttc

SEQ ID NO: 150101 - DNA, 25 bp, Artificial
  Probe
aactaaagagaatgtcctgtgtgtt

SEQ ID NO: 150102 - DNA, 25 bp, Artificial
  Probe
ctcctcccagaaactaaagagaatg

SEQ ID NO: 150103 - DNA, 25 bp, Artificial
  Probe
ctcccagaaactaaagagaatgtcc

SEQ ID NO: 150104 - DNA, 25 bp, Artificial
  Probe
cctcccagaaactaaagagaatgtc

SEQ ID NO: 150105 - DNA, 25 bp, Artificial
  Probe
catcctcatctgtttcattgacaag

SEQ ID NO: 150106 - DNA, 25 bp, Artificial
  Probe
catctgtttcattgacaagttctcc

SEQ ID NO: 150107 - DNA, 25 bp, Artificial
  Probe
cctcatctgtttcattgacaagttc

SEQ ID NO: 150108 - DNA, 25 bp, Artificial
  Probe
atcctcatctgtttcattgacaagt

SEQ ID NO: 150109 - DNA, 25 bp, Artificial
  Probe
tcatctgtttcattgacaagttctc

SEQ ID NO: 150110 - DNA, 25 bp, Artificial
  Probe
ctcatctgtttcattgacaagttct

SEQ ID NO: 150111 - DNA, 25 bp, Artificial
  Probe
tcctcatctgtttcattgacaagtt

SEQ ID NO: 150112 - DNA, 25 bp, Artificial
  Probe
acatcctcatctgtttcattgacaa

SEQ ID NO: 150113 - DNA, 25 bp, Artificial
  Probe
tcctcccagaaactaaagagaatgt

SEQ ID NO: 150114 - DNA, 25 bp, Artificial
  Probe
cagaaactaaagagaatgtcctgtg

SEQ ID NO: 150115 - DNA, 25 bp, Artificial
  Probe
ccagaaactaaagagaatgtcctgt

SEQ ID NO: 150116 - DNA, 25 bp, Artificial
  Probe
cctcctcccagaaactaaagagaat

SEQ ID NO: 150117 - DNA, 25 bp, Artificial
  Probe
atctgtttcattgacaagttctccc

SEQ ID NO: 150118 - DNA, 25 bp, Artificial
  Probe
cccagaaactaaagagaatgtcctg

SEQ ID NO: 150119 - DNA, 25 bp, Artificial
  Probe
aatggagagttcatgtttgactttg

SEQ ID NO: 150120 - DNA, 25 bp, Artificial
  Probe
atggagagttcatgtttgactttga

SEQ ID NO: 150121 - DNA, 25 bp, Artificial
  Probe
aaatggagagttcatgtttgacttt

SEQ ID NO: 150122 - DNA, 25 bp, Artificial
  Probe
tggagagttcatgtttgactttgac

SEQ ID NO: 150123 - DNA, 25 bp, Artificial
  Probe
aaaccctcctcccagaaactaaaga

SEQ ID NO: 150124 - DNA, 25 bp, Artificial
  Probe
ctaaagagaatgtcctgtgtgttct

SEQ ID NO: 150125 - DNA, 25 bp, Artificial
  Probe
gagagttcatgtttgactttgacgg

SEQ ID NO: 150126 - DNA, 25 bp, Artificial
  Probe
ggagagttcatgtttgactttgacg

SEQ ID NO: 150127 - DNA, 25 bp, Artificial
  Probe
ccctcctcccagaaactaaagagaa

SEQ ID NO: 150128 - DNA, 25 bp, Artificial
  Probe
ccaccaaacacacaagaagaaaatg

SEQ ID NO: 150129 - DNA, 25 bp, Artificial
  Probe
catcatccaggcggagttctatctt

SEQ ID NO: 150130 - DNA, 25 bp, Artificial
  Probe
gtgattccagaggtgactgtactcc

SEQ ID NO: 150131 - DNA, 25 bp, Artificial
  Probe
aaccctcctcccagaaactaaagag

SEQ ID NO: 150132 - DNA, 25 bp, Artificial
  Probe
cattggctaatatagctgtggacaa

SEQ ID NO: 150133 - DNA, 25 bp, Artificial
  Probe
caacatcctcatctgtttcattgac

SEQ ID NO: 150134 - DNA, 25 bp, Artificial
  Probe
aacatcctcatctgtttcattgaca

SEQ ID NO: 150135 - DNA, 25 bp, Artificial
  Probe
cccaccaaacacacaagaagaaaat

SEQ ID NO: 150136 - DNA, 25 bp, Artificial
  Probe
aaaatggagagttcatgtttgactt

SEQ ID NO: 150137 - DNA, 25 bp, Artificial
  Probe
atcatccaggcggagttctatcttt

SEQ ID NO: 150138 - DNA, 25 bp, Artificial
  Probe
ccaacatcctcatctgtttcattga

SEQ ID NO: 150139 - DNA, 25 bp, Artificial
  Probe
gctcagggtgcattggctaatatag

SEQ ID NO: 150140 - DNA, 25 bp, Artificial
  Probe
accctcctcccagaaactaaagaga

SEQ ID NO: 150141 - DNA, 25 bp, Artificial
  Probe
gtgcgacatatttctcatctgaatt

SEQ ID NO: 150142 - DNA, 25 bp, Artificial
  Probe
tgcgacatatttctcatctgaattt

SEQ ID NO: 150143 - DNA, 25 bp, Artificial
  Probe
ggtgcgacatatttctcatctgaat

SEQ ID NO: 150144 - DNA, 25 bp, Artificial
  Probe
aggtgcgacatatttctcatctgaa

SEQ ID NO: 150145 - DNA, 25 bp, Artificial
  Probe
gaggtgcgacatatttctcatctga

SEQ ID NO: 150146 - DNA, 25 bp, Artificial
  Probe
cgttcatctcctacatgagacatat

SEQ ID NO: 150147 - DNA, 25 bp, Artificial
  Probe
ttcatctcctacatgagacatatcc

SEQ ID NO: 150148 - DNA, 25 bp, Artificial
  Probe
tcatctcctacatgagacatatccg

SEQ ID NO: 150149 - DNA, 25 bp, Artificial
  Probe
gttcatctcctacatgagacatatc

SEQ ID NO: 150150 - DNA, 25 bp, Artificial
  Probe
gagggtcagtatgtcttttgctatc

SEQ ID NO: 150151 - DNA, 25 bp, Artificial
  Probe
gtatgtcttttgctatcaagtcgtc

SEQ ID NO: 150152 - DNA, 25 bp, Artificial
  Probe
cagtatgtcttttgctatcaagtcg

SEQ ID NO: 150153 - DNA, 25 bp, Artificial
  Probe
agtatgtcttttgctatcaagtcgt

SEQ ID NO: 150154 - DNA, 25 bp, Artificial
  Probe
ggtcagtatgtcttttgctatcaag

SEQ ID NO: 150155 - DNA, 25 bp, Artificial
  Probe
agggtcagtatgtcttttgctatca

SEQ ID NO: 150156 - DNA, 25 bp, Artificial
  Probe
ggaggtgcgacatatttctcatctg

SEQ ID NO: 150157 - DNA, 25 bp, Artificial
  Probe
gggtcagtatgtcttttgctatcaa

SEQ ID NO: 150158 - DNA, 25 bp, Artificial
  Probe
tatgtcttttgctatcaagtcgtcc

SEQ ID NO: 150159 - DNA, 25 bp, Artificial
  Probe
gtcagtatgtcttttgctatcaagt

SEQ ID NO: 150160 - DNA, 25 bp, Artificial
  Probe
tcagtatgtcttttgctatcaagtc

SEQ ID NO: 150161 - DNA, 25 bp, Artificial
  Probe
acgttcatctcctacatgagacata

SEQ ID NO: 150162 - DNA, 25 bp, Artificial
  Probe
cttttgctatcaagtcgtcctctac

SEQ ID NO: 150163 - DNA, 25 bp, Artificial
  Probe
tcttttgctatcaagtcgtcctcta

SEQ ID NO: 150164 - DNA, 25 bp, Artificial
  Probe
cgagggtcagtatgtcttttgctat

SEQ ID NO: 150165 - DNA, 25 bp, Artificial
  Probe
gctaatcagccaagatctcgaattc

SEQ ID NO: 150166 - DNA, 25 bp, Artificial
  Probe
gatcaggaaccctcatttgcataga

SEQ ID NO: 150167 - DNA, 25 bp, Artificial
  Probe
atgtcttttgctatcaagtcgtcct

SEQ ID NO: 150168 - DNA, 25 bp, Artificial
  Probe
atcaggaaccctcatttgcatagac

SEQ ID NO: 150169 - DNA, 25 bp, Artificial
  Probe
gtcttttgctatcaagtcgtcctct

SEQ ID NO: 150170 - DNA, 25 bp, Artificial
  Probe
gggaggtgcgacatatttctcatct

SEQ ID NO: 150171 - DNA, 25 bp, Artificial
  Probe
ctcatttgcatagacgtggtcctag

SEQ ID NO: 150172 - DNA, 25 bp, Artificial
  Probe
tgtcttttgctatcaagtcgtcctc

SEQ ID NO: 150173 - DNA, 25 bp, Artificial
  Probe
ctatcaagtcgtcctctacgtcctg

SEQ ID NO: 150174 - DNA, 25 bp, Artificial
  Probe
cgatcaggaaccctcatttgcatag

SEQ ID NO: 150175 - DNA, 25 bp, Artificial
  Probe
ttgctatcaagtcgtcctctacgtc

SEQ ID NO: 150176 - DNA, 25 bp, Artificial
  Probe
tatcaagtcgtcctctacgtcctga

SEQ ID NO: 150177 - DNA, 25 bp, Artificial
  Probe
ccgagggtcagtatgtcttttgcta

SEQ ID NO: 150178 - DNA, 25 bp, Artificial
  Probe
acgatcaggaaccctcatttgcata

SEQ ID NO: 150179 - DNA, 25 bp, Artificial
  Probe
cctcatttgcatagacgtggtccta

SEQ ID NO: 150180 - DNA, 25 bp, Artificial
  Probe
tttgctatcaagtcgtcctctacgt

SEQ ID NO: 150181 - DNA, 25 bp, Artificial
  Probe
ttttgctatcaagtcgtcctctacg

SEQ ID NO: 150182 - DNA, 25 bp, Artificial
  Probe
tcaggaaccctcatttgcatagacg

SEQ ID NO: 150183 - DNA, 25 bp, Artificial
  Probe
aggaaccctcatttgcatagacgtg

SEQ ID NO: 150184 - DNA, 25 bp, Artificial
  Probe
caggaaccctcatttgcatagacgt

SEQ ID NO: 150185 - DNA, 25 bp, Artificial
  Probe
catagacgtggtcctagggctaatc

SEQ ID NO: 150186 - DNA, 25 bp, Artificial
  Probe
gaatttgctggcttcaacattatcc

SEQ ID NO: 150187 - DNA, 25 bp, Artificial
  Probe
ccctctcaaatacctttcacattgg

SEQ ID NO: 150188 - DNA, 25 bp, Artificial
  Probe
cgaatttgctggcttcaacattatc

SEQ ID NO: 150189 - DNA, 25 bp, Artificial
  Probe
tacgaatttgctggcttcaacatta

SEQ ID NO: 150190 - DNA, 25 bp, Artificial
  Probe
acgaatttgctggcttcaacattat

SEQ ID NO: 150191 - DNA, 25 bp, Artificial
  Probe
ctcaaatacctttcacattggtctg

SEQ ID NO: 150192 - DNA, 25 bp, Artificial
  Probe
tctcaaatacctttcacattggtct

SEQ ID NO: 150193 - DNA, 25 bp, Artificial
  Probe
ctctcaaatacctttcacattggtc

SEQ ID NO: 150194 - DNA, 25 bp, Artificial
  Probe
atagatcctacgaatttgctggctt

SEQ ID NO: 150195 - DNA, 25 bp, Artificial
  Probe
aatttgctggcttcaacattatccc

SEQ ID NO: 150196 - DNA, 25 bp, Artificial
  Probe
cctctcaaatacctttcacattggt

SEQ ID NO: 150197 - DNA, 25 bp, Artificial
  Probe
ctacgaatttgctggcttcaacatt

SEQ ID NO: 150198 - DNA, 25 bp, Artificial
  Probe
tcaaatacctttcacattggtctgc

SEQ ID NO: 150199 - DNA, 25 bp, Artificial
  Probe
catagatcctacgaatttgctggct

SEQ ID NO: 150200 - DNA, 25 bp, Artificial
  Probe
tagatcctacgaatttgctggcttc

SEQ ID NO: 150201 - DNA, 25 bp, Artificial
  Probe
atttgctggcttcaacattatccct

SEQ ID NO: 150202 - DNA, 25 bp, Artificial
  Probe
ccttctccttgagacctaattctcc

SEQ ID NO: 150203 - DNA, 25 bp, Artificial
  Probe
atactgcttttccctctcctttgat

SEQ ID NO: 150204 - DNA, 25 bp, Artificial
  Probe
aatacctttcacattggtctgcctt

SEQ ID NO: 150205 - DNA, 25 bp, Artificial
  Probe
aaatacctttcacattggtctgcct

SEQ ID NO: 150206 - DNA, 25 bp, Artificial
  Probe
caaatacctttcacattggtctgcc

SEQ ID NO: 150207 - DNA, 25 bp, Artificial
  Probe
tcccctctcaaatacctttcacatt

SEQ ID NO: 150208 - DNA, 25 bp, Artificial
  Probe
aatactgcttttccctctcctttga

SEQ ID NO: 150209 - DNA, 25 bp, Artificial
  Probe
gccttctccttgagacctaattctc

SEQ ID NO: 150210 - DNA, 25 bp, Artificial
  Probe
ctcccctctcaaatacctttcacat

SEQ ID NO: 150211 - DNA, 25 bp, Artificial
  Probe
cccctctcaaatacctttcacattg

SEQ ID NO: 150212 - DNA, 25 bp, Artificial
  Probe
tcagacctgatgtggcagtatgaag

SEQ ID NO: 150213 - DNA, 25 bp, Artificial
  Probe
aactcccctctcaaatacctttcac

SEQ ID NO: 150214 - DNA, 25 bp, Artificial
  Probe
caactcccctctcaaatacctttca

SEQ ID NO: 150215 - DNA, 25 bp, Artificial
  Probe
tttgctggcttcaacattatccctg

SEQ ID NO: 150216 - DNA, 25 bp, Artificial
  Probe
ctgccttctccttgagacctaattc

SEQ ID NO: 150217 - DNA, 25 bp, Artificial
  Probe
atacctttcacattggtctgccttc

SEQ ID NO: 150218 - DNA, 25 bp, Artificial
  Probe
caatactgcttttccctctcctttg

SEQ ID NO: 150219 - DNA, 25 bp, Artificial
  Probe
ttcacattggtctgccttctccttg

SEQ ID NO: 150220 - DNA, 25 bp, Artificial
  Probe
atcctacgaatttgctggcttcaac

SEQ ID NO: 150221 - DNA, 25 bp, Artificial
  Probe
gatcctacgaatttgctggcttcaa

SEQ ID NO: 150222 - DNA, 25 bp, Artificial
  Probe
cagtaccatagacgctgagtcagac

SEQ ID NO: 150223 - DNA, 25 bp, Artificial
  Probe
tactgcttttccctctcctttgatg

SEQ ID NO: 150224 - DNA, 25 bp, Artificial
  Probe
tgccttctccttgagacctaattct

SEQ ID NO: 150225 - DNA, 25 bp, Artificial
  Probe
tctgccttctccttgagacctaatt

SEQ ID NO: 150226 - DNA, 25 bp, Artificial
  Probe
gtcagacctgatgtggcagtatgaa

SEQ ID NO: 150227 - DNA, 25 bp, Artificial
  Probe
cctacgaatttgctggcttcaacat

SEQ ID NO: 150228 - DNA, 25 bp, Artificial
  Probe
ccaatactgcttttccctctccttt

SEQ ID NO: 150229 - DNA, 25 bp, Artificial
  Probe
tttcacattggtctgccttctcctt

SEQ ID NO: 150230 - DNA, 25 bp, Artificial
  Probe
catagacgctgagtcagacctgatg

SEQ ID NO: 150231 - DNA, 25 bp, Artificial
  Probe
gaagcatatggttcatgagatcaag

SEQ ID NO: 150232 - DNA, 25 bp, Artificial
  Probe
agaagcatatggttcatgagatcaa

SEQ ID NO: 150233 - DNA, 25 bp, Artificial
  Probe
gagaagcatatggttcatgagatca

SEQ ID NO: 150234 - DNA, 25 bp, Artificial
  Probe
aagcatatggttcatgagatcaagg

SEQ ID NO: 150235 - DNA, 25 bp, Artificial
  Probe
ggagaagcatatggttcatgagatc

SEQ ID NO: 150236 - DNA, 25 bp, Artificial
  Probe
tggagaagcatatggttcatgagat

SEQ ID NO: 150237 - DNA, 25 bp, Artificial
  Probe
caaggtcaaggtgtccatgaagttc

SEQ ID NO: 150238 - DNA, 25 bp, Artificial
  Probe
ggtcaaggtgtccatgaagttcaac

SEQ ID NO: 150239 - DNA, 25 bp, Artificial
  Probe
aggtcaaggtgtccatgaagttcaa

SEQ ID NO: 150240 - DNA, 25 bp, Artificial
  Probe
aaggtcaaggtgtccatgaagttca

SEQ ID NO: 150241 - DNA, 25 bp, Artificial
  Probe
gtggagaagcatatggttcatgaga

SEQ ID NO: 150242 - DNA, 25 bp, Artificial
  Probe
caacaaggtcaaggtgtccatgaag

SEQ ID NO: 150243 - DNA, 25 bp, Artificial
  Probe
gtcaaggtgtccatgaagttcaacg

SEQ ID NO: 150244 - DNA, 25 bp, Artificial
  Probe
acaaggtcaaggtgtccatgaagtt

SEQ ID NO: 150245 - DNA, 25 bp, Artificial
  Probe
aacaaggtcaaggtgtccatgaagt

SEQ ID NO: 150246 - DNA, 25 bp, Artificial
  Probe
aactctcagcattgacgagaacatt

SEQ ID NO: 150247 - DNA, 25 bp, Artificial
  Probe
ggtggagaagcatatggttcatgag

SEQ ID NO: 150248 - DNA, 25 bp, Artificial
  Probe
actctcagcattgacgagaacattg

SEQ ID NO: 150249 - DNA, 25 bp, Artificial
  Probe
caactctcagcattgacgagaacat

SEQ ID NO: 150250 - DNA, 25 bp, Artificial
  Probe
cagttcagtgtctaccctggagaag

SEQ ID NO: 150251 - DNA, 25 bp, Artificial
  Probe
agttcagtgtctaccctggagaaga

SEQ ID NO: 150252 - DNA, 25 bp, Artificial
  Probe
ctacaccgccctcaagttctacatc

SEQ ID NO: 150253 - DNA, 25 bp, Artificial
  Probe
tacatgggagtgtctctgcgtaatc

SEQ ID NO: 150254 - DNA, 25 bp, Artificial
  Probe
ctacatgggagtgtctctgcgtaat

SEQ ID NO: 150255 - DNA, 25 bp, Artificial
  Probe
ctcaagttctacatccagagcccag

SEQ ID NO: 150256 - DNA, 25 bp, Artificial
  Probe
agcatatggttcatgagatcaaggg

SEQ ID NO: 150257 - DNA, 25 bp, Artificial
  Probe
ctctcagcattgacgagaacattgg

SEQ ID NO: 150258 - DNA, 25 bp, Artificial
  Probe
caagttctacatccagagcccagtg

SEQ ID NO: 150259 - DNA, 25 bp, Artificial
  Probe
tcaagttctacatccagagcccagt

SEQ ID NO: 150260 - DNA, 25 bp, Artificial
  Probe
cacaactctcagcattgacgagaac

SEQ ID NO: 150261 - DNA, 25 bp, Artificial
  Probe
acggtggagaagcatatggttcatg

SEQ ID NO: 150262 - DNA, 25 bp, Artificial
  Probe
cacggtggagaagcatatggttcat

SEQ ID NO: 150263 - DNA, 25 bp, Artificial
  Probe
gagtgtctctgcgtaatcagaaggt

SEQ ID NO: 150264 - DNA, 25 bp, Artificial
  Probe
acaactctcagcattgacgagaaca

SEQ ID NO: 150265 - DNA, 25 bp, Artificial
  Probe
agtgtctctgcgtaatcagaaggtg

SEQ ID NO: 150266 - DNA, 25 bp, Artificial
  Probe
cggtggagaagcatatggttcatga

SEQ ID NO: 150267 - DNA, 25 bp, Artificial
  Probe
actacatgggagtgtctctgcgtaa

SEQ ID NO: 150268 - DNA, 25 bp, Artificial
  Probe
catgggagtgtctctgcgtaatcag

SEQ ID NO: 150269 - DNA, 25 bp, Artificial
  Probe
ggagtgtctctgcgtaatcagaagg

SEQ ID NO: 150270 - DNA, 25 bp, Artificial
  Probe
ccacaactctcagcattgacgagaa

SEQ ID NO: 150271 - DNA, 25 bp, Artificial
  Probe
gttcagtgtctaccctggagaagac

SEQ ID NO: 150272 - DNA, 25 bp, Artificial
  Probe
gcatatggttcatgagatcaagggg

SEQ ID NO: 150273 - DNA, 25 bp, Artificial
  Probe
gggagtgtctctgcgtaatcagaag

SEQ ID NO: 150274 - DNA, 25 bp, Artificial
  Probe
tctcagcattgacgagaacattggg

SEQ ID NO: 150275 - DNA, 25 bp, Artificial
  Probe
atgggagtgtctctgcgtaatcaga

SEQ ID NO: 150276 - DNA, 25 bp, Artificial
  Probe
ctctcttcaactggacctagacaag

SEQ ID NO: 150277 - DNA, 25 bp, Artificial
  Probe
tctctcttcaactggacctagacaa

SEQ ID NO: 150278 - DNA, 25 bp, Artificial
  Probe
cagcttcaggacataatgatggatt

SEQ ID NO: 150279 - DNA, 25 bp, Artificial
  Probe
ctgtctctcttcaactggacctaga

SEQ ID NO: 150280 - DNA, 25 bp, Artificial
  Probe
ttcaactggacctagacaagaggat

SEQ ID NO: 150281 - DNA, 25 bp, Artificial
  Probe
gatgcagcttcaggacataatgatg

SEQ ID NO: 150282 - DNA, 25 bp, Artificial
  Probe
cttcaactggacctagacaagagga

SEQ ID NO: 150283 - DNA, 25 bp, Artificial
  Probe
tctcttcaactggacctagacaaga

SEQ ID NO: 150284 - DNA, 25 bp, Artificial
  Probe
agcttcaggacataatgatggattt

SEQ ID NO: 150285 - DNA, 25 bp, Artificial
  Probe
tcaactggacctagacaagaggatg

SEQ ID NO: 150286 - DNA, 25 bp, Artificial
  Probe
gcagcttcaggacataatgatggat

SEQ ID NO: 150287 - DNA, 25 bp, Artificial
  Probe
cctgtctctcttcaactggacctag

SEQ ID NO: 150288 - DNA, 25 bp, Artificial
  Probe
ggatgcagcttcaggacataatgat

SEQ ID NO: 150289 - DNA, 25 bp, Artificial
  Probe
atgcagcttcaggacataatgatgg

SEQ ID NO: 150290 - DNA, 25 bp, Artificial
  Probe
tcttcaactggacctagacaagagg

SEQ ID NO: 150291 - DNA, 25 bp, Artificial
  Probe
gaggatgcagcttcaggacataatg

SEQ ID NO: 150292 - DNA, 25 bp, Artificial
  Probe
agaggatgcagcttcaggacataat

SEQ ID NO: 150293 - DNA, 25 bp, Artificial
  Probe
gcttcaggacataatgatggatttt

SEQ ID NO: 150294 - DNA, 25 bp, Artificial
  Probe
ggacataatgatggattttaagggt

SEQ ID NO: 150295 - DNA, 25 bp, Artificial
  Probe
aggacataatgatggattttaaggg

SEQ ID NO: 150296 - DNA, 25 bp, Artificial
  Probe
aagaggatgcagcttcaggacataa

SEQ ID NO: 150297 - DNA, 25 bp, Artificial
  Probe
aggatgcagcttcaggacataatga

SEQ ID NO: 150298 - DNA, 25 bp, Artificial
  Probe
acataatgatggattttaagggtct

SEQ ID NO: 150299 - DNA, 25 bp, Artificial
  Probe
caggacataatgatggattttaagg

SEQ ID NO: 150300 - DNA, 25 bp, Artificial
  Probe
tgcagcttcaggacataatgatgga

SEQ ID NO: 150301 - DNA, 25 bp, Artificial
  Probe
caactggacctagacaagaggatgc

SEQ ID NO: 150302 - DNA, 25 bp, Artificial
  Probe
cataatgatggattttaagggtctc

SEQ ID NO: 150303 - DNA, 25 bp, Artificial
  Probe
ataatgatggattttaagggtctca

SEQ ID NO: 150304 - DNA, 25 bp, Artificial
  Probe
cttctgactttggcaagacatggag

SEQ ID NO: 150305 - DNA, 25 bp, Artificial
  Probe
caagaggatgcagcttcaggacata

SEQ ID NO: 150306 - DNA, 25 bp, Artificial
  Probe
gtctctcttcaactggacctagaca

SEQ ID NO: 150307 - DNA, 25 bp, Artificial
  Probe
tgtctctcttcaactggacctagac

SEQ ID NO: 150308 - DNA, 25 bp, Artificial
  Probe
ctacaacagtcaccgagtggagaac

SEQ ID NO: 150309 - DNA, 25 bp, Artificial
  Probe
gacataatgatggattttaagggtc

SEQ ID NO: 150310 - DNA, 25 bp, Artificial
  Probe
caactacaacagtcaccgagtggag

SEQ ID NO: 150311 - DNA, 25 bp, Artificial
  Probe
ctagacaagaggatgcagcttcagg

SEQ ID NO: 150312 - DNA, 25 bp, Artificial
  Probe
tcaggacataatgatggattttaag

SEQ ID NO: 150313 - DNA, 25 bp, Artificial
  Probe
cttcaggacataatgatggatttta

SEQ ID NO: 150314 - DNA, 25 bp, Artificial
  Probe
tgatggattttaagggtctcatgcc

SEQ ID NO: 150315 - DNA, 25 bp, Artificial
  Probe
aatgatggattttaagggtctcatg

SEQ ID NO: 150316 - DNA, 25 bp, Artificial
  Probe
atgatggattttaagggtctcatgc

SEQ ID NO: 150317 - DNA, 25 bp, Artificial
  Probe
tagacaagaggatgcagcttcagga

SEQ ID NO: 150318 - DNA, 25 bp, Artificial
  Probe
cctagacaagaggatgcagcttcag

SEQ ID NO: 150319 - DNA, 25 bp, Artificial
  Probe
gacctagacaagaggatgcagcttc

SEQ ID NO: 150320 - DNA, 25 bp, Artificial
  Probe
ccctgtctctcttcaactggaccta

SEQ ID NO: 150321 - DNA, 25 bp, Artificial
  Probe
ttctcggtaatcagcaagtgagtta

SEQ ID NO: 150322 - DNA, 25 bp, Artificial
  Probe
tcaatcaggatgaagatggttggaa

SEQ ID NO: 150323 - DNA, 25 bp, Artificial
  Probe
gatgtatttagttctgcccgaagat

SEQ ID NO: 150324 - DNA, 25 bp, Artificial
  Probe
gttggaaagcagttcagagaaattg

SEQ ID NO: 150325 - DNA, 25 bp, Artificial
  Probe
aatcaggatgaagatggttggaaag

SEQ ID NO: 150326 - DNA, 25 bp, Artificial
  Probe
tctcggtaatcagcaagtgagttac

SEQ ID NO: 150327 - DNA, 25 bp, Artificial
  Probe
caatcaggatgaagatggttggaaa

SEQ ID NO: 150328 - DNA, 25 bp, Artificial
  Probe
atgtatttagttctgcccgaagatc

SEQ ID NO: 150329 - DNA, 25 bp, Artificial
  Probe
aatttctcggtaatcagcaagtgag

SEQ ID NO: 150330 - DNA, 25 bp, Artificial
  Probe
ttggaaagcagttcagagaaattgg

SEQ ID NO: 150331 - DNA, 25 bp, Artificial
  Probe
ggttggaaagcagttcagagaaatt

SEQ ID NO: 150332 - DNA, 25 bp, Artificial
  Probe
aatcacctcaactttcaatcaggat

SEQ ID NO: 150333 - DNA, 25 bp, Artificial
  Probe
aaatcacctcaactttcaatcagga

SEQ ID NO: 150334 - DNA, 25 bp, Artificial
  Probe
atcacctcaactttcaatcaggatg

SEQ ID NO: 150335 - DNA, 25 bp, Artificial
  Probe
gatgaagatggttggaaagcagttc

SEQ ID NO: 150336 - DNA, 25 bp, Artificial
  Probe
aggatgtatttagttctgcccgaag

SEQ ID NO: 150337 - DNA, 25 bp, Artificial
  Probe
tgtatttagttctgcccgaagatca

SEQ ID NO: 150338 - DNA, 25 bp, Artificial
  Probe
ggatgtatttagttctgcccgaaga

SEQ ID NO: 150339 - DNA, 25 bp, Artificial
  Probe
gtatttagttctgcccgaagatcag

SEQ ID NO: 150340 - DNA, 25 bp, Artificial
  Probe
catcaggatgtatttagttctgccc

SEQ ID NO: 150341 - DNA, 25 bp, Artificial
  Probe
ccatcaggatgtatttagttctgcc

SEQ ID NO: 150342 - DNA, 25 bp, Artificial
  Probe
atttctcggtaatcagcaagtgagt

SEQ ID NO: 150343 - DNA, 25 bp, Artificial
  Probe
caaatttctcggtaatcagcaagtg

SEQ ID NO: 150344 - DNA, 25 bp, Artificial
  Probe
ttcaatcaggatgaagatggttgga

SEQ ID NO: 150345 - DNA, 25 bp, Artificial
  Probe
tttctcggtaatcagcaagtgagtt

SEQ ID NO: 150346 - DNA, 25 bp, Artificial
  Probe
tcacctcaactttcaatcaggatga

SEQ ID NO: 150347 - DNA, 25 bp, Artificial
  Probe
cgccatcaggatgtatttagttctg

SEQ ID NO: 150348 - DNA, 25 bp, Artificial
  Probe
tggttggaaagcagttcagagaaat

SEQ ID NO: 150349 - DNA, 25 bp, Artificial
  Probe
atggttggaaagcagttcagagaaa

SEQ ID NO: 150350 - DNA, 25 bp, Artificial
  Probe
gccatcaggatgtatttagttctgc

SEQ ID NO: 150351 - DNA, 25 bp, Artificial
  Probe
ctcggtaatcagcaagtgagttacg

SEQ ID NO: 150352 - DNA, 25 bp, Artificial
  Probe
aaatttctcggtaatcagcaagtga

SEQ ID NO: 150353 - DNA, 25 bp, Artificial
  Probe
atcaggatgtatttagttctgcccg

SEQ ID NO: 150354 - DNA, 25 bp, Artificial
  Probe
ccaaatttctcggtaatcagcaagt

SEQ ID NO: 150355 - DNA, 25 bp, Artificial
  Probe
caggatgtatttagttctgcccgaa

SEQ ID NO: 150356 - DNA, 25 bp, Artificial
  Probe
gatggttggaaagcagttcagagaa

SEQ ID NO: 150357 - DNA, 25 bp, Artificial
  Probe
aagatggttggaaagcagttcagag

SEQ ID NO: 150358 - DNA, 25 bp, Artificial
  Probe
gaagatggttggaaagcagttcaga

SEQ ID NO: 150359 - DNA, 25 bp, Artificial
  Probe
acaaaatcacctcaactttcaatca

SEQ ID NO: 150360 - DNA, 25 bp, Artificial
  Probe
ccacaaaatcacctcaactttcaat

SEQ ID NO: 150361 - DNA, 25 bp, Artificial
  Probe
atcaggatgaagatggttggaaagc

SEQ ID NO: 150362 - DNA, 25 bp, Artificial
  Probe
cacaaaatcacctcaactttcaatc

SEQ ID NO: 150363 - DNA, 25 bp, Artificial
  Probe
ggatgaagatggttggaaagcagtt

SEQ ID NO: 150364 - DNA, 25 bp, Artificial
  Probe
caaaatcacctcaactttcaatcag

SEQ ID NO: 150365 - DNA, 25 bp, Artificial
  Probe
tccacaaaatcacctcaactttcaa

SEQ ID NO: 150366 - DNA, 25 bp, Artificial
  Probe
cgagccttaactcttgttatctact

SEQ ID NO: 150367 - DNA, 25 bp, Artificial
  Probe
gagccttaactcttgttatctactt

SEQ ID NO: 150368 - DNA, 25 bp, Artificial
  Probe
aaactcaatgaatttaccaacttgc

SEQ ID NO: 150369 - DNA, 25 bp, Artificial
  Probe
cctcagaaactcaatgaatttacca

SEQ ID NO: 150370 - DNA, 25 bp, Artificial
  Probe
tcgagccttaactcttgttatctac

SEQ ID NO: 150371 - DNA, 25 bp, Artificial
  Probe
taaagactgattacaccgtgcctat

SEQ ID NO: 150372 - DNA, 25 bp, Artificial
  Probe
ataaagactgattacaccgtgccta

SEQ ID NO: 150373 - DNA, 25 bp, Artificial
  Probe
tataaagactgattacaccgtgcct

SEQ ID NO: 150374 - DNA, 25 bp, Artificial
  Probe
gtataaagactgattacaccgtgcc

SEQ ID NO: 150375 - DNA, 25 bp, Artificial
  Probe
tcctcagaaactcaatgaatttacc

SEQ ID NO: 150376 - DNA, 25 bp, Artificial
  Probe
gactgattacaccgtgcctatgaag

SEQ ID NO: 150377 - DNA, 25 bp, Artificial
  Probe
cgatcctcagaaactcaatgaattt

SEQ ID NO: 150378 - DNA, 25 bp, Artificial
  Probe
cagaaactcaatgaatttaccaact

SEQ ID NO: 150379 - DNA, 25 bp, Artificial
  Probe
agactgattacaccgtgcctatgaa

SEQ ID NO: 150380 - DNA, 25 bp, Artificial
  Probe
aagactgattacaccgtgcctatga

SEQ ID NO: 150381 - DNA, 25 bp, Artificial
  Probe
tcagaaactcaatgaatttaccaac

SEQ ID NO: 150382 - DNA, 25 bp, Artificial
  Probe
atactcaatgccattgtattctcga

SEQ ID NO: 150383 - DNA, 25 bp, Artificial
  Probe
gatactcaatgccattgtattctcg

SEQ ID NO: 150384 - DNA, 25 bp, Artificial
  Probe
cctatgaagccctccagaattgaaa

SEQ ID NO: 150385 - DNA, 25 bp, Artificial
  Probe
ctcagaaactcaatgaatttaccaa

SEQ ID NO: 150386 - DNA, 25 bp, Artificial
  Probe
tcttgttatctactttcgatcctca

SEQ ID NO: 150387 - DNA, 25 bp, Artificial
  Probe
actcttgttatctactttcgatcct

SEQ ID NO: 150388 - DNA, 25 bp, Artificial
  Probe
tgatactcaatgccattgtattctc

SEQ ID NO: 150389 - DNA, 25 bp, Artificial
  Probe
agaaactcaatgaatttaccaactt

SEQ ID NO: 150390 - DNA, 25 bp, Artificial
  Probe
cttgttatctactttcgatcctcag

SEQ ID NO: 150391 - DNA, 25 bp, Artificial
  Probe
tcgatcctcagaaactcaatgaatt

SEQ ID NO: 150392 - DNA, 25 bp, Artificial
  Probe
ttcgatcctcagaaactcaatgaat

SEQ ID NO: 150393 - DNA, 25 bp, Artificial
  Probe
tgttatctactttcgatcctcagaa

SEQ ID NO: 150394 - DNA, 25 bp, Artificial
  Probe
ttgttatctactttcgatcctcaga

SEQ ID NO: 150395 - DNA, 25 bp, Artificial
  Probe
ctcttgttatctactttcgatcctc

SEQ ID NO: 150396 - DNA, 25 bp, Artificial
  Probe
gaaactcaatgaatttaccaacttg

SEQ ID NO: 150397 - DNA, 25 bp, Artificial
  Probe
aaagactgattacaccgtgcctatg

SEQ ID NO: 150398 - DNA, 25 bp, Artificial
  Probe
tgtataaagactgattacaccgtgc

SEQ ID NO: 150399 - DNA, 25 bp, Artificial
  Probe
atcctcagaaactcaatgaatttac

SEQ ID NO: 150400 - DNA, 25 bp, Artificial
  Probe
aactcttgttatctactttcgatcc

SEQ ID NO: 150401 - DNA, 25 bp, Artificial
  Probe
atgatactcaatgccattgtattct

SEQ ID NO: 150402 - DNA, 25 bp, Artificial
  Probe
ttgtataaagactgattacaccgtg

SEQ ID NO: 150403 - DNA, 25 bp, Artificial
  Probe
gagactgtattttgtaatgaacgca

SEQ ID NO: 150404 - DNA, 25 bp, Artificial
  Probe
ggacaatcaagtaaacgtaatttca

SEQ ID NO: 150405 - DNA, 25 bp, Artificial
  Probe
tggacaatcaagtaaacgtaatttc

SEQ ID NO: 150406 - DNA, 25 bp, Artificial
  Probe
agccttaactcttgttatctacttt

SEQ ID NO: 150407 - DNA, 25 bp, Artificial
  Probe
cgagactgtattttgtaatgaacgc

SEQ ID NO: 150408 - DNA, 25 bp, Artificial
  Probe
tttgtataaagactgattacaccgt

SEQ ID NO: 150409 - DNA, 25 bp, Artificial
  Probe
gccttaactcttgttatctactttc

SEQ ID NO: 150410 - DNA, 25 bp, Artificial
  Probe
agactgtattttgtaatgaacgcat

SEQ ID NO: 150411 - DNA, 25 bp, Artificial
  Probe
tcacggatgctgagattataggtaa

SEQ ID NO: 150412 - DNA, 25 bp, Artificial
  Probe
cacggatgctgagattataggtaaa

SEQ ID NO: 150413 - DNA, 25 bp, Artificial
  Probe
ataagcacccaccctttatttcttt

SEQ ID NO: 150414 - DNA, 25 bp, Artificial
  Probe
gacagaacccaacatatccaagttt

SEQ ID NO: 150415 - DNA, 25 bp, Artificial
  Probe
caacaaataagcacccaccctttat

SEQ ID NO: 150416 - DNA, 25 bp, Artificial
  Probe
ggatacactacgtgagtaagctata

SEQ ID NO: 150417 - DNA, 25 bp, Artificial
  Probe
atgtgattctctttaaattgccctg

SEQ ID NO: 150418 - DNA, 25 bp, Artificial
  Probe
cggatacactacgtgagtaagctat

SEQ ID NO: 150419 - DNA, 25 bp, Artificial
  Probe
tgattctctttaaattgccctgact

SEQ ID NO: 150420 - DNA, 25 bp, Artificial
  Probe
gtgattctctttaaattgccctgac

SEQ ID NO: 150421 - DNA, 25 bp, Artificial
  Probe
tgtgattctctttaaattgccctga

SEQ ID NO: 150422 - DNA, 25 bp, Artificial
  Probe
ttctctttaaattgccctgactagc

SEQ ID NO: 150423 - DNA, 25 bp, Artificial
  Probe
attctctttaaattgccctgactag

SEQ ID NO: 150424 - DNA, 25 bp, Artificial
  Probe
gattctctttaaattgccctgacta

SEQ ID NO: 150425 - DNA, 25 bp, Artificial
  Probe
acaaagtccatgtaggctagtctag

SEQ ID NO: 150426 - DNA, 25 bp, Artificial
  Probe
gatacactacgtgagtaagctatag

SEQ ID NO: 150427 - DNA, 25 bp, Artificial
  Probe
tatgtgattctctttaaattgccct

SEQ ID NO: 150428 - DNA, 25 bp, Artificial
  Probe
ctcccatctctttgcatgtttaatt

SEQ ID NO: 150429 - DNA, 25 bp, Artificial
  Probe
gacaaagtccatgtaggctagtcta

SEQ ID NO: 150430 - DNA, 25 bp, Artificial
  Probe
gtattcgacagaacccaacatatcc

SEQ ID NO: 150431 - DNA, 25 bp, Artificial
  Probe
tcccatctctttgcatgtttaattt

SEQ ID NO: 150432 - DNA, 25 bp, Artificial
  Probe
ttaaattgccctgactagccttgag

SEQ ID NO: 150433 - DNA, 25 bp, Artificial
  Probe
tagactccaggcaacaaataagcac

SEQ ID NO: 150434 - DNA, 25 bp, Artificial
  Probe
tattcgacagaacccaacatatcca

SEQ ID NO: 150435 - DNA, 25 bp, Artificial
  Probe
ctagactccaggcaacaaataagca

SEQ ID NO: 150436 - DNA, 25 bp, Artificial
  Probe
cctcccatctctttgcatgtttaat

SEQ ID NO: 150437 - DNA, 25 bp, Artificial
  Probe
cgacagaacccaacatatccaagtt

SEQ ID NO: 150438 - DNA, 25 bp, Artificial
  Probe
ctttaaattgccctgactagccttg

SEQ ID NO: 150439 - DNA, 25 bp, Artificial
  Probe
tctttaaattgccctgactagcctt

SEQ ID NO: 150440 - DNA, 25 bp, Artificial
  Probe
ttatgtgattctctttaaattgccc

SEQ ID NO: 150441 - DNA, 25 bp, Artificial
  Probe
aataagcacccaccctttatttctt

SEQ ID NO: 150442 - DNA, 25 bp, Artificial
  Probe
ttgagacaaagtccatgtaggctag

SEQ ID NO: 150443 - DNA, 25 bp, Artificial
  Probe
acggatgctgagattataggtaaaa

SEQ ID NO: 150444 - DNA, 25 bp, Artificial
  Probe
aacaaataagcacccaccctttatt

SEQ ID NO: 150445 - DNA, 25 bp, Artificial
  Probe
tttaaattgccctgactagccttga

SEQ ID NO: 150446 - DNA, 25 bp, Artificial
  Probe
attcgacagaacccaacatatccaa

SEQ ID NO: 150447 - DNA, 25 bp, Artificial
  Probe
cccaccctttatttcttttctatgt

SEQ ID NO: 150448 - DNA, 25 bp, Artificial
  Probe
acccaccctttatttcttttctatg

SEQ ID NO: 150449 - DNA, 25 bp, Artificial
  Probe
cacccaccctttatttcttttctat

SEQ ID NO: 150450 - DNA, 25 bp, Artificial
  Probe
ctctttaaattgccctgactagcct

SEQ ID NO: 150451 - DNA, 25 bp, Artificial
  Probe
tctctttaaattgccctgactagcc

SEQ ID NO: 150452 - DNA, 25 bp, Artificial
  Probe
ctcacggatgctgagattataggta

SEQ ID NO: 150453 - DNA, 25 bp, Artificial
  Probe
gcacccaccctttatttcttttcta

SEQ ID NO: 150454 - DNA, 25 bp, Artificial
  Probe
taagcacccaccctttatttctttt

SEQ ID NO: 150455 - DNA, 25 bp, Artificial
  Probe
gagacaaagtccatgtaggctagtc

SEQ ID NO: 150456 - DNA, 25 bp, Artificial
  Probe
aagattttaccacatccacggagat

SEQ ID NO: 150457 - DNA, 25 bp, Artificial
  Probe
caaagattttaccacatccacggag

SEQ ID NO: 150458 - DNA, 25 bp, Artificial
  Probe
aaagattttaccacatccacggaga

SEQ ID NO: 150459 - DNA, 25 bp, Artificial
  Probe
gagcaaagattttaccacatccacg

SEQ ID NO: 150460 - DNA, 25 bp, Artificial
  Probe
aaatgtaacctctaggagatgcccg

SEQ ID NO: 150461 - DNA, 25 bp, Artificial
  Probe
aaaatgtaacctctaggagatgccc

SEQ ID NO: 150462 - DNA, 25 bp, Artificial
  Probe
ggagcaaagattttaccacatccac

SEQ ID NO: 150463 - DNA, 25 bp, Artificial
  Probe
ggagcgatggtgtttgttacatgag

SEQ ID NO: 150464 - DNA, 25 bp, Artificial
  Probe
gaggagcgatggtgtttgttacatg

SEQ ID NO: 150465 - DNA, 25 bp, Artificial
  Probe
agcaaagattttaccacatccacgg

SEQ ID NO: 150466 - DNA, 25 bp, Artificial
  Probe
aggagcgatggtgtttgttacatga

SEQ ID NO: 150467 - DNA, 25 bp, Artificial
  Probe
gcaaagattttaccacatccacgga

SEQ ID NO: 150468 - DNA, 25 bp, Artificial
  Probe
aaaatgtacagagaaggggcaaata

SEQ ID NO: 150469 - DNA, 25 bp, Artificial
  Probe
aaatgtacagagaaggggcaaatag

SEQ ID NO: 150470 - DNA, 25 bp, Artificial
  Probe
gggagcaaagattttaccacatcca

SEQ ID NO: 150471 - DNA, 25 bp, Artificial
  Probe
tgggagcaaagattttaccacatcc

SEQ ID NO: 150472 - DNA, 25 bp, Artificial
  Probe
gtacagagaaggggcaaatagcttg

SEQ ID NO: 150473 - DNA, 25 bp, Artificial
  Probe
caaaatgtacagagaaggggcaaat

SEQ ID NO: 150474 - DNA, 25 bp, Artificial
  Probe
aatgtacagagaaggggcaaatagc

SEQ ID NO: 150475 - DNA, 25 bp, Artificial
  Probe
taacctctaggagatgcccggaatt

SEQ ID NO: 150476 - DNA, 25 bp, Artificial
  Probe
atgtacagagaaggggcaaatagct

SEQ ID NO: 150477 - DNA, 25 bp, Artificial
  Probe
tgtacagagaaggggcaaatagctt

SEQ ID NO: 150478 - DNA, 25 bp, Artificial
  Probe
tacagagaaggggcaaatagcttgc

SEQ ID NO: 150479 - DNA, 25 bp, Artificial
  Probe
agaaggggcaaatagcttgcaatta

SEQ ID NO: 150480 - DNA, 25 bp, Artificial
  Probe
gagaaggggcaaatagcttgcaatt

SEQ ID NO: 150481 - DNA, 25 bp, Artificial
  Probe
agagaaggggcaaatagcttgcaat

SEQ ID NO: 150482 - DNA, 25 bp, Artificial
  Probe
gctccaagtagagattgtgcttaat

SEQ ID NO: 150483 - DNA, 25 bp, Artificial
  Probe
ctccaagtagagattgtgcttaatt

SEQ ID NO: 150484 - DNA, 25 bp, Artificial
  Probe
ttgagagagagagagagattggtca

SEQ ID NO: 150485 - DNA, 25 bp, Artificial
  Probe
acagaacattggcaagtatttaacc

SEQ ID NO: 150486 - DNA, 25 bp, Artificial
  Probe
ggaacagaacattggcaagtattta

SEQ ID NO: 150487 - DNA, 25 bp, Artificial
  Probe
cagaacattggcaagtatttaaccc

SEQ ID NO: 150488 - DNA, 25 bp, Artificial
  Probe
tttgagagagagagagagattggtc

SEQ ID NO: 150489 - DNA, 25 bp, Artificial
  Probe
ggctccaagtagagattgtgcttaa

SEQ ID NO: 150490 - DNA, 25 bp, Artificial
  Probe
aacagaacattggcaagtatttaac

SEQ ID NO: 150491 - DNA, 25 bp, Artificial
  Probe
tccaagtagagattgtgcttaatta

SEQ ID NO: 150492 - DNA, 25 bp, Artificial
  Probe
gaacagaacattggcaagtatttaa

SEQ ID NO: 150493 - DNA, 25 bp, Artificial
  Probe
gggaacagaacattggcaagtattt

SEQ ID NO: 150494 - DNA, 25 bp, Artificial
  Probe
gaatctagaatcctgaactgtggtg

SEQ ID NO: 150495 - DNA, 25 bp, Artificial
  Probe
agaatctagaatcctgaactgtggt

SEQ ID NO: 150496 - DNA, 25 bp, Artificial
  Probe
gctcggacagtgcctttataattaa

SEQ ID NO: 150497 - DNA, 25 bp, Artificial
  Probe
ctcggacagtgcctttataattaaa

SEQ ID NO: 150498 - DNA, 25 bp, Artificial
  Probe
ccaagtagagattgtgcttaattat

SEQ ID NO: 150499 - DNA, 25 bp, Artificial
  Probe
tggctccaagtagagattgtgctta

SEQ ID NO: 150500 - DNA, 25 bp, Artificial
  Probe
agaacattggcaagtatttaaccca

SEQ ID NO: 150501 - DNA, 25 bp, Artificial
  Probe
cagaatctagaatcctgaactgtgg

SEQ ID NO: 150502 - DNA, 25 bp, Artificial
  Probe
ccagaatctagaatcctgaactgtg

SEQ ID NO: 150503 - DNA, 25 bp, Artificial
  Probe
caccagaatctagaatcctgaactg

SEQ ID NO: 150504 - DNA, 25 bp, Artificial
  Probe
aatctagaatcctgaactgtggtgg

SEQ ID NO: 150505 - DNA, 25 bp, Artificial
  Probe
accagaatctagaatcctgaactgt

SEQ ID NO: 150506 - DNA, 25 bp, Artificial
  Probe
tgggaacagaacattggcaagtatt

SEQ ID NO: 150507 - DNA, 25 bp, Artificial
  Probe
atgggaacagaacattggcaagtat

SEQ ID NO: 150508 - DNA, 25 bp, Artificial
  Probe
atcgtaactgaattctcggtgtgat

SEQ ID NO: 150509 - DNA, 25 bp, Artificial
  Probe
caatcgtaactgaattctcggtgtg

SEQ ID NO: 150510 - DNA, 25 bp, Artificial
  Probe
tgttatacagaactgtgcgattccg

SEQ ID NO: 150511 - DNA, 25 bp, Artificial
  Probe
aatcgtaactgaattctcggtgtga

SEQ ID NO: 150512 - DNA, 25 bp, Artificial
  Probe
tagaatcctgaactgtggtggagtc

SEQ ID NO: 150513 - DNA, 25 bp, Artificial
  Probe
ctagaatcctgaactgtggtggagt

SEQ ID NO: 150514 - DNA, 25 bp, Artificial
  Probe
tcgtaactgaattctcggtgtgatc

SEQ ID NO: 150515 - DNA, 25 bp, Artificial
  Probe
tgttttgagagagagagagagattg

SEQ ID NO: 150516 - DNA, 25 bp, Artificial
  Probe
gttgttttgagagagagagagagat

SEQ ID NO: 150517 - DNA, 25 bp, Artificial
  Probe
ttgttgttttgagagagagagagag

SEQ ID NO: 150518 - DNA, 25 bp, Artificial
  Probe
ttgttgttgttttgagagagagaga

SEQ ID NO: 150519 - DNA, 25 bp, Artificial
  Probe
gttgttgttgttttgagagagagag

SEQ ID NO: 150520 - DNA, 25 bp, Artificial
  Probe
ttgttgttgttgttttgagagagag

SEQ ID NO: 150521 - DNA, 25 bp, Artificial
  Probe
tttgttgttgttgttttgagagaga

SEQ ID NO: 150522 - DNA, 25 bp, Artificial
  Probe
gttttgagagagagagagagattgg

SEQ ID NO: 150523 - DNA, 25 bp, Artificial
  Probe
gttgttgttttgagagagagagaga

SEQ ID NO: 150524 - DNA, 25 bp, Artificial
  Probe
ttttgagagagagagagagattggt

SEQ ID NO: 150525 - DNA, 25 bp, Artificial
  Probe
tgttgttgttttgagagagagagag

SEQ ID NO: 150526 - DNA, 25 bp, Artificial
  Probe
tgttgttgttgttttgagagagaga

SEQ ID NO: 150527 - DNA, 25 bp, Artificial
  Probe
gtacttgtagcttggatgacttcaa

SEQ ID NO: 150528 - DNA, 25 bp, Artificial
  Probe
ttgtatgacgagtaataatcaatgc

SEQ ID NO: 150529 - DNA, 25 bp, Artificial
  Probe
gaaacgatagatttggcaactgtat

SEQ ID NO: 150530 - DNA, 25 bp, Artificial
  Probe
agaaacgatagatttggcaactgta

SEQ ID NO: 150531 - DNA, 25 bp, Artificial
  Probe
aaacgatagatttggcaactgtatt

SEQ ID NO: 150532 - DNA, 25 bp, Artificial
  Probe
gaagaatgaatgtgactttgaggag

SEQ ID NO: 150533 - DNA, 25 bp, Artificial
  Probe
acgatagatttggcaactgtattag

SEQ ID NO: 150534 - DNA, 25 bp, Artificial
  Probe
cgatagatttggcaactgtattaga

SEQ ID NO: 150535 - DNA, 25 bp, Artificial
  Probe
agagttcaattccagaaacgataga

SEQ ID NO: 150536 - DNA, 25 bp, Artificial
  Probe
aacgatagatttggcaactgtatta

SEQ ID NO: 150537 - DNA, 25 bp, Artificial
  Probe
aagaatgaatgtgactttgaggagt

SEQ ID NO: 150538 - DNA, 25 bp, Artificial
  Probe
agaatgaatgtgactttgaggagta

SEQ ID NO: 150539 - DNA, 25 bp, Artificial
  Probe
aagagttcaattccagaaacgatag

SEQ ID NO: 150540 - DNA, 25 bp, Artificial
  Probe
gaagagttcaattccagaaacgata

SEQ ID NO: 150541 - DNA, 25 bp, Artificial
  Probe
cgaagaatgaatgtgactttgagga

SEQ ID NO: 150542 - DNA, 25 bp, Artificial
  Probe
gagttcaattccagaaacgatagat

SEQ ID NO: 150543 - DNA, 25 bp, Artificial
  Probe
gatattggaaatgaacgagcagtgt

SEQ ID NO: 150544 - DNA, 25 bp, Artificial
  Probe
atattggaaatgaacgagcagtgtg

SEQ ID NO: 150545 - DNA, 25 bp, Artificial
  Probe
acttcaaatacctgtcaacacaaga

SEQ ID NO: 150546 - DNA, 25 bp, Artificial
  Probe
tgtatgacgagtaataatcaatgca

SEQ ID NO: 150547 - DNA, 25 bp, Artificial
  Probe
gactgtggcactttgaagaattgta

SEQ ID NO: 150548 - DNA, 25 bp, Artificial
  Probe
agatttggcaactgtattagaaagt

SEQ ID NO: 150549 - DNA, 25 bp, Artificial
  Probe
agttcaattccagaaacgatagatt

SEQ ID NO: 150550 - DNA, 25 bp, Artificial
  Probe
cttcaaatacctgtcaacacaagac

SEQ ID NO: 150551 - DNA, 25 bp, Artificial
  Probe
gacttcaaatacctgtcaacacaag

SEQ ID NO: 150552 - DNA, 25 bp, Artificial
  Probe
gaatgaatgtgactttgaggagtac

SEQ ID NO: 150553 - DNA, 25 bp, Artificial
  Probe
cagtggtctttgtatgacgagtaat

SEQ ID NO: 150554 - DNA, 25 bp, Artificial
  Probe
tgctatgaagagttcaattccagaa

SEQ ID NO: 150555 - DNA, 25 bp, Artificial
  Probe
atgctatgaagagttcaattccaga

SEQ ID NO: 150556 - DNA, 25 bp, Artificial
  Probe
agtggtctttgtatgacgagtaata

SEQ ID NO: 150557 - DNA, 25 bp, Artificial
  Probe
ggatattggaaatgaacgagcagtg

SEQ ID NO: 150558 - DNA, 25 bp, Artificial
  Probe
ggttaatgtactctgtagaaagtcg

SEQ ID NO: 150559 - DNA, 25 bp, Artificial
  Probe
cggttaatgtactctgtagaaagtc

SEQ ID NO: 150560 - DNA, 25 bp, Artificial
  Probe
catgctatgaagagttcaattccag

SEQ ID NO: 150561 - DNA, 25 bp, Artificial
  Probe
gtggtctttgtatgacgagtaataa

SEQ ID NO: 150562 - DNA, 25 bp, Artificial
  Probe
gttcaattccagaaacgatagattt

SEQ ID NO: 150563 - DNA, 25 bp, Artificial
  Probe
actgtggcactttgaagaattgtac

SEQ ID NO: 150564 - DNA, 25 bp, Artificial
  Probe
caaatacctgtcaacacaagacctt

SEQ ID NO: 150565 - DNA, 25 bp, Artificial
  Probe
ttcaaatacctgtcaacacaagacc

SEQ ID NO: 150566 - DNA, 25 bp, Artificial
  Probe
atgaacttgctcgggaaatatgtga

SEQ ID NO: 150567 - DNA, 25 bp, Artificial
  Probe
ttcaattccagaaacgatagatttg

SEQ ID NO: 150568 - DNA, 25 bp, Artificial
  Probe
caacgggatattggaaatgaacgag

SEQ ID NO: 150569 - DNA, 25 bp, Artificial
  Probe
gacttcagtacttgtagcttggatg

SEQ ID NO: 150570 - DNA, 25 bp, Artificial
  Probe
tgtagaaagtcgaagaatgaatgtg

SEQ ID NO: 150571 - DNA, 25 bp, Artificial
  Probe
gtagaaagtcgaagaatgaatgtga

SEQ ID NO: 150572 - DNA, 25 bp, Artificial
  Probe
tcaatctgtcctgtattcgtatgtc

SEQ ID NO: 150573 - DNA, 25 bp, Artificial
  Probe
ctcaatctgtcctgtattcgtatgt

SEQ ID NO: 150574 - DNA, 25 bp, Artificial
  Probe
actcaatctgtcctgtattcgtatg

SEQ ID NO: 150575 - DNA, 25 bp, Artificial
  Probe
ctctactcaatctgtcctgtattcg

SEQ ID NO: 150576 - DNA, 25 bp, Artificial
  Probe
ctactcaatctgtcctgtattcgta

SEQ ID NO: 150577 - DNA, 25 bp, Artificial
  Probe
gctctactcaatctgtcctgtattc

SEQ ID NO: 150578 - DNA, 25 bp, Artificial
  Probe
ttcacataggattaacatacgacga

SEQ ID NO: 150579 - DNA, 25 bp, Artificial
  Probe
tcacataggattaacatacgacgat

SEQ ID NO: 150580 - DNA, 25 bp, Artificial
  Probe
cttcacataggattaacatacgacg

SEQ ID NO: 150581 - DNA, 25 bp, Artificial
  Probe
tctactcaatctgtcctgtattcgt

SEQ ID NO: 150582 - DNA, 25 bp, Artificial
  Probe
tacgacgatgttgataattgttcct

SEQ ID NO: 150583 - DNA, 25 bp, Artificial
  Probe
atacgacgatgttgataattgttcc

SEQ ID NO: 150584 - DNA, 25 bp, Artificial
  Probe
caatctgtcctgtattcgtatgtcc

SEQ ID NO: 150585 - DNA, 25 bp, Artificial
  Probe
cacataggattaacatacgacgatg

SEQ ID NO: 150586 - DNA, 25 bp, Artificial
  Probe
tactcaatctgtcctgtattcgtat

SEQ ID NO: 150587 - DNA, 25 bp, Artificial
  Probe
aattcatactcgttaccttgtggac

SEQ ID NO: 150588 - DNA, 25 bp, Artificial
  Probe
atctgtcctgtattcgtatgtccat

SEQ ID NO: 150589 - DNA, 25 bp, Artificial
  Probe
aatctgtcctgtattcgtatgtcca

SEQ ID NO: 150590 - DNA, 25 bp, Artificial
  Probe
catacgacgatgttgataattgttc

SEQ ID NO: 150591 - DNA, 25 bp, Artificial
  Probe
attcatactcgttaccttgtggaca

SEQ ID NO: 150592 - DNA, 25 bp, Artificial
  Probe
acgacgatgttgataattgttcctg

SEQ ID NO: 150593 - DNA, 25 bp, Artificial
  Probe
gccttcacataggattaacatacga

SEQ ID NO: 150594 - DNA, 25 bp, Artificial
  Probe
atactcgttaccttgtggacagaag

SEQ ID NO: 150595 - DNA, 25 bp, Artificial
  Probe
ccttcacataggattaacatacgac

SEQ ID NO: 150596 - DNA, 25 bp, Artificial
  Probe
catactcgttaccttgtggacagaa

SEQ ID NO: 150597 - DNA, 25 bp, Artificial
  Probe
ttcatactcgttaccttgtggacag

SEQ ID NO: 150598 - DNA, 25 bp, Artificial
  Probe
agctctactcaatctgtcctgtatt

SEQ ID NO: 150599 - DNA, 25 bp, Artificial
  Probe
aagctctactcaatctgtcctgtat

SEQ ID NO: 150600 - DNA, 25 bp, Artificial
  Probe
tctgtcctgtattcgtatgtccatg

SEQ ID NO: 150601 - DNA, 25 bp, Artificial
  Probe
gacgatgttgataattgttcctgcc

SEQ ID NO: 150602 - DNA, 25 bp, Artificial
  Probe
tctaatctctctgttaccctggaaa

SEQ ID NO: 150603 - DNA, 25 bp, Artificial
  Probe
ctctaatctctctgttaccctggaa

SEQ ID NO: 150604 - DNA, 25 bp, Artificial
  Probe
aaatctggcaaactgtgactctaaa

SEQ ID NO: 150605 - DNA, 25 bp, Artificial
  Probe
aaattcatactcgttaccttgtgga

SEQ ID NO: 150606 - DNA, 25 bp, Artificial
  Probe
cgacgatgttgataattgttcctgc

SEQ ID NO: 150607 - DNA, 25 bp, Artificial
  Probe
gtaacttacagattggatcaccagg

SEQ ID NO: 150608 - DNA, 25 bp, Artificial
  Probe
tcatactcgttaccttgtggacaga

SEQ ID NO: 150609 - DNA, 25 bp, Artificial
  Probe
ctaatctctctgttaccctggaaac

SEQ ID NO: 150610 - DNA, 25 bp, Artificial
  Probe
gcaaagggaatgggatatgtaataa

SEQ ID NO: 150611 - DNA, 25 bp, Artificial
  Probe
ccagaaagaacaagaaagatgaggg

SEQ ID NO: 150612 - DNA, 25 bp, Artificial
  Probe
cccagaaagaacaagaaagatgagg

SEQ ID NO: 150613 - DNA, 25 bp, Artificial
  Probe
gtgcgtgctctaatctctctgttac

SEQ ID NO: 150614 - DNA, 25 bp, Artificial
  Probe
cttcttcatcttcctgcctttcatc

SEQ ID NO: 150615 - DNA, 25 bp, Artificial
  Probe
gaaagaacaagaaagatgagggcaa

SEQ ID NO: 150616 - DNA, 25 bp, Artificial
  Probe
gggatcataaagagaaacgaaagga

SEQ ID NO: 150617 - DNA, 25 bp, Artificial
  Probe
aataaggtagtggatgacaatgagc

SEQ ID NO: 150618 - DNA, 25 bp, Artificial
  Probe
ataaggtagtggatgacaatgagca

SEQ ID NO: 150619 - DNA, 25 bp, Artificial
  Probe
taaggtagtggatgacaatgagcaa

SEQ ID NO: 150620 - DNA, 25 bp, Artificial
  Probe
agaatactgtagtggagtctcagag

SEQ ID NO: 150621 - DNA, 25 bp, Artificial
  Probe
aagactgtctctctaatcactgttg

SEQ ID NO: 150622 - DNA, 25 bp, Artificial
  Probe
cagaatactgtagtggagtctcaga

SEQ ID NO: 150623 - DNA, 25 bp, Artificial
  Probe
aaggtagtggatgacaatgagcaat

SEQ ID NO: 150624 - DNA, 25 bp, Artificial
  Probe
agactgtctctctaatcactgttgt

SEQ ID NO: 150625 - DNA, 25 bp, Artificial
  Probe
tctaatcactgttgtggaaccaatt

SEQ ID NO: 150626 - DNA, 25 bp, Artificial
  Probe
gactgtctctctaatcactgttgtg

SEQ ID NO: 150627 - DNA, 25 bp, Artificial
  Probe
tgtgatcttccagaatactgtagtg

SEQ ID NO: 150628 - DNA, 25 bp, Artificial
  Probe
gtctctctaatcactgttgtggaac

SEQ ID NO: 150629 - DNA, 25 bp, Artificial
  Probe
ctctaatcactgttgtggaaccaat

SEQ ID NO: 150630 - DNA, 25 bp, Artificial
  Probe
ttgtgatcttccagaatactgtagt

SEQ ID NO: 150631 - DNA, 25 bp, Artificial
  Probe
tgtctctctaatcactgttgtggaa

SEQ ID NO: 150632 - DNA, 25 bp, Artificial
  Probe
gaatactgtagtggagtctcagagc

SEQ ID NO: 150633 - DNA, 25 bp, Artificial
  Probe
aggtagtggatgacaatgagcaatg

SEQ ID NO: 150634 - DNA, 25 bp, Artificial
  Probe
tactcttctggacatgatgagcaat

SEQ ID NO: 150635 - DNA, 25 bp, Artificial
  Probe
ctgtctctctaatcactgttgtgga

SEQ ID NO: 150636 - DNA, 25 bp, Artificial
  Probe
tggaaataaggtagtggatgacaat

SEQ ID NO: 150637 - DNA, 25 bp, Artificial
  Probe
gtggaaataaggtagtggatgacaa

SEQ ID NO: 150638 - DNA, 25 bp, Artificial
  Probe
ttgtggaaataaggtagtggatgac

SEQ ID NO: 150639 - DNA, 25 bp, Artificial
  Probe
gttgtggaaataaggtagtggatga

SEQ ID NO: 150640 - DNA, 25 bp, Artificial
  Probe
gtgatcttccagaatactgtagtgg

SEQ ID NO: 150641 - DNA, 25 bp, Artificial
  Probe
ggaaataaggtagtggatgacaatg

SEQ ID NO: 150642 - DNA, 25 bp, Artificial
  Probe
tagtggatgacaatgagcaatgtga

SEQ ID NO: 150643 - DNA, 25 bp, Artificial
  Probe
gtagtggatgacaatgagcaatgtg

SEQ ID NO: 150644 - DNA, 25 bp, Artificial
  Probe
tctctaatcactgttgtggaaccaa

SEQ ID NO: 150645 - DNA, 25 bp, Artificial
  Probe
tctctctaatcactgttgtggaacc

SEQ ID NO: 150646 - DNA, 25 bp, Artificial
  Probe
actgtctctctaatcactgttgtgg

SEQ ID NO: 150647 - DNA, 25 bp, Artificial
  Probe
aatgagcaatgtgactgtggtactt

SEQ ID NO: 150648 - DNA, 25 bp, Artificial
  Probe
ccagaatactgtagtggagtctcag

SEQ ID NO: 150649 - DNA, 25 bp, Artificial
  Probe
atactgtagtggagtctcagagcat

SEQ ID NO: 150650 - DNA, 25 bp, Artificial
  Probe
aaataaggtagtggatgacaatgag

SEQ ID NO: 150651 - DNA, 25 bp, Artificial
  Probe
gaaataaggtagtggatgacaatga

SEQ ID NO: 150652 - DNA, 25 bp, Artificial
  Probe
ttcctactcttctggacatgatgag

SEQ ID NO: 150653 - DNA, 25 bp, Artificial
  Probe
tactgtagtggagtctcagagcatt

SEQ ID NO: 150654 - DNA, 25 bp, Artificial
  Probe
aatactgtagtggagtctcagagca

SEQ ID NO: 150655 - DNA, 25 bp, Artificial
  Probe
tttgttgtcaatcttgtaggtttgc

SEQ ID NO: 150656 - DNA, 25 bp, Artificial
  Probe
actttgttgtcaatcttgtaggttt

SEQ ID NO: 150657 - DNA, 25 bp, Artificial
  Probe
ctactcttctggacatgatgagcaa

SEQ ID NO: 150658 - DNA, 25 bp, Artificial
  Probe
ctctctaatcactgttgtggaacca

SEQ ID NO: 150659 - DNA, 25 bp, Artificial
  Probe
gatgacaatgagcaatgtgactgtg

SEQ ID NO: 150660 - DNA, 25 bp, Artificial
  Probe
ctttgttgtcaatcttgtaggtttg

SEQ ID NO: 150661 - DNA, 25 bp, Artificial
  Probe
actcttctggacatgatgagcaatt

SEQ ID NO: 150662 - DNA, 25 bp, Artificial
  Probe
tctactggtttatgaactggttgag

SEQ ID NO: 150663 - DNA, 25 bp, Artificial
  Probe
ttctactggtttatgaactggttga

SEQ ID NO: 150664 - DNA, 25 bp, Artificial
  Probe
tttctactggtttatgaactggttg

SEQ ID NO: 150665 - DNA, 25 bp, Artificial
  Probe
gtttctactggtttatgaactggtt

SEQ ID NO: 150666 - DNA, 25 bp, Artificial
  Probe
ctactggtttatgaactggttgagt

SEQ ID NO: 150667 - DNA, 25 bp, Artificial
  Probe
ctatgtagcttgagggtagagatgg

SEQ ID NO: 150668 - DNA, 25 bp, Artificial
  Probe
ttctatgtagcttgagggtagagat

SEQ ID NO: 150669 - DNA, 25 bp, Artificial
  Probe
tttctatgtagcttgagggtagaga

SEQ ID NO: 150670 - DNA, 25 bp, Artificial
  Probe
tctatgtagcttgagggtagagatg

SEQ ID NO: 150671 - DNA, 25 bp, Artificial
  Probe
tactggtttatgaactggttgagtt

SEQ ID NO: 150672 - DNA, 25 bp, Artificial
  Probe
agtttctactggtttatgaactggt

SEQ ID NO: 150673 - DNA, 25 bp, Artificial
  Probe
actggtttatgaactggttgagttt

SEQ ID NO: 150674 - DNA, 25 bp, Artificial
  Probe
aagtttctactggtttatgaactgg

SEQ ID NO: 150675 - DNA, 25 bp, Artificial
  Probe
cccaaactcttctttagccacaaaa

SEQ ID NO: 150676 - DNA, 25 bp, Artificial
  Probe
ggttgagttttgtgtatcacttagt

SEQ ID NO: 150677 - DNA, 25 bp, Artificial
  Probe
tggttgagttttgtgtatcacttag

SEQ ID NO: 150678 - DNA, 25 bp, Artificial
  Probe
ctggttgagttttgtgtatcactta

SEQ ID NO: 150679 - DNA, 25 bp, Artificial
  Probe
actggttgagttttgtgtatcactt

SEQ ID NO: 150680 - DNA, 25 bp, Artificial
  Probe
gaagtttctactggtttatgaactg

SEQ ID NO: 150681 - DNA, 25 bp, Artificial
  Probe
tagccacaaaagttcactattaaaa

SEQ ID NO: 150682 - DNA, 25 bp, Artificial
  Probe
ttagccacaaaagttcactattaaa

SEQ ID NO: 150683 - DNA, 25 bp, Artificial
  Probe
tttagccacaaaagttcactattaa

SEQ ID NO: 150684 - DNA, 25 bp, Artificial
  Probe
caaactcttctttagccacaaaagt

SEQ ID NO: 150685 - DNA, 25 bp, Artificial
  Probe
cttctttagccacaaaagttcacta

SEQ ID NO: 150686 - DNA, 25 bp, Artificial
  Probe
ctcttctttagccacaaaagttcac

SEQ ID NO: 150687 - DNA, 25 bp, Artificial
  Probe
tcttctttagccacaaaagttcact

SEQ ID NO: 150688 - DNA, 25 bp, Artificial
  Probe
actcttctttagccacaaaagttca

SEQ ID NO: 150689 - DNA, 25 bp, Artificial
  Probe
ccaaactcttctttagccacaaaag

SEQ ID NO: 150690 - DNA, 25 bp, Artificial
  Probe
gttgagttttgtgtatcacttagtt

SEQ ID NO: 150691 - DNA, 25 bp, Artificial
  Probe
tctttagccacaaaagttcactatt

SEQ ID NO: 150692 - DNA, 25 bp, Artificial
  Probe
ttctttagccacaaaagttcactat

SEQ ID NO: 150693 - DNA, 25 bp, Artificial
  Probe
ttttctatgtagcttgagggtagag

SEQ ID NO: 150694 - DNA, 25 bp, Artificial
  Probe
aactcttctttagccacaaaagttc

SEQ ID NO: 150695 - DNA, 25 bp, Artificial
  Probe
ggtttatgaactggttgagttttgt

SEQ ID NO: 150696 - DNA, 25 bp, Artificial
  Probe
tggtttatgaactggttgagttttg

SEQ ID NO: 150697 - DNA, 25 bp, Artificial
  Probe
ctggtttatgaactggttgagtttt

SEQ ID NO: 150698 - DNA, 25 bp, Artificial
  Probe
atgaactggttgagttttgtgtatc

SEQ ID NO: 150699 - DNA, 25 bp, Artificial
  Probe
aaactcttctttagccacaaaagtt

SEQ ID NO: 150700 - DNA, 25 bp, Artificial
  Probe
tttatgaactggttgagttttgtgt

SEQ ID NO: 150701 - DNA, 25 bp, Artificial
  Probe
gaactggttgagttttgtgtatcac

SEQ ID NO: 150702 - DNA, 25 bp, Artificial
  Probe
gtttatgaactggttgagttttgtg

SEQ ID NO: 150703 - DNA, 25 bp, Artificial
  Probe
aactggttgagttttgtgtatcact

SEQ ID NO: 150704 - DNA, 25 bp, Artificial
  Probe
tgaactggttgagttttgtgtatca

SEQ ID NO: 150705 - DNA, 25 bp, Artificial
  Probe
tgagttttgtgtatcacttagtttt

SEQ ID NO: 150706 - DNA, 25 bp, Artificial
  Probe
ttgagttttgtgtatcacttagttt

SEQ ID NO: 150707 - DNA, 25 bp, Artificial
  Probe
aaataagccctagtgttcaaaatgc

SEQ ID NO: 150708 - DNA, 25 bp, Artificial
  Probe
ctgtttgaaaataagccctagtgtt

SEQ ID NO: 150709 - DNA, 25 bp, Artificial
  Probe
tgtttgaaaataagccctagtgttc

SEQ ID NO: 150710 - DNA, 25 bp, Artificial
  Probe
aaactcttgaaaagtgtcgggaaat

SEQ ID NO: 150711 - DNA, 25 bp, Artificial
  Probe
aactcttgaaaagtgtcgggaaatt

SEQ ID NO: 150712 - DNA, 25 bp, Artificial
  Probe
aaaataagccctagtgttcaaaatg

SEQ ID NO: 150713 - DNA, 25 bp, Artificial
  Probe
caaccgtgtgctgtttgaaaataag

SEQ ID NO: 150714 - DNA, 25 bp, Artificial
  Probe
actcttgaaaagtgtcgggaaattg

SEQ ID NO: 150715 - DNA, 25 bp, Artificial
  Probe
gaaaataagccctagtgttcaaaat

SEQ ID NO: 150716 - DNA, 25 bp, Artificial
  Probe
ctcttgaaaagtgtcgggaaattgg

SEQ ID NO: 150717 - DNA, 25 bp, Artificial
  Probe
aataagccctagtgttcaaaatgca

SEQ ID NO: 150718 - DNA, 25 bp, Artificial
  Probe
ataagccctagtgttcaaaatgcag

SEQ ID NO: 150719 - DNA, 25 bp, Artificial
  Probe
ccaaccgtgtgctgtttgaaaataa

SEQ ID NO: 150720 - DNA, 25 bp, Artificial
  Probe
ccaaagatgaggtggttttccaaaa

SEQ ID NO: 150721 - DNA, 25 bp, Artificial
  Probe
gtttgaaaataagccctagtgttca

SEQ ID NO: 150722 - DNA, 25 bp, Artificial
  Probe
gctgtttgaaaataagccctagtgt

SEQ ID NO: 150723 - DNA, 25 bp, Artificial
  Probe
tgctgtttgaaaataagccctagtg

SEQ ID NO: 150724 - DNA, 25 bp, Artificial
  Probe
gtgctgtttgaaaataagccctagt

SEQ ID NO: 150725 - DNA, 25 bp, Artificial
  Probe
tgtgctgtttgaaaataagccctag

SEQ ID NO: 150726 - DNA, 25 bp, Artificial
  Probe
tgaaaataagccctagtgttcaaaa

SEQ ID NO: 150727 - DNA, 25 bp, Artificial
  Probe
gtgtgctgtttgaaaataagcccta

SEQ ID NO: 150728 - DNA, 25 bp, Artificial
  Probe
tcttgaaaagtgtcgggaaattggg

SEQ ID NO: 150729 - DNA, 25 bp, Artificial
  Probe
accaaccgtgtgctgtttgaaaata

SEQ ID NO: 150730 - DNA, 25 bp, Artificial
  Probe
cccaaagatgaggtggttttccaaa

SEQ ID NO: 150731 - DNA, 25 bp, Artificial
  Probe
aaccgtgtgctgtttgaaaataagc

SEQ ID NO: 150732 - DNA, 25 bp, Artificial
  Probe
cttgaaaagtgtcgggaaattgggg

SEQ ID NO: 150733 - DNA, 25 bp, Artificial
  Probe
ttgaaaagtgtcgggaaattgggga

SEQ ID NO: 150734 - DNA, 25 bp, Artificial
  Probe
gaccaaccgtgtgctgtttgaaaat

SEQ ID NO: 150735 - DNA, 25 bp, Artificial
  Probe
cgtgtgctgtttgaaaataagccct

SEQ ID NO: 150736 - DNA, 25 bp, Artificial
  Probe
ccccaaagatgaggtggttttccaa

SEQ ID NO: 150737 - DNA, 25 bp, Artificial
  Probe
ttgaaaataagccctagtgttcaaa

SEQ ID NO: 150738 - DNA, 25 bp, Artificial
  Probe
tttgaaaataagccctagtgttcaa

SEQ ID NO: 150739 - DNA, 25 bp, Artificial
  Probe
accgtgtgctgtttgaaaataagcc

SEQ ID NO: 150740 - DNA, 25 bp, Artificial
  Probe
gaaacctaagccaagaggtgtaccc

SEQ ID NO: 150741 - DNA, 25 bp, Artificial
  Probe
ggaaacctaagccaagaggtgtacc

SEQ ID NO: 150742 - DNA, 25 bp, Artificial
  Probe
cggaaacctaagccaagaggtgtac

SEQ ID NO: 150743 - DNA, 25 bp, Artificial
  Probe
ccactgctgtatcaatccaataatc

SEQ ID NO: 150744 - DNA, 25 bp, Artificial
  Probe
cctcattatggttatctgctactca

SEQ ID NO: 150745 - DNA, 25 bp, Artificial
  Probe
tcctcattatggttatctgctactc

SEQ ID NO: 150746 - DNA, 25 bp, Artificial
  Probe
ctcctcattatggttatctgctact

SEQ ID NO: 150747 - DNA, 25 bp, Artificial
  Probe
tctcctcattatggttatctgctac

SEQ ID NO: 150748 - DNA, 25 bp, Artificial
  Probe
ttcctctcctcattatggttatctg

SEQ ID NO: 150749 - DNA, 25 bp, Artificial
  Probe
ctctcctcattatggttatctgcta

SEQ ID NO: 150750 - DNA, 25 bp, Artificial
  Probe
cactgctgtatcaatccaataatct

SEQ ID NO: 150751 - DNA, 25 bp, Artificial
  Probe
cttcctctcctcattatggttatct

SEQ ID NO: 150752 - DNA, 25 bp, Artificial
  Probe
tcttcctctcctcattatggttatc

SEQ ID NO: 150753 - DNA, 25 bp, Artificial
  Probe
ctcttcctctcctcattatggttat

SEQ ID NO: 150754 - DNA, 25 bp, Artificial
  Probe
gctcttcctctcctcattatggtta

SEQ ID NO: 150755 - DNA, 25 bp, Artificial
  Probe
cctctcctcattatggttatctgct

SEQ ID NO: 150756 - DNA, 25 bp, Artificial
  Probe
tcctctcctcattatggttatctgc

SEQ ID NO: 150757 - DNA, 25 bp, Artificial
  Probe
gctgtatcaatccaataatctatgc

SEQ ID NO: 150758 - DNA, 25 bp, Artificial
  Probe
ggttatctgctactcaggaatcatt

SEQ ID NO: 150759 - DNA, 25 bp, Artificial
  Probe
cattatggttatctgctactcagga

SEQ ID NO: 150760 - DNA, 25 bp, Artificial
  Probe
tcattatggttatctgctactcagg

SEQ ID NO: 150761 - DNA, 25 bp, Artificial
  Probe
tatggttatctgctactcaggaatc

SEQ ID NO: 150762 - DNA, 25 bp, Artificial
  Probe
tggttatctgctactcaggaatcat

SEQ ID NO: 150763 - DNA, 25 bp, Artificial
  Probe
atggttatctgctactcaggaatca

SEQ ID NO: 150764 - DNA, 25 bp, Artificial
  Probe
ttatggttatctgctactcaggaat

SEQ ID NO: 150765 - DNA, 25 bp, Artificial
  Probe
attatggttatctgctactcaggaa

SEQ ID NO: 150766 - DNA, 25 bp, Artificial
  Probe
tgtatcaatccaataatctatgcct

SEQ ID NO: 150767 - DNA, 25 bp, Artificial
  Probe
actgctgtatcaatccaataatcta

SEQ ID NO: 150768 - DNA, 25 bp, Artificial
  Probe
ctcattatggttatctgctactcag

SEQ ID NO: 150769 - DNA, 25 bp, Artificial
  Probe
ctgtatcaatccaataatctatgcc

SEQ ID NO: 150770 - DNA, 25 bp, Artificial
  Probe
ttagctcttcctctcctcattatgg

SEQ ID NO: 150771 - DNA, 25 bp, Artificial
  Probe
gttatctgctactcaggaatcatta

SEQ ID NO: 150772 - DNA, 25 bp, Artificial
  Probe
aataatctatgcctttgttggtgag

SEQ ID NO: 150773 - DNA, 25 bp, Artificial
  Probe
cccactgctgtatcaatccaataat

SEQ ID NO: 150774 - DNA, 25 bp, Artificial
  Probe
atacaacctggttcttcttctgtct

SEQ ID NO: 150775 - DNA, 25 bp, Artificial
  Probe
catacaacctggttcttcttctgtc

SEQ ID NO: 150776 - DNA, 25 bp, Artificial
  Probe
ataatctatgcctttgttggtgaga

SEQ ID NO: 150777 - DNA, 25 bp, Artificial
  Probe
taatctatgcctttgttggtgagag

SEQ ID NO: 150778 - DNA, 25 bp, Artificial
  Probe
tatatttcattccttcctggcgaga

SEQ ID NO: 150779 - DNA, 25 bp, Artificial
  Probe
caataatctatgcctttgttggtga

SEQ ID NO: 150780 - DNA, 25 bp, Artificial
  Probe
tagctcttcctctcctcattatggt

SEQ ID NO: 150781 - DNA, 25 bp, Artificial
  Probe
gtatcaatccaataatctatgcctt

SEQ ID NO: 150782 - DNA, 25 bp, Artificial
  Probe
tgctgtatcaatccaataatctatg

SEQ ID NO: 150783 - DNA, 25 bp, Artificial
  Probe
gaaatgtggcaatctacctgagaaa

SEQ ID NO: 150784 - DNA, 25 bp, Artificial
  Probe
atatatttcattccttcctggcgag

SEQ ID NO: 150785 - DNA, 25 bp, Artificial
  Probe
tacaacctggttcttcttctgtctg

SEQ ID NO: 150786 - DNA, 25 bp, Artificial
  Probe
ttatctgctactcaggaatcattaa

SEQ ID NO: 150787 - DNA, 25 bp, Artificial
  Probe
tcaatccaataatctatgcctttgt

SEQ ID NO: 150788 - DNA, 25 bp, Artificial
  Probe
tggctctacctcatcaactttatag

SEQ ID NO: 150789 - DNA, 25 bp, Artificial
  Probe
tgcctactctgtatttatgaccaag

SEQ ID NO: 150790 - DNA, 25 bp, Artificial
  Probe
cttgcctactctgtatttatgacca

SEQ ID NO: 150791 - DNA, 25 bp, Artificial
  Probe
atcccttgcctactctgtatttatg

SEQ ID NO: 150792 - DNA, 25 bp, Artificial
  Probe
ttgtttatatggatgactgagaggc

SEQ ID NO: 150793 - DNA, 25 bp, Artificial
  Probe
tcgttgtttatatggatgactgaga

SEQ ID NO: 150794 - DNA, 25 bp, Artificial
  Probe
cgttgtttatatggatgactgagag

SEQ ID NO: 150795 - DNA, 25 bp, Artificial
  Probe
ccttgcctactctgtatttatgacc

SEQ ID NO: 150796 - DNA, 25 bp, Artificial
  Probe
cccttgcctactctgtatttatgac

SEQ ID NO: 150797 - DNA, 25 bp, Artificial
  Probe
tcccttgcctactctgtatttatga

SEQ ID NO: 150798 - DNA, 25 bp, Artificial
  Probe
gttcgttgtttatatggatgactga

SEQ ID NO: 150799 - DNA, 25 bp, Artificial
  Probe
ctctgtatttatgaccaagttcgtt

SEQ ID NO: 150800 - DNA, 25 bp, Artificial
  Probe
gttgtttatatggatgactgagagg

SEQ ID NO: 150801 - DNA, 25 bp, Artificial
  Probe
ttcgttgtttatatggatgactgag

SEQ ID NO: 150802 - DNA, 25 bp, Artificial
  Probe
cctcatcaactttatagcagaatca

SEQ ID NO: 150803 - DNA, 25 bp, Artificial
  Probe
acctcatcaactttatagcagaatc

SEQ ID NO: 150804 - DNA, 25 bp, Artificial
  Probe
attggctctacctcatcaactttat

SEQ ID NO: 150805 - DNA, 25 bp, Artificial
  Probe
ttgcctactctgtatttatgaccaa

SEQ ID NO: 150806 - DNA, 25 bp, Artificial
  Probe
ctgtatttatgaccaagttcgttgt

SEQ ID NO: 150807 - DNA, 25 bp, Artificial
  Probe
ctctacctcatcaactttatagcag

SEQ ID NO: 150808 - DNA, 25 bp, Artificial
  Probe
aattggctctacctcatcaacttta

SEQ ID NO: 150809 - DNA, 25 bp, Artificial
  Probe
tctgtatttatgaccaagttcgttg

SEQ ID NO: 150810 - DNA, 25 bp, Artificial
  Probe
actctgtatttatgaccaagttcgt

SEQ ID NO: 150811 - DNA, 25 bp, Artificial
  Probe
gcctactctgtatttatgaccaagt

SEQ ID NO: 150812 - DNA, 25 bp, Artificial
  Probe
aacctctcttctccatatgtcctaa

SEQ ID NO: 150813 - DNA, 25 bp, Artificial
  Probe
ttggctctacctcatcaactttata

SEQ ID NO: 150814 - DNA, 25 bp, Artificial
  Probe
tgtatttatgaccaagttcgttgtt

SEQ ID NO: 150815 - DNA, 25 bp, Artificial
  Probe
gtcaataactgtatccagcagctag

SEQ ID NO: 150816 - DNA, 25 bp, Artificial
  Probe
tctacctcatcaactttatagcaga

SEQ ID NO: 150817 - DNA, 25 bp, Artificial
  Probe
gatcccttgcctactctgtatttat

SEQ ID NO: 150818 - DNA, 25 bp, Artificial
  Probe
agttcgttgtttatatggatgactg

SEQ ID NO: 150819 - DNA, 25 bp, Artificial
  Probe
tgatcccttgcctactctgtattta

SEQ ID NO: 150820 - DNA, 25 bp, Artificial
  Probe
tcttctcatttcttgatgccttcag

SEQ ID NO: 150821 - DNA, 25 bp, Artificial
  Probe
ctacctcatcaactttatagcagaa

SEQ ID NO: 150822 - DNA, 25 bp, Artificial
  Probe
tgtcaataactgtatccagcagcta

SEQ ID NO: 150823 - DNA, 25 bp, Artificial
  Probe
caagttcgttgtttatatggatgac

SEQ ID NO: 150824 - DNA, 25 bp, Artificial
  Probe
gtcttctcatttcttgatgccttca

SEQ ID NO: 150825 - DNA, 25 bp, Artificial
  Probe
tgtcttctcatttcttgatgccttc

SEQ ID NO: 150826 - DNA, 25 bp, Artificial
  Probe
agtgtgtctgactctctgatgactg

SEQ ID NO: 150827 - DNA, 25 bp, Artificial
  Probe
cagtgtgtctgactctctgatgact

SEQ ID NO: 150828 - DNA, 25 bp, Artificial
  Probe
gctgtatgcttaaatgtcatgtgtt

SEQ ID NO: 150829 - DNA, 25 bp, Artificial
  Probe
gtatttatgaccaagttcgttgttt

SEQ ID NO: 150830 - DNA, 25 bp, Artificial
  Probe
gtatgcttaaatgtcatgtgtttcg

SEQ ID NO: 150831 - DNA, 25 bp, Artificial
  Probe
aagttcgttgtttatatggatgact

SEQ ID NO: 150832 - DNA, 25 bp, Artificial
  Probe
gtgtcttctcatttcttgatgcctt

SEQ ID NO: 150833 - DNA, 25 bp, Artificial
  Probe
catagcgagaaactgggagaaagag

SEQ ID NO: 150834 - DNA, 25 bp, Artificial
  Probe
atagcgagaaactgggagaaagaga

SEQ ID NO: 150835 - DNA, 25 bp, Artificial
  Probe
aatcaaagcagagcatagcgagaaa

SEQ ID NO: 150836 - DNA, 25 bp, Artificial
  Probe
aaatcaaagcagagcatagcgagaa

SEQ ID NO: 150837 - DNA, 25 bp, Artificial
  Probe
atcaaagcagagcatagcgagaaac

SEQ ID NO: 150838 - DNA, 25 bp, Artificial
  Probe
tagcgagaaactgggagaaagagac

SEQ ID NO: 150839 - DNA, 25 bp, Artificial
  Probe
gagaaactgggagaaagagacgaca

SEQ ID NO: 150840 - DNA, 25 bp, Artificial
  Probe
agaaactgggagaaagagacgacac

SEQ ID NO: 150841 - DNA, 25 bp, Artificial
  Probe
agagaagccactgacaaagaacaca

SEQ ID NO: 150842 - DNA, 25 bp, Artificial
  Probe
cagagaagccactgacaaagaacac

SEQ ID NO: 150843 - DNA, 25 bp, Artificial
  Probe
ctggtggatggtgacttttgaagat

SEQ ID NO: 150844 - DNA, 25 bp, Artificial
  Probe
gcatagcgagaaactgggagaaaga

SEQ ID NO: 150845 - DNA, 25 bp, Artificial
  Probe
agcatagcgagaaactgggagaaag

SEQ ID NO: 150846 - DNA, 25 bp, Artificial
  Probe
gagcatagcgagaaactgggagaaa

SEQ ID NO: 150847 - DNA, 25 bp, Artificial
  Probe
tcaaagcagagcatagcgagaaact

SEQ ID NO: 150848 - DNA, 25 bp, Artificial
  Probe
aaccagagaagccactgacaaagaa

SEQ ID NO: 150849 - DNA, 25 bp, Artificial
  Probe
aaaccagagaagccactgacaaaga

SEQ ID NO: 150850 - DNA, 25 bp, Artificial
  Probe
caaaccagagaagccactgacaaag

SEQ ID NO: 150851 - DNA, 25 bp, Artificial
  Probe
tggtggatggtgacttttgaagatc

SEQ ID NO: 150852 - DNA, 25 bp, Artificial
  Probe
cgagaaactgggagaaagagacgac

SEQ ID NO: 150853 - DNA, 25 bp, Artificial
  Probe
ggtggatggtgacttttgaagatca

SEQ ID NO: 150854 - DNA, 25 bp, Artificial
  Probe
caaagcagagcatagcgagaaactg

SEQ ID NO: 150855 - DNA, 25 bp, Artificial
  Probe
gaaactgggagaaagagacgacacc

SEQ ID NO: 150856 - DNA, 25 bp, Artificial
  Probe
gtggatggtgacttttgaagatcaa

SEQ ID NO: 150857 - DNA, 25 bp, Artificial
  Probe
ccagagaagccactgacaaagaaca

SEQ ID NO: 150858 - DNA, 25 bp, Artificial
  Probe
accagagaagccactgacaaagaac

SEQ ID NO: 150859 - DNA, 25 bp, Artificial
  Probe
gtgacttttgaagatcaaaggcttt

SEQ ID NO: 150860 - DNA, 25 bp, Artificial
  Probe
gatggtgacttttgaagatcaaagg

SEQ ID NO: 150861 - DNA, 25 bp, Artificial
  Probe
ggatggtgacttttgaagatcaaag

SEQ ID NO: 150862 - DNA, 25 bp, Artificial
  Probe
tggatggtgacttttgaagatcaaa

SEQ ID NO: 150863 - DNA, 25 bp, Artificial
  Probe
ggtgacttttgaagatcaaaggctt

SEQ ID NO: 150864 - DNA, 25 bp, Artificial
  Probe
atggtgacttttgaagatcaaaggc

SEQ ID NO: 150865 - DNA, 25 bp, Artificial
  Probe
tggtgacttttgaagatcaaaggct

SEQ ID NO: 150866 - DNA, 25 bp, Artificial
  Probe
aatcataattccaactccaggtctg

SEQ ID NO: 150867 - DNA, 25 bp, Artificial
  Probe
attcctcagtattgtgtgtctccat

SEQ ID NO: 150868 - DNA, 25 bp, Artificial
  Probe
ttcctcagtattgtgtgtctccatt

SEQ ID NO: 150869 - DNA, 25 bp, Artificial
  Probe
ttaggcaacacatcagtagttcttg

SEQ ID NO: 150870 - DNA, 25 bp, Artificial
  Probe
atcataattccaactccaggtctgt

SEQ ID NO: 150871 - DNA, 25 bp, Artificial
  Probe
aattcctcagtattgtgtgtctcca

SEQ ID NO: 150872 - DNA, 25 bp, Artificial
  Probe
ataattccaactccaggtctgtcaa

SEQ ID NO: 150873 - DNA, 25 bp, Artificial
  Probe
aattgacttaacatctctgtagcca

SEQ ID NO: 150874 - DNA, 25 bp, Artificial
  Probe
ataaccattcagttcagttcatctt

SEQ ID NO: 150875 - DNA, 25 bp, Artificial
  Probe
aataaccattcagttcagttcatct

SEQ ID NO: 150876 - DNA, 25 bp, Artificial
  Probe
attgacttaacatctctgtagccag

SEQ ID NO: 150877 - DNA, 25 bp, Artificial
  Probe
gacacagtgaagatcagagagatac

SEQ ID NO: 150878 - DNA, 25 bp, Artificial
  Probe
acacagtgaagatcagagagataca

SEQ ID NO: 150879 - DNA, 25 bp, Artificial
  Probe
tcataattccaactccaggtctgtc

SEQ ID NO: 150880 - DNA, 25 bp, Artificial
  Probe
ggacacagtgaagatcagagagata

SEQ ID NO: 150881 - DNA, 25 bp, Artificial
  Probe
cataattccaactccaggtctgtca

SEQ ID NO: 150882 - DNA, 25 bp, Artificial
  Probe
taattgacttaacatctctgtagcc

SEQ ID NO: 150883 - DNA, 25 bp, Artificial
  Probe
agaatgtgccactctatatacctat

SEQ ID NO: 150884 - DNA, 25 bp, Artificial
  Probe
cagtgaagatcagagagatacacaa

SEQ ID NO: 150885 - DNA, 25 bp, Artificial
  Probe
agtgaagatcagagagatacacaag

SEQ ID NO: 150886 - DNA, 25 bp, Artificial
  Probe
cacagtgaagatcagagagatacac

SEQ ID NO: 150887 - DNA, 25 bp, Artificial
  Probe
acagtgaagatcagagagatacaca

SEQ ID NO: 150888 - DNA, 25 bp, Artificial
  Probe
gtgaagatcagagagatacacaagc

SEQ ID NO: 150889 - DNA, 25 bp, Artificial
  Probe
ttcatctttggaccctcttagttac

SEQ ID NO: 150890 - DNA, 25 bp, Artificial
  Probe
gttcatctttggaccctcttagtta

SEQ ID NO: 150891 - DNA, 25 bp, Artificial
  Probe
tcagtattgtgtgtctccatttagg

SEQ ID NO: 150892 - DNA, 25 bp, Artificial
  Probe
cctcagtattgtgtgtctccattta

SEQ ID NO: 150893 - DNA, 25 bp, Artificial
  Probe
ctagaatgtgccactctatatacct

SEQ ID NO: 150894 - DNA, 25 bp, Artificial
  Probe
cattcagttcagttcatctttggac

SEQ ID NO: 150895 - DNA, 25 bp, Artificial
  Probe
acctataataaccattcagttcagt

SEQ ID NO: 150896 - DNA, 25 bp, Artificial
  Probe
ctcagtattgtgtgtctccatttag

SEQ ID NO: 150897 - DNA, 25 bp, Artificial
  Probe
tcatctttggaccctcttagttaca

SEQ ID NO: 150898 - DNA, 25 bp, Artificial
  Probe
aaatcataattccaactccaggtct

SEQ ID NO: 150899 - DNA, 25 bp, Artificial
  Probe
caaatcataattccaactccaggtc

SEQ ID NO: 150900 - DNA, 25 bp, Artificial
  Probe
tgaagatcagagagatacacaagct

SEQ ID NO: 150901 - DNA, 25 bp, Artificial
  Probe
atattgtttgtgatgttagtgggag

SEQ ID NO: 150902 - DNA, 25 bp, Artificial
  Probe
agccatatcacagtttaaggaattg

SEQ ID NO: 150903 - DNA, 25 bp, Artificial
  Probe
atttaggcaacacatcagtagttct

SEQ ID NO: 150904 - DNA, 25 bp, Artificial
  Probe
catttaggcaacacatcagtagttc

SEQ ID NO: 150905 - DNA, 25 bp, Artificial
  Probe
aaccattcagttcagttcatctttg

SEQ ID NO: 150906 - DNA, 25 bp, Artificial
  Probe
tttaggcaacacatcagtagttctt

SEQ ID NO: 150907 - DNA, 25 bp, Artificial
  Probe
attcagttcagttcatctttggacc

SEQ ID NO: 150908 - DNA, 25 bp, Artificial
  Probe
ttgtaggtagtaaactgaaaggtct

SEQ ID NO: 150909 - DNA, 25 bp, Artificial
  Probe
tattgtttgtgatgttagtgggagc

SEQ ID NO: 150910 - DNA, 25 bp, Artificial
  Probe
agttcatctttggaccctcttagtt

SEQ ID NO: 150911 - DNA, 25 bp, Artificial
  Probe
tcaggatagatcgttacgaccagag

SEQ ID NO: 150912 - DNA, 25 bp, Artificial
  Probe
gtcaggatagatcgttacgaccaga

SEQ ID NO: 150913 - DNA, 25 bp, Artificial
  Probe
ccttcggtcaggatagatcgttacg

SEQ ID NO: 150914 - DNA, 25 bp, Artificial
  Probe
gccttcggtcaggatagatcgttac

SEQ ID NO: 150915 - DNA, 25 bp, Artificial
  Probe
ggatagatcgttacgaccagaggag

SEQ ID NO: 150916 - DNA, 25 bp, Artificial
  Probe
cttcggtcaggatagatcgttacga

SEQ ID NO: 150917 - DNA, 25 bp, Artificial
  Probe
ttcggtcaggatagatcgttacgac

SEQ ID NO: 150918 - DNA, 25 bp, Artificial
  Probe
aggatagatcgttacgaccagagga

SEQ ID NO: 150919 - DNA, 25 bp, Artificial
  Probe
caggatagatcgttacgaccagagg

SEQ ID NO: 150920 - DNA, 25 bp, Artificial
  Probe
gaaagactcacaactcctgcaactg

SEQ ID NO: 150921 - DNA, 25 bp, Artificial
  Probe
tgaaagactcacaactcctgcaact

SEQ ID NO: 150922 - DNA, 25 bp, Artificial
  Probe
ggtcaggatagatcgttacgaccag

SEQ ID NO: 150923 - DNA, 25 bp, Artificial
  Probe
ctcacaactcctgcaactggaaaag

SEQ ID NO: 150924 - DNA, 25 bp, Artificial
  Probe
gtgaaagactcacaactcctgcaac

SEQ ID NO: 150925 - DNA, 25 bp, Artificial
  Probe
actcacaactcctgcaactggaaaa

SEQ ID NO: 150926 - DNA, 25 bp, Artificial
  Probe
aatactaatttattgccgtcctgga

SEQ ID NO: 150927 - DNA, 25 bp, Artificial
  Probe
taatactaatttattgccgtcctgg

SEQ ID NO: 150928 - DNA, 25 bp, Artificial
  Probe
ttgaagataaacaagagggactgta

SEQ ID NO: 150929 - DNA, 25 bp, Artificial
  Probe
gttgaagataaacaagagggactgt

SEQ ID NO: 150930 - DNA, 25 bp, Artificial
  Probe
ataaacaagagggactgtacttctg

SEQ ID NO: 150931 - DNA, 25 bp, Artificial
  Probe
tgaagataaacaagagggactgtac

SEQ ID NO: 150932 - DNA, 25 bp, Artificial
  Probe
gataaacaagagggactgtacttct

SEQ ID NO: 150933 - DNA, 25 bp, Artificial
  Probe
agataaacaagagggactgtacttc

SEQ ID NO: 150934 - DNA, 25 bp, Artificial
  Probe
gaagataaacaagagggactgtact

SEQ ID NO: 150935 - DNA, 25 bp, Artificial
  Probe
cagagccgtagtaaatattgtgatt

SEQ ID NO: 150936 - DNA, 25 bp, Artificial
  Probe
gcagagccgtagtaaatattgtgat

SEQ ID NO: 150937 - DNA, 25 bp, Artificial
  Probe
aagataaacaagagggactgtactt

SEQ ID NO: 150938 - DNA, 25 bp, Artificial
  Probe
taaacaagagggactgtacttctgt

SEQ ID NO: 150939 - DNA, 25 bp, Artificial
  Probe
ttcagtcattcactcacagtataaa

SEQ ID NO: 150940 - DNA, 25 bp, Artificial
  Probe
tttcagtcattcactcacagtataa

SEQ ID NO: 150941 - DNA, 25 bp, Artificial
  Probe
tatttaaactcttcagaggaaaccg

SEQ ID NO: 150942 - DNA, 25 bp, Artificial
  Probe
agagccgtagtaaatattgtgattt

SEQ ID NO: 150943 - DNA, 25 bp, Artificial
  Probe
atactaatttattgccgtcctggac

SEQ ID NO: 150944 - DNA, 25 bp, Artificial
  Probe
ataatactaatttattgccgtcctg

SEQ ID NO: 150945 - DNA, 25 bp, Artificial
  Probe
cataatactaatttattgccgtcct

SEQ ID NO: 150946 - DNA, 25 bp, Artificial
  Probe
aaacaagagggactgtacttctgtg

SEQ ID NO: 150947 - DNA, 25 bp, Artificial
  Probe
tactaatttattgccgtcctggact

SEQ ID NO: 150948 - DNA, 25 bp, Artificial
  Probe
aagagggactgtacttctgtggaaa

SEQ ID NO: 150949 - DNA, 25 bp, Artificial
  Probe
cattcactcacagtataaaagcact

SEQ ID NO: 150950 - DNA, 25 bp, Artificial
  Probe
tcattcactcacagtataaaagcac

SEQ ID NO: 150951 - DNA, 25 bp, Artificial
  Probe
gtcattcactcacagtataaaagca

SEQ ID NO: 150952 - DNA, 25 bp, Artificial
  Probe
cgcagagccgtagtaaatattgtga

SEQ ID NO: 150953 - DNA, 25 bp, Artificial
  Probe
ttcactcacagtataaaagcactcc

SEQ ID NO: 150954 - DNA, 25 bp, Artificial
  Probe
attcactcacagtataaaagcactc

SEQ ID NO: 150955 - DNA, 25 bp, Artificial
  Probe
agtcattcactcacagtataaaagc

SEQ ID NO: 150956 - DNA, 25 bp, Artificial
  Probe
gcataatactaatttattgccgtcc

SEQ ID NO: 150957 - DNA, 25 bp, Artificial
  Probe
tcactcacagtataaaagcactcct

SEQ ID NO: 150958 - DNA, 25 bp, Artificial
  Probe
attttcagtcattcactcacagtat

SEQ ID NO: 150959 - DNA, 25 bp, Artificial
  Probe
aattttcagtcattcactcacagta

SEQ ID NO: 150960 - DNA, 25 bp, Artificial
  Probe
ctaatttattgccgtcctggactct

SEQ ID NO: 150961 - DNA, 25 bp, Artificial
  Probe
atttaaactcttcagaggaaaccgg

SEQ ID NO: 150962 - DNA, 25 bp, Artificial
  Probe
ctgttgaagataaacaagagggact

SEQ ID NO: 150963 - DNA, 25 bp, Artificial
  Probe
tgttgaagataaacaagagggactg

SEQ ID NO: 150964 - DNA, 25 bp, Artificial
  Probe
taatttattgccgtcctggactctg

SEQ ID NO: 150965 - DNA, 25 bp, Artificial
  Probe
actaatttattgccgtcctggactc

SEQ ID NO: 150966 - DNA, 25 bp, Artificial
  Probe
gactgtacttctgtggaaaacaatt

SEQ ID NO: 150967 - DNA, 25 bp, Artificial
  Probe
caagagggactgtacttctgtggaa

SEQ ID NO: 150968 - DNA, 25 bp, Artificial
  Probe
ctcacagtataaaagcactcctgac

SEQ ID NO: 150969 - DNA, 25 bp, Artificial
  Probe
tgtacttctgtggaaaacaatttgc

SEQ ID NO: 150970 - DNA, 25 bp, Artificial
  Probe
actgtacttctgtggaaaacaattt

SEQ ID NO: 150971 - DNA, 25 bp, Artificial
  Probe
caagaggaatgttaagttgattgct

SEQ ID NO: 150972 - DNA, 25 bp, Artificial
  Probe
ccaagaggaatgttaagttgattgc

SEQ ID NO: 150973 - DNA, 25 bp, Artificial
  Probe
gccaagaggaatgttaagttgattg

SEQ ID NO: 150974 - DNA, 25 bp, Artificial
  Probe
tgccaagaggaatgttaagttgatt

SEQ ID NO: 150975 - DNA, 25 bp, Artificial
  Probe
ttgccaagaggaatgttaagttgat

SEQ ID NO: 150976 - DNA, 25 bp, Artificial
  Probe
gaggaatgttaagttgattgctctt

SEQ ID NO: 150977 - DNA, 25 bp, Artificial
  Probe
aagaggaatgttaagttgattgctc

SEQ ID NO: 150978 - DNA, 25 bp, Artificial
  Probe
aaggacatcaatgcttacaatggtg

SEQ ID NO: 150979 - DNA, 25 bp, Artificial
  Probe
caaggacatcaatgcttacaatggt

SEQ ID NO: 150980 - DNA, 25 bp, Artificial
  Probe
ttgtttgccactaaatgtcctaaag

SEQ ID NO: 150981 - DNA, 25 bp, Artificial
  Probe
attgtttgccactaaatgtcctaaa

SEQ ID NO: 150982 - DNA, 25 bp, Artificial
  Probe
agtttgccaagaggaatgttaagtt

SEQ ID NO: 150983 - DNA, 25 bp, Artificial
  Probe
tttgaaacgaattatgtgttggtga

SEQ ID NO: 150984 - DNA, 25 bp, Artificial
  Probe
ctttgaaacgaattatgtgttggtg

SEQ ID NO: 150985 - DNA, 25 bp, Artificial
  Probe
tctttgaaacgaattatgtgttggt

SEQ ID NO: 150986 - DNA, 25 bp, Artificial
  Probe
aggaatgttaagttgattgctcttt

SEQ ID NO: 150987 - DNA, 25 bp, Artificial
  Probe
agagtttgccaagaggaatgttaag

SEQ ID NO: 150988 - DNA, 25 bp, Artificial
  Probe
ttgaaacgaattatgtgttggtgac

SEQ ID NO: 150989 - DNA, 25 bp, Artificial
  Probe
ggaatgttaagttgattgctctttc

SEQ ID NO: 150990 - DNA, 25 bp, Artificial
  Probe
gagtttgccaagaggaatgttaagt

SEQ ID NO: 150991 - DNA, 25 bp, Artificial
  Probe
cagagtttgccaagaggaatgttaa

SEQ ID NO: 150992 - DNA, 25 bp, Artificial
  Probe
gaaacgaattatgtgttggtgactg

SEQ ID NO: 150993 - DNA, 25 bp, Artificial
  Probe
gtttgccaagaggaatgttaagttg

SEQ ID NO: 150994 - DNA, 25 bp, Artificial
  Probe
tttgccaagaggaatgttaagttga

SEQ ID NO: 150995 - DNA, 25 bp, Artificial
  Probe
tgtttgccactaaatgtcctaaagg

SEQ ID NO: 150996 - DNA, 25 bp, Artificial
  Probe
caatagactctgttgaggaccattt

SEQ ID NO: 150997 - DNA, 25 bp, Artificial
  Probe
tgaaacgaattatgtgttggtgact

SEQ ID NO: 150998 - DNA, 25 bp, Artificial
  Probe
ttctttgaaacgaattatgtgttgg

SEQ ID NO: 150999 - DNA, 25 bp, Artificial
  Probe
tagtgatctgtgaatgtgaactcgc

SEQ ID NO: 151000 - DNA, 25 bp, Artificial
  Probe
gaatgttaagttgattgctctttca

SEQ ID NO: 151001 - DNA, 25 bp, Artificial
  Probe
tcaatagactctgttgaggaccatt

SEQ ID NO: 151002 - DNA, 25 bp, Artificial
  Probe
ttcaatagactctgttgaggaccat

SEQ ID NO: 151003 - DNA, 25 bp, Artificial
  Probe
aggacatcaatgcttacaatggtgc

SEQ ID NO: 151004 - DNA, 25 bp, Artificial
  Probe
agaggaatgttaagttgattgctct

SEQ ID NO: 151005 - DNA, 25 bp, Artificial
  Probe
ccagagtttgccaagaggaatgtta

SEQ ID NO: 151006 - DNA, 25 bp, Artificial
  Probe
cattgtttgccactaaatgtcctaa

SEQ ID NO: 151007 - DNA, 25 bp, Artificial
  Probe
tggctttctttgaaacgaattatgt

SEQ ID NO: 151008 - DNA, 25 bp, Artificial
  Probe
tgattgctctttcaatagactctgt

SEQ ID NO: 151009 - DNA, 25 bp, Artificial
  Probe
ggctttctttgaaacgaattatgtg

SEQ ID NO: 151010 - DNA, 25 bp, Artificial
  Probe
actggctttctttgaaacgaattat

SEQ ID NO: 151011 - DNA, 25 bp, Artificial
  Probe
gactggctttctttgaaacgaatta

SEQ ID NO: 151012 - DNA, 25 bp, Artificial
  Probe
ctggctttctttgaaacgaattatg

SEQ ID NO: 151013 - DNA, 25 bp, Artificial
  Probe
taccatttcccatcatcgacgataa

SEQ ID NO: 151014 - DNA, 25 bp, Artificial
  Probe
attgctctttcaatagactctgttg

SEQ ID NO: 151015 - DNA, 25 bp, Artificial
  Probe
gctttctttgaaacgaattatgtgt

SEQ ID NO: 151016 - DNA, 25 bp, Artificial
  Probe
actttgtaatctatctggcaacagt

SEQ ID NO: 151017 - DNA, 25 bp, Artificial
  Probe
ctttgtaatctatctggcaacagtt

SEQ ID NO: 151018 - DNA, 25 bp, Artificial
  Probe
tttgtaatctatctggcaacagttt

SEQ ID NO: 151019 - DNA, 25 bp, Artificial
  Probe
tactttgtaatctatctggcaacag

SEQ ID NO: 151020 - DNA, 25 bp, Artificial
  Probe
cgagacgacgactacgagactatag

SEQ ID NO: 151021 - DNA, 25 bp, Artificial
  Probe
gagacgacgactacgagactatagc

SEQ ID NO: 151022 - DNA, 25 bp, Artificial
  Probe
ttgtgatggttgccgtgattacttg

SEQ ID NO: 151023 - DNA, 25 bp, Artificial
  Probe
aatctgaagctgctgagaacatacg

SEQ ID NO: 151024 - DNA, 25 bp, Artificial
  Probe
aaatctgaagctgctgagaacatac

SEQ ID NO: 151025 - DNA, 25 bp, Artificial
  Probe
ttactttgtaatctatctggcaaca

SEQ ID NO: 151026 - DNA, 25 bp, Artificial
  Probe
gacgactacgagactatagccatgt

SEQ ID NO: 151027 - DNA, 25 bp, Artificial
  Probe
tttgtgatggttgccgtgattactt

SEQ ID NO: 151028 - DNA, 25 bp, Artificial
  Probe
acgactacgagactatagccatgtc

SEQ ID NO: 151029 - DNA, 25 bp, Artificial
  Probe
ggttttactgcttttgtgatggttg

SEQ ID NO: 151030 - DNA, 25 bp, Artificial
  Probe
gttgggttttactgcttttgtgatg

SEQ ID NO: 151031 - DNA, 25 bp, Artificial
  Probe
tgttgggttttactgcttttgtgat

SEQ ID NO: 151032 - DNA, 25 bp, Artificial
  Probe
gactacgagactatagccatgtcta

SEQ ID NO: 151033 - DNA, 25 bp, Artificial
  Probe
actacgagactatagccatgtctac

SEQ ID NO: 151034 - DNA, 25 bp, Artificial
  Probe
gttttactgcttttgtgatggttgc

SEQ ID NO: 151035 - DNA, 25 bp, Artificial
  Probe
tgtaatctatctggcaacagttttg

SEQ ID NO: 151036 - DNA, 25 bp, Artificial
  Probe
tcgagacgacgactacgagactata

SEQ ID NO: 151037 - DNA, 25 bp, Artificial
  Probe
taatctatctggcaacagttttgac

SEQ ID NO: 151038 - DNA, 25 bp, Artificial
  Probe
gtaatctatctggcaacagttttga

SEQ ID NO: 151039 - DNA, 25 bp, Artificial
  Probe
ctacgagactatagccatgtctacc

SEQ ID NO: 151040 - DNA, 25 bp, Artificial
  Probe
cgacgactacgagactatagccatg

SEQ ID NO: 151041 - DNA, 25 bp, Artificial
  Probe
ttgtaatctatctggcaacagtttt

SEQ ID NO: 151042 - DNA, 25 bp, Artificial
  Probe
gggttttactgcttttgtgatggtt

SEQ ID NO: 151043 - DNA, 25 bp, Artificial
  Probe
ttgggttttactgcttttgtgatgg

SEQ ID NO: 151044 - DNA, 25 bp, Artificial
  Probe
ctgtgttgggttttactgcttttgt

SEQ ID NO: 151045 - DNA, 25 bp, Artificial
  Probe
cctgtcacatggtttcattacctgt

SEQ ID NO: 151046 - DNA, 25 bp, Artificial
  Probe
aatctatctggcaacagttttgacc

SEQ ID NO: 151047 - DNA, 25 bp, Artificial
  Probe
tacgagactatagccatgtctacca

SEQ ID NO: 151048 - DNA, 25 bp, Artificial
  Probe
gtgttgggttttactgcttttgtga

SEQ ID NO: 151049 - DNA, 25 bp, Artificial
  Probe
catcttttatggattcctgaacaaa

SEQ ID NO: 151050 - DNA, 25 bp, Artificial
  Probe
aaaatctgaagctgctgagaacata

SEQ ID NO: 151051 - DNA, 25 bp, Artificial
  Probe
cgagactatagccatgtctaccatg

SEQ ID NO: 151052 - DNA, 25 bp, Artificial
  Probe
acgacgactacgagactatagccat

SEQ ID NO: 151053 - DNA, 25 bp, Artificial
  Probe
tgtgttgggttttactgcttttgtg

SEQ ID NO: 151054 - DNA, 25 bp, Artificial
  Probe
ttttactgcttttgtgatggttgcc

SEQ ID NO: 151055 - DNA, 25 bp, Artificial
  Probe
gagactatagccatgtctaccatgc

SEQ ID NO: 151056 - DNA, 25 bp, Artificial
  Probe
acagcctgtcacatggtttcattac

SEQ ID NO: 151057 - DNA, 25 bp, Artificial
  Probe
cacagcctgtcacatggtttcatta

SEQ ID NO: 151058 - DNA, 25 bp, Artificial
  Probe
acgagactatagccatgtctaccat

SEQ ID NO: 151059 - DNA, 25 bp, Artificial
  Probe
atcctgtgttgggttttactgcttt

SEQ ID NO: 151060 - DNA, 25 bp, Artificial
  Probe
atctgaagctgctgagaacatacgg

SEQ ID NO: 151061 - DNA, 25 bp, Artificial
  Probe
ctctgtagctcaactgactatctag

SEQ ID NO: 151062 - DNA, 25 bp, Artificial
  Probe
tctgtagctcaactgactatctagg

SEQ ID NO: 151063 - DNA, 25 bp, Artificial
  Probe
cctctgtagctcaactgactatcta

SEQ ID NO: 151064 - DNA, 25 bp, Artificial
  Probe
cttggatctatgcttccttcagtag

SEQ ID NO: 151065 - DNA, 25 bp, Artificial
  Probe
tgattgtgattgtctacgtgctatg

SEQ ID NO: 151066 - DNA, 25 bp, Artificial
  Probe
gtgattgtgattgtctacgtgctat

SEQ ID NO: 151067 - DNA, 25 bp, Artificial
  Probe
ccttggatctatgcttccttcagta

SEQ ID NO: 151068 - DNA, 25 bp, Artificial
  Probe
gaggatgacactggtgattgtgatt

SEQ ID NO: 151069 - DNA, 25 bp, Artificial
  Probe
gattgtgattgtctacgtgctatgc

SEQ ID NO: 151070 - DNA, 25 bp, Artificial
  Probe
ctatgtcacctggattgccttgatg

SEQ ID NO: 151071 - DNA, 25 bp, Artificial
  Probe
acactggtgattgtgattgtctacg

SEQ ID NO: 151072 - DNA, 25 bp, Artificial
  Probe
aggatgacactggtgattgtgattg

SEQ ID NO: 151073 - DNA, 25 bp, Artificial
  Probe
attgtgattgtctacgtgctatgct

SEQ ID NO: 151074 - DNA, 25 bp, Artificial
  Probe
ttggatctatgcttccttcagtagc

SEQ ID NO: 151075 - DNA, 25 bp, Artificial
  Probe
ggatgacactggtgattgtgattgt

SEQ ID NO: 151076 - DNA, 25 bp, Artificial
  Probe
ggtgattgtgattgtctacgtgcta

SEQ ID NO: 151077 - DNA, 25 bp, Artificial
  Probe
ctgtagctcaactgactatctaggg

SEQ ID NO: 151078 - DNA, 25 bp, Artificial
  Probe
gtagctcaactgactatctagggtt

SEQ ID NO: 151079 - DNA, 25 bp, Artificial
  Probe
cttccttcagtagcagtgtctcctc

SEQ ID NO: 151080 - DNA, 25 bp, Artificial
  Probe
actggtgattgtgattgtctacgtg

SEQ ID NO: 151081 - DNA, 25 bp, Artificial
  Probe
tgtagctcaactgactatctagggt

SEQ ID NO: 151082 - DNA, 25 bp, Artificial
  Probe
cctctttgatgaaggatacaccctc

SEQ ID NO: 151083 - DNA, 25 bp, Artificial
  Probe
tgaggatgacactggtgattgtgat

SEQ ID NO: 151084 - DNA, 25 bp, Artificial
  Probe
ctctttgatgaaggatacaccctcc

SEQ ID NO: 151085 - DNA, 25 bp, Artificial
  Probe
ttgtgattgtctacgtgctatgctg

SEQ ID NO: 151086 - DNA, 25 bp, Artificial
  Probe
cactggtgattgtgattgtctacgt

SEQ ID NO: 151087 - DNA, 25 bp, Artificial
  Probe
cctatgtcacctggattgccttgat

SEQ ID NO: 151088 - DNA, 25 bp, Artificial
  Probe
aaccctctgtagctcaactgactat

SEQ ID NO: 151089 - DNA, 25 bp, Artificial
  Probe
ccctctgtagctcaactgactatct

SEQ ID NO: 151090 - DNA, 25 bp, Artificial
  Probe
aaaccctctgtagctcaactgacta

SEQ ID NO: 151091 - DNA, 25 bp, Artificial
  Probe
tatgtcacctggattgccttgatgg

SEQ ID NO: 151092 - DNA, 25 bp, Artificial
  Probe
accctctgtagctcaactgactatc

SEQ ID NO: 151093 - DNA, 25 bp, Artificial
  Probe
gacactggtgattgtgattgtctac

SEQ ID NO: 151094 - DNA, 25 bp, Artificial
  Probe
ctggtgattgtgattgtctacgtgc

SEQ ID NO: 151095 - DNA, 25 bp, Artificial
  Probe
gtgaggatgacactggtgattgtga

SEQ ID NO: 151096 - DNA, 25 bp, Artificial
  Probe
caacccttggatctatgcttccttc

SEQ ID NO: 151097 - DNA, 25 bp, Artificial
  Probe
gctactgggctctttctactcaaaa

SEQ ID NO: 151098 - DNA, 25 bp, Artificial
  Probe
attgctgcctgtcaggttcttatct

SEQ ID NO: 151099 - DNA, 25 bp, Artificial
  Probe
cattgctgcctgtcaggttcttatc

SEQ ID NO: 151100 - DNA, 25 bp, Artificial
  Probe
tgacactggtgattgtgattgtcta

SEQ ID NO: 151101 - DNA, 25 bp, Artificial
  Probe
gatgacactggtgattgtgattgtc

SEQ ID NO: 151102 - DNA, 25 bp, Artificial
  Probe
aacccttggatctatgcttccttca

SEQ ID NO: 151103 - DNA, 25 bp, Artificial
  Probe
ttgctgcctgtcaggttcttatctt

SEQ ID NO: 151104 - DNA, 25 bp, Artificial
  Probe
tggtgattgtgattgtctacgtgct

SEQ ID NO: 151105 - DNA, 25 bp, Artificial
  Probe
atgacactggtgattgtgattgtct

SEQ ID NO: 151106 - DNA, 25 bp, Artificial
  Probe
ctagacatcagactcagagtcaagt

SEQ ID NO: 151107 - DNA, 25 bp, Artificial
  Probe
tagacatcagactcagagtcaagtg

SEQ ID NO: 151108 - DNA, 25 bp, Artificial
  Probe
cctagacatcagactcagagtcaag

SEQ ID NO: 151109 - DNA, 25 bp, Artificial
  Probe
ccctagacatcagactcagagtcaa

SEQ ID NO: 151110 - DNA, 25 bp, Artificial
  Probe
agacatcagactcagagtcaagtgc

SEQ ID NO: 151111 - DNA, 25 bp, Artificial
  Probe
acatcagactcagagtcaagtgcag

SEQ ID NO: 151112 - DNA, 25 bp, Artificial
  Probe
gacatcagactcagagtcaagtgca

SEQ ID NO: 151113 - DNA, 25 bp, Artificial
  Probe
catcagactcagagtcaagtgcagg

SEQ ID NO: 151114 - DNA, 25 bp, Artificial
  Probe
atcagactcagagtcaagtgcagga

SEQ ID NO: 151115 - DNA, 25 bp, Artificial
  Probe
gccctagacatcagactcagagtca

SEQ ID NO: 151116 - DNA, 25 bp, Artificial
  Probe
gcaagtatcagatgacgacataaga

SEQ ID NO: 151117 - DNA, 25 bp, Artificial
  Probe
caagtatcagatgacgacataagat

SEQ ID NO: 151118 - DNA, 25 bp, Artificial
  Probe
agtatcagatgacgacataagattc

SEQ ID NO: 151119 - DNA, 25 bp, Artificial
  Probe
gtatcagatgacgacataagattct

SEQ ID NO: 151120 - DNA, 25 bp, Artificial
  Probe
aagtatcagatgacgacataagatt

SEQ ID NO: 151121 - DNA, 25 bp, Artificial
  Probe
atcagatgacgacataagattctag

SEQ ID NO: 151122 - DNA, 25 bp, Artificial
  Probe
ttacaaacctctctctaaacctcag

SEQ ID NO: 151123 - DNA, 25 bp, Artificial
  Probe
ctgggatttacaaacctctctctaa

SEQ ID NO: 151124 - DNA, 25 bp, Artificial
  Probe
tctgggatttacaaacctctctcta

SEQ ID NO: 151125 - DNA, 25 bp, Artificial
  Probe
tacaaacctctctctaaacctcagt

SEQ ID NO: 151126 - DNA, 25 bp, Artificial
  Probe
atactcaagcaggattagttcttaa

SEQ ID NO: 151127 - DNA, 25 bp, Artificial
  Probe
aatactcaagcaggattagttctta

SEQ ID NO: 151128 - DNA, 25 bp, Artificial
  Probe
ctcaagcaggattagttcttaaagc

SEQ ID NO: 151129 - DNA, 25 bp, Artificial
  Probe
tgcaagtatcagatgacgacataag

SEQ ID NO: 151130 - DNA, 25 bp, Artificial
  Probe
caagcaggattagttcttaaagcaa

SEQ ID NO: 151131 - DNA, 25 bp, Artificial
  Probe
tcaagcaggattagttcttaaagca

SEQ ID NO: 151132 - DNA, 25 bp, Artificial
  Probe
ggctaccagaaagaactagaatagg

SEQ ID NO: 151133 - DNA, 25 bp, Artificial
  Probe
gaactagaataggagctggctgatt

SEQ ID NO: 151134 - DNA, 25 bp, Artificial
  Probe
taccagaaagaactagaataggagc

SEQ ID NO: 151135 - DNA, 25 bp, Artificial
  Probe
gctaccagaaagaactagaatagga

SEQ ID NO: 151136 - DNA, 25 bp, Artificial
  Probe
aagcaggattagttcttaaagcaat

SEQ ID NO: 151137 - DNA, 25 bp, Artificial
  Probe
tttacaaacctctctctaaacctca

SEQ ID NO: 151138 - DNA, 25 bp, Artificial
  Probe
tgggatttacaaacctctctctaaa

SEQ ID NO: 151139 - DNA, 25 bp, Artificial
  Probe
ggatttacaaacctctctctaaacc

SEQ ID NO: 151140 - DNA, 25 bp, Artificial
  Probe
gggatttacaaacctctctctaaac

SEQ ID NO: 151141 - DNA, 25 bp, Artificial
  Probe
acaaacctctctctaaacctcagtc

SEQ ID NO: 151142 - DNA, 25 bp, Artificial
  Probe
gtctgggatttacaaacctctctct

SEQ ID NO: 151143 - DNA, 25 bp, Artificial
  Probe
agtctgggatttacaaacctctctc

SEQ ID NO: 151144 - DNA, 25 bp, Artificial
  Probe
agcaggattagttcttaaagcaata

SEQ ID NO: 151145 - DNA, 25 bp, Artificial
  Probe
actcaagcaggattagttcttaaag

SEQ ID NO: 151146 - DNA, 25 bp, Artificial
  Probe
ctgcaagtatcagatgacgacataa

SEQ ID NO: 151147 - DNA, 25 bp, Artificial
  Probe
agaactagaataggagctggctgat

SEQ ID NO: 151148 - DNA, 25 bp, Artificial
  Probe
tatcagatgacgacataagattcta

SEQ ID NO: 151149 - DNA, 25 bp, Artificial
  Probe
caaacctctctctaaacctcagtcc

SEQ ID NO: 151150 - DNA, 25 bp, Artificial
  Probe
atgagtctgggatttacaaacctct

SEQ ID NO: 151151 - DNA, 25 bp, Artificial
  Probe
atttacaaacctctctctaaacctc

SEQ ID NO: 151152 - DNA, 25 bp, Artificial
  Probe
gatttacaaacctctctctaaacct

SEQ ID NO: 151153 - DNA, 25 bp, Artificial
  Probe
aagaactagaataggagctggctga

SEQ ID NO: 151154 - DNA, 25 bp, Artificial
  Probe
aaatactcaagcaggattagttctt

SEQ ID NO: 151155 - DNA, 25 bp, Artificial
  Probe
gcaggattagttcttaaagcaataa

SEQ ID NO: 151156 - DNA, 25 bp, Artificial
  Probe
actgcaagtatcagatgacgacata

SEQ ID NO: 151157 - DNA, 25 bp, Artificial
  Probe
gagtctgggatttacaaacctctct

SEQ ID NO: 151158 - DNA, 25 bp, Artificial
  Probe
ctaggcttactgcaagtatcagatg

SEQ ID NO: 151159 - DNA, 25 bp, Artificial
  Probe
tctaggcttactgcaagtatcagat

SEQ ID NO: 151160 - DNA, 25 bp, Artificial
  Probe
taggcttactgcaagtatcagatga

SEQ ID NO: 151161 - DNA, 25 bp, Artificial
  Probe
gaaattgtgagaaagaagccagtct

SEQ ID NO: 151162 - DNA, 25 bp, Artificial
  Probe
aagatcgaaattgtgagaaagaagc

SEQ ID NO: 151163 - DNA, 25 bp, Artificial
  Probe
gtgagaaagatcgaaattgtgagaa

SEQ ID NO: 151164 - DNA, 25 bp, Artificial
  Probe
tgagaaagatcgaaattgtgagaaa

SEQ ID NO: 151165 - DNA, 25 bp, Artificial
  Probe
cgaaattgtgagaaagaagccagtc

SEQ ID NO: 151166 - DNA, 25 bp, Artificial
  Probe
ggtgagaaagatcgaaattgtgaga

SEQ ID NO: 151167 - DNA, 25 bp, Artificial
  Probe
aggtgagaaagatcgaaattgtgag

SEQ ID NO: 151168 - DNA, 25 bp, Artificial
  Probe
caaagggaagcaccgaaagtttaag

SEQ ID NO: 151169 - DNA, 25 bp, Artificial
  Probe
aaagtttaagcacacccatgacaag

SEQ ID NO: 151170 - DNA, 25 bp, Artificial
  Probe
gaaagtttaagcacacccatgacaa

SEQ ID NO: 151171 - DNA, 25 bp, Artificial
  Probe
agaaagatcgaaattgtgagaaaga

SEQ ID NO: 151172 - DNA, 25 bp, Artificial
  Probe
caggtgagaaagatcgaaattgtga

SEQ ID NO: 151173 - DNA, 25 bp, Artificial
  Probe
gagaaagatcgaaattgtgagaaag

SEQ ID NO: 151174 - DNA, 25 bp, Artificial
  Probe
agatcgaaattgtgagaaagaagcc

SEQ ID NO: 151175 - DNA, 25 bp, Artificial
  Probe
atcgaaattgtgagaaagaagccag

SEQ ID NO: 151176 - DNA, 25 bp, Artificial
  Probe
gatcgaaattgtgagaaagaagcca

SEQ ID NO: 151177 - DNA, 25 bp, Artificial
  Probe
gtttaagcacacccatgacaagaag

SEQ ID NO: 151178 - DNA, 25 bp, Artificial
  Probe
aaagatcgaaattgtgagaaagaag

SEQ ID NO: 151179 - DNA, 25 bp, Artificial
  Probe
gaaagatcgaaattgtgagaaagaa

SEQ ID NO: 151180 - DNA, 25 bp, Artificial
  Probe
agtttaagcacacccatgacaagaa

SEQ ID NO: 151181 - DNA, 25 bp, Artificial
  Probe
aagtttaagcacacccatgacaaga

SEQ ID NO: 151182 - DNA, 25 bp, Artificial
  Probe
aaattgtgagaaagaagccagtctt

SEQ ID NO: 151183 - DNA, 25 bp, Artificial
  Probe
cacagagactccgtagacgaagatg

SEQ ID NO: 151184 - DNA, 25 bp, Artificial
  Probe
gcaggtgagaaagatcgaaattgtg

SEQ ID NO: 151185 - DNA, 25 bp, Artificial
  Probe
tcgaaattgtgagaaagaagccagt

SEQ ID NO: 151186 - DNA, 25 bp, Artificial
  Probe
gtgcaggtgagaaagatcgaaattg

SEQ ID NO: 151187 - DNA, 25 bp, Artificial
  Probe
ccaaagggaagcaccgaaagtttaa

SEQ ID NO: 151188 - DNA, 25 bp, Artificial
  Probe
tgcaggtgagaaagatcgaaattgt

SEQ ID NO: 151189 - DNA, 25 bp, Artificial
  Probe
gagaaagaagccagtcttcaagaag

SEQ ID NO: 151190 - DNA, 25 bp, Artificial
  Probe
aattgtgagaaagaagccagtcttc

SEQ ID NO: 151191 - DNA, 25 bp, Artificial
  Probe
aaagggaagcaccgaaagtttaagc

SEQ ID NO: 151192 - DNA, 25 bp, Artificial
  Probe
tgagaaagaagccagtcttcaagaa

SEQ ID NO: 151193 - DNA, 25 bp, Artificial
  Probe
cgaaagtttaagcacacccatgaca

SEQ ID NO: 151194 - DNA, 25 bp, Artificial
  Probe
attgtgagaaagaagccagtcttca

SEQ ID NO: 151195 - DNA, 25 bp, Artificial
  Probe
ggtgcaggtgagaaagatcgaaatt

SEQ ID NO: 151196 - DNA, 25 bp, Artificial
  Probe
ttgtgagaaagaagccagtcttcaa

SEQ ID NO: 151197 - DNA, 25 bp, Artificial
  Probe
agaaagaagccagtcttcaagaagg

SEQ ID NO: 151198 - DNA, 25 bp, Artificial
  Probe
gtgagaaagaagccagtcttcaaga

SEQ ID NO: 151199 - DNA, 25 bp, Artificial
  Probe
tgtgagaaagaagccagtcttcaag

SEQ ID NO: 151200 - DNA, 25 bp, Artificial
  Probe
ccgaaagtttaagcacacccatgac

SEQ ID NO: 151201 - DNA, 25 bp, Artificial
  Probe
gaagcaccgaaagtttaagcacacc

SEQ ID NO: 151202 - DNA, 25 bp, Artificial
  Probe
ggaagcaccgaaagtttaagcacac

SEQ ID NO: 151203 - DNA, 25 bp, Artificial
  Probe
caccgaaagtttaagcacacccatg

SEQ ID NO: 151204 - DNA, 25 bp, Artificial
  Probe
accgaaagtttaagcacacccatga

SEQ ID NO: 151205 - DNA, 25 bp, Artificial
  Probe
ctgcaagtgtgagacagtagtgacc

SEQ ID NO: 151206 - DNA, 25 bp, Artificial
  Probe
gcagtaccaactagcatatatcaga

SEQ ID NO: 151207 - DNA, 25 bp, Artificial
  Probe
ggcagtaccaactagcatatatcag

SEQ ID NO: 151208 - DNA, 25 bp, Artificial
  Probe
ttgttgttcaagatgaggagactga

SEQ ID NO: 151209 - DNA, 25 bp, Artificial
  Probe
gttgttgttcaagatgaggagactg

SEQ ID NO: 151210 - DNA, 25 bp, Artificial
  Probe
cagtaccaactagcatatatcagac

SEQ ID NO: 151211 - DNA, 25 bp, Artificial
  Probe
agtaccaactagcatatatcagact

SEQ ID NO: 151212 - DNA, 25 bp, Artificial
  Probe
tgttgttcaagatgaggagactgac

SEQ ID NO: 151213 - DNA, 25 bp, Artificial
  Probe
atggcagtaccaactagcatatatc

SEQ ID NO: 151214 - DNA, 25 bp, Artificial
  Probe
catggcagtaccaactagcatatat

SEQ ID NO: 151215 - DNA, 25 bp, Artificial
  Probe
ggttgttgttcaagatgaggagact

SEQ ID NO: 151216 - DNA, 25 bp, Artificial
  Probe
aggttgttgttcaagatgaggagac

SEQ ID NO: 151217 - DNA, 25 bp, Artificial
  Probe
caggttgttgttcaagatgaggaga

SEQ ID NO: 151218 - DNA, 25 bp, Artificial
  Probe
aactagcatatatcagactagcacg

SEQ ID NO: 151219 - DNA, 25 bp, Artificial
  Probe
ccaactagcatatatcagactagca

SEQ ID NO: 151220 - DNA, 25 bp, Artificial
  Probe
accaactagcatatatcagactagc

SEQ ID NO: 151221 - DNA, 25 bp, Artificial
  Probe
tggcagtaccaactagcatatatca

SEQ ID NO: 151222 - DNA, 25 bp, Artificial
  Probe
actagcatatatcagactagcacgg

SEQ ID NO: 151223 - DNA, 25 bp, Artificial
  Probe
caactagcatatatcagactagcac

SEQ ID NO: 151224 - DNA, 25 bp, Artificial
  Probe
gttgttcaagatgaggagactgacc

SEQ ID NO: 151225 - DNA, 25 bp, Artificial
  Probe
gaacaatccagatttctaacccagg

SEQ ID NO: 151226 - DNA, 25 bp, Artificial
  Probe
gtaccaactagcatatatcagacta

SEQ ID NO: 151227 - DNA, 25 bp, Artificial
  Probe
ccaggttgttgttcaagatgaggag

SEQ ID NO: 151228 - DNA, 25 bp, Artificial
  Probe
tgttcaagatgaggagactgacctt

SEQ ID NO: 151229 - DNA, 25 bp, Artificial
  Probe
ttgttcaagatgaggagactgacct

SEQ ID NO: 151230 - DNA, 25 bp, Artificial
  Probe
ggaacaatccagatttctaacccag

SEQ ID NO: 151231 - DNA, 25 bp, Artificial
  Probe
attaacaatgacaaattcaggagct

SEQ ID NO: 151232 - DNA, 25 bp, Artificial
  Probe
aacaatccagatttctaacccagga

SEQ ID NO: 151233 - DNA, 25 bp, Artificial
  Probe
ggcattaacaatgacaaattcagga

SEQ ID NO: 151234 - DNA, 25 bp, Artificial
  Probe
aggcattaacaatgacaaattcagg

SEQ ID NO: 151235 - DNA, 25 bp, Artificial
  Probe
tccaggcattaacaatgacaaattc

SEQ ID NO: 151236 - DNA, 25 bp, Artificial
  Probe
ctccaggcattaacaatgacaaatt

SEQ ID NO: 151237 - DNA, 25 bp, Artificial
  Probe
caggcattaacaatgacaaattcag

SEQ ID NO: 151238 - DNA, 25 bp, Artificial
  Probe
ccaggcattaacaatgacaaattca

SEQ ID NO: 151239 - DNA, 25 bp, Artificial
  Probe
gacaccacctaacattgctaccatg

SEQ ID NO: 151240 - DNA, 25 bp, Artificial
  Probe
cattaacaatgacaaattcaggagc

SEQ ID NO: 151241 - DNA, 25 bp, Artificial
  Probe
gcattaacaatgacaaattcaggag

SEQ ID NO: 151242 - DNA, 25 bp, Artificial
  Probe
actccaggcattaacaatgacaaat

SEQ ID NO: 151243 - DNA, 25 bp, Artificial
  Probe
gatttctaacccaggatctgatggt

SEQ ID NO: 151244 - DNA, 25 bp, Artificial
  Probe
ggactccaggcattaacaatgacaa

SEQ ID NO: 151245 - DNA, 25 bp, Artificial
  Probe
taccaactagcatatatcagactag

SEQ ID NO: 151246 - DNA, 25 bp, Artificial
  Probe
gactccaggcattaacaatgacaaa

SEQ ID NO: 151247 - DNA, 25 bp, Artificial
  Probe
agatttctaacccaggatctgatgg

SEQ ID NO: 151248 - DNA, 25 bp, Artificial
  Probe
cagccaggttgttgttcaagatgag

SEQ ID NO: 151249 - DNA, 25 bp, Artificial
  Probe
atttctaacccaggatctgatggtg

SEQ ID NO: 151250 - DNA, 25 bp, Artificial
  Probe
ggacaccacctaacattgctaccat

SEQ ID NO: 151251 - DNA, 25 bp, Artificial
  Probe
aatggaattactgagttcaacacag

SEQ ID NO: 151252 - DNA, 25 bp, Artificial
  Probe
catcctcatctccgaatgtatctcc

SEQ ID NO: 151253 - DNA, 25 bp, Artificial
  Probe
ccatcctcatctccgaatgtatctc

SEQ ID NO: 151254 - DNA, 25 bp, Artificial
  Probe
caaccatgtctgtcaacaacaataa

SEQ ID NO: 151255 - DNA, 25 bp, Artificial
  Probe
atggaattactgagttcaacacagc

SEQ ID NO: 151256 - DNA, 25 bp, Artificial
  Probe
atctacaccatcctcatctccgaat

SEQ ID NO: 151257 - DNA, 25 bp, Artificial
  Probe
accatcctcatctccgaatgtatct

SEQ ID NO: 151258 - DNA, 25 bp, Artificial
  Probe
caccatcctcatctccgaatgtatc

SEQ ID NO: 151259 - DNA, 25 bp, Artificial
  Probe
ccaaccatgtctgtcaacaacaata

SEQ ID NO: 151260 - DNA, 25 bp, Artificial
  Probe
ggaaatggaattactgagttcaaca

SEQ ID NO: 151261 - DNA, 25 bp, Artificial
  Probe
tggaaatggaattactgagttcaac

SEQ ID NO: 151262 - DNA, 25 bp, Artificial
  Probe
gtggaaatggaattactgagttcaa

SEQ ID NO: 151263 - DNA, 25 bp, Artificial
  Probe
tttagagtgaagtttgaggtccaga

SEQ ID NO: 151264 - DNA, 25 bp, Artificial
  Probe
gggagagttcatcaaggaaattaag

SEQ ID NO: 151265 - DNA, 25 bp, Artificial
  Probe
ctggacaagttcatagaggtttacc

SEQ ID NO: 151266 - DNA, 25 bp, Artificial
  Probe
gctggacaagttcatagaggtttac

SEQ ID NO: 151267 - DNA, 25 bp, Artificial
  Probe
aaatggaattactgagttcaacaca

SEQ ID NO: 151268 - DNA, 25 bp, Artificial
  Probe
agtattatgactttcaacacccaga

SEQ ID NO: 151269 - DNA, 25 bp, Artificial
  Probe
gtcaacaacaataaagtacagcagg

SEQ ID NO: 151270 - DNA, 25 bp, Artificial
  Probe
ttagagtgaagtttgaggtccagag

SEQ ID NO: 151271 - DNA, 25 bp, Artificial
  Probe
caacaacaataaagtacagcaggtg

SEQ ID NO: 151272 - DNA, 25 bp, Artificial
  Probe
tcaacaacaataaagtacagcaggt

SEQ ID NO: 151273 - DNA, 25 bp, Artificial
  Probe
gaaatggaattactgagttcaacac

SEQ ID NO: 151274 - DNA, 25 bp, Artificial
  Probe
cgtggaaatggaattactgagttca

SEQ ID NO: 151275 - DNA, 25 bp, Artificial
  Probe
attatgactttcaacacccagatgt

SEQ ID NO: 151276 - DNA, 25 bp, Artificial
  Probe
ggagagttcatcaaggaaattaaga

SEQ ID NO: 151277 - DNA, 25 bp, Artificial
  Probe
tattatgactttcaacacccagatg

SEQ ID NO: 151278 - DNA, 25 bp, Artificial
  Probe
gtattatgactttcaacacccagat

SEQ ID NO: 151279 - DNA, 25 bp, Artificial
  Probe
caatcttggaactggtcacaaagta

SEQ ID NO: 151280 - DNA, 25 bp, Artificial
  Probe
agatgtctccaaatacctacacaga

SEQ ID NO: 151281 - DNA, 25 bp, Artificial
  Probe
cagatgtctccaaatacctacacag

SEQ ID NO: 151282 - DNA, 25 bp, Artificial
  Probe
ttcatcaaggaaattaagaaacagc

SEQ ID NO: 151283 - DNA, 25 bp, Artificial
  Probe
ggaattactgagttcaacacagctc

SEQ ID NO: 151284 - DNA, 25 bp, Artificial
  Probe
tctacaccatcctcatctccgaatg

SEQ ID NO: 151285 - DNA, 25 bp, Artificial
  Probe
ttatgactttcaacacccagatgtc

SEQ ID NO: 151286 - DNA, 25 bp, Artificial
  Probe
gatctacaccatcctcatctccgaa

SEQ ID NO: 151287 - DNA, 25 bp, Artificial
  Probe
tgtcaacaacaataaagtacagcag

SEQ ID NO: 151288 - DNA, 25 bp, Artificial
  Probe
acaccatcctcatctccgaatgtat

SEQ ID NO: 151289 - DNA, 25 bp, Artificial
  Probe
ccatgtttgaatactgtccaatcac

SEQ ID NO: 151290 - DNA, 25 bp, Artificial
  Probe
gttagcctctacagcaatcctgatc

SEQ ID NO: 151291 - DNA, 25 bp, Artificial
  Probe
aatcttggaactggtcacaaagtac

SEQ ID NO: 151292 - DNA, 25 bp, Artificial
  Probe
cacccagatgtctccaaatacctac

SEQ ID NO: 151293 - DNA, 25 bp, Artificial
  Probe
ccatgtctgtcaacaacaataaagt

SEQ ID NO: 151294 - DNA, 25 bp, Artificial
  Probe
accatgtctgtcaacaacaataaag

SEQ ID NO: 151295 - DNA, 25 bp, Artificial
  Probe
catgtttgaatactgtccaatcaca

SEQ ID NO: 151296 - DNA, 25 bp, Artificial
  Probe
gcttatattgtccaagagtacatgg

SEQ ID NO: 151297 - DNA, 25 bp, Artificial
  Probe
attgactttctggagaagatcctga

SEQ ID NO: 151298 - DNA, 25 bp, Artificial
  Probe
cattgactttctggagaagatcctg

SEQ ID NO: 151299 - DNA, 25 bp, Artificial
  Probe
ttgactttctggagaagatcctgac

SEQ ID NO: 151300 - DNA, 25 bp, Artificial
  Probe
aagccattgactttctggagaagat

SEQ ID NO: 151301 - DNA, 25 bp, Artificial
  Probe
ccattgactttctggagaagatcct

SEQ ID NO: 151302 - DNA, 25 bp, Artificial
  Probe
gcacgctaagctattcatgtaccag

SEQ ID NO: 151303 - DNA, 25 bp, Artificial
  Probe
caagagtacatggagactgacctgg

SEQ ID NO: 151304 - DNA, 25 bp, Artificial
  Probe
ctcatcctagacaccatccctgtag

SEQ ID NO: 151305 - DNA, 25 bp, Artificial
  Probe
agccattgactttctggagaagatc

SEQ ID NO: 151306 - DNA, 25 bp, Artificial
  Probe
gaagccattgactttctggagaaga

SEQ ID NO: 151307 - DNA, 25 bp, Artificial
  Probe
attactcccacaagggttatctgtc

SEQ ID NO: 151308 - DNA, 25 bp, Artificial
  Probe
tgaagccattgactttctggagaag

SEQ ID NO: 151309 - DNA, 25 bp, Artificial
  Probe
cattactcccacaagggttatctgt

SEQ ID NO: 151310 - DNA, 25 bp, Artificial
  Probe
ccaagagtacatggagactgacctg

SEQ ID NO: 151311 - DNA, 25 bp, Artificial
  Probe
atattgtccaagagtacatggagac

SEQ ID NO: 151312 - DNA, 25 bp, Artificial
  Probe
gtgaagccattgactttctggagaa

SEQ ID NO: 151313 - DNA, 25 bp, Artificial
  Probe
tcatcctagacaccatccctgtagt

SEQ ID NO: 151314 - DNA, 25 bp, Artificial
  Probe
tattgtccaagagtacatggagact

SEQ ID NO: 151315 - DNA, 25 bp, Artificial
  Probe
gagcacgctaagctattcatgtacc

SEQ ID NO: 151316 - DNA, 25 bp, Artificial
  Probe
ggagcacgctaagctattcatgtac

SEQ ID NO: 151317 - DNA, 25 bp, Artificial
  Probe
catcctagacaccatccctgtagtg

SEQ ID NO: 151318 - DNA, 25 bp, Artificial
  Probe
gccattgactttctggagaagatcc

SEQ ID NO: 151319 - DNA, 25 bp, Artificial
  Probe
aggagcacgctaagctattcatgta

SEQ ID NO: 151320 - DNA, 25 bp, Artificial
  Probe
tatattgtccaagagtacatggaga

SEQ ID NO: 151321 - DNA, 25 bp, Artificial
  Probe
cacgctaagctattcatgtaccagc

SEQ ID NO: 151322 - DNA, 25 bp, Artificial
  Probe
ctttctggagaagatcctgacgttc

SEQ ID NO: 151323 - DNA, 25 bp, Artificial
  Probe
tgactttctggagaagatcctgacg

SEQ ID NO: 151324 - DNA, 25 bp, Artificial
  Probe
attgtccaagagtacatggagactg

SEQ ID NO: 151325 - DNA, 25 bp, Artificial
  Probe
ttatattgtccaagagtacatggag

SEQ ID NO: 151326 - DNA, 25 bp, Artificial
  Probe
cttatattgtccaagagtacatgga

SEQ ID NO: 151327 - DNA, 25 bp, Artificial
  Probe
gcattactcccacaagggttatctg

SEQ ID NO: 151328 - DNA, 25 bp, Artificial
  Probe
cagcattactcccacaagggttatc

SEQ ID NO: 151329 - DNA, 25 bp, Artificial
  Probe
agcattactcccacaagggttatct

SEQ ID NO: 151330 - DNA, 25 bp, Artificial
  Probe
agcacgctaagctattcatgtacca

SEQ ID NO: 151331 - DNA, 25 bp, Artificial
  Probe
tttctggagaagatcctgacgttca

SEQ ID NO: 151332 - DNA, 25 bp, Artificial
  Probe
actttctggagaagatcctgacgtt

SEQ ID NO: 151333 - DNA, 25 bp, Artificial
  Probe
caaccgtgaagccattgactttctg

SEQ ID NO: 151334 - DNA, 25 bp, Artificial
  Probe
ttgtccaagagtacatggagactga

SEQ ID NO: 151335 - DNA, 25 bp, Artificial
  Probe
gactttctggagaagatcctgacgt

SEQ ID NO: 151336 - DNA, 25 bp, Artificial
  Probe
ttactcccacaagggttatctgtcg

SEQ ID NO: 151337 - DNA, 25 bp, Artificial
  Probe
caagggttatctgtcggaagggttg

SEQ ID NO: 151338 - DNA, 25 bp, Artificial
  Probe
gctcatcctagacaccatccctgta

SEQ ID NO: 151339 - DNA, 25 bp, Artificial
  Probe
ttctggagaagatcctgacgttcag

SEQ ID NO: 151340 - DNA, 25 bp, Artificial
  Probe
gaggagcacgctaagctattcatgt

SEQ ID NO: 151341 - DNA, 25 bp, Artificial
  Probe
atgttcatcttgcttgtgttagtaa

SEQ ID NO: 151342 - DNA, 25 bp, Artificial
  Probe
gcaaggaatacaacatcactaggaa

SEQ ID NO: 151343 - DNA, 25 bp, Artificial
  Probe
tgttcatcttgcttgtgttagtaac

SEQ ID NO: 151344 - DNA, 25 bp, Artificial
  Probe
ttcatcttgcttgtgttagtaactg

SEQ ID NO: 151345 - DNA, 25 bp, Artificial
  Probe
gttcatcttgcttgtgttagtaact

SEQ ID NO: 151346 - DNA, 25 bp, Artificial
  Probe
tcatcttgcttgtgttagtaactgg

SEQ ID NO: 151347 - DNA, 25 bp, Artificial
  Probe
gatgttcatcttgcttgtgttagta

SEQ ID NO: 151348 - DNA, 25 bp, Artificial
  Probe
caaggaatacaacatcactaggaat

SEQ ID NO: 151349 - DNA, 25 bp, Artificial
  Probe
aggctattacagatgtgttatgaca

SEQ ID NO: 151350 - DNA, 25 bp, Artificial
  Probe
caggctattacagatgtgttatgac

SEQ ID NO: 151351 - DNA, 25 bp, Artificial
  Probe
gcaggctattacagatgtgttatga

SEQ ID NO: 151352 - DNA, 25 bp, Artificial
  Probe
cgatgttcatcttgcttgtgttagt

SEQ ID NO: 151353 - DNA, 25 bp, Artificial
  Probe
acgatgttcatcttgcttgtgttag

SEQ ID NO: 151354 - DNA, 25 bp, Artificial
  Probe
gacgatgttcatcttgcttgtgtta

SEQ ID NO: 151355 - DNA, 25 bp, Artificial
  Probe
ggcaaggaatacaacatcactagga

SEQ ID NO: 151356 - DNA, 25 bp, Artificial
  Probe
ctccataccacagtcaaagaagttt

SEQ ID NO: 151357 - DNA, 25 bp, Artificial
  Probe
gtctctggaactcaaggtctttaag

SEQ ID NO: 151358 - DNA, 25 bp, Artificial
  Probe
tccataccacagtcaaagaagtttc

SEQ ID NO: 151359 - DNA, 25 bp, Artificial
  Probe
atgtctctggaactcaaggtcttta

SEQ ID NO: 151360 - DNA, 25 bp, Artificial
  Probe
aaggaatacaacatcactaggaata

SEQ ID NO: 151361 - DNA, 25 bp, Artificial
  Probe
acatcactaggaatattgaactccg

SEQ ID NO: 151362 - DNA, 25 bp, Artificial
  Probe
tgtctctggaactcaaggtctttaa

SEQ ID NO: 151363 - DNA, 25 bp, Artificial
  Probe
atgcaggctattacagatgtgttat

SEQ ID NO: 151364 - DNA, 25 bp, Artificial
  Probe
cctattgatatccaacacatccatg

SEQ ID NO: 151365 - DNA, 25 bp, Artificial
  Probe
gcctattgatatccaacacatccat

SEQ ID NO: 151366 - DNA, 25 bp, Artificial
  Probe
aggaatacaacatcactaggaatat

SEQ ID NO: 151367 - DNA, 25 bp, Artificial
  Probe
acaacatcactaggaatattgaact

SEQ ID NO: 151368 - DNA, 25 bp, Artificial
  Probe
gatgcaggctattacagatgtgtta

SEQ ID NO: 151369 - DNA, 25 bp, Artificial
  Probe
ctctggaactcaaggtctttaagaa

SEQ ID NO: 151370 - DNA, 25 bp, Artificial
  Probe
tctggaactcaaggtctttaagaat

SEQ ID NO: 151371 - DNA, 25 bp, Artificial
  Probe
caaaggaataaccacagaacccatc

SEQ ID NO: 151372 - DNA, 25 bp, Artificial
  Probe
tgcaggctattacagatgtgttatg

SEQ ID NO: 151373 - DNA, 25 bp, Artificial
  Probe
aatgtctctggaactcaaggtcttt

SEQ ID NO: 151374 - DNA, 25 bp, Artificial
  Probe
aaatgtctctggaactcaaggtctt

SEQ ID NO: 151375 - DNA, 25 bp, Artificial
  Probe
tctctggaactcaaggtctttaaga

SEQ ID NO: 151376 - DNA, 25 bp, Artificial
  Probe
ccataccacagtcaaagaagtttct

SEQ ID NO: 151377 - DNA, 25 bp, Artificial
  Probe
gaacaaatgtctctggaactcaagg

SEQ ID NO: 151378 - DNA, 25 bp, Artificial
  Probe
tgaacaaatgtctctggaactcaag

SEQ ID NO: 151379 - DNA, 25 bp, Artificial
  Probe
ctgtgaacaaatgtctctggaactc

SEQ ID NO: 151380 - DNA, 25 bp, Artificial
  Probe
tcaaaggaataaccacagaacccat

SEQ ID NO: 151381 - DNA, 25 bp, Artificial
  Probe
aacatcactaggaatattgaactcc

SEQ ID NO: 151382 - DNA, 25 bp, Artificial
  Probe
gtgaacaaatgtctctggaactcaa

SEQ ID NO: 151383 - DNA, 25 bp, Artificial
  Probe
caacatcactaggaatattgaactc

SEQ ID NO: 151384 - DNA, 25 bp, Artificial
  Probe
tgtgttatgacatttacctacgagg

SEQ ID NO: 151385 - DNA, 25 bp, Artificial
  Probe
atggaaagatacagtggtataaggg

SEQ ID NO: 151386 - DNA, 25 bp, Artificial
  Probe
gagagatagggataggctgatattg

SEQ ID NO: 151387 - DNA, 25 bp, Artificial
  Probe
agatagggataggctgatattgctc

SEQ ID NO: 151388 - DNA, 25 bp, Artificial
  Probe
gagatagggataggctgatattgct

SEQ ID NO: 151389 - DNA, 25 bp, Artificial
  Probe
agagatagggataggctgatattgc

SEQ ID NO: 151390 - DNA, 25 bp, Artificial
  Probe
gataggctgatattgctcctcctgt

SEQ ID NO: 151391 - DNA, 25 bp, Artificial
  Probe
gatagggataggctgatattgctcc

SEQ ID NO: 151392 - DNA, 25 bp, Artificial
  Probe
atagggataggctgatattgctcct

SEQ ID NO: 151393 - DNA, 25 bp, Artificial
  Probe
tagggataggctgatattgctcctc

SEQ ID NO: 151394 - DNA, 25 bp, Artificial
  Probe
ggataggctgatattgctcctcctg

SEQ ID NO: 151395 - DNA, 25 bp, Artificial
  Probe
gggataggctgatattgctcctcct

SEQ ID NO: 151396 - DNA, 25 bp, Artificial
  Probe
agggataggctgatattgctcctcc

SEQ ID NO: 151397 - DNA, 25 bp, Artificial
  Probe
aatttggaaagttgccccatctctg

SEQ ID NO: 151398 - DNA, 25 bp, Artificial
  Probe
aaatttggaaagttgccccatctct

SEQ ID NO: 151399 - DNA, 25 bp, Artificial
  Probe
gatagctgatgatcttaccatgtcc

SEQ ID NO: 151400 - DNA, 25 bp, Artificial
  Probe
ggatagctgatgatcttaccatgtc

SEQ ID NO: 151401 - DNA, 25 bp, Artificial
  Probe
gatgatcttaccatgtccatgactg

SEQ ID NO: 151402 - DNA, 25 bp, Artificial
  Probe
ctgatgatcttaccatgtccatgac

SEQ ID NO: 151403 - DNA, 25 bp, Artificial
  Probe
tagctgatgatcttaccatgtccat

SEQ ID NO: 151404 - DNA, 25 bp, Artificial
  Probe
atagctgatgatcttaccatgtcca

SEQ ID NO: 151405 - DNA, 25 bp, Artificial
  Probe
tgatgatcttaccatgtccatgact

SEQ ID NO: 151406 - DNA, 25 bp, Artificial
  Probe
atgatcttaccatgtccatgactgt

SEQ ID NO: 151407 - DNA, 25 bp, Artificial
  Probe
ctcttgtttctccataagtcaaagc

SEQ ID NO: 151408 - DNA, 25 bp, Artificial
  Probe
cctcttgtttctccataagtcaaag

SEQ ID NO: 151409 - DNA, 25 bp, Artificial
  Probe
gctgatgatcttaccatgtccatga

SEQ ID NO: 151410 - DNA, 25 bp, Artificial
  Probe
ccctcttgtttctccataagtcaaa

SEQ ID NO: 151411 - DNA, 25 bp, Artificial
  Probe
ttgtttctccataagtcaaagccat

SEQ ID NO: 151412 - DNA, 25 bp, Artificial
  Probe
atgaaatcactgagttctgaagcaa

SEQ ID NO: 151413 - DNA, 25 bp, Artificial
  Probe
tcttgtttctccataagtcaaagcc

SEQ ID NO: 151414 - DNA, 25 bp, Artificial
  Probe
gatcatgtggtggctttatttctac

SEQ ID NO: 151415 - DNA, 25 bp, Artificial
  Probe
ggctttatttctacacttcttgtcc

SEQ ID NO: 151416 - DNA, 25 bp, Artificial
  Probe
cttgtttctccataagtcaaagcca

SEQ ID NO: 151417 - DNA, 25 bp, Artificial
  Probe
gatgaaatcactgagttctgaagca

SEQ ID NO: 151418 - DNA, 25 bp, Artificial
  Probe
gctttatttctacacttcttgtcca

SEQ ID NO: 151419 - DNA, 25 bp, Artificial
  Probe
tggctttatttctacacttcttgtc

SEQ ID NO: 151420 - DNA, 25 bp, Artificial
  Probe
ctccataagtcaaagccatgtttag

SEQ ID NO: 151421 - DNA, 25 bp, Artificial
  Probe
ggatcatgtggtggctttatttcta

SEQ ID NO: 151422 - DNA, 25 bp, Artificial
  Probe
tccataagtcaaagccatgtttaga

SEQ ID NO: 151423 - DNA, 25 bp, Artificial
  Probe
tctccataagtcaaagccatgttta

SEQ ID NO: 151424 - DNA, 25 bp, Artificial
  Probe
tgatcttaccatgtccatgactgtg

SEQ ID NO: 151425 - DNA, 25 bp, Artificial
  Probe
ccataagtcaaagccatgtttagaa

SEQ ID NO: 151426 - DNA, 25 bp, Artificial
  Probe
ataagtcaaagccatgtttagaacg

SEQ ID NO: 151427 - DNA, 25 bp, Artificial
  Probe
agctgatgatcttaccatgtccatg

SEQ ID NO: 151428 - DNA, 25 bp, Artificial
  Probe
ttctccataagtcaaagccatgttt

SEQ ID NO: 151429 - DNA, 25 bp, Artificial
  Probe
tttctccataagtcaaagccatgtt

SEQ ID NO: 151430 - DNA, 25 bp, Artificial
  Probe
ggtggctttatttctacacttcttg

SEQ ID NO: 151431 - DNA, 25 bp, Artificial
  Probe
tgaaatcactgagttctgaagcaac

SEQ ID NO: 151432 - DNA, 25 bp, Artificial
  Probe
tggtggctttatttctacacttctt

SEQ ID NO: 151433 - DNA, 25 bp, Artificial
  Probe
gtggctttatttctacacttcttgt

SEQ ID NO: 151434 - DNA, 25 bp, Artificial
  Probe
atgtggtggctttatttctacactt

SEQ ID NO: 151435 - DNA, 25 bp, Artificial
  Probe
gtggtggctttatttctacacttct

SEQ ID NO: 151436 - DNA, 25 bp, Artificial
  Probe
cataagtcaaagccatgtttagaac

SEQ ID NO: 151437 - DNA, 25 bp, Artificial
  Probe
atttctacacttcttgtccacaatg

SEQ ID NO: 151438 - DNA, 25 bp, Artificial
  Probe
gtttctccataagtcaaagccatgt

SEQ ID NO: 151439 - DNA, 25 bp, Artificial
  Probe
tgtttctccataagtcaaagccatg

SEQ ID NO: 151440 - DNA, 25 bp, Artificial
  Probe
tttatttctacacttcttgtccaca

SEQ ID NO: 151441 - DNA, 25 bp, Artificial
  Probe
tgtggtggctttatttctacacttc

SEQ ID NO: 151442 - DNA, 25 bp, Artificial
  Probe
atcatgtggtggctttatttctaca

SEQ ID NO: 151443 - DNA, 25 bp, Artificial
  Probe
taagtcaaagccatgtttagaacgg

SEQ ID NO: 151444 - DNA, 25 bp, Artificial
  Probe
ccagggatatcaacaacatagacta

SEQ ID NO: 151445 - DNA, 25 bp, Artificial
  Probe
gccagggatatcaacaacatagact

SEQ ID NO: 151446 - DNA, 25 bp, Artificial
  Probe
ctcagtatccacacataaacgggag

SEQ ID NO: 151447 - DNA, 25 bp, Artificial
  Probe
cagggatatcaacaacatagactat

SEQ ID NO: 151448 - DNA, 25 bp, Artificial
  Probe
cagtatccacacataaacgggagtg

SEQ ID NO: 151449 - DNA, 25 bp, Artificial
  Probe
cgtgatgaagatagcagactttggc

SEQ ID NO: 151450 - DNA, 25 bp, Artificial
  Probe
tcagtatccacacataaacgggagt

SEQ ID NO: 151451 - DNA, 25 bp, Artificial
  Probe
acataaacgggagtgttaaaacaaa

SEQ ID NO: 151452 - DNA, 25 bp, Artificial
  Probe
agggatatcaacaacatagactatt

SEQ ID NO: 151453 - DNA, 25 bp, Artificial
  Probe
cacataaacgggagtgttaaaacaa

SEQ ID NO: 151454 - DNA, 25 bp, Artificial
  Probe
cctcagtatccacacataaacggga

SEQ ID NO: 151455 - DNA, 25 bp, Artificial
  Probe
ggccagggatatcaacaacatagac

SEQ ID NO: 151456 - DNA, 25 bp, Artificial
  Probe
caaagagggacacaggatggacaag

SEQ ID NO: 151457 - DNA, 25 bp, Artificial
  Probe
tatccacacataaacgggagtgtta

SEQ ID NO: 151458 - DNA, 25 bp, Artificial
  Probe
gtgatgaagatagcagactttggcc

SEQ ID NO: 151459 - DNA, 25 bp, Artificial
  Probe
tttaagctgctcaaagagggacaca

SEQ ID NO: 151460 - DNA, 25 bp, Artificial
  Probe
gggatatcaacaacatagactatta

SEQ ID NO: 151461 - DNA, 25 bp, Artificial
  Probe
tgatgaagatagcagactttggcct

SEQ ID NO: 151462 - DNA, 25 bp, Artificial
  Probe
gatgaagatagcagactttggcctg

SEQ ID NO: 151463 - DNA, 25 bp, Artificial
  Probe
atccacacataaacgggagtgttaa

SEQ ID NO: 151464 - DNA, 25 bp, Artificial
  Probe
tccacacataaacgggagtgttaaa

SEQ ID NO: 151465 - DNA, 25 bp, Artificial
  Probe
ttttaagctgctcaaagagggacac

SEQ ID NO: 151466 - DNA, 25 bp, Artificial
  Probe
gtatccacacataaacgggagtgtt

SEQ ID NO: 151467 - DNA, 25 bp, Artificial
  Probe
ttaagctgctcaaagagggacacag

SEQ ID NO: 151468 - DNA, 25 bp, Artificial
  Probe
agtatccacacataaacgggagtgt

SEQ ID NO: 151469 - DNA, 25 bp, Artificial
  Probe
cacacataaacgggagtgttaaaac

SEQ ID NO: 151470 - DNA, 25 bp, Artificial
  Probe
atgaagatagcagactttggcctgg

SEQ ID NO: 151471 - DNA, 25 bp, Artificial
  Probe
ccacacataaacgggagtgttaaaa

SEQ ID NO: 151472 - DNA, 25 bp, Artificial
  Probe
cctcaaatcctaaaccaagaatcac

SEQ ID NO: 151473 - DNA, 25 bp, Artificial
  Probe
caaatcctaaaccaagaatcactgt

SEQ ID NO: 151474 - DNA, 25 bp, Artificial
  Probe
tcaaatcctaaaccaagaatcactg

SEQ ID NO: 151475 - DNA, 25 bp, Artificial
  Probe
ctcaaatcctaaaccaagaatcact

SEQ ID NO: 151476 - DNA, 25 bp, Artificial
  Probe
aatcctaaaccaagaatcactgtgt

SEQ ID NO: 151477 - DNA, 25 bp, Artificial
  Probe
aaatcctaaaccaagaatcactgtg

SEQ ID NO: 151478 - DNA, 25 bp, Artificial
  Probe
tttatacaactgactgatttctggg

SEQ ID NO: 151479 - DNA, 25 bp, Artificial
  Probe
gcctcaaatcctaaaccaagaatca

SEQ ID NO: 151480 - DNA, 25 bp, Artificial
  Probe
atcctaaaccaagaatcactgtgtt

SEQ ID NO: 151481 - DNA, 25 bp, Artificial
  Probe
ggagtaaagagtttgctaccaacag

SEQ ID NO: 151482 - DNA, 25 bp, Artificial
  Probe
gtttatacaactgactgatttctgg

SEQ ID NO: 151483 - DNA, 25 bp, Artificial
  Probe
aaccaagaatcactgtgtttacatg

SEQ ID NO: 151484 - DNA, 25 bp, Artificial
  Probe
ccaagaatcactgtgtttacatgaa

SEQ ID NO: 151485 - DNA, 25 bp, Artificial
  Probe
tcactgtgtttacatgaaatgacaa

SEQ ID NO: 151486 - DNA, 25 bp, Artificial
  Probe
accaagaatcactgtgtttacatga

SEQ ID NO: 151487 - DNA, 25 bp, Artificial
  Probe
atcactgtgtttacatgaaatgaca

SEQ ID NO: 151488 - DNA, 25 bp, Artificial
  Probe
cactgtgtttacatgaaatgacaat

SEQ ID NO: 151489 - DNA, 25 bp, Artificial
  Probe
gggagtaaagagtttgctaccaaca

SEQ ID NO: 151490 - DNA, 25 bp, Artificial
  Probe
aatcactgtgtttacatgaaatgac

SEQ ID NO: 151491 - DNA, 25 bp, Artificial
  Probe
caagaatcactgtgtttacatgaaa

SEQ ID NO: 151492 - DNA, 25 bp, Artificial
  Probe
gaatcactgtgtttacatgaaatga

SEQ ID NO: 151493 - DNA, 25 bp, Artificial
  Probe
agaatcactgtgtttacatgaaatg

SEQ ID NO: 151494 - DNA, 25 bp, Artificial
  Probe
tcctaaaccaagaatcactgtgttt

SEQ ID NO: 151495 - DNA, 25 bp, Artificial
  Probe
aaaccaagaatcactgtgtttacat

SEQ ID NO: 151496 - DNA, 25 bp, Artificial
  Probe
actgtgtttacatgaaatgacaatt

SEQ ID NO: 151497 - DNA, 25 bp, Artificial
  Probe
tgtttatacaactgactgatttctg

SEQ ID NO: 151498 - DNA, 25 bp, Artificial
  Probe
tacatcaaagcacgttgtttataca

SEQ ID NO: 151499 - DNA, 25 bp, Artificial
  Probe
ttatacaactgactgatttctgggg

SEQ ID NO: 151500 - DNA, 25 bp, Artificial
  Probe
gtttacatcaaagcacgttgtttat

SEQ ID NO: 151501 - DNA, 25 bp, Artificial
  Probe
ggtttacatcaaagcacgttgttta

SEQ ID NO: 151502 - DNA, 25 bp, Artificial
  Probe
acatgaaatgacaatttgatactgt

SEQ ID NO: 151503 - DNA, 25 bp, Artificial
  Probe
ttacatcaaagcacgttgtttatac

SEQ ID NO: 151504 - DNA, 25 bp, Artificial
  Probe
aagaatcactgtgtttacatgaaat

SEQ ID NO: 151505 - DNA, 25 bp, Artificial
  Probe
ctttctacgggaacatcatcctgag

SEQ ID NO: 151506 - DNA, 25 bp, Artificial
  Probe
tgtgtttacatgaaatgacaatttg

SEQ ID NO: 151507 - DNA, 25 bp, Artificial
  Probe
taaagagtttgctaccaacagccta

SEQ ID NO: 151508 - DNA, 25 bp, Artificial
  Probe
cgggagtaaagagtttgctaccaac

SEQ ID NO: 151509 - DNA, 25 bp, Artificial
  Probe
gagtaaagagtttgctaccaacagc

SEQ ID NO: 151510 - DNA, 25 bp, Artificial
  Probe
gtgtttacatgaaatgacaatttga

SEQ ID NO: 151511 - DNA, 25 bp, Artificial
  Probe
ctgtgtttacatgaaatgacaattt

SEQ ID NO: 151512 - DNA, 25 bp, Artificial
  Probe
cttctaaccgggagtaaagagtttg

SEQ ID NO: 151513 - DNA, 25 bp, Artificial
  Probe
tttacatcaaagcacgttgtttata

SEQ ID NO: 151514 - DNA, 25 bp, Artificial
  Probe
acttctaaccgggagtaaagagttt

SEQ ID NO: 151515 - DNA, 25 bp, Artificial
  Probe
ggcctcaaatcctaaaccaagaatc

SEQ ID NO: 151516 - DNA, 25 bp, Artificial
  Probe
atcatcctgaggaagccacttctaa

SEQ ID NO: 151517 - DNA, 25 bp, Artificial
  Probe
tattcagcaatattccgatcagcac

SEQ ID NO: 151518 - DNA, 25 bp, Artificial
  Probe
catcagccgtgtctattccatctac

SEQ ID NO: 151519 - DNA, 25 bp, Artificial
  Probe
agattgactttgaagatgtgattgc

SEQ ID NO: 151520 - DNA, 25 bp, Artificial
  Probe
gattgactttgaagatgtgattgcg

SEQ ID NO: 151521 - DNA, 25 bp, Artificial
  Probe
atatagtgacatttcagggatggag

SEQ ID NO: 151522 - DNA, 25 bp, Artificial
  Probe
gatatagtgacatttcagggatgga

SEQ ID NO: 151523 - DNA, 25 bp, Artificial
  Probe
agatatagtgacatttcagggatgg

SEQ ID NO: 151524 - DNA, 25 bp, Artificial
  Probe
gatattcagcaatattccgatcagc

SEQ ID NO: 151525 - DNA, 25 bp, Artificial
  Probe
atattcagcaatattccgatcagca

SEQ ID NO: 151526 - DNA, 25 bp, Artificial
  Probe
tatagtgacatttcagggatggagg

SEQ ID NO: 151527 - DNA, 25 bp, Artificial
  Probe
aagagatatagtgacatttcaggga

SEQ ID NO: 151528 - DNA, 25 bp, Artificial
  Probe
gagatatagtgacatttcagggatg

SEQ ID NO: 151529 - DNA, 25 bp, Artificial
  Probe
agagatatagtgacatttcagggat

SEQ ID NO: 151530 - DNA, 25 bp, Artificial
  Probe
aagattgactttgaagatgtgattg

SEQ ID NO: 151531 - DNA, 25 bp, Artificial
  Probe
agatattcagcaatattccgatcag

SEQ ID NO: 151532 - DNA, 25 bp, Artificial
  Probe
caagattgactttgaagatgtgatt

SEQ ID NO: 151533 - DNA, 25 bp, Artificial
  Probe
attgactttgaagatgtgattgcgg

SEQ ID NO: 151534 - DNA, 25 bp, Artificial
  Probe
aagatattcagcaatattccgatca

SEQ ID NO: 151535 - DNA, 25 bp, Artificial
  Probe
caacatctacaagcccaacaacaag

SEQ ID NO: 151536 - DNA, 25 bp, Artificial
  Probe
acgaggtgaatgagaagcaagtgta

SEQ ID NO: 151537 - DNA, 25 bp, Artificial
  Probe
gaggtgaatgagaagcaagtgtacg

SEQ ID NO: 151538 - DNA, 25 bp, Artificial
  Probe
cgaggtgaatgagaagcaagtgtac

SEQ ID NO: 151539 - DNA, 25 bp, Artificial
  Probe
atcaagagcttcctgattgagattc

SEQ ID NO: 151540 - DNA, 25 bp, Artificial
  Probe
gactttgaagatgtgattgcggaac

SEQ ID NO: 151541 - DNA, 25 bp, Artificial
  Probe
catcaagagcttcctgattgagatt

SEQ ID NO: 151542 - DNA, 25 bp, Artificial
  Probe
gaagatgtgattgcggaaccagaag

SEQ ID NO: 151543 - DNA, 25 bp, Artificial
  Probe
ggtgaatgagaagcaagtgtacgac

SEQ ID NO: 151544 - DNA, 25 bp, Artificial
  Probe
gcatcagccgtgtctattccatcta

SEQ ID NO: 151545 - DNA, 25 bp, Artificial
  Probe
aggtgaatgagaagcaagtgtacga

SEQ ID NO: 151546 - DNA, 25 bp, Artificial
  Probe
tgactttgaagatgtgattgcggaa

SEQ ID NO: 151547 - DNA, 25 bp, Artificial
  Probe
ttgactttgaagatgtgattgcgga

SEQ ID NO: 151548 - DNA, 25 bp, Artificial
  Probe
tcaagagcttcctgattgagattca

SEQ ID NO: 151549 - DNA, 25 bp, Artificial
  Probe
attcagcaatattccgatcagcacg

SEQ ID NO: 151550 - DNA, 25 bp, Artificial
  Probe
gtgaatgagaagcaagtgtacgacg

SEQ ID NO: 151551 - DNA, 25 bp, Artificial
  Probe
ttaccgcttgctgtctaccatcttc

SEQ ID NO: 151552 - DNA, 25 bp, Artificial
  Probe
aacatctacaagcccaacaacaagg

SEQ ID NO: 151553 - DNA, 25 bp, Artificial
  Probe
tgaagatgtgattgcggaaccagaa

SEQ ID NO: 151554 - DNA, 25 bp, Artificial
  Probe
ttgaagatgtgattgcggaaccaga

SEQ ID NO: 151555 - DNA, 25 bp, Artificial
  Probe
tcaagattgactttgaagatgtgat

SEQ ID NO: 151556 - DNA, 25 bp, Artificial
  Probe
agacgaggtgaatgagaagcaagtg

SEQ ID NO: 151557 - DNA, 25 bp, Artificial
  Probe
cagacgaggtgaatgagaagcaagt

SEQ ID NO: 151558 - DNA, 25 bp, Artificial
  Probe
caagagcttcctgattgagattcag

SEQ ID NO: 151559 - DNA, 25 bp, Artificial
  Probe
aagagcttcctgattgagattcagt

SEQ ID NO: 151560 - DNA, 25 bp, Artificial
  Probe
tttgaagatgtgattgcggaaccag

SEQ ID NO: 151561 - DNA, 25 bp, Artificial
  Probe
ctttgaagatgtgattgcggaacca

SEQ ID NO: 151562 - DNA, 25 bp, Artificial
  Probe
catcatcatggtcatcttcttcctg

SEQ ID NO: 151563 - DNA, 25 bp, Artificial
  Probe
tcatcatcatggtcatcttcttcct

SEQ ID NO: 151564 - DNA, 25 bp, Artificial
  Probe
gtcatcatcatggtcatcttcttcc

SEQ ID NO: 151565 - DNA, 25 bp, Artificial
  Probe
ggtcatcatcatggtcatcttcttc

SEQ ID NO: 151566 - DNA, 25 bp, Artificial
  Probe
atggtcatcatcatggtcatcttct

SEQ ID NO: 151567 - DNA, 25 bp, Artificial
  Probe
atcatcatggtcatcttcttcctga

SEQ ID NO: 151568 - DNA, 25 bp, Artificial
  Probe
tggtcatcatcatggtcatcttctt

SEQ ID NO: 151569 - DNA, 25 bp, Artificial
  Probe
taagcactcagataaggtatttccc

SEQ ID NO: 151570 - DNA, 25 bp, Artificial
  Probe
ccatctacaacccaatcatctacat

SEQ ID NO: 151571 - DNA, 25 bp, Artificial
  Probe
ctccatctacaacccaatcatctac

SEQ ID NO: 151572 - DNA, 25 bp, Artificial
  Probe
tctacaacccaatcatctacatcat

SEQ ID NO: 151573 - DNA, 25 bp, Artificial
  Probe
atctacaacccaatcatctacatca

SEQ ID NO: 151574 - DNA, 25 bp, Artificial
  Probe
tcatggtcatcttcttcctgatctg

SEQ ID NO: 151575 - DNA, 25 bp, Artificial
  Probe
catctacaacccaatcatctacatc

SEQ ID NO: 151576 - DNA, 25 bp, Artificial
  Probe
tccatctacaacccaatcatctaca

SEQ ID NO: 151577 - DNA, 25 bp, Artificial
  Probe
ttaggactaagaaagcattgagacc

SEQ ID NO: 151578 - DNA, 25 bp, Artificial
  Probe
taggactaagaaagcattgagacca

SEQ ID NO: 151579 - DNA, 25 bp, Artificial
  Probe
gagtgtgtgagtgtgtgtgtatgtg

SEQ ID NO: 151580 - DNA, 25 bp, Artificial
  Probe
gtgagtgtgtgagtgtgtgtgtatg

SEQ ID NO: 151581 - DNA, 25 bp, Artificial
  Probe
ctaagcactcagataaggtatttcc

SEQ ID NO: 151582 - DNA, 25 bp, Artificial
  Probe
cctccatctacaacccaatcatcta

SEQ ID NO: 151583 - DNA, 25 bp, Artificial
  Probe
ctggatcacagagatgaatgacagt

SEQ ID NO: 151584 - DNA, 25 bp, Artificial
  Probe
attaggactaagaaagcattgagac

SEQ ID NO: 151585 - DNA, 25 bp, Artificial
  Probe
cattaggactaagaaagcattgaga

SEQ ID NO: 151586 - DNA, 25 bp, Artificial
  Probe
tgagtgtgtgagtgtgtgtgtatgt

SEQ ID NO: 151587 - DNA, 25 bp, Artificial
  Probe
tgtgagtgtgtgagtgtgtgtgtat

SEQ ID NO: 151588 - DNA, 25 bp, Artificial
  Probe
cagagatgaatgacagtgacagcag

SEQ ID NO: 151589 - DNA, 25 bp, Artificial
  Probe
tggatcacagagatgaatgacagtg

SEQ ID NO: 151590 - DNA, 25 bp, Artificial
  Probe
tcattaggactaagaaagcattgag

SEQ ID NO: 151591 - DNA, 25 bp, Artificial
  Probe
ctacaacccaatcatctacatcatg

SEQ ID NO: 151592 - DNA, 25 bp, Artificial
  Probe
ctaagaaagcattgagaccaggagt

SEQ ID NO: 151593 - DNA, 25 bp, Artificial
  Probe
actaagaaagcattgagaccaggag

SEQ ID NO: 151594 - DNA, 25 bp, Artificial
  Probe
gactaagaaagcattgagaccagga

SEQ ID NO: 151595 - DNA, 25 bp, Artificial
  Probe
aggactaagaaagcattgagaccag

SEQ ID NO: 151596 - DNA, 25 bp, Artificial
  Probe
gagatgaatgacagtgacagcagtg

SEQ ID NO: 151597 - DNA, 25 bp, Artificial
  Probe
gcctaagcactcagataaggtattt

SEQ ID NO: 151598 - DNA, 25 bp, Artificial
  Probe
gtgagtgtgtgtgtatgtgtgtgtg

SEQ ID NO: 151599 - DNA, 25 bp, Artificial
  Probe
gtgtgagtgtgtgtgtatgtgtgtg

SEQ ID NO: 151600 - DNA, 25 bp, Artificial
  Probe
gtgtgtgagtgtgtgtgtatgtgtg

SEQ ID NO: 151601 - DNA, 25 bp, Artificial
  Probe
gtcattaggactaagaaagcattga

SEQ ID NO: 151602 - DNA, 25 bp, Artificial
  Probe
atcatggtcatcttcttcctgatct

SEQ ID NO: 151603 - DNA, 25 bp, Artificial
  Probe
catcatggtcatcttcttcctgatc

SEQ ID NO: 151604 - DNA, 25 bp, Artificial
  Probe
agagatgaatgacagtgacagcagt

SEQ ID NO: 151605 - DNA, 25 bp, Artificial
  Probe
agtgtgtgagtgtgtgtgtatgtgt

SEQ ID NO: 151606 - DNA, 25 bp, Artificial
  Probe
tcatcatggtcatcttcttcctgat

SEQ ID NO: 151607 - DNA, 25 bp, Artificial
  Probe
ttcttatggtggagttggttcttac

SEQ ID NO: 151608 - DNA, 25 bp, Artificial
  Probe
cttatggtggagttggttcttacat

SEQ ID NO: 151609 - DNA, 25 bp, Artificial
  Probe
cacctcaacattggatacatcactt

SEQ ID NO: 151610 - DNA, 25 bp, Artificial
  Probe
tcttatggtggagttggttcttaca

SEQ ID NO: 151611 - DNA, 25 bp, Artificial
  Probe
acctcaacattggatacatcacttg

SEQ ID NO: 151612 - DNA, 25 bp, Artificial
  Probe
atactcaggataacagagaatggtg

SEQ ID NO: 151613 - DNA, 25 bp, Artificial
  Probe
catactcaggataacagagaatggt

SEQ ID NO: 151614 - DNA, 25 bp, Artificial
  Probe
acatactcaggataacagagaatgg

SEQ ID NO: 151615 - DNA, 25 bp, Artificial
  Probe
ttatggtggagttggttcttacatg

SEQ ID NO: 151616 - DNA, 25 bp, Artificial
  Probe
tactcaggataacagagaatggtgg

SEQ ID NO: 151617 - DNA, 25 bp, Artificial
  Probe
gacatactcaggataacagagaatg

SEQ ID NO: 151618 - DNA, 25 bp, Artificial
  Probe
ctcaacattggatacatcacttgcc

SEQ ID NO: 151619 - DNA, 25 bp, Artificial
  Probe
cctcaacattggatacatcacttgc

SEQ ID NO: 151620 - DNA, 25 bp, Artificial
  Probe
tttcttatggtggagttggttctta

SEQ ID NO: 151621 - DNA, 25 bp, Artificial
  Probe
atattattatgtgccctgtgttccc

SEQ ID NO: 151622 - DNA, 25 bp, Artificial
  Probe
ctcaggataacagagaatggtggtg

SEQ ID NO: 151623 - DNA, 25 bp, Artificial
  Probe
gtccaggattctgtaatgcttcatg

SEQ ID NO: 151624 - DNA, 25 bp, Artificial
  Probe
tattattatgtgccctgtgttccct

SEQ ID NO: 151625 - DNA, 25 bp, Artificial
  Probe
tttaacctaatggcacaaagtctta

SEQ ID NO: 151626 - DNA, 25 bp, Artificial
  Probe
ggtccaggattctgtaatgcttcat

SEQ ID NO: 151627 - DNA, 25 bp, Artificial
  Probe
actcaggataacagagaatggtggt

SEQ ID NO: 151628 - DNA, 25 bp, Artificial
  Probe
tatggtggagttggttcttacatgc

SEQ ID NO: 151629 - DNA, 25 bp, Artificial
  Probe
acctaatggcacaaagtcttagaat

SEQ ID NO: 151630 - DNA, 25 bp, Artificial
  Probe
aacctaatggcacaaagtcttagaa

SEQ ID NO: 151631 - DNA, 25 bp, Artificial
  Probe
taacctaatggcacaaagtcttaga

SEQ ID NO: 151632 - DNA, 25 bp, Artificial
  Probe
ttaacctaatggcacaaagtcttag

SEQ ID NO: 151633 - DNA, 25 bp, Artificial
  Probe
caggataacagagaatggtggtgtg

SEQ ID NO: 151634 - DNA, 25 bp, Artificial
  Probe
tcaggataacagagaatggtggtgt

SEQ ID NO: 151635 - DNA, 25 bp, Artificial
  Probe
ccacctcaacattggatacatcact

SEQ ID NO: 151636 - DNA, 25 bp, Artificial
  Probe
gaccacctcaacattggatacatca

SEQ ID NO: 151637 - DNA, 25 bp, Artificial
  Probe
aatattattatgtgccctgtgttcc

SEQ ID NO: 151638 - DNA, 25 bp, Artificial
  Probe
cctaatggcacaaagtcttagaata

SEQ ID NO: 151639 - DNA, 25 bp, Artificial
  Probe
tcaacattggatacatcacttgcca

SEQ ID NO: 151640 - DNA, 25 bp, Artificial
  Probe
accacctcaacattggatacatcac

SEQ ID NO: 151641 - DNA, 25 bp, Artificial
  Probe
agaatattattatgtgccctgtgtt

SEQ ID NO: 151642 - DNA, 25 bp, Artificial
  Probe
gtggtccaggattctgtaatgcttc

SEQ ID NO: 151643 - DNA, 25 bp, Artificial
  Probe
actgtacttctctgtgcaatttgta

SEQ ID NO: 151644 - DNA, 25 bp, Artificial
  Probe
ctgtacttctctgtgcaatttgtaa

SEQ ID NO: 151645 - DNA, 25 bp, Artificial
  Probe
attattatgtgccctgtgttccctg

SEQ ID NO: 151646 - DNA, 25 bp, Artificial
  Probe
gagtaggagaggctgtgttgaagag

SEQ ID NO: 151647 - DNA, 25 bp, Artificial
  Probe
tgtacttctctgtgcaatttgtaaa

SEQ ID NO: 151648 - DNA, 25 bp, Artificial
  Probe
tccaggattctgtaatgcttcatgc

SEQ ID NO: 151649 - DNA, 25 bp, Artificial
  Probe
gtacttctctgtgcaatttgtaaac

SEQ ID NO: 151650 - DNA, 25 bp, Artificial
  Probe
gaatattattatgtgccctgtgttc

SEQ ID NO: 151651 - DNA, 25 bp, Artificial
  Probe
agtggtccaggattctgtaatgctt

SEQ ID NO: 151652 - DNA, 25 bp, Artificial
  Probe
gaatgttcttagaccacgatccttc

SEQ ID NO: 151653 - DNA, 25 bp, Artificial
  Probe
tgaatgttcttagaccacgatcctt

SEQ ID NO: 151654 - DNA, 25 bp, Artificial
  Probe
ctgaatgttcttagaccacgatcct

SEQ ID NO: 151655 - DNA, 25 bp, Artificial
  Probe
aatgttcttagaccacgatccttcc

SEQ ID NO: 151656 - DNA, 25 bp, Artificial
  Probe
ctgctgaatgttcttagaccacgat

SEQ ID NO: 151657 - DNA, 25 bp, Artificial
  Probe
taaagaatctccaggttaagaaggc

SEQ ID NO: 151658 - DNA, 25 bp, Artificial
  Probe
tgctgaatgttcttagaccacgatc

SEQ ID NO: 151659 - DNA, 25 bp, Artificial
  Probe
gttcctgccttccttaaagaatctc

SEQ ID NO: 151660 - DNA, 25 bp, Artificial
  Probe
ctgttcctgccttccttaaagaatc

SEQ ID NO: 151661 - DNA, 25 bp, Artificial
  Probe
atgttcttagaccacgatccttcct

SEQ ID NO: 151662 - DNA, 25 bp, Artificial
  Probe
ttcttagaccacgatccttcctgaa

SEQ ID NO: 151663 - DNA, 25 bp, Artificial
  Probe
tgttcctgccttccttaaagaatct

SEQ ID NO: 151664 - DNA, 25 bp, Artificial
  Probe
tctgttcctgccttccttaaagaat

SEQ ID NO: 151665 - DNA, 25 bp, Artificial
  Probe
ttaaagaatctccaggttaagaagg

SEQ ID NO: 151666 - DNA, 25 bp, Artificial
  Probe
aagaatctccaggttaagaaggcga

SEQ ID NO: 151667 - DNA, 25 bp, Artificial
  Probe
ccttccttaaagaatctccaggtta

SEQ ID NO: 151668 - DNA, 25 bp, Artificial
  Probe
ttcctgccttccttaaagaatctcc

SEQ ID NO: 151669 - DNA, 25 bp, Artificial
  Probe
gctgaatgttcttagaccacgatcc

SEQ ID NO: 151670 - DNA, 25 bp, Artificial
  Probe
tcttagaccacgatccttcctgaag

SEQ ID NO: 151671 - DNA, 25 bp, Artificial
  Probe
atgaaggaaacactgtggagaagag

SEQ ID NO: 151672 - DNA, 25 bp, Artificial
  Probe
gttcttagaccacgatccttcctga

SEQ ID NO: 151673 - DNA, 25 bp, Artificial
  Probe
ctctgttcctgccttccttaaagaa

SEQ ID NO: 151674 - DNA, 25 bp, Artificial
  Probe
ctccaaacagaccaacaacaagtac

SEQ ID NO: 151675 - DNA, 25 bp, Artificial
  Probe
cttccttaaagaatctccaggttaa

SEQ ID NO: 151676 - DNA, 25 bp, Artificial
  Probe
tgttcttagaccacgatccttcctg

SEQ ID NO: 151677 - DNA, 25 bp, Artificial
  Probe
cctccaaacagaccaacaacaagta

SEQ ID NO: 151678 - DNA, 25 bp, Artificial
  Probe
cagttatggtacgtctttggtagtg

SEQ ID NO: 151679 - DNA, 25 bp, Artificial
  Probe
aaagaatctccaggttaagaaggcg

SEQ ID NO: 151680 - DNA, 25 bp, Artificial
  Probe
gtcactctgttcctgccttccttaa

SEQ ID NO: 151681 - DNA, 25 bp, Artificial
  Probe
agaatctccaggttaagaaggcgac

SEQ ID NO: 151682 - DNA, 25 bp, Artificial
  Probe
catgaaggaaacactgtggagaaga

SEQ ID NO: 151683 - DNA, 25 bp, Artificial
  Probe
tcctgccttccttaaagaatctcca

SEQ ID NO: 151684 - DNA, 25 bp, Artificial
  Probe
gccttccttaaagaatctccaggtt

SEQ ID NO: 151685 - DNA, 25 bp, Artificial
  Probe
cactctgttcctgccttccttaaag

SEQ ID NO: 151686 - DNA, 25 bp, Artificial
  Probe
ttttgttcttgttttcttttgccat

SEQ ID NO: 151687 - DNA, 25 bp, Artificial
  Probe
agttatggtacgtctttggtagtgg

SEQ ID NO: 151688 - DNA, 25 bp, Artificial
  Probe
gaatctccaggttaagaaggcgaca

SEQ ID NO: 151689 - DNA, 25 bp, Artificial
  Probe
cctgccttccttaaagaatctccag

SEQ ID NO: 151690 - DNA, 25 bp, Artificial
  Probe
ctccaggttaagaaggcgacactag

SEQ ID NO: 151691 - DNA, 25 bp, Artificial
  Probe
actctgttcctgccttccttaaaga

SEQ ID NO: 151692 - DNA, 25 bp, Artificial
  Probe
tcactctgttcctgccttccttaaa

SEQ ID NO: 151693 - DNA, 25 bp, Artificial
  Probe
cctgctgaatgttcttagaccacga

SEQ ID NO: 151694 - DNA, 25 bp, Artificial
  Probe
ctgccttccttaaagaatctccagg

SEQ ID NO: 151695 - DNA, 25 bp, Artificial
  Probe
aatctccaggttaagaaggcgacac

SEQ ID NO: 151696 - DNA, 25 bp, Artificial
  Probe
tagtgtgtctggtgagcgaattcta

SEQ ID NO: 151697 - DNA, 25 bp, Artificial
  Probe
ctcagcactaaagcacaaatctact

SEQ ID NO: 151698 - DNA, 25 bp, Artificial
  Probe
cactaaagcacaaatctactggaga

SEQ ID NO: 151699 - DNA, 25 bp, Artificial
  Probe
gcactaaagcacaaatctactggag

SEQ ID NO: 151700 - DNA, 25 bp, Artificial
  Probe
agcactaaagcacaaatctactgga

SEQ ID NO: 151701 - DNA, 25 bp, Artificial
  Probe
ttgagtgtgaggcagtatagagtcg

SEQ ID NO: 151702 - DNA, 25 bp, Artificial
  Probe
tcagcactaaagcacaaatctactg

SEQ ID NO: 151703 - DNA, 25 bp, Artificial
  Probe
tacagtcttggctccatcactcaat

SEQ ID NO: 151704 - DNA, 25 bp, Artificial
  Probe
cagcactaaagcacaaatctactgg

SEQ ID NO: 151705 - DNA, 25 bp, Artificial
  Probe
aagcagttggaactcctacagtctt

SEQ ID NO: 151706 - DNA, 25 bp, Artificial
  Probe
taaagcacaaatctactggagatgt

SEQ ID NO: 151707 - DNA, 25 bp, Artificial
  Probe
actaaagcacaaatctactggagat

SEQ ID NO: 151708 - DNA, 25 bp, Artificial
  Probe
ctaaagcacaaatctactggagatg

SEQ ID NO: 151709 - DNA, 25 bp, Artificial
  Probe
cttctgtaagtggaggaaagcagtt

SEQ ID NO: 151710 - DNA, 25 bp, Artificial
  Probe
ctacagtcttggctccatcactcaa

SEQ ID NO: 151711 - DNA, 25 bp, Artificial
  Probe
gacctttgagtgtgaggcagtatag

SEQ ID NO: 151712 - DNA, 25 bp, Artificial
  Probe
agtcagacttctgtaagtggaggaa

SEQ ID NO: 151713 - DNA, 25 bp, Artificial
  Probe
ttctgtaagtggaggaaagcagttg

SEQ ID NO: 151714 - DNA, 25 bp, Artificial
  Probe
agcagttggaactcctacagtcttg

SEQ ID NO: 151715 - DNA, 25 bp, Artificial
  Probe
acctttgagtgtgaggcagtataga

SEQ ID NO: 151716 - DNA, 25 bp, Artificial
  Probe
agacctttgagtgtgaggcagtata

SEQ ID NO: 151717 - DNA, 25 bp, Artificial
  Probe
tagacctttgagtgtgaggcagtat

SEQ ID NO: 151718 - DNA, 25 bp, Artificial
  Probe
caagtggaagacaggaagtcagact

SEQ ID NO: 151719 - DNA, 25 bp, Artificial
  Probe
gaactcctacagtcttggctccatc

SEQ ID NO: 151720 - DNA, 25 bp, Artificial
  Probe
gtaagtggaggaaagcagttggaac

SEQ ID NO: 151721 - DNA, 25 bp, Artificial
  Probe
gtgtgccaagttccaaggtcttaga

SEQ ID NO: 151722 - DNA, 25 bp, Artificial
  Probe
gaaagtggcccagatcataagattt

SEQ ID NO: 151723 - DNA, 25 bp, Artificial
  Probe
gaaagcagttggaactcctacagtc

SEQ ID NO: 151724 - DNA, 25 bp, Artificial
  Probe
ttagacctttgagtgtgaggcagta

SEQ ID NO: 151725 - DNA, 25 bp, Artificial
  Probe
cagtcttggctccatcactcaatca

SEQ ID NO: 151726 - DNA, 25 bp, Artificial
  Probe
acagtcttggctccatcactcaatc

SEQ ID NO: 151727 - DNA, 25 bp, Artificial
  Probe
gctcagcactaaagcacaaatctac

SEQ ID NO: 151728 - DNA, 25 bp, Artificial
  Probe
tgtaagtggaggaaagcagttggaa

SEQ ID NO: 151729 - DNA, 25 bp, Artificial
  Probe
tgtgtgccaagttccaaggtcttag

SEQ ID NO: 151730 - DNA, 25 bp, Artificial
  Probe
gtcttccatgaggtcaaggtgtttc

SEQ ID NO: 151731 - DNA, 25 bp, Artificial
  Probe
aagtcagacttctgtaagtggagga

SEQ ID NO: 151732 - DNA, 25 bp, Artificial
  Probe
aaagcagttggaactcctacagtct

SEQ ID NO: 151733 - DNA, 25 bp, Artificial
  Probe
tcagacttctgtaagtggaggaaag

SEQ ID NO: 151734 - DNA, 25 bp, Artificial
  Probe
gttggaactcctacagtcttggctc

SEQ ID NO: 151735 - DNA, 25 bp, Artificial
  Probe
gtcagacttctgtaagtggaggaaa

SEQ ID NO: 151736 - DNA, 25 bp, Artificial
  Probe
tgaaagtggcccagatcataagatt

SEQ ID NO: 151737 - DNA, 25 bp, Artificial
  Probe
taagtggaggaaagcagttggaact

SEQ ID NO: 151738 - DNA, 25 bp, Artificial
  Probe
atctactggagatgtgtgtgccaag

SEQ ID NO: 151739 - DNA, 25 bp, Artificial
  Probe
ccaagtggaagacaggaagtcagac

SEQ ID NO: 151740 - DNA, 25 bp, Artificial
  Probe
aactcctacagtcttggctccatca

SEQ ID NO: 151741 - DNA, 25 bp, Artificial
  Probe
tcttagacctttgagtgtgaggcag

SEQ ID NO: 151742 - DNA, 25 bp, Artificial
  Probe
cgcaactaatccaataaagcacctt

SEQ ID NO: 151743 - DNA, 25 bp, Artificial
  Probe
cacgcaactaatccaataaagcacc

SEQ ID NO: 151744 - DNA, 25 bp, Artificial
  Probe
ccacgcaactaatccaataaagcac

SEQ ID NO: 151745 - DNA, 25 bp, Artificial
  Probe
acgcaactaatccaataaagcacct

SEQ ID NO: 151746 - DNA, 25 bp, Artificial
  Probe
cccacgcaactaatccaataaagca

SEQ ID NO: 151747 - DNA, 25 bp, Artificial
  Probe
catcatacatacgcttttccaggac

SEQ ID NO: 151748 - DNA, 25 bp, Artificial
  Probe
ctcaacagtttagaggaagccaaaa

SEQ ID NO: 151749 - DNA, 25 bp, Artificial
  Probe
gtctggcatcatacatacgcttttc

SEQ ID NO: 151750 - DNA, 25 bp, Artificial
  Probe
atcatacatacgcttttccaggacc

SEQ ID NO: 151751 - DNA, 25 bp, Artificial
  Probe
gctcaacagtttagaggaagccaaa

SEQ ID NO: 151752 - DNA, 25 bp, Artificial
  Probe
gcatcatacatacgcttttccagga

SEQ ID NO: 151753 - DNA, 25 bp, Artificial
  Probe
aaagaagaaagagggtgctctagat

SEQ ID NO: 151754 - DNA, 25 bp, Artificial
  Probe
cttgatgctctgggaagaactgctt

SEQ ID NO: 151755 - DNA, 25 bp, Artificial
  Probe
ggcatcatacatacgcttttccagg

SEQ ID NO: 151756 - DNA, 25 bp, Artificial
  Probe
tggcatcatacatacgcttttccag

SEQ ID NO: 151757 - DNA, 25 bp, Artificial
  Probe
ctggcatcatacatacgcttttcca

SEQ ID NO: 151758 - DNA, 25 bp, Artificial
  Probe
tcatacatacgcttttccaggaccg

SEQ ID NO: 151759 - DNA, 25 bp, Artificial
  Probe
aaaagaagaaagagggtgctctaga

SEQ ID NO: 151760 - DNA, 25 bp, Artificial
  Probe
cgtctggcatcatacatacgctttt

SEQ ID NO: 151761 - DNA, 25 bp, Artificial
  Probe
ttgatgctctgggaagaactgcttc

SEQ ID NO: 151762 - DNA, 25 bp, Artificial
  Probe
cctagagaactcacatgtctccagc

SEQ ID NO: 151763 - DNA, 25 bp, Artificial
  Probe
ctagagaactcacatgtctccagcg

SEQ ID NO: 151764 - DNA, 25 bp, Artificial
  Probe
ccctagagaactcacatgtctccag

SEQ ID NO: 151765 - DNA, 25 bp, Artificial
  Probe
cagacccctagagaactcacatgtc

SEQ ID NO: 151766 - DNA, 25 bp, Artificial
  Probe
gacccctagagaactcacatgtctc

SEQ ID NO: 151767 - DNA, 25 bp, Artificial
  Probe
agacccctagagaactcacatgtct

SEQ ID NO: 151768 - DNA, 25 bp, Artificial
  Probe
cccctagagaactcacatgtctcca

SEQ ID NO: 151769 - DNA, 25 bp, Artificial
  Probe
acccctagagaactcacatgtctcc

SEQ ID NO: 151770 - DNA, 25 bp, Artificial
  Probe
tgcctgaataatgtcttactgtagt

SEQ ID NO: 151771 - DNA, 25 bp, Artificial
  Probe
gcttgcctgaataatgtcttactgt

SEQ ID NO: 151772 - DNA, 25 bp, Artificial
  Probe
ttgcctgaataatgtcttactgtag

SEQ ID NO: 151773 - DNA, 25 bp, Artificial
  Probe
cttgcctgaataatgtcttactgta

SEQ ID NO: 151774 - DNA, 25 bp, Artificial
  Probe
gcctgaataatgtcttactgtagtt

SEQ ID NO: 151775 - DNA, 25 bp, Artificial
  Probe
agcttgcctgaataatgtcttactg

SEQ ID NO: 151776 - DNA, 25 bp, Artificial
  Probe
cctgaataatgtcttactgtagttg

SEQ ID NO: 151777 - DNA, 25 bp, Artificial
  Probe
aacagcttgcctgaataatgtctta

SEQ ID NO: 151778 - DNA, 25 bp, Artificial
  Probe
cagcttgcctgaataatgtcttact

SEQ ID NO: 151779 - DNA, 25 bp, Artificial
  Probe
acagcttgcctgaataatgtcttac

SEQ ID NO: 151780 - DNA, 25 bp, Artificial
  Probe
gaacagcttgcctgaataatgtctt

SEQ ID NO: 151781 - DNA, 25 bp, Artificial
  Probe
agaacagcttgcctgaataatgtct

SEQ ID NO: 151782 - DNA, 25 bp, Artificial
  Probe
cagaacagcttgcctgaataatgtc

SEQ ID NO: 151783 - DNA, 25 bp, Artificial
  Probe
cacagaacagcttgcctgaataatg

SEQ ID NO: 151784 - DNA, 25 bp, Artificial
  Probe
acagaacagcttgcctgaataatgt

SEQ ID NO: 151785 - DNA, 25 bp, Artificial
  Probe
gaagttcagccagtgcttaagaatt

SEQ ID NO: 151786 - DNA, 25 bp, Artificial
  Probe
ccacagaacagcttgcctgaataat

SEQ ID NO: 151787 - DNA, 25 bp, Artificial
  Probe
aagttcagccagtgcttaagaattc

SEQ ID NO: 151788 - DNA, 25 bp, Artificial
  Probe
taccacagaacagcttgcctgaata

SEQ ID NO: 151789 - DNA, 25 bp, Artificial
  Probe
cagtgcttaagaattcagagccatg

SEQ ID NO: 151790 - DNA, 25 bp, Artificial
  Probe
tgaagttcagccagtgcttaagaat

SEQ ID NO: 151791 - DNA, 25 bp, Artificial
  Probe
gtgcttaagaattcagagccatgtg

SEQ ID NO: 151792 - DNA, 25 bp, Artificial
  Probe
agtgcttaagaattcagagccatgt

SEQ ID NO: 151793 - DNA, 25 bp, Artificial
  Probe
ttcagccagtgcttaagaattcaga

SEQ ID NO: 151794 - DNA, 25 bp, Artificial
  Probe
gttcagccagtgcttaagaattcag

SEQ ID NO: 151795 - DNA, 25 bp, Artificial
  Probe
agttcagccagtgcttaagaattca

SEQ ID NO: 151796 - DNA, 25 bp, Artificial
  Probe
tcagccagtgcttaagaattcagag

SEQ ID NO: 151797 - DNA, 25 bp, Artificial
  Probe
ccagtgcttaagaattcagagccat

SEQ ID NO: 151798 - DNA, 25 bp, Artificial
  Probe
tttgtgaagttcagccagtgcttaa

SEQ ID NO: 151799 - DNA, 25 bp, Artificial
  Probe
gtgaagttcagccagtgcttaagaa

SEQ ID NO: 151800 - DNA, 25 bp, Artificial
  Probe
accacagaacagcttgcctgaataa

SEQ ID NO: 151801 - DNA, 25 bp, Artificial
  Probe
gaagtggaggtagagggttcaaagc

SEQ ID NO: 151802 - DNA, 25 bp, Artificial
  Probe
ttgtgaagttcagccagtgcttaag

SEQ ID NO: 151803 - DNA, 25 bp, Artificial
  Probe
ctttgtgaagttcagccagtgctta

SEQ ID NO: 151804 - DNA, 25 bp, Artificial
  Probe
aaattggagcaaagccactgttaac

SEQ ID NO: 151805 - DNA, 25 bp, Artificial
  Probe
tgaagtggaggtagagggttcaaag

SEQ ID NO: 151806 - DNA, 25 bp, Artificial
  Probe
tgcttaagaattcagagccatgtgc

SEQ ID NO: 151807 - DNA, 25 bp, Artificial
  Probe
ggttagggaggaggtgtactagcag

SEQ ID NO: 151808 - DNA, 25 bp, Artificial
  Probe
cagccagtgcttaagaattcagagc

SEQ ID NO: 151809 - DNA, 25 bp, Artificial
  Probe
tgtgaagttcagccagtgcttaaga

SEQ ID NO: 151810 - DNA, 25 bp, Artificial
  Probe
gcttaagaattcagagccatgtgcc

SEQ ID NO: 151811 - DNA, 25 bp, Artificial
  Probe
aaaacagtaccacagaacagcttgc

SEQ ID NO: 151812 - DNA, 25 bp, Artificial
  Probe
ttttgaagtggaggtagagggttca

SEQ ID NO: 151813 - DNA, 25 bp, Artificial
  Probe
attgagtggctgtatggatttgggg

SEQ ID NO: 151814 - DNA, 25 bp, Artificial
  Probe
aattggagcaaagccactgttaacc

SEQ ID NO: 151815 - DNA, 25 bp, Artificial
  Probe
tttccacatcacccgcacaatttat

SEQ ID NO: 151816 - DNA, 25 bp, Artificial
  Probe
ctttccacatcacccgcacaattta

SEQ ID NO: 151817 - DNA, 25 bp, Artificial
  Probe
ctgacgtgtatctcttctgttgtaa

SEQ ID NO: 151818 - DNA, 25 bp, Artificial
  Probe
tgacgtgtatctcttctgttgtaag

SEQ ID NO: 151819 - DNA, 25 bp, Artificial
  Probe
actgacgtgtatctcttctgttgta

SEQ ID NO: 151820 - DNA, 25 bp, Artificial
  Probe
cagtttgcttccagtgattaaatct

SEQ ID NO: 151821 - DNA, 25 bp, Artificial
  Probe
cattcagtttgcttccagtgattaa

SEQ ID NO: 151822 - DNA, 25 bp, Artificial
  Probe
ttcagtttgcttccagtgattaaat

SEQ ID NO: 151823 - DNA, 25 bp, Artificial
  Probe
attcagtttgcttccagtgattaaa

SEQ ID NO: 151824 - DNA, 25 bp, Artificial
  Probe
gacgtgtatctcttctgttgtaagc

SEQ ID NO: 151825 - DNA, 25 bp, Artificial
  Probe
tcagtttgcttccagtgattaaatc

SEQ ID NO: 151826 - DNA, 25 bp, Artificial
  Probe
tgcttccagtgattaaatctaagtc

SEQ ID NO: 151827 - DNA, 25 bp, Artificial
  Probe
acgtgtatctcttctgttgtaagct

SEQ ID NO: 151828 - DNA, 25 bp, Artificial
  Probe
agtttgcttccagtgattaaatcta

SEQ ID NO: 151829 - DNA, 25 bp, Artificial
  Probe
gcttccagtgattaaatctaagtca

SEQ ID NO: 151830 - DNA, 25 bp, Artificial
  Probe
ccattcagtttgcttccagtgatta

SEQ ID NO: 151831 - DNA, 25 bp, Artificial
  Probe
ttgcttccagtgattaaatctaagt

SEQ ID NO: 151832 - DNA, 25 bp, Artificial
  Probe
gtttgcttccagtgattaaatctaa

SEQ ID NO: 151833 - DNA, 25 bp, Artificial
  Probe
tttgcttccagtgattaaatctaag

SEQ ID NO: 151834 - DNA, 25 bp, Artificial
  Probe
cactgacgtgtatctcttctgttgt

SEQ ID NO: 151835 - DNA, 25 bp, Artificial
  Probe
tccattcagtttgcttccagtgatt

SEQ ID NO: 151836 - DNA, 25 bp, Artificial
  Probe
ttccattcagtttgcttccagtgat

SEQ ID NO: 151837 - DNA, 25 bp, Artificial
  Probe
taccttagtggacatgaaagagctg

SEQ ID NO: 151838 - DNA, 25 bp, Artificial
  Probe
gtaccttagtggacatgaaagagct

SEQ ID NO: 151839 - DNA, 25 bp, Artificial
  Probe
gacagacaaatctaagcccatgact

SEQ ID NO: 151840 - DNA, 25 bp, Artificial
  Probe
atctcttctgttgtaagcttccatt

SEQ ID NO: 151841 - DNA, 25 bp, Artificial
  Probe
gtatctcttctgttgtaagcttcca

SEQ ID NO: 151842 - DNA, 25 bp, Artificial
  Probe
tgtatctcttctgttgtaagcttcc

SEQ ID NO: 151843 - DNA, 25 bp, Artificial
  Probe
tatctcttctgttgtaagcttccat

SEQ ID NO: 151844 - DNA, 25 bp, Artificial
  Probe
gtgtatctcttctgttgtaagcttc

SEQ ID NO: 151845 - DNA, 25 bp, Artificial
  Probe
ttctgcggattgatgacattgtctc

SEQ ID NO: 151846 - DNA, 25 bp, Artificial
  Probe
cttctgcggattgatgacattgtct

SEQ ID NO: 151847 - DNA, 25 bp, Artificial
  Probe
tctcttctgttgtaagcttccattc

SEQ ID NO: 151848 - DNA, 25 bp, Artificial
  Probe
ctacaaacatacaaaacagcagtgg

SEQ ID NO: 151849 - DNA, 25 bp, Artificial
  Probe
cgtgtatctcttctgttgtaagctt

SEQ ID NO: 151850 - DNA, 25 bp, Artificial
  Probe
ctcttctgttgtaagcttccattca

SEQ ID NO: 151851 - DNA, 25 bp, Artificial
  Probe
tacaaacatacaaaacagcagtgga

SEQ ID NO: 151852 - DNA, 25 bp, Artificial
  Probe
cttccattcagtttgcttccagtga

SEQ ID NO: 151853 - DNA, 25 bp, Artificial
  Probe
ttctgttgtaagcttccattcagtt

SEQ ID NO: 151854 - DNA, 25 bp, Artificial
  Probe
tagtggacatgaaagagctgggtat

SEQ ID NO: 151855 - DNA, 25 bp, Artificial
  Probe
ctgcttctgcggattgatgacattg

SEQ ID NO: 151856 - DNA, 25 bp, Artificial
  Probe
aaacatacaaaacagcagtggagac

SEQ ID NO: 151857 - DNA, 25 bp, Artificial
  Probe
caaacatacaaaacagcagtggaga

SEQ ID NO: 151858 - DNA, 25 bp, Artificial
  Probe
acagacaaatctaagcccatgactg

SEQ ID NO: 151859 - DNA, 25 bp, Artificial
  Probe
tcttctgttgtaagcttccattcag

SEQ ID NO: 151860 - DNA, 25 bp, Artificial
  Probe
cttccagtgattaaatctaagtcat

SEQ ID NO: 151861 - DNA, 25 bp, Artificial
  Probe
tggacatgaaagagctgggtatttg

SEQ ID NO: 151862 - DNA, 25 bp, Artificial
  Probe
cttgtagattctagtggtgaaggtg

SEQ ID NO: 151863 - DNA, 25 bp, Artificial
  Probe
gaccttcttatagagccgaacagta

SEQ ID NO: 151864 - DNA, 25 bp, Artificial
  Probe
ttgtagattctagtggtgaaggtgt

SEQ ID NO: 151865 - DNA, 25 bp, Artificial
  Probe
tacttgtagattctagtggtgaagg

SEQ ID NO: 151866 - DNA, 25 bp, Artificial
  Probe
acttgtagattctagtggtgaaggt

SEQ ID NO: 151867 - DNA, 25 bp, Artificial
  Probe
tgtagattctagtggtgaaggtgtg

SEQ ID NO: 151868 - DNA, 25 bp, Artificial
  Probe
tgtactatcaagatgactccaccag

SEQ ID NO: 151869 - DNA, 25 bp, Artificial
  Probe
ctgtactatcaagatgactccacca

SEQ ID NO: 151870 - DNA, 25 bp, Artificial
  Probe
accttcttatagagccgaacagtac

SEQ ID NO: 151871 - DNA, 25 bp, Artificial
  Probe
gtagattctagtggtgaaggtgtgg

SEQ ID NO: 151872 - DNA, 25 bp, Artificial
  Probe
gggtatgtgtaggtcaaatcaaatg

SEQ ID NO: 151873 - DNA, 25 bp, Artificial
  Probe
gtactatcaagatgactccaccagg

SEQ ID NO: 151874 - DNA, 25 bp, Artificial
  Probe
actccactaaacgaccttcttatag

SEQ ID NO: 151875 - DNA, 25 bp, Artificial
  Probe
ttacttgtagattctagtggtgaag

SEQ ID NO: 151876 - DNA, 25 bp, Artificial
  Probe
ccttcttatagagccgaacagtacc

SEQ ID NO: 151877 - DNA, 25 bp, Artificial
  Probe
ttactccactaaacgaccttcttat

SEQ ID NO: 151878 - DNA, 25 bp, Artificial
  Probe
ggactgaaatcaaccacaaattacg

SEQ ID NO: 151879 - DNA, 25 bp, Artificial
  Probe
tccactaaacgaccttcttatagag

SEQ ID NO: 151880 - DNA, 25 bp, Artificial
  Probe
ctccactaaacgaccttcttataga

SEQ ID NO: 151881 - DNA, 25 bp, Artificial
  Probe
tactatcaagatgactccaccagga

SEQ ID NO: 151882 - DNA, 25 bp, Artificial
  Probe
cactaaacgaccttcttatagagcc

SEQ ID NO: 151883 - DNA, 25 bp, Artificial
  Probe
ccactaaacgaccttcttatagagc

SEQ ID NO: 151884 - DNA, 25 bp, Artificial
  Probe
tttactccactaaacgaccttctta

SEQ ID NO: 151885 - DNA, 25 bp, Artificial
  Probe
gctgtactatcaagatgactccacc

SEQ ID NO: 151886 - DNA, 25 bp, Artificial
  Probe
tactccactaaacgaccttcttata

SEQ ID NO: 151887 - DNA, 25 bp, Artificial
  Probe
agctgtactatcaagatgactccac

SEQ ID NO: 151888 - DNA, 25 bp, Artificial
  Probe
ctatcaagatgactccaccaggaag

SEQ ID NO: 151889 - DNA, 25 bp, Artificial
  Probe
taaacgaccttcttatagagccgaa

SEQ ID NO: 151890 - DNA, 25 bp, Artificial
  Probe
ggtatgtgtaggtcaaatcaaatga

SEQ ID NO: 151891 - DNA, 25 bp, Artificial
  Probe
attacttgtagattctagtggtgaa

SEQ ID NO: 151892 - DNA, 25 bp, Artificial
  Probe
aattacttgtagattctagtggtga

SEQ ID NO: 151893 - DNA, 25 bp, Artificial
  Probe
gaagaccttggatgcttacagactg

SEQ ID NO: 151894 - DNA, 25 bp, Artificial
  Probe
tatcaagatgactccaccaggaaga

SEQ ID NO: 151895 - DNA, 25 bp, Artificial
  Probe
ctaaacgaccttcttatagagccga

SEQ ID NO: 151896 - DNA, 25 bp, Artificial
  Probe
ctgattactcaacgcagtatggact

SEQ ID NO: 151897 - DNA, 25 bp, Artificial
  Probe
actatcaagatgactccaccaggaa

SEQ ID NO: 151898 - DNA, 25 bp, Artificial
  Probe
actaaacgaccttcttatagagccg

SEQ ID NO: 151899 - DNA, 25 bp, Artificial
  Probe
aacgaccttcttatagagccgaaca

SEQ ID NO: 151900 - DNA, 25 bp, Artificial
  Probe
tggactgaaatcaaccacaaattac

SEQ ID NO: 151901 - DNA, 25 bp, Artificial
  Probe
gtatggactgaaatcaaccacaaat

SEQ ID NO: 151902 - DNA, 25 bp, Artificial
  Probe
agtatggactgaaatcaaccacaaa

SEQ ID NO: 151903 - DNA, 25 bp, Artificial
  Probe
ctacgctctgtgtaggtgttagatc

SEQ ID NO: 151904 - DNA, 25 bp, Artificial
  Probe
atggactgaaatcaaccacaaatta

SEQ ID NO: 151905 - DNA, 25 bp, Artificial
  Probe
tatggactgaaatcaaccacaaatt

SEQ ID NO: 151906 - DNA, 25 bp, Artificial
  Probe
gactgaaatcaaccacaaattacgt

SEQ ID NO: 151907 - DNA, 25 bp, Artificial
  Probe
catattatgtcagcaccatgtgatg

SEQ ID NO: 151908 - DNA, 25 bp, Artificial
  Probe
ctaaccactgattctgtcatcctcc

SEQ ID NO: 151909 - DNA, 25 bp, Artificial
  Probe
cctaaccactgattctgtcatcctc

SEQ ID NO: 151910 - DNA, 25 bp, Artificial
  Probe
taaccactgattctgtcatcctcct

SEQ ID NO: 151911 - DNA, 25 bp, Artificial
  Probe
gcatattatgtcagcaccatgtgat

SEQ ID NO: 151912 - DNA, 25 bp, Artificial
  Probe
ctcaatccctttcatgcctttattc

SEQ ID NO: 151913 - DNA, 25 bp, Artificial
  Probe
cctttcatgcctttattcctttctt

SEQ ID NO: 151914 - DNA, 25 bp, Artificial
  Probe
atccctttcatgcctttattccttt

SEQ ID NO: 151915 - DNA, 25 bp, Artificial
  Probe
aatccctttcatgcctttattcctt

SEQ ID NO: 151916 - DNA, 25 bp, Artificial
  Probe
cttagagcagtataggaatgcctac

SEQ ID NO: 151917 - DNA, 25 bp, Artificial
  Probe
ccctttcatgcctttattcctttct

SEQ ID NO: 151918 - DNA, 25 bp, Artificial
  Probe
tccctttcatgcctttattcctttc

SEQ ID NO: 151919 - DNA, 25 bp, Artificial
  Probe
caatccctttcatgcctttattcct

SEQ ID NO: 151920 - DNA, 25 bp, Artificial
  Probe
tcaatccctttcatgcctttattcc

SEQ ID NO: 151921 - DNA, 25 bp, Artificial
  Probe
cctcaatccctttcatgcctttatt

SEQ ID NO: 151922 - DNA, 25 bp, Artificial
  Probe
ttagagcagtataggaatgcctacc

SEQ ID NO: 151923 - DNA, 25 bp, Artificial
  Probe
ctttcatgcctttattcctttcttt

SEQ ID NO: 151924 - DNA, 25 bp, Artificial
  Probe
gcttagagcagtataggaatgccta

SEQ ID NO: 151925 - DNA, 25 bp, Artificial
  Probe
ccaggcttagagcagtataggaatg

SEQ ID NO: 151926 - DNA, 25 bp, Artificial
  Probe
ctcctgccactttgtctatttctgt

SEQ ID NO: 151927 - DNA, 25 bp, Artificial
  Probe
gttatgggtctctgtcttcactgag

SEQ ID NO: 151928 - DNA, 25 bp, Artificial
  Probe
aaccactgattctgtcatcctcctc

SEQ ID NO: 151929 - DNA, 25 bp, Artificial
  Probe
cagtataggaatgcctaccatcagg

SEQ ID NO: 151930 - DNA, 25 bp, Artificial
  Probe
tagagcagtataggaatgcctacca

SEQ ID NO: 151931 - DNA, 25 bp, Artificial
  Probe
ctcctcctgccactttgtctatttc

SEQ ID NO: 151932 - DNA, 25 bp, Artificial
  Probe
gagcagtataggaatgcctaccatc

SEQ ID NO: 151933 - DNA, 25 bp, Artificial
  Probe
cctcctgccactttgtctatttctg

SEQ ID NO: 151934 - DNA, 25 bp, Artificial
  Probe
gcagtataggaatgcctaccatcag

SEQ ID NO: 151935 - DNA, 25 bp, Artificial
  Probe
cactgattctgtcatcctcctcctg

SEQ ID NO: 151936 - DNA, 25 bp, Artificial
  Probe
agagcagtataggaatgcctaccat

SEQ ID NO: 151937 - DNA, 25 bp, Artificial
  Probe
aggttatgggtctctgtcttcactg

SEQ ID NO: 151938 - DNA, 25 bp, Artificial
  Probe
tcctcctgccactttgtctatttct

SEQ ID NO: 151939 - DNA, 25 bp, Artificial
  Probe
ggttatgggtctctgtcttcactga

SEQ ID NO: 151940 - DNA, 25 bp, Artificial
  Probe
agcagtataggaatgcctaccatca

SEQ ID NO: 151941 - DNA, 25 bp, Artificial
  Probe
caggcttagagcagtataggaatgc

SEQ ID NO: 151942 - DNA, 25 bp, Artificial
  Probe
ttatgggtctctgtcttcactgagg

SEQ ID NO: 151943 - DNA, 25 bp, Artificial
  Probe
atattatgtcagcaccatgtgatgg

SEQ ID NO: 151944 - DNA, 25 bp, Artificial
  Probe
ttgcatattatgtcagcaccatgtg

SEQ ID NO: 151945 - DNA, 25 bp, Artificial
  Probe
gcctcaatccctttcatgcctttat

SEQ ID NO: 151946 - DNA, 25 bp, Artificial
  Probe
ccctaaccactgattctgtcatcct

SEQ ID NO: 151947 - DNA, 25 bp, Artificial
  Probe
caggttatgggtctctgtcttcact

SEQ ID NO: 151948 - DNA, 25 bp, Artificial
  Probe
tgcatattatgtcagcaccatgtga

SEQ ID NO: 151949 - DNA, 25 bp, Artificial
  Probe
cctcctcctgccactttgtctattt

SEQ ID NO: 151950 - DNA, 25 bp, Artificial
  Probe
tatgggtctctgtcttcactgagga

SEQ ID NO: 151951 - DNA, 25 bp, Artificial
  Probe
ctttgcatattatgtcagcaccatg

SEQ ID NO: 151952 - DNA, 25 bp, Artificial
  Probe
tataagaagtagaagcagtggtagc

SEQ ID NO: 151953 - DNA, 25 bp, Artificial
  Probe
ataagaagtagaagcagtggtagcc

SEQ ID NO: 151954 - DNA, 25 bp, Artificial
  Probe
aattataagaagtagaagcagtggt

SEQ ID NO: 151955 - DNA, 25 bp, Artificial
  Probe
ttataagaagtagaagcagtggtag

SEQ ID NO: 151956 - DNA, 25 bp, Artificial
  Probe
tctctcaattaaagaaacactgtgc

SEQ ID NO: 151957 - DNA, 25 bp, Artificial
  Probe
aggtcagttgtctctcaattaaaga

SEQ ID NO: 151958 - DNA, 25 bp, Artificial
  Probe
ggtcagttgtctctcaattaaagaa

SEQ ID NO: 151959 - DNA, 25 bp, Artificial
  Probe
ctgcttatgaggtcagttgtctctc

SEQ ID NO: 151960 - DNA, 25 bp, Artificial
  Probe
gaggtcagttgtctctcaattaaag

SEQ ID NO: 151961 - DNA, 25 bp, Artificial
  Probe
ttggtgagagtctctgaggaacata

SEQ ID NO: 151962 - DNA, 25 bp, Artificial
  Probe
gtctctcaattaaagaaacactgtg

SEQ ID NO: 151963 - DNA, 25 bp, Artificial
  Probe
tggtgagagtctctgaggaacatag

SEQ ID NO: 151964 - DNA, 25 bp, Artificial
  Probe
attataagaagtagaagcagtggta

SEQ ID NO: 151965 - DNA, 25 bp, Artificial
  Probe
tgtctctcaattaaagaaacactgt

SEQ ID NO: 151966 - DNA, 25 bp, Artificial
  Probe
taagaagtagaagcagtggtagcca

SEQ ID NO: 151967 - DNA, 25 bp, Artificial
  Probe
tcagttgtctctcaattaaagaaac

SEQ ID NO: 151968 - DNA, 25 bp, Artificial
  Probe
gtcagttgtctctcaattaaagaaa

SEQ ID NO: 151969 - DNA, 25 bp, Artificial
  Probe
ttgtctctcaattaaagaaacactg

SEQ ID NO: 151970 - DNA, 25 bp, Artificial
  Probe
cagttgtctctcaattaaagaaaca

SEQ ID NO: 151971 - DNA, 25 bp, Artificial
  Probe
ctctcaattaaagaaacactgtgca

SEQ ID NO: 151972 - DNA, 25 bp, Artificial
  Probe
gagtctctgaggaacatagccagtt

SEQ ID NO: 151973 - DNA, 25 bp, Artificial
  Probe
tctcaattaaagaaacactgtgcaa

SEQ ID NO: 151974 - DNA, 25 bp, Artificial
  Probe
gttgtctctcaattaaagaaacact

SEQ ID NO: 151975 - DNA, 25 bp, Artificial
  Probe
agttgtctctcaattaaagaaacac

SEQ ID NO: 151976 - DNA, 25 bp, Artificial
  Probe
ctcaattaaagaaacactgtgcaat

SEQ ID NO: 151977 - DNA, 25 bp, Artificial
  Probe
cttggtgagagtctctgaggaacat

SEQ ID NO: 151978 - DNA, 25 bp, Artificial
  Probe
agtctctgaggaacatagccagttg

SEQ ID NO: 151979 - DNA, 25 bp, Artificial
  Probe
cttatgaggtcagttgtctctcaat

SEQ ID NO: 151980 - DNA, 25 bp, Artificial
  Probe
atgaggtcagttgtctctcaattaa

SEQ ID NO: 151981 - DNA, 25 bp, Artificial
  Probe
ttatgaggtcagttgtctctcaatt

SEQ ID NO: 151982 - DNA, 25 bp, Artificial
  Probe
tatgaggtcagttgtctctcaatta

SEQ ID NO: 151983 - DNA, 25 bp, Artificial
  Probe
gagagtctctgaggaacatagccag

SEQ ID NO: 151984 - DNA, 25 bp, Artificial
  Probe
gtctctgaggaacatagccagttgt

SEQ ID NO: 151985 - DNA, 25 bp, Artificial
  Probe
ctactataatggcatcagcctcttc

SEQ ID NO: 151986 - DNA, 25 bp, Artificial
  Probe
taaagaaacactgtgcaatatgaaa

SEQ ID NO: 151987 - DNA, 25 bp, Artificial
  Probe
ttaaagaaacactgtgcaatatgaa

SEQ ID NO: 151988 - DNA, 25 bp, Artificial
  Probe
tcaattaaagaaacactgtgcaata

SEQ ID NO: 151989 - DNA, 25 bp, Artificial
  Probe
gtgagagtctctgaggaacatagcc

SEQ ID NO: 151990 - DNA, 25 bp, Artificial
  Probe
ggtgagagtctctgaggaacatagc

SEQ ID NO: 151991 - DNA, 25 bp, Artificial
  Probe
tactataatggcatcagcctcttca

SEQ ID NO: 151992 - DNA, 25 bp, Artificial
  Probe
caatattaactcactgcccaccaca

SEQ ID NO: 151993 - DNA, 25 bp, Artificial
  Probe
aaattataagaagtagaagcagtgg

SEQ ID NO: 151994 - DNA, 25 bp, Artificial
  Probe
attaaagaaacactgtgcaatatga

SEQ ID NO: 151995 - DNA, 25 bp, Artificial
  Probe
ctataatggcatcagcctcttcaac

SEQ ID NO: 151996 - DNA, 25 bp, Artificial
  Probe
gctgcttatgaggtcagttgtctct

SEQ ID NO: 151997 - DNA, 25 bp, Artificial
  Probe
aaccaccacaagagagaagaattaa

SEQ ID NO: 151998 - DNA, 25 bp, Artificial
  Probe
caaccaccacaagagagaagaatta

SEQ ID NO: 151999 - DNA, 25 bp, Artificial
  Probe
ttctcacagactccaacaatatcaa

SEQ ID NO: 152000 - DNA, 25 bp, Artificial
  Probe
ctcacagactccaacaatatcaagg

SEQ ID NO: 152001 - DNA, 25 bp, Artificial
  Probe
tctcacagactccaacaatatcaag

SEQ ID NO: 152002 - DNA, 25 bp, Artificial
  Probe
catagatgagaacttctgtactgcc

SEQ ID NO: 152003 - DNA, 25 bp, Artificial
  Probe
tcatagatgagaacttctgtactgc

SEQ ID NO: 152004 - DNA, 25 bp, Artificial
  Probe
cagactccaacaatatcaaggaagt

SEQ ID NO: 152005 - DNA, 25 bp, Artificial
  Probe
acagactccaacaatatcaaggaag

SEQ ID NO: 152006 - DNA, 25 bp, Artificial
  Probe
cacagactccaacaatatcaaggaa

SEQ ID NO: 152007 - DNA, 25 bp, Artificial
  Probe
agactccaacaatatcaaggaagta

SEQ ID NO: 152008 - DNA, 25 bp, Artificial
  Probe
gactccaacaatatcaaggaagtac

SEQ ID NO: 152009 - DNA, 25 bp, Artificial
  Probe
tcacagactccaacaatatcaagga

SEQ ID NO: 152010 - DNA, 25 bp, Artificial
  Probe
accaccacaagagagaagaattaaa

SEQ ID NO: 152011 - DNA, 25 bp, Artificial
  Probe
ccaccacaagagagaagaattaaag

SEQ ID NO: 152012 - DNA, 25 bp, Artificial
  Probe
ttcatagatgagaacttctgtactg

SEQ ID NO: 152013 - DNA, 25 bp, Artificial
  Probe
ccaaccaccacaagagagaagaatt

SEQ ID NO: 152014 - DNA, 25 bp, Artificial
  Probe
tttctcacagactccaacaatatca

SEQ ID NO: 152015 - DNA, 25 bp, Artificial
  Probe
gtttctcacagactccaacaatatc

SEQ ID NO: 152016 - DNA, 25 bp, Artificial
  Probe
caccacaagagagaagaattaaaga

SEQ ID NO: 152017 - DNA, 25 bp, Artificial
  Probe
atcagccttacattcatctgtgatc

SEQ ID NO: 152018 - DNA, 25 bp, Artificial
  Probe
catcagccttacattcatctgtgat

SEQ ID NO: 152019 - DNA, 25 bp, Artificial
  Probe
accacaagagagaagaattaaagaa

SEQ ID NO: 152020 - DNA, 25 bp, Artificial
  Probe
tccaaccaccacaagagagaagaat

SEQ ID NO: 152021 - DNA, 25 bp, Artificial
  Probe
gcatcagccttacattcatctgtga

SEQ ID NO: 152022 - DNA, 25 bp, Artificial
  Probe
atagatgagaacttctgtactgccc

SEQ ID NO: 152023 - DNA, 25 bp, Artificial
  Probe
tagaagactatgcaactatggcctt

SEQ ID NO: 152024 - DNA, 25 bp, Artificial
  Probe
tccttgttaccaaataaaccatttc

SEQ ID NO: 152025 - DNA, 25 bp, Artificial
  Probe
ctagaagactatgcaactatggcct

SEQ ID NO: 152026 - DNA, 25 bp, Artificial
  Probe
ccttgttaccaaataaaccatttct

SEQ ID NO: 152027 - DNA, 25 bp, Artificial
  Probe
catgaagcctgaagacaagaaggaa

SEQ ID NO: 152028 - DNA, 25 bp, Artificial
  Probe
gaagaaggaaatatgcaatgcgtac

SEQ ID NO: 152029 - DNA, 25 bp, Artificial
  Probe
tgaagaaggaaatatgcaatgcgta

SEQ ID NO: 152030 - DNA, 25 bp, Artificial
  Probe
tctagaagactatgcaactatggcc

SEQ ID NO: 152031 - DNA, 25 bp, Artificial
  Probe
attccttgttaccaaataaaccatt

SEQ ID NO: 152032 - DNA, 25 bp, Artificial
  Probe
aagaaggaaatatgcaatgcgtaca

SEQ ID NO: 152033 - DNA, 25 bp, Artificial
  Probe
tagatgagaacttctgtactgccct

SEQ ID NO: 152034 - DNA, 25 bp, Artificial
  Probe
gccatgttcatagatgagaacttct

SEQ ID NO: 152035 - DNA, 25 bp, Artificial
  Probe
ccatgttcatagatgagaacttctg

SEQ ID NO: 152036 - DNA, 25 bp, Artificial
  Probe
tgttaccaaataaaccatttctctc

SEQ ID NO: 152037 - DNA, 25 bp, Artificial
  Probe
ttccttgttaccaaataaaccattt

SEQ ID NO: 152038 - DNA, 25 bp, Artificial
  Probe
ccacaagagagaagaattaaagaat

SEQ ID NO: 152039 - DNA, 25 bp, Artificial
  Probe
actccaacaatatcaaggaagtact

SEQ ID NO: 152040 - DNA, 25 bp, Artificial
  Probe
atgaagaaggaaatatgcaatgcgt

SEQ ID NO: 152041 - DNA, 25 bp, Artificial
  Probe
catgaagaaggaaatatgcaatgcg

SEQ ID NO: 152042 - DNA, 25 bp, Artificial
  Probe
gatagtgaggtgctgatgatgatta

SEQ ID NO: 152043 - DNA, 25 bp, Artificial
  Probe
atagtgaggtgctgatgatgattaa

SEQ ID NO: 152044 - DNA, 25 bp, Artificial
  Probe
agatagtgaggtgctgatgatgatt

SEQ ID NO: 152045 - DNA, 25 bp, Artificial
  Probe
aagatagtgaggtgctgatgatgat

SEQ ID NO: 152046 - DNA, 25 bp, Artificial
  Probe
gaagatagtgaggtgctgatgatga

SEQ ID NO: 152047 - DNA, 25 bp, Artificial
  Probe
ggaagatagtgaggtgctgatgatg

SEQ ID NO: 152048 - DNA, 25 bp, Artificial
  Probe
aggaagatagtgaggtgctgatgat

SEQ ID NO: 152049 - DNA, 25 bp, Artificial
  Probe
tagtgaggtgctgatgatgattaaa

SEQ ID NO: 152050 - DNA, 25 bp, Artificial
  Probe
ccctaataaatcctctcctgctctc

SEQ ID NO: 152051 - DNA, 25 bp, Artificial
  Probe
gaggaagatagtgaggtgctgatga

SEQ ID NO: 152052 - DNA, 25 bp, Artificial
  Probe
cctaataaatcctctcctgctctcg

SEQ ID NO: 152053 - DNA, 25 bp, Artificial
  Probe
cgcagatcacatccatctatgaatg

SEQ ID NO: 152054 - DNA, 25 bp, Artificial
  Probe
tatgaatggaaaggaaagatcgagg

SEQ ID NO: 152055 - DNA, 25 bp, Artificial
  Probe
aaaggaaagatcgaggaagatagtg

SEQ ID NO: 152056 - DNA, 25 bp, Artificial
  Probe
gaaaggaaagatcgaggaagatagt

SEQ ID NO: 152057 - DNA, 25 bp, Artificial
  Probe
ggaaaggaaagatcgaggaagatag

SEQ ID NO: 152058 - DNA, 25 bp, Artificial
  Probe
ctatgaatggaaaggaaagatcgag

SEQ ID NO: 152059 - DNA, 25 bp, Artificial
  Probe
aaggaaagatcgaggaagatagtga

SEQ ID NO: 152060 - DNA, 25 bp, Artificial
  Probe
tggaaaggaaagatcgaggaagata

SEQ ID NO: 152061 - DNA, 25 bp, Artificial
  Probe
tctatgaatggaaaggaaagatcga

SEQ ID NO: 152062 - DNA, 25 bp, Artificial
  Probe
aggaaagatcgaggaagatagtgag

SEQ ID NO: 152063 - DNA, 25 bp, Artificial
  Probe
ccgcagatcacatccatctatgaat

SEQ ID NO: 152064 - DNA, 25 bp, Artificial
  Probe
gaatggaaaggaaagatcgaggaag

SEQ ID NO: 152065 - DNA, 25 bp, Artificial
  Probe
gaaagatcgaggaagatagtgaggt

SEQ ID NO: 152066 - DNA, 25 bp, Artificial
  Probe
atggaaaggaaagatcgaggaagat

SEQ ID NO: 152067 - DNA, 25 bp, Artificial
  Probe
aaagatcgaggaagatagtgaggtg

SEQ ID NO: 152068 - DNA, 25 bp, Artificial
  Probe
aatggaaaggaaagatcgaggaaga

SEQ ID NO: 152069 - DNA, 25 bp, Artificial
  Probe
atgaatggaaaggaaagatcgagga

SEQ ID NO: 152070 - DNA, 25 bp, Artificial
  Probe
tgaatggaaaggaaagatcgaggaa

SEQ ID NO: 152071 - DNA, 25 bp, Artificial
  Probe
ggaaagatcgaggaagatagtgagg

SEQ ID NO: 152072 - DNA, 25 bp, Artificial
  Probe
atgatgactgagcccctaataaatc

SEQ ID NO: 152073 - DNA, 25 bp, Artificial
  Probe
atctatgaatggaaaggaaagatcg

SEQ ID NO: 152074 - DNA, 25 bp, Artificial
  Probe
gtgaggtgctgatgatgattaaaac

SEQ ID NO: 152075 - DNA, 25 bp, Artificial
  Probe
agtgaggtgctgatgatgattaaaa

SEQ ID NO: 152076 - DNA, 25 bp, Artificial
  Probe
cgaggaagatagtgaggtgctgatg

SEQ ID NO: 152077 - DNA, 25 bp, Artificial
  Probe
aagatcgaggaagatagtgaggtgc

SEQ ID NO: 152078 - DNA, 25 bp, Artificial
  Probe
tgaggtgctgatgatgattaaaaca

SEQ ID NO: 152079 - DNA, 25 bp, Artificial
  Probe
tgctgatgatgattaaaacacaaag

SEQ ID NO: 152080 - DNA, 25 bp, Artificial
  Probe
gatgactgagcccctaataaatcct

SEQ ID NO: 152081 - DNA, 25 bp, Artificial
  Probe
gcagatcacatccatctatgaatgg

SEQ ID NO: 152082 - DNA, 25 bp, Artificial
  Probe
catgatgactgagcccctaataaat

SEQ ID NO: 152083 - DNA, 25 bp, Artificial
  Probe
tgatgactgagcccctaataaatcc

SEQ ID NO: 152084 - DNA, 25 bp, Artificial
  Probe
catctatgaatggaaaggaaagatc

SEQ ID NO: 152085 - DNA, 25 bp, Artificial
  Probe
ggtgctgatgatgattaaaacacaa

SEQ ID NO: 152086 - DNA, 25 bp, Artificial
  Probe
gaggtgctgatgatgattaaaacac

SEQ ID NO: 152087 - DNA, 25 bp, Artificial
  Probe
ataatgtgtgtaatccttgttgctt

SEQ ID NO: 152088 - DNA, 25 bp, Artificial
  Probe
aataatgtgtgtaatccttgttgct

SEQ ID NO: 152089 - DNA, 25 bp, Artificial
  Probe
tgctagttcttcctggtagagttat

SEQ ID NO: 152090 - DNA, 25 bp, Artificial
  Probe
ttgctagttcttcctggtagagtta

SEQ ID NO: 152091 - DNA, 25 bp, Artificial
  Probe
gctagttcttcctggtagagttata

SEQ ID NO: 152092 - DNA, 25 bp, Artificial
  Probe
ttgcctgaattgtactgtatgtagc

SEQ ID NO: 152093 - DNA, 25 bp, Artificial
  Probe
attgcctgaattgtactgtatgtag

SEQ ID NO: 152094 - DNA, 25 bp, Artificial
  Probe
aattgcctgaattgtactgtatgta

SEQ ID NO: 152095 - DNA, 25 bp, Artificial
  Probe
aattgtactgtatgtagctgcacta

SEQ ID NO: 152096 - DNA, 25 bp, Artificial
  Probe
ttgactcaagacagctaacttcatt

SEQ ID NO: 152097 - DNA, 25 bp, Artificial
  Probe
aatgtgtgtaatccttgttgctttc

SEQ ID NO: 152098 - DNA, 25 bp, Artificial
  Probe
gtaatccttgttgctttcctgatac

SEQ ID NO: 152099 - DNA, 25 bp, Artificial
  Probe
tgtaatccttgttgctttcctgata

SEQ ID NO: 152100 - DNA, 25 bp, Artificial
  Probe
taatgtgtgtaatccttgttgcttt

SEQ ID NO: 152101 - DNA, 25 bp, Artificial
  Probe
cctgaattgtactgtatgtagctgc

SEQ ID NO: 152102 - DNA, 25 bp, Artificial
  Probe
gcctgaattgtactgtatgtagctg

SEQ ID NO: 152103 - DNA, 25 bp, Artificial
  Probe
gaattgtactgtatgtagctgcact

SEQ ID NO: 152104 - DNA, 25 bp, Artificial
  Probe
ctgaattgtactgtatgtagctgca

SEQ ID NO: 152105 - DNA, 25 bp, Artificial
  Probe
taatccttgttgctttcctgatacc

SEQ ID NO: 152106 - DNA, 25 bp, Artificial
  Probe
tgaattgtactgtatgtagctgcac

SEQ ID NO: 152107 - DNA, 25 bp, Artificial
  Probe
gtttcccgtggttggttagaatata

SEQ ID NO: 152108 - DNA, 25 bp, Artificial
  Probe
cactacaacagattcttaccgtttc

SEQ ID NO: 152109 - DNA, 25 bp, Artificial
  Probe
tgcctgaattgtactgtatgtagct

SEQ ID NO: 152110 - DNA, 25 bp, Artificial
  Probe
tagatgttgggtttagtcttctgaa

SEQ ID NO: 152111 - DNA, 25 bp, Artificial
  Probe
ttagatgttgggtttagtcttctga

SEQ ID NO: 152112 - DNA, 25 bp, Artificial
  Probe
aaggtcagagattgtaaatggtcaa

SEQ ID NO: 152113 - DNA, 25 bp, Artificial
  Probe
ctacaacagattcttaccgtttcca

SEQ ID NO: 152114 - DNA, 25 bp, Artificial
  Probe
actacaacagattcttaccgtttcc

SEQ ID NO: 152115 - DNA, 25 bp, Artificial
  Probe
aaataatgtgtgtaatccttgttgc

SEQ ID NO: 152116 - DNA, 25 bp, Artificial
  Probe
tgtttagatgttgggtttagtcttc

SEQ ID NO: 152117 - DNA, 25 bp, Artificial
  Probe
caaggtcagagattgtaaatggtca

SEQ ID NO: 152118 - DNA, 25 bp, Artificial
  Probe
tacaacagattcttaccgtttccac

SEQ ID NO: 152119 - DNA, 25 bp, Artificial
  Probe
ctgatttgctagttcttcctggtag

SEQ ID NO: 152120 - DNA, 25 bp, Artificial
  Probe
gtgtaatccttgttgctttcctgat

SEQ ID NO: 152121 - DNA, 25 bp, Artificial
  Probe
tctgatttgctagttcttcctggta

SEQ ID NO: 152122 - DNA, 25 bp, Artificial
  Probe
tttagatgttgggtttagtcttctg

SEQ ID NO: 152123 - DNA, 25 bp, Artificial
  Probe
gtttagatgttgggtttagtcttct

SEQ ID NO: 152124 - DNA, 25 bp, Artificial
  Probe
gatttgctagttcttcctggtagag

SEQ ID NO: 152125 - DNA, 25 bp, Artificial
  Probe
tagctgcactacaacagattcttac

SEQ ID NO: 152126 - DNA, 25 bp, Artificial
  Probe
tttcccgtggttggttagaatatat

SEQ ID NO: 152127 - DNA, 25 bp, Artificial
  Probe
aacagattcttaccgtttccacaag

SEQ ID NO: 152128 - DNA, 25 bp, Artificial
  Probe
gcactacaacagattcttaccgttt

SEQ ID NO: 152129 - DNA, 25 bp, Artificial
  Probe
atttgctagttcttcctggtagagt

SEQ ID NO: 152130 - DNA, 25 bp, Artificial
  Probe
tgatttgctagttcttcctggtaga

SEQ ID NO: 152131 - DNA, 25 bp, Artificial
  Probe
gatctgatttgctagttcttcctgg

SEQ ID NO: 152132 - DNA, 25 bp, Artificial
  Probe
ttgtattctctcctgtacctcttga

SEQ ID NO: 152133 - DNA, 25 bp, Artificial
  Probe
tgtattctctcctgtacctcttgag

SEQ ID NO: 152134 - DNA, 25 bp, Artificial
  Probe
agcagcatttctacacatataaggt

SEQ ID NO: 152135 - DNA, 25 bp, Artificial
  Probe
gcagcatttctacacatataaggtc

SEQ ID NO: 152136 - DNA, 25 bp, Artificial
  Probe
gcaataaagcagcatttctacacat

SEQ ID NO: 152137 - DNA, 25 bp, Artificial
  Probe
gtattctctcctgtacctcttgagc

SEQ ID NO: 152138 - DNA, 25 bp, Artificial
  Probe
aagcagcatttctacacatataagg

SEQ ID NO: 152139 - DNA, 25 bp, Artificial
  Probe
atagtttattatggcacatcagcac

SEQ ID NO: 152140 - DNA, 25 bp, Artificial
  Probe
cagcaataaagcagcatttctacac

SEQ ID NO: 152141 - DNA, 25 bp, Artificial
  Probe
cagcatttctacacatataaggtca

SEQ ID NO: 152142 - DNA, 25 bp, Artificial
  Probe
ggctacctttgtattctctcctgta

SEQ ID NO: 152143 - DNA, 25 bp, Artificial
  Probe
agataatacaccactacattctgtt

SEQ ID NO: 152144 - DNA, 25 bp, Artificial
  Probe
gatggtttcggaaatgtgtaaatca

SEQ ID NO: 152145 - DNA, 25 bp, Artificial
  Probe
tgatggtttcggaaatgtgtaaatc

SEQ ID NO: 152146 - DNA, 25 bp, Artificial
  Probe
agcaataaagcagcatttctacaca

SEQ ID NO: 152147 - DNA, 25 bp, Artificial
  Probe
tacctttgtattctctcctgtacct

SEQ ID NO: 152148 - DNA, 25 bp, Artificial
  Probe
ctacctttgtattctctcctgtacc

SEQ ID NO: 152149 - DNA, 25 bp, Artificial
  Probe
aatagtttattatggcacatcagca

SEQ ID NO: 152150 - DNA, 25 bp, Artificial
  Probe
tttgtattctctcctgtacctcttg

SEQ ID NO: 152151 - DNA, 25 bp, Artificial
  Probe
gctacctttgtattctctcctgtac

SEQ ID NO: 152152 - DNA, 25 bp, Artificial
  Probe
ttattatggcacatcagcacgattt

SEQ ID NO: 152153 - DNA, 25 bp, Artificial
  Probe
tttattatggcacatcagcacgatt

SEQ ID NO: 152154 - DNA, 25 bp, Artificial
  Probe
ctttgtattctctcctgtacctctt

SEQ ID NO: 152155 - DNA, 25 bp, Artificial
  Probe
tagtttattatggcacatcagcacg

SEQ ID NO: 152156 - DNA, 25 bp, Artificial
  Probe
cctttgtattctctcctgtacctct

SEQ ID NO: 152157 - DNA, 25 bp, Artificial
  Probe
caatgctgtgccctaaagtgtattt

SEQ ID NO: 152158 - DNA, 25 bp, Artificial
  Probe
caataaagcagcatttctacacata

SEQ ID NO: 152159 - DNA, 25 bp, Artificial
  Probe
acctttgtattctctcctgtacctc

SEQ ID NO: 152160 - DNA, 25 bp, Artificial
  Probe
tattatggcacatcagcacgatttc

SEQ ID NO: 152161 - DNA, 25 bp, Artificial
  Probe
catcagcacgatttctgtttagata

SEQ ID NO: 152162 - DNA, 25 bp, Artificial
  Probe
acatcagcacgatttctgtttagat

SEQ ID NO: 152163 - DNA, 25 bp, Artificial
  Probe
tattctctcctgtacctcttgagcc

SEQ ID NO: 152164 - DNA, 25 bp, Artificial
  Probe
gtttattatggcacatcagcacgat

SEQ ID NO: 152165 - DNA, 25 bp, Artificial
  Probe
agcatttctacacatataaggtcat

SEQ ID NO: 152166 - DNA, 25 bp, Artificial
  Probe
caccactacattctgttaataatca

SEQ ID NO: 152167 - DNA, 25 bp, Artificial
  Probe
acaccactacattctgttaataatc

SEQ ID NO: 152168 - DNA, 25 bp, Artificial
  Probe
gaaatgtgtaaatcacctggaagaa

SEQ ID NO: 152169 - DNA, 25 bp, Artificial
  Probe
aaagcagcatttctacacatataag

SEQ ID NO: 152170 - DNA, 25 bp, Artificial
  Probe
cctggaagaaattaatggtgtgact

SEQ ID NO: 152171 - DNA, 25 bp, Artificial
  Probe
ctggaagaaattaatggtgtgactt

SEQ ID NO: 152172 - DNA, 25 bp, Artificial
  Probe
aaatgtgtaaatcacctggaagaaa

SEQ ID NO: 152173 - DNA, 25 bp, Artificial
  Probe
tagataatacaccactacattctgt

SEQ ID NO: 152174 - DNA, 25 bp, Artificial
  Probe
atggtttcggaaatgtgtaaatcac

SEQ ID NO: 152175 - DNA, 25 bp, Artificial
  Probe
ggaaatgtgtaaatcacctggaaga

SEQ ID NO: 152176 - DNA, 25 bp, Artificial
  Probe
tcagcacgatttctgtttagataat

SEQ ID NO: 152177 - DNA, 25 bp, Artificial
  Probe
ttatggaagttcagcgttgtatgtc

SEQ ID NO: 152178 - DNA, 25 bp, Artificial
  Probe
aagttcagcgttgtatgtctctcta

SEQ ID NO: 152179 - DNA, 25 bp, Artificial
  Probe
cgaatgcctcactatactatgactt

SEQ ID NO: 152180 - DNA, 25 bp, Artificial
  Probe
gttatggaagttcagcgttgtatgt

SEQ ID NO: 152181 - DNA, 25 bp, Artificial
  Probe
tgttatggaagttcagcgttgtatg

SEQ ID NO: 152182 - DNA, 25 bp, Artificial
  Probe
aatgcctcactatactatgacttga

SEQ ID NO: 152183 - DNA, 25 bp, Artificial
  Probe
gaatgcctcactatactatgacttg

SEQ ID NO: 152184 - DNA, 25 bp, Artificial
  Probe
tatggaagttcagcgttgtatgtct

SEQ ID NO: 152185 - DNA, 25 bp, Artificial
  Probe
agttcagcgttgtatgtctctctac

SEQ ID NO: 152186 - DNA, 25 bp, Artificial
  Probe
ttgtatatctccaggcaaggtgaag

SEQ ID NO: 152187 - DNA, 25 bp, Artificial
  Probe
ctgttatggaagttcagcgttgtat

SEQ ID NO: 152188 - DNA, 25 bp, Artificial
  Probe
gcgaatgcctcactatactatgact

SEQ ID NO: 152189 - DNA, 25 bp, Artificial
  Probe
gaagttcagcgttgtatgtctctct

SEQ ID NO: 152190 - DNA, 25 bp, Artificial
  Probe
tactatgacttgagtccagtgagat

SEQ ID NO: 152191 - DNA, 25 bp, Artificial
  Probe
atactatgacttgagtccagtgaga

SEQ ID NO: 152192 - DNA, 25 bp, Artificial
  Probe
actatactatgacttgagtccagtg

SEQ ID NO: 152193 - DNA, 25 bp, Artificial
  Probe
cactatactatgacttgagtccagt

SEQ ID NO: 152194 - DNA, 25 bp, Artificial
  Probe
tatactatgacttgagtccagtgag

SEQ ID NO: 152195 - DNA, 25 bp, Artificial
  Probe
ctatactatgacttgagtccagtga

SEQ ID NO: 152196 - DNA, 25 bp, Artificial
  Probe
tcactatactatgacttgagtccag

SEQ ID NO: 152197 - DNA, 25 bp, Artificial
  Probe
actatgacttgagtccagtgagatc

SEQ ID NO: 152198 - DNA, 25 bp, Artificial
  Probe
atggaagttcagcgttgtatgtctc

SEQ ID NO: 152199 - DNA, 25 bp, Artificial
  Probe
actgttatggaagttcagcgttgta

SEQ ID NO: 152200 - DNA, 25 bp, Artificial
  Probe
agttcatctaaatcttgtgttctgt

SEQ ID NO: 152201 - DNA, 25 bp, Artificial
  Probe
tcagttcatctaaatcttgtgttct

SEQ ID NO: 152202 - DNA, 25 bp, Artificial
  Probe
ttgtatgtctctctacactgtggtg

SEQ ID NO: 152203 - DNA, 25 bp, Artificial
  Probe
gttgtatgtctctctacactgtggt

SEQ ID NO: 152204 - DNA, 25 bp, Artificial
  Probe
ggaagttcagcgttgtatgtctctc

SEQ ID NO: 152205 - DNA, 25 bp, Artificial
  Probe
tgtatatctccaggcaaggtgaagg

SEQ ID NO: 152206 - DNA, 25 bp, Artificial
  Probe
tttgtatatctccaggcaaggtgaa

SEQ ID NO: 152207 - DNA, 25 bp, Artificial
  Probe
ttcagttcatctaaatcttgtgttc

SEQ ID NO: 152208 - DNA, 25 bp, Artificial
  Probe
ttcagcgttgtatgtctctctacac

SEQ ID NO: 152209 - DNA, 25 bp, Artificial
  Probe
gttcagcgttgtatgtctctctaca

SEQ ID NO: 152210 - DNA, 25 bp, Artificial
  Probe
gtttgactgtaccatcgactgttat

SEQ ID NO: 152211 - DNA, 25 bp, Artificial
  Probe
cagttcatctaaatcttgtgttctg

SEQ ID NO: 152212 - DNA, 25 bp, Artificial
  Probe
tggaagttcagcgttgtatgtctct

SEQ ID NO: 152213 - DNA, 25 bp, Artificial
  Probe
cgttgtatgtctctctacactgtgg

SEQ ID NO: 152214 - DNA, 25 bp, Artificial
  Probe
tttgactgtaccatcgactgttatg

SEQ ID NO: 152215 - DNA, 25 bp, Artificial
  Probe
gttcatctaaatcttgtgttctgta

SEQ ID NO: 152216 - DNA, 25 bp, Artificial
  Probe
tttcagttcatctaaatcttgtgtt

SEQ ID NO: 152217 - DNA, 25 bp, Artificial
  Probe
gactgttatggaagttcagcgttgt

SEQ ID NO: 152218 - DNA, 25 bp, Artificial
  Probe
cttgaaagcctaattaagggagttt

SEQ ID NO: 152219 - DNA, 25 bp, Artificial
  Probe
cagcgttgtatgtctctctacactg

SEQ ID NO: 152220 - DNA, 25 bp, Artificial
  Probe
ctatgacttgagtccagtgagatct

SEQ ID NO: 152221 - DNA, 25 bp, Artificial
  Probe
tgtttgactgtaccatcgactgtta

SEQ ID NO: 152222 - DNA, 25 bp, Artificial
  Probe
gctctgtcctatacatactggaata

SEQ ID NO: 152223 - DNA, 25 bp, Artificial
  Probe
ggctctgtcctatacatactggaat

SEQ ID NO: 152224 - DNA, 25 bp, Artificial
  Probe
ctgaactggaactgtctcacttgaa

SEQ ID NO: 152225 - DNA, 25 bp, Artificial
  Probe
aggctctgtcctatacatactggaa

SEQ ID NO: 152226 - DNA, 25 bp, Artificial
  Probe
tgaactggaactgtctcacttgaac

SEQ ID NO: 152227 - DNA, 25 bp, Artificial
  Probe
gaactggaactgtctcacttgaacc

SEQ ID NO: 152228 - DNA, 25 bp, Artificial
  Probe
gtctgaactggaactgtctcacttg

SEQ ID NO: 152229 - DNA, 25 bp, Artificial
  Probe
tctgaactggaactgtctcacttga

SEQ ID NO: 152230 - DNA, 25 bp, Artificial
  Probe
ctctgtcctatacatactggaatag

SEQ ID NO: 152231 - DNA, 25 bp, Artificial
  Probe
taggctctgtcctatacatactgga

SEQ ID NO: 152232 - DNA, 25 bp, Artificial
  Probe
gatctcttacaggtcatgctggttg

SEQ ID NO: 152233 - DNA, 25 bp, Artificial
  Probe
atggatctcttacaggtcatgctgg

SEQ ID NO: 152234 - DNA, 25 bp, Artificial
  Probe
cgtctgaactggaactgtctcactt

SEQ ID NO: 152235 - DNA, 25 bp, Artificial
  Probe
ggatctcttacaggtcatgctggtt

SEQ ID NO: 152236 - DNA, 25 bp, Artificial
  Probe
ctctcctcaatctttgctgcatttg

SEQ ID NO: 152237 - DNA, 25 bp, Artificial
  Probe
atatattatctttggggagcctggg

SEQ ID NO: 152238 - DNA, 25 bp, Artificial
  Probe
tctctcctcaatctttgctgcattt

SEQ ID NO: 152239 - DNA, 25 bp, Artificial
  Probe
ctcacttgaacccaggagctttaaa

SEQ ID NO: 152240 - DNA, 25 bp, Artificial
  Probe
tgaacccaggagctttaaaacttta

SEQ ID NO: 152241 - DNA, 25 bp, Artificial
  Probe
gaacccaggagctttaaaactttat

SEQ ID NO: 152242 - DNA, 25 bp, Artificial
  Probe
catggatctcttacaggtcatgctg

SEQ ID NO: 152243 - DNA, 25 bp, Artificial
  Probe
acccaggagctttaaaactttattt

SEQ ID NO: 152244 - DNA, 25 bp, Artificial
  Probe
aacccaggagctttaaaactttatt

SEQ ID NO: 152245 - DNA, 25 bp, Artificial
  Probe
ttgaacccaggagctttaaaacttt

SEQ ID NO: 152246 - DNA, 25 bp, Artificial
  Probe
ttctgtgtacccgacctgaacatag

SEQ ID NO: 152247 - DNA, 25 bp, Artificial
  Probe
cttctgtgtacccgacctgaacata

SEQ ID NO: 152248 - DNA, 25 bp, Artificial
  Probe
cttgaacccaggagctttaaaactt

SEQ ID NO: 152249 - DNA, 25 bp, Artificial
  Probe
gtctctcctcaatctttgctgcatt

SEQ ID NO: 152250 - DNA, 25 bp, Artificial
  Probe
actggaataggttttaacgtatgcc

SEQ ID NO: 152251 - DNA, 25 bp, Artificial
  Probe
tactggaataggttttaacgtatgc

SEQ ID NO: 152252 - DNA, 25 bp, Artificial
  Probe
tctcacttgaacccaggagctttaa

SEQ ID NO: 152253 - DNA, 25 bp, Artificial
  Probe
aactggaactgtctcacttgaaccc

SEQ ID NO: 152254 - DNA, 25 bp, Artificial
  Probe
tatattatctttggggagcctgggg

SEQ ID NO: 152255 - DNA, 25 bp, Artificial
  Probe
tcctcaatctttgctgcatttgaaa

SEQ ID NO: 152256 - DNA, 25 bp, Artificial
  Probe
ctggaataggttttaacgtatgccc

SEQ ID NO: 152257 - DNA, 25 bp, Artificial
  Probe
acataggctctgtcctatacatact

SEQ ID NO: 152258 - DNA, 25 bp, Artificial
  Probe
ataggctctgtcctatacatactgg

SEQ ID NO: 152259 - DNA, 25 bp, Artificial
  Probe
cataggctctgtcctatacatactg

SEQ ID NO: 152260 - DNA, 25 bp, Artificial
  Probe
tgaacataggctctgtcctatacat

SEQ ID NO: 152261 - DNA, 25 bp, Artificial
  Probe
aacataggctctgtcctatacatac

SEQ ID NO: 152262 - DNA, 25 bp, Artificial
  Probe
atctcttacaggtcatgctggttgc

SEQ ID NO: 152263 - DNA, 25 bp, Artificial
  Probe
atacatactggaataggttttaacg

SEQ ID NO: 152264 - DNA, 25 bp, Artificial
  Probe
gaacataggctctgtcctatacata

SEQ ID NO: 152265 - DNA, 25 bp, Artificial
  Probe
cacttgaacccaggagctttaaaac

SEQ ID NO: 152266 - DNA, 25 bp, Artificial
  Probe
ctgaacataggctctgtcctataca

SEQ ID NO: 152267 - DNA, 25 bp, Artificial
  Probe
cctgccactctaagtattgaatgta

SEQ ID NO: 152268 - DNA, 25 bp, Artificial
  Probe
ctcctgccactctaagtattgaatg

SEQ ID NO: 152269 - DNA, 25 bp, Artificial
  Probe
tcctgccactctaagtattgaatgt

SEQ ID NO: 152270 - DNA, 25 bp, Artificial
  Probe
ttgtcagagtcaatgatgatgcttc

SEQ ID NO: 152271 - DNA, 25 bp, Artificial
  Probe
ctgccactctaagtattgaatgtac

SEQ ID NO: 152272 - DNA, 25 bp, Artificial
  Probe
cctcctgccactctaagtattgaat

SEQ ID NO: 152273 - DNA, 25 bp, Artificial
  Probe
tgccactctaagtattgaatgtact

SEQ ID NO: 152274 - DNA, 25 bp, Artificial
  Probe
tcagagtcaatgatgatgcttccag

SEQ ID NO: 152275 - DNA, 25 bp, Artificial
  Probe
gtcagagtcaatgatgatgcttcca

SEQ ID NO: 152276 - DNA, 25 bp, Artificial
  Probe
tgtcagagtcaatgatgatgcttcc

SEQ ID NO: 152277 - DNA, 25 bp, Artificial
  Probe
tttgtcagagtcaatgatgatgctt

SEQ ID NO: 152278 - DNA, 25 bp, Artificial
  Probe
ctttgtcagagtcaatgatgatgct

SEQ ID NO: 152279 - DNA, 25 bp, Artificial
  Probe
ccctttgtcagagtcaatgatgatg

SEQ ID NO: 152280 - DNA, 25 bp, Artificial
  Probe
tccctttgtcagagtcaatgatgat

SEQ ID NO: 152281 - DNA, 25 bp, Artificial
  Probe
cagagtcaatgatgatgcttccagg

SEQ ID NO: 152282 - DNA, 25 bp, Artificial
  Probe
cctttgtcagagtcaatgatgatgc

SEQ ID NO: 152283 - DNA, 25 bp, Artificial
  Probe
agagtcaatgatgatgcttccagga

SEQ ID NO: 152284 - DNA, 25 bp, Artificial
  Probe
caatgatgatgcttccaggacaaag

SEQ ID NO: 152285 - DNA, 25 bp, Artificial
  Probe
gtcaatgatgatgcttccaggacaa

SEQ ID NO: 152286 - DNA, 25 bp, Artificial
  Probe
ctccctttgtcagagtcaatgatga

SEQ ID NO: 152287 - DNA, 25 bp, Artificial
  Probe
gagtcaatgatgatgcttccaggac

SEQ ID NO: 152288 - DNA, 25 bp, Artificial
  Probe
tcaatgatgatgcttccaggacaaa

SEQ ID NO: 152289 - DNA, 25 bp, Artificial
  Probe
agtggaattattgttaccaaagaga

SEQ ID NO: 152290 - DNA, 25 bp, Artificial
  Probe
agtcaatgatgatgcttccaggaca

SEQ ID NO: 152291 - DNA, 25 bp, Artificial
  Probe
gtggaattattgttaccaaagagaa

SEQ ID NO: 152292 - DNA, 25 bp, Artificial
  Probe
ccctcctgccactctaagtattgaa

SEQ ID NO: 152293 - DNA, 25 bp, Artificial
  Probe
gccactctaagtattgaatgtactt

SEQ ID NO: 152294 - DNA, 25 bp, Artificial
  Probe
gctccctttgtcagagtcaatgatg

SEQ ID NO: 152295 - DNA, 25 bp, Artificial
  Probe
tagtggaattattgttaccaaagag

SEQ ID NO: 152296 - DNA, 25 bp, Artificial
  Probe
aggtagtgcagtatttcaagcataa

SEQ ID NO: 152297 - DNA, 25 bp, Artificial
  Probe
ggtagtgcagtatttcaagcataaa

SEQ ID NO: 152298 - DNA, 25 bp, Artificial
  Probe
tggaattattgttaccaaagagaat

SEQ ID NO: 152299 - DNA, 25 bp, Artificial
  Probe
caggtagtgcagtatttcaagcata

SEQ ID NO: 152300 - DNA, 25 bp, Artificial
  Probe
ttagtggaattattgttaccaaaga

SEQ ID NO: 152301 - DNA, 25 bp, Artificial
  Probe
ggctccctttgtcagagtcaatgat

SEQ ID NO: 152302 - DNA, 25 bp, Artificial
  Probe
tttagtggaattattgttaccaaag

SEQ ID NO: 152303 - DNA, 25 bp, Artificial
  Probe
tcagcaggtagtgcagtatttcaag

SEQ ID NO: 152304 - DNA, 25 bp, Artificial
  Probe
ctcagcaggtagtgcagtatttcaa

SEQ ID NO: 152305 - DNA, 25 bp, Artificial
  Probe
cttcctcagcaggtagtgcagtatt

SEQ ID NO: 152306 - DNA, 25 bp, Artificial
  Probe
ggaattattgttaccaaagagaata

SEQ ID NO: 152307 - DNA, 25 bp, Artificial
  Probe
gcaggtagtgcagtatttcaagcat

SEQ ID NO: 152308 - DNA, 25 bp, Artificial
  Probe
ttcctcagcaggtagtgcagtattt

SEQ ID NO: 152309 - DNA, 25 bp, Artificial
  Probe
catggagtttctagatggggacaac

SEQ ID NO: 152310 - DNA, 25 bp, Artificial
  Probe
gtagtgcagtatttcaagcataaaa

SEQ ID NO: 152311 - DNA, 25 bp, Artificial
  Probe
ccactctaagtattgaatgtacttt

SEQ ID NO: 152312 - DNA, 25 bp, Artificial
  Probe
acttctctaacggattcatgtgtag

SEQ ID NO: 152313 - DNA, 25 bp, Artificial
  Probe
ctacttctctaacggattcatgtgt

SEQ ID NO: 152314 - DNA, 25 bp, Artificial
  Probe
cagcctacttctctaacggattcat

SEQ ID NO: 152315 - DNA, 25 bp, Artificial
  Probe
cctacttctctaacggattcatgtg

SEQ ID NO: 152316 - DNA, 25 bp, Artificial
  Probe
tacttctctaacggattcatgtgta

SEQ ID NO: 152317 - DNA, 25 bp, Artificial
  Probe
cttctctaacggattcatgtgtagc

SEQ ID NO: 152318 - DNA, 25 bp, Artificial
  Probe
taacggattcatgtgtagctcaata

SEQ ID NO: 152319 - DNA, 25 bp, Artificial
  Probe
aacggattcatgtgtagctcaataa

SEQ ID NO: 152320 - DNA, 25 bp, Artificial
  Probe
ctaacggattcatgtgtagctcaat

SEQ ID NO: 152321 - DNA, 25 bp, Artificial
  Probe
agcctacttctctaacggattcatg

SEQ ID NO: 152322 - DNA, 25 bp, Artificial
  Probe
gcctacttctctaacggattcatgt

SEQ ID NO: 152323 - DNA, 25 bp, Artificial
  Probe
ttctctaacggattcatgtgtagct

SEQ ID NO: 152324 - DNA, 25 bp, Artificial
  Probe
tctaacggattcatgtgtagctcaa

SEQ ID NO: 152325 - DNA, 25 bp, Artificial
  Probe
gtctttgtaagcctttctattccca

SEQ ID NO: 152326 - DNA, 25 bp, Artificial
  Probe
tctctaacggattcatgtgtagctc

SEQ ID NO: 152327 - DNA, 25 bp, Artificial
  Probe
ctttgtaagcctttctattcccaac

SEQ ID NO: 152328 - DNA, 25 bp, Artificial
  Probe
tctttgtaagcctttctattcccaa

SEQ ID NO: 152329 - DNA, 25 bp, Artificial
  Probe
ggtctttgtaagcctttctattccc

SEQ ID NO: 152330 - DNA, 25 bp, Artificial
  Probe
gggtctttgtaagcctttctattcc

SEQ ID NO: 152331 - DNA, 25 bp, Artificial
  Probe
ctctaacggattcatgtgtagctca

SEQ ID NO: 152332 - DNA, 25 bp, Artificial
  Probe
gaccagtcacagccatttcaataat

SEQ ID NO: 152333 - DNA, 25 bp, Artificial
  Probe
cgggtctttgtaagcctttctattc

SEQ ID NO: 152334 - DNA, 25 bp, Artificial
  Probe
tttgtaagcctttctattcccaacg

SEQ ID NO: 152335 - DNA, 25 bp, Artificial
  Probe
gctcaataaagagaatgtttgtctg

SEQ ID NO: 152336 - DNA, 25 bp, Artificial
  Probe
ccagcctacttctctaacggattca

SEQ ID NO: 152337 - DNA, 25 bp, Artificial
  Probe
acgggtctttgtaagcctttctatt

SEQ ID NO: 152338 - DNA, 25 bp, Artificial
  Probe
cggattcatgtgtagctcaataaag

SEQ ID NO: 152339 - DNA, 25 bp, Artificial
  Probe
gtagtgtttacattaaagccagttt

SEQ ID NO: 152340 - DNA, 25 bp, Artificial
  Probe
acggattcatgtgtagctcaataaa

SEQ ID NO: 152341 - DNA, 25 bp, Artificial
  Probe
agaccagtcacagccatttcaataa

SEQ ID NO: 152342 - DNA, 25 bp, Artificial
  Probe
aagaccagtcacagccatttcaata

SEQ ID NO: 152343 - DNA, 25 bp, Artificial
  Probe
ggattcatgtgtagctcaataaaga

SEQ ID NO: 152344 - DNA, 25 bp, Artificial
  Probe
cgtcatttctacttgcctagtatct

SEQ ID NO: 152345 - DNA, 25 bp, Artificial
  Probe
tttctacttgcctagtatctaaccc

SEQ ID NO: 152346 - DNA, 25 bp, Artificial
  Probe
ctcaataaagagaatgtttgtctgt

SEQ ID NO: 152347 - DNA, 25 bp, Artificial
  Probe
cacgggtctttgtaagcctttctat

SEQ ID NO: 152348 - DNA, 25 bp, Artificial
  Probe
atcagtcctacgtcatttctacttg

SEQ ID NO: 152349 - DNA, 25 bp, Artificial
  Probe
gatcagtcctacgtcatttctactt

SEQ ID NO: 152350 - DNA, 25 bp, Artificial
  Probe
tttctattcccaacggtgaggtttc

SEQ ID NO: 152351 - DNA, 25 bp, Artificial
  Probe
ctttctattcccaacggtgaggttt

SEQ ID NO: 152352 - DNA, 25 bp, Artificial
  Probe
agctcaataaagagaatgtttgtct

SEQ ID NO: 152353 - DNA, 25 bp, Artificial
  Probe
tcctacgtcatttctacttgcctag

SEQ ID NO: 152354 - DNA, 25 bp, Artificial
  Probe
tgtagtgtttacattaaagccagtt

SEQ ID NO: 152355 - DNA, 25 bp, Artificial
  Probe
aatattggctgaagaccagtcacag

SEQ ID NO: 152356 - DNA, 25 bp, Artificial
  Probe
tgtgtagctcaataaagagaatgtt

SEQ ID NO: 152357 - DNA, 25 bp, Artificial
  Probe
tgatgaagaagaggaggaaggagag

SEQ ID NO: 152358 - DNA, 25 bp, Artificial
  Probe
ctgatgaagaagaggaggaaggaga

SEQ ID NO: 152359 - DNA, 25 bp, Artificial
  Probe
gacacagaagatgaggagagtgatg

SEQ ID NO: 152360 - DNA, 25 bp, Artificial
  Probe
agacacagaagatgaggagagtgat

SEQ ID NO: 152361 - DNA, 25 bp, Artificial
  Probe
gatgaagaagaggaggaaggagagg

SEQ ID NO: 152362 - DNA, 25 bp, Artificial
  Probe
cagacacagaagatgaggagagtga

SEQ ID NO: 152363 - DNA, 25 bp, Artificial
  Probe
atgaagaagaggaggaaggagaggt

SEQ ID NO: 152364 - DNA, 25 bp, Artificial
  Probe
aaagtacaaagaccgaccacagatt

SEQ ID NO: 152365 - DNA, 25 bp, Artificial
  Probe
agcacagatgaatgaaagtgttgac

SEQ ID NO: 152366 - DNA, 25 bp, Artificial
  Probe
cagcacagatgaatgaaagtgttga

SEQ ID NO: 152367 - DNA, 25 bp, Artificial
  Probe
acacagaagatgaggagagtgatgg

SEQ ID NO: 152368 - DNA, 25 bp, Artificial
  Probe
cctgatgaagaagaggaggaaggag

SEQ ID NO: 152369 - DNA, 25 bp, Artificial
  Probe
cagcagacacagaagatgaggagag

SEQ ID NO: 152370 - DNA, 25 bp, Artificial
  Probe
caaagtacaaagaccgaccacagat

SEQ ID NO: 152371 - DNA, 25 bp, Artificial
  Probe
tatttgctgtccaaagtacaaagac

SEQ ID NO: 152372 - DNA, 25 bp, Artificial
  Probe
ctatttgctgtccaaagtacaaaga

SEQ ID NO: 152373 - DNA, 25 bp, Artificial
  Probe
aagtacaaagaccgaccacagattg

SEQ ID NO: 152374 - DNA, 25 bp, Artificial
  Probe
gctatttgctgtccaaagtacaaag

SEQ ID NO: 152375 - DNA, 25 bp, Artificial
  Probe
aaattcatggaacatctagaccctg

SEQ ID NO: 152376 - DNA, 25 bp, Artificial
  Probe
caaaacgaaattcagactctacgga

SEQ ID NO: 152377 - DNA, 25 bp, Artificial
  Probe
tcaaaacgaaattcagactctacgg

SEQ ID NO: 152378 - DNA, 25 bp, Artificial
  Probe
agcagacacagaagatgaggagagt

SEQ ID NO: 152379 - DNA, 25 bp, Artificial
  Probe
aagaagaggaggaaggagaggtgtc

SEQ ID NO: 152380 - DNA, 25 bp, Artificial
  Probe
gaagaagaggaggaaggagaggtgt

SEQ ID NO: 152381 - DNA, 25 bp, Artificial
  Probe
tgaagaagaggaggaaggagaggtg

SEQ ID NO: 152382 - DNA, 25 bp, Artificial
  Probe
tgagaaggtcaaaacgaaattcaga

SEQ ID NO: 152383 - DNA, 25 bp, Artificial
  Probe
attcatggaacatctagaccctgat

SEQ ID NO: 152384 - DNA, 25 bp, Artificial
  Probe
gcacagatgaatgaaagtgttgacg

SEQ ID NO: 152385 - DNA, 25 bp, Artificial
  Probe
aattcatggaacatctagaccctga

SEQ ID NO: 152386 - DNA, 25 bp, Artificial
  Probe
aaaacgaaattcagactctacggag

SEQ ID NO: 152387 - DNA, 25 bp, Artificial
  Probe
atttgctgtccaaagtacaaagacc

SEQ ID NO: 152388 - DNA, 25 bp, Artificial
  Probe
ggtcaaaacgaaattcagactctac

SEQ ID NO: 152389 - DNA, 25 bp, Artificial
  Probe
aggtcaaaacgaaattcagactcta

SEQ ID NO: 152390 - DNA, 25 bp, Artificial
  Probe
ctagaccctgatgaagaagaggagg

SEQ ID NO: 152391 - DNA, 25 bp, Artificial
  Probe
gtcaaaacgaaattcagactctacg

SEQ ID NO: 152392 - DNA, 25 bp, Artificial
  Probe
gaaggtcaaaacgaaattcagactc

SEQ ID NO: 152393 - DNA, 25 bp, Artificial
  Probe
gagaaggtcaaaacgaaattcagac

SEQ ID NO: 152394 - DNA, 25 bp, Artificial
  Probe
cacagatgaatgaaagtgttgacgt

SEQ ID NO: 152395 - DNA, 25 bp, Artificial
  Probe
atggatgtcatcgctatttgctgtc

SEQ ID NO: 152396 - DNA, 25 bp, Artificial
  Probe
gcagcacagatgaatgaaagtgttg

SEQ ID NO: 152397 - DNA, 25 bp, Artificial
  Probe
aaggtcaaaacgaaattcagactct

SEQ ID NO: 152398 - DNA, 25 bp, Artificial
  Probe
agaaggtcaaaacgaaattcagact

SEQ ID NO: 152399 - DNA, 25 bp, Artificial
  Probe
agttggcagcacagatgaatgaaag

SEQ ID NO: 152400 - DNA, 25 bp, Artificial
  Probe
gagttggcagcacagatgaatgaaa

SEQ ID NO: 152401 - DNA, 25 bp, Artificial
  Probe
tcatggatgtcatcgctatttgctg

SEQ ID NO: 152402 - DNA, 25 bp, Artificial
  Probe
tagtggaagagagtttgacagaagt

SEQ ID NO: 152403 - DNA, 25 bp, Artificial
  Probe
ctctaattccagtccagctctacag

SEQ ID NO: 152404 - DNA, 25 bp, Artificial
  Probe
ctagtggaagagagtttgacagaag

SEQ ID NO: 152405 - DNA, 25 bp, Artificial
  Probe
actctaattccagtccagctctaca

SEQ ID NO: 152406 - DNA, 25 bp, Artificial
  Probe
tctaattccagtccagctctacagg

SEQ ID NO: 152407 - DNA, 25 bp, Artificial
  Probe
gtggaagagagtttgacagaagtct

SEQ ID NO: 152408 - DNA, 25 bp, Artificial
  Probe
agtggaagagagtttgacagaagtc

SEQ ID NO: 152409 - DNA, 25 bp, Artificial
  Probe
ttacctcatcaggatggtgaaacta

SEQ ID NO: 152410 - DNA, 25 bp, Artificial
  Probe
tacctcatcaggatggtgaaactag

SEQ ID NO: 152411 - DNA, 25 bp, Artificial
  Probe
cttacctcatcaggatggtgaaact

SEQ ID NO: 152412 - DNA, 25 bp, Artificial
  Probe
cttactggataacctgctggctgag

SEQ ID NO: 152413 - DNA, 25 bp, Artificial
  Probe
cttcatggccttactggataacctg

SEQ ID NO: 152414 - DNA, 25 bp, Artificial
  Probe
gaccttcatggccttactggataac

SEQ ID NO: 152415 - DNA, 25 bp, Artificial
  Probe
agaccttcatggccttactggataa

SEQ ID NO: 152416 - DNA, 25 bp, Artificial
  Probe
aagaccttcatggccttactggata

SEQ ID NO: 152417 - DNA, 25 bp, Artificial
  Probe
actagtggaagagagtttgacagaa

SEQ ID NO: 152418 - DNA, 25 bp, Artificial
  Probe
ccttacctcatcaggatggtgaaac

SEQ ID NO: 152419 - DNA, 25 bp, Artificial
  Probe
tactggataacctgctggctgagaa

SEQ ID NO: 152420 - DNA, 25 bp, Artificial
  Probe
ttactggataacctgctggctgaga

SEQ ID NO: 152421 - DNA, 25 bp, Artificial
  Probe
gactctaattccagtccagctctac

SEQ ID NO: 152422 - DNA, 25 bp, Artificial
  Probe
agccacgtttaataaaccagtcttt

SEQ ID NO: 152423 - DNA, 25 bp, Artificial
  Probe
gatggtgaaactagtggaagagagt

SEQ ID NO: 152424 - DNA, 25 bp, Artificial
  Probe
ggatggtgaaactagtggaagagag

SEQ ID NO: 152425 - DNA, 25 bp, Artificial
  Probe
tttgacagaagtctctggtttcatt

SEQ ID NO: 152426 - DNA, 25 bp, Artificial
  Probe
atcaggatggtgaaactagtggaag

SEQ ID NO: 152427 - DNA, 25 bp, Artificial
  Probe
caggatggtgaaactagtggaagag

SEQ ID NO: 152428 - DNA, 25 bp, Artificial
  Probe
ttgacagaagtctctggtttcattc

SEQ ID NO: 152429 - DNA, 25 bp, Artificial
  Probe
ccttcatggccttactggataacct

SEQ ID NO: 152430 - DNA, 25 bp, Artificial
  Probe
catcaggatggtgaaactagtggaa

SEQ ID NO: 152431 - DNA, 25 bp, Artificial
  Probe
aggatggtgaaactagtggaagaga

SEQ ID NO: 152432 - DNA, 25 bp, Artificial
  Probe
gtttgacagaagtctctggtttcat

SEQ ID NO: 152433 - DNA, 25 bp, Artificial
  Probe
tggaagagagtttgacagaagtctc

SEQ ID NO: 152434 - DNA, 25 bp, Artificial
  Probe
gagtttgacagaagtctctggtttc

SEQ ID NO: 152435 - DNA, 25 bp, Artificial
  Probe
accttcatggccttactggataacc

SEQ ID NO: 152436 - DNA, 25 bp, Artificial
  Probe
gaagacccttacctcatcaggatgg

SEQ ID NO: 152437 - DNA, 25 bp, Artificial
  Probe
agagtttgacagaagtctctggttt

SEQ ID NO: 152438 - DNA, 25 bp, Artificial
  Probe
ctcatcaggatggtgaaactagtgg

SEQ ID NO: 152439 - DNA, 25 bp, Artificial
  Probe
gaagaccttcatggccttactggat

SEQ ID NO: 152440 - DNA, 25 bp, Artificial
  Probe
cccttacctcatcaggatggtgaaa

SEQ ID NO: 152441 - DNA, 25 bp, Artificial
  Probe
agtttgacagaagtctctggtttca

SEQ ID NO: 152442 - DNA, 25 bp, Artificial
  Probe
tcaggatggtgaaactagtggaaga

SEQ ID NO: 152443 - DNA, 25 bp, Artificial
  Probe
gagagtttgacagaagtctctggtt

SEQ ID NO: 152444 - DNA, 25 bp, Artificial
  Probe
tcatcaggatggtgaaactagtgga

SEQ ID NO: 152445 - DNA, 25 bp, Artificial
  Probe
cagaagtctctggtttcattcctga

SEQ ID NO: 152446 - DNA, 25 bp, Artificial
  Probe
gacagaagtctctggtttcattcct

SEQ ID NO: 152447 - DNA, 25 bp, Artificial
  Probe
aattctagtccagcctctaccttag

SEQ ID NO: 152448 - DNA, 25 bp, Artificial
  Probe
attctagtccagcctctaccttagt

SEQ ID NO: 152449 - DNA, 25 bp, Artificial
  Probe
tccagcctctaccttagtgtcatac

SEQ ID NO: 152450 - DNA, 25 bp, Artificial
  Probe
gtccagcctctaccttagtgtcata

SEQ ID NO: 152451 - DNA, 25 bp, Artificial
  Probe
ttctagtccagcctctaccttagtg

SEQ ID NO: 152452 - DNA, 25 bp, Artificial
  Probe
aaattctagtccagcctctacctta

SEQ ID NO: 152453 - DNA, 25 bp, Artificial
  Probe
tatggtgtctttgcctttctcctta

SEQ ID NO: 152454 - DNA, 25 bp, Artificial
  Probe
aaagaaattctagtccagcctctac

SEQ ID NO: 152455 - DNA, 25 bp, Artificial
  Probe
gaaagaaattctagtccagcctcta

SEQ ID NO: 152456 - DNA, 25 bp, Artificial
  Probe
ctagtccagcctctaccttagtgtc

SEQ ID NO: 152457 - DNA, 25 bp, Artificial
  Probe
gaaattctagtccagcctctacctt

SEQ ID NO: 152458 - DNA, 25 bp, Artificial
  Probe
acacaagacttctcgtgacattgaa

SEQ ID NO: 152459 - DNA, 25 bp, Artificial
  Probe
ccagcctctaccttagtgtcataca

SEQ ID NO: 152460 - DNA, 25 bp, Artificial
  Probe
aatgaatttgccacacaagacttct

SEQ ID NO: 152461 - DNA, 25 bp, Artificial
  Probe
caatgaatttgccacacaagacttc

SEQ ID NO: 152462 - DNA, 25 bp, Artificial
  Probe
tagtccagcctctaccttagtgtca

SEQ ID NO: 152463 - DNA, 25 bp, Artificial
  Probe
aagaaattctagtccagcctctacc

SEQ ID NO: 152464 - DNA, 25 bp, Artificial
  Probe
tctagtccagcctctaccttagtgt

SEQ ID NO: 152465 - DNA, 25 bp, Artificial
  Probe
atgaatttgccacacaagacttctc

SEQ ID NO: 152466 - DNA, 25 bp, Artificial
  Probe
atggtgtctttgcctttctccttag

SEQ ID NO: 152467 - DNA, 25 bp, Artificial
  Probe
ctatggtgtctttgcctttctcctt

SEQ ID NO: 152468 - DNA, 25 bp, Artificial
  Probe
cacacaagacttctcgtgacattga

SEQ ID NO: 152469 - DNA, 25 bp, Artificial
  Probe
agaaattctagtccagcctctacct

SEQ ID NO: 152470 - DNA, 25 bp, Artificial
  Probe
gaaggaaagaaattctagtccagcc

SEQ ID NO: 152471 - DNA, 25 bp, Artificial
  Probe
aaggaaagaaattctagtccagcct

SEQ ID NO: 152472 - DNA, 25 bp, Artificial
  Probe
ccaatgaatttgccacacaagactt

SEQ ID NO: 152473 - DNA, 25 bp, Artificial
  Probe
agtccagcctctaccttagtgtcat

SEQ ID NO: 152474 - DNA, 25 bp, Artificial
  Probe
agaaggaaagaaattctagtccagc

SEQ ID NO: 152475 - DNA, 25 bp, Artificial
  Probe
ggaaagaaattctagtccagcctct

SEQ ID NO: 152476 - DNA, 25 bp, Artificial
  Probe
aggaaagaaattctagtccagcctc

SEQ ID NO: 152477 - DNA, 25 bp, Artificial
  Probe
actatggtgtctttgcctttctcct

SEQ ID NO: 152478 - DNA, 25 bp, Artificial
  Probe
ccacacaagacttctcgtgacattg

SEQ ID NO: 152479 - DNA, 25 bp, Artificial
  Probe
gactatggtgtctttgcctttctcc

SEQ ID NO: 152480 - DNA, 25 bp, Artificial
  Probe
cctctaccttagtgtcatacacaga

SEQ ID NO: 152481 - DNA, 25 bp, Artificial
  Probe
ctctaccttagtgtcatacacagat

SEQ ID NO: 152482 - DNA, 25 bp, Artificial
  Probe
cgactatggtgtctttgcctttctc

SEQ ID NO: 152483 - DNA, 25 bp, Artificial
  Probe
gaatttgccacacaagacttctcgt

SEQ ID NO: 152484 - DNA, 25 bp, Artificial
  Probe
tgaatttgccacacaagacttctcg

SEQ ID NO: 152485 - DNA, 25 bp, Artificial
  Probe
tctaccttagtgtcatacacagatt

SEQ ID NO: 152486 - DNA, 25 bp, Artificial
  Probe
cccaatgaatttgccacacaagact

SEQ ID NO: 152487 - DNA, 25 bp, Artificial
  Probe
tcccaatgaatttgccacacaagac

SEQ ID NO: 152488 - DNA, 25 bp, Artificial
  Probe
gtcccaatgaatttgccacacaaga

SEQ ID NO: 152489 - DNA, 25 bp, Artificial
  Probe
tctttgcctttctccttagcccttc

SEQ ID NO: 152490 - DNA, 25 bp, Artificial
  Probe
gtcatacacagattaaaacagttct

SEQ ID NO: 152491 - DNA, 25 bp, Artificial
  Probe
tgtcatacacagattaaaacagttc

SEQ ID NO: 152492 - DNA, 25 bp, Artificial
  Probe
tgttactctttattcttctgggcaa

SEQ ID NO: 152493 - DNA, 25 bp, Artificial
  Probe
cgtgtgttactctttattcttctgg

SEQ ID NO: 152494 - DNA, 25 bp, Artificial
  Probe
ccgtgtgttactctttattcttctg

SEQ ID NO: 152495 - DNA, 25 bp, Artificial
  Probe
tccgtgtgttactctttattcttct

SEQ ID NO: 152496 - DNA, 25 bp, Artificial
  Probe
ctccgtgtgttactctttattcttc

SEQ ID NO: 152497 - DNA, 25 bp, Artificial
  Probe
cctccgtgtgttactctttattctt

SEQ ID NO: 152498 - DNA, 25 bp, Artificial
  Probe
gtgtgttactctttattcttctggg

SEQ ID NO: 152499 - DNA, 25 bp, Artificial
  Probe
gtgttactctttattcttctgggca

SEQ ID NO: 152500 - DNA, 25 bp, Artificial
  Probe
tgtgttactctttattcttctgggc

SEQ ID NO: 152501 - DNA, 25 bp, Artificial
  Probe
gttactctttattcttctgggcaaa

SEQ ID NO: 152502 - DNA, 25 bp, Artificial
  Probe
ccctccgtgtgttactctttattct

SEQ ID NO: 152503 - DNA, 25 bp, Artificial
  Probe
gggatcattctgagtttcaaagtct

SEQ ID NO: 152504 - DNA, 25 bp, Artificial
  Probe
aacataagatcaggctttggatgag

SEQ ID NO: 152505 - DNA, 25 bp, Artificial
  Probe
tgggatcattctgagtttcaaagtc

SEQ ID NO: 152506 - DNA, 25 bp, Artificial
  Probe
gtgggatcattctgagtttcaaagt

SEQ ID NO: 152507 - DNA, 25 bp, Artificial
  Probe
ggatcattctgagtttcaaagtcta

SEQ ID NO: 152508 - DNA, 25 bp, Artificial
  Probe
cataagatcaggctttggatgagtg

SEQ ID NO: 152509 - DNA, 25 bp, Artificial
  Probe
ataagatcaggctttggatgagtgt

SEQ ID NO: 152510 - DNA, 25 bp, Artificial
  Probe
acataagatcaggctttggatgagt

SEQ ID NO: 152511 - DNA, 25 bp, Artificial
  Probe
ggtgggatcattctgagtttcaaag

SEQ ID NO: 152512 - DNA, 25 bp, Artificial
  Probe
taagatcaggctttggatgagtgtt

SEQ ID NO: 152513 - DNA, 25 bp, Artificial
  Probe
aggtgggatcattctgagtttcaaa

SEQ ID NO: 152514 - DNA, 25 bp, Artificial
  Probe
atcaggctttggatgagtgttcttt

SEQ ID NO: 152515 - DNA, 25 bp, Artificial
  Probe
tttccctttctgacatgaatgagaa

SEQ ID NO: 152516 - DNA, 25 bp, Artificial
  Probe
gccctccgtgtgttactctttattc

SEQ ID NO: 152517 - DNA, 25 bp, Artificial
  Probe
ttccctttctgacatgaatgagaag

SEQ ID NO: 152518 - DNA, 25 bp, Artificial
  Probe
tttggatgagtgttcttttctggtt

SEQ ID NO: 152519 - DNA, 25 bp, Artificial
  Probe
actctttattcttctgggcaaaatt

SEQ ID NO: 152520 - DNA, 25 bp, Artificial
  Probe
gatcattctgagtttcaaagtctaa

SEQ ID NO: 152521 - DNA, 25 bp, Artificial
  Probe
ttactctttattcttctgggcaaaa

SEQ ID NO: 152522 - DNA, 25 bp, Artificial
  Probe
ctttggatgagtgttcttttctggt

SEQ ID NO: 152523 - DNA, 25 bp, Artificial
  Probe
caggtgggatcattctgagtttcaa

SEQ ID NO: 152524 - DNA, 25 bp, Artificial
  Probe
gatcaggctttggatgagtgttctt

SEQ ID NO: 152525 - DNA, 25 bp, Artificial
  Probe
aagatcaggctttggatgagtgttc

SEQ ID NO: 152526 - DNA, 25 bp, Artificial
  Probe
agtgttcttttctggttggcatatc

SEQ ID NO: 152527 - DNA, 25 bp, Artificial
  Probe
gagtgttcttttctggttggcatat

SEQ ID NO: 152528 - DNA, 25 bp, Artificial
  Probe
ttggatgagtgttcttttctggttg

SEQ ID NO: 152529 - DNA, 25 bp, Artificial
  Probe
tactctttattcttctgggcaaaat

SEQ ID NO: 152530 - DNA, 25 bp, Artificial
  Probe
agccctccgtgtgttactctttatt

SEQ ID NO: 152531 - DNA, 25 bp, Artificial
  Probe
tcattctgagtttcaaagtctaatt

SEQ ID NO: 152532 - DNA, 25 bp, Artificial
  Probe
aagccctccgtgtgttactctttat

SEQ ID NO: 152533 - DNA, 25 bp, Artificial
  Probe
atcattctgagtttcaaagtctaat

SEQ ID NO: 152534 - DNA, 25 bp, Artificial
  Probe
attttccctttctgacatgaatgag

SEQ ID NO: 152535 - DNA, 25 bp, Artificial
  Probe
ttttccctttctgacatgaatgaga

SEQ ID NO: 152536 - DNA, 25 bp, Artificial
  Probe
cccaatattttccctttctgacatg

SEQ ID NO: 152537 - DNA, 25 bp, Artificial
  Probe
catcttatcagccatcatctctaca

SEQ ID NO: 152538 - DNA, 25 bp, Artificial
  Probe
atcttatcagccatcatctctacag

SEQ ID NO: 152539 - DNA, 25 bp, Artificial
  Probe
tcatcttatcagccatcatctctac

SEQ ID NO: 152540 - DNA, 25 bp, Artificial
  Probe
gtcatcttatcagccatcatctcta

SEQ ID NO: 152541 - DNA, 25 bp, Artificial
  Probe
agtcatcttatcagccatcatctct

SEQ ID NO: 152542 - DNA, 25 bp, Artificial
  Probe
tcttatcagccatcatctctacaga

SEQ ID NO: 152543 - DNA, 25 bp, Artificial
  Probe
ggagtcatcttatcagccatcatct

SEQ ID NO: 152544 - DNA, 25 bp, Artificial
  Probe
gagtcatcttatcagccatcatctc

SEQ ID NO: 152545 - DNA, 25 bp, Artificial
  Probe
gataaattatgctcacaacgggaag

SEQ ID NO: 152546 - DNA, 25 bp, Artificial
  Probe
cttatcagccatcatctctacagat

SEQ ID NO: 152547 - DNA, 25 bp, Artificial
  Probe
ttatcagccatcatctctacagatc

SEQ ID NO: 152548 - DNA, 25 bp, Artificial
  Probe
tggagtcatcttatcagccatcatc

SEQ ID NO: 152549 - DNA, 25 bp, Artificial
  Probe
ggataaattatgctcacaacgggaa

SEQ ID NO: 152550 - DNA, 25 bp, Artificial
  Probe
tatcagccatcatctctacagatcc

SEQ ID NO: 152551 - DNA, 25 bp, Artificial
  Probe
tacatctttgctgctgaagtacaat

SEQ ID NO: 152552 - DNA, 25 bp, Artificial
  Probe
gttctcaccaagtcctccttaaagt

SEQ ID NO: 152553 - DNA, 25 bp, Artificial
  Probe
ctacatctttgctgctgaagtacaa

SEQ ID NO: 152554 - DNA, 25 bp, Artificial
  Probe
gtccagtcccaaccaagatactaaa

SEQ ID NO: 152555 - DNA, 25 bp, Artificial
  Probe
gtctacaacacaagttccaggacag

SEQ ID NO: 152556 - DNA, 25 bp, Artificial
  Probe
atatcgctacatctttgctgctgaa

SEQ ID NO: 152557 - DNA, 25 bp, Artificial
  Probe
acatctttgctgctgaagtacaatg

SEQ ID NO: 152558 - DNA, 25 bp, Artificial
  Probe
tacacagagaaatcctatcttgaaa

SEQ ID NO: 152559 - DNA, 25 bp, Artificial
  Probe
aatatgacgttctcaccaagtcctc

SEQ ID NO: 152560 - DNA, 25 bp, Artificial
  Probe
gatacacagagaaatcctatcttga

SEQ ID NO: 152561 - DNA, 25 bp, Artificial
  Probe
agtccagtcccaaccaagatactaa

SEQ ID NO: 152562 - DNA, 25 bp, Artificial
  Probe
atacacagagaaatcctatcttgaa

SEQ ID NO: 152563 - DNA, 25 bp, Artificial
  Probe
ttctcaccaagtcctccttaaagtg

SEQ ID NO: 152564 - DNA, 25 bp, Artificial
  Probe
cgttctcaccaagtcctccttaaag

SEQ ID NO: 152565 - DNA, 25 bp, Artificial
  Probe
catctttgctgctgaagtacaatgg

SEQ ID NO: 152566 - DNA, 25 bp, Artificial
  Probe
cggataaattatgctcacaacggga

SEQ ID NO: 152567 - DNA, 25 bp, Artificial
  Probe
catatcgctacatctttgctgctga

SEQ ID NO: 152568 - DNA, 25 bp, Artificial
  Probe
tatcgctacatctttgctgctgaag

SEQ ID NO: 152569 - DNA, 25 bp, Artificial
  Probe
gagtccagtcccaaccaagatacta

SEQ ID NO: 152570 - DNA, 25 bp, Artificial
  Probe
atctttgctgctgaagtacaatgga

SEQ ID NO: 152571 - DNA, 25 bp, Artificial
  Probe
tattctggatgcgaaaagttttacg

SEQ ID NO: 152572 - DNA, 25 bp, Artificial
  Probe
ctggacctgcatggtttatttattc

SEQ ID NO: 152573 - DNA, 25 bp, Artificial
  Probe
ccagtcccaaccaagatactaaaat

SEQ ID NO: 152574 - DNA, 25 bp, Artificial
  Probe
ataaattatgctcacaacgggaagc

SEQ ID NO: 152575 - DNA, 25 bp, Artificial
  Probe
caagagcctttaatcctagcactcg

SEQ ID NO: 152576 - DNA, 25 bp, Artificial
  Probe
tctttgctgctgaagtacaatggag

SEQ ID NO: 152577 - DNA, 25 bp, Artificial
  Probe
gctacatctttgctgctgaagtaca

SEQ ID NO: 152578 - DNA, 25 bp, Artificial
  Probe
ccaaaacgcaagaggatgaaaattc

SEQ ID NO: 152579 - DNA, 25 bp, Artificial
  Probe
atggagtcatcttatcagccatcat

SEQ ID NO: 152580 - DNA, 25 bp, Artificial
  Probe
atgatggagtcatcttatcagccat

SEQ ID NO: 152581 - DNA, 25 bp, Artificial
  Probe
aaatatgacgttctcaccaagtcct

SEQ ID NO: 152582 - DNA, 25 bp, Artificial
  Probe
aacaatcaattacatacactcagca

SEQ ID NO: 152583 - DNA, 25 bp, Artificial
  Probe
acaatcaattacatacactcagcat

SEQ ID NO: 152584 - DNA, 25 bp, Artificial
  Probe
caatcaattacatacactcagcatg

SEQ ID NO: 152585 - DNA, 25 bp, Artificial
  Probe
tcaattacatacactcagcatgatt

SEQ ID NO: 152586 - DNA, 25 bp, Artificial
  Probe
aatcaattacatacactcagcatga

SEQ ID NO: 152587 - DNA, 25 bp, Artificial
  Probe
cccttacctacctgaaacaatcaat

SEQ ID NO: 152588 - DNA, 25 bp, Artificial
  Probe
ccttacctacctgaaacaatcaatt

SEQ ID NO: 152589 - DNA, 25 bp, Artificial
  Probe
aaacaatcaattacatacactcagc

SEQ ID NO: 152590 - DNA, 25 bp, Artificial
  Probe
ctccatgcctatcatttctctacaa

SEQ ID NO: 152591 - DNA, 25 bp, Artificial
  Probe
ttctccatgcctatcatttctctac

SEQ ID NO: 152592 - DNA, 25 bp, Artificial
  Probe
ttcagagtaagagaaataccagccc

SEQ ID NO: 152593 - DNA, 25 bp, Artificial
  Probe
tccatgcctatcatttctctacaaa

SEQ ID NO: 152594 - DNA, 25 bp, Artificial
  Probe
aattctccatgcctatcatttctct

SEQ ID NO: 152595 - DNA, 25 bp, Artificial
  Probe
aaagcccttacctacctgaaacaat

SEQ ID NO: 152596 - DNA, 25 bp, Artificial
  Probe
tctccatgcctatcatttctctaca

SEQ ID NO: 152597 - DNA, 25 bp, Artificial
  Probe
tgctttataagagaacatggctttc

SEQ ID NO: 152598 - DNA, 25 bp, Artificial
  Probe
attctccatgcctatcatttctcta

SEQ ID NO: 152599 - DNA, 25 bp, Artificial
  Probe
acctacctgaaacaatcaattacat

SEQ ID NO: 152600 - DNA, 25 bp, Artificial
  Probe
atgctttataagagaacatggcttt

SEQ ID NO: 152601 - DNA, 25 bp, Artificial
  Probe
actatgctttataagagaacatggc

SEQ ID NO: 152602 - DNA, 25 bp, Artificial
  Probe
aagcccttacctacctgaaacaatc

SEQ ID NO: 152603 - DNA, 25 bp, Artificial
  Probe
ctatgctttataagagaacatggct

SEQ ID NO: 152604 - DNA, 25 bp, Artificial
  Probe
tacctacctgaaacaatcaattaca

SEQ ID NO: 152605 - DNA, 25 bp, Artificial
  Probe
gaaagcccttacctacctgaaacaa

SEQ ID NO: 152606 - DNA, 25 bp, Artificial
  Probe
atcaattacatacactcagcatgat

SEQ ID NO: 152607 - DNA, 25 bp, Artificial
  Probe
acctgaaacaatcaattacatacac

SEQ ID NO: 152608 - DNA, 25 bp, Artificial
  Probe
ccatgcctatcatttctctacaaat

SEQ ID NO: 152609 - DNA, 25 bp, Artificial
  Probe
ttgagcaaagaacaataacagtaaa

SEQ ID NO: 152610 - DNA, 25 bp, Artificial
  Probe
tatgctttataagagaacatggctt

SEQ ID NO: 152611 - DNA, 25 bp, Artificial
  Probe
tttctcttagctttctgaggttgtt

SEQ ID NO: 152612 - DNA, 25 bp, Artificial
  Probe
cctgaaacaatcaattacatacact

SEQ ID NO: 152613 - DNA, 25 bp, Artificial
  Probe
ttctcttagctttctgaggttgttc

SEQ ID NO: 152614 - DNA, 25 bp, Artificial
  Probe
ctttctcttagctttctgaggttgt

SEQ ID NO: 152615 - DNA, 25 bp, Artificial
  Probe
ttacatacactcagcatgatttact

SEQ ID NO: 152616 - DNA, 25 bp, Artificial
  Probe
tttcagagtaagagaaataccagcc

SEQ ID NO: 152617 - DNA, 25 bp, Artificial
  Probe
caattacatacactcagcatgattt

SEQ ID NO: 152618 - DNA, 25 bp, Artificial
  Probe
acatacactcagcatgatttactat

SEQ ID NO: 152619 - DNA, 25 bp, Artificial
  Probe
gcccttacctacctgaaacaatcaa

SEQ ID NO: 152620 - DNA, 25 bp, Artificial
  Probe
tctcttagctttctgaggttgttca

SEQ ID NO: 152621 - DNA, 25 bp, Artificial
  Probe
aagtagtggtatgtggtaaaatggt

SEQ ID NO: 152622 - DNA, 25 bp, Artificial
  Probe
gcaagtagtggtatgtggtaaaatg

SEQ ID NO: 152623 - DNA, 25 bp, Artificial
  Probe
gtggtatgtggtaaaatggtaaagc

SEQ ID NO: 152624 - DNA, 25 bp, Artificial
  Probe
caagtagtggtatgtggtaaaatgg

SEQ ID NO: 152625 - DNA, 25 bp, Artificial
  Probe
tgaaacaatcaattacatacactca

SEQ ID NO: 152626 - DNA, 25 bp, Artificial
  Probe
ttacctacctgaaacaatcaattac

SEQ ID NO: 152627 - DNA, 25 bp, Artificial
  Probe
gcagatagagcaccaacacatataa

SEQ ID NO: 152628 - DNA, 25 bp, Artificial
  Probe
aagatagccaaggatacacagagaa

SEQ ID NO: 152629 - DNA, 25 bp, Artificial
  Probe
aacagttcatatctcacacagacat

SEQ ID NO: 152630 - DNA, 25 bp, Artificial
  Probe
caagatagccaaggatacacagaga

SEQ ID NO: 152631 - DNA, 25 bp, Artificial
  Probe
caactctgctgtctgtgtatctcta

SEQ ID NO: 152632 - DNA, 25 bp, Artificial
  Probe
ctagaagtccaccattcctcttatg

SEQ ID NO: 152633 - DNA, 25 bp, Artificial
  Probe
aactctgctgtctgtgtatctctag

SEQ ID NO: 152634 - DNA, 25 bp, Artificial
  Probe
acagttcatatctcacacagacatg

SEQ ID NO: 152635 - DNA, 25 bp, Artificial
  Probe
atctgatgctctcttctgatgtgtc

SEQ ID NO: 152636 - DNA, 25 bp, Artificial
  Probe
gctagaagtccaccattcctcttat

SEQ ID NO: 152637 - DNA, 25 bp, Artificial
  Probe
atggtaactcgctgtctgtaactag

SEQ ID NO: 152638 - DNA, 25 bp, Artificial
  Probe
ccaagatagccaaggatacacagag

SEQ ID NO: 152639 - DNA, 25 bp, Artificial
  Probe
cctataaggcaagttccaagatagc

SEQ ID NO: 152640 - DNA, 25 bp, Artificial
  Probe
gatgctctcttctgatgtgtctgaa

SEQ ID NO: 152641 - DNA, 25 bp, Artificial
  Probe
atgctctcttctgatgtgtctgaac

SEQ ID NO: 152642 - DNA, 25 bp, Artificial
  Probe
gatctgatgctctcttctgatgtgt

SEQ ID NO: 152643 - DNA, 25 bp, Artificial
  Probe
caagttccaagatagccaaggatac

SEQ ID NO: 152644 - DNA, 25 bp, Artificial
  Probe
catggtaactcgctgtctgtaacta

SEQ ID NO: 152645 - DNA, 25 bp, Artificial
  Probe
tgaatggtgtttgtctttgaaatgt

SEQ ID NO: 152646 - DNA, 25 bp, Artificial
  Probe
aagttccaagatagccaaggataca

SEQ ID NO: 152647 - DNA, 25 bp, Artificial
  Probe
aatggtgtttgtctttgaaatgtct

SEQ ID NO: 152648 - DNA, 25 bp, Artificial
  Probe
atggtgtttgtctttgaaatgtctg

SEQ ID NO: 152649 - DNA, 25 bp, Artificial
  Probe
gaatggtgtttgtctttgaaatgtc

SEQ ID NO: 152650 - DNA, 25 bp, Artificial
  Probe
ggatgaatggtgtttgtctttgaaa

SEQ ID NO: 152651 - DNA, 25 bp, Artificial
  Probe
attaaacccagaatctccactcaaa

SEQ ID NO: 152652 - DNA, 25 bp, Artificial
  Probe
ccatattaaacccagaatctccact

SEQ ID NO: 152653 - DNA, 25 bp, Artificial
  Probe
tccatattaaacccagaatctccac

SEQ ID NO: 152654 - DNA, 25 bp, Artificial
  Probe
ttagagtccacacaaggtcattaaa

SEQ ID NO: 152655 - DNA, 25 bp, Artificial
  Probe
tttagagtccacacaaggtcattaa

SEQ ID NO: 152656 - DNA, 25 bp, Artificial
  Probe
agtaggcaaacagttcatatctcac

SEQ ID NO: 152657 - DNA, 25 bp, Artificial
  Probe
tcaactctgctgtctgtgtatctct

SEQ ID NO: 152658 - DNA, 25 bp, Artificial
  Probe
gtcaactctgctgtctgtgtatctc

SEQ ID NO: 152659 - DNA, 25 bp, Artificial
  Probe
ctgatgctctcttctgatgtgtctg

SEQ ID NO: 152660 - DNA, 25 bp, Artificial
  Probe
tattaaacccagaatctccactcaa

SEQ ID NO: 152661 - DNA, 25 bp, Artificial
  Probe
ttaaacccagaatctccactcaaag

SEQ ID NO: 152662 - DNA, 25 bp, Artificial
  Probe
taggcaaacagttcatatctcacac

SEQ ID NO: 152663 - DNA, 25 bp, Artificial
  Probe
gtaggcaaacagttcatatctcaca

SEQ ID NO: 152664 - DNA, 25 bp, Artificial
  Probe
tagtaggcaaacagttcatatctca

SEQ ID NO: 152665 - DNA, 25 bp, Artificial
  Probe
atattaaacccagaatctccactca

SEQ ID NO: 152666 - DNA, 25 bp, Artificial
  Probe
ctttagagtccacacaaggtcatta

SEQ ID NO: 152667 - DNA, 25 bp, Artificial
  Probe
atgaatggtgtttgtctttgaaatg

SEQ ID NO: 152668 - DNA, 25 bp, Artificial
  Probe
gatagccaaggatacacagagaaac

SEQ ID NO: 152669 - DNA, 25 bp, Artificial
  Probe
agatagccaaggatacacagagaaa

SEQ ID NO: 152670 - DNA, 25 bp, Artificial
  Probe
tacacaacgtatcctctctagcatt

SEQ ID NO: 152671 - DNA, 25 bp, Artificial
  Probe
ttacacaacgtatcctctctagcat

SEQ ID NO: 152672 - DNA, 25 bp, Artificial
  Probe
atcctatctcaacatcctaccactt

SEQ ID NO: 152673 - DNA, 25 bp, Artificial
  Probe
catcctatctcaacatcctaccact

SEQ ID NO: 152674 - DNA, 25 bp, Artificial
  Probe
tcctatctcaacatcctaccacttg

SEQ ID NO: 152675 - DNA, 25 bp, Artificial
  Probe
tagattgaatgccttggacctgaat

SEQ ID NO: 152676 - DNA, 25 bp, Artificial
  Probe
gaagagactgaatgaccagagtatg

SEQ ID NO: 152677 - DNA, 25 bp, Artificial
  Probe
agaagagactgaatgaccagagtat

SEQ ID NO: 152678 - DNA, 25 bp, Artificial
  Probe
aagaagagactgaatgaccagagta

SEQ ID NO: 152679 - DNA, 25 bp, Artificial
  Probe
cactgaagaagagactgaatgacca

SEQ ID NO: 152680 - DNA, 25 bp, Artificial
  Probe
cctatctcaacatcctaccacttgt

SEQ ID NO: 152681 - DNA, 25 bp, Artificial
  Probe
gcatcctatctcaacatcctaccac

SEQ ID NO: 152682 - DNA, 25 bp, Artificial
  Probe
tcactgaagaagagactgaatgacc

SEQ ID NO: 152683 - DNA, 25 bp, Artificial
  Probe
atgtggatcagattcactatgtagg

SEQ ID NO: 152684 - DNA, 25 bp, Artificial
  Probe
cgtatgtggatcagattcactatgt

SEQ ID NO: 152685 - DNA, 25 bp, Artificial
  Probe
gaagaagagactgaatgaccagagt

SEQ ID NO: 152686 - DNA, 25 bp, Artificial
  Probe
tgaagaagagactgaatgaccagag

SEQ ID NO: 152687 - DNA, 25 bp, Artificial
  Probe
ctgaagaagagactgaatgaccaga

SEQ ID NO: 152688 - DNA, 25 bp, Artificial
  Probe
ctagattgaatgccttggacctgaa

SEQ ID NO: 152689 - DNA, 25 bp, Artificial
  Probe
ccataccagtaagagaaaccctaaa

SEQ ID NO: 152690 - DNA, 25 bp, Artificial
  Probe
tccataccagtaagagaaaccctaa

SEQ ID NO: 152691 - DNA, 25 bp, Artificial
  Probe
agattgaatgccttggacctgaatt

SEQ ID NO: 152692 - DNA, 25 bp, Artificial
  Probe
actgaagaagagactgaatgaccag

SEQ ID NO: 152693 - DNA, 25 bp, Artificial
  Probe
accagtaagagaaaccctaaagaat

SEQ ID NO: 152694 - DNA, 25 bp, Artificial
  Probe
cagtaagagaaaccctaaagaatgg

SEQ ID NO: 152695 - DNA, 25 bp, Artificial
  Probe
ccagtaagagaaaccctaaagaatg

SEQ ID NO: 152696 - DNA, 25 bp, Artificial
  Probe
tgcttcagacatactttctttctct

SEQ ID NO: 152697 - DNA, 25 bp, Artificial
  Probe
gtgcttcagacatactttctttctc

SEQ ID NO: 152698 - DNA, 25 bp, Artificial
  Probe
aagagactgaatgaccagagtatgg

SEQ ID NO: 152699 - DNA, 25 bp, Artificial
  Probe
cctaaagaatgggctctcaatactt

SEQ ID NO: 152700 - DNA, 25 bp, Artificial
  Probe
taccagtaagagaaaccctaaagaa

SEQ ID NO: 152701 - DNA, 25 bp, Artificial
  Probe
ctaaagaatgggctctcaatacttg

SEQ ID NO: 152702 - DNA, 25 bp, Artificial
  Probe
ataccagtaagagaaaccctaaaga

SEQ ID NO: 152703 - DNA, 25 bp, Artificial
  Probe
cataccagtaagagaaaccctaaag

SEQ ID NO: 152704 - DNA, 25 bp, Artificial
  Probe
gatcagattcactatgtagggcaaa

SEQ ID NO: 152705 - DNA, 25 bp, Artificial
  Probe
ctccataccagtaagagaaacccta

SEQ ID NO: 152706 - DNA, 25 bp, Artificial
  Probe
ttgtgcttcagacatactttctttc

SEQ ID NO: 152707 - DNA, 25 bp, Artificial
  Probe
ctttgtgcttcagacatactttctt

SEQ ID NO: 152708 - DNA, 25 bp, Artificial
  Probe
tgtgcttcagacatactttctttct

SEQ ID NO: 152709 - DNA, 25 bp, Artificial
  Probe
gcttcagacatactttctttctcta

SEQ ID NO: 152710 - DNA, 25 bp, Artificial
  Probe
gacgtatgtggatcagattcactat

SEQ ID NO: 152711 - DNA, 25 bp, Artificial
  Probe
tttgtgcttcagacatactttcttt

SEQ ID NO: 152712 - DNA, 25 bp, Artificial
  Probe
actttgtgcttcagacatactttct

SEQ ID NO: 152713 - DNA, 25 bp, Artificial
  Probe
acgtatgtggatcagattcactatg

SEQ ID NO: 152714 - DNA, 25 bp, Artificial
  Probe
gtatgtggatcagattcactatgta

SEQ ID NO: 152715 - DNA, 25 bp, Artificial
  Probe
agacgtatgtggatcagattcacta

SEQ ID NO: 152716 - DNA, 25 bp, Artificial
  Probe
ttgcatcctatctcaacatcctacc

SEQ ID NO: 152717 - DNA, 25 bp, Artificial
  Probe
ctgagtctcaagtcaacaagctaag

SEQ ID NO: 152718 - DNA, 25 bp, Artificial
  Probe
atatcgctgagtctcaagtcaacaa

SEQ ID NO: 152719 - DNA, 25 bp, Artificial
  Probe
cagaagatggaagaatgaggctctc

SEQ ID NO: 152720 - DNA, 25 bp, Artificial
  Probe
tatcgctgagtctcaagtcaacaag

SEQ ID NO: 152721 - DNA, 25 bp, Artificial
  Probe
tgagtctcaagtcaacaagctaagg

SEQ ID NO: 152722 - DNA, 25 bp, Artificial
  Probe
agatatcgctgagtctcaagtcaac

SEQ ID NO: 152723 - DNA, 25 bp, Artificial
  Probe
ataaaccctcctgcatactcataaa

SEQ ID NO: 152724 - DNA, 25 bp, Artificial
  Probe
aataaaccctcctgcatactcataa

SEQ ID NO: 152725 - DNA, 25 bp, Artificial
  Probe
aaataaaccctcctgcatactcata

SEQ ID NO: 152726 - DNA, 25 bp, Artificial
  Probe
gatatcgctgagtctcaagtcaaca

SEQ ID NO: 152727 - DNA, 25 bp, Artificial
  Probe
cagatatcgctgagtctcaagtcaa

SEQ ID NO: 152728 - DNA, 25 bp, Artificial
  Probe
agaagatggaagaatgaggctctcc

SEQ ID NO: 152729 - DNA, 25 bp, Artificial
  Probe
atgaactagaggaggctgaggagag

SEQ ID NO: 152730 - DNA, 25 bp, Artificial
  Probe
ccagaagatggaagaatgaggctct

SEQ ID NO: 152731 - DNA, 25 bp, Artificial
  Probe
atgaagaagaacctggagcagacag

SEQ ID NO: 152732 - DNA, 25 bp, Artificial
  Probe
gatgaagaagaacctggagcagaca

SEQ ID NO: 152733 - DNA, 25 bp, Artificial
  Probe
gagtctcaagtcaacaagctaaggg

SEQ ID NO: 152734 - DNA, 25 bp, Artificial
  Probe
gctgagtctcaagtcaacaagctaa

SEQ ID NO: 152735 - DNA, 25 bp, Artificial
  Probe
caaagtgaagtcctacaagaggcag

SEQ ID NO: 152736 - DNA, 25 bp, Artificial
  Probe
catgaactagaggaggctgaggaga

SEQ ID NO: 152737 - DNA, 25 bp, Artificial
  Probe
aaaataaaccctcctgcatactcat

SEQ ID NO: 152738 - DNA, 25 bp, Artificial
  Probe
taaaccctcctgcatactcataaaa

SEQ ID NO: 152739 - DNA, 25 bp, Artificial
  Probe
gaagaacctggagcagacagtgaag

SEQ ID NO: 152740 - DNA, 25 bp, Artificial
  Probe
gaagaagaacctggagcagacagtg

SEQ ID NO: 152741 - DNA, 25 bp, Artificial
  Probe
gcagatatcgctgagtctcaagtca

SEQ ID NO: 152742 - DNA, 25 bp, Artificial
  Probe
aatatgagcgcaaagtcaaagagat

SEQ ID NO: 152743 - DNA, 25 bp, Artificial
  Probe
aaatatgagcgcaaagtcaaagaga

SEQ ID NO: 152744 - DNA, 25 bp, Artificial
  Probe
caaatatgagcgcaaagtcaaagag

SEQ ID NO: 152745 - DNA, 25 bp, Artificial
  Probe
aaagtgaagtcctacaagaggcagg

SEQ ID NO: 152746 - DNA, 25 bp, Artificial
  Probe
atatgagcgcaaagtcaaagagatg

SEQ ID NO: 152747 - DNA, 25 bp, Artificial
  Probe
cacaaatatgagcgcaaagtcaaag

SEQ ID NO: 152748 - DNA, 25 bp, Artificial
  Probe
acaaatatgagcgcaaagtcaaaga

SEQ ID NO: 152749 - DNA, 25 bp, Artificial
  Probe
ccaaagtgaagtcctacaagaggca

SEQ ID NO: 152750 - DNA, 25 bp, Artificial
  Probe
gaagatggaagaatgaggctctccc

SEQ ID NO: 152751 - DNA, 25 bp, Artificial
  Probe
ggcagatatcgctgagtctcaagtc

SEQ ID NO: 152752 - DNA, 25 bp, Artificial
  Probe
tatgagcgcaaagtcaaagagatga

SEQ ID NO: 152753 - DNA, 25 bp, Artificial
  Probe
ccacaaatatgagcgcaaagtcaaa

SEQ ID NO: 152754 - DNA, 25 bp, Artificial
  Probe
agtctcaagtcaacaagctaagggc

SEQ ID NO: 152755 - DNA, 25 bp, Artificial
  Probe
cgctgagtctcaagtcaacaagcta

SEQ ID NO: 152756 - DNA, 25 bp, Artificial
  Probe
gaggccagaagatggaagaatgagg

SEQ ID NO: 152757 - DNA, 25 bp, Artificial
  Probe
ggaggccagaagatggaagaatgag

SEQ ID NO: 152758 - DNA, 25 bp, Artificial
  Probe
aggccaaagtgaagtcctacaagag

SEQ ID NO: 152759 - DNA, 25 bp, Artificial
  Probe
caggccaaagtgaagtcctacaaga

SEQ ID NO: 152760 - DNA, 25 bp, Artificial
  Probe
caaagagatgacttaccaggccgag

SEQ ID NO: 152761 - DNA, 25 bp, Artificial
  Probe
aagtcaacaagctaagggccaagag

SEQ ID NO: 152762 - DNA, 25 bp, Artificial
  Probe
acgagacttcatagatacctacctt

SEQ ID NO: 152763 - DNA, 25 bp, Artificial
  Probe
cgagacttcatagatacctaccttc

SEQ ID NO: 152764 - DNA, 25 bp, Artificial
  Probe
cacgagacttcatagatacctacct

SEQ ID NO: 152765 - DNA, 25 bp, Artificial
  Probe
tccacgagacttcatagatacctac

SEQ ID NO: 152766 - DNA, 25 bp, Artificial
  Probe
cacttatcatctctccacagttcat

SEQ ID NO: 152767 - DNA, 25 bp, Artificial
  Probe
ccacgagacttcatagatacctacc

SEQ ID NO: 152768 - DNA, 25 bp, Artificial
  Probe
ctcacttatcatctctccacagttc

SEQ ID NO: 152769 - DNA, 25 bp, Artificial
  Probe
ttctatgtctacaatcttgcctagt

SEQ ID NO: 152770 - DNA, 25 bp, Artificial
  Probe
aagacctcacttatcatctctccac

SEQ ID NO: 152771 - DNA, 25 bp, Artificial
  Probe
caagacctcacttatcatctctcca

SEQ ID NO: 152772 - DNA, 25 bp, Artificial
  Probe
ctccacgagacttcatagataccta

SEQ ID NO: 152773 - DNA, 25 bp, Artificial
  Probe
tcacttatcatctctccacagttca

SEQ ID NO: 152774 - DNA, 25 bp, Artificial
  Probe
ctcatcctgaatcacttccatcttc

SEQ ID NO: 152775 - DNA, 25 bp, Artificial
  Probe
cttctcatcctgaatcacttccatc

SEQ ID NO: 152776 - DNA, 25 bp, Artificial
  Probe
acttcatagatacctaccttctcag

SEQ ID NO: 152777 - DNA, 25 bp, Artificial
  Probe
gacttcatagatacctaccttctca

SEQ ID NO: 152778 - DNA, 25 bp, Artificial
  Probe
tagatacctaccttctcagaatgga

SEQ ID NO: 152779 - DNA, 25 bp, Artificial
  Probe
gtcacttctcatcctgaatcacttc

SEQ ID NO: 152780 - DNA, 25 bp, Artificial
  Probe
gacctcacttatcatctctccacag

SEQ ID NO: 152781 - DNA, 25 bp, Artificial
  Probe
tctcatcctgaatcacttccatctt

SEQ ID NO: 152782 - DNA, 25 bp, Artificial
  Probe
ttctcatcctgaatcacttccatct

SEQ ID NO: 152783 - DNA, 25 bp, Artificial
  Probe
ttcttggtgtatgaacagagacttc

SEQ ID NO: 152784 - DNA, 25 bp, Artificial
  Probe
cttcatagatacctaccttctcaga

SEQ ID NO: 152785 - DNA, 25 bp, Artificial
  Probe
agacttcatagatacctaccttctc

SEQ ID NO: 152786 - DNA, 25 bp, Artificial
  Probe
gagacttcatagatacctaccttct

SEQ ID NO: 152787 - DNA, 25 bp, Artificial
  Probe
caatcttgcctagtatgtacggttc

SEQ ID NO: 152788 - DNA, 25 bp, Artificial
  Probe
acttctcatcctgaatcacttccat

SEQ ID NO: 152789 - DNA, 25 bp, Artificial
  Probe
atcctgaatcacttccatcttcctc

SEQ ID NO: 152790 - DNA, 25 bp, Artificial
  Probe
cctcacttatcatctctccacagtt

SEQ ID NO: 152791 - DNA, 25 bp, Artificial
  Probe
tctatgtctacaatcttgcctagta

SEQ ID NO: 152792 - DNA, 25 bp, Artificial
  Probe
agatacctaccttctcagaatggag

SEQ ID NO: 152793 - DNA, 25 bp, Artificial
  Probe
tcttggtgtatgaacagagacttct

SEQ ID NO: 152794 - DNA, 25 bp, Artificial
  Probe
aatcttgcctagtatgtacggttca

SEQ ID NO: 152795 - DNA, 25 bp, Artificial
  Probe
atgtctacaatcttgcctagtatgt

SEQ ID NO: 152796 - DNA, 25 bp, Artificial
  Probe
ccaagacctcacttatcatctctcc

SEQ ID NO: 152797 - DNA, 25 bp, Artificial
  Probe
atagatacctaccttctcagaatgg

SEQ ID NO: 152798 - DNA, 25 bp, Artificial
  Probe
acttatcatctctccacagttcatg

SEQ ID NO: 152799 - DNA, 25 bp, Artificial
  Probe
catcctgaatcacttccatcttcct

SEQ ID NO: 152800 - DNA, 25 bp, Artificial
  Probe
atgctaattcactctgtataaggtt

SEQ ID NO: 152801 - DNA, 25 bp, Artificial
  Probe
gatcttgtcacttgttagctcattc

SEQ ID NO: 152802 - DNA, 25 bp, Artificial
  Probe
atcttgtcacttgttagctcattct

SEQ ID NO: 152803 - DNA, 25 bp, Artificial
  Probe
attctatgtctacaatcttgcctag

SEQ ID NO: 152804 - DNA, 25 bp, Artificial
  Probe
atcttgcctagtatgtacggttcaa

SEQ ID NO: 152805 - DNA, 25 bp, Artificial
  Probe
agacctcacttatcatctctccaca

SEQ ID NO: 152806 - DNA, 25 bp, Artificial
  Probe
tcatcctgaatcacttccatcttcc

SEQ ID NO: 152807 - DNA, 25 bp, Artificial
  Probe
ttaggaaggtgtcataaggtagcag

SEQ ID NO: 152808 - DNA, 25 bp, Artificial
  Probe
ctcagcatcagtctattcaagaatg

SEQ ID NO: 152809 - DNA, 25 bp, Artificial
  Probe
cctcagcatcagtctattcaagaat

SEQ ID NO: 152810 - DNA, 25 bp, Artificial
  Probe
tcagcatcagtctattcaagaatga

SEQ ID NO: 152811 - DNA, 25 bp, Artificial
  Probe
gaaggtgtcataaggtagcagagtt

SEQ ID NO: 152812 - DNA, 25 bp, Artificial
  Probe
taggaaggtgtcataaggtagcaga

SEQ ID NO: 152813 - DNA, 25 bp, Artificial
  Probe
ttaagaccaaggtagtagcctgtaa

SEQ ID NO: 152814 - DNA, 25 bp, Artificial
  Probe
gcagaggaagtaagaagtgacagtt

SEQ ID NO: 152815 - DNA, 25 bp, Artificial
  Probe
ataaggtagcagagtttgaaggaag

SEQ ID NO: 152816 - DNA, 25 bp, Artificial
  Probe
ggtttaggaaggtgtcataaggtag

SEQ ID NO: 152817 - DNA, 25 bp, Artificial
  Probe
aaagaaaggtttaggaaggtgtcat

SEQ ID NO: 152818 - DNA, 25 bp, Artificial
  Probe
aaaggtttaggaaggtgtcataagg

SEQ ID NO: 152819 - DNA, 25 bp, Artificial
  Probe
cagaggaagtaagaagtgacagttt

SEQ ID NO: 152820 - DNA, 25 bp, Artificial
  Probe
cataaggtagcagagtttgaaggaa

SEQ ID NO: 152821 - DNA, 25 bp, Artificial
  Probe
agaaaggtttaggaaggtgtcataa

SEQ ID NO: 152822 - DNA, 25 bp, Artificial
  Probe
aagaaaggtttaggaaggtgtcata

SEQ ID NO: 152823 - DNA, 25 bp, Artificial
  Probe
aggtttaggaaggtgtcataaggta

SEQ ID NO: 152824 - DNA, 25 bp, Artificial
  Probe
gaaaggtttaggaaggtgtcataag

SEQ ID NO: 152825 - DNA, 25 bp, Artificial
  Probe
gtttaggaaggtgtcataaggtagc

SEQ ID NO: 152826 - DNA, 25 bp, Artificial
  Probe
taaggtagcagagtttgaaggaaga

SEQ ID NO: 152827 - DNA, 25 bp, Artificial
  Probe
tttaggaaggtgtcataaggtagca

SEQ ID NO: 152828 - DNA, 25 bp, Artificial
  Probe
caaagaaaggtttaggaaggtgtca

SEQ ID NO: 152829 - DNA, 25 bp, Artificial
  Probe
aaggtttaggaaggtgtcataaggt

SEQ ID NO: 152830 - DNA, 25 bp, Artificial
  Probe
gcagagtttgaaggaagactactta

SEQ ID NO: 152831 - DNA, 25 bp, Artificial
  Probe
tgtcataaggtagcagagtttgaag

SEQ ID NO: 152832 - DNA, 25 bp, Artificial
  Probe
aaggtgtcataaggtagcagagttt

SEQ ID NO: 152833 - DNA, 25 bp, Artificial
  Probe
gtgtcataaggtagcagagtttgaa

SEQ ID NO: 152834 - DNA, 25 bp, Artificial
  Probe
aggaagactacttaagaccaaggta

SEQ ID NO: 152835 - DNA, 25 bp, Artificial
  Probe
gaaggaagactacttaagaccaagg

SEQ ID NO: 152836 - DNA, 25 bp, Artificial
  Probe
tgaaggaagactacttaagaccaag

SEQ ID NO: 152837 - DNA, 25 bp, Artificial
  Probe
tagcagagtttgaaggaagactact

SEQ ID NO: 152838 - DNA, 25 bp, Artificial
  Probe
aggaaggtgtcataaggtagcagag

SEQ ID NO: 152839 - DNA, 25 bp, Artificial
  Probe
tcataaggtagcagagtttgaagga

SEQ ID NO: 152840 - DNA, 25 bp, Artificial
  Probe
gtcataaggtagcagagtttgaagg

SEQ ID NO: 152841 - DNA, 25 bp, Artificial
  Probe
aaggaagactacttaagaccaaggt

SEQ ID NO: 152842 - DNA, 25 bp, Artificial
  Probe
gaggaggtcacagataacaccaatt

SEQ ID NO: 152843 - DNA, 25 bp, Artificial
  Probe
ctattcaagaatgatgactgggcat

SEQ ID NO: 152844 - DNA, 25 bp, Artificial
  Probe
ttgaaggaagactacttaagaccaa

SEQ ID NO: 152845 - DNA, 25 bp, Artificial
  Probe
gagcaaagaaaggtttaggaaggtg

SEQ ID NO: 152846 - DNA, 25 bp, Artificial
  Probe
ggaaggtgtcataaggtagcagagt

SEQ ID NO: 152847 - DNA, 25 bp, Artificial
  Probe
ttggcagaggaagtaagaagtgaca

SEQ ID NO: 152848 - DNA, 25 bp, Artificial
  Probe
cagcatcagtctattcaagaatgat

SEQ ID NO: 152849 - DNA, 25 bp, Artificial
  Probe
agcagagtttgaaggaagactactt

SEQ ID NO: 152850 - DNA, 25 bp, Artificial
  Probe
aggtgtcataaggtagcagagtttg

SEQ ID NO: 152851 - DNA, 25 bp, Artificial
  Probe
agagtttggcagaggaagtaagaag

SEQ ID NO: 152852 - DNA, 25 bp, Artificial
  Probe
acaacataactgaggagagaggtag

SEQ ID NO: 152853 - DNA, 25 bp, Artificial
  Probe
gacaacataactgaggagagaggta

SEQ ID NO: 152854 - DNA, 25 bp, Artificial
  Probe
aacataactgaggagagaggtagtg

SEQ ID NO: 152855 - DNA, 25 bp, Artificial
  Probe
caacataactgaggagagaggtagt

SEQ ID NO: 152856 - DNA, 25 bp, Artificial
  Probe
gatcttctccagactccactattct

SEQ ID NO: 152857 - DNA, 25 bp, Artificial
  Probe
acataactgaggagagaggtagtgg

SEQ ID NO: 152858 - DNA, 25 bp, Artificial
  Probe
caggacaacataactgaggagagag

SEQ ID NO: 152859 - DNA, 25 bp, Artificial
  Probe
aggacaacataactgaggagagagg

SEQ ID NO: 152860 - DNA, 25 bp, Artificial
  Probe
ctaggagaaggtagctgatgttcat

SEQ ID NO: 152861 - DNA, 25 bp, Artificial
  Probe
taggagaaggtagctgatgttcatg

SEQ ID NO: 152862 - DNA, 25 bp, Artificial
  Probe
ggacaacataactgaggagagaggt

SEQ ID NO: 152863 - DNA, 25 bp, Artificial
  Probe
cagataaggaggtgattgctttcag

SEQ ID NO: 152864 - DNA, 25 bp, Artificial
  Probe
catactcacctgtctctgaattggc

SEQ ID NO: 152865 - DNA, 25 bp, Artificial
  Probe
ccatactcacctgtctctgaattgg

SEQ ID NO: 152866 - DNA, 25 bp, Artificial
  Probe
gagaaggtagctgatgttcatggtt

SEQ ID NO: 152867 - DNA, 25 bp, Artificial
  Probe
tagatcttctccagactccactatt

SEQ ID NO: 152868 - DNA, 25 bp, Artificial
  Probe
gtagatcttctccagactccactat

SEQ ID NO: 152869 - DNA, 25 bp, Artificial
  Probe
tactcacctgtctctgaattggcat

SEQ ID NO: 152870 - DNA, 25 bp, Artificial
  Probe
atactcacctgtctctgaattggca

SEQ ID NO: 152871 - DNA, 25 bp, Artificial
  Probe
atcttacaggaaacatcaggcagag

SEQ ID NO: 152872 - DNA, 25 bp, Artificial
  Probe
ccaggacaacataactgaggagaga

SEQ ID NO: 152873 - DNA, 25 bp, Artificial
  Probe
agatcttctccagactccactattc

SEQ ID NO: 152874 - DNA, 25 bp, Artificial
  Probe
cataactgaggagagaggtagtggc

SEQ ID NO: 152875 - DNA, 25 bp, Artificial
  Probe
catcttacaggaaacatcaggcaga

SEQ ID NO: 152876 - DNA, 25 bp, Artificial
  Probe
acatcttacaggaaacatcaggcag

SEQ ID NO: 152877 - DNA, 25 bp, Artificial
  Probe
tgtagatcttctccagactccacta

SEQ ID NO: 152878 - DNA, 25 bp, Artificial
  Probe
ataactgaggagagaggtagtggct

SEQ ID NO: 152879 - DNA, 25 bp, Artificial
  Probe
tccaggacaacataactgaggagag

SEQ ID NO: 152880 - DNA, 25 bp, Artificial
  Probe
ccagataaggaggtgattgctttca

SEQ ID NO: 152881 - DNA, 25 bp, Artificial
  Probe
gatcccacatcttacaggaaacatc

SEQ ID NO: 152882 - DNA, 25 bp, Artificial
  Probe
atcccacatcttacaggaaacatca

SEQ ID NO: 152883 - DNA, 25 bp, Artificial
  Probe
cacatcttacaggaaacatcaggca

SEQ ID NO: 152884 - DNA, 25 bp, Artificial
  Probe
cccacatcttacaggaaacatcagg

SEQ ID NO: 152885 - DNA, 25 bp, Artificial
  Probe
ctcacctgtctctgaattggcattg

SEQ ID NO: 152886 - DNA, 25 bp, Artificial
  Probe
cccatactcacctgtctctgaattg

SEQ ID NO: 152887 - DNA, 25 bp, Artificial
  Probe
tactcatgtctcctccctaaacctc

SEQ ID NO: 152888 - DNA, 25 bp, Artificial
  Probe
ctactcatgtctcctccctaaacct

SEQ ID NO: 152889 - DNA, 25 bp, Artificial
  Probe
tgagagatttgggtgaccagataag

SEQ ID NO: 152890 - DNA, 25 bp, Artificial
  Probe
ctgagagatttgggtgaccagataa

SEQ ID NO: 152891 - DNA, 25 bp, Artificial
  Probe
tgaccagataaggaggtgattgctt

SEQ ID NO: 152892 - DNA, 25 bp, Artificial
  Probe
tcccacatcttacaggaaacatcag

SEQ ID NO: 152893 - DNA, 25 bp, Artificial
  Probe
gtctcctccctaaacctcagctata

SEQ ID NO: 152894 - DNA, 25 bp, Artificial
  Probe
gaaggtagctgatgttcatggtttc

SEQ ID NO: 152895 - DNA, 25 bp, Artificial
  Probe
tctcctccctaaacctcagctatag

SEQ ID NO: 152896 - DNA, 25 bp, Artificial
  Probe
actcacctgtctctgaattggcatt

SEQ ID NO: 152897 - DNA, 25 bp, Artificial
  Probe
ctgttctgtaaatacctggtgctaa

SEQ ID NO: 152898 - DNA, 25 bp, Artificial
  Probe
gttcgttcctttctctgttctcatc

SEQ ID NO: 152899 - DNA, 25 bp, Artificial
  Probe
ttcgttcctttctctgttctcatct

SEQ ID NO: 152900 - DNA, 25 bp, Artificial
  Probe
tgttctgtaaatacctggtgctaac

SEQ ID NO: 152901 - DNA, 25 bp, Artificial
  Probe
atctcacgctgttctgtaaatacct

SEQ ID NO: 152902 - DNA, 25 bp, Artificial
  Probe
ttctgtaaatacctggtgctaacat

SEQ ID NO: 152903 - DNA, 25 bp, Artificial
  Probe
tctgtaaatacctggtgctaacatc

SEQ ID NO: 152904 - DNA, 25 bp, Artificial
  Probe
gatctcacgctgttctgtaaatacc

SEQ ID NO: 152905 - DNA, 25 bp, Artificial
  Probe
gttctgtaaatacctggtgctaaca

SEQ ID NO: 152906 - DNA, 25 bp, Artificial
  Probe
tcgttcctttctctgttctcatctg

SEQ ID NO: 152907 - DNA, 25 bp, Artificial
  Probe
ctgtaaatacctggtgctaacatcc

SEQ ID NO: 152908 - DNA, 25 bp, Artificial
  Probe
cgatctcacgctgttctgtaaatac

SEQ ID NO: 152909 - DNA, 25 bp, Artificial
  Probe
tctcacgctgttctgtaaatacctg

SEQ ID NO: 152910 - DNA, 25 bp, Artificial
  Probe
ggttcgttcctttctctgttctcat

SEQ ID NO: 152911 - DNA, 25 bp, Artificial
  Probe
gctgttctgtaaatacctggtgcta

SEQ ID NO: 152912 - DNA, 25 bp, Artificial
  Probe
taaatacctggtgctaacatcccat

SEQ ID NO: 152913 - DNA, 25 bp, Artificial
  Probe
tgtaaatacctggtgctaacatccc

SEQ ID NO: 152914 - DNA, 25 bp, Artificial
  Probe
cgttcctttctctgttctcatctgg

SEQ ID NO: 152915 - DNA, 25 bp, Artificial
  Probe
aagaaccaacctgcaataaacactt

SEQ ID NO: 152916 - DNA, 25 bp, Artificial
  Probe
gttcctttctctgttctcatctggc

SEQ ID NO: 152917 - DNA, 25 bp, Artificial
  Probe
ctcacaagaaccaacctgcaataaa

SEQ ID NO: 152918 - DNA, 25 bp, Artificial
  Probe
ctaacatgctttcactactggaggg

SEQ ID NO: 152919 - DNA, 25 bp, Artificial
  Probe
ctcacgctgttctgtaaatacctgg

SEQ ID NO: 152920 - DNA, 25 bp, Artificial
  Probe
gaaccaacctgcaataaacacttct

SEQ ID NO: 152921 - DNA, 25 bp, Artificial
  Probe
agaaccaacctgcaataaacacttc

SEQ ID NO: 152922 - DNA, 25 bp, Artificial
  Probe
aaccaacctgcaataaacacttctg

SEQ ID NO: 152923 - DNA, 25 bp, Artificial
  Probe
caagaaccaacctgcaataaacact

SEQ ID NO: 152924 - DNA, 25 bp, Artificial
  Probe
tcacaagaaccaacctgcaataaac

SEQ ID NO: 152925 - DNA, 25 bp, Artificial
  Probe
gtaaatacctggtgctaacatccca

SEQ ID NO: 152926 - DNA, 25 bp, Artificial
  Probe
acaagaaccaacctgcaataaacac

SEQ ID NO: 152927 - DNA, 25 bp, Artificial
  Probe
cacaagaaccaacctgcaataaaca

SEQ ID NO: 152928 - DNA, 25 bp, Artificial
  Probe
cttccttttgtttgcccttcttttg

SEQ ID NO: 152929 - DNA, 25 bp, Artificial
  Probe
gctcacaagaaccaacctgcaataa

SEQ ID NO: 152930 - DNA, 25 bp, Artificial
  Probe
gctaacatgctttcactactggagg

SEQ ID NO: 152931 - DNA, 25 bp, Artificial
  Probe
ccctaccccttttatgacccttaaa

SEQ ID NO: 152932 - DNA, 25 bp, Artificial
  Probe
ttttggtttgcttccttttgtttgc

SEQ ID NO: 152933 - DNA, 25 bp, Artificial
  Probe
acccttaaaactttgattttgtcct

SEQ ID NO: 152934 - DNA, 25 bp, Artificial
  Probe
tcacgctgttctgtaaatacctggt

SEQ ID NO: 152935 - DNA, 25 bp, Artificial
  Probe
aaatacctggtgctaacatcccatg

SEQ ID NO: 152936 - DNA, 25 bp, Artificial
  Probe
gacccttaaaactttgattttgtcc

SEQ ID NO: 152937 - DNA, 25 bp, Artificial
  Probe
actttgattttgtcctaaacatgcc

SEQ ID NO: 152938 - DNA, 25 bp, Artificial
  Probe
aactttgattttgtcctaaacatgc

SEQ ID NO: 152939 - DNA, 25 bp, Artificial
  Probe
tgacccttaaaactttgattttgtc

SEQ ID NO: 152940 - DNA, 25 bp, Artificial
  Probe
ttccttttgtttgcccttcttttgg

SEQ ID NO: 152941 - DNA, 25 bp, Artificial
  Probe
caacctgcaataaacacttctgtgg

SEQ ID NO: 152942 - DNA, 25 bp, Artificial
  Probe
tgttcttctgtatctcactctcttg

SEQ ID NO: 152943 - DNA, 25 bp, Artificial
  Probe
tgttcttgttcttctgtatctcact

SEQ ID NO: 152944 - DNA, 25 bp, Artificial
  Probe
cttgttcttctgtatctcactctct

SEQ ID NO: 152945 - DNA, 25 bp, Artificial
  Probe
tcttgttcttctgtatctcactctc

SEQ ID NO: 152946 - DNA, 25 bp, Artificial
  Probe
ggtggtgatgatgatgatgatatgt

SEQ ID NO: 152947 - DNA, 25 bp, Artificial
  Probe
tggtggtgatgatgatgatgatatg

SEQ ID NO: 152948 - DNA, 25 bp, Artificial
  Probe
gtggtggtgatgatgatgatgatat

SEQ ID NO: 152949 - DNA, 25 bp, Artificial
  Probe
gttcttgttcttctgtatctcactc

SEQ ID NO: 152950 - DNA, 25 bp, Artificial
  Probe
gttcttctgtatctcactctcttgc

SEQ ID NO: 152951 - DNA, 25 bp, Artificial
  Probe
ttgttcttctgtatctcactctctt

SEQ ID NO: 152952 - DNA, 25 bp, Artificial
  Probe
ttcttgttcttctgtatctcactct

SEQ ID NO: 152953 - DNA, 25 bp, Artificial
  Probe
ttgttcttgttcttctgtatctcac

SEQ ID NO: 152954 - DNA, 25 bp, Artificial
  Probe
gtggtgatgatgatgatgatatgtt

SEQ ID NO: 152955 - DNA, 25 bp, Artificial
  Probe
ggtgaccataataacgcttactcta

SEQ ID NO: 152956 - DNA, 25 bp, Artificial
  Probe
tggtgatgatgatgatgatatgttc

SEQ ID NO: 152957 - DNA, 25 bp, Artificial
  Probe
gtgaccataataacgcttactctaa

SEQ ID NO: 152958 - DNA, 25 bp, Artificial
  Probe
ggtgatgatgatgatgatatgttca

SEQ ID NO: 152959 - DNA, 25 bp, Artificial
  Probe
ggtggtggtgatgatgatgatgata

SEQ ID NO: 152960 - DNA, 25 bp, Artificial
  Probe
tgatgatgatgatatgttcaatgga

SEQ ID NO: 152961 - DNA, 25 bp, Artificial
  Probe
gatatgttcaatggaatatagtgcc

SEQ ID NO: 152962 - DNA, 25 bp, Artificial
  Probe
atgagagtaggctatagaaggatgt

SEQ ID NO: 152963 - DNA, 25 bp, Artificial
  Probe
acatgagagtaggctatagaaggat

SEQ ID NO: 152964 - DNA, 25 bp, Artificial
  Probe
gacatgagagtaggctatagaagga

SEQ ID NO: 152965 - DNA, 25 bp, Artificial
  Probe
cttagcgtagttcctgtggtgatac

SEQ ID NO: 152966 - DNA, 25 bp, Artificial
  Probe
tgagagtaggctatagaaggatgta

SEQ ID NO: 152967 - DNA, 25 bp, Artificial
  Probe
atgttcaatggaatatagtgccagg

SEQ ID NO: 152968 - DNA, 25 bp, Artificial
  Probe
ttctgtatctcactctcttgcatag

SEQ ID NO: 152969 - DNA, 25 bp, Artificial
  Probe
cttctgtatctcactctcttgcata

SEQ ID NO: 152970 - DNA, 25 bp, Artificial
  Probe
catgagagtaggctatagaaggatg

SEQ ID NO: 152971 - DNA, 25 bp, Artificial
  Probe
gactgaggagtgaacctgatatgtt

SEQ ID NO: 152972 - DNA, 25 bp, Artificial
  Probe
tatgttcaatggaatatagtgccag

SEQ ID NO: 152973 - DNA, 25 bp, Artificial
  Probe
tcttctgtatctcactctcttgcat

SEQ ID NO: 152974 - DNA, 25 bp, Artificial
  Probe
ggacatgagagtaggctatagaagg

SEQ ID NO: 152975 - DNA, 25 bp, Artificial
  Probe
ttcttctgtatctcactctcttgca

SEQ ID NO: 152976 - DNA, 25 bp, Artificial
  Probe
atctcactctcttgcatagtacatc

SEQ ID NO: 152977 - DNA, 25 bp, Artificial
  Probe
gatgatgatgatatgttcaatggaa

SEQ ID NO: 152978 - DNA, 25 bp, Artificial
  Probe
atgatgatgatgatatgttcaatgg

SEQ ID NO: 152979 - DNA, 25 bp, Artificial
  Probe
gtgatgatgatgatgatatgttcaa

SEQ ID NO: 152980 - DNA, 25 bp, Artificial
  Probe
ctcactctcttgcatagtacatctg

SEQ ID NO: 152981 - DNA, 25 bp, Artificial
  Probe
tctcactctcttgcatagtacatct

SEQ ID NO: 152982 - DNA, 25 bp, Artificial
  Probe
tctgtatctcactctcttgcatagt

SEQ ID NO: 152983 - DNA, 25 bp, Artificial
  Probe
gtatctcactctcttgcatagtaca

SEQ ID NO: 152984 - DNA, 25 bp, Artificial
  Probe
tgtatctcactctcttgcatagtac

SEQ ID NO: 152985 - DNA, 25 bp, Artificial
  Probe
ctgtatctcactctcttgcatagta

SEQ ID NO: 152986 - DNA, 25 bp, Artificial
  Probe
caatggaatatagtgccaggcttaa

SEQ ID NO: 152987 - DNA, 25 bp, Artificial
  Probe
ttctctgttaaggtcaagtgaaggt

SEQ ID NO: 152988 - DNA, 25 bp, Artificial
  Probe
tctctgttaaggtcaagtgaaggtc

SEQ ID NO: 152989 - DNA, 25 bp, Artificial
  Probe
ctctgttaaggtcaagtgaaggtca

SEQ ID NO: 152990 - DNA, 25 bp, Artificial
  Probe
attctactctaatcgctatgtggga

SEQ ID NO: 152991 - DNA, 25 bp, Artificial
  Probe
aattctactctaatcgctatgtggg

SEQ ID NO: 152992 - DNA, 25 bp, Artificial
  Probe
gcaaattctactctaatcgctatgt

SEQ ID NO: 152993 - DNA, 25 bp, Artificial
  Probe
tttctctgttaaggtcaagtgaagg

SEQ ID NO: 152994 - DNA, 25 bp, Artificial
  Probe
tatttcaacatacacttgggaagga

SEQ ID NO: 152995 - DNA, 25 bp, Artificial
  Probe
aagaccaatcagcctccctaataaa

SEQ ID NO: 152996 - DNA, 25 bp, Artificial
  Probe
atttcaacatacacttgggaaggaa

SEQ ID NO: 152997 - DNA, 25 bp, Artificial
  Probe
ttagcagattcagccaacagacaag

SEQ ID NO: 152998 - DNA, 25 bp, Artificial
  Probe
tttcaacatacacttgggaaggaag

SEQ ID NO: 152999 - DNA, 25 bp, Artificial
  Probe
aaattctactctaatcgctatgtgg

SEQ ID NO: 153000 - DNA, 25 bp, Artificial
  Probe
cactctgctataaaccctctcacat

SEQ ID NO: 153001 - DNA, 25 bp, Artificial
  Probe
agaccaatcagcctccctaataaag

SEQ ID NO: 153002 - DNA, 25 bp, Artificial
  Probe
gaagaccaatcagcctccctaataa

SEQ ID NO: 153003 - DNA, 25 bp, Artificial
  Probe
ctataaaccctctcacatgcttctg

SEQ ID NO: 153004 - DNA, 25 bp, Artificial
  Probe
ttctactctaatcgctatgtgggag

SEQ ID NO: 153005 - DNA, 25 bp, Artificial
  Probe
caacatacacttgggaaggaagaac

SEQ ID NO: 153006 - DNA, 25 bp, Artificial
  Probe
tcaacatacacttgggaaggaagaa

SEQ ID NO: 153007 - DNA, 25 bp, Artificial
  Probe
ttcaacatacacttgggaaggaaga

SEQ ID NO: 153008 - DNA, 25 bp, Artificial
  Probe
gtatttcaacatacacttgggaagg

SEQ ID NO: 153009 - DNA, 25 bp, Artificial
  Probe
cgtatttcaacatacacttgggaag

SEQ ID NO: 153010 - DNA, 25 bp, Artificial
  Probe
caaattctactctaatcgctatgtg

SEQ ID NO: 153011 - DNA, 25 bp, Artificial
  Probe
agaccgtatttcaacatacacttgg

SEQ ID NO: 153012 - DNA, 25 bp, Artificial
  Probe
tagaccgtatttcaacatacacttg

SEQ ID NO: 153013 - DNA, 25 bp, Artificial
  Probe
agaagaccaatcagcctccctaata

SEQ ID NO: 153014 - DNA, 25 bp, Artificial
  Probe
actctgctataaaccctctcacatg

SEQ ID NO: 153015 - DNA, 25 bp, Artificial
  Probe
ccgtatttcaacatacacttgggaa

SEQ ID NO: 153016 - DNA, 25 bp, Artificial
  Probe
tagcagattcagccaacagacaaga

SEQ ID NO: 153017 - DNA, 25 bp, Artificial
  Probe
aacatacacttgggaaggaagaacc

SEQ ID NO: 153018 - DNA, 25 bp, Artificial
  Probe
ttagaccgtatttcaacatacactt

SEQ ID NO: 153019 - DNA, 25 bp, Artificial
  Probe
tttagaccgtatttcaacatacact

SEQ ID NO: 153020 - DNA, 25 bp, Artificial
  Probe
aagctgctgcaaattctactctaat

SEQ ID NO: 153021 - DNA, 25 bp, Artificial
  Probe
tgcaaattctactctaatcgctatg

SEQ ID NO: 153022 - DNA, 25 bp, Artificial
  Probe
tttagcagattcagccaacagacaa

SEQ ID NO: 153023 - DNA, 25 bp, Artificial
  Probe
gctgcaaattctactctaatcgcta

SEQ ID NO: 153024 - DNA, 25 bp, Artificial
  Probe
aaagctgctgcaaattctactctaa

SEQ ID NO: 153025 - DNA, 25 bp, Artificial
  Probe
gaccgtatttcaacatacacttggg

SEQ ID NO: 153026 - DNA, 25 bp, Artificial
  Probe
gctataaaccctctcacatgcttct

SEQ ID NO: 153027 - DNA, 25 bp, Artificial
  Probe
ctgcaaattctactctaatcgctat

SEQ ID NO: 153028 - DNA, 25 bp, Artificial
  Probe
gtgttcagtgagaagaccaatcagc

SEQ ID NO: 153029 - DNA, 25 bp, Artificial
  Probe
agctgctgcaaattctactctaatc

SEQ ID NO: 153030 - DNA, 25 bp, Artificial
  Probe
ggtgttcagtgagaagaccaatcag

SEQ ID NO: 153031 - DNA, 25 bp, Artificial
  Probe
agtccactctgctataaaccctctc

SEQ ID NO: 153032 - DNA, 25 bp, Artificial
  Probe
tgaactcacatatctgctctgtatg

SEQ ID NO: 153033 - DNA, 25 bp, Artificial
  Probe
acaattctaagcaagtgtgtggaag

SEQ ID NO: 153034 - DNA, 25 bp, Artificial
  Probe
gtgaactcacatatctgctctgtat

SEQ ID NO: 153035 - DNA, 25 bp, Artificial
  Probe
caattctaagcaagtgtgtggaagc

SEQ ID NO: 153036 - DNA, 25 bp, Artificial
  Probe
agtgaactcacatatctgctctgta

SEQ ID NO: 153037 - DNA, 25 bp, Artificial
  Probe
caagtgaactcacatatctgctctg

SEQ ID NO: 153038 - DNA, 25 bp, Artificial
  Probe
aattctaagcaagtgtgtggaagca

SEQ ID NO: 153039 - DNA, 25 bp, Artificial
  Probe
aagtgaactcacatatctgctctgt

SEQ ID NO: 153040 - DNA, 25 bp, Artificial
  Probe
attctaagcaagtgtgtggaagcag

SEQ ID NO: 153041 - DNA, 25 bp, Artificial
  Probe
tctgctctgtatgtaataaatgtct

SEQ ID NO: 153042 - DNA, 25 bp, Artificial
  Probe
tgtgatgtatgtcccttgtctgttc

SEQ ID NO: 153043 - DNA, 25 bp, Artificial
  Probe
ctgtgatgtatgtcccttgtctgtt

SEQ ID NO: 153044 - DNA, 25 bp, Artificial
  Probe
ctgctctgtatgtaataaatgtctt

SEQ ID NO: 153045 - DNA, 25 bp, Artificial
  Probe
gtgatgtatgtcccttgtctgttcc

SEQ ID NO: 153046 - DNA, 25 bp, Artificial
  Probe
atctgctctgtatgtaataaatgtc

SEQ ID NO: 153047 - DNA, 25 bp, Artificial
  Probe
cactgtgatgtatgtcccttgtctg

SEQ ID NO: 153048 - DNA, 25 bp, Artificial
  Probe
actgtgatgtatgtcccttgtctgt

SEQ ID NO: 153049 - DNA, 25 bp, Artificial
  Probe
ctctccactgtgatgtatgtccctt

SEQ ID NO: 153050 - DNA, 25 bp, Artificial
  Probe
gcaagtgaactcacatatctgctct

SEQ ID NO: 153051 - DNA, 25 bp, Artificial
  Probe
tctccactgtgatgtatgtcccttg

SEQ ID NO: 153052 - DNA, 25 bp, Artificial
  Probe
gaactcacatatctgctctgtatgt

SEQ ID NO: 153053 - DNA, 25 bp, Artificial
  Probe
cacctctccactgtgatgtatgtcc

SEQ ID NO: 153054 - DNA, 25 bp, Artificial
  Probe
ccacctctccactgtgatgtatgtc

SEQ ID NO: 153055 - DNA, 25 bp, Artificial
  Probe
gatgtatgtcccttgtctgttccca

SEQ ID NO: 153056 - DNA, 25 bp, Artificial
  Probe
tgatgtatgtcccttgtctgttccc

SEQ ID NO: 153057 - DNA, 25 bp, Artificial
  Probe
actcacatatctgctctgtatgtaa

SEQ ID NO: 153058 - DNA, 25 bp, Artificial
  Probe
aactcacatatctgctctgtatgta

SEQ ID NO: 153059 - DNA, 25 bp, Artificial
  Probe
ccactgtgatgtatgtcccttgtct

SEQ ID NO: 153060 - DNA, 25 bp, Artificial
  Probe
tccactgtgatgtatgtcccttgtc

SEQ ID NO: 153061 - DNA, 25 bp, Artificial
  Probe
ctccactgtgatgtatgtcccttgt

SEQ ID NO: 153062 - DNA, 25 bp, Artificial
  Probe
caggatgggcacaattctaagcaag

SEQ ID NO: 153063 - DNA, 25 bp, Artificial
  Probe
atgtatgtcccttgtctgttcccac

SEQ ID NO: 153064 - DNA, 25 bp, Artificial
  Probe
gatgggcacaattctaagcaagtgt

SEQ ID NO: 153065 - DNA, 25 bp, Artificial
  Probe
tatctgctctgtatgtaataaatgt

SEQ ID NO: 153066 - DNA, 25 bp, Artificial
  Probe
tgcaagtgaactcacatatctgctc

SEQ ID NO: 153067 - DNA, 25 bp, Artificial
  Probe
ctcacatatctgctctgtatgtaat

SEQ ID NO: 153068 - DNA, 25 bp, Artificial
  Probe
aggatgggcacaattctaagcaagt

SEQ ID NO: 153069 - DNA, 25 bp, Artificial
  Probe
cacaattctaagcaagtgtgtggaa

SEQ ID NO: 153070 - DNA, 25 bp, Artificial
  Probe
ggatgggcacaattctaagcaagtg

SEQ ID NO: 153071 - DNA, 25 bp, Artificial
  Probe
cttagcctcaggttaatggaggatg

SEQ ID NO: 153072 - DNA, 25 bp, Artificial
  Probe
tcacatatctgctctgtatgtaata

SEQ ID NO: 153073 - DNA, 25 bp, Artificial
  Probe
cctctccactgtgatgtatgtccct

SEQ ID NO: 153074 - DNA, 25 bp, Artificial
  Probe
cacatatctgctctgtatgtaataa

SEQ ID NO: 153075 - DNA, 25 bp, Artificial
  Probe
ttgcaagtgaactcacatatctgct

SEQ ID NO: 153076 - DNA, 25 bp, Artificial
  Probe
ttagcctcaggttaatggaggatgg

SEQ ID NO: 153077 - DNA, 25 bp, Artificial
  Probe
ctgtctctgtcttgtgatactgatt

SEQ ID NO: 153078 - DNA, 25 bp, Artificial
  Probe
tgtctctgtcttgtgatactgattg

SEQ ID NO: 153079 - DNA, 25 bp, Artificial
  Probe
tacttcctgtctctgtcttgtgata

SEQ ID NO: 153080 - DNA, 25 bp, Artificial
  Probe
gtctctgtcttgtgatactgattgg

SEQ ID NO: 153081 - DNA, 25 bp, Artificial
  Probe
ttacttcctgtctctgtcttgtgat

SEQ ID NO: 153082 - DNA, 25 bp, Artificial
  Probe
cctgtctctgtcttgtgatactgat

SEQ ID NO: 153083 - DNA, 25 bp, Artificial
  Probe
cttcctgtctctgtcttgtgatact

SEQ ID NO: 153084 - DNA, 25 bp, Artificial
  Probe
ttcctgtctctgtcttgtgatactg

SEQ ID NO: 153085 - DNA, 25 bp, Artificial
  Probe
acttcctgtctctgtcttgtgatac

SEQ ID NO: 153086 - DNA, 25 bp, Artificial
  Probe
tctctgtcttgtgatactgattggc

SEQ ID NO: 153087 - DNA, 25 bp, Artificial
  Probe
tcctgtctctgtcttgtgatactga

SEQ ID NO: 153088 - DNA, 25 bp, Artificial
  Probe
ctctgtcttgtgatactgattggca

SEQ ID NO: 153089 - DNA, 25 bp, Artificial
  Probe
tttcttctttgtgcctttacttcct

SEQ ID NO: 153090 - DNA, 25 bp, Artificial
  Probe
ctttacttcctgtctctgtcttgtg

SEQ ID NO: 153091 - DNA, 25 bp, Artificial
  Probe
tttacttcctgtctctgtcttgtga

SEQ ID NO: 153092 - DNA, 25 bp, Artificial
  Probe
ttcttctttgtgcctttacttcctg

SEQ ID NO: 153093 - DNA, 25 bp, Artificial
  Probe
atgcacacattgtcacttgttaatt

SEQ ID NO: 153094 - DNA, 25 bp, Artificial
  Probe
gatgcacacattgtcacttgttaat

SEQ ID NO: 153095 - DNA, 25 bp, Artificial
  Probe
cctttacttcctgtctctgtcttgt

SEQ ID NO: 153096 - DNA, 25 bp, Artificial
  Probe
cttctttgtgcctttacttcctgtc

SEQ ID NO: 153097 - DNA, 25 bp, Artificial
  Probe
gcacacattgtcacttgttaattta

SEQ ID NO: 153098 - DNA, 25 bp, Artificial
  Probe
tctgtcttgtgatactgattggcac

SEQ ID NO: 153099 - DNA, 25 bp, Artificial
  Probe
tgatgcacacattgtcacttgttaa

SEQ ID NO: 153100 - DNA, 25 bp, Artificial
  Probe
ttctttgtgcctttacttcctgtct

SEQ ID NO: 153101 - DNA, 25 bp, Artificial
  Probe
tcttctttgtgcctttacttcctgt

SEQ ID NO: 153102 - DNA, 25 bp, Artificial
  Probe
ctgatgcacacattgtcacttgtta

SEQ ID NO: 153103 - DNA, 25 bp, Artificial
  Probe
ctttgtgcctttacttcctgtctct

SEQ ID NO: 153104 - DNA, 25 bp, Artificial
  Probe
tctttgtgcctttacttcctgtctc

SEQ ID NO: 153105 - DNA, 25 bp, Artificial
  Probe
tttgtgcctttacttcctgtctctg

SEQ ID NO: 153106 - DNA, 25 bp, Artificial
  Probe
gcctttacttcctgtctctgtcttg

SEQ ID NO: 153107 - DNA, 25 bp, Artificial
  Probe
ttgtagtcctctctgtccacctcat

SEQ ID NO: 153108 - DNA, 25 bp, Artificial
  Probe
tgcacacattgtcacttgttaattt

SEQ ID NO: 153109 - DNA, 25 bp, Artificial
  Probe
tgcctttacttcctgtctctgtctt

SEQ ID NO: 153110 - DNA, 25 bp, Artificial
  Probe
ttttcttctttgtgcctttacttcc

SEQ ID NO: 153111 - DNA, 25 bp, Artificial
  Probe
gttttcttctttgtgcctttacttc

SEQ ID NO: 153112 - DNA, 25 bp, Artificial
  Probe
cagttttcttctttgtgcctttact

SEQ ID NO: 153113 - DNA, 25 bp, Artificial
  Probe
agttttcttctttgtgcctttactt

SEQ ID NO: 153114 - DNA, 25 bp, Artificial
  Probe
cacacattgtcacttgttaatttaa

SEQ ID NO: 153115 - DNA, 25 bp, Artificial
  Probe
ttgtgcctttacttcctgtctctgt

SEQ ID NO: 153116 - DNA, 25 bp, Artificial
  Probe
gtgcctttacttcctgtctctgtct

SEQ ID NO: 153117 - DNA, 25 bp, Artificial
  Probe
gagactgatgcacacattgtcactt

SEQ ID NO: 153118 - DNA, 25 bp, Artificial
  Probe
actgatgcacacattgtcacttgtt

SEQ ID NO: 153119 - DNA, 25 bp, Artificial
  Probe
tgtgcctttacttcctgtctctgtc

SEQ ID NO: 153120 - DNA, 25 bp, Artificial
  Probe
agactgatgcacacattgtcacttg

SEQ ID NO: 153121 - DNA, 25 bp, Artificial
  Probe
tgtagtcctctctgtccacctcatg

SEQ ID NO: 153122 - DNA, 25 bp, Artificial
  Probe
tctgtggatgagactatcaagaacc

SEQ ID NO: 153123 - DNA, 25 bp, Artificial
  Probe
aatggttagtcttaactgtgctctc

SEQ ID NO: 153124 - DNA, 25 bp, Artificial
  Probe
gttagtcttaactgtgctctcactg

SEQ ID NO: 153125 - DNA, 25 bp, Artificial
  Probe
atggttagtcttaactgtgctctca

SEQ ID NO: 153126 - DNA, 25 bp, Artificial
  Probe
ttagtcttaactgtgctctcactgg

SEQ ID NO: 153127 - DNA, 25 bp, Artificial
  Probe
gttctcttatgctgggtttgaaatg

SEQ ID NO: 153128 - DNA, 25 bp, Artificial
  Probe
ggttagtcttaactgtgctctcact

SEQ ID NO: 153129 - DNA, 25 bp, Artificial
  Probe
tggttagtcttaactgtgctctcac

SEQ ID NO: 153130 - DNA, 25 bp, Artificial
  Probe
tagtcttaactgtgctctcactgga

SEQ ID NO: 153131 - DNA, 25 bp, Artificial
  Probe
cgttctcttatgctgggtttgaaat

SEQ ID NO: 153132 - DNA, 25 bp, Artificial
  Probe
ttctcttatgctgggtttgaaatgc

SEQ ID NO: 153133 - DNA, 25 bp, Artificial
  Probe
agattgccctcttaaatgttgatcg

SEQ ID NO: 153134 - DNA, 25 bp, Artificial
  Probe
aaatggttagtcttaactgtgctct

SEQ ID NO: 153135 - DNA, 25 bp, Artificial
  Probe
taactgtgctctcactggaggttat

SEQ ID NO: 153136 - DNA, 25 bp, Artificial
  Probe
tgtgctctcactggaggttatttaa

SEQ ID NO: 153137 - DNA, 25 bp, Artificial
  Probe
gattgccctcttaaatgttgatcgg

SEQ ID NO: 153138 - DNA, 25 bp, Artificial
  Probe
ttaactgtgctctcactggaggtta

SEQ ID NO: 153139 - DNA, 25 bp, Artificial
  Probe
ctgtggatgagactatcaagaaccc

SEQ ID NO: 153140 - DNA, 25 bp, Artificial
  Probe
aaatgcagcccaagaagtataagaa

SEQ ID NO: 153141 - DNA, 25 bp, Artificial
  Probe
gaaatgcagcccaagaagtataaga

SEQ ID NO: 153142 - DNA, 25 bp, Artificial
  Probe
ctgtgctctcactggaggttattta

SEQ ID NO: 153143 - DNA, 25 bp, Artificial
  Probe
ttcaagaagacgttctcttatgctg

SEQ ID NO: 153144 - DNA, 25 bp, Artificial
  Probe
gttcaagaagacgttctcttatgct

SEQ ID NO: 153145 - DNA, 25 bp, Artificial
  Probe
aatgcagcccaagaagtataagaac

SEQ ID NO: 153146 - DNA, 25 bp, Artificial
  Probe
tgaaatgcagcccaagaagtataag

SEQ ID NO: 153147 - DNA, 25 bp, Artificial
  Probe
ttgaaatgcagcccaagaagtataa

SEQ ID NO: 153148 - DNA, 25 bp, Artificial
  Probe
tttgaaatgcagcccaagaagtata

SEQ ID NO: 153149 - DNA, 25 bp, Artificial
  Probe
caagattgccctcttaaatgttgat

SEQ ID NO: 153150 - DNA, 25 bp, Artificial
  Probe
aactgtgctctcactggaggttatt

SEQ ID NO: 153151 - DNA, 25 bp, Artificial
  Probe
gtgctctcactggaggttatttaaa

SEQ ID NO: 153152 - DNA, 25 bp, Artificial
  Probe
aagattgccctcttaaatgttgatc

SEQ ID NO: 153153 - DNA, 25 bp, Artificial
  Probe
agtcttaactgtgctctcactggag

SEQ ID NO: 153154 - DNA, 25 bp, Artificial
  Probe
ccaagaagtataagaaccccaagat

SEQ ID NO: 153155 - DNA, 25 bp, Artificial
  Probe
gtctgtggatgagactatcaagaac

SEQ ID NO: 153156 - DNA, 25 bp, Artificial
  Probe
gattgtgtctgtggatgagactatc

SEQ ID NO: 153157 - DNA, 25 bp, Artificial
  Probe
tgtctgtggatgagactatcaagaa

SEQ ID NO: 153158 - DNA, 25 bp, Artificial
  Probe
agaagtataagaaccccaagattgc

SEQ ID NO: 153159 - DNA, 25 bp, Artificial
  Probe
attgtgtctgtggatgagactatca

SEQ ID NO: 153160 - DNA, 25 bp, Artificial
  Probe
tgattgtgtctgtggatgagactat

SEQ ID NO: 153161 - DNA, 25 bp, Artificial
  Probe
ccaagattgccctcttaaatgttga

SEQ ID NO: 153162 - DNA, 25 bp, Artificial
  Probe
gtggacatcaacaacgaggacattg

SEQ ID NO: 153163 - DNA, 25 bp, Artificial
  Probe
ttgtgtctgtggatgagactatcaa

SEQ ID NO: 153164 - DNA, 25 bp, Artificial
  Probe
gtgtctgtggatgagactatcaaga

SEQ ID NO: 153165 - DNA, 25 bp, Artificial
  Probe
gaagtataagaaccccaagattgcc

SEQ ID NO: 153166 - DNA, 25 bp, Artificial
  Probe
caagaagtataagaaccccaagatt

SEQ ID NO: 153167 - DNA, 25 bp, Artificial
  Probe
ctataatcaagagtggacattgtgg

SEQ ID NO: 153168 - DNA, 25 bp, Artificial
  Probe
atatacaattcgctgatctccatga

SEQ ID NO: 153169 - DNA, 25 bp, Artificial
  Probe
gatatacaattcgctgatctccatg

SEQ ID NO: 153170 - DNA, 25 bp, Artificial
  Probe
tatacaattcgctgatctccatgaa

SEQ ID NO: 153171 - DNA, 25 bp, Artificial
  Probe
actataatcaagagtggacattgtg

SEQ ID NO: 153172 - DNA, 25 bp, Artificial
  Probe
gattactttaagacggagcacaaat

SEQ ID NO: 153173 - DNA, 25 bp, Artificial
  Probe
ttaagacggagcacaaattagagat

SEQ ID NO: 153174 - DNA, 25 bp, Artificial
  Probe
ctttaagacggagcacaaattagag

SEQ ID NO: 153175 - DNA, 25 bp, Artificial
  Probe
tttaagacggagcacaaattagaga

SEQ ID NO: 153176 - DNA, 25 bp, Artificial
  Probe
tgattactttaagacggagcacaaa

SEQ ID NO: 153177 - DNA, 25 bp, Artificial
  Probe
actttaagacggagcacaaattaga

SEQ ID NO: 153178 - DNA, 25 bp, Artificial
  Probe
atacaattcgctgatctccatgaat

SEQ ID NO: 153179 - DNA, 25 bp, Artificial
  Probe
attactttaagacggagcacaaatt

SEQ ID NO: 153180 - DNA, 25 bp, Artificial
  Probe
tactttaagacggagcacaaattag

SEQ ID NO: 153181 - DNA, 25 bp, Artificial
  Probe
tataatcaagagtggacattgtggg

SEQ ID NO: 153182 - DNA, 25 bp, Artificial
  Probe
ttgattactttaagacggagcacaa

SEQ ID NO: 153183 - DNA, 25 bp, Artificial
  Probe
cttgattactttaagacggagcaca

SEQ ID NO: 153184 - DNA, 25 bp, Artificial
  Probe
cagttccttgattactttaagacgg

SEQ ID NO: 153185 - DNA, 25 bp, Artificial
  Probe
gcagttccttgattactttaagacg

SEQ ID NO: 153186 - DNA, 25 bp, Artificial
  Probe
ttactttaagacggagcacaaatta

SEQ ID NO: 153187 - DNA, 25 bp, Artificial
  Probe
tactataatcaagagtggacattgt

SEQ ID NO: 153188 - DNA, 25 bp, Artificial
  Probe
taagacggagcacaaattagagatc

SEQ ID NO: 153189 - DNA, 25 bp, Artificial
  Probe
tacgatatacaattcgctgatctcc

SEQ ID NO: 153190 - DNA, 25 bp, Artificial
  Probe
tgtacgatatacaattcgctgatct

SEQ ID NO: 153191 - DNA, 25 bp, Artificial
  Probe
gtacgatatacaattcgctgatctc

SEQ ID NO: 153192 - DNA, 25 bp, Artificial
  Probe
cgatatacaattcgctgatctccat

SEQ ID NO: 153193 - DNA, 25 bp, Artificial
  Probe
cctatgtacgatatacaattcgctg

SEQ ID NO: 153194 - DNA, 25 bp, Artificial
  Probe
agcagttccttgattactttaagac

SEQ ID NO: 153195 - DNA, 25 bp, Artificial
  Probe
ctttgtaccttgtttggaacctaaa

SEQ ID NO: 153196 - DNA, 25 bp, Artificial
  Probe
atgtacgatatacaattcgctgatc

SEQ ID NO: 153197 - DNA, 25 bp, Artificial
  Probe
ttgtaccttgtttggaacctaaatc

SEQ ID NO: 153198 - DNA, 25 bp, Artificial
  Probe
ccttgattactttaagacggagcac

SEQ ID NO: 153199 - DNA, 25 bp, Artificial
  Probe
tgtccatgctctattctttcttcat

SEQ ID NO: 153200 - DNA, 25 bp, Artificial
  Probe
gtgtccatgctctattctttcttca

SEQ ID NO: 153201 - DNA, 25 bp, Artificial
  Probe
tgtgtccatgctctattctttcttc

SEQ ID NO: 153202 - DNA, 25 bp, Artificial
  Probe
gtgtgtccatgctctattctttctt

SEQ ID NO: 153203 - DNA, 25 bp, Artificial
  Probe
tttgtaccttgtttggaacctaaat

SEQ ID NO: 153204 - DNA, 25 bp, Artificial
  Probe
aagcagttccttgattactttaaga

SEQ ID NO: 153205 - DNA, 25 bp, Artificial
  Probe
gtactataatcaagagtggacattg

SEQ ID NO: 153206 - DNA, 25 bp, Artificial
  Probe
ctatgtacgatatacaattcgctga

SEQ ID NO: 153207 - DNA, 25 bp, Artificial
  Probe
taatcaagagtggacattgtgggat

SEQ ID NO: 153208 - DNA, 25 bp, Artificial
  Probe
ataatcaagagtggacattgtggga

SEQ ID NO: 153209 - DNA, 25 bp, Artificial
  Probe
cctcgtcaccagtactataatcaag

SEQ ID NO: 153210 - DNA, 25 bp, Artificial
  Probe
tcgtcaccagtactataatcaagag

SEQ ID NO: 153211 - DNA, 25 bp, Artificial
  Probe
ctcgtcaccagtactataatcaaga

SEQ ID NO: 153212 - DNA, 25 bp, Artificial
  Probe
gaatcttgtctcaatgctcataacg

SEQ ID NO: 153213 - DNA, 25 bp, Artificial
  Probe
tgaatcttgtctcaatgctcataac

SEQ ID NO: 153214 - DNA, 25 bp, Artificial
  Probe
aattagtgctaagtgtgaactggac

SEQ ID NO: 153215 - DNA, 25 bp, Artificial
  Probe
aatcttgtctcaatgctcataacgg

SEQ ID NO: 153216 - DNA, 25 bp, Artificial
  Probe
taattagtgctaagtgtgaactgga

SEQ ID NO: 153217 - DNA, 25 bp, Artificial
  Probe
tcttgtctcaatgctcataacggat

SEQ ID NO: 153218 - DNA, 25 bp, Artificial
  Probe
atcttgtctcaatgctcataacgga

SEQ ID NO: 153219 - DNA, 25 bp, Artificial
  Probe
ttaattagtgctaagtgtgaactgg

SEQ ID NO: 153220 - DNA, 25 bp, Artificial
  Probe
cttgtctcaatgctcataacggatc

SEQ ID NO: 153221 - DNA, 25 bp, Artificial
  Probe
tctcaatgctcataacggatcacaa

SEQ ID NO: 153222 - DNA, 25 bp, Artificial
  Probe
cctttattgtgtttgtcattagcct

SEQ ID NO: 153223 - DNA, 25 bp, Artificial
  Probe
atctgcctttattgtgtttgtcatt

SEQ ID NO: 153224 - DNA, 25 bp, Artificial
  Probe
tgcctttattgtgtttgtcattagc

SEQ ID NO: 153225 - DNA, 25 bp, Artificial
  Probe
tctgcctttattgtgtttgtcatta

SEQ ID NO: 153226 - DNA, 25 bp, Artificial
  Probe
attagtgctaagtgtgaactggacc

SEQ ID NO: 153227 - DNA, 25 bp, Artificial
  Probe
ctttattgtgtttgtcattagcctg

SEQ ID NO: 153228 - DNA, 25 bp, Artificial
  Probe
ctgcctttattgtgtttgtcattag

SEQ ID NO: 153229 - DNA, 25 bp, Artificial
  Probe
tatctgcctttattgtgtttgtcat

SEQ ID NO: 153230 - DNA, 25 bp, Artificial
  Probe
atatctgcctttattgtgtttgtca

SEQ ID NO: 153231 - DNA, 25 bp, Artificial
  Probe
ttgtctcaatgctcataacggatca

SEQ ID NO: 153232 - DNA, 25 bp, Artificial
  Probe
gcctttattgtgtttgtcattagcc

SEQ ID NO: 153233 - DNA, 25 bp, Artificial
  Probe
catatctgcctttattgtgtttgtc

SEQ ID NO: 153234 - DNA, 25 bp, Artificial
  Probe
aatgctcataacggatcacaaatac

SEQ ID NO: 153235 - DNA, 25 bp, Artificial
  Probe
caatgctcataacggatcacaaata

SEQ ID NO: 153236 - DNA, 25 bp, Artificial
  Probe
tttattgtgtttgtcattagcctga

SEQ ID NO: 153237 - DNA, 25 bp, Artificial
  Probe
atgctcataacggatcacaaataca

SEQ ID NO: 153238 - DNA, 25 bp, Artificial
  Probe
atcagccaattatgttaaactagca

SEQ ID NO: 153239 - DNA, 25 bp, Artificial
  Probe
gtctcaatgctcataacggatcaca

SEQ ID NO: 153240 - DNA, 25 bp, Artificial
  Probe
tgtctcaatgctcataacggatcac

SEQ ID NO: 153241 - DNA, 25 bp, Artificial
  Probe
gctcataacggatcacaaatacaga

SEQ ID NO: 153242 - DNA, 25 bp, Artificial
  Probe
tcagccaattatgttaaactagcat

SEQ ID NO: 153243 - DNA, 25 bp, Artificial
  Probe
tcaatgctcataacggatcacaaat

SEQ ID NO: 153244 - DNA, 25 bp, Artificial
  Probe
tgctcataacggatcacaaatacag

SEQ ID NO: 153245 - DNA, 25 bp, Artificial
  Probe
ctcataacggatcacaaatacagat

SEQ ID NO: 153246 - DNA, 25 bp, Artificial
  Probe
tcataacggatcacaaatacagatt

SEQ ID NO: 153247 - DNA, 25 bp, Artificial
  Probe
ctcaatgctcataacggatcacaaa

SEQ ID NO: 153248 - DNA, 25 bp, Artificial
  Probe
atcctctttagagttagactgttgg

SEQ ID NO: 153249 - DNA, 25 bp, Artificial
  Probe
cattagcctgactagaaaggacttt

SEQ ID NO: 153250 - DNA, 25 bp, Artificial
  Probe
aatcagccaattatgttaaactagc

SEQ ID NO: 153251 - DNA, 25 bp, Artificial
  Probe
gcattggctttatcctctttagagt

SEQ ID NO: 153252 - DNA, 25 bp, Artificial
  Probe
cataacggatcacaaatacagattc

SEQ ID NO: 153253 - DNA, 25 bp, Artificial
  Probe
ttgaatcttgtctcaatgctcataa

SEQ ID NO: 153254 - DNA, 25 bp, Artificial
  Probe
aaggcattggctttatcctctttag

SEQ ID NO: 153255 - DNA, 25 bp, Artificial
  Probe
tcattagcctgactagaaaggactt

SEQ ID NO: 153256 - DNA, 25 bp, Artificial
  Probe
ataacggatcacaaatacagattct

SEQ ID NO: 153257 - DNA, 25 bp, Artificial
  Probe
tcagtaacttgttgaagaattgaca

SEQ ID NO: 153258 - DNA, 25 bp, Artificial
  Probe
atcagtaacttgttgaagaattgac

SEQ ID NO: 153259 - DNA, 25 bp, Artificial
  Probe
ttgtttagagagtaggaatgtcagg

SEQ ID NO: 153260 - DNA, 25 bp, Artificial
  Probe
tgaatggtttgaaatgaagactgtt

SEQ ID NO: 153261 - DNA, 25 bp, Artificial
  Probe
ttagagagtaggaatgtcagggttt

SEQ ID NO: 153262 - DNA, 25 bp, Artificial
  Probe
tttagagagtaggaatgtcagggtt

SEQ ID NO: 153263 - DNA, 25 bp, Artificial
  Probe
atgaatggtttgaaatgaagactgt

SEQ ID NO: 153264 - DNA, 25 bp, Artificial
  Probe
aggtttgtttagagagtaggaatgt

SEQ ID NO: 153265 - DNA, 25 bp, Artificial
  Probe
ggtttgtttagagagtaggaatgtc

SEQ ID NO: 153266 - DNA, 25 bp, Artificial
  Probe
tggtttgaaatgaagactgttatgt

SEQ ID NO: 153267 - DNA, 25 bp, Artificial
  Probe
gagaaattccacagtcagttaatgc

SEQ ID NO: 153268 - DNA, 25 bp, Artificial
  Probe
gtttagagagtaggaatgtcagggt

SEQ ID NO: 153269 - DNA, 25 bp, Artificial
  Probe
tgtttagagagtaggaatgtcaggg

SEQ ID NO: 153270 - DNA, 25 bp, Artificial
  Probe
aagaagattgagaaattccacagtc

SEQ ID NO: 153271 - DNA, 25 bp, Artificial
  Probe
gtttgtttagagagtaggaatgtca

SEQ ID NO: 153272 - DNA, 25 bp, Artificial
  Probe
aaggtttgtttagagagtaggaatg

SEQ ID NO: 153273 - DNA, 25 bp, Artificial
  Probe
aatgaatggtttgaaatgaagactg

SEQ ID NO: 153274 - DNA, 25 bp, Artificial
  Probe
acagaatgaatggtttgaaatgaag

SEQ ID NO: 153275 - DNA, 25 bp, Artificial
  Probe
agactgttatgttcttgggaagtaa

SEQ ID NO: 153276 - DNA, 25 bp, Artificial
  Probe
gaagattgagaaattccacagtcag

SEQ ID NO: 153277 - DNA, 25 bp, Artificial
  Probe
agaagattgagaaattccacagtca

SEQ ID NO: 153278 - DNA, 25 bp, Artificial
  Probe
agattgagaaattccacagtcagtt

SEQ ID NO: 153279 - DNA, 25 bp, Artificial
  Probe
aagattgagaaattccacagtcagt

SEQ ID NO: 153280 - DNA, 25 bp, Artificial
  Probe
tttgtttagagagtaggaatgtcag

SEQ ID NO: 153281 - DNA, 25 bp, Artificial
  Probe
actgttatgttcttgggaagtaaac

SEQ ID NO: 153282 - DNA, 25 bp, Artificial
  Probe
gaatgaatggtttgaaatgaagact

SEQ ID NO: 153283 - DNA, 25 bp, Artificial
  Probe
agaatgaatggtttgaaatgaagac

SEQ ID NO: 153284 - DNA, 25 bp, Artificial
  Probe
cagaatgaatggtttgaaatgaaga

SEQ ID NO: 153285 - DNA, 25 bp, Artificial
  Probe
aaagaagattgagaaattccacagt

SEQ ID NO: 153286 - DNA, 25 bp, Artificial
  Probe
tgagaaattccacagtcagttaatg

SEQ ID NO: 153287 - DNA, 25 bp, Artificial
  Probe
gactgttatgttcttgggaagtaaa

SEQ ID NO: 153288 - DNA, 25 bp, Artificial
  Probe
ggtttgaaatgaagactgttatgtt

SEQ ID NO: 153289 - DNA, 25 bp, Artificial
  Probe
gattgagaaattccacagtcagtta

SEQ ID NO: 153290 - DNA, 25 bp, Artificial
  Probe
ttgctgataatttgatgttggacaa

SEQ ID NO: 153291 - DNA, 25 bp, Artificial
  Probe
tttgctgataatttgatgttggaca

SEQ ID NO: 153292 - DNA, 25 bp, Artificial
  Probe
atggtttgaaatgaagactgttatg

SEQ ID NO: 153293 - DNA, 25 bp, Artificial
  Probe
gaaattccacagtcagttaatgcga

SEQ ID NO: 153294 - DNA, 25 bp, Artificial
  Probe
agaaattccacagtcagttaatgcg

SEQ ID NO: 153295 - DNA, 25 bp, Artificial
  Probe
gaatggtttgaaatgaagactgtta

SEQ ID NO: 153296 - DNA, 25 bp, Artificial
  Probe
tacagaacagaccaagctcaagatg

SEQ ID NO: 153297 - DNA, 25 bp, Artificial
  Probe
gtacagaacagaccaagctcaagat

SEQ ID NO: 153298 - DNA, 25 bp, Artificial
  Probe
gtgtcctaaggtttgtttagagagt

SEQ ID NO: 153299 - DNA, 25 bp, Artificial
  Probe
tgtgtcctaaggtttgtttagagag

SEQ ID NO: 153300 - DNA, 25 bp, Artificial
  Probe
ctgtgtcctaaggtttgtttagaga

SEQ ID NO: 153301 - DNA, 25 bp, Artificial
  Probe
agaacagaccaagctcaagatgtaa

SEQ ID NO: 153302 - DNA, 25 bp, Artificial
  Probe
tatgtgtgaatgagtgttaatggaa

SEQ ID NO: 153303 - DNA, 25 bp, Artificial
  Probe
ttatgtgtgaatgagtgttaatgga

SEQ ID NO: 153304 - DNA, 25 bp, Artificial
  Probe
tgtctattatgtgtgaatgagtgtt

SEQ ID NO: 153305 - DNA, 25 bp, Artificial
  Probe
atgtctattatgtgtgaatgagtgt

SEQ ID NO: 153306 - DNA, 25 bp, Artificial
  Probe
gcatgtctattatgtgtgaatgagt

SEQ ID NO: 153307 - DNA, 25 bp, Artificial
  Probe
tacagtgcctatgacggatcaataa

SEQ ID NO: 153308 - DNA, 25 bp, Artificial
  Probe
attatgtgtgaatgagtgttaatgg

SEQ ID NO: 153309 - DNA, 25 bp, Artificial
  Probe
ctttgcccaatacttagatttcacc

SEQ ID NO: 153310 - DNA, 25 bp, Artificial
  Probe
gtacagtgcctatgacggatcaata

SEQ ID NO: 153311 - DNA, 25 bp, Artificial
  Probe
catgtctattatgtgtgaatgagtg

SEQ ID NO: 153312 - DNA, 25 bp, Artificial
  Probe
gtgcatgtctattatgtgtgaatga

SEQ ID NO: 153313 - DNA, 25 bp, Artificial
  Probe
cgtgcatgtctattatgtgtgaatg

SEQ ID NO: 153314 - DNA, 25 bp, Artificial
  Probe
gctttgcccaatacttagatttcac

SEQ ID NO: 153315 - DNA, 25 bp, Artificial
  Probe
atgtgtgaatgagtgttaatggaaa

SEQ ID NO: 153316 - DNA, 25 bp, Artificial
  Probe
atgtattggcgtgcatgtctattat

SEQ ID NO: 153317 - DNA, 25 bp, Artificial
  Probe
tgcatgtctattatgtgtgaatgag

SEQ ID NO: 153318 - DNA, 25 bp, Artificial
  Probe
aatgtattggcgtgcatgtctatta

SEQ ID NO: 153319 - DNA, 25 bp, Artificial
  Probe
tgtgtgaatgagtgttaatggaaac

SEQ ID NO: 153320 - DNA, 25 bp, Artificial
  Probe
tactggtcaataatgaagggtgttt

SEQ ID NO: 153321 - DNA, 25 bp, Artificial
  Probe
atactggtcaataatgaagggtgtt

SEQ ID NO: 153322 - DNA, 25 bp, Artificial
  Probe
tgaatgagtgttaatggaaacttgg

SEQ ID NO: 153323 - DNA, 25 bp, Artificial
  Probe
gtgtgaatgagtgttaatggaaact

SEQ ID NO: 153324 - DNA, 25 bp, Artificial
  Probe
cccaatacttagatttcaccgtact

SEQ ID NO: 153325 - DNA, 25 bp, Artificial
  Probe
tattggcgtgcatgtctattatgtg

SEQ ID NO: 153326 - DNA, 25 bp, Artificial
  Probe
gtattggcgtgcatgtctattatgt

SEQ ID NO: 153327 - DNA, 25 bp, Artificial
  Probe
tgtattggcgtgcatgtctattatg

SEQ ID NO: 153328 - DNA, 25 bp, Artificial
  Probe
tatactggtcaataatgaagggtgt

SEQ ID NO: 153329 - DNA, 25 bp, Artificial
  Probe
tttgcccaatacttagatttcaccg

SEQ ID NO: 153330 - DNA, 25 bp, Artificial
  Probe
gaatgagtgttaatggaaacttggc

SEQ ID NO: 153331 - DNA, 25 bp, Artificial
  Probe
tgtgaatgagtgttaatggaaactt

SEQ ID NO: 153332 - DNA, 25 bp, Artificial
  Probe
gtctattatgtgtgaatgagtgtta

SEQ ID NO: 153333 - DNA, 25 bp, Artificial
  Probe
tgcccaatacttagatttcaccgta

SEQ ID NO: 153334 - DNA, 25 bp, Artificial
  Probe
gtgaatgagtgttaatggaaacttg

SEQ ID NO: 153335 - DNA, 25 bp, Artificial
  Probe
caaccgtgtattaattgccagtgtt

SEQ ID NO: 153336 - DNA, 25 bp, Artificial
  Probe
gaaatagaatctgtcccgagaaagc

SEQ ID NO: 153337 - DNA, 25 bp, Artificial
  Probe
acttagatttcaccgtactttctgg

SEQ ID NO: 153338 - DNA, 25 bp, Artificial
  Probe
cgctttgcccaatacttagatttca

SEQ ID NO: 153339 - DNA, 25 bp, Artificial
  Probe
acgctttgcccaatacttagatttc

SEQ ID NO: 153340 - DNA, 25 bp, Artificial
  Probe
tgatagagaaagtattgagccattt

SEQ ID NO: 153341 - DNA, 25 bp, Artificial
  Probe
gcgtgcatgtctattatgtgtgaat

SEQ ID NO: 153342 - DNA, 25 bp, Artificial
  Probe
ccaatacttagatttcaccgtactt

SEQ ID NO: 153343 - DNA, 25 bp, Artificial
  Probe
cacgctttgcccaatacttagattt

SEQ ID NO: 153344 - DNA, 25 bp, Artificial
  Probe
gcccaatacttagatttcaccgtac

SEQ ID NO: 153345 - DNA, 25 bp, Artificial
  Probe
ttatactggtcaataatgaagggtg

SEQ ID NO: 153346 - DNA, 25 bp, Artificial
  Probe
atgatagagaaagtattgagccatt

SEQ ID NO: 153347 - DNA, 25 bp, Artificial
  Probe
gaccgtaacaaggatcaggaagtaa

SEQ ID NO: 153348 - DNA, 25 bp, Artificial
  Probe
cgtaacaaggatcaggaagtaaact

SEQ ID NO: 153349 - DNA, 25 bp, Artificial
  Probe
gatggatgatctggaccgtaacaag

SEQ ID NO: 153350 - DNA, 25 bp, Artificial
  Probe
ccgtaacaaggatcaggaagtaaac

SEQ ID NO: 153351 - DNA, 25 bp, Artificial
  Probe
gtaacaaggatcaggaagtaaactt

SEQ ID NO: 153352 - DNA, 25 bp, Artificial
  Probe
accgtaacaaggatcaggaagtaaa

SEQ ID NO: 153353 - DNA, 25 bp, Artificial
  Probe
aagtaaacttccaggagtatgttgc

SEQ ID NO: 153354 - DNA, 25 bp, Artificial
  Probe
ggaccgtaacaaggatcaggaagta

SEQ ID NO: 153355 - DNA, 25 bp, Artificial
  Probe
tgatggatgatctggaccgtaacaa

SEQ ID NO: 153356 - DNA, 25 bp, Artificial
  Probe
ctttgatctacaatgaagctctgaa

SEQ ID NO: 153357 - DNA, 25 bp, Artificial
  Probe
taaacttccaggagtatgttgcctt

SEQ ID NO: 153358 - DNA, 25 bp, Artificial
  Probe
tttgatctacaatgaagctctgaaa

SEQ ID NO: 153359 - DNA, 25 bp, Artificial
  Probe
agtaaacttccaggagtatgttgcc

SEQ ID NO: 153360 - DNA, 25 bp, Artificial
  Probe
ttgatctacaatgaagctctgaaat

SEQ ID NO: 153361 - DNA, 25 bp, Artificial
  Probe
ggatgatctggaccgtaacaaggat

SEQ ID NO: 153362 - DNA, 25 bp, Artificial
  Probe
ctgatggatgatctggaccgtaaca

SEQ ID NO: 153363 - DNA, 25 bp, Artificial
  Probe
tgatctacaatgaagctctgaaata

SEQ ID NO: 153364 - DNA, 25 bp, Artificial
  Probe
gaaataaaatgggaaggcagagatg

SEQ ID NO: 153365 - DNA, 25 bp, Artificial
  Probe
tgaaataaaatgggaaggcagagat

SEQ ID NO: 153366 - DNA, 25 bp, Artificial
  Probe
gccttggctttgatctacaatgaag

SEQ ID NO: 153367 - DNA, 25 bp, Artificial
  Probe
gtaaacttccaggagtatgttgcct

SEQ ID NO: 153368 - DNA, 25 bp, Artificial
  Probe
atggatgatctggaccgtaacaagg

SEQ ID NO: 153369 - DNA, 25 bp, Artificial
  Probe
gatgatctggaccgtaacaaggatc

SEQ ID NO: 153370 - DNA, 25 bp, Artificial
  Probe
aaacttccaggagtatgttgccttc

SEQ ID NO: 153371 - DNA, 25 bp, Artificial
  Probe
tatcttccacaagtactctggcaag

SEQ ID NO: 153372 - DNA, 25 bp, Artificial
  Probe
ctatcttccacaagtactctggcaa

SEQ ID NO: 153373 - DNA, 25 bp, Artificial
  Probe
gatctacaatgaagctctgaaataa

SEQ ID NO: 153374 - DNA, 25 bp, Artificial
  Probe
ctgaaataaaatgggaaggcagaga

SEQ ID NO: 153375 - DNA, 25 bp, Artificial
  Probe
gaagctctgaaataaaatgggaagg

SEQ ID NO: 153376 - DNA, 25 bp, Artificial
  Probe
tgaagctctgaaataaaatgggaag

SEQ ID NO: 153377 - DNA, 25 bp, Artificial
  Probe
aacttccaggagtatgttgccttcc

SEQ ID NO: 153378 - DNA, 25 bp, Artificial
  Probe
caatgaagctctgaaataaaatggg

SEQ ID NO: 153379 - DNA, 25 bp, Artificial
  Probe
atgaagctctgaaataaaatgggaa

SEQ ID NO: 153380 - DNA, 25 bp, Artificial
  Probe
aatgaagctctgaaataaaatggga

SEQ ID NO: 153381 - DNA, 25 bp, Artificial
  Probe
atctacaatgaagctctgaaataaa

SEQ ID NO: 153382 - DNA, 25 bp, Artificial
  Probe
ctggaccgtaacaaggatcaggaag

SEQ ID NO: 153383 - DNA, 25 bp, Artificial
  Probe
tggatgatctggaccgtaacaagga

SEQ ID NO: 153384 - DNA, 25 bp, Artificial
  Probe
gctgatggatgatctggaccgtaac

SEQ ID NO: 153385 - DNA, 25 bp, Artificial
  Probe
gaagtaaacttccaggagtatgttg

SEQ ID NO: 153386 - DNA, 25 bp, Artificial
  Probe
acaatgaagctctgaaataaaatgg

SEQ ID NO: 153387 - DNA, 25 bp, Artificial
  Probe
aagctctgaaataaaatgggaaggc

SEQ ID NO: 153388 - DNA, 25 bp, Artificial
  Probe
atctggaccgtaacaaggatcagga

SEQ ID NO: 153389 - DNA, 25 bp, Artificial
  Probe
gctctgaaataaaatgggaaggcag

SEQ ID NO: 153390 - DNA, 25 bp, Artificial
  Probe
taacaaggatcaggaagtaaacttc

SEQ ID NO: 153391 - DNA, 25 bp, Artificial
  Probe
tctggaccgtaacaaggatcaggaa

SEQ ID NO: 153392 - DNA, 25 bp, Artificial
  Probe
ctgtgtatggagagattgaagagat

SEQ ID NO: 153393 - DNA, 25 bp, Artificial
  Probe
agtctgtctatcatattcacctcca

SEQ ID NO: 153394 - DNA, 25 bp, Artificial
  Probe
gtctgtctatcatattcacctccac

SEQ ID NO: 153395 - DNA, 25 bp, Artificial
  Probe
cagtctgtctatcatattcacctcc

SEQ ID NO: 153396 - DNA, 25 bp, Artificial
  Probe
gcagtctgtctatcatattcacctc

SEQ ID NO: 153397 - DNA, 25 bp, Artificial
  Probe
cctgtgtatggagagattgaagaga

SEQ ID NO: 153398 - DNA, 25 bp, Artificial
  Probe
tctgtctatcatattcacctccacg

SEQ ID NO: 153399 - DNA, 25 bp, Artificial
  Probe
tgtgtatggagagattgaagagatc

SEQ ID NO: 153400 - DNA, 25 bp, Artificial
  Probe
ggcagtctgtctatcatattcacct

SEQ ID NO: 153401 - DNA, 25 bp, Artificial
  Probe
gtgtatggagagattgaagagatca

SEQ ID NO: 153402 - DNA, 25 bp, Artificial
  Probe
tgtatggagagattgaagagatcat

SEQ ID NO: 153403 - DNA, 25 bp, Artificial
  Probe
ttgcctgtgtatggagagattgaag

SEQ ID NO: 153404 - DNA, 25 bp, Artificial
  Probe
tatccttctctaggtagttggcaag

SEQ ID NO: 153405 - DNA, 25 bp, Artificial
  Probe
aagtatccttctctaggtagttggc

SEQ ID NO: 153406 - DNA, 25 bp, Artificial
  Probe
gtatccttctctaggtagttggcaa

SEQ ID NO: 153407 - DNA, 25 bp, Artificial
  Probe
gcctgtgtatggagagattgaagag

SEQ ID NO: 153408 - DNA, 25 bp, Artificial
  Probe
taagtatccttctctaggtagttgg

SEQ ID NO: 153409 - DNA, 25 bp, Artificial
  Probe
gtatggagagattgaagagatcatt

SEQ ID NO: 153410 - DNA, 25 bp, Artificial
  Probe
gcagatgatgatgatgaaagtcttc

SEQ ID NO: 153411 - DNA, 25 bp, Artificial
  Probe
agtatccttctctaggtagttggca

SEQ ID NO: 153412 - DNA, 25 bp, Artificial
  Probe
cagtaatttcaatggcacacatagt

SEQ ID NO: 153413 - DNA, 25 bp, Artificial
  Probe
agtaatttcaatggcacacatagtt

SEQ ID NO: 153414 - DNA, 25 bp, Artificial
  Probe
tgcctgtgtatggagagattgaaga

SEQ ID NO: 153415 - DNA, 25 bp, Artificial
  Probe
ttaatgattgttggcaagaaatgtg

SEQ ID NO: 153416 - DNA, 25 bp, Artificial
  Probe
ctatcatattcacctccacgtcctt

SEQ ID NO: 153417 - DNA, 25 bp, Artificial
  Probe
tgtctatcatattcacctccacgtc

SEQ ID NO: 153418 - DNA, 25 bp, Artificial
  Probe
ctgtctatcatattcacctccacgt

SEQ ID NO: 153419 - DNA, 25 bp, Artificial
  Probe
ggcagatgatgatgatgaaagtctt

SEQ ID NO: 153420 - DNA, 25 bp, Artificial
  Probe
cagatgatgatgatgaaagtcttct

SEQ ID NO: 153421 - DNA, 25 bp, Artificial
  Probe
tgatgatgatgaaagtcttctagga

SEQ ID NO: 153422 - DNA, 25 bp, Artificial
  Probe
gtaatttcaatggcacacatagttt

SEQ ID NO: 153423 - DNA, 25 bp, Artificial
  Probe
tatcatattcacctccacgtccttg

SEQ ID NO: 153424 - DNA, 25 bp, Artificial
  Probe
ccaagaagcacatatcccagatttc

SEQ ID NO: 153425 - DNA, 25 bp, Artificial
  Probe
gtggcagatgatgatgatgaaagtc

SEQ ID NO: 153426 - DNA, 25 bp, Artificial
  Probe
tttaatgattgttggcaagaaatgt

SEQ ID NO: 153427 - DNA, 25 bp, Artificial
  Probe
ggacatttaatgattgttggcaaga

SEQ ID NO: 153428 - DNA, 25 bp, Artificial
  Probe
aggacatttaatgattgttggcaag

SEQ ID NO: 153429 - DNA, 25 bp, Artificial
  Probe
ctaggacatttaatgattgttggca

SEQ ID NO: 153430 - DNA, 25 bp, Artificial
  Probe
tttgcctgtgtatggagagattgaa

SEQ ID NO: 153431 - DNA, 25 bp, Artificial
  Probe
tctaggacatttaatgattgttggc

SEQ ID NO: 153432 - DNA, 25 bp, Artificial
  Probe
tctatcatattcacctccacgtcct

SEQ ID NO: 153433 - DNA, 25 bp, Artificial
  Probe
gtctatcatattcacctccacgtcc

SEQ ID NO: 153434 - DNA, 25 bp, Artificial
  Probe
taggacatttaatgattgttggcaa

SEQ ID NO: 153435 - DNA, 25 bp, Artificial
  Probe
tggcagatgatgatgatgaaagtct

SEQ ID NO: 153436 - DNA, 25 bp, Artificial
  Probe
atgatgatgatgaaagtcttctagg

SEQ ID NO: 153437 - DNA, 25 bp, Artificial
  Probe
agcatgatactgacacttggtaaat

SEQ ID NO: 153438 - DNA, 25 bp, Artificial
  Probe
tgacacttggtaaatgtagtttgac

SEQ ID NO: 153439 - DNA, 25 bp, Artificial
  Probe
actgacacttggtaaatgtagtttg

SEQ ID NO: 153440 - DNA, 25 bp, Artificial
  Probe
gacacttggtaaatgtagtttgact

SEQ ID NO: 153441 - DNA, 25 bp, Artificial
  Probe
ctgacacttggtaaatgtagtttga

SEQ ID NO: 153442 - DNA, 25 bp, Artificial
  Probe
gcatgatactgacacttggtaaatg

SEQ ID NO: 153443 - DNA, 25 bp, Artificial
  Probe
aaattgtttgtttagtacgccaact

SEQ ID NO: 153444 - DNA, 25 bp, Artificial
  Probe
gatactgacacttggtaaatgtagt

SEQ ID NO: 153445 - DNA, 25 bp, Artificial
  Probe
tgatactgacacttggtaaatgtag

SEQ ID NO: 153446 - DNA, 25 bp, Artificial
  Probe
gaattatgggctcaactttccaaat

SEQ ID NO: 153447 - DNA, 25 bp, Artificial
  Probe
attatgggctcaactttccaaattg

SEQ ID NO: 153448 - DNA, 25 bp, Artificial
  Probe
catgatactgacacttggtaaatgt

SEQ ID NO: 153449 - DNA, 25 bp, Artificial
  Probe
aattatgggctcaactttccaaatt

SEQ ID NO: 153450 - DNA, 25 bp, Artificial
  Probe
tactgacacttggtaaatgtagttt

SEQ ID NO: 153451 - DNA, 25 bp, Artificial
  Probe
ccagcatgatactgacacttggtaa

SEQ ID NO: 153452 - DNA, 25 bp, Artificial
  Probe
atactgacacttggtaaatgtagtt

SEQ ID NO: 153453 - DNA, 25 bp, Artificial
  Probe
cagcatgatactgacacttggtaaa

SEQ ID NO: 153454 - DNA, 25 bp, Artificial
  Probe
aattgtttgtttagtacgccaacta

SEQ ID NO: 153455 - DNA, 25 bp, Artificial
  Probe
tatgggctcaactttccaaattgtt

SEQ ID NO: 153456 - DNA, 25 bp, Artificial
  Probe
ttatgggctcaactttccaaattgt

SEQ ID NO: 153457 - DNA, 25 bp, Artificial
  Probe
atgatactgacacttggtaaatgta

SEQ ID NO: 153458 - DNA, 25 bp, Artificial
  Probe
acacttggtaaatgtagtttgacta

SEQ ID NO: 153459 - DNA, 25 bp, Artificial
  Probe
atgggctcaactttccaaattgttt

SEQ ID NO: 153460 - DNA, 25 bp, Artificial
  Probe
gctcaactttccaaattgtttgttt

SEQ ID NO: 153461 - DNA, 25 bp, Artificial
  Probe
caaattgtttgtttagtacgccaac

SEQ ID NO: 153462 - DNA, 25 bp, Artificial
  Probe
aaattccccttcacatcaaaacatc

SEQ ID NO: 153463 - DNA, 25 bp, Artificial
  Probe
aaaattccccttcacatcaaaacat

SEQ ID NO: 153464 - DNA, 25 bp, Artificial
  Probe
caactaaaattccccttcacatcaa

SEQ ID NO: 153465 - DNA, 25 bp, Artificial
  Probe
attccccttcacatcaaaacatcat

SEQ ID NO: 153466 - DNA, 25 bp, Artificial
  Probe
tttccaaattgtttgtttagtacgc

SEQ ID NO: 153467 - DNA, 25 bp, Artificial
  Probe
ttccccttcacatcaaaacatcatt

SEQ ID NO: 153468 - DNA, 25 bp, Artificial
  Probe
taaaattccccttcacatcaaaaca

SEQ ID NO: 153469 - DNA, 25 bp, Artificial
  Probe
ttccaaattgtttgtttagtacgcc

SEQ ID NO: 153470 - DNA, 25 bp, Artificial
  Probe
tccccttcacatcaaaacatcattt

SEQ ID NO: 153471 - DNA, 25 bp, Artificial
  Probe
ccaaattgtttgtttagtacgccaa

SEQ ID NO: 153472 - DNA, 25 bp, Artificial
  Probe
tggtaaatgtagtttgactattcct

SEQ ID NO: 153473 - DNA, 25 bp, Artificial
  Probe
actaaaattccccttcacatcaaaa

SEQ ID NO: 153474 - DNA, 25 bp, Artificial
  Probe
aactaaaattccccttcacatcaaa

SEQ ID NO: 153475 - DNA, 25 bp, Artificial
  Probe
aattccccttcacatcaaaacatca

SEQ ID NO: 153476 - DNA, 25 bp, Artificial
  Probe
ctaaaattccccttcacatcaaaac

SEQ ID NO: 153477 - DNA, 25 bp, Artificial
  Probe
ccaactaaaattccccttcacatca

SEQ ID NO: 153478 - DNA, 25 bp, Artificial
  Probe
ggctcaactttccaaattgtttgtt

SEQ ID NO: 153479 - DNA, 25 bp, Artificial
  Probe
tccaaattgtttgtttagtacgcca

SEQ ID NO: 153480 - DNA, 25 bp, Artificial
  Probe
cacttggtaaatgtagtttgactat

SEQ ID NO: 153481 - DNA, 25 bp, Artificial
  Probe
ttggtaaatgtagtttgactattcc

SEQ ID NO: 153482 - DNA, 25 bp, Artificial
  Probe
tatatgtatgtcggtgtgagtgtgt

SEQ ID NO: 153483 - DNA, 25 bp, Artificial
  Probe
atataattcttccacattagcctgc

SEQ ID NO: 153484 - DNA, 25 bp, Artificial
  Probe
atatatgtatgtcggtgtgagtgtg

SEQ ID NO: 153485 - DNA, 25 bp, Artificial
  Probe
tatatatgtatgtcggtgtgagtgt

SEQ ID NO: 153486 - DNA, 25 bp, Artificial
  Probe
aattggtgaataaggacatgagttc

SEQ ID NO: 153487 - DNA, 25 bp, Artificial
  Probe
catacacagaatcaggcacttactg

SEQ ID NO: 153488 - DNA, 25 bp, Artificial
  Probe
ccttggactacttgtctcctaagat

SEQ ID NO: 153489 - DNA, 25 bp, Artificial
  Probe
atatgtatgtcggtgtgagtgtgtg

SEQ ID NO: 153490 - DNA, 25 bp, Artificial
  Probe
cttggactacttgtctcctaagata

SEQ ID NO: 153491 - DNA, 25 bp, Artificial
  Probe
ttccttggactacttgtctcctaag

SEQ ID NO: 153492 - DNA, 25 bp, Artificial
  Probe
cttccttggactacttgtctcctaa

SEQ ID NO: 153493 - DNA, 25 bp, Artificial
  Probe
gcatacacagaatcaggcacttact

SEQ ID NO: 153494 - DNA, 25 bp, Artificial
  Probe
ttggactacttgtctcctaagataa

SEQ ID NO: 153495 - DNA, 25 bp, Artificial
  Probe
tataattcttccacattagcctgca

SEQ ID NO: 153496 - DNA, 25 bp, Artificial
  Probe
tgccctacatatcttaaattggtga

SEQ ID NO: 153497 - DNA, 25 bp, Artificial
  Probe
actgccctacatatcttaaattggt

SEQ ID NO: 153498 - DNA, 25 bp, Artificial
  Probe
agtgaactgccctacatatcttaaa

SEQ ID NO: 153499 - DNA, 25 bp, Artificial
  Probe
ctgccctacatatcttaaattggtg

SEQ ID NO: 153500 - DNA, 25 bp, Artificial
  Probe
tccttggactacttgtctcctaaga

SEQ ID NO: 153501 - DNA, 25 bp, Artificial
  Probe
gccctacatatcttaaattggtgaa

SEQ ID NO: 153502 - DNA, 25 bp, Artificial
  Probe
aactgccctacatatcttaaattgg

SEQ ID NO: 153503 - DNA, 25 bp, Artificial
  Probe
gtgaactgccctacatatcttaaat

SEQ ID NO: 153504 - DNA, 25 bp, Artificial
  Probe
acttccttggactacttgtctccta

SEQ ID NO: 153505 - DNA, 25 bp, Artificial
  Probe
cttactgcgactccttgtaggtatg

SEQ ID NO: 153506 - DNA, 25 bp, Artificial
  Probe
ttcatgtctgttctttgtgttactg

SEQ ID NO: 153507 - DNA, 25 bp, Artificial
  Probe
gttcatgtctgttctttgtgttact

SEQ ID NO: 153508 - DNA, 25 bp, Artificial
  Probe
ggttcatgtctgttctttgtgttac

SEQ ID NO: 153509 - DNA, 25 bp, Artificial
  Probe
gtatgtcggtgtgagtgtgtgtatg

SEQ ID NO: 153510 - DNA, 25 bp, Artificial
  Probe
tggttcatgtctgttctttgtgtta

SEQ ID NO: 153511 - DNA, 25 bp, Artificial
  Probe
acttactgcgactccttgtaggtat

SEQ ID NO: 153512 - DNA, 25 bp, Artificial
  Probe
aaattggtgaataaggacatgagtt

SEQ ID NO: 153513 - DNA, 25 bp, Artificial
  Probe
tgaactgccctacatatcttaaatt

SEQ ID NO: 153514 - DNA, 25 bp, Artificial
  Probe
gaactgccctacatatcttaaattg

SEQ ID NO: 153515 - DNA, 25 bp, Artificial
  Probe
atatatatgtatgtcggtgtgagtg

SEQ ID NO: 153516 - DNA, 25 bp, Artificial
  Probe
tggtgaataaggacatgagttcaat

SEQ ID NO: 153517 - DNA, 25 bp, Artificial
  Probe
attggtgaataaggacatgagttca

SEQ ID NO: 153518 - DNA, 25 bp, Artificial
  Probe
ttggtgaataaggacatgagttcaa

SEQ ID NO: 153519 - DNA, 25 bp, Artificial
  Probe
tatgtcggtgtgagtgtgtgtatgt

SEQ ID NO: 153520 - DNA, 25 bp, Artificial
  Probe
tgtatgtcggtgtgagtgtgtgtat

SEQ ID NO: 153521 - DNA, 25 bp, Artificial
  Probe
atgtatgtcggtgtgagtgtgtgta

SEQ ID NO: 153522 - DNA, 25 bp, Artificial
  Probe
tatgtatgtcggtgtgagtgtgtgt

SEQ ID NO: 153523 - DNA, 25 bp, Artificial
  Probe
tcatgtctgttctttgtgttactgc

SEQ ID NO: 153524 - DNA, 25 bp, Artificial
  Probe
taaattggtgaataaggacatgagt

SEQ ID NO: 153525 - DNA, 25 bp, Artificial
  Probe
cgtgtacccatatataattcttcca

SEQ ID NO: 153526 - DNA, 25 bp, Artificial
  Probe
ctggttcatgtctgttctttgtgtt

SEQ ID NO: 153527 - DNA, 25 bp, Artificial
  Probe
ctgttgctatgtagacttggagaat

SEQ ID NO: 153528 - DNA, 25 bp, Artificial
  Probe
ctatgtagacttggagaatactgcc

SEQ ID NO: 153529 - DNA, 25 bp, Artificial
  Probe
tgctatgtagacttggagaatactg

SEQ ID NO: 153530 - DNA, 25 bp, Artificial
  Probe
tgttgctatgtagacttggagaata

SEQ ID NO: 153531 - DNA, 25 bp, Artificial
  Probe
gctatgtagacttggagaatactgc

SEQ ID NO: 153532 - DNA, 25 bp, Artificial
  Probe
ttgctatgtagacttggagaatact

SEQ ID NO: 153533 - DNA, 25 bp, Artificial
  Probe
gttgctatgtagacttggagaatac

SEQ ID NO: 153534 - DNA, 25 bp, Artificial
  Probe
tatctgttgctatgtagacttggag

SEQ ID NO: 153535 - DNA, 25 bp, Artificial
  Probe
atctgttgctatgtagacttggaga

SEQ ID NO: 153536 - DNA, 25 bp, Artificial
  Probe
atatctgttgctatgtagacttgga

SEQ ID NO: 153537 - DNA, 25 bp, Artificial
  Probe
tctgttgctatgtagacttggagaa

SEQ ID NO: 153538 - DNA, 25 bp, Artificial
  Probe
tatatctgttgctatgtagacttgg

SEQ ID NO: 153539 - DNA, 25 bp, Artificial
  Probe
tatgtagacttggagaatactgcca

SEQ ID NO: 153540 - DNA, 25 bp, Artificial
  Probe
aatgtgtgagagcaactccatagag

SEQ ID NO: 153541 - DNA, 25 bp, Artificial
  Probe
gctgtatcactgcctttgtttatat

SEQ ID NO: 153542 - DNA, 25 bp, Artificial
  Probe
taaatgtgtgagagcaactccatag

SEQ ID NO: 153543 - DNA, 25 bp, Artificial
  Probe
gtaaatgtgtgagagcaactccata

SEQ ID NO: 153544 - DNA, 25 bp, Artificial
  Probe
atgtgtgagagcaactccatagaga

SEQ ID NO: 153545 - DNA, 25 bp, Artificial
  Probe
catagagagggtcttccaatccaag

SEQ ID NO: 153546 - DNA, 25 bp, Artificial
  Probe
agctgtatcactgcctttgtttata

SEQ ID NO: 153547 - DNA, 25 bp, Artificial
  Probe
aaatgtgtgagagcaactccataga

SEQ ID NO: 153548 - DNA, 25 bp, Artificial
  Probe
ctgtatcactgcctttgtttatatt

SEQ ID NO: 153549 - DNA, 25 bp, Artificial
  Probe
tgtgtgagagcaactccatagagag

SEQ ID NO: 153550 - DNA, 25 bp, Artificial
  Probe
aagctgtatcactgcctttgtttat

SEQ ID NO: 153551 - DNA, 25 bp, Artificial
  Probe
aactccatagagagggtcttccaat

SEQ ID NO: 153552 - DNA, 25 bp, Artificial
  Probe
gtatgacaagctgtatcactgcctt

SEQ ID NO: 153553 - DNA, 25 bp, Artificial
  Probe
aacgtgtatgacaagctgtatcact

SEQ ID NO: 153554 - DNA, 25 bp, Artificial
  Probe
tgtatcactgcctttgtttatattt

SEQ ID NO: 153555 - DNA, 25 bp, Artificial
  Probe
caatccaagatggcttccagatacc

SEQ ID NO: 153556 - DNA, 25 bp, Artificial
  Probe
ccaatccaagatggcttccagatac

SEQ ID NO: 153557 - DNA, 25 bp, Artificial
  Probe
tccaatccaagatggcttccagata

SEQ ID NO: 153558 - DNA, 25 bp, Artificial
  Probe
caagctgtatcactgcctttgttta

SEQ ID NO: 153559 - DNA, 25 bp, Artificial
  Probe
actccatagagagggtcttccaatc

SEQ ID NO: 153560 - DNA, 25 bp, Artificial
  Probe
atatatctgttgctatgtagacttg

SEQ ID NO: 153561 - DNA, 25 bp, Artificial
  Probe
ccatagagagggtcttccaatccaa

SEQ ID NO: 153562 - DNA, 25 bp, Artificial
  Probe
gtgtggtaaatgtgtgagagcaact

SEQ ID NO: 153563 - DNA, 25 bp, Artificial
  Probe
gtgtgagagcaactccatagagagg

SEQ ID NO: 153564 - DNA, 25 bp, Artificial
  Probe
ggtaaatgtgtgagagcaactccat

SEQ ID NO: 153565 - DNA, 25 bp, Artificial
  Probe
acgtgtatgacaagctgtatcactg

SEQ ID NO: 153566 - DNA, 25 bp, Artificial
  Probe
agtgatgtccttaaaatgtggtctg

SEQ ID NO: 153567 - DNA, 25 bp, Artificial
  Probe
cagtgatgtccttaaaatgtggtct

SEQ ID NO: 153568 - DNA, 25 bp, Artificial
  Probe
cttccagatacccgtgttcatgttt

SEQ ID NO: 153569 - DNA, 25 bp, Artificial
  Probe
tcagtgatgtccttaaaatgtggtc

SEQ ID NO: 153570 - DNA, 25 bp, Artificial
  Probe
caactccatagagagggtcttccaa

SEQ ID NO: 153571 - DNA, 25 bp, Artificial
  Probe
tgtggtaaatgtgtgagagcaactc

SEQ ID NO: 153572 - DNA, 25 bp, Artificial
  Probe
ctgtgctaatctaatcgctgttctt

SEQ ID NO: 153573 - DNA, 25 bp, Artificial
  Probe
ctctgtgctaatctaatcgctgttc

SEQ ID NO: 153574 - DNA, 25 bp, Artificial
  Probe
tctgtgctaatctaatcgctgttct

SEQ ID NO: 153575 - DNA, 25 bp, Artificial
  Probe
actctgtgctaatctaatcgctgtt

SEQ ID NO: 153576 - DNA, 25 bp, Artificial
  Probe
atacactctgtgctaatctaatcgc

SEQ ID NO: 153577 - DNA, 25 bp, Artificial
  Probe
gtctgatacactctgtgctaatcta

SEQ ID NO: 153578 - DNA, 25 bp, Artificial
  Probe
tagtctgatacactctgtgctaatc

SEQ ID NO: 153579 - DNA, 25 bp, Artificial
  Probe
agtctgatacactctgtgctaatct

SEQ ID NO: 153580 - DNA, 25 bp, Artificial
  Probe
ctagtctgatacactctgtgctaat

SEQ ID NO: 153581 - DNA, 25 bp, Artificial
  Probe
gatacactctgtgctaatctaatcg

SEQ ID NO: 153582 - DNA, 25 bp, Artificial
  Probe
tctgatacactctgtgctaatctaa

SEQ ID NO: 153583 - DNA, 25 bp, Artificial
  Probe
tacactctgtgctaatctaatcgct

SEQ ID NO: 153584 - DNA, 25 bp, Artificial
  Probe
tgtgctaatctaatcgctgttcttt

SEQ ID NO: 153585 - DNA, 25 bp, Artificial
  Probe
tgatacactctgtgctaatctaatc

SEQ ID NO: 153586 - DNA, 25 bp, Artificial
  Probe
ctgatacactctgtgctaatctaat

SEQ ID NO: 153587 - DNA, 25 bp, Artificial
  Probe
tacttcctttgtggttggctatctt

SEQ ID NO: 153588 - DNA, 25 bp, Artificial
  Probe
taaatcagtcagaagtcatggttgg

SEQ ID NO: 153589 - DNA, 25 bp, Artificial
  Probe
ttaaatcagtcagaagtcatggttg

SEQ ID NO: 153590 - DNA, 25 bp, Artificial
  Probe
attaaatgagggtttctgtacttcc

SEQ ID NO: 153591 - DNA, 25 bp, Artificial
  Probe
cactctgtgctaatctaatcgctgt

SEQ ID NO: 153592 - DNA, 25 bp, Artificial
  Probe
acactctgtgctaatctaatcgctg

SEQ ID NO: 153593 - DNA, 25 bp, Artificial
  Probe
cactagtctgatacactctgtgcta

SEQ ID NO: 153594 - DNA, 25 bp, Artificial
  Probe
acttcctttgtggttggctatcttt

SEQ ID NO: 153595 - DNA, 25 bp, Artificial
  Probe
aaatgagggtttctgtacttccttt

SEQ ID NO: 153596 - DNA, 25 bp, Artificial
  Probe
taaatgagggtttctgtacttcctt

SEQ ID NO: 153597 - DNA, 25 bp, Artificial
  Probe
ttaaatgagggtttctgtacttcct

SEQ ID NO: 153598 - DNA, 25 bp, Artificial
  Probe
gtttctgtacttcctttgtggttgg

SEQ ID NO: 153599 - DNA, 25 bp, Artificial
  Probe
ggtttctgtacttcctttgtggttg

SEQ ID NO: 153600 - DNA, 25 bp, Artificial
  Probe
aatgagggtttctgtacttcctttg

SEQ ID NO: 153601 - DNA, 25 bp, Artificial
  Probe
tttaaatcagtcagaagtcatggtt

SEQ ID NO: 153602 - DNA, 25 bp, Artificial
  Probe
gtacttcctttgtggttggctatct

SEQ ID NO: 153603 - DNA, 25 bp, Artificial
  Probe
cagtcagaagtcatggttggcatac

SEQ ID NO: 153604 - DNA, 25 bp, Artificial
  Probe
actagtctgatacactctgtgctaa

SEQ ID NO: 153605 - DNA, 25 bp, Artificial
  Probe
gatgggtgggtgaatttaggagatc

SEQ ID NO: 153606 - DNA, 25 bp, Artificial
  Probe
atgagggtttctgtacttcctttgt

SEQ ID NO: 153607 - DNA, 25 bp, Artificial
  Probe
tgtacttcctttgtggttggctatc

SEQ ID NO: 153608 - DNA, 25 bp, Artificial
  Probe
ctgtacttcctttgtggttggctat

SEQ ID NO: 153609 - DNA, 25 bp, Artificial
  Probe
tcagtcagaagtcatggttggcata

SEQ ID NO: 153610 - DNA, 25 bp, Artificial
  Probe
gacactagtctgatacactctgtgc

SEQ ID NO: 153611 - DNA, 25 bp, Artificial
  Probe
aattaccacgtttaaagctctatct

SEQ ID NO: 153612 - DNA, 25 bp, Artificial
  Probe
gctaatctaatcgctgttcttttgt

SEQ ID NO: 153613 - DNA, 25 bp, Artificial
  Probe
tgctaatctaatcgctgttcttttg

SEQ ID NO: 153614 - DNA, 25 bp, Artificial
  Probe
gtgctaatctaatcgctgttctttt

SEQ ID NO: 153615 - DNA, 25 bp, Artificial
  Probe
ctggacactagtctgatacactctg

SEQ ID NO: 153616 - DNA, 25 bp, Artificial
  Probe
agtcagaagtcatggttggcatact

SEQ ID NO: 153617 - DNA, 25 bp, Artificial
  Probe
cctctagtggtgaattgacagaatg

SEQ ID NO: 153618 - DNA, 25 bp, Artificial
  Probe
ctggaatatggtgtcatgttactgt

SEQ ID NO: 153619 - DNA, 25 bp, Artificial
  Probe
actggaatatggtgtcatgttactg

SEQ ID NO: 153620 - DNA, 25 bp, Artificial
  Probe
aactggaatatggtgtcatgttact

SEQ ID NO: 153621 - DNA, 25 bp, Artificial
  Probe
tggaatatggtgtcatgttactgtg

SEQ ID NO: 153622 - DNA, 25 bp, Artificial
  Probe
gactcttgttcactactctgcgtaa

SEQ ID NO: 153623 - DNA, 25 bp, Artificial
  Probe
ctctagtggtgaattgacagaatgc

SEQ ID NO: 153624 - DNA, 25 bp, Artificial
  Probe
ggaatatggtgtcatgttactgtgg

SEQ ID NO: 153625 - DNA, 25 bp, Artificial
  Probe
tctagtggtgaattgacagaatgct

SEQ ID NO: 153626 - DNA, 25 bp, Artificial
  Probe
gtgttgactcttgttcactactctg

SEQ ID NO: 153627 - DNA, 25 bp, Artificial
  Probe
acttcagccatactcatgtattcaa

SEQ ID NO: 153628 - DNA, 25 bp, Artificial
  Probe
aacacttcagccatactcatgtatt

SEQ ID NO: 153629 - DNA, 25 bp, Artificial
  Probe
cacttcagccatactcatgtattca

SEQ ID NO: 153630 - DNA, 25 bp, Artificial
  Probe
acacttcagccatactcatgtattc

SEQ ID NO: 153631 - DNA, 25 bp, Artificial
  Probe
gaacacttcagccatactcatgtat

SEQ ID NO: 153632 - DNA, 25 bp, Artificial
  Probe
gaatatggtgtcatgttactgtggc

SEQ ID NO: 153633 - DNA, 25 bp, Artificial
  Probe
ctagtggtgaattgacagaatgctg

SEQ ID NO: 153634 - DNA, 25 bp, Artificial
  Probe
gaatatcattcctgtcattcctgaa

SEQ ID NO: 153635 - DNA, 25 bp, Artificial
  Probe
atatggtgtcatgttactgtggctt

SEQ ID NO: 153636 - DNA, 25 bp, Artificial
  Probe
aatatggtgtcatgttactgtggct

SEQ ID NO: 153637 - DNA, 25 bp, Artificial
  Probe
tgttgactcttgttcactactctgc

SEQ ID NO: 153638 - DNA, 25 bp, Artificial
  Probe
tatcattcctgtcattcctgaaagt

SEQ ID NO: 153639 - DNA, 25 bp, Artificial
  Probe
aagatcaaataaatccaaagcctgc

SEQ ID NO: 153640 - DNA, 25 bp, Artificial
  Probe
ctcttgttcactactctgcgtaaag

SEQ ID NO: 153641 - DNA, 25 bp, Artificial
  Probe
attcctgaaagtgttgactcttgtt

SEQ ID NO: 153642 - DNA, 25 bp, Artificial
  Probe
atcattcctgtcattcctgaaagtg

SEQ ID NO: 153643 - DNA, 25 bp, Artificial
  Probe
tcattcctgaaagtgttgactcttg

SEQ ID NO: 153644 - DNA, 25 bp, Artificial
  Probe
actcttgttcactactctgcgtaaa

SEQ ID NO: 153645 - DNA, 25 bp, Artificial
  Probe
ttcctgaaagtgttgactcttgttc

SEQ ID NO: 153646 - DNA, 25 bp, Artificial
  Probe
aaatctatgctctctttcccatgaa

SEQ ID NO: 153647 - DNA, 25 bp, Artificial
  Probe
cattcctgaaagtgttgactcttgt

SEQ ID NO: 153648 - DNA, 25 bp, Artificial
  Probe
attcctgtcattcctgaaagtgttg

SEQ ID NO: 153649 - DNA, 25 bp, Artificial
  Probe
cattcctgtcattcctgaaagtgtt

SEQ ID NO: 153650 - DNA, 25 bp, Artificial
  Probe
atatcattcctgtcattcctgaaag

SEQ ID NO: 153651 - DNA, 25 bp, Artificial
  Probe
atcagaaactggaatatggtgtcat

SEQ ID NO: 153652 - DNA, 25 bp, Artificial
  Probe
atcatcagaaactggaatatggtgt

SEQ ID NO: 153653 - DNA, 25 bp, Artificial
  Probe
catcatcagaaactggaatatggtg

SEQ ID NO: 153654 - DNA, 25 bp, Artificial
  Probe
tcatcatcagaaactggaatatggt

SEQ ID NO: 153655 - DNA, 25 bp, Artificial
  Probe
gggtcatcatcagaaactggaatat

SEQ ID NO: 153656 - DNA, 25 bp, Artificial
  Probe
gaagatcaaataaatccaaagcctg

SEQ ID NO: 153657 - DNA, 25 bp, Artificial
  Probe
agaagatcaaataaatccaaagcct

SEQ ID NO: 153658 - DNA, 25 bp, Artificial
  Probe
gtcatcatcagaaactggaatatgg

SEQ ID NO: 153659 - DNA, 25 bp, Artificial
  Probe
ggtcatcatcagaaactggaatatg

SEQ ID NO: 153660 - DNA, 25 bp, Artificial
  Probe
agaaactggaatatggtgtcatgtt

SEQ ID NO: 153661 - DNA, 25 bp, Artificial
  Probe
tcatcagaaactggaatatggtgtc

SEQ ID NO: 153662 - DNA, 25 bp, Artificial
  Probe
ttagatcacattcctgaggctagac

SEQ ID NO: 153663 - DNA, 25 bp, Artificial
  Probe
gttagatcacattcctgaggctaga

SEQ ID NO: 153664 - DNA, 25 bp, Artificial
  Probe
tgttagatcacattcctgaggctag

SEQ ID NO: 153665 - DNA, 25 bp, Artificial
  Probe
tccaagtattaaagtccagcaatca

SEQ ID NO: 153666 - DNA, 25 bp, Artificial
  Probe
ccaagtattaaagtccagcaatcaa

SEQ ID NO: 153667 - DNA, 25 bp, Artificial
  Probe
atccaagtattaaagtccagcaatc

SEQ ID NO: 153668 - DNA, 25 bp, Artificial
  Probe
gtgttagatcacattcctgaggcta

SEQ ID NO: 153669 - DNA, 25 bp, Artificial
  Probe
ctatccaagtattaaagtccagcaa

SEQ ID NO: 153670 - DNA, 25 bp, Artificial
  Probe
ctgcttaataaagggtctctctgag

SEQ ID NO: 153671 - DNA, 25 bp, Artificial
  Probe
aggaggatctagtcaacgtcaattc

SEQ ID NO: 153672 - DNA, 25 bp, Artificial
  Probe
caagtattaaagtccagcaatcaaa

SEQ ID NO: 153673 - DNA, 25 bp, Artificial
  Probe
caggaggatctagtcaacgtcaatt

SEQ ID NO: 153674 - DNA, 25 bp, Artificial
  Probe
tagatcacattcctgaggctagacc

SEQ ID NO: 153675 - DNA, 25 bp, Artificial
  Probe
tatccaagtattaaagtccagcaat

SEQ ID NO: 153676 - DNA, 25 bp, Artificial
  Probe
aagtgttagatcacattcctgaggc

SEQ ID NO: 153677 - DNA, 25 bp, Artificial
  Probe
ccctttcagtttcacctaattaaca

SEQ ID NO: 153678 - DNA, 25 bp, Artificial
  Probe
ccagctatccaagtattaaagtcca

SEQ ID NO: 153679 - DNA, 25 bp, Artificial
  Probe
cccagctatccaagtattaaagtcc

SEQ ID NO: 153680 - DNA, 25 bp, Artificial
  Probe
cagtttcacctaattaacataccca

SEQ ID NO: 153681 - DNA, 25 bp, Artificial
  Probe
aaagtgttagatcacattcctgagg

SEQ ID NO: 153682 - DNA, 25 bp, Artificial
  Probe
cagctatccaagtattaaagtccag

SEQ ID NO: 153683 - DNA, 25 bp, Artificial
  Probe
cctgcttaataaagggtctctctga

SEQ ID NO: 153684 - DNA, 25 bp, Artificial
  Probe
tcagtttcacctaattaacataccc

SEQ ID NO: 153685 - DNA, 25 bp, Artificial
  Probe
gcccagctatccaagtattaaagtc

SEQ ID NO: 153686 - DNA, 25 bp, Artificial
  Probe
tcacctaattaacatacccaatcaa

SEQ ID NO: 153687 - DNA, 25 bp, Artificial
  Probe
ttcacctaattaacatacccaatca

SEQ ID NO: 153688 - DNA, 25 bp, Artificial
  Probe
agtttcacctaattaacatacccaa

SEQ ID NO: 153689 - DNA, 25 bp, Artificial
  Probe
agtgttagatcacattcctgaggct

SEQ ID NO: 153690 - DNA, 25 bp, Artificial
  Probe
gctatccaagtattaaagtccagca

SEQ ID NO: 153691 - DNA, 25 bp, Artificial
  Probe
ccaatcaaaatacaacatagcccag

SEQ ID NO: 153692 - DNA, 25 bp, Artificial
  Probe
cacctaattaacatacccaatcaaa

SEQ ID NO: 153693 - DNA, 25 bp, Artificial
  Probe
cctttcagtttcacctaattaacat

SEQ ID NO: 153694 - DNA, 25 bp, Artificial
  Probe
tattaaagtccagcaatcaaaagcc

SEQ ID NO: 153695 - DNA, 25 bp, Artificial
  Probe
tacccaatcaaaatacaacatagcc

SEQ ID NO: 153696 - DNA, 25 bp, Artificial
  Probe
ggaggatctagtcaacgtcaattcc

SEQ ID NO: 153697 - DNA, 25 bp, Artificial
  Probe
caatcaaaatacaacatagcccagc

SEQ ID NO: 153698 - DNA, 25 bp, Artificial
  Probe
gtattaaagtccagcaatcaaaagc

SEQ ID NO: 153699 - DNA, 25 bp, Artificial
  Probe
ccacttaacttttcttccctgctta

SEQ ID NO: 153700 - DNA, 25 bp, Artificial
  Probe
gtttcacctaattaacatacccaat

SEQ ID NO: 153701 - DNA, 25 bp, Artificial
  Probe
tttcacctaattaacatacccaatc

SEQ ID NO: 153702 - DNA, 25 bp, Artificial
  Probe
gagtcagaaagcagccacttaactt

SEQ ID NO: 153703 - DNA, 25 bp, Artificial
  Probe
ccaggaggatctagtcaacgtcaat

SEQ ID NO: 153704 - DNA, 25 bp, Artificial
  Probe
cacttaacttttcttccctgcttaa

SEQ ID NO: 153705 - DNA, 25 bp, Artificial
  Probe
cccaatcaaaatacaacatagccca

SEQ ID NO: 153706 - DNA, 25 bp, Artificial
  Probe
acccaatcaaaatacaacatagccc

SEQ ID NO: 153707 - DNA, 25 bp, Artificial
  Probe
ccctcgccttctacttatttctaaa

SEQ ID NO: 153708 - DNA, 25 bp, Artificial
  Probe
agatgcccagttagatttgaatttc

SEQ ID NO: 153709 - DNA, 25 bp, Artificial
  Probe
atttaacctgtaattgtgctttggc

SEQ ID NO: 153710 - DNA, 25 bp, Artificial
  Probe
aagatgcccagttagatttgaattt

SEQ ID NO: 153711 - DNA, 25 bp, Artificial
  Probe
tgtagcgtcagtctgtgtaaataac

SEQ ID NO: 153712 - DNA, 25 bp, Artificial
  Probe
taattgtgctttggcttgatgtcta

SEQ ID NO: 153713 - DNA, 25 bp, Artificial
  Probe
tacaagatgcccagttagatttgaa

SEQ ID NO: 153714 - DNA, 25 bp, Artificial
  Probe
atacaagatgcccagttagatttga

SEQ ID NO: 153715 - DNA, 25 bp, Artificial
  Probe
caagatgcccagttagatttgaatt

SEQ ID NO: 153716 - DNA, 25 bp, Artificial
  Probe
acaagatgcccagttagatttgaat

SEQ ID NO: 153717 - DNA, 25 bp, Artificial
  Probe
aatacaagatgcccagttagatttg

SEQ ID NO: 153718 - DNA, 25 bp, Artificial
  Probe
attgtactttcttactgtagcgtca

SEQ ID NO: 153719 - DNA, 25 bp, Artificial
  Probe
gtagcgtcagtctgtgtaaataacc

SEQ ID NO: 153720 - DNA, 25 bp, Artificial
  Probe
ttaacctgtaattgtgctttggctt

SEQ ID NO: 153721 - DNA, 25 bp, Artificial
  Probe
tttaacctgtaattgtgctttggct

SEQ ID NO: 153722 - DNA, 25 bp, Artificial
  Probe
aattgtactttcttactgtagcgtc

SEQ ID NO: 153723 - DNA, 25 bp, Artificial
  Probe
atgacagtgtttggagttgtaattg

SEQ ID NO: 153724 - DNA, 25 bp, Artificial
  Probe
gatgacagtgtttggagttgtaatt

SEQ ID NO: 153725 - DNA, 25 bp, Artificial
  Probe
tagcgtcagtctgtgtaaataacca

SEQ ID NO: 153726 - DNA, 25 bp, Artificial
  Probe
gacagtgtttggagttgtaattgta

SEQ ID NO: 153727 - DNA, 25 bp, Artificial
  Probe
tgatgacagtgtttggagttgtaat

SEQ ID NO: 153728 - DNA, 25 bp, Artificial
  Probe
tatttaacctgtaattgtgctttgg

SEQ ID NO: 153729 - DNA, 25 bp, Artificial
  Probe
ccagttagatttgaatttcaggcaa

SEQ ID NO: 153730 - DNA, 25 bp, Artificial
  Probe
atgcccagttagatttgaatttcag

SEQ ID NO: 153731 - DNA, 25 bp, Artificial
  Probe
gatgcccagttagatttgaatttca

SEQ ID NO: 153732 - DNA, 25 bp, Artificial
  Probe
cgtcagtctgtgtaaataaccagta

SEQ ID NO: 153733 - DNA, 25 bp, Artificial
  Probe
tgacagtgtttggagttgtaattgt

SEQ ID NO: 153734 - DNA, 25 bp, Artificial
  Probe
ctgtagcgtcagtctgtgtaaataa

SEQ ID NO: 153735 - DNA, 25 bp, Artificial
  Probe
cagtgtttggagttgtaattgtact

SEQ ID NO: 153736 - DNA, 25 bp, Artificial
  Probe
tttctaaacctggtagtcctaacag

SEQ ID NO: 153737 - DNA, 25 bp, Artificial
  Probe
tctaaacctggtagtcctaacagtt

SEQ ID NO: 153738 - DNA, 25 bp, Artificial
  Probe
ttctaaacctggtagtcctaacagt

SEQ ID NO: 153739 - DNA, 25 bp, Artificial
  Probe
aaatacaagatgcccagttagattt

SEQ ID NO: 153740 - DNA, 25 bp, Artificial
  Probe
acagtgtttggagttgtaattgtac

SEQ ID NO: 153741 - DNA, 25 bp, Artificial
  Probe
taacctgtaattgtgctttggcttg

SEQ ID NO: 153742 - DNA, 25 bp, Artificial
  Probe
ctgatgacagtgtttggagttgtaa

SEQ ID NO: 153743 - DNA, 25 bp, Artificial
  Probe
agtgtttggagttgtaattgtactt

SEQ ID NO: 153744 - DNA, 25 bp, Artificial
  Probe
aattgtgctttggcttgatgtctac

SEQ ID NO: 153745 - DNA, 25 bp, Artificial
  Probe
gtaattgtgctttggcttgatgtct

SEQ ID NO: 153746 - DNA, 25 bp, Artificial
  Probe
ttgtactttcttactgtagcgtcag

SEQ ID NO: 153747 - DNA, 25 bp, Artificial
  Probe
taattgtactttcttactgtagcgt

SEQ ID NO: 153748 - DNA, 25 bp, Artificial
  Probe
aacctggtagtcctaacagtttgat

SEQ ID NO: 153749 - DNA, 25 bp, Artificial
  Probe
cccagttagatttgaatttcaggca

SEQ ID NO: 153750 - DNA, 25 bp, Artificial
  Probe
tgcccagttagatttgaatttcagg

SEQ ID NO: 153751 - DNA, 25 bp, Artificial
  Probe
gtcagtctgtgtaaataaccagtac

SEQ ID NO: 153752 - DNA, 25 bp, Artificial
  Probe
attactggacctattctggatctct

SEQ ID NO: 153753 - DNA, 25 bp, Artificial
  Probe
agagtctgttacctggatcattaag

SEQ ID NO: 153754 - DNA, 25 bp, Artificial
  Probe
gattactggacctattctggatctc

SEQ ID NO: 153755 - DNA, 25 bp, Artificial
  Probe
ctgttacctggatcattaagaagca

SEQ ID NO: 153756 - DNA, 25 bp, Artificial
  Probe
ttactggacctattctggatctctc

SEQ ID NO: 153757 - DNA, 25 bp, Artificial
  Probe
tctgttacctggatcattaagaagc

SEQ ID NO: 153758 - DNA, 25 bp, Artificial
  Probe
gagtctgttacctggatcattaaga

SEQ ID NO: 153759 - DNA, 25 bp, Artificial
  Probe
ggacctattctggatctctcactac

SEQ ID NO: 153760 - DNA, 25 bp, Artificial
  Probe
agtctgttacctggatcattaagaa

SEQ ID NO: 153761 - DNA, 25 bp, Artificial
  Probe
gtctgttacctggatcattaagaag

SEQ ID NO: 153762 - DNA, 25 bp, Artificial
  Probe
gacctattctggatctctcactacg

SEQ ID NO: 153763 - DNA, 25 bp, Artificial
  Probe
tggacctattctggatctctcacta

SEQ ID NO: 153764 - DNA, 25 bp, Artificial
  Probe
tactggacctattctggatctctca

SEQ ID NO: 153765 - DNA, 25 bp, Artificial
  Probe
tgactatgtgctcaatatacaagtg

SEQ ID NO: 153766 - DNA, 25 bp, Artificial
  Probe
gactatgtgctcaatatacaagtga

SEQ ID NO: 153767 - DNA, 25 bp, Artificial
  Probe
gccatcaattaagcacaaggatacc

SEQ ID NO: 153768 - DNA, 25 bp, Artificial
  Probe
tgttacctggatcattaagaagcag

SEQ ID NO: 153769 - DNA, 25 bp, Artificial
  Probe
gccatgactatgtgctcaatataca

SEQ ID NO: 153770 - DNA, 25 bp, Artificial
  Probe
actatgtgctcaatatacaagtgaa

SEQ ID NO: 153771 - DNA, 25 bp, Artificial
  Probe
cagagtctgttacctggatcattaa

SEQ ID NO: 153772 - DNA, 25 bp, Artificial
  Probe
tcagagtctgttacctggatcatta

SEQ ID NO: 153773 - DNA, 25 bp, Artificial
  Probe
ccatgactatgtgctcaatatacaa

SEQ ID NO: 153774 - DNA, 25 bp, Artificial
  Probe
atgactatgtgctcaatatacaagt

SEQ ID NO: 153775 - DNA, 25 bp, Artificial
  Probe
gatcattaagaagcagccagttgag

SEQ ID NO: 153776 - DNA, 25 bp, Artificial
  Probe
cgccatgactatgtgctcaatatac

SEQ ID NO: 153777 - DNA, 25 bp, Artificial
  Probe
gttacctggatcattaagaagcagc

SEQ ID NO: 153778 - DNA, 25 bp, Artificial
  Probe
ctggacctattctggatctctcact

SEQ ID NO: 153779 - DNA, 25 bp, Artificial
  Probe
taagacagcatatttaggcagcatc

SEQ ID NO: 153780 - DNA, 25 bp, Artificial
  Probe
ctatgtgctcaatatacaagtgaag

SEQ ID NO: 153781 - DNA, 25 bp, Artificial
  Probe
ctcagagtctgttacctggatcatt

SEQ ID NO: 153782 - DNA, 25 bp, Artificial
  Probe
agcatatttaggcagcatcttgttt

SEQ ID NO: 153783 - DNA, 25 bp, Artificial
  Probe
agattactggacctattctggatct

SEQ ID NO: 153784 - DNA, 25 bp, Artificial
  Probe
actggacctattctggatctctcac

SEQ ID NO: 153785 - DNA, 25 bp, Artificial
  Probe
tatgtgctcaatatacaagtgaagc

SEQ ID NO: 153786 - DNA, 25 bp, Artificial
  Probe
tattctggatctctcactacgcctc

SEQ ID NO: 153787 - DNA, 25 bp, Artificial
  Probe
ctattctggatctctcactacgcct

SEQ ID NO: 153788 - DNA, 25 bp, Artificial
  Probe
atcattaagaagcagccagttgagg

SEQ ID NO: 153789 - DNA, 25 bp, Artificial
  Probe
catgactatgtgctcaatatacaag

SEQ ID NO: 153790 - DNA, 25 bp, Artificial
  Probe
ccgccatgactatgtgctcaatata

SEQ ID NO: 153791 - DNA, 25 bp, Artificial
  Probe
cagcatatttaggcagcatcttgtt

SEQ ID NO: 153792 - DNA, 25 bp, Artificial
  Probe
ccatcaattaagcacaaggataccc

SEQ ID NO: 153793 - DNA, 25 bp, Artificial
  Probe
tctcagagtctgttacctggatcat

SEQ ID NO: 153794 - DNA, 25 bp, Artificial
  Probe
cacatctgagggagagaaagagaaa

SEQ ID NO: 153795 - DNA, 25 bp, Artificial
  Probe
atgtgctcaatatacaagtgaagcc

SEQ ID NO: 153796 - DNA, 25 bp, Artificial
  Probe
ttacctggatcattaagaagcagcc

SEQ ID NO: 153797 - DNA, 25 bp, Artificial
  Probe
tggatggttctggatatataacgaa

SEQ ID NO: 153798 - DNA, 25 bp, Artificial
  Probe
atggatggttctggatatataacga

SEQ ID NO: 153799 - DNA, 25 bp, Artificial
  Probe
aatggatggttctggatatataacg

SEQ ID NO: 153800 - DNA, 25 bp, Artificial
  Probe
gactgaaatggatggttctggatat

SEQ ID NO: 153801 - DNA, 25 bp, Artificial
  Probe
actgaaatggatggttctggatata

SEQ ID NO: 153802 - DNA, 25 bp, Artificial
  Probe
gaggaaagtcaagtctatttgttgg

SEQ ID NO: 153803 - DNA, 25 bp, Artificial
  Probe
ggaggaaagtcaagtctatttgttg

SEQ ID NO: 153804 - DNA, 25 bp, Artificial
  Probe
aaagtcaagtctatttgttgggaac

SEQ ID NO: 153805 - DNA, 25 bp, Artificial
  Probe
gaaagtcaagtctatttgttgggaa

SEQ ID NO: 153806 - DNA, 25 bp, Artificial
  Probe
aagtcaagtctatttgttgggaact

SEQ ID NO: 153807 - DNA, 25 bp, Artificial
  Probe
ggaaagtcaagtctatttgttggga

SEQ ID NO: 153808 - DNA, 25 bp, Artificial
  Probe
aggaaagtcaagtctatttgttggg

SEQ ID NO: 153809 - DNA, 25 bp, Artificial
  Probe
agtcaagtctatttgttgggaactg

SEQ ID NO: 153810 - DNA, 25 bp, Artificial
  Probe
acagtagagaaataatgtgggacaa

SEQ ID NO: 153811 - DNA, 25 bp, Artificial
  Probe
agtagagaaataatgtgggacaagc

SEQ ID NO: 153812 - DNA, 25 bp, Artificial
  Probe
cagtagagaaataatgtgggacaag

SEQ ID NO: 153813 - DNA, 25 bp, Artificial
  Probe
gtctgtagcaagttacccaagaaac

SEQ ID NO: 153814 - DNA, 25 bp, Artificial
  Probe
tacagtagagaaataatgtgggaca

SEQ ID NO: 153815 - DNA, 25 bp, Artificial
  Probe
atgccactgttactcattgatggaa

SEQ ID NO: 153816 - DNA, 25 bp, Artificial
  Probe
gccctgtcctgtaaagtatctgaaa

SEQ ID NO: 153817 - DNA, 25 bp, Artificial
  Probe
ggactgaaatggatggttctggata

SEQ ID NO: 153818 - DNA, 25 bp, Artificial
  Probe
tgtctgtagcaagttacccaagaaa

SEQ ID NO: 153819 - DNA, 25 bp, Artificial
  Probe
gtcaagtctatttgttgggaactgg

SEQ ID NO: 153820 - DNA, 25 bp, Artificial
  Probe
ctgaaatggatggttctggatatat

SEQ ID NO: 153821 - DNA, 25 bp, Artificial
  Probe
tcagatattattgactacttcagga

SEQ ID NO: 153822 - DNA, 25 bp, Artificial
  Probe
aatgccactgttactcattgatgga

SEQ ID NO: 153823 - DNA, 25 bp, Artificial
  Probe
ggatggttctggatatataacgaaa

SEQ ID NO: 153824 - DNA, 25 bp, Artificial
  Probe
ctgtctgtagcaagttacccaagaa

SEQ ID NO: 153825 - DNA, 25 bp, Artificial
  Probe
atacagtagagaaataatgtgggac

SEQ ID NO: 153826 - DNA, 25 bp, Artificial
  Probe
gttctgccctgtcctgtaaagtatc

SEQ ID NO: 153827 - DNA, 25 bp, Artificial
  Probe
ttctgccctgtcctgtaaagtatct

SEQ ID NO: 153828 - DNA, 25 bp, Artificial
  Probe
tggttctggatatataacgaaactt

SEQ ID NO: 153829 - DNA, 25 bp, Artificial
  Probe
tagagaaataatgtgggacaagctg

SEQ ID NO: 153830 - DNA, 25 bp, Artificial
  Probe
gtagagaaataatgtgggacaagct

SEQ ID NO: 153831 - DNA, 25 bp, Artificial
  Probe
tcaagtctatttgttgggaactggg

SEQ ID NO: 153832 - DNA, 25 bp, Artificial
  Probe
aaaggactgaaatggatggttctgg

SEQ ID NO: 153833 - DNA, 25 bp, Artificial
  Probe
atggttctggatatataacgaaact

SEQ ID NO: 153834 - DNA, 25 bp, Artificial
  Probe
tgccctgtcctgtaaagtatctgaa

SEQ ID NO: 153835 - DNA, 25 bp, Artificial
  Probe
agttctgccctgtcctgtaaagtat

SEQ ID NO: 153836 - DNA, 25 bp, Artificial
  Probe
tgtagcaagttacccaagaaacgag

SEQ ID NO: 153837 - DNA, 25 bp, Artificial
  Probe
ctgtagcaagttacccaagaaacga

SEQ ID NO: 153838 - DNA, 25 bp, Artificial
  Probe
tctgtagcaagttacccaagaaacg

SEQ ID NO: 153839 - DNA, 25 bp, Artificial
  Probe
gatggttctggatatataacgaaac

SEQ ID NO: 153840 - DNA, 25 bp, Artificial
  Probe
aaagaggacttcctgtctgtatcag

SEQ ID NO: 153841 - DNA, 25 bp, Artificial
  Probe
ggacttcctgtctgtatcagatatt

SEQ ID NO: 153842 - DNA, 25 bp, Artificial
  Probe
ctgcggatgtgattatgtaatactg

SEQ ID NO: 153843 - DNA, 25 bp, Artificial
  Probe
cggatgtgattatgtaatactgcca

SEQ ID NO: 153844 - DNA, 25 bp, Artificial
  Probe
gctgcggatgtgattatgtaatact

SEQ ID NO: 153845 - DNA, 25 bp, Artificial
  Probe
tgcggatgtgattatgtaatactgc

SEQ ID NO: 153846 - DNA, 25 bp, Artificial
  Probe
tgctgcggatgtgattatgtaatac

SEQ ID NO: 153847 - DNA, 25 bp, Artificial
  Probe
gtgctgcggatgtgattatgtaata

SEQ ID NO: 153848 - DNA, 25 bp, Artificial
  Probe
ggatgtgattatgtaatactgccat

SEQ ID NO: 153849 - DNA, 25 bp, Artificial
  Probe
tagaatcgttagatccgttgttgat

SEQ ID NO: 153850 - DNA, 25 bp, Artificial
  Probe
atagaatcgttagatccgttgttga

SEQ ID NO: 153851 - DNA, 25 bp, Artificial
  Probe
ggcaatatagaatcgttagatccgt

SEQ ID NO: 153852 - DNA, 25 bp, Artificial
  Probe
gcggatgtgattatgtaatactgcc

SEQ ID NO: 153853 - DNA, 25 bp, Artificial
  Probe
gcaatatagaatcgttagatccgtt

SEQ ID NO: 153854 - DNA, 25 bp, Artificial
  Probe
tatagaatcgttagatccgttgttg

SEQ ID NO: 153855 - DNA, 25 bp, Artificial
  Probe
tatggacagttgttaggtaataagg

SEQ ID NO: 153856 - DNA, 25 bp, Artificial
  Probe
tagtgattccgtaagagctgattga

SEQ ID NO: 153857 - DNA, 25 bp, Artificial
  Probe
gtagtgattccgtaagagctgattg

SEQ ID NO: 153858 - DNA, 25 bp, Artificial
  Probe
agtagtgattccgtaagagctgatt

SEQ ID NO: 153859 - DNA, 25 bp, Artificial
  Probe
ctaagaaatgggaaggaaggagaaa

SEQ ID NO: 153860 - DNA, 25 bp, Artificial
  Probe
taagaaatgggaaggaaggagaaac

SEQ ID NO: 153861 - DNA, 25 bp, Artificial
  Probe
atcaactaagaaatgggaaggaagg

SEQ ID NO: 153862 - DNA, 25 bp, Artificial
  Probe
atatagaatcgttagatccgttgtt

SEQ ID NO: 153863 - DNA, 25 bp, Artificial
  Probe
aatatagaatcgttagatccgttgt

SEQ ID NO: 153864 - DNA, 25 bp, Artificial
  Probe
gatgtgattatgtaatactgccatt

SEQ ID NO: 153865 - DNA, 25 bp, Artificial
  Probe
atttgagtagtgattccgtaagagc

SEQ ID NO: 153866 - DNA, 25 bp, Artificial
  Probe
atggacagttgttaggtaataaggg

SEQ ID NO: 153867 - DNA, 25 bp, Artificial
  Probe
gagtagtgattccgtaagagctgat

SEQ ID NO: 153868 - DNA, 25 bp, Artificial
  Probe
ggacagttgttaggtaataagggta

SEQ ID NO: 153869 - DNA, 25 bp, Artificial
  Probe
ttatgtaatactgccatttccaagc

SEQ ID NO: 153870 - DNA, 25 bp, Artificial
  Probe
actaagaaatgggaaggaaggagaa

SEQ ID NO: 153871 - DNA, 25 bp, Artificial
  Probe
aactaagaaatgggaaggaaggaga

SEQ ID NO: 153872 - DNA, 25 bp, Artificial
  Probe
caactaagaaatgggaaggaaggag

SEQ ID NO: 153873 - DNA, 25 bp, Artificial
  Probe
aatcaactaagaaatgggaaggaag

SEQ ID NO: 153874 - DNA, 25 bp, Artificial
  Probe
ttcaaatgacggcaatatagaatcg

SEQ ID NO: 153875 - DNA, 25 bp, Artificial
  Probe
ggaacaaggacatctcgtttatact

SEQ ID NO: 153876 - DNA, 25 bp, Artificial
  Probe
aggaacaaggacatctcgtttatac

SEQ ID NO: 153877 - DNA, 25 bp, Artificial
  Probe
gaacaaggacatctcgtttatactg

SEQ ID NO: 153878 - DNA, 25 bp, Artificial
  Probe
tcaactaagaaatgggaaggaagga

SEQ ID NO: 153879 - DNA, 25 bp, Artificial
  Probe
caatatagaatcgttagatccgttg

SEQ ID NO: 153880 - DNA, 25 bp, Artificial
  Probe
tggacagttgttaggtaataagggt

SEQ ID NO: 153881 - DNA, 25 bp, Artificial
  Probe
tgattccgtaagagctgattgagaa

SEQ ID NO: 153882 - DNA, 25 bp, Artificial
  Probe
aaatcaactaagaaatgggaaggaa

SEQ ID NO: 153883 - DNA, 25 bp, Artificial
  Probe
aatttgagtagtgattccgtaagag

SEQ ID NO: 153884 - DNA, 25 bp, Artificial
  Probe
ttgagtagtgattccgtaagagctg

SEQ ID NO: 153885 - DNA, 25 bp, Artificial
  Probe
gaggaacaaggacatctcgtttata

SEQ ID NO: 153886 - DNA, 25 bp, Artificial
  Probe
aacaaggacatctcgtttatactgt

SEQ ID NO: 153887 - DNA, 25 bp, Artificial
  Probe
aattagagagagaacgatgaagcaa

SEQ ID NO: 153888 - DNA, 25 bp, Artificial
  Probe
tggaattagagagagaacgatgaag

SEQ ID NO: 153889 - DNA, 25 bp, Artificial
  Probe
ctggaattagagagagaacgatgaa

SEQ ID NO: 153890 - DNA, 25 bp, Artificial
  Probe
gaattagagagagaacgatgaagca

SEQ ID NO: 153891 - DNA, 25 bp, Artificial
  Probe
ataacctggatgaatcttgagagaa

SEQ ID NO: 153892 - DNA, 25 bp, Artificial
  Probe
aataacctggatgaatcttgagaga

SEQ ID NO: 153893 - DNA, 25 bp, Artificial
  Probe
ggaattagagagagaacgatgaagc

SEQ ID NO: 153894 - DNA, 25 bp, Artificial
  Probe
gctggaattagagagagaacgatga

SEQ ID NO: 153895 - DNA, 25 bp, Artificial
  Probe
attagagagagaacgatgaagcaaa

SEQ ID NO: 153896 - DNA, 25 bp, Artificial
  Probe
atacgagacatttgataagagaggc

SEQ ID NO: 153897 - DNA, 25 bp, Artificial
  Probe
ttgtttcttattgctatttggctgg

SEQ ID NO: 153898 - DNA, 25 bp, Artificial
  Probe
ggctggaattagagagagaacgatg

SEQ ID NO: 153899 - DNA, 25 bp, Artificial
  Probe
gcttgtttcttattgctatttggct

SEQ ID NO: 153900 - DNA, 25 bp, Artificial
  Probe
cttgtttcttattgctatttggctg

SEQ ID NO: 153901 - DNA, 25 bp, Artificial
  Probe
attgctatttggctggaattagaga

SEQ ID NO: 153902 - DNA, 25 bp, Artificial
  Probe
tgtttcttattgctatttggctgga

SEQ ID NO: 153903 - DNA, 25 bp, Artificial
  Probe
gggcttgtttcttattgctatttgg

SEQ ID NO: 153904 - DNA, 25 bp, Artificial
  Probe
ctatttggctggaattagagagaga

SEQ ID NO: 153905 - DNA, 25 bp, Artificial
  Probe
gtttcttattgctatttggctggaa

SEQ ID NO: 153906 - DNA, 25 bp, Artificial
  Probe
atttggctggaattagagagagaac

SEQ ID NO: 153907 - DNA, 25 bp, Artificial
  Probe
tatttggctggaattagagagagaa

SEQ ID NO: 153908 - DNA, 25 bp, Artificial
  Probe
ttgctatttggctggaattagagag

SEQ ID NO: 153909 - DNA, 25 bp, Artificial
  Probe
aacctggatgaatcttgagagaaag

SEQ ID NO: 153910 - DNA, 25 bp, Artificial
  Probe
tttcttattgctatttggctggaat

SEQ ID NO: 153911 - DNA, 25 bp, Artificial
  Probe
taacctggatgaatcttgagagaaa

SEQ ID NO: 153912 - DNA, 25 bp, Artificial
  Probe
gctatttggctggaattagagagag

SEQ ID NO: 153913 - DNA, 25 bp, Artificial
  Probe
tggctggaattagagagagaacgat

SEQ ID NO: 153914 - DNA, 25 bp, Artificial
  Probe
tattgctatttggctggaattagag

SEQ ID NO: 153915 - DNA, 25 bp, Artificial
  Probe
ggcttgtttcttattgctatttggc

SEQ ID NO: 153916 - DNA, 25 bp, Artificial
  Probe
ttcttattgctatttggctggaatt

SEQ ID NO: 153917 - DNA, 25 bp, Artificial
  Probe
aaataacctggatgaatcttgagag

SEQ ID NO: 153918 - DNA, 25 bp, Artificial
  Probe
tgctatttggctggaattagagaga

SEQ ID NO: 153919 - DNA, 25 bp, Artificial
  Probe
ttattgctatttggctggaattaga

SEQ ID NO: 153920 - DNA, 25 bp, Artificial
  Probe
tcttattgctatttggctggaatta

SEQ ID NO: 153921 - DNA, 25 bp, Artificial
  Probe
ttggctggaattagagagagaacga

SEQ ID NO: 153922 - DNA, 25 bp, Artificial
  Probe
aatacgagacatttgataagagagg

SEQ ID NO: 153923 - DNA, 25 bp, Artificial
  Probe
tttctgcgaagttcactttaatacg

SEQ ID NO: 153924 - DNA, 25 bp, Artificial
  Probe
cttattgctatttggctggaattag

SEQ ID NO: 153925 - DNA, 25 bp, Artificial
  Probe
cgaagttcactttaatacgagacat

SEQ ID NO: 153926 - DNA, 25 bp, Artificial
  Probe
ttctgcgaagttcactttaatacga

SEQ ID NO: 153927 - DNA, 25 bp, Artificial
  Probe
ctgcgaagttcactttaatacgaga

SEQ ID NO: 153928 - DNA, 25 bp, Artificial
  Probe
tctgcgaagttcactttaatacgag

SEQ ID NO: 153929 - DNA, 25 bp, Artificial
  Probe
tacgagacatttgataagagaggcg

SEQ ID NO: 153930 - DNA, 25 bp, Artificial
  Probe
gcgaagttcactttaatacgagaca

SEQ ID NO: 153931 - DNA, 25 bp, Artificial
  Probe
tgcgaagttcactttaatacgagac

SEQ ID NO: 153932 - DNA, 25 bp, Artificial
  Probe
ttcgagggtacaagtcctcaatctc

SEQ ID NO: 153933 - DNA, 25 bp, Artificial
  Probe
cttcgagggtacaagtcctcaatct

SEQ ID NO: 153934 - DNA, 25 bp, Artificial
  Probe
gcttcgagggtacaagtcctcaatc

SEQ ID NO: 153935 - DNA, 25 bp, Artificial
  Probe
attctggctatctactggttctgtt

SEQ ID NO: 153936 - DNA, 25 bp, Artificial
  Probe
gattctggctatctactggttctgt

SEQ ID NO: 153937 - DNA, 25 bp, Artificial
  Probe
tgattctggctatctactggttctg

SEQ ID NO: 153938 - DNA, 25 bp, Artificial
  Probe
gtgattctggctatctactggttct

SEQ ID NO: 153939 - DNA, 25 bp, Artificial
  Probe
ctggctatctactggttctgttctt

SEQ ID NO: 153940 - DNA, 25 bp, Artificial
  Probe
ttctggctatctactggttctgttc

SEQ ID NO: 153941 - DNA, 25 bp, Artificial
  Probe
aagtgattctggctatctactggtt

SEQ ID NO: 153942 - DNA, 25 bp, Artificial
  Probe
ccacaagatacatctctgtctactg

SEQ ID NO: 153943 - DNA, 25 bp, Artificial
  Probe
agtgattctggctatctactggttc

SEQ ID NO: 153944 - DNA, 25 bp, Artificial
  Probe
cacaagatacatctctgtctactga

SEQ ID NO: 153945 - DNA, 25 bp, Artificial
  Probe
atacatctctgtctactgatcctgt

SEQ ID NO: 153946 - DNA, 25 bp, Artificial
  Probe
gtattagtacgaccatgaccttcag

SEQ ID NO: 153947 - DNA, 25 bp, Artificial
  Probe
gatacatctctgtctactgatcctg

SEQ ID NO: 153948 - DNA, 25 bp, Artificial
  Probe
agatacatctctgtctactgatcct

SEQ ID NO: 153949 - DNA, 25 bp, Artificial
  Probe
tctggctatctactggttctgttct

SEQ ID NO: 153950 - DNA, 25 bp, Artificial
  Probe
actcttctgacattccttaataggt

SEQ ID NO: 153951 - DNA, 25 bp, Artificial
  Probe
aagatacatctctgtctactgatcc

SEQ ID NO: 153952 - DNA, 25 bp, Artificial
  Probe
aggatggacacttgatctcattcat

SEQ ID NO: 153953 - DNA, 25 bp, Artificial
  Probe
acaagatacatctctgtctactgat

SEQ ID NO: 153954 - DNA, 25 bp, Artificial
  Probe
gactcttctgacattccttaatagg

SEQ ID NO: 153955 - DNA, 25 bp, Artificial
  Probe
ttcaacaggcaggcaataatctctt

SEQ ID NO: 153956 - DNA, 25 bp, Artificial
  Probe
cttctgacattccttaataggttca

SEQ ID NO: 153957 - DNA, 25 bp, Artificial
  Probe
gctcactccctaaagaatcctaaag

SEQ ID NO: 153958 - DNA, 25 bp, Artificial
  Probe
ggactcttctgacattccttaatag

SEQ ID NO: 153959 - DNA, 25 bp, Artificial
  Probe
ggaactggcagaatcaaatgtaaat

SEQ ID NO: 153960 - DNA, 25 bp, Artificial
  Probe
gacacttgatctcattcatccagga

SEQ ID NO: 153961 - DNA, 25 bp, Artificial
  Probe
tattagtacgaccatgaccttcagc

SEQ ID NO: 153962 - DNA, 25 bp, Artificial
  Probe
acacttgatctcattcatccaggag

SEQ ID NO: 153963 - DNA, 25 bp, Artificial
  Probe
caagatacatctctgtctactgatc

SEQ ID NO: 153964 - DNA, 25 bp, Artificial
  Probe
caagttgatgtccttctctgtttag

SEQ ID NO: 153965 - DNA, 25 bp, Artificial
  Probe
tcaacaggcaggcaataatctcttc

SEQ ID NO: 153966 - DNA, 25 bp, Artificial
  Probe
cttcaacaggcaggcaataatctct

SEQ ID NO: 153967 - DNA, 25 bp, Artificial
  Probe
tgctcactccctaaagaatcctaaa

SEQ ID NO: 153968 - DNA, 25 bp, Artificial
  Probe
ttgctcactccctaaagaatcctaa

SEQ ID NO: 153969 - DNA, 25 bp, Artificial
  Probe
tcttctgacattccttaataggttc

SEQ ID NO: 153970 - DNA, 25 bp, Artificial
  Probe
ctcttctgacattccttaataggtt

SEQ ID NO: 153971 - DNA, 25 bp, Artificial
  Probe
tttgctcactccctaaagaatccta

SEQ ID NO: 153972 - DNA, 25 bp, Artificial
  Probe
gaggatggacacttgatctcattca

SEQ ID NO: 153973 - DNA, 25 bp, Artificial
  Probe
gaactggcagaatcaaatgtaaatg

SEQ ID NO: 153974 - DNA, 25 bp, Artificial
  Probe
tggctatctactggttctgttcttt

SEQ ID NO: 153975 - DNA, 25 bp, Artificial
  Probe
tacatctctgtctactgatcctgta

SEQ ID NO: 153976 - DNA, 25 bp, Artificial
  Probe
ggcagaatcaaatgtaaatgaggag

SEQ ID NO: 153977 - DNA, 25 bp, Artificial
  Probe
acaaagtgattctggctatctactg

SEQ ID NO: 153978 - DNA, 25 bp, Artificial
  Probe
gcagaatcaaatgtaaatgaggagt

SEQ ID NO: 153979 - DNA, 25 bp, Artificial
  Probe
tgacattccttaataggttcattct

SEQ ID NO: 153980 - DNA, 25 bp, Artificial
  Probe
gctcttcttccattgtccttatgta

SEQ ID NO: 153981 - DNA, 25 bp, Artificial
  Probe
ctcttcttccattgtccttatgtag

SEQ ID NO: 153982 - DNA, 25 bp, Artificial
  Probe
tcttccattgtccttatgtaggttc

SEQ ID NO: 153983 - DNA, 25 bp, Artificial
  Probe
cttcttccattgtccttatgtaggt

SEQ ID NO: 153984 - DNA, 25 bp, Artificial
  Probe
tcttcttccattgtccttatgtagg

SEQ ID NO: 153985 - DNA, 25 bp, Artificial
  Probe
ttcttccattgtccttatgtaggtt

SEQ ID NO: 153986 - DNA, 25 bp, Artificial
  Probe
cttccattgtccttatgtaggttcc

SEQ ID NO: 153987 - DNA, 25 bp, Artificial
  Probe
aagctcttcttccattgtccttatg

SEQ ID NO: 153988 - DNA, 25 bp, Artificial
  Probe
agctcttcttccattgtccttatgt

SEQ ID NO: 153989 - DNA, 25 bp, Artificial
  Probe
ctcttcagtatgtgctggagtcttg

SEQ ID NO: 153990 - DNA, 25 bp, Artificial
  Probe
tcttcagtatgtgctggagtcttga

SEQ ID NO: 153991 - DNA, 25 bp, Artificial
  Probe
aaagctcttcttccattgtccttat

SEQ ID NO: 153992 - DNA, 25 bp, Artificial
  Probe
aataaaggtgagcttggtttctatg

SEQ ID NO: 153993 - DNA, 25 bp, Artificial
  Probe
ataaaggtgagcttggtttctatgc

SEQ ID NO: 153994 - DNA, 25 bp, Artificial
  Probe
gagtctgcccactttaacaattcag

SEQ ID NO: 153995 - DNA, 25 bp, Artificial
  Probe
ctaataaaggtgagcttggtttcta

SEQ ID NO: 153996 - DNA, 25 bp, Artificial
  Probe
ttccattgtccttatgtaggttccc

SEQ ID NO: 153997 - DNA, 25 bp, Artificial
  Probe
tctgcccactttaacaattcaggat

SEQ ID NO: 153998 - DNA, 25 bp, Artificial
  Probe
ctgcccactttaacaattcaggatc

SEQ ID NO: 153999 - DNA, 25 bp, Artificial
  Probe
ttcagtatgtgctggagtcttgaag

SEQ ID NO: 154000 - DNA, 25 bp, Artificial
  Probe
cttcagtatgtgctggagtcttgaa

SEQ ID NO: 154001 - DNA, 25 bp, Artificial
  Probe
taataaaggtgagcttggtttctat

SEQ ID NO: 154002 - DNA, 25 bp, Artificial
  Probe
gaatgaaaagtgtaagaagccagtg

SEQ ID NO: 154003 - DNA, 25 bp, Artificial
  Probe
ccattgtccttatgtaggttcccag

SEQ ID NO: 154004 - DNA, 25 bp, Artificial
  Probe
tcagtatgtgctggagtcttgaagg

SEQ ID NO: 154005 - DNA, 25 bp, Artificial
  Probe
attcccataaccctagcctcagttt

SEQ ID NO: 154006 - DNA, 25 bp, Artificial
  Probe
ggaatgaaaagtgtaagaagccagt

SEQ ID NO: 154007 - DNA, 25 bp, Artificial
  Probe
tccattgtccttatgtaggttccca

SEQ ID NO: 154008 - DNA, 25 bp, Artificial
  Probe
aaactctgctaataaaggtgagctt

SEQ ID NO: 154009 - DNA, 25 bp, Artificial
  Probe
gtctgcccactttaacaattcagga

SEQ ID NO: 154010 - DNA, 25 bp, Artificial
  Probe
agtctgcccactttaacaattcagg

SEQ ID NO: 154011 - DNA, 25 bp, Artificial
  Probe
cattgtccttatgtaggttcccagc

SEQ ID NO: 154012 - DNA, 25 bp, Artificial
  Probe
cgagtctgcccactttaacaattca

SEQ ID NO: 154013 - DNA, 25 bp, Artificial
  Probe
gctcttcagtatgtgctggagtctt

SEQ ID NO: 154014 - DNA, 25 bp, Artificial
  Probe
gattcccataaccctagcctcagtt

SEQ ID NO: 154015 - DNA, 25 bp, Artificial
  Probe
aactctgctaataaaggtgagcttg

SEQ ID NO: 154016 - DNA, 25 bp, Artificial
  Probe
gggaatgaaaagtgtaagaagccag

SEQ ID NO: 154017 - DNA, 25 bp, Artificial
  Probe
ctgggaatgaaaagtgtaagaagcc

SEQ ID NO: 154018 - DNA, 25 bp, Artificial
  Probe
ggctgggaatgaaaagtgtaagaag

SEQ ID NO: 154019 - DNA, 25 bp, Artificial
  Probe
atgattcccataaccctagcctcag

SEQ ID NO: 154020 - DNA, 25 bp, Artificial
  Probe
aatgaaaagtgtaagaagccagtgg

SEQ ID NO: 154021 - DNA, 25 bp, Artificial
  Probe
gctaataaaggtgagcttggtttct

SEQ ID NO: 154022 - DNA, 25 bp, Artificial
  Probe
tgctaataaaggtgagcttggtttc

SEQ ID NO: 154023 - DNA, 25 bp, Artificial
  Probe
ctgctaataaaggtgagcttggttt

SEQ ID NO: 154024 - DNA, 25 bp, Artificial
  Probe
ataaccctagcctcagtttcccttg

SEQ ID NO: 154025 - DNA, 25 bp, Artificial
  Probe
cttgccctggagaagagaatcgatg

SEQ ID NO: 154026 - DNA, 25 bp, Artificial
  Probe
tgggagtaaaatataccgcatacaa

SEQ ID NO: 154027 - DNA, 25 bp, Artificial
  Probe
ttgggagtaaaatataccgcataca

SEQ ID NO: 154028 - DNA, 25 bp, Artificial
  Probe
cttgggagtaaaatataccgcatac

SEQ ID NO: 154029 - DNA, 25 bp, Artificial
  Probe
gggagtaaaatataccgcatacaaa

SEQ ID NO: 154030 - DNA, 25 bp, Artificial
  Probe
ggagtaaaatataccgcatacaaaa

SEQ ID NO: 154031 - DNA, 25 bp, Artificial
  Probe
tataaaagcagttgttagtactctc

SEQ ID NO: 154032 - DNA, 25 bp, Artificial
  Probe
ttataaaagcagttgttagtactct

SEQ ID NO: 154033 - DNA, 25 bp, Artificial
  Probe
tttataaaagcagttgttagtactc

SEQ ID NO: 154034 - DNA, 25 bp, Artificial
  Probe
aagccaacttcaataagagcaagga

SEQ ID NO: 154035 - DNA, 25 bp, Artificial
  Probe
agccaacttcaataagagcaaggag

SEQ ID NO: 154036 - DNA, 25 bp, Artificial
  Probe
cttcaataagagcaaggagttcctg

SEQ ID NO: 154037 - DNA, 25 bp, Artificial
  Probe
acttcaataagagcaaggagttcct

SEQ ID NO: 154038 - DNA, 25 bp, Artificial
  Probe
gccaacttcaataagagcaaggagt

SEQ ID NO: 154039 - DNA, 25 bp, Artificial
  Probe
caacttcaataagagcaaggagttc

SEQ ID NO: 154040 - DNA, 25 bp, Artificial
  Probe
aacttcaataagagcaaggagttcc

SEQ ID NO: 154041 - DNA, 25 bp, Artificial
  Probe
ccaacttcaataagagcaaggagtt

SEQ ID NO: 154042 - DNA, 25 bp, Artificial
  Probe
ttcaataagagcaaggagttcctgg

SEQ ID NO: 154043 - DNA, 25 bp, Artificial
  Probe
aaggaagtctctggttctggatgtg

SEQ ID NO: 154044 - DNA, 25 bp, Artificial
  Probe
caataagagcaaggagttcctggag

SEQ ID NO: 154045 - DNA, 25 bp, Artificial
  Probe
tcaataagagcaaggagttcctgga

SEQ ID NO: 154046 - DNA, 25 bp, Artificial
  Probe
gaagccaacttcaataagagcaagg

SEQ ID NO: 154047 - DNA, 25 bp, Artificial
  Probe
aaaggaagtctctggttctggatgt

SEQ ID NO: 154048 - DNA, 25 bp, Artificial
  Probe
aataagagcaaggagttcctggagg

SEQ ID NO: 154049 - DNA, 25 bp, Artificial
  Probe
tcccatcttcatccaagactttgag

SEQ ID NO: 154050 - DNA, 25 bp, Artificial
  Probe
ctcccatcttcatccaagactttga

SEQ ID NO: 154051 - DNA, 25 bp, Artificial
  Probe
gaagtctctggttctggatgtggtg

SEQ ID NO: 154052 - DNA, 25 bp, Artificial
  Probe
caaggagttcctggaggaggttatc

SEQ ID NO: 154053 - DNA, 25 bp, Artificial
  Probe
actcccatcttcatccaagactttg

SEQ ID NO: 154054 - DNA, 25 bp, Artificial
  Probe
cactcccatcttcatccaagacttt

SEQ ID NO: 154055 - DNA, 25 bp, Artificial
  Probe
aaaaggaagtctctggttctggatg

SEQ ID NO: 154056 - DNA, 25 bp, Artificial
  Probe
caaaaggaagtctctggttctggat

SEQ ID NO: 154057 - DNA, 25 bp, Artificial
  Probe
atcactcccatcttcatccaagact

SEQ ID NO: 154058 - DNA, 25 bp, Artificial
  Probe
catcactcccatcttcatccaagac

SEQ ID NO: 154059 - DNA, 25 bp, Artificial
  Probe
cacctaacctggtctacatggtcac

SEQ ID NO: 154060 - DNA, 25 bp, Artificial
  Probe
tcactcccatcttcatccaagactt

SEQ ID NO: 154061 - DNA, 25 bp, Artificial
  Probe
cagacccatcactcccatcttcatc

SEQ ID NO: 154062 - DNA, 25 bp, Artificial
  Probe
ataagagcaaggagttcctggagga

SEQ ID NO: 154063 - DNA, 25 bp, Artificial
  Probe
tctctggttctggatgtggtgtttg

SEQ ID NO: 154064 - DNA, 25 bp, Artificial
  Probe
gtctctggttctggatgtggtgttt

SEQ ID NO: 154065 - DNA, 25 bp, Artificial
  Probe
cccatcactcccatcttcatccaag

SEQ ID NO: 154066 - DNA, 25 bp, Artificial
  Probe
tctggttctggatgtggtgtttgtc

SEQ ID NO: 154067 - DNA, 25 bp, Artificial
  Probe
ctctggttctggatgtggtgtttgt

SEQ ID NO: 154068 - DNA, 25 bp, Artificial
  Probe
aaggagttcctggaggaggttatcc

SEQ ID NO: 154069 - DNA, 25 bp, Artificial
  Probe
ccatcactcccatcttcatccaaga

SEQ ID NO: 154070 - DNA, 25 bp, Artificial
  Probe
taagagcaaggagttcctggaggag

SEQ ID NO: 154071 - DNA, 25 bp, Artificial
  Probe
tttcatcaccaggacccaaaaggaa

SEQ ID NO: 154072 - DNA, 25 bp, Artificial
  Probe
cctggtatctctggggtttcatcac

SEQ ID NO: 154073 - DNA, 25 bp, Artificial
  Probe
tacctttctgagcacagcttctctc

SEQ ID NO: 154074 - DNA, 25 bp, Artificial
  Probe
gtacctttctgagcacagcttctct

SEQ ID NO: 154075 - DNA, 25 bp, Artificial
  Probe
agtacctttctgagcacagcttctc

SEQ ID NO: 154076 - DNA, 25 bp, Artificial
  Probe
ttcatcaccaggacccaaaaggaag

SEQ ID NO: 154077 - DNA, 25 bp, Artificial
  Probe
cagtacctttctgagcacagcttct

SEQ ID NO: 154078 - DNA, 25 bp, Artificial
  Probe
gtttcatcaccaggacccaaaagga

SEQ ID NO: 154079 - DNA, 25 bp, Artificial
  Probe
agagaggttactacatctattctgg

SEQ ID NO: 154080 - DNA, 25 bp, Artificial
  Probe
ccaagagaggttactacatctattc

SEQ ID NO: 154081 - DNA, 25 bp, Artificial
  Probe
gagaggttactacatctattctggg

SEQ ID NO: 154082 - DNA, 25 bp, Artificial
  Probe
aagagaggttactacatctattctg

SEQ ID NO: 154083 - DNA, 25 bp, Artificial
  Probe
caagagaggttactacatctattct

SEQ ID NO: 154084 - DNA, 25 bp, Artificial
  Probe
cccaagagaggttactacatctatt

SEQ ID NO: 154085 - DNA, 25 bp, Artificial
  Probe
gaccagtatgatgctccactttaaa

SEQ ID NO: 154086 - DNA, 25 bp, Artificial
  Probe
tttaaagagcaaagaaagggcagag

SEQ ID NO: 154087 - DNA, 25 bp, Artificial
  Probe
ttaaagagcaaagaaagggcagagg

SEQ ID NO: 154088 - DNA, 25 bp, Artificial
  Probe
ggaccagtatgatgctccactttaa

SEQ ID NO: 154089 - DNA, 25 bp, Artificial
  Probe
agaggttactacatctattctgggg

SEQ ID NO: 154090 - DNA, 25 bp, Artificial
  Probe
ccccaagagaggttactacatctat

SEQ ID NO: 154091 - DNA, 25 bp, Artificial
  Probe
acctggactcctatgagaaagtgac

SEQ ID NO: 154092 - DNA, 25 bp, Artificial
  Probe
gtcacctggactcctatgagaaagt

SEQ ID NO: 154093 - DNA, 25 bp, Artificial
  Probe
cacctggactcctatgagaaagtga

SEQ ID NO: 154094 - DNA, 25 bp, Artificial
  Probe
tcacctggactcctatgagaaagtg

SEQ ID NO: 154095 - DNA, 25 bp, Artificial
  Probe
ctttgactgtgtactcaagttggtg

SEQ ID NO: 154096 - DNA, 25 bp, Artificial
  Probe
ggactcctatgagaaagtgacccag

SEQ ID NO: 154097 - DNA, 25 bp, Artificial
  Probe
ctggactcctatgagaaagtgaccc

SEQ ID NO: 154098 - DNA, 25 bp, Artificial
  Probe
cctggactcctatgagaaagtgacc

SEQ ID NO: 154099 - DNA, 25 bp, Artificial
  Probe
ggtcacctggactcctatgagaaag

SEQ ID NO: 154100 - DNA, 25 bp, Artificial
  Probe
gagttcctggaccagtatgatgctc

SEQ ID NO: 154101 - DNA, 25 bp, Artificial
  Probe
taaagagcaaagaaagggcagaggg

SEQ ID NO: 154102 - DNA, 25 bp, Artificial
  Probe
gactcctatgagaaagtgacccagc

SEQ ID NO: 154103 - DNA, 25 bp, Artificial
  Probe
gctttgactgtgtactcaagttggt

SEQ ID NO: 154104 - DNA, 25 bp, Artificial
  Probe
tggactcctatgagaaagtgaccca

SEQ ID NO: 154105 - DNA, 25 bp, Artificial
  Probe
tttgactgtgtactcaagttggtgc

SEQ ID NO: 154106 - DNA, 25 bp, Artificial
  Probe
acttcttcacactgagcgtcaagac

SEQ ID NO: 154107 - DNA, 25 bp, Artificial
  Probe
cacttcttcacactgagcgtcaaga

SEQ ID NO: 154108 - DNA, 25 bp, Artificial
  Probe
catctttgtcggaagactgtcaacg

SEQ ID NO: 154109 - DNA, 25 bp, Artificial
  Probe
ccagtatgatgctccactttaaaga

SEQ ID NO: 154110 - DNA, 25 bp, Artificial
  Probe
accagtatgatgctccactttaaag

SEQ ID NO: 154111 - DNA, 25 bp, Artificial
  Probe
cagtatgatgctccactttaaagag

SEQ ID NO: 154112 - DNA, 25 bp, Artificial
  Probe
gcatctttgtcggaagactgtcaac

SEQ ID NO: 154113 - DNA, 25 bp, Artificial
  Probe
actcctatgagaaagtgacccagct

SEQ ID NO: 154114 - DNA, 25 bp, Artificial
  Probe
agcatctttgtcggaagactgtcaa

SEQ ID NO: 154115 - DNA, 25 bp, Artificial
  Probe
ttgactgtgtactcaagttggtgca

SEQ ID NO: 154116 - DNA, 25 bp, Artificial
  Probe
cgctttgactgtgtactcaagttgg

SEQ ID NO: 154117 - DNA, 25 bp, Artificial
  Probe
ccgctttgactgtgtactcaagttg

SEQ ID NO: 154118 - DNA, 25 bp, Artificial
  Probe
ctccactttaaagagcaaagaaagg

SEQ ID NO: 154119 - DNA, 25 bp, Artificial
  Probe
tccactttaaagagcaaagaaaggg

SEQ ID NO: 154120 - DNA, 25 bp, Artificial
  Probe
atctttgtcggaagactgtcaacgg

SEQ ID NO: 154121 - DNA, 25 bp, Artificial
  Probe
cagcatctttgtcggaagactgtca

SEQ ID NO: 154122 - DNA, 25 bp, Artificial
  Probe
ctttaaagagcaaagaaagggcaga

SEQ ID NO: 154123 - DNA, 25 bp, Artificial
  Probe
tggaccagtatgatgctccacttta

SEQ ID NO: 154124 - DNA, 25 bp, Artificial
  Probe
actcagattcttattctcaatgtgg

SEQ ID NO: 154125 - DNA, 25 bp, Artificial
  Probe
gttcacactcagattcttattctca

SEQ ID NO: 154126 - DNA, 25 bp, Artificial
  Probe
ctcagattcttattctcaatgtgga

SEQ ID NO: 154127 - DNA, 25 bp, Artificial
  Probe
tgtcaaggatgtgaacaatcaagtt

SEQ ID NO: 154128 - DNA, 25 bp, Artificial
  Probe
agttcacactcagattcttattctc

SEQ ID NO: 154129 - DNA, 25 bp, Artificial
  Probe
tcaagttcacactcagattcttatt

SEQ ID NO: 154130 - DNA, 25 bp, Artificial
  Probe
tcagattcttattctcaatgtggaa

SEQ ID NO: 154131 - DNA, 25 bp, Artificial
  Probe
ttcacactcagattcttattctcaa

SEQ ID NO: 154132 - DNA, 25 bp, Artificial
  Probe
cacactcagattcttattctcaatg

SEQ ID NO: 154133 - DNA, 25 bp, Artificial
  Probe
caagttcacactcagattcttattc

SEQ ID NO: 154134 - DNA, 25 bp, Artificial
  Probe
atcaagttcacactcagattcttat

SEQ ID NO: 154135 - DNA, 25 bp, Artificial
  Probe
gtgtcaaggatgtgaacaatcaagt

SEQ ID NO: 154136 - DNA, 25 bp, Artificial
  Probe
tgtgtcaaggatgtgaacaatcaag

SEQ ID NO: 154137 - DNA, 25 bp, Artificial
  Probe
tcacactcagattcttattctcaat

SEQ ID NO: 154138 - DNA, 25 bp, Artificial
  Probe
aagttcacactcagattcttattct

SEQ ID NO: 154139 - DNA, 25 bp, Artificial
  Probe
aacaatcaagttcacactcagattc

SEQ ID NO: 154140 - DNA, 25 bp, Artificial
  Probe
acaatcaagttcacactcagattct

SEQ ID NO: 154141 - DNA, 25 bp, Artificial
  Probe
caatcaagttcacactcagattctt

SEQ ID NO: 154142 - DNA, 25 bp, Artificial
  Probe
acactcagattcttattctcaatgt

SEQ ID NO: 154143 - DNA, 25 bp, Artificial
  Probe
ctttacaatctgggagagacacatc

SEQ ID NO: 154144 - DNA, 25 bp, Artificial
  Probe
cactcagattcttattctcaatgtg

SEQ ID NO: 154145 - DNA, 25 bp, Artificial
  Probe
aatcaagttcacactcagattctta

SEQ ID NO: 154146 - DNA, 25 bp, Artificial
  Probe
tttacaatctgggagagacacatca

SEQ ID NO: 154147 - DNA, 25 bp, Artificial
  Probe
atagtgtcacctttacaatctggga

SEQ ID NO: 154148 - DNA, 25 bp, Artificial
  Probe
catagtgtcacctttacaatctggg

SEQ ID NO: 154149 - DNA, 25 bp, Artificial
  Probe
cccatagtgtcacctttacaatctg

SEQ ID NO: 154150 - DNA, 25 bp, Artificial
  Probe
cctttacaatctgggagagacacat

SEQ ID NO: 154151 - DNA, 25 bp, Artificial
  Probe
atagatcacagggaacatcagacac

SEQ ID NO: 154152 - DNA, 25 bp, Artificial
  Probe
catagatcacagggaacatcagaca

SEQ ID NO: 154153 - DNA, 25 bp, Artificial
  Probe
tagtgtcacctttacaatctgggag

SEQ ID NO: 154154 - DNA, 25 bp, Artificial
  Probe
ttacaatctgggagagacacatcag

SEQ ID NO: 154155 - DNA, 25 bp, Artificial
  Probe
actggtgtctaaagagaactgagga

SEQ ID NO: 154156 - DNA, 25 bp, Artificial
  Probe
ccatagtgtcacctttacaatctgg

SEQ ID NO: 154157 - DNA, 25 bp, Artificial
  Probe
ggtgtctaaagagaactgaggactc

SEQ ID NO: 154158 - DNA, 25 bp, Artificial
  Probe
cactggtgtctaaagagaactgagg

SEQ ID NO: 154159 - DNA, 25 bp, Artificial
  Probe
ccatagatcacagggaacatcagac

SEQ ID NO: 154160 - DNA, 25 bp, Artificial
  Probe
cagattcttattctcaatgtggaaa

SEQ ID NO: 154161 - DNA, 25 bp, Artificial
  Probe
gaacaatcaagttcacactcagatt

SEQ ID NO: 154162 - DNA, 25 bp, Artificial
  Probe
cacctttacaatctgggagagacac

SEQ ID NO: 154163 - DNA, 25 bp, Artificial
  Probe
tcacctttacaatctgggagagaca

SEQ ID NO: 154164 - DNA, 25 bp, Artificial
  Probe
ttgtgtcaaggatgtgaacaatcaa

SEQ ID NO: 154165 - DNA, 25 bp, Artificial
  Probe
gtcaaggatgtgaacaatcaagttc

SEQ ID NO: 154166 - DNA, 25 bp, Artificial
  Probe
ctggtgtctaaagagaactgaggac

SEQ ID NO: 154167 - DNA, 25 bp, Artificial
  Probe
tagatcacagggaacatcagacact

SEQ ID NO: 154168 - DNA, 25 bp, Artificial
  Probe
gtcacctttacaatctgggagagac

SEQ ID NO: 154169 - DNA, 25 bp, Artificial
  Probe
aattatactcaacacggaagaccac

SEQ ID NO: 154170 - DNA, 25 bp, Artificial
  Probe
tatactcaacacggaagaccactta

SEQ ID NO: 154171 - DNA, 25 bp, Artificial
  Probe
attatactcaacacggaagaccact

SEQ ID NO: 154172 - DNA, 25 bp, Artificial
  Probe
ttatactcaacacggaagaccactt

SEQ ID NO: 154173 - DNA, 25 bp, Artificial
  Probe
atactcaacacggaagaccacttaa

SEQ ID NO: 154174 - DNA, 25 bp, Artificial
  Probe
gctaattatactcaacacggaagac

SEQ ID NO: 154175 - DNA, 25 bp, Artificial
  Probe
taattatactcaacacggaagacca

SEQ ID NO: 154176 - DNA, 25 bp, Artificial
  Probe
ctaattatactcaacacggaagacc

SEQ ID NO: 154177 - DNA, 25 bp, Artificial
  Probe
agctaattatactcaacacggaaga

SEQ ID NO: 154178 - DNA, 25 bp, Artificial
  Probe
tactcaacacggaagaccacttaac

SEQ ID NO: 154179 - DNA, 25 bp, Artificial
  Probe
aatgggaagaaaggaagaaatcact

SEQ ID NO: 154180 - DNA, 25 bp, Artificial
  Probe
aaatgggaagaaaggaagaaatcac

SEQ ID NO: 154181 - DNA, 25 bp, Artificial
  Probe
agagctaattatactcaacacggaa

SEQ ID NO: 154182 - DNA, 25 bp, Artificial
  Probe
aagagctaattatactcaacacgga

SEQ ID NO: 154183 - DNA, 25 bp, Artificial
  Probe
gagctaattatactcaacacggaag

SEQ ID NO: 154184 - DNA, 25 bp, Artificial
  Probe
tgggaagaaaggaagaaatcactta

SEQ ID NO: 154185 - DNA, 25 bp, Artificial
  Probe
atgggaagaaaggaagaaatcactt

SEQ ID NO: 154186 - DNA, 25 bp, Artificial
  Probe
aaagattctgggaagtattgtctgt

SEQ ID NO: 154187 - DNA, 25 bp, Artificial
  Probe
gaaagattctgggaagtattgtctg

SEQ ID NO: 154188 - DNA, 25 bp, Artificial
  Probe
agattctgggaagtattgtctgtaa

SEQ ID NO: 154189 - DNA, 25 bp, Artificial
  Probe
aagattctgggaagtattgtctgta

SEQ ID NO: 154190 - DNA, 25 bp, Artificial
  Probe
tcattgttcagaaaccagaaagatt

SEQ ID NO: 154191 - DNA, 25 bp, Artificial
  Probe
ccctaatttgattcccagtatccaa

SEQ ID NO: 154192 - DNA, 25 bp, Artificial
  Probe
gggaagaaaggaagaaatcacttaa

SEQ ID NO: 154193 - DNA, 25 bp, Artificial
  Probe
tctgggaagtattgtctgtaattct

SEQ ID NO: 154194 - DNA, 25 bp, Artificial
  Probe
cattgttcagaaaccagaaagattc

SEQ ID NO: 154195 - DNA, 25 bp, Artificial
  Probe
atcattgttcagaaaccagaaagat

SEQ ID NO: 154196 - DNA, 25 bp, Artificial
  Probe
taaatgggaagaaaggaagaaatca

SEQ ID NO: 154197 - DNA, 25 bp, Artificial
  Probe
acagtggaacaaatacattaagagt

SEQ ID NO: 154198 - DNA, 25 bp, Artificial
  Probe
agtcagataaatatgcttcaatcgt

SEQ ID NO: 154199 - DNA, 25 bp, Artificial
  Probe
taagagctaattatactcaacacgg

SEQ ID NO: 154200 - DNA, 25 bp, Artificial
  Probe
ctgggaagtattgtctgtaattctt

SEQ ID NO: 154201 - DNA, 25 bp, Artificial
  Probe
ttctgggaagtattgtctgtaattc

SEQ ID NO: 154202 - DNA, 25 bp, Artificial
  Probe
gattctgggaagtattgtctgtaat

SEQ ID NO: 154203 - DNA, 25 bp, Artificial
  Probe
gatcattgttcagaaaccagaaaga

SEQ ID NO: 154204 - DNA, 25 bp, Artificial
  Probe
agatcattgttcagaaaccagaaag

SEQ ID NO: 154205 - DNA, 25 bp, Artificial
  Probe
gaagatcattgttcagaaaccagaa

SEQ ID NO: 154206 - DNA, 25 bp, Artificial
  Probe
acataatcgaagatcattgttcaga

SEQ ID NO: 154207 - DNA, 25 bp, Artificial
  Probe
aagatcattgttcagaaaccagaaa

SEQ ID NO: 154208 - DNA, 25 bp, Artificial
  Probe
cagtggaacaaatacattaagagtc

SEQ ID NO: 154209 - DNA, 25 bp, Artificial
  Probe
gacagtggaacaaatacattaagag

SEQ ID NO: 154210 - DNA, 25 bp, Artificial
  Probe
aattaagtacaacttcctcaccaca

SEQ ID NO: 154211 - DNA, 25 bp, Artificial
  Probe
agtggaacaaatacattaagagtct

SEQ ID NO: 154212 - DNA, 25 bp, Artificial
  Probe
tgggaagtattgtctgtaattcttt

SEQ ID NO: 154213 - DNA, 25 bp, Artificial
  Probe
tgcttcaatcgttactagttagaca

SEQ ID NO: 154214 - DNA, 25 bp, Artificial
  Probe
tggagaagcagattagagcagaatt

SEQ ID NO: 154215 - DNA, 25 bp, Artificial
  Probe
aagatgacactggagaagcagatta

SEQ ID NO: 154216 - DNA, 25 bp, Artificial
  Probe
taagatgacactggagaagcagatt

SEQ ID NO: 154217 - DNA, 25 bp, Artificial
  Probe
ttaagatgacactggagaagcagat

SEQ ID NO: 154218 - DNA, 25 bp, Artificial
  Probe
atgacactggagaagcagattagag

SEQ ID NO: 154219 - DNA, 25 bp, Artificial
  Probe
gatgacactggagaagcagattaga

SEQ ID NO: 154220 - DNA, 25 bp, Artificial
  Probe
agatgacactggagaagcagattag

SEQ ID NO: 154221 - DNA, 25 bp, Artificial
  Probe
ctggagaagcagattagagcagaat

SEQ ID NO: 154222 - DNA, 25 bp, Artificial
  Probe
ctagtttacacacattcaggcattt

SEQ ID NO: 154223 - DNA, 25 bp, Artificial
  Probe
tcataatacttctgacttcgttact

SEQ ID NO: 154224 - DNA, 25 bp, Artificial
  Probe
ctgttgggaagcaaatcataatact

SEQ ID NO: 154225 - DNA, 25 bp, Artificial
  Probe
tttctttgtaaatatccgactttgc

SEQ ID NO: 154226 - DNA, 25 bp, Artificial
  Probe
tgttgggaagcaaatcataatactt

SEQ ID NO: 154227 - DNA, 25 bp, Artificial
  Probe
cataatacttctgacttcgttactt

SEQ ID NO: 154228 - DNA, 25 bp, Artificial
  Probe
gcaaatcataatacttctgacttcg

SEQ ID NO: 154229 - DNA, 25 bp, Artificial
  Probe
caacttaagatgacactggagaagc

SEQ ID NO: 154230 - DNA, 25 bp, Artificial
  Probe
gcaacttaagatgacactggagaag

SEQ ID NO: 154231 - DNA, 25 bp, Artificial
  Probe
atcataatacttctgacttcgttac

SEQ ID NO: 154232 - DNA, 25 bp, Artificial
  Probe
ggagaagcagattagagcagaattc

SEQ ID NO: 154233 - DNA, 25 bp, Artificial
  Probe
aacttaagatgacactggagaagca

SEQ ID NO: 154234 - DNA, 25 bp, Artificial
  Probe
actggagaagcagattagagcagaa

SEQ ID NO: 154235 - DNA, 25 bp, Artificial
  Probe
cctagtttacacacattcaggcatt

SEQ ID NO: 154236 - DNA, 25 bp, Artificial
  Probe
tctttgtaaatatccgactttgcac

SEQ ID NO: 154237 - DNA, 25 bp, Artificial
  Probe
ttgtaaatatccgactttgcaccta

SEQ ID NO: 154238 - DNA, 25 bp, Artificial
  Probe
ctttgcacctagtttacacacattc

SEQ ID NO: 154239 - DNA, 25 bp, Artificial
  Probe
tgtaaatatccgactttgcacctag

SEQ ID NO: 154240 - DNA, 25 bp, Artificial
  Probe
ctttgtaaatatccgactttgcacc

SEQ ID NO: 154241 - DNA, 25 bp, Artificial
  Probe
ttctttgtaaatatccgactttgca

SEQ ID NO: 154242 - DNA, 25 bp, Artificial
  Probe
tttgtaaatatccgactttgcacct

SEQ ID NO: 154243 - DNA, 25 bp, Artificial
  Probe
tttgcacctagtttacacacattca

SEQ ID NO: 154244 - DNA, 25 bp, Artificial
  Probe
ttactagattctagcaacgcagtcc

SEQ ID NO: 154245 - DNA, 25 bp, Artificial
  Probe
aactctatggtagaatttcacatgc

SEQ ID NO: 154246 - DNA, 25 bp, Artificial
  Probe
aatatccgactttgcacctagttta

SEQ ID NO: 154247 - DNA, 25 bp, Artificial
  Probe
taaatatccgactttgcacctagtt

SEQ ID NO: 154248 - DNA, 25 bp, Artificial
  Probe
caaatcataatacttctgacttcgt

SEQ ID NO: 154249 - DNA, 25 bp, Artificial
  Probe
ggcaacttaagatgacactggagaa

SEQ ID NO: 154250 - DNA, 25 bp, Artificial
  Probe
acaaactctatggtagaatttcaca

SEQ ID NO: 154251 - DNA, 25 bp, Artificial
  Probe
cttaagatgacactggagaagcaga

SEQ ID NO: 154252 - DNA, 25 bp, Artificial
  Probe
ttgcacctagtttacacacattcag

SEQ ID NO: 154253 - DNA, 25 bp, Artificial
  Probe
atatccgactttgcacctagtttac

SEQ ID NO: 154254 - DNA, 25 bp, Artificial
  Probe
aaatatccgactttgcacctagttt

SEQ ID NO: 154255 - DNA, 25 bp, Artificial
  Probe
gtaaatatccgactttgcacctagt

SEQ ID NO: 154256 - DNA, 25 bp, Artificial
  Probe
acctagtttacacacattcaggcat

SEQ ID NO: 154257 - DNA, 25 bp, Artificial
  Probe
agcaaatcataatacttctgacttc

SEQ ID NO: 154258 - DNA, 25 bp, Artificial
  Probe
acttaagatgacactggagaagcag

SEQ ID NO: 154259 - DNA, 25 bp, Artificial
  Probe
taatggttgtgaagctgaagatgat

SEQ ID NO: 154260 - DNA, 25 bp, Artificial
  Probe
ttaatggttgtgaagctgaagatga

SEQ ID NO: 154261 - DNA, 25 bp, Artificial
  Probe
tagtcttaatggttgtgaagctgaa

SEQ ID NO: 154262 - DNA, 25 bp, Artificial
  Probe
aagtagtcttaatggttgtgaagct

SEQ ID NO: 154263 - DNA, 25 bp, Artificial
  Probe
cttaatggttgtgaagctgaagatg

SEQ ID NO: 154264 - DNA, 25 bp, Artificial
  Probe
ttgtcagattgttctatcctaactt

SEQ ID NO: 154265 - DNA, 25 bp, Artificial
  Probe
gtagtcttaatggttgtgaagctga

SEQ ID NO: 154266 - DNA, 25 bp, Artificial
  Probe
agtagtcttaatggttgtgaagctg

SEQ ID NO: 154267 - DNA, 25 bp, Artificial
  Probe
aatggttgtgaagctgaagatgatt

SEQ ID NO: 154268 - DNA, 25 bp, Artificial
  Probe
cagacccagtatgaaatagtaacca

SEQ ID NO: 154269 - DNA, 25 bp, Artificial
  Probe
agtcttaatggttgtgaagctgaag

SEQ ID NO: 154270 - DNA, 25 bp, Artificial
  Probe
gtaaggcagacccagtatgaaatag

SEQ ID NO: 154271 - DNA, 25 bp, Artificial
  Probe
gaagatgatttgagacagttgtagc

SEQ ID NO: 154272 - DNA, 25 bp, Artificial
  Probe
gcagacccagtatgaaatagtaacc

SEQ ID NO: 154273 - DNA, 25 bp, Artificial
  Probe
ggcagacccagtatgaaatagtaac

SEQ ID NO: 154274 - DNA, 25 bp, Artificial
  Probe
aggcagacccagtatgaaatagtaa

SEQ ID NO: 154275 - DNA, 25 bp, Artificial
  Probe
aaggcagacccagtatgaaatagta

SEQ ID NO: 154276 - DNA, 25 bp, Artificial
  Probe
taaggcagacccagtatgaaatagt

SEQ ID NO: 154277 - DNA, 25 bp, Artificial
  Probe
aaagtagtcttaatggttgtgaagc

SEQ ID NO: 154278 - DNA, 25 bp, Artificial
  Probe
ccctttgtcagattgttctatccta

SEQ ID NO: 154279 - DNA, 25 bp, Artificial
  Probe
ttgtagcttactggatgttaaggag

SEQ ID NO: 154280 - DNA, 25 bp, Artificial
  Probe
gttgtagcttactggatgttaagga

SEQ ID NO: 154281 - DNA, 25 bp, Artificial
  Probe
agttgtagcttactggatgttaagg

SEQ ID NO: 154282 - DNA, 25 bp, Artificial
  Probe
tgaattgtgttgttgaaagtagtct

SEQ ID NO: 154283 - DNA, 25 bp, Artificial
  Probe
gtagcttactggatgttaaggagac

SEQ ID NO: 154284 - DNA, 25 bp, Artificial
  Probe
tgtagcttactggatgttaaggaga

SEQ ID NO: 154285 - DNA, 25 bp, Artificial
  Probe
agacccagtatgaaatagtaaccat

SEQ ID NO: 154286 - DNA, 25 bp, Artificial
  Probe
tgaagatgatttgagacagttgtag

SEQ ID NO: 154287 - DNA, 25 bp, Artificial
  Probe
ttgaattgtgttgttgaaagtagtc

SEQ ID NO: 154288 - DNA, 25 bp, Artificial
  Probe
tgttgaaagtagtcttaatggttgt

SEQ ID NO: 154289 - DNA, 25 bp, Artificial
  Probe
tgttgttgaaagtagtcttaatggt

SEQ ID NO: 154290 - DNA, 25 bp, Artificial
  Probe
tagcttactggatgttaaggagacc

SEQ ID NO: 154291 - DNA, 25 bp, Artificial
  Probe
gttgaaagtagtcttaatggttgtg

SEQ ID NO: 154292 - DNA, 25 bp, Artificial
  Probe
gtgttgttgaaagtagtcttaatgg

SEQ ID NO: 154293 - DNA, 25 bp, Artificial
  Probe
gacccagtatgaaatagtaaccatt

SEQ ID NO: 154294 - DNA, 25 bp, Artificial
  Probe
tgaaagtagtcttaatggttgtgaa

SEQ ID NO: 154295 - DNA, 25 bp, Artificial
  Probe
ttgaaagtagtcttaatggttgtga

SEQ ID NO: 154296 - DNA, 25 bp, Artificial
  Probe
aaccatttgggctatatttacatgc

SEQ ID NO: 154297 - DNA, 25 bp, Artificial
  Probe
aaatccattcagtttccatgttagc

SEQ ID NO: 154298 - DNA, 25 bp, Artificial
  Probe
cctttgtcagattgttctatcctaa

SEQ ID NO: 154299 - DNA, 25 bp, Artificial
  Probe
tttgaattgtgttgttgaaagtagt

SEQ ID NO: 154300 - DNA, 25 bp, Artificial
  Probe
accatttgggctatatttacatgct

SEQ ID NO: 154301 - DNA, 25 bp, Artificial
  Probe
gaattgtgttgttgaaagtagtctt

SEQ ID NO: 154302 - DNA, 25 bp, Artificial
  Probe
gtatgaaatagtaaccatttgggct

SEQ ID NO: 154303 - DNA, 25 bp, Artificial
  Probe
agtatgaaatagtaaccatttgggc

SEQ ID NO: 154304 - DNA, 25 bp, Artificial
  Probe
ctgatgttcaagaatgatccctacc

SEQ ID NO: 154305 - DNA, 25 bp, Artificial
  Probe
cctgatgttcaagaatgatccctac

SEQ ID NO: 154306 - DNA, 25 bp, Artificial
  Probe
gatgttcaagaatgatccctaccac

SEQ ID NO: 154307 - DNA, 25 bp, Artificial
  Probe
tgatgttcaagaatgatccctacca

SEQ ID NO: 154308 - DNA, 25 bp, Artificial
  Probe
ccctgatgttcaagaatgatcccta

SEQ ID NO: 154309 - DNA, 25 bp, Artificial
  Probe
atgttcaagaatgatccctaccacc

SEQ ID NO: 154310 - DNA, 25 bp, Artificial
  Probe
gattctgtggtgagtttgtcatcgg

SEQ ID NO: 154311 - DNA, 25 bp, Artificial
  Probe
ggattctgtggtgagtttgtcatcg

SEQ ID NO: 154312 - DNA, 25 bp, Artificial
  Probe
cggattctgtggtgagtttgtcatc

SEQ ID NO: 154313 - DNA, 25 bp, Artificial
  Probe
tgttcaagaatgatccctaccaccc

SEQ ID NO: 154314 - DNA, 25 bp, Artificial
  Probe
gttcaagaatgatccctaccacccg

SEQ ID NO: 154315 - DNA, 25 bp, Artificial
  Probe
cagcccctgatgttcaagaatgatc

SEQ ID NO: 154316 - DNA, 25 bp, Artificial
  Probe
cccctgatgttcaagaatgatccct

SEQ ID NO: 154317 - DNA, 25 bp, Artificial
  Probe
agcccctgatgttcaagaatgatcc

SEQ ID NO: 154318 - DNA, 25 bp, Artificial
  Probe
aaggtgtcacctcgacattgatgag

SEQ ID NO: 154319 - DNA, 25 bp, Artificial
  Probe
caaaggtgtcacctcgacattgatg

SEQ ID NO: 154320 - DNA, 25 bp, Artificial
  Probe
aaaggtgtcacctcgacattgatga

SEQ ID NO: 154321 - DNA, 25 bp, Artificial
  Probe
ccaaaggtgtcacctcgacattgat

SEQ ID NO: 154322 - DNA, 25 bp, Artificial
  Probe
catccacttcctgctctgtattata

SEQ ID NO: 154323 - DNA, 25 bp, Artificial
  Probe
tcatccacttcctgctctgtattat

SEQ ID NO: 154324 - DNA, 25 bp, Artificial
  Probe
gattactacagtcacattccgagaa

SEQ ID NO: 154325 - DNA, 25 bp, Artificial
  Probe
aacaaggattactacagtcacattc

SEQ ID NO: 154326 - DNA, 25 bp, Artificial
  Probe
ctcatccacttcctgctctgtatta

SEQ ID NO: 154327 - DNA, 25 bp, Artificial
  Probe
tccacttcctgctctgtattataac

SEQ ID NO: 154328 - DNA, 25 bp, Artificial
  Probe
atccacttcctgctctgtattataa

SEQ ID NO: 154329 - DNA, 25 bp, Artificial
  Probe
ttggaacctcatgtcacctatgtat

SEQ ID NO: 154330 - DNA, 25 bp, Artificial
  Probe
acaaggattactacagtcacattcc

SEQ ID NO: 154331 - DNA, 25 bp, Artificial
  Probe
ccacttcctgctctgtattataaca

SEQ ID NO: 154332 - DNA, 25 bp, Artificial
  Probe
tagaggaataccaagagtggagatt

SEQ ID NO: 154333 - DNA, 25 bp, Artificial
  Probe
ttagaggaataccaagagtggagat

SEQ ID NO: 154334 - DNA, 25 bp, Artificial
  Probe
aagttagaggaataccaagagtgga

SEQ ID NO: 154335 - DNA, 25 bp, Artificial
  Probe
aaggattactacagtcacattccga

SEQ ID NO: 154336 - DNA, 25 bp, Artificial
  Probe
caaggattactacagtcacattccg

SEQ ID NO: 154337 - DNA, 25 bp, Artificial
  Probe
tggaacctcatgtcacctatgtatg

SEQ ID NO: 154338 - DNA, 25 bp, Artificial
  Probe
ccaagaaccaaacaaggattactac

SEQ ID NO: 154339 - DNA, 25 bp, Artificial
  Probe
gttagaggaataccaagagtggaga

SEQ ID NO: 154340 - DNA, 25 bp, Artificial
  Probe
agttagaggaataccaagagtggag

SEQ ID NO: 154341 - DNA, 25 bp, Artificial
  Probe
gttggaacctcatgtcacctatgta

SEQ ID NO: 154342 - DNA, 25 bp, Artificial
  Probe
aaccaaacaaggattactacagtca

SEQ ID NO: 154343 - DNA, 25 bp, Artificial
  Probe
agaaccaaacaaggattactacagt

SEQ ID NO: 154344 - DNA, 25 bp, Artificial
  Probe
ggattactacagtcacattccgaga

SEQ ID NO: 154345 - DNA, 25 bp, Artificial
  Probe
aggattactacagtcacattccgag

SEQ ID NO: 154346 - DNA, 25 bp, Artificial
  Probe
gaaccaaacaaggattactacagtc

SEQ ID NO: 154347 - DNA, 25 bp, Artificial
  Probe
caagaaccaaacaaggattactaca

SEQ ID NO: 154348 - DNA, 25 bp, Artificial
  Probe
ccaaacaaggattactacagtcaca

SEQ ID NO: 154349 - DNA, 25 bp, Artificial
  Probe
accaaacaaggattactacagtcac

SEQ ID NO: 154350 - DNA, 25 bp, Artificial
  Probe
gacttcaaatcccagaaagcataaa

SEQ ID NO: 154351 - DNA, 25 bp, Artificial
  Probe
cacttcctgctctgtattataacaa

SEQ ID NO: 154352 - DNA, 25 bp, Artificial
  Probe
aagaaccaaacaaggattactacag

SEQ ID NO: 154353 - DNA, 25 bp, Artificial
  Probe
ttactacagtcacattccgagaaag

SEQ ID NO: 154354 - DNA, 25 bp, Artificial
  Probe
attactacagtcacattccgagaaa

SEQ ID NO: 154355 - DNA, 25 bp, Artificial
  Probe
caaacaaggattactacagtcacat

SEQ ID NO: 154356 - DNA, 25 bp, Artificial
  Probe
acttcaaatcccagaaagcataaat

SEQ ID NO: 154357 - DNA, 25 bp, Artificial
  Probe
tgacttcaaatcccagaaagcataa

SEQ ID NO: 154358 - DNA, 25 bp, Artificial
  Probe
atcagtgacttcaaatcccagaaag

SEQ ID NO: 154359 - DNA, 25 bp, Artificial
  Probe
gtgacttcaaatcccagaaagcata

SEQ ID NO: 154360 - DNA, 25 bp, Artificial
  Probe
ttcctgctctgtattataacaatgt

SEQ ID NO: 154361 - DNA, 25 bp, Artificial
  Probe
aaacaaggattactacagtcacatt

SEQ ID NO: 154362 - DNA, 25 bp, Artificial
  Probe
acttcctgctctgtattataacaat

SEQ ID NO: 154363 - DNA, 25 bp, Artificial
  Probe
tcactgtactgggatgtaagaagag

SEQ ID NO: 154364 - DNA, 25 bp, Artificial
  Probe
gatcagtgacttcaaatcccagaaa

SEQ ID NO: 154365 - DNA, 25 bp, Artificial
  Probe
tactacagtcacattccgagaaagg

SEQ ID NO: 154366 - DNA, 25 bp, Artificial
  Probe
gaacctcatgtcacctatgtatgaa

SEQ ID NO: 154367 - DNA, 25 bp, Artificial
  Probe
taacatcccaataaagtcctcttcc

SEQ ID NO: 154368 - DNA, 25 bp, Artificial
  Probe
gggacctcctcaccttaatttattt

SEQ ID NO: 154369 - DNA, 25 bp, Artificial
  Probe
caagaagaaaccctatggcactatc

SEQ ID NO: 154370 - DNA, 25 bp, Artificial
  Probe
cgtttcttcactaacatcccaataa

SEQ ID NO: 154371 - DNA, 25 bp, Artificial
  Probe
aagaagaaaccctatggcactatca

SEQ ID NO: 154372 - DNA, 25 bp, Artificial
  Probe
ctaacatcccaataaagtcctcttc

SEQ ID NO: 154373 - DNA, 25 bp, Artificial
  Probe
cactaacatcccaataaagtcctct

SEQ ID NO: 154374 - DNA, 25 bp, Artificial
  Probe
tcactaacatcccaataaagtcctc

SEQ ID NO: 154375 - DNA, 25 bp, Artificial
  Probe
ttcactaacatcccaataaagtcct

SEQ ID NO: 154376 - DNA, 25 bp, Artificial
  Probe
cttcactaacatcccaataaagtcc

SEQ ID NO: 154377 - DNA, 25 bp, Artificial
  Probe
actaacatcccaataaagtcctctt

SEQ ID NO: 154378 - DNA, 25 bp, Artificial
  Probe
agaagaaaccctatggcactatcag

SEQ ID NO: 154379 - DNA, 25 bp, Artificial
  Probe
tgacaaattcattccaaattccacc

SEQ ID NO: 154380 - DNA, 25 bp, Artificial
  Probe
ctcattgtcctatccttgctgcttc

SEQ ID NO: 154381 - DNA, 25 bp, Artificial
  Probe
tcttcactaacatcccaataaagtc

SEQ ID NO: 154382 - DNA, 25 bp, Artificial
  Probe
ttgacaaattcattccaaattccac

SEQ ID NO: 154383 - DNA, 25 bp, Artificial
  Probe
gacaaattcattccaaattccaccc

SEQ ID NO: 154384 - DNA, 25 bp, Artificial
  Probe
cttgacaaattcattccaaattcca

SEQ ID NO: 154385 - DNA, 25 bp, Artificial
  Probe
cattgtcctatccttgctgcttctg

SEQ ID NO: 154386 - DNA, 25 bp, Artificial
  Probe
aacatcccaataaagtcctcttccc

SEQ ID NO: 154387 - DNA, 25 bp, Artificial
  Probe
tcttgacaaattcattccaaattcc

SEQ ID NO: 154388 - DNA, 25 bp, Artificial
  Probe
agggacctcctcaccttaatttatt

SEQ ID NO: 154389 - DNA, 25 bp, Artificial
  Probe
ttcttcactaacatcccaataaagt

SEQ ID NO: 154390 - DNA, 25 bp, Artificial
  Probe
tcattgtcctatccttgctgcttct

SEQ ID NO: 154391 - DNA, 25 bp, Artificial
  Probe
cagggacctcctcaccttaatttat

SEQ ID NO: 154392 - DNA, 25 bp, Artificial
  Probe
gtttcttcactaacatcccaataaa

SEQ ID NO: 154393 - DNA, 25 bp, Artificial
  Probe
gcaagaagaaaccctatggcactat

SEQ ID NO: 154394 - DNA, 25 bp, Artificial
  Probe
tttcttcactaacatcccaataaag

SEQ ID NO: 154395 - DNA, 25 bp, Artificial
  Probe
acgtttcttcactaacatcccaata

SEQ ID NO: 154396 - DNA, 25 bp, Artificial
  Probe
gaagaaaccctatggcactatcagc

SEQ ID NO: 154397 - DNA, 25 bp, Artificial
  Probe
cacgtttcttcactaacatcccaat

SEQ ID NO: 154398 - DNA, 25 bp, Artificial
  Probe
aacttcagaggcatggctatgagaa

SEQ ID NO: 154399 - DNA, 25 bp, Artificial
  Probe
cctcattgtcctatccttgctgctt

SEQ ID NO: 154400 - DNA, 25 bp, Artificial
  Probe
atcttgacaaattcattccaaattc

SEQ ID NO: 154401 - DNA, 25 bp, Artificial
  Probe
ggacctcctcaccttaatttatttt

SEQ ID NO: 154402 - DNA, 25 bp, Artificial
  Probe
gaacttcagaggcatggctatgaga

SEQ ID NO: 154403 - DNA, 25 bp, Artificial
  Probe
gagggagatcttgacaaattcattc

SEQ ID NO: 154404 - DNA, 25 bp, Artificial
  Probe
ggagggagatcttgacaaattcatt

SEQ ID NO: 154405 - DNA, 25 bp, Artificial
  Probe
ccagggacctcctcaccttaattta

SEQ ID NO: 154406 - DNA, 25 bp, Artificial
  Probe
gatcttgacaaattcattccaaatt

SEQ ID NO: 154407 - DNA, 25 bp, Artificial
  Probe
acttcagaggcatggctatgagaac

SEQ ID NO: 154408 - DNA, 25 bp, Artificial
  Probe
cctcctcaccttaatttattttacg

SEQ ID NO: 154409 - DNA, 25 bp, Artificial
  Probe
ggagatcttgacaaattcattccaa

SEQ ID NO: 154410 - DNA, 25 bp, Artificial
  Probe
agggagatcttgacaaattcattcc

SEQ ID NO: 154411 - DNA, 25 bp, Artificial
  Probe
gagatcttgacaaattcattccaaa

SEQ ID NO: 154412 - DNA, 25 bp, Artificial
  Probe
tgaaccagaagagtagagaacagtt

SEQ ID NO: 154413 - DNA, 25 bp, Artificial
  Probe
aattgtgtgtatgatacctgtgtaa

SEQ ID NO: 154414 - DNA, 25 bp, Artificial
  Probe
attgtgtgtatgatacctgtgtaat

SEQ ID NO: 154415 - DNA, 25 bp, Artificial
  Probe
ataattgtgtgtatgatacctgtgt

SEQ ID NO: 154416 - DNA, 25 bp, Artificial
  Probe
ctgaaccagaagagtagagaacagt

SEQ ID NO: 154417 - DNA, 25 bp, Artificial
  Probe
tgtgtgtatgatacctgtgtaataa

SEQ ID NO: 154418 - DNA, 25 bp, Artificial
  Probe
ttgtgtgtatgatacctgtgtaata

SEQ ID NO: 154419 - DNA, 25 bp, Artificial
  Probe
taattgtgtgtatgatacctgtgta

SEQ ID NO: 154420 - DNA, 25 bp, Artificial
  Probe
cgtgctccttaaataattgtgtgta

SEQ ID NO: 154421 - DNA, 25 bp, Artificial
  Probe
ttcaggaagcaacacacatctcatt

SEQ ID NO: 154422 - DNA, 25 bp, Artificial
  Probe
aataattgtgtgtatgatacctgtg

SEQ ID NO: 154423 - DNA, 25 bp, Artificial
  Probe
gaaccagaagagtagagaacagttt

SEQ ID NO: 154424 - DNA, 25 bp, Artificial
  Probe
aaccagaagagtagagaacagtttg

SEQ ID NO: 154425 - DNA, 25 bp, Artificial
  Probe
ctgtccgtgctccttaaataattgt

SEQ ID NO: 154426 - DNA, 25 bp, Artificial
  Probe
gctgaaccagaagagtagagaacag

SEQ ID NO: 154427 - DNA, 25 bp, Artificial
  Probe
ctggtcaagtgttatttaactggag

SEQ ID NO: 154428 - DNA, 25 bp, Artificial
  Probe
tccgtgctccttaaataattgtgtg

SEQ ID NO: 154429 - DNA, 25 bp, Artificial
  Probe
gtccgtgctccttaaataattgtgt

SEQ ID NO: 154430 - DNA, 25 bp, Artificial
  Probe
tgtccgtgctccttaaataattgtg

SEQ ID NO: 154431 - DNA, 25 bp, Artificial
  Probe
tcaggaagcaacacacatctcattc

SEQ ID NO: 154432 - DNA, 25 bp, Artificial
  Probe
agaagagtagagaacagtttgtgtg

SEQ ID NO: 154433 - DNA, 25 bp, Artificial
  Probe
cagaagagtagagaacagtttgtgt

SEQ ID NO: 154434 - DNA, 25 bp, Artificial
  Probe
ttggctggtcaagtgttatttaact

SEQ ID NO: 154435 - DNA, 25 bp, Artificial
  Probe
ccgtgctccttaaataattgtgtgt

SEQ ID NO: 154436 - DNA, 25 bp, Artificial
  Probe
cctgtccgtgctccttaaataattg

SEQ ID NO: 154437 - DNA, 25 bp, Artificial
  Probe
tggtcaagtgttatttaactggagc

SEQ ID NO: 154438 - DNA, 25 bp, Artificial
  Probe
gctggtcaagtgttatttaactgga

SEQ ID NO: 154439 - DNA, 25 bp, Artificial
  Probe
ccagaagagtagagaacagtttgtg

SEQ ID NO: 154440 - DNA, 25 bp, Artificial
  Probe
tggctggtcaagtgttatttaactg

SEQ ID NO: 154441 - DNA, 25 bp, Artificial
  Probe
gaagagtagagaacagtttgtgtgg

SEQ ID NO: 154442 - DNA, 25 bp, Artificial
  Probe
accagaagagtagagaacagtttgt

SEQ ID NO: 154443 - DNA, 25 bp, Artificial
  Probe
tgtggattgggattgaacctctatg

SEQ ID NO: 154444 - DNA, 25 bp, Artificial
  Probe
gtgtggattgggattgaacctctat

SEQ ID NO: 154445 - DNA, 25 bp, Artificial
  Probe
tgctccttaaataattgtgtgtatg

SEQ ID NO: 154446 - DNA, 25 bp, Artificial
  Probe
gtgctccttaaataattgtgtgtat

SEQ ID NO: 154447 - DNA, 25 bp, Artificial
  Probe
ggctggtcaagtgttatttaactgg

SEQ ID NO: 154448 - DNA, 25 bp, Artificial
  Probe
gctccttaaataattgtgtgtatga

SEQ ID NO: 154449 - DNA, 25 bp, Artificial
  Probe
gtcaagtgttatttaactggagctt

SEQ ID NO: 154450 - DNA, 25 bp, Artificial
  Probe
aggctgaaccagaagagtagagaac

SEQ ID NO: 154451 - DNA, 25 bp, Artificial
  Probe
caggctgaaccagaagagtagagaa

SEQ ID NO: 154452 - DNA, 25 bp, Artificial
  Probe
tttcaggaagcaacacacatctcat

SEQ ID NO: 154453 - DNA, 25 bp, Artificial
  Probe
ggtcaagtgttatttaactggagct

SEQ ID NO: 154454 - DNA, 25 bp, Artificial
  Probe
tcaagtgttatttaactggagcttt

SEQ ID NO: 154455 - DNA, 25 bp, Artificial
  Probe
aagagtagagaacagtttgtgtggg

SEQ ID NO: 154456 - DNA, 25 bp, Artificial
  Probe
agtgtggattgggattgaacctcta

SEQ ID NO: 154457 - DNA, 25 bp, Artificial
  Probe
ctgccaagagatgtgatatagaagt

SEQ ID NO: 154458 - DNA, 25 bp, Artificial
  Probe
actgccaagagatgtgatatagaag

SEQ ID NO: 154459 - DNA, 25 bp, Artificial
  Probe
gccaagagatgtgatatagaagtgt

SEQ ID NO: 154460 - DNA, 25 bp, Artificial
  Probe
tgccaagagatgtgatatagaagtg

SEQ ID NO: 154461 - DNA, 25 bp, Artificial
  Probe
ggagtaagaatgtgctaagatcaga

SEQ ID NO: 154462 - DNA, 25 bp, Artificial
  Probe
tggagtaagaatgtgctaagatcag

SEQ ID NO: 154463 - DNA, 25 bp, Artificial
  Probe
ttggagtaagaatgtgctaagatca

SEQ ID NO: 154464 - DNA, 25 bp, Artificial
  Probe
taagaatgtgctaagatcagaatgc

SEQ ID NO: 154465 - DNA, 25 bp, Artificial
  Probe
tggatctgtagtatgttctgactct

SEQ ID NO: 154466 - DNA, 25 bp, Artificial
  Probe
tctcatggatctgtagtatgttctg

SEQ ID NO: 154467 - DNA, 25 bp, Artificial
  Probe
gctctcatggatctgtagtatgttc

SEQ ID NO: 154468 - DNA, 25 bp, Artificial
  Probe
aagaatgtgctaagatcagaatgcc

SEQ ID NO: 154469 - DNA, 25 bp, Artificial
  Probe
atggatctgtagtatgttctgactc

SEQ ID NO: 154470 - DNA, 25 bp, Artificial
  Probe
ctctcatggatctgtagtatgttct

SEQ ID NO: 154471 - DNA, 25 bp, Artificial
  Probe
gagtaagaatgtgctaagatcagaa

SEQ ID NO: 154472 - DNA, 25 bp, Artificial
  Probe
cactgccaagagatgtgatatagaa

SEQ ID NO: 154473 - DNA, 25 bp, Artificial
  Probe
catggatctgtagtatgttctgact

SEQ ID NO: 154474 - DNA, 25 bp, Artificial
  Probe
tcatggatctgtagtatgttctgac

SEQ ID NO: 154475 - DNA, 25 bp, Artificial
  Probe
ctcatggatctgtagtatgttctga

SEQ ID NO: 154476 - DNA, 25 bp, Artificial
  Probe
ggatctgtagtatgttctgactcta

SEQ ID NO: 154477 - DNA, 25 bp, Artificial
  Probe
agaatgtgctaagatcagaatgcct

SEQ ID NO: 154478 - DNA, 25 bp, Artificial
  Probe
tagctctcatggatctgtagtatgt

SEQ ID NO: 154479 - DNA, 25 bp, Artificial
  Probe
cctcatcatatagctctcatggatc

SEQ ID NO: 154480 - DNA, 25 bp, Artificial
  Probe
catcatatagctctcatggatctgt

SEQ ID NO: 154481 - DNA, 25 bp, Artificial
  Probe
gtaagaatgtgctaagatcagaatg

SEQ ID NO: 154482 - DNA, 25 bp, Artificial
  Probe
ccaagagatgtgatatagaagtgta

SEQ ID NO: 154483 - DNA, 25 bp, Artificial
  Probe
tcatcatatagctctcatggatctg

SEQ ID NO: 154484 - DNA, 25 bp, Artificial
  Probe
agctctcatggatctgtagtatgtt

SEQ ID NO: 154485 - DNA, 25 bp, Artificial
  Probe
agtaagaatgtgctaagatcagaat

SEQ ID NO: 154486 - DNA, 25 bp, Artificial
  Probe
ctcatcatatagctctcatggatct

SEQ ID NO: 154487 - DNA, 25 bp, Artificial
  Probe
atagctctcatggatctgtagtatg

SEQ ID NO: 154488 - DNA, 25 bp, Artificial
  Probe
catatagctctcatggatctgtagt

SEQ ID NO: 154489 - DNA, 25 bp, Artificial
  Probe
ccactgccaagagatgtgatataga

SEQ ID NO: 154490 - DNA, 25 bp, Artificial
  Probe
tgtttggagtaagaatgtgctaaga

SEQ ID NO: 154491 - DNA, 25 bp, Artificial
  Probe
ctgtttggagtaagaatgtgctaag

SEQ ID NO: 154492 - DNA, 25 bp, Artificial
  Probe
tcatatagctctcatggatctgtag

SEQ ID NO: 154493 - DNA, 25 bp, Artificial
  Probe
gcctgcttgtggtttcatataatat

SEQ ID NO: 154494 - DNA, 25 bp, Artificial
  Probe
tgcctgcttgtggtttcatataata

SEQ ID NO: 154495 - DNA, 25 bp, Artificial
  Probe
tatattgtgctatgtgtttgggacc

SEQ ID NO: 154496 - DNA, 25 bp, Artificial
  Probe
gtttggagtaagaatgtgctaagat

SEQ ID NO: 154497 - DNA, 25 bp, Artificial
  Probe
atgcctgcttgtggtttcatataat

SEQ ID NO: 154498 - DNA, 25 bp, Artificial
  Probe
atcatatagctctcatggatctgta

SEQ ID NO: 154499 - DNA, 25 bp, Artificial
  Probe
gaatgtgctaagatcagaatgcctg

SEQ ID NO: 154500 - DNA, 25 bp, Artificial
  Probe
aatgcctgcttgtggtttcatataa

SEQ ID NO: 154501 - DNA, 25 bp, Artificial
  Probe
actgtttggagtaagaatgtgctaa

SEQ ID NO: 154502 - DNA, 25 bp, Artificial
  Probe
gagaacaattcacttgctaagacag

SEQ ID NO: 154503 - DNA, 25 bp, Artificial
  Probe
aacaattcacttgctaagacagttc

SEQ ID NO: 154504 - DNA, 25 bp, Artificial
  Probe
gaacaattcacttgctaagacagtt

SEQ ID NO: 154505 - DNA, 25 bp, Artificial
  Probe
caattcacttgctaagacagttctc

SEQ ID NO: 154506 - DNA, 25 bp, Artificial
  Probe
aattcacttgctaagacagttctca

SEQ ID NO: 154507 - DNA, 25 bp, Artificial
  Probe
acaattcacttgctaagacagttct

SEQ ID NO: 154508 - DNA, 25 bp, Artificial
  Probe
agaacaattcacttgctaagacagt

SEQ ID NO: 154509 - DNA, 25 bp, Artificial
  Probe
aggagaacaattcacttgctaagac

SEQ ID NO: 154510 - DNA, 25 bp, Artificial
  Probe
caggagaacaattcacttgctaaga

SEQ ID NO: 154511 - DNA, 25 bp, Artificial
  Probe
attcacttgctaagacagttctcac

SEQ ID NO: 154512 - DNA, 25 bp, Artificial
  Probe
ggagaacaattcacttgctaagaca

SEQ ID NO: 154513 - DNA, 25 bp, Artificial
  Probe
acagtatgaagtattgtgtaggagg

SEQ ID NO: 154514 - DNA, 25 bp, Artificial
  Probe
gtaagaataagccaccaacttcatg

SEQ ID NO: 154515 - DNA, 25 bp, Artificial
  Probe
cctcatcttagaagtgtcacctcag

SEQ ID NO: 154516 - DNA, 25 bp, Artificial
  Probe
ttcacttgctaagacagttctcact

SEQ ID NO: 154517 - DNA, 25 bp, Artificial
  Probe
cacttgctaagacagttctcactct

SEQ ID NO: 154518 - DNA, 25 bp, Artificial
  Probe
tcacttgctaagacagttctcactc

SEQ ID NO: 154519 - DNA, 25 bp, Artificial
  Probe
ggcaactgtagctggtaagaataag

SEQ ID NO: 154520 - DNA, 25 bp, Artificial
  Probe
ctcatcttagaagtgtcacctcagc

SEQ ID NO: 154521 - DNA, 25 bp, Artificial
  Probe
ggtaagaataagccaccaacttcat

SEQ ID NO: 154522 - DNA, 25 bp, Artificial
  Probe
cagtatgaagtattgtgtaggaggg

SEQ ID NO: 154523 - DNA, 25 bp, Artificial
  Probe
gtatgaagtattgtgtaggagggtg

SEQ ID NO: 154524 - DNA, 25 bp, Artificial
  Probe
agtatgaagtattgtgtaggagggt

SEQ ID NO: 154525 - DNA, 25 bp, Artificial
  Probe
gttgaaatgagcacagtatgaagta

SEQ ID NO: 154526 - DNA, 25 bp, Artificial
  Probe
catcttagaagtgtcacctcagcag

SEQ ID NO: 154527 - DNA, 25 bp, Artificial
  Probe
acttgctaagacagttctcactctg

SEQ ID NO: 154528 - DNA, 25 bp, Artificial
  Probe
tggcaactgtagctggtaagaataa

SEQ ID NO: 154529 - DNA, 25 bp, Artificial
  Probe
ttggcaactgtagctggtaagaata

SEQ ID NO: 154530 - DNA, 25 bp, Artificial
  Probe
tatgaagtattgtgtaggagggtgg

SEQ ID NO: 154531 - DNA, 25 bp, Artificial
  Probe
taagaataagccaccaacttcatgg

SEQ ID NO: 154532 - DNA, 25 bp, Artificial
  Probe
tgaaatgagcacagtatgaagtatt

SEQ ID NO: 154533 - DNA, 25 bp, Artificial
  Probe
ttgaaatgagcacagtatgaagtat

SEQ ID NO: 154534 - DNA, 25 bp, Artificial
  Probe
tcattcctattccctcacattgatt

SEQ ID NO: 154535 - DNA, 25 bp, Artificial
  Probe
gtcattcctattccctcacattgat

SEQ ID NO: 154536 - DNA, 25 bp, Artificial
  Probe
atattctttgtcgcttggaaatcct

SEQ ID NO: 154537 - DNA, 25 bp, Artificial
  Probe
tcatcttagaagtgtcacctcagca

SEQ ID NO: 154538 - DNA, 25 bp, Artificial
  Probe
gaaatgagcacagtatgaagtattg

SEQ ID NO: 154539 - DNA, 25 bp, Artificial
  Probe
atgccagtgttagtgttgaaatgag

SEQ ID NO: 154540 - DNA, 25 bp, Artificial
  Probe
attcctattccctcacattgatttg

SEQ ID NO: 154541 - DNA, 25 bp, Artificial
  Probe
cattcctattccctcacattgattt

SEQ ID NO: 154542 - DNA, 25 bp, Artificial
  Probe
gatgccagtgttagtgttgaaatga

SEQ ID NO: 154543 - DNA, 25 bp, Artificial
  Probe
attccctcacattgatttgttcttg

SEQ ID NO: 154544 - DNA, 25 bp, Artificial
  Probe
cctattccctcacattgatttgttc

SEQ ID NO: 154545 - DNA, 25 bp, Artificial
  Probe
tcctattccctcacattgatttgtt

SEQ ID NO: 154546 - DNA, 25 bp, Artificial
  Probe
ttcctattccctcacattgatttgt

SEQ ID NO: 154547 - DNA, 25 bp, Artificial
  Probe
gactttgttggatttgaaattctcg

SEQ ID NO: 154548 - DNA, 25 bp, Artificial
  Probe
cagactttgttggatttgaaattct

SEQ ID NO: 154549 - DNA, 25 bp, Artificial
  Probe
agactttgttggatttgaaattctc

SEQ ID NO: 154550 - DNA, 25 bp, Artificial
  Probe
actttgttggatttgaaattctcga

SEQ ID NO: 154551 - DNA, 25 bp, Artificial
  Probe
ctttgttggatttgaaattctcgac

SEQ ID NO: 154552 - DNA, 25 bp, Artificial
  Probe
tggatttgaaattctcgacaagttt

SEQ ID NO: 154553 - DNA, 25 bp, Artificial
  Probe
ttggatttgaaattctcgacaagtt

SEQ ID NO: 154554 - DNA, 25 bp, Artificial
  Probe
gttggatttgaaattctcgacaagt

SEQ ID NO: 154555 - DNA, 25 bp, Artificial
  Probe
ggatttgaaattctcgacaagtttg

SEQ ID NO: 154556 - DNA, 25 bp, Artificial
  Probe
tttgttggatttgaaattctcgaca

SEQ ID NO: 154557 - DNA, 25 bp, Artificial
  Probe
tgttggatttgaaattctcgacaag

SEQ ID NO: 154558 - DNA, 25 bp, Artificial
  Probe
ttgaaattctcgacaagtttgttgg

SEQ ID NO: 154559 - DNA, 25 bp, Artificial
  Probe
tttgaaattctcgacaagtttgttg

SEQ ID NO: 154560 - DNA, 25 bp, Artificial
  Probe
gatttgaaattctcgacaagtttgt

SEQ ID NO: 154561 - DNA, 25 bp, Artificial
  Probe
gaaattctcgacaagtttgttggtg

SEQ ID NO: 154562 - DNA, 25 bp, Artificial
  Probe
tgaaattctcgacaagtttgttggt

SEQ ID NO: 154563 - DNA, 25 bp, Artificial
  Probe
atttgaaattctcgacaagtttgtt

SEQ ID NO: 154564 - DNA, 25 bp, Artificial
  Probe
ctcgacaagtttgttggtggatatg

SEQ ID NO: 154565 - DNA, 25 bp, Artificial
  Probe
tctcgacaagtttgttggtggatat

SEQ ID NO: 154566 - DNA, 25 bp, Artificial
  Probe
ttctcgacaagtttgttggtggata

SEQ ID NO: 154567 - DNA, 25 bp, Artificial
  Probe
aaattctcgacaagtttgttggtgg

SEQ ID NO: 154568 - DNA, 25 bp, Artificial
  Probe
attctcgacaagtttgttggtggat

SEQ ID NO: 154569 - DNA, 25 bp, Artificial
  Probe
aattctcgacaagtttgttggtgga

SEQ ID NO: 154570 - DNA, 25 bp, Artificial
  Probe
ttgttggatttgaaattctcgacaa

SEQ ID NO: 154571 - DNA, 25 bp, Artificial
  Probe
tcgacaagtttgttggtggatatgc

SEQ ID NO: 154572 - DNA, 25 bp, Artificial
  Probe
tacctcactgcttttcctagcggta

SEQ ID NO: 154573 - DNA, 25 bp, Artificial
  Probe
ccaatgtatgagatgaagatgaatg

SEQ ID NO: 154574 - DNA, 25 bp, Artificial
  Probe
atgaagatgaatgaaactggaagga

SEQ ID NO: 154575 - DNA, 25 bp, Artificial
  Probe
gatgaagatgaatgaaactggaagg

SEQ ID NO: 154576 - DNA, 25 bp, Artificial
  Probe
tgagatgaagatgaatgaaactgga

SEQ ID NO: 154577 - DNA, 25 bp, Artificial
  Probe
tgaagatgaatgaaactggaaggaa

SEQ ID NO: 154578 - DNA, 25 bp, Artificial
  Probe
gaagatgaatgaaactggaaggaaa

SEQ ID NO: 154579 - DNA, 25 bp, Artificial
  Probe
tatgtgtgaagatgcgaactaaatc

SEQ ID NO: 154580 - DNA, 25 bp, Artificial
  Probe
agatgaagatgaatgaaactggaag

SEQ ID NO: 154581 - DNA, 25 bp, Artificial
  Probe
gagatgaagatgaatgaaactggaa

SEQ ID NO: 154582 - DNA, 25 bp, Artificial
  Probe
atgagatgaagatgaatgaaactgg

SEQ ID NO: 154583 - DNA, 25 bp, Artificial
  Probe
gcccaatgtatgagatgaagatgaa

SEQ ID NO: 154584 - DNA, 25 bp, Artificial
  Probe
aatatgtgtgaagatgcgaactaaa

SEQ ID NO: 154585 - DNA, 25 bp, Artificial
  Probe
aaatatgtgtgaagatgcgaactaa

SEQ ID NO: 154586 - DNA, 25 bp, Artificial
  Probe
caatgtatgagatgaagatgaatga

SEQ ID NO: 154587 - DNA, 25 bp, Artificial
  Probe
atatgtgtgaagatgcgaactaaat

SEQ ID NO: 154588 - DNA, 25 bp, Artificial
  Probe
cccaatgtatgagatgaagatgaat

SEQ ID NO: 154589 - DNA, 25 bp, Artificial
  Probe
cacacacagagtcatcttgaaggaa

SEQ ID NO: 154590 - DNA, 25 bp, Artificial
  Probe
acttgtatactacttcatctcagca

SEQ ID NO: 154591 - DNA, 25 bp, Artificial
  Probe
agcacttgtatactacttcatctca

SEQ ID NO: 154592 - DNA, 25 bp, Artificial
  Probe
ctgcccaatgtatgagatgaagatg

SEQ ID NO: 154593 - DNA, 25 bp, Artificial
  Probe
cacttgtatactacttcatctcagc

SEQ ID NO: 154594 - DNA, 25 bp, Artificial
  Probe
gcacttgtatactacttcatctcag

SEQ ID NO: 154595 - DNA, 25 bp, Artificial
  Probe
cagagtcatcttgaaggaaatgttt

SEQ ID NO: 154596 - DNA, 25 bp, Artificial
  Probe
acacacacacagagtcatcttgaag

SEQ ID NO: 154597 - DNA, 25 bp, Artificial
  Probe
tatgaaactcacactggagactaag

SEQ ID NO: 154598 - DNA, 25 bp, Artificial
  Probe
ctatgaaactcacactggagactaa

SEQ ID NO: 154599 - DNA, 25 bp, Artificial
  Probe
tctatgaaactcacactggagacta

SEQ ID NO: 154600 - DNA, 25 bp, Artificial
  Probe
acacagagtcatcttgaaggaaatg

SEQ ID NO: 154601 - DNA, 25 bp, Artificial
  Probe
cacacagagtcatcttgaaggaaat

SEQ ID NO: 154602 - DNA, 25 bp, Artificial
  Probe
tgcccaatgtatgagatgaagatga

SEQ ID NO: 154603 - DNA, 25 bp, Artificial
  Probe
actgcccaatgtatgagatgaagat

SEQ ID NO: 154604 - DNA, 25 bp, Artificial
  Probe
acagagtcatcttgaaggaaatgtt

SEQ ID NO: 154605 - DNA, 25 bp, Artificial
  Probe
aattctaatgtcaccaaacacacac

SEQ ID NO: 154606 - DNA, 25 bp, Artificial
  Probe
tatgtctatgaaactcacactggag

SEQ ID NO: 154607 - DNA, 25 bp, Artificial
  Probe
ttatgtctatgaaactcacactgga

SEQ ID NO: 154608 - DNA, 25 bp, Artificial
  Probe
gaaggaaatgtttcatatcaggact

SEQ ID NO: 154609 - DNA, 25 bp, Artificial
  Probe
agagtcatcttgaaggaaatgtttc

SEQ ID NO: 154610 - DNA, 25 bp, Artificial
  Probe
cacacacacacagagtcatcttgaa

SEQ ID NO: 154611 - DNA, 25 bp, Artificial
  Probe
attccagaatgaaagcacttgtata

SEQ ID NO: 154612 - DNA, 25 bp, Artificial
  Probe
cacagagtcatcttgaaggaaatgt

SEQ ID NO: 154613 - DNA, 25 bp, Artificial
  Probe
atgaaactcacactggagactaagt

SEQ ID NO: 154614 - DNA, 25 bp, Artificial
  Probe
aagcacttgtatactacttcatctc

SEQ ID NO: 154615 - DNA, 25 bp, Artificial
  Probe
attctaatgtcaccaaacacacaca

SEQ ID NO: 154616 - DNA, 25 bp, Artificial
  Probe
cttgtatactacttcatctcagcat

SEQ ID NO: 154617 - DNA, 25 bp, Artificial
  Probe
atgtctatgaaactcacactggaga

SEQ ID NO: 154618 - DNA, 25 bp, Artificial
  Probe
cccttccttacctactttggactct

SEQ ID NO: 154619 - DNA, 25 bp, Artificial
  Probe
tgttttccattccacagacatattc

SEQ ID NO: 154620 - DNA, 25 bp, Artificial
  Probe
agattggggaatttacggtcatcag

SEQ ID NO: 154621 - DNA, 25 bp, Artificial
  Probe
cagattggggaatttacggtcatca

SEQ ID NO: 154622 - DNA, 25 bp, Artificial
  Probe
ctgggctctactacctgtactgtca

SEQ ID NO: 154623 - DNA, 25 bp, Artificial
  Probe
gattggggaatttacggtcatcagg

SEQ ID NO: 154624 - DNA, 25 bp, Artificial
  Probe
catgttttccattccacagacatat

SEQ ID NO: 154625 - DNA, 25 bp, Artificial
  Probe
atgttttccattccacagacatatt

SEQ ID NO: 154626 - DNA, 25 bp, Artificial
  Probe
tgggctctactacctgtactgtcag

SEQ ID NO: 154627 - DNA, 25 bp, Artificial
  Probe
ccagattggggaatttacggtcatc

SEQ ID NO: 154628 - DNA, 25 bp, Artificial
  Probe
aagagaccaaaatcaacagctccag

SEQ ID NO: 154629 - DNA, 25 bp, Artificial
  Probe
gaagagaccaaaatcaacagctcca

SEQ ID NO: 154630 - DNA, 25 bp, Artificial
  Probe
cttgatgacatgttttccattccac

SEQ ID NO: 154631 - DNA, 25 bp, Artificial
  Probe
ccccttccttacctactttggactc

SEQ ID NO: 154632 - DNA, 25 bp, Artificial
  Probe
attggggaatttacggtcatcaggg

SEQ ID NO: 154633 - DNA, 25 bp, Artificial
  Probe
ctttgatgaggggaaggcagtctac

SEQ ID NO: 154634 - DNA, 25 bp, Artificial
  Probe
tatgaccgccagattggggaattta

SEQ ID NO: 154635 - DNA, 25 bp, Artificial
  Probe
gggaagagaccaaaatcaacagctc

SEQ ID NO: 154636 - DNA, 25 bp, Artificial
  Probe
ttgatgacatgttttccattccaca

SEQ ID NO: 154637 - DNA, 25 bp, Artificial
  Probe
gatgacatgttttccattccacaga

SEQ ID NO: 154638 - DNA, 25 bp, Artificial
  Probe
ctgggaagagaccaaaatcaacagc

SEQ ID NO: 154639 - DNA, 25 bp, Artificial
  Probe
gctgggaagagaccaaaatcaacag

SEQ ID NO: 154640 - DNA, 25 bp, Artificial
  Probe
atgacatgttttccattccacagac

SEQ ID NO: 154641 - DNA, 25 bp, Artificial
  Probe
tgatgacatgttttccattccacag

SEQ ID NO: 154642 - DNA, 25 bp, Artificial
  Probe
gcttgatgacatgttttccattcca

SEQ ID NO: 154643 - DNA, 25 bp, Artificial
  Probe
ggaagagaccaaaatcaacagctcc

SEQ ID NO: 154644 - DNA, 25 bp, Artificial
  Probe
actttgatgaggggaaggcagtcta

SEQ ID NO: 154645 - DNA, 25 bp, Artificial
  Probe
acatgttttccattccacagacata

SEQ ID NO: 154646 - DNA, 25 bp, Artificial
  Probe
tgacatgttttccattccacagaca

SEQ ID NO: 154647 - DNA, 25 bp, Artificial
  Probe
tgggaagagaccaaaatcaacagct

SEQ ID NO: 154648 - DNA, 25 bp, Artificial
  Probe
ctatgaccgccagattggggaattt

SEQ ID NO: 154649 - DNA, 25 bp, Artificial
  Probe
gacatgttttccattccacagacat

SEQ ID NO: 154650 - DNA, 25 bp, Artificial
  Probe
cctgctctcccaggttctttaaact

SEQ ID NO: 154651 - DNA, 25 bp, Artificial
  Probe
tcctgctctcccaggttctttaaac

SEQ ID NO: 154652 - DNA, 25 bp, Artificial
  Probe
gtcctgctctcccaggttctttaaa

SEQ ID NO: 154653 - DNA, 25 bp, Artificial
  Probe
ttctatgtgaccactaatcctcagg

SEQ ID NO: 154654 - DNA, 25 bp, Artificial
  Probe
gaacttactggaactcatcaggaag

SEQ ID NO: 154655 - DNA, 25 bp, Artificial
  Probe
tgaacttactggaactcatcaggaa

SEQ ID NO: 154656 - DNA, 25 bp, Artificial
  Probe
aacttactggaactcatcaggaagc

SEQ ID NO: 154657 - DNA, 25 bp, Artificial
  Probe
tttctatgtgaccactaatcctcag

SEQ ID NO: 154658 - DNA, 25 bp, Artificial
  Probe
gtttctatgtgaccactaatcctca

SEQ ID NO: 154659 - DNA, 25 bp, Artificial
  Probe
ctatgtgaccactaatcctcaggag

SEQ ID NO: 154660 - DNA, 25 bp, Artificial
  Probe
atgaacttactggaactcatcagga

SEQ ID NO: 154661 - DNA, 25 bp, Artificial
  Probe
tctatgtgaccactaatcctcagga

SEQ ID NO: 154662 - DNA, 25 bp, Artificial
  Probe
ggtttctatgtgaccactaatcctc

SEQ ID NO: 154663 - DNA, 25 bp, Artificial
  Probe
gtccaagcaataggaatggtgtcat

SEQ ID NO: 154664 - DNA, 25 bp, Artificial
  Probe
gatctctctgaggagctgactagac

SEQ ID NO: 154665 - DNA, 25 bp, Artificial
  Probe
ctgatctctctgaggagctgactag

SEQ ID NO: 154666 - DNA, 25 bp, Artificial
  Probe
cttactggaactcatcaggaagctg

SEQ ID NO: 154667 - DNA, 25 bp, Artificial
  Probe
caataggaatggtgtcatgagaagg

SEQ ID NO: 154668 - DNA, 25 bp, Artificial
  Probe
tccaagcaataggaatggtgtcatg

SEQ ID NO: 154669 - DNA, 25 bp, Artificial
  Probe
tgatctctctgaggagctgactaga

SEQ ID NO: 154670 - DNA, 25 bp, Artificial
  Probe
acttactggaactcatcaggaagct

SEQ ID NO: 154671 - DNA, 25 bp, Artificial
  Probe
gcaataggaatggtgtcatgagaag

SEQ ID NO: 154672 - DNA, 25 bp, Artificial
  Probe
caagcaataggaatggtgtcatgag

SEQ ID NO: 154673 - DNA, 25 bp, Artificial
  Probe
gaaggtccaagcaataggaatggtg

SEQ ID NO: 154674 - DNA, 25 bp, Artificial
  Probe
tatgtgaccactaatcctcaggagc

SEQ ID NO: 154675 - DNA, 25 bp, Artificial
  Probe
agcaataggaatggtgtcatgagaa

SEQ ID NO: 154676 - DNA, 25 bp, Artificial
  Probe
aagcaataggaatggtgtcatgaga

SEQ ID NO: 154677 - DNA, 25 bp, Artificial
  Probe
tgcagatgaacttactggaactcat

SEQ ID NO: 154678 - DNA, 25 bp, Artificial
  Probe
aataggaatggtgtcatgagaaggc

SEQ ID NO: 154679 - DNA, 25 bp, Artificial
  Probe
aaggtccaagcaataggaatggtgt

SEQ ID NO: 154680 - DNA, 25 bp, Artificial
  Probe
atctctctgaggagctgactagacc

SEQ ID NO: 154681 - DNA, 25 bp, Artificial
  Probe
cctgatctctctgaggagctgacta

SEQ ID NO: 154682 - DNA, 25 bp, Artificial
  Probe
aggtccaagcaataggaatggtgtc

SEQ ID NO: 154683 - DNA, 25 bp, Artificial
  Probe
ggaaggtccaagcaataggaatggt

SEQ ID NO: 154684 - DNA, 25 bp, Artificial
  Probe
ggtccaagcaataggaatggtgtca

SEQ ID NO: 154685 - DNA, 25 bp, Artificial
  Probe
ttactggaactcatcaggaagctgc

SEQ ID NO: 154686 - DNA, 25 bp, Artificial
  Probe
ccaagcaataggaatggtgtcatga

SEQ ID NO: 154687 - DNA, 25 bp, Artificial
  Probe
atgtgaccactaatcctcaggagct

SEQ ID NO: 154688 - DNA, 25 bp, Artificial
  Probe
ataggaatggtgtcatgagaaggcc

SEQ ID NO: 154689 - DNA, 25 bp, Artificial
  Probe
aactcatcaggaagctgcaacagag

SEQ ID NO: 154690 - DNA, 25 bp, Artificial
  Probe
gaactcatcaggaagctgcaacaga

SEQ ID NO: 154691 - DNA, 25 bp, Artificial
  Probe
ctggtttctatgtgaccactaatcc

SEQ ID NO: 154692 - DNA, 25 bp, Artificial
  Probe
tggtttctatgtgaccactaatcct

SEQ ID NO: 154693 - DNA, 25 bp, Artificial
  Probe
tagctggtttctatgtgaccactaa

SEQ ID NO: 154694 - DNA, 25 bp, Artificial
  Probe
gctggtttctatgtgaccactaatc

SEQ ID NO: 154695 - DNA, 25 bp, Artificial
  Probe
agctggtttctatgtgaccactaat

SEQ ID NO: 154696 - DNA, 25 bp, Artificial
  Probe
gtagctggtttctatgtgaccacta

SEQ ID NO: 154697 - DNA, 25 bp, Artificial
  Probe
gggaaggtccaagcaataggaatgg

SEQ ID NO: 154698 - DNA, 25 bp, Artificial
  Probe
cagatgatagaagacaaggaaggag

SEQ ID NO: 154699 - DNA, 25 bp, Artificial
  Probe
atgatagaagacaaggaaggaggaa

SEQ ID NO: 154700 - DNA, 25 bp, Artificial
  Probe
tagccagatgatagaagacaaggaa

SEQ ID NO: 154701 - DNA, 25 bp, Artificial
  Probe
gatgatagaagacaaggaaggagga

SEQ ID NO: 154702 - DNA, 25 bp, Artificial
  Probe
agatgatagaagacaaggaaggagg

SEQ ID NO: 154703 - DNA, 25 bp, Artificial
  Probe
tgatagaagacaaggaaggaggaag

SEQ ID NO: 154704 - DNA, 25 bp, Artificial
  Probe
ccagatgatagaagacaaggaagga

SEQ ID NO: 154705 - DNA, 25 bp, Artificial
  Probe
ctagccagatgatagaagacaagga

SEQ ID NO: 154706 - DNA, 25 bp, Artificial
  Probe
agccagatgatagaagacaaggaag

SEQ ID NO: 154707 - DNA, 25 bp, Artificial
  Probe
cttacaggtgagattccttacaagt

SEQ ID NO: 154708 - DNA, 25 bp, Artificial
  Probe
gactcttacaggtgagattccttac

SEQ ID NO: 154709 - DNA, 25 bp, Artificial
  Probe
ttacaggtgagattccttacaagtg

SEQ ID NO: 154710 - DNA, 25 bp, Artificial
  Probe
tcttacaggtgagattccttacaag

SEQ ID NO: 154711 - DNA, 25 bp, Artificial
  Probe
ctcttacaggtgagattccttacaa

SEQ ID NO: 154712 - DNA, 25 bp, Artificial
  Probe
actcttacaggtgagattccttaca

SEQ ID NO: 154713 - DNA, 25 bp, Artificial
  Probe
gatagaagacaaggaaggaggaagc

SEQ ID NO: 154714 - DNA, 25 bp, Artificial
  Probe
gccagatgatagaagacaaggaagg

SEQ ID NO: 154715 - DNA, 25 bp, Artificial
  Probe
ggactcttacaggtgagattcctta

SEQ ID NO: 154716 - DNA, 25 bp, Artificial
  Probe
ccactgtcatgcactcaactatatt

SEQ ID NO: 154717 - DNA, 25 bp, Artificial
  Probe
catctatttcttatgccttgcccta

SEQ ID NO: 154718 - DNA, 25 bp, Artificial
  Probe
tacatctatttcttatgccttgccc

SEQ ID NO: 154719 - DNA, 25 bp, Artificial
  Probe
atctatttcttatgccttgccctag

SEQ ID NO: 154720 - DNA, 25 bp, Artificial
  Probe
cctagccagatgatagaagacaagg

SEQ ID NO: 154721 - DNA, 25 bp, Artificial
  Probe
atacatctatttcttatgccttgcc

SEQ ID NO: 154722 - DNA, 25 bp, Artificial
  Probe
tacaggtgagattccttacaagtgc

SEQ ID NO: 154723 - DNA, 25 bp, Artificial
  Probe
cacaggactcttacaggtgagattc

SEQ ID NO: 154724 - DNA, 25 bp, Artificial
  Probe
atagaagacaaggaaggaggaagcc

SEQ ID NO: 154725 - DNA, 25 bp, Artificial
  Probe
acatctatttcttatgccttgccct

SEQ ID NO: 154726 - DNA, 25 bp, Artificial
  Probe
ccctagccagatgatagaagacaag

SEQ ID NO: 154727 - DNA, 25 bp, Artificial
  Probe
caggtgagattccttacaagtgctc

SEQ ID NO: 154728 - DNA, 25 bp, Artificial
  Probe
tctatttcttatgccttgccctagc

SEQ ID NO: 154729 - DNA, 25 bp, Artificial
  Probe
cactgtcatgcactcaactatattt

SEQ ID NO: 154730 - DNA, 25 bp, Artificial
  Probe
agttctcacttacaaacctctgtgt

SEQ ID NO: 154731 - DNA, 25 bp, Artificial
  Probe
acaggactcttacaggtgagattcc

SEQ ID NO: 154732 - DNA, 25 bp, Artificial
  Probe
ccacaggactcttacaggtgagatt

SEQ ID NO: 154733 - DNA, 25 bp, Artificial
  Probe
gtctgatcatcttgctctccatatg

SEQ ID NO: 154734 - DNA, 25 bp, Artificial
  Probe
gttctcacttacaaacctctgtgta

SEQ ID NO: 154735 - DNA, 25 bp, Artificial
  Probe
ttctcacttacaaacctctgtgtac

SEQ ID NO: 154736 - DNA, 25 bp, Artificial
  Probe
acaggtgagattccttacaagtgct

SEQ ID NO: 154737 - DNA, 25 bp, Artificial
  Probe
ggtctgatcatcttgctctccatat

SEQ ID NO: 154738 - DNA, 25 bp, Artificial
  Probe
agtaaacaacaacaagagcaaaaca

SEQ ID NO: 154739 - DNA, 25 bp, Artificial
  Probe
acaaaagtaaacaacaacaagagca

SEQ ID NO: 154740 - DNA, 25 bp, Artificial
  Probe
tatacatctatttcttatgccttgc

SEQ ID NO: 154741 - DNA, 25 bp, Artificial
  Probe
taaacaacaacaagagcaaaacaac

SEQ ID NO: 154742 - DNA, 25 bp, Artificial
  Probe
gtaaacaacaacaagagcaaaacaa

SEQ ID NO: 154743 - DNA, 25 bp, Artificial
  Probe
tgaaggaataataggtatctgtgct

SEQ ID NO: 154744 - DNA, 25 bp, Artificial
  Probe
agtatctgtctgtcataacctggta

SEQ ID NO: 154745 - DNA, 25 bp, Artificial
  Probe
cctacctgcctagaactcatataac

SEQ ID NO: 154746 - DNA, 25 bp, Artificial
  Probe
tcctacctgcctagaactcatataa

SEQ ID NO: 154747 - DNA, 25 bp, Artificial
  Probe
atcctacctgcctagaactcatata

SEQ ID NO: 154748 - DNA, 25 bp, Artificial
  Probe
gtatctgtctgtcataacctggtat

SEQ ID NO: 154749 - DNA, 25 bp, Artificial
  Probe
cctgcctagaactcatataactgtg

SEQ ID NO: 154750 - DNA, 25 bp, Artificial
  Probe
cacagacattgaaggaataataggt

SEQ ID NO: 154751 - DNA, 25 bp, Artificial
  Probe
acacagacattgaaggaataatagg

SEQ ID NO: 154752 - DNA, 25 bp, Artificial
  Probe
acctgcctagaactcatataactgt

SEQ ID NO: 154753 - DNA, 25 bp, Artificial
  Probe
tacctgcctagaactcatataactg

SEQ ID NO: 154754 - DNA, 25 bp, Artificial
  Probe
catcctacctgcctagaactcatat

SEQ ID NO: 154755 - DNA, 25 bp, Artificial
  Probe
ttgaaggaataataggtatctgtgc

SEQ ID NO: 154756 - DNA, 25 bp, Artificial
  Probe
ctacctgcctagaactcatataact

SEQ ID NO: 154757 - DNA, 25 bp, Artificial
  Probe
tatctgtctgtcataacctggtatt

SEQ ID NO: 154758 - DNA, 25 bp, Artificial
  Probe
gcctagaactcatataactgtgaca

SEQ ID NO: 154759 - DNA, 25 bp, Artificial
  Probe
tgcctagaactcatataactgtgac

SEQ ID NO: 154760 - DNA, 25 bp, Artificial
  Probe
ctgcctagaactcatataactgtga

SEQ ID NO: 154761 - DNA, 25 bp, Artificial
  Probe
gattgttcagtaagcaggcgaataa

SEQ ID NO: 154762 - DNA, 25 bp, Artificial
  Probe
gaaggaataataggtatctgtgctt

SEQ ID NO: 154763 - DNA, 25 bp, Artificial
  Probe
ctctctggtaggattgttcagtaag

SEQ ID NO: 154764 - DNA, 25 bp, Artificial
  Probe
tcatcctacctgcctagaactcata

SEQ ID NO: 154765 - DNA, 25 bp, Artificial
  Probe
atcatcctacctgcctagaactcat

SEQ ID NO: 154766 - DNA, 25 bp, Artificial
  Probe
cagtatctgtctgtcataacctggt

SEQ ID NO: 154767 - DNA, 25 bp, Artificial
  Probe
tctctggtaggattgttcagtaagc

SEQ ID NO: 154768 - DNA, 25 bp, Artificial
  Probe
gctctctggtaggattgttcagtaa

SEQ ID NO: 154769 - DNA, 25 bp, Artificial
  Probe
agaactcatataactgtgacagagc

SEQ ID NO: 154770 - DNA, 25 bp, Artificial
  Probe
ttactctttctccatcatcctacct

SEQ ID NO: 154771 - DNA, 25 bp, Artificial
  Probe
gttactctttctccatcatcctacc

SEQ ID NO: 154772 - DNA, 25 bp, Artificial
  Probe
ataataggtatctgtgctttgtgct

SEQ ID NO: 154773 - DNA, 25 bp, Artificial
  Probe
acagacattgaaggaataataggta

SEQ ID NO: 154774 - DNA, 25 bp, Artificial
  Probe
taataggtatctgtgctttgtgctc

SEQ ID NO: 154775 - DNA, 25 bp, Artificial
  Probe
aataataggtatctgtgctttgtgc

SEQ ID NO: 154776 - DNA, 25 bp, Artificial
  Probe
tctggtaggattgttcagtaagcag

SEQ ID NO: 154777 - DNA, 25 bp, Artificial
  Probe
ctctggtaggattgttcagtaagca

SEQ ID NO: 154778 - DNA, 25 bp, Artificial
  Probe
tactctttctccatcatcctacctg

SEQ ID NO: 154779 - DNA, 25 bp, Artificial
  Probe
aacacagacattgaaggaataatag

SEQ ID NO: 154780 - DNA, 25 bp, Artificial
  Probe
agttactctttctccatcatcctac

SEQ ID NO: 154781 - DNA, 25 bp, Artificial
  Probe
caagttactctttctccatcatcct

SEQ ID NO: 154782 - DNA, 25 bp, Artificial
  Probe
tccaagttactctttctccatcatc

SEQ ID NO: 154783 - DNA, 25 bp, Artificial
  Probe
ttcattccaagttactctttctcca

SEQ ID NO: 154784 - DNA, 25 bp, Artificial
  Probe
ttccaagttactctttctccatcat

SEQ ID NO: 154785 - DNA, 25 bp, Artificial
  Probe
attccaagttactctttctccatca

SEQ ID NO: 154786 - DNA, 25 bp, Artificial
  Probe
tcattccaagttactctttctccat

SEQ ID NO: 154787 - DNA, 25 bp, Artificial
  Probe
tctgtctgtcataacctggtatttc

SEQ ID NO: 154788 - DNA, 25 bp, Artificial
  Probe
tacaaggtggaacatctcatcaatg

SEQ ID NO: 154789 - DNA, 25 bp, Artificial
  Probe
aagactcatacaagctatcacactg

SEQ ID NO: 154790 - DNA, 25 bp, Artificial
  Probe
catctcatcaatgccatgtccatag

SEQ ID NO: 154791 - DNA, 25 bp, Artificial
  Probe
atctcatcaatgccatgtccataga

SEQ ID NO: 154792 - DNA, 25 bp, Artificial
  Probe
tcatcaatgccatgtccatagagag

SEQ ID NO: 154793 - DNA, 25 bp, Artificial
  Probe
agactcatacaagctatcacactgg

SEQ ID NO: 154794 - DNA, 25 bp, Artificial
  Probe
gactcatacaagctatcacactggt

SEQ ID NO: 154795 - DNA, 25 bp, Artificial
  Probe
ctcatcaatgccatgtccatagaga

SEQ ID NO: 154796 - DNA, 25 bp, Artificial
  Probe
tctcatcaatgccatgtccatagag

SEQ ID NO: 154797 - DNA, 25 bp, Artificial
  Probe
ttcctggaagaaagactcatacaag

SEQ ID NO: 154798 - DNA, 25 bp, Artificial
  Probe
gttcctggaagaaagactcatacaa

SEQ ID NO: 154799 - DNA, 25 bp, Artificial
  Probe
gaagatgggatgagtgaagggtatc

SEQ ID NO: 154800 - DNA, 25 bp, Artificial
  Probe
ctgttcctggaagaaagactcatac

SEQ ID NO: 154801 - DNA, 25 bp, Artificial
  Probe
acaaggtggaacatctcatcaatgc

SEQ ID NO: 154802 - DNA, 25 bp, Artificial
  Probe
tctgttcctggaagaaagactcata

SEQ ID NO: 154803 - DNA, 25 bp, Artificial
  Probe
ctggaagaaagactcatacaagcta

SEQ ID NO: 154804 - DNA, 25 bp, Artificial
  Probe
aaagactcatacaagctatcacact

SEQ ID NO: 154805 - DNA, 25 bp, Artificial
  Probe
catagagagctgaaaggaagacatt

SEQ ID NO: 154806 - DNA, 25 bp, Artificial
  Probe
gaaagactcatacaagctatcacac

SEQ ID NO: 154807 - DNA, 25 bp, Artificial
  Probe
agaaagactcatacaagctatcaca

SEQ ID NO: 154808 - DNA, 25 bp, Artificial
  Probe
tggaagaaagactcatacaagctat

SEQ ID NO: 154809 - DNA, 25 bp, Artificial
  Probe
tcctggaagaaagactcatacaagc

SEQ ID NO: 154810 - DNA, 25 bp, Artificial
  Probe
atacaagctatcacactggtgtctc

SEQ ID NO: 154811 - DNA, 25 bp, Artificial
  Probe
atagagagctgaaaggaagacattc

SEQ ID NO: 154812 - DNA, 25 bp, Artificial
  Probe
ggaagaaagactcatacaagctatc

SEQ ID NO: 154813 - DNA, 25 bp, Artificial
  Probe
aaatctcaccgaggaaagaaggaaa

SEQ ID NO: 154814 - DNA, 25 bp, Artificial
  Probe
catacaagctatcacactggtgtct

SEQ ID NO: 154815 - DNA, 25 bp, Artificial
  Probe
tcatacaagctatcacactggtgtc

SEQ ID NO: 154816 - DNA, 25 bp, Artificial
  Probe
ctcatacaagctatcacactggtgt

SEQ ID NO: 154817 - DNA, 25 bp, Artificial
  Probe
actcatacaagctatcacactggtg

SEQ ID NO: 154818 - DNA, 25 bp, Artificial
  Probe
tagagagctgaaaggaagacattct

SEQ ID NO: 154819 - DNA, 25 bp, Artificial
  Probe
aagaaagactcatacaagctatcac

SEQ ID NO: 154820 - DNA, 25 bp, Artificial
  Probe
gaagaaagactcatacaagctatca

SEQ ID NO: 154821 - DNA, 25 bp, Artificial
  Probe
tgttcctggaagaaagactcataca

SEQ ID NO: 154822 - DNA, 25 bp, Artificial
  Probe
catcaatgccatgtccatagagagc

SEQ ID NO: 154823 - DNA, 25 bp, Artificial
  Probe
aatctcaccgaggaaagaaggaaag

SEQ ID NO: 154824 - DNA, 25 bp, Artificial
  Probe
ccatagagagctgaaaggaagacat

SEQ ID NO: 154825 - DNA, 25 bp, Artificial
  Probe
aagatgggatgagtgaagggtatca

SEQ ID NO: 154826 - DNA, 25 bp, Artificial
  Probe
caaggtggaacatctcatcaatgcc

SEQ ID NO: 154827 - DNA, 25 bp, Artificial
  Probe
acatctcatcaatgccatgtccata

SEQ ID NO: 154828 - DNA, 25 bp, Artificial
  Probe
cctggaagaaagactcatacaagct

SEQ ID NO: 154829 - DNA, 25 bp, Artificial
  Probe
ggaagatgggatgagtgaagggtat

SEQ ID NO: 154830 - DNA, 25 bp, Artificial
  Probe
tacaagctatcacactggtgtctca

SEQ ID NO: 154831 - DNA, 25 bp, Artificial
  Probe
agagagctgaaaggaagacattctg

SEQ ID NO: 154832 - DNA, 25 bp, Artificial
  Probe
atcaatgccatgtccatagagagct

SEQ ID NO: 154833 - DNA, 25 bp, Artificial
  Probe
agtcttgataatcctgacattgcta

SEQ ID NO: 154834 - DNA, 25 bp, Artificial
  Probe
gagtcttgataatcctgacattgct

SEQ ID NO: 154835 - DNA, 25 bp, Artificial
  Probe
agagtcttgataatcctgacattgc

SEQ ID NO: 154836 - DNA, 25 bp, Artificial
  Probe
gtcttgataatcctgacattgctaa

SEQ ID NO: 154837 - DNA, 25 bp, Artificial
  Probe
tatgttgacaataatgtgtaatgcg

SEQ ID NO: 154838 - DNA, 25 bp, Artificial
  Probe
aagagtcttgataatcctgacattg

SEQ ID NO: 154839 - DNA, 25 bp, Artificial
  Probe
gattcattcatatcttcctgcactc

SEQ ID NO: 154840 - DNA, 25 bp, Artificial
  Probe
attcattcatatcttcctgcactcc

SEQ ID NO: 154841 - DNA, 25 bp, Artificial
  Probe
gggtcctattgttctaatttgttga

SEQ ID NO: 154842 - DNA, 25 bp, Artificial
  Probe
ttcattcatatcttcctgcactcct

SEQ ID NO: 154843 - DNA, 25 bp, Artificial
  Probe
ggcagtgggattcattcatatcttc

SEQ ID NO: 154844 - DNA, 25 bp, Artificial
  Probe
tcttgataatcctgacattgctaaa

SEQ ID NO: 154845 - DNA, 25 bp, Artificial
  Probe
ctattgttctaatttgttgaagggc

SEQ ID NO: 154846 - DNA, 25 bp, Artificial
  Probe
catggagtgattatgttgacaataa

SEQ ID NO: 154847 - DNA, 25 bp, Artificial
  Probe
tcattcatatcttcctgcactcctg

SEQ ID NO: 154848 - DNA, 25 bp, Artificial
  Probe
ggattcattcatatcttcctgcact

SEQ ID NO: 154849 - DNA, 25 bp, Artificial
  Probe
cctctacatggagtgattatgttga

SEQ ID NO: 154850 - DNA, 25 bp, Artificial
  Probe
tcctctacatggagtgattatgttg

SEQ ID NO: 154851 - DNA, 25 bp, Artificial
  Probe
tctacatggagtgattatgttgaca

SEQ ID NO: 154852 - DNA, 25 bp, Artificial
  Probe
agtgggattcattcatatcttcctg

SEQ ID NO: 154853 - DNA, 25 bp, Artificial
  Probe
cagtgggattcattcatatcttcct

SEQ ID NO: 154854 - DNA, 25 bp, Artificial
  Probe
ttcctctacatggagtgattatgtt

SEQ ID NO: 154855 - DNA, 25 bp, Artificial
  Probe
ctctacatggagtgattatgttgac

SEQ ID NO: 154856 - DNA, 25 bp, Artificial
  Probe
gggtggtttatcttcgacatcttaa

SEQ ID NO: 154857 - DNA, 25 bp, Artificial
  Probe
ggagtgattatgttgacaataatgt

SEQ ID NO: 154858 - DNA, 25 bp, Artificial
  Probe
tggagtgattatgttgacaataatg

SEQ ID NO: 154859 - DNA, 25 bp, Artificial
  Probe
ctacatggagtgattatgttgacaa

SEQ ID NO: 154860 - DNA, 25 bp, Artificial
  Probe
cttgataatcctgacattgctaaat

SEQ ID NO: 154861 - DNA, 25 bp, Artificial
  Probe
gaactcatttgcttctctccttcct

SEQ ID NO: 154862 - DNA, 25 bp, Artificial
  Probe
aactcatttgcttctctccttcctg

SEQ ID NO: 154863 - DNA, 25 bp, Artificial
  Probe
ataatcctgacattgctaaataggg

SEQ ID NO: 154864 - DNA, 25 bp, Artificial
  Probe
ggtcctattgttctaatttgttgaa

SEQ ID NO: 154865 - DNA, 25 bp, Artificial
  Probe
agggtggtttatcttcgacatctta

SEQ ID NO: 154866 - DNA, 25 bp, Artificial
  Probe
ttatgttgacaataatgtgtaatgc

SEQ ID NO: 154867 - DNA, 25 bp, Artificial
  Probe
gtgggattcattcatatcttcctgc

SEQ ID NO: 154868 - DNA, 25 bp, Artificial
  Probe
gcagtgggattcattcatatcttcc

SEQ ID NO: 154869 - DNA, 25 bp, Artificial
  Probe
cctttcctctacatggagtgattat

SEQ ID NO: 154870 - DNA, 25 bp, Artificial
  Probe
acactcaaagaagggtggtttatct

SEQ ID NO: 154871 - DNA, 25 bp, Artificial
  Probe
cacactcaaagaagggtggtttatc

SEQ ID NO: 154872 - DNA, 25 bp, Artificial
  Probe
acatggagtgattatgttgacaata

SEQ ID NO: 154873 - DNA, 25 bp, Artificial
  Probe
tacatggagtgattatgttgacaat

SEQ ID NO: 154874 - DNA, 25 bp, Artificial
  Probe
ggtggtttatcttcgacatcttaaa

SEQ ID NO: 154875 - DNA, 25 bp, Artificial
  Probe
ttgtctccattcctttcctcccata

SEQ ID NO: 154876 - DNA, 25 bp, Artificial
  Probe
cctattgttctaatttgttgaaggg

SEQ ID NO: 154877 - DNA, 25 bp, Artificial
  Probe
cggcagtgggattcattcatatctt

SEQ ID NO: 154878 - DNA, 25 bp, Artificial
  Probe
ccttgattgaataccttacagccta

SEQ ID NO: 154879 - DNA, 25 bp, Artificial
  Probe
acctccttgattgaataccttacag

SEQ ID NO: 154880 - DNA, 25 bp, Artificial
  Probe
tacctccttgattgaataccttaca

SEQ ID NO: 154881 - DNA, 25 bp, Artificial
  Probe
ctccttgattgaataccttacagcc

SEQ ID NO: 154882 - DNA, 25 bp, Artificial
  Probe
cctccttgattgaataccttacagc

SEQ ID NO: 154883 - DNA, 25 bp, Artificial
  Probe
tgattgaataccttacagcctagac

SEQ ID NO: 154884 - DNA, 25 bp, Artificial
  Probe
gattgaataccttacagcctagacc

SEQ ID NO: 154885 - DNA, 25 bp, Artificial
  Probe
tccttgattgaataccttacagcct

SEQ ID NO: 154886 - DNA, 25 bp, Artificial
  Probe
attgaataccttacagcctagacct

SEQ ID NO: 154887 - DNA, 25 bp, Artificial
  Probe
ttgattgaataccttacagcctaga

SEQ ID NO: 154888 - DNA, 25 bp, Artificial
  Probe
ccttatacctccttgattgaatacc

SEQ ID NO: 154889 - DNA, 25 bp, Artificial
  Probe
cttgattgaataccttacagcctag

SEQ ID NO: 154890 - DNA, 25 bp, Artificial
  Probe
ttgaataccttacagcctagacctc

SEQ ID NO: 154891 - DNA, 25 bp, Artificial
  Probe
tagtaggacctatgtatctcatcgc

SEQ ID NO: 154892 - DNA, 25 bp, Artificial
  Probe
ataccttacagcctagacctcagta

SEQ ID NO: 154893 - DNA, 25 bp, Artificial
  Probe
gaataccttacagcctagacctcag

SEQ ID NO: 154894 - DNA, 25 bp, Artificial
  Probe
atacctccttgattgaataccttac

SEQ ID NO: 154895 - DNA, 25 bp, Artificial
  Probe
gacctatgtatctcatcgctgtgat

SEQ ID NO: 154896 - DNA, 25 bp, Artificial
  Probe
cttatacctccttgattgaatacct

SEQ ID NO: 154897 - DNA, 25 bp, Artificial
  Probe
aataccttacagcctagacctcagt

SEQ ID NO: 154898 - DNA, 25 bp, Artificial
  Probe
gtaggacctatgtatctcatcgctg

SEQ ID NO: 154899 - DNA, 25 bp, Artificial
  Probe
agtaggacctatgtatctcatcgct

SEQ ID NO: 154900 - DNA, 25 bp, Artificial
  Probe
taggacctatgtatctcatcgctgt

SEQ ID NO: 154901 - DNA, 25 bp, Artificial
  Probe
aatatgttggtacgttatgtcctgg

SEQ ID NO: 154902 - DNA, 25 bp, Artificial
  Probe
taccttacagcctagacctcagtac

SEQ ID NO: 154903 - DNA, 25 bp, Artificial
  Probe
atagtaggacctatgtatctcatcg

SEQ ID NO: 154904 - DNA, 25 bp, Artificial
  Probe
tgaataccttacagcctagacctca

SEQ ID NO: 154905 - DNA, 25 bp, Artificial
  Probe
ttatacctccttgattgaatacctt

SEQ ID NO: 154906 - DNA, 25 bp, Artificial
  Probe
ctagacctcagagctgttcttagtt

SEQ ID NO: 154907 - DNA, 25 bp, Artificial
  Probe
gttcccttatacctccttgattgaa

SEQ ID NO: 154908 - DNA, 25 bp, Artificial
  Probe
ttcccttatacctccttgattgaat

SEQ ID NO: 154909 - DNA, 25 bp, Artificial
  Probe
atatgttggtacgttatgtcctggt

SEQ ID NO: 154910 - DNA, 25 bp, Artificial
  Probe
taactcgttcccttatacctccttg

SEQ ID NO: 154911 - DNA, 25 bp, Artificial
  Probe
gtaactcgttcccttatacctcctt

SEQ ID NO: 154912 - DNA, 25 bp, Artificial
  Probe
cccttatacctccttgattgaatac

SEQ ID NO: 154913 - DNA, 25 bp, Artificial
  Probe
tcccttatacctccttgattgaata

SEQ ID NO: 154914 - DNA, 25 bp, Artificial
  Probe
ctcgttcccttatacctccttgatt

SEQ ID NO: 154915 - DNA, 25 bp, Artificial
  Probe
tatgttggtacgttatgtcctggtt

SEQ ID NO: 154916 - DNA, 25 bp, Artificial
  Probe
ctatgtatctcatcgctgtgatgtg

SEQ ID NO: 154917 - DNA, 25 bp, Artificial
  Probe
cgttcccttatacctccttgattga

SEQ ID NO: 154918 - DNA, 25 bp, Artificial
  Probe
tcgttcccttatacctccttgattg

SEQ ID NO: 154919 - DNA, 25 bp, Artificial
  Probe
tttcagtaagactttcaggcacttc

SEQ ID NO: 154920 - DNA, 25 bp, Artificial
  Probe
ccttacagcctagacctcagtacaa

SEQ ID NO: 154921 - DNA, 25 bp, Artificial
  Probe
tatgtatctcatcgctgtgatgtgt

SEQ ID NO: 154922 - DNA, 25 bp, Artificial
  Probe
cttacagcctagacctcagtacaaa

SEQ ID NO: 154923 - DNA, 25 bp, Artificial
  Probe
agtgacttgtaagatggtggatgtt

SEQ ID NO: 154924 - DNA, 25 bp, Artificial
  Probe
aagtgacttgtaagatggtggatgt

SEQ ID NO: 154925 - DNA, 25 bp, Artificial
  Probe
cgactatactgagactgcactctag

SEQ ID NO: 154926 - DNA, 25 bp, Artificial
  Probe
gctggactttgacctacttgtatta

SEQ ID NO: 154927 - DNA, 25 bp, Artificial
  Probe
taacaccctgaaactgaatctactt

SEQ ID NO: 154928 - DNA, 25 bp, Artificial
  Probe
ggactttgacctacttgtattatgc

SEQ ID NO: 154929 - DNA, 25 bp, Artificial
  Probe
tgttcttcctttaatgggttgtttc

SEQ ID NO: 154930 - DNA, 25 bp, Artificial
  Probe
gtgttcttcctttaatgggttgttt

SEQ ID NO: 154931 - DNA, 25 bp, Artificial
  Probe
ataacaccctgaaactgaatctact

SEQ ID NO: 154932 - DNA, 25 bp, Artificial
  Probe
gttcttcctttaatgggttgtttcc

SEQ ID NO: 154933 - DNA, 25 bp, Artificial
  Probe
aacaccctgaaactgaatctacttg

SEQ ID NO: 154934 - DNA, 25 bp, Artificial
  Probe
tgtgttcttcctttaatgggttgtt

SEQ ID NO: 154935 - DNA, 25 bp, Artificial
  Probe
gtgacttgtaagatggtggatgttt

SEQ ID NO: 154936 - DNA, 25 bp, Artificial
  Probe
ctgtgttcttcctttaatgggttgt

SEQ ID NO: 154937 - DNA, 25 bp, Artificial
  Probe
agtataacaccctgaaactgaatct

SEQ ID NO: 154938 - DNA, 25 bp, Artificial
  Probe
tggactttgacctacttgtattatg

SEQ ID NO: 154939 - DNA, 25 bp, Artificial
  Probe
gactatactgagactgcactctagg

SEQ ID NO: 154940 - DNA, 25 bp, Artificial
  Probe
agatggtaactgtaaagacactgtt

SEQ ID NO: 154941 - DNA, 25 bp, Artificial
  Probe
gagatggtaactgtaaagacactgt

SEQ ID NO: 154942 - DNA, 25 bp, Artificial
  Probe
ggtcatagtcataccttctgatgaa

SEQ ID NO: 154943 - DNA, 25 bp, Artificial
  Probe
tgctggactttgacctacttgtatt

SEQ ID NO: 154944 - DNA, 25 bp, Artificial
  Probe
tataacaccctgaaactgaatctac

SEQ ID NO: 154945 - DNA, 25 bp, Artificial
  Probe
gtataacaccctgaaactgaatcta

SEQ ID NO: 154946 - DNA, 25 bp, Artificial
  Probe
actgtaaagacactgttatctcctt

SEQ ID NO: 154947 - DNA, 25 bp, Artificial
  Probe
aactgtaaagacactgttatctcct

SEQ ID NO: 154948 - DNA, 25 bp, Artificial
  Probe
ctggactttgacctacttgtattat

SEQ ID NO: 154949 - DNA, 25 bp, Artificial
  Probe
aaagtgacttgtaagatggtggatg

SEQ ID NO: 154950 - DNA, 25 bp, Artificial
  Probe
cctgtgttcttcctttaatgggttg

SEQ ID NO: 154951 - DNA, 25 bp, Artificial
  Probe
caaagtgacttgtaagatggtggat

SEQ ID NO: 154952 - DNA, 25 bp, Artificial
  Probe
cgagatggtaactgtaaagacactg

SEQ ID NO: 154953 - DNA, 25 bp, Artificial
  Probe
ttaattcagatacctatcgagatgg

SEQ ID NO: 154954 - DNA, 25 bp, Artificial
  Probe
ctgctggactttgacctacttgtat

SEQ ID NO: 154955 - DNA, 25 bp, Artificial
  Probe
acactgttatctccttaaatatgct

SEQ ID NO: 154956 - DNA, 25 bp, Artificial
  Probe
cccattaccttgtctataacagttt

SEQ ID NO: 154957 - DNA, 25 bp, Artificial
  Probe
gaaactgaatctacttgctgggttg

SEQ ID NO: 154958 - DNA, 25 bp, Artificial
  Probe
agtcataccttctgatgaagttgag

SEQ ID NO: 154959 - DNA, 25 bp, Artificial
  Probe
taattcagatacctatcgagatggt

SEQ ID NO: 154960 - DNA, 25 bp, Artificial
  Probe
gacactgttatctccttaaatatgc

SEQ ID NO: 154961 - DNA, 25 bp, Artificial
  Probe
tgaaactgaatctacttgctgggtt

SEQ ID NO: 154962 - DNA, 25 bp, Artificial
  Probe
cctatcgagatggtaactgtaaaga

SEQ ID NO: 154963 - DNA, 25 bp, Artificial
  Probe
tagtcataccttctgatgaagttga

SEQ ID NO: 154964 - DNA, 25 bp, Artificial
  Probe
ctgaaactgaatctacttgctgggt

SEQ ID NO: 154965 - DNA, 25 bp, Artificial
  Probe
accctgaaactgaatctacttgctg

SEQ ID NO: 154966 - DNA, 25 bp, Artificial
  Probe
caccctgaaactgaatctacttgct

SEQ ID NO: 154967 - DNA, 25 bp, Artificial
  Probe
tcatagtcataccttctgatgaagt

SEQ ID NO: 154968 - DNA, 25 bp, Artificial
  Probe
tcctgtccgttgtattatatgtgag

SEQ ID NO: 154969 - DNA, 25 bp, Artificial
  Probe
ctcatcttccgacctatacaatctt

SEQ ID NO: 154970 - DNA, 25 bp, Artificial
  Probe
gactcatcttccgacctatacaatc

SEQ ID NO: 154971 - DNA, 25 bp, Artificial
  Probe
tgtccgttgtattatatgtgagtgt

SEQ ID NO: 154972 - DNA, 25 bp, Artificial
  Probe
cctgtccgttgtattatatgtgagt

SEQ ID NO: 154973 - DNA, 25 bp, Artificial
  Probe
tcatcttccgacctatacaatcttg

SEQ ID NO: 154974 - DNA, 25 bp, Artificial
  Probe
actcatcttccgacctatacaatct

SEQ ID NO: 154975 - DNA, 25 bp, Artificial
  Probe
ctgtccgttgtattatatgtgagtg

SEQ ID NO: 154976 - DNA, 25 bp, Artificial
  Probe
atcctgtccgttgtattatatgtga

SEQ ID NO: 154977 - DNA, 25 bp, Artificial
  Probe
catcctgtccgttgtattatatgtg

SEQ ID NO: 154978 - DNA, 25 bp, Artificial
  Probe
catcttccgacctatacaatcttgc

SEQ ID NO: 154979 - DNA, 25 bp, Artificial
  Probe
gtccgttgtattatatgtgagtgta

SEQ ID NO: 154980 - DNA, 25 bp, Artificial
  Probe
ctgactgacctcaatgaatacagac

SEQ ID NO: 154981 - DNA, 25 bp, Artificial
  Probe
aacatcctgtccgttgtattatatg

SEQ ID NO: 154982 - DNA, 25 bp, Artificial
  Probe
atcttccgacctatacaatcttgcc

SEQ ID NO: 154983 - DNA, 25 bp, Artificial
  Probe
tccgttgtattatatgtgagtgtaa

SEQ ID NO: 154984 - DNA, 25 bp, Artificial
  Probe
cacctgactgacctcaatgaataca

SEQ ID NO: 154985 - DNA, 25 bp, Artificial
  Probe
cctgactgacctcaatgaatacaga

SEQ ID NO: 154986 - DNA, 25 bp, Artificial
  Probe
ggactcatcttccgacctatacaat

SEQ ID NO: 154987 - DNA, 25 bp, Artificial
  Probe
ctactttgtttctttccgccattat

SEQ ID NO: 154988 - DNA, 25 bp, Artificial
  Probe
acctgactgacctcaatgaatacag

SEQ ID NO: 154989 - DNA, 25 bp, Artificial
  Probe
tttgtttctttccgccattatatca

SEQ ID NO: 154990 - DNA, 25 bp, Artificial
  Probe
actttgtttctttccgccattatat

SEQ ID NO: 154991 - DNA, 25 bp, Artificial
  Probe
gtttctttccgccattatatcaagg

SEQ ID NO: 154992 - DNA, 25 bp, Artificial
  Probe
tgtttctttccgccattatatcaag

SEQ ID NO: 154993 - DNA, 25 bp, Artificial
  Probe
ttaacatcctgtccgttgtattata

SEQ ID NO: 154994 - DNA, 25 bp, Artificial
  Probe
tactttgtttctttccgccattata

SEQ ID NO: 154995 - DNA, 25 bp, Artificial
  Probe
ctttgtttctttccgccattatatc

SEQ ID NO: 154996 - DNA, 25 bp, Artificial
  Probe
tgactgacctcaatgaatacagacg

SEQ ID NO: 154997 - DNA, 25 bp, Artificial
  Probe
caatgaatacagacgctttgagaag

SEQ ID NO: 154998 - DNA, 25 bp, Artificial
  Probe
ttgtttctttccgccattatatcaa

SEQ ID NO: 154999 - DNA, 25 bp, Artificial
  Probe
cctactttgtttctttccgccatta

SEQ ID NO: 155000 - DNA, 25 bp, Artificial
  Probe
ccacctgactgacctcaatgaatac

SEQ ID NO: 155001 - DNA, 25 bp, Artificial
  Probe
taacatcctgtccgttgtattatat

SEQ ID NO: 155002 - DNA, 25 bp, Artificial
  Probe
cgacctatacaatcttgccacagag

SEQ ID NO: 155003 - DNA, 25 bp, Artificial
  Probe
cttccgacctatacaatcttgccac

SEQ ID NO: 155004 - DNA, 25 bp, Artificial
  Probe
aatgaatacagacgctttgagaagg

SEQ ID NO: 155005 - DNA, 25 bp, Artificial
  Probe
tcttccgacctatacaatcttgcca

SEQ ID NO: 155006 - DNA, 25 bp, Artificial
  Probe
gacctatacaatcttgccacagagc

SEQ ID NO: 155007 - DNA, 25 bp, Artificial
  Probe
ctgacctcaatgaatacagacgctt

SEQ ID NO: 155008 - DNA, 25 bp, Artificial
  Probe
atacagacgctttgagaaggagaaa

SEQ ID NO: 155009 - DNA, 25 bp, Artificial
  Probe
aatacagacgctttgagaaggagaa

SEQ ID NO: 155010 - DNA, 25 bp, Artificial
  Probe
acatcctgtccgttgtattatatgt

SEQ ID NO: 155011 - DNA, 25 bp, Artificial
  Probe
atgaatacagacgctttgagaagga

SEQ ID NO: 155012 - DNA, 25 bp, Artificial
  Probe
gaatacagacgctttgagaaggaga

SEQ ID NO: 155013 - DNA, 25 bp, Artificial
  Probe
tatgttgacaataatgtgtaatgcg

SEQ ID NO: 155014 - DNA, 25 bp, Artificial
  Probe
catggagtgattatgttgacaataa

SEQ ID NO: 155015 - DNA, 25 bp, Artificial
  Probe
ttgtctccattcctttcctctacat

SEQ ID NO: 155016 - DNA, 25 bp, Artificial
  Probe
ccttgtctccattcctttcctctac

SEQ ID NO: 155017 - DNA, 25 bp, Artificial
  Probe
cctctacatggagtgattatgttga

SEQ ID NO: 155018 - DNA, 25 bp, Artificial
  Probe
tcctctacatggagtgattatgttg

SEQ ID NO: 155019 - DNA, 25 bp, Artificial
  Probe
tctacatggagtgattatgttgaca

SEQ ID NO: 155020 - DNA, 25 bp, Artificial
  Probe
ttcctctacatggagtgattatgtt

SEQ ID NO: 155021 - DNA, 25 bp, Artificial
  Probe
cttgtctccattcctttcctctaca

SEQ ID NO: 155022 - DNA, 25 bp, Artificial
  Probe
ctctacatggagtgattatgttgac

SEQ ID NO: 155023 - DNA, 25 bp, Artificial
  Probe
ggagtgattatgttgacaataatgt

SEQ ID NO: 155024 - DNA, 25 bp, Artificial
  Probe
tggagtgattatgttgacaataatg

SEQ ID NO: 155025 - DNA, 25 bp, Artificial
  Probe
ctacatggagtgattatgttgacaa

SEQ ID NO: 155026 - DNA, 25 bp, Artificial
  Probe
ttatgttgacaataatgtgtaatgc

SEQ ID NO: 155027 - DNA, 25 bp, Artificial
  Probe
cctttcctctacatggagtgattat

SEQ ID NO: 155028 - DNA, 25 bp, Artificial
  Probe
tcctttcctctacatggagtgatta

SEQ ID NO: 155029 - DNA, 25 bp, Artificial
  Probe
acatggagtgattatgttgacaata

SEQ ID NO: 155030 - DNA, 25 bp, Artificial
  Probe
tacatggagtgattatgttgacaat

SEQ ID NO: 155031 - DNA, 25 bp, Artificial
  Probe
attcctttcctctacatggagtgat

SEQ ID NO: 155032 - DNA, 25 bp, Artificial
  Probe
agtgattatgttgacaataatgtgt

SEQ ID NO: 155033 - DNA, 25 bp, Artificial
  Probe
tgtctccattcctttcctctacatg

SEQ ID NO: 155034 - DNA, 25 bp, Artificial
  Probe
ttcctttcctctacatggagtgatt

SEQ ID NO: 155035 - DNA, 25 bp, Artificial
  Probe
ctttcctctacatggagtgattatg

SEQ ID NO: 155036 - DNA, 25 bp, Artificial
  Probe
cccttgtctccattcctttcctcta

SEQ ID NO: 155037 - DNA, 25 bp, Artificial
  Probe
cattcctttcctctacatggagtga

SEQ ID NO: 155038 - DNA, 25 bp, Artificial
  Probe
gcgttcttttcactggtttatctac

SEQ ID NO: 155039 - DNA, 25 bp, Artificial
  Probe
cgttcttttcactggtttatctaca

SEQ ID NO: 155040 - DNA, 25 bp, Artificial
  Probe
gagtgattatgttgacaataatgtg

SEQ ID NO: 155041 - DNA, 25 bp, Artificial
  Probe
atggagtgattatgttgacaataat

SEQ ID NO: 155042 - DNA, 25 bp, Artificial
  Probe
tatcttttcctttcttcagactccg

SEQ ID NO: 155043 - DNA, 25 bp, Artificial
  Probe
atgttgacaataatgtgtaatgcgc

SEQ ID NO: 155044 - DNA, 25 bp, Artificial
  Probe
tttcctctacatggagtgattatgt

SEQ ID NO: 155045 - DNA, 25 bp, Artificial
  Probe
ttatcttttcctttcttcagactcc

SEQ ID NO: 155046 - DNA, 25 bp, Artificial
  Probe
tccttatcttttcctttcttcagac

SEQ ID NO: 155047 - DNA, 25 bp, Artificial
  Probe
ccttatcttttcctttcttcagact

SEQ ID NO: 155048 - DNA, 25 bp, Artificial
  Probe
atcttttcctttcttcagactccgt

SEQ ID NO: 155049 - DNA, 25 bp, Artificial
  Probe
ttccttatcttttcctttcttcaga

SEQ ID NO: 155050 - DNA, 25 bp, Artificial
  Probe
acaataatgtgtaatgcgcgttctt

SEQ ID NO: 155051 - DNA, 25 bp, Artificial
  Probe
caattaataaaagagcagtgtggtt

SEQ ID NO: 155052 - DNA, 25 bp, Artificial
  Probe
gtgattatgttgacaataatgtgta

SEQ ID NO: 155053 - DNA, 25 bp, Artificial
  Probe
tttcctttcttcagactccgtccaa

SEQ ID NO: 155054 - DNA, 25 bp, Artificial
  Probe
tttccttatcttttcctttcttcag

SEQ ID NO: 155055 - DNA, 25 bp, Artificial
  Probe
ttgacaataatgtgtaatgcgcgtt

SEQ ID NO: 155056 - DNA, 25 bp, Artificial
  Probe
cttatcttttcctttcttcagactc

SEQ ID NO: 155057 - DNA, 25 bp, Artificial
  Probe
ttccaattaataaaagagcagtgtg

SEQ ID NO: 155058 - DNA, 25 bp, Artificial
  Probe
tactgcttatgatgaccgtgtactt

SEQ ID NO: 155059 - DNA, 25 bp, Artificial
  Probe
ttactgcttatgatgaccgtgtact

SEQ ID NO: 155060 - DNA, 25 bp, Artificial
  Probe
gttactgcttatgatgaccgtgtac

SEQ ID NO: 155061 - DNA, 25 bp, Artificial
  Probe
gatttgctgctcctttctttatagt

SEQ ID NO: 155062 - DNA, 25 bp, Artificial
  Probe
ttgctgctcctttctttatagtaag

SEQ ID NO: 155063 - DNA, 25 bp, Artificial
  Probe
tttgctgctcctttctttatagtaa

SEQ ID NO: 155064 - DNA, 25 bp, Artificial
  Probe
cttatgatgaccgtgtactttggat

SEQ ID NO: 155065 - DNA, 25 bp, Artificial
  Probe
atttgctgctcctttctttatagta

SEQ ID NO: 155066 - DNA, 25 bp, Artificial
  Probe
ttatgatgaccgtgtactttggatc

SEQ ID NO: 155067 - DNA, 25 bp, Artificial
  Probe
tctggaaattggattaaactcttga

SEQ ID NO: 155068 - DNA, 25 bp, Artificial
  Probe
tatgatgaccgtgtactttggatct

SEQ ID NO: 155069 - DNA, 25 bp, Artificial
  Probe
tggaaattggattaaactcttgaac

SEQ ID NO: 155070 - DNA, 25 bp, Artificial
  Probe
ggttactgcttatgatgaccgtgta

SEQ ID NO: 155071 - DNA, 25 bp, Artificial
  Probe
ggatttgctgctcctttctttatag

SEQ ID NO: 155072 - DNA, 25 bp, Artificial
  Probe
ggaaattggattaaactcttgaact

SEQ ID NO: 155073 - DNA, 25 bp, Artificial
  Probe
ctggaaattggattaaactcttgaa

SEQ ID NO: 155074 - DNA, 25 bp, Artificial
  Probe
tggatttgctgctcctttctttata

SEQ ID NO: 155075 - DNA, 25 bp, Artificial
  Probe
tgatctggaaattggattaaactct

SEQ ID NO: 155076 - DNA, 25 bp, Artificial
  Probe
ctgcttatgatgaccgtgtactttg

SEQ ID NO: 155077 - DNA, 25 bp, Artificial
  Probe
gtgtactttggatctggatttgctg

SEQ ID NO: 155078 - DNA, 25 bp, Artificial
  Probe
atctggaaattggattaaactcttg

SEQ ID NO: 155079 - DNA, 25 bp, Artificial
  Probe
actgcttatgatgaccgtgtacttt

SEQ ID NO: 155080 - DNA, 25 bp, Artificial
  Probe
ctggatttgctgctcctttctttat

SEQ ID NO: 155081 - DNA, 25 bp, Artificial
  Probe
taaggtggtacggtcatttcttctg

SEQ ID NO: 155082 - DNA, 25 bp, Artificial
  Probe
gtaaggtggtacggtcatttcttct

SEQ ID NO: 155083 - DNA, 25 bp, Artificial
  Probe
tgagtaaatgaaagctacagtacaa

SEQ ID NO: 155084 - DNA, 25 bp, Artificial
  Probe
ttgagtaaatgaaagctacagtaca

SEQ ID NO: 155085 - DNA, 25 bp, Artificial
  Probe
atgatctggaaattggattaaactc

SEQ ID NO: 155086 - DNA, 25 bp, Artificial
  Probe
atgatgaccgtgtactttggatctg

SEQ ID NO: 155087 - DNA, 25 bp, Artificial
  Probe
gatctggaaattggattaaactctt

SEQ ID NO: 155088 - DNA, 25 bp, Artificial
  Probe
gaccgtgtactttggatctggattt

SEQ ID NO: 155089 - DNA, 25 bp, Artificial
  Probe
gcttatgatgaccgtgtactttgga

SEQ ID NO: 155090 - DNA, 25 bp, Artificial
  Probe
aattggattaaactcttgaactctt

SEQ ID NO: 155091 - DNA, 25 bp, Artificial
  Probe
aaattggattaaactcttgaactct

SEQ ID NO: 155092 - DNA, 25 bp, Artificial
  Probe
tcccattaacagaatgaagaaagtt

SEQ ID NO: 155093 - DNA, 25 bp, Artificial
  Probe
atcccattaacagaatgaagaaagt

SEQ ID NO: 155094 - DNA, 25 bp, Artificial
  Probe
tactttggatctggatttgctgctc

SEQ ID NO: 155095 - DNA, 25 bp, Artificial
  Probe
accgtgtactttggatctggatttg

SEQ ID NO: 155096 - DNA, 25 bp, Artificial
  Probe
gaaattggattaaactcttgaactc

SEQ ID NO: 155097 - DNA, 25 bp, Artificial
  Probe
tctggatttgctgctcctttcttta

SEQ ID NO: 155098 - DNA, 25 bp, Artificial
  Probe
aagtggcggttactgcttatgatga

SEQ ID NO: 155099 - DNA, 25 bp, Artificial
  Probe
caagtggcggttactgcttatgatg

SEQ ID NO: 155100 - DNA, 25 bp, Artificial
  Probe
catcccattaacagaatgaagaaag

SEQ ID NO: 155101 - DNA, 25 bp, Artificial
  Probe
tgcttatgatgaccgtgtactttgg

SEQ ID NO: 155102 - DNA, 25 bp, Artificial
  Probe
tcatttcttctgccttccgtctttg

SEQ ID NO: 155103 - DNA, 25 bp, Artificial
  Probe
agttatgaacactatacacagtcaa

SEQ ID NO: 155104 - DNA, 25 bp, Artificial
  Probe
aagttatgaacactatacacagtca

SEQ ID NO: 155105 - DNA, 25 bp, Artificial
  Probe
atacacagtcaataaagcgaatgga

SEQ ID NO: 155106 - DNA, 25 bp, Artificial
  Probe
tatacacagtcaataaagcgaatgg

SEQ ID NO: 155107 - DNA, 25 bp, Artificial
  Probe
tacacagtcaataaagcgaatggaa

SEQ ID NO: 155108 - DNA, 25 bp, Artificial
  Probe
agaagttatgaacactatacacagt

SEQ ID NO: 155109 - DNA, 25 bp, Artificial
  Probe
gaagttatgaacactatacacagtc

SEQ ID NO: 155110 - DNA, 25 bp, Artificial
  Probe
acactatacacagtcaataaagcga

SEQ ID NO: 155111 - DNA, 25 bp, Artificial
  Probe
aacactatacacagtcaataaagcg

SEQ ID NO: 155112 - DNA, 25 bp, Artificial
  Probe
cactatacacagtcaataaagcgaa

SEQ ID NO: 155113 - DNA, 25 bp, Artificial
  Probe
cagtcaataaagcgaatggaacttg

SEQ ID NO: 155114 - DNA, 25 bp, Artificial
  Probe
ctatacacagtcaataaagcgaatg

SEQ ID NO: 155115 - DNA, 25 bp, Artificial
  Probe
acctccctagaagttatgaacacta

SEQ ID NO: 155116 - DNA, 25 bp, Artificial
  Probe
acagtcaataaagcgaatggaactt

SEQ ID NO: 155117 - DNA, 25 bp, Artificial
  Probe
gttatgaacactatacacagtcaat

SEQ ID NO: 155118 - DNA, 25 bp, Artificial
  Probe
acacagtcaataaagcgaatggaac

SEQ ID NO: 155119 - DNA, 25 bp, Artificial
  Probe
cctccctagaagttatgaacactat

SEQ ID NO: 155120 - DNA, 25 bp, Artificial
  Probe
gcagtccttgacattaaagagagaa

SEQ ID NO: 155121 - DNA, 25 bp, Artificial
  Probe
actatacacagtcaataaagcgaat

SEQ ID NO: 155122 - DNA, 25 bp, Artificial
  Probe
cctatactttgggatagattgggta

SEQ ID NO: 155123 - DNA, 25 bp, Artificial
  Probe
cacagtcaataaagcgaatggaact

SEQ ID NO: 155124 - DNA, 25 bp, Artificial
  Probe
cacctccctagaagttatgaacact

SEQ ID NO: 155125 - DNA, 25 bp, Artificial
  Probe
gaacactatacacagtcaataaagc

SEQ ID NO: 155126 - DNA, 25 bp, Artificial
  Probe
cagtccttgacattaaagagagaat

SEQ ID NO: 155127 - DNA, 25 bp, Artificial
  Probe
cctagaagttatgaacactatacac

SEQ ID NO: 155128 - DNA, 25 bp, Artificial
  Probe
agtcaataaagcgaatggaacttgc

SEQ ID NO: 155129 - DNA, 25 bp, Artificial
  Probe
ccacctccctagaagttatgaacac

SEQ ID NO: 155130 - DNA, 25 bp, Artificial
  Probe
agtccttgacattaaagagagaatt

SEQ ID NO: 155131 - DNA, 25 bp, Artificial
  Probe
ggcagtccttgacattaaagagaga

SEQ ID NO: 155132 - DNA, 25 bp, Artificial
  Probe
tactttgggatagattgggtaaagg

SEQ ID NO: 155133 - DNA, 25 bp, Artificial
  Probe
tatactttgggatagattgggtaaa

SEQ ID NO: 155134 - DNA, 25 bp, Artificial
  Probe
aggcagtccttgacattaaagagag

SEQ ID NO: 155135 - DNA, 25 bp, Artificial
  Probe
ccctagaagttatgaacactataca

SEQ ID NO: 155136 - DNA, 25 bp, Artificial
  Probe
ctatactttgggatagattgggtaa

SEQ ID NO: 155137 - DNA, 25 bp, Artificial
  Probe
tagaagttatgaacactatacacag

SEQ ID NO: 155138 - DNA, 25 bp, Artificial
  Probe
gtccttgacattaaagagagaattt

SEQ ID NO: 155139 - DNA, 25 bp, Artificial
  Probe
tgaacactatacacagtcaataaag

SEQ ID NO: 155140 - DNA, 25 bp, Artificial
  Probe
tccctagaagttatgaacactatac

SEQ ID NO: 155141 - DNA, 25 bp, Artificial
  Probe
ctagaagttatgaacactatacaca

SEQ ID NO: 155142 - DNA, 25 bp, Artificial
  Probe
actttgggatagattgggtaaaggg

SEQ ID NO: 155143 - DNA, 25 bp, Artificial
  Probe
cccacctccctagaagttatgaaca

SEQ ID NO: 155144 - DNA, 25 bp, Artificial
  Probe
ctgccctatactttgggatagattg

SEQ ID NO: 155145 - DNA, 25 bp, Artificial
  Probe
tctgccctatactttgggatagatt

SEQ ID NO: 155146 - DNA, 25 bp, Artificial
  Probe
ttctgccctatactttgggatagat

SEQ ID NO: 155147 - DNA, 25 bp, Artificial
  Probe
atactttgggatagattgggtaaag

SEQ ID NO: 155148 - DNA, 25 bp, Artificial
  Probe
aaactcagagaagaatcaagaaggg

SEQ ID NO: 155149 - DNA, 25 bp, Artificial
  Probe
caaactcagagaagaatcaagaagg

SEQ ID NO: 155150 - DNA, 25 bp, Artificial
  Probe
cagagaagaatcaagaagggtgttt

SEQ ID NO: 155151 - DNA, 25 bp, Artificial
  Probe
tacaaggagaaatacgagaagttgg

SEQ ID NO: 155152 - DNA, 25 bp, Artificial
  Probe
tcaaactcagagaagaatcaagaag

SEQ ID NO: 155153 - DNA, 25 bp, Artificial
  Probe
aactcagagaagaatcaagaagggt

SEQ ID NO: 155154 - DNA, 25 bp, Artificial
  Probe
ctacaaggagaaatacgagaagttg

SEQ ID NO: 155155 - DNA, 25 bp, Artificial
  Probe
tcagagaagaatcaagaagggtgtt

SEQ ID NO: 155156 - DNA, 25 bp, Artificial
  Probe
aaggagaaatacgagaagttggtga

SEQ ID NO: 155157 - DNA, 25 bp, Artificial
  Probe
actcaaactcagagaagaatcaaga

SEQ ID NO: 155158 - DNA, 25 bp, Artificial
  Probe
caagggactcttctacatctgtgat

SEQ ID NO: 155159 - DNA, 25 bp, Artificial
  Probe
aactcaaactcagagaagaatcaag

SEQ ID NO: 155160 - DNA, 25 bp, Artificial
  Probe
aggagaaatacgagaagttggtgag

SEQ ID NO: 155161 - DNA, 25 bp, Artificial
  Probe
ctcagagaagaatcaagaagggtgt

SEQ ID NO: 155162 - DNA, 25 bp, Artificial
  Probe
actcagagaagaatcaagaagggtg

SEQ ID NO: 155163 - DNA, 25 bp, Artificial
  Probe
ctcaaactcagagaagaatcaagaa

SEQ ID NO: 155164 - DNA, 25 bp, Artificial
  Probe
caaggagaaatacgagaagttggtg

SEQ ID NO: 155165 - DNA, 25 bp, Artificial
  Probe
aaactcaaactcagagaagaatcaa

SEQ ID NO: 155166 - DNA, 25 bp, Artificial
  Probe
cctacaaggagaaatacgagaagtt

SEQ ID NO: 155167 - DNA, 25 bp, Artificial
  Probe
acaaggagaaatacgagaagttggt

SEQ ID NO: 155168 - DNA, 25 bp, Artificial
  Probe
aactaaactcaaactcagagaagaa

SEQ ID NO: 155169 - DNA, 25 bp, Artificial
  Probe
aaactaaactcaaactcagagaaga

SEQ ID NO: 155170 - DNA, 25 bp, Artificial
  Probe
taaactcaaactcagagaagaatca

SEQ ID NO: 155171 - DNA, 25 bp, Artificial
  Probe
actaaactcaaactcagagaagaat

SEQ ID NO: 155172 - DNA, 25 bp, Artificial
  Probe
agaaatacgagaagttggtgagcag

SEQ ID NO: 155173 - DNA, 25 bp, Artificial
  Probe
gagaaatacgagaagttggtgagca

SEQ ID NO: 155174 - DNA, 25 bp, Artificial
  Probe
ctaaactcaaactcagagaagaatc

SEQ ID NO: 155175 - DNA, 25 bp, Artificial
  Probe
ttcatgtacccaagggactcttcta

SEQ ID NO: 155176 - DNA, 25 bp, Artificial
  Probe
gcctacaaggagaaatacgagaagt

SEQ ID NO: 155177 - DNA, 25 bp, Artificial
  Probe
tacccaagggactcttctacatctg

SEQ ID NO: 155178 - DNA, 25 bp, Artificial
  Probe
gtacccaagggactcttctacatct

SEQ ID NO: 155179 - DNA, 25 bp, Artificial
  Probe
agagaagaatcaagaagggtgtttt

SEQ ID NO: 155180 - DNA, 25 bp, Artificial
  Probe
ccaagggactcttctacatctgtga

SEQ ID NO: 155181 - DNA, 25 bp, Artificial
  Probe
ggagaaatacgagaagttggtgagc

SEQ ID NO: 155182 - DNA, 25 bp, Artificial
  Probe
tcatgtacccaagggactcttctac

SEQ ID NO: 155183 - DNA, 25 bp, Artificial
  Probe
tttcatgtacccaagggactcttct

SEQ ID NO: 155184 - DNA, 25 bp, Artificial
  Probe
cgcctacaaggagaaatacgagaag

SEQ ID NO: 155185 - DNA, 25 bp, Artificial
  Probe
aagggactcttctacatctgtgatg

SEQ ID NO: 155186 - DNA, 25 bp, Artificial
  Probe
aaagggacgcctacaaggagaaata

SEQ ID NO: 155187 - DNA, 25 bp, Artificial
  Probe
gaaatacgagaagttggtgagcagc

SEQ ID NO: 155188 - DNA, 25 bp, Artificial
  Probe
ccgaagctgaacagaaaatatgatg

SEQ ID NO: 155189 - DNA, 25 bp, Artificial
  Probe
acgcctacaaggagaaatacgagaa

SEQ ID NO: 155190 - DNA, 25 bp, Artificial
  Probe
gaagctgaacagaaaatatgatgcc

SEQ ID NO: 155191 - DNA, 25 bp, Artificial
  Probe
cgaagctgaacagaaaatatgatgc

SEQ ID NO: 155192 - DNA, 25 bp, Artificial
  Probe
atctgtgatgtgagaaaagcagttg

SEQ ID NO: 155193 - DNA, 25 bp, Artificial
  Probe
aattcacataaagtgtggggaactc

SEQ ID NO: 155194 - DNA, 25 bp, Artificial
  Probe
cacataaagtgtggggaactcaaaa

SEQ ID NO: 155195 - DNA, 25 bp, Artificial
  Probe
attcacataaagtgtggggaactca

SEQ ID NO: 155196 - DNA, 25 bp, Artificial
  Probe
tcacataaagtgtggggaactcaaa

SEQ ID NO: 155197 - DNA, 25 bp, Artificial
  Probe
ttcacataaagtgtggggaactcaa

SEQ ID NO: 155198 - DNA, 25 bp, Artificial
  Probe
gaattcacataaagtgtggggaact

SEQ ID NO: 155199 - DNA, 25 bp, Artificial
  Probe
cttcgagaactttctccctgggttg

SEQ ID NO: 155200 - DNA, 25 bp, Artificial
  Probe
atggatatagtggcaattctactgg

SEQ ID NO: 155201 - DNA, 25 bp, Artificial
  Probe
agttcttgaagatatggacctatgg

SEQ ID NO: 155202 - DNA, 25 bp, Artificial
  Probe
cgtaatggatatagtggcaattcta

SEQ ID NO: 155203 - DNA, 25 bp, Artificial
  Probe
aatggatatagtggcaattctactg

SEQ ID NO: 155204 - DNA, 25 bp, Artificial
  Probe
cacaagttcttgaagatatggacct

SEQ ID NO: 155205 - DNA, 25 bp, Artificial
  Probe
tgaaggactaatcacaagttcttga

SEQ ID NO: 155206 - DNA, 25 bp, Artificial
  Probe
aggactaatcacaagttcttgaaga

SEQ ID NO: 155207 - DNA, 25 bp, Artificial
  Probe
tcacaagttcttgaagatatggacc

SEQ ID NO: 155208 - DNA, 25 bp, Artificial
  Probe
acaagttcttgaagatatggaccta

SEQ ID NO: 155209 - DNA, 25 bp, Artificial
  Probe
ttgaaggactaatcacaagttcttg

SEQ ID NO: 155210 - DNA, 25 bp, Artificial
  Probe
aaggactaatcacaagttcttgaag

SEQ ID NO: 155211 - DNA, 25 bp, Artificial
  Probe
gaaggactaatcacaagttcttgaa

SEQ ID NO: 155212 - DNA, 25 bp, Artificial
  Probe
aagttcttgaagatatggacctatg

SEQ ID NO: 155213 - DNA, 25 bp, Artificial
  Probe
atcacaagttcttgaagatatggac

SEQ ID NO: 155214 - DNA, 25 bp, Artificial
  Probe
ggactaatcacaagttcttgaagat

SEQ ID NO: 155215 - DNA, 25 bp, Artificial
  Probe
catgacaagaggaacttctcagatg

SEQ ID NO: 155216 - DNA, 25 bp, Artificial
  Probe
acgtaatggatatagtggcaattct

SEQ ID NO: 155217 - DNA, 25 bp, Artificial
  Probe
tgaacgtaatggatatagtggcaat

SEQ ID NO: 155218 - DNA, 25 bp, Artificial
  Probe
tagctgaacgtaatggatatagtgg

SEQ ID NO: 155219 - DNA, 25 bp, Artificial
  Probe
tttcccgtcattccaaacaaataaa

SEQ ID NO: 155220 - DNA, 25 bp, Artificial
  Probe
ttcccgtcattccaaacaaataaag

SEQ ID NO: 155221 - DNA, 25 bp, Artificial
  Probe
ctttcccgtcattccaaacaaataa

SEQ ID NO: 155222 - DNA, 25 bp, Artificial
  Probe
aacgtaatggatatagtggcaattc

SEQ ID NO: 155223 - DNA, 25 bp, Artificial
  Probe
gaacgtaatggatatagtggcaatt

SEQ ID NO: 155224 - DNA, 25 bp, Artificial
  Probe
ctgaacgtaatggatatagtggcaa

SEQ ID NO: 155225 - DNA, 25 bp, Artificial
  Probe
caagttcttgaagatatggacctat

SEQ ID NO: 155226 - DNA, 25 bp, Artificial
  Probe
aatcacaagttcttgaagatatgga

SEQ ID NO: 155227 - DNA, 25 bp, Artificial
  Probe
gggctgttcctttgttgatattcta

SEQ ID NO: 155228 - DNA, 25 bp, Artificial
  Probe
gtaatggatatagtggcaattctac

SEQ ID NO: 155229 - DNA, 25 bp, Artificial
  Probe
atgacaagaggaacttctcagatgc

SEQ ID NO: 155230 - DNA, 25 bp, Artificial
  Probe
gttgactaaactggatgtgaagatg

SEQ ID NO: 155231 - DNA, 25 bp, Artificial
  Probe
ggctgttcctttgttgatattctag

SEQ ID NO: 155232 - DNA, 25 bp, Artificial
  Probe
ttgactaaactggatgtgaagatgc

SEQ ID NO: 155233 - DNA, 25 bp, Artificial
  Probe
ggttgactaaactggatgtgaagat

SEQ ID NO: 155234 - DNA, 25 bp, Artificial
  Probe
ccatgacaagaggaacttctcagat

SEQ ID NO: 155235 - DNA, 25 bp, Artificial
  Probe
gactaaactggatgtgaagatgctt

SEQ ID NO: 155236 - DNA, 25 bp, Artificial
  Probe
ggatagctgaacgtaatggatatag

SEQ ID NO: 155237 - DNA, 25 bp, Artificial
  Probe
actaaactggatgtgaagatgcttg

SEQ ID NO: 155238 - DNA, 25 bp, Artificial
  Probe
tttgctcttgaaggactaatcacaa

SEQ ID NO: 155239 - DNA, 25 bp, Artificial
  Probe
tcccgtcattccaaacaaataaagg

SEQ ID NO: 155240 - DNA, 25 bp, Artificial
  Probe
taatggatatagtggcaattctact

SEQ ID NO: 155241 - DNA, 25 bp, Artificial
  Probe
ttcttgaagatatggacctatggga

SEQ ID NO: 155242 - DNA, 25 bp, Artificial
  Probe
gttcttgaagatatggacctatggg

SEQ ID NO: 155243 - DNA, 25 bp, Artificial
  Probe
atagctgaacgtaatggatatagtg

SEQ ID NO: 155244 - DNA, 25 bp, Artificial
  Probe
tcttgaagatatggacctatgggag

SEQ ID NO: 155245 - DNA, 25 bp, Artificial
  Probe
taatggctgttagaagatgacggag

SEQ ID NO: 155246 - DNA, 25 bp, Artificial
  Probe
ctaatggctgttagaagatgacgga

SEQ ID NO: 155247 - DNA, 25 bp, Artificial
  Probe
ttagaagatgacggagcaaatgatg

SEQ ID NO: 155248 - DNA, 25 bp, Artificial
  Probe
gttagaagatgacggagcaaatgat

SEQ ID NO: 155249 - DNA, 25 bp, Artificial
  Probe
ctgttagaagatgacggagcaaatg

SEQ ID NO: 155250 - DNA, 25 bp, Artificial
  Probe
atggttacctctacgtccttcaatg

SEQ ID NO: 155251 - DNA, 25 bp, Artificial
  Probe
cttgtatttataagacgagtgtggc

SEQ ID NO: 155252 - DNA, 25 bp, Artificial
  Probe
gccttgtatttataagacgagtgtg

SEQ ID NO: 155253 - DNA, 25 bp, Artificial
  Probe
tgttagaagatgacggagcaaatga

SEQ ID NO: 155254 - DNA, 25 bp, Artificial
  Probe
ccttgtatttataagacgagtgtgg

SEQ ID NO: 155255 - DNA, 25 bp, Artificial
  Probe
tagaagatgacggagcaaatgatgg

SEQ ID NO: 155256 - DNA, 25 bp, Artificial
  Probe
cagaagggtttctaatggctgttag

SEQ ID NO: 155257 - DNA, 25 bp, Artificial
  Probe
tggttacctctacgtccttcaatgg

SEQ ID NO: 155258 - DNA, 25 bp, Artificial
  Probe
ttgtatttataagacgagtgtggcc

SEQ ID NO: 155259 - DNA, 25 bp, Artificial
  Probe
ggccttgtatttataagacgagtgt

SEQ ID NO: 155260 - DNA, 25 bp, Artificial
  Probe
caacccttctccatccctgatactc

SEQ ID NO: 155261 - DNA, 25 bp, Artificial
  Probe
gaagatgacggagcaaatgatggac

SEQ ID NO: 155262 - DNA, 25 bp, Artificial
  Probe
tccttcaatgggtgtgtctcttctc

SEQ ID NO: 155263 - DNA, 25 bp, Artificial
  Probe
cttcaatgggtgtgtctcttctcac

SEQ ID NO: 155264 - DNA, 25 bp, Artificial
  Probe
gttttggtggtgtttcttttgacaa

SEQ ID NO: 155265 - DNA, 25 bp, Artificial
  Probe
ccagaagggtttctaatggctgtta

SEQ ID NO: 155266 - DNA, 25 bp, Artificial
  Probe
cttctccatccctgatactccagac

SEQ ID NO: 155267 - DNA, 25 bp, Artificial
  Probe
agaagatgacggagcaaatgatgga

SEQ ID NO: 155268 - DNA, 25 bp, Artificial
  Probe
cggccttgtatttataagacgagtg

SEQ ID NO: 155269 - DNA, 25 bp, Artificial
  Probe
tctaatggctgttagaagatgacgg

SEQ ID NO: 155270 - DNA, 25 bp, Artificial
  Probe
ccttcaatgggtgtgtctcttctca

SEQ ID NO: 155271 - DNA, 25 bp, Artificial
  Probe
gtccttcaatgggtgtgtctcttct

SEQ ID NO: 155272 - DNA, 25 bp, Artificial
  Probe
ttctccatccctgatactccagact

SEQ ID NO: 155273 - DNA, 25 bp, Artificial
  Probe
ccggccttgtatttataagacgagt

SEQ ID NO: 155274 - DNA, 25 bp, Artificial
  Probe
gccgttagaaaacagctatgtaaaa

SEQ ID NO: 155275 - DNA, 25 bp, Artificial
  Probe
acacagacacattaataaacaatga

SEQ ID NO: 155276 - DNA, 25 bp, Artificial
  Probe
caagagatttcggaaggaaaagaag

SEQ ID NO: 155277 - DNA, 25 bp, Artificial
  Probe
tgttttaagttttacacagacacat

SEQ ID NO: 155278 - DNA, 25 bp, Artificial
  Probe
atgttttaagttttacacagacaca

SEQ ID NO: 155279 - DNA, 25 bp, Artificial
  Probe
aagatgacggagcaaatgatggaca

SEQ ID NO: 155280 - DNA, 25 bp, Artificial
  Probe
caggacagtgggtggaagataagtg

SEQ ID NO: 155281 - DNA, 25 bp, Artificial
  Probe
catccagaagggtttctaatggctg

SEQ ID NO: 155282 - DNA, 25 bp, Artificial
  Probe
tctccatccctgatactccagactc

SEQ ID NO: 155283 - DNA, 25 bp, Artificial
  Probe
ccaagcaagagatttcggaaggaaa

SEQ ID NO: 155284 - DNA, 25 bp, Artificial
  Probe
gttttaagttttacacagacacatt

SEQ ID NO: 155285 - DNA, 25 bp, Artificial
  Probe
gctgttagaagatgacggagcaaat

SEQ ID NO: 155286 - DNA, 25 bp, Artificial
  Probe
agaagggtttctaatggctgttaga

SEQ ID NO: 155287 - DNA, 25 bp, Artificial
  Probe
catcgtgctctcagactctgattag

SEQ ID NO: 155288 - DNA, 25 bp, Artificial
  Probe
aagagatttcggaaggaaaagaagc

SEQ ID NO: 155289 - DNA, 25 bp, Artificial
  Probe
gatgttttaagttttacacagacac

SEQ ID NO: 155290 - DNA, 25 bp, Artificial
  Probe
gaacaattaatcgagcttatgccag

SEQ ID NO: 155291 - DNA, 25 bp, Artificial
  Probe
gtggaacaattaatcgagcttatgc

SEQ ID NO: 155292 - DNA, 25 bp, Artificial
  Probe
aacaattaatcgagcttatgccagt

SEQ ID NO: 155293 - DNA, 25 bp, Artificial
  Probe
aattaatcgagcttatgccagtctg

SEQ ID NO: 155294 - DNA, 25 bp, Artificial
  Probe
caattaatcgagcttatgccagtct

SEQ ID NO: 155295 - DNA, 25 bp, Artificial
  Probe
acaattaatcgagcttatgccagtc

SEQ ID NO: 155296 - DNA, 25 bp, Artificial
  Probe
agaagtgatccagatcctccaagat

SEQ ID NO: 155297 - DNA, 25 bp, Artificial
  Probe
ggaacaattaatcgagcttatgcca

SEQ ID NO: 155298 - DNA, 25 bp, Artificial
  Probe
tggaacaattaatcgagcttatgcc

SEQ ID NO: 155299 - DNA, 25 bp, Artificial
  Probe
tgtggaacaattaatcgagcttatg

SEQ ID NO: 155300 - DNA, 25 bp, Artificial
  Probe
gtgtggaacaattaatcgagcttat

SEQ ID NO: 155301 - DNA, 25 bp, Artificial
  Probe
gacagttccagaagtgatccagatc

SEQ ID NO: 155302 - DNA, 25 bp, Artificial
  Probe
tgtgtggaacaattaatcgagctta

SEQ ID NO: 155303 - DNA, 25 bp, Artificial
  Probe
attaatcgagcttatgccagtctgt

SEQ ID NO: 155304 - DNA, 25 bp, Artificial
  Probe
atgtgtggaacaattaatcgagctt

SEQ ID NO: 155305 - DNA, 25 bp, Artificial
  Probe
aatgtgtggaacaattaatcgagct

SEQ ID NO: 155306 - DNA, 25 bp, Artificial
  Probe
agacacttcgtgactcaatgcttaa

SEQ ID NO: 155307 - DNA, 25 bp, Artificial
  Probe
atccgaactgaacaataaagccttt

SEQ ID NO: 155308 - DNA, 25 bp, Artificial
  Probe
catccgaactgaacaataaagcctt

SEQ ID NO: 155309 - DNA, 25 bp, Artificial
  Probe
gggtcttaaatgtgtggaacaatta

SEQ ID NO: 155310 - DNA, 25 bp, Artificial
  Probe
tgacagttccagaagtgatccagat

SEQ ID NO: 155311 - DNA, 25 bp, Artificial
  Probe
atgacagttccagaagtgatccaga

SEQ ID NO: 155312 - DNA, 25 bp, Artificial
  Probe
ttaagtacccagatagtcaccaacc

SEQ ID NO: 155313 - DNA, 25 bp, Artificial
  Probe
gtcattcatccgaactgaacaataa

SEQ ID NO: 155314 - DNA, 25 bp, Artificial
  Probe
tgtcattcatccgaactgaacaata

SEQ ID NO: 155315 - DNA, 25 bp, Artificial
  Probe
catgacagttccagaagtgatccag

SEQ ID NO: 155316 - DNA, 25 bp, Artificial
  Probe
tccgaactgaacaataaagccttta

SEQ ID NO: 155317 - DNA, 25 bp, Artificial
  Probe
ttaatcgagcttatgccagtctgtc

SEQ ID NO: 155318 - DNA, 25 bp, Artificial
  Probe
cagaagtgatccagatcctccaaga

SEQ ID NO: 155319 - DNA, 25 bp, Artificial
  Probe
agttccagaagtgatccagatcctc

SEQ ID NO: 155320 - DNA, 25 bp, Artificial
  Probe
cttatgccagtctgtcattcatccg

SEQ ID NO: 155321 - DNA, 25 bp, Artificial
  Probe
cagacacttcgtgactcaatgctta

SEQ ID NO: 155322 - DNA, 25 bp, Artificial
  Probe
cttcgtgactcaatgcttaagtacc

SEQ ID NO: 155323 - DNA, 25 bp, Artificial
  Probe
agcttatgccagtctgtcattcatc

SEQ ID NO: 155324 - DNA, 25 bp, Artificial
  Probe
gagcttatgccagtctgtcattcat

SEQ ID NO: 155325 - DNA, 25 bp, Artificial
  Probe
cagttccagaagtgatccagatcct

SEQ ID NO: 155326 - DNA, 25 bp, Artificial
  Probe
ctgtcattcatccgaactgaacaat

SEQ ID NO: 155327 - DNA, 25 bp, Artificial
  Probe
gcttatgccagtctgtcattcatcc

SEQ ID NO: 155328 - DNA, 25 bp, Artificial
  Probe
ggtcttaaatgtgtggaacaattaa

SEQ ID NO: 155329 - DNA, 25 bp, Artificial
  Probe
tatgccagtctgtcattcatccgaa

SEQ ID NO: 155330 - DNA, 25 bp, Artificial
  Probe
ttatgccagtctgtcattcatccga

SEQ ID NO: 155331 - DNA, 25 bp, Artificial
  Probe
tcatccgaactgaacaataaagcct

SEQ ID NO: 155332 - DNA, 25 bp, Artificial
  Probe
acagttccagaagtgatccagatcc

SEQ ID NO: 155333 - DNA, 25 bp, Artificial
  Probe
aaatgtgtggaacaattaatcgagc

SEQ ID NO: 155334 - DNA, 25 bp, Artificial
  Probe
gaagtgatccagatcctccaagatc

SEQ ID NO: 155335 - DNA, 25 bp, Artificial
  Probe
aaatgctgtgattagagtccctatg

SEQ ID NO: 155336 - DNA, 25 bp, Artificial
  Probe
taaatgctgtgattagagtccctat

SEQ ID NO: 155337 - DNA, 25 bp, Artificial
  Probe
ataaatgctgtgattagagtcccta

SEQ ID NO: 155338 - DNA, 25 bp, Artificial
  Probe
tataaatgctgtgattagagtccct

SEQ ID NO: 155339 - DNA, 25 bp, Artificial
  Probe
tgattagagtccctatggcaagaag

SEQ ID NO: 155340 - DNA, 25 bp, Artificial
  Probe
ctctctatagcttcaagtctgcctt

SEQ ID NO: 155341 - DNA, 25 bp, Artificial
  Probe
gtgattagagtccctatggcaagaa

SEQ ID NO: 155342 - DNA, 25 bp, Artificial
  Probe
aatgctgtgattagagtccctatgg

SEQ ID NO: 155343 - DNA, 25 bp, Artificial
  Probe
ctcctcactgtgttataaatgctgt

SEQ ID NO: 155344 - DNA, 25 bp, Artificial
  Probe
ctcctcctcactgtgttataaatgc

SEQ ID NO: 155345 - DNA, 25 bp, Artificial
  Probe
gctcctcctcactgtgttataaatg

SEQ ID NO: 155346 - DNA, 25 bp, Artificial
  Probe
ctgtgattagagtccctatggcaag

SEQ ID NO: 155347 - DNA, 25 bp, Artificial
  Probe
ataatacaagtgccttagcatgtgt

SEQ ID NO: 155348 - DNA, 25 bp, Artificial
  Probe
cctcctcactgtgttataaatgctg

SEQ ID NO: 155349 - DNA, 25 bp, Artificial
  Probe
tcctcctcactgtgttataaatgct

SEQ ID NO: 155350 - DNA, 25 bp, Artificial
  Probe
tgctcctcctcactgtgttataaat

SEQ ID NO: 155351 - DNA, 25 bp, Artificial
  Probe
taatacaagtgccttagcatgtgtt

SEQ ID NO: 155352 - DNA, 25 bp, Artificial
  Probe
tataatacaagtgccttagcatgtg

SEQ ID NO: 155353 - DNA, 25 bp, Artificial
  Probe
ttataaatgctgtgattagagtccc

SEQ ID NO: 155354 - DNA, 25 bp, Artificial
  Probe
cactctctatagcttcaagtctgcc

SEQ ID NO: 155355 - DNA, 25 bp, Artificial
  Probe
ccactctctatagcttcaagtctgc

SEQ ID NO: 155356 - DNA, 25 bp, Artificial
  Probe
tgtgattagagtccctatggcaaga

SEQ ID NO: 155357 - DNA, 25 bp, Artificial
  Probe
actctctatagcttcaagtctgcct

SEQ ID NO: 155358 - DNA, 25 bp, Artificial
  Probe
ttaaaggagaaacagtcaaatcatg

SEQ ID NO: 155359 - DNA, 25 bp, Artificial
  Probe
ctggtttacagatgtttccactgag

SEQ ID NO: 155360 - DNA, 25 bp, Artificial
  Probe
atataatacaagtgccttagcatgt

SEQ ID NO: 155361 - DNA, 25 bp, Artificial
  Probe
tcctcactgtgttataaatgctgtg

SEQ ID NO: 155362 - DNA, 25 bp, Artificial
  Probe
tctctatagcttcaagtctgccttt

SEQ ID NO: 155363 - DNA, 25 bp, Artificial
  Probe
ctgtgctcctcctcactgtgttata

SEQ ID NO: 155364 - DNA, 25 bp, Artificial
  Probe
aatacaagtgccttagcatgtgttg

SEQ ID NO: 155365 - DNA, 25 bp, Artificial
  Probe
gattagagtccctatggcaagaagg

SEQ ID NO: 155366 - DNA, 25 bp, Artificial
  Probe
gttataaatgctgtgattagagtcc

SEQ ID NO: 155367 - DNA, 25 bp, Artificial
  Probe
tgtgctcctcctcactgtgttataa

SEQ ID NO: 155368 - DNA, 25 bp, Artificial
  Probe
tatttaatggttaagggacttgcag

SEQ ID NO: 155369 - DNA, 25 bp, Artificial
  Probe
atttaatggttaagggacttgcagg

SEQ ID NO: 155370 - DNA, 25 bp, Artificial
  Probe
cagtaagctggtttacagatgtttc

SEQ ID NO: 155371 - DNA, 25 bp, Artificial
  Probe
tacagtaagctggtttacagatgtt

SEQ ID NO: 155372 - DNA, 25 bp, Artificial
  Probe
ctacagtaagctggtttacagatgt

SEQ ID NO: 155373 - DNA, 25 bp, Artificial
  Probe
actacagtaagctggtttacagatg

SEQ ID NO: 155374 - DNA, 25 bp, Artificial
  Probe
cactacagtaagctggtttacagat

SEQ ID NO: 155375 - DNA, 25 bp, Artificial
  Probe
actgtgttataaatgctgtgattag

SEQ ID NO: 155376 - DNA, 25 bp, Artificial
  Probe
acagtaagctggtttacagatgttt

SEQ ID NO: 155377 - DNA, 25 bp, Artificial
  Probe
tatatttaatggttaagggacttgc

SEQ ID NO: 155378 - DNA, 25 bp, Artificial
  Probe
agtaagctggtttacagatgtttcc

SEQ ID NO: 155379 - DNA, 25 bp, Artificial
  Probe
atatttaatggttaagggacttgca

SEQ ID NO: 155380 - DNA, 25 bp, Artificial
  Probe
ctactcgtctcagtcatcatatcac

SEQ ID NO: 155381 - DNA, 25 bp, Artificial
  Probe
tctactcgtctcagtcatcatatca

SEQ ID NO: 155382 - DNA, 25 bp, Artificial
  Probe
ctctactcgtctcagtcatcatatc

SEQ ID NO: 155383 - DNA, 25 bp, Artificial
  Probe
tactcgtctcagtcatcatatcact

SEQ ID NO: 155384 - DNA, 25 bp, Artificial
  Probe
tgcgtcttaactgaatctgtgaata

SEQ ID NO: 155385 - DNA, 25 bp, Artificial
  Probe
gcgtcttaactgaatctgtgaatat

SEQ ID NO: 155386 - DNA, 25 bp, Artificial
  Probe
acaaccaacctattgaaccttctaa

SEQ ID NO: 155387 - DNA, 25 bp, Artificial
  Probe
aacaaccaacctattgaaccttcta

SEQ ID NO: 155388 - DNA, 25 bp, Artificial
  Probe
aatagtagtcatacaactctctgcg

SEQ ID NO: 155389 - DNA, 25 bp, Artificial
  Probe
ctgcgtcttaactgaatctgtgaat

SEQ ID NO: 155390 - DNA, 25 bp, Artificial
  Probe
cctctactcgtctcagtcatcatat

SEQ ID NO: 155391 - DNA, 25 bp, Artificial
  Probe
caatagtagtcatacaactctctgc

SEQ ID NO: 155392 - DNA, 25 bp, Artificial
  Probe
aattattgcctctactcgtctcagt

SEQ ID NO: 155393 - DNA, 25 bp, Artificial
  Probe
cctctcaataatcgctctcttccaa

SEQ ID NO: 155394 - DNA, 25 bp, Artificial
  Probe
attattgcctctactcgtctcagtc

SEQ ID NO: 155395 - DNA, 25 bp, Artificial
  Probe
tctgcgtcttaactgaatctgtgaa

SEQ ID NO: 155396 - DNA, 25 bp, Artificial
  Probe
tgacctctcaataatcgctctcttc

SEQ ID NO: 155397 - DNA, 25 bp, Artificial
  Probe
tatagctctgcgtcttaactgaatc

SEQ ID NO: 155398 - DNA, 25 bp, Artificial
  Probe
atatagctctgcgtcttaactgaat

SEQ ID NO: 155399 - DNA, 25 bp, Artificial
  Probe
gacctctcaataatcgctctcttcc

SEQ ID NO: 155400 - DNA, 25 bp, Artificial
  Probe
tatatagctctgcgtcttaactgaa

SEQ ID NO: 155401 - DNA, 25 bp, Artificial
  Probe
ttatatagctctgcgtcttaactga

SEQ ID NO: 155402 - DNA, 25 bp, Artificial
  Probe
ctctgcgtcttaactgaatctgtga

SEQ ID NO: 155403 - DNA, 25 bp, Artificial
  Probe
ttctcaagcatatcaatagtagtca

SEQ ID NO: 155404 - DNA, 25 bp, Artificial
  Probe
ctctcaataatcgctctcttccaaa

SEQ ID NO: 155405 - DNA, 25 bp, Artificial
  Probe
atagctctgcgtcttaactgaatct

SEQ ID NO: 155406 - DNA, 25 bp, Artificial
  Probe
tctcaagcatatcaatagtagtcat

SEQ ID NO: 155407 - DNA, 25 bp, Artificial
  Probe
aaattattgcctctactcgtctcag

SEQ ID NO: 155408 - DNA, 25 bp, Artificial
  Probe
tattgcctctactcgtctcagtcat

SEQ ID NO: 155409 - DNA, 25 bp, Artificial
  Probe
tcaatagtagtcatacaactctctg

SEQ ID NO: 155410 - DNA, 25 bp, Artificial
  Probe
acctctcaataatcgctctcttcca

SEQ ID NO: 155411 - DNA, 25 bp, Artificial
  Probe
tttagccttaataactgtcccaatg

SEQ ID NO: 155412 - DNA, 25 bp, Artificial
  Probe
ttagccttaataactgtcccaatgg

SEQ ID NO: 155413 - DNA, 25 bp, Artificial
  Probe
accaacctattgaaccttctaaagt

SEQ ID NO: 155414 - DNA, 25 bp, Artificial
  Probe
gtaaacaaccaacctattgaacctt

SEQ ID NO: 155415 - DNA, 25 bp, Artificial
  Probe
tctgaatctccaaattattgcctct

SEQ ID NO: 155416 - DNA, 25 bp, Artificial
  Probe
tctctgaatctccaaattattgcct

SEQ ID NO: 155417 - DNA, 25 bp, Artificial
  Probe
taaacaaccaacctattgaaccttc

SEQ ID NO: 155418 - DNA, 25 bp, Artificial
  Probe
ctctgaatctccaaattattgcctc

SEQ ID NO: 155419 - DNA, 25 bp, Artificial
  Probe
ctctctgaatctccaaattattgcc

SEQ ID NO: 155420 - DNA, 25 bp, Artificial
  Probe
cctctctgaatctccaaattattgc

SEQ ID NO: 155421 - DNA, 25 bp, Artificial
  Probe
gcctctctgaatctccaaattattg

SEQ ID NO: 155422 - DNA, 25 bp, Artificial
  Probe
ttattgcctctactcgtctcagtca

SEQ ID NO: 155423 - DNA, 25 bp, Artificial
  Probe
ccaacctattgaaccttctaaagtc

SEQ ID NO: 155424 - DNA, 25 bp, Artificial
  Probe
aaacaaccaacctattgaaccttct

SEQ ID NO: 155425 - DNA, 25 bp, Artificial
  Probe
cttggtctaggtattgatgaggatg

SEQ ID NO: 155426 - DNA, 25 bp, Artificial
  Probe
tggtctaggtattgatgaggatgat

SEQ ID NO: 155427 - DNA, 25 bp, Artificial
  Probe
ttggtctaggtattgatgaggatga

SEQ ID NO: 155428 - DNA, 25 bp, Artificial
  Probe
tgcttaccttcattccttctgataa

SEQ ID NO: 155429 - DNA, 25 bp, Artificial
  Probe
atgcttaccttcattccttctgata

SEQ ID NO: 155430 - DNA, 25 bp, Artificial
  Probe
gatgcttaccttcattccttctgat

SEQ ID NO: 155431 - DNA, 25 bp, Artificial
  Probe
tacctatgtactgtaatatgtggcg

SEQ ID NO: 155432 - DNA, 25 bp, Artificial
  Probe
ggtctaggtattgatgaggatgatc

SEQ ID NO: 155433 - DNA, 25 bp, Artificial
  Probe
cctatgtactgtaatatgtggcgag

SEQ ID NO: 155434 - DNA, 25 bp, Artificial
  Probe
ttgatgcttaccttcattccttctg

SEQ ID NO: 155435 - DNA, 25 bp, Artificial
  Probe
atgctaacaggatctacaggatgat

SEQ ID NO: 155436 - DNA, 25 bp, Artificial
  Probe
tagactaggcttcaccagaactatg

SEQ ID NO: 155437 - DNA, 25 bp, Artificial
  Probe
gtagactaggcttcaccagaactat

SEQ ID NO: 155438 - DNA, 25 bp, Artificial
  Probe
acctatgtactgtaatatgtggcga

SEQ ID NO: 155439 - DNA, 25 bp, Artificial
  Probe
gtaatatgtggcgagtgtactgtac

SEQ ID NO: 155440 - DNA, 25 bp, Artificial
  Probe
cgttgttgtagagtaagtacctatg

SEQ ID NO: 155441 - DNA, 25 bp, Artificial
  Probe
gcttggtctaggtattgatgaggat

SEQ ID NO: 155442 - DNA, 25 bp, Artificial
  Probe
gcttaccttcattccttctgataat

SEQ ID NO: 155443 - DNA, 25 bp, Artificial
  Probe
ctatgtactgtaatatgtggcgagt

SEQ ID NO: 155444 - DNA, 25 bp, Artificial
  Probe
tgtaatatgtggcgagtgtactgta

SEQ ID NO: 155445 - DNA, 25 bp, Artificial
  Probe
tatgtactgtaatatgtggcgagtg

SEQ ID NO: 155446 - DNA, 25 bp, Artificial
  Probe
tgatgcttaccttcattccttctga

SEQ ID NO: 155447 - DNA, 25 bp, Artificial
  Probe
tactgtaatatgtggcgagtgtact

SEQ ID NO: 155448 - DNA, 25 bp, Artificial
  Probe
ctgacaagaatgacaagtctgtgaa

SEQ ID NO: 155449 - DNA, 25 bp, Artificial
  Probe
tgtactgtaatatgtggcgagtgta

SEQ ID NO: 155450 - DNA, 25 bp, Artificial
  Probe
catgctaacaggatctacaggatga

SEQ ID NO: 155451 - DNA, 25 bp, Artificial
  Probe
agtagactaggcttcaccagaacta

SEQ ID NO: 155452 - DNA, 25 bp, Artificial
  Probe
atcacgcatggaagaagtagactag

SEQ ID NO: 155453 - DNA, 25 bp, Artificial
  Probe
gttgttgtagagtaagtacctatgt

SEQ ID NO: 155454 - DNA, 25 bp, Artificial
  Probe
atgtactgtaatatgtggcgagtgt

SEQ ID NO: 155455 - DNA, 25 bp, Artificial
  Probe
gtctaggtattgatgaggatgatcc

SEQ ID NO: 155456 - DNA, 25 bp, Artificial
  Probe
tgatactgtgatctataggttgacc

SEQ ID NO: 155457 - DNA, 25 bp, Artificial
  Probe
ctgtaatatgtggcgagtgtactgt

SEQ ID NO: 155458 - DNA, 25 bp, Artificial
  Probe
acgttgttgtagagtaagtacctat

SEQ ID NO: 155459 - DNA, 25 bp, Artificial
  Probe
catcacgcatggaagaagtagacta

SEQ ID NO: 155460 - DNA, 25 bp, Artificial
  Probe
agaactatgtgtttgatgcttacct

SEQ ID NO: 155461 - DNA, 25 bp, Artificial
  Probe
cagaactatgtgtttgatgcttacc

SEQ ID NO: 155462 - DNA, 25 bp, Artificial
  Probe
ccagaactatgtgtttgatgcttac

SEQ ID NO: 155463 - DNA, 25 bp, Artificial
  Probe
aactatgtgtttgatgcttaccttc

SEQ ID NO: 155464 - DNA, 25 bp, Artificial
  Probe
gaactatgtgtttgatgcttacctt

SEQ ID NO: 155465 - DNA, 25 bp, Artificial
  Probe
accagaactatgtgtttgatgctta

SEQ ID NO: 155466 - DNA, 25 bp, Artificial
  Probe
agactaggcttcaccagaactatgt

SEQ ID NO: 155467 - DNA, 25 bp, Artificial
  Probe
tgtgatactgtgatctataggttga

SEQ ID NO: 155468 - DNA, 25 bp, Artificial
  Probe
actgtgatactgtgatctataggtt

SEQ ID NO: 155469 - DNA, 25 bp, Artificial
  Probe
agcaaagaaacacctggagataaac

SEQ ID NO: 155470 - DNA, 25 bp, Artificial
  Probe
ctgttatgttgtgtatggatgtgta

SEQ ID NO: 155471 - DNA, 25 bp, Artificial
  Probe
gctgttatgttgtgtatggatgtgt

SEQ ID NO: 155472 - DNA, 25 bp, Artificial
  Probe
tagagtatctcaatcaagaacaggc

SEQ ID NO: 155473 - DNA, 25 bp, Artificial
  Probe
tgttatgttgtgtatggatgtgtat

SEQ ID NO: 155474 - DNA, 25 bp, Artificial
  Probe
agtgttgactaatgtatccaatggt

SEQ ID NO: 155475 - DNA, 25 bp, Artificial
  Probe
tacaagcagatgactccagatagtt

SEQ ID NO: 155476 - DNA, 25 bp, Artificial
  Probe
agtatctcaatcaagaacaggcaga

SEQ ID NO: 155477 - DNA, 25 bp, Artificial
  Probe
atacgaaccaatccatgaagaatga

SEQ ID NO: 155478 - DNA, 25 bp, Artificial
  Probe
gtatctcaatcaagaacaggcagag

SEQ ID NO: 155479 - DNA, 25 bp, Artificial
  Probe
gagtatctcaatcaagaacaggcag

SEQ ID NO: 155480 - DNA, 25 bp, Artificial
  Probe
tgctagagtatctcaatcaagaaca

SEQ ID NO: 155481 - DNA, 25 bp, Artificial
  Probe
gtgctagagtatctcaatcaagaac

SEQ ID NO: 155482 - DNA, 25 bp, Artificial
  Probe
gtgttgactaatgtatccaatggtc

SEQ ID NO: 155483 - DNA, 25 bp, Artificial
  Probe
agtgctagagtatctcaatcaagaa

SEQ ID NO: 155484 - DNA, 25 bp, Artificial
  Probe
aagtgctagagtatctcaatcaaga

SEQ ID NO: 155485 - DNA, 25 bp, Artificial
  Probe
tacgaaccaatccatgaagaatgag

SEQ ID NO: 155486 - DNA, 25 bp, Artificial
  Probe
agagtatctcaatcaagaacaggca

SEQ ID NO: 155487 - DNA, 25 bp, Artificial
  Probe
tatacgaaccaatccatgaagaatg

SEQ ID NO: 155488 - DNA, 25 bp, Artificial
  Probe
tcatggtattgacaatgctcacata

SEQ ID NO: 155489 - DNA, 25 bp, Artificial
  Probe
gctagagtatctcaatcaagaacag

SEQ ID NO: 155490 - DNA, 25 bp, Artificial
  Probe
catggtattgacaatgctcacatat

SEQ ID NO: 155491 - DNA, 25 bp, Artificial
  Probe
attctgagctgttatgttgtgtatg

SEQ ID NO: 155492 - DNA, 25 bp, Artificial
  Probe
cttattctgagctgttatgttgtgt

SEQ ID NO: 155493 - DNA, 25 bp, Artificial
  Probe
acttattctgagctgttatgttgtg

SEQ ID NO: 155494 - DNA, 25 bp, Artificial
  Probe
aatatacgaaccaatccatgaagaa

SEQ ID NO: 155495 - DNA, 25 bp, Artificial
  Probe
ctgagctgttatgttgtgtatggat

SEQ ID NO: 155496 - DNA, 25 bp, Artificial
  Probe
ctagagtatctcaatcaagaacagg

SEQ ID NO: 155497 - DNA, 25 bp, Artificial
  Probe
gtacaagcagatgactccagatagt

SEQ ID NO: 155498 - DNA, 25 bp, Artificial
  Probe
atatacgaaccaatccatgaagaat

SEQ ID NO: 155499 - DNA, 25 bp, Artificial
  Probe
gagctgttatgttgtgtatggatgt

SEQ ID NO: 155500 - DNA, 25 bp, Artificial
  Probe
tgagctgttatgttgtgtatggatg

SEQ ID NO: 155501 - DNA, 25 bp, Artificial
  Probe
ttctgagctgttatgttgtgtatgg

SEQ ID NO: 155502 - DNA, 25 bp, Artificial
  Probe
tagacagtacctggatgaagatatg

SEQ ID NO: 155503 - DNA, 25 bp, Artificial
  Probe
agctgttatgttgtgtatggatgtg

SEQ ID NO: 155504 - DNA, 25 bp, Artificial
  Probe
acacagaaatatacgaaccaatcca

SEQ ID NO: 155505 - DNA, 25 bp, Artificial
  Probe
agagaacacagaaatatacgaacca

SEQ ID NO: 155506 - DNA, 25 bp, Artificial
  Probe
aagtgtgttaatctctatcctgtta

SEQ ID NO: 155507 - DNA, 25 bp, Artificial
  Probe
taagtgtgttaatctctatcctgtt

SEQ ID NO: 155508 - DNA, 25 bp, Artificial
  Probe
aacacagaaatatacgaaccaatcc

SEQ ID NO: 155509 - DNA, 25 bp, Artificial
  Probe
acagtacctggatgaagatatgctc

SEQ ID NO: 155510 - DNA, 25 bp, Artificial
  Probe
gacagtacctggatgaagatatgct

SEQ ID NO: 155511 - DNA, 25 bp, Artificial
  Probe
agacagtacctggatgaagatatgc

SEQ ID NO: 155512 - DNA, 25 bp, Artificial
  Probe
ctttaatgcccaatttcccttcttt

SEQ ID NO: 155513 - DNA, 25 bp, Artificial
  Probe
cacagaaatatacgaaccaatccat

SEQ ID NO: 155514 - DNA, 25 bp, Artificial
  Probe
tctgagctgttatgttgtgtatgga

SEQ ID NO: 155515 - DNA, 25 bp, Artificial
  Probe
ctgatgaggaagtggatgagatgat

SEQ ID NO: 155516 - DNA, 25 bp, Artificial
  Probe
tgatgaggaagtggatgagatgatc

SEQ ID NO: 155517 - DNA, 25 bp, Artificial
  Probe
acaaacacaacaaagagaagaaaca

SEQ ID NO: 155518 - DNA, 25 bp, Artificial
  Probe
taaagcaacagaagattagtcccaa

SEQ ID NO: 155519 - DNA, 25 bp, Artificial
  Probe
ataaagcaacagaagattagtccca

SEQ ID NO: 155520 - DNA, 25 bp, Artificial
  Probe
cacaaacacaacaaagagaagaaac

SEQ ID NO: 155521 - DNA, 25 bp, Artificial
  Probe
gactgatgaggaagtggatgagatg

SEQ ID NO: 155522 - DNA, 25 bp, Artificial
  Probe
gataaagcaacagaagattagtccc

SEQ ID NO: 155523 - DNA, 25 bp, Artificial
  Probe
tgactgagaatctgataaagcaaca

SEQ ID NO: 155524 - DNA, 25 bp, Artificial
  Probe
ccagaaagatgaaggatacagacag

SEQ ID NO: 155525 - DNA, 25 bp, Artificial
  Probe
aaagcaacagaagattagtcccaaa

SEQ ID NO: 155526 - DNA, 25 bp, Artificial
  Probe
caaacacaacaaagagaagaaacaa

SEQ ID NO: 155527 - DNA, 25 bp, Artificial
  Probe
gcacaaacacaacaaagagaagaaa

SEQ ID NO: 155528 - DNA, 25 bp, Artificial
  Probe
aaagaagcacaaacacaacaaagag

SEQ ID NO: 155529 - DNA, 25 bp, Artificial
  Probe
tgataaagcaacagaagattagtcc

SEQ ID NO: 155530 - DNA, 25 bp, Artificial
  Probe
aacaaagaagcacaaacacaacaaa

SEQ ID NO: 155531 - DNA, 25 bp, Artificial
  Probe
aaacaaagaagcacaaacacaacaa

SEQ ID NO: 155532 - DNA, 25 bp, Artificial
  Probe
cagaaagatgaaggatacagacagc

SEQ ID NO: 155533 - DNA, 25 bp, Artificial
  Probe
caaagaagcacaaacacaacaaaga

SEQ ID NO: 155534 - DNA, 25 bp, Artificial
  Probe
actgatgaggaagtggatgagatga

SEQ ID NO: 155535 - DNA, 25 bp, Artificial
  Probe
tgactgatgaggaagtggatgagat

SEQ ID NO: 155536 - DNA, 25 bp, Artificial
  Probe
ttgactgagaatctgataaagcaac

SEQ ID NO: 155537 - DNA, 25 bp, Artificial
  Probe
aaacacaacaaagagaagaaacaaa

SEQ ID NO: 155538 - DNA, 25 bp, Artificial
  Probe
gaagcacaaacacaacaaagagaag

SEQ ID NO: 155539 - DNA, 25 bp, Artificial
  Probe
acaaagaagcacaaacacaacaaag

SEQ ID NO: 155540 - DNA, 25 bp, Artificial
  Probe
agcacaaacacaacaaagagaagaa

SEQ ID NO: 155541 - DNA, 25 bp, Artificial
  Probe
aagcacaaacacaacaaagagaaga

SEQ ID NO: 155542 - DNA, 25 bp, Artificial
  Probe
agaagcacaaacacaacaaagagaa

SEQ ID NO: 155543 - DNA, 25 bp, Artificial
  Probe
aagaagcacaaacacaacaaagaga

SEQ ID NO: 155544 - DNA, 25 bp, Artificial
  Probe
attgactgagaatctgataaagcaa

SEQ ID NO: 155545 - DNA, 25 bp, Artificial
  Probe
ccaggtcaattatgaagagtttgta

SEQ ID NO: 155546 - DNA, 25 bp, Artificial
  Probe
gactgagaatctgataaagcaacag

SEQ ID NO: 155547 - DNA, 25 bp, Artificial
  Probe
gatacagacagcgaggaggagatac

SEQ ID NO: 155548 - DNA, 25 bp, Artificial
  Probe
gccaggtcaattatgaagagtttgt

SEQ ID NO: 155549 - DNA, 25 bp, Artificial
  Probe
gccagaaagatgaaggatacagaca

SEQ ID NO: 155550 - DNA, 25 bp, Artificial
  Probe
ctgactgatgaggaagtggatgaga

SEQ ID NO: 155551 - DNA, 25 bp, Artificial
  Probe
aaagatgaaggatacagacagcgag

SEQ ID NO: 155552 - DNA, 25 bp, Artificial
  Probe
gaaagatgaaggatacagacagcga

SEQ ID NO: 155553 - DNA, 25 bp, Artificial
  Probe
agaaagatgaaggatacagacagcg

SEQ ID NO: 155554 - DNA, 25 bp, Artificial
  Probe
aagatgaaggatacagacagcgagg

SEQ ID NO: 155555 - DNA, 25 bp, Artificial
  Probe
gattgactgagaatctgataaagca

SEQ ID NO: 155556 - DNA, 25 bp, Artificial
  Probe
tgattgactgagaatctgataaagc

SEQ ID NO: 155557 - DNA, 25 bp, Artificial
  Probe
caggtcaattatgaagagtttgtac

SEQ ID NO: 155558 - DNA, 25 bp, Artificial
  Probe
ctgataaagcaacagaagattagtc

SEQ ID NO: 155559 - DNA, 25 bp, Artificial
  Probe
gatgaaggatacagacagcgaggag

SEQ ID NO: 155560 - DNA, 25 bp, Artificial
  Probe
ctgtatttaggtttaccactgcttg

SEQ ID NO: 155561 - DNA, 25 bp, Artificial
  Probe
tctgtatttaggtttaccactgctt

SEQ ID NO: 155562 - DNA, 25 bp, Artificial
  Probe
ttctgtatttaggtttaccactgct

SEQ ID NO: 155563 - DNA, 25 bp, Artificial
  Probe
tgtatttaggtttaccactgcttgt

SEQ ID NO: 155564 - DNA, 25 bp, Artificial
  Probe
gtatttaggtttaccactgcttgtt

SEQ ID NO: 155565 - DNA, 25 bp, Artificial
  Probe
tatttaggtttaccactgcttgttc

SEQ ID NO: 155566 - DNA, 25 bp, Artificial
  Probe
atttaggtttaccactgcttgttca

SEQ ID NO: 155567 - DNA, 25 bp, Artificial
  Probe
tttctgtatttaggtttaccactgc

SEQ ID NO: 155568 - DNA, 25 bp, Artificial
  Probe
ttaggtttaccactgcttgttcaaa

SEQ ID NO: 155569 - DNA, 25 bp, Artificial
  Probe
tttaggtttaccactgcttgttcaa

SEQ ID NO: 155570 - DNA, 25 bp, Artificial
  Probe
gtggatcatttgtgctgtacttatt

SEQ ID NO: 155571 - DNA, 25 bp, Artificial
  Probe
tgtggatcatttgtgctgtacttat

SEQ ID NO: 155572 - DNA, 25 bp, Artificial
  Probe
tggatcatttgtgctgtacttattt

SEQ ID NO: 155573 - DNA, 25 bp, Artificial
  Probe
tacccatttcgccttatagtgagtc

SEQ ID NO: 155574 - DNA, 25 bp, Artificial
  Probe
tcatttgtgctgtacttatttctgt

SEQ ID NO: 155575 - DNA, 25 bp, Artificial
  Probe
ctgtggatcatttgtgctgtactta

SEQ ID NO: 155576 - DNA, 25 bp, Artificial
  Probe
taggtttaccactgcttgttcaaag

SEQ ID NO: 155577 - DNA, 25 bp, Artificial
  Probe
ggatcatttgtgctgtacttatttc

SEQ ID NO: 155578 - DNA, 25 bp, Artificial
  Probe
aacttattcgccttggagcacattc

SEQ ID NO: 155579 - DNA, 25 bp, Artificial
  Probe
gtacccatttcgccttatagtgagt

SEQ ID NO: 155580 - DNA, 25 bp, Artificial
  Probe
atcatttgtgctgtacttatttctg

SEQ ID NO: 155581 - DNA, 25 bp, Artificial
  Probe
gatcatttgtgctgtacttatttct

SEQ ID NO: 155582 - DNA, 25 bp, Artificial
  Probe
catttgtgctgtacttatttctgta

SEQ ID NO: 155583 - DNA, 25 bp, Artificial
  Probe
tcgccttatagtgagtcgaatacaa

SEQ ID NO: 155584 - DNA, 25 bp, Artificial
  Probe
actgtggatcatttgtgctgtactt

SEQ ID NO: 155585 - DNA, 25 bp, Artificial
  Probe
tctctccaacaaggcaaaggttaag

SEQ ID NO: 155586 - DNA, 25 bp, Artificial
  Probe
caacttattcgccttggagcacatt

SEQ ID NO: 155587 - DNA, 25 bp, Artificial
  Probe
aaatttgtagtctgtctctccaaca

SEQ ID NO: 155588 - DNA, 25 bp, Artificial
  Probe
ccctgtttatattggaaacctcagt

SEQ ID NO: 155589 - DNA, 25 bp, Artificial
  Probe
atttctgtatttaggtttaccactg

SEQ ID NO: 155590 - DNA, 25 bp, Artificial
  Probe
cctgtttatattggaaacctcagtt

SEQ ID NO: 155591 - DNA, 25 bp, Artificial
  Probe
gtctctccaacaaggcaaaggttaa

SEQ ID NO: 155592 - DNA, 25 bp, Artificial
  Probe
cgtacccatttcgccttatagtgag

SEQ ID NO: 155593 - DNA, 25 bp, Artificial
  Probe
gactgtggatcatttgtgctgtact

SEQ ID NO: 155594 - DNA, 25 bp, Artificial
  Probe
agactgtggatcatttgtgctgtac

SEQ ID NO: 155595 - DNA, 25 bp, Artificial
  Probe
ttgtgctgtacttatttctgtattt

SEQ ID NO: 155596 - DNA, 25 bp, Artificial
  Probe
tttgtgctgtacttatttctgtatt

SEQ ID NO: 155597 - DNA, 25 bp, Artificial
  Probe
gtacagccctgtttatattggaaac

SEQ ID NO: 155598 - DNA, 25 bp, Artificial
  Probe
ttgcttttaatcttcttgtctctgt

SEQ ID NO: 155599 - DNA, 25 bp, Artificial
  Probe
gtagtctgtctctccaacaaggcaa

SEQ ID NO: 155600 - DNA, 25 bp, Artificial
  Probe
gccctgtttatattggaaacctcag

SEQ ID NO: 155601 - DNA, 25 bp, Artificial
  Probe
cagccctgtttatattggaaacctc

SEQ ID NO: 155602 - DNA, 25 bp, Artificial
  Probe
atttgtgctgtacttatttctgtat

SEQ ID NO: 155603 - DNA, 25 bp, Artificial
  Probe
tacagccctgtttatattggaaacc

SEQ ID NO: 155604 - DNA, 25 bp, Artificial
  Probe
tgctgtacttatttctgtatttagg

SEQ ID NO: 155605 - DNA, 25 bp, Artificial
  Probe
gggtttatctaggttgctgagtatt

SEQ ID NO: 155606 - DNA, 25 bp, Artificial
  Probe
agggtttatctaggttgctgagtat

SEQ ID NO: 155607 - DNA, 25 bp, Artificial
  Probe
cctattaagtctttactggagagcc

SEQ ID NO: 155608 - DNA, 25 bp, Artificial
  Probe
ctctccatcagggtttatctaggtt

SEQ ID NO: 155609 - DNA, 25 bp, Artificial
  Probe
tctccatcagggtttatctaggttg

SEQ ID NO: 155610 - DNA, 25 bp, Artificial
  Probe
ggtttatctaggttgctgagtattt

SEQ ID NO: 155611 - DNA, 25 bp, Artificial
  Probe
atgttccttcccaagtcttgtattt

SEQ ID NO: 155612 - DNA, 25 bp, Artificial
  Probe
aatgttccttcccaagtcttgtatt

SEQ ID NO: 155613 - DNA, 25 bp, Artificial
  Probe
ttcccaagtcttgtatttctccttc

SEQ ID NO: 155614 - DNA, 25 bp, Artificial
  Probe
cttcccaagtcttgtatttctcctt

SEQ ID NO: 155615 - DNA, 25 bp, Artificial
  Probe
ttccttcccaagtcttgtatttctc

SEQ ID NO: 155616 - DNA, 25 bp, Artificial
  Probe
tttcattccaatgttccttcccaag

SEQ ID NO: 155617 - DNA, 25 bp, Artificial
  Probe
aagtttcattccaatgttccttccc

SEQ ID NO: 155618 - DNA, 25 bp, Artificial
  Probe
gttccttcccaagtcttgtatttct

SEQ ID NO: 155619 - DNA, 25 bp, Artificial
  Probe
ccaagtcttgtatttctccttcact

SEQ ID NO: 155620 - DNA, 25 bp, Artificial
  Probe
tgttccttcccaagtcttgtatttc

SEQ ID NO: 155621 - DNA, 25 bp, Artificial
  Probe
caatgttccttcccaagtcttgtat

SEQ ID NO: 155622 - DNA, 25 bp, Artificial
  Probe
gtttcattccaatgttccttcccaa

SEQ ID NO: 155623 - DNA, 25 bp, Artificial
  Probe
attccaatgttccttcccaagtctt

SEQ ID NO: 155624 - DNA, 25 bp, Artificial
  Probe
tcctattaagtctttactggagagc

SEQ ID NO: 155625 - DNA, 25 bp, Artificial
  Probe
cccaagtcttgtatttctccttcac

SEQ ID NO: 155626 - DNA, 25 bp, Artificial
  Probe
tcccaagtcttgtatttctccttca

SEQ ID NO: 155627 - DNA, 25 bp, Artificial
  Probe
cccactcctattaagtctttactgg

SEQ ID NO: 155628 - DNA, 25 bp, Artificial
  Probe
ctattaagtctttactggagagcca

SEQ ID NO: 155629 - DNA, 25 bp, Artificial
  Probe
cagggtttatctaggttgctgagta

SEQ ID NO: 155630 - DNA, 25 bp, Artificial
  Probe
ccactcctattaagtctttactgga

SEQ ID NO: 155631 - DNA, 25 bp, Artificial
  Probe
ctccatcagggtttatctaggttgc

SEQ ID NO: 155632 - DNA, 25 bp, Artificial
  Probe
ccttcccaagtcttgtatttctcct

SEQ ID NO: 155633 - DNA, 25 bp, Artificial
  Probe
tccttcccaagtcttgtatttctcc

SEQ ID NO: 155634 - DNA, 25 bp, Artificial
  Probe
accgagaagaaaggaaccttgatag

SEQ ID NO: 155635 - DNA, 25 bp, Artificial
  Probe
ttcattccaatgttccttcccaagt

SEQ ID NO: 155636 - DNA, 25 bp, Artificial
  Probe
agtttcattccaatgttccttccca

SEQ ID NO: 155637 - DNA, 25 bp, Artificial
  Probe
caccgagaagaaaggaaccttgata

SEQ ID NO: 155638 - DNA, 25 bp, Artificial
  Probe
tccatcagggtttatctaggttgct

SEQ ID NO: 155639 - DNA, 25 bp, Artificial
  Probe
cattccaatgttccttcccaagtct

SEQ ID NO: 155640 - DNA, 25 bp, Artificial
  Probe
tcattccaatgttccttcccaagtc

SEQ ID NO: 155641 - DNA, 25 bp, Artificial
  Probe
ccaatgttccttcccaagtcttgta

SEQ ID NO: 155642 - DNA, 25 bp, Artificial
  Probe
ctagggactaactctactcctcacc

SEQ ID NO: 155643 - DNA, 25 bp, Artificial
  Probe
gaagaaaggaaccttgatagcctct

SEQ ID NO: 155644 - DNA, 25 bp, Artificial
  Probe
agaagaaaggaaccttgatagcctc

SEQ ID NO: 155645 - DNA, 25 bp, Artificial
  Probe
gagaagaaaggaaccttgatagcct

SEQ ID NO: 155646 - DNA, 25 bp, Artificial
  Probe
cacagttctgagactccgagatttg

SEQ ID NO: 155647 - DNA, 25 bp, Artificial
  Probe
tagggactaactctactcctcacct

SEQ ID NO: 155648 - DNA, 25 bp, Artificial
  Probe
aagaaaggaaccttgatagcctctg

SEQ ID NO: 155649 - DNA, 25 bp, Artificial
  Probe
ccccactcctattaagtctttactg

SEQ ID NO: 155650 - DNA, 25 bp, Artificial
  Probe
gtggactacaagaacatctgctatg

SEQ ID NO: 155651 - DNA, 25 bp, Artificial
  Probe
cattattgacaaggaggatcttcgg

SEQ ID NO: 155652 - DNA, 25 bp, Artificial
  Probe
ctatcaacttcactgtcttcctgac

SEQ ID NO: 155653 - DNA, 25 bp, Artificial
  Probe
gatggcattattgacaaggaggatc

SEQ ID NO: 155654 - DNA, 25 bp, Artificial
  Probe
cctatcaacttcactgtcttcctga

SEQ ID NO: 155655 - DNA, 25 bp, Artificial
  Probe
ggcattattgacaaggaggatcttc

SEQ ID NO: 155656 - DNA, 25 bp, Artificial
  Probe
atggcattattgacaaggaggatct

SEQ ID NO: 155657 - DNA, 25 bp, Artificial
  Probe
gcattattgacaaggaggatcttcg

SEQ ID NO: 155658 - DNA, 25 bp, Artificial
  Probe
tggcattattgacaaggaggatctt

SEQ ID NO: 155659 - DNA, 25 bp, Artificial
  Probe
cgtggactacaagaacatctgctat

SEQ ID NO: 155660 - DNA, 25 bp, Artificial
  Probe
ggatggcattattgacaaggaggat

SEQ ID NO: 155661 - DNA, 25 bp, Artificial
  Probe
tatcaacttcactgtcttcctgacc

SEQ ID NO: 155662 - DNA, 25 bp, Artificial
  Probe
gcctatcaacttcactgtcttcctg

SEQ ID NO: 155663 - DNA, 25 bp, Artificial
  Probe
cttgccttcagaggatctaagacat

SEQ ID NO: 155664 - DNA, 25 bp, Artificial
  Probe
agtcaactggtctttgtttcttaaa

SEQ ID NO: 155665 - DNA, 25 bp, Artificial
  Probe
aagtcaactggtctttgtttcttaa

SEQ ID NO: 155666 - DNA, 25 bp, Artificial
  Probe
gttcaaggaggctttcactgtaatt

SEQ ID NO: 155667 - DNA, 25 bp, Artificial
  Probe
ttgccttcagaggatctaagacatg

SEQ ID NO: 155668 - DNA, 25 bp, Artificial
  Probe
ttcaaggaggctttcactgtaattg

SEQ ID NO: 155669 - DNA, 25 bp, Artificial
  Probe
caaggaggctttcactgtaattgat

SEQ ID NO: 155670 - DNA, 25 bp, Artificial
  Probe
caatgtgaagaatgaggaactcgac

SEQ ID NO: 155671 - DNA, 25 bp, Artificial
  Probe
tcaatgtgaagaatgaggaactcga

SEQ ID NO: 155672 - DNA, 25 bp, Artificial
  Probe
tacaagaacatctgctatgtcatca

SEQ ID NO: 155673 - DNA, 25 bp, Artificial
  Probe
actacaagaacatctgctatgtcat

SEQ ID NO: 155674 - DNA, 25 bp, Artificial
  Probe
gaacagggatggcattattgacaag

SEQ ID NO: 155675 - DNA, 25 bp, Artificial
  Probe
gactacaagaacatctgctatgtca

SEQ ID NO: 155676 - DNA, 25 bp, Artificial
  Probe
ccaggaggagatcaagaatatgtgg

SEQ ID NO: 155677 - DNA, 25 bp, Artificial
  Probe
ctacaagaacatctgctatgtcatc

SEQ ID NO: 155678 - DNA, 25 bp, Artificial
  Probe
aaggaggctttcactgtaattgatc

SEQ ID NO: 155679 - DNA, 25 bp, Artificial
  Probe
ggactacaagaacatctgctatgtc

SEQ ID NO: 155680 - DNA, 25 bp, Artificial
  Probe
gatcagaacagggatggcattattg

SEQ ID NO: 155681 - DNA, 25 bp, Artificial
  Probe
aagaacatctgctatgtcatcacac

SEQ ID NO: 155682 - DNA, 25 bp, Artificial
  Probe
caagaacatctgctatgtcatcaca

SEQ ID NO: 155683 - DNA, 25 bp, Artificial
  Probe
acaagaacatctgctatgtcatcac

SEQ ID NO: 155684 - DNA, 25 bp, Artificial
  Probe
agaacagggatggcattattgacaa

SEQ ID NO: 155685 - DNA, 25 bp, Artificial
  Probe
atcagaacagggatggcattattga

SEQ ID NO: 155686 - DNA, 25 bp, Artificial
  Probe
agttcaaggaggctttcactgtaat

SEQ ID NO: 155687 - DNA, 25 bp, Artificial
  Probe
tggactacaagaacatctgctatgt

SEQ ID NO: 155688 - DNA, 25 bp, Artificial
  Probe
caggaggagatcaagaatatgtggg

SEQ ID NO: 155689 - DNA, 25 bp, Artificial
  Probe
cccaggaggagatcaagaatatgtg

SEQ ID NO: 155690 - DNA, 25 bp, Artificial
  Probe
attattgacaaggaggatcttcggg

SEQ ID NO: 155691 - DNA, 25 bp, Artificial
  Probe
tttcccaggaggagatcaagaatat

SEQ ID NO: 155692 - DNA, 25 bp, Artificial
  Probe
cttcagaggatctaagacatgcacc

SEQ ID NO: 155693 - DNA, 25 bp, Artificial
  Probe
tcaacttcactgtcttcctgaccat

SEQ ID NO: 155694 - DNA, 25 bp, Artificial
  Probe
atcaacttcactgtcttcctgacca

SEQ ID NO: 155695 - DNA, 25 bp, Artificial
  Probe
ctgtcctgacgatgaagagatagag

SEQ ID NO: 155696 - DNA, 25 bp, Artificial
  Probe
acataatggacacactccgatatag

SEQ ID NO: 155697 - DNA, 25 bp, Artificial
  Probe
ctacataatggacacactccgatat

SEQ ID NO: 155698 - DNA, 25 bp, Artificial
  Probe
cataatggacacactccgatatagc

SEQ ID NO: 155699 - DNA, 25 bp, Artificial
  Probe
tacataatggacacactccgatata

SEQ ID NO: 155700 - DNA, 25 bp, Artificial
  Probe
ggaaagattagaggacaagggtaag

SEQ ID NO: 155701 - DNA, 25 bp, Artificial
  Probe
gaaagattagaggacaagggtaaga

SEQ ID NO: 155702 - DNA, 25 bp, Artificial
  Probe
ataagggaaagattagaggacaagg

SEQ ID NO: 155703 - DNA, 25 bp, Artificial
  Probe
ggataagggaaagattagaggacaa

SEQ ID NO: 155704 - DNA, 25 bp, Artificial
  Probe
gggataagggaaagattagaggaca

SEQ ID NO: 155705 - DNA, 25 bp, Artificial
  Probe
agattagaggacaagggtaagattt

SEQ ID NO: 155706 - DNA, 25 bp, Artificial
  Probe
aagattagaggacaagggtaagatt

SEQ ID NO: 155707 - DNA, 25 bp, Artificial
  Probe
aaagattagaggacaagggtaagat

SEQ ID NO: 155708 - DNA, 25 bp, Artificial
  Probe
ataatggacacactccgatatagcc

SEQ ID NO: 155709 - DNA, 25 bp, Artificial
  Probe
atatttgccaagtttctgcctacat

SEQ ID NO: 155710 - DNA, 25 bp, Artificial
  Probe
taagggaaagattagaggacaaggg

SEQ ID NO: 155711 - DNA, 25 bp, Artificial
  Probe
cctgtcctgacgatgaagagataga

SEQ ID NO: 155712 - DNA, 25 bp, Artificial
  Probe
gggaaagattagaggacaagggtaa

SEQ ID NO: 155713 - DNA, 25 bp, Artificial
  Probe
gctacataatggacacactccgata

SEQ ID NO: 155714 - DNA, 25 bp, Artificial
  Probe
gataagggaaagattagaggacaag

SEQ ID NO: 155715 - DNA, 25 bp, Artificial
  Probe
acctgtcctgacgatgaagagatag

SEQ ID NO: 155716 - DNA, 25 bp, Artificial
  Probe
tatttgccaagtttctgcctacatc

SEQ ID NO: 155717 - DNA, 25 bp, Artificial
  Probe
gacatatttgccaagtttctgccta

SEQ ID NO: 155718 - DNA, 25 bp, Artificial
  Probe
catatttgccaagtttctgcctaca

SEQ ID NO: 155719 - DNA, 25 bp, Artificial
  Probe
acatatttgccaagtttctgcctac

SEQ ID NO: 155720 - DNA, 25 bp, Artificial
  Probe
cacctgtcctgacgatgaagagata

SEQ ID NO: 155721 - DNA, 25 bp, Artificial
  Probe
agggaaagattagaggacaagggta

SEQ ID NO: 155722 - DNA, 25 bp, Artificial
  Probe
tgtcctgacgatgaagagatagagc

SEQ ID NO: 155723 - DNA, 25 bp, Artificial
  Probe
ggttctagacaattacttgacatcc

SEQ ID NO: 155724 - DNA, 25 bp, Artificial
  Probe
cctgaaggttctagacaattacttg

SEQ ID NO: 155725 - DNA, 25 bp, Artificial
  Probe
taatggacacactccgatatagcca

SEQ ID NO: 155726 - DNA, 25 bp, Artificial
  Probe
gaaggttctagacaattacttgaca

SEQ ID NO: 155727 - DNA, 25 bp, Artificial
  Probe
tgaaggttctagacaattacttgac

SEQ ID NO: 155728 - DNA, 25 bp, Artificial
  Probe
tgggtaagacaacgtatttcagtaa

SEQ ID NO: 155729 - DNA, 25 bp, Artificial
  Probe
aagggaaagattagaggacaagggt

SEQ ID NO: 155730 - DNA, 25 bp, Artificial
  Probe
aggttctagacaattacttgacatc

SEQ ID NO: 155731 - DNA, 25 bp, Artificial
  Probe
ctgaaggttctagacaattacttga

SEQ ID NO: 155732 - DNA, 25 bp, Artificial
  Probe
tcctgacgatgaagagatagagctg

SEQ ID NO: 155733 - DNA, 25 bp, Artificial
  Probe
gtcctgacgatgaagagatagagct

SEQ ID NO: 155734 - DNA, 25 bp, Artificial
  Probe
tctgcctacatcaagaactcaaacc

SEQ ID NO: 155735 - DNA, 25 bp, Artificial
  Probe
gggtaagacaacgtatttcagtaat

SEQ ID NO: 155736 - DNA, 25 bp, Artificial
  Probe
ttgggtaagacaacgtatttcagta

SEQ ID NO: 155737 - DNA, 25 bp, Artificial
  Probe
acgttgctacataatggacacactc

SEQ ID NO: 155738 - DNA, 25 bp, Artificial
  Probe
aaggttctagacaattacttgacat

SEQ ID NO: 155739 - DNA, 25 bp, Artificial
  Probe
atttgccaagtttctgcctacatca

SEQ ID NO: 155740 - DNA, 25 bp, Artificial
  Probe
aatgctcttcacagtagacaatgag

SEQ ID NO: 155741 - DNA, 25 bp, Artificial
  Probe
caatgctcttcacagtagacaatga

SEQ ID NO: 155742 - DNA, 25 bp, Artificial
  Probe
atgctcttcacagtagacaatgagg

SEQ ID NO: 155743 - DNA, 25 bp, Artificial
  Probe
gcaatgctcttcacagtagacaatg

SEQ ID NO: 155744 - DNA, 25 bp, Artificial
  Probe
ctaaagtcactacccaggaatgcta

SEQ ID NO: 155745 - DNA, 25 bp, Artificial
  Probe
tgtctaaagtcactacccaggaatg

SEQ ID NO: 155746 - DNA, 25 bp, Artificial
  Probe
taaagtcactacccaggaatgctac

SEQ ID NO: 155747 - DNA, 25 bp, Artificial
  Probe
atgtaaagaactgatgggagggaag

SEQ ID NO: 155748 - DNA, 25 bp, Artificial
  Probe
gatgtaaagaactgatgggagggaa

SEQ ID NO: 155749 - DNA, 25 bp, Artificial
  Probe
ctcttcacagtagacaatgaggctg

SEQ ID NO: 155750 - DNA, 25 bp, Artificial
  Probe
gagatgtaaagaactgatgggaggg

SEQ ID NO: 155751 - DNA, 25 bp, Artificial
  Probe
ggagatgtaaagaactgatgggagg

SEQ ID NO: 155752 - DNA, 25 bp, Artificial
  Probe
gtctcggagatgtaaagaactgatg

SEQ ID NO: 155753 - DNA, 25 bp, Artificial
  Probe
ctgtctaaagtcactacccaggaat

SEQ ID NO: 155754 - DNA, 25 bp, Artificial
  Probe
agatgtaaagaactgatgggaggga

SEQ ID NO: 155755 - DNA, 25 bp, Artificial
  Probe
cggagatgtaaagaactgatgggag

SEQ ID NO: 155756 - DNA, 25 bp, Artificial
  Probe
tctcggagatgtaaagaactgatgg

SEQ ID NO: 155757 - DNA, 25 bp, Artificial
  Probe
ctcggagatgtaaagaactgatggg

SEQ ID NO: 155758 - DNA, 25 bp, Artificial
  Probe
tgcaatgctcttcacagtagacaat

SEQ ID NO: 155759 - DNA, 25 bp, Artificial
  Probe
gtctaaagtcactacccaggaatgc

SEQ ID NO: 155760 - DNA, 25 bp, Artificial
  Probe
tacctaacatcctgatcacgtctag

SEQ ID NO: 155761 - DNA, 25 bp, Artificial
  Probe
ctacctaacatcctgatcacgtcta

SEQ ID NO: 155762 - DNA, 25 bp, Artificial
  Probe
atctgtctaaagtcactacccagga

SEQ ID NO: 155763 - DNA, 25 bp, Artificial
  Probe
catctgtctaaagtcactacccagg

SEQ ID NO: 155764 - DNA, 25 bp, Artificial
  Probe
ccatctgtctaaagtcactacccag

SEQ ID NO: 155765 - DNA, 25 bp, Artificial
  Probe
tctaaagtcactacccaggaatgct

SEQ ID NO: 155766 - DNA, 25 bp, Artificial
  Probe
tcggagatgtaaagaactgatggga

SEQ ID NO: 155767 - DNA, 25 bp, Artificial
  Probe
cctaacatcctgatcacgtctagat

SEQ ID NO: 155768 - DNA, 25 bp, Artificial
  Probe
gaatgctacctaacatcctgatcac

SEQ ID NO: 155769 - DNA, 25 bp, Artificial
  Probe
cgtctcggagatgtaaagaactgat

SEQ ID NO: 155770 - DNA, 25 bp, Artificial
  Probe
tctgtctaaagtcactacccaggaa

SEQ ID NO: 155771 - DNA, 25 bp, Artificial
  Probe
ataaaggaccatgtgcaatactaaa

SEQ ID NO: 155772 - DNA, 25 bp, Artificial
  Probe
aataaaggaccatgtgcaatactaa

SEQ ID NO: 155773 - DNA, 25 bp, Artificial
  Probe
aaataaaggaccatgtgcaatacta

SEQ ID NO: 155774 - DNA, 25 bp, Artificial
  Probe
ctacccaggaatgctacctaacatc

SEQ ID NO: 155775 - DNA, 25 bp, Artificial
  Probe
atgcttgtgtcaggttcctcagaat

SEQ ID NO: 155776 - DNA, 25 bp, Artificial
  Probe
atctgcaatgctcttcacagtagac

SEQ ID NO: 155777 - DNA, 25 bp, Artificial
  Probe
catctgcaatgctcttcacagtaga

SEQ ID NO: 155778 - DNA, 25 bp, Artificial
  Probe
cacattctcctcagacatctgcaat

SEQ ID NO: 155779 - DNA, 25 bp, Artificial
  Probe
actacccaggaatgctacctaacat

SEQ ID NO: 155780 - DNA, 25 bp, Artificial
  Probe
acatttgagtcttgggacctttcag

SEQ ID NO: 155781 - DNA, 25 bp, Artificial
  Probe
gacatttgagtcttgggacctttca

SEQ ID NO: 155782 - DNA, 25 bp, Artificial
  Probe
acatctgcaatgctcttcacagtag

SEQ ID NO: 155783 - DNA, 25 bp, Artificial
  Probe
gacatctgcaatgctcttcacagta

SEQ ID NO: 155784 - DNA, 25 bp, Artificial
  Probe
acctaacatcctgatcacgtctaga

SEQ ID NO: 155785 - DNA, 25 bp, Artificial
  Probe
caagagtattattaacgctgccata

SEQ ID NO: 155786 - DNA, 25 bp, Artificial
  Probe
ccaagagtattattaacgctgccat

SEQ ID NO: 155787 - DNA, 25 bp, Artificial
  Probe
cagagtattaacgctccaagagtat

SEQ ID NO: 155788 - DNA, 25 bp, Artificial
  Probe
agagtattaacgctccaagagtatt

SEQ ID NO: 155789 - DNA, 25 bp, Artificial
  Probe
taacgctccaagagtattattaacg

SEQ ID NO: 155790 - DNA, 25 bp, Artificial
  Probe
tattattaacgctgccatacctcag

SEQ ID NO: 155791 - DNA, 25 bp, Artificial
  Probe
tccaagagtattattaacgctgcca

SEQ ID NO: 155792 - DNA, 25 bp, Artificial
  Probe
aacgctccaagagtattattaacgc

SEQ ID NO: 155793 - DNA, 25 bp, Artificial
  Probe
agtattattaacgctgccatacctc

SEQ ID NO: 155794 - DNA, 25 bp, Artificial
  Probe
gagtattattaacgctgccatacct

SEQ ID NO: 155795 - DNA, 25 bp, Artificial
  Probe
agagtattattaacgctgccatacc

SEQ ID NO: 155796 - DNA, 25 bp, Artificial
  Probe
ctccaagagtattattaacgctgcc

SEQ ID NO: 155797 - DNA, 25 bp, Artificial
  Probe
ccagagtattaacgctccaagagta

SEQ ID NO: 155798 - DNA, 25 bp, Artificial
  Probe
gtattattaacgctgccatacctca

SEQ ID NO: 155799 - DNA, 25 bp, Artificial
  Probe
aagagtattattaacgctgccatac

SEQ ID NO: 155800 - DNA, 25 bp, Artificial
  Probe
cgctccaagagtattattaacgctg

SEQ ID NO: 155801 - DNA, 25 bp, Artificial
  Probe
gagtattaacgctccaagagtatta

SEQ ID NO: 155802 - DNA, 25 bp, Artificial
  Probe
gctccaagagtattattaacgctgc

SEQ ID NO: 155803 - DNA, 25 bp, Artificial
  Probe
acgctccaagagtattattaacgct

SEQ ID NO: 155804 - DNA, 25 bp, Artificial
  Probe
gctccaataaaggtgactctatgaa

SEQ ID NO: 155805 - DNA, 25 bp, Artificial
  Probe
attattaacgctgccatacctcagt

SEQ ID NO: 155806 - DNA, 25 bp, Artificial
  Probe
ctccagagtattaacgctccaagag

SEQ ID NO: 155807 - DNA, 25 bp, Artificial
  Probe
ttattaacgctgccatacctcagtt

SEQ ID NO: 155808 - DNA, 25 bp, Artificial
  Probe
agtattaacgctccaagagtattat

SEQ ID NO: 155809 - DNA, 25 bp, Artificial
  Probe
ctccaataaaggtgactctatgaaa

SEQ ID NO: 155810 - DNA, 25 bp, Artificial
  Probe
ttaacgctccaagagtattattaac

SEQ ID NO: 155811 - DNA, 25 bp, Artificial
  Probe
tccagagtattaacgctccaagagt

SEQ ID NO: 155812 - DNA, 25 bp, Artificial
  Probe
gattatcgcagcacaggaagagatg

SEQ ID NO: 155813 - DNA, 25 bp, Artificial
  Probe
gtattaacgctccaagagtattatt

SEQ ID NO: 155814 - DNA, 25 bp, Artificial
  Probe
agattatcgcagcacaggaagagat

SEQ ID NO: 155815 - DNA, 25 bp, Artificial
  Probe
aagctccaataaaggtgactctatg

SEQ ID NO: 155816 - DNA, 25 bp, Artificial
  Probe
caagctccaataaaggtgactctat

SEQ ID NO: 155817 - DNA, 25 bp, Artificial
  Probe
agctccaataaaggtgactctatga

SEQ ID NO: 155818 - DNA, 25 bp, Artificial
  Probe
tacaagttcttgccttcagagcttc

SEQ ID NO: 155819 - DNA, 25 bp, Artificial
  Probe
cctccagagtattaacgctccaaga

SEQ ID NO: 155820 - DNA, 25 bp, Artificial
  Probe
tcaagctccaataaaggtgactcta

SEQ ID NO: 155821 - DNA, 25 bp, Artificial
  Probe
tattaacgctgccatacctcagttt

SEQ ID NO: 155822 - DNA, 25 bp, Artificial
  Probe
gtacaagttcttgccttcagagctt

SEQ ID NO: 155823 - DNA, 25 bp, Artificial
  Probe
attaacgctccaagagtattattaa

SEQ ID NO: 155824 - DNA, 25 bp, Artificial
  Probe
cagtacaagttcttgccttcagagc

SEQ ID NO: 155825 - DNA, 25 bp, Artificial
  Probe
cagattatcgcagcacaggaagaga

SEQ ID NO: 155826 - DNA, 25 bp, Artificial
  Probe
agtacaagttcttgccttcagagct

SEQ ID NO: 155827 - DNA, 25 bp, Artificial
  Probe
tccaataaaggtgactctatgaaaa

SEQ ID NO: 155828 - DNA, 25 bp, Artificial
  Probe
aacaggtcaagctccaataaaggtg

SEQ ID NO: 155829 - DNA, 25 bp, Artificial
  Probe
caacaggtcaagctccaataaaggt

SEQ ID NO: 155830 - DNA, 25 bp, Artificial
  Probe
tatcaacacttgtatctggtctctg

SEQ ID NO: 155831 - DNA, 25 bp, Artificial
  Probe
atatcaacacttgtatctggtctct

SEQ ID NO: 155832 - DNA, 25 bp, Artificial
  Probe
atcaacacttgtatctggtctctgt

SEQ ID NO: 155833 - DNA, 25 bp, Artificial
  Probe
tcaacacttgtatctggtctctgtg

SEQ ID NO: 155834 - DNA, 25 bp, Artificial
  Probe
aagtttcatgctagatgtcctatgt

SEQ ID NO: 155835 - DNA, 25 bp, Artificial
  Probe
gatatcaacacttgtatctggtctc

SEQ ID NO: 155836 - DNA, 25 bp, Artificial
  Probe
agtttcatgctagatgtcctatgta

SEQ ID NO: 155837 - DNA, 25 bp, Artificial
  Probe
aaagtttcatgctagatgtcctatg

SEQ ID NO: 155838 - DNA, 25 bp, Artificial
  Probe
caaagtttcatgctagatgtcctat

SEQ ID NO: 155839 - DNA, 25 bp, Artificial
  Probe
gggtgtatgtagttgtgggtcttag

SEQ ID NO: 155840 - DNA, 25 bp, Artificial
  Probe
ttcatgctagatgtcctatgtatta

SEQ ID NO: 155841 - DNA, 25 bp, Artificial
  Probe
acaaagtttcatgctagatgtccta

SEQ ID NO: 155842 - DNA, 25 bp, Artificial
  Probe
gtatgtagttgtgggtcttagcttc

SEQ ID NO: 155843 - DNA, 25 bp, Artificial
  Probe
agggtgtatgtagttgtgggtctta

SEQ ID NO: 155844 - DNA, 25 bp, Artificial
  Probe
tcatgctagatgtcctatgtattat

SEQ ID NO: 155845 - DNA, 25 bp, Artificial
  Probe
gtttcatgctagatgtcctatgtat

SEQ ID NO: 155846 - DNA, 25 bp, Artificial
  Probe
cacaaagtttcatgctagatgtcct

SEQ ID NO: 155847 - DNA, 25 bp, Artificial
  Probe
tgtatgtagttgtgggtcttagctt

SEQ ID NO: 155848 - DNA, 25 bp, Artificial
  Probe
ggtgtatgtagttgtgggtcttagc

SEQ ID NO: 155849 - DNA, 25 bp, Artificial
  Probe
acacaaagtttcatgctagatgtcc

SEQ ID NO: 155850 - DNA, 25 bp, Artificial
  Probe
ggacacaaagtttcatgctagatgt

SEQ ID NO: 155851 - DNA, 25 bp, Artificial
  Probe
gggacacaaagtttcatgctagatg

SEQ ID NO: 155852 - DNA, 25 bp, Artificial
  Probe
tatgtagttgtgggtcttagcttcc

SEQ ID NO: 155853 - DNA, 25 bp, Artificial
  Probe
tttcatgctagatgtcctatgtatt

SEQ ID NO: 155854 - DNA, 25 bp, Artificial
  Probe
gtgtatgtagttgtgggtcttagct

SEQ ID NO: 155855 - DNA, 25 bp, Artificial
  Probe
ttttggtttagggatgtttggtttt

SEQ ID NO: 155856 - DNA, 25 bp, Artificial
  Probe
ttgttttggttttgctctgattctt

SEQ ID NO: 155857 - DNA, 25 bp, Artificial
  Probe
tttgttttggttttgctctgattct

SEQ ID NO: 155858 - DNA, 25 bp, Artificial
  Probe
ttttgttttggttttgctctgattc

SEQ ID NO: 155859 - DNA, 25 bp, Artificial
  Probe
gttttgttttggttttgctctgatt

SEQ ID NO: 155860 - DNA, 25 bp, Artificial
  Probe
tttgttttgttttggttttgctctg

SEQ ID NO: 155861 - DNA, 25 bp, Artificial
  Probe
ttttgttttgttttggttttgctct

SEQ ID NO: 155862 - DNA, 25 bp, Artificial
  Probe
tcttttgttttgttttggttttgct

SEQ ID NO: 155863 - DNA, 25 bp, Artificial
  Probe
gtcttttgttttgttttggttttgc

SEQ ID NO: 155864 - DNA, 25 bp, Artificial
  Probe
tagttttccaagggtgtatgtagtt

SEQ ID NO: 155865 - DNA, 25 bp, Artificial
  Probe
cttttgttttgttttggttttgctc

SEQ ID NO: 155866 - DNA, 25 bp, Artificial
  Probe
ttgttttgttttgttttctttcgcc

SEQ ID NO: 155867 - DNA, 25 bp, Artificial
  Probe
tggtcttttgttttgttttggtttt

SEQ ID NO: 155868 - DNA, 25 bp, Artificial
  Probe
ttggtcttttgttttgttttggttt

SEQ ID NO: 155869 - DNA, 25 bp, Artificial
  Probe
tttggtcttttgttttgttttggtt

SEQ ID NO: 155870 - DNA, 25 bp, Artificial
  Probe
gttttgttttgttttctttcgcctc

SEQ ID NO: 155871 - DNA, 25 bp, Artificial
  Probe
tttgttttgttttgttttctttcgc

SEQ ID NO: 155872 - DNA, 25 bp, Artificial
  Probe
tgttttgttttggttttgctctgat

SEQ ID NO: 155873 - DNA, 25 bp, Artificial
  Probe
ggtcttttgttttgttttggttttg

SEQ ID NO: 155874 - DNA, 25 bp, Artificial
  Probe
atttggtcttttgttttgttttggt

SEQ ID NO: 155875 - DNA, 25 bp, Artificial
  Probe
tcatctgttacctgacatactgaat

SEQ ID NO: 155876 - DNA, 25 bp, Artificial
  Probe
tgagacagtagaagataatgaagtg

SEQ ID NO: 155877 - DNA, 25 bp, Artificial
  Probe
tctgttacctgacatactgaatagg

SEQ ID NO: 155878 - DNA, 25 bp, Artificial
  Probe
gagacagtagaagataatgaagtga

SEQ ID NO: 155879 - DNA, 25 bp, Artificial
  Probe
agacagtagaagataatgaagtgaa

SEQ ID NO: 155880 - DNA, 25 bp, Artificial
  Probe
tttattcttcccattaggctccaaa

SEQ ID NO: 155881 - DNA, 25 bp, Artificial
  Probe
catctgttacctgacatactgaata

SEQ ID NO: 155882 - DNA, 25 bp, Artificial
  Probe
ttattcttcccattaggctccaaac

SEQ ID NO: 155883 - DNA, 25 bp, Artificial
  Probe
gttaaatactttggcactgactgta

SEQ ID NO: 155884 - DNA, 25 bp, Artificial
  Probe
atctgttacctgacatactgaatag

SEQ ID NO: 155885 - DNA, 25 bp, Artificial
  Probe
atgagacagtagaagataatgaagt

SEQ ID NO: 155886 - DNA, 25 bp, Artificial
  Probe
atactgaatagggaacggctgataa

SEQ ID NO: 155887 - DNA, 25 bp, Artificial
  Probe
tactgaatagggaacggctgataaa

SEQ ID NO: 155888 - DNA, 25 bp, Artificial
  Probe
gtagaagataatgaagtgaaaggct

SEQ ID NO: 155889 - DNA, 25 bp, Artificial
  Probe
agtagaagataatgaagtgaaaggc

SEQ ID NO: 155890 - DNA, 25 bp, Artificial
  Probe
tattcttcccattaggctccaaact

SEQ ID NO: 155891 - DNA, 25 bp, Artificial
  Probe
atttcgcctgaggaataataaagtc

SEQ ID NO: 155892 - DNA, 25 bp, Artificial
  Probe
aatgaagtgaaaggctttgatgatg

SEQ ID NO: 155893 - DNA, 25 bp, Artificial
  Probe
agttaaatactttggcactgactgt

SEQ ID NO: 155894 - DNA, 25 bp, Artificial
  Probe
gaaaggctttgatgatgatgttctc

SEQ ID NO: 155895 - DNA, 25 bp, Artificial
  Probe
tcgcctgaggaataataaagtcatt

SEQ ID NO: 155896 - DNA, 25 bp, Artificial
  Probe
ttcgcctgaggaataataaagtcat

SEQ ID NO: 155897 - DNA, 25 bp, Artificial
  Probe
tttcgcctgaggaataataaagtca

SEQ ID NO: 155898 - DNA, 25 bp, Artificial
  Probe
aagcctctttatgagacagtagaag

SEQ ID NO: 155899 - DNA, 25 bp, Artificial
  Probe
catactgaatagggaacggctgata

SEQ ID NO: 155900 - DNA, 25 bp, Artificial
  Probe
gacaaaccaggagaaagaacttgat

SEQ ID NO: 155901 - DNA, 25 bp, Artificial
  Probe
gaagtgaaaggctttgatgatgatg

SEQ ID NO: 155902 - DNA, 25 bp, Artificial
  Probe
cgcctgaggaataataaagtcattt

SEQ ID NO: 155903 - DNA, 25 bp, Artificial
  Probe
aatttcgcctgaggaataataaagt

SEQ ID NO: 155904 - DNA, 25 bp, Artificial
  Probe
ttaaatactttggcactgactgtac

SEQ ID NO: 155905 - DNA, 25 bp, Artificial
  Probe
gtaagcctctttatgagacagtaga

SEQ ID NO: 155906 - DNA, 25 bp, Artificial
  Probe
gagtaagcctctttatgagacagta

SEQ ID NO: 155907 - DNA, 25 bp, Artificial
  Probe
tgaaaggctttgatgatgatgttct

SEQ ID NO: 155908 - DNA, 25 bp, Artificial
  Probe
gtgaaaggctttgatgatgatgttc

SEQ ID NO: 155909 - DNA, 25 bp, Artificial
  Probe
agtgaaaggctttgatgatgatgtt

SEQ ID NO: 155910 - DNA, 25 bp, Artificial
  Probe
tgaagtgaaaggctttgatgatgat

SEQ ID NO: 155911 - DNA, 25 bp, Artificial
  Probe
atgaagtgaaaggctttgatgatga

SEQ ID NO: 155912 - DNA, 25 bp, Artificial
  Probe
agtaagcctctttatgagacagtag

SEQ ID NO: 155913 - DNA, 25 bp, Artificial
  Probe
taatgaagtgaaaggctttgatgat

SEQ ID NO: 155914 - DNA, 25 bp, Artificial
  Probe
ataatgaagtgaaaggctttgatga

SEQ ID NO: 155915 - DNA, 25 bp, Artificial
  Probe
aagataatgaagtgaaaggctttga

SEQ ID NO: 155916 - DNA, 25 bp, Artificial
  Probe
gttgacaaaccaggagaaagaactt

SEQ ID NO: 155917 - DNA, 25 bp, Artificial
  Probe
tttcatctgttacctgacatactga

SEQ ID NO: 155918 - DNA, 25 bp, Artificial
  Probe
gtttcatctgttacctgacatactg

SEQ ID NO: 155919 - DNA, 25 bp, Artificial
  Probe
agtttcatctgttacctgacatact

SEQ ID NO: 155920 - DNA, 25 bp, Artificial
  Probe
cagaagactgaaggaactgaaggac

SEQ ID NO: 155921 - DNA, 25 bp, Artificial
  Probe
agaagactgaaggaactgaaggacc

SEQ ID NO: 155922 - DNA, 25 bp, Artificial
  Probe
ctaagtacacttgctccttctgtgg

SEQ ID NO: 155923 - DNA, 25 bp, Artificial
  Probe
gaagactgaaggaactgaaggacca

SEQ ID NO: 155924 - DNA, 25 bp, Artificial
  Probe
atgtcactggtccatttgtttctct

SEQ ID NO: 155925 - DNA, 25 bp, Artificial
  Probe
atttgtttctctgtcctcaggctaa

SEQ ID NO: 155926 - DNA, 25 bp, Artificial
  Probe
tttgtttctctgtcctcaggctaaa

SEQ ID NO: 155927 - DNA, 25 bp, Artificial
  Probe
gctaagtacacttgctccttctgtg

SEQ ID NO: 155928 - DNA, 25 bp, Artificial
  Probe
tcactggtccatttgtttctctgtc

SEQ ID NO: 155929 - DNA, 25 bp, Artificial
  Probe
ctggtctgcaataaatgggctaatt

SEQ ID NO: 155930 - DNA, 25 bp, Artificial
  Probe
catttgtttctctgtcctcaggcta

SEQ ID NO: 155931 - DNA, 25 bp, Artificial
  Probe
aagactgaaggaactgaaggaccag

SEQ ID NO: 155932 - DNA, 25 bp, Artificial
  Probe
gtcactggtccatttgtttctctgt

SEQ ID NO: 155933 - DNA, 25 bp, Artificial
  Probe
tgtcactggtccatttgtttctctg

SEQ ID NO: 155934 - DNA, 25 bp, Artificial
  Probe
ctggtccatttgtttctctgtcctc

SEQ ID NO: 155935 - DNA, 25 bp, Artificial
  Probe
tggtctgcaataaatgggctaattt

SEQ ID NO: 155936 - DNA, 25 bp, Artificial
  Probe
catcagaagactgaaggaactgaag

SEQ ID NO: 155937 - DNA, 25 bp, Artificial
  Probe
aatgtcactggtccatttgtttctc

SEQ ID NO: 155938 - DNA, 25 bp, Artificial
  Probe
gcaataaatgggctaatttacacaa

SEQ ID NO: 155939 - DNA, 25 bp, Artificial
  Probe
cggaaaatggtgaagaaaattgaaa

SEQ ID NO: 155940 - DNA, 25 bp, Artificial
  Probe
atggtgaagaaaattgaaatcagcc

SEQ ID NO: 155941 - DNA, 25 bp, Artificial
  Probe
atcagaagactgaaggaactgaagg

SEQ ID NO: 155942 - DNA, 25 bp, Artificial
  Probe
gaagaaaattgaaatcagccagcac

SEQ ID NO: 155943 - DNA, 25 bp, Artificial
  Probe
aatggtgaagaaaattgaaatcagc

SEQ ID NO: 155944 - DNA, 25 bp, Artificial
  Probe
ggtccatttgtttctctgtcctcag

SEQ ID NO: 155945 - DNA, 25 bp, Artificial
  Probe
ggtgaagaaaattgaaatcagccag

SEQ ID NO: 155946 - DNA, 25 bp, Artificial
  Probe
gtccatttgtttctctgtcctcagg

SEQ ID NO: 155947 - DNA, 25 bp, Artificial
  Probe
cagtagaagcacctcctgagacttg

SEQ ID NO: 155948 - DNA, 25 bp, Artificial
  Probe
cactggtccatttgtttctctgtcc

SEQ ID NO: 155949 - DNA, 25 bp, Artificial
  Probe
ccatcagaagactgaaggaactgaa

SEQ ID NO: 155950 - DNA, 25 bp, Artificial
  Probe
acgctaagtacacttgctccttctg

SEQ ID NO: 155951 - DNA, 25 bp, Artificial
  Probe
cacgctaagtacacttgctccttct

SEQ ID NO: 155952 - DNA, 25 bp, Artificial
  Probe
ggtctgcaataaatgggctaattta

SEQ ID NO: 155953 - DNA, 25 bp, Artificial
  Probe
taaatgggctaatttacacaacaaa

SEQ ID NO: 155954 - DNA, 25 bp, Artificial
  Probe
tgcaataaatgggctaatttacaca

SEQ ID NO: 155955 - DNA, 25 bp, Artificial
  Probe
ttctgtggcaagaccaagatgaaga

SEQ ID NO: 155956 - DNA, 25 bp, Artificial
  Probe
tggtccatttgtttctctgtcctca

SEQ ID NO: 155957 - DNA, 25 bp, Artificial
  Probe
actggtccatttgtttctctgtcct

SEQ ID NO: 155958 - DNA, 25 bp, Artificial
  Probe
gtgaagaaaattgaaatcagccagc

SEQ ID NO: 155959 - DNA, 25 bp, Artificial
  Probe
ctgcaataaatgggctaatttacac

SEQ ID NO: 155960 - DNA, 25 bp, Artificial
  Probe
tctgcaataaatgggctaatttaca

SEQ ID NO: 155961 - DNA, 25 bp, Artificial
  Probe
ataaatgggctaatttacacaacaa

SEQ ID NO: 155962 - DNA, 25 bp, Artificial
  Probe
aataaatgggctaatttacacaaca

SEQ ID NO: 155963 - DNA, 25 bp, Artificial
  Probe
ttgtttctctgtcctcaggctaaac

SEQ ID NO: 155964 - DNA, 25 bp, Artificial
  Probe
gtctgcaataaatgggctaatttac

SEQ ID NO: 155965 - DNA, 25 bp, Artificial
  Probe
tcagtaatacagtcaagcaggagtt

SEQ ID NO: 155966 - DNA, 25 bp, Artificial
  Probe
gaatactgttgaacctagagcactg

SEQ ID NO: 155967 - DNA, 25 bp, Artificial
  Probe
atgtgatatgacctatgacaactgg

SEQ ID NO: 155968 - DNA, 25 bp, Artificial
  Probe
atggaatactgttgaacctagagca

SEQ ID NO: 155969 - DNA, 25 bp, Artificial
  Probe
caaggacaagttacaacagaaggtg

SEQ ID NO: 155970 - DNA, 25 bp, Artificial
  Probe
attcatattatccatccatgccaca

SEQ ID NO: 155971 - DNA, 25 bp, Artificial
  Probe
cattcatattatccatccatgccac

SEQ ID NO: 155972 - DNA, 25 bp, Artificial
  Probe
tcattcatattatccatccatgcca

SEQ ID NO: 155973 - DNA, 25 bp, Artificial
  Probe
gtcattcatattatccatccatgcc

SEQ ID NO: 155974 - DNA, 25 bp, Artificial
  Probe
aatactgttgaacctagagcactgt

SEQ ID NO: 155975 - DNA, 25 bp, Artificial
  Probe
gatcttctagcctcatggaatactg

SEQ ID NO: 155976 - DNA, 25 bp, Artificial
  Probe
atcttctagcctcatggaatactgt

SEQ ID NO: 155977 - DNA, 25 bp, Artificial
  Probe
catggaatactgttgaacctagagc

SEQ ID NO: 155978 - DNA, 25 bp, Artificial
  Probe
cttctagcctcatggaatactgttg

SEQ ID NO: 155979 - DNA, 25 bp, Artificial
  Probe
ttcatattatccatccatgccacac

SEQ ID NO: 155980 - DNA, 25 bp, Artificial
  Probe
tgtcattcatattatccatccatgc

SEQ ID NO: 155981 - DNA, 25 bp, Artificial
  Probe
tcttctagcctcatggaatactgtt

SEQ ID NO: 155982 - DNA, 25 bp, Artificial
  Probe
aatgtgatatgacctatgacaactg

SEQ ID NO: 155983 - DNA, 25 bp, Artificial
  Probe
aacctagagcactgtcttgattctt

SEQ ID NO: 155984 - DNA, 25 bp, Artificial
  Probe
tcatggaatactgttgaacctagag

SEQ ID NO: 155985 - DNA, 25 bp, Artificial
  Probe
ctcatggaatactgttgaacctaga

SEQ ID NO: 155986 - DNA, 25 bp, Artificial
  Probe
tgatcttagaacacacaggtaatgt

SEQ ID NO: 155987 - DNA, 25 bp, Artificial
  Probe
cctcatggaatactgttgaacctag

SEQ ID NO: 155988 - DNA, 25 bp, Artificial
  Probe
atactgttgaacctagagcactgtc

SEQ ID NO: 155989 - DNA, 25 bp, Artificial
  Probe
ggaatactgttgaacctagagcact

SEQ ID NO: 155990 - DNA, 25 bp, Artificial
  Probe
ctcagtaatacagtcaagcaggagt

SEQ ID NO: 155991 - DNA, 25 bp, Artificial
  Probe
ttgaacctagagcactgtcttgatt

SEQ ID NO: 155992 - DNA, 25 bp, Artificial
  Probe
tggaatactgttgaacctagagcac

SEQ ID NO: 155993 - DNA, 25 bp, Artificial
  Probe
gtgtgtgtgtgtgtgatcttagaac

SEQ ID NO: 155994 - DNA, 25 bp, Artificial
  Probe
atattatccatccatgccacactgt

SEQ ID NO: 155995 - DNA, 25 bp, Artificial
  Probe
catattatccatccatgccacactg

SEQ ID NO: 155996 - DNA, 25 bp, Artificial
  Probe
tcatattatccatccatgccacact

SEQ ID NO: 155997 - DNA, 25 bp, Artificial
  Probe
gaacctagagcactgtcttgattct

SEQ ID NO: 155998 - DNA, 25 bp, Artificial
  Probe
ctagcctcatggaatactgttgaac

SEQ ID NO: 155999 - DNA, 25 bp, Artificial
  Probe
tctagcctcatggaatactgttgaa

SEQ ID NO: 156000 - DNA, 25 bp, Artificial
  Probe
ttctagcctcatggaatactgttga

SEQ ID NO: 156001 - DNA, 25 bp, Artificial
  Probe
tatgacctatgacaactggtaacag

SEQ ID NO: 156002 - DNA, 25 bp, Artificial
  Probe
gtgatcttagaacacacaggtaatg

SEQ ID NO: 156003 - DNA, 25 bp, Artificial
  Probe
gtgatatgacctatgacaactggta

SEQ ID NO: 156004 - DNA, 25 bp, Artificial
  Probe
gtctgtaccaggtagtccaatagaa

SEQ ID NO: 156005 - DNA, 25 bp, Artificial
  Probe
atatgacctatgacaactggtaaca

SEQ ID NO: 156006 - DNA, 25 bp, Artificial
  Probe
tgtgtgtgtgtgtgtgatcttagaa

SEQ ID NO: 156007 - DNA, 25 bp, Artificial
  Probe
tgatatgacctatgacaactggtaa

SEQ ID NO: 156008 - DNA, 25 bp, Artificial
  Probe
tgaacctagagcactgtcttgattc

SEQ ID NO: 156009 - DNA, 25 bp, Artificial
  Probe
ccaaggacaagttacaacagaaggt

SEQ ID NO: 156010 - DNA, 25 bp, Artificial
  Probe
atacagagacattgaacgactttga

SEQ ID NO: 156011 - DNA, 25 bp, Artificial
  Probe
agaaatacagagacattgaacgact

SEQ ID NO: 156012 - DNA, 25 bp, Artificial
  Probe
ggaagaaatacagagacattgaacg

SEQ ID NO: 156013 - DNA, 25 bp, Artificial
  Probe
aacagtataaggagacaatgatggg

SEQ ID NO: 156014 - DNA, 25 bp, Artificial
  Probe
agtgacccagaagaaacagtataag

SEQ ID NO: 156015 - DNA, 25 bp, Artificial
  Probe
ccagaagaaacagtataaggagaca

SEQ ID NO: 156016 - DNA, 25 bp, Artificial
  Probe
cccagaagaaacagtataaggagac

SEQ ID NO: 156017 - DNA, 25 bp, Artificial
  Probe
gacccagaagaaacagtataaggag

SEQ ID NO: 156018 - DNA, 25 bp, Artificial
  Probe
aatacagagacattgaacgactttg

SEQ ID NO: 156019 - DNA, 25 bp, Artificial
  Probe
aagtgacccagaagaaacagtataa

SEQ ID NO: 156020 - DNA, 25 bp, Artificial
  Probe
aaagtgacccagaagaaacagtata

SEQ ID NO: 156021 - DNA, 25 bp, Artificial
  Probe
tataaggagacaatgatgggacaga

SEQ ID NO: 156022 - DNA, 25 bp, Artificial
  Probe
gtataaggagacaatgatgggacag

SEQ ID NO: 156023 - DNA, 25 bp, Artificial
  Probe
cagtataaggagacaatgatgggac

SEQ ID NO: 156024 - DNA, 25 bp, Artificial
  Probe
gaaatacagagacattgaacgactt

SEQ ID NO: 156025 - DNA, 25 bp, Artificial
  Probe
aagaaatacagagacattgaacgac

SEQ ID NO: 156026 - DNA, 25 bp, Artificial
  Probe
tgaggaagaaatacagagacattga

SEQ ID NO: 156027 - DNA, 25 bp, Artificial
  Probe
acccagaagaaacagtataaggaga

SEQ ID NO: 156028 - DNA, 25 bp, Artificial
  Probe
atcactacctgtattcccattacct

SEQ ID NO: 156029 - DNA, 25 bp, Artificial
  Probe
agtataaggagacaatgatgggaca

SEQ ID NO: 156030 - DNA, 25 bp, Artificial
  Probe
acagtataaggagacaatgatggga

SEQ ID NO: 156031 - DNA, 25 bp, Artificial
  Probe
tacagagacattgaacgactttgag

SEQ ID NO: 156032 - DNA, 25 bp, Artificial
  Probe
gaagaaatacagagacattgaacga

SEQ ID NO: 156033 - DNA, 25 bp, Artificial
  Probe
tgacccagaagaaacagtataagga

SEQ ID NO: 156034 - DNA, 25 bp, Artificial
  Probe
gtgacccagaagaaacagtataagg

SEQ ID NO: 156035 - DNA, 25 bp, Artificial
  Probe
caaagtgacccagaagaaacagtat

SEQ ID NO: 156036 - DNA, 25 bp, Artificial
  Probe
tatcactacctgtattcccattacc

SEQ ID NO: 156037 - DNA, 25 bp, Artificial
  Probe
aaatacagagacattgaacgacttt

SEQ ID NO: 156038 - DNA, 25 bp, Artificial
  Probe
aggaagaaatacagagacattgaac

SEQ ID NO: 156039 - DNA, 25 bp, Artificial
  Probe
agacattgaacgactttgaggaatc

SEQ ID NO: 156040 - DNA, 25 bp, Artificial
  Probe
gagacattgaacgactttgaggaat

SEQ ID NO: 156041 - DNA, 25 bp, Artificial
  Probe
tcactacctgtattcccattacctg

SEQ ID NO: 156042 - DNA, 25 bp, Artificial
  Probe
gaggaagaaatacagagacattgaa

SEQ ID NO: 156043 - DNA, 25 bp, Artificial
  Probe
aaacagtataaggagacaatgatgg

SEQ ID NO: 156044 - DNA, 25 bp, Artificial
  Probe
gatatacatccaagtggacgaatga

SEQ ID NO: 156045 - DNA, 25 bp, Artificial
  Probe
atatacatccaagtggacgaatgac

SEQ ID NO: 156046 - DNA, 25 bp, Artificial
  Probe
cagaagaaacagtataaggagacaa

SEQ ID NO: 156047 - DNA, 25 bp, Artificial
  Probe
ataaggagacaatgatgggacagac

SEQ ID NO: 156048 - DNA, 25 bp, Artificial
  Probe
atacatccaagtggacgaatgacta

SEQ ID NO: 156049 - DNA, 25 bp, Artificial
  Probe
tatacatccaagtggacgaatgact

SEQ ID NO: 156050 - DNA, 25 bp, Artificial
  Probe
aatcaaagtgacccagaagaaacag

SEQ ID NO: 156051 - DNA, 25 bp, Artificial
  Probe
agagacattgaacgactttgaggaa

SEQ ID NO: 156052 - DNA, 25 bp, Artificial
  Probe
cctgaggaagaaatacagagacatt

SEQ ID NO: 156053 - DNA, 25 bp, Artificial
  Probe
ctgaggaagaaatacagagacattg

SEQ ID NO: 156054 - DNA, 25 bp, Artificial
  Probe
caatcaaagtgacccagaagaaaca

SEQ ID NO: 156055 - DNA, 25 bp, Artificial
  Probe
tagacagagatagacagagagacag

SEQ ID NO: 156056 - DNA, 25 bp, Artificial
  Probe
cagagagacagagatagacagagat

SEQ ID NO: 156057 - DNA, 25 bp, Artificial
  Probe
catacacatacagagacagagagac

SEQ ID NO: 156058 - DNA, 25 bp, Artificial
  Probe
atacagacatagagacagacagaga

SEQ ID NO: 156059 - DNA, 25 bp, Artificial
  Probe
agatacagacatagagacagacaga

SEQ ID NO: 156060 - DNA, 25 bp, Artificial
  Probe
cagatacagacatagagacagacag

SEQ ID NO: 156061 - DNA, 25 bp, Artificial
  Probe
acagatacagacatagagacagaca

SEQ ID NO: 156062 - DNA, 25 bp, Artificial
  Probe
gacagatacagacatagagacagac

SEQ ID NO: 156063 - DNA, 25 bp, Artificial
  Probe
agacagatacagacatagagacaga

SEQ ID NO: 156064 - DNA, 25 bp, Artificial
  Probe
agagacagatacagacatagagaca

SEQ ID NO: 156065 - DNA, 25 bp, Artificial
  Probe
acagagagacagatacagacataga

SEQ ID NO: 156066 - DNA, 25 bp, Artificial
  Probe
agacagagagacagatacagacata

SEQ ID NO: 156067 - DNA, 25 bp, Artificial
  Probe
tagacagagagacagatacagacat

SEQ ID NO: 156068 - DNA, 25 bp, Artificial
  Probe
atagacagagagacagatacagaca

SEQ ID NO: 156069 - DNA, 25 bp, Artificial
  Probe
atacacatacagagacagagagaca

SEQ ID NO: 156070 - DNA, 25 bp, Artificial
  Probe
acatacacatacagagacagagaga

SEQ ID NO: 156071 - DNA, 25 bp, Artificial
  Probe
cacatacacatacagagacagagag

SEQ ID NO: 156072 - DNA, 25 bp, Artificial
  Probe
atacacacacacatacacatacaga

SEQ ID NO: 156073 - DNA, 25 bp, Artificial
  Probe
tacacacacacatacacatacagag

SEQ ID NO: 156074 - DNA, 25 bp, Artificial
  Probe
gacagagatagacagagagacagat

SEQ ID NO: 156075 - DNA, 25 bp, Artificial
  Probe
gatacagacatagagacagacagag

SEQ ID NO: 156076 - DNA, 25 bp, Artificial
  Probe
gagacagatacagacatagagacag

SEQ ID NO: 156077 - DNA, 25 bp, Artificial
  Probe
gacagagagacagatacagacatag

SEQ ID NO: 156078 - DNA, 25 bp, Artificial
  Probe
tacagacatagagacagacagagac

SEQ ID NO: 156079 - DNA, 25 bp, Artificial
  Probe
gagagacagatacagacatagagac

SEQ ID NO: 156080 - DNA, 25 bp, Artificial
  Probe
agagagacagatacagacatagaga

SEQ ID NO: 156081 - DNA, 25 bp, Artificial
  Probe
cagagagacagatacagacatagag

SEQ ID NO: 156082 - DNA, 25 bp, Artificial
  Probe
gatagacagagagacagatacagac

SEQ ID NO: 156083 - DNA, 25 bp, Artificial
  Probe
agatagacagagagacagatacaga

SEQ ID NO: 156084 - DNA, 25 bp, Artificial
  Probe
agagatagacagagagacagataca

SEQ ID NO: 156085 - DNA, 25 bp, Artificial
  Probe
acagagatagacagagagacagata

SEQ ID NO: 156086 - DNA, 25 bp, Artificial
  Probe
atagacagagatagacagagagaca

SEQ ID NO: 156087 - DNA, 25 bp, Artificial
  Probe
acagagatagacagagatagacaga

SEQ ID NO: 156088 - DNA, 25 bp, Artificial
  Probe
agacagagatagacagagatagaca

SEQ ID NO: 156089 - DNA, 25 bp, Artificial
  Probe
acacatacacatacagagacagaga

SEQ ID NO: 156090 - DNA, 25 bp, Artificial
  Probe
cacacatacacatacagagacagag

SEQ ID NO: 156091 - DNA, 25 bp, Artificial
  Probe
tacacatacagagacagagagacag

SEQ ID NO: 156092 - DNA, 25 bp, Artificial
  Probe
gagatagacagagagacagatacag

SEQ ID NO: 156093 - DNA, 25 bp, Artificial
  Probe
cagagatagacagagagacagatac

SEQ ID NO: 156094 - DNA, 25 bp, Artificial
  Probe
gacagagatagacagagatagacag

SEQ ID NO: 156095 - DNA, 25 bp, Artificial
  Probe
atagagacagacagagacagagaga

SEQ ID NO: 156096 - DNA, 25 bp, Artificial
  Probe
catagagacagacagagacagagag

SEQ ID NO: 156097 - DNA, 25 bp, Artificial
  Probe
agacagagatagacagagagacaga

SEQ ID NO: 156098 - DNA, 25 bp, Artificial
  Probe
gatagacagagatagacagagagac

SEQ ID NO: 156099 - DNA, 25 bp, Artificial
  Probe
agatagacagagatagacagagaga

SEQ ID NO: 156100 - DNA, 25 bp, Artificial
  Probe
atagtgtgtgatgaagaagatgagc

SEQ ID NO: 156101 - DNA, 25 bp, Artificial
  Probe
catagtgtgtgatgaagaagatgag

SEQ ID NO: 156102 - DNA, 25 bp, Artificial
  Probe
tatggacacagagaagaacaggaag

SEQ ID NO: 156103 - DNA, 25 bp, Artificial
  Probe
ctatggacacagagaagaacaggaa

SEQ ID NO: 156104 - DNA, 25 bp, Artificial
  Probe
aacacattcgttaatctctcaagaa

SEQ ID NO: 156105 - DNA, 25 bp, Artificial
  Probe
aactaagcaccatgtatatagccag

SEQ ID NO: 156106 - DNA, 25 bp, Artificial
  Probe
acatagtgtgtgatgaagaagatga

SEQ ID NO: 156107 - DNA, 25 bp, Artificial
  Probe
aagacatagtgtgtgatgaagaaga

SEQ ID NO: 156108 - DNA, 25 bp, Artificial
  Probe
gacatagtgtgtgatgaagaagatg

SEQ ID NO: 156109 - DNA, 25 bp, Artificial
  Probe
agacatagtgtgtgatgaagaagat

SEQ ID NO: 156110 - DNA, 25 bp, Artificial
  Probe
gaagacatagtgtgtgatgaagaag

SEQ ID NO: 156111 - DNA, 25 bp, Artificial
  Probe
ggaagacatagtgtgtgatgaagaa

SEQ ID NO: 156112 - DNA, 25 bp, Artificial
  Probe
aaggaagacatagtgtgtgatgaag

SEQ ID NO: 156113 - DNA, 25 bp, Artificial
  Probe
gaaggaagacatagtgtgtgatgaa

SEQ ID NO: 156114 - DNA, 25 bp, Artificial
  Probe
ttgaaggaagacatagtgtgtgatg

SEQ ID NO: 156115 - DNA, 25 bp, Artificial
  Probe
taagcaccatgtatatagccaggat

SEQ ID NO: 156116 - DNA, 25 bp, Artificial
  Probe
aggaagacatagtgtgtgatgaaga

SEQ ID NO: 156117 - DNA, 25 bp, Artificial
  Probe
tgaaggaagacatagtgtgtgatga

SEQ ID NO: 156118 - DNA, 25 bp, Artificial
  Probe
ctaagcaccatgtatatagccagga

SEQ ID NO: 156119 - DNA, 25 bp, Artificial
  Probe
actaagcaccatgtatatagccagg

SEQ ID NO: 156120 - DNA, 25 bp, Artificial
  Probe
cttcactgagtaacacattcgttaa

SEQ ID NO: 156121 - DNA, 25 bp, Artificial
  Probe
cactgagtaacacattcgttaatct

SEQ ID NO: 156122 - DNA, 25 bp, Artificial
  Probe
tcactgagtaacacattcgttaatc

SEQ ID NO: 156123 - DNA, 25 bp, Artificial
  Probe
ccttcactgagtaacacattcgtta

SEQ ID NO: 156124 - DNA, 25 bp, Artificial
  Probe
tctatggacacagagaagaacagga

SEQ ID NO: 156125 - DNA, 25 bp, Artificial
  Probe
actgagtaacacattcgttaatctc

SEQ ID NO: 156126 - DNA, 25 bp, Artificial
  Probe
accttcactgagtaacacattcgtt

SEQ ID NO: 156127 - DNA, 25 bp, Artificial
  Probe
aatggaggcttaatgctataccaag

SEQ ID NO: 156128 - DNA, 25 bp, Artificial
  Probe
ttcactgagtaacacattcgttaat

SEQ ID NO: 156129 - DNA, 25 bp, Artificial
  Probe
tacgcaattccaagagcatctacat

SEQ ID NO: 156130 - DNA, 25 bp, Artificial
  Probe
gagtaacacattcgttaatctctca

SEQ ID NO: 156131 - DNA, 25 bp, Artificial
  Probe
tgagtaacacattcgttaatctctc

SEQ ID NO: 156132 - DNA, 25 bp, Artificial
  Probe
ctgagtaacacattcgttaatctct

SEQ ID NO: 156133 - DNA, 25 bp, Artificial
  Probe
ttacgcaattccaagagcatctaca

SEQ ID NO: 156134 - DNA, 25 bp, Artificial
  Probe
tagtgtgtgatgaagaagatgagct

SEQ ID NO: 156135 - DNA, 25 bp, Artificial
  Probe
acacattcgttaatctctcaagaat

SEQ ID NO: 156136 - DNA, 25 bp, Artificial
  Probe
agtaacacattcgttaatctctcaa

SEQ ID NO: 156137 - DNA, 25 bp, Artificial
  Probe
catcaaatcaagggcaaaggatatg

SEQ ID NO: 156138 - DNA, 25 bp, Artificial
  Probe
aagcaccatgtatatagccaggatg

SEQ ID NO: 156139 - DNA, 25 bp, Artificial
  Probe
cagacaggtttgaaggaagacatag

SEQ ID NO: 156140 - DNA, 25 bp, Artificial
  Probe
cacattccttccagagactttctaa

SEQ ID NO: 156141 - DNA, 25 bp, Artificial
  Probe
agtagcattcttacccattagacac

SEQ ID NO: 156142 - DNA, 25 bp, Artificial
  Probe
cagtagcattcttacccattagaca

SEQ ID NO: 156143 - DNA, 25 bp, Artificial
  Probe
acagtagcattcttacccattagac

SEQ ID NO: 156144 - DNA, 25 bp, Artificial
  Probe
acattccttccagagactttctaaa

SEQ ID NO: 156145 - DNA, 25 bp, Artificial
  Probe
atacagccagatactagagcaggat

SEQ ID NO: 156146 - DNA, 25 bp, Artificial
  Probe
catacagccagatactagagcagga

SEQ ID NO: 156147 - DNA, 25 bp, Artificial
  Probe
tacagccagatactagagcaggatc

SEQ ID NO: 156148 - DNA, 25 bp, Artificial
  Probe
acagccagatactagagcaggatcc

SEQ ID NO: 156149 - DNA, 25 bp, Artificial
  Probe
agagaagttccaaggactgttacaa

SEQ ID NO: 156150 - DNA, 25 bp, Artificial
  Probe
aatgtgtgagaggctatgtttgtat

SEQ ID NO: 156151 - DNA, 25 bp, Artificial
  Probe
tgtgagaggctatgtttgtatgttt

SEQ ID NO: 156152 - DNA, 25 bp, Artificial
  Probe
aaatgtgtgagaggctatgtttgta

SEQ ID NO: 156153 - DNA, 25 bp, Artificial
  Probe
atttcttatgacttgcttacttggg

SEQ ID NO: 156154 - DNA, 25 bp, Artificial
  Probe
atgtgtgagaggctatgtttgtatg

SEQ ID NO: 156155 - DNA, 25 bp, Artificial
  Probe
cagagaagttccaaggactgttaca

SEQ ID NO: 156156 - DNA, 25 bp, Artificial
  Probe
gtgtgagaggctatgtttgtatgtt

SEQ ID NO: 156157 - DNA, 25 bp, Artificial
  Probe
gttccaaggactgttacaaatgaaa

SEQ ID NO: 156158 - DNA, 25 bp, Artificial
  Probe
gaaatgtgtgagaggctatgtttgt

SEQ ID NO: 156159 - DNA, 25 bp, Artificial
  Probe
ttccaaggactgttacaaatgaaat

SEQ ID NO: 156160 - DNA, 25 bp, Artificial
  Probe
gaagttccaaggactgttacaaatg

SEQ ID NO: 156161 - DNA, 25 bp, Artificial
  Probe
agaagttccaaggactgttacaaat

SEQ ID NO: 156162 - DNA, 25 bp, Artificial
  Probe
agttccaaggactgttacaaatgaa

SEQ ID NO: 156163 - DNA, 25 bp, Artificial
  Probe
aagttccaaggactgttacaaatga

SEQ ID NO: 156164 - DNA, 25 bp, Artificial
  Probe
tgtgtgagaggctatgtttgtatgt

SEQ ID NO: 156165 - DNA, 25 bp, Artificial
  Probe
tcttcttgacatcgttgtttatagc

SEQ ID NO: 156166 - DNA, 25 bp, Artificial
  Probe
tccaaggactgttacaaatgaaata

SEQ ID NO: 156167 - DNA, 25 bp, Artificial
  Probe
gagaagttccaaggactgttacaaa

SEQ ID NO: 156168 - DNA, 25 bp, Artificial
  Probe
ggaaatgtgtgagaggctatgtttg

SEQ ID NO: 156169 - DNA, 25 bp, Artificial
  Probe
aggaaatgtgtgagaggctatgttt

SEQ ID NO: 156170 - DNA, 25 bp, Artificial
  Probe
aatttcttatgacttgcttacttgg

SEQ ID NO: 156171 - DNA, 25 bp, Artificial
  Probe
ccaaggactgttacaaatgaaataa

SEQ ID NO: 156172 - DNA, 25 bp, Artificial
  Probe
gaggaaatgtgtgagaggctatgtt

SEQ ID NO: 156173 - DNA, 25 bp, Artificial
  Probe
tttgtgttagggtgaggaaatgtgt

SEQ ID NO: 156174 - DNA, 25 bp, Artificial
  Probe
ttattgggagaccattaagtgtcaa

SEQ ID NO: 156175 - DNA, 25 bp, Artificial
  Probe
tttattgggagaccattaagtgtca

SEQ ID NO: 156176 - DNA, 25 bp, Artificial
  Probe
tattgggagaccattaagtgtcaac

SEQ ID NO: 156177 - DNA, 25 bp, Artificial
  Probe
gttagggtgaggaaatgtgtgagag

SEQ ID NO: 156178 - DNA, 25 bp, Artificial
  Probe
atttattgggagaccattaagtgtc

SEQ ID NO: 156179 - DNA, 25 bp, Artificial
  Probe
tttattcttcttgacatcgttgttt

SEQ ID NO: 156180 - DNA, 25 bp, Artificial
  Probe
cttcttgacatcgttgtttatagct

SEQ ID NO: 156181 - DNA, 25 bp, Artificial
  Probe
gtgaggaaatgtgtgagaggctatg

SEQ ID NO: 156182 - DNA, 25 bp, Artificial
  Probe
ttgtgttagggtgaggaaatgtgtg

SEQ ID NO: 156183 - DNA, 25 bp, Artificial
  Probe
ttcttcttgacatcgttgtttatag

SEQ ID NO: 156184 - DNA, 25 bp, Artificial
  Probe
gtgttagggtgaggaaatgtgtgag

SEQ ID NO: 156185 - DNA, 25 bp, Artificial
  Probe
tgttagggtgaggaaatgtgtgaga

SEQ ID NO: 156186 - DNA, 25 bp, Artificial
  Probe
tgagaggctatgtttgtatgttttg

SEQ ID NO: 156187 - DNA, 25 bp, Artificial
  Probe
gtgagaggctatgtttgtatgtttt

SEQ ID NO: 156188 - DNA, 25 bp, Artificial
  Probe
gagaggctatgtttgtatgttttga

SEQ ID NO: 156189 - DNA, 25 bp, Artificial
  Probe
tgaggaaatgtgtgagaggctatgt

SEQ ID NO: 156190 - DNA, 25 bp, Artificial
  Probe
tttcttatgacttgcttacttgggg

SEQ ID NO: 156191 - DNA, 25 bp, Artificial
  Probe
agaggctatgtttgtatgttttgaa

SEQ ID NO: 156192 - DNA, 25 bp, Artificial
  Probe
ttattcttcttgacatcgttgttta

SEQ ID NO: 156193 - DNA, 25 bp, Artificial
  Probe
tatttattgggagaccattaagtgt

SEQ ID NO: 156194 - DNA, 25 bp, Artificial
  Probe
ccagatactccaggaatgttaagat

SEQ ID NO: 156195 - DNA, 25 bp, Artificial
  Probe
atactccaggaatgttaagatgtct

SEQ ID NO: 156196 - DNA, 25 bp, Artificial
  Probe
agatactccaggaatgttaagatgt

SEQ ID NO: 156197 - DNA, 25 bp, Artificial
  Probe
gatactccaggaatgttaagatgtc

SEQ ID NO: 156198 - DNA, 25 bp, Artificial
  Probe
cagatactccaggaatgttaagatg

SEQ ID NO: 156199 - DNA, 25 bp, Artificial
  Probe
tactccaggaatgttaagatgtctt

SEQ ID NO: 156200 - DNA, 25 bp, Artificial
  Probe
gccagatactccaggaatgttaaga

SEQ ID NO: 156201 - DNA, 25 bp, Artificial
  Probe
tgccagatactccaggaatgttaag

SEQ ID NO: 156202 - DNA, 25 bp, Artificial
  Probe
gtgccagatactccaggaatgttaa

SEQ ID NO: 156203 - DNA, 25 bp, Artificial
  Probe
tccaggaatgttaagatgtcttacc

SEQ ID NO: 156204 - DNA, 25 bp, Artificial
  Probe
atgttaagatgtcttaccttcacgg

SEQ ID NO: 156205 - DNA, 25 bp, Artificial
  Probe
ccaggaatgttaagatgtcttacct

SEQ ID NO: 156206 - DNA, 25 bp, Artificial
  Probe
ttaagatgtcttaccttcacggaga

SEQ ID NO: 156207 - DNA, 25 bp, Artificial
  Probe
gttaagatgtcttaccttcacggag

SEQ ID NO: 156208 - DNA, 25 bp, Artificial
  Probe
aatgttaagatgtcttaccttcacg

SEQ ID NO: 156209 - DNA, 25 bp, Artificial
  Probe
actccaggaatgttaagatgtctta

SEQ ID NO: 156210 - DNA, 25 bp, Artificial
  Probe
ctccaggaatgttaagatgtcttac

SEQ ID NO: 156211 - DNA, 25 bp, Artificial
  Probe
gatagggtatgtcataactgccaat

SEQ ID NO: 156212 - DNA, 25 bp, Artificial
  Probe
agaagatagggtatgtcataactgc

SEQ ID NO: 156213 - DNA, 25 bp, Artificial
  Probe
gcagaagatagggtatgtcataact

SEQ ID NO: 156214 - DNA, 25 bp, Artificial
  Probe
gaagatagggtatgtcataactgcc

SEQ ID NO: 156215 - DNA, 25 bp, Artificial
  Probe
tgttaagatgtcttaccttcacgga

SEQ ID NO: 156216 - DNA, 25 bp, Artificial
  Probe
cgcagaagatagggtatgtcataac

SEQ ID NO: 156217 - DNA, 25 bp, Artificial
  Probe
ggaatgttaagatgtcttaccttca

SEQ ID NO: 156218 - DNA, 25 bp, Artificial
  Probe
atagggtatgtcataactgccaatg

SEQ ID NO: 156219 - DNA, 25 bp, Artificial
  Probe
agatagggtatgtcataactgccaa

SEQ ID NO: 156220 - DNA, 25 bp, Artificial
  Probe
aagatagggtatgtcataactgcca

SEQ ID NO: 156221 - DNA, 25 bp, Artificial
  Probe
caggaatgttaagatgtcttacctt

SEQ ID NO: 156222 - DNA, 25 bp, Artificial
  Probe
caaataacttgtgtatcaactggcg

SEQ ID NO: 156223 - DNA, 25 bp, Artificial
  Probe
gcaaataacttgtgtatcaactggc

SEQ ID NO: 156224 - DNA, 25 bp, Artificial
  Probe
aggaatgttaagatgtcttaccttc

SEQ ID NO: 156225 - DNA, 25 bp, Artificial
  Probe
atcattgtgtaattaaagtgcctgc

SEQ ID NO: 156226 - DNA, 25 bp, Artificial
  Probe
aattaaagtgcctgctgggatttag

SEQ ID NO: 156227 - DNA, 25 bp, Artificial
  Probe
gaatgttaagatgtcttaccttcac

SEQ ID NO: 156228 - DNA, 25 bp, Artificial
  Probe
catcattgtgtaattaaagtgcctg

SEQ ID NO: 156229 - DNA, 25 bp, Artificial
  Probe
cattgtgtaattaaagtgcctgctg

SEQ ID NO: 156230 - DNA, 25 bp, Artificial
  Probe
tcattgtgtaattaaagtgcctgct

SEQ ID NO: 156231 - DNA, 25 bp, Artificial
  Probe
tggacagctacatcattgtgtaatt

SEQ ID NO: 156232 - DNA, 25 bp, Artificial
  Probe
taattaaagtgcctgctgggattta

SEQ ID NO: 156233 - DNA, 25 bp, Artificial
  Probe
ggacagctacatcattgtgtaatta

SEQ ID NO: 156234 - DNA, 25 bp, Artificial
  Probe
gtggacagctacatcattgtgtaat

SEQ ID NO: 156235 - DNA, 25 bp, Artificial
  Probe
gtaattaaagtgcctgctgggattt

SEQ ID NO: 156236 - DNA, 25 bp, Artificial
  Probe
cagaagatagggtatgtcataactg

SEQ ID NO: 156237 - DNA, 25 bp, Artificial
  Probe
acatcattgtgtaattaaagtgcct

SEQ ID NO: 156238 - DNA, 25 bp, Artificial
  Probe
attgtgtaattaaagtgcctgctgg

SEQ ID NO: 156239 - DNA, 25 bp, Artificial
  Probe
tctacatcaagttctttccttacgg

SEQ ID NO: 156240 - DNA, 25 bp, Artificial
  Probe
ctaaagcagtggtataagggtttcc

SEQ ID NO: 156241 - DNA, 25 bp, Artificial
  Probe
attgaggctatctataagatggtgg

SEQ ID NO: 156242 - DNA, 25 bp, Artificial
  Probe
ctctacatcaagttctttccttacg

SEQ ID NO: 156243 - DNA, 25 bp, Artificial
  Probe
cattgaggctatctataagatggtg

SEQ ID NO: 156244 - DNA, 25 bp, Artificial
  Probe
tcattgaggctatctataagatggt

SEQ ID NO: 156245 - DNA, 25 bp, Artificial
  Probe
gatgctggagatcattgaggctatc

SEQ ID NO: 156246 - DNA, 25 bp, Artificial
  Probe
ctggagatcattgaggctatctata

SEQ ID NO: 156247 - DNA, 25 bp, Artificial
  Probe
gctggagatcattgaggctatctat

SEQ ID NO: 156248 - DNA, 25 bp, Artificial
  Probe
gctaaagcagtggtataagggtttc

SEQ ID NO: 156249 - DNA, 25 bp, Artificial
  Probe
tggagatcattgaggctatctataa

SEQ ID NO: 156250 - DNA, 25 bp, Artificial
  Probe
ttcagcaactctacatcaagttctt

SEQ ID NO: 156251 - DNA, 25 bp, Artificial
  Probe
agatgctggagatcattgaggctat

SEQ ID NO: 156252 - DNA, 25 bp, Artificial
  Probe
actctacatcaagttctttccttac

SEQ ID NO: 156253 - DNA, 25 bp, Artificial
  Probe
tacatcaagttctttccttacggag

SEQ ID NO: 156254 - DNA, 25 bp, Artificial
  Probe
ctacatcaagttctttccttacgga

SEQ ID NO: 156255 - DNA, 25 bp, Artificial
  Probe
ggagatcattgaggctatctataag

SEQ ID NO: 156256 - DNA, 25 bp, Artificial
  Probe
taaagcagtggtataagggtttcct

SEQ ID NO: 156257 - DNA, 25 bp, Artificial
  Probe
atcattgaggctatctataagatgg

SEQ ID NO: 156258 - DNA, 25 bp, Artificial
  Probe
catcaagttctttccttacggagac

SEQ ID NO: 156259 - DNA, 25 bp, Artificial
  Probe
acatcaagttctttccttacggaga

SEQ ID NO: 156260 - DNA, 25 bp, Artificial
  Probe
tgctggagatcattgaggctatcta

SEQ ID NO: 156261 - DNA, 25 bp, Artificial
  Probe
gagatgctggagatcattgaggcta

SEQ ID NO: 156262 - DNA, 25 bp, Artificial
  Probe
agctaaagcagtggtataagggttt

SEQ ID NO: 156263 - DNA, 25 bp, Artificial
  Probe
ttgaggctatctataagatggtggg

SEQ ID NO: 156264 - DNA, 25 bp, Artificial
  Probe
gagatcattgaggctatctataaga

SEQ ID NO: 156265 - DNA, 25 bp, Artificial
  Probe
gagctaaagcagtggtataagggtt

SEQ ID NO: 156266 - DNA, 25 bp, Artificial
  Probe
cagtggtataagggtttcctgaagg

SEQ ID NO: 156267 - DNA, 25 bp, Artificial
  Probe
atgctggagatcattgaggctatct

SEQ ID NO: 156268 - DNA, 25 bp, Artificial
  Probe
aaagcagtggtataagggtttcctg

SEQ ID NO: 156269 - DNA, 25 bp, Artificial
  Probe
atcaagttctttccttacggagacg

SEQ ID NO: 156270 - DNA, 25 bp, Artificial
  Probe
cagcaactctacatcaagttctttc

SEQ ID NO: 156271 - DNA, 25 bp, Artificial
  Probe
tcagcaactctacatcaagttcttt

SEQ ID NO: 156272 - DNA, 25 bp, Artificial
  Probe
tttcagcaactctacatcaagttct

SEQ ID NO: 156273 - DNA, 25 bp, Artificial
  Probe
gtttcagcaactctacatcaagttc

SEQ ID NO: 156274 - DNA, 25 bp, Artificial
  Probe
agtttcagcaactctacatcaagtt

SEQ ID NO: 156275 - DNA, 25 bp, Artificial
  Probe
caggagctaaagcagtggtataagg

SEQ ID NO: 156276 - DNA, 25 bp, Artificial
  Probe
ctcaggtggacaatcatctggagag

SEQ ID NO: 156277 - DNA, 25 bp, Artificial
  Probe
caactctacatcaagttctttcctt

SEQ ID NO: 156278 - DNA, 25 bp, Artificial
  Probe
gcaactctacatcaagttctttcct

SEQ ID NO: 156279 - DNA, 25 bp, Artificial
  Probe
agcaactctacatcaagttctttcc

SEQ ID NO: 156280 - DNA, 25 bp, Artificial
  Probe
gcagtggtataagggtttcctgaag

SEQ ID NO: 156281 - DNA, 25 bp, Artificial
  Probe
gatcattgaggctatctataagatg

SEQ ID NO: 156282 - DNA, 25 bp, Artificial
  Probe
ggtataagggtttcctgaaggactg

SEQ ID NO: 156283 - DNA, 25 bp, Artificial
  Probe
agatcattgaggctatctataagat

SEQ ID NO: 156284 - DNA, 25 bp, Artificial
  Probe
cccttctctctctctctctagttat

SEQ ID NO: 156285 - DNA, 25 bp, Artificial
  Probe
atttacaccgacaattctgtgaaac

SEQ ID NO: 156286 - DNA, 25 bp, Artificial
  Probe
gtatttacaccgacaattctgtgaa

SEQ ID NO: 156287 - DNA, 25 bp, Artificial
  Probe
tatttacaccgacaattctgtgaaa

SEQ ID NO: 156288 - DNA, 25 bp, Artificial
  Probe
tgtatttacaccgacaattctgtga

SEQ ID NO: 156289 - DNA, 25 bp, Artificial
  Probe
cacgacttcattgagcacatcctac

SEQ ID NO: 156290 - DNA, 25 bp, Artificial
  Probe
tcacgacttcattgagcacatccta

SEQ ID NO: 156291 - DNA, 25 bp, Artificial
  Probe
tttacaccgacaattctgtgaaacc

SEQ ID NO: 156292 - DNA, 25 bp, Artificial
  Probe
cttcattgagcacatcctacgcaag

SEQ ID NO: 156293 - DNA, 25 bp, Artificial
  Probe
ccccttctctctctctctctagtta

SEQ ID NO: 156294 - DNA, 25 bp, Artificial
  Probe
ctaccgacttcaagtttgccatgta

SEQ ID NO: 156295 - DNA, 25 bp, Artificial
  Probe
taccgacttcaagtttgccatgtac

SEQ ID NO: 156296 - DNA, 25 bp, Artificial
  Probe
acgacttcattgagcacatcctacg

SEQ ID NO: 156297 - DNA, 25 bp, Artificial
  Probe
acttcattgagcacatcctacgcaa

SEQ ID NO: 156298 - DNA, 25 bp, Artificial
  Probe
ttacaccgacaattctgtgaaaccc

SEQ ID NO: 156299 - DNA, 25 bp, Artificial
  Probe
ctctgtgtgctaccgacttcaagtt

SEQ ID NO: 156300 - DNA, 25 bp, Artificial
  Probe
atgttgacctgtgaggaagccattc

SEQ ID NO: 156301 - DNA, 25 bp, Artificial
  Probe
gatgttgacctgtgaggaagccatt

SEQ ID NO: 156302 - DNA, 25 bp, Artificial
  Probe
ctgtgtgctaccgacttcaagtttg

SEQ ID NO: 156303 - DNA, 25 bp, Artificial
  Probe
tagccccttctctctctctctctag

SEQ ID NO: 156304 - DNA, 25 bp, Artificial
  Probe
ctagccccttctctctctctctcta

SEQ ID NO: 156305 - DNA, 25 bp, Artificial
  Probe
tctgtgtgctaccgacttcaagttt

SEQ ID NO: 156306 - DNA, 25 bp, Artificial
  Probe
gactgccgaaaagctgtgtatttac

SEQ ID NO: 156307 - DNA, 25 bp, Artificial
  Probe
tgactgccgaaaagctgtgtattta

SEQ ID NO: 156308 - DNA, 25 bp, Artificial
  Probe
ctgtgtatttacaccgacaattctg

SEQ ID NO: 156309 - DNA, 25 bp, Artificial
  Probe
gtgtatttacaccgacaattctgtg

SEQ ID NO: 156310 - DNA, 25 bp, Artificial
  Probe
tgtgtatttacaccgacaattctgt

SEQ ID NO: 156311 - DNA, 25 bp, Artificial
  Probe
aagctgtgtatttacaccgacaatt

SEQ ID NO: 156312 - DNA, 25 bp, Artificial
  Probe
aaagctgtgtatttacaccgacaat

SEQ ID NO: 156313 - DNA, 25 bp, Artificial
  Probe
gccccttctctctctctctctagtt

SEQ ID NO: 156314 - DNA, 25 bp, Artificial
  Probe
gctgtgtatttacaccgacaattct

SEQ ID NO: 156315 - DNA, 25 bp, Artificial
  Probe
agctgtgtatttacaccgacaattc

SEQ ID NO: 156316 - DNA, 25 bp, Artificial
  Probe
actgccgaaaagctgtgtatttaca

SEQ ID NO: 156317 - DNA, 25 bp, Artificial
  Probe
cagtaacccctcacgacttcattga

SEQ ID NO: 156318 - DNA, 25 bp, Artificial
  Probe
ctgactgccgaaaagctgtgtattt

SEQ ID NO: 156319 - DNA, 25 bp, Artificial
  Probe
ctcacgacttcattgagcacatcct

SEQ ID NO: 156320 - DNA, 25 bp, Artificial
  Probe
agccccttctctctctctctctagt

SEQ ID NO: 156321 - DNA, 25 bp, Artificial
  Probe
aaaagctgtgtatttacaccgacaa

SEQ ID NO: 156322 - DNA, 25 bp, Artificial
  Probe
tacaccgacaattctgtgaaacccc

SEQ ID NO: 156323 - DNA, 25 bp, Artificial
  Probe
gaaaagctgtgtatttacaccgaca

SEQ ID NO: 156324 - DNA, 25 bp, Artificial
  Probe
cacaccgatgtggattgtctcaaag

SEQ ID NO: 156325 - DNA, 25 bp, Artificial
  Probe
cgaaaagctgtgtatttacaccgac

SEQ ID NO: 156326 - DNA, 25 bp, Artificial
  Probe
agtaacccctcacgacttcattgag

SEQ ID NO: 156327 - DNA, 25 bp, Artificial
  Probe
ctgccgaaaagctgtgtatttacac

SEQ ID NO: 156328 - DNA, 25 bp, Artificial
  Probe
ccgaaaagctgtgtatttacaccga

SEQ ID NO: 156329 - DNA, 25 bp, Artificial
  Probe
actgctattctctacgaaactaaca

SEQ ID NO: 156330 - DNA, 25 bp, Artificial
  Probe
aacaccaaagaaacatctaagcaat

SEQ ID NO: 156331 - DNA, 25 bp, Artificial
  Probe
caacaccaaagaaacatctaagcaa

SEQ ID NO: 156332 - DNA, 25 bp, Artificial
  Probe
taccaacaccaaagaaacatctaag

SEQ ID NO: 156333 - DNA, 25 bp, Artificial
  Probe
cttaccaacaccaaagaaacatcta

SEQ ID NO: 156334 - DNA, 25 bp, Artificial
  Probe
tattctctacgaaactaacaactgc

SEQ ID NO: 156335 - DNA, 25 bp, Artificial
  Probe
tgctattctctacgaaactaacaac

SEQ ID NO: 156336 - DNA, 25 bp, Artificial
  Probe
aaacggaagactaacaagatttgga

SEQ ID NO: 156337 - DNA, 25 bp, Artificial
  Probe
ggaagactaacaagatttggacatt

SEQ ID NO: 156338 - DNA, 25 bp, Artificial
  Probe
acaccaaagaaacatctaagcaata

SEQ ID NO: 156339 - DNA, 25 bp, Artificial
  Probe
gctattctctacgaaactaacaact

SEQ ID NO: 156340 - DNA, 25 bp, Artificial
  Probe
ctgctattctctacgaaactaacaa

SEQ ID NO: 156341 - DNA, 25 bp, Artificial
  Probe
ttaccaacaccaaagaaacatctaa

SEQ ID NO: 156342 - DNA, 25 bp, Artificial
  Probe
cggaagactaacaagatttggacat

SEQ ID NO: 156343 - DNA, 25 bp, Artificial
  Probe
aacggaagactaacaagatttggac

SEQ ID NO: 156344 - DNA, 25 bp, Artificial
  Probe
ccttaccaacaccaaagaaacatct

SEQ ID NO: 156345 - DNA, 25 bp, Artificial
  Probe
accttaccaacaccaaagaaacatc

SEQ ID NO: 156346 - DNA, 25 bp, Artificial
  Probe
gaccttaccaacaccaaagaaacat

SEQ ID NO: 156347 - DNA, 25 bp, Artificial
  Probe
atgtttactgctattctctacgaaa

SEQ ID NO: 156348 - DNA, 25 bp, Artificial
  Probe
aatgtttactgctattctctacgaa

SEQ ID NO: 156349 - DNA, 25 bp, Artificial
  Probe
tactgctattctctacgaaactaac

SEQ ID NO: 156350 - DNA, 25 bp, Artificial
  Probe
caccaaagaaacatctaagcaataa

SEQ ID NO: 156351 - DNA, 25 bp, Artificial
  Probe
ccaacaccaaagaaacatctaagca

SEQ ID NO: 156352 - DNA, 25 bp, Artificial
  Probe
accaacaccaaagaaacatctaagc

SEQ ID NO: 156353 - DNA, 25 bp, Artificial
  Probe
acggaagactaacaagatttggaca

SEQ ID NO: 156354 - DNA, 25 bp, Artificial
  Probe
cccaaccaaagaaatctgaaatata

SEQ ID NO: 156355 - DNA, 25 bp, Artificial
  Probe
ctctacgaaactaacaactgcaaag

SEQ ID NO: 156356 - DNA, 25 bp, Artificial
  Probe
accaaagaaacatctaagcaataaa

SEQ ID NO: 156357 - DNA, 25 bp, Artificial
  Probe
tctctacgaaactaacaactgcaaa

SEQ ID NO: 156358 - DNA, 25 bp, Artificial
  Probe
ctattctctacgaaactaacaactg

SEQ ID NO: 156359 - DNA, 25 bp, Artificial
  Probe
ttactgctattctctacgaaactaa

SEQ ID NO: 156360 - DNA, 25 bp, Artificial
  Probe
tttactgctattctctacgaaacta

SEQ ID NO: 156361 - DNA, 25 bp, Artificial
  Probe
attctctacgaaactaacaactgca

SEQ ID NO: 156362 - DNA, 25 bp, Artificial
  Probe
ttctctacgaaactaacaactgcaa

SEQ ID NO: 156363 - DNA, 25 bp, Artificial
  Probe
gaatgtttactgctattctctacga

SEQ ID NO: 156364 - DNA, 25 bp, Artificial
  Probe
ggtgaccttaagaattaatgaccat

SEQ ID NO: 156365 - DNA, 25 bp, Artificial
  Probe
ttcttacatagctctctctgaaatg

SEQ ID NO: 156366 - DNA, 25 bp, Artificial
  Probe
tctacgaaactaacaactgcaaagg

SEQ ID NO: 156367 - DNA, 25 bp, Artificial
  Probe
agactaacaagatttggacattaga

SEQ ID NO: 156368 - DNA, 25 bp, Artificial
  Probe
gaagactaacaagatttggacatta

SEQ ID NO: 156369 - DNA, 25 bp, Artificial
  Probe
gtgaccttaagaattaatgaccatt

SEQ ID NO: 156370 - DNA, 25 bp, Artificial
  Probe
gcaataaaacggaagactaacaaga

SEQ ID NO: 156371 - DNA, 25 bp, Artificial
  Probe
agcaataaaacggaagactaacaag

SEQ ID NO: 156372 - DNA, 25 bp, Artificial
  Probe
ctctgaaatgtgcagtaacaagttc

SEQ ID NO: 156373 - DNA, 25 bp, Artificial
  Probe
tgtttactgctattctctacgaaac

SEQ ID NO: 156374 - DNA, 25 bp, Artificial
  Probe
attactacctccaagaagaacactg

SEQ ID NO: 156375 - DNA, 25 bp, Artificial
  Probe
tactacctccaagaagaacactgta

SEQ ID NO: 156376 - DNA, 25 bp, Artificial
  Probe
ctacctccaagaagaacactgtatg

SEQ ID NO: 156377 - DNA, 25 bp, Artificial
  Probe
actacctccaagaagaacactgtat

SEQ ID NO: 156378 - DNA, 25 bp, Artificial
  Probe
tacctccaagaagaacactgtatga

SEQ ID NO: 156379 - DNA, 25 bp, Artificial
  Probe
ttactacctccaagaagaacactgt

SEQ ID NO: 156380 - DNA, 25 bp, Artificial
  Probe
tattactacctccaagaagaacact

SEQ ID NO: 156381 - DNA, 25 bp, Artificial
  Probe
tgtggcaataagaagagatcctaag

SEQ ID NO: 156382 - DNA, 25 bp, Artificial
  Probe
ctgtggcaataagaagagatcctaa

SEQ ID NO: 156383 - DNA, 25 bp, Artificial
  Probe
gtggcaataagaagagatcctaagg

SEQ ID NO: 156384 - DNA, 25 bp, Artificial
  Probe
tctgtggcaataagaagagatccta

SEQ ID NO: 156385 - DNA, 25 bp, Artificial
  Probe
ttattactacctccaagaagaacac

SEQ ID NO: 156386 - DNA, 25 bp, Artificial
  Probe
acctccaagaagaacactgtatgag

SEQ ID NO: 156387 - DNA, 25 bp, Artificial
  Probe
ccaagaagaacactgtatgagctta

SEQ ID NO: 156388 - DNA, 25 bp, Artificial
  Probe
gtagaagctgtgaacactgtgatag

SEQ ID NO: 156389 - DNA, 25 bp, Artificial
  Probe
caagaagaacactgtatgagcttat

SEQ ID NO: 156390 - DNA, 25 bp, Artificial
  Probe
attattactacctccaagaagaaca

SEQ ID NO: 156391 - DNA, 25 bp, Artificial
  Probe
gacgaaggttccaaagtatcagata

SEQ ID NO: 156392 - DNA, 25 bp, Artificial
  Probe
gtaaagtttgaacagtttccacaca

SEQ ID NO: 156393 - DNA, 25 bp, Artificial
  Probe
caatttcagcaacttctctctaact

SEQ ID NO: 156394 - DNA, 25 bp, Artificial
  Probe
gcaatttcagcaacttctctctaac

SEQ ID NO: 156395 - DNA, 25 bp, Artificial
  Probe
agcaatttcagcaacttctctctaa

SEQ ID NO: 156396 - DNA, 25 bp, Artificial
  Probe
ggcaataagaagagatcctaaggaa

SEQ ID NO: 156397 - DNA, 25 bp, Artificial
  Probe
tggcaataagaagagatcctaagga

SEQ ID NO: 156398 - DNA, 25 bp, Artificial
  Probe
taaagtttgaacagtttccacacaa

SEQ ID NO: 156399 - DNA, 25 bp, Artificial
  Probe
aagcaatttcagcaacttctctcta

SEQ ID NO: 156400 - DNA, 25 bp, Artificial
  Probe
taagcaatttcagcaacttctctct

SEQ ID NO: 156401 - DNA, 25 bp, Artificial
  Probe
gtaagcaatttcagcaacttctctc

SEQ ID NO: 156402 - DNA, 25 bp, Artificial
  Probe
aagaagaacactgtatgagcttatt

SEQ ID NO: 156403 - DNA, 25 bp, Artificial
  Probe
tttgtaagcaatttcagcaacttct

SEQ ID NO: 156404 - DNA, 25 bp, Artificial
  Probe
catttgtaagcaatttcagcaactt

SEQ ID NO: 156405 - DNA, 25 bp, Artificial
  Probe
acatttgtaagcaatttcagcaact

SEQ ID NO: 156406 - DNA, 25 bp, Artificial
  Probe
cacatttgtaagcaatttcagcaac

SEQ ID NO: 156407 - DNA, 25 bp, Artificial
  Probe
tcacatttgtaagcaatttcagcaa

SEQ ID NO: 156408 - DNA, 25 bp, Artificial
  Probe
ttgtaagcaatttcagcaacttctc

SEQ ID NO: 156409 - DNA, 25 bp, Artificial
  Probe
tccaagaagaacactgtatgagctt

SEQ ID NO: 156410 - DNA, 25 bp, Artificial
  Probe
atcagataccacacaatttctatgc

SEQ ID NO: 156411 - DNA, 25 bp, Artificial
  Probe
tctcacatttgtaagcaatttcagc

SEQ ID NO: 156412 - DNA, 25 bp, Artificial
  Probe
tcaattattactacctccaagaaga

SEQ ID NO: 156413 - DNA, 25 bp, Artificial
  Probe
atttgtaagcaatttcagcaacttc

SEQ ID NO: 156414 - DNA, 25 bp, Artificial
  Probe
tgtaagcaatttcagcaacttctct

SEQ ID NO: 156415 - DNA, 25 bp, Artificial
  Probe
ctcacatttgtaagcaatttcagca

SEQ ID NO: 156416 - DNA, 25 bp, Artificial
  Probe
aaagtttgaacagtttccacacaac

SEQ ID NO: 156417 - DNA, 25 bp, Artificial
  Probe
cacagaagatcagtttatcaggaca

SEQ ID NO: 156418 - DNA, 25 bp, Artificial
  Probe
acacagaagatcagtttatcaggac

SEQ ID NO: 156419 - DNA, 25 bp, Artificial
  Probe
cagagaacattagtccagaagaaga

SEQ ID NO: 156420 - DNA, 25 bp, Artificial
  Probe
tcagagaacattagtccagaagaag

SEQ ID NO: 156421 - DNA, 25 bp, Artificial
  Probe
atcagagaacattagtccagaagaa

SEQ ID NO: 156422 - DNA, 25 bp, Artificial
  Probe
aatcagagaacattagtccagaaga

SEQ ID NO: 156423 - DNA, 25 bp, Artificial
  Probe
agagaacattagtccagaagaagaa

SEQ ID NO: 156424 - DNA, 25 bp, Artificial
  Probe
aaggaagcattgaagacagacttaa

SEQ ID NO: 156425 - DNA, 25 bp, Artificial
  Probe
gagattgatcctgccttagtagtag

SEQ ID NO: 156426 - DNA, 25 bp, Artificial
  Probe
gagaacattagtccagaagaagaat

SEQ ID NO: 156427 - DNA, 25 bp, Artificial
  Probe
gtccagaagaagaatataagatcgc

SEQ ID NO: 156428 - DNA, 25 bp, Artificial
  Probe
aagaagaatataagatcgcttgcct

SEQ ID NO: 156429 - DNA, 25 bp, Artificial
  Probe
gaagaagaatataagatcgcttgcc

SEQ ID NO: 156430 - DNA, 25 bp, Artificial
  Probe
tccagaagaagaatataagatcgct

SEQ ID NO: 156431 - DNA, 25 bp, Artificial
  Probe
agaagaatataagatcgcttgcctc

SEQ ID NO: 156432 - DNA, 25 bp, Artificial
  Probe
cgagattgatcctgccttagtagta

SEQ ID NO: 156433 - DNA, 25 bp, Artificial
  Probe
agaagaagaatataagatcgcttgc

SEQ ID NO: 156434 - DNA, 25 bp, Artificial
  Probe
ctgacaatggatctcttggaatctt

SEQ ID NO: 156435 - DNA, 25 bp, Artificial
  Probe
gaaccaaccatcacgagtctgtata

SEQ ID NO: 156436 - DNA, 25 bp, Artificial
  Probe
agattgatcctgccttagtagtagc

SEQ ID NO: 156437 - DNA, 25 bp, Artificial
  Probe
tgacaatggatctcttggaatcttg

SEQ ID NO: 156438 - DNA, 25 bp, Artificial
  Probe
caagcgtaagagaatatatgactgt

SEQ ID NO: 156439 - DNA, 25 bp, Artificial
  Probe
acaagcgtaagagaatatatgactg

SEQ ID NO: 156440 - DNA, 25 bp, Artificial
  Probe
tgacaagcgtaagagaatatatgac

SEQ ID NO: 156441 - DNA, 25 bp, Artificial
  Probe
gaagaatataagatcgcttgcctcc

SEQ ID NO: 156442 - DNA, 25 bp, Artificial
  Probe
tgtactccagtccatagagaactat

SEQ ID NO: 156443 - DNA, 25 bp, Artificial
  Probe
ccagaagaagaatataagatcgctt

SEQ ID NO: 156444 - DNA, 25 bp, Artificial
  Probe
gacaagcgtaagagaatatatgact

SEQ ID NO: 156445 - DNA, 25 bp, Artificial
  Probe
ctgacaagcgtaagagaatatatga

SEQ ID NO: 156446 - DNA, 25 bp, Artificial
  Probe
aagaatataagatcgcttgcctcct

SEQ ID NO: 156447 - DNA, 25 bp, Artificial
  Probe
aatataagatcgcttgcctcctgat

SEQ ID NO: 156448 - DNA, 25 bp, Artificial
  Probe
tctgacaagcgtaagagaatatatg

SEQ ID NO: 156449 - DNA, 25 bp, Artificial
  Probe
gcgtaagagaatatatgactgtact

SEQ ID NO: 156450 - DNA, 25 bp, Artificial
  Probe
agcgtaagagaatatatgactgtac

SEQ ID NO: 156451 - DNA, 25 bp, Artificial
  Probe
agtccagaagaagaatataagatcg

SEQ ID NO: 156452 - DNA, 25 bp, Artificial
  Probe
attgatcctgccttagtagtagctc

SEQ ID NO: 156453 - DNA, 25 bp, Artificial
  Probe
gattgatcctgccttagtagtagct

SEQ ID NO: 156454 - DNA, 25 bp, Artificial
  Probe
cctgacaatggatctcttggaatct

SEQ ID NO: 156455 - DNA, 25 bp, Artificial
  Probe
agaacattagtccagaagaagaata

SEQ ID NO: 156456 - DNA, 25 bp, Artificial
  Probe
caatagaaggacactgcaacaatat

SEQ ID NO: 156457 - DNA, 25 bp, Artificial
  Probe
agaatataagatcgcttgcctcctg

SEQ ID NO: 156458 - DNA, 25 bp, Artificial
  Probe
gaaggacactgcaacaatattcatt

SEQ ID NO: 156459 - DNA, 25 bp, Artificial
  Probe
tagaaggacactgcaacaatattca

SEQ ID NO: 156460 - DNA, 25 bp, Artificial
  Probe
cttcttcagcaaacacaacacttag

SEQ ID NO: 156461 - DNA, 25 bp, Artificial
  Probe
atataagatcgcttgcctcctgatg

SEQ ID NO: 156462 - DNA, 25 bp, Artificial
  Probe
gaatataagatcgcttgcctcctga

SEQ ID NO: 156463 - DNA, 25 bp, Artificial
  Probe
cagaagaagaatataagatcgcttg

SEQ ID NO: 156464 - DNA, 25 bp, Artificial
  Probe
tgtttcagagattgctacctacttt

SEQ ID NO: 156465 - DNA, 25 bp, Artificial
  Probe
tttcagagattgctacctactttcc

SEQ ID NO: 156466 - DNA, 25 bp, Artificial
  Probe
gtgtttcagagattgctacctactt

SEQ ID NO: 156467 - DNA, 25 bp, Artificial
  Probe
gtttcagagattgctacctactttc

SEQ ID NO: 156468 - DNA, 25 bp, Artificial
  Probe
atgcccactctaacactttgataag

SEQ ID NO: 156469 - DNA, 25 bp, Artificial
  Probe
ctttgataagagtggtgtaaactgc

SEQ ID NO: 156470 - DNA, 25 bp, Artificial
  Probe
actttgataagagtggtgtaaactg

SEQ ID NO: 156471 - DNA, 25 bp, Artificial
  Probe
tgcccactctaacactttgataaga

SEQ ID NO: 156472 - DNA, 25 bp, Artificial
  Probe
catgcccactctaacactttgataa

SEQ ID NO: 156473 - DNA, 25 bp, Artificial
  Probe
ttcagagattgctacctactttccg

SEQ ID NO: 156474 - DNA, 25 bp, Artificial
  Probe
ctgaaattaacgctgagtggatgtt

SEQ ID NO: 156475 - DNA, 25 bp, Artificial
  Probe
tttctgagtcaccagtctttcaaac

SEQ ID NO: 156476 - DNA, 25 bp, Artificial
  Probe
gtttctgagtcaccagtctttcaaa

SEQ ID NO: 156477 - DNA, 25 bp, Artificial
  Probe
gaaattaacgctgagtggatgttag

SEQ ID NO: 156478 - DNA, 25 bp, Artificial
  Probe
tgaaattaacgctgagtggatgtta

SEQ ID NO: 156479 - DNA, 25 bp, Artificial
  Probe
tttaaagccatcctgaaattaacgc

SEQ ID NO: 156480 - DNA, 25 bp, Artificial
  Probe
tcatgcccactctaacactttgata

SEQ ID NO: 156481 - DNA, 25 bp, Artificial
  Probe
catgaggtgtttcagagattgctac

SEQ ID NO: 156482 - DNA, 25 bp, Artificial
  Probe
cagtctttcaaacacgttaggaatc

SEQ ID NO: 156483 - DNA, 25 bp, Artificial
  Probe
cagagattgctacctactttccgtg

SEQ ID NO: 156484 - DNA, 25 bp, Artificial
  Probe
ttctgagtcaccagtctttcaaaca

SEQ ID NO: 156485 - DNA, 25 bp, Artificial
  Probe
tgtttctgagtcaccagtctttcaa

SEQ ID NO: 156486 - DNA, 25 bp, Artificial
  Probe
tcagagattgctacctactttccgt

SEQ ID NO: 156487 - DNA, 25 bp, Artificial
  Probe
gataagagtggtgtaaactgcattc

SEQ ID NO: 156488 - DNA, 25 bp, Artificial
  Probe
tgataagagtggtgtaaactgcatt

SEQ ID NO: 156489 - DNA, 25 bp, Artificial
  Probe
ttgataagagtggtgtaaactgcat

SEQ ID NO: 156490 - DNA, 25 bp, Artificial
  Probe
tttgataagagtggtgtaaactgca

SEQ ID NO: 156491 - DNA, 25 bp, Artificial
  Probe
ataagagtggtgtaaactgcattcc

SEQ ID NO: 156492 - DNA, 25 bp, Artificial
  Probe
ggacatttaaagccatcctgaaatt

SEQ ID NO: 156493 - DNA, 25 bp, Artificial
  Probe
ccagtctttcaaacacgttaggaat

SEQ ID NO: 156494 - DNA, 25 bp, Artificial
  Probe
agtctttcaaacacgttaggaatcg

SEQ ID NO: 156495 - DNA, 25 bp, Artificial
  Probe
ggtgtttcagagattgctacctact

SEQ ID NO: 156496 - DNA, 25 bp, Artificial
  Probe
gattgctacctactttccgtgcttt

SEQ ID NO: 156497 - DNA, 25 bp, Artificial
  Probe
cctactttccgtgcttttgttttat

SEQ ID NO: 156498 - DNA, 25 bp, Artificial
  Probe
actttgccactgctgtattttattt

SEQ ID NO: 156499 - DNA, 25 bp, Artificial
  Probe
atttaaagccatcctgaaattaacg

SEQ ID NO: 156500 - DNA, 25 bp, Artificial
  Probe
ctactttccgtgcttttgttttatg

SEQ ID NO: 156501 - DNA, 25 bp, Artificial
  Probe
ttgtgtttctgagtcaccagtcttt

SEQ ID NO: 156502 - DNA, 25 bp, Artificial
  Probe
tttgtgtttctgagtcaccagtctt

SEQ ID NO: 156503 - DNA, 25 bp, Artificial
  Probe
cactttgccactgctgtattttatt

SEQ ID NO: 156504 - DNA, 25 bp, Artificial
  Probe
gagagcatgaggtgtttcagagatt

SEQ ID NO: 156505 - DNA, 25 bp, Artificial
  Probe
cctgaaattaacgctgagtggatgt

SEQ ID NO: 156506 - DNA, 25 bp, Artificial
  Probe
ttaaagccatcctgaaattaacgct

SEQ ID NO: 156507 - DNA, 25 bp, Artificial
  Probe
ctttgccactgctgtattttatttt

SEQ ID NO: 156508 - DNA, 25 bp, Artificial
  Probe
tctgagtcaccagtctttcaaacac

SEQ ID NO: 156509 - DNA, 25 bp, Artificial
  Probe
ctaacacatacaagcacaatagacg

SEQ ID NO: 156510 - DNA, 25 bp, Artificial
  Probe
aatacaccgactatgaagacctatg

SEQ ID NO: 156511 - DNA, 25 bp, Artificial
  Probe
gaatacaccgactatgaagacctat

SEQ ID NO: 156512 - DNA, 25 bp, Artificial
  Probe
ctacgaatacaccgactatgaagac

SEQ ID NO: 156513 - DNA, 25 bp, Artificial
  Probe
actaacacatacaagcacaatagac

SEQ ID NO: 156514 - DNA, 25 bp, Artificial
  Probe
cgaatacaccgactatgaagaccta

SEQ ID NO: 156515 - DNA, 25 bp, Artificial
  Probe
aactaacacatacaagcacaataga

SEQ ID NO: 156516 - DNA, 25 bp, Artificial
  Probe
tacgaatacaccgactatgaagacc

SEQ ID NO: 156517 - DNA, 25 bp, Artificial
  Probe
taacacatacaagcacaatagacgc

SEQ ID NO: 156518 - DNA, 25 bp, Artificial
  Probe
tataggtcaccaatgatactgaagc

SEQ ID NO: 156519 - DNA, 25 bp, Artificial
  Probe
atacaccgactatgaagacctatgt

SEQ ID NO: 156520 - DNA, 25 bp, Artificial
  Probe
gctacgaatacaccgactatgaaga

SEQ ID NO: 156521 - DNA, 25 bp, Artificial
  Probe
tacaccgactatgaagacctatgtt

SEQ ID NO: 156522 - DNA, 25 bp, Artificial
  Probe
ttcgtctattagaagtggataatcg

SEQ ID NO: 156523 - DNA, 25 bp, Artificial
  Probe
atgatactgaagctacgaatacacc

SEQ ID NO: 156524 - DNA, 25 bp, Artificial
  Probe
accaatgatactgaagctacgaata

SEQ ID NO: 156525 - DNA, 25 bp, Artificial
  Probe
ccaatgatactgaagctacgaatac

SEQ ID NO: 156526 - DNA, 25 bp, Artificial
  Probe
agctgttattcttattcttatcgcc

SEQ ID NO: 156527 - DNA, 25 bp, Artificial
  Probe
caccaatgatactgaagctacgaat

SEQ ID NO: 156528 - DNA, 25 bp, Artificial
  Probe
aatgatactgaagctacgaatacac

SEQ ID NO: 156529 - DNA, 25 bp, Artificial
  Probe
caatgatactgaagctacgaataca

SEQ ID NO: 156530 - DNA, 25 bp, Artificial
  Probe
ttattcttattcttatcgccctccc

SEQ ID NO: 156531 - DNA, 25 bp, Artificial
  Probe
gctgttattcttattcttatcgccc

SEQ ID NO: 156532 - DNA, 25 bp, Artificial
  Probe
taggtcaccaatgatactgaagcta

SEQ ID NO: 156533 - DNA, 25 bp, Artificial
  Probe
tattcttattcttatcgccctccct

SEQ ID NO: 156534 - DNA, 25 bp, Artificial
  Probe
aagctacgaatacaccgactatgaa

SEQ ID NO: 156535 - DNA, 25 bp, Artificial
  Probe
gttattcttattcttatcgccctcc

SEQ ID NO: 156536 - DNA, 25 bp, Artificial
  Probe
agaagtggaaacaatttggacaatc

SEQ ID NO: 156537 - DNA, 25 bp, Artificial
  Probe
aagaagtggaaacaatttggacaat

SEQ ID NO: 156538 - DNA, 25 bp, Artificial
  Probe
cctacataatcccaaccaatgactt

SEQ ID NO: 156539 - DNA, 25 bp, Artificial
  Probe
acgaatacaccgactatgaagacct

SEQ ID NO: 156540 - DNA, 25 bp, Artificial
  Probe
agacgaaatcaataacccagttcta

SEQ ID NO: 156541 - DNA, 25 bp, Artificial
  Probe
tagacgaaatcaataacccagttct

SEQ ID NO: 156542 - DNA, 25 bp, Artificial
  Probe
ataggtcaccaatgatactgaagct

SEQ ID NO: 156543 - DNA, 25 bp, Artificial
  Probe
cgtctattagaagtggataatcgag

SEQ ID NO: 156544 - DNA, 25 bp, Artificial
  Probe
attcttattcttatcgccctccctt

SEQ ID NO: 156545 - DNA, 25 bp, Artificial
  Probe
cgaaatcaataacccagttctaaca

SEQ ID NO: 156546 - DNA, 25 bp, Artificial
  Probe
acgaaatcaataacccagttctaac

SEQ ID NO: 156547 - DNA, 25 bp, Artificial
  Probe
agctacgaatacaccgactatgaag

SEQ ID NO: 156548 - DNA, 25 bp, Artificial
  Probe
gaagctacgaatacaccgactatga

SEQ ID NO: 156549 - DNA, 25 bp, Artificial
  Probe
ctgaagctacgaatacaccgactat

SEQ ID NO: 156550 - DNA, 25 bp, Artificial
  Probe
gatactgaagctacgaatacaccga

SEQ ID NO: 156551 - DNA, 25 bp, Artificial
  Probe
gacgaaatcaataacccagttctaa

SEQ ID NO: 156552 - DNA, 25 bp, Artificial
  Probe
tgttattcttattcttatcgccctc

SEQ ID NO: 156553 - DNA, 25 bp, Artificial
  Probe
ctgttattcttattcttatcgccct

SEQ ID NO: 156554 - DNA, 25 bp, Artificial
  Probe
gaacactcaacttcctaatcctctc

SEQ ID NO: 156555 - DNA, 25 bp, Artificial
  Probe
aacactcaacttcctaatcctctcc

SEQ ID NO: 156556 - DNA, 25 bp, Artificial
  Probe
ccttatagcaactaacattgtcact

SEQ ID NO: 156557 - DNA, 25 bp, Artificial
  Probe
tccttatagcaactaacattgtcac

SEQ ID NO: 156558 - DNA, 25 bp, Artificial
  Probe
agcaacatgatgattattagcaagc

SEQ ID NO: 156559 - DNA, 25 bp, Artificial
  Probe
tagcaactaacattgtcactacagg

SEQ ID NO: 156560 - DNA, 25 bp, Artificial
  Probe
caactaacattgtcactacaggaat

SEQ ID NO: 156561 - DNA, 25 bp, Artificial
  Probe
atagcaactaacattgtcactacag

SEQ ID NO: 156562 - DNA, 25 bp, Artificial
  Probe
gcaactaacattgtcactacaggaa

SEQ ID NO: 156563 - DNA, 25 bp, Artificial
  Probe
gcaacatgatgattattagcaagct

SEQ ID NO: 156564 - DNA, 25 bp, Artificial
  Probe
aattataactagctcggtctgccta

SEQ ID NO: 156565 - DNA, 25 bp, Artificial
  Probe
taattataactagctcggtctgcct

SEQ ID NO: 156566 - DNA, 25 bp, Artificial
  Probe
agcaactaacattgtcactacagga

SEQ ID NO: 156567 - DNA, 25 bp, Artificial
  Probe
cattgtcactacaggaatatactca

SEQ ID NO: 156568 - DNA, 25 bp, Artificial
  Probe
acattgtcactacaggaatatactc

SEQ ID NO: 156569 - DNA, 25 bp, Artificial
  Probe
attataactagctcggtctgcctac

SEQ ID NO: 156570 - DNA, 25 bp, Artificial
  Probe
tatagcaactaacattgtcactaca

SEQ ID NO: 156571 - DNA, 25 bp, Artificial
  Probe
aactaacattgtcactacaggaata

SEQ ID NO: 156572 - DNA, 25 bp, Artificial
  Probe
tagcaacatgatgattattagcaag

SEQ ID NO: 156573 - DNA, 25 bp, Artificial
  Probe
ctacaatactaataatcgcccacgg

SEQ ID NO: 156574 - DNA, 25 bp, Artificial
  Probe
aacattgtcactacaggaatatact

SEQ ID NO: 156575 - DNA, 25 bp, Artificial
  Probe
actaacattgtcactacaggaatat

SEQ ID NO: 156576 - DNA, 25 bp, Artificial
  Probe
gatagcaacatgatgattattagca

SEQ ID NO: 156577 - DNA, 25 bp, Artificial
  Probe
tgatagcaacatgatgattattagc

SEQ ID NO: 156578 - DNA, 25 bp, Artificial
  Probe
gctacaatactaataatcgcccacg

SEQ ID NO: 156579 - DNA, 25 bp, Artificial
  Probe
aagccactctaatcccaacactaat

SEQ ID NO: 156580 - DNA, 25 bp, Artificial
  Probe
ttgtcactacaggaatatactcaat

SEQ ID NO: 156581 - DNA, 25 bp, Artificial
  Probe
attgtcactacaggaatatactcaa

SEQ ID NO: 156582 - DNA, 25 bp, Artificial
  Probe
agccactctaatcccaacactaatt

SEQ ID NO: 156583 - DNA, 25 bp, Artificial
  Probe
ttatagcaactaacattgtcactac

SEQ ID NO: 156584 - DNA, 25 bp, Artificial
  Probe
ataattataactagctcggtctgcc

SEQ ID NO: 156585 - DNA, 25 bp, Artificial
  Probe
ggcataattataactagctcggtct

SEQ ID NO: 156586 - DNA, 25 bp, Artificial
  Probe
aggcataattataactagctcggtc

SEQ ID NO: 156587 - DNA, 25 bp, Artificial
  Probe
gaagccactctaatcccaacactaa

SEQ ID NO: 156588 - DNA, 25 bp, Artificial
  Probe
cataattataactagctcggtctgc

SEQ ID NO: 156589 - DNA, 25 bp, Artificial
  Probe
gcataattataactagctcggtctg

SEQ ID NO: 156590 - DNA, 25 bp, Artificial
  Probe
cttatagcaactaacattgtcacta

SEQ ID NO: 156591 - DNA, 25 bp, Artificial
  Probe
atagcaacatgatgattattagcaa

SEQ ID NO: 156592 - DNA, 25 bp, Artificial
  Probe
gagctacaatactaataatcgccca

SEQ ID NO: 156593 - DNA, 25 bp, Artificial
  Probe
tgggagctacaatactaataatcgc

SEQ ID NO: 156594 - DNA, 25 bp, Artificial
  Probe
agctacaatactaataatcgcccac

SEQ ID NO: 156595 - DNA, 25 bp, Artificial
  Probe
ggagctacaatactaataatcgccc

SEQ ID NO: 156596 - DNA, 25 bp, Artificial
  Probe
gggagctacaatactaataatcgcc

SEQ ID NO: 156597 - DNA, 25 bp, Artificial
  Probe
gaggcataattataactagctcggt

SEQ ID NO: 156598 - DNA, 25 bp, Artificial
  Probe
tgaggcataattataactagctcgg

SEQ ID NO: 156599 - DNA, 25 bp, Artificial
  Probe
catcttctctcttcttgtctctcag

SEQ ID NO: 156600 - DNA, 25 bp, Artificial
  Probe
tcatcttctctcttcttgtctctca

SEQ ID NO: 156601 - DNA, 25 bp, Artificial
  Probe
ttcatcttctctcttcttgtctctc

SEQ ID NO: 156602 - DNA, 25 bp, Artificial
  Probe
ttaaccatcttgactactgacttcc

SEQ ID NO: 156603 - DNA, 25 bp, Artificial
  Probe
taaccatcttgactactgacttcca

SEQ ID NO: 156604 - DNA, 25 bp, Artificial
  Probe
atcttctctcttcttgtctctcagc

SEQ ID NO: 156605 - DNA, 25 bp, Artificial
  Probe
agatatacaagtctgtgatgatgga

SEQ ID NO: 156606 - DNA, 25 bp, Artificial
  Probe
tatacaagtctgtgatgatggattg

SEQ ID NO: 156607 - DNA, 25 bp, Artificial
  Probe
aagatatacaagtctgtgatgatgg

SEQ ID NO: 156608 - DNA, 25 bp, Artificial
  Probe
gatatacaagtctgtgatgatggat

SEQ ID NO: 156609 - DNA, 25 bp, Artificial
  Probe
cagtaagatttcacacccaggataa

SEQ ID NO: 156610 - DNA, 25 bp, Artificial
  Probe
aaccatcttgactactgacttccag

SEQ ID NO: 156611 - DNA, 25 bp, Artificial
  Probe
gttccctgtaaagcacttcaataaa

SEQ ID NO: 156612 - DNA, 25 bp, Artificial
  Probe
gtaagatttcacacccaggataatg

SEQ ID NO: 156613 - DNA, 25 bp, Artificial
  Probe
agtaagatttcacacccaggataat

SEQ ID NO: 156614 - DNA, 25 bp, Artificial
  Probe
tgttccctgtaaagcacttcaataa

SEQ ID NO: 156615 - DNA, 25 bp, Artificial
  Probe
tttcatcttctctcttcttgtctct

SEQ ID NO: 156616 - DNA, 25 bp, Artificial
  Probe
ccctgtaaagcacttcaataaagac

SEQ ID NO: 156617 - DNA, 25 bp, Artificial
  Probe
tccctgtaaagcacttcaataaaga

SEQ ID NO: 156618 - DNA, 25 bp, Artificial
  Probe
ttccctgtaaagcacttcaataaag

SEQ ID NO: 156619 - DNA, 25 bp, Artificial
  Probe
acagtaagatttcacacccaggata

SEQ ID NO: 156620 - DNA, 25 bp, Artificial
  Probe
gactccactctgctctcattactct

SEQ ID NO: 156621 - DNA, 25 bp, Artificial
  Probe
tacagtaagatttcacacccaggat

SEQ ID NO: 156622 - DNA, 25 bp, Artificial
  Probe
atacagtaagatttcacacccagga

SEQ ID NO: 156623 - DNA, 25 bp, Artificial
  Probe
catacagtaagatttcacacccagg

SEQ ID NO: 156624 - DNA, 25 bp, Artificial
  Probe
atatacaagtctgtgatgatggatt

SEQ ID NO: 156625 - DNA, 25 bp, Artificial
  Probe
ttgttccctgtaaagcacttcaata

SEQ ID NO: 156626 - DNA, 25 bp, Artificial
  Probe
ctctcttcttgtctctcagctcttc

SEQ ID NO: 156627 - DNA, 25 bp, Artificial
  Probe
cttctctcttcttgtctctcagctc

SEQ ID NO: 156628 - DNA, 25 bp, Artificial
  Probe
caataaagacataacttccaacagc

SEQ ID NO: 156629 - DNA, 25 bp, Artificial
  Probe
gcatacagtaagatttcacacccag

SEQ ID NO: 156630 - DNA, 25 bp, Artificial
  Probe
actccactctgctctcattactctg

SEQ ID NO: 156631 - DNA, 25 bp, Artificial
  Probe
gcacttcaataaagacataacttcc

SEQ ID NO: 156632 - DNA, 25 bp, Artificial
  Probe
taagatttcacacccaggataatgt

SEQ ID NO: 156633 - DNA, 25 bp, Artificial
  Probe
ccctcaaagatatacaagtctgtga

SEQ ID NO: 156634 - DNA, 25 bp, Artificial
  Probe
gataatgtgccctgttctgttcttc

SEQ ID NO: 156635 - DNA, 25 bp, Artificial
  Probe
cctgtaaagcacttcaataaagaca

SEQ ID NO: 156636 - DNA, 25 bp, Artificial
  Probe
tctcttcttgtctctcagctcttct

SEQ ID NO: 156637 - DNA, 25 bp, Artificial
  Probe
tctctcttcttgtctctcagctctt

SEQ ID NO: 156638 - DNA, 25 bp, Artificial
  Probe
ttctctcttcttgtctctcagctct

SEQ ID NO: 156639 - DNA, 25 bp, Artificial
  Probe
tcttctctcttcttgtctctcagct

SEQ ID NO: 156640 - DNA, 25 bp, Artificial
  Probe
tgttaaccatcttgactactgactt

SEQ ID NO: 156641 - DNA, 25 bp, Artificial
  Probe
ataatgtgccctgttctgttcttct

SEQ ID NO: 156642 - DNA, 25 bp, Artificial
  Probe
gttaaccatcttgactactgacttc

SEQ ID NO: 156643 - DNA, 25 bp, Artificial
  Probe
tcttgctatgttaaccatcttgact

SEQ ID NO: 156644 - DNA, 25 bp, Artificial
  Probe
ggatgaactatacacttgaacacct

SEQ ID NO: 156645 - DNA, 25 bp, Artificial
  Probe
atgaactatacacttgaacacctgg

SEQ ID NO: 156646 - DNA, 25 bp, Artificial
  Probe
tggatgaactatacacttgaacacc

SEQ ID NO: 156647 - DNA, 25 bp, Artificial
  Probe
gatgaactatacacttgaacacctg

SEQ ID NO: 156648 - DNA, 25 bp, Artificial
  Probe
gaggttcagagatacattgacattg

SEQ ID NO: 156649 - DNA, 25 bp, Artificial
  Probe
aggttcagagatacattgacattgg

SEQ ID NO: 156650 - DNA, 25 bp, Artificial
  Probe
cgaggttcagagatacattgacatt

SEQ ID NO: 156651 - DNA, 25 bp, Artificial
  Probe
ggttcagagatacattgacattggt

SEQ ID NO: 156652 - DNA, 25 bp, Artificial
  Probe
tcctatacttcttgattattgtccg

SEQ ID NO: 156653 - DNA, 25 bp, Artificial
  Probe
gttcagagatacattgacattggtc

SEQ ID NO: 156654 - DNA, 25 bp, Artificial
  Probe
acgaggttcagagatacattgacat

SEQ ID NO: 156655 - DNA, 25 bp, Artificial
  Probe
ttcagagatacattgacattggtcc

SEQ ID NO: 156656 - DNA, 25 bp, Artificial
  Probe
ctatacacttgaacacctggcaatc

SEQ ID NO: 156657 - DNA, 25 bp, Artificial
  Probe
gtggatgaactatacacttgaacac

SEQ ID NO: 156658 - DNA, 25 bp, Artificial
  Probe
ccactgtatccttccttcttctcac

SEQ ID NO: 156659 - DNA, 25 bp, Artificial
  Probe
caggaagagattgaccatgtgattg

SEQ ID NO: 156660 - DNA, 25 bp, Artificial
  Probe
actatacacttgaacacctggcaat

SEQ ID NO: 156661 - DNA, 25 bp, Artificial
  Probe
aatgccactgtatccttccttcttc

SEQ ID NO: 156662 - DNA, 25 bp, Artificial
  Probe
cactgtatccttccttcttctcaca

SEQ ID NO: 156663 - DNA, 25 bp, Artificial
  Probe
tcagagatacattgacattggtcca

SEQ ID NO: 156664 - DNA, 25 bp, Artificial
  Probe
aatgccaatcagtggatgaactata

SEQ ID NO: 156665 - DNA, 25 bp, Artificial
  Probe
tatacacttgaacacctggcaatca

SEQ ID NO: 156666 - DNA, 25 bp, Artificial
  Probe
aactatacacttgaacacctggcaa

SEQ ID NO: 156667 - DNA, 25 bp, Artificial
  Probe
gaactatacacttgaacacctggca

SEQ ID NO: 156668 - DNA, 25 bp, Artificial
  Probe
tgaactatacacttgaacacctggc

SEQ ID NO: 156669 - DNA, 25 bp, Artificial
  Probe
atgccaatcagtggatgaactatac

SEQ ID NO: 156670 - DNA, 25 bp, Artificial
  Probe
tgtccaaggataatagttctgcatt

SEQ ID NO: 156671 - DNA, 25 bp, Artificial
  Probe
ttgtccaaggataatagttctgcat

SEQ ID NO: 156672 - DNA, 25 bp, Artificial
  Probe
cacgaggttcagagatacattgaca

SEQ ID NO: 156673 - DNA, 25 bp, Artificial
  Probe
ggaatagagacagtaagctcaacaa

SEQ ID NO: 156674 - DNA, 25 bp, Artificial
  Probe
cagagatacattgacattggtccaa

SEQ ID NO: 156675 - DNA, 25 bp, Artificial
  Probe
atagagacagtaagctcaacaatga

SEQ ID NO: 156676 - DNA, 25 bp, Artificial
  Probe
gtccacgaggttcagagatacattg

SEQ ID NO: 156677 - DNA, 25 bp, Artificial
  Probe
cccaatatgttcttcactttcttca

SEQ ID NO: 156678 - DNA, 25 bp, Artificial
  Probe
ctactgtcatagaaatgccactgta

SEQ ID NO: 156679 - DNA, 25 bp, Artificial
  Probe
tactactgtcatagaaatgccactg

SEQ ID NO: 156680 - DNA, 25 bp, Artificial
  Probe
tcatagaaatgccactgtatccttc

SEQ ID NO: 156681 - DNA, 25 bp, Artificial
  Probe
agccttcatttactactgtcataga

SEQ ID NO: 156682 - DNA, 25 bp, Artificial
  Probe
tactgtcatagaaatgccactgtat

SEQ ID NO: 156683 - DNA, 25 bp, Artificial
  Probe
ttactactgtcatagaaatgccact

SEQ ID NO: 156684 - DNA, 25 bp, Artificial
  Probe
caatgtcatctgctccattatcttg

SEQ ID NO: 156685 - DNA, 25 bp, Artificial
  Probe
gactacttcattcctttctcagcag

SEQ ID NO: 156686 - DNA, 25 bp, Artificial
  Probe
cggttctctatttgtccaaggataa

SEQ ID NO: 156687 - DNA, 25 bp, Artificial
  Probe
tatccttccttcttctcacagcttc

SEQ ID NO: 156688 - DNA, 25 bp, Artificial
  Probe
gtcatagaaatgccactgtatcctt

SEQ ID NO: 156689 - DNA, 25 bp, Artificial
  Probe
acattaccattacgaggatacacag

SEQ ID NO: 156690 - DNA, 25 bp, Artificial
  Probe
tcacattaccattacgaggatacac

SEQ ID NO: 156691 - DNA, 25 bp, Artificial
  Probe
cacattaccattacgaggatacaca

SEQ ID NO: 156692 - DNA, 25 bp, Artificial
  Probe
ttcacattaccattacgaggataca

SEQ ID NO: 156693 - DNA, 25 bp, Artificial
  Probe
cttcacattaccattacgaggatac

SEQ ID NO: 156694 - DNA, 25 bp, Artificial
  Probe
tcttcacattaccattacgaggata

SEQ ID NO: 156695 - DNA, 25 bp, Artificial
  Probe
cattaccattacgaggatacacagc

SEQ ID NO: 156696 - DNA, 25 bp, Artificial
  Probe
gacgactcttcacattaccattacg

SEQ ID NO: 156697 - DNA, 25 bp, Artificial
  Probe
attgcttaatctcactctgacttga

SEQ ID NO: 156698 - DNA, 25 bp, Artificial
  Probe
gaatctctaacatcacaaccttctt

SEQ ID NO: 156699 - DNA, 25 bp, Artificial
  Probe
tgaatctctaacatcacaaccttct

SEQ ID NO: 156700 - DNA, 25 bp, Artificial
  Probe
attaccattacgaggatacacagca

SEQ ID NO: 156701 - DNA, 25 bp, Artificial
  Probe
tgacgactcttcacattaccattac

SEQ ID NO: 156702 - DNA, 25 bp, Artificial
  Probe
ctcttcacattaccattacgaggat

SEQ ID NO: 156703 - DNA, 25 bp, Artificial
  Probe
aattgcttaatctcactctgacttg

SEQ ID NO: 156704 - DNA, 25 bp, Artificial
  Probe
acgactcttcacattaccattacga

SEQ ID NO: 156705 - DNA, 25 bp, Artificial
  Probe
acagcaattacaccatgaatctcta

SEQ ID NO: 156706 - DNA, 25 bp, Artificial
  Probe
atgaatctctaacatcacaaccttc

SEQ ID NO: 156707 - DNA, 25 bp, Artificial
  Probe
gcaattacaccatgaatctctaaca

SEQ ID NO: 156708 - DNA, 25 bp, Artificial
  Probe
gactcttcacattaccattacgagg

SEQ ID NO: 156709 - DNA, 25 bp, Artificial
  Probe
agcaattacaccatgaatctctaac

SEQ ID NO: 156710 - DNA, 25 bp, Artificial
  Probe
cagcaattacaccatgaatctctaa

SEQ ID NO: 156711 - DNA, 25 bp, Artificial
  Probe
actcttcacattaccattacgagga

SEQ ID NO: 156712 - DNA, 25 bp, Artificial
  Probe
cgactcttcacattaccattacgag

SEQ ID NO: 156713 - DNA, 25 bp, Artificial
  Probe
gatgacaggtgtgatagatggagag

SEQ ID NO: 156714 - DNA, 25 bp, Artificial
  Probe
cacagcaattacaccatgaatctct

SEQ ID NO: 156715 - DNA, 25 bp, Artificial
  Probe
caccatgaatctctaacatcacaac

SEQ ID NO: 156716 - DNA, 25 bp, Artificial
  Probe
acaccatgaatctctaacatcacaa

SEQ ID NO: 156717 - DNA, 25 bp, Artificial
  Probe
tacaccatgaatctctaacatcaca

SEQ ID NO: 156718 - DNA, 25 bp, Artificial
  Probe
ccatgaatctctaacatcacaacct

SEQ ID NO: 156719 - DNA, 25 bp, Artificial
  Probe
attccgatgacaggtgtgatagatg

SEQ ID NO: 156720 - DNA, 25 bp, Artificial
  Probe
accatgaatctctaacatcacaacc

SEQ ID NO: 156721 - DNA, 25 bp, Artificial
  Probe
ttaccattacgaggatacacagcac

SEQ ID NO: 156722 - DNA, 25 bp, Artificial
  Probe
tgttaattgcttaatctcactctga

SEQ ID NO: 156723 - DNA, 25 bp, Artificial
  Probe
catgaatctctaacatcacaacctt

SEQ ID NO: 156724 - DNA, 25 bp, Artificial
  Probe
acacagcaattacaccatgaatctc

SEQ ID NO: 156725 - DNA, 25 bp, Artificial
  Probe
ctgttaattgcttaatctcactctg

SEQ ID NO: 156726 - DNA, 25 bp, Artificial
  Probe
tctgttaattgcttaatctcactct

SEQ ID NO: 156727 - DNA, 25 bp, Artificial
  Probe
gttaattgcttaatctcactctgac

SEQ ID NO: 156728 - DNA, 25 bp, Artificial
  Probe
cattccgatgacaggtgtgatagat

SEQ ID NO: 156729 - DNA, 25 bp, Artificial
  Probe
taattgcttaatctcactctgactt

SEQ ID NO: 156730 - DNA, 25 bp, Artificial
  Probe
ttaattgcttaatctcactctgact

SEQ ID NO: 156731 - DNA, 25 bp, Artificial
  Probe
cacacagcaattacaccatgaatct

SEQ ID NO: 156732 - DNA, 25 bp, Artificial
  Probe
ttcactgttagccagaactaagtca

SEQ ID NO: 156733 - DNA, 25 bp, Artificial
  Probe
ttacaccatgaatctctaacatcac

SEQ ID NO: 156734 - DNA, 25 bp, Artificial
  Probe
gagaagtcagtcacaggtaacacat

SEQ ID NO: 156735 - DNA, 25 bp, Artificial
  Probe
gagagaagtcagtcacaggtaacac

SEQ ID NO: 156736 - DNA, 25 bp, Artificial
  Probe
ctcaacctcacctctaccttcctaa

SEQ ID NO: 156737 - DNA, 25 bp, Artificial
  Probe
tcaacctcacctctaccttcctaag

SEQ ID NO: 156738 - DNA, 25 bp, Artificial
  Probe
agagaagtcagtcacaggtaacaca

SEQ ID NO: 156739 - DNA, 25 bp, Artificial
  Probe
agaagtcagtcacaggtaacacatg

SEQ ID NO: 156740 - DNA, 25 bp, Artificial
  Probe
ggagaaattcatcacctttagcaag

SEQ ID NO: 156741 - DNA, 25 bp, Artificial
  Probe
caagagtaaacacaggtgagagaag

SEQ ID NO: 156742 - DNA, 25 bp, Artificial
  Probe
tgagagaagtcagtcacaggtaaca

SEQ ID NO: 156743 - DNA, 25 bp, Artificial
  Probe
gaaggaggaactgaaggagaaattc

SEQ ID NO: 156744 - DNA, 25 bp, Artificial
  Probe
aagagtaaacacaggtgagagaagt

SEQ ID NO: 156745 - DNA, 25 bp, Artificial
  Probe
tgaaggaggaactgaaggagaaatt

SEQ ID NO: 156746 - DNA, 25 bp, Artificial
  Probe
attcaagagtaaacacaggtgagag

SEQ ID NO: 156747 - DNA, 25 bp, Artificial
  Probe
cattcaagagtaaacacaggtgaga

SEQ ID NO: 156748 - DNA, 25 bp, Artificial
  Probe
ctgaaggaggaactgaaggagaaat

SEQ ID NO: 156749 - DNA, 25 bp, Artificial
  Probe
agagtaaacacaggtgagagaagtc

SEQ ID NO: 156750 - DNA, 25 bp, Artificial
  Probe
tcaagagtaaacacaggtgagagaa

SEQ ID NO: 156751 - DNA, 25 bp, Artificial
  Probe
ttcaagagtaaacacaggtgagaga

SEQ ID NO: 156752 - DNA, 25 bp, Artificial
  Probe
aggagaaattcatcacctttagcaa

SEQ ID NO: 156753 - DNA, 25 bp, Artificial
  Probe
gaagtcagtcacaggtaacacatgg

SEQ ID NO: 156754 - DNA, 25 bp, Artificial
  Probe
gaagaaagagctactgtttatgtgc

SEQ ID NO: 156755 - DNA, 25 bp, Artificial
  Probe
gggagaagaaagagctactgtttat

SEQ ID NO: 156756 - DNA, 25 bp, Artificial
  Probe
taaacacaggtgagagaagtcagtc

SEQ ID NO: 156757 - DNA, 25 bp, Artificial
  Probe
agtaaacacaggtgagagaagtcag

SEQ ID NO: 156758 - DNA, 25 bp, Artificial
  Probe
gagtaaacacaggtgagagaagtca

SEQ ID NO: 156759 - DNA, 25 bp, Artificial
  Probe
ggagaagaaagagctactgtttatg

SEQ ID NO: 156760 - DNA, 25 bp, Artificial
  Probe
gtaaacacaggtgagagaagtcagt

SEQ ID NO: 156761 - DNA, 25 bp, Artificial
  Probe
gcattcaagagtaaacacaggtgag

SEQ ID NO: 156762 - DNA, 25 bp, Artificial
  Probe
agaagaaagagctactgtttatgtg

SEQ ID NO: 156763 - DNA, 25 bp, Artificial
  Probe
aagaaagagctactgtttatgtgcc

SEQ ID NO: 156764 - DNA, 25 bp, Artificial
  Probe
cggataagtgcattcaagagtaaac

SEQ ID NO: 156765 - DNA, 25 bp, Artificial
  Probe
gagaagaaagagctactgtttatgt

SEQ ID NO: 156766 - DNA, 25 bp, Artificial
  Probe
ggataagtgcattcaagagtaaaca

SEQ ID NO: 156767 - DNA, 25 bp, Artificial
  Probe
accggataagtgcattcaagagtaa

SEQ ID NO: 156768 - DNA, 25 bp, Artificial
  Probe
aaccggataagtgcattcaagagta

SEQ ID NO: 156769 - DNA, 25 bp, Artificial
  Probe
tctgaaggaggaactgaaggagaaa

SEQ ID NO: 156770 - DNA, 25 bp, Artificial
  Probe
cctcaacctcacctctaccttccta

SEQ ID NO: 156771 - DNA, 25 bp, Artificial
  Probe
cgggagaagaaagagctactgttta

SEQ ID NO: 156772 - DNA, 25 bp, Artificial
  Probe
aagtcagtcacaggtaacacatggt

SEQ ID NO: 156773 - DNA, 25 bp, Artificial
  Probe
ttctgaaggaggaactgaaggagaa

SEQ ID NO: 156774 - DNA, 25 bp, Artificial
  Probe
agaaagagctactgtttatgtgcca

SEQ ID NO: 156775 - DNA, 25 bp, Artificial
  Probe
tttgccttggtggagaaataaaatc

SEQ ID NO: 156776 - DNA, 25 bp, Artificial
  Probe
ctttgccttggtggagaaataaaat

SEQ ID NO: 156777 - DNA, 25 bp, Artificial
  Probe
taagtgcattcaagagtaaacacag

SEQ ID NO: 156778 - DNA, 25 bp, Artificial
  Probe
ataagtgcattcaagagtaaacaca

SEQ ID NO: 156779 - DNA, 25 bp, Artificial
  Probe
ccaggtgttcattcattcattcatt

SEQ ID NO: 156780 - DNA, 25 bp, Artificial
  Probe
tcattcatacattccatagccatct

SEQ ID NO: 156781 - DNA, 25 bp, Artificial
  Probe
cattcattcatacattccatagcca

SEQ ID NO: 156782 - DNA, 25 bp, Artificial
  Probe
aggtgttcattcattcattcattca

SEQ ID NO: 156783 - DNA, 25 bp, Artificial
  Probe
ttcatacattccatagccatctact

SEQ ID NO: 156784 - DNA, 25 bp, Artificial
  Probe
tgatgagagtaagatacaggtgagg

SEQ ID NO: 156785 - DNA, 25 bp, Artificial
  Probe
ttcattcatacattccatagccatc

SEQ ID NO: 156786 - DNA, 25 bp, Artificial
  Probe
tcattcattcatacattccatagcc

SEQ ID NO: 156787 - DNA, 25 bp, Artificial
  Probe
caggtgttcattcattcattcattc

SEQ ID NO: 156788 - DNA, 25 bp, Artificial
  Probe
accaggtgttcattcattcattcat

SEQ ID NO: 156789 - DNA, 25 bp, Artificial
  Probe
tcatacattccatagccatctacta

SEQ ID NO: 156790 - DNA, 25 bp, Artificial
  Probe
attcattcatacattccatagccat

SEQ ID NO: 156791 - DNA, 25 bp, Artificial
  Probe
ggtgttcattcattcattcattcat

SEQ ID NO: 156792 - DNA, 25 bp, Artificial
  Probe
attcatacattccatagccatctac

SEQ ID NO: 156793 - DNA, 25 bp, Artificial
  Probe
cattcatacattccatagccatcta

SEQ ID NO: 156794 - DNA, 25 bp, Artificial
  Probe
ttacagtcttcattgttctcagagc

SEQ ID NO: 156795 - DNA, 25 bp, Artificial
  Probe
ggagacgaccagaagttatatcagg

SEQ ID NO: 156796 - DNA, 25 bp, Artificial
  Probe
tctgatgagagtaagatacaggtga

SEQ ID NO: 156797 - DNA, 25 bp, Artificial
  Probe
ctgatgagagtaagatacaggtgag

SEQ ID NO: 156798 - DNA, 25 bp, Artificial
  Probe
caatacataagtctgctctggacat

SEQ ID NO: 156799 - DNA, 25 bp, Artificial
  Probe
ttctgatgagagtaagatacaggtg

SEQ ID NO: 156800 - DNA, 25 bp, Artificial
  Probe
catacattccatagccatctactaa

SEQ ID NO: 156801 - DNA, 25 bp, Artificial
  Probe
attacagtcttcattgttctcagag

SEQ ID NO: 156802 - DNA, 25 bp, Artificial
  Probe
ttcattcattcatacattccatagc

SEQ ID NO: 156803 - DNA, 25 bp, Artificial
  Probe
attctgatgagagtaagatacaggt

SEQ ID NO: 156804 - DNA, 25 bp, Artificial
  Probe
aatacataagtctgctctggacatg

SEQ ID NO: 156805 - DNA, 25 bp, Artificial
  Probe
acattccatagccatctactaaagg

SEQ ID NO: 156806 - DNA, 25 bp, Artificial
  Probe
tgccaataaatgtgtctgtgttaaa

SEQ ID NO: 156807 - DNA, 25 bp, Artificial
  Probe
ttgccaataaatgtgtctgtgttaa

SEQ ID NO: 156808 - DNA, 25 bp, Artificial
  Probe
ctcatcatagaaatagggacaagga

SEQ ID NO: 156809 - DNA, 25 bp, Artificial
  Probe
tttgccaataaatgtgtctgtgtta

SEQ ID NO: 156810 - DNA, 25 bp, Artificial
  Probe
cgaccagaagttatatcagggaatt

SEQ ID NO: 156811 - DNA, 25 bp, Artificial
  Probe
gaggatgggagggttgtaatttatt

SEQ ID NO: 156812 - DNA, 25 bp, Artificial
  Probe
aagaaccagaacttgagagaagaaa

SEQ ID NO: 156813 - DNA, 25 bp, Artificial
  Probe
aaagaaccagaacttgagagaagaa

SEQ ID NO: 156814 - DNA, 25 bp, Artificial
  Probe
ctttcctactccttgaacattacca

SEQ ID NO: 156815 - DNA, 25 bp, Artificial
  Probe
atcatagaaatagggacaaggatgc

SEQ ID NO: 156816 - DNA, 25 bp, Artificial
  Probe
ttgaaagaaccagaacttgagagaa

SEQ ID NO: 156817 - DNA, 25 bp, Artificial
  Probe
tacagtcttcattgttctcagagcc

SEQ ID NO: 156818 - DNA, 25 bp, Artificial
  Probe
actattacagtcttcattgttctca

SEQ ID NO: 156819 - DNA, 25 bp, Artificial
  Probe
tggagacgaccagaagttatatcag

SEQ ID NO: 156820 - DNA, 25 bp, Artificial
  Probe
cagaacttgagagaagaaacagaag

SEQ ID NO: 156821 - DNA, 25 bp, Artificial
  Probe
gaaagaaccagaacttgagagaaga

SEQ ID NO: 156822 - DNA, 25 bp, Artificial
  Probe
agaacttgagagaagaaacagaaga

SEQ ID NO: 156823 - DNA, 25 bp, Artificial
  Probe
acgaccagaagttatatcagggaat

SEQ ID NO: 156824 - DNA, 25 bp, Artificial
  Probe
gaaggaagagagtatggaatatgcc

SEQ ID NO: 156825 - DNA, 25 bp, Artificial
  Probe
ggaaggaagagagtatggaatatgc

SEQ ID NO: 156826 - DNA, 25 bp, Artificial
  Probe
gaagagagtatggaatatgcctgtg

SEQ ID NO: 156827 - DNA, 25 bp, Artificial
  Probe
ggaagagagtatggaatatgcctgt

SEQ ID NO: 156828 - DNA, 25 bp, Artificial
  Probe
aaggaagagagtatggaatatgcct

SEQ ID NO: 156829 - DNA, 25 bp, Artificial
  Probe
gagagagagagagagagagatggtg

SEQ ID NO: 156830 - DNA, 25 bp, Artificial
  Probe
aagagagtatggaatatgcctgtgc

SEQ ID NO: 156831 - DNA, 25 bp, Artificial
  Probe
ctctacaattaatccttggcacttc

SEQ ID NO: 156832 - DNA, 25 bp, Artificial
  Probe
agagagagagagagagagagatggt

SEQ ID NO: 156833 - DNA, 25 bp, Artificial
  Probe
ttataccagaataaccttcgcagga

SEQ ID NO: 156834 - DNA, 25 bp, Artificial
  Probe
tctacaattaatccttggcacttcc

SEQ ID NO: 156835 - DNA, 25 bp, Artificial
  Probe
aggaagagagtatggaatatgcctg

SEQ ID NO: 156836 - DNA, 25 bp, Artificial
  Probe
gctctacaattaatccttggcactt

SEQ ID NO: 156837 - DNA, 25 bp, Artificial
  Probe
gagtatggaatatgcctgtgcctag

SEQ ID NO: 156838 - DNA, 25 bp, Artificial
  Probe
aagggaaggaagagagtatggaata

SEQ ID NO: 156839 - DNA, 25 bp, Artificial
  Probe
tataccagaataaccttcgcaggag

SEQ ID NO: 156840 - DNA, 25 bp, Artificial
  Probe
agagtatggaatatgcctgtgccta

SEQ ID NO: 156841 - DNA, 25 bp, Artificial
  Probe
gggaaggaagagagtatggaatatg

SEQ ID NO: 156842 - DNA, 25 bp, Artificial
  Probe
agggaaggaagagagtatggaatat

SEQ ID NO: 156843 - DNA, 25 bp, Artificial
  Probe
gagagaaagggaaggaagagagtat

SEQ ID NO: 156844 - DNA, 25 bp, Artificial
  Probe
aaagggaaggaagagagtatggaat

SEQ ID NO: 156845 - DNA, 25 bp, Artificial
  Probe
gaagctctacaattaatccttggca

SEQ ID NO: 156846 - DNA, 25 bp, Artificial
  Probe
agagaaagggaaggaagagagtatg

SEQ ID NO: 156847 - DNA, 25 bp, Artificial
  Probe
aagctctacaattaatccttggcac

SEQ ID NO: 156848 - DNA, 25 bp, Artificial
  Probe
tagagagacagatagatcctggcaa

SEQ ID NO: 156849 - DNA, 25 bp, Artificial
  Probe
ccagctagagagacagatagatcct

SEQ ID NO: 156850 - DNA, 25 bp, Artificial
  Probe
gaaagggaaggaagagagtatggaa

SEQ ID NO: 156851 - DNA, 25 bp, Artificial
  Probe
gagggagaagaagagagagagattg

SEQ ID NO: 156852 - DNA, 25 bp, Artificial
  Probe
cagctagagagacagatagatcctg

SEQ ID NO: 156853 - DNA, 25 bp, Artificial
  Probe
agagagaaagggaaggaagagagta

SEQ ID NO: 156854 - DNA, 25 bp, Artificial
  Probe
ctagagagacagatagatcctggca

SEQ ID NO: 156855 - DNA, 25 bp, Artificial
  Probe
gagaaagggaaggaagagagtatgg

SEQ ID NO: 156856 - DNA, 25 bp, Artificial
  Probe
gaactacacatgaccttgactccag

SEQ ID NO: 156857 - DNA, 25 bp, Artificial
  Probe
tacaattaatccttggcacttccag

SEQ ID NO: 156858 - DNA, 25 bp, Artificial
  Probe
ctacaattaatccttggcacttcca

SEQ ID NO: 156859 - DNA, 25 bp, Artificial
  Probe
agctctacaattaatccttggcact

SEQ ID NO: 156860 - DNA, 25 bp, Artificial
  Probe
cttaatcccagcacttgagaaacag

SEQ ID NO: 156861 - DNA, 25 bp, Artificial
  Probe
agagacagatagatcctggcaagaa

SEQ ID NO: 156862 - DNA, 25 bp, Artificial
  Probe
agaaagggaaggaagagagtatgga

SEQ ID NO: 156863 - DNA, 25 bp, Artificial
  Probe
agagagagagagagagagatggtgg

SEQ ID NO: 156864 - DNA, 25 bp, Artificial
  Probe
ttaatcccagcacttgagaaacaga

SEQ ID NO: 156865 - DNA, 25 bp, Artificial
  Probe
ggagggagaagaagagagagagatt

SEQ ID NO: 156866 - DNA, 25 bp, Artificial
  Probe
agctagagagacagatagatcctgg

SEQ ID NO: 156867 - DNA, 25 bp, Artificial
  Probe
tttataccagaataaccttcgcagg

SEQ ID NO: 156868 - DNA, 25 bp, Artificial
  Probe
aaccttaatcccagcacttgagaaa

SEQ ID NO: 156869 - DNA, 25 bp, Artificial
  Probe
tagtgttctttctctaccttctgct

SEQ ID NO: 156870 - DNA, 25 bp, Artificial
  Probe
tcattgttgttgatgttgtaactaa

SEQ ID NO: 156871 - DNA, 25 bp, Artificial
  Probe
ttcattgttgttgatgttgtaacta

SEQ ID NO: 156872 - DNA, 25 bp, Artificial
  Probe
gtgttctttctctaccttctgcttc

SEQ ID NO: 156873 - DNA, 25 bp, Artificial
  Probe
ttctttctctaccttctgcttccaa

SEQ ID NO: 156874 - DNA, 25 bp, Artificial
  Probe
agtgttctttctctaccttctgctt

SEQ ID NO: 156875 - DNA, 25 bp, Artificial
  Probe
tctttctctaccttctgcttccaaa

SEQ ID NO: 156876 - DNA, 25 bp, Artificial
  Probe
gaactcacagagatccacctaccta

SEQ ID NO: 156877 - DNA, 25 bp, Artificial
  Probe
aactcacagagatccacctacctac

SEQ ID NO: 156878 - DNA, 25 bp, Artificial
  Probe
gttctttctctaccttctgcttcca

SEQ ID NO: 156879 - DNA, 25 bp, Artificial
  Probe
tgttctttctctaccttctgcttcc

SEQ ID NO: 156880 - DNA, 25 bp, Artificial
  Probe
aagtctttattcctgtgacactgac

SEQ ID NO: 156881 - DNA, 25 bp, Artificial
  Probe
cattgttgttgatgttgtaactaat

SEQ ID NO: 156882 - DNA, 25 bp, Artificial
  Probe
aaagtctttattcctgtgacactga

SEQ ID NO: 156883 - DNA, 25 bp, Artificial
  Probe
tttcattgttgttgatgttgtaact

SEQ ID NO: 156884 - DNA, 25 bp, Artificial
  Probe
cacctacctactgctgggattaaag

SEQ ID NO: 156885 - DNA, 25 bp, Artificial
  Probe
agtctttattcctgtgacactgaca

SEQ ID NO: 156886 - DNA, 25 bp, Artificial
  Probe
gctgtcttggaactcactctgtaga

SEQ ID NO: 156887 - DNA, 25 bp, Artificial
  Probe
gtctttattcctgtgacactgacac

SEQ ID NO: 156888 - DNA, 25 bp, Artificial
  Probe
ctcacagagatccacctacctactg

SEQ ID NO: 156889 - DNA, 25 bp, Artificial
  Probe
taaagtctttattcctgtgacactg

SEQ ID NO: 156890 - DNA, 25 bp, Artificial
  Probe
actcacagagatccacctacctact

SEQ ID NO: 156891 - DNA, 25 bp, Artificial
  Probe
tcttggaactcactctgtagaccag

SEQ ID NO: 156892 - DNA, 25 bp, Artificial
  Probe
acagtagtgttctttctctaccttc

SEQ ID NO: 156893 - DNA, 25 bp, Artificial
  Probe
agtagtgttctttctctaccttctg

SEQ ID NO: 156894 - DNA, 25 bp, Artificial
  Probe
cagtagtgttctttctctaccttct

SEQ ID NO: 156895 - DNA, 25 bp, Artificial
  Probe
ttaaagtctttattcctgtgacact

SEQ ID NO: 156896 - DNA, 25 bp, Artificial
  Probe
attgttgttgatgttgtaactaatt

SEQ ID NO: 156897 - DNA, 25 bp, Artificial
  Probe
gtagtgttctttctctaccttctgc

SEQ ID NO: 156898 - DNA, 25 bp, Artificial
  Probe
ccattaaagtctttattcctgtgac

SEQ ID NO: 156899 - DNA, 25 bp, Artificial
  Probe
ctttctctaccttctgcttccaaaa

SEQ ID NO: 156900 - DNA, 25 bp, Artificial
  Probe
gaccctggctaattttacactttta

SEQ ID NO: 156901 - DNA, 25 bp, Artificial
  Probe
ctaccttctgcttccaaaagagtta

SEQ ID NO: 156902 - DNA, 25 bp, Artificial
  Probe
tctttattcctgtgacactgacacg

SEQ ID NO: 156903 - DNA, 25 bp, Artificial
  Probe
ggctgtcttggaactcactctgtag

SEQ ID NO: 156904 - DNA, 25 bp, Artificial
  Probe
cttcttctctgagccaggtgtagac

SEQ ID NO: 156905 - DNA, 25 bp, Artificial
  Probe
tttctctaccttctgcttccaaaag

SEQ ID NO: 156906 - DNA, 25 bp, Artificial
  Probe
taccttctgcttccaaaagagttac

SEQ ID NO: 156907 - DNA, 25 bp, Artificial
  Probe
accctggctaattttacacttttaa

SEQ ID NO: 156908 - DNA, 25 bp, Artificial
  Probe
tttaatcgacgagaccacagaattc

SEQ ID NO: 156909 - DNA, 25 bp, Artificial
  Probe
cttctgcttccaaaagagttacctt

SEQ ID NO: 156910 - DNA, 25 bp, Artificial
  Probe
attaaagtctttattcctgtgacac

SEQ ID NO: 156911 - DNA, 25 bp, Artificial
  Probe
cattaaagtctttattcctgtgaca

SEQ ID NO: 156912 - DNA, 25 bp, Artificial
  Probe
agagttaccttcaactttgtttctt

SEQ ID NO: 156913 - DNA, 25 bp, Artificial
  Probe
aagagttaccttcaactttgtttct

SEQ ID NO: 156914 - DNA, 25 bp, Artificial
  Probe
tgactccgcatccgaagatatgaag

SEQ ID NO: 156915 - DNA, 25 bp, Artificial
  Probe
ctgactccgcatccgaagatatgaa

SEQ ID NO: 156916 - DNA, 25 bp, Artificial
  Probe
attaagtccccaatgtgaaatctgt

SEQ ID NO: 156917 - DNA, 25 bp, Artificial
  Probe
gactccgcatccgaagatatgaagt

SEQ ID NO: 156918 - DNA, 25 bp, Artificial
  Probe
ttaagtccccaatgtgaaatctgtc

SEQ ID NO: 156919 - DNA, 25 bp, Artificial
  Probe
tattaagtccccaatgtgaaatctg

SEQ ID NO: 156920 - DNA, 25 bp, Artificial
  Probe
taagtccccaatgtgaaatctgtct

SEQ ID NO: 156921 - DNA, 25 bp, Artificial
  Probe
actccgcatccgaagatatgaagtg

SEQ ID NO: 156922 - DNA, 25 bp, Artificial
  Probe
ttattaagtccccaatgtgaaatct

SEQ ID NO: 156923 - DNA, 25 bp, Artificial
  Probe
cccaatgtgaaatctgtctgttcag

SEQ ID NO: 156924 - DNA, 25 bp, Artificial
  Probe
tttattaagtccccaatgtgaaatc

SEQ ID NO: 156925 - DNA, 25 bp, Artificial
  Probe
caatgtgaaatctgtctgttcagag

SEQ ID NO: 156926 - DNA, 25 bp, Artificial
  Probe
aatgtgaaatctgtctgttcagagt

SEQ ID NO: 156927 - DNA, 25 bp, Artificial
  Probe
aagtccccaatgtgaaatctgtctg

SEQ ID NO: 156928 - DNA, 25 bp, Artificial
  Probe
atgtgaaatctgtctgttcagagtg

SEQ ID NO: 156929 - DNA, 25 bp, Artificial
  Probe
gtgctgaggactacgaatacccatc

SEQ ID NO: 156930 - DNA, 25 bp, Artificial
  Probe
ccaatgtgaaatctgtctgttcaga

SEQ ID NO: 156931 - DNA, 25 bp, Artificial
  Probe
tccccaatgtgaaatctgtctgttc

SEQ ID NO: 156932 - DNA, 25 bp, Artificial
  Probe
aatctgtctgttcagagtgtgcaat

SEQ ID NO: 156933 - DNA, 25 bp, Artificial
  Probe
gtccccaatgtgaaatctgtctgtt

SEQ ID NO: 156934 - DNA, 25 bp, Artificial
  Probe
gtgaaatctgtctgttcagagtgtg

SEQ ID NO: 156935 - DNA, 25 bp, Artificial
  Probe
tgtgaaatctgtctgttcagagtgt

SEQ ID NO: 156936 - DNA, 25 bp, Artificial
  Probe
gtttatttattaagtccccaatgtg

SEQ ID NO: 156937 - DNA, 25 bp, Artificial
  Probe
atttattaagtccccaatgtgaaat

SEQ ID NO: 156938 - DNA, 25 bp, Artificial
  Probe
tatttattaagtccccaatgtgaaa

SEQ ID NO: 156939 - DNA, 25 bp, Artificial
  Probe
ttatttattaagtccccaatgtgaa

SEQ ID NO: 156940 - DNA, 25 bp, Artificial
  Probe
tttatttattaagtccccaatgtga

SEQ ID NO: 156941 - DNA, 25 bp, Artificial
  Probe
atctgtctgttcagagtgtgcaatg

SEQ ID NO: 156942 - DNA, 25 bp, Artificial
  Probe
agtttatttattaagtccccaatgt

SEQ ID NO: 156943 - DNA, 25 bp, Artificial
  Probe
tttgagtttatttattaagtcccca

SEQ ID NO: 156944 - DNA, 25 bp, Artificial
  Probe
agtgctgaggactacgaatacccat

SEQ ID NO: 156945 - DNA, 25 bp, Artificial
  Probe
agtccccaatgtgaaatctgtctgt

SEQ ID NO: 156946 - DNA, 25 bp, Artificial
  Probe
ttgagtttatttattaagtccccaa

SEQ ID NO: 156947 - DNA, 25 bp, Artificial
  Probe
tgagtttatttattaagtccccaat

SEQ ID NO: 156948 - DNA, 25 bp, Artificial
  Probe
gagtttatttattaagtccccaatg

SEQ ID NO: 156949 - DNA, 25 bp, Artificial
  Probe
ggactacatgggctggatggatttc

SEQ ID NO: 156950 - DNA, 25 bp, Artificial
  Probe
tgaaatctgtctgttcagagtgtgc

SEQ ID NO: 156951 - DNA, 25 bp, Artificial
  Probe
aaatctgtctgttcagagtgtgcaa

SEQ ID NO: 156952 - DNA, 25 bp, Artificial
  Probe
caggataagtgaccgggactacatg

SEQ ID NO: 156953 - DNA, 25 bp, Artificial
  Probe
tgtagaagctgtggaccctatggag

SEQ ID NO: 156954 - DNA, 25 bp, Artificial
  Probe
ctgtagaagctgtggaccctatgga

SEQ ID NO: 156955 - DNA, 25 bp, Artificial
  Probe
ttttgagtttatttattaagtcccc

SEQ ID NO: 156956 - DNA, 25 bp, Artificial
  Probe
gaaatctgtctgttcagagtgtgca

SEQ ID NO: 156957 - DNA, 25 bp, Artificial
  Probe
ccccaatgtgaaatctgtctgttca

SEQ ID NO: 156958 - DNA, 25 bp, Artificial
  Probe
acaggataagtgaccgggactacat

SEQ ID NO: 156959 - DNA, 25 bp, Artificial
  Probe
ggcggaatgtcaactttagatttac

SEQ ID NO: 156960 - DNA, 25 bp, Artificial
  Probe
gggcggaatgtcaactttagattta

SEQ ID NO: 156961 - DNA, 25 bp, Artificial
  Probe
caattcaccctggaagaggaagtag

SEQ ID NO: 156962 - DNA, 25 bp, Artificial
  Probe
attcaccctggaagaggaagtagaa

SEQ ID NO: 156963 - DNA, 25 bp, Artificial
  Probe
aattcaccctggaagaggaagtaga

SEQ ID NO: 156964 - DNA, 25 bp, Artificial
  Probe
tagctgagtatggtgtgtacgtgag

SEQ ID NO: 156965 - DNA, 25 bp, Artificial
  Probe
aagtagaagggttggggacataatc

SEQ ID NO: 156966 - DNA, 25 bp, Artificial
  Probe
gaagtagaagggttggggacataat

SEQ ID NO: 156967 - DNA, 25 bp, Artificial
  Probe
gtagctgagtatggtgtgtacgtga

SEQ ID NO: 156968 - DNA, 25 bp, Artificial
  Probe
ttcaccctggaagaggaagtagaag

SEQ ID NO: 156969 - DNA, 25 bp, Artificial
  Probe
cctgcattgctcagtcaataataaa

SEQ ID NO: 156970 - DNA, 25 bp, Artificial
  Probe
ctggaagaggaagtagaagggttgg

SEQ ID NO: 156971 - DNA, 25 bp, Artificial
  Probe
ccctgcattgctcagtcaataataa

SEQ ID NO: 156972 - DNA, 25 bp, Artificial
  Probe
gtagaagggttggggacataatctg

SEQ ID NO: 156973 - DNA, 25 bp, Artificial
  Probe
tagaagggttggggacataatctga

SEQ ID NO: 156974 - DNA, 25 bp, Artificial
  Probe
agtagaagggttggggacataatct

SEQ ID NO: 156975 - DNA, 25 bp, Artificial
  Probe
cctggaagaggaagtagaagggttg

SEQ ID NO: 156976 - DNA, 25 bp, Artificial
  Probe
ggaagtagaagggttggggacataa

SEQ ID NO: 156977 - DNA, 25 bp, Artificial
  Probe
gcaattcaccctggaagaggaagta

SEQ ID NO: 156978 - DNA, 25 bp, Artificial
  Probe
ggggcggaatgtcaactttagattt

SEQ ID NO: 156979 - DNA, 25 bp, Artificial
  Probe
agaagggttggggacataatctgag

SEQ ID NO: 156980 - DNA, 25 bp, Artificial
  Probe
gccctgcattgctcagtcaataata

SEQ ID NO: 156981 - DNA, 25 bp, Artificial
  Probe
tcaccctggaagaggaagtagaagg

SEQ ID NO: 156982 - DNA, 25 bp, Artificial
  Probe
aggaagtagaagggttggggacata

SEQ ID NO: 156983 - DNA, 25 bp, Artificial
  Probe
ctgcattgctcagtcaataataaaa

SEQ ID NO: 156984 - DNA, 25 bp, Artificial
  Probe
gaagggttggggacataatctgagg

SEQ ID NO: 156985 - DNA, 25 bp, Artificial
  Probe
tagccctgcattgctcagtcaataa

SEQ ID NO: 156986 - DNA, 25 bp, Artificial
  Probe
gaagaggaagtagaagggttgggga

SEQ ID NO: 156987 - DNA, 25 bp, Artificial
  Probe
ctagccctgcattgctcagtcaata

SEQ ID NO: 156988 - DNA, 25 bp, Artificial
  Probe
agccctgcattgctcagtcaataat

SEQ ID NO: 156989 - DNA, 25 bp, Artificial
  Probe
cgtagctgagtatggtgtgtacgtg

SEQ ID NO: 156990 - DNA, 25 bp, Artificial
  Probe
cagagtgaagtggaggaagtaattc

SEQ ID NO: 156991 - DNA, 25 bp, Artificial
  Probe
acttgaaggagaggttgagaatgaa

SEQ ID NO: 156992 - DNA, 25 bp, Artificial
  Probe
cttgaaggagaggttgagaatgaac

SEQ ID NO: 156993 - DNA, 25 bp, Artificial
  Probe
gaacttgaaggagaggttgagaatg

SEQ ID NO: 156994 - DNA, 25 bp, Artificial
  Probe
aaggagaggttgagaatgaacagaa

SEQ ID NO: 156995 - DNA, 25 bp, Artificial
  Probe
aacttgaaggagaggttgagaatga

SEQ ID NO: 156996 - DNA, 25 bp, Artificial
  Probe
tgaacttgaaggagaggttgagaat

SEQ ID NO: 156997 - DNA, 25 bp, Artificial
  Probe
ttgaaggagaggttgagaatgaaca

SEQ ID NO: 156998 - DNA, 25 bp, Artificial
  Probe
gaaggagaggttgagaatgaacaga

SEQ ID NO: 156999 - DNA, 25 bp, Artificial
  Probe
aatcttacaagagacaagcagagga

SEQ ID NO: 157000 - DNA, 25 bp, Artificial
  Probe
tgaaggagaggttgagaatgaacag

SEQ ID NO: 157001 - DNA, 25 bp, Artificial
  Probe
atcttacaagagacaagcagaggag

SEQ ID NO: 157002 - DNA, 25 bp, Artificial
  Probe
gcagagtgaagtggaggaagtaatt

SEQ ID NO: 157003 - DNA, 25 bp, Artificial
  Probe
gtgaacttgaaggagaggttgagaa

SEQ ID NO: 157004 - DNA, 25 bp, Artificial
  Probe
taaggaagcacgaaagaagagtaaa

SEQ ID NO: 157005 - DNA, 25 bp, Artificial
  Probe
ttaaggaagcacgaaagaagagtaa

SEQ ID NO: 157006 - DNA, 25 bp, Artificial
  Probe
ataaattacaggcgaaggtgaaatc

SEQ ID NO: 157007 - DNA, 25 bp, Artificial
  Probe
gataaattacaggcgaaggtgaaat

SEQ ID NO: 157008 - DNA, 25 bp, Artificial
  Probe
taaattacaggcgaaggtgaaatct

SEQ ID NO: 157009 - DNA, 25 bp, Artificial
  Probe
gttaaggaagcacgaaagaagagta

SEQ ID NO: 157010 - DNA, 25 bp, Artificial
  Probe
aaggaagcacgaaagaagagtaaag

SEQ ID NO: 157011 - DNA, 25 bp, Artificial
  Probe
aattacaggcgaaggtgaaatctta

SEQ ID NO: 157012 - DNA, 25 bp, Artificial
  Probe
gaagcacgaaagaagagtaaaggaa

SEQ ID NO: 157013 - DNA, 25 bp, Artificial
  Probe
gaagtggaggaagtaattcaaagag

SEQ ID NO: 157014 - DNA, 25 bp, Artificial
  Probe
attacaggcgaaggtgaaatcttac

SEQ ID NO: 157015 - DNA, 25 bp, Artificial
  Probe
gcaggacctagtggataaattacag

SEQ ID NO: 157016 - DNA, 25 bp, Artificial
  Probe
aagcacgaaagaagagtaaaggaac

SEQ ID NO: 157017 - DNA, 25 bp, Artificial
  Probe
ggataaattacaggcgaaggtgaaa

SEQ ID NO: 157018 - DNA, 25 bp, Artificial
  Probe
aagtggaggaagtaattcaaagagc

SEQ ID NO: 157019 - DNA, 25 bp, Artificial
  Probe
ctagtggataaattacaggcgaagg

SEQ ID NO: 157020 - DNA, 25 bp, Artificial
  Probe
aaattacaggcgaaggtgaaatctt

SEQ ID NO: 157021 - DNA, 25 bp, Artificial
  Probe
tagtggataaattacaggcgaaggt

SEQ ID NO: 157022 - DNA, 25 bp, Artificial
  Probe
tgaaatcttacaagagacaagcaga

SEQ ID NO: 157023 - DNA, 25 bp, Artificial
  Probe
gtgaaatcttacaagagacaagcag

SEQ ID NO: 157024 - DNA, 25 bp, Artificial
  Probe
gaaatcttacaagagacaagcagag

SEQ ID NO: 157025 - DNA, 25 bp, Artificial
  Probe
ggagaggttgagaatgaacagaaac

SEQ ID NO: 157026 - DNA, 25 bp, Artificial
  Probe
aaatcttacaagagacaagcagagg

SEQ ID NO: 157027 - DNA, 25 bp, Artificial
  Probe
cgaaggtgaaatcttacaagagaca

SEQ ID NO: 157028 - DNA, 25 bp, Artificial
  Probe
gaagtaattcaaagagcacgcaatg

SEQ ID NO: 157029 - DNA, 25 bp, Artificial
  Probe
cacgaaagaagagtaaaggaactta

SEQ ID NO: 157030 - DNA, 25 bp, Artificial
  Probe
aggagaggttgagaatgaacagaaa

SEQ ID NO: 157031 - DNA, 25 bp, Artificial
  Probe
ttaaagggttaaggaagcacgaaag

SEQ ID NO: 157032 - DNA, 25 bp, Artificial
  Probe
aggtgaaatcttacaagagacaagc

SEQ ID NO: 157033 - DNA, 25 bp, Artificial
  Probe
aaggtgaaatcttacaagagacaag

SEQ ID NO: 157034 - DNA, 25 bp, Artificial
  Probe
gaaggtgaaatcttacaagagacaa

SEQ ID NO: 157035 - DNA, 25 bp, Artificial
  Probe
ctaatgagtgagtgaaggaagtgta

SEQ ID NO: 157036 - DNA, 25 bp, Artificial
  Probe
aatgagtgagtgaaggaagtgtatc

SEQ ID NO: 157037 - DNA, 25 bp, Artificial
  Probe
taatgagtgagtgaaggaagtgtat

SEQ ID NO: 157038 - DNA, 25 bp, Artificial
  Probe
tgtcactatatcttgttcagcattg

SEQ ID NO: 157039 - DNA, 25 bp, Artificial
  Probe
ctatgacagaataattgcttgcctt

SEQ ID NO: 157040 - DNA, 25 bp, Artificial
  Probe
aactaatgagtgagtgaaggaagtg

SEQ ID NO: 157041 - DNA, 25 bp, Artificial
  Probe
gtcactatatcttgttcagcattgc

SEQ ID NO: 157042 - DNA, 25 bp, Artificial
  Probe
taactaatgagtgagtgaaggaagt

SEQ ID NO: 157043 - DNA, 25 bp, Artificial
  Probe
gctatgacagaataattgcttgcct

SEQ ID NO: 157044 - DNA, 25 bp, Artificial
  Probe
atgtcactatatcttgttcagcatt

SEQ ID NO: 157045 - DNA, 25 bp, Artificial
  Probe
actaatgagtgagtgaaggaagtgt

SEQ ID NO: 157046 - DNA, 25 bp, Artificial
  Probe
cctgctatgacagaataattgcttg

SEQ ID NO: 157047 - DNA, 25 bp, Artificial
  Probe
gctatcacctgctatgacagaataa

SEQ ID NO: 157048 - DNA, 25 bp, Artificial
  Probe
agtgaaggaagtgtatcggtgaatt

SEQ ID NO: 157049 - DNA, 25 bp, Artificial
  Probe
tgctatgacagaataattgcttgcc

SEQ ID NO: 157050 - DNA, 25 bp, Artificial
  Probe
atgagtgagtgaaggaagtgtatcg

SEQ ID NO: 157051 - DNA, 25 bp, Artificial
  Probe
acctgctatgacagaataattgctt

SEQ ID NO: 157052 - DNA, 25 bp, Artificial
  Probe
gatcttgtaagaactggctgtcatt

SEQ ID NO: 157053 - DNA, 25 bp, Artificial
  Probe
ctgctatgacagaataattgcttgc

SEQ ID NO: 157054 - DNA, 25 bp, Artificial
  Probe
catgtcactatatcttgttcagcat

SEQ ID NO: 157055 - DNA, 25 bp, Artificial
  Probe
atcacctgctatgacagaataattg

SEQ ID NO: 157056 - DNA, 25 bp, Artificial
  Probe
gagtgaaggaagtgtatcggtgaat

SEQ ID NO: 157057 - DNA, 25 bp, Artificial
  Probe
cacctgctatgacagaataattgct

SEQ ID NO: 157058 - DNA, 25 bp, Artificial
  Probe
tcacctgctatgacagaataattgc

SEQ ID NO: 157059 - DNA, 25 bp, Artificial
  Probe
ataactaatgagtgagtgaaggaag

SEQ ID NO: 157060 - DNA, 25 bp, Artificial
  Probe
ccctaatcttcttattcccagtcag

SEQ ID NO: 157061 - DNA, 25 bp, Artificial
  Probe
cactatatcttgttcagcattgcac

SEQ ID NO: 157062 - DNA, 25 bp, Artificial
  Probe
tcactatatcttgttcagcattgca

SEQ ID NO: 157063 - DNA, 25 bp, Artificial
  Probe
aataactaatgagtgagtgaaggaa

SEQ ID NO: 157064 - DNA, 25 bp, Artificial
  Probe
cctaatcttcttattcccagtcagt

SEQ ID NO: 157065 - DNA, 25 bp, Artificial
  Probe
ctatcacctgctatgacagaataat

SEQ ID NO: 157066 - DNA, 25 bp, Artificial
  Probe
aatcttcttattcccagtcagtgta

SEQ ID NO: 157067 - DNA, 25 bp, Artificial
  Probe
taatcttcttattcccagtcagtgt

SEQ ID NO: 157068 - DNA, 25 bp, Artificial
  Probe
tatgacagaataattgcttgccttt

SEQ ID NO: 157069 - DNA, 25 bp, Artificial
  Probe
ctaatcttcttattcccagtcagtg

SEQ ID NO: 157070 - DNA, 25 bp, Artificial
  Probe
tatcacctgctatgacagaataatt

SEQ ID NO: 157071 - DNA, 25 bp, Artificial
  Probe
tattcccagtcagtgtacctttatg

SEQ ID NO: 157072 - DNA, 25 bp, Artificial
  Probe
atcttcttattcccagtcagtgtac

SEQ ID NO: 157073 - DNA, 25 bp, Artificial
  Probe
cttattcccagtcagtgtaccttta

SEQ ID NO: 157074 - DNA, 25 bp, Artificial
  Probe
ctatatcttgttcagcattgcacac

SEQ ID NO: 157075 - DNA, 25 bp, Artificial
  Probe
cttgtaagaactggctgtcatttgt

SEQ ID NO: 157076 - DNA, 25 bp, Artificial
  Probe
actatatcttgttcagcattgcaca

SEQ ID NO: 157077 - DNA, 25 bp, Artificial
  Probe
ttattcccagtcagtgtacctttat

SEQ ID NO: 157078 - DNA, 25 bp, Artificial
  Probe
gccctaatcttcttattcccagtca

SEQ ID NO: 157079 - DNA, 25 bp, Artificial
  Probe
cagaagttgaaacatgaatgggatt

SEQ ID NO: 157080 - DNA, 25 bp, Artificial
  Probe
caaagtggagtatgtcaggaagaag

SEQ ID NO: 157081 - DNA, 25 bp, Artificial
  Probe
aaagtggagtatgtcaggaagaagc

SEQ ID NO: 157082 - DNA, 25 bp, Artificial
  Probe
ccaaagtggagtatgtcaggaagaa

SEQ ID NO: 157083 - DNA, 25 bp, Artificial
  Probe
agagagcgaaaacaaaaccacaaaa

SEQ ID NO: 157084 - DNA, 25 bp, Artificial
  Probe
cagagagcgaaaacaaaaccacaaa

SEQ ID NO: 157085 - DNA, 25 bp, Artificial
  Probe
gccaaagtggagtatgtcaggaaga

SEQ ID NO: 157086 - DNA, 25 bp, Artificial
  Probe
acagagagcgaaaacaaaaccacaa

SEQ ID NO: 157087 - DNA, 25 bp, Artificial
  Probe
tcacagagagcgaaaacaaaaccac

SEQ ID NO: 157088 - DNA, 25 bp, Artificial
  Probe
gtcacagagagcgaaaacaaaacca

SEQ ID NO: 157089 - DNA, 25 bp, Artificial
  Probe
cacagagagcgaaaacaaaaccaca

SEQ ID NO: 157090 - DNA, 25 bp, Artificial
  Probe
ggccaaagtggagtatgtcaggaag

SEQ ID NO: 157091 - DNA, 25 bp, Artificial
  Probe
ggcgagaatcacatagttccatata

SEQ ID NO: 157092 - DNA, 25 bp, Artificial
  Probe
gcgagaatcacatagttccatataa

SEQ ID NO: 157093 - DNA, 25 bp, Artificial
  Probe
ccactgtataagcatgatcctgtta

SEQ ID NO: 157094 - DNA, 25 bp, Artificial
  Probe
gaggagaaggaagaattgatggagt

SEQ ID NO: 157095 - DNA, 25 bp, Artificial
  Probe
gaactgtattagtcagcctgttagt

SEQ ID NO: 157096 - DNA, 25 bp, Artificial
  Probe
cagaactgtattagtcagcctgtta

SEQ ID NO: 157097 - DNA, 25 bp, Artificial
  Probe
aactgtattagtcagcctgttagtg

SEQ ID NO: 157098 - DNA, 25 bp, Artificial
  Probe
agaactgtattagtcagcctgttag

SEQ ID NO: 157099 - DNA, 25 bp, Artificial
  Probe
ataagttgtccttagtctcttgtgc

SEQ ID NO: 157100 - DNA, 25 bp, Artificial
  Probe
aggagaaggaagaattgatggagtg

SEQ ID NO: 157101 - DNA, 25 bp, Artificial
  Probe
cactgtataagcatgatcctgttaa

SEQ ID NO: 157102 - DNA, 25 bp, Artificial
  Probe
atccactgtataagcatgatcctgt

SEQ ID NO: 157103 - DNA, 25 bp, Artificial
  Probe
gagaaggaagaattgatggagtggt

SEQ ID NO: 157104 - DNA, 25 bp, Artificial
  Probe
tccactgtataagcatgatcctgtt

SEQ ID NO: 157105 - DNA, 25 bp, Artificial
  Probe
taagttgtccttagtctcttgtgct

SEQ ID NO: 157106 - DNA, 25 bp, Artificial
  Probe
ggaggagaaggaagaattgatggag

SEQ ID NO: 157107 - DNA, 25 bp, Artificial
  Probe
gaggaggagaaggaagaattgatgg

SEQ ID NO: 157108 - DNA, 25 bp, Artificial
  Probe
ggaggaggagaaggaagaattgatg

SEQ ID NO: 157109 - DNA, 25 bp, Artificial
  Probe
gaaggaggaggagaaggaagaattg

SEQ ID NO: 157110 - DNA, 25 bp, Artificial
  Probe
gttgtccttagtctcttgtgctgat

SEQ ID NO: 157111 - DNA, 25 bp, Artificial
  Probe
agaaggaagaattgatggagtggtg

SEQ ID NO: 157112 - DNA, 25 bp, Artificial
  Probe
aggaggaggagaaggaagaattgat

SEQ ID NO: 157113 - DNA, 25 bp, Artificial
  Probe
cacatagttccatataagttgtcct

SEQ ID NO: 157114 - DNA, 25 bp, Artificial
  Probe
tcacatagttccatataagttgtcc

SEQ ID NO: 157115 - DNA, 25 bp, Artificial
  Probe
tccatataagttgtccttagtctct

SEQ ID NO: 157116 - DNA, 25 bp, Artificial
  Probe
aggaggagaaggaagaattgatgga

SEQ ID NO: 157117 - DNA, 25 bp, Artificial
  Probe
aaggaggaggagaaggaagaattga

SEQ ID NO: 157118 - DNA, 25 bp, Artificial
  Probe
ctcttgtgctgatccactgtataag

SEQ ID NO: 157119 - DNA, 25 bp, Artificial
  Probe
gtgtatggcgagaatcacatagttc

SEQ ID NO: 157120 - DNA, 25 bp, Artificial
  Probe
ttgtccttagtctcttgtgctgatc

SEQ ID NO: 157121 - DNA, 25 bp, Artificial
  Probe
aagaacagaactgtattagtcagcc

SEQ ID NO: 157122 - DNA, 25 bp, Artificial
  Probe
gaagaacagaactgtattagtcagc

SEQ ID NO: 157123 - DNA, 25 bp, Artificial
  Probe
tctcttgtgctgatccactgtataa

SEQ ID NO: 157124 - DNA, 25 bp, Artificial
  Probe
taaatacacttggacagaaccgtag

SEQ ID NO: 157125 - DNA, 25 bp, Artificial
  Probe
aagttgtccttagtctcttgtgctg

SEQ ID NO: 157126 - DNA, 25 bp, Artificial
  Probe
actgtataagcatgatcctgttaat

SEQ ID NO: 157127 - DNA, 25 bp, Artificial
  Probe
cacttaaatacacttggacagaacc

SEQ ID NO: 157128 - DNA, 25 bp, Artificial
  Probe
ttaaatacacttggacagaaccgta

SEQ ID NO: 157129 - DNA, 25 bp, Artificial
  Probe
ggagaaggaagaattgatggagtgg

SEQ ID NO: 157130 - DNA, 25 bp, Artificial
  Probe
tataagttgtccttagtctcttgtg

SEQ ID NO: 157131 - DNA, 25 bp, Artificial
  Probe
gttccatataagttgtccttagtct

SEQ ID NO: 157132 - DNA, 25 bp, Artificial
  Probe
agttccatataagttgtccttagtc

SEQ ID NO: 157133 - DNA, 25 bp, Artificial
  Probe
tctaagaaaggctcctaactaatgg

SEQ ID NO: 157134 - DNA, 25 bp, Artificial
  Probe
gaacagaactgtattagtcagcctg

SEQ ID NO: 157135 - DNA, 25 bp, Artificial
  Probe
agaacagaactgtattagtcagcct

SEQ ID NO: 157136 - DNA, 25 bp, Artificial
  Probe
aagaagataaagagtggagagtgtg

SEQ ID NO: 157137 - DNA, 25 bp, Artificial
  Probe
gaagaagataaagagtggagagtgt

SEQ ID NO: 157138 - DNA, 25 bp, Artificial
  Probe
gaggaagaagataaagagtggagag

SEQ ID NO: 157139 - DNA, 25 bp, Artificial
  Probe
ctaacctaacctcaacctcctaaac

SEQ ID NO: 157140 - DNA, 25 bp, Artificial
  Probe
ggaagaagataaagagtggagagtg

SEQ ID NO: 157141 - DNA, 25 bp, Artificial
  Probe
aggaagaagataaagagtggagagt

SEQ ID NO: 157142 - DNA, 25 bp, Artificial
  Probe
cctaacctaacctcaacctcctaaa

SEQ ID NO: 157143 - DNA, 25 bp, Artificial
  Probe
cgaggaagaagataaagagtggaga

SEQ ID NO: 157144 - DNA, 25 bp, Artificial
  Probe
taacctaacctcaacctcctaaacc

SEQ ID NO: 157145 - DNA, 25 bp, Artificial
  Probe
atactgggttggaatgtgaacaata

SEQ ID NO: 157146 - DNA, 25 bp, Artificial
  Probe
ggttggaatgtgaacaataaagagg

SEQ ID NO: 157147 - DNA, 25 bp, Artificial
  Probe
gggttggaatgtgaacaataaagag

SEQ ID NO: 157148 - DNA, 25 bp, Artificial
  Probe
tactgggttggaatgtgaacaataa

SEQ ID NO: 157149 - DNA, 25 bp, Artificial
  Probe
agaagataaagagtggagagtgtgg

SEQ ID NO: 157150 - DNA, 25 bp, Artificial
  Probe
gttggaatgtgaacaataaagagga

SEQ ID NO: 157151 - DNA, 25 bp, Artificial
  Probe
ctgggttggaatgtgaacaataaag

SEQ ID NO: 157152 - DNA, 25 bp, Artificial
  Probe
tggaatgtgaacaataaagaggaat

SEQ ID NO: 157153 - DNA, 25 bp, Artificial
  Probe
tgggttggaatgtgaacaataaaga

SEQ ID NO: 157154 - DNA, 25 bp, Artificial
  Probe
actgggttggaatgtgaacaataaa

SEQ ID NO: 157155 - DNA, 25 bp, Artificial
  Probe
ggaatgtgaacaataaagaggaatg

SEQ ID NO: 157156 - DNA, 25 bp, Artificial
  Probe
ttggaatgtgaacaataaagaggaa

SEQ ID NO: 157157 - DNA, 25 bp, Artificial
  Probe
catactgggttggaatgtgaacaat

SEQ ID NO: 157158 - DNA, 25 bp, Artificial
  Probe
atggcgaggaagaagataaagagtg

SEQ ID NO: 157159 - DNA, 25 bp, Artificial
  Probe
ctctaatgggaagtgaagtcctatc

SEQ ID NO: 157160 - DNA, 25 bp, Artificial
  Probe
aagacttccctactgtgtttgtgag

SEQ ID NO: 157161 - DNA, 25 bp, Artificial
  Probe
atgtgaacaataaagaggaatgtct

SEQ ID NO: 157162 - DNA, 25 bp, Artificial
  Probe
ccctaacctaacctcaacctcctaa

SEQ ID NO: 157163 - DNA, 25 bp, Artificial
  Probe
tctaatgggaagtgaagtcctatcc

SEQ ID NO: 157164 - DNA, 25 bp, Artificial
  Probe
ctccaagccagacgacgatattcta

SEQ ID NO: 157165 - DNA, 25 bp, Artificial
  Probe
aacctaacctcaacctcctaaacct

SEQ ID NO: 157166 - DNA, 25 bp, Artificial
  Probe
ctttccaccctaacctaacctcaac

SEQ ID NO: 157167 - DNA, 25 bp, Artificial
  Probe
gcgaggaagaagataaagagtggag

SEQ ID NO: 157168 - DNA, 25 bp, Artificial
  Probe
acaataaagaggaatgtctaagtgt

SEQ ID NO: 157169 - DNA, 25 bp, Artificial
  Probe
tgtgaacaataaagaggaatgtcta

SEQ ID NO: 157170 - DNA, 25 bp, Artificial
  Probe
tctttccaccctaacctaacctcaa

SEQ ID NO: 157171 - DNA, 25 bp, Artificial
  Probe
gaagataaagagtggagagtgtggc

SEQ ID NO: 157172 - DNA, 25 bp, Artificial
  Probe
aatgtgaacaataaagaggaatgtc

SEQ ID NO: 157173 - DNA, 25 bp, Artificial
  Probe
gaatgtgaacaataaagaggaatgt

SEQ ID NO: 157174 - DNA, 25 bp, Artificial
  Probe
gctctaatgggaagtgaagtcctat

SEQ ID NO: 157175 - DNA, 25 bp, Artificial
  Probe
caagacttccctactgtgtttgtga

SEQ ID NO: 157176 - DNA, 25 bp, Artificial
  Probe
tccaagccagacgacgatattctag

SEQ ID NO: 157177 - DNA, 25 bp, Artificial
  Probe
catggcgaggaagaagataaagagt

SEQ ID NO: 157178 - DNA, 25 bp, Artificial
  Probe
acatggcgaggaagaagataaagag

SEQ ID NO: 157179 - DNA, 25 bp, Artificial
  Probe
ccagacgacgatattctagacatcc

SEQ ID NO: 157180 - DNA, 25 bp, Artificial
  Probe
ttaccatactgggttggaatgtgaa

SEQ ID NO: 157181 - DNA, 25 bp, Artificial
  Probe
cagagacacttgaggttggttatta

SEQ ID NO: 157182 - DNA, 25 bp, Artificial
  Probe
gagacacttgaggttggttattatg

SEQ ID NO: 157183 - DNA, 25 bp, Artificial
  Probe
agagacacttgaggttggttattat

SEQ ID NO: 157184 - DNA, 25 bp, Artificial
  Probe
agacacttgaggttggttattatgt

SEQ ID NO: 157185 - DNA, 25 bp, Artificial
  Probe
tcagagacacttgaggttggttatt

SEQ ID NO: 157186 - DNA, 25 bp, Artificial
  Probe
gacacttgaggttggttattatgta

SEQ ID NO: 157187 - DNA, 25 bp, Artificial
  Probe
acacttgaggttggttattatgtaa

SEQ ID NO: 157188 - DNA, 25 bp, Artificial
  Probe
aggaagaacaggaagaaaggtttat

SEQ ID NO: 157189 - DNA, 25 bp, Artificial
  Probe
caggaagaacaggaagaaaggttta

SEQ ID NO: 157190 - DNA, 25 bp, Artificial
  Probe
ggaagaacaggaagaaaggtttatt

SEQ ID NO: 157191 - DNA, 25 bp, Artificial
  Probe
gtgtgagtccttactgtttgatttc

SEQ ID NO: 157192 - DNA, 25 bp, Artificial
  Probe
tgtgagtccttactgtttgatttca

SEQ ID NO: 157193 - DNA, 25 bp, Artificial
  Probe
agtgtgagtccttactgtttgattt

SEQ ID NO: 157194 - DNA, 25 bp, Artificial
  Probe
aagtgtgagtccttactgtttgatt

SEQ ID NO: 157195 - DNA, 25 bp, Artificial
  Probe
aaagtgtgagtccttactgtttgat

SEQ ID NO: 157196 - DNA, 25 bp, Artificial
  Probe
ttcaaagtgtgagtccttactgttt

SEQ ID NO: 157197 - DNA, 25 bp, Artificial
  Probe
ttcttcaaagtgtgagtccttactg

SEQ ID NO: 157198 - DNA, 25 bp, Artificial
  Probe
gttcttcaaagtgtgagtccttact

SEQ ID NO: 157199 - DNA, 25 bp, Artificial
  Probe
agttcttcaaagtgtgagtccttac

SEQ ID NO: 157200 - DNA, 25 bp, Artificial
  Probe
cagttcttcaaagtgtgagtcctta

SEQ ID NO: 157201 - DNA, 25 bp, Artificial
  Probe
tttacccaggaagaacaggaagaaa

SEQ ID NO: 157202 - DNA, 25 bp, Artificial
  Probe
cttcaaagtgtgagtccttactgtt

SEQ ID NO: 157203 - DNA, 25 bp, Artificial
  Probe
atggatgatgtttaagcatgatgtc

SEQ ID NO: 157204 - DNA, 25 bp, Artificial
  Probe
ttacccaggaagaacaggaagaaag

SEQ ID NO: 157205 - DNA, 25 bp, Artificial
  Probe
tcttcaaagtgtgagtccttactgt

SEQ ID NO: 157206 - DNA, 25 bp, Artificial
  Probe
gtgagtccttactgtttgatttcaa

SEQ ID NO: 157207 - DNA, 25 bp, Artificial
  Probe
aatggatgatgtttaagcatgatgt

SEQ ID NO: 157208 - DNA, 25 bp, Artificial
  Probe
gcaaatggatgatgtttaagcatga

SEQ ID NO: 157209 - DNA, 25 bp, Artificial
  Probe
atgatgtttaagcatgatgtcagtg

SEQ ID NO: 157210 - DNA, 25 bp, Artificial
  Probe
gatgatgtttaagcatgatgtcagt

SEQ ID NO: 157211 - DNA, 25 bp, Artificial
  Probe
ggatgatgtttaagcatgatgtcag

SEQ ID NO: 157212 - DNA, 25 bp, Artificial
  Probe
tggatgatgtttaagcatgatgtca

SEQ ID NO: 157213 - DNA, 25 bp, Artificial
  Probe
aaatggatgatgtttaagcatgatg

SEQ ID NO: 157214 - DNA, 25 bp, Artificial
  Probe
caaatggatgatgtttaagcatgat

SEQ ID NO: 157215 - DNA, 25 bp, Artificial
  Probe
gaagaacaggaagaaaggtttattt

SEQ ID NO: 157216 - DNA, 25 bp, Artificial
  Probe
gtttacccaggaagaacaggaagaa

SEQ ID NO: 157217 - DNA, 25 bp, Artificial
  Probe
cacttgaggttggttattatgtaaa

SEQ ID NO: 157218 - DNA, 25 bp, Artificial
  Probe
acagttcttcaaagtgtgagtcctt

SEQ ID NO: 157219 - DNA, 25 bp, Artificial
  Probe
ctggtgcaaatggatgatgtttaag

SEQ ID NO: 157220 - DNA, 25 bp, Artificial
  Probe
acttgaggttggttattatgtaaac

SEQ ID NO: 157221 - DNA, 25 bp, Artificial
  Probe
gaggtgacacgtcaagagtgatatt

SEQ ID NO: 157222 - DNA, 25 bp, Artificial
  Probe
ccaggaagaacaggaagaaaggttt

SEQ ID NO: 157223 - DNA, 25 bp, Artificial
  Probe
actggtgcaaatggatgatgtttaa

SEQ ID NO: 157224 - DNA, 25 bp, Artificial
  Probe
cttgaggttggttattatgtaaact

SEQ ID NO: 157225 - DNA, 25 bp, Artificial
  Probe
aactggtgcaaatggatgatgttta

SEQ ID NO: 157226 - DNA, 25 bp, Artificial
  Probe
gatcagtaagcacagcaatacatat

SEQ ID NO: 157227 - DNA, 25 bp, Artificial
  Probe
agtaattgttcttcagcctctcctc

SEQ ID NO: 157228 - DNA, 25 bp, Artificial
  Probe
tccatagaatagtgctgttcaccta

SEQ ID NO: 157229 - DNA, 25 bp, Artificial
  Probe
ccatagaatagtgctgttcacctag

SEQ ID NO: 157230 - DNA, 25 bp, Artificial
  Probe
gcagacactgagtaattgttcttca

SEQ ID NO: 157231 - DNA, 25 bp, Artificial
  Probe
cttccatagaatagtgctgttcacc

SEQ ID NO: 157232 - DNA, 25 bp, Artificial
  Probe
ccttccatagaatagtgctgttcac

SEQ ID NO: 157233 - DNA, 25 bp, Artificial
  Probe
ttccatagaatagtgctgttcacct

SEQ ID NO: 157234 - DNA, 25 bp, Artificial
  Probe
gagtaattgttcttcagcctctcct

SEQ ID NO: 157235 - DNA, 25 bp, Artificial
  Probe
ggcagacactgagtaattgttcttc

SEQ ID NO: 157236 - DNA, 25 bp, Artificial
  Probe
tgagtaattgttcttcagcctctcc

SEQ ID NO: 157237 - DNA, 25 bp, Artificial
  Probe
aggcagacactgagtaattgttctt

SEQ ID NO: 157238 - DNA, 25 bp, Artificial
  Probe
ctggtggtaacttgtgttggtgtat

SEQ ID NO: 157239 - DNA, 25 bp, Artificial
  Probe
agtaagcacagcaatacatatgagt

SEQ ID NO: 157240 - DNA, 25 bp, Artificial
  Probe
cagtaagcacagcaatacatatgag

SEQ ID NO: 157241 - DNA, 25 bp, Artificial
  Probe
gtaattgttcttcagcctctcctcg

SEQ ID NO: 157242 - DNA, 25 bp, Artificial
  Probe
gaggcagacactgagtaattgttct

SEQ ID NO: 157243 - DNA, 25 bp, Artificial
  Probe
atcagtaagcacagcaatacatatg

SEQ ID NO: 157244 - DNA, 25 bp, Artificial
  Probe
tggtggtaacttgtgttggtgtatg

SEQ ID NO: 157245 - DNA, 25 bp, Artificial
  Probe
tcagtaagcacagcaatacatatga

SEQ ID NO: 157246 - DNA, 25 bp, Artificial
  Probe
aagaaggatcattaaacagagcatt

SEQ ID NO: 157247 - DNA, 25 bp, Artificial
  Probe
aaagaaggatcattaaacagagcat

SEQ ID NO: 157248 - DNA, 25 bp, Artificial
  Probe
taattgttcttcagcctctcctcgt

SEQ ID NO: 157249 - DNA, 25 bp, Artificial
  Probe
cccttccatagaatagtgctgttca

SEQ ID NO: 157250 - DNA, 25 bp, Artificial
  Probe
gtaagcacagcaatacatatgagtg

SEQ ID NO: 157251 - DNA, 25 bp, Artificial
  Probe
taagcacagcaatacatatgagtgt

SEQ ID NO: 157252 - DNA, 25 bp, Artificial
  Probe
agaaggatcattaaacagagcatta

SEQ ID NO: 157253 - DNA, 25 bp, Artificial
  Probe
aatggtaaatgttccaagggagatt

SEQ ID NO: 157254 - DNA, 25 bp, Artificial
  Probe
ttaatggtaaatgttccaagggaga

SEQ ID NO: 157255 - DNA, 25 bp, Artificial
  Probe
taatggtaaatgttccaagggagat

SEQ ID NO: 157256 - DNA, 25 bp, Artificial
  Probe
tctggtggtaacttgtgttggtgta

SEQ ID NO: 157257 - DNA, 25 bp, Artificial
  Probe
atggtaaatgttccaagggagattc

SEQ ID NO: 157258 - DNA, 25 bp, Artificial
  Probe
tgtatgccatgacaacactgtttaa

SEQ ID NO: 157259 - DNA, 25 bp, Artificial
  Probe
ggaggcagacactgagtaattgttc

SEQ ID NO: 157260 - DNA, 25 bp, Artificial
  Probe
agattctgcttcaaacccaccatag

SEQ ID NO: 157261 - DNA, 25 bp, Artificial
  Probe
gagattctgcttcaaacccaccata

SEQ ID NO: 157262 - DNA, 25 bp, Artificial
  Probe
tgatcagtaagcacagcaatacata

SEQ ID NO: 157263 - DNA, 25 bp, Artificial
  Probe
ggtaaatgttccaagggagattctg

SEQ ID NO: 157264 - DNA, 25 bp, Artificial
  Probe
taacttgtgttggtgtatgccatga

SEQ ID NO: 157265 - DNA, 25 bp, Artificial
  Probe
gtaacttgtgttggtgtatgccatg

SEQ ID NO: 157266 - DNA, 25 bp, Artificial
  Probe
tgtttaaatagtcctttgcagagtg

SEQ ID NO: 157267 - DNA, 25 bp, Artificial
  Probe
ttcaaacccaccatagaatgctgat

SEQ ID NO: 157268 - DNA, 25 bp, Artificial
  Probe
gtttaaatagtcctttgcagagtga

SEQ ID NO: 157269 - DNA, 25 bp, Artificial
  Probe
caacactgtttaaatagtcctttgc

SEQ ID NO: 157270 - DNA, 25 bp, Artificial
  Probe
gattctgcttcaaacccaccataga

SEQ ID NO: 157271 - DNA, 25 bp, Artificial
  Probe
catcaacttcggctacttcactatc

SEQ ID NO: 157272 - DNA, 25 bp, Artificial
  Probe
atcaacttcggctacttcactatca

SEQ ID NO: 157273 - DNA, 25 bp, Artificial
  Probe
tcaacttcggctacttcactatcaa

SEQ ID NO: 157274 - DNA, 25 bp, Artificial
  Probe
cgaagataatgaatacacagcgagg

SEQ ID NO: 157275 - DNA, 25 bp, Artificial
  Probe
caacttcggctacttcactatcaag

SEQ ID NO: 157276 - DNA, 25 bp, Artificial
  Probe
ccatcaacttcggctacttcactat

SEQ ID NO: 157277 - DNA, 25 bp, Artificial
  Probe
aatcgaagataatgaatacacagcg

SEQ ID NO: 157278 - DNA, 25 bp, Artificial
  Probe
acagagtgtactggatgacttctac

SEQ ID NO: 157279 - DNA, 25 bp, Artificial
  Probe
gataatgaatacacagcgagggaag

SEQ ID NO: 157280 - DNA, 25 bp, Artificial
  Probe
gaagataatgaatacacagcgaggg

SEQ ID NO: 157281 - DNA, 25 bp, Artificial
  Probe
tacagagtgtactggatgacttcta

SEQ ID NO: 157282 - DNA, 25 bp, Artificial
  Probe
tacttacagagtgtactggatgact

SEQ ID NO: 157283 - DNA, 25 bp, Artificial
  Probe
ctacttacagagtgtactggatgac

SEQ ID NO: 157284 - DNA, 25 bp, Artificial
  Probe
actacttacagagtgtactggatga

SEQ ID NO: 157285 - DNA, 25 bp, Artificial
  Probe
gactacttacagagtgtactggatg

SEQ ID NO: 157286 - DNA, 25 bp, Artificial
  Probe
tgactacttacagagtgtactggat

SEQ ID NO: 157287 - DNA, 25 bp, Artificial
  Probe
cttacagagtgtactggatgacttc

SEQ ID NO: 157288 - DNA, 25 bp, Artificial
  Probe
ttgactacttacagagtgtactgga

SEQ ID NO: 157289 - DNA, 25 bp, Artificial
  Probe
ttacagagtgtactggatgacttct

SEQ ID NO: 157290 - DNA, 25 bp, Artificial
  Probe
agataatgaatacacagcgagggaa

SEQ ID NO: 157291 - DNA, 25 bp, Artificial
  Probe
aagataatgaatacacagcgaggga

SEQ ID NO: 157292 - DNA, 25 bp, Artificial
  Probe
acttacagagtgtactggatgactt

SEQ ID NO: 157293 - DNA, 25 bp, Artificial
  Probe
ccaacctttgactacttacagagtg

SEQ ID NO: 157294 - DNA, 25 bp, Artificial
  Probe
cagagtgtactggatgacttctaca

SEQ ID NO: 157295 - DNA, 25 bp, Artificial
  Probe
caacctttgactacttacagagtgt

SEQ ID NO: 157296 - DNA, 25 bp, Artificial
  Probe
gagaactaacgcagatgtgatgacc

SEQ ID NO: 157297 - DNA, 25 bp, Artificial
  Probe
ggagaactaacgcagatgtgatgac

SEQ ID NO: 157298 - DNA, 25 bp, Artificial
  Probe
ataatgaatacacagcgagggaagg

SEQ ID NO: 157299 - DNA, 25 bp, Artificial
  Probe
atcgaagataatgaatacacagcga

SEQ ID NO: 157300 - DNA, 25 bp, Artificial
  Probe
tcgaagataatgaatacacagcgag

SEQ ID NO: 157301 - DNA, 25 bp, Artificial
  Probe
taatcgaagataatgaatacacagc

SEQ ID NO: 157302 - DNA, 25 bp, Artificial
  Probe
aacttcggctacttcactatcaagt

SEQ ID NO: 157303 - DNA, 25 bp, Artificial
  Probe
gcgagagtaatcgaagataatgaat

SEQ ID NO: 157304 - DNA, 25 bp, Artificial
  Probe
gccaacctttgactacttacagagt

SEQ ID NO: 157305 - DNA, 25 bp, Artificial
  Probe
gagatcgtcacctatgggaagattc

SEQ ID NO: 157306 - DNA, 25 bp, Artificial
  Probe
gtacatcgagcggaagaactacatc

SEQ ID NO: 157307 - DNA, 25 bp, Artificial
  Probe
cttcggctacttcactatcaagtct

SEQ ID NO: 157308 - DNA, 25 bp, Artificial
  Probe
ttcggctacttcactatcaagtctg

SEQ ID NO: 157309 - DNA, 25 bp, Artificial
  Probe
acttcggctacttcactatcaagtc

SEQ ID NO: 157310 - DNA, 25 bp, Artificial
  Probe
tttgactacttacagagtgtactgg

SEQ ID NO: 157311 - DNA, 25 bp, Artificial
  Probe
acctttgactacttacagagtgtac

SEQ ID NO: 157312 - DNA, 25 bp, Artificial
  Probe
aacctttgactacttacagagtgta

SEQ ID NO: 157313 - DNA, 25 bp, Artificial
  Probe
cctttgactacttacagagtgtact

SEQ ID NO: 157314 - DNA, 25 bp, Artificial
  Probe
ctacttcactatcaagtctgacgtg

SEQ ID NO: 157315 - DNA, 25 bp, Artificial
  Probe
tacttcactatcaagtctgacgtgt

SEQ ID NO: 157316 - DNA, 25 bp, Artificial
  Probe
caaacaaagtggagaaagagagaaa

SEQ ID NO: 157317 - DNA, 25 bp, Artificial
  Probe
tccaggagtttgtgaataaatgtct

SEQ ID NO: 157318 - DNA, 25 bp, Artificial
  Probe
aaagcaaacaaagtggagaaagaga

SEQ ID NO: 157319 - DNA, 25 bp, Artificial
  Probe
ttccaggagtttgtgaataaatgtc

SEQ ID NO: 157320 - DNA, 25 bp, Artificial
  Probe
cttccaggagtttgtgaataaatgt

SEQ ID NO: 157321 - DNA, 25 bp, Artificial
  Probe
gcaaacaaagtggagaaagagagaa

SEQ ID NO: 157322 - DNA, 25 bp, Artificial
  Probe
aagcaaacaaagtggagaaagagag

SEQ ID NO: 157323 - DNA, 25 bp, Artificial
  Probe
ccaggagtttgtgaataaatgtctc

SEQ ID NO: 157324 - DNA, 25 bp, Artificial
  Probe
agacttccaggagtttgtgaataaa

SEQ ID NO: 157325 - DNA, 25 bp, Artificial
  Probe
acttccaggagtttgtgaataaatg

SEQ ID NO: 157326 - DNA, 25 bp, Artificial
  Probe
caggagtttgtgaataaatgtctca

SEQ ID NO: 157327 - DNA, 25 bp, Artificial
  Probe
gactacatagtgaatgagccacctc

SEQ ID NO: 157328 - DNA, 25 bp, Artificial
  Probe
cagacttccaggagtttgtgaataa

SEQ ID NO: 157329 - DNA, 25 bp, Artificial
  Probe
gacttccaggagtttgtgaataaat

SEQ ID NO: 157330 - DNA, 25 bp, Artificial
  Probe
gctgctggactacatagtgaatgag

SEQ ID NO: 157331 - DNA, 25 bp, Artificial
  Probe
tcagacttccaggagtttgtgaata

SEQ ID NO: 157332 - DNA, 25 bp, Artificial
  Probe
agcaaacaaagtggagaaagagaga

SEQ ID NO: 157333 - DNA, 25 bp, Artificial
  Probe
aggagtttgtgaataaatgtctcat

SEQ ID NO: 157334 - DNA, 25 bp, Artificial
  Probe
ctggactacatagtgaatgagccac

SEQ ID NO: 157335 - DNA, 25 bp, Artificial
  Probe
atgtctcattaagaacccagcagag

SEQ ID NO: 157336 - DNA, 25 bp, Artificial
  Probe
gagctgctggactacatagtgaatg

SEQ ID NO: 157337 - DNA, 25 bp, Artificial
  Probe
taaatgtctcattaagaacccagca

SEQ ID NO: 157338 - DNA, 25 bp, Artificial
  Probe
ctcagacttccaggagtttgtgaat

SEQ ID NO: 157339 - DNA, 25 bp, Artificial
  Probe
ataaatgtctcattaagaacccagc

SEQ ID NO: 157340 - DNA, 25 bp, Artificial
  Probe
actacatagtgaatgagccacctcc

SEQ ID NO: 157341 - DNA, 25 bp, Artificial
  Probe
ggactacatagtgaatgagccacct

SEQ ID NO: 157342 - DNA, 25 bp, Artificial
  Probe
atctttgagctgctggactacatag

SEQ ID NO: 157343 - DNA, 25 bp, Artificial
  Probe
aaatgtctcattaagaacccagcag

SEQ ID NO: 157344 - DNA, 25 bp, Artificial
  Probe
agctgctggactacatagtgaatga

SEQ ID NO: 157345 - DNA, 25 bp, Artificial
  Probe
tgagctgctggactacatagtgaat

SEQ ID NO: 157346 - DNA, 25 bp, Artificial
  Probe
ctgctggactacatagtgaatgagc

SEQ ID NO: 157347 - DNA, 25 bp, Artificial
  Probe
aaaagcaaacaaagtggagaaagag

SEQ ID NO: 157348 - DNA, 25 bp, Artificial
  Probe
gaaaagcaaacaaagtggagaaaga

SEQ ID NO: 157349 - DNA, 25 bp, Artificial
  Probe
ttgagctgctggactacatagtgaa

SEQ ID NO: 157350 - DNA, 25 bp, Artificial
  Probe
catctttgagctgctggactacata

SEQ ID NO: 157351 - DNA, 25 bp, Artificial
  Probe
aaacaaagtggagaaagagagaaaa

SEQ ID NO: 157352 - DNA, 25 bp, Artificial
  Probe
aatgtctcattaagaacccagcaga

SEQ ID NO: 157353 - DNA, 25 bp, Artificial
  Probe
ggaaaagcaaacaaagtggagaaag

SEQ ID NO: 157354 - DNA, 25 bp, Artificial
  Probe
tggactacatagtgaatgagccacc

SEQ ID NO: 157355 - DNA, 25 bp, Artificial
  Probe
ggagtttgtgaataaatgtctcatt

SEQ ID NO: 157356 - DNA, 25 bp, Artificial
  Probe
tggaaaagcaaacaaagtggagaaa

SEQ ID NO: 157357 - DNA, 25 bp, Artificial
  Probe
ttggaaaagcaaacaaagtggagaa

SEQ ID NO: 157358 - DNA, 25 bp, Artificial
  Probe
aataaatgtctcattaagaacccag

SEQ ID NO: 157359 - DNA, 25 bp, Artificial
  Probe
gaataaatgtctcattaagaaccca

SEQ ID NO: 157360 - DNA, 25 bp, Artificial
  Probe
tgaataaatgtctcattaagaaccc

SEQ ID NO: 157361 - DNA, 25 bp, Artificial
  Probe
gagattggatgtaaccttgtaacct

SEQ ID NO: 157362 - DNA, 25 bp, Artificial
  Probe
ccactatgctaagacaatgacagat

SEQ ID NO: 157363 - DNA, 25 bp, Artificial
  Probe
tatagtcagtcagtctctctctctt

SEQ ID NO: 157364 - DNA, 25 bp, Artificial
  Probe
agattggatgtaaccttgtaaccta

SEQ ID NO: 157365 - DNA, 25 bp, Artificial
  Probe
cactatgctaagacaatgacagatt

SEQ ID NO: 157366 - DNA, 25 bp, Artificial
  Probe
ggagattggatgtaaccttgtaacc

SEQ ID NO: 157367 - DNA, 25 bp, Artificial
  Probe
tgtgttcaatctacttgttgtatgc

SEQ ID NO: 157368 - DNA, 25 bp, Artificial
  Probe
tgttcaatctacttgttgtatgcct

SEQ ID NO: 157369 - DNA, 25 bp, Artificial
  Probe
gtgttcaatctacttgttgtatgcc

SEQ ID NO: 157370 - DNA, 25 bp, Artificial
  Probe
gtgatgtgttcaatctacttgttgt

SEQ ID NO: 157371 - DNA, 25 bp, Artificial
  Probe
tgtgatgtgttcaatctacttgttg

SEQ ID NO: 157372 - DNA, 25 bp, Artificial
  Probe
gtgaactatgagtggattatggcta

SEQ ID NO: 157373 - DNA, 25 bp, Artificial
  Probe
cgttgtgaactatgagtggattatg

SEQ ID NO: 157374 - DNA, 25 bp, Artificial
  Probe
tcgttgtgaactatgagtggattat

SEQ ID NO: 157375 - DNA, 25 bp, Artificial
  Probe
ttcgttgtgaactatgagtggatta

SEQ ID NO: 157376 - DNA, 25 bp, Artificial
  Probe
cactgagattatggaccacaatgtt

SEQ ID NO: 157377 - DNA, 25 bp, Artificial
  Probe
gttgtgaactatgagtggattatgg

SEQ ID NO: 157378 - DNA, 25 bp, Artificial
  Probe
ctatagtcagtcagtctctctctct

SEQ ID NO: 157379 - DNA, 25 bp, Artificial
  Probe
aattccttagtagaagtgacctgct

SEQ ID NO: 157380 - DNA, 25 bp, Artificial
  Probe
gttcaatctacttgttgtatgccta

SEQ ID NO: 157381 - DNA, 25 bp, Artificial
  Probe
tatgagtggattatggctatactgg

SEQ ID NO: 157382 - DNA, 25 bp, Artificial
  Probe
gattggatgtaaccttgtaacctat

SEQ ID NO: 157383 - DNA, 25 bp, Artificial
  Probe
tgaactatgagtggattatggctat

SEQ ID NO: 157384 - DNA, 25 bp, Artificial
  Probe
ttgtgaactatgagtggattatggc

SEQ ID NO: 157385 - DNA, 25 bp, Artificial
  Probe
caaccttattccatcaagcatccaa

SEQ ID NO: 157386 - DNA, 25 bp, Artificial
  Probe
attccttagtagaagtgacctgctc

SEQ ID NO: 157387 - DNA, 25 bp, Artificial
  Probe
atgtgatgtgttcaatctacttgtt

SEQ ID NO: 157388 - DNA, 25 bp, Artificial
  Probe
aatgtgatgtgttcaatctacttgt

SEQ ID NO: 157389 - DNA, 25 bp, Artificial
  Probe
ctccaaccttattccatcaagcatc

SEQ ID NO: 157390 - DNA, 25 bp, Artificial
  Probe
tgtgaactatgagtggattatggct

SEQ ID NO: 157391 - DNA, 25 bp, Artificial
  Probe
tgatgtgttcaatctacttgttgta

SEQ ID NO: 157392 - DNA, 25 bp, Artificial
  Probe
ttcaatctacttgttgtatgcctag

SEQ ID NO: 157393 - DNA, 25 bp, Artificial
  Probe
actatgagtggattatggctatact

SEQ ID NO: 157394 - DNA, 25 bp, Artificial
  Probe
ctatgagtggattatggctatactg

SEQ ID NO: 157395 - DNA, 25 bp, Artificial
  Probe
agtcaaggaatcagttctgagaatt

SEQ ID NO: 157396 - DNA, 25 bp, Artificial
  Probe
gagtcaaggaatcagttctgagaat

SEQ ID NO: 157397 - DNA, 25 bp, Artificial
  Probe
ctctctctctctctccaggtactac

SEQ ID NO: 157398 - DNA, 25 bp, Artificial
  Probe
tctctctctctctctccaggtacta

SEQ ID NO: 157399 - DNA, 25 bp, Artificial
  Probe
cttagtagaagtgacctgctccttg

SEQ ID NO: 157400 - DNA, 25 bp, Artificial
  Probe
aatctacttgttgtatgcctagagg

SEQ ID NO: 157401 - DNA, 25 bp, Artificial
  Probe
atctacttgttgtatgcctagagga

SEQ ID NO: 157402 - DNA, 25 bp, Artificial
  Probe
agagtcaaggaatcagttctgagaa

SEQ ID NO: 157403 - DNA, 25 bp, Artificial
  Probe
tctacttgttgtatgcctagaggaa

SEQ ID NO: 157404 - DNA, 25 bp, Artificial
  Probe
tcaatctacttgttgtatgcctaga

SEQ ID NO: 157405 - DNA, 25 bp, Artificial
  Probe
ccttgtaacctatagtcagtcagtc

SEQ ID NO: 157406 - DNA, 25 bp, Artificial
  Probe
tcaacctcataagacagagttcata

SEQ ID NO: 157407 - DNA, 25 bp, Artificial
  Probe
gtcaacctcataagacagagttcat

SEQ ID NO: 157408 - DNA, 25 bp, Artificial
  Probe
acctcataagacagagttcatatct

SEQ ID NO: 157409 - DNA, 25 bp, Artificial
  Probe
caacctcataagacagagttcatat

SEQ ID NO: 157410 - DNA, 25 bp, Artificial
  Probe
gacattgttaatcagaccatgccat

SEQ ID NO: 157411 - DNA, 25 bp, Artificial
  Probe
aacctcataagacagagttcatatc

SEQ ID NO: 157412 - DNA, 25 bp, Artificial
  Probe
acattgttaatcagaccatgccatg

SEQ ID NO: 157413 - DNA, 25 bp, Artificial
  Probe
attgttaatcagaccatgccatgac

SEQ ID NO: 157414 - DNA, 25 bp, Artificial
  Probe
cattgttaatcagaccatgccatga

SEQ ID NO: 157415 - DNA, 25 bp, Artificial
  Probe
tatgtttaacctccacgaatatccc

SEQ ID NO: 157416 - DNA, 25 bp, Artificial
  Probe
acctatgtttaacctccacgaatat

SEQ ID NO: 157417 - DNA, 25 bp, Artificial
  Probe
gggacatttcaaacatcaattcact

SEQ ID NO: 157418 - DNA, 25 bp, Artificial
  Probe
atcttaaattcggagttcattggga

SEQ ID NO: 157419 - DNA, 25 bp, Artificial
  Probe
catcttaaattcggagttcattggg

SEQ ID NO: 157420 - DNA, 25 bp, Artificial
  Probe
tgggacatttcaaacatcaattcac

SEQ ID NO: 157421 - DNA, 25 bp, Artificial
  Probe
taaattcggagttcattgggacatt

SEQ ID NO: 157422 - DNA, 25 bp, Artificial
  Probe
ttaaattcggagttcattgggacat

SEQ ID NO: 157423 - DNA, 25 bp, Artificial
  Probe
aatcttcgatgcagctattccaatt

SEQ ID NO: 157424 - DNA, 25 bp, Artificial
  Probe
ctatgtttaacctccacgaatatcc

SEQ ID NO: 157425 - DNA, 25 bp, Artificial
  Probe
cctatgtttaacctccacgaatatc

SEQ ID NO: 157426 - DNA, 25 bp, Artificial
  Probe
gcatcttaaattcggagttcattgg

SEQ ID NO: 157427 - DNA, 25 bp, Artificial
  Probe
aacctatgtttaacctccacgaata

SEQ ID NO: 157428 - DNA, 25 bp, Artificial
  Probe
ttcattgggacatttcaaacatcaa

SEQ ID NO: 157429 - DNA, 25 bp, Artificial
  Probe
agttcattgggacatttcaaacatc

SEQ ID NO: 157430 - DNA, 25 bp, Artificial
  Probe
gagttcattgggacatttcaaacat

SEQ ID NO: 157431 - DNA, 25 bp, Artificial
  Probe
tcttaaattcggagttcattgggac

SEQ ID NO: 157432 - DNA, 25 bp, Artificial
  Probe
cgcatcttaaattcggagttcattg

SEQ ID NO: 157433 - DNA, 25 bp, Artificial
  Probe
tcgcatcttaaattcggagttcatt

SEQ ID NO: 157434 - DNA, 25 bp, Artificial
  Probe
gttcattgggacatttcaaacatca

SEQ ID NO: 157435 - DNA, 25 bp, Artificial
  Probe
gaacctatgtttaacctccacgaat

SEQ ID NO: 157436 - DNA, 25 bp, Artificial
  Probe
ttgggacatttcaaacatcaattca

SEQ ID NO: 157437 - DNA, 25 bp, Artificial
  Probe
cttaaattcggagttcattgggaca

SEQ ID NO: 157438 - DNA, 25 bp, Artificial
  Probe
ctcgctaagaatgactgtacggtac

SEQ ID NO: 157439 - DNA, 25 bp, Artificial
  Probe
atgtttaacctccacgaatatccct

SEQ ID NO: 157440 - DNA, 25 bp, Artificial
  Probe
gtcgcatcttaaattcggagttcat

SEQ ID NO: 157441 - DNA, 25 bp, Artificial
  Probe
aattcggagttcattgggacatttc

SEQ ID NO: 157442 - DNA, 25 bp, Artificial
  Probe
tcaggactcgctaagaatgactgta

SEQ ID NO: 157443 - DNA, 25 bp, Artificial
  Probe
ggacatttcaaacatcaattcacta

SEQ ID NO: 157444 - DNA, 25 bp, Artificial
  Probe
actcgctaagaatgactgtacggta

SEQ ID NO: 157445 - DNA, 25 bp, Artificial
  Probe
tgacattgttaatcagaccatgcca

SEQ ID NO: 157446 - DNA, 25 bp, Artificial
  Probe
tgtttaacctccacgaatatccctc

SEQ ID NO: 157447 - DNA, 25 bp, Artificial
  Probe
cttcaggactcgctaagaatgactg

SEQ ID NO: 157448 - DNA, 25 bp, Artificial
  Probe
ggagttcattgggacatttcaaaca

SEQ ID NO: 157449 - DNA, 25 bp, Artificial
  Probe
caggactcgctaagaatgactgtac

SEQ ID NO: 157450 - DNA, 25 bp, Artificial
  Probe
aaattcggagttcattgggacattt

SEQ ID NO: 157451 - DNA, 25 bp, Artificial
  Probe
aatgaactgaatacttggacctcac

SEQ ID NO: 157452 - DNA, 25 bp, Artificial
  Probe
caatgaactgaatacttggacctca

SEQ ID NO: 157453 - DNA, 25 bp, Artificial
  Probe
atgaactgaatacttggacctcacc

SEQ ID NO: 157454 - DNA, 25 bp, Artificial
  Probe
gccagagatatcaacaacatagact

SEQ ID NO: 157455 - DNA, 25 bp, Artificial
  Probe
aactgcaccaatgaactgaatactt

SEQ ID NO: 157456 - DNA, 25 bp, Artificial
  Probe
gatgaagatagcagactttggactc

SEQ ID NO: 157457 - DNA, 25 bp, Artificial
  Probe
cgccagagatatcaacaacatagac

SEQ ID NO: 157458 - DNA, 25 bp, Artificial
  Probe
caactgcaccaatgaactgaatact

SEQ ID NO: 157459 - DNA, 25 bp, Artificial
  Probe
tcgccagagatatcaacaacataga

SEQ ID NO: 157460 - DNA, 25 bp, Artificial
  Probe
gtgatgaagatagcagactttggac

SEQ ID NO: 157461 - DNA, 25 bp, Artificial
  Probe
tgatgaagatagcagactttggact

SEQ ID NO: 157462 - DNA, 25 bp, Artificial
  Probe
actgcaccaatgaactgaatacttg

SEQ ID NO: 157463 - DNA, 25 bp, Artificial
  Probe
ctcgccagagatatcaacaacatag

SEQ ID NO: 157464 - DNA, 25 bp, Artificial
  Probe
actcgccagagatatcaacaacata

SEQ ID NO: 157465 - DNA, 25 bp, Artificial
  Probe
ccaactgcaccaatgaactgaatac

SEQ ID NO: 157466 - DNA, 25 bp, Artificial
  Probe
atgaagatagcagactttggactcg

SEQ ID NO: 157467 - DNA, 25 bp, Artificial
  Probe
ccagagatatcaacaacatagacta

SEQ ID NO: 157468 - DNA, 25 bp, Artificial
  Probe
cgtgatgaagatagcagactttgga

SEQ ID NO: 157469 - DNA, 25 bp, Artificial
  Probe
accaactgcaccaatgaactgaata

SEQ ID NO: 157470 - DNA, 25 bp, Artificial
  Probe
gactcgccagagatatcaacaacat

SEQ ID NO: 157471 - DNA, 25 bp, Artificial
  Probe
ctcagtatccacacataaacggcag

SEQ ID NO: 157472 - DNA, 25 bp, Artificial
  Probe
ccaatgaactgaatacttggacctc

SEQ ID NO: 157473 - DNA, 25 bp, Artificial
  Probe
tcagtatccacacataaacggcagt

SEQ ID NO: 157474 - DNA, 25 bp, Artificial
  Probe
caccaactgcaccaatgaactgaat

SEQ ID NO: 157475 - DNA, 25 bp, Artificial
  Probe
taaacggcagtgttaaaacatgaat

SEQ ID NO: 157476 - DNA, 25 bp, Artificial
  Probe
ataaacggcagtgttaaaacatgaa

SEQ ID NO: 157477 - DNA, 25 bp, Artificial
  Probe
accaatgaactgaatacttggacct

SEQ ID NO: 157478 - DNA, 25 bp, Artificial
  Probe
caccaatgaactgaatacttggacc

SEQ ID NO: 157479 - DNA, 25 bp, Artificial
  Probe
cataaacggcagtgttaaaacatga

SEQ ID NO: 157480 - DNA, 25 bp, Artificial
  Probe
tgaactgaatacttggacctcaccc

SEQ ID NO: 157481 - DNA, 25 bp, Artificial
  Probe
aaacggcagtgttaaaacatgaatt

SEQ ID NO: 157482 - DNA, 25 bp, Artificial
  Probe
acataaacggcagtgttaaaacatg

SEQ ID NO: 157483 - DNA, 25 bp, Artificial
  Probe
cagagatatcaacaacatagactat

SEQ ID NO: 157484 - DNA, 25 bp, Artificial
  Probe
cacataaacggcagtgttaaaacat

SEQ ID NO: 157485 - DNA, 25 bp, Artificial
  Probe
gcaccaatgaactgaatacttggac

SEQ ID NO: 157486 - DNA, 25 bp, Artificial
  Probe
ttggactcgccagagatatcaacaa

SEQ ID NO: 157487 - DNA, 25 bp, Artificial
  Probe
cagtatccacacataaacggcagtg

SEQ ID NO: 157488 - DNA, 25 bp, Artificial
  Probe
cctcagtatccacacataaacggca

SEQ ID NO: 157489 - DNA, 25 bp, Artificial
  Probe
tgaagatagcagactttggactcgc

SEQ ID NO: 157490 - DNA, 25 bp, Artificial
  Probe
ggactcgccagagatatcaacaaca

SEQ ID NO: 157491 - DNA, 25 bp, Artificial
  Probe
aactgaatacttggacctcacccag

SEQ ID NO: 157492 - DNA, 25 bp, Artificial
  Probe
gaactgaatacttggacctcaccca

SEQ ID NO: 157493 - DNA, 25 bp, Artificial
  Probe
cagactttggactcgccagagatat

SEQ ID NO: 157494 - DNA, 25 bp, Artificial
  Probe
ctgcaccaatgaactgaatacttgg

SEQ ID NO: 157495 - DNA, 25 bp, Artificial
  Probe
tgcaccaatgaactgaatacttgga

SEQ ID NO: 157496 - DNA, 25 bp, Artificial
  Probe
tagagccactaatcttccaaagaaa

SEQ ID NO: 157497 - DNA, 25 bp, Artificial
  Probe
ttagagccactaatcttccaaagaa

SEQ ID NO: 157498 - DNA, 25 bp, Artificial
  Probe
tttagagccactaatcttccaaaga

SEQ ID NO: 157499 - DNA, 25 bp, Artificial
  Probe
agccactaatcttccaaagaaagag

SEQ ID NO: 157500 - DNA, 25 bp, Artificial
  Probe
gagccactaatcttccaaagaaaga

SEQ ID NO: 157501 - DNA, 25 bp, Artificial
  Probe
agagccactaatcttccaaagaaag

SEQ ID NO: 157502 - DNA, 25 bp, Artificial
  Probe
actaatcttccaaagaaagagctga

SEQ ID NO: 157503 - DNA, 25 bp, Artificial
  Probe
cactaatcttccaaagaaagagctg

SEQ ID NO: 157504 - DNA, 25 bp, Artificial
  Probe
ccactaatcttccaaagaaagagct

SEQ ID NO: 157505 - DNA, 25 bp, Artificial
  Probe
gccactaatcttccaaagaaagagc

SEQ ID NO: 157506 - DNA, 25 bp, Artificial
  Probe
ctaatcttccaaagaaagagctgaa

SEQ ID NO: 157507 - DNA, 25 bp, Artificial
  Probe
gtctgtttgaggacaccaacctatg

SEQ ID NO: 157508 - DNA, 25 bp, Artificial
  Probe
ttttagagccactaatcttccaaag

SEQ ID NO: 157509 - DNA, 25 bp, Artificial
  Probe
taatcttccaaagaaagagctgaag

SEQ ID NO: 157510 - DNA, 25 bp, Artificial
  Probe
aatcttccaaagaaagagctgaagc

SEQ ID NO: 157511 - DNA, 25 bp, Artificial
  Probe
ctagtgggttttaatatgtcagcta

SEQ ID NO: 157512 - DNA, 25 bp, Artificial
  Probe
atcttccaaagaaagagctgaagct

SEQ ID NO: 157513 - DNA, 25 bp, Artificial
  Probe
ggtctgtttgaggacaccaacctat

SEQ ID NO: 157514 - DNA, 25 bp, Artificial
  Probe
actagtgggttttaatatgtcagct

SEQ ID NO: 157515 - DNA, 25 bp, Artificial
  Probe
gctttcgtaactagtgggttttaat

SEQ ID NO: 157516 - DNA, 25 bp, Artificial
  Probe
ctgtgatccacgcaaccactttaaa

SEQ ID NO: 157517 - DNA, 25 bp, Artificial
  Probe
aactagtgggttttaatatgtcagc

SEQ ID NO: 157518 - DNA, 25 bp, Artificial
  Probe
ggctttcgtaactagtgggttttaa

SEQ ID NO: 157519 - DNA, 25 bp, Artificial
  Probe
tctgtttgaggacaccaacctatgc

SEQ ID NO: 157520 - DNA, 25 bp, Artificial
  Probe
ctgaagctggctttcgtaactagtg

SEQ ID NO: 157521 - DNA, 25 bp, Artificial
  Probe
tcttccaaagaaagagctgaagctg

SEQ ID NO: 157522 - DNA, 25 bp, Artificial
  Probe
tctgtgatccacgcaaccactttaa

SEQ ID NO: 157523 - DNA, 25 bp, Artificial
  Probe
ttctgtgatccacgcaaccacttta

SEQ ID NO: 157524 - DNA, 25 bp, Artificial
  Probe
ctaccttgtgggtctgtttgaggac

SEQ ID NO: 157525 - DNA, 25 bp, Artificial
  Probe
tggctttcgtaactagtgggtttta

SEQ ID NO: 157526 - DNA, 25 bp, Artificial
  Probe
gtgatccacgcaaccactttaaaag

SEQ ID NO: 157527 - DNA, 25 bp, Artificial
  Probe
tcgtaactagtgggttttaatatgt

SEQ ID NO: 157528 - DNA, 25 bp, Artificial
  Probe
cgtaactagtgggttttaatatgtc

SEQ ID NO: 157529 - DNA, 25 bp, Artificial
  Probe
caaagaaagagctgaagctggcttt

SEQ ID NO: 157530 - DNA, 25 bp, Artificial
  Probe
tgatccacgcaaccactttaaaagg

SEQ ID NO: 157531 - DNA, 25 bp, Artificial
  Probe
cttccaaagaaagagctgaagctgg

SEQ ID NO: 157532 - DNA, 25 bp, Artificial
  Probe
tgtgatccacgcaaccactttaaaa

SEQ ID NO: 157533 - DNA, 25 bp, Artificial
  Probe
ttcgtaactagtgggttttaatatg

SEQ ID NO: 157534 - DNA, 25 bp, Artificial
  Probe
ctttcgtaactagtgggttttaata

SEQ ID NO: 157535 - DNA, 25 bp, Artificial
  Probe
ctggctttcgtaactagtgggtttt

SEQ ID NO: 157536 - DNA, 25 bp, Artificial
  Probe
tgaagctggctttcgtaactagtgg

SEQ ID NO: 157537 - DNA, 25 bp, Artificial
  Probe
gtaactagtgggttttaatatgtca

SEQ ID NO: 157538 - DNA, 25 bp, Artificial
  Probe
agctgaagctggctttcgtaactag

SEQ ID NO: 157539 - DNA, 25 bp, Artificial
  Probe
gagctgaagctggctttcgtaacta

SEQ ID NO: 157540 - DNA, 25 bp, Artificial
  Probe
cacgcaaccactttaaaaggctctt

SEQ ID NO: 157541 - DNA, 25 bp, Artificial
  Probe
atatagtgagtgaatggtgatgtgg

SEQ ID NO: 157542 - DNA, 25 bp, Artificial
  Probe
tatagtgagtgaatggtgatgtgga

SEQ ID NO: 157543 - DNA, 25 bp, Artificial
  Probe
atagtgagtgaatggtgatgtggaa

SEQ ID NO: 157544 - DNA, 25 bp, Artificial
  Probe
gaagcactcacagagacaagttatt

SEQ ID NO: 157545 - DNA, 25 bp, Artificial
  Probe
tatatagtgagtgaatggtgatgtg

SEQ ID NO: 157546 - DNA, 25 bp, Artificial
  Probe
tgaagcactcacagagacaagttat

SEQ ID NO: 157547 - DNA, 25 bp, Artificial
  Probe
cattcatccagttgacttccagaag

SEQ ID NO: 157548 - DNA, 25 bp, Artificial
  Probe
ttctcttcttccattgcctttctaa

SEQ ID NO: 157549 - DNA, 25 bp, Artificial
  Probe
cttctcttcttccattgcctttcta

SEQ ID NO: 157550 - DNA, 25 bp, Artificial
  Probe
tgtgagggaaatgatagaagtcttt

SEQ ID NO: 157551 - DNA, 25 bp, Artificial
  Probe
tctgtggtaagtctactgtttgttt

SEQ ID NO: 157552 - DNA, 25 bp, Artificial
  Probe
ttctgtggtaagtctactgtttgtt

SEQ ID NO: 157553 - DNA, 25 bp, Artificial
  Probe
tttctgtggtaagtctactgtttgt

SEQ ID NO: 157554 - DNA, 25 bp, Artificial
  Probe
atgtgagggaaatgatagaagtctt

SEQ ID NO: 157555 - DNA, 25 bp, Artificial
  Probe
ctatgaagcacctgaaattaactgg

SEQ ID NO: 157556 - DNA, 25 bp, Artificial
  Probe
ttaaacttctgggcttctcttcttc

SEQ ID NO: 157557 - DNA, 25 bp, Artificial
  Probe
aatggtgatgtggaaagagttgtag

SEQ ID NO: 157558 - DNA, 25 bp, Artificial
  Probe
gaatggtgatgtggaaagagttgta

SEQ ID NO: 157559 - DNA, 25 bp, Artificial
  Probe
tctcttcttccattgcctttctaag

SEQ ID NO: 157560 - DNA, 25 bp, Artificial
  Probe
atagactctcaaggtttcttctgtg

SEQ ID NO: 157561 - DNA, 25 bp, Artificial
  Probe
catagactctcaaggtttcttctgt

SEQ ID NO: 157562 - DNA, 25 bp, Artificial
  Probe
tcatagactctcaaggtttcttctg

SEQ ID NO: 157563 - DNA, 25 bp, Artificial
  Probe
cttcatattaccctggaaagagagc

SEQ ID NO: 157564 - DNA, 25 bp, Artificial
  Probe
gcttcatattaccctggaaagagag

SEQ ID NO: 157565 - DNA, 25 bp, Artificial
  Probe
tctatgaagcacctgaaattaactg

SEQ ID NO: 157566 - DNA, 25 bp, Artificial
  Probe
atttctgtggtaagtctactgtttg

SEQ ID NO: 157567 - DNA, 25 bp, Artificial
  Probe
ttatatagtgagtgaatggtgatgt

SEQ ID NO: 157568 - DNA, 25 bp, Artificial
  Probe
caatttctgtggtaagtctactgtt

SEQ ID NO: 157569 - DNA, 25 bp, Artificial
  Probe
gcaatttctgtggtaagtctactgt

SEQ ID NO: 157570 - DNA, 25 bp, Artificial
  Probe
ctgtggtaagtctactgtttgttta

SEQ ID NO: 157571 - DNA, 25 bp, Artificial
  Probe
tgcttcatattaccctggaaagaga

SEQ ID NO: 157572 - DNA, 25 bp, Artificial
  Probe
gtgcttcatattaccctggaaagag

SEQ ID NO: 157573 - DNA, 25 bp, Artificial
  Probe
atcatagactctcaaggtttcttct

SEQ ID NO: 157574 - DNA, 25 bp, Artificial
  Probe
tagactctcaaggtttcttctgtga

SEQ ID NO: 157575 - DNA, 25 bp, Artificial
  Probe
aagcactcacagagacaagttattt

SEQ ID NO: 157576 - DNA, 25 bp, Artificial
  Probe
tatgaagcacctgaaattaactggc

SEQ ID NO: 157577 - DNA, 25 bp, Artificial
  Probe
gggaaatgatagaagtctttaaggt

SEQ ID NO: 157578 - DNA, 25 bp, Artificial
  Probe
tagtgagtgaatggtgatgtggaaa

SEQ ID NO: 157579 - DNA, 25 bp, Artificial
  Probe
aatttctgtggtaagtctactgttt

SEQ ID NO: 157580 - DNA, 25 bp, Artificial
  Probe
cagcagatgagtaatatatgtcttg

SEQ ID NO: 157581 - DNA, 25 bp, Artificial
  Probe
agcactcacagagacaagttatttc

SEQ ID NO: 157582 - DNA, 25 bp, Artificial
  Probe
ttctatgaagcacctgaaattaact

SEQ ID NO: 157583 - DNA, 25 bp, Artificial
  Probe
taaagaaagattacagcagatgagt

SEQ ID NO: 157584 - DNA, 25 bp, Artificial
  Probe
catgtgagggaaatgatagaagtct

SEQ ID NO: 157585 - DNA, 25 bp, Artificial
  Probe
aaagaaagattacagcagatgagta

SEQ ID NO: 157586 - DNA, 25 bp, Artificial
  Probe
agatcaagaaaactgctaacaggat

SEQ ID NO: 157587 - DNA, 25 bp, Artificial
  Probe
gagatcaagaaaactgctaacagga

SEQ ID NO: 157588 - DNA, 25 bp, Artificial
  Probe
gatcaagaaaactgctaacaggatc

SEQ ID NO: 157589 - DNA, 25 bp, Artificial
  Probe
atcaagaaaactgctaacaggatcc

SEQ ID NO: 157590 - DNA, 25 bp, Artificial
  Probe
tcaagaaaactgctaacaggatccg

SEQ ID NO: 157591 - DNA, 25 bp, Artificial
  Probe
caagaaaactgctaacaggatccgg

SEQ ID NO: 157592 - DNA, 25 bp, Artificial
  Probe
aagaaaactgctaacaggatccggg

SEQ ID NO: 157593 - DNA, 25 bp, Artificial
  Probe
attactactggtggtggttacactt

SEQ ID NO: 157594 - DNA, 25 bp, Artificial
  Probe
tattactgtgcaagaatctacggag

SEQ ID NO: 157595 - DNA, 25 bp, Artificial
  Probe
ttattactgtgcaagaatctacgga

SEQ ID NO: 157596 - DNA, 25 bp, Artificial
  Probe
cttattactgtgcaagaatctacgg

SEQ ID NO: 157597 - DNA, 25 bp, Artificial
  Probe
cattactactggtggtggttacact

SEQ ID NO: 157598 - DNA, 25 bp, Artificial
  Probe
acttattactgtgcaagaatctacg

SEQ ID NO: 157599 - DNA, 25 bp, Artificial
  Probe
atccattactactggtggtggttac

SEQ ID NO: 157600 - DNA, 25 bp, Artificial
  Probe
catccattactactggtggtggtta

SEQ ID NO: 157601 - DNA, 25 bp, Artificial
  Probe
gccacttattactgtgcaagaatct

SEQ ID NO: 157602 - DNA, 25 bp, Artificial
  Probe
attactgtgcaagaatctacggagg

SEQ ID NO: 157603 - DNA, 25 bp, Artificial
  Probe
ccacttattactgtgcaagaatcta

SEQ ID NO: 157604 - DNA, 25 bp, Artificial
  Probe
tactggtggtggttacactttctat

SEQ ID NO: 157605 - DNA, 25 bp, Artificial
  Probe
ccattactactggtggtggttacac

SEQ ID NO: 157606 - DNA, 25 bp, Artificial
  Probe
tccattactactggtggtggttaca

SEQ ID NO: 157607 - DNA, 25 bp, Artificial
  Probe
ttactactggtggtggttacacttt

SEQ ID NO: 157608 - DNA, 25 bp, Artificial
  Probe
ctactggtggtggttacactttcta

SEQ ID NO: 157609 - DNA, 25 bp, Artificial
  Probe
gagggtcccactactttgattactg

SEQ ID NO: 157610 - DNA, 25 bp, Artificial
  Probe
cacttattactgtgcaagaatctac

SEQ ID NO: 157611 - DNA, 25 bp, Artificial
  Probe
tactactggtggtggttacactttc

SEQ ID NO: 157612 - DNA, 25 bp, Artificial
  Probe
actggtggtggttacactttctatc

SEQ ID NO: 157613 - DNA, 25 bp, Artificial
  Probe
ggccacttattactgtgcaagaatc

SEQ ID NO: 157614 - DNA, 25 bp, Artificial
  Probe
ctggtggtggttacactttctatcg

SEQ ID NO: 157615 - DNA, 25 bp, Artificial
  Probe
actactggtggtggttacactttct

SEQ ID NO: 157616 - DNA, 25 bp, Artificial
  Probe
ttcactatctccagagataatgcaa

SEQ ID NO: 157617 - DNA, 25 bp, Artificial
  Probe
ccgattcactatctccagagataat

SEQ ID NO: 157618 - DNA, 25 bp, Artificial
  Probe
attcactatctccagagataatgca

SEQ ID NO: 157619 - DNA, 25 bp, Artificial
  Probe
gatcgcatccattactactggtggt

SEQ ID NO: 157620 - DNA, 25 bp, Artificial
  Probe
gattcactatctccagagataatgc

SEQ ID NO: 157621 - DNA, 25 bp, Artificial
  Probe
ggagggtcccactactttgattact

SEQ ID NO: 157622 - DNA, 25 bp, Artificial
  Probe
cgattcactatctccagagataatg

SEQ ID NO: 157623 - DNA, 25 bp, Artificial
  Probe
gccgattcactatctccagagataa

SEQ ID NO: 157624 - DNA, 25 bp, Artificial
  Probe
atcgcatccattactactggtggtg

SEQ ID NO: 157625 - DNA, 25 bp, Artificial
  Probe
aatacctgcaaatggacagtctgag

SEQ ID NO: 157626 - DNA, 25 bp, Artificial
  Probe
gcatccattactactggtggtggtt

SEQ ID NO: 157627 - DNA, 25 bp, Artificial
  Probe
agggtcccactactttgattactgg

SEQ ID NO: 157628 - DNA, 25 bp, Artificial
  Probe
caatacctgcaaatggacagtctga

SEQ ID NO: 157629 - DNA, 25 bp, Artificial
  Probe
cggccacttattactgtgcaagaat

SEQ ID NO: 157630 - DNA, 25 bp, Artificial
  Probe
ttactgtgcaagaatctacggaggg

SEQ ID NO: 157631 - DNA, 25 bp, Artificial
  Probe
tcactatctccagagataatgcaaa

SEQ ID NO: 157632 - DNA, 25 bp, Artificial
  Probe
caaatggacagtctgaggtctgagg

SEQ ID NO: 157633 - DNA, 25 bp, Artificial
  Probe
aaactcccaatacctgcaaatggac

SEQ ID NO: 157634 - DNA, 25 bp, Artificial
  Probe
aaatggacagtctgaggtctgagga

SEQ ID NO: 157635 - DNA, 25 bp, Artificial
  Probe
cggagggtcccactactttgattac

SEQ ID NO: 157636 - DNA, 25 bp, Artificial
  Probe
aatctacggagggtcccactacttt

SEQ ID NO: 157637 - DNA, 25 bp, Artificial
  Probe
tggtggtggttacactttctatcgc

SEQ ID NO: 157638 - DNA, 25 bp, Artificial
  Probe
tcttagcctaatggatactgtctct

SEQ ID NO: 157639 - DNA, 25 bp, Artificial
  Probe
cttagcctaatggatactgtctctc

SEQ ID NO: 157640 - DNA, 25 bp, Artificial
  Probe
aataggagagtgagacatctgagac

SEQ ID NO: 157641 - DNA, 25 bp, Artificial
  Probe
cttagtgttgtggtgacctcttagt

SEQ ID NO: 157642 - DNA, 25 bp, Artificial
  Probe
ttagtgttgtggtgacctcttagtg

SEQ ID NO: 157643 - DNA, 25 bp, Artificial
  Probe
ttagcctaatggatactgtctctcc

SEQ ID NO: 157644 - DNA, 25 bp, Artificial
  Probe
ccttagtgttgtggtgacctcttag

SEQ ID NO: 157645 - DNA, 25 bp, Artificial
  Probe
catctctttgtgctttgtatctgtc

SEQ ID NO: 157646 - DNA, 25 bp, Artificial
  Probe
atctctttgtgctttgtatctgtca

SEQ ID NO: 157647 - DNA, 25 bp, Artificial
  Probe
ataggagagtgagacatctgagacg

SEQ ID NO: 157648 - DNA, 25 bp, Artificial
  Probe
attatgtttgtgccactgatttagc

SEQ ID NO: 157649 - DNA, 25 bp, Artificial
  Probe
ggaaattatgtttgtgccactgatt

SEQ ID NO: 157650 - DNA, 25 bp, Artificial
  Probe
aaataggagagtgagacatctgaga

SEQ ID NO: 157651 - DNA, 25 bp, Artificial
  Probe
caaataggagagtgagacatctgag

SEQ ID NO: 157652 - DNA, 25 bp, Artificial
  Probe
aaaggaaattatgtttgtgccactg

SEQ ID NO: 157653 - DNA, 25 bp, Artificial
  Probe
ccatctctttgtgctttgtatctgt

SEQ ID NO: 157654 - DNA, 25 bp, Artificial
  Probe
tctctttgtgctttgtatctgtcag

SEQ ID NO: 157655 - DNA, 25 bp, Artificial
  Probe
tgaccaaataggagagtgagacatc

SEQ ID NO: 157656 - DNA, 25 bp, Artificial
  Probe
gatgtgaccaaataggagagtgaga

SEQ ID NO: 157657 - DNA, 25 bp, Artificial
  Probe
ctctttgtgctttgtatctgtcagt

SEQ ID NO: 157658 - DNA, 25 bp, Artificial
  Probe
aggaaattatgtttgtgccactgat

SEQ ID NO: 157659 - DNA, 25 bp, Artificial
  Probe
tagtgttgtggtgacctcttagtgt

SEQ ID NO: 157660 - DNA, 25 bp, Artificial
  Probe
aaggaaattatgtttgtgccactga

SEQ ID NO: 157661 - DNA, 25 bp, Artificial
  Probe
aaacaacagggttctaggaagttag

SEQ ID NO: 157662 - DNA, 25 bp, Artificial
  Probe
ccaaataggagagtgagacatctga

SEQ ID NO: 157663 - DNA, 25 bp, Artificial
  Probe
gaccaaataggagagtgagacatct

SEQ ID NO: 157664 - DNA, 25 bp, Artificial
  Probe
caaacaacagggttctaggaagtta

SEQ ID NO: 157665 - DNA, 25 bp, Artificial
  Probe
tctttgtgctttgtatctgtcagtg

SEQ ID NO: 157666 - DNA, 25 bp, Artificial
  Probe
gtgaccaaataggagagtgagacat

SEQ ID NO: 157667 - DNA, 25 bp, Artificial
  Probe
atgtgaccaaataggagagtgagac

SEQ ID NO: 157668 - DNA, 25 bp, Artificial
  Probe
ctcagtgctctgtaccaagtcttag

SEQ ID NO: 157669 - DNA, 25 bp, Artificial
  Probe
aattatgtttgtgccactgatttag

SEQ ID NO: 157670 - DNA, 25 bp, Artificial
  Probe
accaaataggagagtgagacatctg

SEQ ID NO: 157671 - DNA, 25 bp, Artificial
  Probe
gaaattatgtttgtgccactgattt

SEQ ID NO: 157672 - DNA, 25 bp, Artificial
  Probe
ttatgtttgtgccactgatttagcc

SEQ ID NO: 157673 - DNA, 25 bp, Artificial
  Probe
gtcatctcattgctctttcctgaag

SEQ ID NO: 157674 - DNA, 25 bp, Artificial
  Probe
gtgttgtggtgacctcttagtgttc

SEQ ID NO: 157675 - DNA, 25 bp, Artificial
  Probe
ctgtctctaaagtgtgccatctctt

SEQ ID NO: 157676 - DNA, 25 bp, Artificial
  Probe
gccatctctttgtgctttgtatctg

SEQ ID NO: 157677 - DNA, 25 bp, Artificial
  Probe
agtcatctcattgctctttcctgaa

SEQ ID NO: 157678 - DNA, 25 bp, Artificial
  Probe
aagtcatctcattgctctttcctga

SEQ ID NO: 157679 - DNA, 25 bp, Artificial
  Probe
gtaccaagtcttagccaaacaacag

SEQ ID NO: 157680 - DNA, 25 bp, Artificial
  Probe
ctggcgaaatcttcaatagcttatc

SEQ ID NO: 157681 - DNA, 25 bp, Artificial
  Probe
tggcgaaatcttcaatagcttatct

SEQ ID NO: 157682 - DNA, 25 bp, Artificial
  Probe
ggcgaaatcttcaatagcttatctt

SEQ ID NO: 157683 - DNA, 25 bp, Artificial
  Probe
ttctgattctccttctgttaagtcg

SEQ ID NO: 157684 - DNA, 25 bp, Artificial
  Probe
atcatattatggctattggtcaggc

SEQ ID NO: 157685 - DNA, 25 bp, Artificial
  Probe
agactaattctgattctccttctgt

SEQ ID NO: 157686 - DNA, 25 bp, Artificial
  Probe
gaataatgttggtgtactcggctat

SEQ ID NO: 157687 - DNA, 25 bp, Artificial
  Probe
aataatgttggtgtactcggctatg

SEQ ID NO: 157688 - DNA, 25 bp, Artificial
  Probe
ttagaataatgttggtgtactcggc

SEQ ID NO: 157689 - DNA, 25 bp, Artificial
  Probe
gactaattctgattctccttctgtt

SEQ ID NO: 157690 - DNA, 25 bp, Artificial
  Probe
attctgattctccttctgttaagtc

SEQ ID NO: 157691 - DNA, 25 bp, Artificial
  Probe
ttggtgtactcggctatgaagaata

SEQ ID NO: 157692 - DNA, 25 bp, Artificial
  Probe
agaataatgttggtgtactcggcta

SEQ ID NO: 157693 - DNA, 25 bp, Artificial
  Probe
tagaataatgttggtgtactcggct

SEQ ID NO: 157694 - DNA, 25 bp, Artificial
  Probe
ataatgttggtgtactcggctatga

SEQ ID NO: 157695 - DNA, 25 bp, Artificial
  Probe
attagaataatgttggtgtactcgg

SEQ ID NO: 157696 - DNA, 25 bp, Artificial
  Probe
taatgttggtgtactcggctatgaa

SEQ ID NO: 157697 - DNA, 25 bp, Artificial
  Probe
aattctgattctccttctgttaagt

SEQ ID NO: 157698 - DNA, 25 bp, Artificial
  Probe
tatcatattatggctattggtcagg

SEQ ID NO: 157699 - DNA, 25 bp, Artificial
  Probe
ctgattctccttctgttaagtcgaa

SEQ ID NO: 157700 - DNA, 25 bp, Artificial
  Probe
aagaccattgatgacttggaagatg

SEQ ID NO: 157701 - DNA, 25 bp, Artificial
  Probe
tcatattatggctattggtcaggcg

SEQ ID NO: 157702 - DNA, 25 bp, Artificial
  Probe
tctgattctccttctgttaagtcga

SEQ ID NO: 157703 - DNA, 25 bp, Artificial
  Probe
tggtgtactcggctatgaagaatag

SEQ ID NO: 157704 - DNA, 25 bp, Artificial
  Probe
tgtatcatattatggctattggtca

SEQ ID NO: 157705 - DNA, 25 bp, Artificial
  Probe
actaattctgattctccttctgtta

SEQ ID NO: 157706 - DNA, 25 bp, Artificial
  Probe
gaccattgatgacttggaagatgag

SEQ ID NO: 157707 - DNA, 25 bp, Artificial
  Probe
gttggtgtactcggctatgaagaat

SEQ ID NO: 157708 - DNA, 25 bp, Artificial
  Probe
aaagcctgagactaattctgattct

SEQ ID NO: 157709 - DNA, 25 bp, Artificial
  Probe
agaccattgatgacttggaagatga

SEQ ID NO: 157710 - DNA, 25 bp, Artificial
  Probe
ttgatgttagggcgtttattagaat

SEQ ID NO: 157711 - DNA, 25 bp, Artificial
  Probe
attgatgttagggcgtttattagaa

SEQ ID NO: 157712 - DNA, 25 bp, Artificial
  Probe
cgttaaagcctgagactaattctga

SEQ ID NO: 157713 - DNA, 25 bp, Artificial
  Probe
atgacctctatataaactgacaccg

SEQ ID NO: 157714 - DNA, 25 bp, Artificial
  Probe
ttaatagtcagatatgttcttgtgc

SEQ ID NO: 157715 - DNA, 25 bp, Artificial
  Probe
aatgttggtgtactcggctatgaag

SEQ ID NO: 157716 - DNA, 25 bp, Artificial
  Probe
aattgatgttagggcgtttattaga

SEQ ID NO: 157717 - DNA, 25 bp, Artificial
  Probe
ggtgtactcggctatgaagaatagg

SEQ ID NO: 157718 - DNA, 25 bp, Artificial
  Probe
gtatcatattatggctattggtcag

SEQ ID NO: 157719 - DNA, 25 bp, Artificial
  Probe
tgacctctatataaactgacaccgt

SEQ ID NO: 157720 - DNA, 25 bp, Artificial
  Probe
gggcgtttattagaataatgttggt

SEQ ID NO: 157721 - DNA, 25 bp, Artificial
  Probe
gacctctatataaactgacaccgtt

SEQ ID NO: 157722 - DNA, 25 bp, Artificial
  Probe
ttctgctagggttgaaatgtatcat

SEQ ID NO: 157723 - DNA, 25 bp, Artificial
  Probe
agggcgtttattagaataatgttgg

SEQ ID NO: 157724 - DNA, 25 bp, Artificial
  Probe
gttaaagcctgagactaattctgat

SEQ ID NO: 157725 - DNA, 25 bp, Artificial
  Probe
tctgctagggttgaaatgtatcata

SEQ ID NO: 157726 - DNA, 25 bp, Artificial
  Probe
cctcaatgacatgacctctatataa

SEQ ID NO: 157727 - DNA, 25 bp, Artificial
  Probe
ggcgtttattagaataatgttggtg

SEQ ID NO: 157728 - DNA, 25 bp, Artificial
  Probe
ataagaatatccaccagtcagtgag

SEQ ID NO: 157729 - DNA, 25 bp, Artificial
  Probe
gataagaatatccaccagtcagtga

SEQ ID NO: 157730 - DNA, 25 bp, Artificial
  Probe
taagaatatccaccagtcagtgagt

SEQ ID NO: 157731 - DNA, 25 bp, Artificial
  Probe
gagacacagctctggataagaatat

SEQ ID NO: 157732 - DNA, 25 bp, Artificial
  Probe
agacacagctctggataagaatatc

SEQ ID NO: 157733 - DNA, 25 bp, Artificial
  Probe
aagaatatccaccagtcagtgagtg

SEQ ID NO: 157734 - DNA, 25 bp, Artificial
  Probe
ggagacacagctctggataagaata

SEQ ID NO: 157735 - DNA, 25 bp, Artificial
  Probe
gaatatccaccagtcagtgagtgag

SEQ ID NO: 157736 - DNA, 25 bp, Artificial
  Probe
agaatatccaccagtcagtgagtga

SEQ ID NO: 157737 - DNA, 25 bp, Artificial
  Probe
ttcttgtaataaagggaagctctgt

SEQ ID NO: 157738 - DNA, 25 bp, Artificial
  Probe
tcttgtaataaagggaagctctgtg

SEQ ID NO: 157739 - DNA, 25 bp, Artificial
  Probe
aggagacacagctctggataagaat

SEQ ID NO: 157740 - DNA, 25 bp, Artificial
  Probe
tcatacgtcatttgatggagaaaga

SEQ ID NO: 157741 - DNA, 25 bp, Artificial
  Probe
atttgatggagaaagacccagagaa

SEQ ID NO: 157742 - DNA, 25 bp, Artificial
  Probe
ttcatacgtcatttgatggagaaag

SEQ ID NO: 157743 - DNA, 25 bp, Artificial
  Probe
gatttcatacgtcatttgatggaga

SEQ ID NO: 157744 - DNA, 25 bp, Artificial
  Probe
agatttcatacgtcatttgatggag

SEQ ID NO: 157745 - DNA, 25 bp, Artificial
  Probe
cttgtaataaagggaagctctgtgc

SEQ ID NO: 157746 - DNA, 25 bp, Artificial
  Probe
atttcatacgtcatttgatggagaa

SEQ ID NO: 157747 - DNA, 25 bp, Artificial
  Probe
aagatttcatacgtcatttgatgga

SEQ ID NO: 157748 - DNA, 25 bp, Artificial
  Probe
catacgtcatttgatggagaaagac

SEQ ID NO: 157749 - DNA, 25 bp, Artificial
  Probe
tttgaccgaattgtggagaaaggag

SEQ ID NO: 157750 - DNA, 25 bp, Artificial
  Probe
tttgatggagaaagacccagagaag

SEQ ID NO: 157751 - DNA, 25 bp, Artificial
  Probe
catttgatggagaaagacccagaga

SEQ ID NO: 157752 - DNA, 25 bp, Artificial
  Probe
tcatttgatggagaaagacccagag

SEQ ID NO: 157753 - DNA, 25 bp, Artificial
  Probe
atacgtcatttgatggagaaagacc

SEQ ID NO: 157754 - DNA, 25 bp, Artificial
  Probe
aaagatttcatacgtcatttgatgg

SEQ ID NO: 157755 - DNA, 25 bp, Artificial
  Probe
gtcatttgatggagaaagacccaga

SEQ ID NO: 157756 - DNA, 25 bp, Artificial
  Probe
aatatccaccagtcagtgagtgagc

SEQ ID NO: 157757 - DNA, 25 bp, Artificial
  Probe
caggagacacagctctggataagaa

SEQ ID NO: 157758 - DNA, 25 bp, Artificial
  Probe
ttgatggagaaagacccagagaaga

SEQ ID NO: 157759 - DNA, 25 bp, Artificial
  Probe
ttgtaataaagggaagctctgtgcc

SEQ ID NO: 157760 - DNA, 25 bp, Artificial
  Probe
tttcatacgtcatttgatggagaaa

SEQ ID NO: 157761 - DNA, 25 bp, Artificial
  Probe
gaattgtggagaaaggaggctacac

SEQ ID NO: 157762 - DNA, 25 bp, Artificial
  Probe
tgatggagaaagacccagagaagag

SEQ ID NO: 157763 - DNA, 25 bp, Artificial
  Probe
tacgtcatttgatggagaaagaccc

SEQ ID NO: 157764 - DNA, 25 bp, Artificial
  Probe
cttcttgtaataaagggaagctctg

SEQ ID NO: 157765 - DNA, 25 bp, Artificial
  Probe
gagaaagacccagagaagaggttca

SEQ ID NO: 157766 - DNA, 25 bp, Artificial
  Probe
cgtcatttgatggagaaagacccag

SEQ ID NO: 157767 - DNA, 25 bp, Artificial
  Probe
gttccttcttgtaataaagggaagc

SEQ ID NO: 157768 - DNA, 25 bp, Artificial
  Probe
catggactgaacatcaaggagtcag

SEQ ID NO: 157769 - DNA, 25 bp, Artificial
  Probe
atatccaccagtcagtgagtgagca

SEQ ID NO: 157770 - DNA, 25 bp, Artificial
  Probe
gatggagaaagacccagagaagagg

SEQ ID NO: 157771 - DNA, 25 bp, Artificial
  Probe
tgttccttcttgtaataaagggaag

SEQ ID NO: 157772 - DNA, 25 bp, Artificial
  Probe
ggataagaatatccaccagtcagtg

SEQ ID NO: 157773 - DNA, 25 bp, Artificial
  Probe
ggttacaaggctgagactatgaatg

SEQ ID NO: 157774 - DNA, 25 bp, Artificial
  Probe
tgtatgtaggcttagtctagtctct

SEQ ID NO: 157775 - DNA, 25 bp, Artificial
  Probe
ctgtatgtaggcttagtctagtctc

SEQ ID NO: 157776 - DNA, 25 bp, Artificial
  Probe
ttgagagagagagagagagagtgtt

SEQ ID NO: 157777 - DNA, 25 bp, Artificial
  Probe
actgtatgtaggcttagtctagtct

SEQ ID NO: 157778 - DNA, 25 bp, Artificial
  Probe
acagaagtacagaacctcaagttag

SEQ ID NO: 157779 - DNA, 25 bp, Artificial
  Probe
gacagaagtacagaacctcaagtta

SEQ ID NO: 157780 - DNA, 25 bp, Artificial
  Probe
gttacaaggctgagactatgaatgt

SEQ ID NO: 157781 - DNA, 25 bp, Artificial
  Probe
gcttagtctagtctctacctggtac

SEQ ID NO: 157782 - DNA, 25 bp, Artificial
  Probe
ttacaaggctgagactatgaatgtc

SEQ ID NO: 157783 - DNA, 25 bp, Artificial
  Probe
tacaaggctgagactatgaatgtca

SEQ ID NO: 157784 - DNA, 25 bp, Artificial
  Probe
tactgtatgtaggcttagtctagtc

SEQ ID NO: 157785 - DNA, 25 bp, Artificial
  Probe
gtatgtaggcttagtctagtctcta

SEQ ID NO: 157786 - DNA, 25 bp, Artificial
  Probe
ggcttagtctagtctctacctggta

SEQ ID NO: 157787 - DNA, 25 bp, Artificial
  Probe
cagaagtacagaacctcaagttagg

SEQ ID NO: 157788 - DNA, 25 bp, Artificial
  Probe
ttactgtatgtaggcttagtctagt

SEQ ID NO: 157789 - DNA, 25 bp, Artificial
  Probe
gtgctttatttgagagagagagaga

SEQ ID NO: 157790 - DNA, 25 bp, Artificial
  Probe
tgtgctttatttgagagagagagag

SEQ ID NO: 157791 - DNA, 25 bp, Artificial
  Probe
ctgtgctttatttgagagagagaga

SEQ ID NO: 157792 - DNA, 25 bp, Artificial
  Probe
cgactctacaaactactctgaaact

SEQ ID NO: 157793 - DNA, 25 bp, Artificial
  Probe
cttagattctgtggttcctggatgg

SEQ ID NO: 157794 - DNA, 25 bp, Artificial
  Probe
ggacagaagtacagaacctcaagtt

SEQ ID NO: 157795 - DNA, 25 bp, Artificial
  Probe
tgctttatttgagagagagagagag

SEQ ID NO: 157796 - DNA, 25 bp, Artificial
  Probe
atttgagagagagagagagagagtg

SEQ ID NO: 157797 - DNA, 25 bp, Artificial
  Probe
gctttatttgagagagagagagaga

SEQ ID NO: 157798 - DNA, 25 bp, Artificial
  Probe
taggcttagtctagtctctacctgg

SEQ ID NO: 157799 - DNA, 25 bp, Artificial
  Probe
tatttgagagagagagagagagagt

SEQ ID NO: 157800 - DNA, 25 bp, Artificial
  Probe
tctgtgctttatttgagagagagag

SEQ ID NO: 157801 - DNA, 25 bp, Artificial
  Probe
gactctacaaactactctgaaactc

SEQ ID NO: 157802 - DNA, 25 bp, Artificial
  Probe
actatgaatgtcagtcctcaacttt

SEQ ID NO: 157803 - DNA, 25 bp, Artificial
  Probe
atgtaggcttagtctagtctctacc

SEQ ID NO: 157804 - DNA, 25 bp, Artificial
  Probe
ctatgaatgtcagtcctcaactttg

SEQ ID NO: 157805 - DNA, 25 bp, Artificial
  Probe
tgagagagagagagagagagtgttt

SEQ ID NO: 157806 - DNA, 25 bp, Artificial
  Probe
tttgagagagagagagagagagtgt

SEQ ID NO: 157807 - DNA, 25 bp, Artificial
  Probe
catcactaatcccatcttgagagta

SEQ ID NO: 157808 - DNA, 25 bp, Artificial
  Probe
gtaggcttagtctagtctctacctg

SEQ ID NO: 157809 - DNA, 25 bp, Artificial
  Probe
atccatcactaatcccatcttgaga

SEQ ID NO: 157810 - DNA, 25 bp, Artificial
  Probe
ttatttgagagagagagagagagag

SEQ ID NO: 157811 - DNA, 25 bp, Artificial
  Probe
gcttagattctgtggttcctggatg

SEQ ID NO: 157812 - DNA, 25 bp, Artificial
  Probe
tgtaggcttagtctagtctctacct

SEQ ID NO: 157813 - DNA, 25 bp, Artificial
  Probe
actctacaaactactctgaaactca

SEQ ID NO: 157814 - DNA, 25 bp, Artificial
  Probe
tccatcactaatcccatcttgagag

SEQ ID NO: 157815 - DNA, 25 bp, Artificial
  Probe
gggttacaaggctgagactatgaat

SEQ ID NO: 157816 - DNA, 25 bp, Artificial
  Probe
tatgaatgtcagtcctcaactttga

SEQ ID NO: 157817 - DNA, 25 bp, Artificial
  Probe
atgatccatcactaatcccatcttg

SEQ ID NO: 157818 - DNA, 25 bp, Artificial
  Probe
caaaagaaggaaacagatggcatac

SEQ ID NO: 157819 - DNA, 25 bp, Artificial
  Probe
aaaagaaggaaacagatggcatacg

SEQ ID NO: 157820 - DNA, 25 bp, Artificial
  Probe
aaagaaggaaacagatggcatacgc

SEQ ID NO: 157821 - DNA, 25 bp, Artificial
  Probe
ttgtagccaaaagaaggaaacagat

SEQ ID NO: 157822 - DNA, 25 bp, Artificial
  Probe
gctggaataaacagatgaattttgc

SEQ ID NO: 157823 - DNA, 25 bp, Artificial
  Probe
gaaacagatggcatacgctgagaat

SEQ ID NO: 157824 - DNA, 25 bp, Artificial
  Probe
tgtagccaaaagaaggaaacagatg

SEQ ID NO: 157825 - DNA, 25 bp, Artificial
  Probe
cttgtagccaaaagaaggaaacaga

SEQ ID NO: 157826 - DNA, 25 bp, Artificial
  Probe
acttgtagccaaaagaaggaaacag

SEQ ID NO: 157827 - DNA, 25 bp, Artificial
  Probe
aaacagatggcatacgctgagaatg

SEQ ID NO: 157828 - DNA, 25 bp, Artificial
  Probe
cacttgtagccaaaagaaggaaaca

SEQ ID NO: 157829 - DNA, 25 bp, Artificial
  Probe
ccacttgtagccaaaagaaggaaac

SEQ ID NO: 157830 - DNA, 25 bp, Artificial
  Probe
atcctccacttgtagccaaaagaag

SEQ ID NO: 157831 - DNA, 25 bp, Artificial
  Probe
ccaaaagaaggaaacagatggcata

SEQ ID NO: 157832 - DNA, 25 bp, Artificial
  Probe
ataaacagatgaattttgcatggtg

SEQ ID NO: 157833 - DNA, 25 bp, Artificial
  Probe
aagaaggaaacagatggcatacgct

SEQ ID NO: 157834 - DNA, 25 bp, Artificial
  Probe
catcctccacttgtagccaaaagaa

SEQ ID NO: 157835 - DNA, 25 bp, Artificial
  Probe
taaacagatgaattttgcatggtgt

SEQ ID NO: 157836 - DNA, 25 bp, Artificial
  Probe
gaaataaacattggtctccaagcat

SEQ ID NO: 157837 - DNA, 25 bp, Artificial
  Probe
cagatgaattttgcatggtgtttcc

SEQ ID NO: 157838 - DNA, 25 bp, Artificial
  Probe
gtagccaaaagaaggaaacagatgg

SEQ ID NO: 157839 - DNA, 25 bp, Artificial
  Probe
aataaacattggtctccaagcattt

SEQ ID NO: 157840 - DNA, 25 bp, Artificial
  Probe
aaataaacattggtctccaagcatt

SEQ ID NO: 157841 - DNA, 25 bp, Artificial
  Probe
acagatgaattttgcatggtgtttc

SEQ ID NO: 157842 - DNA, 25 bp, Artificial
  Probe
aataaacagatgaattttgcatggt

SEQ ID NO: 157843 - DNA, 25 bp, Artificial
  Probe
atggtgtttccctgtgtcaaacttc

SEQ ID NO: 157844 - DNA, 25 bp, Artificial
  Probe
tccacttgtagccaaaagaaggaaa

SEQ ID NO: 157845 - DNA, 25 bp, Artificial
  Probe
tggaataaacagatgaattttgcat

SEQ ID NO: 157846 - DNA, 25 bp, Artificial
  Probe
ctggaataaacagatgaattttgca

SEQ ID NO: 157847 - DNA, 25 bp, Artificial
  Probe
gaataaacagatgaattttgcatgg

SEQ ID NO: 157848 - DNA, 25 bp, Artificial
  Probe
ggaataaacagatgaattttgcatg

SEQ ID NO: 157849 - DNA, 25 bp, Artificial
  Probe
ggaaataaacattggtctccaagca

SEQ ID NO: 157850 - DNA, 25 bp, Artificial
  Probe
ctccacttgtagccaaaagaaggaa

SEQ ID NO: 157851 - DNA, 25 bp, Artificial
  Probe
catggaaataaacattggtctccaa

SEQ ID NO: 157852 - DNA, 25 bp, Artificial
  Probe
gatgaattttgcatggtgtttccct

SEQ ID NO: 157853 - DNA, 25 bp, Artificial
  Probe
agatgaattttgcatggtgtttccc

SEQ ID NO: 157854 - DNA, 25 bp, Artificial
  Probe
atggaaataaacattggtctccaag

SEQ ID NO: 157855 - DNA, 25 bp, Artificial
  Probe
catggtgtttccctgtgtcaaactt

SEQ ID NO: 157856 - DNA, 25 bp, Artificial
  Probe
atgaattttgcatggtgtttccctg

SEQ ID NO: 157857 - DNA, 25 bp, Artificial
  Probe
aagggaggagcactctgtgtaagaa

SEQ ID NO: 157858 - DNA, 25 bp, Artificial
  Probe
tggaaataaacattggtctccaagc

SEQ ID NO: 157859 - DNA, 25 bp, Artificial
  Probe
aacagatgaattttgcatggtgttt

SEQ ID NO: 157860 - DNA, 25 bp, Artificial
  Probe
aaacagatgaattttgcatggtgtt

SEQ ID NO: 157861 - DNA, 25 bp, Artificial
  Probe
tcccatggaaataaacattggtctc

SEQ ID NO: 157862 - DNA, 25 bp, Artificial
  Probe
gaattttgcatggtgtttccctgtg

SEQ ID NO: 157863 - DNA, 25 bp, Artificial
  Probe
ttatataccgatgacttccatactt

SEQ ID NO: 157864 - DNA, 25 bp, Artificial
  Probe
tataccgatgacttccatactttaa

SEQ ID NO: 157865 - DNA, 25 bp, Artificial
  Probe
atataccgatgacttccatacttta

SEQ ID NO: 157866 - DNA, 25 bp, Artificial
  Probe
ataccgatgacttccatactttaaa

SEQ ID NO: 157867 - DNA, 25 bp, Artificial
  Probe
tatataccgatgacttccatacttt

SEQ ID NO: 157868 - DNA, 25 bp, Artificial
  Probe
tttatataccgatgacttccatact

SEQ ID NO: 157869 - DNA, 25 bp, Artificial
  Probe
ttgttttatataccgatgacttcca

SEQ ID NO: 157870 - DNA, 25 bp, Artificial
  Probe
accgatgacttccatactttaaaac

SEQ ID NO: 157871 - DNA, 25 bp, Artificial
  Probe
tgttttatataccgatgacttccat

SEQ ID NO: 157872 - DNA, 25 bp, Artificial
  Probe
taccgatgacttccatactttaaaa

SEQ ID NO: 157873 - DNA, 25 bp, Artificial
  Probe
attgttttatataccgatgacttcc

SEQ ID NO: 157874 - DNA, 25 bp, Artificial
  Probe
ctgatttgtagtgattcattgtttt

SEQ ID NO: 157875 - DNA, 25 bp, Artificial
  Probe
agtgattcattgttttatataccga

SEQ ID NO: 157876 - DNA, 25 bp, Artificial
  Probe
ttttatataccgatgacttccatac

SEQ ID NO: 157877 - DNA, 25 bp, Artificial
  Probe
gttttatataccgatgacttccata

SEQ ID NO: 157878 - DNA, 25 bp, Artificial
  Probe
cattgttttatataccgatgacttc

SEQ ID NO: 157879 - DNA, 25 bp, Artificial
  Probe
gtgattcattgttttatataccgat

SEQ ID NO: 157880 - DNA, 25 bp, Artificial
  Probe
tgattcattgttttatataccgatg

SEQ ID NO: 157881 - DNA, 25 bp, Artificial
  Probe
tgatttgtagtgattcattgtttta

SEQ ID NO: 157882 - DNA, 25 bp, Artificial
  Probe
tcattgttttatataccgatgactt

SEQ ID NO: 157883 - DNA, 25 bp, Artificial
  Probe
ttcattgttttatataccgatgact

SEQ ID NO: 157884 - DNA, 25 bp, Artificial
  Probe
tagtgattcattgttttatataccg

SEQ ID NO: 157885 - DNA, 25 bp, Artificial
  Probe
attcattgttttatataccgatgac

SEQ ID NO: 157886 - DNA, 25 bp, Artificial
  Probe
gattcattgttttatataccgatga

SEQ ID NO: 157887 - DNA, 25 bp, Artificial
  Probe
tagtaagagtgaagtgtgtgtgtgt

SEQ ID NO: 157888 - DNA, 25 bp, Artificial
  Probe
gcaatgaagtagaatgtctcctagt

SEQ ID NO: 157889 - DNA, 25 bp, Artificial
  Probe
ctagtaagagtgaagtgtgtgtgtg

SEQ ID NO: 157890 - DNA, 25 bp, Artificial
  Probe
ggcaatgaagtagaatgtctcctag

SEQ ID NO: 157891 - DNA, 25 bp, Artificial
  Probe
ctataacaggtagcaggtgtattca

SEQ ID NO: 157892 - DNA, 25 bp, Artificial
  Probe
atgtctcctagtaagagtgaagtgt

SEQ ID NO: 157893 - DNA, 25 bp, Artificial
  Probe
aatgtctcctagtaagagtgaagtg

SEQ ID NO: 157894 - DNA, 25 bp, Artificial
  Probe
gaatgtctcctagtaagagtgaagt

SEQ ID NO: 157895 - DNA, 25 bp, Artificial
  Probe
tcctagtaagagtgaagtgtgtgtg

SEQ ID NO: 157896 - DNA, 25 bp, Artificial
  Probe
tataacaggtagcaggtgtattcat

SEQ ID NO: 157897 - DNA, 25 bp, Artificial
  Probe
agaatgtctcctagtaagagtgaag

SEQ ID NO: 157898 - DNA, 25 bp, Artificial
  Probe
cctataacaggtagcaggtgtattc

SEQ ID NO: 157899 - DNA, 25 bp, Artificial
  Probe
cctagtaagagtgaagtgtgtgtgt

SEQ ID NO: 157900 - DNA, 25 bp, Artificial
  Probe
tctcctagtaagagtgaagtgtgtg

SEQ ID NO: 157901 - DNA, 25 bp, Artificial
  Probe
gtctcctagtaagagtgaagtgtgt

SEQ ID NO: 157902 - DNA, 25 bp, Artificial
  Probe
tgtctcctagtaagagtgaagtgtg

SEQ ID NO: 157903 - DNA, 25 bp, Artificial
  Probe
ctcctagtaagagtgaagtgtgtgt

SEQ ID NO: 157904 - DNA, 25 bp, Artificial
  Probe
gtagaatgtctcctagtaagagtga

SEQ ID NO: 157905 - DNA, 25 bp, Artificial
  Probe
agtagaatgtctcctagtaagagtg

SEQ ID NO: 157906 - DNA, 25 bp, Artificial
  Probe
aggcaatgaagtagaatgtctccta

SEQ ID NO: 157907 - DNA, 25 bp, Artificial
  Probe
ataacaggtagcaggtgtattcatg

SEQ ID NO: 157908 - DNA, 25 bp, Artificial
  Probe
tgaagtagaatgtctcctagtaaga

SEQ ID NO: 157909 - DNA, 25 bp, Artificial
  Probe
agtaagagtgaagtgtgtgtgtgtg

SEQ ID NO: 157910 - DNA, 25 bp, Artificial
  Probe
tagaatgtctcctagtaagagtgaa

SEQ ID NO: 157911 - DNA, 25 bp, Artificial
  Probe
aagtagaatgtctcctagtaagagt

SEQ ID NO: 157912 - DNA, 25 bp, Artificial
  Probe
tgaaagagagagagagagagagaga

SEQ ID NO: 157913 - DNA, 25 bp, Artificial
  Probe
gtgaaagagagagagagagagagag

SEQ ID NO: 157914 - DNA, 25 bp, Artificial
  Probe
caatgaagtagaatgtctcctagta

SEQ ID NO: 157915 - DNA, 25 bp, Artificial
  Probe
taagagtgaagtgtgtgtgtgtgtg

SEQ ID NO: 157916 - DNA, 25 bp, Artificial
  Probe
gtaagagtgaagtgtgtgtgtgtgt

SEQ ID NO: 157917 - DNA, 25 bp, Artificial
  Probe
tgtgaaagagagagagagagagaga

SEQ ID NO: 157918 - DNA, 25 bp, Artificial
  Probe
gtgtgaaagagagagagagagagag

SEQ ID NO: 157919 - DNA, 25 bp, Artificial
  Probe
gaagtagaatgtctcctagtaagag

SEQ ID NO: 157920 - DNA, 25 bp, Artificial
  Probe
caggcaatgaagtagaatgtctcct

SEQ ID NO: 157921 - DNA, 25 bp, Artificial
  Probe
taacaggtagcaggtgtattcatgg

SEQ ID NO: 157922 - DNA, 25 bp, Artificial
  Probe
ccaggcaatgaagtagaatgtctcc

SEQ ID NO: 157923 - DNA, 25 bp, Artificial
  Probe
atgaagtagaatgtctcctagtaag

SEQ ID NO: 157924 - DNA, 25 bp, Artificial
  Probe
gtgtgtgaaagagagagagagagag

SEQ ID NO: 157925 - DNA, 25 bp, Artificial
  Probe
ttgtaacaggagacagaaagagaaa

SEQ ID NO: 157926 - DNA, 25 bp, Artificial
  Probe
tttgtaacaggagacagaaagagaa

SEQ ID NO: 157927 - DNA, 25 bp, Artificial
  Probe
tgtgtgaaagagagagagagagaga

SEQ ID NO: 157928 - DNA, 25 bp, Artificial
  Probe
ctgtgtgtgaaagagagagagagag

SEQ ID NO: 157929 - DNA, 25 bp, Artificial
  Probe
aaacactggactaacctataacagg

SEQ ID NO: 157930 - DNA, 25 bp, Artificial
  Probe
tgtgtgtgaaagagagagagagaga

SEQ ID NO: 157931 - DNA, 25 bp, Artificial
  Probe
tacccaggcaatgaagtagaatgtc

SEQ ID NO: 157932 - DNA, 25 bp, Artificial
  Probe
ggcagtcttgagaatgataacttca

SEQ ID NO: 157933 - DNA, 25 bp, Artificial
  Probe
cctggatatagatacatctcgtgaa

SEQ ID NO: 157934 - DNA, 25 bp, Artificial
  Probe
cgtgtaggagacagaccttattaac

SEQ ID NO: 157935 - DNA, 25 bp, Artificial
  Probe
tcgtgtaggagacagaccttattaa

SEQ ID NO: 157936 - DNA, 25 bp, Artificial
  Probe
aagatagaagtcgtgtaggagacag

SEQ ID NO: 157937 - DNA, 25 bp, Artificial
  Probe
gtgtaggagacagaccttattaact

SEQ ID NO: 157938 - DNA, 25 bp, Artificial
  Probe
tgtaggagacagaccttattaactc

SEQ ID NO: 157939 - DNA, 25 bp, Artificial
  Probe
gtcgtgtaggagacagaccttatta

SEQ ID NO: 157940 - DNA, 25 bp, Artificial
  Probe
gatagaagtcgtgtaggagacagac

SEQ ID NO: 157941 - DNA, 25 bp, Artificial
  Probe
agatagaagtcgtgtaggagacaga

SEQ ID NO: 157942 - DNA, 25 bp, Artificial
  Probe
gctaaagatagaagtcgtgtaggag

SEQ ID NO: 157943 - DNA, 25 bp, Artificial
  Probe
gagcagaacagattagataaagcca

SEQ ID NO: 157944 - DNA, 25 bp, Artificial
  Probe
tgagcagaacagattagataaagcc

SEQ ID NO: 157945 - DNA, 25 bp, Artificial
  Probe
ttgagcagaacagattagataaagc

SEQ ID NO: 157946 - DNA, 25 bp, Artificial
  Probe
tggatatagatacatctcgtgaatg

SEQ ID NO: 157947 - DNA, 25 bp, Artificial
  Probe
tagataaagccacattaagttcccg

SEQ ID NO: 157948 - DNA, 25 bp, Artificial
  Probe
agcagaacagattagataaagccac

SEQ ID NO: 157949 - DNA, 25 bp, Artificial
  Probe
agtgctattcattgtcaggaaagat

SEQ ID NO: 157950 - DNA, 25 bp, Artificial
  Probe
aaagtgctattcattgtcaggaaag

SEQ ID NO: 157951 - DNA, 25 bp, Artificial
  Probe
aagtgctattcattgtcaggaaaga

SEQ ID NO: 157952 - DNA, 25 bp, Artificial
  Probe
ctttgctgctcttgagtttgtttaa

SEQ ID NO: 157953 - DNA, 25 bp, Artificial
  Probe
ctaaagatagaagtcgtgtaggaga

SEQ ID NO: 157954 - DNA, 25 bp, Artificial
  Probe
cagaacagattagataaagccacat

SEQ ID NO: 157955 - DNA, 25 bp, Artificial
  Probe
gcagaacagattagataaagccaca

SEQ ID NO: 157956 - DNA, 25 bp, Artificial
  Probe
attacaggtgtttagacttgcgaaa

SEQ ID NO: 157957 - DNA, 25 bp, Artificial
  Probe
ctggatatagatacatctcgtgaat

SEQ ID NO: 157958 - DNA, 25 bp, Artificial
  Probe
ttagataaagccacattaagttccc

SEQ ID NO: 157959 - DNA, 25 bp, Artificial
  Probe
gtgctattcattgtcaggaaagata

SEQ ID NO: 157960 - DNA, 25 bp, Artificial
  Probe
tctttgctgctcttgagtttgttta

SEQ ID NO: 157961 - DNA, 25 bp, Artificial
  Probe
ggaagtggtagcctgattatttgtg

SEQ ID NO: 157962 - DNA, 25 bp, Artificial
  Probe
gaagggcagtcttgagaatgataac

SEQ ID NO: 157963 - DNA, 25 bp, Artificial
  Probe
ctccctggatatagatacatctcgt

SEQ ID NO: 157964 - DNA, 25 bp, Artificial
  Probe
actccctggatatagatacatctcg

SEQ ID NO: 157965 - DNA, 25 bp, Artificial
  Probe
cattacaggtgtttagacttgcgaa

SEQ ID NO: 157966 - DNA, 25 bp, Artificial
  Probe
agtcgtgtaggagacagaccttatt

SEQ ID NO: 157967 - DNA, 25 bp, Artificial
  Probe
aagtcgtgtaggagacagaccttat

SEQ ID NO: 157968 - DNA, 25 bp, Artificial
  Probe
ccctggatatagatacatctcgtga

SEQ ID NO: 157969 - DNA, 25 bp, Artificial
  Probe
tccctggatatagatacatctcgtg

SEQ ID NO: 157970 - DNA, 25 bp, Artificial
  Probe
agaacagattagataaagccacatt

SEQ ID NO: 157971 - DNA, 25 bp, Artificial
  Probe
tgctattcattgtcaggaaagataa

SEQ ID NO: 157972 - DNA, 25 bp, Artificial
  Probe
gcagtcttgagaatgataacttcat

SEQ ID NO: 157973 - DNA, 25 bp, Artificial
  Probe
gggcagtcttgagaatgataacttc

SEQ ID NO: 157974 - DNA, 25 bp, Artificial
  Probe
atagaagtcgtgtaggagacagacc

SEQ ID NO: 157975 - DNA, 25 bp, Artificial
  Probe
ttctttgctgctcttgagtttgttt

SEQ ID NO: 157976 - DNA, 25 bp, Artificial
  Probe
tttctttgctgctcttgagtttgtt

SEQ ID NO: 157977 - DNA, 25 bp, Artificial
  Probe
ttagcatcatcctggtgttaatgtt

SEQ ID NO: 157978 - DNA, 25 bp, Artificial
  Probe
cttagcatcatcctggtgttaatgt

SEQ ID NO: 157979 - DNA, 25 bp, Artificial
  Probe
tagcatcatcctggtgttaatgttg

SEQ ID NO: 157980 - DNA, 25 bp, Artificial
  Probe
tggtgttaatgttgctgcttatcat

SEQ ID NO: 157981 - DNA, 25 bp, Artificial
  Probe
tcctagaagatcagaagttgtcatt

SEQ ID NO: 157982 - DNA, 25 bp, Artificial
  Probe
ctggtgttaatgttgctgcttatca

SEQ ID NO: 157983 - DNA, 25 bp, Artificial
  Probe
ttcctagaagatcagaagttgtcat

SEQ ID NO: 157984 - DNA, 25 bp, Artificial
  Probe
cctagaagatcagaagttgtcattc

SEQ ID NO: 157985 - DNA, 25 bp, Artificial
  Probe
cctggtcagtattcaacagtcaata

SEQ ID NO: 157986 - DNA, 25 bp, Artificial
  Probe
ggtgttaatgttgctgcttatcatg

SEQ ID NO: 157987 - DNA, 25 bp, Artificial
  Probe
ttaatgttgctgcttatcatgctct

SEQ ID NO: 157988 - DNA, 25 bp, Artificial
  Probe
gttaatgttgctgcttatcatgctc

SEQ ID NO: 157989 - DNA, 25 bp, Artificial
  Probe
ctggtcagtattcaacagtcaataa

SEQ ID NO: 157990 - DNA, 25 bp, Artificial
  Probe
cctggtgttaatgttgctgcttatc

SEQ ID NO: 157991 - DNA, 25 bp, Artificial
  Probe
taatgttgctgcttatcatgctctc

SEQ ID NO: 157992 - DNA, 25 bp, Artificial
  Probe
gtgttaatgttgctgcttatcatgc

SEQ ID NO: 157993 - DNA, 25 bp, Artificial
  Probe
tgttaatgttgctgcttatcatgct

SEQ ID NO: 157994 - DNA, 25 bp, Artificial
  Probe
gcttagcatcatcctggtgttaatg

SEQ ID NO: 157995 - DNA, 25 bp, Artificial
  Probe
tcctggtcagtattcaacagtcaat

SEQ ID NO: 157996 - DNA, 25 bp, Artificial
  Probe
catcatcctggtgttaatgttgctg

SEQ ID NO: 157997 - DNA, 25 bp, Artificial
  Probe
ttctcttgacaacagatggtgactc

SEQ ID NO: 157998 - DNA, 25 bp, Artificial
  Probe
tcctggtgttaatgttgctgcttat

SEQ ID NO: 157999 - DNA, 25 bp, Artificial
  Probe
atcctggtgttaatgttgctgctta

SEQ ID NO: 158000 - DNA, 25 bp, Artificial
  Probe
aactgtggttctgctggttaatctt

SEQ ID NO: 158001 - DNA, 25 bp, Artificial
  Probe
atctcaagattaacacagcctcacc

SEQ ID NO: 158002 - DNA, 25 bp, Artificial
  Probe
atgtcctggtcagtattcaacagtc

SEQ ID NO: 158003 - DNA, 25 bp, Artificial
  Probe
ccctctggagataagtaagtctttc

SEQ ID NO: 158004 - DNA, 25 bp, Artificial
  Probe
cctctggagataagtaagtctttca

SEQ ID NO: 158005 - DNA, 25 bp, Artificial
  Probe
ctcaagattaacacagcctcacctc

SEQ ID NO: 158006 - DNA, 25 bp, Artificial
  Probe
gtcctggtcagtattcaacagtcaa

SEQ ID NO: 158007 - DNA, 25 bp, Artificial
  Probe
tcagaagcactatgaggaaagtatg

SEQ ID NO: 158008 - DNA, 25 bp, Artificial
  Probe
tggagataagtaagtctttcaagga

SEQ ID NO: 158009 - DNA, 25 bp, Artificial
  Probe
agatcagaagttgtcattcttggaa

SEQ ID NO: 158010 - DNA, 25 bp, Artificial
  Probe
aagatcagaagttgtcattcttgga

SEQ ID NO: 158011 - DNA, 25 bp, Artificial
  Probe
gaagatcagaagttgtcattcttgg

SEQ ID NO: 158012 - DNA, 25 bp, Artificial
  Probe
ctggagataagtaagtctttcaagg

SEQ ID NO: 158013 - DNA, 25 bp, Artificial
  Probe
gtaagtctttcaaggattcatggtg

SEQ ID NO: 158014 - DNA, 25 bp, Artificial
  Probe
agtaagtctttcaaggattcatggt

SEQ ID NO: 158015 - DNA, 25 bp, Artificial
  Probe
gtcagtattcaacagtcaataaagc

SEQ ID NO: 158016 - DNA, 25 bp, Artificial
  Probe
ctctttctcttgacaacagatggtg

SEQ ID NO: 158017 - DNA, 25 bp, Artificial
  Probe
ggaaagtggttcatagatcagtctt

SEQ ID NO: 158018 - DNA, 25 bp, Artificial
  Probe
aatctcaagattaacacagcctcac

SEQ ID NO: 158019 - DNA, 25 bp, Artificial
  Probe
agaagatcagaagttgtcattcttg

SEQ ID NO: 158020 - DNA, 25 bp, Artificial
  Probe
caactgtggttctgctggttaatct

SEQ ID NO: 158021 - DNA, 25 bp, Artificial
  Probe
tggtcagtattcaacagtcaataaa

SEQ ID NO: 158022 - DNA, 25 bp, Artificial
  Probe
attctatgacattgtggctgagttc

SEQ ID NO: 158023 - DNA, 25 bp, Artificial
  Probe
cattctatgacattgtggctgagtt

SEQ ID NO: 158024 - DNA, 25 bp, Artificial
  Probe
cacctactacctggacatcactaac

SEQ ID NO: 158025 - DNA, 25 bp, Artificial
  Probe
tcacctactacctggacatcactaa

SEQ ID NO: 158026 - DNA, 25 bp, Artificial
  Probe
gatactactccattgcctcatcctc

SEQ ID NO: 158027 - DNA, 25 bp, Artificial
  Probe
ctcacctactacctggacatcacta

SEQ ID NO: 158028 - DNA, 25 bp, Artificial
  Probe
actatgttaagaagctgatgaccaa

SEQ ID NO: 158029 - DNA, 25 bp, Artificial
  Probe
ctgtggactatgttaagaagctgat

SEQ ID NO: 158030 - DNA, 25 bp, Artificial
  Probe
gactatgttaagaagctgatgacca

SEQ ID NO: 158031 - DNA, 25 bp, Artificial
  Probe
tggactatgttaagaagctgatgac

SEQ ID NO: 158032 - DNA, 25 bp, Artificial
  Probe
gtggactatgttaagaagctgatga

SEQ ID NO: 158033 - DNA, 25 bp, Artificial
  Probe
ctatgttaagaagctgatgaccaag

SEQ ID NO: 158034 - DNA, 25 bp, Artificial
  Probe
tatgttaagaagctgatgaccaagg

SEQ ID NO: 158035 - DNA, 25 bp, Artificial
  Probe
tgtggactatgttaagaagctgatg

SEQ ID NO: 158036 - DNA, 25 bp, Artificial
  Probe
gatgaggactatctgtaccgtgaag

SEQ ID NO: 158037 - DNA, 25 bp, Artificial
  Probe
ggactatgttaagaagctgatgacc

SEQ ID NO: 158038 - DNA, 25 bp, Artificial
  Probe
acctactacctggacatcactaacc

SEQ ID NO: 158039 - DNA, 25 bp, Artificial
  Probe
acattctatgacattgtggctgagt

SEQ ID NO: 158040 - DNA, 25 bp, Artificial
  Probe
atgaggactatctgtaccgtgaaga

SEQ ID NO: 158041 - DNA, 25 bp, Artificial
  Probe
gacctggatgtcatcatgtctctaa

SEQ ID NO: 158042 - DNA, 25 bp, Artificial
  Probe
ctgtaatcacctaacttctgccgac

SEQ ID NO: 158043 - DNA, 25 bp, Artificial
  Probe
atactactccattgcctcatcctcc

SEQ ID NO: 158044 - DNA, 25 bp, Artificial
  Probe
gactatctgtaccgtgaagagctag

SEQ ID NO: 158045 - DNA, 25 bp, Artificial
  Probe
ttctatgacattgtggctgagttcg

SEQ ID NO: 158046 - DNA, 25 bp, Artificial
  Probe
tgaggactatctgtaccgtgaagag

SEQ ID NO: 158047 - DNA, 25 bp, Artificial
  Probe
cgatactactccattgcctcatcct

SEQ ID NO: 158048 - DNA, 25 bp, Artificial
  Probe
ggatgaggactatctgtaccgtgaa

SEQ ID NO: 158049 - DNA, 25 bp, Artificial
  Probe
cctggatgtcatcatgtctctaaac

SEQ ID NO: 158050 - DNA, 25 bp, Artificial
  Probe
acctggatgtcatcatgtctctaaa

SEQ ID NO: 158051 - DNA, 25 bp, Artificial
  Probe
tggatgtcatcatgtctctaaacaa

SEQ ID NO: 158052 - DNA, 25 bp, Artificial
  Probe
ctggatgtcatcatgtctctaaaca

SEQ ID NO: 158053 - DNA, 25 bp, Artificial
  Probe
gtcatcatgtctctaaacaatctcg

SEQ ID NO: 158054 - DNA, 25 bp, Artificial
  Probe
ctactcactagatgtgtggagctag

SEQ ID NO: 158055 - DNA, 25 bp, Artificial
  Probe
taatcacctaacttctgccgacctc

SEQ ID NO: 158056 - DNA, 25 bp, Artificial
  Probe
ctccctgtaatcacctaacttctgc

SEQ ID NO: 158057 - DNA, 25 bp, Artificial
  Probe
gctccctgtaatcacctaacttctg

SEQ ID NO: 158058 - DNA, 25 bp, Artificial
  Probe
ccaggctgtggactatgttaagaag

SEQ ID NO: 158059 - DNA, 25 bp, Artificial
  Probe
ggatgtcatcatgtctctaaacaat

SEQ ID NO: 158060 - DNA, 25 bp, Artificial
  Probe
ggactatctgtaccgtgaagagcta

SEQ ID NO: 158061 - DNA, 25 bp, Artificial
  Probe
catcctagccatcctccaagactac

SEQ ID NO: 158062 - DNA, 25 bp, Artificial
  Probe
tgtcatcatgtctctaaacaatctc

SEQ ID NO: 158063 - DNA, 25 bp, Artificial
  Probe
gtaatcacctaacttctgccgacct

SEQ ID NO: 158064 - DNA, 25 bp, Artificial
  Probe
cctgtaatcacctaacttctgccga

SEQ ID NO: 158065 - DNA, 25 bp, Artificial
  Probe
taaacaatctcgatgaggagtcaaa

SEQ ID NO: 158066 - DNA, 25 bp, Artificial
  Probe
ctaaacaatctcgatgaggagtcaa

SEQ ID NO: 158067 - DNA, 25 bp, Artificial
  Probe
tacttacataagcacacatacacac

SEQ ID NO: 158068 - DNA, 25 bp, Artificial
  Probe
acttacataagcacacatacacacg

SEQ ID NO: 158069 - DNA, 25 bp, Artificial
  Probe
cctctctggaccttcttatgtctat

SEQ ID NO: 158070 - DNA, 25 bp, Artificial
  Probe
tgagtccttaataggtctgtgtagt

SEQ ID NO: 158071 - DNA, 25 bp, Artificial
  Probe
gtgagtccttaataggtctgtgtag

SEQ ID NO: 158072 - DNA, 25 bp, Artificial
  Probe
atacttacataagcacacatacaca

SEQ ID NO: 158073 - DNA, 25 bp, Artificial
  Probe
tgtgagtccttaataggtctgtgta

SEQ ID NO: 158074 - DNA, 25 bp, Artificial
  Probe
gagtccttaataggtctgtgtagtt

SEQ ID NO: 158075 - DNA, 25 bp, Artificial
  Probe
atgtgagtccttaataggtctgtgt

SEQ ID NO: 158076 - DNA, 25 bp, Artificial
  Probe
tatagctgtattggaggattgaacc

SEQ ID NO: 158077 - DNA, 25 bp, Artificial
  Probe
cgtatagctgtattggaggattgaa

SEQ ID NO: 158078 - DNA, 25 bp, Artificial
  Probe
gtatagctgtattggaggattgaac

SEQ ID NO: 158079 - DNA, 25 bp, Artificial
  Probe
ctctctggaccttcttatgtctata

SEQ ID NO: 158080 - DNA, 25 bp, Artificial
  Probe
acctctctggaccttcttatgtcta

SEQ ID NO: 158081 - DNA, 25 bp, Artificial
  Probe
ttacataagcacacatacacacgta

SEQ ID NO: 158082 - DNA, 25 bp, Artificial
  Probe
aataaagatgaatagggcagtgtgt

SEQ ID NO: 158083 - DNA, 25 bp, Artificial
  Probe
catgtgagtccttaataggtctgtg

SEQ ID NO: 158084 - DNA, 25 bp, Artificial
  Probe
aaataaagatgaatagggcagtgtg

SEQ ID NO: 158085 - DNA, 25 bp, Artificial
  Probe
ataaagatgaatagggcagtgtgtg

SEQ ID NO: 158086 - DNA, 25 bp, Artificial
  Probe
cccagcacttagtaggttcaataaa

SEQ ID NO: 158087 - DNA, 25 bp, Artificial
  Probe
tctctggaccttcttatgtctataa

SEQ ID NO: 158088 - DNA, 25 bp, Artificial
  Probe
atatattcgagtcgtctccagagaa

SEQ ID NO: 158089 - DNA, 25 bp, Artificial
  Probe
acgtatagctgtattggaggattga

SEQ ID NO: 158090 - DNA, 25 bp, Artificial
  Probe
cacgtatagctgtattggaggattg

SEQ ID NO: 158091 - DNA, 25 bp, Artificial
  Probe
gtggaataacagaaagcaagagact

SEQ ID NO: 158092 - DNA, 25 bp, Artificial
  Probe
ctgacctctctggaccttcttatgt

SEQ ID NO: 158093 - DNA, 25 bp, Artificial
  Probe
actgacctctctggaccttcttatg

SEQ ID NO: 158094 - DNA, 25 bp, Artificial
  Probe
cactgacctctctggaccttcttat

SEQ ID NO: 158095 - DNA, 25 bp, Artificial
  Probe
gatatattcgagtcgtctccagaga

SEQ ID NO: 158096 - DNA, 25 bp, Artificial
  Probe
tcccagcacttagtaggttcaataa

SEQ ID NO: 158097 - DNA, 25 bp, Artificial
  Probe
ttcccagcacttagtaggttcaata

SEQ ID NO: 158098 - DNA, 25 bp, Artificial
  Probe
ccagcacttagtaggttcaataaat

SEQ ID NO: 158099 - DNA, 25 bp, Artificial
  Probe
cttacataagcacacatacacacgt

SEQ ID NO: 158100 - DNA, 25 bp, Artificial
  Probe
ttcctgcttctctggtacaataaat

SEQ ID NO: 158101 - DNA, 25 bp, Artificial
  Probe
tttcctgcttctctggtacaataaa

SEQ ID NO: 158102 - DNA, 25 bp, Artificial
  Probe
gtttcctgcttctctggtacaataa

SEQ ID NO: 158103 - DNA, 25 bp, Artificial
  Probe
tcctgcttctctggtacaataaata

SEQ ID NO: 158104 - DNA, 25 bp, Artificial
  Probe
atagctgtattggaggattgaacct

SEQ ID NO: 158105 - DNA, 25 bp, Artificial
  Probe
aaagatgaatagggcagtgtgtgta

SEQ ID NO: 158106 - DNA, 25 bp, Artificial
  Probe
taaagatgaatagggcagtgtgtgt

SEQ ID NO: 158107 - DNA, 25 bp, Artificial
  Probe
gacctctctggaccttcttatgtct

SEQ ID NO: 158108 - DNA, 25 bp, Artificial
  Probe
acataagcacacatacacacgtata

SEQ ID NO: 158109 - DNA, 25 bp, Artificial
  Probe
tacataagcacacatacacacgtat

SEQ ID NO: 158110 - DNA, 25 bp, Artificial
  Probe
cataagcacacatacacacgtatag

SEQ ID NO: 158111 - DNA, 25 bp, Artificial
  Probe
taaatgagagtttccatgcctatgt

SEQ ID NO: 158112 - DNA, 25 bp, Artificial
  Probe
ccaggcatctacaccaaacttatta

SEQ ID NO: 158113 - DNA, 25 bp, Artificial
  Probe
caggcatctacaccaaacttattaa

SEQ ID NO: 158114 - DNA, 25 bp, Artificial
  Probe
ctactgtctaatgagaagtgcatca

SEQ ID NO: 158115 - DNA, 25 bp, Artificial
  Probe
tactgtctaatgagaagtgcatcaa

SEQ ID NO: 158116 - DNA, 25 bp, Artificial
  Probe
cacactgtaccctgatctcaataaa

SEQ ID NO: 158117 - DNA, 25 bp, Artificial
  Probe
aggcatctacaccaaacttattaag

SEQ ID NO: 158118 - DNA, 25 bp, Artificial
  Probe
tcacactgtaccctgatctcaataa

SEQ ID NO: 158119 - DNA, 25 bp, Artificial
  Probe
gtcacactgtaccctgatctcaata

SEQ ID NO: 158120 - DNA, 25 bp, Artificial
  Probe
ctgtctaatgagaagtgcatcaaag

SEQ ID NO: 158121 - DNA, 25 bp, Artificial
  Probe
actgtctaatgagaagtgcatcaaa

SEQ ID NO: 158122 - DNA, 25 bp, Artificial
  Probe
aagtgcatcaaagcctacaaagaaa

SEQ ID NO: 158123 - DNA, 25 bp, Artificial
  Probe
ctaatgagaagtgcatcaaagccta

SEQ ID NO: 158124 - DNA, 25 bp, Artificial
  Probe
taatgagaagtgcatcaaagcctac

SEQ ID NO: 158125 - DNA, 25 bp, Artificial
  Probe
gaagtgcatcaaagcctacaaagaa

SEQ ID NO: 158126 - DNA, 25 bp, Artificial
  Probe
tgtctaatgagaagtgcatcaaagc

SEQ ID NO: 158127 - DNA, 25 bp, Artificial
  Probe
gagaagtgcatcaaagcctacaaag

SEQ ID NO: 158128 - DNA, 25 bp, Artificial
  Probe
actgtaccctgatctcaataaaacc

SEQ ID NO: 158129 - DNA, 25 bp, Artificial
  Probe
acactgtaccctgatctcaataaaa

SEQ ID NO: 158130 - DNA, 25 bp, Artificial
  Probe
cactgtaccctgatctcaataaaac

SEQ ID NO: 158131 - DNA, 25 bp, Artificial
  Probe
tgtcacactgtaccctgatctcaat

SEQ ID NO: 158132 - DNA, 25 bp, Artificial
  Probe
tctaatgagaagtgcatcaaagcct

SEQ ID NO: 158133 - DNA, 25 bp, Artificial
  Probe
gtctaatgagaagtgcatcaaagcc

SEQ ID NO: 158134 - DNA, 25 bp, Artificial
  Probe
ctgtaccctgatctcaataaaaccc

SEQ ID NO: 158135 - DNA, 25 bp, Artificial
  Probe
agaagtgcatcaaagcctacaaaga

SEQ ID NO: 158136 - DNA, 25 bp, Artificial
  Probe
gtaccctgatctcaataaaacccac

SEQ ID NO: 158137 - DNA, 25 bp, Artificial
  Probe
gccaggcatctacaccaaacttatt

SEQ ID NO: 158138 - DNA, 25 bp, Artificial
  Probe
aataagccaggcatctacaccaaac

SEQ ID NO: 158139 - DNA, 25 bp, Artificial
  Probe
caataagccaggcatctacaccaaa

SEQ ID NO: 158140 - DNA, 25 bp, Artificial
  Probe
ggcatctacaccaaacttattaagt

SEQ ID NO: 158141 - DNA, 25 bp, Artificial
  Probe
tgtaccctgatctcaataaaaccca

SEQ ID NO: 158142 - DNA, 25 bp, Artificial
  Probe
atcaaagcctacaaagaaaaggtga

SEQ ID NO: 158143 - DNA, 25 bp, Artificial
  Probe
catcaaagcctacaaagaaaaggtg

SEQ ID NO: 158144 - DNA, 25 bp, Artificial
  Probe
atgagaagtgcatcaaagcctacaa

SEQ ID NO: 158145 - DNA, 25 bp, Artificial
  Probe
aatgagaagtgcatcaaagcctaca

SEQ ID NO: 158146 - DNA, 25 bp, Artificial
  Probe
taccctgatctcaataaaacccacc

SEQ ID NO: 158147 - DNA, 25 bp, Artificial
  Probe
aattccctgatgatctccagtgtgt

SEQ ID NO: 158148 - DNA, 25 bp, Artificial
  Probe
tgagaagtgcatcaaagcctacaaa

SEQ ID NO: 158149 - DNA, 25 bp, Artificial
  Probe
aaagcctacaaagaaaaggtgacag

SEQ ID NO: 158150 - DNA, 25 bp, Artificial
  Probe
tcaaagcctacaaagaaaaggtgac

SEQ ID NO: 158151 - DNA, 25 bp, Artificial
  Probe
agccaggcatctacaccaaacttat

SEQ ID NO: 158152 - DNA, 25 bp, Artificial
  Probe
ataagccaggcatctacaccaaact

SEQ ID NO: 158153 - DNA, 25 bp, Artificial
  Probe
ccaataagccaggcatctacaccaa

SEQ ID NO: 158154 - DNA, 25 bp, Artificial
  Probe
caaagcctacaaagaaaaggtgaca

SEQ ID NO: 158155 - DNA, 25 bp, Artificial
  Probe
gtgcatcaaagcctacaaagaaaag

SEQ ID NO: 158156 - DNA, 25 bp, Artificial
  Probe
agcctacaaagaaaaggtgacagat

SEQ ID NO: 158157 - DNA, 25 bp, Artificial
  Probe
ggaggatataactgtgagacgaatt

SEQ ID NO: 158158 - DNA, 25 bp, Artificial
  Probe
tggaggatataactgtgagacgaat

SEQ ID NO: 158159 - DNA, 25 bp, Artificial
  Probe
ttggaggatataactgtgagacgaa

SEQ ID NO: 158160 - DNA, 25 bp, Artificial
  Probe
ttgttggaggatataactgtgagac

SEQ ID NO: 158161 - DNA, 25 bp, Artificial
  Probe
gttgttggaggatataactgtgaga

SEQ ID NO: 158162 - DNA, 25 bp, Artificial
  Probe
ggttgttggaggatataactgtgag

SEQ ID NO: 158163 - DNA, 25 bp, Artificial
  Probe
gtatgaccacaacaatgacctgatg

SEQ ID NO: 158164 - DNA, 25 bp, Artificial
  Probe
gttggaggatataactgtgagacga

SEQ ID NO: 158165 - DNA, 25 bp, Artificial
  Probe
aacatccaccttctgtctaatgaga

SEQ ID NO: 158166 - DNA, 25 bp, Artificial
  Probe
tgttggaggatataactgtgagacg

SEQ ID NO: 158167 - DNA, 25 bp, Artificial
  Probe
tgaacatccaccttctgtctaatga

SEQ ID NO: 158168 - DNA, 25 bp, Artificial
  Probe
gtgaacatccaccttctgtctaatg

SEQ ID NO: 158169 - DNA, 25 bp, Artificial
  Probe
tgtgaacatccaccttctgtctaat

SEQ ID NO: 158170 - DNA, 25 bp, Artificial
  Probe
cgtatgaccacaacaatgacctgat

SEQ ID NO: 158171 - DNA, 25 bp, Artificial
  Probe
acaacctagttaaagatgaaccctt

SEQ ID NO: 158172 - DNA, 25 bp, Artificial
  Probe
aacaacctagttaaagatgaaccct

SEQ ID NO: 158173 - DNA, 25 bp, Artificial
  Probe
gtgtgaacatccaccttctgtctaa

SEQ ID NO: 158174 - DNA, 25 bp, Artificial
  Probe
ccgaaacaacctagttaaagatgaa

SEQ ID NO: 158175 - DNA, 25 bp, Artificial
  Probe
tatgaccacaacaatgacctgatgc

SEQ ID NO: 158176 - DNA, 25 bp, Artificial
  Probe
aaacaacctagttaaagatgaaccc

SEQ ID NO: 158177 - DNA, 25 bp, Artificial
  Probe
acatccaccttctgtctaatgagaa

SEQ ID NO: 158178 - DNA, 25 bp, Artificial
  Probe
tctgtctaatgagaagtgcatcgaa

SEQ ID NO: 158179 - DNA, 25 bp, Artificial
  Probe
gccgaaacaacctagttaaagatga

SEQ ID NO: 158180 - DNA, 25 bp, Artificial
  Probe
cgaaacaacctagttaaagatgaac

SEQ ID NO: 158181 - DNA, 25 bp, Artificial
  Probe
gaggatataactgtgagacgaattc

SEQ ID NO: 158182 - DNA, 25 bp, Artificial
  Probe
gggttgttggaggatataactgtga

SEQ ID NO: 158183 - DNA, 25 bp, Artificial
  Probe
gaaacaacctagttaaagatgaacc

SEQ ID NO: 158184 - DNA, 25 bp, Artificial
  Probe
atatcatgtggttcctgatcctgtt

SEQ ID NO: 158185 - DNA, 25 bp, Artificial
  Probe
aattaagtcatgatctccagtgtgt

SEQ ID NO: 158186 - DNA, 25 bp, Artificial
  Probe
attaagtcatgatctccagtgtgtg

SEQ ID NO: 158187 - DNA, 25 bp, Artificial
  Probe
tgtgtgaacatccaccttctgtcta

SEQ ID NO: 158188 - DNA, 25 bp, Artificial
  Probe
aggatataactgtgagacgaattcc

SEQ ID NO: 158189 - DNA, 25 bp, Artificial
  Probe
tatcatgtggttcctgatcctgttc

SEQ ID NO: 158190 - DNA, 25 bp, Artificial
  Probe
ctaatgagaagtgcatcgaaaccta

SEQ ID NO: 158191 - DNA, 25 bp, Artificial
  Probe
tagttaaagatgaaccctttgctca

SEQ ID NO: 158192 - DNA, 25 bp, Artificial
  Probe
taatgagaagtgcatcgaaacctac

SEQ ID NO: 158193 - DNA, 25 bp, Artificial
  Probe
ctagttaaagatgaaccctttgctc

SEQ ID NO: 158194 - DNA, 25 bp, Artificial
  Probe
cctagttaaagatgaaccctttgct

SEQ ID NO: 158195 - DNA, 25 bp, Artificial
  Probe
ctgctactggacacacgatatcatg

SEQ ID NO: 158196 - DNA, 25 bp, Artificial
  Probe
catgatctccagtgtgtgaacatcc

SEQ ID NO: 158197 - DNA, 25 bp, Artificial
  Probe
acctagttaaagatgaaccctttgc

SEQ ID NO: 158198 - DNA, 25 bp, Artificial
  Probe
ctgtctaatgagaagtgcatcgaaa

SEQ ID NO: 158199 - DNA, 25 bp, Artificial
  Probe
aacctagttaaagatgaaccctttg

SEQ ID NO: 158200 - DNA, 25 bp, Artificial
  Probe
caacctagttaaagatgaacccttt

SEQ ID NO: 158201 - DNA, 25 bp, Artificial
  Probe
ctcgggttgttggaggatataactg

SEQ ID NO: 158202 - DNA, 25 bp, Artificial
  Probe
gacaacaagcacaacactgagatat

SEQ ID NO: 158203 - DNA, 25 bp, Artificial
  Probe
acaacaagcacaacactgagatatg

SEQ ID NO: 158204 - DNA, 25 bp, Artificial
  Probe
gttcattgacctcattcctaccaac

SEQ ID NO: 158205 - DNA, 25 bp, Artificial
  Probe
agacaacaagcacaacactgagata

SEQ ID NO: 158206 - DNA, 25 bp, Artificial
  Probe
ggaacaacaataataacatcactct

SEQ ID NO: 158207 - DNA, 25 bp, Artificial
  Probe
ttcattgacctcattcctaccaacc

SEQ ID NO: 158208 - DNA, 25 bp, Artificial
  Probe
ttacctaattaagtggaagcaggaa

SEQ ID NO: 158209 - DNA, 25 bp, Artificial
  Probe
ctgtgatattgcatggatatgaagc

SEQ ID NO: 158210 - DNA, 25 bp, Artificial
  Probe
attacctaattaagtggaagcagga

SEQ ID NO: 158211 - DNA, 25 bp, Artificial
  Probe
aagaaataagacgctttaccctcac

SEQ ID NO: 158212 - DNA, 25 bp, Artificial
  Probe
ccacattcggaatttacacttgaaa

SEQ ID NO: 158213 - DNA, 25 bp, Artificial
  Probe
agggaacaacaataataacatcact

SEQ ID NO: 158214 - DNA, 25 bp, Artificial
  Probe
ccaagggaacaacaataataacatc

SEQ ID NO: 158215 - DNA, 25 bp, Artificial
  Probe
agatgggaatggaaagtttaagaaa

SEQ ID NO: 158216 - DNA, 25 bp, Artificial
  Probe
tcaagaatcactggatgttacaaat

SEQ ID NO: 158217 - DNA, 25 bp, Artificial
  Probe
atcaagaatcactggatgttacaaa

SEQ ID NO: 158218 - DNA, 25 bp, Artificial
  Probe
cccaagggaacaacaataataacat

SEQ ID NO: 158219 - DNA, 25 bp, Artificial
  Probe
acccaagggaacaacaataataaca

SEQ ID NO: 158220 - DNA, 25 bp, Artificial
  Probe
aatagatggaaagaaataagacgct

SEQ ID NO: 158221 - DNA, 25 bp, Artificial
  Probe
cattgacctcattcctaccaacctg

SEQ ID NO: 158222 - DNA, 25 bp, Artificial
  Probe
ctaaagtccaggaagagattgatcg

SEQ ID NO: 158223 - DNA, 25 bp, Artificial
  Probe
acaataataacatcactctcatcag

SEQ ID NO: 158224 - DNA, 25 bp, Artificial
  Probe
aacaacaataataacatcactctca

SEQ ID NO: 158225 - DNA, 25 bp, Artificial
  Probe
caagaatcactggatgttacaaatc

SEQ ID NO: 158226 - DNA, 25 bp, Artificial
  Probe
gggaacaacaataataacatcactc

SEQ ID NO: 158227 - DNA, 25 bp, Artificial
  Probe
gctaaagtccaggaagagattgatc

SEQ ID NO: 158228 - DNA, 25 bp, Artificial
  Probe
aaatctgtacttcacccaaaggata

SEQ ID NO: 158229 - DNA, 25 bp, Artificial
  Probe
aatctgtacttcacccaaaggatat

SEQ ID NO: 158230 - DNA, 25 bp, Artificial
  Probe
tacccaagggaacaacaataataac

SEQ ID NO: 158231 - DNA, 25 bp, Artificial
  Probe
tcattgacctcattcctaccaacct

SEQ ID NO: 158232 - DNA, 25 bp, Artificial
  Probe
gaaatctgtacttcacccaaaggat

SEQ ID NO: 158233 - DNA, 25 bp, Artificial
  Probe
gagacaacaagcacaacactgagat

SEQ ID NO: 158234 - DNA, 25 bp, Artificial
  Probe
tattacctaattaagtggaagcagg

SEQ ID NO: 158235 - DNA, 25 bp, Artificial
  Probe
atagatggaaagaaataagacgctt

SEQ ID NO: 158236 - DNA, 25 bp, Artificial
  Probe
taaagtccaggaagagattgatcgt

SEQ ID NO: 158237 - DNA, 25 bp, Artificial
  Probe
aaataaagagatcaaattgcctggc

SEQ ID NO: 158238 - DNA, 25 bp, Artificial
  Probe
ctaatacccaagggaacaacaataa

SEQ ID NO: 158239 - DNA, 25 bp, Artificial
  Probe
acaacaataataacatcactctcat

SEQ ID NO: 158240 - DNA, 25 bp, Artificial
  Probe
ggttcattgacctcattcctaccaa

SEQ ID NO: 158241 - DNA, 25 bp, Artificial
  Probe
aagggaacaacaataataacatcac

SEQ ID NO: 158242 - DNA, 25 bp, Artificial
  Probe
caagggaacaacaataataacatca

SEQ ID NO: 158243 - DNA, 25 bp, Artificial
  Probe
tagatgggaatggaaagtttaagaa

SEQ ID NO: 158244 - DNA, 25 bp, Artificial
  Probe
ttagatgggaatggaaagtttaaga

SEQ ID NO: 158245 - DNA, 25 bp, Artificial
  Probe
aaatagatggaaagaaataagacgc

SEQ ID NO: 158246 - DNA, 25 bp, Artificial
  Probe
aagtgactatttcatgcctttctca

SEQ ID NO: 158247 - DNA, 25 bp, Artificial
  Probe
gtgtagagttctctgccattctgaa

SEQ ID NO: 158248 - DNA, 25 bp, Artificial
  Probe
atgtgtagagttctctgccattctg

SEQ ID NO: 158249 - DNA, 25 bp, Artificial
  Probe
catgtgtagagttctctgccattct

SEQ ID NO: 158250 - DNA, 25 bp, Artificial
  Probe
tgtgtagagttctctgccattctga

SEQ ID NO: 158251 - DNA, 25 bp, Artificial
  Probe
tgtagagttctctgccattctgaaa

SEQ ID NO: 158252 - DNA, 25 bp, Artificial
  Probe
acatgaaggccctagatattgattt

SEQ ID NO: 158253 - DNA, 25 bp, Artificial
  Probe
ctacatgaaggccctagatattgat

SEQ ID NO: 158254 - DNA, 25 bp, Artificial
  Probe
tacatgaaggccctagatattgatt

SEQ ID NO: 158255 - DNA, 25 bp, Artificial
  Probe
tagagttctctgccattctgaaaag

SEQ ID NO: 158256 - DNA, 25 bp, Artificial
  Probe
aacatgtgtagagttctctgccatt

SEQ ID NO: 158257 - DNA, 25 bp, Artificial
  Probe
gtagagttctctgccattctgaaaa

SEQ ID NO: 158258 - DNA, 25 bp, Artificial
  Probe
gctacatgaaggccctagatattga

SEQ ID NO: 158259 - DNA, 25 bp, Artificial
  Probe
acatgtgtagagttctctgccattc

SEQ ID NO: 158260 - DNA, 25 bp, Artificial
  Probe
ccctagatattgattttgccacccg

SEQ ID NO: 158261 - DNA, 25 bp, Artificial
  Probe
tgaaggccctagatattgattttgc

SEQ ID NO: 158262 - DNA, 25 bp, Artificial
  Probe
atgaaggccctagatattgattttg

SEQ ID NO: 158263 - DNA, 25 bp, Artificial
  Probe
catgaaggccctagatattgatttt

SEQ ID NO: 158264 - DNA, 25 bp, Artificial
  Probe
agagttctctgccattctgaaaagc

SEQ ID NO: 158265 - DNA, 25 bp, Artificial
  Probe
gccctagatattgattttgccaccc

SEQ ID NO: 158266 - DNA, 25 bp, Artificial
  Probe
cctagatattgattttgccacccgc

SEQ ID NO: 158267 - DNA, 25 bp, Artificial
  Probe
attctgaaaagcagcattgggactc

SEQ ID NO: 158268 - DNA, 25 bp, Artificial
  Probe
gaacatgtgtagagttctctgccat

SEQ ID NO: 158269 - DNA, 25 bp, Artificial
  Probe
cctggaacatgtgtagagttctctg

SEQ ID NO: 158270 - DNA, 25 bp, Artificial
  Probe
ggaagcctggaacatgtgtagagtt

SEQ ID NO: 158271 - DNA, 25 bp, Artificial
  Probe
gagtttgacgaacacacaaagggtc

SEQ ID NO: 158272 - DNA, 25 bp, Artificial
  Probe
cattctgaaaagcagcattgggact

SEQ ID NO: 158273 - DNA, 25 bp, Artificial
  Probe
cagaaaggggagaaggagaatcgtg

SEQ ID NO: 158274 - DNA, 25 bp, Artificial
  Probe
gtttgacgaacacacaaagggtctg

SEQ ID NO: 158275 - DNA, 25 bp, Artificial
  Probe
ctggaacatgtgtagagttctctgc

SEQ ID NO: 158276 - DNA, 25 bp, Artificial
  Probe
agtttgacgaacacacaaagggtct

SEQ ID NO: 158277 - DNA, 25 bp, Artificial
  Probe
gaagcctggaacatgtgtagagttc

SEQ ID NO: 158278 - DNA, 25 bp, Artificial
  Probe
ctagatattgattttgccacccgca

SEQ ID NO: 158279 - DNA, 25 bp, Artificial
  Probe
ggctacatgaaggccctagatattg

SEQ ID NO: 158280 - DNA, 25 bp, Artificial
  Probe
aggctacatgaaggccctagatatt

SEQ ID NO: 158281 - DNA, 25 bp, Artificial
  Probe
gagttctctgccattctgaaaagca

SEQ ID NO: 158282 - DNA, 25 bp, Artificial
  Probe
aagcctggaacatgtgtagagttct

SEQ ID NO: 158283 - DNA, 25 bp, Artificial
  Probe
gcctggaacatgtgtagagttctct

SEQ ID NO: 158284 - DNA, 25 bp, Artificial
  Probe
agcctggaacatgtgtagagttctc

SEQ ID NO: 158285 - DNA, 25 bp, Artificial
  Probe
ggaacatgtgtagagttctctgcca

SEQ ID NO: 158286 - DNA, 25 bp, Artificial
  Probe
tggaacatgtgtagagttctctgcc

SEQ ID NO: 158287 - DNA, 25 bp, Artificial
  Probe
ccattctgaaaagcagcattgggac

SEQ ID NO: 158288 - DNA, 25 bp, Artificial
  Probe
gtgcagaaaggggagaaggagaatc

SEQ ID NO: 158289 - DNA, 25 bp, Artificial
  Probe
gaaggccctagatattgattttgcc

SEQ ID NO: 158290 - DNA, 25 bp, Artificial
  Probe
aaggccctagatattgattttgcca

SEQ ID NO: 158291 - DNA, 25 bp, Artificial
  Probe
aggccctagatattgattttgccac

SEQ ID NO: 158292 - DNA, 25 bp, Artificial
  Probe
aaggacacacgaatactgaacaatg

SEQ ID NO: 158293 - DNA, 25 bp, Artificial
  Probe
caaggacacacgaatactgaacaat

SEQ ID NO: 158294 - DNA, 25 bp, Artificial
  Probe
cacacgaatactgaacaatggctag

SEQ ID NO: 158295 - DNA, 25 bp, Artificial
  Probe
acacacgaatactgaacaatggcta

SEQ ID NO: 158296 - DNA, 25 bp, Artificial
  Probe
acgaatactgaacaatggctaggag

SEQ ID NO: 158297 - DNA, 25 bp, Artificial
  Probe
cacgaatactgaacaatggctagga

SEQ ID NO: 158298 - DNA, 25 bp, Artificial
  Probe
aggacacacgaatactgaacaatgg

SEQ ID NO: 158299 - DNA, 25 bp, Artificial
  Probe
acacgaatactgaacaatggctagg

SEQ ID NO: 158300 - DNA, 25 bp, Artificial
  Probe
ccaaggacacacgaatactgaacaa

SEQ ID NO: 158301 - DNA, 25 bp, Artificial
  Probe
cgaatactgaacaatggctaggagg

SEQ ID NO: 158302 - DNA, 25 bp, Artificial
  Probe
gaatactgaacaatggctaggaggc

SEQ ID NO: 158303 - DNA, 25 bp, Artificial
  Probe
gacacacgaatactgaacaatggct

SEQ ID NO: 158304 - DNA, 25 bp, Artificial
  Probe
atactgaacaatggctaggaggctt

SEQ ID NO: 158305 - DNA, 25 bp, Artificial
  Probe
aatactgaacaatggctaggaggct

SEQ ID NO: 158306 - DNA, 25 bp, Artificial
  Probe
ggacacacgaatactgaacaatggc

SEQ ID NO: 158307 - DNA, 25 bp, Artificial
  Probe
ctgaacaatggctaggaggctttac

SEQ ID NO: 158308 - DNA, 25 bp, Artificial
  Probe
actgaacaatggctaggaggcttta

SEQ ID NO: 158309 - DNA, 25 bp, Artificial
  Probe
tactgaacaatggctaggaggcttt

SEQ ID NO: 158310 - DNA, 25 bp, Artificial
  Probe
tgaacaatggctaggaggctttacc

SEQ ID NO: 158311 - DNA, 25 bp, Artificial
  Probe
ttacaaggaatctctatctggtgga

SEQ ID NO: 158312 - DNA, 25 bp, Artificial
  Probe
tacaaggaatctctatctggtggag

SEQ ID NO: 158313 - DNA, 25 bp, Artificial
  Probe
agagagctaacacttctggatactt

SEQ ID NO: 158314 - DNA, 25 bp, Artificial
  Probe
aagagagctaacacttctggatact

SEQ ID NO: 158315 - DNA, 25 bp, Artificial
  Probe
tttacaaggaatctctatctggtgg

SEQ ID NO: 158316 - DNA, 25 bp, Artificial
  Probe
ttgaagtcatcctcagtctacaagg

SEQ ID NO: 158317 - DNA, 25 bp, Artificial
  Probe
catcctcagtctacaaggtgttctt

SEQ ID NO: 158318 - DNA, 25 bp, Artificial
  Probe
tttgaagtcatcctcagtctacaag

SEQ ID NO: 158319 - DNA, 25 bp, Artificial
  Probe
gaagtcatcctcagtctacaaggtg

SEQ ID NO: 158320 - DNA, 25 bp, Artificial
  Probe
gtttgaagtcatcctcagtctacaa

SEQ ID NO: 158321 - DNA, 25 bp, Artificial
  Probe
ctttacaaggaatctctatctggtg

SEQ ID NO: 158322 - DNA, 25 bp, Artificial
  Probe
tcatcctcagtctacaaggtgttct

SEQ ID NO: 158323 - DNA, 25 bp, Artificial
  Probe
gtcatcctcagtctacaaggtgttc

SEQ ID NO: 158324 - DNA, 25 bp, Artificial
  Probe
tgaagtcatcctcagtctacaaggt

SEQ ID NO: 158325 - DNA, 25 bp, Artificial
  Probe
acaaggaatctctatctggtggagg

SEQ ID NO: 158326 - DNA, 25 bp, Artificial
  Probe
agtcatcctcagtctacaaggtgtt

SEQ ID NO: 158327 - DNA, 25 bp, Artificial
  Probe
aagtcatcctcagtctacaaggtgt

SEQ ID NO: 158328 - DNA, 25 bp, Artificial
  Probe
ctgtttgaagtcatcctcagtctac

SEQ ID NO: 158329 - DNA, 25 bp, Artificial
  Probe
tgtttgaagtcatcctcagtctaca

SEQ ID NO: 158330 - DNA, 25 bp, Artificial
  Probe
ttcttgcctcttgtgtgttccttta

SEQ ID NO: 158331 - DNA, 25 bp, Artificial
  Probe
cctgtttgaagtcatcctcagtcta

SEQ ID NO: 158332 - DNA, 25 bp, Artificial
  Probe
gaagagagctaacacttctggatac

SEQ ID NO: 158333 - DNA, 25 bp, Artificial
  Probe
tcttgcctcttgtgtgttcctttac

SEQ ID NO: 158334 - DNA, 25 bp, Artificial
  Probe
ggaagagagctaacacttctggata

SEQ ID NO: 158335 - DNA, 25 bp, Artificial
  Probe
atcctcagtctacaaggtgttcttg

SEQ ID NO: 158336 - DNA, 25 bp, Artificial
  Probe
tgttcttgcctcttgtgtgttcctt

SEQ ID NO: 158337 - DNA, 25 bp, Artificial
  Probe
cttgcctcttgtgtgttcctttaca

SEQ ID NO: 158338 - DNA, 25 bp, Artificial
  Probe
gttcttgcctcttgtgtgttccttt

SEQ ID NO: 158339 - DNA, 25 bp, Artificial
  Probe
caaggaatctctatctggtggaggg

SEQ ID NO: 158340 - DNA, 25 bp, Artificial
  Probe
cctttacaaggaatctctatctggt

SEQ ID NO: 158341 - DNA, 25 bp, Artificial
  Probe
aaggtgttcttgcctcttgtgtgtt

SEQ ID NO: 158342 - DNA, 25 bp, Artificial
  Probe
gtctacaaggtgttcttgcctcttg

SEQ ID NO: 158343 - DNA, 25 bp, Artificial
  Probe
agtctacaaggtgttcttgcctctt

SEQ ID NO: 158344 - DNA, 25 bp, Artificial
  Probe
gcctgtttgaagtcatcctcagtct

SEQ ID NO: 158345 - DNA, 25 bp, Artificial
  Probe
ttgcctcttgtgtgttcctttacaa

SEQ ID NO: 158346 - DNA, 25 bp, Artificial
  Probe
cagtctacaaggtgttcttgcctct

SEQ ID NO: 158347 - DNA, 25 bp, Artificial
  Probe
tcagtctacaaggtgttcttgcctc

SEQ ID NO: 158348 - DNA, 25 bp, Artificial
  Probe
ctcagtctacaaggtgttcttgcct

SEQ ID NO: 158349 - DNA, 25 bp, Artificial
  Probe
tcctcagtctacaaggtgttcttgc

SEQ ID NO: 158350 - DNA, 25 bp, Artificial
  Probe
tgcctgtttgaagtcatcctcagtc

SEQ ID NO: 158351 - DNA, 25 bp, Artificial
  Probe
gggaagagagctaacacttctggat

SEQ ID NO: 158352 - DNA, 25 bp, Artificial
  Probe
cctcagtctacaaggtgttcttgcc

SEQ ID NO: 158353 - DNA, 25 bp, Artificial
  Probe
aaggaatctctatctggtggagggg

SEQ ID NO: 158354 - DNA, 25 bp, Artificial
  Probe
ctccgggttatctccatgcagaaag

SEQ ID NO: 158355 - DNA, 25 bp, Artificial
  Probe
ttcttgtaatccaggctctgatgtt

SEQ ID NO: 158356 - DNA, 25 bp, Artificial
  Probe
aatttcttgtaatccaggctctgat

SEQ ID NO: 158357 - DNA, 25 bp, Artificial
  Probe
cactgtccaatttcttgtaatccag

SEQ ID NO: 158358 - DNA, 25 bp, Artificial
  Probe
atttcttgtaatccaggctctgatg

SEQ ID NO: 158359 - DNA, 25 bp, Artificial
  Probe
actgtccaatttcttgtaatccagg

SEQ ID NO: 158360 - DNA, 25 bp, Artificial
  Probe
gcactgtccaatttcttgtaatcca

SEQ ID NO: 158361 - DNA, 25 bp, Artificial
  Probe
caatttcttgtaatccaggctctga

SEQ ID NO: 158362 - DNA, 25 bp, Artificial
  Probe
tccaatttcttgtaatccaggctct

SEQ ID NO: 158363 - DNA, 25 bp, Artificial
  Probe
gtccaatttcttgtaatccaggctc

SEQ ID NO: 158364 - DNA, 25 bp, Artificial
  Probe
tcttgtaatccaggctctgatgttt

SEQ ID NO: 158365 - DNA, 25 bp, Artificial
  Probe
tttcttgtaatccaggctctgatgt

SEQ ID NO: 158366 - DNA, 25 bp, Artificial
  Probe
ccaatttcttgtaatccaggctctg

SEQ ID NO: 158367 - DNA, 25 bp, Artificial
  Probe
tgtccaatttcttgtaatccaggct

SEQ ID NO: 158368 - DNA, 25 bp, Artificial
  Probe
ctctcaagctgtgtttctggattac

SEQ ID NO: 158369 - DNA, 25 bp, Artificial
  Probe
ctgtccaatttcttgtaatccaggc

SEQ ID NO: 158370 - DNA, 25 bp, Artificial
  Probe
ctgcactgtccaatttcttgtaatc

SEQ ID NO: 158371 - DNA, 25 bp, Artificial
  Probe
aatgagaagcaattgttgatcctgg

SEQ ID NO: 158372 - DNA, 25 bp, Artificial
  Probe
caaatcgaagaagcaaggaaggttt

SEQ ID NO: 158373 - DNA, 25 bp, Artificial
  Probe
aaacaaatcgaagaagcaaggaagg

SEQ ID NO: 158374 - DNA, 25 bp, Artificial
  Probe
tgcactgtccaatttcttgtaatcc

SEQ ID NO: 158375 - DNA, 25 bp, Artificial
  Probe
agcaaggaaggttttcaagttttag

SEQ ID NO: 158376 - DNA, 25 bp, Artificial
  Probe
aagcaaggaaggttttcaagtttta

SEQ ID NO: 158377 - DNA, 25 bp, Artificial
  Probe
gaagcaaggaaggttttcaagtttt

SEQ ID NO: 158378 - DNA, 25 bp, Artificial
  Probe
tctcaagctgtgtttctggattaca

SEQ ID NO: 158379 - DNA, 25 bp, Artificial
  Probe
caaggaaggttttcaagttttagcg

SEQ ID NO: 158380 - DNA, 25 bp, Artificial
  Probe
gcaaggaaggttttcaagttttagc

SEQ ID NO: 158381 - DNA, 25 bp, Artificial
  Probe
agaagcaaggaaggttttcaagttt

SEQ ID NO: 158382 - DNA, 25 bp, Artificial
  Probe
aagaagcaaggaaggttttcaagtt

SEQ ID NO: 158383 - DNA, 25 bp, Artificial
  Probe
gctgcactgtccaatttcttgtaat

SEQ ID NO: 158384 - DNA, 25 bp, Artificial
  Probe
aaatgagaagcaattgttgatcctg

SEQ ID NO: 158385 - DNA, 25 bp, Artificial
  Probe
gaagaagcaaggaaggttttcaagt

SEQ ID NO: 158386 - DNA, 25 bp, Artificial
  Probe
acaaatcgaagaagcaaggaaggtt

SEQ ID NO: 158387 - DNA, 25 bp, Artificial
  Probe
aacaaatcgaagaagcaaggaaggt

SEQ ID NO: 158388 - DNA, 25 bp, Artificial
  Probe
aaggaaggttttcaagttttagcgg

SEQ ID NO: 158389 - DNA, 25 bp, Artificial
  Probe
cttgtaatccaggctctgatgtttt

SEQ ID NO: 158390 - DNA, 25 bp, Artificial
  Probe
gaagcaattgttgatcctggctatt

SEQ ID NO: 158391 - DNA, 25 bp, Artificial
  Probe
ttgtaatccaggctctgatgttttg

SEQ ID NO: 158392 - DNA, 25 bp, Artificial
  Probe
ggaaggttttcaagttttagcggag

SEQ ID NO: 158393 - DNA, 25 bp, Artificial
  Probe
agctgcactgtccaatttcttgtaa

SEQ ID NO: 158394 - DNA, 25 bp, Artificial
  Probe
aggaaggttttcaagttttagcgga

SEQ ID NO: 158395 - DNA, 25 bp, Artificial
  Probe
cgaagaagcaaggaaggttttcaag

SEQ ID NO: 158396 - DNA, 25 bp, Artificial
  Probe
aaatcgaagaagcaaggaaggtttt

SEQ ID NO: 158397 - DNA, 25 bp, Artificial
  Probe
agaagcaattgttgatcctggctat

SEQ ID NO: 158398 - DNA, 25 bp, Artificial
  Probe
gaaggttttcaagttttagcggagc

SEQ ID NO: 158399 - DNA, 25 bp, Artificial
  Probe
gagctgcactgtccaatttcttgta

SEQ ID NO: 158400 - DNA, 25 bp, Artificial
  Probe
ttcctatctccactctgtagtacaa

SEQ ID NO: 158401 - DNA, 25 bp, Artificial
  Probe
cttcctatctccactctgtagtaca

SEQ ID NO: 158402 - DNA, 25 bp, Artificial
  Probe
tcctatctccactctgtagtacaac

SEQ ID NO: 158403 - DNA, 25 bp, Artificial
  Probe
ctatctccactctgtagtacaacca

SEQ ID NO: 158404 - DNA, 25 bp, Artificial
  Probe
tatctccactctgtagtacaaccag

SEQ ID NO: 158405 - DNA, 25 bp, Artificial
  Probe
gcttcctatctccactctgtagtac

SEQ ID NO: 158406 - DNA, 25 bp, Artificial
  Probe
cctatctccactctgtagtacaacc

SEQ ID NO: 158407 - DNA, 25 bp, Artificial
  Probe
ggcttcctatctccactctgtagta

SEQ ID NO: 158408 - DNA, 25 bp, Artificial
  Probe
ccagcttacgcatattcctatatat

SEQ ID NO: 158409 - DNA, 25 bp, Artificial
  Probe
atctccactctgtagtacaaccagt

SEQ ID NO: 158410 - DNA, 25 bp, Artificial
  Probe
acaaccagtttaagagtattcctgt

SEQ ID NO: 158411 - DNA, 25 bp, Artificial
  Probe
tctccactctgtagtacaaccagtt

SEQ ID NO: 158412 - DNA, 25 bp, Artificial
  Probe
caaccagtttaagagtattcctgtt

SEQ ID NO: 158413 - DNA, 25 bp, Artificial
  Probe
gtacaaccagtttaagagtattcct

SEQ ID NO: 158414 - DNA, 25 bp, Artificial
  Probe
agtacaaccagtttaagagtattcc

SEQ ID NO: 158415 - DNA, 25 bp, Artificial
  Probe
ccactctgtagtacaaccagtttaa

SEQ ID NO: 158416 - DNA, 25 bp, Artificial
  Probe
cccagcttacgcatattcctatata

SEQ ID NO: 158417 - DNA, 25 bp, Artificial
  Probe
tccactctgtagtacaaccagttta

SEQ ID NO: 158418 - DNA, 25 bp, Artificial
  Probe
tctgtagtacaaccagtttaagagt

SEQ ID NO: 158419 - DNA, 25 bp, Artificial
  Probe
actctgtagtacaaccagtttaaga

SEQ ID NO: 158420 - DNA, 25 bp, Artificial
  Probe
cactctgtagtacaaccagtttaag

SEQ ID NO: 158421 - DNA, 25 bp, Artificial
  Probe
tacaaccagtttaagagtattcctg

SEQ ID NO: 158422 - DNA, 25 bp, Artificial
  Probe
acccagcttacgcatattcctatat

SEQ ID NO: 158423 - DNA, 25 bp, Artificial
  Probe
aacccagcttacgcatattcctata

SEQ ID NO: 158424 - DNA, 25 bp, Artificial
  Probe
caggcttcctatctccactctgtag

SEQ ID NO: 158425 - DNA, 25 bp, Artificial
  Probe
ctccactctgtagtacaaccagttt

SEQ ID NO: 158426 - DNA, 25 bp, Artificial
  Probe
catgttgactgcctcagactgtaag

SEQ ID NO: 158427 - DNA, 25 bp, Artificial
  Probe
aaccagtttaagagtattcctgtta

SEQ ID NO: 158428 - DNA, 25 bp, Artificial
  Probe
aaacccagcttacgcatattcctat

SEQ ID NO: 158429 - DNA, 25 bp, Artificial
  Probe
ctgtagtacaaccagtttaagagta

SEQ ID NO: 158430 - DNA, 25 bp, Artificial
  Probe
aggcttcctatctccactctgtagt

SEQ ID NO: 158431 - DNA, 25 bp, Artificial
  Probe
tcaggcttcctatctccactctgta

SEQ ID NO: 158432 - DNA, 25 bp, Artificial
  Probe
accagtttaagagtattcctgttat

SEQ ID NO: 158433 - DNA, 25 bp, Artificial
  Probe
tagactcgtttaataaagactctct

SEQ ID NO: 158434 - DNA, 25 bp, Artificial
  Probe
tgttcttgcattggactcacaattc

SEQ ID NO: 158435 - DNA, 25 bp, Artificial
  Probe
ctctctttgttcttgcattggactc

SEQ ID NO: 158436 - DNA, 25 bp, Artificial
  Probe
gcaattagactcgtttaataaagac

SEQ ID NO: 158437 - DNA, 25 bp, Artificial
  Probe
gactctctttgttcttgcattggac

SEQ ID NO: 158438 - DNA, 25 bp, Artificial
  Probe
tgtagtacaaccagtttaagagtat

SEQ ID NO: 158439 - DNA, 25 bp, Artificial
  Probe
ctctttgttcttgcattggactcac

SEQ ID NO: 158440 - DNA, 25 bp, Artificial
  Probe
agactctctttgttcttgcattgga

SEQ ID NO: 158441 - DNA, 25 bp, Artificial
  Probe
gaaacccagcttacgcatattccta

SEQ ID NO: 158442 - DNA, 25 bp, Artificial
  Probe
tctctttgttcttgcattggactca

SEQ ID NO: 158443 - DNA, 25 bp, Artificial
  Probe
actctctttgttcttgcattggact

SEQ ID NO: 158444 - DNA, 25 bp, Artificial
  Probe
ttcttgcattggactcacaattcct

SEQ ID NO: 158445 - DNA, 25 bp, Artificial
  Probe
atgagagagagagagagagagagag

SEQ ID NO: 158446 - DNA, 25 bp, Artificial
  Probe
aatgagagagagagagagagagaga

SEQ ID NO: 158447 - DNA, 25 bp, Artificial
  Probe
gagagagagagagagagagaacgaa

SEQ ID NO: 158448 - DNA, 25 bp, Artificial
  Probe
agagagagagagagagagaacgaac

SEQ ID NO: 158449 - DNA, 25 bp, Artificial
  Probe
gagagagagagagagagagagaacg

SEQ ID NO: 158450 - DNA, 25 bp, Artificial
  Probe
agagagagagagagagagagaacga

SEQ ID NO: 158451 - DNA, 25 bp, Artificial
  Probe
gagagagagagagagaacgaaccat

SEQ ID NO: 158452 - DNA, 25 bp, Artificial
  Probe
aaatgagagagagagagagagagag

SEQ ID NO: 158453 - DNA, 25 bp, Artificial
  Probe
taaatgagagagagagagagagaga

SEQ ID NO: 158454 - DNA, 25 bp, Artificial
  Probe
acaacacatttcaattaccgagaac

SEQ ID NO: 158455 - DNA, 25 bp, Artificial
  Probe
aacaacacatttcaattaccgagaa

SEQ ID NO: 158456 - DNA, 25 bp, Artificial
  Probe
taacaacacatttcaattaccgaga

SEQ ID NO: 158457 - DNA, 25 bp, Artificial
  Probe
gagagagagagagagagaacgaacc

SEQ ID NO: 158458 - DNA, 25 bp, Artificial
  Probe
ttaacaacacatttcaattaccgag

SEQ ID NO: 158459 - DNA, 25 bp, Artificial
  Probe
ataaatgagagagagagagagagag

SEQ ID NO: 158460 - DNA, 25 bp, Artificial
  Probe
aactatctcagccctacacttgaaa

SEQ ID NO: 158461 - DNA, 25 bp, Artificial
  Probe
tttaacaacacatttcaattaccga

SEQ ID NO: 158462 - DNA, 25 bp, Artificial
  Probe
agagagagagagagaacgaaccatg

SEQ ID NO: 158463 - DNA, 25 bp, Artificial
  Probe
catgggtttcttctgaactatctca

SEQ ID NO: 158464 - DNA, 25 bp, Artificial
  Probe
aataaatgagagagagagagagaga

SEQ ID NO: 158465 - DNA, 25 bp, Artificial
  Probe
gaactatctcagccctacacttgaa

SEQ ID NO: 158466 - DNA, 25 bp, Artificial
  Probe
gagtggcagcatttagggaaataaa

SEQ ID NO: 158467 - DNA, 25 bp, Artificial
  Probe
agagagagagagagagaacgaacca

SEQ ID NO: 158468 - DNA, 25 bp, Artificial
  Probe
aaataaatgagagagagagagagag

SEQ ID NO: 158469 - DNA, 25 bp, Artificial
  Probe
atttaacaacacatttcaattaccg

SEQ ID NO: 158470 - DNA, 25 bp, Artificial
  Probe
ctgtcagagagtggatagaccttcc

SEQ ID NO: 158471 - DNA, 25 bp, Artificial
  Probe
tgaactatctcagccctacacttga

SEQ ID NO: 158472 - DNA, 25 bp, Artificial
  Probe
gtggcagcatttagggaaataaata

SEQ ID NO: 158473 - DNA, 25 bp, Artificial
  Probe
aagaagaaacaaaacaaagcaaagc

SEQ ID NO: 158474 - DNA, 25 bp, Artificial
  Probe
tggcagcatttagggaaataaataa

SEQ ID NO: 158475 - DNA, 25 bp, Artificial
  Probe
agtggcagcatttagggaaataaat

SEQ ID NO: 158476 - DNA, 25 bp, Artificial
  Probe
tcctctcagcattaaaatcaaacag

SEQ ID NO: 158477 - DNA, 25 bp, Artificial
  Probe
cctttcctctcagcattaaaatcaa

SEQ ID NO: 158478 - DNA, 25 bp, Artificial
  Probe
gctgtcagagagtggatagaccttc

SEQ ID NO: 158479 - DNA, 25 bp, Artificial
  Probe
aagaaagcgtcccatgaagaagaaa

SEQ ID NO: 158480 - DNA, 25 bp, Artificial
  Probe
aaagaaagcgtcccatgaagaagaa

SEQ ID NO: 158481 - DNA, 25 bp, Artificial
  Probe
cctaatctagagtaaacaaccaccc

SEQ ID NO: 158482 - DNA, 25 bp, Artificial
  Probe
acctaatctagagtaaacaaccacc

SEQ ID NO: 158483 - DNA, 25 bp, Artificial
  Probe
ttcctctcagcattaaaatcaaaca

SEQ ID NO: 158484 - DNA, 25 bp, Artificial
  Probe
tgaagaagaaacaaaacaaagcaaa

SEQ ID NO: 158485 - DNA, 25 bp, Artificial
  Probe
cctctcagcattaaaatcaaacaga

SEQ ID NO: 158486 - DNA, 25 bp, Artificial
  Probe
atgaagaagaaacaaaacaaagcaa

SEQ ID NO: 158487 - DNA, 25 bp, Artificial
  Probe
cctacacttgaaaattgctagatgg

SEQ ID NO: 158488 - DNA, 25 bp, Artificial
  Probe
ccctacacttgaaaattgctagatg

SEQ ID NO: 158489 - DNA, 25 bp, Artificial
  Probe
ggagtggcagcatttagggaaataa

SEQ ID NO: 158490 - DNA, 25 bp, Artificial
  Probe
tggataagatgttaattgagcacaa

SEQ ID NO: 158491 - DNA, 25 bp, Artificial
  Probe
gtggataagatgttaattgagcaca

SEQ ID NO: 158492 - DNA, 25 bp, Artificial
  Probe
tagtggataagatgttaattgagca

SEQ ID NO: 158493 - DNA, 25 bp, Artificial
  Probe
agtggataagatgttaattgagcac

SEQ ID NO: 158494 - DNA, 25 bp, Artificial
  Probe
ggataagatgttaattgagcacaag

SEQ ID NO: 158495 - DNA, 25 bp, Artificial
  Probe
atttgagtatgaggaccctttcttc

SEQ ID NO: 158496 - DNA, 25 bp, Artificial
  Probe
gatttgagtatgaggaccctttctt

SEQ ID NO: 158497 - DNA, 25 bp, Artificial
  Probe
gccttagtggataagatgttaattg

SEQ ID NO: 158498 - DNA, 25 bp, Artificial
  Probe
cacgaggagattgatgaggtcatag

SEQ ID NO: 158499 - DNA, 25 bp, Artificial
  Probe
agccttagtggataagatgttaatt

SEQ ID NO: 158500 - DNA, 25 bp, Artificial
  Probe
acatcccgagacattaaattccaag

SEQ ID NO: 158501 - DNA, 25 bp, Artificial
  Probe
gacatcccgagacattaaattccaa

SEQ ID NO: 158502 - DNA, 25 bp, Artificial
  Probe
atgacatcccgagacattaaattcc

SEQ ID NO: 158503 - DNA, 25 bp, Artificial
  Probe
gataagatgttaattgagcacaaga

SEQ ID NO: 158504 - DNA, 25 bp, Artificial
  Probe
ttagtggataagatgttaattgagc

SEQ ID NO: 158505 - DNA, 25 bp, Artificial
  Probe
tatgacatcccgagacattaaattc

SEQ ID NO: 158506 - DNA, 25 bp, Artificial
  Probe
catcccgagacattaaattccaagg

SEQ ID NO: 158507 - DNA, 25 bp, Artificial
  Probe
cctactgcccatctataatcacctg

SEQ ID NO: 158508 - DNA, 25 bp, Artificial
  Probe
ttgatgtccaataaacaacttctgt

SEQ ID NO: 158509 - DNA, 25 bp, Artificial
  Probe
atctataatcacctgggctatggga

SEQ ID NO: 158510 - DNA, 25 bp, Artificial
  Probe
tttgagtatgaggaccctttcttca

SEQ ID NO: 158511 - DNA, 25 bp, Artificial
  Probe
ataagatgttaattgagcacaagaa

SEQ ID NO: 158512 - DNA, 25 bp, Artificial
  Probe
tgacatcccgagacattaaattcca

SEQ ID NO: 158513 - DNA, 25 bp, Artificial
  Probe
ctataatcacctgggctatgggaac

SEQ ID NO: 158514 - DNA, 25 bp, Artificial
  Probe
catctataatcacctgggctatggg

SEQ ID NO: 158515 - DNA, 25 bp, Artificial
  Probe
atatgacatcccgagacattaaatt

SEQ ID NO: 158516 - DNA, 25 bp, Artificial
  Probe
cattaaattccaaggcttcctcatc

SEQ ID NO: 158517 - DNA, 25 bp, Artificial
  Probe
tctataatcacctgggctatgggaa

SEQ ID NO: 158518 - DNA, 25 bp, Artificial
  Probe
tagccttagtggataagatgttaat

SEQ ID NO: 158519 - DNA, 25 bp, Artificial
  Probe
atagccttagtggataagatgttaa

SEQ ID NO: 158520 - DNA, 25 bp, Artificial
  Probe
ttatagccttagtggataagatgtt

SEQ ID NO: 158521 - DNA, 25 bp, Artificial
  Probe
cgatttgagtatgaggaccctttct

SEQ ID NO: 158522 - DNA, 25 bp, Artificial
  Probe
acattaaattccaaggcttcctcat

SEQ ID NO: 158523 - DNA, 25 bp, Artificial
  Probe
cgagacattaaattccaaggcttcc

SEQ ID NO: 158524 - DNA, 25 bp, Artificial
  Probe
ccgagacattaaattccaaggcttc

SEQ ID NO: 158525 - DNA, 25 bp, Artificial
  Probe
acgaggagattgatgaggtcatagg

SEQ ID NO: 158526 - DNA, 25 bp, Artificial
  Probe
attaaattccaaggcttcctcatcc

SEQ ID NO: 158527 - DNA, 25 bp, Artificial
  Probe
agacattaaattccaaggcttcctc

SEQ ID NO: 158528 - DNA, 25 bp, Artificial
  Probe
gagacattaaattccaaggcttcct

SEQ ID NO: 158529 - DNA, 25 bp, Artificial
  Probe
tcaattcatttatagccttagtgga

SEQ ID NO: 158530 - DNA, 25 bp, Artificial
  Probe
tgatgtccaataaacaacttctgta

SEQ ID NO: 158531 - DNA, 25 bp, Artificial
  Probe
gacattaaattccaaggcttcctca

SEQ ID NO: 158532 - DNA, 25 bp, Artificial
  Probe
agtatgaggaccctttcttcaacag

SEQ ID NO: 158533 - DNA, 25 bp, Artificial
  Probe
gagtatgaggaccctttcttcaaca

SEQ ID NO: 158534 - DNA, 25 bp, Artificial
  Probe
tgagtatgaggaccctttcttcaac

SEQ ID NO: 158535 - DNA, 25 bp, Artificial
  Probe
aacattcagaaccaccttcaagatg

SEQ ID NO: 158536 - DNA, 25 bp, Artificial
  Probe
aaacattcagaaccaccttcaagat

SEQ ID NO: 158537 - DNA, 25 bp, Artificial
  Probe
attcagaaccaccttcaagatgctc

SEQ ID NO: 158538 - DNA, 25 bp, Artificial
  Probe
cattcagaaccaccttcaagatgct

SEQ ID NO: 158539 - DNA, 25 bp, Artificial
  Probe
acattcagaaccaccttcaagatgc

SEQ ID NO: 158540 - DNA, 25 bp, Artificial
  Probe
ttcagaaccaccttcaagatgctcc

SEQ ID NO: 158541 - DNA, 25 bp, Artificial
  Probe
cagaaccaccttcaagatgctcctc

SEQ ID NO: 158542 - DNA, 25 bp, Artificial
  Probe
gaaccaccttcaagatgctcctctt

SEQ ID NO: 158543 - DNA, 25 bp, Artificial
  Probe
gcttcaacacttactccagttctta

SEQ ID NO: 158544 - DNA, 25 bp, Artificial
  Probe
cttcaacacttactccagttcttaa

SEQ ID NO: 158545 - DNA, 25 bp, Artificial
  Probe
ctatgtctgagtgttgcttctcctt

SEQ ID NO: 158546 - DNA, 25 bp, Artificial
  Probe
aataattctctccctacttcctcca

SEQ ID NO: 158547 - DNA, 25 bp, Artificial
  Probe
ataattctctccctacttcctccag

SEQ ID NO: 158548 - DNA, 25 bp, Artificial
  Probe
aaataattctctccctacttcctcc

SEQ ID NO: 158549 - DNA, 25 bp, Artificial
  Probe
ggcttcaacacttactccagttctt

SEQ ID NO: 158550 - DNA, 25 bp, Artificial
  Probe
agttctatctcttcacttccttccc

SEQ ID NO: 158551 - DNA, 25 bp, Artificial
  Probe
gcagcctgaatatctaaagttctat

SEQ ID NO: 158552 - DNA, 25 bp, Artificial
  Probe
gagtgttgcttctcctttcttagag

SEQ ID NO: 158553 - DNA, 25 bp, Artificial
  Probe
cctagcagatgaaacatgagtctta

SEQ ID NO: 158554 - DNA, 25 bp, Artificial
  Probe
ctgagtgttgcttctcctttcttag

SEQ ID NO: 158555 - DNA, 25 bp, Artificial
  Probe
ccagttcttaaataattctctccct

SEQ ID NO: 158556 - DNA, 25 bp, Artificial
  Probe
tccagttcttaaataattctctccc

SEQ ID NO: 158557 - DNA, 25 bp, Artificial
  Probe
ggcagcctgaatatctaaagttcta

SEQ ID NO: 158558 - DNA, 25 bp, Artificial
  Probe
aagttctatctcttcacttccttcc

SEQ ID NO: 158559 - DNA, 25 bp, Artificial
  Probe
ttcaacacttactccagttcttaaa

SEQ ID NO: 158560 - DNA, 25 bp, Artificial
  Probe
tgagtgttgcttctcctttcttaga

SEQ ID NO: 158561 - DNA, 25 bp, Artificial
  Probe
tctgagtgttgcttctcctttctta

SEQ ID NO: 158562 - DNA, 25 bp, Artificial
  Probe
aacatctaaggacatttgtacttgc

SEQ ID NO: 158563 - DNA, 25 bp, Artificial
  Probe
gcctgaacatctaaggacatttgta

SEQ ID NO: 158564 - DNA, 25 bp, Artificial
  Probe
tcaacacttactccagttcttaaat

SEQ ID NO: 158565 - DNA, 25 bp, Artificial
  Probe
ctagcagatgaaacatgagtcttaa

SEQ ID NO: 158566 - DNA, 25 bp, Artificial
  Probe
tatgtctgagtgttgcttctccttt

SEQ ID NO: 158567 - DNA, 25 bp, Artificial
  Probe
aggcttcaacacttactccagttct

SEQ ID NO: 158568 - DNA, 25 bp, Artificial
  Probe
caggcttcaacacttactccagttc

SEQ ID NO: 158569 - DNA, 25 bp, Artificial
  Probe
cctgaacatctaaggacatttgtac

SEQ ID NO: 158570 - DNA, 25 bp, Artificial
  Probe
ctggcagcctgaatatctaaagttc

SEQ ID NO: 158571 - DNA, 25 bp, Artificial
  Probe
ctgaacatctaaggacatttgtact

SEQ ID NO: 158572 - DNA, 25 bp, Artificial
  Probe
acctagcagatgaaacatgagtctt

SEQ ID NO: 158573 - DNA, 25 bp, Artificial
  Probe
cattcctggcagcctgaatatctaa

SEQ ID NO: 158574 - DNA, 25 bp, Artificial
  Probe
tggcagcctgaatatctaaagttct

SEQ ID NO: 158575 - DNA, 25 bp, Artificial
  Probe
catctaaggacatttgtacttgcag

SEQ ID NO: 158576 - DNA, 25 bp, Artificial
  Probe
taattctctccctacttcctccagc

SEQ ID NO: 158577 - DNA, 25 bp, Artificial
  Probe
cagcctgaacatctaaggacatttg

SEQ ID NO: 158578 - DNA, 25 bp, Artificial
  Probe
ttcttagagacagtcgtgtgtgtgt

SEQ ID NO: 158579 - DNA, 25 bp, Artificial
  Probe
cctatgtctgagtgttgcttctcct

SEQ ID NO: 158580 - DNA, 25 bp, Artificial
  Probe
atctaaggacatttgtacttgcagg

SEQ ID NO: 158581 - DNA, 25 bp, Artificial
  Probe
tgaacatctaaggacatttgtactt

SEQ ID NO: 158582 - DNA, 25 bp, Artificial
  Probe
gaacatctaaggacatttgtacttg

SEQ ID NO: 158583 - DNA, 25 bp, Artificial
  Probe
agcctgaacatctaaggacatttgt

SEQ ID NO: 158584 - DNA, 25 bp, Artificial
  Probe
cacctagcagatgaaacatgagtct

SEQ ID NO: 158585 - DNA, 25 bp, Artificial
  Probe
taaataattctctccctacttcctc

SEQ ID NO: 158586 - DNA, 25 bp, Artificial
  Probe
ctccagttcttaaataattctctcc

SEQ ID NO: 158587 - DNA, 25 bp, Artificial
  Probe
ctttcttagagacagtcgtgtgtgt

SEQ ID NO: 158588 - DNA, 25 bp, Artificial
  Probe
gaaatctaccattcctcattaaccc

SEQ ID NO: 158589 - DNA, 25 bp, Artificial
  Probe
ttaaccccttgactatgaaacagac

SEQ ID NO: 158590 - DNA, 25 bp, Artificial
  Probe
attaaccccttgactatgaaacaga

SEQ ID NO: 158591 - DNA, 25 bp, Artificial
  Probe
aaatctaccattcctcattaacccc

SEQ ID NO: 158592 - DNA, 25 bp, Artificial
  Probe
taaccccttgactatgaaacagact

SEQ ID NO: 158593 - DNA, 25 bp, Artificial
  Probe
cattaaccccttgactatgaaacag

SEQ ID NO: 158594 - DNA, 25 bp, Artificial
  Probe
atctaccattcctcattaacccctt

SEQ ID NO: 158595 - DNA, 25 bp, Artificial
  Probe
aatctaccattcctcattaacccct

SEQ ID NO: 158596 - DNA, 25 bp, Artificial
  Probe
attcctcattaaccccttgactatg

SEQ ID NO: 158597 - DNA, 25 bp, Artificial
  Probe
cattcctcattaaccccttgactat

SEQ ID NO: 158598 - DNA, 25 bp, Artificial
  Probe
tctaccattcctcattaaccccttg

SEQ ID NO: 158599 - DNA, 25 bp, Artificial
  Probe
ccattcctcattaaccccttgacta

SEQ ID NO: 158600 - DNA, 25 bp, Artificial
  Probe
ctaccattcctcattaaccccttga

SEQ ID NO: 158601 - DNA, 25 bp, Artificial
  Probe
taccattcctcattaaccccttgac

SEQ ID NO: 158602 - DNA, 25 bp, Artificial
  Probe
aaccccttgactatgaaacagactg

SEQ ID NO: 158603 - DNA, 25 bp, Artificial
  Probe
ggaaatctaccattcctcattaacc

SEQ ID NO: 158604 - DNA, 25 bp, Artificial
  Probe
tggaaatctaccattcctcattaac

SEQ ID NO: 158605 - DNA, 25 bp, Artificial
  Probe
tcattaaccccttgactatgaaaca

SEQ ID NO: 158606 - DNA, 25 bp, Artificial
  Probe
cctcattaaccccttgactatgaaa

SEQ ID NO: 158607 - DNA, 25 bp, Artificial
  Probe
ctcattaaccccttgactatgaaac

SEQ ID NO: 158608 - DNA, 25 bp, Artificial
  Probe
catggaaatctaccattcctcatta

SEQ ID NO: 158609 - DNA, 25 bp, Artificial
  Probe
tcctcattaaccccttgactatgaa

SEQ ID NO: 158610 - DNA, 25 bp, Artificial
  Probe
ttcctcattaaccccttgactatga

SEQ ID NO: 158611 - DNA, 25 bp, Artificial
  Probe
accattcctcattaaccccttgact

SEQ ID NO: 158612 - DNA, 25 bp, Artificial
  Probe
atggaaatctaccattcctcattaa

SEQ ID NO: 158613 - DNA, 25 bp, Artificial
  Probe
catcctatcaacaaggggtcctgtc

SEQ ID NO: 158614 - DNA, 25 bp, Artificial
  Probe
atcctatcaacaaggggtcctgtct

SEQ ID NO: 158615 - DNA, 25 bp, Artificial
  Probe
ccatggaaatctaccattcctcatt

SEQ ID NO: 158616 - DNA, 25 bp, Artificial
  Probe
atcctaacaccattgatatgactcc

SEQ ID NO: 158617 - DNA, 25 bp, Artificial
  Probe
ctctgtgatctatgctattggacta

SEQ ID NO: 158618 - DNA, 25 bp, Artificial
  Probe
tgtgatctatgctattggactatgt

SEQ ID NO: 158619 - DNA, 25 bp, Artificial
  Probe
cttcactaccatcctccagaactac

SEQ ID NO: 158620 - DNA, 25 bp, Artificial
  Probe
ctgtgatctatgctattggactatg

SEQ ID NO: 158621 - DNA, 25 bp, Artificial
  Probe
tctgtgatctatgctattggactat

SEQ ID NO: 158622 - DNA, 25 bp, Artificial
  Probe
atgctctgtgatctatgctattgga

SEQ ID NO: 158623 - DNA, 25 bp, Artificial
  Probe
tgcctagtatgtatggttcatgtaa

SEQ ID NO: 158624 - DNA, 25 bp, Artificial
  Probe
ttgcctagtatgtatggttcatgta

SEQ ID NO: 158625 - DNA, 25 bp, Artificial
  Probe
gatcctaacaccattgatatgactc

SEQ ID NO: 158626 - DNA, 25 bp, Artificial
  Probe
tcttcactaccatcctccagaacta

SEQ ID NO: 158627 - DNA, 25 bp, Artificial
  Probe
ttcactaccatcctccagaactact

SEQ ID NO: 158628 - DNA, 25 bp, Artificial
  Probe
catgctctgtgatctatgctattgg

SEQ ID NO: 158629 - DNA, 25 bp, Artificial
  Probe
ccatgctctgtgatctatgctattg

SEQ ID NO: 158630 - DNA, 25 bp, Artificial
  Probe
tccatgctctgtgatctatgctatt

SEQ ID NO: 158631 - DNA, 25 bp, Artificial
  Probe
actaccatcctccagaactactcag

SEQ ID NO: 158632 - DNA, 25 bp, Artificial
  Probe
tcactaccatcctccagaactactc

SEQ ID NO: 158633 - DNA, 25 bp, Artificial
  Probe
tgctattggactatgtataaggtct

SEQ ID NO: 158634 - DNA, 25 bp, Artificial
  Probe
gctctgtgatctatgctattggact

SEQ ID NO: 158635 - DNA, 25 bp, Artificial
  Probe
gctattggactatgtataaggtctg

SEQ ID NO: 158636 - DNA, 25 bp, Artificial
  Probe
tgctctgtgatctatgctattggac

SEQ ID NO: 158637 - DNA, 25 bp, Artificial
  Probe
ctccatgctctgtgatctatgctat

SEQ ID NO: 158638 - DNA, 25 bp, Artificial
  Probe
cactaccatcctccagaactactca

SEQ ID NO: 158639 - DNA, 25 bp, Artificial
  Probe
ctaccatcctccagaactactcagt

SEQ ID NO: 158640 - DNA, 25 bp, Artificial
  Probe
gtgatctatgctattggactatgta

SEQ ID NO: 158641 - DNA, 25 bp, Artificial
  Probe
atgctattggactatgtataaggtc

SEQ ID NO: 158642 - DNA, 25 bp, Artificial
  Probe
taccatcctccagaactactcagtg

SEQ ID NO: 158643 - DNA, 25 bp, Artificial
  Probe
taacaccattgatatgactcccaag

SEQ ID NO: 158644 - DNA, 25 bp, Artificial
  Probe
ctaacaccattgatatgactcccaa

SEQ ID NO: 158645 - DNA, 25 bp, Artificial
  Probe
ggtttgcctagtatgtatggttcat

SEQ ID NO: 158646 - DNA, 25 bp, Artificial
  Probe
tctccatgctctgtgatctatgcta

SEQ ID NO: 158647 - DNA, 25 bp, Artificial
  Probe
tcctaacaccattgatatgactccc

SEQ ID NO: 158648 - DNA, 25 bp, Artificial
  Probe
tatgctattggactatgtataaggt

SEQ ID NO: 158649 - DNA, 25 bp, Artificial
  Probe
ctgaggtgtacttcatcctgagttc

SEQ ID NO: 158650 - DNA, 25 bp, Artificial
  Probe
tttgcctagtatgtatggttcatgt

SEQ ID NO: 158651 - DNA, 25 bp, Artificial
  Probe
gtttgcctagtatgtatggttcatg

SEQ ID NO: 158652 - DNA, 25 bp, Artificial
  Probe
cctaacaccattgatatgactccca

SEQ ID NO: 158653 - DNA, 25 bp, Artificial
  Probe
ttggactatgtataaggtctgaatt

SEQ ID NO: 158654 - DNA, 25 bp, Artificial
  Probe
gaggtgtacttcatcctgagttcag

SEQ ID NO: 158655 - DNA, 25 bp, Artificial
  Probe
aattctatgtctacaggtttgccta

SEQ ID NO: 158656 - DNA, 25 bp, Artificial
  Probe
attggactatgtataaggtctgaat

SEQ ID NO: 158657 - DNA, 25 bp, Artificial
  Probe
gtatggttcatgtaaacaggatcat

SEQ ID NO: 158658 - DNA, 25 bp, Artificial
  Probe
tctatgtctacaggtttgcctagta

SEQ ID NO: 158659 - DNA, 25 bp, Artificial
  Probe
attctatgtctacaggtttgcctag

SEQ ID NO: 158660 - DNA, 25 bp, Artificial
  Probe
tgatctatgctattggactatgtat

SEQ ID NO: 158661 - DNA, 25 bp, Artificial
  Probe
ctaagaatccacctcagacagaaca

SEQ ID NO: 158662 - DNA, 25 bp, Artificial
  Probe
taagaatccacctcagacagaacac

SEQ ID NO: 158663 - DNA, 25 bp, Artificial
  Probe
cctaaccttaacatctctgagagtg

SEQ ID NO: 158664 - DNA, 25 bp, Artificial
  Probe
gacagaacacactgaacacacataa

SEQ ID NO: 158665 - DNA, 25 bp, Artificial
  Probe
ctaaccttaacatctctgagagtgt

SEQ ID NO: 158666 - DNA, 25 bp, Artificial
  Probe
gctaagaatccacctcagacagaac

SEQ ID NO: 158667 - DNA, 25 bp, Artificial
  Probe
agaacacactgaacacacataaatg

SEQ ID NO: 158668 - DNA, 25 bp, Artificial
  Probe
gaacacactgaacacacataaatgg

SEQ ID NO: 158669 - DNA, 25 bp, Artificial
  Probe
agacagaacacactgaacacacata

SEQ ID NO: 158670 - DNA, 25 bp, Artificial
  Probe
ctgaacacacataaatgggtctctg

SEQ ID NO: 158671 - DNA, 25 bp, Artificial
  Probe
cactgaacacacataaatgggtctc

SEQ ID NO: 158672 - DNA, 25 bp, Artificial
  Probe
actgaacacacataaatgggtctct

SEQ ID NO: 158673 - DNA, 25 bp, Artificial
  Probe
aacacactgaacacacataaatggg

SEQ ID NO: 158674 - DNA, 25 bp, Artificial
  Probe
cagaacacactgaacacacataaat

SEQ ID NO: 158675 - DNA, 25 bp, Artificial
  Probe
aagaatccacctcagacagaacaca

SEQ ID NO: 158676 - DNA, 25 bp, Artificial
  Probe
acagaacacactgaacacacataaa

SEQ ID NO: 158677 - DNA, 25 bp, Artificial
  Probe
gttcagccctaaccttaacatctct

SEQ ID NO: 158678 - DNA, 25 bp, Artificial
  Probe
acactgaacacacataaatgggtct

SEQ ID NO: 158679 - DNA, 25 bp, Artificial
  Probe
cacactgaacacacataaatgggtc

SEQ ID NO: 158680 - DNA, 25 bp, Artificial
  Probe
ggctaagaatccacctcagacagaa

SEQ ID NO: 158681 - DNA, 25 bp, Artificial
  Probe
ccctaaccttaacatctctgagagt

SEQ ID NO: 158682 - DNA, 25 bp, Artificial
  Probe
acacactgaacacacataaatgggt

SEQ ID NO: 158683 - DNA, 25 bp, Artificial
  Probe
cagacagaacacactgaacacacat

SEQ ID NO: 158684 - DNA, 25 bp, Artificial
  Probe
ttcagccctaaccttaacatctctg

SEQ ID NO: 158685 - DNA, 25 bp, Artificial
  Probe
gaatccacctcagacagaacacact

SEQ ID NO: 158686 - DNA, 25 bp, Artificial
  Probe
agaatccacctcagacagaacacac

SEQ ID NO: 158687 - DNA, 25 bp, Artificial
  Probe
gccctaaccttaacatctctgagag

SEQ ID NO: 158688 - DNA, 25 bp, Artificial
  Probe
cagccctaaccttaacatctctgag

SEQ ID NO: 158689 - DNA, 25 bp, Artificial
  Probe
agccctaaccttaacatctctgaga

SEQ ID NO: 158690 - DNA, 25 bp, Artificial
  Probe
tgaacacacataaatgggtctctgc

SEQ ID NO: 158691 - DNA, 25 bp, Artificial
  Probe
atcagaaggaagggtatttgcagat

SEQ ID NO: 158692 - DNA, 25 bp, Artificial
  Probe
cagaaggaagggtatttgcagattg

SEQ ID NO: 158693 - DNA, 25 bp, Artificial
  Probe
tcagaaggaagggtatttgcagatt

SEQ ID NO: 158694 - DNA, 25 bp, Artificial
  Probe
gatcagaaggaagggtatttgcaga

SEQ ID NO: 158695 - DNA, 25 bp, Artificial
  Probe
ctcttggctaagaatccacctcaga

SEQ ID NO: 158696 - DNA, 25 bp, Artificial
  Probe
gaacacacataaatgggtctctgcc

SEQ ID NO: 158697 - DNA, 25 bp, Artificial
  Probe
agaaggaagggtatttgcagattgg

SEQ ID NO: 158698 - DNA, 25 bp, Artificial
  Probe
ttggctaagaatccacctcagacag

SEQ ID NO: 158699 - DNA, 25 bp, Artificial
  Probe
cttggctaagaatccacctcagaca

SEQ ID NO: 158700 - DNA, 25 bp, Artificial
  Probe
tatgatcagaaggaagggtatttgc

SEQ ID NO: 158701 - DNA, 25 bp, Artificial
  Probe
aatccacctcagacagaacacactg

SEQ ID NO: 158702 - DNA, 25 bp, Artificial
  Probe
tcttggctaagaatccacctcagac

SEQ ID NO: 158703 - DNA, 25 bp, Artificial
  Probe
gaaggaagggtatttgcagattggt

SEQ ID NO: 158704 - DNA, 25 bp, Artificial
  Probe
aaggaagggtatttgcagattggtg

SEQ ID NO: 158705 - DNA, 25 bp, Artificial
  Probe
ctttcttgaagaggttcagccctaa

SEQ ID NO: 158706 - DNA, 25 bp, Artificial
  Probe
actcaagtcagtatttcatcacact

SEQ ID NO: 158707 - DNA, 25 bp, Artificial
  Probe
aactcaagtcagtatttcatcacac

SEQ ID NO: 158708 - DNA, 25 bp, Artificial
  Probe
aaactcaagtcagtatttcatcaca

SEQ ID NO: 158709 - DNA, 25 bp, Artificial
  Probe
atctcaaatctgtatgacctctgtc

SEQ ID NO: 158710 - DNA, 25 bp, Artificial
  Probe
gatctcaaatctgtatgacctctgt

SEQ ID NO: 158711 - DNA, 25 bp, Artificial
  Probe
tatttcatcacactgctttcagact

SEQ ID NO: 158712 - DNA, 25 bp, Artificial
  Probe
gtatttcatcacactgctttcagac

SEQ ID NO: 158713 - DNA, 25 bp, Artificial
  Probe
agtatttcatcacactgctttcaga

SEQ ID NO: 158714 - DNA, 25 bp, Artificial
  Probe
ggatctcaaatctgtatgacctctg

SEQ ID NO: 158715 - DNA, 25 bp, Artificial
  Probe
gggatctcaaatctgtatgacctct

SEQ ID NO: 158716 - DNA, 25 bp, Artificial
  Probe
tctcaaatctgtatgacctctgtcc

SEQ ID NO: 158717 - DNA, 25 bp, Artificial
  Probe
atttcatcacactgctttcagactg

SEQ ID NO: 158718 - DNA, 25 bp, Artificial
  Probe
ctcaaatctgtatgacctctgtccc

SEQ ID NO: 158719 - DNA, 25 bp, Artificial
  Probe
caaatctgtatgacctctgtcccag

SEQ ID NO: 158720 - DNA, 25 bp, Artificial
  Probe
tcaaatctgtatgacctctgtccca

SEQ ID NO: 158721 - DNA, 25 bp, Artificial
  Probe
cagactgatagctaaccaggacatc

SEQ ID NO: 158722 - DNA, 25 bp, Artificial
  Probe
tttcatcacactgctttcagactga

SEQ ID NO: 158723 - DNA, 25 bp, Artificial
  Probe
ccagaggaaaactcaagtcagtatt

SEQ ID NO: 158724 - DNA, 25 bp, Artificial
  Probe
cttggtttcaaaatgcttgtggatt

SEQ ID NO: 158725 - DNA, 25 bp, Artificial
  Probe
tcagactgatagctaaccaggacat

SEQ ID NO: 158726 - DNA, 25 bp, Artificial
  Probe
catcacactgctttcagactgatag

SEQ ID NO: 158727 - DNA, 25 bp, Artificial
  Probe
ttggtttcaaaatgcttgtggattg

SEQ ID NO: 158728 - DNA, 25 bp, Artificial
  Probe
cagaggaaaactcaagtcagtattt

SEQ ID NO: 158729 - DNA, 25 bp, Artificial
  Probe
tcatcacactgctttcagactgata

SEQ ID NO: 158730 - DNA, 25 bp, Artificial
  Probe
ttcagactgatagctaaccaggaca

SEQ ID NO: 158731 - DNA, 25 bp, Artificial
  Probe
acttggtttcaaaatgcttgtggat

SEQ ID NO: 158732 - DNA, 25 bp, Artificial
  Probe
actgatagctaaccaggacatcaag

SEQ ID NO: 158733 - DNA, 25 bp, Artificial
  Probe
gactgatagctaaccaggacatcaa

SEQ ID NO: 158734 - DNA, 25 bp, Artificial
  Probe
cccagaggaaaactcaagtcagtat

SEQ ID NO: 158735 - DNA, 25 bp, Artificial
  Probe
aacttggtttcaaaatgcttgtgga

SEQ ID NO: 158736 - DNA, 25 bp, Artificial
  Probe
aaaactcaagtcagtatttcatcac

SEQ ID NO: 158737 - DNA, 25 bp, Artificial
  Probe
ttcatcacactgctttcagactgat

SEQ ID NO: 158738 - DNA, 25 bp, Artificial
  Probe
ctttcagactgatagctaaccagga

SEQ ID NO: 158739 - DNA, 25 bp, Artificial
  Probe
tttcagactgatagctaaccaggac

SEQ ID NO: 158740 - DNA, 25 bp, Artificial
  Probe
ggggatctcaaatctgtatgacctc

SEQ ID NO: 158741 - DNA, 25 bp, Artificial
  Probe
agactgatagctaaccaggacatca

SEQ ID NO: 158742 - DNA, 25 bp, Artificial
  Probe
atcacactgctttcagactgatagc

SEQ ID NO: 158743 - DNA, 25 bp, Artificial
  Probe
gaggaaaactcaagtcagtatttca

SEQ ID NO: 158744 - DNA, 25 bp, Artificial
  Probe
ctggggatctcaaatctgtatgacc

SEQ ID NO: 158745 - DNA, 25 bp, Artificial
  Probe
tggtttcaaaatgcttgtggattgg

SEQ ID NO: 158746 - DNA, 25 bp, Artificial
  Probe
agaggaaaactcaagtcagtatttc

SEQ ID NO: 158747 - DNA, 25 bp, Artificial
  Probe
ctcaagtcagtatttcatcacactg

SEQ ID NO: 158748 - DNA, 25 bp, Artificial
  Probe
cagtatttcatcacactgctttcag

SEQ ID NO: 158749 - DNA, 25 bp, Artificial
  Probe
gtcagtatttcatcacactgctttc

SEQ ID NO: 158750 - DNA, 25 bp, Artificial
  Probe
tcagtatttcatcacactgctttca

SEQ ID NO: 158751 - DNA, 25 bp, Artificial
  Probe
gaatgaatgctggatgtatgtgaag

SEQ ID NO: 158752 - DNA, 25 bp, Artificial
  Probe
atgaatgctggatgtatgtgaagaa

SEQ ID NO: 158753 - DNA, 25 bp, Artificial
  Probe
aatgaatgctggatgtatgtgaaga

SEQ ID NO: 158754 - DNA, 25 bp, Artificial
  Probe
aagaggaatgaatgctggatgtatg

SEQ ID NO: 158755 - DNA, 25 bp, Artificial
  Probe
caagaggaatgaatgctggatgtat

SEQ ID NO: 158756 - DNA, 25 bp, Artificial
  Probe
ggaatgaatgctggatgtatgtgaa

SEQ ID NO: 158757 - DNA, 25 bp, Artificial
  Probe
gaggaatgaatgctggatgtatgtg

SEQ ID NO: 158758 - DNA, 25 bp, Artificial
  Probe
agaggaatgaatgctggatgtatgt

SEQ ID NO: 158759 - DNA, 25 bp, Artificial
  Probe
aggaatgaatgctggatgtatgtga

SEQ ID NO: 158760 - DNA, 25 bp, Artificial
  Probe
tcaagaggaatgaatgctggatgta

SEQ ID NO: 158761 - DNA, 25 bp, Artificial
  Probe
ggatgaactggacaggtctatacac

SEQ ID NO: 158762 - DNA, 25 bp, Artificial
  Probe
aggatgaactggacaggtctataca

SEQ ID NO: 158763 - DNA, 25 bp, Artificial
  Probe
caggatgaactggacaggtctatac

SEQ ID NO: 158764 - DNA, 25 bp, Artificial
  Probe
gaatgctggatgtatgtgaagaaag

SEQ ID NO: 158765 - DNA, 25 bp, Artificial
  Probe
tgaatgctggatgtatgtgaagaaa

SEQ ID NO: 158766 - DNA, 25 bp, Artificial
  Probe
tgtccgtcatctttatcttcagaat

SEQ ID NO: 158767 - DNA, 25 bp, Artificial
  Probe
gactcaagaggaatgaatgctggat

SEQ ID NO: 158768 - DNA, 25 bp, Artificial
  Probe
tccgtcatctttatcttcagaatca

SEQ ID NO: 158769 - DNA, 25 bp, Artificial
  Probe
gtccgtcatctttatcttcagaatc

SEQ ID NO: 158770 - DNA, 25 bp, Artificial
  Probe
aatgctggatgtatgtgaagaaagg

SEQ ID NO: 158771 - DNA, 25 bp, Artificial
  Probe
ctcaagaggaatgaatgctggatgt

SEQ ID NO: 158772 - DNA, 25 bp, Artificial
  Probe
actcaagaggaatgaatgctggatg

SEQ ID NO: 158773 - DNA, 25 bp, Artificial
  Probe
ccgtcatctttatcttcagaatcat

SEQ ID NO: 158774 - DNA, 25 bp, Artificial
  Probe
ttatcttcagaatcatggtgctggt

SEQ ID NO: 158775 - DNA, 25 bp, Artificial
  Probe
tatggctgtccgtcatctttatctt

SEQ ID NO: 158776 - DNA, 25 bp, Artificial
  Probe
gatgaactggacaggtctatacacc

SEQ ID NO: 158777 - DNA, 25 bp, Artificial
  Probe
gaaagggactcaagaggaatgaatg

SEQ ID NO: 158778 - DNA, 25 bp, Artificial
  Probe
agaaagggactcaagaggaatgaat

SEQ ID NO: 158779 - DNA, 25 bp, Artificial
  Probe
tctttatcttcagaatcatggtgct

SEQ ID NO: 158780 - DNA, 25 bp, Artificial
  Probe
ctgtccgtcatctttatcttcagaa

SEQ ID NO: 158781 - DNA, 25 bp, Artificial
  Probe
aagaaagggactcaagaggaatgaa

SEQ ID NO: 158782 - DNA, 25 bp, Artificial
  Probe
atctttatcttcagaatcatggtgc

SEQ ID NO: 158783 - DNA, 25 bp, Artificial
  Probe
tatcttcagaatcatggtgctggtg

SEQ ID NO: 158784 - DNA, 25 bp, Artificial
  Probe
gtatggctgtccgtcatctttatct

SEQ ID NO: 158785 - DNA, 25 bp, Artificial
  Probe
agtatggctgtccgtcatctttatc

SEQ ID NO: 158786 - DNA, 25 bp, Artificial
  Probe
gagtatggctgtccgtcatctttat

SEQ ID NO: 158787 - DNA, 25 bp, Artificial
  Probe
gaagaaagggactcaagaggaatga

SEQ ID NO: 158788 - DNA, 25 bp, Artificial
  Probe
gtcaagtcaagcaaaggaagaaagg

SEQ ID NO: 158789 - DNA, 25 bp, Artificial
  Probe
ggtcaagtcaagcaaaggaagaaag

SEQ ID NO: 158790 - DNA, 25 bp, Artificial
  Probe
ctttatcttcagaatcatggtgctg

SEQ ID NO: 158791 - DNA, 25 bp, Artificial
  Probe
ctagtcagcagctcttagaggagat

SEQ ID NO: 158792 - DNA, 25 bp, Artificial
  Probe
gcaggatgaactggacaggtctata

SEQ ID NO: 158793 - DNA, 25 bp, Artificial
  Probe
aggtcaagtcaagcaaaggaagaaa

SEQ ID NO: 158794 - DNA, 25 bp, Artificial
  Probe
atgctggatgtatgtgaagaaaggg

SEQ ID NO: 158795 - DNA, 25 bp, Artificial
  Probe
tttatcttcagaatcatggtgctgg

SEQ ID NO: 158796 - DNA, 25 bp, Artificial
  Probe
ctgctcttctgtgtagattgaggtt

SEQ ID NO: 158797 - DNA, 25 bp, Artificial
  Probe
atgtggtaagactgacctggtatag

SEQ ID NO: 158798 - DNA, 25 bp, Artificial
  Probe
gagcagtttgggagatgtttagata

SEQ ID NO: 158799 - DNA, 25 bp, Artificial
  Probe
gcagtttgggagatgtttagatatg

SEQ ID NO: 158800 - DNA, 25 bp, Artificial
  Probe
agcagtttgggagatgtttagatat

SEQ ID NO: 158801 - DNA, 25 bp, Artificial
  Probe
ctctgctcttctgtgtagattgagg

SEQ ID NO: 158802 - DNA, 25 bp, Artificial
  Probe
tgggtggagattaagaaactaaaga

SEQ ID NO: 158803 - DNA, 25 bp, Artificial
  Probe
gtgggtggagattaagaaactaaag

SEQ ID NO: 158804 - DNA, 25 bp, Artificial
  Probe
ttgctctgctcttctgtgtagattg

SEQ ID NO: 158805 - DNA, 25 bp, Artificial
  Probe
gttgctctgctcttctgtgtagatt

SEQ ID NO: 158806 - DNA, 25 bp, Artificial
  Probe
gaaaggaagggtagaattgaaatgt

SEQ ID NO: 158807 - DNA, 25 bp, Artificial
  Probe
gtaagactgacctggtatagcttca

SEQ ID NO: 158808 - DNA, 25 bp, Artificial
  Probe
gtgtagtgggtggagattaagaaac

SEQ ID NO: 158809 - DNA, 25 bp, Artificial
  Probe
agaaaggaagggtagaattgaaatg

SEQ ID NO: 158810 - DNA, 25 bp, Artificial
  Probe
cagaaaggaagggtagaattgaaat

SEQ ID NO: 158811 - DNA, 25 bp, Artificial
  Probe
cagtttgggagatgtttagatatgt

SEQ ID NO: 158812 - DNA, 25 bp, Artificial
  Probe
aaggaagggtagaattgaaatgttt

SEQ ID NO: 158813 - DNA, 25 bp, Artificial
  Probe
aaaggaagggtagaattgaaatgtt

SEQ ID NO: 158814 - DNA, 25 bp, Artificial
  Probe
agtgggtggagattaagaaactaaa

SEQ ID NO: 158815 - DNA, 25 bp, Artificial
  Probe
tcagaaaggaagggtagaattgaaa

SEQ ID NO: 158816 - DNA, 25 bp, Artificial
  Probe
ctcagaaaggaagggtagaattgaa

SEQ ID NO: 158817 - DNA, 25 bp, Artificial
  Probe
aaccctgctttgttaatctcaatga

SEQ ID NO: 158818 - DNA, 25 bp, Artificial
  Probe
taccattcccattctcagaaacaat

SEQ ID NO: 158819 - DNA, 25 bp, Artificial
  Probe
catgtggtaagactgacctggtata

SEQ ID NO: 158820 - DNA, 25 bp, Artificial
  Probe
ttaccattcccattctcagaaacaa

SEQ ID NO: 158821 - DNA, 25 bp, Artificial
  Probe
gggtggagattaagaaactaaagaa

SEQ ID NO: 158822 - DNA, 25 bp, Artificial
  Probe
ctcttaccattcccattctcagaaa

SEQ ID NO: 158823 - DNA, 25 bp, Artificial
  Probe
agtttgggagatgtttagatatgtc

SEQ ID NO: 158824 - DNA, 25 bp, Artificial
  Probe
cttaccattcccattctcagaaaca

SEQ ID NO: 158825 - DNA, 25 bp, Artificial
  Probe
tcttaccattcccattctcagaaac

SEQ ID NO: 158826 - DNA, 25 bp, Artificial
  Probe
tgtagtgggtggagattaagaaact

SEQ ID NO: 158827 - DNA, 25 bp, Artificial
  Probe
tctgctcttctgtgtagattgaggt

SEQ ID NO: 158828 - DNA, 25 bp, Artificial
  Probe
gctctgctcttctgtgtagattgag

SEQ ID NO: 158829 - DNA, 25 bp, Artificial
  Probe
catcttgtatataaccctgctttgt

SEQ ID NO: 158830 - DNA, 25 bp, Artificial
  Probe
tgagcagtttgggagatgtttagat

SEQ ID NO: 158831 - DNA, 25 bp, Artificial
  Probe
ggtgtagtgggtggagattaagaaa

SEQ ID NO: 158832 - DNA, 25 bp, Artificial
  Probe
accctgctttgttaatctcaatgac

SEQ ID NO: 158833 - DNA, 25 bp, Artificial
  Probe
tgctctgctcttctgtgtagattga

SEQ ID NO: 158834 - DNA, 25 bp, Artificial
  Probe
ccctgctttgttaatctcaatgaca

SEQ ID NO: 158835 - DNA, 25 bp, Artificial
  Probe
cctcttaccattcccattctcagaa

SEQ ID NO: 158836 - DNA, 25 bp, Artificial
  Probe
tgggagatgtttagatatgtccttg

SEQ ID NO: 158837 - DNA, 25 bp, Artificial
  Probe
ggagatgtttagatatgtccttggg

SEQ ID NO: 158838 - DNA, 25 bp, Artificial
  Probe
gggagatgtttagatatgtccttgg

SEQ ID NO: 158839 - DNA, 25 bp, Artificial
  Probe
taaccctgctttgttaatctcaatg

SEQ ID NO: 158840 - DNA, 25 bp, Artificial
  Probe
tgctcttctgtgtagattgaggttt

SEQ ID NO: 158841 - DNA, 25 bp, Artificial
  Probe
aagaaggagactcagcattgtactt

SEQ ID NO: 158842 - DNA, 25 bp, Artificial
  Probe
gaagaaggagactcagcattgtact

SEQ ID NO: 158843 - DNA, 25 bp, Artificial
  Probe
aacagacttggtcaagaagagattc

SEQ ID NO: 158844 - DNA, 25 bp, Artificial
  Probe
tcaaagagaaaggacagagagtaaa

SEQ ID NO: 158845 - DNA, 25 bp, Artificial
  Probe
atcaaagagaaaggacagagagtaa

SEQ ID NO: 158846 - DNA, 25 bp, Artificial
  Probe
gaaaggacagagagtaaatatgagc

SEQ ID NO: 158847 - DNA, 25 bp, Artificial
  Probe
tgaagaaggagactcagcattgtac

SEQ ID NO: 158848 - DNA, 25 bp, Artificial
  Probe
gtagacattattgaccaaacagact

SEQ ID NO: 158849 - DNA, 25 bp, Artificial
  Probe
agacattattgaccaaacagacttg

SEQ ID NO: 158850 - DNA, 25 bp, Artificial
  Probe
caaagagaaaggacagagagtaaat

SEQ ID NO: 158851 - DNA, 25 bp, Artificial
  Probe
gatcaaagagaaaggacagagagta

SEQ ID NO: 158852 - DNA, 25 bp, Artificial
  Probe
aaggagactcagcattgtacttctg

SEQ ID NO: 158853 - DNA, 25 bp, Artificial
  Probe
tagacattattgaccaaacagactt

SEQ ID NO: 158854 - DNA, 25 bp, Artificial
  Probe
gacttggtcaagaagagattctcag

SEQ ID NO: 158855 - DNA, 25 bp, Artificial
  Probe
cagacttggtcaagaagagattctc

SEQ ID NO: 158856 - DNA, 25 bp, Artificial
  Probe
tgaagtaacccagactccaagatac

SEQ ID NO: 158857 - DNA, 25 bp, Artificial
  Probe
agacttggtcaagaagagattctca

SEQ ID NO: 158858 - DNA, 25 bp, Artificial
  Probe
acagacttggtcaagaagagattct

SEQ ID NO: 158859 - DNA, 25 bp, Artificial
  Probe
ctgaagtaacccagactccaagata

SEQ ID NO: 158860 - DNA, 25 bp, Artificial
  Probe
agaaaggacagagagtaaatatgag

SEQ ID NO: 158861 - DNA, 25 bp, Artificial
  Probe
gagaaaggacagagagtaaatatga

SEQ ID NO: 158862 - DNA, 25 bp, Artificial
  Probe
agagaaaggacagagagtaaatatg

SEQ ID NO: 158863 - DNA, 25 bp, Artificial
  Probe
gagtaaatatgagctgtagtcctga

SEQ ID NO: 158864 - DNA, 25 bp, Artificial
  Probe
agagtaaatatgagctgtagtcctg

SEQ ID NO: 158865 - DNA, 25 bp, Artificial
  Probe
gagagtaaatatgagctgtagtcct

SEQ ID NO: 158866 - DNA, 25 bp, Artificial
  Probe
agagagtaaatatgagctgtagtcc

SEQ ID NO: 158867 - DNA, 25 bp, Artificial
  Probe
aaaggacagagagtaaatatgagct

SEQ ID NO: 158868 - DNA, 25 bp, Artificial
  Probe
gaagtaacccagactccaagatacc

SEQ ID NO: 158869 - DNA, 25 bp, Artificial
  Probe
aaacagacttggtcaagaagagatt

SEQ ID NO: 158870 - DNA, 25 bp, Artificial
  Probe
ggtagacattattgaccaaacagac

SEQ ID NO: 158871 - DNA, 25 bp, Artificial
  Probe
agtaaatatgagctgtagtcctgaa

SEQ ID NO: 158872 - DNA, 25 bp, Artificial
  Probe
aggtagacattattgaccaaacaga

SEQ ID NO: 158873 - DNA, 25 bp, Artificial
  Probe
cgaaaggtagacattattgaccaaa

SEQ ID NO: 158874 - DNA, 25 bp, Artificial
  Probe
caaacagacttggtcaagaagagat

SEQ ID NO: 158875 - DNA, 25 bp, Artificial
  Probe
aagtaacccagactccaagatacct

SEQ ID NO: 158876 - DNA, 25 bp, Artificial
  Probe
ggagactcagcattgtacttctgtg

SEQ ID NO: 158877 - DNA, 25 bp, Artificial
  Probe
aggagactcagcattgtacttctgt

SEQ ID NO: 158878 - DNA, 25 bp, Artificial
  Probe
aaggtagacattattgaccaaacag

SEQ ID NO: 158879 - DNA, 25 bp, Artificial
  Probe
gtaaatatgagctgtagtcctgaaa

SEQ ID NO: 158880 - DNA, 25 bp, Artificial
  Probe
aaagagaaaggacagagagtaaata

SEQ ID NO: 158881 - DNA, 25 bp, Artificial
  Probe
gaagagattctcagctcagtgtgtc

SEQ ID NO: 158882 - DNA, 25 bp, Artificial
  Probe
aaaggtagacattattgaccaaaca

SEQ ID NO: 158883 - DNA, 25 bp, Artificial
  Probe
taacccagactccaagatacctgat

SEQ ID NO: 158884 - DNA, 25 bp, Artificial
  Probe
aaggacagagagtaaatatgagctg

SEQ ID NO: 158885 - DNA, 25 bp, Artificial
  Probe
aagagaaaggacagagagtaaatat

SEQ ID NO: 158886 - DNA, 25 bp, Artificial
  Probe
gagaagttactcctcactcactctg

SEQ ID NO: 158887 - DNA, 25 bp, Artificial
  Probe
ttagtgctcagactatccatcaatg

SEQ ID NO: 158888 - DNA, 25 bp, Artificial
  Probe
gttagtgctcagactatccatcaat

SEQ ID NO: 158889 - DNA, 25 bp, Artificial
  Probe
cttggatgttagtgctcagactatc

SEQ ID NO: 158890 - DNA, 25 bp, Artificial
  Probe
ttcatcctgagcactgagaagttac

SEQ ID NO: 158891 - DNA, 25 bp, Artificial
  Probe
gttcatcctgagcactgagaagtta

SEQ ID NO: 158892 - DNA, 25 bp, Artificial
  Probe
atgttagtgctcagactatccatca

SEQ ID NO: 158893 - DNA, 25 bp, Artificial
  Probe
tgttagtgctcagactatccatcaa

SEQ ID NO: 158894 - DNA, 25 bp, Artificial
  Probe
catcctgagcactgagaagttactc

SEQ ID NO: 158895 - DNA, 25 bp, Artificial
  Probe
agaagttactcctcactcactctgg

SEQ ID NO: 158896 - DNA, 25 bp, Artificial
  Probe
tcatcctgagcactgagaagttact

SEQ ID NO: 158897 - DNA, 25 bp, Artificial
  Probe
tagtgctcagactatccatcaatgg

SEQ ID NO: 158898 - DNA, 25 bp, Artificial
  Probe
cccttcagcaactcttctactcttt

SEQ ID NO: 158899 - DNA, 25 bp, Artificial
  Probe
tactcctcactcactctggcttcta

SEQ ID NO: 158900 - DNA, 25 bp, Artificial
  Probe
gatgttagtgctcagactatccatc

SEQ ID NO: 158901 - DNA, 25 bp, Artificial
  Probe
atcctgagcactgagaagttactcc

SEQ ID NO: 158902 - DNA, 25 bp, Artificial
  Probe
agttcatcctgagcactgagaagtt

SEQ ID NO: 158903 - DNA, 25 bp, Artificial
  Probe
acccttcagcaactcttctactctt

SEQ ID NO: 158904 - DNA, 25 bp, Artificial
  Probe
gttactcctcactcactctggcttc

SEQ ID NO: 158905 - DNA, 25 bp, Artificial
  Probe
cctgagcactgagaagttactcctc

SEQ ID NO: 158906 - DNA, 25 bp, Artificial
  Probe
ccttcagcaactcttctactctttt

SEQ ID NO: 158907 - DNA, 25 bp, Artificial
  Probe
ttactcctcactcactctggcttct

SEQ ID NO: 158908 - DNA, 25 bp, Artificial
  Probe
gacccttcagcaactcttctactct

SEQ ID NO: 158909 - DNA, 25 bp, Artificial
  Probe
ggatgttagtgctcagactatccat

SEQ ID NO: 158910 - DNA, 25 bp, Artificial
  Probe
ttggatgttagtgctcagactatcc

SEQ ID NO: 158911 - DNA, 25 bp, Artificial
  Probe
actcttctactcttttaatgttggc

SEQ ID NO: 158912 - DNA, 25 bp, Artificial
  Probe
gaagttactcctcactcactctggc

SEQ ID NO: 158913 - DNA, 25 bp, Artificial
  Probe
cttcagcaactcttctactctttta

SEQ ID NO: 158914 - DNA, 25 bp, Artificial
  Probe
ctgagaagttactcctcactcactc

SEQ ID NO: 158915 - DNA, 25 bp, Artificial
  Probe
ctcactcactctggcttctacctct

SEQ ID NO: 158916 - DNA, 25 bp, Artificial
  Probe
tcctgagcactgagaagttactcct

SEQ ID NO: 158917 - DNA, 25 bp, Artificial
  Probe
agcaactcttctactcttttaatgt

SEQ ID NO: 158918 - DNA, 25 bp, Artificial
  Probe
tgagaagttactcctcactcactct

SEQ ID NO: 158919 - DNA, 25 bp, Artificial
  Probe
ttcagcaactcttctactcttttaa

SEQ ID NO: 158920 - DNA, 25 bp, Artificial
  Probe
cagcaactcttctactcttttaatg

SEQ ID NO: 158921 - DNA, 25 bp, Artificial
  Probe
agttactcctcactcactctggctt

SEQ ID NO: 158922 - DNA, 25 bp, Artificial
  Probe
aagttactcctcactcactctggct

SEQ ID NO: 158923 - DNA, 25 bp, Artificial
  Probe
tcagcaactcttctactcttttaat

SEQ ID NO: 158924 - DNA, 25 bp, Artificial
  Probe
actgagaagttactcctcactcact

SEQ ID NO: 158925 - DNA, 25 bp, Artificial
  Probe
cactgagaagttactcctcactcac

SEQ ID NO: 158926 - DNA, 25 bp, Artificial
  Probe
tcactcactctggcttctacctctg

SEQ ID NO: 158927 - DNA, 25 bp, Artificial
  Probe
actcctcactcactctggcttctac

SEQ ID NO: 158928 - DNA, 25 bp, Artificial
  Probe
tttagaggatctgaaaacggtgact

SEQ ID NO: 158929 - DNA, 25 bp, Artificial
  Probe
gcaactcttctactcttttaatgtt

SEQ ID NO: 158930 - DNA, 25 bp, Artificial
  Probe
ttttagaggatctgaaaacggtgac

SEQ ID NO: 158931 - DNA, 25 bp, Artificial
  Probe
cgatgttaagtgtagatgagtggtt

SEQ ID NO: 158932 - DNA, 25 bp, Artificial
  Probe
cttcctgtcttcatctatcacgatc

SEQ ID NO: 158933 - DNA, 25 bp, Artificial
  Probe
gcttcctgtcttcatctatcacgat

SEQ ID NO: 158934 - DNA, 25 bp, Artificial
  Probe
aagtgtagatgagtggtttagtgag

SEQ ID NO: 158935 - DNA, 25 bp, Artificial
  Probe
tcgatgttaagtgtagatgagtggt

SEQ ID NO: 158936 - DNA, 25 bp, Artificial
  Probe
ccactctgcatattaaggtagatcc

SEQ ID NO: 158937 - DNA, 25 bp, Artificial
  Probe
ataaatccgaataaacttcagcacc

SEQ ID NO: 158938 - DNA, 25 bp, Artificial
  Probe
taagtgtagatgagtggtttagtga

SEQ ID NO: 158939 - DNA, 25 bp, Artificial
  Probe
taaatccgaataaacttcagcacca

SEQ ID NO: 158940 - DNA, 25 bp, Artificial
  Probe
gatgttaagtgtagatgagtggttt

SEQ ID NO: 158941 - DNA, 25 bp, Artificial
  Probe
agtgtagatgagtggtttagtgagg

SEQ ID NO: 158942 - DNA, 25 bp, Artificial
  Probe
ttaagtgtagatgagtggtttagtg

SEQ ID NO: 158943 - DNA, 25 bp, Artificial
  Probe
gttaagtgtagatgagtggtttagt

SEQ ID NO: 158944 - DNA, 25 bp, Artificial
  Probe
tgttaagtgtagatgagtggtttag

SEQ ID NO: 158945 - DNA, 25 bp, Artificial
  Probe
gatggatttcaagaacctgctagac

SEQ ID NO: 158946 - DNA, 25 bp, Artificial
  Probe
aataaatccgaataaacttcagcac

SEQ ID NO: 158947 - DNA, 25 bp, Artificial
  Probe
tctgcatattaaggtagatcctcac

SEQ ID NO: 158948 - DNA, 25 bp, Artificial
  Probe
cactctgcatattaaggtagatcct

SEQ ID NO: 158949 - DNA, 25 bp, Artificial
  Probe
ctctgcatattaaggtagatcctca

SEQ ID NO: 158950 - DNA, 25 bp, Artificial
  Probe
actctgcatattaaggtagatcctc

SEQ ID NO: 158951 - DNA, 25 bp, Artificial
  Probe
aaatccgaataaacttcagcaccac

SEQ ID NO: 158952 - DNA, 25 bp, Artificial
  Probe
tctgatggatttcaagaacctgcta

SEQ ID NO: 158953 - DNA, 25 bp, Artificial
  Probe
ctgcatattaaggtagatcctcacc

SEQ ID NO: 158954 - DNA, 25 bp, Artificial
  Probe
ctgatggatttcaagaacctgctag

SEQ ID NO: 158955 - DNA, 25 bp, Artificial
  Probe
atgttaagtgtagatgagtggttta

SEQ ID NO: 158956 - DNA, 25 bp, Artificial
  Probe
tgatggatttcaagaacctgctaga

SEQ ID NO: 158957 - DNA, 25 bp, Artificial
  Probe
aaataaatccgaataaacttcagca

SEQ ID NO: 158958 - DNA, 25 bp, Artificial
  Probe
agcttcctgtcttcatctatcacga

SEQ ID NO: 158959 - DNA, 25 bp, Artificial
  Probe
atctgatggatttcaagaacctgct

SEQ ID NO: 158960 - DNA, 25 bp, Artificial
  Probe
atggatttcaagaacctgctagacc

SEQ ID NO: 158961 - DNA, 25 bp, Artificial
  Probe
gtgtagatgagtggtttagtgaggc

SEQ ID NO: 158962 - DNA, 25 bp, Artificial
  Probe
gatctgatggatttcaagaacctgc

SEQ ID NO: 158963 - DNA, 25 bp, Artificial
  Probe
ttacctctcccactctgcatattaa

SEQ ID NO: 158964 - DNA, 25 bp, Artificial
  Probe
cccactctgcatattaaggtagatc

SEQ ID NO: 158965 - DNA, 25 bp, Artificial
  Probe
tctcccactctgcatattaaggtag

SEQ ID NO: 158966 - DNA, 25 bp, Artificial
  Probe
ctctcccactctgcatattaaggta

SEQ ID NO: 158967 - DNA, 25 bp, Artificial
  Probe
tacctctcccactctgcatattaag

SEQ ID NO: 158968 - DNA, 25 bp, Artificial
  Probe
cttacctctcccactctgcatatta

SEQ ID NO: 158969 - DNA, 25 bp, Artificial
  Probe
tcccactctgcatattaaggtagat

SEQ ID NO: 158970 - DNA, 25 bp, Artificial
  Probe
atcgatgttaagtgtagatgagtgg

SEQ ID NO: 158971 - DNA, 25 bp, Artificial
  Probe
ctcccactctgcatattaaggtaga

SEQ ID NO: 158972 - DNA, 25 bp, Artificial
  Probe
gatcgatgttaagtgtagatgagtg

SEQ ID NO: 158973 - DNA, 25 bp, Artificial
  Probe
cagcttcctgtcttcatctatcacg

SEQ ID NO: 158974 - DNA, 25 bp, Artificial
  Probe
gcagcttcctgtcttcatctatcac

SEQ ID NO: 158975 - DNA, 25 bp, Artificial
  Probe
gatttcaagaacctgctagaccacc

SEQ ID NO: 158976 - DNA, 25 bp, Artificial
  Probe
gattcggacctattcaaccagtaat

SEQ ID NO: 158977 - DNA, 25 bp, Artificial
  Probe
attcggacctattcaaccagtaatt

SEQ ID NO: 158978 - DNA, 25 bp, Artificial
  Probe
ttcggacctattcaaccagtaattg

SEQ ID NO: 158979 - DNA, 25 bp, Artificial
  Probe
tgattcggacctattcaaccagtaa

SEQ ID NO: 158980 - DNA, 25 bp, Artificial
  Probe
ggacctattcaaccagtaattggat

SEQ ID NO: 158981 - DNA, 25 bp, Artificial
  Probe
atgtgtcacttgattcggacctatt

SEQ ID NO: 158982 - DNA, 25 bp, Artificial
  Probe
aatgtgtcacttgattcggacctat

SEQ ID NO: 158983 - DNA, 25 bp, Artificial
  Probe
gacctattcaaccagtaattggatc

SEQ ID NO: 158984 - DNA, 25 bp, Artificial
  Probe
cctctcctgtcttgtagtgtcctag

SEQ ID NO: 158985 - DNA, 25 bp, Artificial
  Probe
gtgtcacttgattcggacctattca

SEQ ID NO: 158986 - DNA, 25 bp, Artificial
  Probe
tgtgtcacttgattcggacctattc

SEQ ID NO: 158987 - DNA, 25 bp, Artificial
  Probe
cggacctattcaaccagtaattgga

SEQ ID NO: 158988 - DNA, 25 bp, Artificial
  Probe
tcggacctattcaaccagtaattgg

SEQ ID NO: 158989 - DNA, 25 bp, Artificial
  Probe
ctagattgtaagctcctggagacag

SEQ ID NO: 158990 - DNA, 25 bp, Artificial
  Probe
acctctcctgtcttgtagtgtccta

SEQ ID NO: 158991 - DNA, 25 bp, Artificial
  Probe
ttgattcggacctattcaaccagta

SEQ ID NO: 158992 - DNA, 25 bp, Artificial
  Probe
gtcacttgattcggacctattcaac

SEQ ID NO: 158993 - DNA, 25 bp, Artificial
  Probe
tgtcacttgattcggacctattcaa

SEQ ID NO: 158994 - DNA, 25 bp, Artificial
  Probe
aaatgtgtcacttgattcggaccta

SEQ ID NO: 158995 - DNA, 25 bp, Artificial
  Probe
cttgattcggacctattcaaccagt

SEQ ID NO: 158996 - DNA, 25 bp, Artificial
  Probe
acttgattcggacctattcaaccag

SEQ ID NO: 158997 - DNA, 25 bp, Artificial
  Probe
tcacttgattcggacctattcaacc

SEQ ID NO: 158998 - DNA, 25 bp, Artificial
  Probe
cacttgattcggacctattcaacca

SEQ ID NO: 158999 - DNA, 25 bp, Artificial
  Probe
gtggtggaggaagagggttaagaaa

SEQ ID NO: 159000 - DNA, 25 bp, Artificial
  Probe
gtggaggaagagggttaagaaaact

SEQ ID NO: 159001 - DNA, 25 bp, Artificial
  Probe
gacctctcctgtcttgtagtgtcct

SEQ ID NO: 159002 - DNA, 25 bp, Artificial
  Probe
gctagattgtaagctcctggagaca

SEQ ID NO: 159003 - DNA, 25 bp, Artificial
  Probe
gtggcagaagagaaagtgtcaactg

SEQ ID NO: 159004 - DNA, 25 bp, Artificial
  Probe
gaatggacattctgacatcaccagc

SEQ ID NO: 159005 - DNA, 25 bp, Artificial
  Probe
acctattcaaccagtaattggatcc

SEQ ID NO: 159006 - DNA, 25 bp, Artificial
  Probe
ggtggaggaagagggttaagaaaac

SEQ ID NO: 159007 - DNA, 25 bp, Artificial
  Probe
aatggacattctgacatcaccagct

SEQ ID NO: 159008 - DNA, 25 bp, Artificial
  Probe
tggtggaggaagagggttaagaaaa

SEQ ID NO: 159009 - DNA, 25 bp, Artificial
  Probe
ggctagattgtaagctcctggagac

SEQ ID NO: 159010 - DNA, 25 bp, Artificial
  Probe
aaaatgtgtcacttgattcggacct

SEQ ID NO: 159011 - DNA, 25 bp, Artificial
  Probe
ctctcctgtcttgtagtgtcctagg

SEQ ID NO: 159012 - DNA, 25 bp, Artificial
  Probe
ggtggcagaagagaaagtgtcaact

SEQ ID NO: 159013 - DNA, 25 bp, Artificial
  Probe
cacctttaccaaaacaccgtctctg

SEQ ID NO: 159014 - DNA, 25 bp, Artificial
  Probe
caagatcctaccatggagagctaac

SEQ ID NO: 159015 - DNA, 25 bp, Artificial
  Probe
acctttaccaaaacaccgtctctga

SEQ ID NO: 159016 - DNA, 25 bp, Artificial
  Probe
ctattcaaccagtaattggatccca

SEQ ID NO: 159017 - DNA, 25 bp, Artificial
  Probe
aagatcctaccatggagagctaaca

SEQ ID NO: 159018 - DNA, 25 bp, Artificial
  Probe
ctttaccaaaacaccgtctctgacc

SEQ ID NO: 159019 - DNA, 25 bp, Artificial
  Probe
cctttaccaaaacaccgtctctgac

SEQ ID NO: 159020 - DNA, 25 bp, Artificial
  Probe
cctattcaaccagtaattggatccc

SEQ ID NO: 159021 - DNA, 25 bp, Artificial
  Probe
tggaacaccttgattcaactctata

SEQ ID NO: 159022 - DNA, 25 bp, Artificial
  Probe
gtggaacaccttgattcaactctat

SEQ ID NO: 159023 - DNA, 25 bp, Artificial
  Probe
ctcatgtgtaatcactcctctgaag

SEQ ID NO: 159024 - DNA, 25 bp, Artificial
  Probe
ccacttaatgctaactgctcaacag

SEQ ID NO: 159025 - DNA, 25 bp, Artificial
  Probe
gaacaccttgattcaactctatagc

SEQ ID NO: 159026 - DNA, 25 bp, Artificial
  Probe
aacaccttgattcaactctatagcc

SEQ ID NO: 159027 - DNA, 25 bp, Artificial
  Probe
ctctgaagccctctagtgataaatt

SEQ ID NO: 159028 - DNA, 25 bp, Artificial
  Probe
ggaacaccttgattcaactctatag

SEQ ID NO: 159029 - DNA, 25 bp, Artificial
  Probe
tgtggaacaccttgattcaactcta

SEQ ID NO: 159030 - DNA, 25 bp, Artificial
  Probe
gaagccctctagtgataaattctga

SEQ ID NO: 159031 - DNA, 25 bp, Artificial
  Probe
tgaagccctctagtgataaattctg

SEQ ID NO: 159032 - DNA, 25 bp, Artificial
  Probe
ctgaagccctctagtgataaattct

SEQ ID NO: 159033 - DNA, 25 bp, Artificial
  Probe
tctgaagccctctagtgataaattc

SEQ ID NO: 159034 - DNA, 25 bp, Artificial
  Probe
cctcatgtgtaatcactcctctgaa

SEQ ID NO: 159035 - DNA, 25 bp, Artificial
  Probe
ttagcctcatgtgtaatcactcctc

SEQ ID NO: 159036 - DNA, 25 bp, Artificial
  Probe
cctctgaagccctctagtgataaat

SEQ ID NO: 159037 - DNA, 25 bp, Artificial
  Probe
ctatgaagtcctgtatgctcatctt

SEQ ID NO: 159038 - DNA, 25 bp, Artificial
  Probe
aagccctctagtgataaattctgag

SEQ ID NO: 159039 - DNA, 25 bp, Artificial
  Probe
tcatgtgtaatcactcctctgaagc

SEQ ID NO: 159040 - DNA, 25 bp, Artificial
  Probe
tagcctcatgtgtaatcactcctct

SEQ ID NO: 159041 - DNA, 25 bp, Artificial
  Probe
tcctctgaagccctctagtgataaa

SEQ ID NO: 159042 - DNA, 25 bp, Artificial
  Probe
cttaatgctaactgctcaacagcta

SEQ ID NO: 159043 - DNA, 25 bp, Artificial
  Probe
gctatgaagtcctgtatgctcatct

SEQ ID NO: 159044 - DNA, 25 bp, Artificial
  Probe
caagtttcctcaaagaaccgagatc

SEQ ID NO: 159045 - DNA, 25 bp, Artificial
  Probe
ttaatgctaactgctcaacagctac

SEQ ID NO: 159046 - DNA, 25 bp, Artificial
  Probe
ttctcaggtgttagaagctgtagag

SEQ ID NO: 159047 - DNA, 25 bp, Artificial
  Probe
gatctgtacttcctggaatgccatt

SEQ ID NO: 159048 - DNA, 25 bp, Artificial
  Probe
ctcctctgaagccctctagtgataa

SEQ ID NO: 159049 - DNA, 25 bp, Artificial
  Probe
gagtgtgtgtttctcaggtgttaga

SEQ ID NO: 159050 - DNA, 25 bp, Artificial
  Probe
catgtgtaatcactcctctgaagcc

SEQ ID NO: 159051 - DNA, 25 bp, Artificial
  Probe
tttagcctcatgtgtaatcactcct

SEQ ID NO: 159052 - DNA, 25 bp, Artificial
  Probe
tcccacttaatgctaactgctcaac

SEQ ID NO: 159053 - DNA, 25 bp, Artificial
  Probe
gtcccacttaatgctaactgctcaa

SEQ ID NO: 159054 - DNA, 25 bp, Artificial
  Probe
atctgtacttcctggaatgccattg

SEQ ID NO: 159055 - DNA, 25 bp, Artificial
  Probe
cacttaatgctaactgctcaacagc

SEQ ID NO: 159056 - DNA, 25 bp, Artificial
  Probe
taatcactcctctgaagccctctag

SEQ ID NO: 159057 - DNA, 25 bp, Artificial
  Probe
gtaatcactcctctgaagccctcta

SEQ ID NO: 159058 - DNA, 25 bp, Artificial
  Probe
tctcaggtgttagaagctgtagagg

SEQ ID NO: 159059 - DNA, 25 bp, Artificial
  Probe
cccacttaatgctaactgctcaaca

SEQ ID NO: 159060 - DNA, 25 bp, Artificial
  Probe
ccaagtttcctcaaagaaccgagat

SEQ ID NO: 159061 - DNA, 25 bp, Artificial
  Probe
tatgaagtcctgtatgctcatcttt

SEQ ID NO: 159062 - DNA, 25 bp, Artificial
  Probe
aagtttcctcaaagaaccgagatcc

SEQ ID NO: 159063 - DNA, 25 bp, Artificial
  Probe
acaccttgattcaactctatagccc

SEQ ID NO: 159064 - DNA, 25 bp, Artificial
  Probe
tagaagtcccacttaatgctaactg

SEQ ID NO: 159065 - DNA, 25 bp, Artificial
  Probe
gtgtgtgtttctcaggtgttagaag

SEQ ID NO: 159066 - DNA, 25 bp, Artificial
  Probe
atgaatcaccttcttaacacttcct

SEQ ID NO: 159067 - DNA, 25 bp, Artificial
  Probe
tgaatcaccttcttaacacttcctg

SEQ ID NO: 159068 - DNA, 25 bp, Artificial
  Probe
gaatcaccttcttaacacttcctga

SEQ ID NO: 159069 - DNA, 25 bp, Artificial
  Probe
caccttcttaacacttcctgattat

SEQ ID NO: 159070 - DNA, 25 bp, Artificial
  Probe
tcaccttcttaacacttcctgatta

SEQ ID NO: 159071 - DNA, 25 bp, Artificial
  Probe
tatgaatcaccttcttaacacttcc

SEQ ID NO: 159072 - DNA, 25 bp, Artificial
  Probe
accttcttaacacttcctgattatt

SEQ ID NO: 159073 - DNA, 25 bp, Artificial
  Probe
atgcttcttgtttatttaccgactc

SEQ ID NO: 159074 - DNA, 25 bp, Artificial
  Probe
gcttcttgtttatttaccgactctt

SEQ ID NO: 159075 - DNA, 25 bp, Artificial
  Probe
tgcttcttgtttatttaccgactct

SEQ ID NO: 159076 - DNA, 25 bp, Artificial
  Probe
aatgcttcttgtttatttaccgact

SEQ ID NO: 159077 - DNA, 25 bp, Artificial
  Probe
tgtttatttaccgactctttgtgaa

SEQ ID NO: 159078 - DNA, 25 bp, Artificial
  Probe
ttgtttatttaccgactctttgtga

SEQ ID NO: 159079 - DNA, 25 bp, Artificial
  Probe
cttgtttatttaccgactctttgtg

SEQ ID NO: 159080 - DNA, 25 bp, Artificial
  Probe
tcttgtttatttaccgactctttgt

SEQ ID NO: 159081 - DNA, 25 bp, Artificial
  Probe
ttatgaatcaccttcttaacacttc

SEQ ID NO: 159082 - DNA, 25 bp, Artificial
  Probe
gtttatttaccgactctttgtgaag

SEQ ID NO: 159083 - DNA, 25 bp, Artificial
  Probe
atcaccttcttaacacttcctgatt

SEQ ID NO: 159084 - DNA, 25 bp, Artificial
  Probe
aatcaccttcttaacacttcctgat

SEQ ID NO: 159085 - DNA, 25 bp, Artificial
  Probe
tgtaagaagacatataactccgtaa

SEQ ID NO: 159086 - DNA, 25 bp, Artificial
  Probe
ttgtaagaagacatataactccgta

SEQ ID NO: 159087 - DNA, 25 bp, Artificial
  Probe
ttgtcaaggcagatcatctttgtaa

SEQ ID NO: 159088 - DNA, 25 bp, Artificial
  Probe
tttgtcaaggcagatcatctttgta

SEQ ID NO: 159089 - DNA, 25 bp, Artificial
  Probe
ttcttgtttatttaccgactctttg

SEQ ID NO: 159090 - DNA, 25 bp, Artificial
  Probe
tgtcaaggcagatcatctttgtaag

SEQ ID NO: 159091 - DNA, 25 bp, Artificial
  Probe
aaatgcttcttgtttatttaccgac

SEQ ID NO: 159092 - DNA, 25 bp, Artificial
  Probe
cttcttgtttatttaccgactcttt

SEQ ID NO: 159093 - DNA, 25 bp, Artificial
  Probe
cagatttgttcaatgcactaaagga

SEQ ID NO: 159094 - DNA, 25 bp, Artificial
  Probe
tcagatttgttcaatgcactaaagg

SEQ ID NO: 159095 - DNA, 25 bp, Artificial
  Probe
cattcaccatgaccaacctatgaag

SEQ ID NO: 159096 - DNA, 25 bp, Artificial
  Probe
tttacaatgcactacaggaatgaaa

SEQ ID NO: 159097 - DNA, 25 bp, Artificial
  Probe
gtcagatttgttcaatgcactaaag

SEQ ID NO: 159098 - DNA, 25 bp, Artificial
  Probe
tttgtaagaagacatataactccgt

SEQ ID NO: 159099 - DNA, 25 bp, Artificial
  Probe
tacaatgcactacaggaatgaaatt

SEQ ID NO: 159100 - DNA, 25 bp, Artificial
  Probe
ttacaatgcactacaggaatgaaat

SEQ ID NO: 159101 - DNA, 25 bp, Artificial
  Probe
atttacaatgcactacaggaatgaa

SEQ ID NO: 159102 - DNA, 25 bp, Artificial
  Probe
agatttgttcaatgcactaaaggaa

SEQ ID NO: 159103 - DNA, 25 bp, Artificial
  Probe
ccttcttaacacttcctgattattt

SEQ ID NO: 159104 - DNA, 25 bp, Artificial
  Probe
agacatataactccgtaaatactga

SEQ ID NO: 159105 - DNA, 25 bp, Artificial
  Probe
gatttgttcaatgcactaaaggaaa

SEQ ID NO: 159106 - DNA, 25 bp, Artificial
  Probe
agtcagatttgttcaatgcactaaa

SEQ ID NO: 159107 - DNA, 25 bp, Artificial
  Probe
aagtcagatttgttcaatgcactaa

SEQ ID NO: 159108 - DNA, 25 bp, Artificial
  Probe
aaagtcagatttgttcaatgcacta

SEQ ID NO: 159109 - DNA, 25 bp, Artificial
  Probe
ctttgtaagaagacatataactccg

SEQ ID NO: 159110 - DNA, 25 bp, Artificial
  Probe
aaggcagatcatctttgtaagaaga

SEQ ID NO: 159111 - DNA, 25 bp, Artificial
  Probe
atagagtatatcttcaagccgtcct

SEQ ID NO: 159112 - DNA, 25 bp, Artificial
  Probe
tagagtatatcttcaagccgtcctg

SEQ ID NO: 159113 - DNA, 25 bp, Artificial
  Probe
gatagagtatatcttcaagccgtcc

SEQ ID NO: 159114 - DNA, 25 bp, Artificial
  Probe
gagtatatcttcaagccgtcctgtg

SEQ ID NO: 159115 - DNA, 25 bp, Artificial
  Probe
agagtatatcttcaagccgtcctgt

SEQ ID NO: 159116 - DNA, 25 bp, Artificial
  Probe
gagaaagcatttgtttgtccaagat

SEQ ID NO: 159117 - DNA, 25 bp, Artificial
  Probe
gtatatcttcaagccgtcctgtgtg

SEQ ID NO: 159118 - DNA, 25 bp, Artificial
  Probe
agtatatcttcaagccgtcctgtgt

SEQ ID NO: 159119 - DNA, 25 bp, Artificial
  Probe
agaaagcatttgtttgtccaagatc

SEQ ID NO: 159120 - DNA, 25 bp, Artificial
  Probe
agatagagtatatcttcaagccgtc

SEQ ID NO: 159121 - DNA, 25 bp, Artificial
  Probe
gagatagagtatatcttcaagccgt

SEQ ID NO: 159122 - DNA, 25 bp, Artificial
  Probe
tgagatagagtatatcttcaagccg

SEQ ID NO: 159123 - DNA, 25 bp, Artificial
  Probe
ggagaaagcatttgtttgtccaaga

SEQ ID NO: 159124 - DNA, 25 bp, Artificial
  Probe
gatagaacaaagccagaaaatcact

SEQ ID NO: 159125 - DNA, 25 bp, Artificial
  Probe
agatagaacaaagccagaaaatcac

SEQ ID NO: 159126 - DNA, 25 bp, Artificial
  Probe
ttaaacgaacgtacttgcagatgtg

SEQ ID NO: 159127 - DNA, 25 bp, Artificial
  Probe
aagatagaacaaagccagaaaatca

SEQ ID NO: 159128 - DNA, 25 bp, Artificial
  Probe
tatatcttcaagccgtcctgtgtgc

SEQ ID NO: 159129 - DNA, 25 bp, Artificial
  Probe
gagtaccccgatgagatagagtata

SEQ ID NO: 159130 - DNA, 25 bp, Artificial
  Probe
ttcagagcggagaaagcatttgttt

SEQ ID NO: 159131 - DNA, 25 bp, Artificial
  Probe
agtaccccgatgagatagagtatat

SEQ ID NO: 159132 - DNA, 25 bp, Artificial
  Probe
gaaagatagaacaaagccagaaaat

SEQ ID NO: 159133 - DNA, 25 bp, Artificial
  Probe
taaacgaacgtacttgcagatgtga

SEQ ID NO: 159134 - DNA, 25 bp, Artificial
  Probe
aaagatagaacaaagccagaaaatc

SEQ ID NO: 159135 - DNA, 25 bp, Artificial
  Probe
atagaacaaagccagaaaatcactg

SEQ ID NO: 159136 - DNA, 25 bp, Artificial
  Probe
tagaacaaagccagaaaatcactgt

SEQ ID NO: 159137 - DNA, 25 bp, Artificial
  Probe
atgagatagagtatatcttcaagcc

SEQ ID NO: 159138 - DNA, 25 bp, Artificial
  Probe
cggagaaagcatttgtttgtccaag

SEQ ID NO: 159139 - DNA, 25 bp, Artificial
  Probe
cttgttcagagcggagaaagcattt

SEQ ID NO: 159140 - DNA, 25 bp, Artificial
  Probe
gtaccccgatgagatagagtatatc

SEQ ID NO: 159141 - DNA, 25 bp, Artificial
  Probe
ccgatgagatagagtatatcttcaa

SEQ ID NO: 159142 - DNA, 25 bp, Artificial
  Probe
ggagtaccccgatgagatagagtat

SEQ ID NO: 159143 - DNA, 25 bp, Artificial
  Probe
agagcggagaaagcatttgtttgtc

SEQ ID NO: 159144 - DNA, 25 bp, Artificial
  Probe
tcagagcggagaaagcatttgtttg

SEQ ID NO: 159145 - DNA, 25 bp, Artificial
  Probe
aaagccagcacataggagagatgag

SEQ ID NO: 159146 - DNA, 25 bp, Artificial
  Probe
aaatcactgtgagccttgttcagag

SEQ ID NO: 159147 - DNA, 25 bp, Artificial
  Probe
gttcagagcggagaaagcatttgtt

SEQ ID NO: 159148 - DNA, 25 bp, Artificial
  Probe
ttgttcagagcggagaaagcatttg

SEQ ID NO: 159149 - DNA, 25 bp, Artificial
  Probe
cccgatgagatagagtatatcttca

SEQ ID NO: 159150 - DNA, 25 bp, Artificial
  Probe
cagagcggagaaagcatttgtttgt

SEQ ID NO: 159151 - DNA, 25 bp, Artificial
  Probe
caaagccagcacataggagagatga

SEQ ID NO: 159152 - DNA, 25 bp, Artificial
  Probe
agaacaaagccagaaaatcactgtg

SEQ ID NO: 159153 - DNA, 25 bp, Artificial
  Probe
aggagtaccccgatgagatagagta

SEQ ID NO: 159154 - DNA, 25 bp, Artificial
  Probe
gattgagaccctggtggacatcttc

SEQ ID NO: 159155 - DNA, 25 bp, Artificial
  Probe
gatgagatagagtatatcttcaagc

SEQ ID NO: 159156 - DNA, 25 bp, Artificial
  Probe
atgagttcaattccagcaaccacat

SEQ ID NO: 159157 - DNA, 25 bp, Artificial
  Probe
cttccaaaggtcctgagttcaattc

SEQ ID NO: 159158 - DNA, 25 bp, Artificial
  Probe
tcttccaaaggtcctgagttcaatt

SEQ ID NO: 159159 - DNA, 25 bp, Artificial
  Probe
ctcttccaaaggtcctgagttcaat

SEQ ID NO: 159160 - DNA, 25 bp, Artificial
  Probe
ttccaaaggtcctgagttcaattcc

SEQ ID NO: 159161 - DNA, 25 bp, Artificial
  Probe
ctgagttcaattccagcaaccacat

SEQ ID NO: 159162 - DNA, 25 bp, Artificial
  Probe
catgagttcaattccagcaaccaca

SEQ ID NO: 159163 - DNA, 25 bp, Artificial
  Probe
aaaacaaaacagtaatgacagagag

SEQ ID NO: 159164 - DNA, 25 bp, Artificial
  Probe
aaggtcctgagttcaattccagcaa

SEQ ID NO: 159165 - DNA, 25 bp, Artificial
  Probe
tccaaaggtcctgagttcaattcca

SEQ ID NO: 159166 - DNA, 25 bp, Artificial
  Probe
caaccatctgtaaagagatccgatg

SEQ ID NO: 159167 - DNA, 25 bp, Artificial
  Probe
ccaaaggtcctgagttcaattccag

SEQ ID NO: 159168 - DNA, 25 bp, Artificial
  Probe
ccagaggtcatgagttcaattccag

SEQ ID NO: 159169 - DNA, 25 bp, Artificial
  Probe
agacagctacagtgtacttatataa

SEQ ID NO: 159170 - DNA, 25 bp, Artificial
  Probe
gaggtcatgagttcaattccagcaa

SEQ ID NO: 159171 - DNA, 25 bp, Artificial
  Probe
tccagaggtcatgagttcaattcca

SEQ ID NO: 159172 - DNA, 25 bp, Artificial
  Probe
aggtcatgagttcaattccagcaac

SEQ ID NO: 159173 - DNA, 25 bp, Artificial
  Probe
taatgacagagagggctggagagat

SEQ ID NO: 159174 - DNA, 25 bp, Artificial
  Probe
caaaggtcctgagttcaattccagc

SEQ ID NO: 159175 - DNA, 25 bp, Artificial
  Probe
cagaggtcatgagttcaattccagc

SEQ ID NO: 159176 - DNA, 25 bp, Artificial
  Probe
aggtcctgagttcaattccagcaac

SEQ ID NO: 159177 - DNA, 25 bp, Artificial
  Probe
aaccatctgtaaagagatccgatgc

SEQ ID NO: 159178 - DNA, 25 bp, Artificial
  Probe
tcatgagttcaattccagcaaccac

SEQ ID NO: 159179 - DNA, 25 bp, Artificial
  Probe
gtcatgagttcaattccagcaacca

SEQ ID NO: 159180 - DNA, 25 bp, Artificial
  Probe
agaggtcatgagttcaattccagca

SEQ ID NO: 159181 - DNA, 25 bp, Artificial
  Probe
aaaggtcctgagttcaattccagca

SEQ ID NO: 159182 - DNA, 25 bp, Artificial
  Probe
atctgtaaagagatccgatgccctc

SEQ ID NO: 159183 - DNA, 25 bp, Artificial
  Probe
gacagctacagtgtacttatataat

SEQ ID NO: 159184 - DNA, 25 bp, Artificial
  Probe
gctcttccaaaggtcctgagttcaa

SEQ ID NO: 159185 - DNA, 25 bp, Artificial
  Probe
ctgctcttccaaaggtcctgagttc

SEQ ID NO: 159186 - DNA, 25 bp, Artificial
  Probe
gtaatgacagagagggctggagaga

SEQ ID NO: 159187 - DNA, 25 bp, Artificial
  Probe
agtaatgacagagagggctggagag

SEQ ID NO: 159188 - DNA, 25 bp, Artificial
  Probe
aacagtaatgacagagagggctgga

SEQ ID NO: 159189 - DNA, 25 bp, Artificial
  Probe
catctgtaaagagatccgatgccct

SEQ ID NO: 159190 - DNA, 25 bp, Artificial
  Probe
cagtaatgacagagagggctggaga

SEQ ID NO: 159191 - DNA, 25 bp, Artificial
  Probe
accatctgtaaagagatccgatgcc

SEQ ID NO: 159192 - DNA, 25 bp, Artificial
  Probe
ggtcatgagttcaattccagcaacc

SEQ ID NO: 159193 - DNA, 25 bp, Artificial
  Probe
tctgtaaagagatccgatgccctct

SEQ ID NO: 159194 - DNA, 25 bp, Artificial
  Probe
ccatctgtaaagagatccgatgccc

SEQ ID NO: 159195 - DNA, 25 bp, Artificial
  Probe
aaacaaaacaggggctggggattta

SEQ ID NO: 159196 - DNA, 25 bp, Artificial
  Probe
aaggtctcttcacttatgtattccg

SEQ ID NO: 159197 - DNA, 25 bp, Artificial
  Probe
taccgaacctcattacacaacactg

SEQ ID NO: 159198 - DNA, 25 bp, Artificial
  Probe
gtaccgaacctcattacacaacact

SEQ ID NO: 159199 - DNA, 25 bp, Artificial
  Probe
caataaagaaggaagtgtgtatgac

SEQ ID NO: 159200 - DNA, 25 bp, Artificial
  Probe
gtggataacaataaagaaggaagtg

SEQ ID NO: 159201 - DNA, 25 bp, Artificial
  Probe
attccagactgctgactttgataag

SEQ ID NO: 159202 - DNA, 25 bp, Artificial
  Probe
gattccagactgctgactttgataa

SEQ ID NO: 159203 - DNA, 25 bp, Artificial
  Probe
aggtcctgtggataacaataaagaa

SEQ ID NO: 159204 - DNA, 25 bp, Artificial
  Probe
gtcctgtggataacaataaagaagg

SEQ ID NO: 159205 - DNA, 25 bp, Artificial
  Probe
ggtcctgtggataacaataaagaag

SEQ ID NO: 159206 - DNA, 25 bp, Artificial
  Probe
tgaggaaggtctcttcacttatgta

SEQ ID NO: 159207 - DNA, 25 bp, Artificial
  Probe
aataaagaaggaagtgtgtatgact

SEQ ID NO: 159208 - DNA, 25 bp, Artificial
  Probe
gaggaaggtctcttcacttatgtat

SEQ ID NO: 159209 - DNA, 25 bp, Artificial
  Probe
cctgtggataacaataaagaaggaa

SEQ ID NO: 159210 - DNA, 25 bp, Artificial
  Probe
gctactctttcaagtatgagatggt

SEQ ID NO: 159211 - DNA, 25 bp, Artificial
  Probe
aggctactctttcaagtatgagatg

SEQ ID NO: 159212 - DNA, 25 bp, Artificial
  Probe
gaggctactctttcaagtatgagat

SEQ ID NO: 159213 - DNA, 25 bp, Artificial
  Probe
aggtctcttcacttatgtattccgg

SEQ ID NO: 159214 - DNA, 25 bp, Artificial
  Probe
acaataaagaaggaagtgtgtatga

SEQ ID NO: 159215 - DNA, 25 bp, Artificial
  Probe
tggataacaataaagaaggaagtgt

SEQ ID NO: 159216 - DNA, 25 bp, Artificial
  Probe
tgtggataacaataaagaaggaagt

SEQ ID NO: 159217 - DNA, 25 bp, Artificial
  Probe
ggctactctttcaagtatgagatgg

SEQ ID NO: 159218 - DNA, 25 bp, Artificial
  Probe
gatggaggctactctttcaagtatg

SEQ ID NO: 159219 - DNA, 25 bp, Artificial
  Probe
agatggaggctactctttcaagtat

SEQ ID NO: 159220 - DNA, 25 bp, Artificial
  Probe
aggaaggtctcttcacttatgtatt

SEQ ID NO: 159221 - DNA, 25 bp, Artificial
  Probe
atggaggctactctttcaagtatga

SEQ ID NO: 159222 - DNA, 25 bp, Artificial
  Probe
gaaggtctcttcacttatgtattcc

SEQ ID NO: 159223 - DNA, 25 bp, Artificial
  Probe
ggaaggtctcttcacttatgtattc

SEQ ID NO: 159224 - DNA, 25 bp, Artificial
  Probe
ggataacaataaagaaggaagtgtg

SEQ ID NO: 159225 - DNA, 25 bp, Artificial
  Probe
ctgaggaaggtctcttcacttatgt

SEQ ID NO: 159226 - DNA, 25 bp, Artificial
  Probe
ggaggctactctttcaagtatgaga

SEQ ID NO: 159227 - DNA, 25 bp, Artificial
  Probe
ctcagatggaggctactctttcaag

SEQ ID NO: 159228 - DNA, 25 bp, Artificial
  Probe
ctgtggataacaataaagaaggaag

SEQ ID NO: 159229 - DNA, 25 bp, Artificial
  Probe
tggaggctactctttcaagtatgag

SEQ ID NO: 159230 - DNA, 25 bp, Artificial
  Probe
cagatggaggctactctttcaagta

SEQ ID NO: 159231 - DNA, 25 bp, Artificial
  Probe
aacaataaagaaggaagtgtgtatg

SEQ ID NO: 159232 - DNA, 25 bp, Artificial
  Probe
tttcccttcatctttctgtctgagg

SEQ ID NO: 159233 - DNA, 25 bp, Artificial
  Probe
ttccagactgctgactttgataagg

SEQ ID NO: 159234 - DNA, 25 bp, Artificial
  Probe
cctgaggaaggtctcttcacttatg

SEQ ID NO: 159235 - DNA, 25 bp, Artificial
  Probe
caggtcctgtggataacaataaaga

SEQ ID NO: 159236 - DNA, 25 bp, Artificial
  Probe
cagagagaattgcattgtgggattt

SEQ ID NO: 159237 - DNA, 25 bp, Artificial
  Probe
gataacaataaagaaggaagtgtgt

SEQ ID NO: 159238 - DNA, 25 bp, Artificial
  Probe
cgattccagactgctgactttgata

SEQ ID NO: 159239 - DNA, 25 bp, Artificial
  Probe
tcagatggaggctactctttcaagt

SEQ ID NO: 159240 - DNA, 25 bp, Artificial
  Probe
tcttcacttatgtattccggccatc

SEQ ID NO: 159241 - DNA, 25 bp, Artificial
  Probe
ggctatcttctggattgagtatgtc

SEQ ID NO: 159242 - DNA, 25 bp, Artificial
  Probe
aaggctatcttctggattgagtatg

SEQ ID NO: 159243 - DNA, 25 bp, Artificial
  Probe
aggctatcttctggattgagtatgt

SEQ ID NO: 159244 - DNA, 25 bp, Artificial
  Probe
caaggctatcttctggattgagtat

SEQ ID NO: 159245 - DNA, 25 bp, Artificial
  Probe
gctatcttctggattgagtatgtca

SEQ ID NO: 159246 - DNA, 25 bp, Artificial
  Probe
gaggcagatcatcattgtaagaaga

SEQ ID NO: 159247 - DNA, 25 bp, Artificial
  Probe
acaaggctatcttctggattgagta

SEQ ID NO: 159248 - DNA, 25 bp, Artificial
  Probe
ggaggcagatcatcattgtaagaag

SEQ ID NO: 159249 - DNA, 25 bp, Artificial
  Probe
tggaggcagatcatcattgtaagaa

SEQ ID NO: 159250 - DNA, 25 bp, Artificial
  Probe
atcttctggattgagtatgtcatgc

SEQ ID NO: 159251 - DNA, 25 bp, Artificial
  Probe
gcagatcatcattgtaagaagacat

SEQ ID NO: 159252 - DNA, 25 bp, Artificial
  Probe
ggcagatcatcattgtaagaagaca

SEQ ID NO: 159253 - DNA, 25 bp, Artificial
  Probe
gacaaggctatcttctggattgagt

SEQ ID NO: 159254 - DNA, 25 bp, Artificial
  Probe
ttgtggaggcagatcatcattgtaa

SEQ ID NO: 159255 - DNA, 25 bp, Artificial
  Probe
ctatcttctggattgagtatgtcat

SEQ ID NO: 159256 - DNA, 25 bp, Artificial
  Probe
gtggaggcagatcatcattgtaaga

SEQ ID NO: 159257 - DNA, 25 bp, Artificial
  Probe
gcttcttgttcatttaccgattctt

SEQ ID NO: 159258 - DNA, 25 bp, Artificial
  Probe
tcttgttcatttaccgattctttgc

SEQ ID NO: 159259 - DNA, 25 bp, Artificial
  Probe
tttatactacctccctcttatgtgc

SEQ ID NO: 159260 - DNA, 25 bp, Artificial
  Probe
ggacaaggctatcttctggattgag

SEQ ID NO: 159261 - DNA, 25 bp, Artificial
  Probe
ttatactacctccctcttatgtgcc

SEQ ID NO: 159262 - DNA, 25 bp, Artificial
  Probe
ctatgattggcattcctatgtttgg

SEQ ID NO: 159263 - DNA, 25 bp, Artificial
  Probe
cctatgattggcattcctatgtttg

SEQ ID NO: 159264 - DNA, 25 bp, Artificial
  Probe
atgcttcttgttcatttaccgattc

SEQ ID NO: 159265 - DNA, 25 bp, Artificial
  Probe
tgcttcttgttcatttaccgattct

SEQ ID NO: 159266 - DNA, 25 bp, Artificial
  Probe
tgtggaggcagatcatcattgtaag

SEQ ID NO: 159267 - DNA, 25 bp, Artificial
  Probe
ccctatgattggcattcctatgttt

SEQ ID NO: 159268 - DNA, 25 bp, Artificial
  Probe
tatcttctggattgagtatgtcatg

SEQ ID NO: 159269 - DNA, 25 bp, Artificial
  Probe
tgaatcactttcttaacacttcctg

SEQ ID NO: 159270 - DNA, 25 bp, Artificial
  Probe
ttgcccaaggatatagaagactttg

SEQ ID NO: 159271 - DNA, 25 bp, Artificial
  Probe
tgtaagaagacatatagctctgtga

SEQ ID NO: 159272 - DNA, 25 bp, Artificial
  Probe
ctggacaaggctatcttctggattg

SEQ ID NO: 159273 - DNA, 25 bp, Artificial
  Probe
tatactacctccctcttatgtgcct

SEQ ID NO: 159274 - DNA, 25 bp, Artificial
  Probe
ttcttgttcatttaccgattctttg

SEQ ID NO: 159275 - DNA, 25 bp, Artificial
  Probe
atccctatgattggcattcctatgt

SEQ ID NO: 159276 - DNA, 25 bp, Artificial
  Probe
gttgacaatgcactacaggaatgaa

SEQ ID NO: 159277 - DNA, 25 bp, Artificial
  Probe
tccctatgattggcattcctatgtt

SEQ ID NO: 159278 - DNA, 25 bp, Artificial
  Probe
gaatcactttcttaacacttcctga

SEQ ID NO: 159279 - DNA, 25 bp, Artificial
  Probe
cttcttgttcatttaccgattcttt

SEQ ID NO: 159280 - DNA, 25 bp, Artificial
  Probe
atgaatcactttcttaacacttcct

SEQ ID NO: 159281 - DNA, 25 bp, Artificial
  Probe
tgcccaaggatatagaagactttgt

SEQ ID NO: 159282 - DNA, 25 bp, Artificial
  Probe
ttgtaagaagacatatagctctgtg

SEQ ID NO: 159283 - DNA, 25 bp, Artificial
  Probe
tggacaaggctatcttctggattga

SEQ ID NO: 159284 - DNA, 25 bp, Artificial
  Probe
cttgcccaaggatatagaagacttt

SEQ ID NO: 159285 - DNA, 25 bp, Artificial
  Probe
tcactttcttaacacttcctgattt

SEQ ID NO: 159286 - DNA, 25 bp, Artificial
  Probe
cctcattatcattggactaacagag

SEQ ID NO: 159287 - DNA, 25 bp, Artificial
  Probe
tcattatcattggactaacagagaa

SEQ ID NO: 159288 - DNA, 25 bp, Artificial
  Probe
ctcattatcattggactaacagaga

SEQ ID NO: 159289 - DNA, 25 bp, Artificial
  Probe
ccctcattatcattggactaacaga

SEQ ID NO: 159290 - DNA, 25 bp, Artificial
  Probe
ctttctctttgattcccatcctctg

SEQ ID NO: 159291 - DNA, 25 bp, Artificial
  Probe
gcactttatctctcttcagttctca

SEQ ID NO: 159292 - DNA, 25 bp, Artificial
  Probe
cactttatctctcttcagttctcag

SEQ ID NO: 159293 - DNA, 25 bp, Artificial
  Probe
actttatctctcttcagttctcaga

SEQ ID NO: 159294 - DNA, 25 bp, Artificial
  Probe
tgatacagaacagtagagagaaatg

SEQ ID NO: 159295 - DNA, 25 bp, Artificial
  Probe
gatacagaacagtagagagaaatga

SEQ ID NO: 159296 - DNA, 25 bp, Artificial
  Probe
gctttctctttgattcccatcctct

SEQ ID NO: 159297 - DNA, 25 bp, Artificial
  Probe
ttatcattggactaacagagaaaga

SEQ ID NO: 159298 - DNA, 25 bp, Artificial
  Probe
gaagctaagataaatctggtggaga

SEQ ID NO: 159299 - DNA, 25 bp, Artificial
  Probe
agaagctaagataaatctggtggag

SEQ ID NO: 159300 - DNA, 25 bp, Artificial
  Probe
gcgtctcaagaagctaagataaatc

SEQ ID NO: 159301 - DNA, 25 bp, Artificial
  Probe
tgcgtctcaagaagctaagataaat

SEQ ID NO: 159302 - DNA, 25 bp, Artificial
  Probe
caagaagctaagataaatctggtgg

SEQ ID NO: 159303 - DNA, 25 bp, Artificial
  Probe
aagaagctaagataaatctggtgga

SEQ ID NO: 159304 - DNA, 25 bp, Artificial
  Probe
tatctctcttcagttctcagagtct

SEQ ID NO: 159305 - DNA, 25 bp, Artificial
  Probe
aactcttgcactttatctctcttca

SEQ ID NO: 159306 - DNA, 25 bp, Artificial
  Probe
tttctctttgattcccatcctctgc

SEQ ID NO: 159307 - DNA, 25 bp, Artificial
  Probe
tgctttctctttgattcccatcctc

SEQ ID NO: 159308 - DNA, 25 bp, Artificial
  Probe
cctgcatttgttactggctaattta

SEQ ID NO: 159309 - DNA, 25 bp, Artificial
  Probe
atctctcttcagttctcagagtctt

SEQ ID NO: 159310 - DNA, 25 bp, Artificial
  Probe
actcttgcactttatctctcttcag

SEQ ID NO: 159311 - DNA, 25 bp, Artificial
  Probe
ctgcgtctcaagaagctaagataaa

SEQ ID NO: 159312 - DNA, 25 bp, Artificial
  Probe
atacctgcatttgttactggctaat

SEQ ID NO: 159313 - DNA, 25 bp, Artificial
  Probe
acagaacagtagagagaaatgaata

SEQ ID NO: 159314 - DNA, 25 bp, Artificial
  Probe
ggaaactcttgcactttatctctct

SEQ ID NO: 159315 - DNA, 25 bp, Artificial
  Probe
tacagaacagtagagagaaatgaat

SEQ ID NO: 159316 - DNA, 25 bp, Artificial
  Probe
atacagaacagtagagagaaatgaa

SEQ ID NO: 159317 - DNA, 25 bp, Artificial
  Probe
ccttcatcataacccaagttactgg

SEQ ID NO: 159318 - DNA, 25 bp, Artificial
  Probe
tacctgcatttgttactggctaatt

SEQ ID NO: 159319 - DNA, 25 bp, Artificial
  Probe
aatacctgcatttgttactggctaa

SEQ ID NO: 159320 - DNA, 25 bp, Artificial
  Probe
tatcattggactaacagagaaagat

SEQ ID NO: 159321 - DNA, 25 bp, Artificial
  Probe
ttatctctcttcagttctcagagtc

SEQ ID NO: 159322 - DNA, 25 bp, Artificial
  Probe
gccttcatcataacccaagttactg

SEQ ID NO: 159323 - DNA, 25 bp, Artificial
  Probe
aaactcttgcactttatctctcttc

SEQ ID NO: 159324 - DNA, 25 bp, Artificial
  Probe
gaaactcttgcactttatctctctt

SEQ ID NO: 159325 - DNA, 25 bp, Artificial
  Probe
tcaagaagctaagataaatctggtg

SEQ ID NO: 159326 - DNA, 25 bp, Artificial
  Probe
tctctcttcagttctcagagtcttg

SEQ ID NO: 159327 - DNA, 25 bp, Artificial
  Probe
gataaatctggtggagataggacag

SEQ ID NO: 159328 - DNA, 25 bp, Artificial
  Probe
agataaatctggtggagataggaca

SEQ ID NO: 159329 - DNA, 25 bp, Artificial
  Probe
cgtctcaagaagctaagataaatct

SEQ ID NO: 159330 - DNA, 25 bp, Artificial
  Probe
ttgcactttatctctcttcagttct

SEQ ID NO: 159331 - DNA, 25 bp, Artificial
  Probe
ttgacataccgctcattggcaagta

SEQ ID NO: 159332 - DNA, 25 bp, Artificial
  Probe
cgatgaccgagatcaaagtgtagtc

SEQ ID NO: 159333 - DNA, 25 bp, Artificial
  Probe
agcgatgaccgagatcaaagtgtag

SEQ ID NO: 159334 - DNA, 25 bp, Artificial
  Probe
gagcgatgaccgagatcaaagtgta

SEQ ID NO: 159335 - DNA, 25 bp, Artificial
  Probe
gcgatgaccgagatcaaagtgtagt

SEQ ID NO: 159336 - DNA, 25 bp, Artificial
  Probe
gatgaccgagatcaaagtgtagtca

SEQ ID NO: 159337 - DNA, 25 bp, Artificial
  Probe
atgaccgagatcaaagtgtagtcac

SEQ ID NO: 159338 - DNA, 25 bp, Artificial
  Probe
gaccgagatcaaagtgtagtcactg

SEQ ID NO: 159339 - DNA, 25 bp, Artificial
  Probe
tgaccgagatcaaagtgtagtcact

SEQ ID NO: 159340 - DNA, 25 bp, Artificial
  Probe
tgacagagacataaggattggtgat

SEQ ID NO: 159341 - DNA, 25 bp, Artificial
  Probe
gacagagacataaggattggtgatg

SEQ ID NO: 159342 - DNA, 25 bp, Artificial
  Probe
gttggtgacagagacataaggattg

SEQ ID NO: 159343 - DNA, 25 bp, Artificial
  Probe
taacatcattctgaacatcggaaga

SEQ ID NO: 159344 - DNA, 25 bp, Artificial
  Probe
ctaacatcattctgaacatcggaag

SEQ ID NO: 159345 - DNA, 25 bp, Artificial
  Probe
gaactaacatcattctgaacatcgg

SEQ ID NO: 159346 - DNA, 25 bp, Artificial
  Probe
ggaactaacatcattctgaacatcg

SEQ ID NO: 159347 - DNA, 25 bp, Artificial
  Probe
actaacatcattctgaacatcggaa

SEQ ID NO: 159348 - DNA, 25 bp, Artificial
  Probe
aactaacatcattctgaacatcgga

SEQ ID NO: 159349 - DNA, 25 bp, Artificial
  Probe
gtgacagagacataaggattggtga

SEQ ID NO: 159350 - DNA, 25 bp, Artificial
  Probe
ttggtgacagagacataaggattgg

SEQ ID NO: 159351 - DNA, 25 bp, Artificial
  Probe
tgttggtgacagagacataaggatt

SEQ ID NO: 159352 - DNA, 25 bp, Artificial
  Probe
ttgttggtgacagagacataaggat

SEQ ID NO: 159353 - DNA, 25 bp, Artificial
  Probe
ggtgacagagacataaggattggtg

SEQ ID NO: 159354 - DNA, 25 bp, Artificial
  Probe
tgatgatgaaagttgtcctggttac

SEQ ID NO: 159355 - DNA, 25 bp, Artificial
  Probe
gtgatgatgaaagttgtcctggtta

SEQ ID NO: 159356 - DNA, 25 bp, Artificial
  Probe
ctatactgaaggaaatccacactgt

SEQ ID NO: 159357 - DNA, 25 bp, Artificial
  Probe
tatactgaaggaaatccacactgtt

SEQ ID NO: 159358 - DNA, 25 bp, Artificial
  Probe
gttgttggtgacagagacataagga

SEQ ID NO: 159359 - DNA, 25 bp, Artificial
  Probe
aataatgacttgtccttgcatctag

SEQ ID NO: 159360 - DNA, 25 bp, Artificial
  Probe
tggtgacagagacataaggattggt

SEQ ID NO: 159361 - DNA, 25 bp, Artificial
  Probe
agggaactaacatcattctgaacat

SEQ ID NO: 159362 - DNA, 25 bp, Artificial
  Probe
aagggaactaacatcattctgaaca

SEQ ID NO: 159363 - DNA, 25 bp, Artificial
  Probe
atactgaaggaaatccacactgttg

SEQ ID NO: 159364 - DNA, 25 bp, Artificial
  Probe
gggaactaacatcattctgaacatc

SEQ ID NO: 159365 - DNA, 25 bp, Artificial
  Probe
tgttgttggtgacagagacataagg

SEQ ID NO: 159366 - DNA, 25 bp, Artificial
  Probe
gctatactgaaggaaatccacactg

SEQ ID NO: 159367 - DNA, 25 bp, Artificial
  Probe
aacatcattctgaacatcggaagaa

SEQ ID NO: 159368 - DNA, 25 bp, Artificial
  Probe
aaagggaactaacatcattctgaac

SEQ ID NO: 159369 - DNA, 25 bp, Artificial
  Probe
aagcccaatgaatttacccttgaaa

SEQ ID NO: 159370 - DNA, 25 bp, Artificial
  Probe
gatgatgaaagttgtcctggttaca

SEQ ID NO: 159371 - DNA, 25 bp, Artificial
  Probe
ataatgacttgtccttgcatctaga

SEQ ID NO: 159372 - DNA, 25 bp, Artificial
  Probe
atgatgaaagttgtcctggttacac

SEQ ID NO: 159373 - DNA, 25 bp, Artificial
  Probe
cagagacataaggattggtgatgtg

SEQ ID NO: 159374 - DNA, 25 bp, Artificial
  Probe
acagagacataaggattggtgatgt

SEQ ID NO: 159375 - DNA, 25 bp, Artificial
  Probe
agctatactgaaggaaatccacact

SEQ ID NO: 159376 - DNA, 25 bp, Artificial
  Probe
tgatgaaagttgtcctggttacact

SEQ ID NO: 159377 - DNA, 25 bp, Artificial
  Probe
tactgaaggaaatccacactgttgt

SEQ ID NO: 159378 - DNA, 25 bp, Artificial
  Probe
tttgaaacgattccatgtgaagaca

SEQ ID NO: 159379 - DNA, 25 bp, Artificial
  Probe
catggtgatgatgaaagttgtcctg

SEQ ID NO: 159380 - DNA, 25 bp, Artificial
  Probe
tctgtacgtcatgttgcttctcatc

SEQ ID NO: 159381 - DNA, 25 bp, Artificial
  Probe
ctctgtacgtcatgttgcttctcat

SEQ ID NO: 159382 - DNA, 25 bp, Artificial
  Probe
atggtgatgatgaaagttgtcctgg

SEQ ID NO: 159383 - DNA, 25 bp, Artificial
  Probe
aaacagctatactgaaggaaatcca

SEQ ID NO: 159384 - DNA, 25 bp, Artificial
  Probe
tggaaacagctatactgaaggaaat

SEQ ID NO: 159385 - DNA, 25 bp, Artificial
  Probe
gtaacgcactatctattcatctcca

SEQ ID NO: 159386 - DNA, 25 bp, Artificial
  Probe
tgtaacgcactatctattcatctcc

SEQ ID NO: 159387 - DNA, 25 bp, Artificial
  Probe
cctgtaacgcactatctattcatct

SEQ ID NO: 159388 - DNA, 25 bp, Artificial
  Probe
gcactatctattcatctccatctgt

SEQ ID NO: 159389 - DNA, 25 bp, Artificial
  Probe
aacgcactatctattcatctccatc

SEQ ID NO: 159390 - DNA, 25 bp, Artificial
  Probe
cgcactatctattcatctccatctg

SEQ ID NO: 159391 - DNA, 25 bp, Artificial
  Probe
tatctattcatctccatctgtgtcc

SEQ ID NO: 159392 - DNA, 25 bp, Artificial
  Probe
taacgcactatctattcatctccat

SEQ ID NO: 159393 - DNA, 25 bp, Artificial
  Probe
acgcactatctattcatctccatct

SEQ ID NO: 159394 - DNA, 25 bp, Artificial
  Probe
ctgtaacgcactatctattcatctc

SEQ ID NO: 159395 - DNA, 25 bp, Artificial
  Probe
ttgtaattctaatgtggtgacctcc

SEQ ID NO: 159396 - DNA, 25 bp, Artificial
  Probe
gtaattctaatgtggtgacctcctc

SEQ ID NO: 159397 - DNA, 25 bp, Artificial
  Probe
actatctattcatctccatctgtgt

SEQ ID NO: 159398 - DNA, 25 bp, Artificial
  Probe
tgtaattctaatgtggtgacctcct

SEQ ID NO: 159399 - DNA, 25 bp, Artificial
  Probe
attgtaattctaatgtggtgacctc

SEQ ID NO: 159400 - DNA, 25 bp, Artificial
  Probe
atctattcatctccatctgtgtccg

SEQ ID NO: 159401 - DNA, 25 bp, Artificial
  Probe
ctatctattcatctccatctgtgtc

SEQ ID NO: 159402 - DNA, 25 bp, Artificial
  Probe
taattctaatgtggtgacctcctca

SEQ ID NO: 159403 - DNA, 25 bp, Artificial
  Probe
cttctctggtcttcagtcattgtat

SEQ ID NO: 159404 - DNA, 25 bp, Artificial
  Probe
ttctctggtcttcagtcattgtatg

SEQ ID NO: 159405 - DNA, 25 bp, Artificial
  Probe
acttctctggtcttcagtcattgta

SEQ ID NO: 159406 - DNA, 25 bp, Artificial
  Probe
tacttctctggtcttcagtcattgt

SEQ ID NO: 159407 - DNA, 25 bp, Artificial
  Probe
ttcaatgtacttctctggtcttcag

SEQ ID NO: 159408 - DNA, 25 bp, Artificial
  Probe
gtacttctctggtcttcagtcattg

SEQ ID NO: 159409 - DNA, 25 bp, Artificial
  Probe
atgtacttctctggtcttcagtcat

SEQ ID NO: 159410 - DNA, 25 bp, Artificial
  Probe
caatgtacttctctggtcttcagtc

SEQ ID NO: 159411 - DNA, 25 bp, Artificial
  Probe
cattgtatgatgtgttgtgatagct

SEQ ID NO: 159412 - DNA, 25 bp, Artificial
  Probe
tgtacttctctggtcttcagtcatt

SEQ ID NO: 159413 - DNA, 25 bp, Artificial
  Probe
aatgtacttctctggtcttcagtca

SEQ ID NO: 159414 - DNA, 25 bp, Artificial
  Probe
tcaatgtacttctctggtcttcagt

SEQ ID NO: 159415 - DNA, 25 bp, Artificial
  Probe
aattctaatgtggtgacctcctcag

SEQ ID NO: 159416 - DNA, 25 bp, Artificial
  Probe
cactatctattcatctccatctgtg

SEQ ID NO: 159417 - DNA, 25 bp, Artificial
  Probe
aaataaaccctgtaacgcactatct

SEQ ID NO: 159418 - DNA, 25 bp, Artificial
  Probe
taaaccctgtaacgcactatctatt

SEQ ID NO: 159419 - DNA, 25 bp, Artificial
  Probe
aataaaccctgtaacgcactatcta

SEQ ID NO: 159420 - DNA, 25 bp, Artificial
  Probe
ataaaccctgtaacgcactatctat

SEQ ID NO: 159421 - DNA, 25 bp, Artificial
  Probe
aaaccctgtaacgcactatctattc

SEQ ID NO: 159422 - DNA, 25 bp, Artificial
  Probe
gtaaataaaccctgtaacgcactat

SEQ ID NO: 159423 - DNA, 25 bp, Artificial
  Probe
ccctgtaacgcactatctattcatc

SEQ ID NO: 159424 - DNA, 25 bp, Artificial
  Probe
cctcctcagacagaagtagaaatta

SEQ ID NO: 159425 - DNA, 25 bp, Artificial
  Probe
taaataaaccctgtaacgcactatc

SEQ ID NO: 159426 - DNA, 25 bp, Artificial
  Probe
agcattgtaattctaatgtggtgac

SEQ ID NO: 159427 - DNA, 25 bp, Artificial
  Probe
acctcctcagacagaagtagaaatt

SEQ ID NO: 159428 - DNA, 25 bp, Artificial
  Probe
gcattgtaattctaatgtggtgacc

SEQ ID NO: 159429 - DNA, 25 bp, Artificial
  Probe
gacctcctcagacagaagtagaaat

SEQ ID NO: 159430 - DNA, 25 bp, Artificial
  Probe
gaagctactattgtgttctgaatgt

SEQ ID NO: 159431 - DNA, 25 bp, Artificial
  Probe
aagctactattgtgttctgaatgtt

SEQ ID NO: 159432 - DNA, 25 bp, Artificial
  Probe
agaagctactattgtgttctgaatg

SEQ ID NO: 159433 - DNA, 25 bp, Artificial
  Probe
agctactattgtgttctgaatgttt

SEQ ID NO: 159434 - DNA, 25 bp, Artificial
  Probe
aagaagctactattgtgttctgaat

SEQ ID NO: 159435 - DNA, 25 bp, Artificial
  Probe
gctactattgtgttctgaatgtttt

SEQ ID NO: 159436 - DNA, 25 bp, Artificial
  Probe
aaagaagctactattgtgttctgaa

SEQ ID NO: 159437 - DNA, 25 bp, Artificial
  Probe
tgtgttctgaatgttttaaatggca

SEQ ID NO: 159438 - DNA, 25 bp, Artificial
  Probe
ttgtgttctgaatgttttaaatggc

SEQ ID NO: 159439 - DNA, 25 bp, Artificial
  Probe
aatgttttaaatggcagaggctttc

SEQ ID NO: 159440 - DNA, 25 bp, Artificial
  Probe
gaatgttttaaatggcagaggcttt

SEQ ID NO: 159441 - DNA, 25 bp, Artificial
  Probe
tgaatgttttaaatggcagaggctt

SEQ ID NO: 159442 - DNA, 25 bp, Artificial
  Probe
gtgttctgaatgttttaaatggcag

SEQ ID NO: 159443 - DNA, 25 bp, Artificial
  Probe
atgttttaaatggcagaggctttcc

SEQ ID NO: 159444 - DNA, 25 bp, Artificial
  Probe
ctgaatgttttaaatggcagaggct

SEQ ID NO: 159445 - DNA, 25 bp, Artificial
  Probe
attgtgttctgaatgttttaaatgg

SEQ ID NO: 159446 - DNA, 25 bp, Artificial
  Probe
ttctgaatgttttaaatggcagagg

SEQ ID NO: 159447 - DNA, 25 bp, Artificial
  Probe
tgttctgaatgttttaaatggcaga

SEQ ID NO: 159448 - DNA, 25 bp, Artificial
  Probe
gttctgaatgttttaaatggcagag

SEQ ID NO: 159449 - DNA, 25 bp, Artificial
  Probe
ctactattgtgttctgaatgtttta

SEQ ID NO: 159450 - DNA, 25 bp, Artificial
  Probe
tctgaatgttttaaatggcagaggc

SEQ ID NO: 159451 - DNA, 25 bp, Artificial
  Probe
actattgtgttctgaatgttttaaa

SEQ ID NO: 159452 - DNA, 25 bp, Artificial
  Probe
tttgtattgttcacgcttagtttct

SEQ ID NO: 159453 - DNA, 25 bp, Artificial
  Probe
atgaacattgtcacatagcttacac

SEQ ID NO: 159454 - DNA, 25 bp, Artificial
  Probe
tgaacattgtcacatagcttacact

SEQ ID NO: 159455 - DNA, 25 bp, Artificial
  Probe
ttgtattgttcacgcttagtttcta

SEQ ID NO: 159456 - DNA, 25 bp, Artificial
  Probe
atttgtattgttcacgcttagtttc

SEQ ID NO: 159457 - DNA, 25 bp, Artificial
  Probe
tattgttcacgcttagtttctatgt

SEQ ID NO: 159458 - DNA, 25 bp, Artificial
  Probe
tgtattgttcacgcttagtttctat

SEQ ID NO: 159459 - DNA, 25 bp, Artificial
  Probe
aacattgtcacatagcttacactag

SEQ ID NO: 159460 - DNA, 25 bp, Artificial
  Probe
gaacattgtcacatagcttacacta

SEQ ID NO: 159461 - DNA, 25 bp, Artificial
  Probe
gtattgttcacgcttagtttctatg

SEQ ID NO: 159462 - DNA, 25 bp, Artificial
  Probe
gttatttgtattgttcacgcttagt

SEQ ID NO: 159463 - DNA, 25 bp, Artificial
  Probe
acatctttctgatccttggtcaatt

SEQ ID NO: 159464 - DNA, 25 bp, Artificial
  Probe
aacatctttctgatccttggtcaat

SEQ ID NO: 159465 - DNA, 25 bp, Artificial
  Probe
atctttctgatccttggtcaatttg

SEQ ID NO: 159466 - DNA, 25 bp, Artificial
  Probe
catctttctgatccttggtcaattt

SEQ ID NO: 159467 - DNA, 25 bp, Artificial
  Probe
aaacatctttctgatccttggtcaa

SEQ ID NO: 159468 - DNA, 25 bp, Artificial
  Probe
tatgaacattgtcacatagcttaca

SEQ ID NO: 159469 - DNA, 25 bp, Artificial
  Probe
attgttcacgcttagtttctatgtg

SEQ ID NO: 159470 - DNA, 25 bp, Artificial
  Probe
tttctgatccttggtcaatttggtt

SEQ ID NO: 159471 - DNA, 25 bp, Artificial
  Probe
tctttctgatccttggtcaatttgg

SEQ ID NO: 159472 - DNA, 25 bp, Artificial
  Probe
tatttgtattgttcacgcttagttt

SEQ ID NO: 159473 - DNA, 25 bp, Artificial
  Probe
ttatttgtattgttcacgcttagtt

SEQ ID NO: 159474 - DNA, 25 bp, Artificial
  Probe
ctttctgatccttggtcaatttggt

SEQ ID NO: 159475 - DNA, 25 bp, Artificial
  Probe
ggagacacagtgtaagagaattcat

SEQ ID NO: 159476 - DNA, 25 bp, Artificial
  Probe
acattgtcacatagcttacactagc

SEQ ID NO: 159477 - DNA, 25 bp, Artificial
  Probe
ttggagacacagtgtaagagaattc

SEQ ID NO: 159478 - DNA, 25 bp, Artificial
  Probe
ttctgatccttggtcaatttggttg

SEQ ID NO: 159479 - DNA, 25 bp, Artificial
  Probe
tttggagacacagtgtaagagaatt

SEQ ID NO: 159480 - DNA, 25 bp, Artificial
  Probe
atttggagacacagtgtaagagaat

SEQ ID NO: 159481 - DNA, 25 bp, Artificial
  Probe
tgtgtaagctctttgaatcaacttt

SEQ ID NO: 159482 - DNA, 25 bp, Artificial
  Probe
tatttggagacacagtgtaagagaa

SEQ ID NO: 159483 - DNA, 25 bp, Artificial
  Probe
ttatttggagacacagtgtaagaga

SEQ ID NO: 159484 - DNA, 25 bp, Artificial
  Probe
atgtgtaagctctttgaatcaactt

SEQ ID NO: 159485 - DNA, 25 bp, Artificial
  Probe
aatgtgtaagctctttgaatcaact

SEQ ID NO: 159486 - DNA, 25 bp, Artificial
  Probe
gcaaataagtgtctttatagcgata

SEQ ID NO: 159487 - DNA, 25 bp, Artificial
  Probe
agacacagtgtaagagaattcattc

SEQ ID NO: 159488 - DNA, 25 bp, Artificial
  Probe
gagacacagtgtaagagaattcatt

SEQ ID NO: 159489 - DNA, 25 bp, Artificial
  Probe
acgcttagtttctatgtgcaaataa

SEQ ID NO: 159490 - DNA, 25 bp, Artificial
  Probe
cattgtcacatagcttacactagcc

SEQ ID NO: 159491 - DNA, 25 bp, Artificial
  Probe
ggtcaatttggttgtgtcagagaac

SEQ ID NO: 159492 - DNA, 25 bp, Artificial
  Probe
cttggtcaatttggttgtgtcagag

SEQ ID NO: 159493 - DNA, 25 bp, Artificial
  Probe
atagcttgaagcatagaagatgtac

SEQ ID NO: 159494 - DNA, 25 bp, Artificial
  Probe
tggagacacagtgtaagagaattca

SEQ ID NO: 159495 - DNA, 25 bp, Artificial
  Probe
tgtgcaaataagtgtctttatagcg

SEQ ID NO: 159496 - DNA, 25 bp, Artificial
  Probe
gtgcaaataagtgtctttatagcga

SEQ ID NO: 159497 - DNA, 25 bp, Artificial
  Probe
aacaagtggaatagagcagatggat

SEQ ID NO: 159498 - DNA, 25 bp, Artificial
  Probe
aagtggaatagagcagatggatgtg

SEQ ID NO: 159499 - DNA, 25 bp, Artificial
  Probe
caagtggaatagagcagatggatgt

SEQ ID NO: 159500 - DNA, 25 bp, Artificial
  Probe
acaagtggaatagagcagatggatg

SEQ ID NO: 159501 - DNA, 25 bp, Artificial
  Probe
gtggaatagagcagatggatgtgac

SEQ ID NO: 159502 - DNA, 25 bp, Artificial
  Probe
agtggaatagagcagatggatgtga

SEQ ID NO: 159503 - DNA, 25 bp, Artificial
  Probe
aatggaaacaagtggaatagagcag

SEQ ID NO: 159504 - DNA, 25 bp, Artificial
  Probe
caatggaaacaagtggaatagagca

SEQ ID NO: 159505 - DNA, 25 bp, Artificial
  Probe
gaaacaagtggaatagagcagatgg

SEQ ID NO: 159506 - DNA, 25 bp, Artificial
  Probe
ggaaacaagtggaatagagcagatg

SEQ ID NO: 159507 - DNA, 25 bp, Artificial
  Probe
tggaatagagcagatggatgtgaca

SEQ ID NO: 159508 - DNA, 25 bp, Artificial
  Probe
aaacaagtggaatagagcagatgga

SEQ ID NO: 159509 - DNA, 25 bp, Artificial
  Probe
tggaaacaagtggaatagagcagat

SEQ ID NO: 159510 - DNA, 25 bp, Artificial
  Probe
atggaaacaagtggaatagagcaga

SEQ ID NO: 159511 - DNA, 25 bp, Artificial
  Probe
atacccaatggaaacaagtggaata

SEQ ID NO: 159512 - DNA, 25 bp, Artificial
  Probe
tacccaatggaaacaagtggaatag

SEQ ID NO: 159513 - DNA, 25 bp, Artificial
  Probe
aatacccaatggaaacaagtggaat

SEQ ID NO: 159514 - DNA, 25 bp, Artificial
  Probe
gaatacccaatggaaacaagtggaa

SEQ ID NO: 159515 - DNA, 25 bp, Artificial
  Probe
cccaatggaaacaagtggaatagag

SEQ ID NO: 159516 - DNA, 25 bp, Artificial
  Probe
ctgtggaatacccaatggaaacaag

SEQ ID NO: 159517 - DNA, 25 bp, Artificial
  Probe
ccaatggaaacaagtggaatagagc

SEQ ID NO: 159518 - DNA, 25 bp, Artificial
  Probe
acccaatggaaacaagtggaataga

SEQ ID NO: 159519 - DNA, 25 bp, Artificial
  Probe
gtggaatacccaatggaaacaagtg

SEQ ID NO: 159520 - DNA, 25 bp, Artificial
  Probe
tgtggaatacccaatggaaacaagt

SEQ ID NO: 159521 - DNA, 25 bp, Artificial
  Probe
ggaatacccaatggaaacaagtgga

SEQ ID NO: 159522 - DNA, 25 bp, Artificial
  Probe
tggaatacccaatggaaacaagtgg

SEQ ID NO: 159523 - DNA, 25 bp, Artificial
  Probe
cctgtggaatacccaatggaaacaa

SEQ ID NO: 159524 - DNA, 25 bp, Artificial
  Probe
cacctgtggaatacccaatggaaac

SEQ ID NO: 159525 - DNA, 25 bp, Artificial
  Probe
acctgtggaatacccaatggaaaca

SEQ ID NO: 159526 - DNA, 25 bp, Artificial
  Probe
acacctgtggaatacccaatggaaa

SEQ ID NO: 159527 - DNA, 25 bp, Artificial
  Probe
gacacctgtggaatacccaatggaa

SEQ ID NO: 159528 - DNA, 25 bp, Artificial
  Probe
gaaacaaatcctggaaggggatgtg

SEQ ID NO: 159529 - DNA, 25 bp, Artificial
  Probe
aaaaggaaacaaatcctggaagggg

SEQ ID NO: 159530 - DNA, 25 bp, Artificial
  Probe
aaacaaatcctggaaggggatgtgt

SEQ ID NO: 159531 - DNA, 25 bp, Artificial
  Probe
aaggaaacaaatcctggaaggggat

SEQ ID NO: 159532 - DNA, 25 bp, Artificial
  Probe
aaaggaaacaaatcctggaagggga

SEQ ID NO: 159533 - DNA, 25 bp, Artificial
  Probe
ggaaacaaatcctggaaggggatgt

SEQ ID NO: 159534 - DNA, 25 bp, Artificial
  Probe
aacaaatcctggaaggggatgtgtg

SEQ ID NO: 159535 - DNA, 25 bp, Artificial
  Probe
aggaaacaaatcctggaaggggatg

SEQ ID NO: 159536 - DNA, 25 bp, Artificial
  Probe
caaatcctggaaggggatgtgtgag

SEQ ID NO: 159537 - DNA, 25 bp, Artificial
  Probe
tcatcatcattggactaacagagaa

SEQ ID NO: 159538 - DNA, 25 bp, Artificial
  Probe
atcatcatcattggactaacagaga

SEQ ID NO: 159539 - DNA, 25 bp, Artificial
  Probe
catcatcatcattggactaacagag

SEQ ID NO: 159540 - DNA, 25 bp, Artificial
  Probe
ccatcatcatcattggactaacaga

SEQ ID NO: 159541 - DNA, 25 bp, Artificial
  Probe
tcatcattggactaacagagaaaga

SEQ ID NO: 159542 - DNA, 25 bp, Artificial
  Probe
catcatcattggactaacagagaaa

SEQ ID NO: 159543 - DNA, 25 bp, Artificial
  Probe
atcatcattggactaacagagaaag

SEQ ID NO: 159544 - DNA, 25 bp, Artificial
  Probe
catcattggactaacagagaaagat

SEQ ID NO: 159545 - DNA, 25 bp, Artificial
  Probe
actttatctcccttcagttctcaga

SEQ ID NO: 159546 - DNA, 25 bp, Artificial
  Probe
cactttatctcccttcagttctcag

SEQ ID NO: 159547 - DNA, 25 bp, Artificial
  Probe
ctttatctcccttcagttctcagag

SEQ ID NO: 159548 - DNA, 25 bp, Artificial
  Probe
tttatctcccttcagttctcagagt

SEQ ID NO: 159549 - DNA, 25 bp, Artificial
  Probe
ttatctcccttcagttctcagagtc

SEQ ID NO: 159550 - DNA, 25 bp, Artificial
  Probe
cttagaaatcacatgctgggagaaa

SEQ ID NO: 159551 - DNA, 25 bp, Artificial
  Probe
cagaaatctactcagcatgaaccta

SEQ ID NO: 159552 - DNA, 25 bp, Artificial
  Probe
tacagaaatctactcagcatgaacc

SEQ ID NO: 159553 - DNA, 25 bp, Artificial
  Probe
tatctcccttcagttctcagagtct

SEQ ID NO: 159554 - DNA, 25 bp, Artificial
  Probe
gaaatctactcagcatgaacctatg

SEQ ID NO: 159555 - DNA, 25 bp, Artificial
  Probe
agaaatctactcagcatgaacctat

SEQ ID NO: 159556 - DNA, 25 bp, Artificial
  Probe
gttcttagaaatcacatgctgggag

SEQ ID NO: 159557 - DNA, 25 bp, Artificial
  Probe
tacccatcatcatcattggactaac

SEQ ID NO: 159558 - DNA, 25 bp, Artificial
  Probe
cttacccatcatcatcattggacta

SEQ ID NO: 159559 - DNA, 25 bp, Artificial
  Probe
atacagaaatctactcagcatgaac

SEQ ID NO: 159560 - DNA, 25 bp, Artificial
  Probe
gatatttctgattgtctcatggtga

SEQ ID NO: 159561 - DNA, 25 bp, Artificial
  Probe
agatatttctgattgtctcatggtg

SEQ ID NO: 159562 - DNA, 25 bp, Artificial
  Probe
gcactttatctcccttcagttctca

SEQ ID NO: 159563 - DNA, 25 bp, Artificial
  Probe
ttacccatcatcatcattggactaa

SEQ ID NO: 159564 - DNA, 25 bp, Artificial
  Probe
tcttagaaatcacatgctgggagaa

SEQ ID NO: 159565 - DNA, 25 bp, Artificial
  Probe
ttcttagaaatcacatgctgggaga

SEQ ID NO: 159566 - DNA, 25 bp, Artificial
  Probe
gatacagaaatctactcagcatgaa

SEQ ID NO: 159567 - DNA, 25 bp, Artificial
  Probe
tctgattgtctcatggtgaaattaa

SEQ ID NO: 159568 - DNA, 25 bp, Artificial
  Probe
ttctgattgtctcatggtgaaatta

SEQ ID NO: 159569 - DNA, 25 bp, Artificial
  Probe
acagaaatctactcagcatgaacct

SEQ ID NO: 159570 - DNA, 25 bp, Artificial
  Probe
cccatcatcatcattggactaacag

SEQ ID NO: 159571 - DNA, 25 bp, Artificial
  Probe
atatttctgattgtctcatggtgaa

SEQ ID NO: 159572 - DNA, 25 bp, Artificial
  Probe
atctcccttcagttctcagagtctt

SEQ ID NO: 159573 - DNA, 25 bp, Artificial
  Probe
aaactcttgcactttatctcccttc

SEQ ID NO: 159574 - DNA, 25 bp, Artificial
  Probe
gaaactcttgcactttatctccctt

SEQ ID NO: 159575 - DNA, 25 bp, Artificial
  Probe
tgatgcagaacagtagatagaaatg

SEQ ID NO: 159576 - DNA, 25 bp, Artificial
  Probe
acccatcatcatcattggactaaca

SEQ ID NO: 159577 - DNA, 25 bp, Artificial
  Probe
gatgcagaacagtagatagaaatga

SEQ ID NO: 159578 - DNA, 25 bp, Artificial
  Probe
attaatcctaaagattctggcacca

SEQ ID NO: 159579 - DNA, 25 bp, Artificial
  Probe
gattgtctcatggtgaaattaatgt

SEQ ID NO: 159580 - DNA, 25 bp, Artificial
  Probe
tgattgtctcatggtgaaattaatg

SEQ ID NO: 159581 - DNA, 25 bp, Artificial
  Probe
aattaatcctaaagattctggcacc

SEQ ID NO: 159582 - DNA, 25 bp, Artificial
  Probe
ctctaccttaccgacagtcttcaag

SEQ ID NO: 159583 - DNA, 25 bp, Artificial
  Probe
aattccaagatggcacatagttcaa

SEQ ID NO: 159584 - DNA, 25 bp, Artificial
  Probe
agtttcaatccaatcctcatctctt

SEQ ID NO: 159585 - DNA, 25 bp, Artificial
  Probe
tttcttatcttccagcacaaacttg

SEQ ID NO: 159586 - DNA, 25 bp, Artificial
  Probe
gtttcaatccaatcctcatctcttt

SEQ ID NO: 159587 - DNA, 25 bp, Artificial
  Probe
attccaagatggcacatagttcaag

SEQ ID NO: 159588 - DNA, 25 bp, Artificial
  Probe
tctaccttaccgacagtcttcaaga

SEQ ID NO: 159589 - DNA, 25 bp, Artificial
  Probe
tcaggcagggtctctctatatcata

SEQ ID NO: 159590 - DNA, 25 bp, Artificial
  Probe
acctctcaagtgatcctgtttattt

SEQ ID NO: 159591 - DNA, 25 bp, Artificial
  Probe
gagtttcaatccaatcctcatctct

SEQ ID NO: 159592 - DNA, 25 bp, Artificial
  Probe
cctctaccttaccgacagtcttcaa

SEQ ID NO: 159593 - DNA, 25 bp, Artificial
  Probe
cttggtttgctctcagacatacttg

SEQ ID NO: 159594 - DNA, 25 bp, Artificial
  Probe
aaacttgccacagtgtaataaacat

SEQ ID NO: 159595 - DNA, 25 bp, Artificial
  Probe
cttgccacagtgtaataaacatagc

SEQ ID NO: 159596 - DNA, 25 bp, Artificial
  Probe
caaacttgccacagtgtaataaaca

SEQ ID NO: 159597 - DNA, 25 bp, Artificial
  Probe
acaaacttgccacagtgtaataaac

SEQ ID NO: 159598 - DNA, 25 bp, Artificial
  Probe
ttcaggcagggtctctctatatcat

SEQ ID NO: 159599 - DNA, 25 bp, Artificial
  Probe
gccacagtgtaataaacatagccta

SEQ ID NO: 159600 - DNA, 25 bp, Artificial
  Probe
acttgccacagtgtaataaacatag

SEQ ID NO: 159601 - DNA, 25 bp, Artificial
  Probe
caggcagggtctctctatatcatag

SEQ ID NO: 159602 - DNA, 25 bp, Artificial
  Probe
actgtttcttatcttccagcacaaa

SEQ ID NO: 159603 - DNA, 25 bp, Artificial
  Probe
aacttgccacagtgtaataaacata

SEQ ID NO: 159604 - DNA, 25 bp, Artificial
  Probe
cacaaacttgccacagtgtaataaa

SEQ ID NO: 159605 - DNA, 25 bp, Artificial
  Probe
gtctcacatgggtacttcattacac

SEQ ID NO: 159606 - DNA, 25 bp, Artificial
  Probe
cctctcaagtgatcctgtttattta

SEQ ID NO: 159607 - DNA, 25 bp, Artificial
  Probe
gactgtttcttatcttccagcacaa

SEQ ID NO: 159608 - DNA, 25 bp, Artificial
  Probe
ccacagtgtaataaacatagcctat

SEQ ID NO: 159609 - DNA, 25 bp, Artificial
  Probe
ttgccacagtgtaataaacatagcc

SEQ ID NO: 159610 - DNA, 25 bp, Artificial
  Probe
agtctcacatgggtacttcattaca

SEQ ID NO: 159611 - DNA, 25 bp, Artificial
  Probe
caaactgaattatccgaggcaaagg

SEQ ID NO: 159612 - DNA, 25 bp, Artificial
  Probe
ccaaactgaattatccgaggcaaag

SEQ ID NO: 159613 - DNA, 25 bp, Artificial
  Probe
cacctctcaagtgatcctgtttatt

SEQ ID NO: 159614 - DNA, 25 bp, Artificial
  Probe
cttcaggcagggtctctctatatca

SEQ ID NO: 159615 - DNA, 25 bp, Artificial
  Probe
gaaattccaagatggcacatagttc

SEQ ID NO: 159616 - DNA, 25 bp, Artificial
  Probe
ccttggtttgctctcagacatactt

SEQ ID NO: 159617 - DNA, 25 bp, Artificial
  Probe
aaattccaagatggcacatagttca

SEQ ID NO: 159618 - DNA, 25 bp, Artificial
  Probe
agactgtttcttatcttccagcaca

SEQ ID NO: 159619 - DNA, 25 bp, Artificial
  Probe
ttaaacttcgacatcatctgggaac

SEQ ID NO: 159620 - DNA, 25 bp, Artificial
  Probe
gttaaacttcgacatcatctgggaa

SEQ ID NO: 159621 - DNA, 25 bp, Artificial
  Probe
tgccacagtgtaataaacatagcct

SEQ ID NO: 159622 - DNA, 25 bp, Artificial
  Probe
tctctatatcatagacctggctctc

SEQ ID NO: 159623 - DNA, 25 bp, Artificial
  Probe
ctctctatatcatagacctggctct

SEQ ID NO: 159624 - DNA, 25 bp, Artificial
  Probe
tctctctatatcatagacctggctc

SEQ ID NO: 159625 - DNA, 25 bp, Artificial
  Probe
aaagagtccttaggtctcaagacag

SEQ ID NO: 159626 - DNA, 25 bp, Artificial
  Probe
accaaactgaattatccgaggcaaa

SEQ ID NO: 159627 - DNA, 25 bp, Artificial
  Probe
ggtgttactggtattggaactggtc

SEQ ID NO: 159628 - DNA, 25 bp, Artificial
  Probe
gtggtgttactggtattggaactgg

SEQ ID NO: 159629 - DNA, 25 bp, Artificial
  Probe
ggtggtgttactggtattggaactg

SEQ ID NO: 159630 - DNA, 25 bp, Artificial
  Probe
ctggtggtgttactggtattggaac

SEQ ID NO: 159631 - DNA, 25 bp, Artificial
  Probe
tggtgttactggtattggaactggt

SEQ ID NO: 159632 - DNA, 25 bp, Artificial
  Probe
tggtggtgttactggtattggaact

SEQ ID NO: 159633 - DNA, 25 bp, Artificial
  Probe
gttactggtattggaactggtcctg

SEQ ID NO: 159634 - DNA, 25 bp, Artificial
  Probe
gtgttactggtattggaactggtcc

SEQ ID NO: 159635 - DNA, 25 bp, Artificial
  Probe
ctgggtttggactttctcctatcta

SEQ ID NO: 159636 - DNA, 25 bp, Artificial
  Probe
tgttactggtattggaactggtcct

SEQ ID NO: 159637 - DNA, 25 bp, Artificial
  Probe
tgggtttggactttctcctatctac

SEQ ID NO: 159638 - DNA, 25 bp, Artificial
  Probe
tttggactttctcctatctacccag

SEQ ID NO: 159639 - DNA, 25 bp, Artificial
  Probe
gtttggactttctcctatctaccca

SEQ ID NO: 159640 - DNA, 25 bp, Artificial
  Probe
cctggtggtgttactggtattggaa

SEQ ID NO: 159641 - DNA, 25 bp, Artificial
  Probe
ggtttggactttctcctatctaccc

SEQ ID NO: 159642 - DNA, 25 bp, Artificial
  Probe
gggtttggactttctcctatctacc

SEQ ID NO: 159643 - DNA, 25 bp, Artificial
  Probe
ttactggtattggaactggtcctgg

SEQ ID NO: 159644 - DNA, 25 bp, Artificial
  Probe
ttggactttctcctatctacccagg

SEQ ID NO: 159645 - DNA, 25 bp, Artificial
  Probe
cttgtacctggtgatcttggaggag

SEQ ID NO: 159646 - DNA, 25 bp, Artificial
  Probe
gactttctcctatctacccaggtgg

SEQ ID NO: 159647 - DNA, 25 bp, Artificial
  Probe
ggactttctcctatctacccaggtg

SEQ ID NO: 159648 - DNA, 25 bp, Artificial
  Probe
cctgggtttggactttctcctatct

SEQ ID NO: 159649 - DNA, 25 bp, Artificial
  Probe
ctttctcctatctacccaggtggtg

SEQ ID NO: 159650 - DNA, 25 bp, Artificial
  Probe
acctgggtttggactttctcctatc

SEQ ID NO: 159651 - DNA, 25 bp, Artificial
  Probe
gacctgggtttggactttctcctat

SEQ ID NO: 159652 - DNA, 25 bp, Artificial
  Probe
tggactttctcctatctacccaggt

SEQ ID NO: 159653 - DNA, 25 bp, Artificial
  Probe
actttctcctatctacccaggtggt

SEQ ID NO: 159654 - DNA, 25 bp, Artificial
  Probe
agacctgggtttggactttctccta

SEQ ID NO: 159655 - DNA, 25 bp, Artificial
  Probe
tttctcctatctacccaggtggtgg

SEQ ID NO: 159656 - DNA, 25 bp, Artificial
  Probe
catccaaagctgctaaatacggagc

SEQ ID NO: 159657 - DNA, 25 bp, Artificial
  Probe
gcatccaaagctgctaaatacggag

SEQ ID NO: 159658 - DNA, 25 bp, Artificial
  Probe
gaaatcttgtggccggaagagaaag

SEQ ID NO: 159659 - DNA, 25 bp, Artificial
  Probe
ctgcatccaaagctgctaaatacgg

SEQ ID NO: 159660 - DNA, 25 bp, Artificial
  Probe
ggctgcatccaaagctgctaaatac

SEQ ID NO: 159661 - DNA, 25 bp, Artificial
  Probe
tgcatccaaagctgctaaatacgga

SEQ ID NO: 159662 - DNA, 25 bp, Artificial
  Probe
gctgcatccaaagctgctaaatacg

SEQ ID NO: 159663 - DNA, 25 bp, Artificial
  Probe
aaatcttgtggccggaagagaaagt

SEQ ID NO: 159664 - DNA, 25 bp, Artificial
  Probe
tggctgcatccaaagctgctaaata

SEQ ID NO: 159665 - DNA, 25 bp, Artificial
  Probe
tagagtaataagagagaaggcggaa

SEQ ID NO: 159666 - DNA, 25 bp, Artificial
  Probe
ttattgcttactctgtcctgtatgc

SEQ ID NO: 159667 - DNA, 25 bp, Artificial
  Probe
agagtaataagagagaaggcggaag

SEQ ID NO: 159668 - DNA, 25 bp, Artificial
  Probe
ctagagtaataagagagaaggcgga

SEQ ID NO: 159669 - DNA, 25 bp, Artificial
  Probe
aagaactaggaatcactgttgactg

SEQ ID NO: 159670 - DNA, 25 bp, Artificial
  Probe
taagaactaggaatcactgttgact

SEQ ID NO: 159671 - DNA, 25 bp, Artificial
  Probe
ctaagaactaggaatcactgttgac

SEQ ID NO: 159672 - DNA, 25 bp, Artificial
  Probe
tattgcttactctgtcctgtatgcc

SEQ ID NO: 159673 - DNA, 25 bp, Artificial
  Probe
gagtaataagagagaaggcggaagg

SEQ ID NO: 159674 - DNA, 25 bp, Artificial
  Probe
gaactctgtcttcctctggtattcc

SEQ ID NO: 159675 - DNA, 25 bp, Artificial
  Probe
cgaactctgtcttcctctggtattc

SEQ ID NO: 159676 - DNA, 25 bp, Artificial
  Probe
cttactctgtcctgtatgccttgtc

SEQ ID NO: 159677 - DNA, 25 bp, Artificial
  Probe
cctagagtaataagagagaaggcgg

SEQ ID NO: 159678 - DNA, 25 bp, Artificial
  Probe
tgatttattgcttactctgtcctgt

SEQ ID NO: 159679 - DNA, 25 bp, Artificial
  Probe
atgatttattgcttactctgtcctg

SEQ ID NO: 159680 - DNA, 25 bp, Artificial
  Probe
actcttatctttcccagacacattt

SEQ ID NO: 159681 - DNA, 25 bp, Artificial
  Probe
agaactaggaatcactgttgactgc

SEQ ID NO: 159682 - DNA, 25 bp, Artificial
  Probe
tactcttatctttcccagacacatt

SEQ ID NO: 159683 - DNA, 25 bp, Artificial
  Probe
tttattgcttactctgtcctgtatg

SEQ ID NO: 159684 - DNA, 25 bp, Artificial
  Probe
gatttattgcttactctgtcctgta

SEQ ID NO: 159685 - DNA, 25 bp, Artificial
  Probe
gtactcttatctttcccagacacat

SEQ ID NO: 159686 - DNA, 25 bp, Artificial
  Probe
ggctccctagagtaataagagagaa

SEQ ID NO: 159687 - DNA, 25 bp, Artificial
  Probe
ggatgtgcttactcgtttctttgaa

SEQ ID NO: 159688 - DNA, 25 bp, Artificial
  Probe
aactctgtcttcctctggtattccg

SEQ ID NO: 159689 - DNA, 25 bp, Artificial
  Probe
gctccctagagtaataagagagaag

SEQ ID NO: 159690 - DNA, 25 bp, Artificial
  Probe
attgcttactctgtcctgtatgcct

SEQ ID NO: 159691 - DNA, 25 bp, Artificial
  Probe
catgatttattgcttactctgtcct

SEQ ID NO: 159692 - DNA, 25 bp, Artificial
  Probe
acctaagaactaggaatcactgttg

SEQ ID NO: 159693 - DNA, 25 bp, Artificial
  Probe
cacctaagaactaggaatcactgtt

SEQ ID NO: 159694 - DNA, 25 bp, Artificial
  Probe
cctaagaactaggaatcactgttga

SEQ ID NO: 159695 - DNA, 25 bp, Artificial
  Probe
atttattgcttactctgtcctgtat

SEQ ID NO: 159696 - DNA, 25 bp, Artificial
  Probe
tccctagagtaataagagagaaggc

SEQ ID NO: 159697 - DNA, 25 bp, Artificial
  Probe
aggatgtgcttactcgtttctttga

SEQ ID NO: 159698 - DNA, 25 bp, Artificial
  Probe
ttgagtgggtggaacatttcatttc

SEQ ID NO: 159699 - DNA, 25 bp, Artificial
  Probe
cttgagtgggtggaacatttcattt

SEQ ID NO: 159700 - DNA, 25 bp, Artificial
  Probe
ttactctgtcctgtatgccttgtcc

SEQ ID NO: 159701 - DNA, 25 bp, Artificial
  Probe
ttgcttactctgtcctgtatgcctt

SEQ ID NO: 159702 - DNA, 25 bp, Artificial
  Probe
ctagcacaaaggatatgaagaggtg

SEQ ID NO: 159703 - DNA, 25 bp, Artificial
  Probe
taataagagagaaggcggaaggctg

SEQ ID NO: 159704 - DNA, 25 bp, Artificial
  Probe
gtaataagagagaaggcggaaggct

SEQ ID NO: 159705 - DNA, 25 bp, Artificial
  Probe
agtaataagagagaaggcggaaggc

SEQ ID NO: 159706 - DNA, 25 bp, Artificial
  Probe
acatgatttattgcttactctgtcc

SEQ ID NO: 159707 - DNA, 25 bp, Artificial
  Probe
gaggatgtgcttactcgtttctttg

SEQ ID NO: 159708 - DNA, 25 bp, Artificial
  Probe
ctccctagagtaataagagagaagg

SEQ ID NO: 159709 - DNA, 25 bp, Artificial
  Probe
gttcttcaagtggacgcagtatgag

SEQ ID NO: 159710 - DNA, 25 bp, Artificial
  Probe
tcctattaacagcatcctatcatca

SEQ ID NO: 159711 - DNA, 25 bp, Artificial
  Probe
aatgtatggtgatcttagaggagga

SEQ ID NO: 159712 - DNA, 25 bp, Artificial
  Probe
gaatgtatggtgatcttagaggagg

SEQ ID NO: 159713 - DNA, 25 bp, Artificial
  Probe
ggaatgtatggtgatcttagaggag

SEQ ID NO: 159714 - DNA, 25 bp, Artificial
  Probe
cagtgtatggaatgtatggtgatct

SEQ ID NO: 159715 - DNA, 25 bp, Artificial
  Probe
atggaatgtatggtgatcttagagg

SEQ ID NO: 159716 - DNA, 25 bp, Artificial
  Probe
tggaatgtatggtgatcttagagga

SEQ ID NO: 159717 - DNA, 25 bp, Artificial
  Probe
agtgtatggaatgtatggtgatctt

SEQ ID NO: 159718 - DNA, 25 bp, Artificial
  Probe
atgtatggtgatcttagaggaggac

SEQ ID NO: 159719 - DNA, 25 bp, Artificial
  Probe
cctattaacagcatcctatcatcaa

SEQ ID NO: 159720 - DNA, 25 bp, Artificial
  Probe
ttcctattaacagcatcctatcatc

SEQ ID NO: 159721 - DNA, 25 bp, Artificial
  Probe
gcagtgtatggaatgtatggtgatc

SEQ ID NO: 159722 - DNA, 25 bp, Artificial
  Probe
ttataagcacctactcactctcctt

SEQ ID NO: 159723 - DNA, 25 bp, Artificial
  Probe
gtgtatggaatgtatggtgatctta

SEQ ID NO: 159724 - DNA, 25 bp, Artificial
  Probe
tgtatggaatgtatggtgatcttag

SEQ ID NO: 159725 - DNA, 25 bp, Artificial
  Probe
gtatggaatgtatggtgatcttaga

SEQ ID NO: 159726 - DNA, 25 bp, Artificial
  Probe
acctactcactctcctttcctatta

SEQ ID NO: 159727 - DNA, 25 bp, Artificial
  Probe
ctattaacagcatcctatcatcaag

SEQ ID NO: 159728 - DNA, 25 bp, Artificial
  Probe
actctcctttcctattaacagcatc

SEQ ID NO: 159729 - DNA, 25 bp, Artificial
  Probe
tattaacagcatcctatcatcaagg

SEQ ID NO: 159730 - DNA, 25 bp, Artificial
  Probe
cactctcctttcctattaacagcat

SEQ ID NO: 159731 - DNA, 25 bp, Artificial
  Probe
ctcctttcctattaacagcatccta

SEQ ID NO: 159732 - DNA, 25 bp, Artificial
  Probe
actcactctcctttcctattaacag

SEQ ID NO: 159733 - DNA, 25 bp, Artificial
  Probe
atggattctggaggtttaacaatgt

SEQ ID NO: 159734 - DNA, 25 bp, Artificial
  Probe
ctctcctttcctattaacagcatcc

SEQ ID NO: 159735 - DNA, 25 bp, Artificial
  Probe
ctcactctcctttcctattaacagc

SEQ ID NO: 159736 - DNA, 25 bp, Artificial
  Probe
cacctactcactctcctttcctatt

SEQ ID NO: 159737 - DNA, 25 bp, Artificial
  Probe
tataagcacctactcactctccttt

SEQ ID NO: 159738 - DNA, 25 bp, Artificial
  Probe
ggattctggaggtttaacaatgtct

SEQ ID NO: 159739 - DNA, 25 bp, Artificial
  Probe
gtaagaatggtaggatgggacaaac

SEQ ID NO: 159740 - DNA, 25 bp, Artificial
  Probe
tctcctttcctattaacagcatcct

SEQ ID NO: 159741 - DNA, 25 bp, Artificial
  Probe
gattctggaggtttaacaatgtctt

SEQ ID NO: 159742 - DNA, 25 bp, Artificial
  Probe
tcctttcctattaacagcatcctat

SEQ ID NO: 159743 - DNA, 25 bp, Artificial
  Probe
aactggaggaatgcttatgtttgta

SEQ ID NO: 159744 - DNA, 25 bp, Artificial
  Probe
tatggaatgtatggtgatcttagag

SEQ ID NO: 159745 - DNA, 25 bp, Artificial
  Probe
tcactctcctttcctattaacagca

SEQ ID NO: 159746 - DNA, 25 bp, Artificial
  Probe
tggattctggaggtttaacaatgtc

SEQ ID NO: 159747 - DNA, 25 bp, Artificial
  Probe
cctttcctattaacagcatcctatc

SEQ ID NO: 159748 - DNA, 25 bp, Artificial
  Probe
cctactcactctcctttcctattaa

SEQ ID NO: 159749 - DNA, 25 bp, Artificial
  Probe
attctggaggtttaacaatgtcttt

SEQ ID NO: 159750 - DNA, 25 bp, Artificial
  Probe
accataaggaacacagtacaaagta

SEQ ID NO: 159751 - DNA, 25 bp, Artificial
  Probe
taccataaggaacacagtacaaagt

SEQ ID NO: 159752 - DNA, 25 bp, Artificial
  Probe
tactcactctcctttcctattaaca

SEQ ID NO: 159753 - DNA, 25 bp, Artificial
  Probe
gaatgcttatgtttgtactcctgga

SEQ ID NO: 159754 - DNA, 25 bp, Artificial
  Probe
ctggaggaatgcttatgtttgtact

SEQ ID NO: 159755 - DNA, 25 bp, Artificial
  Probe
ctgttgctatgtagacttggagaat

SEQ ID NO: 159756 - DNA, 25 bp, Artificial
  Probe
ctatgtagacttggagaatactgcc

SEQ ID NO: 159757 - DNA, 25 bp, Artificial
  Probe
tgctatgtagacttggagaatactg

SEQ ID NO: 159758 - DNA, 25 bp, Artificial
  Probe
tgttgctatgtagacttggagaata

SEQ ID NO: 159759 - DNA, 25 bp, Artificial
  Probe
gctatgtagacttggagaatactgc

SEQ ID NO: 159760 - DNA, 25 bp, Artificial
  Probe
ttgctatgtagacttggagaatact

SEQ ID NO: 159761 - DNA, 25 bp, Artificial
  Probe
gttgctatgtagacttggagaatac

SEQ ID NO: 159762 - DNA, 25 bp, Artificial
  Probe
tatctgttgctatgtagacttggag

SEQ ID NO: 159763 - DNA, 25 bp, Artificial
  Probe
atctgttgctatgtagacttggaga

SEQ ID NO: 159764 - DNA, 25 bp, Artificial
  Probe
atatctgttgctatgtagacttgga

SEQ ID NO: 159765 - DNA, 25 bp, Artificial
  Probe
tctgttgctatgtagacttggagaa

SEQ ID NO: 159766 - DNA, 25 bp, Artificial
  Probe
tatatctgttgctatgtagacttgg

SEQ ID NO: 159767 - DNA, 25 bp, Artificial
  Probe
tatgtagacttggagaatactgcca

SEQ ID NO: 159768 - DNA, 25 bp, Artificial
  Probe
gctgtatcactgcctttgtttatat

SEQ ID NO: 159769 - DNA, 25 bp, Artificial
  Probe
cttgcctctgagattaaatgggatt

SEQ ID NO: 159770 - DNA, 25 bp, Artificial
  Probe
ttgcctctgagattaaatgggattg

SEQ ID NO: 159771 - DNA, 25 bp, Artificial
  Probe
tacttgcctctgagattaaatggga

SEQ ID NO: 159772 - DNA, 25 bp, Artificial
  Probe
acttgcctctgagattaaatgggat

SEQ ID NO: 159773 - DNA, 25 bp, Artificial
  Probe
gtacttgcctctgagattaaatggg

SEQ ID NO: 159774 - DNA, 25 bp, Artificial
  Probe
agctgtatcactgcctttgtttata

SEQ ID NO: 159775 - DNA, 25 bp, Artificial
  Probe
ctgtatcactgcctttgtttatatt

SEQ ID NO: 159776 - DNA, 25 bp, Artificial
  Probe
aagctgtatcactgcctttgtttat

SEQ ID NO: 159777 - DNA, 25 bp, Artificial
  Probe
gtatgacaagctgtatcactgcctt

SEQ ID NO: 159778 - DNA, 25 bp, Artificial
  Probe
taccagtacttgcctctgagattaa

SEQ ID NO: 159779 - DNA, 25 bp, Artificial
  Probe
aacgtgtatgacaagctgtatcact

SEQ ID NO: 159780 - DNA, 25 bp, Artificial
  Probe
cctctgagattaaatgggattgcat

SEQ ID NO: 159781 - DNA, 25 bp, Artificial
  Probe
tgtatcactgcctttgtttatattt

SEQ ID NO: 159782 - DNA, 25 bp, Artificial
  Probe
ctaccagtacttgcctctgagatta

SEQ ID NO: 159783 - DNA, 25 bp, Artificial
  Probe
tgcctctgagattaaatgggattgc

SEQ ID NO: 159784 - DNA, 25 bp, Artificial
  Probe
caagctgtatcactgcctttgttta

SEQ ID NO: 159785 - DNA, 25 bp, Artificial
  Probe
gttttgactgtatcctggtttcttt

SEQ ID NO: 159786 - DNA, 25 bp, Artificial
  Probe
atatatctgttgctatgtagacttg

SEQ ID NO: 159787 - DNA, 25 bp, Artificial
  Probe
tgttttgactgtatcctggtttctt

SEQ ID NO: 159788 - DNA, 25 bp, Artificial
  Probe
ttttgactgtatcctggtttctttt

SEQ ID NO: 159789 - DNA, 25 bp, Artificial
  Probe
acgtgtatgacaagctgtatcactg

SEQ ID NO: 159790 - DNA, 25 bp, Artificial
  Probe
agtgatgtccttaaaatgtggtctg

SEQ ID NO: 159791 - DNA, 25 bp, Artificial
  Probe
cagtgatgtccttaaaatgtggtct

SEQ ID NO: 159792 - DNA, 25 bp, Artificial
  Probe
tcagtgatgtccttaaaatgtggtc

SEQ ID NO: 159793 - DNA, 25 bp, Artificial
  Probe
gtgttttgactgtatcctggtttct

SEQ ID NO: 159794 - DNA, 25 bp, Artificial
  Probe
agagtcctggaagaaatttaccaat

SEQ ID NO: 159795 - DNA, 25 bp, Artificial
  Probe
cttgaactcccagagatccattgtc

SEQ ID NO: 159796 - DNA, 25 bp, Artificial
  Probe
agtacttgcctctgagattaaatgg

SEQ ID NO: 159797 - DNA, 25 bp, Artificial
  Probe
cagagtcctggaagaaatttaccaa

SEQ ID NO: 159798 - DNA, 25 bp, Artificial
  Probe
gagtcctggaagaaatttaccaatt

SEQ ID NO: 159799 - DNA, 25 bp, Artificial
  Probe
accaattttctctgctttctattct

SEQ ID NO: 159800 - DNA, 25 bp, Artificial
  Probe
actaaggtcttgttgttccagaatg

SEQ ID NO: 159801 - DNA, 25 bp, Artificial
  Probe
gactaaggtcttgttgttccagaat

SEQ ID NO: 159802 - DNA, 25 bp, Artificial
  Probe
tgactaaggtcttgttgttccagaa

SEQ ID NO: 159803 - DNA, 25 bp, Artificial
  Probe
ctcacagacaagaccacagattgat

SEQ ID NO: 159804 - DNA, 25 bp, Artificial
  Probe
ctgactaaggtcttgttgttccaga

SEQ ID NO: 159805 - DNA, 25 bp, Artificial
  Probe
ggtttagatggcttatcaggaaaga

SEQ ID NO: 159806 - DNA, 25 bp, Artificial
  Probe
ctaaggtcttgttgttccagaatgg

SEQ ID NO: 159807 - DNA, 25 bp, Artificial
  Probe
gtttagatggcttatcaggaaagag

SEQ ID NO: 159808 - DNA, 25 bp, Artificial
  Probe
agagaagagagagtgcaagtctatc

SEQ ID NO: 159809 - DNA, 25 bp, Artificial
  Probe
gggtttagatggcttatcaggaaag

SEQ ID NO: 159810 - DNA, 25 bp, Artificial
  Probe
tacatctggaagtgatttctgactg

SEQ ID NO: 159811 - DNA, 25 bp, Artificial
  Probe
gcaaagcatatctaggaaggacaat

SEQ ID NO: 159812 - DNA, 25 bp, Artificial
  Probe
cacagtcaatgacagtggagaatac

SEQ ID NO: 159813 - DNA, 25 bp, Artificial
  Probe
caaagcatatctaggaaggacaatg

SEQ ID NO: 159814 - DNA, 25 bp, Artificial
  Probe
tcacagacaagaccacagattgatc

SEQ ID NO: 159815 - DNA, 25 bp, Artificial
  Probe
tgggtttagatggcttatcaggaaa

SEQ ID NO: 159816 - DNA, 25 bp, Artificial
  Probe
gtgaggtattattatcaaagcagca

SEQ ID NO: 159817 - DNA, 25 bp, Artificial
  Probe
tgtgaggtattattatcaaagcagc

SEQ ID NO: 159818 - DNA, 25 bp, Artificial
  Probe
caaattcctgaaagttgtcctctga

SEQ ID NO: 159819 - DNA, 25 bp, Artificial
  Probe
tgaggtattattatcaaagcagcaa

SEQ ID NO: 159820 - DNA, 25 bp, Artificial
  Probe
gagaagagagagtgcaagtctatcc

SEQ ID NO: 159821 - DNA, 25 bp, Artificial
  Probe
gtacatctggaagtgatttctgact

SEQ ID NO: 159822 - DNA, 25 bp, Artificial
  Probe
gagagtgcaagtctatcctggataa

SEQ ID NO: 159823 - DNA, 25 bp, Artificial
  Probe
tagagaagagagagtgcaagtctat

SEQ ID NO: 159824 - DNA, 25 bp, Artificial
  Probe
ttagagaagagagagtgcaagtcta

SEQ ID NO: 159825 - DNA, 25 bp, Artificial
  Probe
tctgtgtacggagaaatcttcaaac

SEQ ID NO: 159826 - DNA, 25 bp, Artificial
  Probe
acagtcaatgacagtggagaatacc

SEQ ID NO: 159827 - DNA, 25 bp, Artificial
  Probe
agagtgcaagtctatcctggataac

SEQ ID NO: 159828 - DNA, 25 bp, Artificial
  Probe
aaattcctgaaagttgtcctctgac

SEQ ID NO: 159829 - DNA, 25 bp, Artificial
  Probe
cgtacatctggaagtgatttctgac

SEQ ID NO: 159830 - DNA, 25 bp, Artificial
  Probe
cagttcttgaatgactttggagacc

SEQ ID NO: 159831 - DNA, 25 bp, Artificial
  Probe
gaagagagagtgcaagtctatcctg

SEQ ID NO: 159832 - DNA, 25 bp, Artificial
  Probe
agaagagagagtgcaagtctatcct

SEQ ID NO: 159833 - DNA, 25 bp, Artificial
  Probe
ggagagaacaaattcctgaaagttg

SEQ ID NO: 159834 - DNA, 25 bp, Artificial
  Probe
aaagggagagaacaaattcctgaaa

SEQ ID NO: 159835 - DNA, 25 bp, Artificial
  Probe
gaggtattattatcaaagcagcaat

SEQ ID NO: 159836 - DNA, 25 bp, Artificial
  Probe
ctgtgtacggagaaatcttcaaacc

SEQ ID NO: 159837 - DNA, 25 bp, Artificial
  Probe
agagagtgcaagtctatcctggata

SEQ ID NO: 159838 - DNA, 25 bp, Artificial
  Probe
aagggagagaacaaattcctgaaag

SEQ ID NO: 159839 - DNA, 25 bp, Artificial
  Probe
cacagacaagaccacagattgatcc

SEQ ID NO: 159840 - DNA, 25 bp, Artificial
  Probe
cctgtgaggtattattatcaaagca

SEQ ID NO: 159841 - DNA, 25 bp, Artificial
  Probe
gggagagaacaaattcctgaaagtt

SEQ ID NO: 159842 - DNA, 25 bp, Artificial
  Probe
caaagggagagaacaaattcctgaa

SEQ ID NO: 159843 - DNA, 25 bp, Artificial
  Probe
gtgtacggagaaatcttcaaacctc

SEQ ID NO: 159844 - DNA, 25 bp, Artificial
  Probe
tgtgtacggagaaatcttcaaacct

SEQ ID NO: 159845 - DNA, 25 bp, Artificial
  Probe
tttagaggaagccaagaagaagaaa

SEQ ID NO: 159846 - DNA, 25 bp, Artificial
  Probe
ttagaggaagccaagaagaagaaag

SEQ ID NO: 159847 - DNA, 25 bp, Artificial
  Probe
gtttagaggaagccaagaagaagaa

SEQ ID NO: 159848 - DNA, 25 bp, Artificial
  Probe
tagaggaagccaagaagaagaaaga

SEQ ID NO: 159849 - DNA, 25 bp, Artificial
  Probe
agtttagaggaagccaagaagaaga

SEQ ID NO: 159850 - DNA, 25 bp, Artificial
  Probe
cagtttagaggaagccaagaagaag

SEQ ID NO: 159851 - DNA, 25 bp, Artificial
  Probe
caactaatccaataaagccaccttg

SEQ ID NO: 159852 - DNA, 25 bp, Artificial
  Probe
acagtttagaggaagccaagaagaa

SEQ ID NO: 159853 - DNA, 25 bp, Artificial
  Probe
aacagtttagaggaagccaagaaga

SEQ ID NO: 159854 - DNA, 25 bp, Artificial
  Probe
caacagtttagaggaagccaagaag

SEQ ID NO: 159855 - DNA, 25 bp, Artificial
  Probe
gcaactaatccaataaagccacctt

SEQ ID NO: 159856 - DNA, 25 bp, Artificial
  Probe
tcaacagtttagaggaagccaagaa

SEQ ID NO: 159857 - DNA, 25 bp, Artificial
  Probe
agaggaagccaagaagaagaaagag

SEQ ID NO: 159858 - DNA, 25 bp, Artificial
  Probe
aactaatccaataaagccaccttgc

SEQ ID NO: 159859 - DNA, 25 bp, Artificial
  Probe
cacgcaactaatccaataaagccac

SEQ ID NO: 159860 - DNA, 25 bp, Artificial
  Probe
ctcaacagtttagaggaagccaaga

SEQ ID NO: 159861 - DNA, 25 bp, Artificial
  Probe
gaggaagccaagaagaagaaagagg

SEQ ID NO: 159862 - DNA, 25 bp, Artificial
  Probe
taatccaataaagccaccttgcgat

SEQ ID NO: 159863 - DNA, 25 bp, Artificial
  Probe
gaagccaagaagaagaaagagggtg

SEQ ID NO: 159864 - DNA, 25 bp, Artificial
  Probe
ctaatccaataaagccaccttgcga

SEQ ID NO: 159865 - DNA, 25 bp, Artificial
  Probe
cgcaactaatccaataaagccacct

SEQ ID NO: 159866 - DNA, 25 bp, Artificial
  Probe
catcatagatacgcttttccaggac

SEQ ID NO: 159867 - DNA, 25 bp, Artificial
  Probe
acgcaactaatccaataaagccacc

SEQ ID NO: 159868 - DNA, 25 bp, Artificial
  Probe
ccacgcaactaatccaataaagcca

SEQ ID NO: 159869 - DNA, 25 bp, Artificial
  Probe
actaatccaataaagccaccttgcg

SEQ ID NO: 159870 - DNA, 25 bp, Artificial
  Probe
gtctggcatcatagatacgcttttc

SEQ ID NO: 159871 - DNA, 25 bp, Artificial
  Probe
aggaagccaagaagaagaaagaggg

SEQ ID NO: 159872 - DNA, 25 bp, Artificial
  Probe
atcatagatacgcttttccaggacc

SEQ ID NO: 159873 - DNA, 25 bp, Artificial
  Probe
aagaagaagaaagagggtgctctag

SEQ ID NO: 159874 - DNA, 25 bp, Artificial
  Probe
caagaagaagaaagagggtgctcta

SEQ ID NO: 159875 - DNA, 25 bp, Artificial
  Probe
cccacgcaactaatccaataaagcc

SEQ ID NO: 159876 - DNA, 25 bp, Artificial
  Probe
ggaagccaagaagaagaaagagggt

SEQ ID NO: 159877 - DNA, 25 bp, Artificial
  Probe
gcatcatagatacgcttttccagga

SEQ ID NO: 159878 - DNA, 25 bp, Artificial
  Probe
ggcatcatagatacgcttttccagg

SEQ ID NO: 159879 - DNA, 25 bp, Artificial
  Probe
gctcaacagtttagaggaagccaag

SEQ ID NO: 159880 - DNA, 25 bp, Artificial
  Probe
tggcatcatagatacgcttttccag

SEQ ID NO: 159881 - DNA, 25 bp, Artificial
  Probe
ctggcatcatagatacgcttttcca

SEQ ID NO: 159882 - DNA, 25 bp, Artificial
  Probe
gaagaagaaagagggtgctctagat

SEQ ID NO: 159883 - DNA, 25 bp, Artificial
  Probe
tcatagatacgcttttccaggaccg

SEQ ID NO: 159884 - DNA, 25 bp, Artificial
  Probe
agaagaagaaagagggtgctctaga

SEQ ID NO: 159885 - DNA, 25 bp, Artificial
  Probe
ccaagaagaagaaagagggtgctct

SEQ ID NO: 159886 - DNA, 25 bp, Artificial
  Probe
tctaatgcctgcacttgatgctctc

SEQ ID NO: 159887 - DNA, 25 bp, Artificial
  Probe
cgtctggcatcatagatacgctttt

SEQ ID NO: 159888 - DNA, 25 bp, Artificial
  Probe
cctagagaactccacatgtctccag

SEQ ID NO: 159889 - DNA, 25 bp, Artificial
  Probe
ctagagaactccacatgtctccagc

SEQ ID NO: 159890 - DNA, 25 bp, Artificial
  Probe
gagcagttctagcataacaaggata

SEQ ID NO: 159891 - DNA, 25 bp, Artificial
  Probe
agcagttctagcataacaaggatat

SEQ ID NO: 159892 - DNA, 25 bp, Artificial
  Probe
gatatgttggactggatctgatgag

SEQ ID NO: 159893 - DNA, 25 bp, Artificial
  Probe
ataagcgatatgttggactggatct

SEQ ID NO: 159894 - DNA, 25 bp, Artificial
  Probe
atatgttggactggatctgatgagt

SEQ ID NO: 159895 - DNA, 25 bp, Artificial
  Probe
gcagttctagcataacaaggatata

SEQ ID NO: 159896 - DNA, 25 bp, Artificial
  Probe
gatgagtggagcagttctagcataa

SEQ ID NO: 159897 - DNA, 25 bp, Artificial
  Probe
cgatatgttggactggatctgatga

SEQ ID NO: 159898 - DNA, 25 bp, Artificial
  Probe
tatgttggactggatctgatgagtg

SEQ ID NO: 159899 - DNA, 25 bp, Artificial
  Probe
taagcgatatgttggactggatctg

SEQ ID NO: 159900 - DNA, 25 bp, Artificial
  Probe
ggagcagttctagcataacaaggat

SEQ ID NO: 159901 - DNA, 25 bp, Artificial
  Probe
atgagtggagcagttctagcataac

SEQ ID NO: 159902 - DNA, 25 bp, Artificial
  Probe
cataagcgatatgttggactggatc

SEQ ID NO: 159903 - DNA, 25 bp, Artificial
  Probe
gcatagaataacacagcaaattgga

SEQ ID NO: 159904 - DNA, 25 bp, Artificial
  Probe
gttgaaacagaccatagatacaggg

SEQ ID NO: 159905 - DNA, 25 bp, Artificial
  Probe
agtggagcagttctagcataacaag

SEQ ID NO: 159906 - DNA, 25 bp, Artificial
  Probe
gagtggagcagttctagcataacaa

SEQ ID NO: 159907 - DNA, 25 bp, Artificial
  Probe
gcaaataccagttaccgtaatgttt

SEQ ID NO: 159908 - DNA, 25 bp, Artificial
  Probe
aaagcaaataccagttaccgtaatg

SEQ ID NO: 159909 - DNA, 25 bp, Artificial
  Probe
agcaaataccagttaccgtaatgtt

SEQ ID NO: 159910 - DNA, 25 bp, Artificial
  Probe
aagcaaataccagttaccgtaatgt

SEQ ID NO: 159911 - DNA, 25 bp, Artificial
  Probe
tgctgaaacattcttcctaatacaa

SEQ ID NO: 159912 - DNA, 25 bp, Artificial
  Probe
gatctgatgagtggagcagttctag

SEQ ID NO: 159913 - DNA, 25 bp, Artificial
  Probe
cttggttccataagcgatatgttgg

SEQ ID NO: 159914 - DNA, 25 bp, Artificial
  Probe
atgctgaaacattcttcctaataca

SEQ ID NO: 159915 - DNA, 25 bp, Artificial
  Probe
tgatgagtggagcagttctagcata

SEQ ID NO: 159916 - DNA, 25 bp, Artificial
  Probe
actacatttactctgacaaatccca

SEQ ID NO: 159917 - DNA, 25 bp, Artificial
  Probe
acatttactctgacaaatcccaatt

SEQ ID NO: 159918 - DNA, 25 bp, Artificial
  Probe
ctacatttactctgacaaatcccaa

SEQ ID NO: 159919 - DNA, 25 bp, Artificial
  Probe
aactacatttactctgacaaatccc

SEQ ID NO: 159920 - DNA, 25 bp, Artificial
  Probe
catagaataacacagcaaattggat

SEQ ID NO: 159921 - DNA, 25 bp, Artificial
  Probe
ccataagcgatatgttggactggat

SEQ ID NO: 159922 - DNA, 25 bp, Artificial
  Probe
tttctcatatttgccaagccaacaa

SEQ ID NO: 159923 - DNA, 25 bp, Artificial
  Probe
gctgaaacattcttcctaatacaaa

SEQ ID NO: 159924 - DNA, 25 bp, Artificial
  Probe
gcgatatgttggactggatctgatg

SEQ ID NO: 159925 - DNA, 25 bp, Artificial
  Probe
tgttgaaacagaccatagatacagg

SEQ ID NO: 159926 - DNA, 25 bp, Artificial
  Probe
tggagcagttctagcataacaagga

SEQ ID NO: 159927 - DNA, 25 bp, Artificial
  Probe
gtggagcagttctagcataacaagg

SEQ ID NO: 159928 - DNA, 25 bp, Artificial
  Probe
tgagtggagcagttctagcataaca

SEQ ID NO: 159929 - DNA, 25 bp, Artificial
  Probe
agcgatatgttggactggatctgat

SEQ ID NO: 159930 - DNA, 25 bp, Artificial
  Probe
tacatttactctgacaaatcccaat

SEQ ID NO: 159931 - DNA, 25 bp, Artificial
  Probe
caatattcttgttccttccctcaaa

SEQ ID NO: 159932 - DNA, 25 bp, Artificial
  Probe
tgaaacagaccatagatacagggta

SEQ ID NO: 159933 - DNA, 25 bp, Artificial
  Probe
ttctcatatttgccaagccaacaag

SEQ ID NO: 159934 - DNA, 25 bp, Artificial
  Probe
gaaacagaccatagatacagggtaa

SEQ ID NO: 159935 - DNA, 25 bp, Artificial
  Probe
ttcataagtatagacgagagcagag

SEQ ID NO: 159936 - DNA, 25 bp, Artificial
  Probe
cttcataagtatagacgagagcaga

SEQ ID NO: 159937 - DNA, 25 bp, Artificial
  Probe
tcataagtatagacgagagcagagc

SEQ ID NO: 159938 - DNA, 25 bp, Artificial
  Probe
ataagtatagacgagagcagagcac

SEQ ID NO: 159939 - DNA, 25 bp, Artificial
  Probe
cataagtatagacgagagcagagca

SEQ ID NO: 159940 - DNA, 25 bp, Artificial
  Probe
aatgattcaactggaagaggtgctt

SEQ ID NO: 159941 - DNA, 25 bp, Artificial
  Probe
ctcccacctatcttcctataaatgc

SEQ ID NO: 159942 - DNA, 25 bp, Artificial
  Probe
cctcccacctatcttcctataaatg

SEQ ID NO: 159943 - DNA, 25 bp, Artificial
  Probe
tcctcccacctatcttcctataaat

SEQ ID NO: 159944 - DNA, 25 bp, Artificial
  Probe
ctcctcccacctatcttcctataaa

SEQ ID NO: 159945 - DNA, 25 bp, Artificial
  Probe
taagtatagacgagagcagagcact

SEQ ID NO: 159946 - DNA, 25 bp, Artificial
  Probe
ctatcttcctataaatgccagccta

SEQ ID NO: 159947 - DNA, 25 bp, Artificial
  Probe
ccacctatcttcctataaatgccag

SEQ ID NO: 159948 - DNA, 25 bp, Artificial
  Probe
tatcttcctataaatgccagcctaa

SEQ ID NO: 159949 - DNA, 25 bp, Artificial
  Probe
atcttcctataaatgccagcctaag

SEQ ID NO: 159950 - DNA, 25 bp, Artificial
  Probe
cacctatcttcctataaatgccagc

SEQ ID NO: 159951 - DNA, 25 bp, Artificial
  Probe
cacaatgattcaactggaagaggtg

SEQ ID NO: 159952 - DNA, 25 bp, Artificial
  Probe
aataggaatggatgagtcgtttctg

SEQ ID NO: 159953 - DNA, 25 bp, Artificial
  Probe
caataggaatggatgagtcgtttct

SEQ ID NO: 159954 - DNA, 25 bp, Artificial
  Probe
actcctcccacctatcttcctataa

SEQ ID NO: 159955 - DNA, 25 bp, Artificial
  Probe
tcccacctatcttcctataaatgcc

SEQ ID NO: 159956 - DNA, 25 bp, Artificial
  Probe
cccacctatcttcctataaatgcca

SEQ ID NO: 159957 - DNA, 25 bp, Artificial
  Probe
ataggaatggatgagtcgtttctga

SEQ ID NO: 159958 - DNA, 25 bp, Artificial
  Probe
cctatcttcctataaatgccagcct

SEQ ID NO: 159959 - DNA, 25 bp, Artificial
  Probe
cactcctcccacctatcttcctata

SEQ ID NO: 159960 - DNA, 25 bp, Artificial
  Probe
caatgattcaactggaagaggtgct

SEQ ID NO: 159961 - DNA, 25 bp, Artificial
  Probe
tttgtatcttggtgtaacattgtgg

SEQ ID NO: 159962 - DNA, 25 bp, Artificial
  Probe
acctatcttcctataaatgccagcc

SEQ ID NO: 159963 - DNA, 25 bp, Artificial
  Probe
taggaatggatgagtcgtttctgag

SEQ ID NO: 159964 - DNA, 25 bp, Artificial
  Probe
acaatgattcaactggaagaggtgc

SEQ ID NO: 159965 - DNA, 25 bp, Artificial
  Probe
ttgtatcttggtgtaacattgtggg

SEQ ID NO: 159966 - DNA, 25 bp, Artificial
  Probe
gcaataggaatggatgagtcgtttc

SEQ ID NO: 159967 - DNA, 25 bp, Artificial
  Probe
acttcataagtatagacgagagcag

SEQ ID NO: 159968 - DNA, 25 bp, Artificial
  Probe
acaaggtcttctaatagctaagcat

SEQ ID NO: 159969 - DNA, 25 bp, Artificial
  Probe
cctaagatttacccagcttgagatt

SEQ ID NO: 159970 - DNA, 25 bp, Artificial
  Probe
tcttcctataaatgccagcctaagc

SEQ ID NO: 159971 - DNA, 25 bp, Artificial
  Probe
aagtatagacgagagcagagcactc

SEQ ID NO: 159972 - DNA, 25 bp, Artificial
  Probe
tacaaggtcttctaatagctaagca

SEQ ID NO: 159973 - DNA, 25 bp, Artificial
  Probe
tcctaagatttacccagcttgagat

SEQ ID NO: 159974 - DNA, 25 bp, Artificial
  Probe
caaggtcttctaatagctaagcatt

SEQ ID NO: 159975 - DNA, 25 bp, Artificial
  Probe
ccacaatgattcaactggaagaggt

SEQ ID NO: 159976 - DNA, 25 bp, Artificial
  Probe
ccagtgacatagatgctctcagaga

SEQ ID NO: 159977 - DNA, 25 bp, Artificial
  Probe
ctacaaggtcttctaatagctaagc

SEQ ID NO: 159978 - DNA, 25 bp, Artificial
  Probe
atgattcaactggaagaggtgcttt

SEQ ID NO: 159979 - DNA, 25 bp, Artificial
  Probe
ctccaagctcctctcctaagattta

SEQ ID NO: 159980 - DNA, 25 bp, Artificial
  Probe
gtttgctcaagatcccaacttcatc

SEQ ID NO: 159981 - DNA, 25 bp, Artificial
  Probe
tttgctcaagatcccaacttcatcg

SEQ ID NO: 159982 - DNA, 25 bp, Artificial
  Probe
agtttgctcaagatcccaacttcat

SEQ ID NO: 159983 - DNA, 25 bp, Artificial
  Probe
cagtttgctcaagatcccaacttca

SEQ ID NO: 159984 - DNA, 25 bp, Artificial
  Probe
acagtttgctcaagatcccaacttc

SEQ ID NO: 159985 - DNA, 25 bp, Artificial
  Probe
gacagtttgctcaagatcccaactt

SEQ ID NO: 159986 - DNA, 25 bp, Artificial
  Probe
ctcaagatcccaacttcatcgaggt

SEQ ID NO: 159987 - DNA, 25 bp, Artificial
  Probe
aagatcccaacttcatcgaggtcac

SEQ ID NO: 159988 - DNA, 25 bp, Artificial
  Probe
ttgctcaagatcccaacttcatcga

SEQ ID NO: 159989 - DNA, 25 bp, Artificial
  Probe
caagatcccaacttcatcgaggtca

SEQ ID NO: 159990 - DNA, 25 bp, Artificial
  Probe
tgctcaagatcccaacttcatcgag

SEQ ID NO: 159991 - DNA, 25 bp, Artificial
  Probe
ggacagtttgctcaagatcccaact

SEQ ID NO: 159992 - DNA, 25 bp, Artificial
  Probe
ccagactaataaccacgactacatg

SEQ ID NO: 159993 - DNA, 25 bp, Artificial
  Probe
gccagactaataaccacgactacat

SEQ ID NO: 159994 - DNA, 25 bp, Artificial
  Probe
gatgaactgaggctgatccattact

SEQ ID NO: 159995 - DNA, 25 bp, Artificial
  Probe
atgaactgaggctgatccattactc

SEQ ID NO: 159996 - DNA, 25 bp, Artificial
  Probe
gaggacttctctctcattctggagt

SEQ ID NO: 159997 - DNA, 25 bp, Artificial
  Probe
taacaggaggagaggtgacattgag

SEQ ID NO: 159998 - DNA, 25 bp, Artificial
  Probe
gtaacaggaggagaggtgacattga

SEQ ID NO: 159999 - DNA, 25 bp, Artificial
  Probe
agtaacaggaggagaggtgacattg

SEQ ID NO: 160000 - DNA, 25 bp, Artificial
  Probe
cagtaacaggaggagaggtgacatt

SEQ ID NO: 160001 - DNA, 25 bp, Artificial
  Probe
gtatgctgaacagttcttcggatca

SEQ ID NO: 160002 - DNA, 25 bp, Artificial
  Probe
catatgatgttaaccgcactgagaa

SEQ ID NO: 160003 - DNA, 25 bp, Artificial
  Probe
ggtatgctgaacagttcttcggatc

SEQ ID NO: 160004 - DNA, 25 bp, Artificial
  Probe
acttctctctcattctggagtcagc

SEQ ID NO: 160005 - DNA, 25 bp, Artificial
  Probe
cgccagactaataaccacgactaca

SEQ ID NO: 160006 - DNA, 25 bp, Artificial
  Probe
cagactaataaccacgactacatgt

SEQ ID NO: 160007 - DNA, 25 bp, Artificial
  Probe
ttctctctcattctggagtcagctt

SEQ ID NO: 160008 - DNA, 25 bp, Artificial
  Probe
attgagctgtcgccagactaataac

SEQ ID NO: 160009 - DNA, 25 bp, Artificial
  Probe
cattgagctgtcgccagactaataa

SEQ ID NO: 160010 - DNA, 25 bp, Artificial
  Probe
aggtatgctgaacagttcttcggat

SEQ ID NO: 160011 - DNA, 25 bp, Artificial
  Probe
attctggagtcagcttctctctctc

SEQ ID NO: 160012 - DNA, 25 bp, Artificial
  Probe
gtacttctgtgccagcagtgataac

SEQ ID NO: 160013 - DNA, 25 bp, Artificial
  Probe
actgaggctgatccattactcatat

SEQ ID NO: 160014 - DNA, 25 bp, Artificial
  Probe
aactgaggctgatccattactcata

SEQ ID NO: 160015 - DNA, 25 bp, Artificial
  Probe
tacttctgtgccagcagtgataact

SEQ ID NO: 160016 - DNA, 25 bp, Artificial
  Probe
aagaggacttctctctcattctgga

SEQ ID NO: 160017 - DNA, 25 bp, Artificial
  Probe
caagaggacttctctctcattctgg

SEQ ID NO: 160018 - DNA, 25 bp, Artificial
  Probe
ccaagaggacttctctctcattctg

SEQ ID NO: 160019 - DNA, 25 bp, Artificial
  Probe
atatgatgttaaccgcactgagaaa

SEQ ID NO: 160020 - DNA, 25 bp, Artificial
  Probe
cattctggagtcagcttctctctct

SEQ ID NO: 160021 - DNA, 25 bp, Artificial
  Probe
tcattctggagtcagcttctctctc

SEQ ID NO: 160022 - DNA, 25 bp, Artificial
  Probe
ctcattctggagtcagcttctctct

SEQ ID NO: 160023 - DNA, 25 bp, Artificial
  Probe
tctcattctggagtcagcttctctc

SEQ ID NO: 160024 - DNA, 25 bp, Artificial
  Probe
ctctcattctggagtcagcttctct

SEQ ID NO: 160025 - DNA, 25 bp, Artificial
  Probe
tctctcattctggagtcagcttctc

SEQ ID NO: 160026 - DNA, 25 bp, Artificial
  Probe
ctctctcattctggagtcagcttct

SEQ ID NO: 160027 - DNA, 25 bp, Artificial
  Probe
tctctctcattctggagtcagcttc

SEQ ID NO: 160028 - DNA, 25 bp, Artificial
  Probe
cttctctctcattctggagtcagct

SEQ ID NO: 160029 - DNA, 25 bp, Artificial
  Probe
atgtactggtatcgacagaacatgg

SEQ ID NO: 160030 - DNA, 25 bp, Artificial
  Probe
tatgatgttaaccgcactgagaaag

SEQ ID NO: 160031 - DNA, 25 bp, Artificial
  Probe
tgtacttctgtgccagcagtgataa

SEQ ID NO: 160032 - DNA, 25 bp, Artificial
  Probe
agaggacttctctctcattctggag

SEQ ID NO: 160033 - DNA, 25 bp, Artificial
  Probe
gacttctctctcattctggagtcag

SEQ ID NO: 160034 - DNA, 25 bp, Artificial
  Probe
gagtcagcttctctctctcagacag

SEQ ID NO: 160035 - DNA, 25 bp, Artificial
  Probe
gaggtatgctgaacagttcttcgga

SEQ ID NO: 160036 - DNA, 25 bp, Artificial
  Probe
gaactgaggctgatccattactcat

SEQ ID NO: 160037 - DNA, 25 bp, Artificial
  Probe
aaccatcttcatcctcttcatgttg

SEQ ID NO: 160038 - DNA, 25 bp, Artificial
  Probe
catcttcatcctcttcatgttggtg

SEQ ID NO: 160039 - DNA, 25 bp, Artificial
  Probe
aagagaacagaaccatgtcagttac

SEQ ID NO: 160040 - DNA, 25 bp, Artificial
  Probe
cagcatcttcttcaagtctgtcttc

SEQ ID NO: 160041 - DNA, 25 bp, Artificial
  Probe
gtcatcgagctgttctatgtcttat

SEQ ID NO: 160042 - DNA, 25 bp, Artificial
  Probe
tcatcgagctgttctatgtcttatt

SEQ ID NO: 160043 - DNA, 25 bp, Artificial
  Probe
gagaacagaaccatgtcagttacag

SEQ ID NO: 160044 - DNA, 25 bp, Artificial
  Probe
gaatgagaaggaggaagtttactgt

SEQ ID NO: 160045 - DNA, 25 bp, Artificial
  Probe
catcttcttcaagtctgtcttcgag

SEQ ID NO: 160046 - DNA, 25 bp, Artificial
  Probe
tgtcatcgagctgttctatgtctta

SEQ ID NO: 160047 - DNA, 25 bp, Artificial
  Probe
agagaacagaaccatgtcagttaca

SEQ ID NO: 160048 - DNA, 25 bp, Artificial
  Probe
agcatcttcttcaagtctgtcttcg

SEQ ID NO: 160049 - DNA, 25 bp, Artificial
  Probe
ggaatgagaaggaggaagtttactg

SEQ ID NO: 160050 - DNA, 25 bp, Artificial
  Probe
cttgaatgtcatcgagctgttctat

SEQ ID NO: 160051 - DNA, 25 bp, Artificial
  Probe
aatgagaaggaggaagtttactgta

SEQ ID NO: 160052 - DNA, 25 bp, Artificial
  Probe
gaacagaaccatgtcagttacagtg

SEQ ID NO: 160053 - DNA, 25 bp, Artificial
  Probe
agaacagaaccatgtcagttacagt

SEQ ID NO: 160054 - DNA, 25 bp, Artificial
  Probe
ttgaatgtcatcgagctgttctatg

SEQ ID NO: 160055 - DNA, 25 bp, Artificial
  Probe
gaatgtcatcgagctgttctatgtc

SEQ ID NO: 160056 - DNA, 25 bp, Artificial
  Probe
tgagaaggaggaagtttactgtaat

SEQ ID NO: 160057 - DNA, 25 bp, Artificial
  Probe
atgagaaggaggaagtttactgtaa

SEQ ID NO: 160058 - DNA, 25 bp, Artificial
  Probe
atgtcatcgagctgttctatgtctt

SEQ ID NO: 160059 - DNA, 25 bp, Artificial
  Probe
aatgtcatcgagctgttctatgtct

SEQ ID NO: 160060 - DNA, 25 bp, Artificial
  Probe
atcttcatcctcttcatgttggtgg

SEQ ID NO: 160061 - DNA, 25 bp, Artificial
  Probe
ctgttctcaccaccatatgttctag

SEQ ID NO: 160062 - DNA, 25 bp, Artificial
  Probe
agggtactggacattaacattctag

SEQ ID NO: 160063 - DNA, 25 bp, Artificial
  Probe
caagggtactggacattaacattct

SEQ ID NO: 160064 - DNA, 25 bp, Artificial
  Probe
gctgttctatgtcttatttaaggct

SEQ ID NO: 160065 - DNA, 25 bp, Artificial
  Probe
gagaaggaggaagtttactgtaatc

SEQ ID NO: 160066 - DNA, 25 bp, Artificial
  Probe
atcttcttcaagtctgtcttcgagg

SEQ ID NO: 160067 - DNA, 25 bp, Artificial
  Probe
aagggtactggacattaacattcta

SEQ ID NO: 160068 - DNA, 25 bp, Artificial
  Probe
gggaatgagaaggaggaagtttact

SEQ ID NO: 160069 - DNA, 25 bp, Artificial
  Probe
tgttctcaccaccatatgttctagt

SEQ ID NO: 160070 - DNA, 25 bp, Artificial
  Probe
tcttgaatgtcatcgagctgttcta

SEQ ID NO: 160071 - DNA, 25 bp, Artificial
  Probe
catgtcagttacagtgcatagtcaa

SEQ ID NO: 160072 - DNA, 25 bp, Artificial
  Probe
ccagcatcttcttcaagtctgtctt

SEQ ID NO: 160073 - DNA, 25 bp, Artificial
  Probe
aaaccatcttcatcctcttcatgtt

SEQ ID NO: 160074 - DNA, 25 bp, Artificial
  Probe
tgaatgtcatcgagctgttctatgt

SEQ ID NO: 160075 - DNA, 25 bp, Artificial
  Probe
ttaaggctattaagaatcatctggg

SEQ ID NO: 160076 - DNA, 25 bp, Artificial
  Probe
gaaccatgtcagttacagtgcatag

SEQ ID NO: 160077 - DNA, 25 bp, Artificial
  Probe
gtacctttatggattcactctgagt

SEQ ID NO: 160078 - DNA, 25 bp, Artificial
  Probe
aagtatcctttctggcttgtctgag

SEQ ID NO: 160079 - DNA, 25 bp, Artificial
  Probe
gaagtatcctttctggcttgtctga

SEQ ID NO: 160080 - DNA, 25 bp, Artificial
  Probe
gtgggactttcttccttctatatgt

SEQ ID NO: 160081 - DNA, 25 bp, Artificial
  Probe
aaggaggaagtttactgtaatccag

SEQ ID NO: 160082 - DNA, 25 bp, Artificial
  Probe
ttctatgttgctttaatcttggctg

SEQ ID NO: 160083 - DNA, 25 bp, Artificial
  Probe
gttctatgttgctttaatcttggct

SEQ ID NO: 160084 - DNA, 25 bp, Artificial
  Probe
tgttctatgttgctttaatcttggc

SEQ ID NO: 160085 - DNA, 25 bp, Artificial
  Probe
aaattccaactgtttctacctctgt

SEQ ID NO: 160086 - DNA, 25 bp, Artificial
  Probe
aattccaactgtttctacctctgta

SEQ ID NO: 160087 - DNA, 25 bp, Artificial
  Probe
tctatgttgctttaatcttggctgg

SEQ ID NO: 160088 - DNA, 25 bp, Artificial
  Probe
ctgttctatgttgctttaatcttgg

SEQ ID NO: 160089 - DNA, 25 bp, Artificial
  Probe
cctgttctatgttgctttaatcttg

SEQ ID NO: 160090 - DNA, 25 bp, Artificial
  Probe
ctacctctgtagactgttcacataa

SEQ ID NO: 160091 - DNA, 25 bp, Artificial
  Probe
tcctgttctatgttgctttaatctt

SEQ ID NO: 160092 - DNA, 25 bp, Artificial
  Probe
ttcctgttctatgttgctttaatct

SEQ ID NO: 160093 - DNA, 25 bp, Artificial
  Probe
aaactcacagcaaatcaacaggaaa

SEQ ID NO: 160094 - DNA, 25 bp, Artificial
  Probe
actgttcacataaattcacattggg

SEQ ID NO: 160095 - DNA, 25 bp, Artificial
  Probe
tactgttccacaagtgtcattgctt

SEQ ID NO: 160096 - DNA, 25 bp, Artificial
  Probe
acctctgtagactgttcacataaat

SEQ ID NO: 160097 - DNA, 25 bp, Artificial
  Probe
aactcacagcaaatcaacaggaaag

SEQ ID NO: 160098 - DNA, 25 bp, Artificial
  Probe
gactgttcacataaattcacattgg

SEQ ID NO: 160099 - DNA, 25 bp, Artificial
  Probe
tacctctgtagactgttcacataaa

SEQ ID NO: 160100 - DNA, 25 bp, Artificial
  Probe
tttcctgttctatgttgctttaatc

SEQ ID NO: 160101 - DNA, 25 bp, Artificial
  Probe
cctctgtagactgttcacataaatt

SEQ ID NO: 160102 - DNA, 25 bp, Artificial
  Probe
caaactcacagcaaatcaacaggaa

SEQ ID NO: 160103 - DNA, 25 bp, Artificial
  Probe
tgtagactgttcacataaattcaca

SEQ ID NO: 160104 - DNA, 25 bp, Artificial
  Probe
agactgttcacataaattcacattg

SEQ ID NO: 160105 - DNA, 25 bp, Artificial
  Probe
agtcaaactcacagcaaatcaacag

SEQ ID NO: 160106 - DNA, 25 bp, Artificial
  Probe
ataaatttccagtcacgcatctcta

SEQ ID NO: 160107 - DNA, 25 bp, Artificial
  Probe
aaataaatttccagtcacgcatctc

SEQ ID NO: 160108 - DNA, 25 bp, Artificial
  Probe
aattggtactgaaggtgcatgttct

SEQ ID NO: 160109 - DNA, 25 bp, Artificial
  Probe
taaatttccagtcacgcatctctaa

SEQ ID NO: 160110 - DNA, 25 bp, Artificial
  Probe
ctgtagactgttcacataaattcac

SEQ ID NO: 160111 - DNA, 25 bp, Artificial
  Probe
ctatgttgctttaatcttggctggc

SEQ ID NO: 160112 - DNA, 25 bp, Artificial
  Probe
ggtactgaaggtgcatgttctgtaa

SEQ ID NO: 160113 - DNA, 25 bp, Artificial
  Probe
aataaatttccagtcacgcatctct

SEQ ID NO: 160114 - DNA, 25 bp, Artificial
  Probe
tctgtagactgttcacataaattca

SEQ ID NO: 160115 - DNA, 25 bp, Artificial
  Probe
cagtcaaactcacagcaaatcaaca

SEQ ID NO: 160116 - DNA, 25 bp, Artificial
  Probe
caagtgtcattgcttctgtggatca

SEQ ID NO: 160117 - DNA, 25 bp, Artificial
  Probe
tgtcattgcttctgtggatcacttc

SEQ ID NO: 160118 - DNA, 25 bp, Artificial
  Probe
ctgttccacaagtgtcattgcttct

SEQ ID NO: 160119 - DNA, 25 bp, Artificial
  Probe
gtactgttccacaagtgtcattgct

SEQ ID NO: 160120 - DNA, 25 bp, Artificial
  Probe
tcaaactcacagcaaatcaacagga

SEQ ID NO: 160121 - DNA, 25 bp, Artificial
  Probe
gtcaaactcacagcaaatcaacagg

SEQ ID NO: 160122 - DNA, 25 bp, Artificial
  Probe
gatctcaagtactgttccacaagtg

SEQ ID NO: 160123 - DNA, 25 bp, Artificial
  Probe
agatctcaagtactgttccacaagt

SEQ ID NO: 160124 - DNA, 25 bp, Artificial
  Probe
cagatctcaagtactgttccacaag

SEQ ID NO: 160125 - DNA, 25 bp, Artificial
  Probe
acaagtgtcattgcttctgtggatc

SEQ ID NO: 160126 - DNA, 25 bp, Artificial
  Probe
ctctgtagactgttcacataaattc

SEQ ID NO: 160127 - DNA, 25 bp, Artificial
  Probe
ctaaggagtatggcatggacttcta

SEQ ID NO: 160128 - DNA, 25 bp, Artificial
  Probe
taaggagtatggcatggacttctac

SEQ ID NO: 160129 - DNA, 25 bp, Artificial
  Probe
accaaccttaacattaaagagtcct

SEQ ID NO: 160130 - DNA, 25 bp, Artificial
  Probe
caccaaccttaacattaaagagtcc

SEQ ID NO: 160131 - DNA, 25 bp, Artificial
  Probe
gcaccaaccttaacattaaagagtc

SEQ ID NO: 160132 - DNA, 25 bp, Artificial
  Probe
ccaaccttaacattaaagagtcctt

SEQ ID NO: 160133 - DNA, 25 bp, Artificial
  Probe
aaagtgaggatacagatttgggaca

SEQ ID NO: 160134 - DNA, 25 bp, Artificial
  Probe
accttaacattaaagagtccttcac

SEQ ID NO: 160135 - DNA, 25 bp, Artificial
  Probe
ggcatcaaagtgaggatacagattt

SEQ ID NO: 160136 - DNA, 25 bp, Artificial
  Probe
ggaataaggctgacgaagaacagaa

SEQ ID NO: 160137 - DNA, 25 bp, Artificial
  Probe
ccttaacattaaagagtccttcact

SEQ ID NO: 160138 - DNA, 25 bp, Artificial
  Probe
aaccttaacattaaagagtccttca

SEQ ID NO: 160139 - DNA, 25 bp, Artificial
  Probe
caaccttaacattaaagagtccttc

SEQ ID NO: 160140 - DNA, 25 bp, Artificial
  Probe
gaataaggctgacgaagaacagaaa

SEQ ID NO: 160141 - DNA, 25 bp, Artificial
  Probe
aataaggctgacgaagaacagaaac

SEQ ID NO: 160142 - DNA, 25 bp, Artificial
  Probe
ctgcaccaaccttaacattaaagag

SEQ ID NO: 160143 - DNA, 25 bp, Artificial
  Probe
tgcaccaaccttaacattaaagagt

SEQ ID NO: 160144 - DNA, 25 bp, Artificial
  Probe
tatggcatggacttctacgaaacaa

SEQ ID NO: 160145 - DNA, 25 bp, Artificial
  Probe
aagtgaggatacagatttgggacac

SEQ ID NO: 160146 - DNA, 25 bp, Artificial
  Probe
cctgcaccaaccttaacattaaaga

SEQ ID NO: 160147 - DNA, 25 bp, Artificial
  Probe
tttagtctacgacattagcagcgag

SEQ ID NO: 160148 - DNA, 25 bp, Artificial
  Probe
cggcatcaaagtgaggatacagatt

SEQ ID NO: 160149 - DNA, 25 bp, Artificial
  Probe
gagtatggcatggacttctacgaaa

SEQ ID NO: 160150 - DNA, 25 bp, Artificial
  Probe
gtagacggcatcaaagtgaggatac

SEQ ID NO: 160151 - DNA, 25 bp, Artificial
  Probe
agtagacggcatcaaagtgaggata

SEQ ID NO: 160152 - DNA, 25 bp, Artificial
  Probe
gcatcaaagtgaggatacagatttg

SEQ ID NO: 160153 - DNA, 25 bp, Artificial
  Probe
catcaaagtgaggatacagatttgg

SEQ ID NO: 160154 - DNA, 25 bp, Artificial
  Probe
atcaaagtgaggatacagatttggg

SEQ ID NO: 160155 - DNA, 25 bp, Artificial
  Probe
ggagtatggcatggacttctacgaa

SEQ ID NO: 160156 - DNA, 25 bp, Artificial
  Probe
aaggagtatggcatggacttctacg

SEQ ID NO: 160157 - DNA, 25 bp, Artificial
  Probe
gctaaggagtatggcatggacttct

SEQ ID NO: 160158 - DNA, 25 bp, Artificial
  Probe
gtatggcatggacttctacgaaaca

SEQ ID NO: 160159 - DNA, 25 bp, Artificial
  Probe
agtatggcatggacttctacgaaac

SEQ ID NO: 160160 - DNA, 25 bp, Artificial
  Probe
cagaagatcctcatcgggaataagg

SEQ ID NO: 160161 - DNA, 25 bp, Artificial
  Probe
ccagaagatcctcatcgggaataag

SEQ ID NO: 160162 - DNA, 25 bp, Artificial
  Probe
gtgaggatacagatttgggacacag

SEQ ID NO: 160163 - DNA, 25 bp, Artificial
  Probe
caaagtgaggatacagatttgggac

SEQ ID NO: 160164 - DNA, 25 bp, Artificial
  Probe
tagacggcatcaaagtgaggataca

SEQ ID NO: 160165 - DNA, 25 bp, Artificial
  Probe
tcaaagtgaggatacagatttggga

SEQ ID NO: 160166 - DNA, 25 bp, Artificial
  Probe
tccagaagatcctcatcgggaataa

SEQ ID NO: 160167 - DNA, 25 bp, Artificial
  Probe
ctcttatcagcacatcatgaagtgg

SEQ ID NO: 160168 - DNA, 25 bp, Artificial
  Probe
agtgaggatacagatttgggacaca

SEQ ID NO: 160169 - DNA, 25 bp, Artificial
  Probe
atggcatggacttctacgaaacaag

SEQ ID NO: 160170 - DNA, 25 bp, Artificial
  Probe
ataaggctgacgaagaacagaaacg

SEQ ID NO: 160171 - DNA, 25 bp, Artificial
  Probe
ttagtctacgacattagcagcgagc

SEQ ID NO: 160172 - DNA, 25 bp, Artificial
  Probe
gttagcattgaaggtggtatggaag

SEQ ID NO: 160173 - DNA, 25 bp, Artificial
  Probe
gagagccattagacttctaggtgat

SEQ ID NO: 160174 - DNA, 25 bp, Artificial
  Probe
agagccattagacttctaggtgatg

SEQ ID NO: 160175 - DNA, 25 bp, Artificial
  Probe
ttgagagccattagacttctaggtg

SEQ ID NO: 160176 - DNA, 25 bp, Artificial
  Probe
tgagagccattagacttctaggtga

SEQ ID NO: 160177 - DNA, 25 bp, Artificial
  Probe
ggttagcattgaaggtggtatggaa

SEQ ID NO: 160178 - DNA, 25 bp, Artificial
  Probe
tgacatttgagagccattagacttc

SEQ ID NO: 160179 - DNA, 25 bp, Artificial
  Probe
ttgtactactggatatctgactgga

SEQ ID NO: 160180 - DNA, 25 bp, Artificial
  Probe
tgtactactggatatctgactggag

SEQ ID NO: 160181 - DNA, 25 bp, Artificial
  Probe
atgacatttgagagccattagactt

SEQ ID NO: 160182 - DNA, 25 bp, Artificial
  Probe
gacatttgagagccattagacttct

SEQ ID NO: 160183 - DNA, 25 bp, Artificial
  Probe
gagccattagacttctaggtgatgc

SEQ ID NO: 160184 - DNA, 25 bp, Artificial
  Probe
ttagcattgaaggtggtatggaagc

SEQ ID NO: 160185 - DNA, 25 bp, Artificial
  Probe
acatttgagagccattagacttcta

SEQ ID NO: 160186 - DNA, 25 bp, Artificial
  Probe
atttgagagccattagacttctagg

SEQ ID NO: 160187 - DNA, 25 bp, Artificial
  Probe
gtactactggatatctgactggagc

SEQ ID NO: 160188 - DNA, 25 bp, Artificial
  Probe
tttgagagccattagacttctaggt

SEQ ID NO: 160189 - DNA, 25 bp, Artificial
  Probe
catttgagagccattagacttctag

SEQ ID NO: 160190 - DNA, 25 bp, Artificial
  Probe
tcagtatgtgtaacttgaagctaat

SEQ ID NO: 160191 - DNA, 25 bp, Artificial
  Probe
caggttagcattgaaggtggtatgg

SEQ ID NO: 160192 - DNA, 25 bp, Artificial
  Probe
tgaaacacagcatggaattaacatt

SEQ ID NO: 160193 - DNA, 25 bp, Artificial
  Probe
catgtggcaagatcatcattagaaa

SEQ ID NO: 160194 - DNA, 25 bp, Artificial
  Probe
aggttagcattgaaggtggtatgga

SEQ ID NO: 160195 - DNA, 25 bp, Artificial
  Probe
atgtggcaagatcatcattagaaat

SEQ ID NO: 160196 - DNA, 25 bp, Artificial
  Probe
ttgttcagtatgtgtaacttgaagc

SEQ ID NO: 160197 - DNA, 25 bp, Artificial
  Probe
acacagcatggaattaacattaaac

SEQ ID NO: 160198 - DNA, 25 bp, Artificial
  Probe
tactactggatatctgactggagcc

SEQ ID NO: 160199 - DNA, 25 bp, Artificial
  Probe
cacagcatggaattaacattaaact

SEQ ID NO: 160200 - DNA, 25 bp, Artificial
  Probe
gaaacacagcatggaattaacatta

SEQ ID NO: 160201 - DNA, 25 bp, Artificial
  Probe
cagtatgtgtaacttgaagctaatt

SEQ ID NO: 160202 - DNA, 25 bp, Artificial
  Probe
ctgaaacacagcatggaattaacat

SEQ ID NO: 160203 - DNA, 25 bp, Artificial
  Probe
tactgaaacacagcatggaattaac

SEQ ID NO: 160204 - DNA, 25 bp, Artificial
  Probe
cttactgaaacacagcatggaatta

SEQ ID NO: 160205 - DNA, 25 bp, Artificial
  Probe
aacttaaattgggtgttagcttgag

SEQ ID NO: 160206 - DNA, 25 bp, Artificial
  Probe
ttactgaaacacagcatggaattaa

SEQ ID NO: 160207 - DNA, 25 bp, Artificial
  Probe
acttgaagctaatttgtactactgg

SEQ ID NO: 160208 - DNA, 25 bp, Artificial
  Probe
cttaaattgggtgttagcttgaggt

SEQ ID NO: 160209 - DNA, 25 bp, Artificial
  Probe
acttaaattgggtgttagcttgagg

SEQ ID NO: 160210 - DNA, 25 bp, Artificial
  Probe
aaacttaaattgggtgttagcttga

SEQ ID NO: 160211 - DNA, 25 bp, Artificial
  Probe
tcttactgaaacacagcatggaatt

SEQ ID NO: 160212 - DNA, 25 bp, Artificial
  Probe
ttcttactgaaacacagcatggaat

SEQ ID NO: 160213 - DNA, 25 bp, Artificial
  Probe
cttgaagctaatttgtactactgga

SEQ ID NO: 160214 - DNA, 25 bp, Artificial
  Probe
ttaaattgggtgttagcttgaggtg

SEQ ID NO: 160215 - DNA, 25 bp, Artificial
  Probe
tgttcagtatgtgtaacttgaagct

SEQ ID NO: 160216 - DNA, 25 bp, Artificial
  Probe
gcaggttagcattgaaggtggtatg

SEQ ID NO: 160217 - DNA, 25 bp, Artificial
  Probe
gcagtgcttgatacaattctctctt

SEQ ID NO: 160218 - DNA, 25 bp, Artificial
  Probe
aaagaagaatcaagttgggtttcac

SEQ ID NO: 160219 - DNA, 25 bp, Artificial
  Probe
gccaaacaattcaaacaaagaagaa

SEQ ID NO: 160220 - DNA, 25 bp, Artificial
  Probe
caaagaagaatcaagttgggtttca

SEQ ID NO: 160221 - DNA, 25 bp, Artificial
  Probe
acaaagaagaatcaagttgggtttc

SEQ ID NO: 160222 - DNA, 25 bp, Artificial
  Probe
tcaaacaaagaagaatcaagttggg

SEQ ID NO: 160223 - DNA, 25 bp, Artificial
  Probe
aacaaagaagaatcaagttgggttt

SEQ ID NO: 160224 - DNA, 25 bp, Artificial
  Probe
aaacaaagaagaatcaagttgggtt

SEQ ID NO: 160225 - DNA, 25 bp, Artificial
  Probe
caaacaaagaagaatcaagttgggt

SEQ ID NO: 160226 - DNA, 25 bp, Artificial
  Probe
cagtgcttgatacaattctctcttt

SEQ ID NO: 160227 - DNA, 25 bp, Artificial
  Probe
ttcgccaaacaattcaaacaaagaa

SEQ ID NO: 160228 - DNA, 25 bp, Artificial
  Probe
tggtacgtgtctggttctgtaatag

SEQ ID NO: 160229 - DNA, 25 bp, Artificial
  Probe
tgcttgatacaattctctctttacc

SEQ ID NO: 160230 - DNA, 25 bp, Artificial
  Probe
ggtacgtgtctggttctgtaataga

SEQ ID NO: 160231 - DNA, 25 bp, Artificial
  Probe
ttcaaacaaagaagaatcaagttgg

SEQ ID NO: 160232 - DNA, 25 bp, Artificial
  Probe
cgccaaacaattcaaacaaagaaga

SEQ ID NO: 160233 - DNA, 25 bp, Artificial
  Probe
tcgccaaacaattcaaacaaagaag

SEQ ID NO: 160234 - DNA, 25 bp, Artificial
  Probe
gtggtacgtgtctggttctgtaata

SEQ ID NO: 160235 - DNA, 25 bp, Artificial
  Probe
gcttgatacaattctctctttacct

SEQ ID NO: 160236 - DNA, 25 bp, Artificial
  Probe
gttcgccaaacaattcaaacaaaga

SEQ ID NO: 160237 - DNA, 25 bp, Artificial
  Probe
agttcgccaaacaattcaaacaaag

SEQ ID NO: 160238 - DNA, 25 bp, Artificial
  Probe
aagaagaatcaagttgggtttcacg

SEQ ID NO: 160239 - DNA, 25 bp, Artificial
  Probe
cagttcgccaaacaattcaaacaaa

SEQ ID NO: 160240 - DNA, 25 bp, Artificial
  Probe
gtgcttgatacaattctctctttac

SEQ ID NO: 160241 - DNA, 25 bp, Artificial
  Probe
aacctctgatgagttggaacagttc

SEQ ID NO: 160242 - DNA, 25 bp, Artificial
  Probe
agtgcttgatacaattctctcttta

SEQ ID NO: 160243 - DNA, 25 bp, Artificial
  Probe
tacgtgtctggttctgtaatagaag

SEQ ID NO: 160244 - DNA, 25 bp, Artificial
  Probe
gtacgtgtctggttctgtaatagaa

SEQ ID NO: 160245 - DNA, 25 bp, Artificial
  Probe
acgtgtctggttctgtaatagaaga

SEQ ID NO: 160246 - DNA, 25 bp, Artificial
  Probe
acagttcgccaaacaattcaaacaa

SEQ ID NO: 160247 - DNA, 25 bp, Artificial
  Probe
aacagttcgccaaacaattcaaaca

SEQ ID NO: 160248 - DNA, 25 bp, Artificial
  Probe
gaacagttcgccaaacaattcaaac

SEQ ID NO: 160249 - DNA, 25 bp, Artificial
  Probe
gagcagtgcttgatacaattctctc

SEQ ID NO: 160250 - DNA, 25 bp, Artificial
  Probe
agcagtgcttgatacaattctctct

SEQ ID NO: 160251 - DNA, 25 bp, Artificial
  Probe
agtggtacgtgtctggttctgtaat

SEQ ID NO: 160252 - DNA, 25 bp, Artificial
  Probe
cgtgtctggttctgtaatagaagac

SEQ ID NO: 160253 - DNA, 25 bp, Artificial
  Probe
aagtggtacgtgtctggttctgtaa

SEQ ID NO: 160254 - DNA, 25 bp, Artificial
  Probe
ccaaacaattcaaacaaagaagaat

SEQ ID NO: 160255 - DNA, 25 bp, Artificial
  Probe
cttgatacaattctctctttacctt

SEQ ID NO: 160256 - DNA, 25 bp, Artificial
  Probe
ggaacagttcgccaaacaattcaaa

SEQ ID NO: 160257 - DNA, 25 bp, Artificial
  Probe
caagctgaaaccactgctaaataag

SEQ ID NO: 160258 - DNA, 25 bp, Artificial
  Probe
ggagcagtgcttgatacaattctct

SEQ ID NO: 160259 - DNA, 25 bp, Artificial
  Probe
aagctgaaaccactgctaaataagt

SEQ ID NO: 160260 - DNA, 25 bp, Artificial
  Probe
atgaagagactccaacctctgatga

SEQ ID NO: 160261 - DNA, 25 bp, Artificial
  Probe
gaagtggtacgtgtctggttctgta

SEQ ID NO: 160262 - DNA, 25 bp, Artificial
  Probe
ttacctactgttacttaccgacttg

SEQ ID NO: 160263 - DNA, 25 bp, Artificial
  Probe
cttacctactgttacttaccgactt

SEQ ID NO: 160264 - DNA, 25 bp, Artificial
  Probe
tacctactgttacttaccgacttgt

SEQ ID NO: 160265 - DNA, 25 bp, Artificial
  Probe
ttacttaccgacttgtctactgttc

SEQ ID NO: 160266 - DNA, 25 bp, Artificial
  Probe
gttacttaccgacttgtctactgtt

SEQ ID NO: 160267 - DNA, 25 bp, Artificial
  Probe
tactgttacttaccgacttgtctac

SEQ ID NO: 160268 - DNA, 25 bp, Artificial
  Probe
ccttacctactgttacttaccgact

SEQ ID NO: 160269 - DNA, 25 bp, Artificial
  Probe
ctactgttacttaccgacttgtcta

SEQ ID NO: 160270 - DNA, 25 bp, Artificial
  Probe
ctgttacttaccgacttgtctactg

SEQ ID NO: 160271 - DNA, 25 bp, Artificial
  Probe
actgttacttaccgacttgtctact

SEQ ID NO: 160272 - DNA, 25 bp, Artificial
  Probe
tgttacttaccgacttgtctactgt

SEQ ID NO: 160273 - DNA, 25 bp, Artificial
  Probe
gactggaatatcttcaagtgctctt

SEQ ID NO: 160274 - DNA, 25 bp, Artificial
  Probe
tacttaccgacttgtctactgttcc

SEQ ID NO: 160275 - DNA, 25 bp, Artificial
  Probe
cctactgttacttaccgacttgtct

SEQ ID NO: 160276 - DNA, 25 bp, Artificial
  Probe
agactggaatatcttcaagtgctct

SEQ ID NO: 160277 - DNA, 25 bp, Artificial
  Probe
acctactgttacttaccgacttgtc

SEQ ID NO: 160278 - DNA, 25 bp, Artificial
  Probe
cagactggaatatcttcaagtgctc

SEQ ID NO: 160279 - DNA, 25 bp, Artificial
  Probe
cagcagactggaatatcttcaagtg

SEQ ID NO: 160280 - DNA, 25 bp, Artificial
  Probe
aaacagaaagaagaaagagaagtgc

SEQ ID NO: 160281 - DNA, 25 bp, Artificial
  Probe
ccaaacagaaagaagaaagagaagt

SEQ ID NO: 160282 - DNA, 25 bp, Artificial
  Probe
agatggaagggttaaatgattggta

SEQ ID NO: 160283 - DNA, 25 bp, Artificial
  Probe
tagatggaagggttaaatgattggt

SEQ ID NO: 160284 - DNA, 25 bp, Artificial
  Probe
gatggaagggttaaatgattggtag

SEQ ID NO: 160285 - DNA, 25 bp, Artificial
  Probe
tccaaacagaaagaagaaagagaag

SEQ ID NO: 160286 - DNA, 25 bp, Artificial
  Probe
atggaagggttaaatgattggtagc

SEQ ID NO: 160287 - DNA, 25 bp, Artificial
  Probe
tgaaacctcttaactggaccaaata

SEQ ID NO: 160288 - DNA, 25 bp, Artificial
  Probe
atgaaacctcttaactggaccaaat

SEQ ID NO: 160289 - DNA, 25 bp, Artificial
  Probe
gaagggttaaatgattggtagcaaa

SEQ ID NO: 160290 - DNA, 25 bp, Artificial
  Probe
gaaacctcttaactggaccaaatag

SEQ ID NO: 160291 - DNA, 25 bp, Artificial
  Probe
caaacagaaagaagaaagagaagtg

SEQ ID NO: 160292 - DNA, 25 bp, Artificial
  Probe
ctcttaactggaccaaatagcaaag

SEQ ID NO: 160293 - DNA, 25 bp, Artificial
  Probe
atagatggaagggttaaatgattgg

SEQ ID NO: 160294 - DNA, 25 bp, Artificial
  Probe
actggaatatcttcaagtgctcttt

SEQ ID NO: 160295 - DNA, 25 bp, Artificial
  Probe
cctcttaactggaccaaatagcaaa

SEQ ID NO: 160296 - DNA, 25 bp, Artificial
  Probe
aaacctcttaactggaccaaatagc

SEQ ID NO: 160297 - DNA, 25 bp, Artificial
  Probe
ttccaaacagaaagaagaaagagaa

SEQ ID NO: 160298 - DNA, 25 bp, Artificial
  Probe
ggaagggttaaatgattggtagcaa

SEQ ID NO: 160299 - DNA, 25 bp, Artificial
  Probe
taaactgtgccttccatctaccttt

SEQ ID NO: 160300 - DNA, 25 bp, Artificial
  Probe
aacaacacacatgaaacctcttaac

SEQ ID NO: 160301 - DNA, 25 bp, Artificial
  Probe
caacaacacacatgaaacctcttaa

SEQ ID NO: 160302 - DNA, 25 bp, Artificial
  Probe
cccttacctactgttacttaccgac

SEQ ID NO: 160303 - DNA, 25 bp, Artificial
  Probe
caacacacatgaaacctcttaactg

SEQ ID NO: 160304 - DNA, 25 bp, Artificial
  Probe
aaagacaacaacaacacacatgaaa

SEQ ID NO: 160305 - DNA, 25 bp, Artificial
  Probe
acaacacacatgaaacctcttaact

SEQ ID NO: 160306 - DNA, 25 bp, Artificial
  Probe
tcttaactggaccaaatagcaaagc

SEQ ID NO: 160307 - DNA, 25 bp, Artificial
  Probe
gagccaataaaaccttgagactcta

SEQ ID NO: 160308 - DNA, 25 bp, Artificial
  Probe
aacacaagcacacctgataacatta

SEQ ID NO: 160309 - DNA, 25 bp, Artificial
  Probe
agaagaagcagaactgagaatatgg

SEQ ID NO: 160310 - DNA, 25 bp, Artificial
  Probe
ccaggtatgtcagacttactaatcc

SEQ ID NO: 160311 - DNA, 25 bp, Artificial
  Probe
ccaagaagaagcagaactgagaata

SEQ ID NO: 160312 - DNA, 25 bp, Artificial
  Probe
gaagaagcagaactgagaatatggt

SEQ ID NO: 160313 - DNA, 25 bp, Artificial
  Probe
caccaggtatgtcagacttactaat

SEQ ID NO: 160314 - DNA, 25 bp, Artificial
  Probe
tcaccaggtatgtcagacttactaa

SEQ ID NO: 160315 - DNA, 25 bp, Artificial
  Probe
ttcaccaggtatgtcagacttacta

SEQ ID NO: 160316 - DNA, 25 bp, Artificial
  Probe
acacaagcacacctgataacattag

SEQ ID NO: 160317 - DNA, 25 bp, Artificial
  Probe
aagaagcagaactgagaatatggtt

SEQ ID NO: 160318 - DNA, 25 bp, Artificial
  Probe
accaggtatgtcagacttactaatc

SEQ ID NO: 160319 - DNA, 25 bp, Artificial
  Probe
aagaagaagcagaactgagaatatg

SEQ ID NO: 160320 - DNA, 25 bp, Artificial
  Probe
caagaagaagcagaactgagaatat

SEQ ID NO: 160321 - DNA, 25 bp, Artificial
  Probe
agaagcagaactgagaatatggtta

SEQ ID NO: 160322 - DNA, 25 bp, Artificial
  Probe
gaagcagaactgagaatatggttat

SEQ ID NO: 160323 - DNA, 25 bp, Artificial
  Probe
cttcaccaggtatgtcagacttact

SEQ ID NO: 160324 - DNA, 25 bp, Artificial
  Probe
tccaagaagaagcagaactgagaat

SEQ ID NO: 160325 - DNA, 25 bp, Artificial
  Probe
taacacaacttatatacgctaccag

SEQ ID NO: 160326 - DNA, 25 bp, Artificial
  Probe
ataaactccaagaagaagcagaact

SEQ ID NO: 160327 - DNA, 25 bp, Artificial
  Probe
gataaactccaagaagaagcagaac

SEQ ID NO: 160328 - DNA, 25 bp, Artificial
  Probe
tgataaactccaagaagaagcagaa

SEQ ID NO: 160329 - DNA, 25 bp, Artificial
  Probe
aagcagaactgagaatatggttata

SEQ ID NO: 160330 - DNA, 25 bp, Artificial
  Probe
gcacacaaatctgataaactccaag

SEQ ID NO: 160331 - DNA, 25 bp, Artificial
  Probe
caagcacacaaatctgataaactcc

SEQ ID NO: 160332 - DNA, 25 bp, Artificial
  Probe
ataacacaacttatatacgctacca

SEQ ID NO: 160333 - DNA, 25 bp, Artificial
  Probe
cacaagcacacctgataacattagg

SEQ ID NO: 160334 - DNA, 25 bp, Artificial
  Probe
agcacacaaatctgataaactccaa

SEQ ID NO: 160335 - DNA, 25 bp, Artificial
  Probe
aagcacacaaatctgataaactcca

SEQ ID NO: 160336 - DNA, 25 bp, Artificial
  Probe
caggtatgtcagacttactaatccc

SEQ ID NO: 160337 - DNA, 25 bp, Artificial
  Probe
ctccaagaagaagcagaactgagaa

SEQ ID NO: 160338 - DNA, 25 bp, Artificial
  Probe
ttcgtattcccaatatgtaagagca

SEQ ID NO: 160339 - DNA, 25 bp, Artificial
  Probe
atctgataaactccaagaagaagca

SEQ ID NO: 160340 - DNA, 25 bp, Artificial
  Probe
tcgtattcccaatatgtaagagcac

SEQ ID NO: 160341 - DNA, 25 bp, Artificial
  Probe
gcttcaccaggtatgtcagacttac

SEQ ID NO: 160342 - DNA, 25 bp, Artificial
  Probe
tagaacaggaaacaaactagaccag

SEQ ID NO: 160343 - DNA, 25 bp, Artificial
  Probe
gtaggctagaacaggaaacaaacta

SEQ ID NO: 160344 - DNA, 25 bp, Artificial
  Probe
aacaggaaacaaactagaccagaat

SEQ ID NO: 160345 - DNA, 25 bp, Artificial
  Probe
taaactccaagaagaagcagaactg

SEQ ID NO: 160346 - DNA, 25 bp, Artificial
  Probe
acaggaaacaaactagaccagaata

SEQ ID NO: 160347 - DNA, 25 bp, Artificial
  Probe
cacacaaatctgataaactccaaga

SEQ ID NO: 160348 - DNA, 25 bp, Artificial
  Probe
aactccaagaagaagcagaactgag

SEQ ID NO: 160349 - DNA, 25 bp, Artificial
  Probe
aatctgataaactccaagaagaagc

SEQ ID NO: 160350 - DNA, 25 bp, Artificial
  Probe
tttcgtattcccaatatgtaagagc

SEQ ID NO: 160351 - DNA, 25 bp, Artificial
  Probe
tcaagcacacaaatctgataaactc

SEQ ID NO: 160352 - DNA, 25 bp, Artificial
  Probe
gaacaggaaacaaactagaccagaa

SEQ ID NO: 160353 - DNA, 25 bp, Artificial
  Probe
attaaggatcactggctgaaacatc

SEQ ID NO: 160354 - DNA, 25 bp, Artificial
  Probe
cattaaggatcactggctgaaacat

SEQ ID NO: 160355 - DNA, 25 bp, Artificial
  Probe
ctccctaaagagtccagcatctaag

SEQ ID NO: 160356 - DNA, 25 bp, Artificial
  Probe
tccctaaagagtccagcatctaagc

SEQ ID NO: 160357 - DNA, 25 bp, Artificial
  Probe
taaagagtccagcatctaagcccag

SEQ ID NO: 160358 - DNA, 25 bp, Artificial
  Probe
ctaaagagtccagcatctaagccca

SEQ ID NO: 160359 - DNA, 25 bp, Artificial
  Probe
ccattaaggatcactggctgaaaca

SEQ ID NO: 160360 - DNA, 25 bp, Artificial
  Probe
accattaaggatcactggctgaaac

SEQ ID NO: 160361 - DNA, 25 bp, Artificial
  Probe
caccattaaggatcactggctgaaa

SEQ ID NO: 160362 - DNA, 25 bp, Artificial
  Probe
gacactaggctttctccagactcag

SEQ ID NO: 160363 - DNA, 25 bp, Artificial
  Probe
ccaccattaaggatcactggctgaa

SEQ ID NO: 160364 - DNA, 25 bp, Artificial
  Probe
cctaaagagtccagcatctaagccc

SEQ ID NO: 160365 - DNA, 25 bp, Artificial
  Probe
ccctaaagagtccagcatctaagcc

SEQ ID NO: 160366 - DNA, 25 bp, Artificial
  Probe
ccagactcagtggatctgaagaaga

SEQ ID NO: 160367 - DNA, 25 bp, Artificial
  Probe
gctccctaaagagtccagcatctaa

SEQ ID NO: 160368 - DNA, 25 bp, Artificial
  Probe
ttaaggatcactggctgaaacatcc

SEQ ID NO: 160369 - DNA, 25 bp, Artificial
  Probe
acactaggctttctccagactcagt

SEQ ID NO: 160370 - DNA, 25 bp, Artificial
  Probe
caagaagatgaggcccaccattaag

SEQ ID NO: 160371 - DNA, 25 bp, Artificial
  Probe
tccagactcagtggatctgaagaag

SEQ ID NO: 160372 - DNA, 25 bp, Artificial
  Probe
ctccagactcagtggatctgaagaa

SEQ ID NO: 160373 - DNA, 25 bp, Artificial
  Probe
ttctccagactcagtggatctgaag

SEQ ID NO: 160374 - DNA, 25 bp, Artificial
  Probe
acaagaagatgaggcccaccattaa

SEQ ID NO: 160375 - DNA, 25 bp, Artificial
  Probe
caatgtggacctgctccctaaagag

SEQ ID NO: 160376 - DNA, 25 bp, Artificial
  Probe
aggacactaggctttctccagactc

SEQ ID NO: 160377 - DNA, 25 bp, Artificial
  Probe
aagatgaggcccaccattaaggatc

SEQ ID NO: 160378 - DNA, 25 bp, Artificial
  Probe
gaagatgaggcccaccattaaggat

SEQ ID NO: 160379 - DNA, 25 bp, Artificial
  Probe
aagaagatgaggcccaccattaagg

SEQ ID NO: 160380 - DNA, 25 bp, Artificial
  Probe
tctccagactcagtggatctgaaga

SEQ ID NO: 160381 - DNA, 25 bp, Artificial
  Probe
tttctccagactcagtggatctgaa

SEQ ID NO: 160382 - DNA, 25 bp, Artificial
  Probe
cacaagaagatgaggcccaccatta

SEQ ID NO: 160383 - DNA, 25 bp, Artificial
  Probe
ctttctccagactcagtggatctga

SEQ ID NO: 160384 - DNA, 25 bp, Artificial
  Probe
taaggatcactggctgaaacatccg

SEQ ID NO: 160385 - DNA, 25 bp, Artificial
  Probe
agaagatgaggcccaccattaagga

SEQ ID NO: 160386 - DNA, 25 bp, Artificial
  Probe
gatgaggcccaccattaaggatcac

SEQ ID NO: 160387 - DNA, 25 bp, Artificial
  Probe
agatgaggcccaccattaaggatca

SEQ ID NO: 160388 - DNA, 25 bp, Artificial
  Probe
cactaggctttctccagactcagtg

SEQ ID NO: 160389 - DNA, 25 bp, Artificial
  Probe
taggctttctccagactcagtggat

SEQ ID NO: 160390 - DNA, 25 bp, Artificial
  Probe
gctttctccagactcagtggatctg

SEQ ID NO: 160391 - DNA, 25 bp, Artificial
  Probe
ctaggctttctccagactcagtgga

SEQ ID NO: 160392 - DNA, 25 bp, Artificial
  Probe
actactctacatccttcattcttcc

SEQ ID NO: 160393 - DNA, 25 bp, Artificial
  Probe
tcaactactctacatccttcattct

SEQ ID NO: 160394 - DNA, 25 bp, Artificial
  Probe
ccagatcaactactctacatccttc

SEQ ID NO: 160395 - DNA, 25 bp, Artificial
  Probe
caactactctacatccttcattctt

SEQ ID NO: 160396 - DNA, 25 bp, Artificial
  Probe
accagatcaactactctacatcctt

SEQ ID NO: 160397 - DNA, 25 bp, Artificial
  Probe
cagatcaactactctacatccttca

SEQ ID NO: 160398 - DNA, 25 bp, Artificial
  Probe
gaccagatcaactactctacatcct

SEQ ID NO: 160399 - DNA, 25 bp, Artificial
  Probe
atcaactactctacatccttcattc

SEQ ID NO: 160400 - DNA, 25 bp, Artificial
  Probe
aactactctacatccttcattcttc

SEQ ID NO: 160401 - DNA, 25 bp, Artificial
  Probe
agatcaactactctacatccttcat

SEQ ID NO: 160402 - DNA, 25 bp, Artificial
  Probe
gatcaactactctacatccttcatt

SEQ ID NO: 160403 - DNA, 25 bp, Artificial
  Probe
ccttcattcttccctttgtctctat

SEQ ID NO: 160404 - DNA, 25 bp, Artificial
  Probe
tctacatccttcattcttccctttg

SEQ ID NO: 160405 - DNA, 25 bp, Artificial
  Probe
ctctacatccttcattcttcccttt

SEQ ID NO: 160406 - DNA, 25 bp, Artificial
  Probe
tactctacatccttcattcttccct

SEQ ID NO: 160407 - DNA, 25 bp, Artificial
  Probe
ctactctacatccttcattcttccc

SEQ ID NO: 160408 - DNA, 25 bp, Artificial
  Probe
tccttcattcttccctttgtctcta

SEQ ID NO: 160409 - DNA, 25 bp, Artificial
  Probe
actctacatccttcattcttccctt

SEQ ID NO: 160410 - DNA, 25 bp, Artificial
  Probe
ccagggtagatagagagaaattcag

SEQ ID NO: 160411 - DNA, 25 bp, Artificial
  Probe
aaatgggtgtgattattgacttgaa

SEQ ID NO: 160412 - DNA, 25 bp, Artificial
  Probe
agatagagagaaattcagaaggtgg

SEQ ID NO: 160413 - DNA, 25 bp, Artificial
  Probe
aagtgaatttggagttaaacagagg

SEQ ID NO: 160414 - DNA, 25 bp, Artificial
  Probe
aatgggtgtgattattgacttgaat

SEQ ID NO: 160415 - DNA, 25 bp, Artificial
  Probe
atgtaggacttagatgagaaactgt

SEQ ID NO: 160416 - DNA, 25 bp, Artificial
  Probe
gatagagagaaattcagaaggtggc

SEQ ID NO: 160417 - DNA, 25 bp, Artificial
  Probe
agtgaatttggagttaaacagaggg

SEQ ID NO: 160418 - DNA, 25 bp, Artificial
  Probe
atccttcattcttccctttgtctct

SEQ ID NO: 160419 - DNA, 25 bp, Artificial
  Probe
catccttcattcttccctttgtctc

SEQ ID NO: 160420 - DNA, 25 bp, Artificial
  Probe
atgggtgtgattattgacttgaatt

SEQ ID NO: 160421 - DNA, 25 bp, Artificial
  Probe
cagggtagatagagagaaattcaga

SEQ ID NO: 160422 - DNA, 25 bp, Artificial
  Probe
cttcattcttccctttgtctctatt

SEQ ID NO: 160423 - DNA, 25 bp, Artificial
  Probe
ggaccagatcaactactctacatcc

SEQ ID NO: 160424 - DNA, 25 bp, Artificial
  Probe
atagagagaaattcagaaggtggca

SEQ ID NO: 160425 - DNA, 25 bp, Artificial
  Probe
cccagggtagatagagagaaattca

SEQ ID NO: 160426 - DNA, 25 bp, Artificial
  Probe
ggagagatggcttagcagttaagag

SEQ ID NO: 160427 - DNA, 25 bp, Artificial
  Probe
tgggtgtgattattgacttgaatta

SEQ ID NO: 160428 - DNA, 25 bp, Artificial
  Probe
tacatccttcattcttccctttgtc

SEQ ID NO: 160429 - DNA, 25 bp, Artificial
  Probe
ctacatccttcattcttccctttgt

SEQ ID NO: 160430 - DNA, 25 bp, Artificial
  Probe
agggtagatagagagaaattcagaa

SEQ ID NO: 160431 - DNA, 25 bp, Artificial
  Probe
tgtaggacttagatgagaaactgtc

SEQ ID NO: 160432 - DNA, 25 bp, Artificial
  Probe
tagagagaaattcagaaggtggcag

SEQ ID NO: 160433 - DNA, 25 bp, Artificial
  Probe
ggtagatagagagaaattcagaagg

SEQ ID NO: 160434 - DNA, 25 bp, Artificial
  Probe
gggtagatagagagaaattcagaag

SEQ ID NO: 160435 - DNA, 25 bp, Artificial
  Probe
gtaggacttagatgagaaactgtct

SEQ ID NO: 160436 - DNA, 25 bp, Artificial
  Probe
ctggagagatggcttagcagttaag

SEQ ID NO: 160437 - DNA, 25 bp, Artificial
  Probe
gtcaccaagaacatcactgagattg

SEQ ID NO: 160438 - DNA, 25 bp, Artificial
  Probe
agtcaccaagaacatcactgagatt

SEQ ID NO: 160439 - DNA, 25 bp, Artificial
  Probe
aagtcaccaagaacatcactgagat

SEQ ID NO: 160440 - DNA, 25 bp, Artificial
  Probe
ggacaaagtggatgaagagagatac

SEQ ID NO: 160441 - DNA, 25 bp, Artificial
  Probe
tggacaaagtggatgaagagagata

SEQ ID NO: 160442 - DNA, 25 bp, Artificial
  Probe
gaagggcatctctgaggaataaatt

SEQ ID NO: 160443 - DNA, 25 bp, Artificial
  Probe
caaagtggatgaagagagatacgac

SEQ ID NO: 160444 - DNA, 25 bp, Artificial
  Probe
gacaaagtggatgaagagagatacg

SEQ ID NO: 160445 - DNA, 25 bp, Artificial
  Probe
acaaagtggatgaagagagatacga

SEQ ID NO: 160446 - DNA, 25 bp, Artificial
  Probe
tgaagggcatctctgaggaataaat

SEQ ID NO: 160447 - DNA, 25 bp, Artificial
  Probe
gaagaaggaggacactgagaaggaa

SEQ ID NO: 160448 - DNA, 25 bp, Artificial
  Probe
aagaacatcactgagattgcagatc

SEQ ID NO: 160449 - DNA, 25 bp, Artificial
  Probe
ctgaagggcatctctgaggaataaa

SEQ ID NO: 160450 - DNA, 25 bp, Artificial
  Probe
tcaccaagaacatcactgagattgc

SEQ ID NO: 160451 - DNA, 25 bp, Artificial
  Probe
caagaacatcactgagattgcagat

SEQ ID NO: 160452 - DNA, 25 bp, Artificial
  Probe
aaagtggatgaagagagatacgacg

SEQ ID NO: 160453 - DNA, 25 bp, Artificial
  Probe
gtggacaaagtggatgaagagagat

SEQ ID NO: 160454 - DNA, 25 bp, Artificial
  Probe
gatgaagagagatacgacgtggaag

SEQ ID NO: 160455 - DNA, 25 bp, Artificial
  Probe
aaagtcaccaagaacatcactgaga

SEQ ID NO: 160456 - DNA, 25 bp, Artificial
  Probe
aagggcatctctgaggaataaattt

SEQ ID NO: 160457 - DNA, 25 bp, Artificial
  Probe
tctgaagggcatctctgaggaataa

SEQ ID NO: 160458 - DNA, 25 bp, Artificial
  Probe
gggcatctctgaggaataaatttct

SEQ ID NO: 160459 - DNA, 25 bp, Artificial
  Probe
agggcatctctgaggaataaatttc

SEQ ID NO: 160460 - DNA, 25 bp, Artificial
  Probe
ggcatctctgaggaataaatttctt

SEQ ID NO: 160461 - DNA, 25 bp, Artificial
  Probe
aagtggatgaagagagatacgacgt

SEQ ID NO: 160462 - DNA, 25 bp, Artificial
  Probe
aagaaggaggacactgagaaggaaa

SEQ ID NO: 160463 - DNA, 25 bp, Artificial
  Probe
tgaagaaggaggacactgagaagga

SEQ ID NO: 160464 - DNA, 25 bp, Artificial
  Probe
gtgtggacaaagtggatgaagagag

SEQ ID NO: 160465 - DNA, 25 bp, Artificial
  Probe
tgtggacaaagtggatgaagagaga

SEQ ID NO: 160466 - DNA, 25 bp, Artificial
  Probe
aatctgcaatcccattctctacctc

SEQ ID NO: 160467 - DNA, 25 bp, Artificial
  Probe
ccaagaacatcactgagattgcaga

SEQ ID NO: 160468 - DNA, 25 bp, Artificial
  Probe
ctctgaagggcatctctgaggaata

SEQ ID NO: 160469 - DNA, 25 bp, Artificial
  Probe
ggatgaagagagatacgacgtggaa

SEQ ID NO: 160470 - DNA, 25 bp, Artificial
  Probe
agtggatgaagagagatacgacgtg

SEQ ID NO: 160471 - DNA, 25 bp, Artificial
  Probe
gaatatcgatgcactaagtggaatg

SEQ ID NO: 160472 - DNA, 25 bp, Artificial
  Probe
agaatatcgatgcactaagtggaat

SEQ ID NO: 160473 - DNA, 25 bp, Artificial
  Probe
aagaatatcgatgcactaagtggaa

SEQ ID NO: 160474 - DNA, 25 bp, Artificial
  Probe
caagaatatcgatgcactaagtgga

SEQ ID NO: 160475 - DNA, 25 bp, Artificial
  Probe
accaagaacatcactgagattgcag

SEQ ID NO: 160476 - DNA, 25 bp, Artificial
  Probe
caccaagaacatcactgagattgca

SEQ ID NO: 160477 - DNA, 25 bp, Artificial
  Probe
gcatctctgaggaataaatttcttt

SEQ ID NO: 160478 - DNA, 25 bp, Artificial
  Probe
aatatcgatgcactaagtggaatgg

SEQ ID NO: 160479 - DNA, 25 bp, Artificial
  Probe
attctctacctctggagatcagcat

SEQ ID NO: 160480 - DNA, 25 bp, Artificial
  Probe
gtgaagaaggaggacactgagaagg

SEQ ID NO: 160481 - DNA, 25 bp, Artificial
  Probe
ggtgaagaaggaggacactgagaag

SEQ ID NO: 160482 - DNA, 25 bp, Artificial
  Probe
gaggatacactcacctttgaagagg

SEQ ID NO: 160483 - DNA, 25 bp, Artificial
  Probe
cttcctatgtgtcctccctcacttc

SEQ ID NO: 160484 - DNA, 25 bp, Artificial
  Probe
aggatacactcacctttgaagaggc

SEQ ID NO: 160485 - DNA, 25 bp, Artificial
  Probe
tgaggatacactcacctttgaagag

SEQ ID NO: 160486 - DNA, 25 bp, Artificial
  Probe
ctgaggatacactcacctttgaaga

SEQ ID NO: 160487 - DNA, 25 bp, Artificial
  Probe
ccttgatgtcaacatctggtgctag

SEQ ID NO: 160488 - DNA, 25 bp, Artificial
  Probe
acttcctatgtgtcctccctcactt

SEQ ID NO: 160489 - DNA, 25 bp, Artificial
  Probe
cctgaggatacactcacctttgaag

SEQ ID NO: 160490 - DNA, 25 bp, Artificial
  Probe
tatgtgtcctccctcacttcccaat

SEQ ID NO: 160491 - DNA, 25 bp, Artificial
  Probe
gacttcctatgtgtcctccctcact

SEQ ID NO: 160492 - DNA, 25 bp, Artificial
  Probe
ttcctatgtgtcctccctcacttcc

SEQ ID NO: 160493 - DNA, 25 bp, Artificial
  Probe
gcctgaggatacactcacctttgaa

SEQ ID NO: 160494 - DNA, 25 bp, Artificial
  Probe
cccttgatgtcaacatctggtgcta

SEQ ID NO: 160495 - DNA, 25 bp, Artificial
  Probe
ggatacactcacctttgaagaggcc

SEQ ID NO: 160496 - DNA, 25 bp, Artificial
  Probe
ctgcctgaggatacactcacctttg

SEQ ID NO: 160497 - DNA, 25 bp, Artificial
  Probe
ttaatgggagccccttgatgtcaac

SEQ ID NO: 160498 - DNA, 25 bp, Artificial
  Probe
gttaatgggagccccttgatgtcaa

SEQ ID NO: 160499 - DNA, 25 bp, Artificial
  Probe
tgaagagcagatagcaatatacgat

SEQ ID NO: 160500 - DNA, 25 bp, Artificial
  Probe
gaagagcagatagcaatatacgatg

SEQ ID NO: 160501 - DNA, 25 bp, Artificial
  Probe
ttcaattcattaagcagaagcatgg

SEQ ID NO: 160502 - DNA, 25 bp, Artificial
  Probe
ctgaagagcagatagcaatatacga

SEQ ID NO: 160503 - DNA, 25 bp, Artificial
  Probe
ctattcaattcattaagcagaagca

SEQ ID NO: 160504 - DNA, 25 bp, Artificial
  Probe
attcaattcattaagcagaagcatg

SEQ ID NO: 160505 - DNA, 25 bp, Artificial
  Probe
tctattcaattcattaagcagaagc

SEQ ID NO: 160506 - DNA, 25 bp, Artificial
  Probe
tattcaattcattaagcagaagcat

SEQ ID NO: 160507 - DNA, 25 bp, Artificial
  Probe
atttgtggaagggatgactatgttg

SEQ ID NO: 160508 - DNA, 25 bp, Artificial
  Probe
catttgtggaagggatgactatgtt

SEQ ID NO: 160509 - DNA, 25 bp, Artificial
  Probe
ctaaacatcacttattaaccctgga

SEQ ID NO: 160510 - DNA, 25 bp, Artificial
  Probe
tctaaacatcacttattaaccctgg

SEQ ID NO: 160511 - DNA, 25 bp, Artificial
  Probe
tcaccactgtctaaacatcacttat

SEQ ID NO: 160512 - DNA, 25 bp, Artificial
  Probe
atcaccactgtctaaacatcactta

SEQ ID NO: 160513 - DNA, 25 bp, Artificial
  Probe
aaacatcacttattaaccctggatc

SEQ ID NO: 160514 - DNA, 25 bp, Artificial
  Probe
ggaagataccatcgaggttactaat

SEQ ID NO: 160515 - DNA, 25 bp, Artificial
  Probe
caccactgtctaaacatcacttatt

SEQ ID NO: 160516 - DNA, 25 bp, Artificial
  Probe
aaactgttcatttgtggaagggatg

SEQ ID NO: 160517 - DNA, 25 bp, Artificial
  Probe
agataccatcgaggttactaatgaa

SEQ ID NO: 160518 - DNA, 25 bp, Artificial
  Probe
aagataccatcgaggttactaatga

SEQ ID NO: 160519 - DNA, 25 bp, Artificial
  Probe
aagagcagatagcaatatacgatgc

SEQ ID NO: 160520 - DNA, 25 bp, Artificial
  Probe
gaagataccatcgaggttactaatg

SEQ ID NO: 160521 - DNA, 25 bp, Artificial
  Probe
gatcaccactgtctaaacatcactt

SEQ ID NO: 160522 - DNA, 25 bp, Artificial
  Probe
taaacatcacttattaaccctggat

SEQ ID NO: 160523 - DNA, 25 bp, Artificial
  Probe
gtctaaacatcacttattaaccctg

SEQ ID NO: 160524 - DNA, 25 bp, Artificial
  Probe
tcaattcattaagcagaagcatggg

SEQ ID NO: 160525 - DNA, 25 bp, Artificial
  Probe
tttgtggaagggatgactatgttgg

SEQ ID NO: 160526 - DNA, 25 bp, Artificial
  Probe
aatgccagaatctattcaattcatt

SEQ ID NO: 160527 - DNA, 25 bp, Artificial
  Probe
accactgtctaaacatcacttatta

SEQ ID NO: 160528 - DNA, 25 bp, Artificial
  Probe
tgtctaaacatcacttattaaccct

SEQ ID NO: 160529 - DNA, 25 bp, Artificial
  Probe
tgccagaatctattcaattcattaa

SEQ ID NO: 160530 - DNA, 25 bp, Artificial
  Probe
ctgtctaaacatcacttattaaccc

SEQ ID NO: 160531 - DNA, 25 bp, Artificial
  Probe
agagcagatagcaatatacgatgcc

SEQ ID NO: 160532 - DNA, 25 bp, Artificial
  Probe
atgccagaatctattcaattcatta

SEQ ID NO: 160533 - DNA, 25 bp, Artificial
  Probe
tctgaagagcagatagcaatatacg

SEQ ID NO: 160534 - DNA, 25 bp, Artificial
  Probe
gagacacacttaccacttggctagt

SEQ ID NO: 160535 - DNA, 25 bp, Artificial
  Probe
aatccaagactatgagaaaatgcca

SEQ ID NO: 160536 - DNA, 25 bp, Artificial
  Probe
aaatccaagactatgagaaaatgcc

SEQ ID NO: 160537 - DNA, 25 bp, Artificial
  Probe
catttgctggtcaggagactttaaa

SEQ ID NO: 160538 - DNA, 25 bp, Artificial
  Probe
caagactatgagaaaatgccagaat

SEQ ID NO: 160539 - DNA, 25 bp, Artificial
  Probe
atccaagactatgagaaaatgccag

SEQ ID NO: 160540 - DNA, 25 bp, Artificial
  Probe
aagactatgagaaaatgccagaatc

SEQ ID NO: 160541 - DNA, 25 bp, Artificial
  Probe
ccaagactatgagaaaatgccagaa

SEQ ID NO: 160542 - DNA, 25 bp, Artificial
  Probe
ttcatttgtggaagggatgactatg

SEQ ID NO: 160543 - DNA, 25 bp, Artificial
  Probe
gttcatttgtggaagggatgactat

SEQ ID NO: 160544 - DNA, 25 bp, Artificial
  Probe
tggactactatgctactgctctcaa

SEQ ID NO: 160545 - DNA, 25 bp, Artificial
  Probe
ctatgctggatgccattctatgtag

SEQ ID NO: 160546 - DNA, 25 bp, Artificial
  Probe
ctggactactatgctactgctctca

SEQ ID NO: 160547 - DNA, 25 bp, Artificial
  Probe
tatgctggatgccattctatgtagt

SEQ ID NO: 160548 - DNA, 25 bp, Artificial
  Probe
gattctctatggtttcctctcagac

SEQ ID NO: 160549 - DNA, 25 bp, Artificial
  Probe
attctctatggtttcctctcagaca

SEQ ID NO: 160550 - DNA, 25 bp, Artificial
  Probe
ctatggtttcctctcagacaacttc

SEQ ID NO: 160551 - DNA, 25 bp, Artificial
  Probe
ttctctatggtttcctctcagacaa

SEQ ID NO: 160552 - DNA, 25 bp, Artificial
  Probe
tctatggtttcctctcagacaactt

SEQ ID NO: 160553 - DNA, 25 bp, Artificial
  Probe
ggactactatgctactgctctcaaa

SEQ ID NO: 160554 - DNA, 25 bp, Artificial
  Probe
cgattctctatggtttcctctcaga

SEQ ID NO: 160555 - DNA, 25 bp, Artificial
  Probe
ctttcaccaagaccactactttctg

SEQ ID NO: 160556 - DNA, 25 bp, Artificial
  Probe
ctctatggtttcctctcagacaact

SEQ ID NO: 160557 - DNA, 25 bp, Artificial
  Probe
tctctatggtttcctctcagacaac

SEQ ID NO: 160558 - DNA, 25 bp, Artificial
  Probe
ttctatgtagtgcagcttctgaatc

SEQ ID NO: 160559 - DNA, 25 bp, Artificial
  Probe
cattctatgtagtgcagcttctgaa

SEQ ID NO: 160560 - DNA, 25 bp, Artificial
  Probe
cctggactactatgctactgctctc

SEQ ID NO: 160561 - DNA, 25 bp, Artificial
  Probe
ccgattctctatggtttcctctcag

SEQ ID NO: 160562 - DNA, 25 bp, Artificial
  Probe
ctatgtagtgcagcttctgaatctg

SEQ ID NO: 160563 - DNA, 25 bp, Artificial
  Probe
tctatgtagtgcagcttctgaatct

SEQ ID NO: 160564 - DNA, 25 bp, Artificial
  Probe
tatggtttcctctcagacaacttcc

SEQ ID NO: 160565 - DNA, 25 bp, Artificial
  Probe
tttcaccaagaccactactttctga

SEQ ID NO: 160566 - DNA, 25 bp, Artificial
  Probe
attctatgtagtgcagcttctgaat

SEQ ID NO: 160567 - DNA, 25 bp, Artificial
  Probe
gctatgctggatgccattctatgta

SEQ ID NO: 160568 - DNA, 25 bp, Artificial
  Probe
tatgtagtgcagcttctgaatctgt

SEQ ID NO: 160569 - DNA, 25 bp, Artificial
  Probe
atgctggatgccattctatgtagtg

SEQ ID NO: 160570 - DNA, 25 bp, Artificial
  Probe
tcaccaagaccactactttctgaaa

SEQ ID NO: 160571 - DNA, 25 bp, Artificial
  Probe
cctttcaccaagaccactactttct

SEQ ID NO: 160572 - DNA, 25 bp, Artificial
  Probe
gaagatcactaggctcgtgctaatg

SEQ ID NO: 160573 - DNA, 25 bp, Artificial
  Probe
agaagatcactaggctcgtgctaat

SEQ ID NO: 160574 - DNA, 25 bp, Artificial
  Probe
ccattctatgtagtgcagcttctga

SEQ ID NO: 160575 - DNA, 25 bp, Artificial
  Probe
atgtagtgcagcttctgaatctgtt

SEQ ID NO: 160576 - DNA, 25 bp, Artificial
  Probe
aagaagatcactaggctcgtgctaa

SEQ ID NO: 160577 - DNA, 25 bp, Artificial
  Probe
cccgattctctatggtttcctctca

SEQ ID NO: 160578 - DNA, 25 bp, Artificial
  Probe
actactatgctactgctctcaaaag

SEQ ID NO: 160579 - DNA, 25 bp, Artificial
  Probe
gactactatgctactgctctcaaaa

SEQ ID NO: 160580 - DNA, 25 bp, Artificial
  Probe
ccctttcaccaagaccactactttc

SEQ ID NO: 160581 - DNA, 25 bp, Artificial
  Probe
caagaaaactcctgttgtcactaag

SEQ ID NO: 160582 - DNA, 25 bp, Artificial
  Probe
tcaagaaaactcctgttgtcactaa

SEQ ID NO: 160583 - DNA, 25 bp, Artificial
  Probe
ttcaagaaaactcctgttgtcacta

SEQ ID NO: 160584 - DNA, 25 bp, Artificial
  Probe
gaccactactttctgaaaaccattt

SEQ ID NO: 160585 - DNA, 25 bp, Artificial
  Probe
tccctttcaccaagaccactacttt

SEQ ID NO: 160586 - DNA, 25 bp, Artificial
  Probe
gtgctatgctggatgccattctatg

SEQ ID NO: 160587 - DNA, 25 bp, Artificial
  Probe
aacttcaagaaaactcctgttgtca

SEQ ID NO: 160588 - DNA, 25 bp, Artificial
  Probe
actctcaagccagcaacttcaagaa

SEQ ID NO: 160589 - DNA, 25 bp, Artificial
  Probe
gagaaagcaagatttatagcccaag

SEQ ID NO: 160590 - DNA, 25 bp, Artificial
  Probe
ccaaccaaagagaaagcaagattta

SEQ ID NO: 160591 - DNA, 25 bp, Artificial
  Probe
gatggtgagagtttgttagtttgac

SEQ ID NO: 160592 - DNA, 25 bp, Artificial
  Probe
agatggtgagagtttgttagtttga

SEQ ID NO: 160593 - DNA, 25 bp, Artificial
  Probe
cagatggtgagagtttgttagtttg

SEQ ID NO: 160594 - DNA, 25 bp, Artificial
  Probe
gaaagcaagatttatagcccaagtc

SEQ ID NO: 160595 - DNA, 25 bp, Artificial
  Probe
agagaaagcaagatttatagcccaa

SEQ ID NO: 160596 - DNA, 25 bp, Artificial
  Probe
aagagaaagcaagatttatagccca

SEQ ID NO: 160597 - DNA, 25 bp, Artificial
  Probe
agaaagcaagatttatagcccaagt

SEQ ID NO: 160598 - DNA, 25 bp, Artificial
  Probe
aagcaagatttatagcccaagtcat

SEQ ID NO: 160599 - DNA, 25 bp, Artificial
  Probe
aaagcaagatttatagcccaagtca

SEQ ID NO: 160600 - DNA, 25 bp, Artificial
  Probe
aaagagaaagcaagatttatagccc

SEQ ID NO: 160601 - DNA, 25 bp, Artificial
  Probe
attgctgagaactttaaggtctttg

SEQ ID NO: 160602 - DNA, 25 bp, Artificial
  Probe
ttgctgagaactttaaggtctttga

SEQ ID NO: 160603 - DNA, 25 bp, Artificial
  Probe
tccaaccaaagagaaagcaagattt

SEQ ID NO: 160604 - DNA, 25 bp, Artificial
  Probe
cgtattgctgagaactttaaggtct

SEQ ID NO: 160605 - DNA, 25 bp, Artificial
  Probe
atggtgagagtttgttagtttgacg

SEQ ID NO: 160606 - DNA, 25 bp, Artificial
  Probe
ccagatggtgagagtttgttagttt

SEQ ID NO: 160607 - DNA, 25 bp, Artificial
  Probe
caaagagaaagcaagatttatagcc

SEQ ID NO: 160608 - DNA, 25 bp, Artificial
  Probe
ccaaagagaaagcaagatttatagc

SEQ ID NO: 160609 - DNA, 25 bp, Artificial
  Probe
gtattgctgagaactttaaggtctt

SEQ ID NO: 160610 - DNA, 25 bp, Artificial
  Probe
ttccaaccaaagagaaagcaagatt

SEQ ID NO: 160611 - DNA, 25 bp, Artificial
  Probe
caaccaaagagaaagcaagatttat

SEQ ID NO: 160612 - DNA, 25 bp, Artificial
  Probe
tattgctgagaactttaaggtcttt

SEQ ID NO: 160613 - DNA, 25 bp, Artificial
  Probe
aactttaaggtctttgactttgagc

SEQ ID NO: 160614 - DNA, 25 bp, Artificial
  Probe
agcaagatttatagcccaagtcatg

SEQ ID NO: 160615 - DNA, 25 bp, Artificial
  Probe
actctactcagctacaacaggaact

SEQ ID NO: 160616 - DNA, 25 bp, Artificial
  Probe
cactctactcagctacaacaggaac

SEQ ID NO: 160617 - DNA, 25 bp, Artificial
  Probe
gctgagaactttaaggtctttgact

SEQ ID NO: 160618 - DNA, 25 bp, Artificial
  Probe
ctgagaactttaaggtctttgactt

SEQ ID NO: 160619 - DNA, 25 bp, Artificial
  Probe
tgctgagaactttaaggtctttgac

SEQ ID NO: 160620 - DNA, 25 bp, Artificial
  Probe
agaactttaaggtctttgactttga

SEQ ID NO: 160621 - DNA, 25 bp, Artificial
  Probe
tgagaactttaaggtctttgacttt

SEQ ID NO: 160622 - DNA, 25 bp, Artificial
  Probe
ctctactcagctacaacaggaactg

SEQ ID NO: 160623 - DNA, 25 bp, Artificial
  Probe
gaactttaaggtctttgactttgag

SEQ ID NO: 160624 - DNA, 25 bp, Artificial
  Probe
gagaactttaaggtctttgactttg

SEQ ID NO: 160625 - DNA, 25 bp, Artificial
  Probe
caagatttatagcccaagtcatgcc

SEQ ID NO: 160626 - DNA, 25 bp, Artificial
  Probe
accaaagagaaagcaagatttatag

SEQ ID NO: 160627 - DNA, 25 bp, Artificial
  Probe
tttgttagtttgacgtagaatgtgg

SEQ ID NO: 160628 - DNA, 25 bp, Artificial
  Probe
tgagagtttgttagtttgacgtaga

SEQ ID NO: 160629 - DNA, 25 bp, Artificial
  Probe
gtgagagtttgttagtttgacgtag

SEQ ID NO: 160630 - DNA, 25 bp, Artificial
  Probe
ttgttagtttgacgtagaatgtgga

SEQ ID NO: 160631 - DNA, 25 bp, Artificial
  Probe
gtcatgccactaacacttaaatttg

SEQ ID NO: 160632 - DNA, 25 bp, Artificial
  Probe
catgccactaacacttaaatttgag

SEQ ID NO: 160633 - DNA, 25 bp, Artificial
  Probe
aagatttatagcccaagtcatgcca

SEQ ID NO: 160634 - DNA, 25 bp, Artificial
  Probe
actacacagaatgtcacaacttaga

SEQ ID NO: 160635 - DNA, 25 bp, Artificial
  Probe
aactacacagaatgtcacaacttag

SEQ ID NO: 160636 - DNA, 25 bp, Artificial
  Probe
ctacacagaatgtcacaacttagat

SEQ ID NO: 160637 - DNA, 25 bp, Artificial
  Probe
acacagaatgtcacaacttagatat

SEQ ID NO: 160638 - DNA, 25 bp, Artificial
  Probe
cagtgttacttccttagcttaccaa

SEQ ID NO: 160639 - DNA, 25 bp, Artificial
  Probe
tacacagaatgtcacaacttagata

SEQ ID NO: 160640 - DNA, 25 bp, Artificial
  Probe
gaaatctgttggctactgtaaggtc

SEQ ID NO: 160641 - DNA, 25 bp, Artificial
  Probe
ttgaaactacacagaatgtcacaac

SEQ ID NO: 160642 - DNA, 25 bp, Artificial
  Probe
gaaactacacagaatgtcacaactt

SEQ ID NO: 160643 - DNA, 25 bp, Artificial
  Probe
cttgaaactacacagaatgtcacaa

SEQ ID NO: 160644 - DNA, 25 bp, Artificial
  Probe
tcttgaaactacacagaatgtcaca

SEQ ID NO: 160645 - DNA, 25 bp, Artificial
  Probe
tgaaactacacagaatgtcacaact

SEQ ID NO: 160646 - DNA, 25 bp, Artificial
  Probe
cccataagtgcttaacatttgttga

SEQ ID NO: 160647 - DNA, 25 bp, Artificial
  Probe
gcttaacatttgttgaagagggaaa

SEQ ID NO: 160648 - DNA, 25 bp, Artificial
  Probe
aagtgcttaacatttgttgaagagg

SEQ ID NO: 160649 - DNA, 25 bp, Artificial
  Probe
aggaaatctgttggctactgtaagg

SEQ ID NO: 160650 - DNA, 25 bp, Artificial
  Probe
cttcaacaaatgtccttcaacccat

SEQ ID NO: 160651 - DNA, 25 bp, Artificial
  Probe
tgcttaacatttgttgaagagggaa

SEQ ID NO: 160652 - DNA, 25 bp, Artificial
  Probe
aaactacacagaatgtcacaactta

SEQ ID NO: 160653 - DNA, 25 bp, Artificial
  Probe
ccataagtgcttaacatttgttgaa

SEQ ID NO: 160654 - DNA, 25 bp, Artificial
  Probe
gcagtgttacttccttagcttacca

SEQ ID NO: 160655 - DNA, 25 bp, Artificial
  Probe
caggaaatctgttggctactgtaag

SEQ ID NO: 160656 - DNA, 25 bp, Artificial
  Probe
aaatctgttggctactgtaaggtcc

SEQ ID NO: 160657 - DNA, 25 bp, Artificial
  Probe
ggaaatctgttggctactgtaaggt

SEQ ID NO: 160658 - DNA, 25 bp, Artificial
  Probe
gttacttccttagcttaccaaatgt

SEQ ID NO: 160659 - DNA, 25 bp, Artificial
  Probe
tgttacttccttagcttaccaaatg

SEQ ID NO: 160660 - DNA, 25 bp, Artificial
  Probe
gtgttacttccttagcttaccaaat

SEQ ID NO: 160661 - DNA, 25 bp, Artificial
  Probe
gtgcttaacatttgttgaagaggga

SEQ ID NO: 160662 - DNA, 25 bp, Artificial
  Probe
agtgcttaacatttgttgaagaggg

SEQ ID NO: 160663 - DNA, 25 bp, Artificial
  Probe
taagtgcttaacatttgttgaagag

SEQ ID NO: 160664 - DNA, 25 bp, Artificial
  Probe
agtgttacttccttagcttaccaaa

SEQ ID NO: 160665 - DNA, 25 bp, Artificial
  Probe
cagcagtgttacttccttagcttac

SEQ ID NO: 160666 - DNA, 25 bp, Artificial
  Probe
tacttccttagcttaccaaatgttg

SEQ ID NO: 160667 - DNA, 25 bp, Artificial
  Probe
ttacttccttagcttaccaaatgtt

SEQ ID NO: 160668 - DNA, 25 bp, Artificial
  Probe
caaatgtccttcaacccattagttt

SEQ ID NO: 160669 - DNA, 25 bp, Artificial
  Probe
cacagaatgtcacaacttagatatc

SEQ ID NO: 160670 - DNA, 25 bp, Artificial
  Probe
caacaaatgtccttcaacccattag

SEQ ID NO: 160671 - DNA, 25 bp, Artificial
  Probe
acaaatgtccttcaacccattagtt

SEQ ID NO: 160672 - DNA, 25 bp, Artificial
  Probe
aacaaatgtccttcaacccattagt

SEQ ID NO: 160673 - DNA, 25 bp, Artificial
  Probe
tcaacaaatgtccttcaacccatta

SEQ ID NO: 160674 - DNA, 25 bp, Artificial
  Probe
acttcaacaaatgtccttcaaccca

SEQ ID NO: 160675 - DNA, 25 bp, Artificial
  Probe
gacttcaacaaatgtccttcaaccc

SEQ ID NO: 160676 - DNA, 25 bp, Artificial
  Probe
cataagtgcttaacatttgttgaag

SEQ ID NO: 160677 - DNA, 25 bp, Artificial
  Probe
ttcttgaaactacacagaatgtcac

SEQ ID NO: 160678 - DNA, 25 bp, Artificial
  Probe
ataagtgcttaacatttgttgaaga

SEQ ID NO: 160679 - DNA, 25 bp, Artificial
  Probe
ccaagttcaatatgttcactgtgcg

SEQ ID NO: 160680 - DNA, 25 bp, Artificial
  Probe
caagaccaaatacaatgccctcaag

SEQ ID NO: 160681 - DNA, 25 bp, Artificial
  Probe
aagaccaaatacaatgccctcaaga

SEQ ID NO: 160682 - DNA, 25 bp, Artificial
  Probe
agaccaaatacaatgccctcaagac

SEQ ID NO: 160683 - DNA, 25 bp, Artificial
  Probe
cccaagttcaatatgttcactgtgc

SEQ ID NO: 160684 - DNA, 25 bp, Artificial
  Probe
aagagaacatccaggtcctgaagat

SEQ ID NO: 160685 - DNA, 25 bp, Artificial
  Probe
agagaacatccaggtcctgaagatc

SEQ ID NO: 160686 - DNA, 25 bp, Artificial
  Probe
gaagagaacatccaggtcctgaaga

SEQ ID NO: 160687 - DNA, 25 bp, Artificial
  Probe
gaagatcgcacaggtctttaagaac

SEQ ID NO: 160688 - DNA, 25 bp, Artificial
  Probe
gaccaaatacaatgccctcaagacc

SEQ ID NO: 160689 - DNA, 25 bp, Artificial
  Probe
aaccccaagttcaatatgttcactg

SEQ ID NO: 160690 - DNA, 25 bp, Artificial
  Probe
tgaagatcgcacaggtctttaagaa

SEQ ID NO: 160691 - DNA, 25 bp, Artificial
  Probe
caatgacatcactctgctgaagctg

SEQ ID NO: 160692 - DNA, 25 bp, Artificial
  Probe
ctgaagatcgcacaggtctttaaga

SEQ ID NO: 160693 - DNA, 25 bp, Artificial
  Probe
ccccaagttcaatatgttcactgtg

SEQ ID NO: 160694 - DNA, 25 bp, Artificial
  Probe
accccaagttcaatatgttcactgt

SEQ ID NO: 160695 - DNA, 25 bp, Artificial
  Probe
aagatcgcacaggtctttaagaacc

SEQ ID NO: 160696 - DNA, 25 bp, Artificial
  Probe
gagaacatccaggtcctgaagatcg

SEQ ID NO: 160697 - DNA, 25 bp, Artificial
  Probe
cgaagagaacatccaggtcctgaag

SEQ ID NO: 160698 - DNA, 25 bp, Artificial
  Probe
cacttccactcctgctgtgtattcc

SEQ ID NO: 160699 - DNA, 25 bp, Artificial
  Probe
ccacttccactcctgctgtgtattc

SEQ ID NO: 160700 - DNA, 25 bp, Artificial
  Probe
caagttcaatatgttcactgtgcgc

SEQ ID NO: 160701 - DNA, 25 bp, Artificial
  Probe
accaaatacaatgccctcaagaccc

SEQ ID NO: 160702 - DNA, 25 bp, Artificial
  Probe
aatgacatcactctgctgaagctgg

SEQ ID NO: 160703 - DNA, 25 bp, Artificial
  Probe
cacaggtctttaagaaccccaagtt

SEQ ID NO: 160704 - DNA, 25 bp, Artificial
  Probe
tctacccaacgtcgatgatgacttc

SEQ ID NO: 160705 - DNA, 25 bp, Artificial
  Probe
aagaaccccaagttcaatatgttca

SEQ ID NO: 160706 - DNA, 25 bp, Artificial
  Probe
agatcgcacaggtctttaagaaccc

SEQ ID NO: 160707 - DNA, 25 bp, Artificial
  Probe
gcaagaccaaatacaatgccctcaa

SEQ ID NO: 160708 - DNA, 25 bp, Artificial
  Probe
taagaaccccaagttcaatatgttc

SEQ ID NO: 160709 - DNA, 25 bp, Artificial
  Probe
gtctttaagaaccccaagttcaata

SEQ ID NO: 160710 - DNA, 25 bp, Artificial
  Probe
ggtctttaagaaccccaagttcaat

SEQ ID NO: 160711 - DNA, 25 bp, Artificial
  Probe
gaaccccaagttcaatatgttcact

SEQ ID NO: 160712 - DNA, 25 bp, Artificial
  Probe
agaaccccaagttcaatatgttcac

SEQ ID NO: 160713 - DNA, 25 bp, Artificial
  Probe
gtctacccaacgtcgatgatgactt

SEQ ID NO: 160714 - DNA, 25 bp, Artificial
  Probe
ttaagaaccccaagttcaatatgtt

SEQ ID NO: 160715 - DNA, 25 bp, Artificial
  Probe
tttaagaaccccaagttcaatatgt

SEQ ID NO: 160716 - DNA, 25 bp, Artificial
  Probe
ctttaagaaccccaagttcaatatg

SEQ ID NO: 160717 - DNA, 25 bp, Artificial
  Probe
tctttaagaaccccaagttcaatat

SEQ ID NO: 160718 - DNA, 25 bp, Artificial
  Probe
aggtctttaagaaccccaagttcaa

SEQ ID NO: 160719 - DNA, 25 bp, Artificial
  Probe
aaatacaatgccctcaagacccctg

SEQ ID NO: 160720 - DNA, 25 bp, Artificial
  Probe
caaatacaatgccctcaagacccct

SEQ ID NO: 160721 - DNA, 25 bp, Artificial
  Probe
caggtctttaagaaccccaagttca

SEQ ID NO: 160722 - DNA, 25 bp, Artificial
  Probe
acaggtctttaagaaccccaagttc

SEQ ID NO: 160723 - DNA, 25 bp, Artificial
  Probe
ctacccaacgtcgatgatgacttcc

SEQ ID NO: 160724 - DNA, 25 bp, Artificial
  Probe
ttgagtgtgaggcagtatagagtca

SEQ ID NO: 160725 - DNA, 25 bp, Artificial
  Probe
aagaacaaccacttcacaggatctc

SEQ ID NO: 160726 - DNA, 25 bp, Artificial
  Probe
tgagtgtgaggcagtatagagtcag

SEQ ID NO: 160727 - DNA, 25 bp, Artificial
  Probe
gtagtcttggctccatcactcaatc

SEQ ID NO: 160728 - DNA, 25 bp, Artificial
  Probe
caagaacaaccacttcacaggatct

SEQ ID NO: 160729 - DNA, 25 bp, Artificial
  Probe
tagtcttggctccatcactcaatca

SEQ ID NO: 160730 - DNA, 25 bp, Artificial
  Probe
tgtagtcttggctccatcactcaat

SEQ ID NO: 160731 - DNA, 25 bp, Artificial
  Probe
gagtgtgaggcagtatagagtcagg

SEQ ID NO: 160732 - DNA, 25 bp, Artificial
  Probe
ccaagaacaaccacttcacaggatc

SEQ ID NO: 160733 - DNA, 25 bp, Artificial
  Probe
aagcagttggaactcctgtagtctt

SEQ ID NO: 160734 - DNA, 25 bp, Artificial
  Probe
caaagcacaaatctactggagatgt

SEQ ID NO: 160735 - DNA, 25 bp, Artificial
  Probe
ctgtagtcttggctccatcactcaa

SEQ ID NO: 160736 - DNA, 25 bp, Artificial
  Probe
tgtgtgccaaattccaaggtcttag

SEQ ID NO: 160737 - DNA, 25 bp, Artificial
  Probe
ctcagcaccaaagcacaaatctact

SEQ ID NO: 160738 - DNA, 25 bp, Artificial
  Probe
ccaaagcacaaatctactggagatg

SEQ ID NO: 160739 - DNA, 25 bp, Artificial
  Probe
agaacaaccacttcacaggatctcc

SEQ ID NO: 160740 - DNA, 25 bp, Artificial
  Probe
cagtatagagtcagggcctttaatg

SEQ ID NO: 160741 - DNA, 25 bp, Artificial
  Probe
accaaagcacaaatctactggagat

SEQ ID NO: 160742 - DNA, 25 bp, Artificial
  Probe
gtgtgtgccaaattccaaggtctta

SEQ ID NO: 160743 - DNA, 25 bp, Artificial
  Probe
gaactcctgtagtcttggctccatc

SEQ ID NO: 160744 - DNA, 25 bp, Artificial
  Probe
agggcctttaatgatataattcgtg

SEQ ID NO: 160745 - DNA, 25 bp, Artificial
  Probe
cagggcctttaatgatataattcgt

SEQ ID NO: 160746 - DNA, 25 bp, Artificial
  Probe
catgtggaagacaggaagtcagact

SEQ ID NO: 160747 - DNA, 25 bp, Artificial
  Probe
gtatagagtcagggcctttaatgat

SEQ ID NO: 160748 - DNA, 25 bp, Artificial
  Probe
agcagttggaactcctgtagtcttg

SEQ ID NO: 160749 - DNA, 25 bp, Artificial
  Probe
agtatagagtcagggcctttaatga

SEQ ID NO: 160750 - DNA, 25 bp, Artificial
  Probe
caccaaagcacaaatctactggaga

SEQ ID NO: 160751 - DNA, 25 bp, Artificial
  Probe
agagtcagggcctttaatgatataa

SEQ ID NO: 160752 - DNA, 25 bp, Artificial
  Probe
tcagggcctttaatgatataattcg

SEQ ID NO: 160753 - DNA, 25 bp, Artificial
  Probe
atagagtcagggcctttaatgatat

SEQ ID NO: 160754 - DNA, 25 bp, Artificial
  Probe
gaaagcagttggaactcctgtagtc

SEQ ID NO: 160755 - DNA, 25 bp, Artificial
  Probe
gcagtatagagtcagggcctttaat

SEQ ID NO: 160756 - DNA, 25 bp, Artificial
  Probe
aaagtggcccaaagcataagaattt

SEQ ID NO: 160757 - DNA, 25 bp, Artificial
  Probe
gtgtgccaaattccaaggtcttagg

SEQ ID NO: 160758 - DNA, 25 bp, Artificial
  Probe
tactggagatgtgtgtgccaaattc

SEQ ID NO: 160759 - DNA, 25 bp, Artificial
  Probe
ctactggagatgtgtgtgccaaatt

SEQ ID NO: 160760 - DNA, 25 bp, Artificial
  Probe
gttggaactcctgtagtcttggctc

SEQ ID NO: 160761 - DNA, 25 bp, Artificial
  Probe
gaacaaccacttcacaggatctcct

SEQ ID NO: 160762 - DNA, 25 bp, Artificial
  Probe
tagagtcagggcctttaatgatata

SEQ ID NO: 160763 - DNA, 25 bp, Artificial
  Probe
tatagagtcagggcctttaatgata

SEQ ID NO: 160764 - DNA, 25 bp, Artificial
  Probe
gaaagtggcccaaagcataagaatt

SEQ ID NO: 160765 - DNA, 25 bp, Artificial
  Probe
gagtcagggcctttaatgatataat

SEQ ID NO: 160766 - DNA, 25 bp, Artificial
  Probe
tcagcaccaaagcacaaatctactg

SEQ ID NO: 160767 - DNA, 25 bp, Artificial
  Probe
aaagcagttggaactcctgtagtct

SEQ ID NO: 160768 - DNA, 25 bp, Artificial
  Probe
aactcctgtagtcttggctccatca

SEQ ID NO: 160769 - DNA, 25 bp, Artificial
  Probe
gttactacttctcaccactatgtca

SEQ ID NO: 160770 - DNA, 25 bp, Artificial
  Probe
ttactacttctcaccactatgtcaa

SEQ ID NO: 160771 - DNA, 25 bp, Artificial
  Probe
agaagaccaccaagataattccatt

SEQ ID NO: 160772 - DNA, 25 bp, Artificial
  Probe
aagaagaccaccaagataattccat

SEQ ID NO: 160773 - DNA, 25 bp, Artificial
  Probe
ttccaagaagaccaccaagataatt

SEQ ID NO: 160774 - DNA, 25 bp, Artificial
  Probe
cagatgttgtaagtctacctcagag

SEQ ID NO: 160775 - DNA, 25 bp, Artificial
  Probe
tccaagaagaccaccaagataattc

SEQ ID NO: 160776 - DNA, 25 bp, Artificial
  Probe
caagaagaccaccaagataattcca

SEQ ID NO: 160777 - DNA, 25 bp, Artificial
  Probe
atcctgtccagatgttgtaagtcta

SEQ ID NO: 160778 - DNA, 25 bp, Artificial
  Probe
cagttactacttctcaccactatgt

SEQ ID NO: 160779 - DNA, 25 bp, Artificial
  Probe
acagttactacttctcaccactatg

SEQ ID NO: 160780 - DNA, 25 bp, Artificial
  Probe
ccagatgttgtaagtctacctcaga

SEQ ID NO: 160781 - DNA, 25 bp, Artificial
  Probe
tccagatgttgtaagtctacctcag

SEQ ID NO: 160782 - DNA, 25 bp, Artificial
  Probe
agttactacttctcaccactatgtc

SEQ ID NO: 160783 - DNA, 25 bp, Artificial
  Probe
ccaagaagaccaccaagataattcc

SEQ ID NO: 160784 - DNA, 25 bp, Artificial
  Probe
aacagttactacttctcaccactat

SEQ ID NO: 160785 - DNA, 25 bp, Artificial
  Probe
gtccagatgttgtaagtctacctca

SEQ ID NO: 160786 - DNA, 25 bp, Artificial
  Probe
tgtccagatgttgtaagtctacctc

SEQ ID NO: 160787 - DNA, 25 bp, Artificial
  Probe
aatcctgtccagatgttgtaagtct

SEQ ID NO: 160788 - DNA, 25 bp, Artificial
  Probe
ctgtccagatgttgtaagtctacct

SEQ ID NO: 160789 - DNA, 25 bp, Artificial
  Probe
tcctgtccagatgttgtaagtctac

SEQ ID NO: 160790 - DNA, 25 bp, Artificial
  Probe
cctgtccagatgttgtaagtctacc

SEQ ID NO: 160791 - DNA, 25 bp, Artificial
  Probe
agagctgtctattaagtcctgtgaa

SEQ ID NO: 160792 - DNA, 25 bp, Artificial
  Probe
actacttctcaccactatgtcaaac

SEQ ID NO: 160793 - DNA, 25 bp, Artificial
  Probe
aaatcaagcaaataccacagagatg

SEQ ID NO: 160794 - DNA, 25 bp, Artificial
  Probe
tacatttgaactaagcagaaggacc

SEQ ID NO: 160795 - DNA, 25 bp, Artificial
  Probe
gctgtctattaagtcctgtgaaagt

SEQ ID NO: 160796 - DNA, 25 bp, Artificial
  Probe
tgtctattaagtcctgtgaaagtga

SEQ ID NO: 160797 - DNA, 25 bp, Artificial
  Probe
atacatttgaactaagcagaaggac

SEQ ID NO: 160798 - DNA, 25 bp, Artificial
  Probe
gcagattattccgagaacacattta

SEQ ID NO: 160799 - DNA, 25 bp, Artificial
  Probe
tactacttctcaccactatgtcaaa

SEQ ID NO: 160800 - DNA, 25 bp, Artificial
  Probe
ctgtctattaagtcctgtgaaagtg

SEQ ID NO: 160801 - DNA, 25 bp, Artificial
  Probe
tattccgagaacacatttactgagt

SEQ ID NO: 160802 - DNA, 25 bp, Artificial
  Probe
aaatcctgtccagatgttgtaagtc

SEQ ID NO: 160803 - DNA, 25 bp, Artificial
  Probe
gaaatcctgtccagatgttgtaagt

SEQ ID NO: 160804 - DNA, 25 bp, Artificial
  Probe
tgaaatcctgtccagatgttgtaag

SEQ ID NO: 160805 - DNA, 25 bp, Artificial
  Probe
cttcagagctgtctattaagtcctg

SEQ ID NO: 160806 - DNA, 25 bp, Artificial
  Probe
caggacttcagagctgtctattaag

SEQ ID NO: 160807 - DNA, 25 bp, Artificial
  Probe
gaagaccaccaagataattccattt

SEQ ID NO: 160808 - DNA, 25 bp, Artificial
  Probe
agaggcaactaacttctttcattga

SEQ ID NO: 160809 - DNA, 25 bp, Artificial
  Probe
aagtttgaagagtgctgttacgaaa

SEQ ID NO: 160810 - DNA, 25 bp, Artificial
  Probe
aaagtttgaagagtgctgttacgaa

SEQ ID NO: 160811 - DNA, 25 bp, Artificial
  Probe
ttattccgagaacacatttactgag

SEQ ID NO: 160812 - DNA, 25 bp, Artificial
  Probe
attccgagaacacatttactgagta

SEQ ID NO: 160813 - DNA, 25 bp, Artificial
  Probe
ttcagagctgtctattaagtcctgt

SEQ ID NO: 160814 - DNA, 25 bp, Artificial
  Probe
agagactgttgccttcatatacctc

SEQ ID NO: 160815 - DNA, 25 bp, Artificial
  Probe
ctattcaagcaggaatcatctccaa

SEQ ID NO: 160816 - DNA, 25 bp, Artificial
  Probe
tattcaagcaggaatcatctccaac

SEQ ID NO: 160817 - DNA, 25 bp, Artificial
  Probe
cagagactgttgccttcatatacct

SEQ ID NO: 160818 - DNA, 25 bp, Artificial
  Probe
cactattcaagcaggaatcatctcc

SEQ ID NO: 160819 - DNA, 25 bp, Artificial
  Probe
gactgttgccttcatatacctccac

SEQ ID NO: 160820 - DNA, 25 bp, Artificial
  Probe
agactgttgccttcatatacctcca

SEQ ID NO: 160821 - DNA, 25 bp, Artificial
  Probe
gagactgttgccttcatatacctcc

SEQ ID NO: 160822 - DNA, 25 bp, Artificial
  Probe
actattcaagcaggaatcatctcca

SEQ ID NO: 160823 - DNA, 25 bp, Artificial
  Probe
gcactattcaagcaggaatcatctc

SEQ ID NO: 160824 - DNA, 25 bp, Artificial
  Probe
ccagagactgttgccttcatatacc

SEQ ID NO: 160825 - DNA, 25 bp, Artificial
  Probe
attcaagcaggaatcatctccaaca

SEQ ID NO: 160826 - DNA, 25 bp, Artificial
  Probe
gccagagactgttgccttcatatac

SEQ ID NO: 160827 - DNA, 25 bp, Artificial
  Probe
ttcaagcaggaatcatctccaacac

SEQ ID NO: 160828 - DNA, 25 bp, Artificial
  Probe
actgttgccttcatatacctccacc

SEQ ID NO: 160829 - DNA, 25 bp, Artificial
  Probe
tgccagagactgttgccttcatata

SEQ ID NO: 160830 - DNA, 25 bp, Artificial
  Probe
aaatactcaggacttgcactttcac

SEQ ID NO: 160831 - DNA, 25 bp, Artificial
  Probe
caagcaggaatcatctccaacactc

SEQ ID NO: 160832 - DNA, 25 bp, Artificial
  Probe
aggaatcatctccaacactcaggtc

SEQ ID NO: 160833 - DNA, 25 bp, Artificial
  Probe
atgccagagactgttgccttcatat

SEQ ID NO: 160834 - DNA, 25 bp, Artificial
  Probe
aagcaggaatcatctccaacactca

SEQ ID NO: 160835 - DNA, 25 bp, Artificial
  Probe
tcaagcaggaatcatctccaacact

SEQ ID NO: 160836 - DNA, 25 bp, Artificial
  Probe
caggaatcatctccaacactcaggt

SEQ ID NO: 160837 - DNA, 25 bp, Artificial
  Probe
tgcactattcaagcaggaatcatct

SEQ ID NO: 160838 - DNA, 25 bp, Artificial
  Probe
agcaggaatcatctccaacactcag

SEQ ID NO: 160839 - DNA, 25 bp, Artificial
  Probe
cactttcacgattcttgcttcccaa

SEQ ID NO: 160840 - DNA, 25 bp, Artificial
  Probe
aatactcaggacttgcactttcacg

SEQ ID NO: 160841 - DNA, 25 bp, Artificial
  Probe
ggaatcatctccaacactcaggtcc

SEQ ID NO: 160842 - DNA, 25 bp, Artificial
  Probe
aaatggcggaaaatactcaggactt

SEQ ID NO: 160843 - DNA, 25 bp, Artificial
  Probe
gagagactgactatccggctacatg

SEQ ID NO: 160844 - DNA, 25 bp, Artificial
  Probe
catgagagactgactatccggctac

SEQ ID NO: 160845 - DNA, 25 bp, Artificial
  Probe
gagtggcttacagttctgggatgaa

SEQ ID NO: 160846 - DNA, 25 bp, Artificial
  Probe
aaaatactcaggacttgcactttca

SEQ ID NO: 160847 - DNA, 25 bp, Artificial
  Probe
gaatcatctccaacactcaggtccc

SEQ ID NO: 160848 - DNA, 25 bp, Artificial
  Probe
ggaaaatactcaggacttgcacttt

SEQ ID NO: 160849 - DNA, 25 bp, Artificial
  Probe
ctgttgccttcatatacctccaccc

SEQ ID NO: 160850 - DNA, 25 bp, Artificial
  Probe
tgagagactgactatccggctacat

SEQ ID NO: 160851 - DNA, 25 bp, Artificial
  Probe
atgagagactgactatccggctaca

SEQ ID NO: 160852 - DNA, 25 bp, Artificial
  Probe
aggacttgcactttcacgattcttg

SEQ ID NO: 160853 - DNA, 25 bp, Artificial
  Probe
caggacttgcactttcacgattctt

SEQ ID NO: 160854 - DNA, 25 bp, Artificial
  Probe
aatggcggaaaatactcaggacttg

SEQ ID NO: 160855 - DNA, 25 bp, Artificial
  Probe
catgccagagactgttgccttcata

SEQ ID NO: 160856 - DNA, 25 bp, Artificial
  Probe
tactcaggacttgcactttcacgat

SEQ ID NO: 160857 - DNA, 25 bp, Artificial
  Probe
atactcaggacttgcactttcacga

SEQ ID NO: 160858 - DNA, 25 bp, Artificial
  Probe
ctcaggacttgcactttcacgattc

SEQ ID NO: 160859 - DNA, 25 bp, Artificial
  Probe
cataattaactggctaggctactcc

SEQ ID NO: 160860 - DNA, 25 bp, Artificial
  Probe
ccataattaactggctaggctactc

SEQ ID NO: 160861 - DNA, 25 bp, Artificial
  Probe
ataattaactggctaggctactcca

SEQ ID NO: 160862 - DNA, 25 bp, Artificial
  Probe
taattaactggctaggctactccaa

SEQ ID NO: 160863 - DNA, 25 bp, Artificial
  Probe
aattaactggctaggctactccaac

SEQ ID NO: 160864 - DNA, 25 bp, Artificial
  Probe
tgcttatttcaacaaagactttcaa

SEQ ID NO: 160865 - DNA, 25 bp, Artificial
  Probe
atgcttatttcaacaaagactttca

SEQ ID NO: 160866 - DNA, 25 bp, Artificial
  Probe
taagaagataatcaagtgcaagttc

SEQ ID NO: 160867 - DNA, 25 bp, Artificial
  Probe
attaactggctaggctactccaact

SEQ ID NO: 160868 - DNA, 25 bp, Artificial
  Probe
agaagataatcaagtgcaagttctg

SEQ ID NO: 160869 - DNA, 25 bp, Artificial
  Probe
ttaagaagataatcaagtgcaagtt

SEQ ID NO: 160870 - DNA, 25 bp, Artificial
  Probe
aagaagataatcaagtgcaagttct

SEQ ID NO: 160871 - DNA, 25 bp, Artificial
  Probe
gcttatttcaacaaagactttcaaa

SEQ ID NO: 160872 - DNA, 25 bp, Artificial
  Probe
gaagataatcaagtgcaagttctgc

SEQ ID NO: 160873 - DNA, 25 bp, Artificial
  Probe
cggttatttatgcttatttcaacaa

SEQ ID NO: 160874 - DNA, 25 bp, Artificial
  Probe
ttaactggctaggctactccaactc

SEQ ID NO: 160875 - DNA, 25 bp, Artificial
  Probe
gctcaatccggttatttatgcttat

SEQ ID NO: 160876 - DNA, 25 bp, Artificial
  Probe
tgctcaatccggttatttatgctta

SEQ ID NO: 160877 - DNA, 25 bp, Artificial
  Probe
atttcaacaaagactttcaaaacgc

SEQ ID NO: 160878 - DNA, 25 bp, Artificial
  Probe
cgcttttaagaagataatcaagtgc

SEQ ID NO: 160879 - DNA, 25 bp, Artificial
  Probe
aagataatcaagtgcaagttctgcc

SEQ ID NO: 160880 - DNA, 25 bp, Artificial
  Probe
tttcaacaaagactttcaaaacgct

SEQ ID NO: 160881 - DNA, 25 bp, Artificial
  Probe
ttcaacaaagactttcaaaacgctt

SEQ ID NO: 160882 - DNA, 25 bp, Artificial
  Probe
ctgctcaatccggttatttatgctt

SEQ ID NO: 160883 - DNA, 25 bp, Artificial
  Probe
tatgcttatttcaacaaagactttc

SEQ ID NO: 160884 - DNA, 25 bp, Artificial
  Probe
gttgttgggtgccataattaactgg

SEQ ID NO: 160885 - DNA, 25 bp, Artificial
  Probe
acgcttttaagaagataatcaagtg

SEQ ID NO: 160886 - DNA, 25 bp, Artificial
  Probe
ccggttatttatgcttatttcaaca

SEQ ID NO: 160887 - DNA, 25 bp, Artificial
  Probe
tttaagaagataatcaagtgcaagt

SEQ ID NO: 160888 - DNA, 25 bp, Artificial
  Probe
tccggttatttatgcttatttcaac

SEQ ID NO: 160889 - DNA, 25 bp, Artificial
  Probe
gactttcaaaacgcttttaagaaga

SEQ ID NO: 160890 - DNA, 25 bp, Artificial
  Probe
agactttcaaaacgcttttaagaag

SEQ ID NO: 160891 - DNA, 25 bp, Artificial
  Probe
tttatgcttatttcaacaaagactt

SEQ ID NO: 160892 - DNA, 25 bp, Artificial
  Probe
cgttgttgggtgccataattaactg

SEQ ID NO: 160893 - DNA, 25 bp, Artificial
  Probe
ctccctgctcaatccggttatttat

SEQ ID NO: 160894 - DNA, 25 bp, Artificial
  Probe
tgaaaggaagacggtgaagactctg

SEQ ID NO: 160895 - DNA, 25 bp, Artificial
  Probe
gtgaaaggaagacggtgaagactct

SEQ ID NO: 160896 - DNA, 25 bp, Artificial
  Probe
aagactttcaaaacgcttttaagaa

SEQ ID NO: 160897 - DNA, 25 bp, Artificial
  Probe
ctcaatccggttatttatgcttatt

SEQ ID NO: 160898 - DNA, 25 bp, Artificial
  Probe
tccctgctcaatccggttatttatg

SEQ ID NO: 160899 - DNA, 25 bp, Artificial
  Probe
actttcaaaacgcttttaagaagat

SEQ ID NO: 160900 - DNA, 25 bp, Artificial
  Probe
aacgcttttaagaagataatcaagt

SEQ ID NO: 160901 - DNA, 25 bp, Artificial
  Probe
ttatgcttatttcaacaaagacttt

SEQ ID NO: 160902 - DNA, 25 bp, Artificial
  Probe
atttatgcttatttcaacaaagact

SEQ ID NO: 160903 - DNA, 25 bp, Artificial
  Probe
caacaaagactttcaaaacgctttt

SEQ ID NO: 160904 - DNA, 25 bp, Artificial
  Probe
tgaagaagaacaagatgatgaggaa

SEQ ID NO: 160905 - DNA, 25 bp, Artificial
  Probe
ctgaagaagaacaagatgatgagga

SEQ ID NO: 160906 - DNA, 25 bp, Artificial
  Probe
agaagaacaagatgatgaggaagaa

SEQ ID NO: 160907 - DNA, 25 bp, Artificial
  Probe
aagaagaacaagatgatgaggaaga

SEQ ID NO: 160908 - DNA, 25 bp, Artificial
  Probe
gaagaagaacaagatgatgaggaag

SEQ ID NO: 160909 - DNA, 25 bp, Artificial
  Probe
cttcatcaagaacatcatcatccag

SEQ ID NO: 160910 - DNA, 25 bp, Artificial
  Probe
gaccttcatcaagaacatcatcatc

SEQ ID NO: 160911 - DNA, 25 bp, Artificial
  Probe
agaccttcatcaagaacatcatcat

SEQ ID NO: 160912 - DNA, 25 bp, Artificial
  Probe
gagaccttcatcaagaacatcatca

SEQ ID NO: 160913 - DNA, 25 bp, Artificial
  Probe
tctgaagaagaacaagatgatgagg

SEQ ID NO: 160914 - DNA, 25 bp, Artificial
  Probe
actctgaagaagaacaagatgatga

SEQ ID NO: 160915 - DNA, 25 bp, Artificial
  Probe
gactctgaagaagaacaagatgatg

SEQ ID NO: 160916 - DNA, 25 bp, Artificial
  Probe
ttcatcaagaacatcatcatccagg

SEQ ID NO: 160917 - DNA, 25 bp, Artificial
  Probe
ccttcatcaagaacatcatcatcca

SEQ ID NO: 160918 - DNA, 25 bp, Artificial
  Probe
accttcatcaagaacatcatcatcc

SEQ ID NO: 160919 - DNA, 25 bp, Artificial
  Probe
cgactctgaagaagaacaagatgat

SEQ ID NO: 160920 - DNA, 25 bp, Artificial
  Probe
gtctctactcaccagcacaattatg

SEQ ID NO: 160921 - DNA, 25 bp, Artificial
  Probe
tgagaccttcatcaagaacatcatc

SEQ ID NO: 160922 - DNA, 25 bp, Artificial
  Probe
ctctgaagaagaacaagatgatgag

SEQ ID NO: 160923 - DNA, 25 bp, Artificial
  Probe
atcaagaacatcatcatccaggact

SEQ ID NO: 160924 - DNA, 25 bp, Artificial
  Probe
catcaagaacatcatcatccaggac

SEQ ID NO: 160925 - DNA, 25 bp, Artificial
  Probe
tcatcaagaacatcatcatccagga

SEQ ID NO: 160926 - DNA, 25 bp, Artificial
  Probe
gaacatcatcatccaggactgtatg

SEQ ID NO: 160927 - DNA, 25 bp, Artificial
  Probe
agaacatcatcatccaggactgtat

SEQ ID NO: 160928 - DNA, 25 bp, Artificial
  Probe
aagaacatcatcatccaggactgta

SEQ ID NO: 160929 - DNA, 25 bp, Artificial
  Probe
tgtctctactcaccagcacaattat

SEQ ID NO: 160930 - DNA, 25 bp, Artificial
  Probe
atgtctctactcaccagcacaatta

SEQ ID NO: 160931 - DNA, 25 bp, Artificial
  Probe
tcaagaacatcatcatccaggactg

SEQ ID NO: 160932 - DNA, 25 bp, Artificial
  Probe
gatgatgaggaagaaattgatgtgg

SEQ ID NO: 160933 - DNA, 25 bp, Artificial
  Probe
atgatgaggaagaaattgatgtggt

SEQ ID NO: 160934 - DNA, 25 bp, Artificial
  Probe
gaagaacaagatgatgaggaagaaa

SEQ ID NO: 160935 - DNA, 25 bp, Artificial
  Probe
gcgactctgaagaagaacaagatga

SEQ ID NO: 160936 - DNA, 25 bp, Artificial
  Probe
agcgactctgaagaagaacaagatg

SEQ ID NO: 160937 - DNA, 25 bp, Artificial
  Probe
agatgatgaggaagaaattgatgtg

SEQ ID NO: 160938 - DNA, 25 bp, Artificial
  Probe
tttatgcttcccatcttctttcttt

SEQ ID NO: 160939 - DNA, 25 bp, Artificial
  Probe
atgaggaagaaattgatgtggtgtc

SEQ ID NO: 160940 - DNA, 25 bp, Artificial
  Probe
gatgaggaagaaattgatgtggtgt

SEQ ID NO: 160941 - DNA, 25 bp, Artificial
  Probe
tgatgaggaagaaattgatgtggtg

SEQ ID NO: 160942 - DNA, 25 bp, Artificial
  Probe
caagaacatcatcatccaggactgt

SEQ ID NO: 160943 - DNA, 25 bp, Artificial
  Probe
aagaacaagatgatgaggaagaaat

SEQ ID NO: 160944 - DNA, 25 bp, Artificial
  Probe
aagatgatgaggaagaaattgatgt

SEQ ID NO: 160945 - DNA, 25 bp, Artificial
  Probe
agaacaagatgatgaggaagaaatt

SEQ ID NO: 160946 - DNA, 25 bp, Artificial
  Probe
atgagaccttcatcaagaacatcat

SEQ ID NO: 160947 - DNA, 25 bp, Artificial
  Probe
aacaagatgatgaggaagaaattga

SEQ ID NO: 160948 - DNA, 25 bp, Artificial
  Probe
cagcgactctgaagaagaacaagat

SEQ ID NO: 160949 - DNA, 25 bp, Artificial
  Probe
aagccaatgttcatctcaccaagtt

SEQ ID NO: 160950 - DNA, 25 bp, Artificial
  Probe
caagaagaagttggagactgacctc

SEQ ID NO: 160951 - DNA, 25 bp, Artificial
  Probe
aagtgaaagtcaagtcctacaagag

SEQ ID NO: 160952 - DNA, 25 bp, Artificial
  Probe
caagtgaaagtcaagtcctacaaga

SEQ ID NO: 160953 - DNA, 25 bp, Artificial
  Probe
tcaagtgaaagtcaagtcctacaag

SEQ ID NO: 160954 - DNA, 25 bp, Artificial
  Probe
agatcgcagagaaggatgaagagat

SEQ ID NO: 160955 - DNA, 25 bp, Artificial
  Probe
gatagaaagatcgcagagaaggatg

SEQ ID NO: 160956 - DNA, 25 bp, Artificial
  Probe
agccaatgttcatctcaccaagttc

SEQ ID NO: 160957 - DNA, 25 bp, Artificial
  Probe
aagatcgcagagaaggatgaagaga

SEQ ID NO: 160958 - DNA, 25 bp, Artificial
  Probe
atagaaagatcgcagagaaggatga

SEQ ID NO: 160959 - DNA, 25 bp, Artificial
  Probe
aagaagaagttggagactgacctca

SEQ ID NO: 160960 - DNA, 25 bp, Artificial
  Probe
ctggtggataaacttcaagtgaaag

SEQ ID NO: 160961 - DNA, 25 bp, Artificial
  Probe
atctggtggataaacttcaagtgaa

SEQ ID NO: 160962 - DNA, 25 bp, Artificial
  Probe
ttcaagtgaaagtcaagtcctacaa

SEQ ID NO: 160963 - DNA, 25 bp, Artificial
  Probe
tctggtggataaacttcaagtgaaa

SEQ ID NO: 160964 - DNA, 25 bp, Artificial
  Probe
tagaaagatcgcagagaaggatgaa

SEQ ID NO: 160965 - DNA, 25 bp, Artificial
  Probe
gatctggtggataaacttcaagtga

SEQ ID NO: 160966 - DNA, 25 bp, Artificial
  Probe
cttcaagtgaaagtcaagtcctaca

SEQ ID NO: 160967 - DNA, 25 bp, Artificial
  Probe
ggatctggtggataaacttcaagtg

SEQ ID NO: 160968 - DNA, 25 bp, Artificial
  Probe
caagccaatgttcatctcaccaagt

SEQ ID NO: 160969 - DNA, 25 bp, Artificial
  Probe
cctcatccacaccaagaagaagttg

SEQ ID NO: 160970 - DNA, 25 bp, Artificial
  Probe
aggatctggtggataaacttcaagt

SEQ ID NO: 160971 - DNA, 25 bp, Artificial
  Probe
ggaacagaagaggaacacagagtct

SEQ ID NO: 160972 - DNA, 25 bp, Artificial
  Probe
caggatctggtggataaacttcaag

SEQ ID NO: 160973 - DNA, 25 bp, Artificial
  Probe
ctagagaaatccagaaagcagatgg

SEQ ID NO: 160974 - DNA, 25 bp, Artificial
  Probe
agaagaagttggagactgacctcac

SEQ ID NO: 160975 - DNA, 25 bp, Artificial
  Probe
gaagaggaactaccagaggacagtg

SEQ ID NO: 160976 - DNA, 25 bp, Artificial
  Probe
cagagtgaggaggacaggaagaatg

SEQ ID NO: 160977 - DNA, 25 bp, Artificial
  Probe
ccaatgttcatctcaccaagttccg

SEQ ID NO: 160978 - DNA, 25 bp, Artificial
  Probe
aaagatcgcagagaaggatgaagag

SEQ ID NO: 160979 - DNA, 25 bp, Artificial
  Probe
gaaagatcgcagagaaggatgaaga

SEQ ID NO: 160980 - DNA, 25 bp, Artificial
  Probe
agaaagatcgcagagaaggatgaag

SEQ ID NO: 160981 - DNA, 25 bp, Artificial
  Probe
agtgaaagtcaagtcctacaagagg

SEQ ID NO: 160982 - DNA, 25 bp, Artificial
  Probe
ctgaagaggaactaccagaggacag

SEQ ID NO: 160983 - DNA, 25 bp, Artificial
  Probe
acaagccaatgttcatctcaccaag

SEQ ID NO: 160984 - DNA, 25 bp, Artificial
  Probe
ggacaggaagaatgtgctgagattg

SEQ ID NO: 160985 - DNA, 25 bp, Artificial
  Probe
gaagaagttggagactgacctcaca

SEQ ID NO: 160986 - DNA, 25 bp, Artificial
  Probe
gcagaagatatgcagaatgtatgtt

SEQ ID NO: 160987 - DNA, 25 bp, Artificial
  Probe
aggacaggaagaatgtgctgagatt

SEQ ID NO: 160988 - DNA, 25 bp, Artificial
  Probe
ctcctgaccatcctgcttaatttcc

SEQ ID NO: 160989 - DNA, 25 bp, Artificial
  Probe
agagaaggatgaagagatcgagcag

SEQ ID NO: 160990 - DNA, 25 bp, Artificial
  Probe
gaggatcagagagctagagtttgag

SEQ ID NO: 160991 - DNA, 25 bp, Artificial
  Probe
ggcagaagatatgcagaatgtatgt

SEQ ID NO: 160992 - DNA, 25 bp, Artificial
  Probe
gccaatgttcatctcaccaagttcc

SEQ ID NO: 160993 - DNA, 25 bp, Artificial
  Probe
atcgcagagaaggatgaagagatcg

SEQ ID NO: 160994 - DNA, 25 bp, Artificial
  Probe
gtgtgtctttgacatgggaacagaa

SEQ ID NO: 160995 - DNA, 25 bp, Artificial
  Probe
ggtgtgtctttgacatgggaacaga

SEQ ID NO: 160996 - DNA, 25 bp, Artificial
  Probe
gataaccatacaccgtgtaccacag

SEQ ID NO: 160997 - DNA, 25 bp, Artificial
  Probe
cactggataaccatacaccgtgtac

SEQ ID NO: 160998 - DNA, 25 bp, Artificial
  Probe
ctggataaccatacaccgtgtacca

SEQ ID NO: 160999 - DNA, 25 bp, Artificial
  Probe
actggataaccatacaccgtgtacc

SEQ ID NO: 161000 - DNA, 25 bp, Artificial
  Probe
ataaccatacaccgtgtaccacagg

SEQ ID NO: 161001 - DNA, 25 bp, Artificial
  Probe
ggataaccatacaccgtgtaccaca

SEQ ID NO: 161002 - DNA, 25 bp, Artificial
  Probe
tggataaccatacaccgtgtaccac

SEQ ID NO: 161003 - DNA, 25 bp, Artificial
  Probe
gcactggataaccatacaccgtgta

SEQ ID NO: 161004 - DNA, 25 bp, Artificial
  Probe
tccacactgagaataagaatctgag

SEQ ID NO: 161005 - DNA, 25 bp, Artificial
  Probe
ttactggatggaatacttagaggtt

SEQ ID NO: 161006 - DNA, 25 bp, Artificial
  Probe
ccacactgagaataagaatctgagt

SEQ ID NO: 161007 - DNA, 25 bp, Artificial
  Probe
attactggatggaatacttagaggt

SEQ ID NO: 161008 - DNA, 25 bp, Artificial
  Probe
ctccacactgagaataagaatctga

SEQ ID NO: 161009 - DNA, 25 bp, Artificial
  Probe
actccacactgagaataagaatctg

SEQ ID NO: 161010 - DNA, 25 bp, Artificial
  Probe
cactccacactgagaataagaatct

SEQ ID NO: 161011 - DNA, 25 bp, Artificial
  Probe
tcactccacactgagaataagaatc

SEQ ID NO: 161012 - DNA, 25 bp, Artificial
  Probe
actgagaataagaatctgagtgtga

SEQ ID NO: 161013 - DNA, 25 bp, Artificial
  Probe
tgagaataagaatctgagtgtgaac

SEQ ID NO: 161014 - DNA, 25 bp, Artificial
  Probe
aacttacttctgttgttcttggagc

SEQ ID NO: 161015 - DNA, 25 bp, Artificial
  Probe
ctgagaataagaatctgagtgtgaa

SEQ ID NO: 161016 - DNA, 25 bp, Artificial
  Probe
aacttgattgttcacatccttgaca

SEQ ID NO: 161017 - DNA, 25 bp, Artificial
  Probe
gagaataagaatctgagtgtgaact

SEQ ID NO: 161018 - DNA, 25 bp, Artificial
  Probe
aataagaatctgagtgtgaacttga

SEQ ID NO: 161019 - DNA, 25 bp, Artificial
  Probe
ataagaatctgagtgtgaacttgat

SEQ ID NO: 161020 - DNA, 25 bp, Artificial
  Probe
gaataagaatctgagtgtgaacttg

SEQ ID NO: 161021 - DNA, 25 bp, Artificial
  Probe
ttgattgttcacatccttgacacag

SEQ ID NO: 161022 - DNA, 25 bp, Artificial
  Probe
cttgattgttcacatccttgacaca

SEQ ID NO: 161023 - DNA, 25 bp, Artificial
  Probe
acttgattgttcacatccttgacac

SEQ ID NO: 161024 - DNA, 25 bp, Artificial
  Probe
aattactggatggaatacttagagg

SEQ ID NO: 161025 - DNA, 25 bp, Artificial
  Probe
agaataagaatctgagtgtgaactt

SEQ ID NO: 161026 - DNA, 25 bp, Artificial
  Probe
gaatctgagtgtgaacttgattgtt

SEQ ID NO: 161027 - DNA, 25 bp, Artificial
  Probe
agaatctgagtgtgaacttgattgt

SEQ ID NO: 161028 - DNA, 25 bp, Artificial
  Probe
aagaatctgagtgtgaacttgattg

SEQ ID NO: 161029 - DNA, 25 bp, Artificial
  Probe
cttacttctgttgttcttggagctg

SEQ ID NO: 161030 - DNA, 25 bp, Artificial
  Probe
gtctgaagttccctgtgattctatg

SEQ ID NO: 161031 - DNA, 25 bp, Artificial
  Probe
tactggatggaatacttagaggttt

SEQ ID NO: 161032 - DNA, 25 bp, Artificial
  Probe
tgtctgaagttccctgtgattctat

SEQ ID NO: 161033 - DNA, 25 bp, Artificial
  Probe
acttacttctgttgttcttggagct

SEQ ID NO: 161034 - DNA, 25 bp, Artificial
  Probe
taagaatctgagtgtgaacttgatt

SEQ ID NO: 161035 - DNA, 25 bp, Artificial
  Probe
gattgttcacatccttgacacagtg

SEQ ID NO: 161036 - DNA, 25 bp, Artificial
  Probe
tgattgttcacatccttgacacagt

SEQ ID NO: 161037 - DNA, 25 bp, Artificial
  Probe
ctgtgattctatggcttcagtgtga

SEQ ID NO: 161038 - DNA, 25 bp, Artificial
  Probe
ttacttctgttgttcttggagctgt

SEQ ID NO: 161039 - DNA, 25 bp, Artificial
  Probe
tctgaagttccctgtgattctatgg

SEQ ID NO: 161040 - DNA, 25 bp, Artificial
  Probe
gtgtctgaagttccctgtgattcta

SEQ ID NO: 161041 - DNA, 25 bp, Artificial
  Probe
gaggaacctgctaagctactacaac

SEQ ID NO: 161042 - DNA, 25 bp, Artificial
  Probe
tacttctgttgttcttggagctgtg

SEQ ID NO: 161043 - DNA, 25 bp, Artificial
  Probe
tgaggaacctgctaagctactacaa

SEQ ID NO: 161044 - DNA, 25 bp, Artificial
  Probe
aagttccctgtgattctatggcttc

SEQ ID NO: 161045 - DNA, 25 bp, Artificial
  Probe
gaagttccctgtgattctatggctt

SEQ ID NO: 161046 - DNA, 25 bp, Artificial
  Probe
cctgtgattctatggcttcagtgtg

SEQ ID NO: 161047 - DNA, 25 bp, Artificial
  Probe
atccaccgactccaacttacttctg

SEQ ID NO: 161048 - DNA, 25 bp, Artificial
  Probe
catccaccgactccaacttacttct

SEQ ID NO: 161049 - DNA, 25 bp, Artificial
  Probe
aggttatccttggctatatgacatg

SEQ ID NO: 161050 - DNA, 25 bp, Artificial
  Probe
tacaaggacagagactggacataga

SEQ ID NO: 161051 - DNA, 25 bp, Artificial
  Probe
gtacaaggacagagactggacatag

SEQ ID NO: 161052 - DNA, 25 bp, Artificial
  Probe
aaggacagagactggacatagacaa

SEQ ID NO: 161053 - DNA, 25 bp, Artificial
  Probe
atggaggtcctttctacatctcttt

SEQ ID NO: 161054 - DNA, 25 bp, Artificial
  Probe
caaggacagagactggacatagaca

SEQ ID NO: 161055 - DNA, 25 bp, Artificial
  Probe
acaaggacagagactggacatagac

SEQ ID NO: 161056 - DNA, 25 bp, Artificial
  Probe
ggtacaaggacagagactggacata

SEQ ID NO: 161057 - DNA, 25 bp, Artificial
  Probe
agaacctaaactagctttacccttg

SEQ ID NO: 161058 - DNA, 25 bp, Artificial
  Probe
cagaacctaaactagctttaccctt

SEQ ID NO: 161059 - DNA, 25 bp, Artificial
  Probe
ttactcttgggacagggacaaattc

SEQ ID NO: 161060 - DNA, 25 bp, Artificial
  Probe
cttactcttgggacagggacaaatt

SEQ ID NO: 161061 - DNA, 25 bp, Artificial
  Probe
gaacctaaactagctttacccttgg

SEQ ID NO: 161062 - DNA, 25 bp, Artificial
  Probe
ttcaactgaagctggatgtattcaa

SEQ ID NO: 161063 - DNA, 25 bp, Artificial
  Probe
ggacagagactggacatagacaaag

SEQ ID NO: 161064 - DNA, 25 bp, Artificial
  Probe
ggttatccttggctatatgacatgt

SEQ ID NO: 161065 - DNA, 25 bp, Artificial
  Probe
aatgatacccacacctcccactaaa

SEQ ID NO: 161066 - DNA, 25 bp, Artificial
  Probe
cttgggacagggacaaattcttctt

SEQ ID NO: 161067 - DNA, 25 bp, Artificial
  Probe
aggacagagactggacatagacaaa

SEQ ID NO: 161068 - DNA, 25 bp, Artificial
  Probe
gttatccttggctatatgacatgtt

SEQ ID NO: 161069 - DNA, 25 bp, Artificial
  Probe
ttgggacagggacaaattcttcttg

SEQ ID NO: 161070 - DNA, 25 bp, Artificial
  Probe
tactcttgggacagggacaaattct

SEQ ID NO: 161071 - DNA, 25 bp, Artificial
  Probe
tcttcaactgaagctggatgtattc

SEQ ID NO: 161072 - DNA, 25 bp, Artificial
  Probe
ctcttcaactgaagctggatgtatt

SEQ ID NO: 161073 - DNA, 25 bp, Artificial
  Probe
gcagaacctaaactagctttaccct

SEQ ID NO: 161074 - DNA, 25 bp, Artificial
  Probe
aaattcttcttggctcacccttcac

SEQ ID NO: 161075 - DNA, 25 bp, Artificial
  Probe
cttcaactgaagctggatgtattca

SEQ ID NO: 161076 - DNA, 25 bp, Artificial
  Probe
ctcttgggacagggacaaattcttc

SEQ ID NO: 161077 - DNA, 25 bp, Artificial
  Probe
gacagagactggacatagacaaagc

SEQ ID NO: 161078 - DNA, 25 bp, Artificial
  Probe
aaggttatccttggctatatgacat

SEQ ID NO: 161079 - DNA, 25 bp, Artificial
  Probe
ccaaagatggaggtcctttctacat

SEQ ID NO: 161080 - DNA, 25 bp, Artificial
  Probe
tggatgtattcaaagtagccttgag

SEQ ID NO: 161081 - DNA, 25 bp, Artificial
  Probe
ctggatgtattcaaagtagccttga

SEQ ID NO: 161082 - DNA, 25 bp, Artificial
  Probe
atgatacccacacctcccactaaac

SEQ ID NO: 161083 - DNA, 25 bp, Artificial
  Probe
caatgatacccacacctcccactaa

SEQ ID NO: 161084 - DNA, 25 bp, Artificial
  Probe
gctggatgtattcaaagtagccttg

SEQ ID NO: 161085 - DNA, 25 bp, Artificial
  Probe
caaattcttcttggctcacccttca

SEQ ID NO: 161086 - DNA, 25 bp, Artificial
  Probe
acaaattcttcttggctcacccttc

SEQ ID NO: 161087 - DNA, 25 bp, Artificial
  Probe
gacaaattcttcttggctcaccctt

SEQ ID NO: 161088 - DNA, 25 bp, Artificial
  Probe
tacatctcttttaagacttgcctcc

SEQ ID NO: 161089 - DNA, 25 bp, Artificial
  Probe
tctacatctcttttaagacttgcct

SEQ ID NO: 161090 - DNA, 25 bp, Artificial
  Probe
tcttgggacagggacaaattcttct

SEQ ID NO: 161091 - DNA, 25 bp, Artificial
  Probe
aacctaaactagctttacccttggc

SEQ ID NO: 161092 - DNA, 25 bp, Artificial
  Probe
ctacatctcttttaagacttgcctc

SEQ ID NO: 161093 - DNA, 25 bp, Artificial
  Probe
ggaggtcctttctacatctctttta

SEQ ID NO: 161094 - DNA, 25 bp, Artificial
  Probe
tttgaagaaacagaagtcccattac

SEQ ID NO: 161095 - DNA, 25 bp, Artificial
  Probe
aataccatctgacgataagtgcttt

SEQ ID NO: 161096 - DNA, 25 bp, Artificial
  Probe
aaataccatctgacgataagtgctt

SEQ ID NO: 161097 - DNA, 25 bp, Artificial
  Probe
tattagagggatgcttgggtgttta

SEQ ID NO: 161098 - DNA, 25 bp, Artificial
  Probe
ataccatctgacgataagtgctttg

SEQ ID NO: 161099 - DNA, 25 bp, Artificial
  Probe
ctttgaagaaacagaagtcccatta

SEQ ID NO: 161100 - DNA, 25 bp, Artificial
  Probe
ttgaagaaacagaagtcccattact

SEQ ID NO: 161101 - DNA, 25 bp, Artificial
  Probe
aagaaacagaagtcccattactcag

SEQ ID NO: 161102 - DNA, 25 bp, Artificial
  Probe
gaagaaacagaagtcccattactca

SEQ ID NO: 161103 - DNA, 25 bp, Artificial
  Probe
tgaagaaacagaagtcccattactc

SEQ ID NO: 161104 - DNA, 25 bp, Artificial
  Probe
attagagggatgcttgggtgtttag

SEQ ID NO: 161105 - DNA, 25 bp, Artificial
  Probe
ctattagagggatgcttgggtgttt

SEQ ID NO: 161106 - DNA, 25 bp, Artificial
  Probe
gcacagagccagagacctattagag

SEQ ID NO: 161107 - DNA, 25 bp, Artificial
  Probe
caggtaaggaggaggtgtcaagaag

SEQ ID NO: 161108 - DNA, 25 bp, Artificial
  Probe
agaaacagaagtcccattactcagc

SEQ ID NO: 161109 - DNA, 25 bp, Artificial
  Probe
cacagagccagagacctattagagg

SEQ ID NO: 161110 - DNA, 25 bp, Artificial
  Probe
ctcctcacaactcctattcctgacc

SEQ ID NO: 161111 - DNA, 25 bp, Artificial
  Probe
cagagacctattagagggatgcttg

SEQ ID NO: 161112 - DNA, 25 bp, Artificial
  Probe
taccatctgacgataagtgctttgc

SEQ ID NO: 161113 - DNA, 25 bp, Artificial
  Probe
tagagggatgcttgggtgtttagtt

SEQ ID NO: 161114 - DNA, 25 bp, Artificial
  Probe
ttagagggatgcttgggtgtttagt

SEQ ID NO: 161115 - DNA, 25 bp, Artificial
  Probe
aaaataccatctgacgataagtgct

SEQ ID NO: 161116 - DNA, 25 bp, Artificial
  Probe
gtggacagtgacaagctagacattg

SEQ ID NO: 161117 - DNA, 25 bp, Artificial
  Probe
attcttgttgacgacatcaaacttt

SEQ ID NO: 161118 - DNA, 25 bp, Artificial
  Probe
cagctccaggatgtcattcttgttg

SEQ ID NO: 161119 - DNA, 25 bp, Artificial
  Probe
cttcccttccttagacagttttctc

SEQ ID NO: 161120 - DNA, 25 bp, Artificial
  Probe
tttagttcccttgaggtccaggtaa

SEQ ID NO: 161121 - DNA, 25 bp, Artificial
  Probe
agagacctattagagggatgcttgg

SEQ ID NO: 161122 - DNA, 25 bp, Artificial
  Probe
ccagagacctattagagggatgctt

SEQ ID NO: 161123 - DNA, 25 bp, Artificial
  Probe
cattcttgttgacgacatcaaactt

SEQ ID NO: 161124 - DNA, 25 bp, Artificial
  Probe
gctcctcacaactcctattcctgac

SEQ ID NO: 161125 - DNA, 25 bp, Artificial
  Probe
actttgaagaaacagaagtcccatt

SEQ ID NO: 161126 - DNA, 25 bp, Artificial
  Probe
aactttgaagaaacagaagtcccat

SEQ ID NO: 161127 - DNA, 25 bp, Artificial
  Probe
caaactttgaagaaacagaagtccc

SEQ ID NO: 161128 - DNA, 25 bp, Artificial
  Probe
ttcttgttgacgacatcaaactttg

SEQ ID NO: 161129 - DNA, 25 bp, Artificial
  Probe
aaactttgaagaaacagaagtccca

SEQ ID NO: 161130 - DNA, 25 bp, Artificial
  Probe
ttcccttccttagacagttttctca

SEQ ID NO: 161131 - DNA, 25 bp, Artificial
  Probe
attcatttcagatgggtggtggaga

SEQ ID NO: 161132 - DNA, 25 bp, Artificial
  Probe
cattcatttcagatgggtggtggag

SEQ ID NO: 161133 - DNA, 25 bp, Artificial
  Probe
aaacagaagtcccattactcagctc

SEQ ID NO: 161134 - DNA, 25 bp, Artificial
  Probe
gaaacagaagtcccattactcagct

SEQ ID NO: 161135 - DNA, 25 bp, Artificial
  Probe
ccttccttagacagttttctcagaa

SEQ ID NO: 161136 - DNA, 25 bp, Artificial
  Probe
tcattcttgttgacgacatcaaact

SEQ ID NO: 161137 - DNA, 25 bp, Artificial
  Probe
cagtgacaagctagacattgcagag

SEQ ID NO: 161138 - DNA, 25 bp, Artificial
  Probe
ttgcacagagccagagacctattag

SEQ ID NO: 161139 - DNA, 25 bp, Artificial
  Probe
atgttctaaccaagagtcaggagat

SEQ ID NO: 161140 - DNA, 25 bp, Artificial
  Probe
ttagtctaacaagagccaagaactg

SEQ ID NO: 161141 - DNA, 25 bp, Artificial
  Probe
ggcttgacaatactggattcttctg

SEQ ID NO: 161142 - DNA, 25 bp, Artificial
  Probe
tagtctaacaagagccaagaactga

SEQ ID NO: 161143 - DNA, 25 bp, Artificial
  Probe
gatgttctaaccaagagtcaggaga

SEQ ID NO: 161144 - DNA, 25 bp, Artificial
  Probe
ccgatctccgtctataagaagttaa

SEQ ID NO: 161145 - DNA, 25 bp, Artificial
  Probe
acatcctcatggttcagataattgg

SEQ ID NO: 161146 - DNA, 25 bp, Artificial
  Probe
tgatgttctaaccaagagtcaggag

SEQ ID NO: 161147 - DNA, 25 bp, Artificial
  Probe
aacatcctcatggttcagataattg

SEQ ID NO: 161148 - DNA, 25 bp, Artificial
  Probe
gcttgacaatactggattcttctgc

SEQ ID NO: 161149 - DNA, 25 bp, Artificial
  Probe
agtctaacaagagccaagaactgaa

SEQ ID NO: 161150 - DNA, 25 bp, Artificial
  Probe
gccgatctccgtctataagaagtta

SEQ ID NO: 161151 - DNA, 25 bp, Artificial
  Probe
tgttctaaccaagagtcaggagatc

SEQ ID NO: 161152 - DNA, 25 bp, Artificial
  Probe
cctcatggttcagataattggatgc

SEQ ID NO: 161153 - DNA, 25 bp, Artificial
  Probe
tataacttctgccagccttgttgaa

SEQ ID NO: 161154 - DNA, 25 bp, Artificial
  Probe
tgacaatactggattcttctgcatt

SEQ ID NO: 161155 - DNA, 25 bp, Artificial
  Probe
ttgacaatactggattcttctgcat

SEQ ID NO: 161156 - DNA, 25 bp, Artificial
  Probe
tggagaaggcaagatttatacagaa

SEQ ID NO: 161157 - DNA, 25 bp, Artificial
  Probe
gttctaaccaagagtcaggagatcc

SEQ ID NO: 161158 - DNA, 25 bp, Artificial
  Probe
aatactggattcttctgcattgtgt

SEQ ID NO: 161159 - DNA, 25 bp, Artificial
  Probe
gtcaatacttagagatgggtgtgta

SEQ ID NO: 161160 - DNA, 25 bp, Artificial
  Probe
ataaactaagtaagggctgctgaat

SEQ ID NO: 161161 - DNA, 25 bp, Artificial
  Probe
tcctcatggttcagataattggatg

SEQ ID NO: 161162 - DNA, 25 bp, Artificial
  Probe
catcctcatggttcagataattgga

SEQ ID NO: 161163 - DNA, 25 bp, Artificial
  Probe
aataaactaagtaagggctgctgaa

SEQ ID NO: 161164 - DNA, 25 bp, Artificial
  Probe
tgttccctggtttaatggtgtatat

SEQ ID NO: 161165 - DNA, 25 bp, Artificial
  Probe
gtgttccctggtttaatggtgtata

SEQ ID NO: 161166 - DNA, 25 bp, Artificial
  Probe
ggagaaggcaagatttatacagaag

SEQ ID NO: 161167 - DNA, 25 bp, Artificial
  Probe
taataaactaagtaagggctgctga

SEQ ID NO: 161168 - DNA, 25 bp, Artificial
  Probe
cttgacaatactggattcttctgca

SEQ ID NO: 161169 - DNA, 25 bp, Artificial
  Probe
gtgtcaatacttagagatgggtgtg

SEQ ID NO: 161170 - DNA, 25 bp, Artificial
  Probe
atactggattcttctgcattgtgtc

SEQ ID NO: 161171 - DNA, 25 bp, Artificial
  Probe
taaactaagtaagggctgctgaatg

SEQ ID NO: 161172 - DNA, 25 bp, Artificial
  Probe
tgtcaatacttagagatgggtgtgt

SEQ ID NO: 161173 - DNA, 25 bp, Artificial
  Probe
ctaacaagagccaagaactgaaact

SEQ ID NO: 161174 - DNA, 25 bp, Artificial
  Probe
taacaagagccaagaactgaaactt

SEQ ID NO: 161175 - DNA, 25 bp, Artificial
  Probe
ctcatggttcagataattggatgca

SEQ ID NO: 161176 - DNA, 25 bp, Artificial
  Probe
ttaataaactaagtaagggctgctg

SEQ ID NO: 161177 - DNA, 25 bp, Artificial
  Probe
acatttagtctaacaagagccaaga

SEQ ID NO: 161178 - DNA, 25 bp, Artificial
  Probe
gagaaggcaagatttatacagaagt

SEQ ID NO: 161179 - DNA, 25 bp, Artificial
  Probe
atggttcagataattggatgcacaa

SEQ ID NO: 161180 - DNA, 25 bp, Artificial
  Probe
taagtgttcctttgaatctcagtgt

SEQ ID NO: 161181 - DNA, 25 bp, Artificial
  Probe
tcatggttcagataattggatgcac

SEQ ID NO: 161182 - DNA, 25 bp, Artificial
  Probe
ataacttctgccagccttgttgaat

SEQ ID NO: 161183 - DNA, 25 bp, Artificial
  Probe
tttagtctaacaagagccaagaact

SEQ ID NO: 161184 - DNA, 25 bp, Artificial
  Probe
aagccagtaagaagtgtgtagtagc

SEQ ID NO: 161185 - DNA, 25 bp, Artificial
  Probe
gtgtagtagcttcctgattacctag

SEQ ID NO: 161186 - DNA, 25 bp, Artificial
  Probe
tgtgtagtagcttcctgattaccta

SEQ ID NO: 161187 - DNA, 25 bp, Artificial
  Probe
aagtgtgtagtagcttcctgattac

SEQ ID NO: 161188 - DNA, 25 bp, Artificial
  Probe
aaagccagtaagaagtgtgtagtag

SEQ ID NO: 161189 - DNA, 25 bp, Artificial
  Probe
agtaaagccagtaagaagtgtgtag

SEQ ID NO: 161190 - DNA, 25 bp, Artificial
  Probe
ttagtaaagccagtaagaagtgtgt

SEQ ID NO: 161191 - DNA, 25 bp, Artificial
  Probe
cagagacacagacaaacaataaaca

SEQ ID NO: 161192 - DNA, 25 bp, Artificial
  Probe
acagagacacagacaaacaataaac

SEQ ID NO: 161193 - DNA, 25 bp, Artificial
  Probe
gtaaagccagtaagaagtgtgtagt

SEQ ID NO: 161194 - DNA, 25 bp, Artificial
  Probe
gtgtgtagtagcttcctgattacct

SEQ ID NO: 161195 - DNA, 25 bp, Artificial
  Probe
agtgtgtagtagcttcctgattacc

SEQ ID NO: 161196 - DNA, 25 bp, Artificial
  Probe
gctacagagacacagacaaacaata

SEQ ID NO: 161197 - DNA, 25 bp, Artificial
  Probe
agagacacagacaaacaataaacaa

SEQ ID NO: 161198 - DNA, 25 bp, Artificial
  Probe
taaagccagtaagaagtgtgtagta

SEQ ID NO: 161199 - DNA, 25 bp, Artificial
  Probe
tagtaaagccagtaagaagtgtgta

SEQ ID NO: 161200 - DNA, 25 bp, Artificial
  Probe
tttagtaaagccagtaagaagtgtg

SEQ ID NO: 161201 - DNA, 25 bp, Artificial
  Probe
ctacagagacacagacaaacaataa

SEQ ID NO: 161202 - DNA, 25 bp, Artificial
  Probe
gagacacagacaaacaataaacaaa

SEQ ID NO: 161203 - DNA, 25 bp, Artificial
  Probe
tacagagacacagacaaacaataaa

SEQ ID NO: 161204 - DNA, 25 bp, Artificial
  Probe
gccagtaagaagtgtgtagtagctt

SEQ ID NO: 161205 - DNA, 25 bp, Artificial
  Probe
tgggcaagcctagatgtttatttaa

SEQ ID NO: 161206 - DNA, 25 bp, Artificial
  Probe
atgggcaagcctagatgtttattta

SEQ ID NO: 161207 - DNA, 25 bp, Artificial
  Probe
tttgttcaactggaaatgaggtgag

SEQ ID NO: 161208 - DNA, 25 bp, Artificial
  Probe
gggcaagcctagatgtttatttaac

SEQ ID NO: 161209 - DNA, 25 bp, Artificial
  Probe
ggcaagcctagatgtttatttaact

SEQ ID NO: 161210 - DNA, 25 bp, Artificial
  Probe
gcaagcctagatgtttatttaactt

SEQ ID NO: 161211 - DNA, 25 bp, Artificial
  Probe
catgggcaagcctagatgtttattt

SEQ ID NO: 161212 - DNA, 25 bp, Artificial
  Probe
gaagtgtgtagtagcttcctgatta

SEQ ID NO: 161213 - DNA, 25 bp, Artificial
  Probe
taagaagtgtgtagtagcttcctga

SEQ ID NO: 161214 - DNA, 25 bp, Artificial
  Probe
gtaagaagtgtgtagtagcttcctg

SEQ ID NO: 161215 - DNA, 25 bp, Artificial
  Probe
agtaagaagtgtgtagtagcttcct

SEQ ID NO: 161216 - DNA, 25 bp, Artificial
  Probe
cagtaagaagtgtgtagtagcttcc

SEQ ID NO: 161217 - DNA, 25 bp, Artificial
  Probe
ccagtaagaagtgtgtagtagcttc

SEQ ID NO: 161218 - DNA, 25 bp, Artificial
  Probe
tcatgggcaagcctagatgtttatt

SEQ ID NO: 161219 - DNA, 25 bp, Artificial
  Probe
agctacagagacacagacaaacaat

SEQ ID NO: 161220 - DNA, 25 bp, Artificial
  Probe
agaagtgtgtagtagcttcctgatt

SEQ ID NO: 161221 - DNA, 25 bp, Artificial
  Probe
aagaagtgtgtagtagcttcctgat

SEQ ID NO: 161222 - DNA, 25 bp, Artificial
  Probe
ttgttcaactggaaatgaggtgagg

SEQ ID NO: 161223 - DNA, 25 bp, Artificial
  Probe
caggctcatgggatatgtgtttaca

SEQ ID NO: 161224 - DNA, 25 bp, Artificial
  Probe
gagctacagagacacagacaaacaa

SEQ ID NO: 161225 - DNA, 25 bp, Artificial
  Probe
gtcatgggcaagcctagatgtttat

SEQ ID NO: 161226 - DNA, 25 bp, Artificial
  Probe
ttttagtaaagccagtaagaagtgt

SEQ ID NO: 161227 - DNA, 25 bp, Artificial
  Probe
agacacagacaaacaataaacaaaa

SEQ ID NO: 161228 - DNA, 25 bp, Artificial
  Probe
ttgagctacagagacacagacaaac

SEQ ID NO: 161229 - DNA, 25 bp, Artificial
  Probe
tataagaagttccgcttactaccat

SEQ ID NO: 161230 - DNA, 25 bp, Artificial
  Probe
ataagaagttccgcttactaccatg

SEQ ID NO: 161231 - DNA, 25 bp, Artificial
  Probe
ttataagaagttccgcttactacca

SEQ ID NO: 161232 - DNA, 25 bp, Artificial
  Probe
atataaaccaaaccagaagagtcct

SEQ ID NO: 161233 - DNA, 25 bp, Artificial
  Probe
actaacaatctgaaatcactggagg

SEQ ID NO: 161234 - DNA, 25 bp, Artificial
  Probe
agctcaagaacgtaactaacaatct

SEQ ID NO: 161235 - DNA, 25 bp, Artificial
  Probe
gaccagacactaaacgaacttaact

SEQ ID NO: 161236 - DNA, 25 bp, Artificial
  Probe
gctcaagaacgtaactaacaatctg

SEQ ID NO: 161237 - DNA, 25 bp, Artificial
  Probe
taagaagttccgcttactaccatgt

SEQ ID NO: 161238 - DNA, 25 bp, Artificial
  Probe
aactaacaatctgaaatcactggag

SEQ ID NO: 161239 - DNA, 25 bp, Artificial
  Probe
gaagtatgaggaggttgctcgtaag

SEQ ID NO: 161240 - DNA, 25 bp, Artificial
  Probe
ctcaagaacgtaactaacaatctga

SEQ ID NO: 161241 - DNA, 25 bp, Artificial
  Probe
ggaccagacactaaacgaacttaac

SEQ ID NO: 161242 - DNA, 25 bp, Artificial
  Probe
ctaacaatctgaaatcactggaggc

SEQ ID NO: 161243 - DNA, 25 bp, Artificial
  Probe
cgtaactaacaatctgaaatcactg

SEQ ID NO: 161244 - DNA, 25 bp, Artificial
  Probe
aagaagttccgcttactaccatgtc

SEQ ID NO: 161245 - DNA, 25 bp, Artificial
  Probe
tcaagaacgtaactaacaatctgaa

SEQ ID NO: 161246 - DNA, 25 bp, Artificial
  Probe
taacaatctgaaatcactggaggct

SEQ ID NO: 161247 - DNA, 25 bp, Artificial
  Probe
tataaaccaaaccagaagagtcctg

SEQ ID NO: 161248 - DNA, 25 bp, Artificial
  Probe
gtaactaacaatctgaaatcactgg

SEQ ID NO: 161249 - DNA, 25 bp, Artificial
  Probe
tggaccagacactaaacgaacttaa

SEQ ID NO: 161250 - DNA, 25 bp, Artificial
  Probe
gtatgaggaggttgctcgtaagttg

SEQ ID NO: 161251 - DNA, 25 bp, Artificial
  Probe
taactaacaatctgaaatcactgga

SEQ ID NO: 161252 - DNA, 25 bp, Artificial
  Probe
gaagagtcctgtcttgataccaact

SEQ ID NO: 161253 - DNA, 25 bp, Artificial
  Probe
agaagagtcctgtcttgataccaac

SEQ ID NO: 161254 - DNA, 25 bp, Artificial
  Probe
cagaagagtcctgtcttgataccaa

SEQ ID NO: 161255 - DNA, 25 bp, Artificial
  Probe
aaccagaagagtcctgtcttgatac

SEQ ID NO: 161256 - DNA, 25 bp, Artificial
  Probe
ccagacactaaacgaacttaactgt

SEQ ID NO: 161257 - DNA, 25 bp, Artificial
  Probe
accagacactaaacgaacttaactg

SEQ ID NO: 161258 - DNA, 25 bp, Artificial
  Probe
ttgataccaactccactccagagag

SEQ ID NO: 161259 - DNA, 25 bp, Artificial
  Probe
cttgataccaactccactccagaga

SEQ ID NO: 161260 - DNA, 25 bp, Artificial
  Probe
tcttgataccaactccactccagag

SEQ ID NO: 161261 - DNA, 25 bp, Artificial
  Probe
agtatgaggaggttgctcgtaagtt

SEQ ID NO: 161262 - DNA, 25 bp, Artificial
  Probe
aagtatgaggaggttgctcgtaagt

SEQ ID NO: 161263 - DNA, 25 bp, Artificial
  Probe
gtcttgataccaactccactccaga

SEQ ID NO: 161264 - DNA, 25 bp, Artificial
  Probe
tcctgtcttgataccaactccactc

SEQ ID NO: 161265 - DNA, 25 bp, Artificial
  Probe
cagacactaaacgaacttaactgta

SEQ ID NO: 161266 - DNA, 25 bp, Artificial
  Probe
gaagttccgcttactaccatgtctc

SEQ ID NO: 161267 - DNA, 25 bp, Artificial
  Probe
tatataaaccaaaccagaagagtcc

SEQ ID NO: 161268 - DNA, 25 bp, Artificial
  Probe
cggaggtgtctgaactaaagagtag

SEQ ID NO: 161269 - DNA, 25 bp, Artificial
  Probe
tgaaagacgaggagaagatggagat

SEQ ID NO: 161270 - DNA, 25 bp, Artificial
  Probe
atgaaagacgaggagaagatggaga

SEQ ID NO: 161271 - DNA, 25 bp, Artificial
  Probe
ataaaccaaaccagaagagtcctgt

SEQ ID NO: 161272 - DNA, 25 bp, Artificial
  Probe
agacactaaacgaacttaactgtat

SEQ ID NO: 161273 - DNA, 25 bp, Artificial
  Probe
ggaggtgtctgaactaaagagtagc

SEQ ID NO: 161274 - DNA, 25 bp, Artificial
  Probe
ggacctacaatgcttacagagttat

SEQ ID NO: 161275 - DNA, 25 bp, Artificial
  Probe
ttacagagttatagccaccacagaa

SEQ ID NO: 161276 - DNA, 25 bp, Artificial
  Probe
attcatcaactctctaccaggacag

SEQ ID NO: 161277 - DNA, 25 bp, Artificial
  Probe
cttacagagttatagccaccacaga

SEQ ID NO: 161278 - DNA, 25 bp, Artificial
  Probe
gattcatcaactctctaccaggaca

SEQ ID NO: 161279 - DNA, 25 bp, Artificial
  Probe
agattcatcaactctctaccaggac

SEQ ID NO: 161280 - DNA, 25 bp, Artificial
  Probe
acctacaatgcttacagagttatag

SEQ ID NO: 161281 - DNA, 25 bp, Artificial
  Probe
gacctacaatgcttacagagttata

SEQ ID NO: 161282 - DNA, 25 bp, Artificial
  Probe
tcatcaactctctaccaggacagta

SEQ ID NO: 161283 - DNA, 25 bp, Artificial
  Probe
catcaactctctaccaggacagtac

SEQ ID NO: 161284 - DNA, 25 bp, Artificial
  Probe
ttcatcaactctctaccaggacagt

SEQ ID NO: 161285 - DNA, 25 bp, Artificial
  Probe
tacagagttatagccaccacagaaa

SEQ ID NO: 161286 - DNA, 25 bp, Artificial
  Probe
tacaatgcttacagagttatagcca

SEQ ID NO: 161287 - DNA, 25 bp, Artificial
  Probe
acaatgcttacagagttatagccac

SEQ ID NO: 161288 - DNA, 25 bp, Artificial
  Probe
ctacaatgcttacagagttatagcc

SEQ ID NO: 161289 - DNA, 25 bp, Artificial
  Probe
cctacaatgcttacagagttatagc

SEQ ID NO: 161290 - DNA, 25 bp, Artificial
  Probe
gggacctacaatgcttacagagtta

SEQ ID NO: 161291 - DNA, 25 bp, Artificial
  Probe
atcaactctctaccaggacagtacc

SEQ ID NO: 161292 - DNA, 25 bp, Artificial
  Probe
caatgcttacagagttatagccacc

SEQ ID NO: 161293 - DNA, 25 bp, Artificial
  Probe
attaggtataaaggtgtcttaggga

SEQ ID NO: 161294 - DNA, 25 bp, Artificial
  Probe
acagagttatagccaccacagaaag

SEQ ID NO: 161295 - DNA, 25 bp, Artificial
  Probe
tgagaaatgtcatcatcaactgtac

SEQ ID NO: 161296 - DNA, 25 bp, Artificial
  Probe
aatgcttacagagttatagccacca

SEQ ID NO: 161297 - DNA, 25 bp, Artificial
  Probe
ttaggtataaaggtgtcttagggac

SEQ ID NO: 161298 - DNA, 25 bp, Artificial
  Probe
gagaaagggatgctaaacaccattg

SEQ ID NO: 161299 - DNA, 25 bp, Artificial
  Probe
ccaggcttccagtactattaggtat

SEQ ID NO: 161300 - DNA, 25 bp, Artificial
  Probe
ggacgactcctaatctaatgagaaa

SEQ ID NO: 161301 - DNA, 25 bp, Artificial
  Probe
cgactcctaatctaatgagaaatgt

SEQ ID NO: 161302 - DNA, 25 bp, Artificial
  Probe
acgactcctaatctaatgagaaatg

SEQ ID NO: 161303 - DNA, 25 bp, Artificial
  Probe
gaaagggacgactcctaatctaatg

SEQ ID NO: 161304 - DNA, 25 bp, Artificial
  Probe
aaagggacgactcctaatctaatga

SEQ ID NO: 161305 - DNA, 25 bp, Artificial
  Probe
gacgactcctaatctaatgagaaat

SEQ ID NO: 161306 - DNA, 25 bp, Artificial
  Probe
ctacactgggacctacaatgcttac

SEQ ID NO: 161307 - DNA, 25 bp, Artificial
  Probe
gtataaaggtgtcttagggaccatc

SEQ ID NO: 161308 - DNA, 25 bp, Artificial
  Probe
tataaaggtgtcttagggaccatca

SEQ ID NO: 161309 - DNA, 25 bp, Artificial
  Probe
gggacgactcctaatctaatgagaa

SEQ ID NO: 161310 - DNA, 25 bp, Artificial
  Probe
aagggacgactcctaatctaatgag

SEQ ID NO: 161311 - DNA, 25 bp, Artificial
  Probe
taggtataaaggtgtcttagggacc

SEQ ID NO: 161312 - DNA, 25 bp, Artificial
  Probe
caggcttccagtactattaggtata

SEQ ID NO: 161313 - DNA, 25 bp, Artificial
  Probe
ggaaagggacgactcctaatctaat

SEQ ID NO: 161314 - DNA, 25 bp, Artificial
  Probe
atgcttacagagttatagccaccac

SEQ ID NO: 161315 - DNA, 25 bp, Artificial
  Probe
gacttggagaaagggatgctaaaca

SEQ ID NO: 161316 - DNA, 25 bp, Artificial
  Probe
ggtataaaggtgtcttagggaccat

SEQ ID NO: 161317 - DNA, 25 bp, Artificial
  Probe
gtcatcatgtttgtgtgctttgaac

SEQ ID NO: 161318 - DNA, 25 bp, Artificial
  Probe
agggacgactcctaatctaatgaga

SEQ ID NO: 161319 - DNA, 25 bp, Artificial
  Probe
tgatgacaacactaagcctcttctt

SEQ ID NO: 161320 - DNA, 25 bp, Artificial
  Probe
catgaagaacctagtgatgacaaca

SEQ ID NO: 161321 - DNA, 25 bp, Artificial
  Probe
acatgaagaacctagtgatgacaac

SEQ ID NO: 161322 - DNA, 25 bp, Artificial
  Probe
aggctacctacaatacactcttcaa

SEQ ID NO: 161323 - DNA, 25 bp, Artificial
  Probe
atgaagaacctagtgatgacaacac

SEQ ID NO: 161324 - DNA, 25 bp, Artificial
  Probe
aacaggctacctacaatacactctt

SEQ ID NO: 161325 - DNA, 25 bp, Artificial
  Probe
cagtctccaatgttattagctccat

SEQ ID NO: 161326 - DNA, 25 bp, Artificial
  Probe
caggctacctacaatacactcttca

SEQ ID NO: 161327 - DNA, 25 bp, Artificial
  Probe
acaggctacctacaatacactcttc

SEQ ID NO: 161328 - DNA, 25 bp, Artificial
  Probe
gaacaggctacctacaatacactct

SEQ ID NO: 161329 - DNA, 25 bp, Artificial
  Probe
atgttattagctccattgtcttcgg

SEQ ID NO: 161330 - DNA, 25 bp, Artificial
  Probe
ggctacctacaatacactcttcaaa

SEQ ID NO: 161331 - DNA, 25 bp, Artificial
  Probe
cacatgaagaacctagtgatgacaa

SEQ ID NO: 161332 - DNA, 25 bp, Artificial
  Probe
acaatacactcttcaaaggctatgg

SEQ ID NO: 161333 - DNA, 25 bp, Artificial
  Probe
gctacctacaatacactcttcaaag

SEQ ID NO: 161334 - DNA, 25 bp, Artificial
  Probe
ttccacatgaagaacctagtgatga

SEQ ID NO: 161335 - DNA, 25 bp, Artificial
  Probe
gatgacaacactaagcctcttcttt

SEQ ID NO: 161336 - DNA, 25 bp, Artificial
  Probe
tacaatacactcttcaaaggctatg

SEQ ID NO: 161337 - DNA, 25 bp, Artificial
  Probe
agatgatgggtcaaatgaacagatt

SEQ ID NO: 161338 - DNA, 25 bp, Artificial
  Probe
ttaccaggatcataccaaagtacac

SEQ ID NO: 161339 - DNA, 25 bp, Artificial
  Probe
ctacaatacactcttcaaaggctat

SEQ ID NO: 161340 - DNA, 25 bp, Artificial
  Probe
acagtctccaatgttattagctcca

SEQ ID NO: 161341 - DNA, 25 bp, Artificial
  Probe
tttaccaggatcataccaaagtaca

SEQ ID NO: 161342 - DNA, 25 bp, Artificial
  Probe
atgacaacactaagcctcttctttg

SEQ ID NO: 161343 - DNA, 25 bp, Artificial
  Probe
gtttaccaggatcataccaaagtac

SEQ ID NO: 161344 - DNA, 25 bp, Artificial
  Probe
atgaaactagaagacatcaacgagt

SEQ ID NO: 161345 - DNA, 25 bp, Artificial
  Probe
ccaatgaaactagaagacatcaacg

SEQ ID NO: 161346 - DNA, 25 bp, Artificial
  Probe
cccaatgaaactagaagacatcaac

SEQ ID NO: 161347 - DNA, 25 bp, Artificial
  Probe
tcccaatgaaactagaagacatcaa

SEQ ID NO: 161348 - DNA, 25 bp, Artificial
  Probe
ttcccaatgaaactagaagacatca

SEQ ID NO: 161349 - DNA, 25 bp, Artificial
  Probe
gtgatgacaacactaagcctcttct

SEQ ID NO: 161350 - DNA, 25 bp, Artificial
  Probe
cagatgatgggtcaaatgaacagat

SEQ ID NO: 161351 - DNA, 25 bp, Artificial
  Probe
tccacatgaagaacctagtgatgac

SEQ ID NO: 161352 - DNA, 25 bp, Artificial
  Probe
gatgatgggtcaaatgaacagattt

SEQ ID NO: 161353 - DNA, 25 bp, Artificial
  Probe
caatgaaactagaagacatcaacga

SEQ ID NO: 161354 - DNA, 25 bp, Artificial
  Probe
caatacactcttcaaaggctatggc

SEQ ID NO: 161355 - DNA, 25 bp, Artificial
  Probe
aatgaaactagaagacatcaacgag

SEQ ID NO: 161356 - DNA, 25 bp, Artificial
  Probe
ccacatgaagaacctagtgatgaca

SEQ ID NO: 161357 - DNA, 25 bp, Artificial
  Probe
cgaacaggctacctacaatacactc

SEQ ID NO: 161358 - DNA, 25 bp, Artificial
  Probe
taccaggatcataccaaagtacacc

SEQ ID NO: 161359 - DNA, 25 bp, Artificial
  Probe
cctacaatacactcttcaaaggcta

SEQ ID NO: 161360 - DNA, 25 bp, Artificial
  Probe
tacctacaatacactcttcaaaggc

SEQ ID NO: 161361 - DNA, 25 bp, Artificial
  Probe
tgaaactagaagacatcaacgagtc

SEQ ID NO: 161362 - DNA, 25 bp, Artificial
  Probe
agtctccaatgttattagctccatt

SEQ ID NO: 161363 - DNA, 25 bp, Artificial
  Probe
aatgttattagctccattgtcttcg

SEQ ID NO: 161364 - DNA, 25 bp, Artificial
  Probe
gagaacagagaagatgaagatgagg

SEQ ID NO: 161365 - DNA, 25 bp, Artificial
  Probe
agagaacagagaagatgaagatgag

SEQ ID NO: 161366 - DNA, 25 bp, Artificial
  Probe
gagagaacagagaagatgaagatga

SEQ ID NO: 161367 - DNA, 25 bp, Artificial
  Probe
ggagagaacagagaagatgaagatg

SEQ ID NO: 161368 - DNA, 25 bp, Artificial
  Probe
taggattgacacattggactctatc

SEQ ID NO: 161369 - DNA, 25 bp, Artificial
  Probe
tggagagaacagagaagatgaagat

SEQ ID NO: 161370 - DNA, 25 bp, Artificial
  Probe
ctaggattgacacattggactctat

SEQ ID NO: 161371 - DNA, 25 bp, Artificial
  Probe
gtggagagaacagagaagatgaaga

SEQ ID NO: 161372 - DNA, 25 bp, Artificial
  Probe
gattgacacattggactctatcacc

SEQ ID NO: 161373 - DNA, 25 bp, Artificial
  Probe
ggattgacacattggactctatcac

SEQ ID NO: 161374 - DNA, 25 bp, Artificial
  Probe
aggattgacacattggactctatca

SEQ ID NO: 161375 - DNA, 25 bp, Artificial
  Probe
gctaggattgacacattggactcta

SEQ ID NO: 161376 - DNA, 25 bp, Artificial
  Probe
ggtggagagaacagagaagatgaag

SEQ ID NO: 161377 - DNA, 25 bp, Artificial
  Probe
ttctctcactcagtcctctacacaa

SEQ ID NO: 161378 - DNA, 25 bp, Artificial
  Probe
aggtggagagaacagagaagatgaa

SEQ ID NO: 161379 - DNA, 25 bp, Artificial
  Probe
tctctcactcagtcctctacacaag

SEQ ID NO: 161380 - DNA, 25 bp, Artificial
  Probe
cttctctcactcagtcctctacaca

SEQ ID NO: 161381 - DNA, 25 bp, Artificial
  Probe
aagatgaagatgagggttaagaagg

SEQ ID NO: 161382 - DNA, 25 bp, Artificial
  Probe
cagagaagatgaagatgagggttaa

SEQ ID NO: 161383 - DNA, 25 bp, Artificial
  Probe
acagagaagatgaagatgagggtta

SEQ ID NO: 161384 - DNA, 25 bp, Artificial
  Probe
gagaagatgaagatgagggttaaga

SEQ ID NO: 161385 - DNA, 25 bp, Artificial
  Probe
agagaagatgaagatgagggttaag

SEQ ID NO: 161386 - DNA, 25 bp, Artificial
  Probe
ggtttgtaagtctgtttgggatatt

SEQ ID NO: 161387 - DNA, 25 bp, Artificial
  Probe
ttctttcggtttgtaagtctgtttg

SEQ ID NO: 161388 - DNA, 25 bp, Artificial
  Probe
ctctcactcagtcctctacacaaga

SEQ ID NO: 161389 - DNA, 25 bp, Artificial
  Probe
tttctttcggtttgtaagtctgttt

SEQ ID NO: 161390 - DNA, 25 bp, Artificial
  Probe
cggtttgtaagtctgtttgggatat

SEQ ID NO: 161391 - DNA, 25 bp, Artificial
  Probe
agaagatgaagatgagggttaagaa

SEQ ID NO: 161392 - DNA, 25 bp, Artificial
  Probe
gaagatgaagatgagggttaagaag

SEQ ID NO: 161393 - DNA, 25 bp, Artificial
  Probe
attgacacattggactctatcacca

SEQ ID NO: 161394 - DNA, 25 bp, Artificial
  Probe
ggcaccgatgtattccctataatag

SEQ ID NO: 161395 - DNA, 25 bp, Artificial
  Probe
atttactgattagtgtgggtggtag

SEQ ID NO: 161396 - DNA, 25 bp, Artificial
  Probe
agaacagagaagatgaagatgaggg

SEQ ID NO: 161397 - DNA, 25 bp, Artificial
  Probe
catttactgattagtgtgggtggta

SEQ ID NO: 161398 - DNA, 25 bp, Artificial
  Probe
gccagaattacaaagtgaaactcat

SEQ ID NO: 161399 - DNA, 25 bp, Artificial
  Probe
caggtggagagaacagagaagatga

SEQ ID NO: 161400 - DNA, 25 bp, Artificial
  Probe
taccaggatcataccaaattacacc

SEQ ID NO: 161401 - DNA, 25 bp, Artificial
  Probe
gatgaagatgagggttaagaaggga

SEQ ID NO: 161402 - DNA, 25 bp, Artificial
  Probe
agatgaagatgagggttaagaaggg

SEQ ID NO: 161403 - DNA, 25 bp, Artificial
  Probe
ccaggatcataccaaattacaccat

SEQ ID NO: 161404 - DNA, 25 bp, Artificial
  Probe
ctgccagaattacaaagtgaaactc

SEQ ID NO: 161405 - DNA, 25 bp, Artificial
  Probe
atgaagatgagggttaagaagggac

SEQ ID NO: 161406 - DNA, 25 bp, Artificial
  Probe
aacagagaagatgaagatgagggtt

SEQ ID NO: 161407 - DNA, 25 bp, Artificial
  Probe
gaacagagaagatgaagatgagggt

SEQ ID NO: 161408 - DNA, 25 bp, Artificial
  Probe
gtgtgtccaagaactcaaattcaga

SEQ ID NO: 161409 - DNA, 25 bp, Artificial
  Probe
aattagtgtaagaggaaggtatgcc

SEQ ID NO: 161410 - DNA, 25 bp, Artificial
  Probe
gtaagaggaaggtatgccaagaatc

SEQ ID NO: 161411 - DNA, 25 bp, Artificial
  Probe
attagtgtaagaggaaggtatgcca

SEQ ID NO: 161412 - DNA, 25 bp, Artificial
  Probe
ttagtgtaagaggaaggtatgccaa

SEQ ID NO: 161413 - DNA, 25 bp, Artificial
  Probe
taagaggaaggtatgccaagaatca

SEQ ID NO: 161414 - DNA, 25 bp, Artificial
  Probe
tgtaagaggaaggtatgccaagaat

SEQ ID NO: 161415 - DNA, 25 bp, Artificial
  Probe
tagtgtaagaggaaggtatgccaag

SEQ ID NO: 161416 - DNA, 25 bp, Artificial
  Probe
cctgagagagagtcaaccttagtat

SEQ ID NO: 161417 - DNA, 25 bp, Artificial
  Probe
gagagagagtcaaccttagtattct

SEQ ID NO: 161418 - DNA, 25 bp, Artificial
  Probe
tgagagagagtcaaccttagtattc

SEQ ID NO: 161419 - DNA, 25 bp, Artificial
  Probe
ctgagagagagtcaaccttagtatt

SEQ ID NO: 161420 - DNA, 25 bp, Artificial
  Probe
gtgtaagaggaaggtatgccaagaa

SEQ ID NO: 161421 - DNA, 25 bp, Artificial
  Probe
gctgaagagtaattagtgtaagagg

SEQ ID NO: 161422 - DNA, 25 bp, Artificial
  Probe
aagaggaaggtatgccaagaatcac

SEQ ID NO: 161423 - DNA, 25 bp, Artificial
  Probe
agagtaattagtgtaagaggaaggt

SEQ ID NO: 161424 - DNA, 25 bp, Artificial
  Probe
ttgagactgtagtatggcagagaag

SEQ ID NO: 161425 - DNA, 25 bp, Artificial
  Probe
catgtagacatccaggtgttgtaag

SEQ ID NO: 161426 - DNA, 25 bp, Artificial
  Probe
tgctgaagagtaattagtgtaagag

SEQ ID NO: 161427 - DNA, 25 bp, Artificial
  Probe
ttatgtgtgaatcgaacttactctc

SEQ ID NO: 161428 - DNA, 25 bp, Artificial
  Probe
ctatataagtggcaccatgtgtctc

SEQ ID NO: 161429 - DNA, 25 bp, Artificial
  Probe
atgtgtgaatcgaacttactctcaa

SEQ ID NO: 161430 - DNA, 25 bp, Artificial
  Probe
tatgtgtgaatcgaacttactctca

SEQ ID NO: 161431 - DNA, 25 bp, Artificial
  Probe
agtcaaccttagtattctctgcaag

SEQ ID NO: 161432 - DNA, 25 bp, Artificial
  Probe
agtgtaagaggaaggtatgccaaga

SEQ ID NO: 161433 - DNA, 25 bp, Artificial
  Probe
taattagtgtaagaggaaggtatgc

SEQ ID NO: 161434 - DNA, 25 bp, Artificial
  Probe
gtcaaccttagtattctctgcaagt

SEQ ID NO: 161435 - DNA, 25 bp, Artificial
  Probe
tagacatccaggtgttgtaagcatc

SEQ ID NO: 161436 - DNA, 25 bp, Artificial
  Probe
tcaaccttagtattctctgcaagta

SEQ ID NO: 161437 - DNA, 25 bp, Artificial
  Probe
taaatgtgctaccagggtgttaaat

SEQ ID NO: 161438 - DNA, 25 bp, Artificial
  Probe
ttgctgaagagtaattagtgtaaga

SEQ ID NO: 161439 - DNA, 25 bp, Artificial
  Probe
gtagacatccaggtgttgtaagcat

SEQ ID NO: 161440 - DNA, 25 bp, Artificial
  Probe
gagtcaaccttagtattctctgcaa

SEQ ID NO: 161441 - DNA, 25 bp, Artificial
  Probe
ctgtgtcctatataagtggcaccat

SEQ ID NO: 161442 - DNA, 25 bp, Artificial
  Probe
ctgttggctttgagactgtagtatg

SEQ ID NO: 161443 - DNA, 25 bp, Artificial
  Probe
aagagtaattagtgtaagaggaagg

SEQ ID NO: 161444 - DNA, 25 bp, Artificial
  Probe
caaccttagtattctctgcaagtat

SEQ ID NO: 161445 - DNA, 25 bp, Artificial
  Probe
ttaaatgtgctaccagggtgttaaa

SEQ ID NO: 161446 - DNA, 25 bp, Artificial
  Probe
ccatgtagacatccaggtgttgtaa

SEQ ID NO: 161447 - DNA, 25 bp, Artificial
  Probe
tatataagtggcaccatgtgtctcc

SEQ ID NO: 161448 - DNA, 25 bp, Artificial
  Probe
cctatataagtggcaccatgtgtct

SEQ ID NO: 161449 - DNA, 25 bp, Artificial
  Probe
tcctatataagtggcaccatgtgtc

SEQ ID NO: 161450 - DNA, 25 bp, Artificial
  Probe
ttgtgtctatagccagtaccttgtg

SEQ ID NO: 161451 - DNA, 25 bp, Artificial
  Probe
ctgaagagtaattagtgtaagagga

SEQ ID NO: 161452 - DNA, 25 bp, Artificial
  Probe
atgtagacatccaggtgttgtaagc

SEQ ID NO: 161453 - DNA, 25 bp, Artificial
  Probe
gcaaggttagtttgttcaaatccat

SEQ ID NO: 161454 - DNA, 25 bp, Artificial
  Probe
ttacatcagtgctgcatgacagtaa

SEQ ID NO: 161455 - DNA, 25 bp, Artificial
  Probe
tacatcagtgctgcatgacagtaag

SEQ ID NO: 161456 - DNA, 25 bp, Artificial
  Probe
cttacatcagtgctgcatgacagta

SEQ ID NO: 161457 - DNA, 25 bp, Artificial
  Probe
cagtgctgcatgacagtaaggaatt

SEQ ID NO: 161458 - DNA, 25 bp, Artificial
  Probe
gagatatattgaccttgccccaaac

SEQ ID NO: 161459 - DNA, 25 bp, Artificial
  Probe
agtgctgcatgacagtaaggaattc

SEQ ID NO: 161460 - DNA, 25 bp, Artificial
  Probe
tcagtgctgcatgacagtaaggaat

SEQ ID NO: 161461 - DNA, 25 bp, Artificial
  Probe
atcagtgctgcatgacagtaaggaa

SEQ ID NO: 161462 - DNA, 25 bp, Artificial
  Probe
acttacatcagtgctgcatgacagt

SEQ ID NO: 161463 - DNA, 25 bp, Artificial
  Probe
agatatattgaccttgccccaaacg

SEQ ID NO: 161464 - DNA, 25 bp, Artificial
  Probe
catcagtgctgcatgacagtaagga

SEQ ID NO: 161465 - DNA, 25 bp, Artificial
  Probe
acatcagtgctgcatgacagtaagg

SEQ ID NO: 161466 - DNA, 25 bp, Artificial
  Probe
gatatattgaccttgccccaaacgg

SEQ ID NO: 161467 - DNA, 25 bp, Artificial
  Probe
caaacggtttgttgcatgaagtgac

SEQ ID NO: 161468 - DNA, 25 bp, Artificial
  Probe
aaacggtttgttgcatgaagtgacc

SEQ ID NO: 161469 - DNA, 25 bp, Artificial
  Probe
atatattgaccttgccccaaacggt

SEQ ID NO: 161470 - DNA, 25 bp, Artificial
  Probe
tatattgaccttgccccaaacggtt

SEQ ID NO: 161471 - DNA, 25 bp, Artificial
  Probe
ccaaacggtttgttgcatgaagtga

SEQ ID NO: 161472 - DNA, 25 bp, Artificial
  Probe
cacacataatgagcagcacatagac

SEQ ID NO: 161473 - DNA, 25 bp, Artificial
  Probe
ccttcttcactctgtgtctattcaa

SEQ ID NO: 161474 - DNA, 25 bp, Artificial
  Probe
atccttcttcactctgtgtctattc

SEQ ID NO: 161475 - DNA, 25 bp, Artificial
  Probe
tccttcttcactctgtgtctattca

SEQ ID NO: 161476 - DNA, 25 bp, Artificial
  Probe
tatccttcttcactctgtgtctatt

SEQ ID NO: 161477 - DNA, 25 bp, Artificial
  Probe
ttatccttcttcactctgtgtctat

SEQ ID NO: 161478 - DNA, 25 bp, Artificial
  Probe
acataatgagcagcacatagaccag

SEQ ID NO: 161479 - DNA, 25 bp, Artificial
  Probe
cacataatgagcagcacatagacca

SEQ ID NO: 161480 - DNA, 25 bp, Artificial
  Probe
acacataatgagcagcacatagacc

SEQ ID NO: 161481 - DNA, 25 bp, Artificial
  Probe
ccacacataatgagcagcacataga

SEQ ID NO: 161482 - DNA, 25 bp, Artificial
  Probe
tgtatgggagataataatgggctat

SEQ ID NO: 161483 - DNA, 25 bp, Artificial
  Probe
atgtatgggagataataatgggcta

SEQ ID NO: 161484 - DNA, 25 bp, Artificial
  Probe
tagactttatccttcttcactctgt

SEQ ID NO: 161485 - DNA, 25 bp, Artificial
  Probe
cataatgagcagcacatagaccagg

SEQ ID NO: 161486 - DNA, 25 bp, Artificial
  Probe
taatgagcagcacatagaccaggat

SEQ ID NO: 161487 - DNA, 25 bp, Artificial
  Probe
ataatgagcagcacatagaccagga

SEQ ID NO: 161488 - DNA, 25 bp, Artificial
  Probe
catgtatgggagataataatgggct

SEQ ID NO: 161489 - DNA, 25 bp, Artificial
  Probe
aggcatgtatgggagataataatgg

SEQ ID NO: 161490 - DNA, 25 bp, Artificial
  Probe
gcacacatatagactttatccttct

SEQ ID NO: 161491 - DNA, 25 bp, Artificial
  Probe
ggcatgtatgggagataataatggg

SEQ ID NO: 161492 - DNA, 25 bp, Artificial
  Probe
ctttatccttcttcactctgtgtct

SEQ ID NO: 161493 - DNA, 25 bp, Artificial
  Probe
agactttatccttcttcactctgtg

SEQ ID NO: 161494 - DNA, 25 bp, Artificial
  Probe
actttatccttcttcactctgtgtc

SEQ ID NO: 161495 - DNA, 25 bp, Artificial
  Probe
gactttatccttcttcactctgtgt

SEQ ID NO: 161496 - DNA, 25 bp, Artificial
  Probe
tcttcactctgtgtctattcaaacg

SEQ ID NO: 161497 - DNA, 25 bp, Artificial
  Probe
ttcttcactctgtgtctattcaaac

SEQ ID NO: 161498 - DNA, 25 bp, Artificial
  Probe
gcatgtatgggagataataatgggc

SEQ ID NO: 161499 - DNA, 25 bp, Artificial
  Probe
tttatccttcttcactctgtgtcta

SEQ ID NO: 161500 - DNA, 25 bp, Artificial
  Probe
aaggcatgtatgggagataataatg

SEQ ID NO: 161501 - DNA, 25 bp, Artificial
  Probe
ctggagaagaatcctagtcgatctg

SEQ ID NO: 161502 - DNA, 25 bp, Artificial
  Probe
cttcttcactctgtgtctattcaaa

SEQ ID NO: 161503 - DNA, 25 bp, Artificial
  Probe
atagactttatccttcttcactctg

SEQ ID NO: 161504 - DNA, 25 bp, Artificial
  Probe
caagagctggagaagaatcctagtc

SEQ ID NO: 161505 - DNA, 25 bp, Artificial
  Probe
gcataaggcatgtatgggagataat

SEQ ID NO: 161506 - DNA, 25 bp, Artificial
  Probe
cacggaagaactagatcacagcaac

SEQ ID NO: 161507 - DNA, 25 bp, Artificial
  Probe
cgtataattctggtttctctcaccc

SEQ ID NO: 161508 - DNA, 25 bp, Artificial
  Probe
acggaagaactagatcacagcaact

SEQ ID NO: 161509 - DNA, 25 bp, Artificial
  Probe
ccactttgcacacatatagacttta

SEQ ID NO: 161510 - DNA, 25 bp, Artificial
  Probe
gtggctttcaatggattctctcatg

SEQ ID NO: 161511 - DNA, 25 bp, Artificial
  Probe
atgggagataataatgggctataaa

SEQ ID NO: 161512 - DNA, 25 bp, Artificial
  Probe
gtatgggagataataatgggctata

SEQ ID NO: 161513 - DNA, 25 bp, Artificial
  Probe
gaattaggcagtgacttcctagagg

SEQ ID NO: 161514 - DNA, 25 bp, Artificial
  Probe
cccactttgcacacatatagacttt

SEQ ID NO: 161515 - DNA, 25 bp, Artificial
  Probe
cggaagaactagatcacagcaactg

SEQ ID NO: 161516 - DNA, 25 bp, Artificial
  Probe
cttggagaggcataaggcatgtatg

SEQ ID NO: 161517 - DNA, 25 bp, Artificial
  Probe
ttcactcttaaccaagctccaataa

SEQ ID NO: 161518 - DNA, 25 bp, Artificial
  Probe
attcactcttaaccaagctccaata

SEQ ID NO: 161519 - DNA, 25 bp, Artificial
  Probe
gaaataataccctacagatgagcga

SEQ ID NO: 161520 - DNA, 25 bp, Artificial
  Probe
tggaaataataccctacagatgagc

SEQ ID NO: 161521 - DNA, 25 bp, Artificial
  Probe
gtttctgctttctctctcatttctg

SEQ ID NO: 161522 - DNA, 25 bp, Artificial
  Probe
ttgtttctgctttctctctcatttc

SEQ ID NO: 161523 - DNA, 25 bp, Artificial
  Probe
cttctctcttcttgtttctgctttc

SEQ ID NO: 161524 - DNA, 25 bp, Artificial
  Probe
cttgtttctgctttctctctcattt

SEQ ID NO: 161525 - DNA, 25 bp, Artificial
  Probe
ttctctcttcttgtttctgctttct

SEQ ID NO: 161526 - DNA, 25 bp, Artificial
  Probe
aataataccctacagatgagcgaaa

SEQ ID NO: 161527 - DNA, 25 bp, Artificial
  Probe
aaataataccctacagatgagcgaa

SEQ ID NO: 161528 - DNA, 25 bp, Artificial
  Probe
tgtttctgctttctctctcatttct

SEQ ID NO: 161529 - DNA, 25 bp, Artificial
  Probe
tcttgtttctgctttctctctcatt

SEQ ID NO: 161530 - DNA, 25 bp, Artificial
  Probe
ttcttgtttctgctttctctctcat

SEQ ID NO: 161531 - DNA, 25 bp, Artificial
  Probe
atactgggtctcctttctcaacata

SEQ ID NO: 161532 - DNA, 25 bp, Artificial
  Probe
cattcactcttaaccaagctccaat

SEQ ID NO: 161533 - DNA, 25 bp, Artificial
  Probe
tactgggtctcctttctcaacatat

SEQ ID NO: 161534 - DNA, 25 bp, Artificial
  Probe
tcttcttgtttctgctttctctctc

SEQ ID NO: 161535 - DNA, 25 bp, Artificial
  Probe
ctcttcttgtttctgctttctctct

SEQ ID NO: 161536 - DNA, 25 bp, Artificial
  Probe
tctcttcttgtttctgctttctctc

SEQ ID NO: 161537 - DNA, 25 bp, Artificial
  Probe
ctctcttcttgtttctgctttctct

SEQ ID NO: 161538 - DNA, 25 bp, Artificial
  Probe
tctctcttcttgtttctgctttctc

SEQ ID NO: 161539 - DNA, 25 bp, Artificial
  Probe
ggaaataataccctacagatgagcg

SEQ ID NO: 161540 - DNA, 25 bp, Artificial
  Probe
cttcttgtttctgctttctctctca

SEQ ID NO: 161541 - DNA, 25 bp, Artificial
  Probe
gttgtctatgatgggaagaaaggta

SEQ ID NO: 161542 - DNA, 25 bp, Artificial
  Probe
ccttctctcttcttgtttctgcttt

SEQ ID NO: 161543 - DNA, 25 bp, Artificial
  Probe
tttcctacattgtctctgaaccttt

SEQ ID NO: 161544 - DNA, 25 bp, Artificial
  Probe
atgttgtctatgatgggaagaaagg

SEQ ID NO: 161545 - DNA, 25 bp, Artificial
  Probe
ttcctacattgtctctgaacctttc

SEQ ID NO: 161546 - DNA, 25 bp, Artificial
  Probe
aaagttcttcaagcaacccagatat

SEQ ID NO: 161547 - DNA, 25 bp, Artificial
  Probe
ctacattgtctctgaacctttctcc

SEQ ID NO: 161548 - DNA, 25 bp, Artificial
  Probe
cctacattgtctctgaacctttctc

SEQ ID NO: 161549 - DNA, 25 bp, Artificial
  Probe
ctttatgccaggaatcttgaagtca

SEQ ID NO: 161550 - DNA, 25 bp, Artificial
  Probe
aatgttgtctatgatgggaagaaag

SEQ ID NO: 161551 - DNA, 25 bp, Artificial
  Probe
tacatactgggtctcctttctcaac

SEQ ID NO: 161552 - DNA, 25 bp, Artificial
  Probe
tttctgctttctctctcatttctga

SEQ ID NO: 161553 - DNA, 25 bp, Artificial
  Probe
tacattgtctctgaacctttctcct

SEQ ID NO: 161554 - DNA, 25 bp, Artificial
  Probe
tcctacattgtctctgaacctttct

SEQ ID NO: 161555 - DNA, 25 bp, Artificial
  Probe
ttaagtctggagtaggaagcctcat

SEQ ID NO: 161556 - DNA, 25 bp, Artificial
  Probe
aagttcttcaagcaacccagatatg

SEQ ID NO: 161557 - DNA, 25 bp, Artificial
  Probe
ttgtctatgatgggaagaaaggtac

SEQ ID NO: 161558 - DNA, 25 bp, Artificial
  Probe
ccaagatgtaccttcctcctttatg

SEQ ID NO: 161559 - DNA, 25 bp, Artificial
  Probe
tccaagatgtaccttcctcctttat

SEQ ID NO: 161560 - DNA, 25 bp, Artificial
  Probe
tagtgggtttaagtctggagtagga

SEQ ID NO: 161561 - DNA, 25 bp, Artificial
  Probe
tgttgtctatgatgggaagaaaggt

SEQ ID NO: 161562 - DNA, 25 bp, Artificial
  Probe
tgctatctgcttcaacatctcttat

SEQ ID NO: 161563 - DNA, 25 bp, Artificial
  Probe
gtgctatctgcttcaacatctctta

SEQ ID NO: 161564 - DNA, 25 bp, Artificial
  Probe
gctatctgcttcaacatctcttatg

SEQ ID NO: 161565 - DNA, 25 bp, Artificial
  Probe
cagtacaatcttagaggtgctagtc

SEQ ID NO: 161566 - DNA, 25 bp, Artificial
  Probe
acagtacaatcttagaggtgctagt

SEQ ID NO: 161567 - DNA, 25 bp, Artificial
  Probe
acaatcctgaggtgaagaagaagat

SEQ ID NO: 161568 - DNA, 25 bp, Artificial
  Probe
caatcctgaggtgaagaagaagatc

SEQ ID NO: 161569 - DNA, 25 bp, Artificial
  Probe
agtacaatcttagaggtgctagtcc

SEQ ID NO: 161570 - DNA, 25 bp, Artificial
  Probe
taaccaacatcatctgtgctatctg

SEQ ID NO: 161571 - DNA, 25 bp, Artificial
  Probe
gtaaccaacatcatctgtgctatct

SEQ ID NO: 161572 - DNA, 25 bp, Artificial
  Probe
agtaaccaacatcatctgtgctatc

SEQ ID NO: 161573 - DNA, 25 bp, Artificial
  Probe
gacattctgattcaagccaagatga

SEQ ID NO: 161574 - DNA, 25 bp, Artificial
  Probe
catcatctgtgctatctgcttcaac

SEQ ID NO: 161575 - DNA, 25 bp, Artificial
  Probe
cagtaaccaacatcatctgtgctat

SEQ ID NO: 161576 - DNA, 25 bp, Artificial
  Probe
gcctatcttcatgtcagtaaccaac

SEQ ID NO: 161577 - DNA, 25 bp, Artificial
  Probe
ctatctgcttcaacatctcttatga

SEQ ID NO: 161578 - DNA, 25 bp, Artificial
  Probe
aatcctgaggtgaagaagaagatcc

SEQ ID NO: 161579 - DNA, 25 bp, Artificial
  Probe
tatctgcttcaacatctcttatgag

SEQ ID NO: 161580 - DNA, 25 bp, Artificial
  Probe
cctatcttcatgtcagtaaccaaca

SEQ ID NO: 161581 - DNA, 25 bp, Artificial
  Probe
ggacattctgattcaagccaagatg

SEQ ID NO: 161582 - DNA, 25 bp, Artificial
  Probe
cacagtacaatcttagaggtgctag

SEQ ID NO: 161583 - DNA, 25 bp, Artificial
  Probe
tcagtaaccaacatcatctgtgcta

SEQ ID NO: 161584 - DNA, 25 bp, Artificial
  Probe
atctgtgctatctgcttcaacatct

SEQ ID NO: 161585 - DNA, 25 bp, Artificial
  Probe
catctgtgctatctgcttcaacatc

SEQ ID NO: 161586 - DNA, 25 bp, Artificial
  Probe
caacatcatctgtgctatctgcttc

SEQ ID NO: 161587 - DNA, 25 bp, Artificial
  Probe
tgtgctatctgcttcaacatctctt

SEQ ID NO: 161588 - DNA, 25 bp, Artificial
  Probe
ccacagtacaatcttagaggtgcta

SEQ ID NO: 161589 - DNA, 25 bp, Artificial
  Probe
tcatctgtgctatctgcttcaacat

SEQ ID NO: 161590 - DNA, 25 bp, Artificial
  Probe
atcatctgtgctatctgcttcaaca

SEQ ID NO: 161591 - DNA, 25 bp, Artificial
  Probe
acatcatctgtgctatctgcttcaa

SEQ ID NO: 161592 - DNA, 25 bp, Artificial
  Probe
aacatcatctgtgctatctgcttca

SEQ ID NO: 161593 - DNA, 25 bp, Artificial
  Probe
gtgataaagggttatgccaaagttc

SEQ ID NO: 161594 - DNA, 25 bp, Artificial
  Probe
atcctgaggtgaagaagaagatcca

SEQ ID NO: 161595 - DNA, 25 bp, Artificial
  Probe
cacaatcctgaggtgaagaagaaga

SEQ ID NO: 161596 - DNA, 25 bp, Artificial
  Probe
cgcctatcttcatgtcagtaaccaa

SEQ ID NO: 161597 - DNA, 25 bp, Artificial
  Probe
ctgtgctatctgcttcaacatctct

SEQ ID NO: 161598 - DNA, 25 bp, Artificial
  Probe
tctgtgctatctgcttcaacatctc

SEQ ID NO: 161599 - DNA, 25 bp, Artificial
  Probe
tcctgaggtgaagaagaagatccaa

SEQ ID NO: 161600 - DNA, 25 bp, Artificial
  Probe
ctaatctgtcaggaagccaagtcac

SEQ ID NO: 161601 - DNA, 25 bp, Artificial
  Probe
catagagacaactaccactgtgctc

SEQ ID NO: 161602 - DNA, 25 bp, Artificial
  Probe
tggatgtgtcagatgataaacaact

SEQ ID NO: 161603 - DNA, 25 bp, Artificial
  Probe
acttggatgtgtcagatgataaaca

SEQ ID NO: 161604 - DNA, 25 bp, Artificial
  Probe
ggtgataaagggttatgccaaagtt

SEQ ID NO: 161605 - DNA, 25 bp, Artificial
  Probe
ttggatgtgtcagatgataaacaac

SEQ ID NO: 161606 - DNA, 25 bp, Artificial
  Probe
caacacccacagtacaatcttagag

SEQ ID NO: 161607 - DNA, 25 bp, Artificial
  Probe
ctccttcttacagttctggtgctaa

SEQ ID NO: 161608 - DNA, 25 bp, Artificial
  Probe
tccttcttacagttctggtgctaag

SEQ ID NO: 161609 - DNA, 25 bp, Artificial
  Probe
ggagtagagaggtaagggtcaataa

SEQ ID NO: 161610 - DNA, 25 bp, Artificial
  Probe
gagaggtaagggtcaataaagagga

SEQ ID NO: 161611 - DNA, 25 bp, Artificial
  Probe
agagaggtaagggtcaataaagagg

SEQ ID NO: 161612 - DNA, 25 bp, Artificial
  Probe
gtagagaggtaagggtcaataaaga

SEQ ID NO: 161613 - DNA, 25 bp, Artificial
  Probe
agtagagaggtaagggtcaataaag

SEQ ID NO: 161614 - DNA, 25 bp, Artificial
  Probe
gagtagagaggtaagggtcaataaa

SEQ ID NO: 161615 - DNA, 25 bp, Artificial
  Probe
tagagaggtaagggtcaataaagag

SEQ ID NO: 161616 - DNA, 25 bp, Artificial
  Probe
tggagtagagaggtaagggtcaata

SEQ ID NO: 161617 - DNA, 25 bp, Artificial
  Probe
actccttcttacagttctggtgcta

SEQ ID NO: 161618 - DNA, 25 bp, Artificial
  Probe
aataaagaggacaggagatggcttc

SEQ ID NO: 161619 - DNA, 25 bp, Artificial
  Probe
gacaaggagagacttactcaggagt

SEQ ID NO: 161620 - DNA, 25 bp, Artificial
  Probe
taagggtcaataaagaggacaggag

SEQ ID NO: 161621 - DNA, 25 bp, Artificial
  Probe
agaggtaagggtcaataaagaggac

SEQ ID NO: 161622 - DNA, 25 bp, Artificial
  Probe
ggacaaggagagacttactcaggag

SEQ ID NO: 161623 - DNA, 25 bp, Artificial
  Probe
caataaagaggacaggagatggctt

SEQ ID NO: 161624 - DNA, 25 bp, Artificial
  Probe
gtaagggtcaataaagaggacagga

SEQ ID NO: 161625 - DNA, 25 bp, Artificial
  Probe
aggtaagggtcaataaagaggacag

SEQ ID NO: 161626 - DNA, 25 bp, Artificial
  Probe
gaggtaagggtcaataaagaggaca

SEQ ID NO: 161627 - DNA, 25 bp, Artificial
  Probe
gtggagtagagaggtaagggtcaat

SEQ ID NO: 161628 - DNA, 25 bp, Artificial
  Probe
ctttgggacaaggagagacttactc

SEQ ID NO: 161629 - DNA, 25 bp, Artificial
  Probe
tggactccttcttacagttctggtg

SEQ ID NO: 161630 - DNA, 25 bp, Artificial
  Probe
ctggactccttcttacagttctggt

SEQ ID NO: 161631 - DNA, 25 bp, Artificial
  Probe
acctggactccttcttacagttctg

SEQ ID NO: 161632 - DNA, 25 bp, Artificial
  Probe
cacctggactccttcttacagttct

SEQ ID NO: 161633 - DNA, 25 bp, Artificial
  Probe
tcaataaagaggacaggagatggct

SEQ ID NO: 161634 - DNA, 25 bp, Artificial
  Probe
cactttgggacaaggagagacttac

SEQ ID NO: 161635 - DNA, 25 bp, Artificial
  Probe
gtactgacacaataaagcagctatg

SEQ ID NO: 161636 - DNA, 25 bp, Artificial
  Probe
tactgacacaataaagcagctatgt

SEQ ID NO: 161637 - DNA, 25 bp, Artificial
  Probe
ctgacacaataaagcagctatgttc

SEQ ID NO: 161638 - DNA, 25 bp, Artificial
  Probe
ggtcaataaagaggacaggagatgg

SEQ ID NO: 161639 - DNA, 25 bp, Artificial
  Probe
gggtcaataaagaggacaggagatg

SEQ ID NO: 161640 - DNA, 25 bp, Artificial
  Probe
ggtaagggtcaataaagaggacagg

SEQ ID NO: 161641 - DNA, 25 bp, Artificial
  Probe
actttgggacaaggagagacttact

SEQ ID NO: 161642 - DNA, 25 bp, Artificial
  Probe
tcactttgggacaaggagagactta

SEQ ID NO: 161643 - DNA, 25 bp, Artificial
  Probe
acacctggactccttcttacagttc

SEQ ID NO: 161644 - DNA, 25 bp, Artificial
  Probe
gacacctggactccttcttacagtt

SEQ ID NO: 161645 - DNA, 25 bp, Artificial
  Probe
agggtcaataaagaggacaggagat

SEQ ID NO: 161646 - DNA, 25 bp, Artificial
  Probe
cttcactgagctgcaatgttcctta

SEQ ID NO: 161647 - DNA, 25 bp, Artificial
  Probe
gactccttcttacagttctggtgct

SEQ ID NO: 161648 - DNA, 25 bp, Artificial
  Probe
acaataaagcagctatgttcccaaa

SEQ ID NO: 161649 - DNA, 25 bp, Artificial
  Probe
actgacacaataaagcagctatgtt

SEQ ID NO: 161650 - DNA, 25 bp, Artificial
  Probe
tttgggacaaggagagacttactca

SEQ ID NO: 161651 - DNA, 25 bp, Artificial
  Probe
caagtggagtagagaggtaagggtc

SEQ ID NO: 161652 - DNA, 25 bp, Artificial
  Probe
ttgccttctgaattgtgattagtga

SEQ ID NO: 161653 - DNA, 25 bp, Artificial
  Probe
tgccttctgaattgtgattagtgaa

SEQ ID NO: 161654 - DNA, 25 bp, Artificial
  Probe
aaacatttcctaagagacaacagtg

SEQ ID NO: 161655 - DNA, 25 bp, Artificial
  Probe
aaatcatcagaaaccgaagtcaaga

SEQ ID NO: 161656 - DNA, 25 bp, Artificial
  Probe
tggaacattatagatgctgcaagat

SEQ ID NO: 161657 - DNA, 25 bp, Artificial
  Probe
tttgccttctgaattgtgattagtg

SEQ ID NO: 161658 - DNA, 25 bp, Artificial
  Probe
gttgattgcacagtagatgatatga

SEQ ID NO: 161659 - DNA, 25 bp, Artificial
  Probe
attatagatgctgcaagatacactg

SEQ ID NO: 161660 - DNA, 25 bp, Artificial
  Probe
acattatagatgctgcaagatacac

SEQ ID NO: 161661 - DNA, 25 bp, Artificial
  Probe
ctggaacattatagatgctgcaaga

SEQ ID NO: 161662 - DNA, 25 bp, Artificial
  Probe
ttgttgtctcagaagaaatgggtta

SEQ ID NO: 161663 - DNA, 25 bp, Artificial
  Probe
gccttctgaattgtgattagtgaaa

SEQ ID NO: 161664 - DNA, 25 bp, Artificial
  Probe
tgttgtctcagaagaaatgggttaa

SEQ ID NO: 161665 - DNA, 25 bp, Artificial
  Probe
gaaaggctggaacattatagatgct

SEQ ID NO: 161666 - DNA, 25 bp, Artificial
  Probe
gttgtctcagaagaaatgggttaaa

SEQ ID NO: 161667 - DNA, 25 bp, Artificial
  Probe
cattatagatgctgcaagatacact

SEQ ID NO: 161668 - DNA, 25 bp, Artificial
  Probe
ggaacattatagatgctgcaagata

SEQ ID NO: 161669 - DNA, 25 bp, Artificial
  Probe
tgattgcacagtagatgatatgatc

SEQ ID NO: 161670 - DNA, 25 bp, Artificial
  Probe
ttgtctcagaagaaatgggttaaag

SEQ ID NO: 161671 - DNA, 25 bp, Artificial
  Probe
aaaggctggaacattatagatgctg

SEQ ID NO: 161672 - DNA, 25 bp, Artificial
  Probe
tctcagaagaaatgggttaaagcag

SEQ ID NO: 161673 - DNA, 25 bp, Artificial
  Probe
ttccttgttgtctcagaagaaatgg

SEQ ID NO: 161674 - DNA, 25 bp, Artificial
  Probe
aatcatcagaaaccgaagtcaagac

SEQ ID NO: 161675 - DNA, 25 bp, Artificial
  Probe
gtctcagaagaaatgggttaaagca

SEQ ID NO: 161676 - DNA, 25 bp, Artificial
  Probe
tgtctcagaagaaatgggttaaagc

SEQ ID NO: 161677 - DNA, 25 bp, Artificial
  Probe
aacattatagatgctgcaagataca

SEQ ID NO: 161678 - DNA, 25 bp, Artificial
  Probe
cggaaaggctggaacattatagatg

SEQ ID NO: 161679 - DNA, 25 bp, Artificial
  Probe
tgttgattgcacagtagatgatatg

SEQ ID NO: 161680 - DNA, 25 bp, Artificial
  Probe
cttgttgtctcagaagaaatgggtt

SEQ ID NO: 161681 - DNA, 25 bp, Artificial
  Probe
aaggctggaacattatagatgctgc

SEQ ID NO: 161682 - DNA, 25 bp, Artificial
  Probe
acggaaaggctggaacattatagat

SEQ ID NO: 161683 - DNA, 25 bp, Artificial
  Probe
ttgattgcacagtagatgatatgat

SEQ ID NO: 161684 - DNA, 25 bp, Artificial
  Probe
aacatttcctaagagacaacagtgt

SEQ ID NO: 161685 - DNA, 25 bp, Artificial
  Probe
ctcagaagaaatgggttaaagcagg

SEQ ID NO: 161686 - DNA, 25 bp, Artificial
  Probe
ggaaaggctggaacattatagatgc

SEQ ID NO: 161687 - DNA, 25 bp, Artificial
  Probe
gaacattatagatgctgcaagatac

SEQ ID NO: 161688 - DNA, 25 bp, Artificial
  Probe
ttgttgattgcacagtagatgatat

SEQ ID NO: 161689 - DNA, 25 bp, Artificial
  Probe
gctggaacattatagatgctgcaag

SEQ ID NO: 161690 - DNA, 25 bp, Artificial
  Probe
tttcctaagagacaacagtgtttct

SEQ ID NO: 161691 - DNA, 25 bp, Artificial
  Probe
acatttcctaagagacaacagtgtt

SEQ ID NO: 161692 - DNA, 25 bp, Artificial
  Probe
catttcctaagagacaacagtgttt

SEQ ID NO: 161693 - DNA, 25 bp, Artificial
  Probe
atttcctaagagacaacagtgtttc

SEQ ID NO: 161694 - DNA, 25 bp, Artificial
  Probe
tccgatttattcagaatcagagcat

SEQ ID NO: 161695 - DNA, 25 bp, Artificial
  Probe
cacggaaaggctggaacattataga

SEQ ID NO: 161696 - DNA, 25 bp, Artificial
  Probe
tcacggaaaggctggaacattatag

SEQ ID NO: 161697 - DNA, 25 bp, Artificial
  Probe
cgagtggatgtactggtctgtaatg

SEQ ID NO: 161698 - DNA, 25 bp, Artificial
  Probe
gtggatgtactggtctgtaatgctg

SEQ ID NO: 161699 - DNA, 25 bp, Artificial
  Probe
gagtggatgtactggtctgtaatgc

SEQ ID NO: 161700 - DNA, 25 bp, Artificial
  Probe
gatgtactggtctgtaatgctggac

SEQ ID NO: 161701 - DNA, 25 bp, Artificial
  Probe
agtggatgtactggtctgtaatgct

SEQ ID NO: 161702 - DNA, 25 bp, Artificial
  Probe
tcgagtggatgtactggtctgtaat

SEQ ID NO: 161703 - DNA, 25 bp, Artificial
  Probe
agagcttcaaagtttatgccacatt

SEQ ID NO: 161704 - DNA, 25 bp, Artificial
  Probe
gagcttcaaagtttatgccacattg

SEQ ID NO: 161705 - DNA, 25 bp, Artificial
  Probe
ggatgtactggtctgtaatgctgga

SEQ ID NO: 161706 - DNA, 25 bp, Artificial
  Probe
cagagcttcaaagtttatgccacat

SEQ ID NO: 161707 - DNA, 25 bp, Artificial
  Probe
tggatgtactggtctgtaatgctgg

SEQ ID NO: 161708 - DNA, 25 bp, Artificial
  Probe
cgttcccagagcttcaaagtttatg

SEQ ID NO: 161709 - DNA, 25 bp, Artificial
  Probe
gtcgagtggatgtactggtctgtaa

SEQ ID NO: 161710 - DNA, 25 bp, Artificial
  Probe
gttcccagagcttcaaagtttatgc

SEQ ID NO: 161711 - DNA, 25 bp, Artificial
  Probe
cttcaaagtttatgccacattgcgg

SEQ ID NO: 161712 - DNA, 25 bp, Artificial
  Probe
ccgttcccagagcttcaaagtttat

SEQ ID NO: 161713 - DNA, 25 bp, Artificial
  Probe
agcttcaaagtttatgccacattgc

SEQ ID NO: 161714 - DNA, 25 bp, Artificial
  Probe
atgtactggtctgtaatgctggacg

SEQ ID NO: 161715 - DNA, 25 bp, Artificial
  Probe
ttcccagagcttcaaagtttatgcc

SEQ ID NO: 161716 - DNA, 25 bp, Artificial
  Probe
gcttcaaagtttatgccacattgcg

SEQ ID NO: 161717 - DNA, 25 bp, Artificial
  Probe
ccagagcttcaaagtttatgccaca

SEQ ID NO: 161718 - DNA, 25 bp, Artificial
  Probe
aaagtttatgccacattgcgggatc

SEQ ID NO: 161719 - DNA, 25 bp, Artificial
  Probe
caaagtttatgccacattgcgggat

SEQ ID NO: 161720 - DNA, 25 bp, Artificial
  Probe
ttcaaagtttatgccacattgcggg

SEQ ID NO: 161721 - DNA, 25 bp, Artificial
  Probe
cccagagcttcaaagtttatgccac

SEQ ID NO: 161722 - DNA, 25 bp, Artificial
  Probe
accgttcccagagcttcaaagttta

SEQ ID NO: 161723 - DNA, 25 bp, Artificial
  Probe
ggtcgagtggatgtactggtctgta

SEQ ID NO: 161724 - DNA, 25 bp, Artificial
  Probe
tcccagagcttcaaagtttatgcca

SEQ ID NO: 161725 - DNA, 25 bp, Artificial
  Probe
aagtttatgccacattgcgggatct

SEQ ID NO: 161726 - DNA, 25 bp, Artificial
  Probe
cttggtgtttggttcttcattcttt

SEQ ID NO: 161727 - DNA, 25 bp, Artificial
  Probe
ggaataactattgaaatgacggtgt

SEQ ID NO: 161728 - DNA, 25 bp, Artificial
  Probe
aggaataactattgaaatgacggtg

SEQ ID NO: 161729 - DNA, 25 bp, Artificial
  Probe
acttggtgtttggttcttcattctt

SEQ ID NO: 161730 - DNA, 25 bp, Artificial
  Probe
ttactcagatttacgccttacaaag

SEQ ID NO: 161731 - DNA, 25 bp, Artificial
  Probe
tttactcagatttacgccttacaaa

SEQ ID NO: 161732 - DNA, 25 bp, Artificial
  Probe
gacttggtgtttggttcttcattct

SEQ ID NO: 161733 - DNA, 25 bp, Artificial
  Probe
aaggaataactattgaaatgacggt

SEQ ID NO: 161734 - DNA, 25 bp, Artificial
  Probe
agacttggtgtttggttcttcattc

SEQ ID NO: 161735 - DNA, 25 bp, Artificial
  Probe
aaaggaataactattgaaatgacgg

SEQ ID NO: 161736 - DNA, 25 bp, Artificial
  Probe
gaataactattgaaatgacggtgtt

SEQ ID NO: 161737 - DNA, 25 bp, Artificial
  Probe
tgagctaccactttcctaaatagaa

SEQ ID NO: 161738 - DNA, 25 bp, Artificial
  Probe
tcaaatctgctttatcaaatgtgaa

SEQ ID NO: 161739 - DNA, 25 bp, Artificial
  Probe
ttcaaatctgctttatcaaatgtga

SEQ ID NO: 161740 - DNA, 25 bp, Artificial
  Probe
ttatcaaatgtgaagctcatcttgc

SEQ ID NO: 161741 - DNA, 25 bp, Artificial
  Probe
aactattgaaatgacggtgttaatt

SEQ ID NO: 161742 - DNA, 25 bp, Artificial
  Probe
caaatctgctttatcaaatgtgaag

SEQ ID NO: 161743 - DNA, 25 bp, Artificial
  Probe
tttcaaatctgctttatcaaatgtg

SEQ ID NO: 161744 - DNA, 25 bp, Artificial
  Probe
gcacaaaggaataactattgaaatg

SEQ ID NO: 161745 - DNA, 25 bp, Artificial
  Probe
actattgaaatgacggtgttaattt

SEQ ID NO: 161746 - DNA, 25 bp, Artificial
  Probe
tgtgagctaccactttcctaaatag

SEQ ID NO: 161747 - DNA, 25 bp, Artificial
  Probe
ctgtgagctaccactttcctaaata

SEQ ID NO: 161748 - DNA, 25 bp, Artificial
  Probe
gtgagctaccactttcctaaataga

SEQ ID NO: 161749 - DNA, 25 bp, Artificial
  Probe
tttaagacttggtgtttggttcttc

SEQ ID NO: 161750 - DNA, 25 bp, Artificial
  Probe
tgttaatatgttaccaaagtagagc

SEQ ID NO: 161751 - DNA, 25 bp, Artificial
  Probe
taagacttggtgtttggttcttcat

SEQ ID NO: 161752 - DNA, 25 bp, Artificial
  Probe
tatcaaatgtgaagctcatcttgca

SEQ ID NO: 161753 - DNA, 25 bp, Artificial
  Probe
ttaagacttggtgtttggttcttca

SEQ ID NO: 161754 - DNA, 25 bp, Artificial
  Probe
caacatttactatgcacaaaggaat

SEQ ID NO: 161755 - DNA, 25 bp, Artificial
  Probe
ttggtgtttggttcttcattctttt

SEQ ID NO: 161756 - DNA, 25 bp, Artificial
  Probe
tttatcaaatgtgaagctcatcttg

SEQ ID NO: 161757 - DNA, 25 bp, Artificial
  Probe
acttttaagacttggtgtttggttc

SEQ ID NO: 161758 - DNA, 25 bp, Artificial
  Probe
gacttttaagacttggtgtttggtt

SEQ ID NO: 161759 - DNA, 25 bp, Artificial
  Probe
ttgacttttaagacttggtgtttgg

SEQ ID NO: 161760 - DNA, 25 bp, Artificial
  Probe
caaaggaataactattgaaatgacg

SEQ ID NO: 161761 - DNA, 25 bp, Artificial
  Probe
tggtgtttggttcttcattctttta

SEQ ID NO: 161762 - DNA, 25 bp, Artificial
  Probe
gcatttgacttttaagacttggtgt

SEQ ID NO: 161763 - DNA, 25 bp, Artificial
  Probe
aagacttggtgtttggttcttcatt

SEQ ID NO: 161764 - DNA, 25 bp, Artificial
  Probe
cttttactcagatttacgccttaca

SEQ ID NO: 161765 - DNA, 25 bp, Artificial
  Probe
ggtgtttggttcttcattcttttac

SEQ ID NO: 161766 - DNA, 25 bp, Artificial
  Probe
ctttatcaaatgtgaagctcatctt

SEQ ID NO: 161767 - DNA, 25 bp, Artificial
  Probe
tgacttttaagacttggtgtttggt

SEQ ID NO: 161768 - DNA, 25 bp, Artificial
  Probe
cttttaagacttggtgtttggttct

SEQ ID NO: 161769 - DNA, 25 bp, Artificial
  Probe
cattcttttactcagatttacgcct

SEQ ID NO: 161770 - DNA, 25 bp, Artificial
  Probe
tcattcttttactcagatttacgcc

SEQ ID NO: 161771 - DNA, 25 bp, Artificial
  Probe
ttgttcctctgtagttgtacctaag

SEQ ID NO: 161772 - DNA, 25 bp, Artificial
  Probe
cttgttcctctgtagttgtacctaa

SEQ ID NO: 161773 - DNA, 25 bp, Artificial
  Probe
tcttgttcctctgtagttgtaccta

SEQ ID NO: 161774 - DNA, 25 bp, Artificial
  Probe
ttcttgttcctctgtagttgtacct

SEQ ID NO: 161775 - DNA, 25 bp, Artificial
  Probe
tattccttctatcaacattggctag

SEQ ID NO: 161776 - DNA, 25 bp, Artificial
  Probe
tgttcctctgtagttgtacctaagc

SEQ ID NO: 161777 - DNA, 25 bp, Artificial
  Probe
ttattccttctatcaacattggcta

SEQ ID NO: 161778 - DNA, 25 bp, Artificial
  Probe
tgtttcttgttcctctgtagttgta

SEQ ID NO: 161779 - DNA, 25 bp, Artificial
  Probe
gagatttcagttgtgttaaaggctt

SEQ ID NO: 161780 - DNA, 25 bp, Artificial
  Probe
ttcctctgtagttgtacctaagctg

SEQ ID NO: 161781 - DNA, 25 bp, Artificial
  Probe
gttcctctgtagttgtacctaagct

SEQ ID NO: 161782 - DNA, 25 bp, Artificial
  Probe
tacctaagctgactccaagtacatt

SEQ ID NO: 161783 - DNA, 25 bp, Artificial
  Probe
agtgtttcttgttcctctgtagttg

SEQ ID NO: 161784 - DNA, 25 bp, Artificial
  Probe
gtgtttcttgttcctctgtagttgt

SEQ ID NO: 161785 - DNA, 25 bp, Artificial
  Probe
cgttcaacaacccaatagtttatcc

SEQ ID NO: 161786 - DNA, 25 bp, Artificial
  Probe
gttcaacaacccaatagtttatcca

SEQ ID NO: 161787 - DNA, 25 bp, Artificial
  Probe
tctgtagttgtacctaagctgactc

SEQ ID NO: 161788 - DNA, 25 bp, Artificial
  Probe
ctctgtagttgtacctaagctgact

SEQ ID NO: 161789 - DNA, 25 bp, Artificial
  Probe
ttatcccatttgtaggtttctaggc

SEQ ID NO: 161790 - DNA, 25 bp, Artificial
  Probe
ttcaacaacccaatagtttatccag

SEQ ID NO: 161791 - DNA, 25 bp, Artificial
  Probe
tatggagaaagaattgatattgccc

SEQ ID NO: 161792 - DNA, 25 bp, Artificial
  Probe
agatttcagttgtgttaaaggcttt

SEQ ID NO: 161793 - DNA, 25 bp, Artificial
  Probe
agactccattggatctctctgaata

SEQ ID NO: 161794 - DNA, 25 bp, Artificial
  Probe
tagactccattggatctctctgaat

SEQ ID NO: 161795 - DNA, 25 bp, Artificial
  Probe
tagttgtacctaagctgactccaag

SEQ ID NO: 161796 - DNA, 25 bp, Artificial
  Probe
actccattggatctctctgaatatg

SEQ ID NO: 161797 - DNA, 25 bp, Artificial
  Probe
ttgagatttcagttgtgttaaaggc

SEQ ID NO: 161798 - DNA, 25 bp, Artificial
  Probe
gactccattggatctctctgaatat

SEQ ID NO: 161799 - DNA, 25 bp, Artificial
  Probe
cctctgtagttgtacctaagctgac

SEQ ID NO: 161800 - DNA, 25 bp, Artificial
  Probe
tcctctgtagttgtacctaagctga

SEQ ID NO: 161801 - DNA, 25 bp, Artificial
  Probe
ctagactccattggatctctctgaa

SEQ ID NO: 161802 - DNA, 25 bp, Artificial
  Probe
tttattccttctatcaacattggct

SEQ ID NO: 161803 - DNA, 25 bp, Artificial
  Probe
tagtttatttaacagactgccacca

SEQ ID NO: 161804 - DNA, 25 bp, Artificial
  Probe
gtagtttatttaacagactgccacc

SEQ ID NO: 161805 - DNA, 25 bp, Artificial
  Probe
ggtagtttatttaacagactgccac

SEQ ID NO: 161806 - DNA, 25 bp, Artificial
  Probe
gttgtacctaagctgactccaagta

SEQ ID NO: 161807 - DNA, 25 bp, Artificial
  Probe
gtagttgtacctaagctgactccaa

SEQ ID NO: 161808 - DNA, 25 bp, Artificial
  Probe
tttcttgttcctctgtagttgtacc

SEQ ID NO: 161809 - DNA, 25 bp, Artificial
  Probe
gtttcttgttcctctgtagttgtac

SEQ ID NO: 161810 - DNA, 25 bp, Artificial
  Probe
tgagatttcagttgtgttaaaggct

SEQ ID NO: 161811 - DNA, 25 bp, Artificial
  Probe
tcaacaacccaatagtttatccagc

SEQ ID NO: 161812 - DNA, 25 bp, Artificial
  Probe
atttgtaggtttctaggcaagttga

SEQ ID NO: 161813 - DNA, 25 bp, Artificial
  Probe
catttgtaggtttctaggcaagttg

SEQ ID NO: 161814 - DNA, 25 bp, Artificial
  Probe
tatcccatttgtaggtttctaggca

SEQ ID NO: 161815 - DNA, 25 bp, Artificial
  Probe
cattggatctctctgaatatgggaa

SEQ ID NO: 161816 - DNA, 25 bp, Artificial
  Probe
cgagagtatttgacaacctttatgc

SEQ ID NO: 161817 - DNA, 25 bp, Artificial
  Probe
ccgagagtatttgacaacctttatg

SEQ ID NO: 161818 - DNA, 25 bp, Artificial
  Probe
tccgagagtatttgacaacctttat

SEQ ID NO: 161819 - DNA, 25 bp, Artificial
  Probe
gtatttgacaacctttatgctgctc

SEQ ID NO: 161820 - DNA, 25 bp, Artificial
  Probe
gagtatttgacaacctttatgctgc

SEQ ID NO: 161821 - DNA, 25 bp, Artificial
  Probe
agagtatttgacaacctttatgctg

SEQ ID NO: 161822 - DNA, 25 bp, Artificial
  Probe
agtatttgacaacctttatgctgct

SEQ ID NO: 161823 - DNA, 25 bp, Artificial
  Probe
gagagtatttgacaacctttatgct

SEQ ID NO: 161824 - DNA, 25 bp, Artificial
  Probe
gacaacctttatgctgctcattaaa

SEQ ID NO: 161825 - DNA, 25 bp, Artificial
  Probe
ctccgagagtatttgacaaccttta

SEQ ID NO: 161826 - DNA, 25 bp, Artificial
  Probe
tgacaacctttatgctgctcattaa

SEQ ID NO: 161827 - DNA, 25 bp, Artificial
  Probe
ttgacaacctttatgctgctcatta

SEQ ID NO: 161828 - DNA, 25 bp, Artificial
  Probe
tatttgacaacctttatgctgctca

SEQ ID NO: 161829 - DNA, 25 bp, Artificial
  Probe
atttgacaacctttatgctgctcat

SEQ ID NO: 161830 - DNA, 25 bp, Artificial
  Probe
atccctaagattccatgttcctgat

SEQ ID NO: 161831 - DNA, 25 bp, Artificial
  Probe
tttgacaacctttatgctgctcatt

SEQ ID NO: 161832 - DNA, 25 bp, Artificial
  Probe
tccctaagattccatgttcctgatc

SEQ ID NO: 161833 - DNA, 25 bp, Artificial
  Probe
cacacacacatccctaagattccat

SEQ ID NO: 161834 - DNA, 25 bp, Artificial
  Probe
catccctaagattccatgttcctga

SEQ ID NO: 161835 - DNA, 25 bp, Artificial
  Probe
acacacacacacatccctaagattc

SEQ ID NO: 161836 - DNA, 25 bp, Artificial
  Probe
tctttgagtttgctcccagagaatt

SEQ ID NO: 161837 - DNA, 25 bp, Artificial
  Probe
ctaagattccatgttcctgatcacc

SEQ ID NO: 161838 - DNA, 25 bp, Artificial
  Probe
cctaagattccatgttcctgatcac

SEQ ID NO: 161839 - DNA, 25 bp, Artificial
  Probe
cacacacacacacatccctaagatt

SEQ ID NO: 161840 - DNA, 25 bp, Artificial
  Probe
cctccgagagtatttgacaaccttt

SEQ ID NO: 161841 - DNA, 25 bp, Artificial
  Probe
taagattccatgttcctgatcacct

SEQ ID NO: 161842 - DNA, 25 bp, Artificial
  Probe
acacacacatccctaagattccatg

SEQ ID NO: 161843 - DNA, 25 bp, Artificial
  Probe
tttgaaacagtctttgagtttgctc

SEQ ID NO: 161844 - DNA, 25 bp, Artificial
  Probe
ctttgaaacagtctttgagtttgct

SEQ ID NO: 161845 - DNA, 25 bp, Artificial
  Probe
ccctttgaaacagtctttgagtttg

SEQ ID NO: 161846 - DNA, 25 bp, Artificial
  Probe
gttctgttttcatctgtttcccata

SEQ ID NO: 161847 - DNA, 25 bp, Artificial
  Probe
cacacacacacatccctaagattcc

SEQ ID NO: 161848 - DNA, 25 bp, Artificial
  Probe
gtctttgagtttgctcccagagaat

SEQ ID NO: 161849 - DNA, 25 bp, Artificial
  Probe
ctaggtccacctcgaactactttat

SEQ ID NO: 161850 - DNA, 25 bp, Artificial
  Probe
taggtccacctcgaactactttatg

SEQ ID NO: 161851 - DNA, 25 bp, Artificial
  Probe
ccttttgttttctttctgtccccta

SEQ ID NO: 161852 - DNA, 25 bp, Artificial
  Probe
cctttgaaacagtctttgagtttgc

SEQ ID NO: 161853 - DNA, 25 bp, Artificial
  Probe
tcctccgagagtatttgacaacctt

SEQ ID NO: 161854 - DNA, 25 bp, Artificial
  Probe
cttttgttttctttctgtcccctag

SEQ ID NO: 161855 - DNA, 25 bp, Artificial
  Probe
ctcattaaaaccacagcaattcaaa

SEQ ID NO: 161856 - DNA, 25 bp, Artificial
  Probe
ctttatgctgctcattaaaaccaca

SEQ ID NO: 161857 - DNA, 25 bp, Artificial
  Probe
aacctttatgctgctcattaaaacc

SEQ ID NO: 161858 - DNA, 25 bp, Artificial
  Probe
acaacctttatgctgctcattaaaa

SEQ ID NO: 161859 - DNA, 25 bp, Artificial
  Probe
aactactttatgccccaagacaatc

SEQ ID NO: 161860 - DNA, 25 bp, Artificial
  Probe
gaactactttatgccccaagacaat

SEQ ID NO: 161861 - DNA, 25 bp, Artificial
  Probe
aagcattgtcctctaatagtgttca

SEQ ID NO: 161862 - DNA, 25 bp, Artificial
  Probe
atcattcaacatacatcattccagg

SEQ ID NO: 161863 - DNA, 25 bp, Artificial
  Probe
acttctatgcctgaatactatgacg

SEQ ID NO: 161864 - DNA, 25 bp, Artificial
  Probe
tggagacttctatgcctgaatacta

SEQ ID NO: 161865 - DNA, 25 bp, Artificial
  Probe
tcattcaacatacatcattccagga

SEQ ID NO: 161866 - DNA, 25 bp, Artificial
  Probe
gatggagacttctatgcctgaatac

SEQ ID NO: 161867 - DNA, 25 bp, Artificial
  Probe
attcaacatacatcattccaggaga

SEQ ID NO: 161868 - DNA, 25 bp, Artificial
  Probe
cattcaacatacatcattccaggag

SEQ ID NO: 161869 - DNA, 25 bp, Artificial
  Probe
ttcaacatacatcattccaggagat

SEQ ID NO: 161870 - DNA, 25 bp, Artificial
  Probe
ggagacttctatgcctgaatactat

SEQ ID NO: 161871 - DNA, 25 bp, Artificial
  Probe
atggagacttctatgcctgaatact

SEQ ID NO: 161872 - DNA, 25 bp, Artificial
  Probe
tgatggagacttctatgcctgaata

SEQ ID NO: 161873 - DNA, 25 bp, Artificial
  Probe
agcattgtcctctaatagtgttcaa

SEQ ID NO: 161874 - DNA, 25 bp, Artificial
  Probe
caagcattgtcctctaatagtgttc

SEQ ID NO: 161875 - DNA, 25 bp, Artificial
  Probe
gacttctatgcctgaatactatgac

SEQ ID NO: 161876 - DNA, 25 bp, Artificial
  Probe
agacttctatgcctgaatactatga

SEQ ID NO: 161877 - DNA, 25 bp, Artificial
  Probe
tgaccttctcattgttacttatcct

SEQ ID NO: 161878 - DNA, 25 bp, Artificial
  Probe
gagacttctatgcctgaatactatg

SEQ ID NO: 161879 - DNA, 25 bp, Artificial
  Probe
gctagtagacagaatcattcaacat

SEQ ID NO: 161880 - DNA, 25 bp, Artificial
  Probe
agacagaatcattcaacatacatca

SEQ ID NO: 161881 - DNA, 25 bp, Artificial
  Probe
aatcattcaacatacatcattccag

SEQ ID NO: 161882 - DNA, 25 bp, Artificial
  Probe
gtgatggagacttctatgcctgaat

SEQ ID NO: 161883 - DNA, 25 bp, Artificial
  Probe
gaccttctcattgttacttatccta

SEQ ID NO: 161884 - DNA, 25 bp, Artificial
  Probe
aagagaagttgtgaagctgatagag

SEQ ID NO: 161885 - DNA, 25 bp, Artificial
  Probe
gaagagaagttgtgaagctgataga

SEQ ID NO: 161886 - DNA, 25 bp, Artificial
  Probe
gagaagttgtgaagctgatagagtt

SEQ ID NO: 161887 - DNA, 25 bp, Artificial
  Probe
caattattcaatgctgccagagacc

SEQ ID NO: 161888 - DNA, 25 bp, Artificial
  Probe
ccaattattcaatgctgccagagac

SEQ ID NO: 161889 - DNA, 25 bp, Artificial
  Probe
cagagctagtagacagaatcattca

SEQ ID NO: 161890 - DNA, 25 bp, Artificial
  Probe
agctagtagacagaatcattcaaca

SEQ ID NO: 161891 - DNA, 25 bp, Artificial
  Probe
agaagttgtgaagctgatagagttc

SEQ ID NO: 161892 - DNA, 25 bp, Artificial
  Probe
ggaattgtaggagactggaagaacc

SEQ ID NO: 161893 - DNA, 25 bp, Artificial
  Probe
ttaacagaatacctgacctggagtg

SEQ ID NO: 161894 - DNA, 25 bp, Artificial
  Probe
gcagagctagtagacagaatcattc

SEQ ID NO: 161895 - DNA, 25 bp, Artificial
  Probe
agagaagttgtgaagctgatagagt

SEQ ID NO: 161896 - DNA, 25 bp, Artificial
  Probe
agtagacagaatcattcaacataca

SEQ ID NO: 161897 - DNA, 25 bp, Artificial
  Probe
gagctagtagacagaatcattcaac

SEQ ID NO: 161898 - DNA, 25 bp, Artificial
  Probe
aacaatccatgcaccaattattcaa

SEQ ID NO: 161899 - DNA, 25 bp, Artificial
  Probe
gaagaacaatccatgcaccaattat

SEQ ID NO: 161900 - DNA, 25 bp, Artificial
  Probe
agagctagtagacagaatcattcaa

SEQ ID NO: 161901 - DNA, 25 bp, Artificial
  Probe
acaatccatgcaccaattattcaat

SEQ ID NO: 161902 - DNA, 25 bp, Artificial
  Probe
aagaacaatccatgcaccaattatt

SEQ ID NO: 161903 - DNA, 25 bp, Artificial
  Probe
attattcaatgctgccagagaccat

SEQ ID NO: 161904 - DNA, 25 bp, Artificial
  Probe
cattccaggagatgaagaacaatcc

SEQ ID NO: 161905 - DNA, 25 bp, Artificial
  Probe
cgaagagaagttgtgaagctgatag

SEQ ID NO: 161906 - DNA, 25 bp, Artificial
  Probe
atagcatccaggtaactaacttcag

SEQ ID NO: 161907 - DNA, 25 bp, Artificial
  Probe
tagcatccaggtaactaacttcaga

SEQ ID NO: 161908 - DNA, 25 bp, Artificial
  Probe
tatagcatccaggtaactaacttca

SEQ ID NO: 161909 - DNA, 25 bp, Artificial
  Probe
atgatacagaatatagcatccaggt

SEQ ID NO: 161910 - DNA, 25 bp, Artificial
  Probe
agcatccaggtaactaacttcagaa

SEQ ID NO: 161911 - DNA, 25 bp, Artificial
  Probe
agcaatcttggaccttatcttgata

SEQ ID NO: 161912 - DNA, 25 bp, Artificial
  Probe
cagcaatcttggaccttatcttgat

SEQ ID NO: 161913 - DNA, 25 bp, Artificial
  Probe
acagaatatagcatccaggtaacta

SEQ ID NO: 161914 - DNA, 25 bp, Artificial
  Probe
tacagaatatagcatccaggtaact

SEQ ID NO: 161915 - DNA, 25 bp, Artificial
  Probe
tgatacagaatatagcatccaggta

SEQ ID NO: 161916 - DNA, 25 bp, Artificial
  Probe
catccaggtaactaacttcagaagc

SEQ ID NO: 161917 - DNA, 25 bp, Artificial
  Probe
gcatccaggtaactaacttcagaag

SEQ ID NO: 161918 - DNA, 25 bp, Artificial
  Probe
tcttggaccttatcttgataacctt

SEQ ID NO: 161919 - DNA, 25 bp, Artificial
  Probe
atcttggaccttatcttgataacct

SEQ ID NO: 161920 - DNA, 25 bp, Artificial
  Probe
ctcggtattcagagatgatacagaa

SEQ ID NO: 161921 - DNA, 25 bp, Artificial
  Probe
atccaggtaactaacttcagaagca

SEQ ID NO: 161922 - DNA, 25 bp, Artificial
  Probe
atatagcatccaggtaactaacttc

SEQ ID NO: 161923 - DNA, 25 bp, Artificial
  Probe
gaatatagcatccaggtaactaact

SEQ ID NO: 161924 - DNA, 25 bp, Artificial
  Probe
agaatatagcatccaggtaactaac

SEQ ID NO: 161925 - DNA, 25 bp, Artificial
  Probe
cagaatatagcatccaggtaactaa

SEQ ID NO: 161926 - DNA, 25 bp, Artificial
  Probe
atacagaatatagcatccaggtaac

SEQ ID NO: 161927 - DNA, 25 bp, Artificial
  Probe
gcaatcttggaccttatcttgataa

SEQ ID NO: 161928 - DNA, 25 bp, Artificial
  Probe
caggtaactaacttcagaagcacac

SEQ ID NO: 161929 - DNA, 25 bp, Artificial
  Probe
cctcggtattcagagatgatacaga

SEQ ID NO: 161930 - DNA, 25 bp, Artificial
  Probe
gatacagaatatagcatccaggtaa

SEQ ID NO: 161931 - DNA, 25 bp, Artificial
  Probe
aatcttggaccttatcttgataacc

SEQ ID NO: 161932 - DNA, 25 bp, Artificial
  Probe
aatatagcatccaggtaactaactt

SEQ ID NO: 161933 - DNA, 25 bp, Artificial
  Probe
agggaagccaagtttatgttagaaa

SEQ ID NO: 161934 - DNA, 25 bp, Artificial
  Probe
taaagatgtgagagggtgaaggata

SEQ ID NO: 161935 - DNA, 25 bp, Artificial
  Probe
tcggtattcagagatgatacagaat

SEQ ID NO: 161936 - DNA, 25 bp, Artificial
  Probe
gggaagccaagtttatgttagaaat

SEQ ID NO: 161937 - DNA, 25 bp, Artificial
  Probe
tccaggtaactaacttcagaagcac

SEQ ID NO: 161938 - DNA, 25 bp, Artificial
  Probe
agccaagtttatgttagaaatcgtt

SEQ ID NO: 161939 - DNA, 25 bp, Artificial
  Probe
aagccaagtttatgttagaaatcgt

SEQ ID NO: 161940 - DNA, 25 bp, Artificial
  Probe
cagggaagccaagtttatgttagaa

SEQ ID NO: 161941 - DNA, 25 bp, Artificial
  Probe
cttggaccttatcttgataacctta

SEQ ID NO: 161942 - DNA, 25 bp, Artificial
  Probe
aaagatgtgagagggtgaaggataa

SEQ ID NO: 161943 - DNA, 25 bp, Artificial
  Probe
tttcagggaagccaagtttatgtta

SEQ ID NO: 161944 - DNA, 25 bp, Artificial
  Probe
ccaggtaactaacttcagaagcaca

SEQ ID NO: 161945 - DNA, 25 bp, Artificial
  Probe
gaagccaagtttatgttagaaatcg

SEQ ID NO: 161946 - DNA, 25 bp, Artificial
  Probe
gagcctcggtattcagagatgatac

SEQ ID NO: 161947 - DNA, 25 bp, Artificial
  Probe
gacctaatggcatttgaaacagtta

SEQ ID NO: 161948 - DNA, 25 bp, Artificial
  Probe
ttcagggaagccaagtttatgttag

SEQ ID NO: 161949 - DNA, 25 bp, Artificial
  Probe
atgtgagagggtgaaggataagttt

SEQ ID NO: 161950 - DNA, 25 bp, Artificial
  Probe
gccaagtttatgttagaaatcgttt

SEQ ID NO: 161951 - DNA, 25 bp, Artificial
  Probe
atggagcaaggttactcttcctatt

SEQ ID NO: 161952 - DNA, 25 bp, Artificial
  Probe
tgtgcagcctaagtgttaagaataa

SEQ ID NO: 161953 - DNA, 25 bp, Artificial
  Probe
gtgcagcctaagtgttaagaataat

SEQ ID NO: 161954 - DNA, 25 bp, Artificial
  Probe
ctgtgcagcctaagtgttaagaata

SEQ ID NO: 161955 - DNA, 25 bp, Artificial
  Probe
tgcagcctaagtgttaagaataatt

SEQ ID NO: 161956 - DNA, 25 bp, Artificial
  Probe
ttaagctgtgaactcactgtacttc

SEQ ID NO: 161957 - DNA, 25 bp, Artificial
  Probe
acagactagcaaatccttgagtaaa

SEQ ID NO: 161958 - DNA, 25 bp, Artificial
  Probe
tcctttcatgtctttattcttgtgc

SEQ ID NO: 161959 - DNA, 25 bp, Artificial
  Probe
catggagcaaggttactcttcctat

SEQ ID NO: 161960 - DNA, 25 bp, Artificial
  Probe
cacagactagcaaatccttgagtaa

SEQ ID NO: 161961 - DNA, 25 bp, Artificial
  Probe
atgtctttattcttgtgcggtgatg

SEQ ID NO: 161962 - DNA, 25 bp, Artificial
  Probe
cttcttgaatgcccatttctcatac

SEQ ID NO: 161963 - DNA, 25 bp, Artificial
  Probe
cttagaacaagtttgatgactctca

SEQ ID NO: 161964 - DNA, 25 bp, Artificial
  Probe
ttcttgaatgcccatttctcataca

SEQ ID NO: 161965 - DNA, 25 bp, Artificial
  Probe
ctttcatgtctttattcttgtgcgg

SEQ ID NO: 161966 - DNA, 25 bp, Artificial
  Probe
cctttcatgtctttattcttgtgcg

SEQ ID NO: 161967 - DNA, 25 bp, Artificial
  Probe
taaatacttggagggaaggcacatt

SEQ ID NO: 161968 - DNA, 25 bp, Artificial
  Probe
tcttagaacaagtttgatgactctc

SEQ ID NO: 161969 - DNA, 25 bp, Artificial
  Probe
ttaaatacttggagggaaggcacat

SEQ ID NO: 161970 - DNA, 25 bp, Artificial
  Probe
gagcaaggttactcttcctatttct

SEQ ID NO: 161971 - DNA, 25 bp, Artificial
  Probe
gcagcctaagtgttaagaataattt

SEQ ID NO: 161972 - DNA, 25 bp, Artificial
  Probe
agcaaggttactcttcctatttctg

SEQ ID NO: 161973 - DNA, 25 bp, Artificial
  Probe
aaggttactcttcctatttctgtgc

SEQ ID NO: 161974 - DNA, 25 bp, Artificial
  Probe
gcaaggttactcttcctatttctgt

SEQ ID NO: 161975 - DNA, 25 bp, Artificial
  Probe
tcttgaatgcccatttctcatacac

SEQ ID NO: 161976 - DNA, 25 bp, Artificial
  Probe
acacagactagcaaatccttgagta

SEQ ID NO: 161977 - DNA, 25 bp, Artificial
  Probe
tttcatgtctttattcttgtgcggt

SEQ ID NO: 161978 - DNA, 25 bp, Artificial
  Probe
tctgtgcagcctaagtgttaagaat

SEQ ID NO: 161979 - DNA, 25 bp, Artificial
  Probe
caaggttactcttcctatttctgtg

SEQ ID NO: 161980 - DNA, 25 bp, Artificial
  Probe
gtgatgtcttcctttcatgtcttta

SEQ ID NO: 161981 - DNA, 25 bp, Artificial
  Probe
ttgaatgcccatttctcatacacag

SEQ ID NO: 161982 - DNA, 25 bp, Artificial
  Probe
cttgaatgcccatttctcatacaca

SEQ ID NO: 161983 - DNA, 25 bp, Artificial
  Probe
gcttcttgaatgcccatttctcata

SEQ ID NO: 161984 - DNA, 25 bp, Artificial
  Probe
ctgtgaactcactgtacttcctgtt

SEQ ID NO: 161985 - DNA, 25 bp, Artificial
  Probe
ggtgatgtcttcctttcatgtcttt

SEQ ID NO: 161986 - DNA, 25 bp, Artificial
  Probe
ggagcaaggttactcttcctatttc

SEQ ID NO: 161987 - DNA, 25 bp, Artificial
  Probe
cttaagctgtgaactcactgtactt

SEQ ID NO: 161988 - DNA, 25 bp, Artificial
  Probe
taagctgtgaactcactgtacttcc

SEQ ID NO: 161989 - DNA, 25 bp, Artificial
  Probe
catgtctttattcttgtgcggtgat

SEQ ID NO: 161990 - DNA, 25 bp, Artificial
  Probe
tgtcttcctttcatgtctttattct

SEQ ID NO: 161991 - DNA, 25 bp, Artificial
  Probe
catacacagaatgatgggtttcacg

SEQ ID NO: 161992 - DNA, 25 bp, Artificial
  Probe
ttcttagaacaagtttgatgactct

SEQ ID NO: 161993 - DNA, 25 bp, Artificial
  Probe
tgactctcaaattgaatgtatccat

SEQ ID NO: 161994 - DNA, 25 bp, Artificial
  Probe
atgactctcaaattgaatgtatcca

SEQ ID NO: 161995 - DNA, 25 bp, Artificial
  Probe
tatttctgtgcagcctaagtgttaa

SEQ ID NO: 161996 - DNA, 25 bp, Artificial
  Probe
gccacagtgactaacaagcatataa

SEQ ID NO: 161997 - DNA, 25 bp, Artificial
  Probe
tctctcaagagttactgaagttgtt

SEQ ID NO: 161998 - DNA, 25 bp, Artificial
  Probe
ttctctcaagagttactgaagttgt

SEQ ID NO: 161999 - DNA, 25 bp, Artificial
  Probe
ccaatactgtagaatagcttccatg

SEQ ID NO: 162000 - DNA, 25 bp, Artificial
  Probe
tcggttcctgtgttgatttatctaa

SEQ ID NO: 162001 - DNA, 25 bp, Artificial
  Probe
ctcggttcctgtgttgatttatcta

SEQ ID NO: 162002 - DNA, 25 bp, Artificial
  Probe
cggttcctgtgttgatttatctaaa

SEQ ID NO: 162003 - DNA, 25 bp, Artificial
  Probe
taactcggttcctgtgttgatttat

SEQ ID NO: 162004 - DNA, 25 bp, Artificial
  Probe
ttaactcggttcctgtgttgattta

SEQ ID NO: 162005 - DNA, 25 bp, Artificial
  Probe
ccacagtgactaacaagcatataaa

SEQ ID NO: 162006 - DNA, 25 bp, Artificial
  Probe
caatactgtagaatagcttccatga

SEQ ID NO: 162007 - DNA, 25 bp, Artificial
  Probe
aactcggttcctgtgttgatttatc

SEQ ID NO: 162008 - DNA, 25 bp, Artificial
  Probe
cttgtgaactttcgtgtcattgttt

SEQ ID NO: 162009 - DNA, 25 bp, Artificial
  Probe
ttaagaagcaagcaaacacactgaa

SEQ ID NO: 162010 - DNA, 25 bp, Artificial
  Probe
tttaagaagcaagcaaacacactga

SEQ ID NO: 162011 - DNA, 25 bp, Artificial
  Probe
actcggttcctgtgttgatttatct

SEQ ID NO: 162012 - DNA, 25 bp, Artificial
  Probe
tatctaaatcattgactccctgtcc

SEQ ID NO: 162013 - DNA, 25 bp, Artificial
  Probe
tctgtgacttaacgtaactgttacc

SEQ ID NO: 162014 - DNA, 25 bp, Artificial
  Probe
ctctgtgacttaacgtaactgttac

SEQ ID NO: 162015 - DNA, 25 bp, Artificial
  Probe
taagaagcaagcaaacacactgaag

SEQ ID NO: 162016 - DNA, 25 bp, Artificial
  Probe
atctaaatcattgactccctgtcct

SEQ ID NO: 162017 - DNA, 25 bp, Artificial
  Probe
aatactgtagaatagcttccatgaa

SEQ ID NO: 162018 - DNA, 25 bp, Artificial
  Probe
tttaatgccacagtgactaacaagc

SEQ ID NO: 162019 - DNA, 25 bp, Artificial
  Probe
tgacttaacgtaactgttaccactg

SEQ ID NO: 162020 - DNA, 25 bp, Artificial
  Probe
gtgacttaacgtaactgttaccact

SEQ ID NO: 162021 - DNA, 25 bp, Artificial
  Probe
ctgtgacttaacgtaactgttacca

SEQ ID NO: 162022 - DNA, 25 bp, Artificial
  Probe
gctctgtgacttaacgtaactgtta

SEQ ID NO: 162023 - DNA, 25 bp, Artificial
  Probe
gcctgtatttctctcaagagttact

SEQ ID NO: 162024 - DNA, 25 bp, Artificial
  Probe
agcctgtatttctctcaagagttac

SEQ ID NO: 162025 - DNA, 25 bp, Artificial
  Probe
acttgtgaactttcgtgtcattgtt

SEQ ID NO: 162026 - DNA, 25 bp, Artificial
  Probe
tgtgacttaacgtaactgttaccac

SEQ ID NO: 162027 - DNA, 25 bp, Artificial
  Probe
ttagcctgtatttctctcaagagtt

SEQ ID NO: 162028 - DNA, 25 bp, Artificial
  Probe
tttatctaaatcattgactccctgt

SEQ ID NO: 162029 - DNA, 25 bp, Artificial
  Probe
attagcctgtatttctctcaagagt

SEQ ID NO: 162030 - DNA, 25 bp, Artificial
  Probe
tgctctgtgacttaacgtaactgtt

SEQ ID NO: 162031 - DNA, 25 bp, Artificial
  Probe
cccaatactgtagaatagcttccat

SEQ ID NO: 162032 - DNA, 25 bp, Artificial
  Probe
ctctcaagagttactgaagttgttt

SEQ ID NO: 162033 - DNA, 25 bp, Artificial
  Probe
tgtagaatagcttccatgaaactcc

SEQ ID NO: 162034 - DNA, 25 bp, Artificial
  Probe
actgtagaatagcttccatgaaact

SEQ ID NO: 162035 - DNA, 25 bp, Artificial
  Probe
ttcccaatactgtagaatagcttcc

SEQ ID NO: 162036 - DNA, 25 bp, Artificial
  Probe
ctgtgctctgtgacttaacgtaact

SEQ ID NO: 162037 - DNA, 25 bp, Artificial
  Probe
tctaaatcattgactccctgtcctg

SEQ ID NO: 162038 - DNA, 25 bp, Artificial
  Probe
ctgtagaatagcttccatgaaactc

SEQ ID NO: 162039 - DNA, 25 bp, Artificial
  Probe
tcccaatactgtagaatagcttcca

SEQ ID NO: 162040 - DNA, 25 bp, Artificial
  Probe
tttctctcaagagttactgaagttg

SEQ ID NO: 162041 - DNA, 25 bp, Artificial
  Probe
taactagcctagaacactaactcac

SEQ ID NO: 162042 - DNA, 25 bp, Artificial
  Probe
aactagcctagaacactaactcaca

SEQ ID NO: 162043 - DNA, 25 bp, Artificial
  Probe
ttaactagcctagaacactaactca

SEQ ID NO: 162044 - DNA, 25 bp, Artificial
  Probe
tcttcatgttatccagcctactcta

SEQ ID NO: 162045 - DNA, 25 bp, Artificial
  Probe
ttcatgttatccagcctactctaag

SEQ ID NO: 162046 - DNA, 25 bp, Artificial
  Probe
cttcatgttatccagcctactctaa

SEQ ID NO: 162047 - DNA, 25 bp, Artificial
  Probe
tagcctagaacactaactcacacag

SEQ ID NO: 162048 - DNA, 25 bp, Artificial
  Probe
ctagcctagaacactaactcacaca

SEQ ID NO: 162049 - DNA, 25 bp, Artificial
  Probe
actagcctagaacactaactcacac

SEQ ID NO: 162050 - DNA, 25 bp, Artificial
  Probe
gttatccagcctactctaagcctag

SEQ ID NO: 162051 - DNA, 25 bp, Artificial
  Probe
tgttatccagcctactctaagccta

SEQ ID NO: 162052 - DNA, 25 bp, Artificial
  Probe
ttcttcatgttatccagcctactct

SEQ ID NO: 162053 - DNA, 25 bp, Artificial
  Probe
atgttatccagcctactctaagcct

SEQ ID NO: 162054 - DNA, 25 bp, Artificial
  Probe
tcatgttatccagcctactctaagc

SEQ ID NO: 162055 - DNA, 25 bp, Artificial
  Probe
cctactctaagcctagatagaaggt

SEQ ID NO: 162056 - DNA, 25 bp, Artificial
  Probe
agcctactctaagcctagatagaag

SEQ ID NO: 162057 - DNA, 25 bp, Artificial
  Probe
cagcctactctaagcctagatagaa

SEQ ID NO: 162058 - DNA, 25 bp, Artificial
  Probe
tactctaagcctagatagaaggtgc

SEQ ID NO: 162059 - DNA, 25 bp, Artificial
  Probe
ctactctaagcctagatagaaggtg

SEQ ID NO: 162060 - DNA, 25 bp, Artificial
  Probe
gcctactctaagcctagatagaagg

SEQ ID NO: 162061 - DNA, 25 bp, Artificial
  Probe
atccagcctactctaagcctagata

SEQ ID NO: 162062 - DNA, 25 bp, Artificial
  Probe
tatccagcctactctaagcctagat

SEQ ID NO: 162063 - DNA, 25 bp, Artificial
  Probe
ttatccagcctactctaagcctaga

SEQ ID NO: 162064 - DNA, 25 bp, Artificial
  Probe
cagaagaagacaagaaggacacagg

SEQ ID NO: 162065 - DNA, 25 bp, Artificial
  Probe
ccagaagaagacaagaaggacacag

SEQ ID NO: 162066 - DNA, 25 bp, Artificial
  Probe
ccctttaactagcctagaacactaa

SEQ ID NO: 162067 - DNA, 25 bp, Artificial
  Probe
catgttatccagcctactctaagcc

SEQ ID NO: 162068 - DNA, 25 bp, Artificial
  Probe
ccagcctactctaagcctagataga

SEQ ID NO: 162069 - DNA, 25 bp, Artificial
  Probe
tccagcctactctaagcctagatag

SEQ ID NO: 162070 - DNA, 25 bp, Artificial
  Probe
agaagaagacaagaaggacacaggt

SEQ ID NO: 162071 - DNA, 25 bp, Artificial
  Probe
ctagaacactaactcacacagcacc

SEQ ID NO: 162072 - DNA, 25 bp, Artificial
  Probe
cctagaacactaactcacacagcac

SEQ ID NO: 162073 - DNA, 25 bp, Artificial
  Probe
gaaaccgaagaaaggaattgacaga

SEQ ID NO: 162074 - DNA, 25 bp, Artificial
  Probe
agaaaccgaagaaaggaattgacag

SEQ ID NO: 162075 - DNA, 25 bp, Artificial
  Probe
cctttaactagcctagaacactaac

SEQ ID NO: 162076 - DNA, 25 bp, Artificial
  Probe
tttcttcatgttatccagcctactc

SEQ ID NO: 162077 - DNA, 25 bp, Artificial
  Probe
ctttcttcatgttatccagcctact

SEQ ID NO: 162078 - DNA, 25 bp, Artificial
  Probe
gaagaagacaagaaggacacaggtg

SEQ ID NO: 162079 - DNA, 25 bp, Artificial
  Probe
aaaccgaagaaaggaattgacagac

SEQ ID NO: 162080 - DNA, 25 bp, Artificial
  Probe
cagaaaccgaagaaaggaattgaca

SEQ ID NO: 162081 - DNA, 25 bp, Artificial
  Probe
actttcttcatgttatccagcctac

SEQ ID NO: 162082 - DNA, 25 bp, Artificial
  Probe
cactttcttcatgttatccagccta

SEQ ID NO: 162083 - DNA, 25 bp, Artificial
  Probe
gccctttaactagcctagaacacta

SEQ ID NO: 162084 - DNA, 25 bp, Artificial
  Probe
atgtcactttcttcatgttatccag

SEQ ID NO: 162085 - DNA, 25 bp, Artificial
  Probe
tgtcactttcttcatgttatccagc

SEQ ID NO: 162086 - DNA, 25 bp, Artificial
  Probe
gtactagacgacaaggattacttct

SEQ ID NO: 162087 - DNA, 25 bp, Artificial
  Probe
actagacgacaaggattacttctta

SEQ ID NO: 162088 - DNA, 25 bp, Artificial
  Probe
tactagacgacaaggattacttctt

SEQ ID NO: 162089 - DNA, 25 bp, Artificial
  Probe
ccattccactgatattctgaactat

SEQ ID NO: 162090 - DNA, 25 bp, Artificial
  Probe
ctagacgacaaggattacttcttat

SEQ ID NO: 162091 - DNA, 25 bp, Artificial
  Probe
tttgacagagtattggttgaaagga

SEQ ID NO: 162092 - DNA, 25 bp, Artificial
  Probe
atttgacagagtattggttgaaagg

SEQ ID NO: 162093 - DNA, 25 bp, Artificial
  Probe
cagtgtgaaagttggagataaagtt

SEQ ID NO: 162094 - DNA, 25 bp, Artificial
  Probe
ttgacagagtattggttgaaaggag

SEQ ID NO: 162095 - DNA, 25 bp, Artificial
  Probe
gctatttgacagagtattggttgaa

SEQ ID NO: 162096 - DNA, 25 bp, Artificial
  Probe
tagacgacaaggattacttcttatt

SEQ ID NO: 162097 - DNA, 25 bp, Artificial
  Probe
cccattccactgatattctgaacta

SEQ ID NO: 162098 - DNA, 25 bp, Artificial
  Probe
cgctatttgacagagtattggttga

SEQ ID NO: 162099 - DNA, 25 bp, Artificial
  Probe
acttcttatttagagatggcgacat

SEQ ID NO: 162100 - DNA, 25 bp, Artificial
  Probe
ttcttccgctatttgacagagtatt

SEQ ID NO: 162101 - DNA, 25 bp, Artificial
  Probe
tttcttccgctatttgacagagtat

SEQ ID NO: 162102 - DNA, 25 bp, Artificial
  Probe
tcttatttagagatggcgacattct

SEQ ID NO: 162103 - DNA, 25 bp, Artificial
  Probe
agtgtgaaagttggagataaagttc

SEQ ID NO: 162104 - DNA, 25 bp, Artificial
  Probe
gacagagtattggttgaaaggagtg

SEQ ID NO: 162105 - DNA, 25 bp, Artificial
  Probe
tatttagagatggcgacattcttgg

SEQ ID NO: 162106 - DNA, 25 bp, Artificial
  Probe
tacttcttatttagagatggcgaca

SEQ ID NO: 162107 - DNA, 25 bp, Artificial
  Probe
tcttccgctatttgacagagtattg

SEQ ID NO: 162108 - DNA, 25 bp, Artificial
  Probe
ttatttagagatggcgacattcttg

SEQ ID NO: 162109 - DNA, 25 bp, Artificial
  Probe
gtgtgaaagttggagataaagttct

SEQ ID NO: 162110 - DNA, 25 bp, Artificial
  Probe
gtttcttccgctatttgacagagta

SEQ ID NO: 162111 - DNA, 25 bp, Artificial
  Probe
cttatttagagatggcgacattctt

SEQ ID NO: 162112 - DNA, 25 bp, Artificial
  Probe
ttcttatttagagatggcgacattc

SEQ ID NO: 162113 - DNA, 25 bp, Artificial
  Probe
cttcttatttagagatggcgacatt

SEQ ID NO: 162114 - DNA, 25 bp, Artificial
  Probe
tcagtgtgaaagttggagataaagt

SEQ ID NO: 162115 - DNA, 25 bp, Artificial
  Probe
cttccgctatttgacagagtattgg

SEQ ID NO: 162116 - DNA, 25 bp, Artificial
  Probe
gtcagtgtgaaagttggagataaag

SEQ ID NO: 162117 - DNA, 25 bp, Artificial
  Probe
tgtcagtgtgaaagttggagataaa

SEQ ID NO: 162118 - DNA, 25 bp, Artificial
  Probe
tgacagagtattggttgaaaggagt

SEQ ID NO: 162119 - DNA, 25 bp, Artificial
  Probe
aagtttcttccgctatttgacagag

SEQ ID NO: 162120 - DNA, 25 bp, Artificial
  Probe
ctgtcagtgtgaaagttggagataa

SEQ ID NO: 162121 - DNA, 25 bp, Artificial
  Probe
tgtgaaagttggagataaagttctt

SEQ ID NO: 162122 - DNA, 25 bp, Artificial
  Probe
tgtaaataatttccatgcctccctt

SEQ ID NO: 162123 - DNA, 25 bp, Artificial
  Probe
ttacttcttatttagagatggcgac

SEQ ID NO: 162124 - DNA, 25 bp, Artificial
  Probe
gtaaataatttccatgcctcccttt

SEQ ID NO: 162125 - DNA, 25 bp, Artificial
  Probe
cattccactgatattctgaactatt

SEQ ID NO: 162126 - DNA, 25 bp, Artificial
  Probe
ccgctatttgacagagtattggttg

SEQ ID NO: 162127 - DNA, 25 bp, Artificial
  Probe
tccgctatttgacagagtattggtt

SEQ ID NO: 162128 - DNA, 25 bp, Artificial
  Probe
ttccgctatttgacagagtattggt

SEQ ID NO: 162129 - DNA, 25 bp, Artificial
  Probe
atgtaaataatttccatgcctccct

SEQ ID NO: 162130 - DNA, 25 bp, Artificial
  Probe
tgaaagttggagataaagttcttct

SEQ ID NO: 162131 - DNA, 25 bp, Artificial
  Probe
aagatactggagagaatacagaagg

SEQ ID NO: 162132 - DNA, 25 bp, Artificial
  Probe
gatgagtgaagacttagccttgatc

SEQ ID NO: 162133 - DNA, 25 bp, Artificial
  Probe
ggatgagtgaagacttagccttgat

SEQ ID NO: 162134 - DNA, 25 bp, Artificial
  Probe
ggtgtcataccatatcaaggtgaag

SEQ ID NO: 162135 - DNA, 25 bp, Artificial
  Probe
aatacagaagggaagaaagatgagg

SEQ ID NO: 162136 - DNA, 25 bp, Artificial
  Probe
ggagagaatacagaagggaagaaag

SEQ ID NO: 162137 - DNA, 25 bp, Artificial
  Probe
gagagaatacagaagggaagaaaga

SEQ ID NO: 162138 - DNA, 25 bp, Artificial
  Probe
tacagaagggaagaaagatgaggat

SEQ ID NO: 162139 - DNA, 25 bp, Artificial
  Probe
atacagaagggaagaaagatgagga

SEQ ID NO: 162140 - DNA, 25 bp, Artificial
  Probe
tggagagaatacagaagggaagaaa

SEQ ID NO: 162141 - DNA, 25 bp, Artificial
  Probe
agaatacagaagggaagaaagatga

SEQ ID NO: 162142 - DNA, 25 bp, Artificial
  Probe
acctttcagagttatgctaaatacg

SEQ ID NO: 162143 - DNA, 25 bp, Artificial
  Probe
gaatacagaagggaagaaagatgag

SEQ ID NO: 162144 - DNA, 25 bp, Artificial
  Probe
gagaatacagaagggaagaaagatg

SEQ ID NO: 162145 - DNA, 25 bp, Artificial
  Probe
agagaatacagaagggaagaaagat

SEQ ID NO: 162146 - DNA, 25 bp, Artificial
  Probe
gtgtcataccatatcaaggtgaagc

SEQ ID NO: 162147 - DNA, 25 bp, Artificial
  Probe
cctttcagagttatgctaaatacga

SEQ ID NO: 162148 - DNA, 25 bp, Artificial
  Probe
atgagtgaagacttagccttgatcg

SEQ ID NO: 162149 - DNA, 25 bp, Artificial
  Probe
gtgaagacttagccttgatcggtag

SEQ ID NO: 162150 - DNA, 25 bp, Artificial
  Probe
gaagataaagcatgaggacacaaac

SEQ ID NO: 162151 - DNA, 25 bp, Artificial
  Probe
tctgaaagatactggagagaataca

SEQ ID NO: 162152 - DNA, 25 bp, Artificial
  Probe
acagaagggaagaaagatgaggatg

SEQ ID NO: 162153 - DNA, 25 bp, Artificial
  Probe
atactggagagaatacagaagggaa

SEQ ID NO: 162154 - DNA, 25 bp, Artificial
  Probe
gtcataccatatcaaggtgaagctc

SEQ ID NO: 162155 - DNA, 25 bp, Artificial
  Probe
gatactggagagaatacagaaggga

SEQ ID NO: 162156 - DNA, 25 bp, Artificial
  Probe
agatactggagagaatacagaaggg

SEQ ID NO: 162157 - DNA, 25 bp, Artificial
  Probe
tactggagagaatacagaagggaag

SEQ ID NO: 162158 - DNA, 25 bp, Artificial
  Probe
caggatgagtgaagacttagccttg

SEQ ID NO: 162159 - DNA, 25 bp, Artificial
  Probe
ggaagataaagcatgaggacacaaa

SEQ ID NO: 162160 - DNA, 25 bp, Artificial
  Probe
tcataccatatcaaggtgaagctca

SEQ ID NO: 162161 - DNA, 25 bp, Artificial
  Probe
cagagatgctgaagaggacaagatc

SEQ ID NO: 162162 - DNA, 25 bp, Artificial
  Probe
agtgaagacttagccttgatcggta

SEQ ID NO: 162163 - DNA, 25 bp, Artificial
  Probe
aggatgagtgaagacttagccttga

SEQ ID NO: 162164 - DNA, 25 bp, Artificial
  Probe
ctggagagaatacagaagggaagaa

SEQ ID NO: 162165 - DNA, 25 bp, Artificial
  Probe
aagataaagcatgaggacacaaacc

SEQ ID NO: 162166 - DNA, 25 bp, Artificial
  Probe
tgtcataccatatcaaggtgaagct

SEQ ID NO: 162167 - DNA, 25 bp, Artificial
  Probe
ctggtaacctttcagagttatgcta

SEQ ID NO: 162168 - DNA, 25 bp, Artificial
  Probe
tggtaacctttcagagttatgctaa

SEQ ID NO: 162169 - DNA, 25 bp, Artificial
  Probe
tgaaagatactggagagaatacaga

SEQ ID NO: 162170 - DNA, 25 bp, Artificial
  Probe
ctgaaagatactggagagaatacag

SEQ ID NO: 162171 - DNA, 25 bp, Artificial
  Probe
ggtaacctttcagagttatgctaaa

SEQ ID NO: 162172 - DNA, 25 bp, Artificial
  Probe
aagacttagccttgatcggtaggaa

SEQ ID NO: 162173 - DNA, 25 bp, Artificial
  Probe
ttaaagcatttgccacagacatcag

SEQ ID NO: 162174 - DNA, 25 bp, Artificial
  Probe
ttcagagttatgctaaatacgaaag

SEQ ID NO: 162175 - DNA, 25 bp, Artificial
  Probe
ctttcagagttatgctaaatacgaa

SEQ ID NO: 162176 - DNA, 25 bp, Artificial
  Probe
cagtgctgtaacaagttaagtcctc

SEQ ID NO: 162177 - DNA, 25 bp, Artificial
  Probe
attcatgtgtcattgtggttgtatg

SEQ ID NO: 162178 - DNA, 25 bp, Artificial
  Probe
cattcatgtgtcattgtggttgtat

SEQ ID NO: 162179 - DNA, 25 bp, Artificial
  Probe
ctgtaacaagttaagtcctccagac

SEQ ID NO: 162180 - DNA, 25 bp, Artificial
  Probe
gtacattcatgtgtcattgtggttg

SEQ ID NO: 162181 - DNA, 25 bp, Artificial
  Probe
agtgctgtaacaagttaagtcctcc

SEQ ID NO: 162182 - DNA, 25 bp, Artificial
  Probe
acattcatgtgtcattgtggttgta

SEQ ID NO: 162183 - DNA, 25 bp, Artificial
  Probe
tacattcatgtgtcattgtggttgt

SEQ ID NO: 162184 - DNA, 25 bp, Artificial
  Probe
gtgctgtaacaagttaagtcctcca

SEQ ID NO: 162185 - DNA, 25 bp, Artificial
  Probe
tataaagcagaaattccagaagcag

SEQ ID NO: 162186 - DNA, 25 bp, Artificial
  Probe
ctataaagcagaaattccagaagca

SEQ ID NO: 162187 - DNA, 25 bp, Artificial
  Probe
taaagcagaaattccagaagcagat

SEQ ID NO: 162188 - DNA, 25 bp, Artificial
  Probe
ataaagcagaaattccagaagcaga

SEQ ID NO: 162189 - DNA, 25 bp, Artificial
  Probe
gctgtaacaagttaagtcctccaga

SEQ ID NO: 162190 - DNA, 25 bp, Artificial
  Probe
tgctgtaacaagttaagtcctccag

SEQ ID NO: 162191 - DNA, 25 bp, Artificial
  Probe
agtgtcctcagtttaagatacttca

SEQ ID NO: 162192 - DNA, 25 bp, Artificial
  Probe
cagagtgtcctcagtttaagatact

SEQ ID NO: 162193 - DNA, 25 bp, Artificial
  Probe
tcagagtgtcctcagtttaagatac

SEQ ID NO: 162194 - DNA, 25 bp, Artificial
  Probe
gtcagagtgtcctcagtttaagata

SEQ ID NO: 162195 - DNA, 25 bp, Artificial
  Probe
acagtgctgtaacaagttaagtcct

SEQ ID NO: 162196 - DNA, 25 bp, Artificial
  Probe
cacagtgctgtaacaagttaagtcc

SEQ ID NO: 162197 - DNA, 25 bp, Artificial
  Probe
ccacagtgctgtaacaagttaagtc

SEQ ID NO: 162198 - DNA, 25 bp, Artificial
  Probe
gtccacagtgctgtaacaagttaag

SEQ ID NO: 162199 - DNA, 25 bp, Artificial
  Probe
agtcagagtgtcctcagtttaagat

SEQ ID NO: 162200 - DNA, 25 bp, Artificial
  Probe
agagtgtcctcagtttaagatactt

SEQ ID NO: 162201 - DNA, 25 bp, Artificial
  Probe
gagtgtcctcagtttaagatacttc

SEQ ID NO: 162202 - DNA, 25 bp, Artificial
  Probe
tccacagtgctgtaacaagttaagt

SEQ ID NO: 162203 - DNA, 25 bp, Artificial
  Probe
aaagcagaaattccagaagcagatg

SEQ ID NO: 162204 - DNA, 25 bp, Artificial
  Probe
gtgtcctcagtttaagatacttcat

SEQ ID NO: 162205 - DNA, 25 bp, Artificial
  Probe
atgaaacatacagtggaagtcacaa

SEQ ID NO: 162206 - DNA, 25 bp, Artificial
  Probe
tcatgtgtcattgtggttgtatgaa

SEQ ID NO: 162207 - DNA, 25 bp, Artificial
  Probe
ttcatgtgtcattgtggttgtatga

SEQ ID NO: 162208 - DNA, 25 bp, Artificial
  Probe
acttcatcaatctttgtgtagtgta

SEQ ID NO: 162209 - DNA, 25 bp, Artificial
  Probe
tacttcatcaatctttgtgtagtgt

SEQ ID NO: 162210 - DNA, 25 bp, Artificial
  Probe
tgtccacagtgctgtaacaagttaa

SEQ ID NO: 162211 - DNA, 25 bp, Artificial
  Probe
tgaaacatacagtggaagtcacaaa

SEQ ID NO: 162212 - DNA, 25 bp, Artificial
  Probe
cagtcagagtgtcctcagtttaaga

SEQ ID NO: 162213 - DNA, 25 bp, Artificial
  Probe
tcagtcagagtgtcctcagtttaag

SEQ ID NO: 162214 - DNA, 25 bp, Artificial
  Probe
ctcagtcagagtgtcctcagtttaa

SEQ ID NO: 162215 - DNA, 25 bp, Artificial
  Probe
gtcctcagtttaagatacttcatca

SEQ ID NO: 162216 - DNA, 25 bp, Artificial
  Probe
tgtcctcagtttaagatacttcatc

SEQ ID NO: 162217 - DNA, 25 bp, Artificial
  Probe
cttcatcaatctttgtgtagtgtac

SEQ ID NO: 162218 - DNA, 25 bp, Artificial
  Probe
catgaaacatacagtggaagtcaca

SEQ ID NO: 162219 - DNA, 25 bp, Artificial
  Probe
gtgtccacagtgctgtaacaagtta

SEQ ID NO: 162220 - DNA, 25 bp, Artificial
  Probe
tcctcagtttaagatacttcatcaa

SEQ ID NO: 162221 - DNA, 25 bp, Artificial
  Probe
tatagtctagcagatggaacagaac

SEQ ID NO: 162222 - DNA, 25 bp, Artificial
  Probe
atagtctagcagatggaacagaact

SEQ ID NO: 162223 - DNA, 25 bp, Artificial
  Probe
tagtctagcagatggaacagaactc

SEQ ID NO: 162224 - DNA, 25 bp, Artificial
  Probe
taacgaactaatccaaacctacaca

SEQ ID NO: 162225 - DNA, 25 bp, Artificial
  Probe
acgaactaatccaaacctacacata

SEQ ID NO: 162226 - DNA, 25 bp, Artificial
  Probe
aacgaactaatccaaacctacacat

SEQ ID NO: 162227 - DNA, 25 bp, Artificial
  Probe
gtaacgaactaatccaaacctacac

SEQ ID NO: 162228 - DNA, 25 bp, Artificial
  Probe
atggagggaaataaacttgttggaa

SEQ ID NO: 162229 - DNA, 25 bp, Artificial
  Probe
cctatagtctagcagatggaacaga

SEQ ID NO: 162230 - DNA, 25 bp, Artificial
  Probe
tggagggaaataaacttgttggaaa

SEQ ID NO: 162231 - DNA, 25 bp, Artificial
  Probe
ctatagtctagcagatggaacagaa

SEQ ID NO: 162232 - DNA, 25 bp, Artificial
  Probe
cgagagatttctggtaacgaactaa

SEQ ID NO: 162233 - DNA, 25 bp, Artificial
  Probe
cacacaggaaggaaataaattcaca

SEQ ID NO: 162234 - DNA, 25 bp, Artificial
  Probe
cacaggaaggaaataaattcacagt

SEQ ID NO: 162235 - DNA, 25 bp, Artificial
  Probe
acacaggaaggaaataaattcacag

SEQ ID NO: 162236 - DNA, 25 bp, Artificial
  Probe
tcacacaggaaggaaataaattcac

SEQ ID NO: 162237 - DNA, 25 bp, Artificial
  Probe
cgaactaatccaaacctacacatat

SEQ ID NO: 162238 - DNA, 25 bp, Artificial
  Probe
caggaaggaaataaattcacagtca

SEQ ID NO: 162239 - DNA, 25 bp, Artificial
  Probe
acaggaaggaaataaattcacagtc

SEQ ID NO: 162240 - DNA, 25 bp, Artificial
  Probe
cgatcacacaggaaggaaataaatt

SEQ ID NO: 162241 - DNA, 25 bp, Artificial
  Probe
acgatcacacaggaaggaaataaat

SEQ ID NO: 162242 - DNA, 25 bp, Artificial
  Probe
ttcctttctccatctcgctgataat

SEQ ID NO: 162243 - DNA, 25 bp, Artificial
  Probe
attcctttctccatctcgctgataa

SEQ ID NO: 162244 - DNA, 25 bp, Artificial
  Probe
tctagcagatggaacagaactcact

SEQ ID NO: 162245 - DNA, 25 bp, Artificial
  Probe
gtctagcagatggaacagaactcac

SEQ ID NO: 162246 - DNA, 25 bp, Artificial
  Probe
aggaaggaaataaattcacagtcaa

SEQ ID NO: 162247 - DNA, 25 bp, Artificial
  Probe
atcacacaggaaggaaataaattca

SEQ ID NO: 162248 - DNA, 25 bp, Artificial
  Probe
caaagaatcaagcaacttccgaaac

SEQ ID NO: 162249 - DNA, 25 bp, Artificial
  Probe
tcaaagaatcaagcaacttccgaaa

SEQ ID NO: 162250 - DNA, 25 bp, Artificial
  Probe
cacagtcaaagaatcaagcaacttc

SEQ ID NO: 162251 - DNA, 25 bp, Artificial
  Probe
aagcggatctttaagaaggaatagg

SEQ ID NO: 162252 - DNA, 25 bp, Artificial
  Probe
caagcggatctttaagaaggaatag

SEQ ID NO: 162253 - DNA, 25 bp, Artificial
  Probe
gacgatcacacaggaaggaaataaa

SEQ ID NO: 162254 - DNA, 25 bp, Artificial
  Probe
gagagatttctggtaacgaactaat

SEQ ID NO: 162255 - DNA, 25 bp, Artificial
  Probe
agaatcaagcaacttccgaaacatt

SEQ ID NO: 162256 - DNA, 25 bp, Artificial
  Probe
aagaatcaagcaacttccgaaacat

SEQ ID NO: 162257 - DNA, 25 bp, Artificial
  Probe
ccaagcggatctttaagaaggaata

SEQ ID NO: 162258 - DNA, 25 bp, Artificial
  Probe
agtctagcagatggaacagaactca

SEQ ID NO: 162259 - DNA, 25 bp, Artificial
  Probe
tcacagtcaaagaatcaagcaactt

SEQ ID NO: 162260 - DNA, 25 bp, Artificial
  Probe
ttcacagtcaaagaatcaagcaact

SEQ ID NO: 162261 - DNA, 25 bp, Artificial
  Probe
gattcctttctccatctcgctgata

SEQ ID NO: 162262 - DNA, 25 bp, Artificial
  Probe
gcctatagtctagcagatggaacag

SEQ ID NO: 162263 - DNA, 25 bp, Artificial
  Probe
aaagaatcaagcaacttccgaaaca

SEQ ID NO: 162264 - DNA, 25 bp, Artificial
  Probe
gaatcaagcaacttccgaaacattg

SEQ ID NO: 162265 - DNA, 25 bp, Artificial
  Probe
catggagggaaataaacttgttgga

SEQ ID NO: 162266 - DNA, 25 bp, Artificial
  Probe
acattcttcaacagttggaccttag

SEQ ID NO: 162267 - DNA, 25 bp, Artificial
  Probe
gacattcttcaacagttggacctta

SEQ ID NO: 162268 - DNA, 25 bp, Artificial
  Probe
cattcttcaacagttggaccttagc

SEQ ID NO: 162269 - DNA, 25 bp, Artificial
  Probe
attcttcaacagttggaccttagcc

SEQ ID NO: 162270 - DNA, 25 bp, Artificial
  Probe
ggacattcttcaacagttggacctt

SEQ ID NO: 162271 - DNA, 25 bp, Artificial
  Probe
caggacattcttcaacagttggacc

SEQ ID NO: 162272 - DNA, 25 bp, Artificial
  Probe
ctgaatgctgaagtttccaagacca

SEQ ID NO: 162273 - DNA, 25 bp, Artificial
  Probe
tgaatgctgaagtttccaagaccac

SEQ ID NO: 162274 - DNA, 25 bp, Artificial
  Probe
aggacattcttcaacagttggacct

SEQ ID NO: 162275 - DNA, 25 bp, Artificial
  Probe
gcaggacattcttcaacagttggac

SEQ ID NO: 162276 - DNA, 25 bp, Artificial
  Probe
cctgaatgctgaagtttccaagacc

SEQ ID NO: 162277 - DNA, 25 bp, Artificial
  Probe
ccctgaatgctgaagtttccaagac

SEQ ID NO: 162278 - DNA, 25 bp, Artificial
  Probe
gaatgctgaagtttccaagaccacc

SEQ ID NO: 162279 - DNA, 25 bp, Artificial
  Probe
cttagccctgaatgctgaagtttcc

SEQ ID NO: 162280 - DNA, 25 bp, Artificial
  Probe
ccttagccctgaatgctgaagtttc

SEQ ID NO: 162281 - DNA, 25 bp, Artificial
  Probe
aacagttggaccttagccctgaatg

SEQ ID NO: 162282 - DNA, 25 bp, Artificial
  Probe
ttcttcaacagttggaccttagccc

SEQ ID NO: 162283 - DNA, 25 bp, Artificial
  Probe
gatagctcatgacctggagaacctg

SEQ ID NO: 162284 - DNA, 25 bp, Artificial
  Probe
caacagttggaccttagccctgaat

SEQ ID NO: 162285 - DNA, 25 bp, Artificial
  Probe
tagccctgaatgctgaagtttccaa

SEQ ID NO: 162286 - DNA, 25 bp, Artificial
  Probe
ttagccctgaatgctgaagtttcca

SEQ ID NO: 162287 - DNA, 25 bp, Artificial
  Probe
accttagccctgaatgctgaagttt

SEQ ID NO: 162288 - DNA, 25 bp, Artificial
  Probe
gaccttagccctgaatgctgaagtt

SEQ ID NO: 162289 - DNA, 25 bp, Artificial
  Probe
agcacttgttcctattgtcttgata

SEQ ID NO: 162290 - DNA, 25 bp, Artificial
  Probe
gcacttgttcctattgtcttgataa

SEQ ID NO: 162291 - DNA, 25 bp, Artificial
  Probe
aagcacttgttcctattgtcttgat

SEQ ID NO: 162292 - DNA, 25 bp, Artificial
  Probe
ttgtattcctgaatggtaatggtga

SEQ ID NO: 162293 - DNA, 25 bp, Artificial
  Probe
gtgcttgtattcctgaatggtaatg

SEQ ID NO: 162294 - DNA, 25 bp, Artificial
  Probe
tattcctgaatggtaatggtgactg

SEQ ID NO: 162295 - DNA, 25 bp, Artificial
  Probe
gtattcctgaatggtaatggtgact

SEQ ID NO: 162296 - DNA, 25 bp, Artificial
  Probe
cttgtattcctgaatggtaatggtg

SEQ ID NO: 162297 - DNA, 25 bp, Artificial
  Probe
tgtattcctgaatggtaatggtgac

SEQ ID NO: 162298 - DNA, 25 bp, Artificial
  Probe
tgtgcttgtattcctgaatggtaat

SEQ ID NO: 162299 - DNA, 25 bp, Artificial
  Probe
gcttgtattcctgaatggtaatggt

SEQ ID NO: 162300 - DNA, 25 bp, Artificial
  Probe
tgcttgtattcctgaatggtaatgg

SEQ ID NO: 162301 - DNA, 25 bp, Artificial
  Probe
gtgtgcttgtattcctgaatggtaa

SEQ ID NO: 162302 - DNA, 25 bp, Artificial
  Probe
attcctgaatggtaatggtgactgt

SEQ ID NO: 162303 - DNA, 25 bp, Artificial
  Probe
cacttgttcctattgtcttgataag

SEQ ID NO: 162304 - DNA, 25 bp, Artificial
  Probe
ttcctgaatggtaatggtgactgtc

SEQ ID NO: 162305 - DNA, 25 bp, Artificial
  Probe
tttgctatgaatgatgcctgtgttt

SEQ ID NO: 162306 - DNA, 25 bp, Artificial
  Probe
cgtgtgcttgtattcctgaatggta

SEQ ID NO: 162307 - DNA, 25 bp, Artificial
  Probe
ttgctatgaatgatgcctgtgtttc

SEQ ID NO: 162308 - DNA, 25 bp, Artificial
  Probe
tgtagggttaagttaaactctgaga

SEQ ID NO: 162309 - DNA, 25 bp, Artificial
  Probe
gaactcattcttagaggcaaagcag

SEQ ID NO: 162310 - DNA, 25 bp, Artificial
  Probe
ttgtagggttaagttaaactctgag

SEQ ID NO: 162311 - DNA, 25 bp, Artificial
  Probe
acttgttcctattgtcttgataaga

SEQ ID NO: 162312 - DNA, 25 bp, Artificial
  Probe
gagcagaaatgactccttcctctag

SEQ ID NO: 162313 - DNA, 25 bp, Artificial
  Probe
gtagggttaagttaaactctgagat

SEQ ID NO: 162314 - DNA, 25 bp, Artificial
  Probe
tttgtagggttaagttaaactctga

SEQ ID NO: 162315 - DNA, 25 bp, Artificial
  Probe
ctatgaatgatgcctgtgtttccac

SEQ ID NO: 162316 - DNA, 25 bp, Artificial
  Probe
tcctgaatggtaatggtgactgtca

SEQ ID NO: 162317 - DNA, 25 bp, Artificial
  Probe
tttgattcctggagcagaaatgact

SEQ ID NO: 162318 - DNA, 25 bp, Artificial
  Probe
tagggttaagttaaactctgagatc

SEQ ID NO: 162319 - DNA, 25 bp, Artificial
  Probe
gccaagcacttgttcctattgtctt

SEQ ID NO: 162320 - DNA, 25 bp, Artificial
  Probe
caagcacttgttcctattgtcttga

SEQ ID NO: 162321 - DNA, 25 bp, Artificial
  Probe
ggtgcttttgtagggttaagttaaa

SEQ ID NO: 162322 - DNA, 25 bp, Artificial
  Probe
tggtgcttttgtagggttaagttaa

SEQ ID NO: 162323 - DNA, 25 bp, Artificial
  Probe
ttgattcctggagcagaaatgactc

SEQ ID NO: 162324 - DNA, 25 bp, Artificial
  Probe
cttgttcctattgtcttgataagaa

SEQ ID NO: 162325 - DNA, 25 bp, Artificial
  Probe
ctggtgcttttgtagggttaagtta

SEQ ID NO: 162326 - DNA, 25 bp, Artificial
  Probe
gtgcttttgtagggttaagttaaac

SEQ ID NO: 162327 - DNA, 25 bp, Artificial
  Probe
gctatgaatgatgcctgtgtttcca

SEQ ID NO: 162328 - DNA, 25 bp, Artificial
  Probe
tgctatgaatgatgcctgtgtttcc

SEQ ID NO: 162329 - DNA, 25 bp, Artificial
  Probe
ttttgctatgaatgatgcctgtgtt

SEQ ID NO: 162330 - DNA, 25 bp, Artificial
  Probe
ttgcagagtgtgtcttcaagaagaa

SEQ ID NO: 162331 - DNA, 25 bp, Artificial
  Probe
ccaagcacttgttcctattgtcttg

SEQ ID NO: 162332 - DNA, 25 bp, Artificial
  Probe
gttaaactctgagatcttgggcaaa

SEQ ID NO: 162333 - DNA, 25 bp, Artificial
  Probe
taagttaaactctgagatcttgggc

SEQ ID NO: 162334 - DNA, 25 bp, Artificial
  Probe
gtatttgacatcaacagttccaact

SEQ ID NO: 162335 - DNA, 25 bp, Artificial
  Probe
cgtatttgacatcaacagttccaac

SEQ ID NO: 162336 - DNA, 25 bp, Artificial
  Probe
atgtcttccatcagtattcagggag

SEQ ID NO: 162337 - DNA, 25 bp, Artificial
  Probe
cttccatcagtattcagggagagag

SEQ ID NO: 162338 - DNA, 25 bp, Artificial
  Probe
tcttccatcagtattcagggagaga

SEQ ID NO: 162339 - DNA, 25 bp, Artificial
  Probe
gtcttccatcagtattcagggagag

SEQ ID NO: 162340 - DNA, 25 bp, Artificial
  Probe
acgtatttgacatcaacagttccaa

SEQ ID NO: 162341 - DNA, 25 bp, Artificial
  Probe
tgaagaagtcagaactgaaggagct

SEQ ID NO: 162342 - DNA, 25 bp, Artificial
  Probe
tgtcttccatcagtattcagggaga

SEQ ID NO: 162343 - DNA, 25 bp, Artificial
  Probe
gaggaaatcaaagagcaggaagtgg

SEQ ID NO: 162344 - DNA, 25 bp, Artificial
  Probe
ggaggaaatcaaagagcaggaagtg

SEQ ID NO: 162345 - DNA, 25 bp, Artificial
  Probe
catcagtattcagggagagagggtg

SEQ ID NO: 162346 - DNA, 25 bp, Artificial
  Probe
ttccatcagtattcagggagagagg

SEQ ID NO: 162347 - DNA, 25 bp, Artificial
  Probe
tggaggaaatcaaagagcaggaagt

SEQ ID NO: 162348 - DNA, 25 bp, Artificial
  Probe
ctggaggaaatcaaagagcaggaag

SEQ ID NO: 162349 - DNA, 25 bp, Artificial
  Probe
caagctgaagaagtcagaactgaag

SEQ ID NO: 162350 - DNA, 25 bp, Artificial
  Probe
atcagtattcagggagagagggtga

SEQ ID NO: 162351 - DNA, 25 bp, Artificial
  Probe
gtacgtatttgacatcaacagttcc

SEQ ID NO: 162352 - DNA, 25 bp, Artificial
  Probe
ccaagtacgtatttgacatcaacag

SEQ ID NO: 162353 - DNA, 25 bp, Artificial
  Probe
caagtacgtatttgacatcaacagt

SEQ ID NO: 162354 - DNA, 25 bp, Artificial
  Probe
tacgtatttgacatcaacagttcca

SEQ ID NO: 162355 - DNA, 25 bp, Artificial
  Probe
agtacgtatttgacatcaacagttc

SEQ ID NO: 162356 - DNA, 25 bp, Artificial
  Probe
gatgtcttccatcagtattcaggga

SEQ ID NO: 162357 - DNA, 25 bp, Artificial
  Probe
accaagtacgtatttgacatcaaca

SEQ ID NO: 162358 - DNA, 25 bp, Artificial
  Probe
gtattcagggagagagggtgacaag

SEQ ID NO: 162359 - DNA, 25 bp, Artificial
  Probe
aagtacgtatttgacatcaacagtt

SEQ ID NO: 162360 - DNA, 25 bp, Artificial
  Probe
acaagctgaagaagtcagaactgaa

SEQ ID NO: 162361 - DNA, 25 bp, Artificial
  Probe
agtattcagggagagagggtgacaa

SEQ ID NO: 162362 - DNA, 25 bp, Artificial
  Probe
ctgaagaagtcagaactgaaggagc

SEQ ID NO: 162363 - DNA, 25 bp, Artificial
  Probe
gctgaagaagtcagaactgaaggag

SEQ ID NO: 162364 - DNA, 25 bp, Artificial
  Probe
aagctgaagaagtcagaactgaagg

SEQ ID NO: 162365 - DNA, 25 bp, Artificial
  Probe
ccatcagtattcagggagagagggt

SEQ ID NO: 162366 - DNA, 25 bp, Artificial
  Probe
catggttgccctcattgatgtcttc

SEQ ID NO: 162367 - DNA, 25 bp, Artificial
  Probe
cacaagctgaagaagtcagaactga

SEQ ID NO: 162368 - DNA, 25 bp, Artificial
  Probe
tcagtattcagggagagagggtgac

SEQ ID NO: 162369 - DNA, 25 bp, Artificial
  Probe
agctgaagaagtcagaactgaagga

SEQ ID NO: 162370 - DNA, 25 bp, Artificial
  Probe
cagtattcagggagagagggtgaca

SEQ ID NO: 162371 - DNA, 25 bp, Artificial
  Probe
tccatcagtattcagggagagaggg

SEQ ID NO: 162372 - DNA, 25 bp, Artificial
  Probe
gtgacaagcacaagctgaagaagtc

SEQ ID NO: 162373 - DNA, 25 bp, Artificial
  Probe
aagcacaagctgaagaagtcagaac

SEQ ID NO: 162374 - DNA, 25 bp, Artificial
  Probe
caagcacaagctgaagaagtcagaa

SEQ ID NO: 162375 - DNA, 25 bp, Artificial
  Probe
ggttgccctcattgatgtcttccat

SEQ ID NO: 162376 - DNA, 25 bp, Artificial
  Probe
atggttgccctcattgatgtcttcc

SEQ ID NO: 162377 - DNA, 25 bp, Artificial
  Probe
tatttgacatcaacagttccaactg

SEQ ID NO: 162378 - DNA, 25 bp, Artificial
  Probe
gaagtcagaactgaaggagctcatc

SEQ ID NO: 162379 - DNA, 25 bp, Artificial
  Probe
tcagagcacaattaagagagcaact

SEQ ID NO: 162380 - DNA, 25 bp, Artificial
  Probe
ctcagagcacaattaagagagcaac

SEQ ID NO: 162381 - DNA, 25 bp, Artificial
  Probe
actcagagcacaattaagagagcaa

SEQ ID NO: 162382 - DNA, 25 bp, Artificial
  Probe
aactcagagcacaattaagagagca

SEQ ID NO: 162383 - DNA, 25 bp, Artificial
  Probe
acaaacaaactcagagcacaattaa

SEQ ID NO: 162384 - DNA, 25 bp, Artificial
  Probe
aacaaacaaactcagagcacaatta

SEQ ID NO: 162385 - DNA, 25 bp, Artificial
  Probe
cagagcacaattaagagagcaactg

SEQ ID NO: 162386 - DNA, 25 bp, Artificial
  Probe
aaacaaacaaactcagagcacaatt

SEQ ID NO: 162387 - DNA, 25 bp, Artificial
  Probe
aaacaaactcagagcacaattaaga

SEQ ID NO: 162388 - DNA, 25 bp, Artificial
  Probe
caaacaaactcagagcacaattaag

SEQ ID NO: 162389 - DNA, 25 bp, Artificial
  Probe
gaaacaaacaaactcagagcacaat

SEQ ID NO: 162390 - DNA, 25 bp, Artificial
  Probe
agagcacaattaagagagcaactgg

SEQ ID NO: 162391 - DNA, 25 bp, Artificial
  Probe
caaatgaaagttccagaaaccatcc

SEQ ID NO: 162392 - DNA, 25 bp, Artificial
  Probe
atgaaagttccagaaaccatccaaa

SEQ ID NO: 162393 - DNA, 25 bp, Artificial
  Probe
aatgaaagttccagaaaccatccaa

SEQ ID NO: 162394 - DNA, 25 bp, Artificial
  Probe
aaatgaaagttccagaaaccatcca

SEQ ID NO: 162395 - DNA, 25 bp, Artificial
  Probe
ccttgcctaatgagtcagaaactaa

SEQ ID NO: 162396 - DNA, 25 bp, Artificial
  Probe
cttgcctaatgagtcagaaactaag

SEQ ID NO: 162397 - DNA, 25 bp, Artificial
  Probe
caaactcagagcacaattaagagag

SEQ ID NO: 162398 - DNA, 25 bp, Artificial
  Probe
aacaaactcagagcacaattaagag

SEQ ID NO: 162399 - DNA, 25 bp, Artificial
  Probe
gcaaatgaaagttccagaaaccatc

SEQ ID NO: 162400 - DNA, 25 bp, Artificial
  Probe
gagcacaattaagagagcaactggt

SEQ ID NO: 162401 - DNA, 25 bp, Artificial
  Probe
acaaactcagagcacaattaagaga

SEQ ID NO: 162402 - DNA, 25 bp, Artificial
  Probe
aaactcagagcacaattaagagagc

SEQ ID NO: 162403 - DNA, 25 bp, Artificial
  Probe
gttgaaacaaacaaactcagagcac

SEQ ID NO: 162404 - DNA, 25 bp, Artificial
  Probe
ttgcctaatgagtcagaaactaagg

SEQ ID NO: 162405 - DNA, 25 bp, Artificial
  Probe
cctaatgagtcagaaactaaggctg

SEQ ID NO: 162406 - DNA, 25 bp, Artificial
  Probe
tgaaacaaacaaactcagagcacaa

SEQ ID NO: 162407 - DNA, 25 bp, Artificial
  Probe
ttgaaacaaacaaactcagagcaca

SEQ ID NO: 162408 - DNA, 25 bp, Artificial
  Probe
ctaaggctgaccgtgtgtttatgta

SEQ ID NO: 162409 - DNA, 25 bp, Artificial
  Probe
caagagattgaaagcgtatgaagcc

SEQ ID NO: 162410 - DNA, 25 bp, Artificial
  Probe
gccttgcctaatgagtcagaaacta

SEQ ID NO: 162411 - DNA, 25 bp, Artificial
  Probe
tatactccttcctgcaaatgaaagt

SEQ ID NO: 162412 - DNA, 25 bp, Artificial
  Probe
gtatactccttcctgcaaatgaaag

SEQ ID NO: 162413 - DNA, 25 bp, Artificial
  Probe
agcacaattaagagagcaactggtg

SEQ ID NO: 162414 - DNA, 25 bp, Artificial
  Probe
atactccttcctgcaaatgaaagtt

SEQ ID NO: 162415 - DNA, 25 bp, Artificial
  Probe
cgtatactccttcctgcaaatgaaa

SEQ ID NO: 162416 - DNA, 25 bp, Artificial
  Probe
tactccttcctgcaaatgaaagttc

SEQ ID NO: 162417 - DNA, 25 bp, Artificial
  Probe
aagagattgaaagcgtatgaagccc

SEQ ID NO: 162418 - DNA, 25 bp, Artificial
  Probe
aactaaggctgaccgtgtgtttatg

SEQ ID NO: 162419 - DNA, 25 bp, Artificial
  Probe
tgcaaatgaaagttccagaaaccat

SEQ ID NO: 162420 - DNA, 25 bp, Artificial
  Probe
gctgttttcctaagacttctctgaa

SEQ ID NO: 162421 - DNA, 25 bp, Artificial
  Probe
atcaagagattgaaagcgtatgaag

SEQ ID NO: 162422 - DNA, 25 bp, Artificial
  Probe
gatcaagagattgaaagcgtatgaa

SEQ ID NO: 162423 - DNA, 25 bp, Artificial
  Probe
ttcctgcaaatgaaagttccagaaa

SEQ ID NO: 162424 - DNA, 25 bp, Artificial
  Probe
ccctacagcatggaaaataaacttt

SEQ ID NO: 162425 - DNA, 25 bp, Artificial
  Probe
atgatgctcaacactacgctctctg

SEQ ID NO: 162426 - DNA, 25 bp, Artificial
  Probe
cccctacagcatggaaaataaactt

SEQ ID NO: 162427 - DNA, 25 bp, Artificial
  Probe
catgatgctcaacactacgctctct

SEQ ID NO: 162428 - DNA, 25 bp, Artificial
  Probe
cctacagcatggaaaataaactttt

SEQ ID NO: 162429 - DNA, 25 bp, Artificial
  Probe
ctacagcatggaaaataaactttta

SEQ ID NO: 162430 - DNA, 25 bp, Artificial
  Probe
acagcatggaaaataaacttttaaa

SEQ ID NO: 162431 - DNA, 25 bp, Artificial
  Probe
tacagcatggaaaataaacttttaa

SEQ ID NO: 162432 - DNA, 25 bp, Artificial
  Probe
cagcatggaaaataaacttttaaaa

SEQ ID NO: 162433 - DNA, 25 bp, Artificial
  Probe
aaaggttcactaaagcagtagaaat

SEQ ID NO: 162434 - DNA, 25 bp, Artificial
  Probe
aaggttcactaaagcagtagaaatt

SEQ ID NO: 162435 - DNA, 25 bp, Artificial
  Probe
ctgggatgcctttgtggaactatat

SEQ ID NO: 162436 - DNA, 25 bp, Artificial
  Probe
attatcaaggatggaccatgaaaca

SEQ ID NO: 162437 - DNA, 25 bp, Artificial
  Probe
cattatcaaggatggaccatgaaac

SEQ ID NO: 162438 - DNA, 25 bp, Artificial
  Probe
tatcaaggatggaccatgaaacaaa

SEQ ID NO: 162439 - DNA, 25 bp, Artificial
  Probe
ttatcaaggatggaccatgaaacaa

SEQ ID NO: 162440 - DNA, 25 bp, Artificial
  Probe
tctgtggatgactgagtacctgaac

SEQ ID NO: 162441 - DNA, 25 bp, Artificial
  Probe
tgcattatcaaggatggaccatgaa

SEQ ID NO: 162442 - DNA, 25 bp, Artificial
  Probe
ggaccatgaaacaaagttgtgattt

SEQ ID NO: 162443 - DNA, 25 bp, Artificial
  Probe
aggttcactaaagcagtagaaatta

SEQ ID NO: 162444 - DNA, 25 bp, Artificial
  Probe
tgggatgcctttgtggaactatatg

SEQ ID NO: 162445 - DNA, 25 bp, Artificial
  Probe
ctctgtggatgactgagtacctgaa

SEQ ID NO: 162446 - DNA, 25 bp, Artificial
  Probe
gcattatcaaggatggaccatgaaa

SEQ ID NO: 162447 - DNA, 25 bp, Artificial
  Probe
atcaaggatggaccatgaaacaaag

SEQ ID NO: 162448 - DNA, 25 bp, Artificial
  Probe
tggaccatgaaacaaagttgtgatt

SEQ ID NO: 162449 - DNA, 25 bp, Artificial
  Probe
atggaccatgaaacaaagttgtgat

SEQ ID NO: 162450 - DNA, 25 bp, Artificial
  Probe
ggcaaatggtcaaatcagctattta

SEQ ID NO: 162451 - DNA, 25 bp, Artificial
  Probe
aaggatggaccatgaaacaaagttg

SEQ ID NO: 162452 - DNA, 25 bp, Artificial
  Probe
caaggatggaccatgaaacaaagtt

SEQ ID NO: 162453 - DNA, 25 bp, Artificial
  Probe
gcaaatggtcaaatcagctatttac

SEQ ID NO: 162454 - DNA, 25 bp, Artificial
  Probe
tcaaatcagctatttactgccaaag

SEQ ID NO: 162455 - DNA, 25 bp, Artificial
  Probe
gtcaaatcagctatttactgccaaa

SEQ ID NO: 162456 - DNA, 25 bp, Artificial
  Probe
aatggtcaaatcagctatttactgc

SEQ ID NO: 162457 - DNA, 25 bp, Artificial
  Probe
caaatcagctatttactgccaaagg

SEQ ID NO: 162458 - DNA, 25 bp, Artificial
  Probe
ggttcactaaagcagtagaaattaa

SEQ ID NO: 162459 - DNA, 25 bp, Artificial
  Probe
caggcaaatggtcaaatcagctatt

SEQ ID NO: 162460 - DNA, 25 bp, Artificial
  Probe
gctatttactgccaaagggaaatat

SEQ ID NO: 162461 - DNA, 25 bp, Artificial
  Probe
gatggaccatgaaacaaagttgtga

SEQ ID NO: 162462 - DNA, 25 bp, Artificial
  Probe
gggatgcctttgtggaactatatgg

SEQ ID NO: 162463 - DNA, 25 bp, Artificial
  Probe
aggcaaatggtcaaatcagctattt

SEQ ID NO: 162464 - DNA, 25 bp, Artificial
  Probe
atggtcaaatcagctatttactgcc

SEQ ID NO: 162465 - DNA, 25 bp, Artificial
  Probe
cagctatttactgccaaagggaaat

SEQ ID NO: 162466 - DNA, 25 bp, Artificial
  Probe
aaatcagctatttactgccaaaggg

SEQ ID NO: 162467 - DNA, 25 bp, Artificial
  Probe
atatgcattatcaaggatggaccat

SEQ ID NO: 162468 - DNA, 25 bp, Artificial
  Probe
aatatgcattatcaaggatggacca

SEQ ID NO: 162469 - DNA, 25 bp, Artificial
  Probe
ggtcaaatcagctatttactgccaa

SEQ ID NO: 162470 - DNA, 25 bp, Artificial
  Probe
tcaaggatggaccatgaaacaaagt

SEQ ID NO: 162471 - DNA, 25 bp, Artificial
  Probe
tatgcattatcaaggatggaccatg

SEQ ID NO: 162472 - DNA, 25 bp, Artificial
  Probe
gtttgatttctcctggctgtctctg

SEQ ID NO: 162473 - DNA, 25 bp, Artificial
  Probe
ctgtttgatttctcctggctgtctc

SEQ ID NO: 162474 - DNA, 25 bp, Artificial
  Probe
ctctgtttgatttctcctggctgtc

SEQ ID NO: 162475 - DNA, 25 bp, Artificial
  Probe
ttaaagcagaacacacacacacaca

SEQ ID NO: 162476 - DNA, 25 bp, Artificial
  Probe
tttaaagcagaacacacacacacac

SEQ ID NO: 162477 - DNA, 25 bp, Artificial
  Probe
tttgatttctcctggctgtctctga

SEQ ID NO: 162478 - DNA, 25 bp, Artificial
  Probe
ggagtggagtttgatgagaagttta

SEQ ID NO: 162479 - DNA, 25 bp, Artificial
  Probe
aaagaaagacgggaatttgatgttt

SEQ ID NO: 162480 - DNA, 25 bp, Artificial
  Probe
ctaaagaaagacgggaatttgatgt

SEQ ID NO: 162481 - DNA, 25 bp, Artificial
  Probe
aagaaagacgggaatttgatgtttg

SEQ ID NO: 162482 - DNA, 25 bp, Artificial
  Probe
gctaaagaaagacgggaatttgatg

SEQ ID NO: 162483 - DNA, 25 bp, Artificial
  Probe
taaagaaagacgggaatttgatgtt

SEQ ID NO: 162484 - DNA, 25 bp, Artificial
  Probe
gagtggagtttgatgagaagtttat

SEQ ID NO: 162485 - DNA, 25 bp, Artificial
  Probe
gaaagacgggaatttgatgtttgac

SEQ ID NO: 162486 - DNA, 25 bp, Artificial
  Probe
agaaagacgggaatttgatgtttga

SEQ ID NO: 162487 - DNA, 25 bp, Artificial
  Probe
tctatgttgaagagtttgatgccag

SEQ ID NO: 162488 - DNA, 25 bp, Artificial
  Probe
gctggaacttctcctctatgttgaa

SEQ ID NO: 162489 - DNA, 25 bp, Artificial
  Probe
aggagtggagtttgatgagaagttt

SEQ ID NO: 162490 - DNA, 25 bp, Artificial
  Probe
gaccagagccattctcaactacatc

SEQ ID NO: 162491 - DNA, 25 bp, Artificial
  Probe
tggagtttgatgagaagtttataca

SEQ ID NO: 162492 - DNA, 25 bp, Artificial
  Probe
tgatgagaagtttatacaaagtcca

SEQ ID NO: 162493 - DNA, 25 bp, Artificial
  Probe
tctcaactacatcgccaccaaatat

SEQ ID NO: 162494 - DNA, 25 bp, Artificial
  Probe
ttctcaactacatcgccaccaaata

SEQ ID NO: 162495 - DNA, 25 bp, Artificial
  Probe
ctcaactacatcgccaccaaatatg

SEQ ID NO: 162496 - DNA, 25 bp, Artificial
  Probe
tgagaagtttatacaaagtccagaa

SEQ ID NO: 162497 - DNA, 25 bp, Artificial
  Probe
caaatatgacctctatgggaaggac

SEQ ID NO: 162498 - DNA, 25 bp, Artificial
  Probe
aatatgacctctatgggaaggacat

SEQ ID NO: 162499 - DNA, 25 bp, Artificial
  Probe
gtggagtttgatgagaagtttatac

SEQ ID NO: 162500 - DNA, 25 bp, Artificial
  Probe
aaatatgacctctatgggaaggaca

SEQ ID NO: 162501 - DNA, 25 bp, Artificial
  Probe
aaagacgggaatttgatgtttgacc

SEQ ID NO: 162502 - DNA, 25 bp, Artificial
  Probe
caactacatcgccaccaaatatgac

SEQ ID NO: 162503 - DNA, 25 bp, Artificial
  Probe
ctatgttgaagagtttgatgccagc

SEQ ID NO: 162504 - DNA, 25 bp, Artificial
  Probe
agaagtttatacaaagtccagaaga

SEQ ID NO: 162505 - DNA, 25 bp, Artificial
  Probe
atgagaagtttatacaaagtccaga

SEQ ID NO: 162506 - DNA, 25 bp, Artificial
  Probe
agtggagtttgatgagaagtttata

SEQ ID NO: 162507 - DNA, 25 bp, Artificial
  Probe
caggagtggagtttgatgagaagtt

SEQ ID NO: 162508 - DNA, 25 bp, Artificial
  Probe
ctgctggaacttctcctctatgttg

SEQ ID NO: 162509 - DNA, 25 bp, Artificial
  Probe
aaagctaaagaaagacgggaatttg

SEQ ID NO: 162510 - DNA, 25 bp, Artificial
  Probe
atcgccaccaaatatgacctctatg

SEQ ID NO: 162511 - DNA, 25 bp, Artificial
  Probe
agctaaagaaagacgggaatttgat

SEQ ID NO: 162512 - DNA, 25 bp, Artificial
  Probe
gatgagaagtttatacaaagtccag

SEQ ID NO: 162513 - DNA, 25 bp, Artificial
  Probe
ctggaacttctcctctatgttgaag

SEQ ID NO: 162514 - DNA, 25 bp, Artificial
  Probe
tggaacttctcctctatgttgaaga

SEQ ID NO: 162515 - DNA, 25 bp, Artificial
  Probe
aagctaaagaaagacgggaatttga

SEQ ID NO: 162516 - DNA, 25 bp, Artificial
  Probe
gagaagtttatacaaagtccagaag

SEQ ID NO: 162517 - DNA, 25 bp, Artificial
  Probe
catcgccaccaaatatgacctctat

SEQ ID NO: 162518 - DNA, 25 bp, Artificial
  Probe
aatgagaagcaattgttgatcctag

SEQ ID NO: 162519 - DNA, 25 bp, Artificial
  Probe
caccaaatatgacctctatgggaag

SEQ ID NO: 162520 - DNA, 25 bp, Artificial
  Probe
attctcaactacatcgccaccaaat

SEQ ID NO: 162521 - DNA, 25 bp, Artificial
  Probe
gaacttctcctctatgttgaagagt

SEQ ID NO: 162522 - DNA, 25 bp, Artificial
  Probe
tcaactacatcgccaccaaatatga

SEQ ID NO: 162523 - DNA, 25 bp, Artificial
  Probe
ttattgacaccttaacacaacctca

SEQ ID NO: 162524 - DNA, 25 bp, Artificial
  Probe
cttatgacattcttgaccagtacca

SEQ ID NO: 162525 - DNA, 25 bp, Artificial
  Probe
ttatgacattcttgaccagtaccac

SEQ ID NO: 162526 - DNA, 25 bp, Artificial
  Probe
tattgacaccttaacacaacctcac

SEQ ID NO: 162527 - DNA, 25 bp, Artificial
  Probe
tatgacattcttgaccagtaccaca

SEQ ID NO: 162528 - DNA, 25 bp, Artificial
  Probe
atgacattcttgaccagtaccacat

SEQ ID NO: 162529 - DNA, 25 bp, Artificial
  Probe
tgacattcttgaccagtaccacatt

SEQ ID NO: 162530 - DNA, 25 bp, Artificial
  Probe
cccttctttattgacaccttaacac

SEQ ID NO: 162531 - DNA, 25 bp, Artificial
  Probe
gaagatgaagctctactctgagttc

SEQ ID NO: 162532 - DNA, 25 bp, Artificial
  Probe
attgacaccttaacacaacctcaca

SEQ ID NO: 162533 - DNA, 25 bp, Artificial
  Probe
ctatgaggagaagagatacgccatg

SEQ ID NO: 162534 - DNA, 25 bp, Artificial
  Probe
agaagatgaagctctactctgagtt

SEQ ID NO: 162535 - DNA, 25 bp, Artificial
  Probe
ccttctttattgacaccttaacaca

SEQ ID NO: 162536 - DNA, 25 bp, Artificial
  Probe
aatctgccctacttaattgatggat

SEQ ID NO: 162537 - DNA, 25 bp, Artificial
  Probe
tcaagctatgaggagaagagatacg

SEQ ID NO: 162538 - DNA, 25 bp, Artificial
  Probe
tggaatacacagactcaagctatga

SEQ ID NO: 162539 - DNA, 25 bp, Artificial
  Probe
gagaagatgaagctctactctgagt

SEQ ID NO: 162540 - DNA, 25 bp, Artificial
  Probe
tgagaagatgaagctctactctgag

SEQ ID NO: 162541 - DNA, 25 bp, Artificial
  Probe
ctgagaagatgaagctctactctga

SEQ ID NO: 162542 - DNA, 25 bp, Artificial
  Probe
tttattgacaccttaacacaacctc

SEQ ID NO: 162543 - DNA, 25 bp, Artificial
  Probe
ctttattgacaccttaacacaacct

SEQ ID NO: 162544 - DNA, 25 bp, Artificial
  Probe
tctttattgacaccttaacacaacc

SEQ ID NO: 162545 - DNA, 25 bp, Artificial
  Probe
ctggaatacacagactcaagctatg

SEQ ID NO: 162546 - DNA, 25 bp, Artificial
  Probe
aagatgaagctctactctgagttcc

SEQ ID NO: 162547 - DNA, 25 bp, Artificial
  Probe
atctgccctacttaattgatggatc

SEQ ID NO: 162548 - DNA, 25 bp, Artificial
  Probe
cctatgatactgggatactggaacg

SEQ ID NO: 162549 - DNA, 25 bp, Artificial
  Probe
ccgctacctctcaacacctatattt

SEQ ID NO: 162550 - DNA, 25 bp, Artificial
  Probe
cctgagaagatgaagctctactctg

SEQ ID NO: 162551 - DNA, 25 bp, Artificial
  Probe
gacattcttgaccagtaccacattt

SEQ ID NO: 162552 - DNA, 25 bp, Artificial
  Probe
ttgacaccttaacacaacctcacag

SEQ ID NO: 162553 - DNA, 25 bp, Artificial
  Probe
gcctatgatactgggatactggaac

SEQ ID NO: 162554 - DNA, 25 bp, Artificial
  Probe
atgcctatgatactgggatactgga

SEQ ID NO: 162555 - DNA, 25 bp, Artificial
  Probe
cctggaatacacagactcaagctat

SEQ ID NO: 162556 - DNA, 25 bp, Artificial
  Probe
caagctatgaggagaagagatacgc

SEQ ID NO: 162557 - DNA, 25 bp, Artificial
  Probe
gatgaagctctactctgagttcctg

SEQ ID NO: 162558 - DNA, 25 bp, Artificial
  Probe
agatgaagctctactctgagttcct

SEQ ID NO: 162559 - DNA, 25 bp, Artificial
  Probe
tgcctatgatactgggatactggaa

SEQ ID NO: 162560 - DNA, 25 bp, Artificial
  Probe
gctatgaggagaagagatacgccat

SEQ ID NO: 162561 - DNA, 25 bp, Artificial
  Probe
ttctttattgacaccttaacacaac

SEQ ID NO: 162562 - DNA, 25 bp, Artificial
  Probe
gaagccagagttcttgaagaccatc

SEQ ID NO: 162563 - DNA, 25 bp, Artificial
  Probe
accttaacacaacctcacagtcctt

SEQ ID NO: 162564 - DNA, 25 bp, Artificial
  Probe
gaagaagatctctgcctacatgaag

SEQ ID NO: 162565 - DNA, 25 bp, Artificial
  Probe
cttctttattgacaccttaacacaa

SEQ ID NO: 162566 - DNA, 25 bp, Artificial
  Probe
aagaagatctctgcctacatgaaga

SEQ ID NO: 162567 - DNA, 25 bp, Artificial
  Probe
aagattacccagagcaatgccataa

SEQ ID NO: 162568 - DNA, 25 bp, Artificial
  Probe
ccagatgttacctatgtcaagaagg

SEQ ID NO: 162569 - DNA, 25 bp, Artificial
  Probe
aatgaaatgtctggatgctaatgag

SEQ ID NO: 162570 - DNA, 25 bp, Artificial
  Probe
cccagatgttacctatgtcaagaag

SEQ ID NO: 162571 - DNA, 25 bp, Artificial
  Probe
atgaaatgtctggatgctaatgagg

SEQ ID NO: 162572 - DNA, 25 bp, Artificial
  Probe
aaatgaaatgtctggatgctaatga

SEQ ID NO: 162573 - DNA, 25 bp, Artificial
  Probe
acccagatgttacctatgtcaagaa

SEQ ID NO: 162574 - DNA, 25 bp, Artificial
  Probe
gaaatgaaatgtctggatgctaatg

SEQ ID NO: 162575 - DNA, 25 bp, Artificial
  Probe
gagaaatgaaatgtctggatgctaa

SEQ ID NO: 162576 - DNA, 25 bp, Artificial
  Probe
agaaatgaaatgtctggatgctaat

SEQ ID NO: 162577 - DNA, 25 bp, Artificial
  Probe
cgagaaatgaaatgtctggatgcta

SEQ ID NO: 162578 - DNA, 25 bp, Artificial
  Probe
cacccagatgttacctatgtcaaga

SEQ ID NO: 162579 - DNA, 25 bp, Artificial
  Probe
gagcgagaaatgaaatgtctggatg

SEQ ID NO: 162580 - DNA, 25 bp, Artificial
  Probe
ccacccagatgttacctatgtcaag

SEQ ID NO: 162581 - DNA, 25 bp, Artificial
  Probe
cactgagcgagaaatgaaatgtctg

SEQ ID NO: 162582 - DNA, 25 bp, Artificial
  Probe
tgagcgagaaatgaaatgtctggat

SEQ ID NO: 162583 - DNA, 25 bp, Artificial
  Probe
tcactgagcgagaaatgaaatgtct

SEQ ID NO: 162584 - DNA, 25 bp, Artificial
  Probe
tgaaatgtctggatgctaatgaggc

SEQ ID NO: 162585 - DNA, 25 bp, Artificial
  Probe
accacccagatgttacctatgtcaa

SEQ ID NO: 162586 - DNA, 25 bp, Artificial
  Probe
ctatgtcaagaaggttcggaccatg

SEQ ID NO: 162587 - DNA, 25 bp, Artificial
  Probe
agtgtttgatgagtgtgaaggtgtg

SEQ ID NO: 162588 - DNA, 25 bp, Artificial
  Probe
cagtgtttgatgagtgtgaaggtgt

SEQ ID NO: 162589 - DNA, 25 bp, Artificial
  Probe
ctgagcgagaaatgaaatgtctgga

SEQ ID NO: 162590 - DNA, 25 bp, Artificial
  Probe
actgagcgagaaatgaaatgtctgg

SEQ ID NO: 162591 - DNA, 25 bp, Artificial
  Probe
tttcttatacatgggagttacttcc

SEQ ID NO: 162592 - DNA, 25 bp, Artificial
  Probe
atcttcactgagcgagaaatgaaat

SEQ ID NO: 162593 - DNA, 25 bp, Artificial
  Probe
caccacccagatgttacctatgtca

SEQ ID NO: 162594 - DNA, 25 bp, Artificial
  Probe
gatcttcactgagcgagaaatgaaa

SEQ ID NO: 162595 - DNA, 25 bp, Artificial
  Probe
cctatgtcaagaaggttcggaccat

SEQ ID NO: 162596 - DNA, 25 bp, Artificial
  Probe
tcttcactgagcgagaaatgaaatg

SEQ ID NO: 162597 - DNA, 25 bp, Artificial
  Probe
gtttgatgagtgtgaaggtgtggac

SEQ ID NO: 162598 - DNA, 25 bp, Artificial
  Probe
ccagtgtttgatgagtgtgaaggtg

SEQ ID NO: 162599 - DNA, 25 bp, Artificial
  Probe
tggcattttcttatacatgggagtt

SEQ ID NO: 162600 - DNA, 25 bp, Artificial
  Probe
ttggcattttcttatacatgggagt

SEQ ID NO: 162601 - DNA, 25 bp, Artificial
  Probe
tttggcattttcttatacatgggag

SEQ ID NO: 162602 - DNA, 25 bp, Artificial
  Probe
ctttggcattttcttatacatggga

SEQ ID NO: 162603 - DNA, 25 bp, Artificial
  Probe
tctttggcattttcttatacatggg

SEQ ID NO: 162604 - DNA, 25 bp, Artificial
  Probe
ttcactgagcgagaaatgaaatgtc

SEQ ID NO: 162605 - DNA, 25 bp, Artificial
  Probe
cttcactgagcgagaaatgaaatgt

SEQ ID NO: 162606 - DNA, 25 bp, Artificial
  Probe
gctctttggcattttcttatacatg

SEQ ID NO: 162607 - DNA, 25 bp, Artificial
  Probe
gagccagtgtttgatgagtgtgaag

SEQ ID NO: 162608 - DNA, 25 bp, Artificial
  Probe
ggcattttcttatacatgggagtta

SEQ ID NO: 162609 - DNA, 25 bp, Artificial
  Probe
gcgagaaatgaaatgtctggatgct

SEQ ID NO: 162610 - DNA, 25 bp, Artificial
  Probe
agcgagaaatgaaatgtctggatgc

SEQ ID NO: 162611 - DNA, 25 bp, Artificial
  Probe
acaccacccagatgttacctatgtc

SEQ ID NO: 162612 - DNA, 25 bp, Artificial
  Probe
ctctttggcattttcttatacatgg

SEQ ID NO: 162613 - DNA, 25 bp, Artificial
  Probe
gtcaggacagattacaggattaact

SEQ ID NO: 162614 - DNA, 25 bp, Artificial
  Probe
caggacagattacaggattaactga

SEQ ID NO: 162615 - DNA, 25 bp, Artificial
  Probe
tcaggacagattacaggattaactg

SEQ ID NO: 162616 - DNA, 25 bp, Artificial
  Probe
acagattacaggattaactgaaggc

SEQ ID NO: 162617 - DNA, 25 bp, Artificial
  Probe
aggacagattacaggattaactgaa

SEQ ID NO: 162618 - DNA, 25 bp, Artificial
  Probe
gacagattacaggattaactgaagg

SEQ ID NO: 162619 - DNA, 25 bp, Artificial
  Probe
ggacagattacaggattaactgaag

SEQ ID NO: 162620 - DNA, 25 bp, Artificial
  Probe
gattacaggattaactgaaggcgag

SEQ ID NO: 162621 - DNA, 25 bp, Artificial
  Probe
agattacaggattaactgaaggcga

SEQ ID NO: 162622 - DNA, 25 bp, Artificial
  Probe
cagattacaggattaactgaaggcg

SEQ ID NO: 162623 - DNA, 25 bp, Artificial
  Probe
tgtcaggacagattacaggattaac

SEQ ID NO: 162624 - DNA, 25 bp, Artificial
  Probe
gtgtcaggacagattacaggattaa

SEQ ID NO: 162625 - DNA, 25 bp, Artificial
  Probe
ggtgtcaggacagattacaggatta

SEQ ID NO: 162626 - DNA, 25 bp, Artificial
  Probe
atgtgtccattgaagatcgtgtgat

SEQ ID NO: 162627 - DNA, 25 bp, Artificial
  Probe
gattgcccaataaacattccctatg

SEQ ID NO: 162628 - DNA, 25 bp, Artificial
  Probe
caaaggtggaaatgaagaaagtaca

SEQ ID NO: 162629 - DNA, 25 bp, Artificial
  Probe
ggtggaaatgaagaaagtacaaaga

SEQ ID NO: 162630 - DNA, 25 bp, Artificial
  Probe
aggtggaaatgaagaaagtacaaag

SEQ ID NO: 162631 - DNA, 25 bp, Artificial
  Probe
ggcaaaggtggaaatgaagaaagta

SEQ ID NO: 162632 - DNA, 25 bp, Artificial
  Probe
gcaaaggtggaaatgaagaaagtac

SEQ ID NO: 162633 - DNA, 25 bp, Artificial
  Probe
taatcctcactctaagaaacatggc

SEQ ID NO: 162634 - DNA, 25 bp, Artificial
  Probe
aaggtggaaatgaagaaagtacaaa

SEQ ID NO: 162635 - DNA, 25 bp, Artificial
  Probe
aaaggtggaaatgaagaaagtacaa

SEQ ID NO: 162636 - DNA, 25 bp, Artificial
  Probe
aagaaagtacaaagactggaaatgc

SEQ ID NO: 162637 - DNA, 25 bp, Artificial
  Probe
gtggaaatgaagaaagtacaaagac

SEQ ID NO: 162638 - DNA, 25 bp, Artificial
  Probe
gaaagtacaaagactggaaatgctg

SEQ ID NO: 162639 - DNA, 25 bp, Artificial
  Probe
agaaagtacaaagactggaaatgct

SEQ ID NO: 162640 - DNA, 25 bp, Artificial
  Probe
attacaggattaactgaaggcgagc

SEQ ID NO: 162641 - DNA, 25 bp, Artificial
  Probe
tgaagaaagtacaaagactggaaat

SEQ ID NO: 162642 - DNA, 25 bp, Artificial
  Probe
atgaagaaagtacaaagactggaaa

SEQ ID NO: 162643 - DNA, 25 bp, Artificial
  Probe
aatgaagaaagtacaaagactggaa

SEQ ID NO: 162644 - DNA, 25 bp, Artificial
  Probe
aaatgaagaaagtacaaagactgga

SEQ ID NO: 162645 - DNA, 25 bp, Artificial
  Probe
tggaaatgaagaaagtacaaagact

SEQ ID NO: 162646 - DNA, 25 bp, Artificial
  Probe
ttaatcctcactctaagaaacatgg

SEQ ID NO: 162647 - DNA, 25 bp, Artificial
  Probe
gaagaaagtacaaagactggaaatg

SEQ ID NO: 162648 - DNA, 25 bp, Artificial
  Probe
gaaatgaagaaagtacaaagactgg

SEQ ID NO: 162649 - DNA, 25 bp, Artificial
  Probe
ggaaatgaagaaagtacaaagactg

SEQ ID NO: 162650 - DNA, 25 bp, Artificial
  Probe
gtacaaagactggaaatgctggaag

SEQ ID NO: 162651 - DNA, 25 bp, Artificial
  Probe
aaagtacaaagactggaaatgctgg

SEQ ID NO: 162652 - DNA, 25 bp, Artificial
  Probe
ctgctgtcctgctaaactgtagaaa

SEQ ID NO: 162653 - DNA, 25 bp, Artificial
  Probe
ggattgcccaataaacattccctat

SEQ ID NO: 162654 - DNA, 25 bp, Artificial
  Probe
aaccaaaccattaaactgtaatctt

SEQ ID NO: 162655 - DNA, 25 bp, Artificial
  Probe
aaaccaaaccattaaactgtaatct

SEQ ID NO: 162656 - DNA, 25 bp, Artificial
  Probe
tggtgtcaggacagattacaggatt

SEQ ID NO: 162657 - DNA, 25 bp, Artificial
  Probe
aatgtgtccattgaagatcgtgtga

SEQ ID NO: 162658 - DNA, 25 bp, Artificial
  Probe
gttaattcggagaggagtgacattg

SEQ ID NO: 162659 - DNA, 25 bp, Artificial
  Probe
gactgacaactgttaattcggagag

SEQ ID NO: 162660 - DNA, 25 bp, Artificial
  Probe
ctgactgacaactgttaattcggag

SEQ ID NO: 162661 - DNA, 25 bp, Artificial
  Probe
ctcctgactgacaactgttaattcg

SEQ ID NO: 162662 - DNA, 25 bp, Artificial
  Probe
ttaattcggagaggagtgacattgt

SEQ ID NO: 162663 - DNA, 25 bp, Artificial
  Probe
gctcctgactgacaactgttaattc

SEQ ID NO: 162664 - DNA, 25 bp, Artificial
  Probe
tgactgacaactgttaattcggaga

SEQ ID NO: 162665 - DNA, 25 bp, Artificial
  Probe
gtaactaggctaaggatggatggag

SEQ ID NO: 162666 - DNA, 25 bp, Artificial
  Probe
ttgagaacagtacatacttggtgtg

SEQ ID NO: 162667 - DNA, 25 bp, Artificial
  Probe
taattcggagaggagtgacattgtg

SEQ ID NO: 162668 - DNA, 25 bp, Artificial
  Probe
tgacaactgttaattcggagaggag

SEQ ID NO: 162669 - DNA, 25 bp, Artificial
  Probe
ctgacaactgttaattcggagagga

SEQ ID NO: 162670 - DNA, 25 bp, Artificial
  Probe
gagaacagtacatacttggtgtgag

SEQ ID NO: 162671 - DNA, 25 bp, Artificial
  Probe
tgttaattcggagaggagtgacatt

SEQ ID NO: 162672 - DNA, 25 bp, Artificial
  Probe
tgtaactaggctaaggatggatgga

SEQ ID NO: 162673 - DNA, 25 bp, Artificial
  Probe
gtgtaactaggctaaggatggatgg

SEQ ID NO: 162674 - DNA, 25 bp, Artificial
  Probe
cattagaggcttgaattgcttggac

SEQ ID NO: 162675 - DNA, 25 bp, Artificial
  Probe
actgacaactgttaattcggagagg

SEQ ID NO: 162676 - DNA, 25 bp, Artificial
  Probe
tgagaacagtacatacttggtgtga

SEQ ID NO: 162677 - DNA, 25 bp, Artificial
  Probe
taactaggctaaggatggatggagt

SEQ ID NO: 162678 - DNA, 25 bp, Artificial
  Probe
aactgttaattcggagaggagtgac

SEQ ID NO: 162679 - DNA, 25 bp, Artificial
  Probe
caactgttaattcggagaggagtga

SEQ ID NO: 162680 - DNA, 25 bp, Artificial
  Probe
gacaactgttaattcggagaggagt

SEQ ID NO: 162681 - DNA, 25 bp, Artificial
  Probe
cgtgtaactaggctaaggatggatg

SEQ ID NO: 162682 - DNA, 25 bp, Artificial
  Probe
ctgttaattcggagaggagtgacat

SEQ ID NO: 162683 - DNA, 25 bp, Artificial
  Probe
aaaccgactgtgtattgtatgaaag

SEQ ID NO: 162684 - DNA, 25 bp, Artificial
  Probe
cctgactgacaactgttaattcgga

SEQ ID NO: 162685 - DNA, 25 bp, Artificial
  Probe
tcctgactgacaactgttaattcgg

SEQ ID NO: 162686 - DNA, 25 bp, Artificial
  Probe
aaagtgctcaagatggacaaagtat

SEQ ID NO: 162687 - DNA, 25 bp, Artificial
  Probe
tcattagaggcttgaattgcttgga

SEQ ID NO: 162688 - DNA, 25 bp, Artificial
  Probe
acaactgttaattcggagaggagtg

SEQ ID NO: 162689 - DNA, 25 bp, Artificial
  Probe
ggctcctgactgacaactgttaatt

SEQ ID NO: 162690 - DNA, 25 bp, Artificial
  Probe
gaaagtgctcaagatggacaaagta

SEQ ID NO: 162691 - DNA, 25 bp, Artificial
  Probe
tcataagtaatcctttgtttagcgg

SEQ ID NO: 162692 - DNA, 25 bp, Artificial
  Probe
gactgtgtattgtatgaaagtgctc

SEQ ID NO: 162693 - DNA, 25 bp, Artificial
  Probe
tacctcactactgaacaaatcaaca

SEQ ID NO: 162694 - DNA, 25 bp, Artificial
  Probe
ctctacctcactactgaacaaatca

SEQ ID NO: 162695 - DNA, 25 bp, Artificial
  Probe
tgtgtattgtatgaaagtgctcaag

SEQ ID NO: 162696 - DNA, 25 bp, Artificial
  Probe
ctgtgtattgtatgaaagtgctcaa

SEQ ID NO: 162697 - DNA, 25 bp, Artificial
  Probe
attgtatgaaagtgctcaagatgga

SEQ ID NO: 162698 - DNA, 25 bp, Artificial
  Probe
actgtgtattgtatgaaagtgctca

SEQ ID NO: 162699 - DNA, 25 bp, Artificial
  Probe
aaccgactgtgtattgtatgaaagt

SEQ ID NO: 162700 - DNA, 25 bp, Artificial
  Probe
gtgtattgtatgaaagtgctcaaga

SEQ ID NO: 162701 - DNA, 25 bp, Artificial
  Probe
ctacctcactactgaacaaatcaac

SEQ ID NO: 162702 - DNA, 25 bp, Artificial
  Probe
tctacctcactactgaacaaatcaa

SEQ ID NO: 162703 - DNA, 25 bp, Artificial
  Probe
ttatatctgcctctctctctctctc

SEQ ID NO: 162704 - DNA, 25 bp, Artificial
  Probe
ccagaatcctatccatattgtccag

SEQ ID NO: 162705 - DNA, 25 bp, Artificial
  Probe
tatatctgcctctctctctctctct

SEQ ID NO: 162706 - DNA, 25 bp, Artificial
  Probe
ggtccatactctgttatcaagatga

SEQ ID NO: 162707 - DNA, 25 bp, Artificial
  Probe
atatctgcctctctctctctctctc

SEQ ID NO: 162708 - DNA, 25 bp, Artificial
  Probe
ccatactctgttatcaagatgagga

SEQ ID NO: 162709 - DNA, 25 bp, Artificial
  Probe
tccatactctgttatcaagatgagg

SEQ ID NO: 162710 - DNA, 25 bp, Artificial
  Probe
tgttatcaagatgaggatcaggaag

SEQ ID NO: 162711 - DNA, 25 bp, Artificial
  Probe
gtccatactctgttatcaagatgag

SEQ ID NO: 162712 - DNA, 25 bp, Artificial
  Probe
cagaatcctatccatattgtccagg

SEQ ID NO: 162713 - DNA, 25 bp, Artificial
  Probe
gttatcaagatgaggatcaggaagc

SEQ ID NO: 162714 - DNA, 25 bp, Artificial
  Probe
ctgttatcaagatgaggatcaggaa

SEQ ID NO: 162715 - DNA, 25 bp, Artificial
  Probe
ctctgttatcaagatgaggatcagg

SEQ ID NO: 162716 - DNA, 25 bp, Artificial
  Probe
actctgttatcaagatgaggatcag

SEQ ID NO: 162717 - DNA, 25 bp, Artificial
  Probe
tctgttatcaagatgaggatcagga

SEQ ID NO: 162718 - DNA, 25 bp, Artificial
  Probe
tatctgcctctctctctctctctct

SEQ ID NO: 162719 - DNA, 25 bp, Artificial
  Probe
tactctgttatcaagatgaggatca

SEQ ID NO: 162720 - DNA, 25 bp, Artificial
  Probe
aaagggtccatactctgttatcaag

SEQ ID NO: 162721 - DNA, 25 bp, Artificial
  Probe
gaaagggtccatactctgttatcaa

SEQ ID NO: 162722 - DNA, 25 bp, Artificial
  Probe
tttctgtttctgtctctctgtcttt

SEQ ID NO: 162723 - DNA, 25 bp, Artificial
  Probe
atttctgtttctgtctctctgtctt

SEQ ID NO: 162724 - DNA, 25 bp, Artificial
  Probe
tgtctttatatctgcctctctctct

SEQ ID NO: 162725 - DNA, 25 bp, Artificial
  Probe
tctgtctttatatctgcctctctct

SEQ ID NO: 162726 - DNA, 25 bp, Artificial
  Probe
tctctgtctttatatctgcctctct

SEQ ID NO: 162727 - DNA, 25 bp, Artificial
  Probe
tctctctgtctttatatctgcctct

SEQ ID NO: 162728 - DNA, 25 bp, Artificial
  Probe
gtctctctgtctttatatctgcctc

SEQ ID NO: 162729 - DNA, 25 bp, Artificial
  Probe
ctgtctttatatctgcctctctctc

SEQ ID NO: 162730 - DNA, 25 bp, Artificial
  Probe
ctctgtctttatatctgcctctctc

SEQ ID NO: 162731 - DNA, 25 bp, Artificial
  Probe
ctctctgtctttatatctgcctctc

SEQ ID NO: 162732 - DNA, 25 bp, Artificial
  Probe
ctgtctctctgtctttatatctgcc

SEQ ID NO: 162733 - DNA, 25 bp, Artificial
  Probe
catactctgttatcaagatgaggat

SEQ ID NO: 162734 - DNA, 25 bp, Artificial
  Probe
gtctttatatctgcctctctctctc

SEQ ID NO: 162735 - DNA, 25 bp, Artificial
  Probe
tttatatctgcctctctctctctct

SEQ ID NO: 162736 - DNA, 25 bp, Artificial
  Probe
tctttatatctgcctctctctctct

SEQ ID NO: 162737 - DNA, 25 bp, Artificial
  Probe
tgtctctctgtctttatatctgcct

SEQ ID NO: 162738 - DNA, 25 bp, Artificial
  Probe
tctgtctctctgtctttatatctgc

SEQ ID NO: 162739 - DNA, 25 bp, Artificial
  Probe
ttctgtttctgtctctctgtcttta

SEQ ID NO: 162740 - DNA, 25 bp, Artificial
  Probe
ctttatatctgcctctctctctctc

SEQ ID NO: 162741 - DNA, 25 bp, Artificial
  Probe
ttatcaagatgaggatcaggaagct

SEQ ID NO: 162742 - DNA, 25 bp, Artificial
  Probe
tctgtttctgtctctctgtctttat

SEQ ID NO: 162743 - DNA, 25 bp, Artificial
  Probe
tatttctgtttctgtctctctgtct

SEQ ID NO: 162744 - DNA, 25 bp, Artificial
  Probe
gggtccatactctgttatcaagatg

SEQ ID NO: 162745 - DNA, 25 bp, Artificial
  Probe
agggtccatactctgttatcaagat

SEQ ID NO: 162746 - DNA, 25 bp, Artificial
  Probe
aagggtccatactctgttatcaaga

SEQ ID NO: 162747 - DNA, 25 bp, Artificial
  Probe
tctctcaattaaagaaacactgtgc

SEQ ID NO: 162748 - DNA, 25 bp, Artificial
  Probe
gactcttgtgcttgtagataaccta

SEQ ID NO: 162749 - DNA, 25 bp, Artificial
  Probe
tagactcttgtgcttgtagataacc

SEQ ID NO: 162750 - DNA, 25 bp, Artificial
  Probe
cagtagactcttgtgcttgtagata

SEQ ID NO: 162751 - DNA, 25 bp, Artificial
  Probe
tagataacctagcagagaacacact

SEQ ID NO: 162752 - DNA, 25 bp, Artificial
  Probe
gtagataacctagcagagaacacac

SEQ ID NO: 162753 - DNA, 25 bp, Artificial
  Probe
gtagactcttgtgcttgtagataac

SEQ ID NO: 162754 - DNA, 25 bp, Artificial
  Probe
agtagactcttgtgcttgtagataa

SEQ ID NO: 162755 - DNA, 25 bp, Artificial
  Probe
actcttgtgcttgtagataacctag

SEQ ID NO: 162756 - DNA, 25 bp, Artificial
  Probe
agactcttgtgcttgtagataacct

SEQ ID NO: 162757 - DNA, 25 bp, Artificial
  Probe
atcctaacatgacagtagactcttg

SEQ ID NO: 162758 - DNA, 25 bp, Artificial
  Probe
ttgtagataacctagcagagaacac

SEQ ID NO: 162759 - DNA, 25 bp, Artificial
  Probe
cttgtagataacctagcagagaaca

SEQ ID NO: 162760 - DNA, 25 bp, Artificial
  Probe
tgtagataacctagcagagaacaca

SEQ ID NO: 162761 - DNA, 25 bp, Artificial
  Probe
acagtagactcttgtgcttgtagat

SEQ ID NO: 162762 - DNA, 25 bp, Artificial
  Probe
ctatcctaacatgacagtagactct

SEQ ID NO: 162763 - DNA, 25 bp, Artificial
  Probe
atgacagtagactcttgtgcttgta

SEQ ID NO: 162764 - DNA, 25 bp, Artificial
  Probe
ataacctagcagagaacacactcaa

SEQ ID NO: 162765 - DNA, 25 bp, Artificial
  Probe
agataacctagcagagaacacactc

SEQ ID NO: 162766 - DNA, 25 bp, Artificial
  Probe
cctaacatgacagtagactcttgtg

SEQ ID NO: 162767 - DNA, 25 bp, Artificial
  Probe
tcctaacatgacagtagactcttgt

SEQ ID NO: 162768 - DNA, 25 bp, Artificial
  Probe
tatcctaacatgacagtagactctt

SEQ ID NO: 162769 - DNA, 25 bp, Artificial
  Probe
gacagtagactcttgtgcttgtaga

SEQ ID NO: 162770 - DNA, 25 bp, Artificial
  Probe
atattggctggagcgaatggattat

SEQ ID NO: 162771 - DNA, 25 bp, Artificial
  Probe
gataacctagcagagaacacactca

SEQ ID NO: 162772 - DNA, 25 bp, Artificial
  Probe
tgacagtagactcttgtgcttgtag

SEQ ID NO: 162773 - DNA, 25 bp, Artificial
  Probe
ctaacatgacagtagactcttgtgc

SEQ ID NO: 162774 - DNA, 25 bp, Artificial
  Probe
taacatgacagtagactcttgtgct

SEQ ID NO: 162775 - DNA, 25 bp, Artificial
  Probe
tggtcctcaaagtctatcctaacat

SEQ ID NO: 162776 - DNA, 25 bp, Artificial
  Probe
atgtggtcctcaaagtctatcctaa

SEQ ID NO: 162777 - DNA, 25 bp, Artificial
  Probe
aatgtggtcctcaaagtctatccta

SEQ ID NO: 162778 - DNA, 25 bp, Artificial
  Probe
ctcaaacgctccattcaatcattaa

SEQ ID NO: 162779 - DNA, 25 bp, Artificial
  Probe
actcaaacgctccattcaatcatta

SEQ ID NO: 162780 - DNA, 25 bp, Artificial
  Probe
aagaatgtggtcctcaaagtctatc

SEQ ID NO: 162781 - DNA, 25 bp, Artificial
  Probe
caagaatgtggtcctcaaagtctat

SEQ ID NO: 162782 - DNA, 25 bp, Artificial
  Probe
tattggctggagcgaatggattatc

SEQ ID NO: 162783 - DNA, 25 bp, Artificial
  Probe
gatattggctggagcgaatggatta

SEQ ID NO: 162784 - DNA, 25 bp, Artificial
  Probe
tctatcctaacatgacagtagactc

SEQ ID NO: 162785 - DNA, 25 bp, Artificial
  Probe
gtggtcctcaaagtctatcctaaca

SEQ ID NO: 162786 - DNA, 25 bp, Artificial
  Probe
tgtggtcctcaaagtctatcctaac

SEQ ID NO: 162787 - DNA, 25 bp, Artificial
  Probe
ccaagtcatttgatgcctactattg

SEQ ID NO: 162788 - DNA, 25 bp, Artificial
  Probe
aagtcatttgatgcctactattgct

SEQ ID NO: 162789 - DNA, 25 bp, Artificial
  Probe
caagtcatttgatgcctactattgc

SEQ ID NO: 162790 - DNA, 25 bp, Artificial
  Probe
gcttgtagataacctagcagagaac

SEQ ID NO: 162791 - DNA, 25 bp, Artificial
  Probe
aacatgacagtagactcttgtgctt

SEQ ID NO: 162792 - DNA, 25 bp, Artificial
  Probe
gaatgtggtcctcaaagtctatcct

SEQ ID NO: 162793 - DNA, 25 bp, Artificial
  Probe
gtgacaggttctgagtgtgaatatc

SEQ ID NO: 162794 - DNA, 25 bp, Artificial
  Probe
tttactttattcacatcctggcact

SEQ ID NO: 162795 - DNA, 25 bp, Artificial
  Probe
atttactttattcacatcctggcac

SEQ ID NO: 162796 - DNA, 25 bp, Artificial
  Probe
catttactttattcacatcctggca

SEQ ID NO: 162797 - DNA, 25 bp, Artificial
  Probe
acatttactttattcacatcctggc

SEQ ID NO: 162798 - DNA, 25 bp, Artificial
  Probe
gtaggagaagacagtaaatcacagg

SEQ ID NO: 162799 - DNA, 25 bp, Artificial
  Probe
agaggtaaatggatagagagaggat

SEQ ID NO: 162800 - DNA, 25 bp, Artificial
  Probe
ttactttattcacatcctggcactc

SEQ ID NO: 162801 - DNA, 25 bp, Artificial
  Probe
gagaagacagtaaatcacagggaag

SEQ ID NO: 162802 - DNA, 25 bp, Artificial
  Probe
cacctttctgaagatttggaatgac

SEQ ID NO: 162803 - DNA, 25 bp, Artificial
  Probe
tagaggtaaatggatagagagagga

SEQ ID NO: 162804 - DNA, 25 bp, Artificial
  Probe
ggtgacaggttctgagtgtgaatat

SEQ ID NO: 162805 - DNA, 25 bp, Artificial
  Probe
taggagaagacagtaaatcacaggg

SEQ ID NO: 162806 - DNA, 25 bp, Artificial
  Probe
tgacaggttctgagtgtgaatatcg

SEQ ID NO: 162807 - DNA, 25 bp, Artificial
  Probe
tatacttgggagaggcagaaagaat

SEQ ID NO: 162808 - DNA, 25 bp, Artificial
  Probe
ttatacttgggagaggcagaaagaa

SEQ ID NO: 162809 - DNA, 25 bp, Artificial
  Probe
tttattcacatcctggcactcaaag

SEQ ID NO: 162810 - DNA, 25 bp, Artificial
  Probe
ctttattcacatcctggcactcaaa

SEQ ID NO: 162811 - DNA, 25 bp, Artificial
  Probe
tcacctttctgaagatttggaatga

SEQ ID NO: 162812 - DNA, 25 bp, Artificial
  Probe
gtcacctttctgaagatttggaatg

SEQ ID NO: 162813 - DNA, 25 bp, Artificial
  Probe
acctttctgaagatttggaatgacc

SEQ ID NO: 162814 - DNA, 25 bp, Artificial
  Probe
tactttattcacatcctggcactca

SEQ ID NO: 162815 - DNA, 25 bp, Artificial
  Probe
ttagaggtaaatggatagagagagg

SEQ ID NO: 162816 - DNA, 25 bp, Artificial
  Probe
cttatacttgggagaggcagaaaga

SEQ ID NO: 162817 - DNA, 25 bp, Artificial
  Probe
ttcaagtgagaaagacagtccctta

SEQ ID NO: 162818 - DNA, 25 bp, Artificial
  Probe
cacatttactttattcacatcctgg

SEQ ID NO: 162819 - DNA, 25 bp, Artificial
  Probe
gttcagagagccagggttagaatat

SEQ ID NO: 162820 - DNA, 25 bp, Artificial
  Probe
tgtaggagaagacagtaaatcacag

SEQ ID NO: 162821 - DNA, 25 bp, Artificial
  Probe
aagtgagaaagacagtcccttagag

SEQ ID NO: 162822 - DNA, 25 bp, Artificial
  Probe
aagacagtaaatcacagggaaggag

SEQ ID NO: 162823 - DNA, 25 bp, Artificial
  Probe
gaagacagtaaatcacagggaagga

SEQ ID NO: 162824 - DNA, 25 bp, Artificial
  Probe
agaagacagtaaatcacagggaagg

SEQ ID NO: 162825 - DNA, 25 bp, Artificial
  Probe
ggagaagacagtaaatcacagggaa

SEQ ID NO: 162826 - DNA, 25 bp, Artificial
  Probe
gaggtaaatggatagagagaggata

SEQ ID NO: 162827 - DNA, 25 bp, Artificial
  Probe
tcctctcacatttactttattcaca

SEQ ID NO: 162828 - DNA, 25 bp, Artificial
  Probe
caagtgagaaagacagtcccttaga

SEQ ID NO: 162829 - DNA, 25 bp, Artificial
  Probe
tcaagtgagaaagacagtcccttag

SEQ ID NO: 162830 - DNA, 25 bp, Artificial
  Probe
ggtcacctttctgaagatttggaat

SEQ ID NO: 162831 - DNA, 25 bp, Artificial
  Probe
aaagacagtcccttagaggtaaatg

SEQ ID NO: 162832 - DNA, 25 bp, Artificial
  Probe
ctgagatgtgaggagagtcttgtgt

SEQ ID NO: 162833 - DNA, 25 bp, Artificial
  Probe
gaaagacagtcccttagaggtaaat

SEQ ID NO: 162834 - DNA, 25 bp, Artificial
  Probe
tcaaggaggtccctatgtctaataa

SEQ ID NO: 162835 - DNA, 25 bp, Artificial
  Probe
ctcaaggaggtccctatgtctaata

SEQ ID NO: 162836 - DNA, 25 bp, Artificial
  Probe
ctttgctgtctctcctcttctgtag

SEQ ID NO: 162837 - DNA, 25 bp, Artificial
  Probe
agaaagacagtcccttagaggtaaa

SEQ ID NO: 162838 - DNA, 25 bp, Artificial
  Probe
acaacttcactatctaattccaggt

SEQ ID NO: 162839 - DNA, 25 bp, Artificial
  Probe
gtcctgaattgtgtgtctcatagaa

SEQ ID NO: 162840 - DNA, 25 bp, Artificial
  Probe
ctgtcctgaattgtgtgtctcatag

SEQ ID NO: 162841 - DNA, 25 bp, Artificial
  Probe
tgtcctgaattgtgtgtctcataga

SEQ ID NO: 162842 - DNA, 25 bp, Artificial
  Probe
actgtcctgaattgtgtgtctcata

SEQ ID NO: 162843 - DNA, 25 bp, Artificial
  Probe
caacttcactatctaattccaggta

SEQ ID NO: 162844 - DNA, 25 bp, Artificial
  Probe
tacaacttcactatctaattccagg

SEQ ID NO: 162845 - DNA, 25 bp, Artificial
  Probe
tcctgaattgtgtgtctcatagaaa

SEQ ID NO: 162846 - DNA, 25 bp, Artificial
  Probe
acttcactatctaattccaggtatt

SEQ ID NO: 162847 - DNA, 25 bp, Artificial
  Probe
aacttcactatctaattccaggtat

SEQ ID NO: 162848 - DNA, 25 bp, Artificial
  Probe
ctcatgtagttcacactgacctcaa

SEQ ID NO: 162849 - DNA, 25 bp, Artificial
  Probe
atgatctttaatgctggctgacttt

SEQ ID NO: 162850 - DNA, 25 bp, Artificial
  Probe
gactgtcctgaattgtgtgtctcat

SEQ ID NO: 162851 - DNA, 25 bp, Artificial
  Probe
aaacaacgacatgatctttaatgct

SEQ ID NO: 162852 - DNA, 25 bp, Artificial
  Probe
aacaacgacatgatctttaatgctg

SEQ ID NO: 162853 - DNA, 25 bp, Artificial
  Probe
catgatctttaatgctggctgactt

SEQ ID NO: 162854 - DNA, 25 bp, Artificial
  Probe
ttacaacttcactatctaattccag

SEQ ID NO: 162855 - DNA, 25 bp, Artificial
  Probe
gatgtcttgaaatctcgatctcctg

SEQ ID NO: 162856 - DNA, 25 bp, Artificial
  Probe
acaacgacatgatctttaatgctgg

SEQ ID NO: 162857 - DNA, 25 bp, Artificial
  Probe
atgtcttgaaatctcgatctcctga

SEQ ID NO: 162858 - DNA, 25 bp, Artificial
  Probe
gacatgatctttaatgctggctgac

SEQ ID NO: 162859 - DNA, 25 bp, Artificial
  Probe
tcatgtagttcacactgacctcaaa

SEQ ID NO: 162860 - DNA, 25 bp, Artificial
  Probe
ttgtgtcattggactgtcctgaatt

SEQ ID NO: 162861 - DNA, 25 bp, Artificial
  Probe
acatgatctttaatgctggctgact

SEQ ID NO: 162862 - DNA, 25 bp, Artificial
  Probe
ttccaggtattttgtcacacttaac

SEQ ID NO: 162863 - DNA, 25 bp, Artificial
  Probe
attacaacttcactatctaattcca

SEQ ID NO: 162864 - DNA, 25 bp, Artificial
  Probe
ctaattccaggtattttgtcacact

SEQ ID NO: 162865 - DNA, 25 bp, Artificial
  Probe
tctaattccaggtattttgtcacac

SEQ ID NO: 162866 - DNA, 25 bp, Artificial
  Probe
aacgacatgatctttaatgctggct

SEQ ID NO: 162867 - DNA, 25 bp, Artificial
  Probe
caacgacatgatctttaatgctggc

SEQ ID NO: 162868 - DNA, 25 bp, Artificial
  Probe
attggactgtcctgaattgtgtgtc

SEQ ID NO: 162869 - DNA, 25 bp, Artificial
  Probe
tcattggactgtcctgaattgtgtg

SEQ ID NO: 162870 - DNA, 25 bp, Artificial
  Probe
gtcattggactgtcctgaattgtgt

SEQ ID NO: 162871 - DNA, 25 bp, Artificial
  Probe
tgtcattggactgtcctgaattgtg

SEQ ID NO: 162872 - DNA, 25 bp, Artificial
  Probe
gtgtcattggactgtcctgaattgt

SEQ ID NO: 162873 - DNA, 25 bp, Artificial
  Probe
tgtgtcattggactgtcctgaattg

SEQ ID NO: 162874 - DNA, 25 bp, Artificial
  Probe
ccaaagatgtcttgaaatctcgatc

SEQ ID NO: 162875 - DNA, 25 bp, Artificial
  Probe
tccaaagatgtcttgaaatctcgat

SEQ ID NO: 162876 - DNA, 25 bp, Artificial
  Probe
atccaaagatgtcttgaaatctcga

SEQ ID NO: 162877 - DNA, 25 bp, Artificial
  Probe
attccaggtattttgtcacacttaa

SEQ ID NO: 162878 - DNA, 25 bp, Artificial
  Probe
aattccaggtattttgtcacactta

SEQ ID NO: 162879 - DNA, 25 bp, Artificial
  Probe
taattccaggtattttgtcacactt

SEQ ID NO: 162880 - DNA, 25 bp, Artificial
  Probe
cttgaaatctcgatctcctgaccag

SEQ ID NO: 162881 - DNA, 25 bp, Artificial
  Probe
aagatgtcttgaaatctcgatctcc

SEQ ID NO: 162882 - DNA, 25 bp, Artificial
  Probe
ttcacactgacctcaaaatcctata

SEQ ID NO: 162883 - DNA, 25 bp, Artificial
  Probe
ctacaactactatgacgacgagaag

SEQ ID NO: 162884 - DNA, 25 bp, Artificial
  Probe
cagtcaatcagtgttcatattcgtg

SEQ ID NO: 162885 - DNA, 25 bp, Artificial
  Probe
agccattacattacattgacaactc

SEQ ID NO: 162886 - DNA, 25 bp, Artificial
  Probe
gagccattacattacattgacaact

SEQ ID NO: 162887 - DNA, 25 bp, Artificial
  Probe
agagccattacattacattgacaac

SEQ ID NO: 162888 - DNA, 25 bp, Artificial
  Probe
agtcaatcagtgttcatattcgtgg

SEQ ID NO: 162889 - DNA, 25 bp, Artificial
  Probe
tctacaactactatgacgacgagaa

SEQ ID NO: 162890 - DNA, 25 bp, Artificial
  Probe
tatatccaatctagcctcaacagtc

SEQ ID NO: 162891 - DNA, 25 bp, Artificial
  Probe
tacaactactatgacgacgagaagg

SEQ ID NO: 162892 - DNA, 25 bp, Artificial
  Probe
cctagagccattacattacattgac

SEQ ID NO: 162893 - DNA, 25 bp, Artificial
  Probe
gccattacattacattgacaactca

SEQ ID NO: 162894 - DNA, 25 bp, Artificial
  Probe
atatccaatctagcctcaacagtca

SEQ ID NO: 162895 - DNA, 25 bp, Artificial
  Probe
ttatatccaatctagcctcaacagt

SEQ ID NO: 162896 - DNA, 25 bp, Artificial
  Probe
tatccaatctagcctcaacagtcaa

SEQ ID NO: 162897 - DNA, 25 bp, Artificial
  Probe
tagagccattacattacattgacaa

SEQ ID NO: 162898 - DNA, 25 bp, Artificial
  Probe
ctagagccattacattacattgaca

SEQ ID NO: 162899 - DNA, 25 bp, Artificial
  Probe
ctactatgacgacgagaaggagaag

SEQ ID NO: 162900 - DNA, 25 bp, Artificial
  Probe
caatctagcctcaacagtcaatcag

SEQ ID NO: 162901 - DNA, 25 bp, Artificial
  Probe
acagtcaatcagtgttcatattcgt

SEQ ID NO: 162902 - DNA, 25 bp, Artificial
  Probe
ctctacaactactatgacgacgaga

SEQ ID NO: 162903 - DNA, 25 bp, Artificial
  Probe
aatctagcctcaacagtcaatcagt

SEQ ID NO: 162904 - DNA, 25 bp, Artificial
  Probe
atccaatctagcctcaacagtcaat

SEQ ID NO: 162905 - DNA, 25 bp, Artificial
  Probe
actactatgacgacgagaaggagaa

SEQ ID NO: 162906 - DNA, 25 bp, Artificial
  Probe
aactactatgacgacgagaaggaga

SEQ ID NO: 162907 - DNA, 25 bp, Artificial
  Probe
caactactatgacgacgagaaggag

SEQ ID NO: 162908 - DNA, 25 bp, Artificial
  Probe
cctctacaactactatgacgacgag

SEQ ID NO: 162909 - DNA, 25 bp, Artificial
  Probe
gtcaatcagtgttcatattcgtggc

SEQ ID NO: 162910 - DNA, 25 bp, Artificial
  Probe
ggatgagaagttccaccataagatg

SEQ ID NO: 162911 - DNA, 25 bp, Artificial
  Probe
atctagcctcaacagtcaatcagtg

SEQ ID NO: 162912 - DNA, 25 bp, Artificial
  Probe
tccaatctagcctcaacagtcaatc

SEQ ID NO: 162913 - DNA, 25 bp, Artificial
  Probe
ccaatctagcctcaacagtcaatca

SEQ ID NO: 162914 - DNA, 25 bp, Artificial
  Probe
ttcccataggtctgagtaggtattt

SEQ ID NO: 162915 - DNA, 25 bp, Artificial
  Probe
attcccataggtctgagtaggtatt

SEQ ID NO: 162916 - DNA, 25 bp, Artificial
  Probe
acaactactatgacgacgagaagga

SEQ ID NO: 162917 - DNA, 25 bp, Artificial
  Probe
aattcccataggtctgagtaggtat

SEQ ID NO: 162918 - DNA, 25 bp, Artificial
  Probe
ccctagagccattacattacattga

SEQ ID NO: 162919 - DNA, 25 bp, Artificial
  Probe
cagacactatgagaccaaattcagg

SEQ ID NO: 162920 - DNA, 25 bp, Artificial
  Probe
ccagacactatgagaccaaattcag

SEQ ID NO: 162921 - DNA, 25 bp, Artificial
  Probe
gccctagagccattacattacattg

SEQ ID NO: 162922 - DNA, 25 bp, Artificial
  Probe
tactatgacgacgagaaggagaagc

SEQ ID NO: 162923 - DNA, 25 bp, Artificial
  Probe
gcctctacaactactatgacgacga

SEQ ID NO: 162924 - DNA, 25 bp, Artificial
  Probe
ctgttcacctctgattccctttaac

SEQ ID NO: 162925 - DNA, 25 bp, Artificial
  Probe
atcgacaagaacaaggcagacttat

SEQ ID NO: 162926 - DNA, 25 bp, Artificial
  Probe
acctctgattccctttaaccacaaa

SEQ ID NO: 162927 - DNA, 25 bp, Artificial
  Probe
tttatatccaatctagcctcaacag

SEQ ID NO: 162928 - DNA, 25 bp, Artificial
  Probe
caggaatggcatcagttcttagata

SEQ ID NO: 162929 - DNA, 25 bp, Artificial
  Probe
aggaatggcatcagttcttagatat

SEQ ID NO: 162930 - DNA, 25 bp, Artificial
  Probe
ggaatggcatcagttcttagatatt

SEQ ID NO: 162931 - DNA, 25 bp, Artificial
  Probe
tcaggaatggcatcagttcttagat

SEQ ID NO: 162932 - DNA, 25 bp, Artificial
  Probe
ctcaggaatggcatcagttcttaga

SEQ ID NO: 162933 - DNA, 25 bp, Artificial
  Probe
gtacttagccacactagacactctt

SEQ ID NO: 162934 - DNA, 25 bp, Artificial
  Probe
ggagaatcatcaactgtgctaaatc

SEQ ID NO: 162935 - DNA, 25 bp, Artificial
  Probe
taagattaagtaccaatccagcctc

SEQ ID NO: 162936 - DNA, 25 bp, Artificial
  Probe
tggagaatcatcaactgtgctaaat

SEQ ID NO: 162937 - DNA, 25 bp, Artificial
  Probe
taataaagttctggctctcaaaggg

SEQ ID NO: 162938 - DNA, 25 bp, Artificial
  Probe
gggaagaaatagggatgggagatat

SEQ ID NO: 162939 - DNA, 25 bp, Artificial
  Probe
ccaagtaaatacatcccaaattccg

SEQ ID NO: 162940 - DNA, 25 bp, Artificial
  Probe
ataagattaagtaccaatccagcct

SEQ ID NO: 162941 - DNA, 25 bp, Artificial
  Probe
taaagtcttccttgtggttctgaat

SEQ ID NO: 162942 - DNA, 25 bp, Artificial
  Probe
ataaagtcttccttgtggttctgaa

SEQ ID NO: 162943 - DNA, 25 bp, Artificial
  Probe
gataaagtcttccttgtggttctga

SEQ ID NO: 162944 - DNA, 25 bp, Artificial
  Probe
gacctgagaaatgaaatccaagtaa

SEQ ID NO: 162945 - DNA, 25 bp, Artificial
  Probe
ctactcagaactgtaccacgacttc

SEQ ID NO: 162946 - DNA, 25 bp, Artificial
  Probe
atggcatagataaagtcttccttgt

SEQ ID NO: 162947 - DNA, 25 bp, Artificial
  Probe
agataaagtcttccttgtggttctg

SEQ ID NO: 162948 - DNA, 25 bp, Artificial
  Probe
ataataaagttctggctctcaaagg

SEQ ID NO: 162949 - DNA, 25 bp, Artificial
  Probe
gcatagataaagtcttccttgtggt

SEQ ID NO: 162950 - DNA, 25 bp, Artificial
  Probe
tggcatagataaagtcttccttgtg

SEQ ID NO: 162951 - DNA, 25 bp, Artificial
  Probe
gatggcatagataaagtcttccttg

SEQ ID NO: 162952 - DNA, 25 bp, Artificial
  Probe
ggaagaaatagggatgggagatatt

SEQ ID NO: 162953 - DNA, 25 bp, Artificial
  Probe
tccaagtaaatacatcccaaattcc

SEQ ID NO: 162954 - DNA, 25 bp, Artificial
  Probe
atatttccattacaaacctcaacga

SEQ ID NO: 162955 - DNA, 25 bp, Artificial
  Probe
gagaatcatcaactgtgctaaatct

SEQ ID NO: 162956 - DNA, 25 bp, Artificial
  Probe
aagtcttccttgtggttctgaattt

SEQ ID NO: 162957 - DNA, 25 bp, Artificial
  Probe
aaagtcttccttgtggttctgaatt

SEQ ID NO: 162958 - DNA, 25 bp, Artificial
  Probe
acctgagaaatgaaatccaagtaaa

SEQ ID NO: 162959 - DNA, 25 bp, Artificial
  Probe
tagataaagtcttccttgtggttct

SEQ ID NO: 162960 - DNA, 25 bp, Artificial
  Probe
aataagattaagtaccaatccagcc

SEQ ID NO: 162961 - DNA, 25 bp, Artificial
  Probe
gatatttccattacaaacctcaacg

SEQ ID NO: 162962 - DNA, 25 bp, Artificial
  Probe
ttggagaatcatcaactgtgctaaa

SEQ ID NO: 162963 - DNA, 25 bp, Artificial
  Probe
tttggagaatcatcaactgtgctaa

SEQ ID NO: 162964 - DNA, 25 bp, Artificial
  Probe
aagcaaaggacctgagaaatgaaat

SEQ ID NO: 162965 - DNA, 25 bp, Artificial
  Probe
cctcaggaatggcatcagttcttag

SEQ ID NO: 162966 - DNA, 25 bp, Artificial
  Probe
ggaaataataaagttctggctctca

SEQ ID NO: 162967 - DNA, 25 bp, Artificial
  Probe
tgaaatccaagtaaatacatcccaa

SEQ ID NO: 162968 - DNA, 25 bp, Artificial
  Probe
aaagggtgttgatgggtttagtttc

SEQ ID NO: 162969 - DNA, 25 bp, Artificial
  Probe
ggcatagataaagtcttccttgtgg

SEQ ID NO: 162970 - DNA, 25 bp, Artificial
  Probe
aggaaataataaagttctggctctc

SEQ ID NO: 162971 - DNA, 25 bp, Artificial
  Probe
gctggatggcatagataaagtcttc

SEQ ID NO: 162972 - DNA, 25 bp, Artificial
  Probe
aactctgactaccacacagtgaatg

SEQ ID NO: 162973 - DNA, 25 bp, Artificial
  Probe
catcctgagtgtattcttggtgaga

SEQ ID NO: 162974 - DNA, 25 bp, Artificial
  Probe
acatacagacaaagcattcctacat

SEQ ID NO: 162975 - DNA, 25 bp, Artificial
  Probe
gattgtgaggtctgtatgtaaatgc

SEQ ID NO: 162976 - DNA, 25 bp, Artificial
  Probe
tacatacagacaaagcattcctaca

SEQ ID NO: 162977 - DNA, 25 bp, Artificial
  Probe
gggattgtgaggtctgtatgtaaat

SEQ ID NO: 162978 - DNA, 25 bp, Artificial
  Probe
ggattgtgaggtctgtatgtaaatg

SEQ ID NO: 162979 - DNA, 25 bp, Artificial
  Probe
catacagacaaagcattcctacatt

SEQ ID NO: 162980 - DNA, 25 bp, Artificial
  Probe
ttaaagggattgtgaggtctgtatg

SEQ ID NO: 162981 - DNA, 25 bp, Artificial
  Probe
gttaaagggattgtgaggtctgtat

SEQ ID NO: 162982 - DNA, 25 bp, Artificial
  Probe
agggattgtgaggtctgtatgtaaa

SEQ ID NO: 162983 - DNA, 25 bp, Artificial
  Probe
aagggattgtgaggtctgtatgtaa

SEQ ID NO: 162984 - DNA, 25 bp, Artificial
  Probe
aaagggattgtgaggtctgtatgta

SEQ ID NO: 162985 - DNA, 25 bp, Artificial
  Probe
taaagggattgtgaggtctgtatgt

SEQ ID NO: 162986 - DNA, 25 bp, Artificial
  Probe
acagacaaagcattcctacatttaa

SEQ ID NO: 162987 - DNA, 25 bp, Artificial
  Probe
atacagacaaagcattcctacattt

SEQ ID NO: 162988 - DNA, 25 bp, Artificial
  Probe
gcatcctgagtgtattcttggtgag

SEQ ID NO: 162989 - DNA, 25 bp, Artificial
  Probe
cagacaaagcattcctacatttaag

SEQ ID NO: 162990 - DNA, 25 bp, Artificial
  Probe
tgaaacatatactctgctccgacat

SEQ ID NO: 162991 - DNA, 25 bp, Artificial
  Probe
gtacatacagacaaagcattcctac

SEQ ID NO: 162992 - DNA, 25 bp, Artificial
  Probe
agacaaagcattcctacatttaaga

SEQ ID NO: 162993 - DNA, 25 bp, Artificial
  Probe
tacagacaaagcattcctacattta

SEQ ID NO: 162994 - DNA, 25 bp, Artificial
  Probe
gaagtgcatcctgagtgtattcttg

SEQ ID NO: 162995 - DNA, 25 bp, Artificial
  Probe
atcctgagtgtattcttggtgagaa

SEQ ID NO: 162996 - DNA, 25 bp, Artificial
  Probe
cgttaaagggattgtgaggtctgta

SEQ ID NO: 162997 - DNA, 25 bp, Artificial
  Probe
gaaacatatactctgctccgacatg

SEQ ID NO: 162998 - DNA, 25 bp, Artificial
  Probe
gacaaagcattcctacatttaagaa

SEQ ID NO: 162999 - DNA, 25 bp, Artificial
  Probe
gtgaaacatatactctgctccgaca

SEQ ID NO: 163000 - DNA, 25 bp, Artificial
  Probe
ccgtttagaggatctttacctagag

SEQ ID NO: 163001 - DNA, 25 bp, Artificial
  Probe
cgtttagaggatctttacctagaga

SEQ ID NO: 163002 - DNA, 25 bp, Artificial
  Probe
acaaagcattcctacatttaagaaa

SEQ ID NO: 163003 - DNA, 25 bp, Artificial
  Probe
attgtgaggtctgtatgtaaatgca

SEQ ID NO: 163004 - DNA, 25 bp, Artificial
  Probe
aagtgcatcctgagtgtattcttgg

SEQ ID NO: 163005 - DNA, 25 bp, Artificial
  Probe
cgaagtgcatcctgagtgtattctt

SEQ ID NO: 163006 - DNA, 25 bp, Artificial
  Probe
gccgtttagaggatctttacctaga

SEQ ID NO: 163007 - DNA, 25 bp, Artificial
  Probe
tgtgaaacatatactctgctccgac

SEQ ID NO: 163008 - DNA, 25 bp, Artificial
  Probe
cctgagtgtattcttggtgagaaag

SEQ ID NO: 163009 - DNA, 25 bp, Artificial
  Probe
tcctgagtgtattcttggtgagaaa

SEQ ID NO: 163010 - DNA, 25 bp, Artificial
  Probe
gatgctctcttctggtgtgtaggtg

SEQ ID NO: 163011 - DNA, 25 bp, Artificial
  Probe
gagtgtattcttggtgagaaagcag

SEQ ID NO: 163012 - DNA, 25 bp, Artificial
  Probe
ctgagtgtattcttggtgagaaagc

SEQ ID NO: 163013 - DNA, 25 bp, Artificial
  Probe
gtgcatcctgagtgtattcttggtg

SEQ ID NO: 163014 - DNA, 25 bp, Artificial
  Probe
tcgaagtgcatcctgagtgtattct

SEQ ID NO: 163015 - DNA, 25 bp, Artificial
  Probe
aaacatatactctgctccgacatgc

SEQ ID NO: 163016 - DNA, 25 bp, Artificial
  Probe
gctctcttctggtgtgtaggtgtac

SEQ ID NO: 163017 - DNA, 25 bp, Artificial
  Probe
tgctctcttctggtgtgtaggtgta

SEQ ID NO: 163018 - DNA, 25 bp, Artificial
  Probe
agcaggaagatgtcagaagttacaa

SEQ ID NO: 163019 - DNA, 25 bp, Artificial
  Probe
ttgagtgcttatgattgtaagaaga

SEQ ID NO: 163020 - DNA, 25 bp, Artificial
  Probe
aatacaatggagagacaaagaagca

SEQ ID NO: 163021 - DNA, 25 bp, Artificial
  Probe
tgagtgcttatgattgtaagaagat

SEQ ID NO: 163022 - DNA, 25 bp, Artificial
  Probe
cttgagtgcttatgattgtaagaag

SEQ ID NO: 163023 - DNA, 25 bp, Artificial
  Probe
tacaatggagagacaaagaagcata

SEQ ID NO: 163024 - DNA, 25 bp, Artificial
  Probe
atacaatggagagacaaagaagcat

SEQ ID NO: 163025 - DNA, 25 bp, Artificial
  Probe
gagcaggaagatgtcagaagttaca

SEQ ID NO: 163026 - DNA, 25 bp, Artificial
  Probe
caatggagagacaaagaagcataaa

SEQ ID NO: 163027 - DNA, 25 bp, Artificial
  Probe
acaatggagagacaaagaagcataa

SEQ ID NO: 163028 - DNA, 25 bp, Artificial
  Probe
taatacaatggagagacaaagaagc

SEQ ID NO: 163029 - DNA, 25 bp, Artificial
  Probe
ttgtaagaagattgatgtgaatgaa

SEQ ID NO: 163030 - DNA, 25 bp, Artificial
  Probe
cgagcaggaagatgtcagaagttac

SEQ ID NO: 163031 - DNA, 25 bp, Artificial
  Probe
tgtaagaagattgatgtgaatgaat

SEQ ID NO: 163032 - DNA, 25 bp, Artificial
  Probe
attgtaagaagattgatgtgaatga

SEQ ID NO: 163033 - DNA, 25 bp, Artificial
  Probe
tgattgtaagaagattgatgtgaat

SEQ ID NO: 163034 - DNA, 25 bp, Artificial
  Probe
atgattgtaagaagattgatgtgaa

SEQ ID NO: 163035 - DNA, 25 bp, Artificial
  Probe
tctttccagaaatagggctaattca

SEQ ID NO: 163036 - DNA, 25 bp, Artificial
  Probe
gtgcttatgattgtaagaagattga

SEQ ID NO: 163037 - DNA, 25 bp, Artificial
  Probe
agtgcttatgattgtaagaagattg

SEQ ID NO: 163038 - DNA, 25 bp, Artificial
  Probe
ccagaaatagggctaattcaataca

SEQ ID NO: 163039 - DNA, 25 bp, Artificial
  Probe
ctttccagaaatagggctaattcaa

SEQ ID NO: 163040 - DNA, 25 bp, Artificial
  Probe
ggaagatgtcagaagttacaaagga

SEQ ID NO: 163041 - DNA, 25 bp, Artificial
  Probe
aggaagatgtcagaagttacaaagg

SEQ ID NO: 163042 - DNA, 25 bp, Artificial
  Probe
caggaagatgtcagaagttacaaag

SEQ ID NO: 163043 - DNA, 25 bp, Artificial
  Probe
acgagcaggaagatgtcagaagtta

SEQ ID NO: 163044 - DNA, 25 bp, Artificial
  Probe
gattgtaagaagattgatgtgaatg

SEQ ID NO: 163045 - DNA, 25 bp, Artificial
  Probe
tccagaaatagggctaattcaatac

SEQ ID NO: 163046 - DNA, 25 bp, Artificial
  Probe
tgacaaataatacaatggagagaca

SEQ ID NO: 163047 - DNA, 25 bp, Artificial
  Probe
tggagagacaaataatacaatgaca

SEQ ID NO: 163048 - DNA, 25 bp, Artificial
  Probe
tgacaatggagagacaaataataca

SEQ ID NO: 163049 - DNA, 25 bp, Artificial
  Probe
gagtgcttatgattgtaagaagatt

SEQ ID NO: 163050 - DNA, 25 bp, Artificial
  Probe
ggactatactctggcaaatgtctat

SEQ ID NO: 163051 - DNA, 25 bp, Artificial
  Probe
gaagatgtcagaagttacaaaggaa

SEQ ID NO: 163052 - DNA, 25 bp, Artificial
  Probe
atctttccagaaatagggctaattc

SEQ ID NO: 163053 - DNA, 25 bp, Artificial
  Probe
tggactatactctggcaaatgtcta

SEQ ID NO: 163054 - DNA, 25 bp, Artificial
  Probe
gcaggaagatgtcagaagttacaaa

SEQ ID NO: 163055 - DNA, 25 bp, Artificial
  Probe
tttccagaaatagggctaattcaat

SEQ ID NO: 163056 - DNA, 25 bp, Artificial
  Probe
ctagaagtagaaatgagagaaagca

SEQ ID NO: 163057 - DNA, 25 bp, Artificial
  Probe
aagatgtcagaagttacaaaggaaa

SEQ ID NO: 163058 - DNA, 25 bp, Artificial
  Probe
tcttgagtgcttatgattgtaagaa

SEQ ID NO: 163059 - DNA, 25 bp, Artificial
  Probe
ttcttgagtgcttatgattgtaaga

SEQ ID NO: 163060 - DNA, 25 bp, Artificial
  Probe
ggaactctggagaggtttattcaaa

SEQ ID NO: 163061 - DNA, 25 bp, Artificial
  Probe
tttggaactctggagaggtttattc

SEQ ID NO: 163062 - DNA, 25 bp, Artificial
  Probe
ttggactatactctggcaaatgtct

SEQ ID NO: 163063 - DNA, 25 bp, Artificial
  Probe
gtcttcatccatcattctcctcaat

SEQ ID NO: 163064 - DNA, 25 bp, Artificial
  Probe
attcagtcttcatccatcattctcc

SEQ ID NO: 163065 - DNA, 25 bp, Artificial
  Probe
aaccattcagtcttcatccatcatt

SEQ ID NO: 163066 - DNA, 25 bp, Artificial
  Probe
ttcatccatcattctcctcaataca

SEQ ID NO: 163067 - DNA, 25 bp, Artificial
  Probe
cattcagtcttcatccatcattctc

SEQ ID NO: 163068 - DNA, 25 bp, Artificial
  Probe
ccattcagtcttcatccatcattct

SEQ ID NO: 163069 - DNA, 25 bp, Artificial
  Probe
tcatccatcattctcctcaatacat

SEQ ID NO: 163070 - DNA, 25 bp, Artificial
  Probe
accattcagtcttcatccatcattc

SEQ ID NO: 163071 - DNA, 25 bp, Artificial
  Probe
cttcatccatcattctcctcaatac

SEQ ID NO: 163072 - DNA, 25 bp, Artificial
  Probe
tcttcatccatcattctcctcaata

SEQ ID NO: 163073 - DNA, 25 bp, Artificial
  Probe
ttcaaccattcagtcttcatccatc

SEQ ID NO: 163074 - DNA, 25 bp, Artificial
  Probe
caaccattcagtcttcatccatcat

SEQ ID NO: 163075 - DNA, 25 bp, Artificial
  Probe
agtcttcatccatcattctcctcaa

SEQ ID NO: 163076 - DNA, 25 bp, Artificial
  Probe
ttcagtcttcatccatcattctcct

SEQ ID NO: 163077 - DNA, 25 bp, Artificial
  Probe
catccatcattctcctcaatacatt

SEQ ID NO: 163078 - DNA, 25 bp, Artificial
  Probe
gttcaaccattcagtcttcatccat

SEQ ID NO: 163079 - DNA, 25 bp, Artificial
  Probe
aagttcaaccattcagtcttcatcc

SEQ ID NO: 163080 - DNA, 25 bp, Artificial
  Probe
tcagtcttcatccatcattctcctc

SEQ ID NO: 163081 - DNA, 25 bp, Artificial
  Probe
cagtcttcatccatcattctcctca

SEQ ID NO: 163082 - DNA, 25 bp, Artificial
  Probe
tcaaccattcagtcttcatccatca

SEQ ID NO: 163083 - DNA, 25 bp, Artificial
  Probe
agttcaaccattcagtcttcatcca

SEQ ID NO: 163084 - DNA, 25 bp, Artificial
  Probe
aagtcagctacatatagtggaatgg

SEQ ID NO: 163085 - DNA, 25 bp, Artificial
  Probe
caagtcagctacatatagtggaatg

SEQ ID NO: 163086 - DNA, 25 bp, Artificial
  Probe
ttccttatctaaacaaactcaacgc

SEQ ID NO: 163087 - DNA, 25 bp, Artificial
  Probe
attccctactctggtattcaaatgg

SEQ ID NO: 163088 - DNA, 25 bp, Artificial
  Probe
gcattccctactctggtattcaaat

SEQ ID NO: 163089 - DNA, 25 bp, Artificial
  Probe
ccttatctaaacaaactcaacgcac

SEQ ID NO: 163090 - DNA, 25 bp, Artificial
  Probe
tccttatctaaacaaactcaacgca

SEQ ID NO: 163091 - DNA, 25 bp, Artificial
  Probe
cctactctggtattcaaatggaaca

SEQ ID NO: 163092 - DNA, 25 bp, Artificial
  Probe
cttatctaaacaaactcaacgcacg

SEQ ID NO: 163093 - DNA, 25 bp, Artificial
  Probe
aagaccaagtcagctacatatagtg

SEQ ID NO: 163094 - DNA, 25 bp, Artificial
  Probe
gaagaccaagtcagctacatatagt

SEQ ID NO: 163095 - DNA, 25 bp, Artificial
  Probe
ctccgaagttcaaccattcagtctt

SEQ ID NO: 163096 - DNA, 25 bp, Artificial
  Probe
ccctactctggtattcaaatggaac

SEQ ID NO: 163097 - DNA, 25 bp, Artificial
  Probe
aaacgatggtgacaaagtagaagac

SEQ ID NO: 163098 - DNA, 25 bp, Artificial
  Probe
agaagaccaagtcagctacatatag

SEQ ID NO: 163099 - DNA, 25 bp, Artificial
  Probe
attctcctcaatacatttctcactg

SEQ ID NO: 163100 - DNA, 25 bp, Artificial
  Probe
cattctcctcaatacatttctcact

SEQ ID NO: 163101 - DNA, 25 bp, Artificial
  Probe
tcattctcctcaatacatttctcac

SEQ ID NO: 163102 - DNA, 25 bp, Artificial
  Probe
ccatcattctcctcaatacatttct

SEQ ID NO: 163103 - DNA, 25 bp, Artificial
  Probe
tccatcattctcctcaatacatttc

SEQ ID NO: 163104 - DNA, 25 bp, Artificial
  Probe
agcattccctactctggtattcaaa

SEQ ID NO: 163105 - DNA, 25 bp, Artificial
  Probe
aagcattccctactctggtattcaa

SEQ ID NO: 163106 - DNA, 25 bp, Artificial
  Probe
aaagcattccctactctggtattca

SEQ ID NO: 163107 - DNA, 25 bp, Artificial
  Probe
ctactctggtattcaaatggaacaa

SEQ ID NO: 163108 - DNA, 25 bp, Artificial
  Probe
ctggaagtgagactaaggacattcg

SEQ ID NO: 163109 - DNA, 25 bp, Artificial
  Probe
cagtgatgactcaagaaggacagag

SEQ ID NO: 163110 - DNA, 25 bp, Artificial
  Probe
gctggaagtgagactaaggacattc

SEQ ID NO: 163111 - DNA, 25 bp, Artificial
  Probe
ctacctggattagaagtagaatcgc

SEQ ID NO: 163112 - DNA, 25 bp, Artificial
  Probe
gctacctggattagaagtagaatcg

SEQ ID NO: 163113 - DNA, 25 bp, Artificial
  Probe
ctcagtcaggtgtcagttcatgtag

SEQ ID NO: 163114 - DNA, 25 bp, Artificial
  Probe
gaactgacactgtgaggaaagattt

SEQ ID NO: 163115 - DNA, 25 bp, Artificial
  Probe
caatcatttgtatgtgtgagttggg

SEQ ID NO: 163116 - DNA, 25 bp, Artificial
  Probe
cccaatcatttgtatgtgtgagttg

SEQ ID NO: 163117 - DNA, 25 bp, Artificial
  Probe
gactaaggacattcgtctatagcag

SEQ ID NO: 163118 - DNA, 25 bp, Artificial
  Probe
aactgacactgtgaggaaagatttg

SEQ ID NO: 163119 - DNA, 25 bp, Artificial
  Probe
ggaagtgagactaaggacattcgtc

SEQ ID NO: 163120 - DNA, 25 bp, Artificial
  Probe
tggaagtgagactaaggacattcgt

SEQ ID NO: 163121 - DNA, 25 bp, Artificial
  Probe
agaactgacactgtgaggaaagatt

SEQ ID NO: 163122 - DNA, 25 bp, Artificial
  Probe
ctaaggacattcgtctatagcagct

SEQ ID NO: 163123 - DNA, 25 bp, Artificial
  Probe
taaggacattcgtctatagcagctc

SEQ ID NO: 163124 - DNA, 25 bp, Artificial
  Probe
actaaggacattcgtctatagcagc

SEQ ID NO: 163125 - DNA, 25 bp, Artificial
  Probe
agctacctggattagaagtagaatc

SEQ ID NO: 163126 - DNA, 25 bp, Artificial
  Probe
agactagctacctggattagaagta

SEQ ID NO: 163127 - DNA, 25 bp, Artificial
  Probe
cattcgtctatagcagctcagtcag

SEQ ID NO: 163128 - DNA, 25 bp, Artificial
  Probe
cagactagctacctggattagaagt

SEQ ID NO: 163129 - DNA, 25 bp, Artificial
  Probe
actgacactgtgaggaaagatttgt

SEQ ID NO: 163130 - DNA, 25 bp, Artificial
  Probe
tcagtcaggtgtcagttcatgtagg

SEQ ID NO: 163131 - DNA, 25 bp, Artificial
  Probe
agctggaagtgagactaaggacatt

SEQ ID NO: 163132 - DNA, 25 bp, Artificial
  Probe
cactgtgaggaaagatttgtcgatc

SEQ ID NO: 163133 - DNA, 25 bp, Artificial
  Probe
cagaactgacactgtgaggaaagat

SEQ ID NO: 163134 - DNA, 25 bp, Artificial
  Probe
acattcgtctatagcagctcagtca

SEQ ID NO: 163135 - DNA, 25 bp, Artificial
  Probe
gacattcgtctatagcagctcagtc

SEQ ID NO: 163136 - DNA, 25 bp, Artificial
  Probe
agtgagactaaggacattcgtctat

SEQ ID NO: 163137 - DNA, 25 bp, Artificial
  Probe
aagtgagactaaggacattcgtcta

SEQ ID NO: 163138 - DNA, 25 bp, Artificial
  Probe
gtgagactaaggacattcgtctata

SEQ ID NO: 163139 - DNA, 25 bp, Artificial
  Probe
gcagtgatgactcaagaaggacaga

SEQ ID NO: 163140 - DNA, 25 bp, Artificial
  Probe
agcagtgatgactcaagaaggacag

SEQ ID NO: 163141 - DNA, 25 bp, Artificial
  Probe
tcagcagtgatgactcaagaaggac

SEQ ID NO: 163142 - DNA, 25 bp, Artificial
  Probe
atttgtatgtgtgagttggggaatc

SEQ ID NO: 163143 - DNA, 25 bp, Artificial
  Probe
ctgtgaggaaagatttgtcgatcag

SEQ ID NO: 163144 - DNA, 25 bp, Artificial
  Probe
actgtgaggaaagatttgtcgatca

SEQ ID NO: 163145 - DNA, 25 bp, Artificial
  Probe
attcgtctatagcagctcagtcagg

SEQ ID NO: 163146 - DNA, 25 bp, Artificial
  Probe
aaagtccccaatcatttgtatgtgt

SEQ ID NO: 163147 - DNA, 25 bp, Artificial
  Probe
gctcagtcaggtgtcagttcatgta

SEQ ID NO: 163148 - DNA, 25 bp, Artificial
  Probe
actagctacctggattagaagtaga

SEQ ID NO: 163149 - DNA, 25 bp, Artificial
  Probe
gatcagcagtgatgactcaagaagg

SEQ ID NO: 163150 - DNA, 25 bp, Artificial
  Probe
gactagctacctggattagaagtag

SEQ ID NO: 163151 - DNA, 25 bp, Artificial
  Probe
aaggacattcgtctatagcagctca

SEQ ID NO: 163152 - DNA, 25 bp, Artificial
  Probe
gagaacacagcagagtccagactag

SEQ ID NO: 163153 - DNA, 25 bp, Artificial
  Probe
gaaacctcagaatttctatgagacg

SEQ ID NO: 163154 - DNA, 25 bp, Artificial
  Probe
aaacctcagaatttctatgagacgc

SEQ ID NO: 163155 - DNA, 25 bp, Artificial
  Probe
tgcccctctcttctttctctctttt

SEQ ID NO: 163156 - DNA, 25 bp, Artificial
  Probe
aacctcagaatttctatgagacgcc

SEQ ID NO: 163157 - DNA, 25 bp, Artificial
  Probe
gtgcccctctcttctttctctcttt

SEQ ID NO: 163158 - DNA, 25 bp, Artificial
  Probe
gggagaaacctcagaatttctatga

SEQ ID NO: 163159 - DNA, 25 bp, Artificial
  Probe
gattttgccttcagtttctggtgaa

SEQ ID NO: 163160 - DNA, 25 bp, Artificial
  Probe
ggagaaacctcagaatttctatgag

SEQ ID NO: 163161 - DNA, 25 bp, Artificial
  Probe
agaaacctcagaatttctatgagac

SEQ ID NO: 163162 - DNA, 25 bp, Artificial
  Probe
cgattttgccttcagtttctggtga

SEQ ID NO: 163163 - DNA, 25 bp, Artificial
  Probe
gagaaacctcagaatttctatgaga

SEQ ID NO: 163164 - DNA, 25 bp, Artificial
  Probe
acctcagaatttctatgagacgccc

SEQ ID NO: 163165 - DNA, 25 bp, Artificial
  Probe
ggggagaaacctcagaatttctatg

SEQ ID NO: 163166 - DNA, 25 bp, Artificial
  Probe
cctcagaatttctatgagacgcccc

SEQ ID NO: 163167 - DNA, 25 bp, Artificial
  Probe
agatggagacagcagaatataatgg

SEQ ID NO: 163168 - DNA, 25 bp, Artificial
  Probe
gatggagacagcagaatataatggc

SEQ ID NO: 163169 - DNA, 25 bp, Artificial
  Probe
aagatggagacagcagaatataatg

SEQ ID NO: 163170 - DNA, 25 bp, Artificial
  Probe
acaatagcaactgaagatgagtaga

SEQ ID NO: 163171 - DNA, 25 bp, Artificial
  Probe
agacaatagcaactgaagatgagta

SEQ ID NO: 163172 - DNA, 25 bp, Artificial
  Probe
gacaatagcaactgaagatgagtag

SEQ ID NO: 163173 - DNA, 25 bp, Artificial
  Probe
atagcaactgaagatgagtagaact

SEQ ID NO: 163174 - DNA, 25 bp, Artificial
  Probe
aatagcaactgaagatgagtagaac

SEQ ID NO: 163175 - DNA, 25 bp, Artificial
  Probe
caatagcaactgaagatgagtagaa

SEQ ID NO: 163176 - DNA, 25 bp, Artificial
  Probe
cagacaatagcaactgaagatgagt

SEQ ID NO: 163177 - DNA, 25 bp, Artificial
  Probe
aaccttaacatcttacctgtggaca

SEQ ID NO: 163178 - DNA, 25 bp, Artificial
  Probe
acaggagacaatcgtccacttatag

SEQ ID NO: 163179 - DNA, 25 bp, Artificial
  Probe
aagaacctaagaacagtatgtgtaa

SEQ ID NO: 163180 - DNA, 25 bp, Artificial
  Probe
cacaggagacaatcgtccacttata

SEQ ID NO: 163181 - DNA, 25 bp, Artificial
  Probe
agcacttatcaaaccttaacatctt

SEQ ID NO: 163182 - DNA, 25 bp, Artificial
  Probe
aagcacttatcaaaccttaacatct

SEQ ID NO: 163183 - DNA, 25 bp, Artificial
  Probe
accttaacatcttacctgtggacag

SEQ ID NO: 163184 - DNA, 25 bp, Artificial
  Probe
aaaccttaacatcttacctgtggac

SEQ ID NO: 163185 - DNA, 25 bp, Artificial
  Probe
caaaccttaacatcttacctgtgga

SEQ ID NO: 163186 - DNA, 25 bp, Artificial
  Probe
tcaaaccttaacatcttacctgtgg

SEQ ID NO: 163187 - DNA, 25 bp, Artificial
  Probe
gtgttagcactctctgtcatctcag

SEQ ID NO: 163188 - DNA, 25 bp, Artificial
  Probe
gctctttgtcaaatgctatgattct

SEQ ID NO: 163189 - DNA, 25 bp, Artificial
  Probe
atcaaaccttaacatcttacctgtg

SEQ ID NO: 163190 - DNA, 25 bp, Artificial
  Probe
tttgtcaaatgctatgattctgtga

SEQ ID NO: 163191 - DNA, 25 bp, Artificial
  Probe
ctttgtcaaatgctatgattctgtg

SEQ ID NO: 163192 - DNA, 25 bp, Artificial
  Probe
tctttgtcaaatgctatgattctgt

SEQ ID NO: 163193 - DNA, 25 bp, Artificial
  Probe
aaagatggagacagcagaatataat

SEQ ID NO: 163194 - DNA, 25 bp, Artificial
  Probe
cgctctttgtcaaatgctatgattc

SEQ ID NO: 163195 - DNA, 25 bp, Artificial
  Probe
caggagacaatcgtccacttatagc

SEQ ID NO: 163196 - DNA, 25 bp, Artificial
  Probe
gctaagcacttatcaaaccttaaca

SEQ ID NO: 163197 - DNA, 25 bp, Artificial
  Probe
gtgtgttagcactctctgtcatctc

SEQ ID NO: 163198 - DNA, 25 bp, Artificial
  Probe
ctctttgtcaaatgctatgattctg

SEQ ID NO: 163199 - DNA, 25 bp, Artificial
  Probe
gcacttatcaaaccttaacatctta

SEQ ID NO: 163200 - DNA, 25 bp, Artificial
  Probe
tgtgttagcactctctgtcatctca

SEQ ID NO: 163201 - DNA, 25 bp, Artificial
  Probe
taaagatggagacagcagaatataa

SEQ ID NO: 163202 - DNA, 25 bp, Artificial
  Probe
tcaaatgctatgattctgtgacaca

SEQ ID NO: 163203 - DNA, 25 bp, Artificial
  Probe
catgtagtgctgcctaatctgtgtg

SEQ ID NO: 163204 - DNA, 25 bp, Artificial
  Probe
tatcaaaccttaacatcttacctgt

SEQ ID NO: 163205 - DNA, 25 bp, Artificial
  Probe
agaacctaagaacagtatgtgtaaa

SEQ ID NO: 163206 - DNA, 25 bp, Artificial
  Probe
aaagaacctaagaacagtatgtgta

SEQ ID NO: 163207 - DNA, 25 bp, Artificial
  Probe
acacaggagacaatcgtccacttat

SEQ ID NO: 163208 - DNA, 25 bp, Artificial
  Probe
ttatcaaaccttaacatcttacctg

SEQ ID NO: 163209 - DNA, 25 bp, Artificial
  Probe
acttatcaaaccttaacatcttacc

SEQ ID NO: 163210 - DNA, 25 bp, Artificial
  Probe
tagcaactgaagatgagtagaactc

SEQ ID NO: 163211 - DNA, 25 bp, Artificial
  Probe
atctcagacaatagcaactgaagat

SEQ ID NO: 163212 - DNA, 25 bp, Artificial
  Probe
cgaaagaaagagtatgtcaagtgtc

SEQ ID NO: 163213 - DNA, 25 bp, Artificial
  Probe
tgtaactggagatgaaactgatgag

SEQ ID NO: 163214 - DNA, 25 bp, Artificial
  Probe
ctgtaactggagatgaaactgatga

SEQ ID NO: 163215 - DNA, 25 bp, Artificial
  Probe
taactggagatgaaactgatgagga

SEQ ID NO: 163216 - DNA, 25 bp, Artificial
  Probe
gtaactggagatgaaactgatgagg

SEQ ID NO: 163217 - DNA, 25 bp, Artificial
  Probe
gagatgaaactgatgaggagactga

SEQ ID NO: 163218 - DNA, 25 bp, Artificial
  Probe
gaaagaaagagtatgtcaagtgtct

SEQ ID NO: 163219 - DNA, 25 bp, Artificial
  Probe
tgaaactttgaaagacatttgctct

SEQ ID NO: 163220 - DNA, 25 bp, Artificial
  Probe
gcttgaaactttgaaagacatttgc

SEQ ID NO: 163221 - DNA, 25 bp, Artificial
  Probe
gctgtaactggagatgaaactgatg

SEQ ID NO: 163222 - DNA, 25 bp, Artificial
  Probe
aaactttgaaagacatttgctctcc

SEQ ID NO: 163223 - DNA, 25 bp, Artificial
  Probe
gaaactttgaaagacatttgctctc

SEQ ID NO: 163224 - DNA, 25 bp, Artificial
  Probe
ttgaaactttgaaagacatttgctc

SEQ ID NO: 163225 - DNA, 25 bp, Artificial
  Probe
cttgaaactttgaaagacatttgct

SEQ ID NO: 163226 - DNA, 25 bp, Artificial
  Probe
agatgaaactgatgaggagactgac

SEQ ID NO: 163227 - DNA, 25 bp, Artificial
  Probe
aactggagatgaaactgatgaggag

SEQ ID NO: 163228 - DNA, 25 bp, Artificial
  Probe
ggagatgaaactgatgaggagactg

SEQ ID NO: 163229 - DNA, 25 bp, Artificial
  Probe
ctggagatgaaactgatgaggagac

SEQ ID NO: 163230 - DNA, 25 bp, Artificial
  Probe
gtcgaaagaaagagtatgtcaagtg

SEQ ID NO: 163231 - DNA, 25 bp, Artificial
  Probe
ggctgtaactggagatgaaactgat

SEQ ID NO: 163232 - DNA, 25 bp, Artificial
  Probe
tcgaaagaaagagtatgtcaagtgt

SEQ ID NO: 163233 - DNA, 25 bp, Artificial
  Probe
aactttgaaagacatttgctctccc

SEQ ID NO: 163234 - DNA, 25 bp, Artificial
  Probe
tagaggagcttgaaactttgaaaga

SEQ ID NO: 163235 - DNA, 25 bp, Artificial
  Probe
ggagcttgaaactttgaaagacatt

SEQ ID NO: 163236 - DNA, 25 bp, Artificial
  Probe
ctttgaaagacatttgctctcccaa

SEQ ID NO: 163237 - DNA, 25 bp, Artificial
  Probe
gatgaaactgatgaggagactgacc

SEQ ID NO: 163238 - DNA, 25 bp, Artificial
  Probe
atagaggagcttgaaactttgaaag

SEQ ID NO: 163239 - DNA, 25 bp, Artificial
  Probe
agcttgaaactttgaaagacatttg

SEQ ID NO: 163240 - DNA, 25 bp, Artificial
  Probe
tggagatgaaactgatgaggagact

SEQ ID NO: 163241 - DNA, 25 bp, Artificial
  Probe
actggagatgaaactgatgaggaga

SEQ ID NO: 163242 - DNA, 25 bp, Artificial
  Probe
caacatggctgtaactggagatgaa

SEQ ID NO: 163243 - DNA, 25 bp, Artificial
  Probe
cgtcgaaagaaagagtatgtcaagt

SEQ ID NO: 163244 - DNA, 25 bp, Artificial
  Probe
gagcttgaaactttgaaagacattt

SEQ ID NO: 163245 - DNA, 25 bp, Artificial
  Probe
aggagcttgaaactttgaaagacat

SEQ ID NO: 163246 - DNA, 25 bp, Artificial
  Probe
cttatagaggagcttgaaactttga

SEQ ID NO: 163247 - DNA, 25 bp, Artificial
  Probe
atggctgtaactggagatgaaactg

SEQ ID NO: 163248 - DNA, 25 bp, Artificial
  Probe
agaggagcttgaaactttgaaagac

SEQ ID NO: 163249 - DNA, 25 bp, Artificial
  Probe
acgtcgaaagaaagagtatgtcaag

SEQ ID NO: 163250 - DNA, 25 bp, Artificial
  Probe
gaggagcttgaaactttgaaagaca

SEQ ID NO: 163251 - DNA, 25 bp, Artificial
  Probe
tatagaggagcttgaaactttgaaa

SEQ ID NO: 163252 - DNA, 25 bp, Artificial
  Probe
ttatagaggagcttgaaactttgaa

SEQ ID NO: 163253 - DNA, 25 bp, Artificial
  Probe
actttgaaagacatttgctctccca

SEQ ID NO: 163254 - DNA, 25 bp, Artificial
  Probe
catggctgtaactggagatgaaact

SEQ ID NO: 163255 - DNA, 25 bp, Artificial
  Probe
aacatggctgtaactggagatgaaa

SEQ ID NO: 163256 - DNA, 25 bp, Artificial
  Probe
gctctcccaaaacagattagtagaa

SEQ ID NO: 163257 - DNA, 25 bp, Artificial
  Probe
agcatgtgtataatcagactggaat

SEQ ID NO: 163258 - DNA, 25 bp, Artificial
  Probe
ttccttattcacttcatgtctcaga

SEQ ID NO: 163259 - DNA, 25 bp, Artificial
  Probe
tagcatgtgtataatcagactggaa

SEQ ID NO: 163260 - DNA, 25 bp, Artificial
  Probe
ttagcatgtgtataatcagactgga

SEQ ID NO: 163261 - DNA, 25 bp, Artificial
  Probe
gcatgtgtataatcagactggaatg

SEQ ID NO: 163262 - DNA, 25 bp, Artificial
  Probe
cttagcatgtgtataatcagactgg

SEQ ID NO: 163263 - DNA, 25 bp, Artificial
  Probe
catgtgtataatcagactggaatgg

SEQ ID NO: 163264 - DNA, 25 bp, Artificial
  Probe
acttagcatgtgtataatcagactg

SEQ ID NO: 163265 - DNA, 25 bp, Artificial
  Probe
tccttattcacttcatgtctcagac

SEQ ID NO: 163266 - DNA, 25 bp, Artificial
  Probe
ccacttagcatgtgtataatcagac

SEQ ID NO: 163267 - DNA, 25 bp, Artificial
  Probe
gccacttagcatgtgtataatcaga

SEQ ID NO: 163268 - DNA, 25 bp, Artificial
  Probe
aagattatgctgactcaaggtggag

SEQ ID NO: 163269 - DNA, 25 bp, Artificial
  Probe
taaagattatgctgactcaaggtgg

SEQ ID NO: 163270 - DNA, 25 bp, Artificial
  Probe
atgtgtataatcagactggaatggg

SEQ ID NO: 163271 - DNA, 25 bp, Artificial
  Probe
cacttagcatgtgtataatcagact

SEQ ID NO: 163272 - DNA, 25 bp, Artificial
  Probe
tcctgttgagtttccttattcactt

SEQ ID NO: 163273 - DNA, 25 bp, Artificial
  Probe
ttcctgttgagtttccttattcact

SEQ ID NO: 163274 - DNA, 25 bp, Artificial
  Probe
cctgttgagtttccttattcacttc

SEQ ID NO: 163275 - DNA, 25 bp, Artificial
  Probe
ataaagattatgctgactcaaggtg

SEQ ID NO: 163276 - DNA, 25 bp, Artificial
  Probe
ctgttgagtttccttattcacttca

SEQ ID NO: 163277 - DNA, 25 bp, Artificial
  Probe
attcctgttgagtttccttattcac

SEQ ID NO: 163278 - DNA, 25 bp, Artificial
  Probe
cattcctgttgagtttccttattca

SEQ ID NO: 163279 - DNA, 25 bp, Artificial
  Probe
cacttagtttcacagcctttccttt

SEQ ID NO: 163280 - DNA, 25 bp, Artificial
  Probe
cataggacctactgtgtaccacttg

SEQ ID NO: 163281 - DNA, 25 bp, Artificial
  Probe
tgacattcctgttgagtttccttat

SEQ ID NO: 163282 - DNA, 25 bp, Artificial
  Probe
ctgacattcctgttgagtttcctta

SEQ ID NO: 163283 - DNA, 25 bp, Artificial
  Probe
aaagattatgctgactcaaggtgga

SEQ ID NO: 163284 - DNA, 25 bp, Artificial
  Probe
acattcctgttgagtttccttattc

SEQ ID NO: 163285 - DNA, 25 bp, Artificial
  Probe
gacattcctgttgagtttccttatt

SEQ ID NO: 163286 - DNA, 25 bp, Artificial
  Probe
tgttgagtttccttattcacttcat

SEQ ID NO: 163287 - DNA, 25 bp, Artificial
  Probe
gtttccttattcacttcatgtctca

SEQ ID NO: 163288 - DNA, 25 bp, Artificial
  Probe
aataaagattatgctgactcaaggt

SEQ ID NO: 163289 - DNA, 25 bp, Artificial
  Probe
tttccttattcacttcatgtctcag

SEQ ID NO: 163290 - DNA, 25 bp, Artificial
  Probe
ttctgccacttagcatgtgtataat

SEQ ID NO: 163291 - DNA, 25 bp, Artificial
  Probe
aatgtatttattccagaccctttct

SEQ ID NO: 163292 - DNA, 25 bp, Artificial
  Probe
tctgccacttagcatgtgtataatc

SEQ ID NO: 163293 - DNA, 25 bp, Artificial
  Probe
tgagtttccttattcacttcatgtc

SEQ ID NO: 163294 - DNA, 25 bp, Artificial
  Probe
tgccacttagcatgtgtataatcag

SEQ ID NO: 163295 - DNA, 25 bp, Artificial
  Probe
ctgccacttagcatgtgtataatca

SEQ ID NO: 163296 - DNA, 25 bp, Artificial
  Probe
agtttccttattcacttcatgtctc

SEQ ID NO: 163297 - DNA, 25 bp, Artificial
  Probe
gagtttccttattcacttcatgtct

SEQ ID NO: 163298 - DNA, 25 bp, Artificial
  Probe
ttgagtttccttattcacttcatgt

SEQ ID NO: 163299 - DNA, 25 bp, Artificial
  Probe
ataggacctactgtgtaccacttgg

SEQ ID NO: 163300 - DNA, 25 bp, Artificial
  Probe
ccataggacctactgtgtaccactt

SEQ ID NO: 163301 - DNA, 25 bp, Artificial
  Probe
gttgagtttccttattcacttcatg

SEQ ID NO: 163302 - DNA, 25 bp, Artificial
  Probe
cctctaccaactggagaactactgc

SEQ ID NO: 163303 - DNA, 25 bp, Artificial
  Probe
ccctctaccaactggagaactactg

SEQ ID NO: 163304 - DNA, 25 bp, Artificial
  Probe
gtggtttcttctacacacccaagtc

SEQ ID NO: 163305 - DNA, 25 bp, Artificial
  Probe
ccaactggagaactactgcaactga

SEQ ID NO: 163306 - DNA, 25 bp, Artificial
  Probe
tccctctaccaactggagaactact

SEQ ID NO: 163307 - DNA, 25 bp, Artificial
  Probe
accaactggagaactactgcaactg

SEQ ID NO: 163308 - DNA, 25 bp, Artificial
  Probe
tggtttcttctacacacccaagtcc

SEQ ID NO: 163309 - DNA, 25 bp, Artificial
  Probe
cgtggtttcttctacacacccaagt

SEQ ID NO: 163310 - DNA, 25 bp, Artificial
  Probe
ggtttcttctacacacccaagtccc

SEQ ID NO: 163311 - DNA, 25 bp, Artificial
  Probe
tttgtcaaacagcacctttgtggtc

SEQ ID NO: 163312 - DNA, 25 bp, Artificial
  Probe
aacgtggtttcttctacacacccaa

SEQ ID NO: 163313 - DNA, 25 bp, Artificial
  Probe
acgtggtttcttctacacacccaag

SEQ ID NO: 163314 - DNA, 25 bp, Artificial
  Probe
gaacgtggtttcttctacacaccca

SEQ ID NO: 163315 - DNA, 25 bp, Artificial
  Probe
ctccctctaccaactggagaactac

SEQ ID NO: 163316 - DNA, 25 bp, Artificial
  Probe
gctccctctaccaactggagaacta

SEQ ID NO: 163317 - DNA, 25 bp, Artificial
  Probe
aagtagaaggctaacaagtgacaag

SEQ ID NO: 163318 - DNA, 25 bp, Artificial
  Probe
gaagtagaaggctaacaagtgacaa

SEQ ID NO: 163319 - DNA, 25 bp, Artificial
  Probe
tagaaggctaacaagtgacaaggta

SEQ ID NO: 163320 - DNA, 25 bp, Artificial
  Probe
agaaggctaacaagtgacaaggtag

SEQ ID NO: 163321 - DNA, 25 bp, Artificial
  Probe
agtagaaggctaacaagtgacaagg

SEQ ID NO: 163322 - DNA, 25 bp, Artificial
  Probe
gtagaaggctaacaagtgacaaggt

SEQ ID NO: 163323 - DNA, 25 bp, Artificial
  Probe
cgaagtagaaggctaacaagtgaca

SEQ ID NO: 163324 - DNA, 25 bp, Artificial
  Probe
aatctgtctcgaagtagaaggctaa

SEQ ID NO: 163325 - DNA, 25 bp, Artificial
  Probe
taccatatcctaagaaagcattccg

SEQ ID NO: 163326 - DNA, 25 bp, Artificial
  Probe
gaaggctaacaagtgacaaggtagg

SEQ ID NO: 163327 - DNA, 25 bp, Artificial
  Probe
agattatcctgaccagtttgatgac

SEQ ID NO: 163328 - DNA, 25 bp, Artificial
  Probe
aagattatcctgaccagtttgatga

SEQ ID NO: 163329 - DNA, 25 bp, Artificial
  Probe
gaagattatcctgaccagtttgatg

SEQ ID NO: 163330 - DNA, 25 bp, Artificial
  Probe
gactccaatatgcccgaagattatc

SEQ ID NO: 163331 - DNA, 25 bp, Artificial
  Probe
cgaagattatcctgaccagtttgat

SEQ ID NO: 163332 - DNA, 25 bp, Artificial
  Probe
atctgtctcgaagtagaaggctaac

SEQ ID NO: 163333 - DNA, 25 bp, Artificial
  Probe
caatatgcccgaagattatcctgac

SEQ ID NO: 163334 - DNA, 25 bp, Artificial
  Probe
ctcgaagtagaaggctaacaagtga

SEQ ID NO: 163335 - DNA, 25 bp, Artificial
  Probe
tgactccaatatgcccgaagattat

SEQ ID NO: 163336 - DNA, 25 bp, Artificial
  Probe
ggtttaccatatcctaagaaagcat

SEQ ID NO: 163337 - DNA, 25 bp, Artificial
  Probe
gattatcctgaccagtttgatgacg

SEQ ID NO: 163338 - DNA, 25 bp, Artificial
  Probe
ttaccatatcctaagaaagcattcc

SEQ ID NO: 163339 - DNA, 25 bp, Artificial
  Probe
tctcgaagtagaaggctaacaagtg

SEQ ID NO: 163340 - DNA, 25 bp, Artificial
  Probe
gtctcgaagtagaaggctaacaagt

SEQ ID NO: 163341 - DNA, 25 bp, Artificial
  Probe
tcgaagtagaaggctaacaagtgac

SEQ ID NO: 163342 - DNA, 25 bp, Artificial
  Probe
ctccaatatgcccgaagattatcct

SEQ ID NO: 163343 - DNA, 25 bp, Artificial
  Probe
aatatgcccgaagattatcctgacc

SEQ ID NO: 163344 - DNA, 25 bp, Artificial
  Probe
ccaatatgcccgaagattatcctga

SEQ ID NO: 163345 - DNA, 25 bp, Artificial
  Probe
tccaatatgcccgaagattatcctg

SEQ ID NO: 163346 - DNA, 25 bp, Artificial
  Probe
actccaatatgcccgaagattatcc

SEQ ID NO: 163347 - DNA, 25 bp, Artificial
  Probe
tgtctcgaagtagaaggctaacaag

SEQ ID NO: 163348 - DNA, 25 bp, Artificial
  Probe
ctgtctcgaagtagaaggctaacaa

SEQ ID NO: 163349 - DNA, 25 bp, Artificial
  Probe
cgatattgtagcggttcctgtgaag

SEQ ID NO: 163350 - DNA, 25 bp, Artificial
  Probe
gtgactccaatatgcccgaagatta

SEQ ID NO: 163351 - DNA, 25 bp, Artificial
  Probe
ccgaagattatcctgaccagtttga

SEQ ID NO: 163352 - DNA, 25 bp, Artificial
  Probe
gatattgtagcggttcctgtgaagc

SEQ ID NO: 163353 - DNA, 25 bp, Artificial
  Probe
gaactgatctttcgatattgtagcg

SEQ ID NO: 163354 - DNA, 25 bp, Artificial
  Probe
aggaggaactgatctttcgatattg

SEQ ID NO: 163355 - DNA, 25 bp, Artificial
  Probe
caaggaggaactgatctttcgatat

SEQ ID NO: 163356 - DNA, 25 bp, Artificial
  Probe
ggaactgatctttcgatattgtagc

SEQ ID NO: 163357 - DNA, 25 bp, Artificial
  Probe
ggaggaactgatctttcgatattgt

SEQ ID NO: 163358 - DNA, 25 bp, Artificial
  Probe
aaggaggaactgatctttcgatatt

SEQ ID NO: 163359 - DNA, 25 bp, Artificial
  Probe
tgatctttcgatattgtagcggttc

SEQ ID NO: 163360 - DNA, 25 bp, Artificial
  Probe
ctgatctttcgatattgtagcggtt

SEQ ID NO: 163361 - DNA, 25 bp, Artificial
  Probe
aactgatctttcgatattgtagcgg

SEQ ID NO: 163362 - DNA, 25 bp, Artificial
  Probe
actgatgagaatgctgttatggtat

SEQ ID NO: 163363 - DNA, 25 bp, Artificial
  Probe
gactgatgagaatgctgttatggta

SEQ ID NO: 163364 - DNA, 25 bp, Artificial
  Probe
ctgatgagaatgctgttatggtatc

SEQ ID NO: 163365 - DNA, 25 bp, Artificial
  Probe
gtgactgatgagaatgctgttatgg

SEQ ID NO: 163366 - DNA, 25 bp, Artificial
  Probe
ggtgactgatgagaatgctgttatg

SEQ ID NO: 163367 - DNA, 25 bp, Artificial
  Probe
cgtgtagtgtattgctaggaataag

SEQ ID NO: 163368 - DNA, 25 bp, Artificial
  Probe
tgactgatgagaatgctgttatggt

SEQ ID NO: 163369 - DNA, 25 bp, Artificial
  Probe
tgagaatgctgttatggtatcagac

SEQ ID NO: 163370 - DNA, 25 bp, Artificial
  Probe
atgagaatgctgttatggtatcaga

SEQ ID NO: 163371 - DNA, 25 bp, Artificial
  Probe
gatgagaatgctgttatggtatcag

SEQ ID NO: 163372 - DNA, 25 bp, Artificial
  Probe
gagaatgctgttatggtatcagacg

SEQ ID NO: 163373 - DNA, 25 bp, Artificial
  Probe
atactcctagtagagaaccgaagtt

SEQ ID NO: 163374 - DNA, 25 bp, Artificial
  Probe
actatgaggcatactcctagtagag

SEQ ID NO: 163375 - DNA, 25 bp, Artificial
  Probe
ctatgaggcatactcctagtagaga

SEQ ID NO: 163376 - DNA, 25 bp, Artificial
  Probe
catactcctagtagagaaccgaagt

SEQ ID NO: 163377 - DNA, 25 bp, Artificial
  Probe
atgaggcatactcctagtagagaac

SEQ ID NO: 163378 - DNA, 25 bp, Artificial
  Probe
tatgaggcatactcctagtagagaa

SEQ ID NO: 163379 - DNA, 25 bp, Artificial
  Probe
gtatcagacgtgtagtgtattgcta

SEQ ID NO: 163380 - DNA, 25 bp, Artificial
  Probe
tatcagacgtgtagtgtattgctag

SEQ ID NO: 163381 - DNA, 25 bp, Artificial
  Probe
atggtatcagacgtgtagtgtattg

SEQ ID NO: 163382 - DNA, 25 bp, Artificial
  Probe
gttatggtatcagacgtgtagtgta

SEQ ID NO: 163383 - DNA, 25 bp, Artificial
  Probe
ttgtactatgaggcatactcctagt

SEQ ID NO: 163384 - DNA, 25 bp, Artificial
  Probe
gacgtgtagtgtattgctaggaata

SEQ ID NO: 163385 - DNA, 25 bp, Artificial
  Probe
acgtgtagtgtattgctaggaataa

SEQ ID NO: 163386 - DNA, 25 bp, Artificial
  Probe
tatggtatcagacgtgtagtgtatt

SEQ ID NO: 163387 - DNA, 25 bp, Artificial
  Probe
ttatggtatcagacgtgtagtgtat

SEQ ID NO: 163388 - DNA, 25 bp, Artificial
  Probe
agacgtgtagtgtattgctaggaat

SEQ ID NO: 163389 - DNA, 25 bp, Artificial
  Probe
tgttatggtatcagacgtgtagtgt

SEQ ID NO: 163390 - DNA, 25 bp, Artificial
  Probe
tagtagagaaccgaagtttcatcat

SEQ ID NO: 163391 - DNA, 25 bp, Artificial
  Probe
tagtgtattgctaggaataagcctg

SEQ ID NO: 163392 - DNA, 25 bp, Artificial
  Probe
gtagtgtattgctaggaataagcct

SEQ ID NO: 163393 - DNA, 25 bp, Artificial
  Probe
tgtagtgtattgctaggaataagcc

SEQ ID NO: 163394 - DNA, 25 bp, Artificial
  Probe
catttcacaaagccacacccatata

SEQ ID NO: 163395 - DNA, 25 bp, Artificial
  Probe
gcatactcctagtagagaaccgaag

SEQ ID NO: 163396 - DNA, 25 bp, Artificial
  Probe
ctagtagagaaccgaagtttcatca

SEQ ID NO: 163397 - DNA, 25 bp, Artificial
  Probe
gtgtagtgtattgctaggaataagc

SEQ ID NO: 163398 - DNA, 25 bp, Artificial
  Probe
cctagtagagaaccgaagtttcatc

SEQ ID NO: 163399 - DNA, 25 bp, Artificial
  Probe
tcctagtagagaaccgaagtttcat

SEQ ID NO: 163400 - DNA, 25 bp, Artificial
  Probe
gtattgctaggaataagcctgtgag

SEQ ID NO: 163401 - DNA, 25 bp, Artificial
  Probe
atttcacaaagccacacccatatat

SEQ ID NO: 163402 - DNA, 25 bp, Artificial
  Probe
atcagacgtgtagtgtattgctagg

SEQ ID NO: 163403 - DNA, 25 bp, Artificial
  Probe
tgatgagaatgctgttatggtatca

SEQ ID NO: 163404 - DNA, 25 bp, Artificial
  Probe
ctgttatggtatcagacgtgtagtg

SEQ ID NO: 163405 - DNA, 25 bp, Artificial
  Probe
aacatggacagaaacatttcacaaa

SEQ ID NO: 163406 - DNA, 25 bp, Artificial
  Probe
cagacgtgtagtgtattgctaggaa

SEQ ID NO: 163407 - DNA, 25 bp, Artificial
  Probe
ctgtattctctgttgatcctgatgg

SEQ ID NO: 163408 - DNA, 25 bp, Artificial
  Probe
gctgtattctctgttgatcctgatg

SEQ ID NO: 163409 - DNA, 25 bp, Artificial
  Probe
gtactggagaagttagagaatggtc

SEQ ID NO: 163410 - DNA, 25 bp, Artificial
  Probe
tactggagaagttagagaatggtcc

SEQ ID NO: 163411 - DNA, 25 bp, Artificial
  Probe
agctgtattctctgttgatcctgat

SEQ ID NO: 163412 - DNA, 25 bp, Artificial
  Probe
tgggagaagatagaggaataaagga

SEQ ID NO: 163413 - DNA, 25 bp, Artificial
  Probe
tatggagctgtattctctgttgatc

SEQ ID NO: 163414 - DNA, 25 bp, Artificial
  Probe
ttgggagaagatagaggaataaagg

SEQ ID NO: 163415 - DNA, 25 bp, Artificial
  Probe
ggagaagttagagaatggtccagaa

SEQ ID NO: 163416 - DNA, 25 bp, Artificial
  Probe
ttatggagctgtattctctgttgat

SEQ ID NO: 163417 - DNA, 25 bp, Artificial
  Probe
gggagaagatagaggaataaaggaa

SEQ ID NO: 163418 - DNA, 25 bp, Artificial
  Probe
agttagagaatggtccagaaatgag

SEQ ID NO: 163419 - DNA, 25 bp, Artificial
  Probe
gagaagttagagaatggtccagaaa

SEQ ID NO: 163420 - DNA, 25 bp, Artificial
  Probe
aagttagagaatggtccagaaatga

SEQ ID NO: 163421 - DNA, 25 bp, Artificial
  Probe
gaagttagagaatggtccagaaatg

SEQ ID NO: 163422 - DNA, 25 bp, Artificial
  Probe
agaagttagagaatggtccagaaat

SEQ ID NO: 163423 - DNA, 25 bp, Artificial
  Probe
gttagagaatggtccagaaatgagg

SEQ ID NO: 163424 - DNA, 25 bp, Artificial
  Probe
gagctgtattctctgttgatcctga

SEQ ID NO: 163425 - DNA, 25 bp, Artificial
  Probe
cttgggagaagatagaggaataaag

SEQ ID NO: 163426 - DNA, 25 bp, Artificial
  Probe
tgtattctctgttgatcctgatggg

SEQ ID NO: 163427 - DNA, 25 bp, Artificial
  Probe
ttagagaatggtccagaaatgaggc

SEQ ID NO: 163428 - DNA, 25 bp, Artificial
  Probe
agtactggagaagttagagaatggt

SEQ ID NO: 163429 - DNA, 25 bp, Artificial
  Probe
atggagctgtattctctgttgatcc

SEQ ID NO: 163430 - DNA, 25 bp, Artificial
  Probe
ggagaagatagaggaataaaggaat

SEQ ID NO: 163431 - DNA, 25 bp, Artificial
  Probe
tgtttatggagctgtattctctgtt

SEQ ID NO: 163432 - DNA, 25 bp, Artificial
  Probe
tttatggagctgtattctctgttga

SEQ ID NO: 163433 - DNA, 25 bp, Artificial
  Probe
gtttatggagctgtattctctgttg

SEQ ID NO: 163434 - DNA, 25 bp, Artificial
  Probe
ctgtttatggagctgtattctctgt

SEQ ID NO: 163435 - DNA, 25 bp, Artificial
  Probe
ggagctgtattctctgttgatcctg

SEQ ID NO: 163436 - DNA, 25 bp, Artificial
  Probe
atcattcttgggagaagatagagga

SEQ ID NO: 163437 - DNA, 25 bp, Artificial
  Probe
cattcttgggagaagatagaggaat

SEQ ID NO: 163438 - DNA, 25 bp, Artificial
  Probe
tcattcttgggagaagatagaggaa

SEQ ID NO: 163439 - DNA, 25 bp, Artificial
  Probe
aatcattcttgggagaagatagagg

SEQ ID NO: 163440 - DNA, 25 bp, Artificial
  Probe
gcaatcattcttgggagaagataga

SEQ ID NO: 163441 - DNA, 25 bp, Artificial
  Probe
agcaatcattcttgggagaagatag

SEQ ID NO: 163442 - DNA, 25 bp, Artificial
  Probe
gagcaatcattcttgggagaagata

SEQ ID NO: 163443 - DNA, 25 bp, Artificial
  Probe
gtattctctgttgatcctgatgggc

SEQ ID NO: 163444 - DNA, 25 bp, Artificial
  Probe
tattctctgttgatcctgatgggct

SEQ ID NO: 163445 - DNA, 25 bp, Artificial
  Probe
tagagaatggtccagaaatgaggca

SEQ ID NO: 163446 - DNA, 25 bp, Artificial
  Probe
caatcattcttgggagaagatagag

SEQ ID NO: 163447 - DNA, 25 bp, Artificial
  Probe
tggagctgtattctctgttgatcct

SEQ ID NO: 163448 - DNA, 25 bp, Artificial
  Probe
tcttgggagaagatagaggaataaa

SEQ ID NO: 163449 - DNA, 25 bp, Artificial
  Probe
ttcttgggagaagatagaggaataa

SEQ ID NO: 163450 - DNA, 25 bp, Artificial
  Probe
attcttgggagaagatagaggaata

SEQ ID NO: 163451 - DNA, 25 bp, Artificial
  Probe
atgctgtttatggagctgtattctc

SEQ ID NO: 163452 - DNA, 25 bp, Artificial
  Probe
aagtattcctcatgtcctgtgctaa

SEQ ID NO: 163453 - DNA, 25 bp, Artificial
  Probe
gaagtattcctcatgtcctgtgcta

SEQ ID NO: 163454 - DNA, 25 bp, Artificial
  Probe
agtattcctcatgtcctgtgctaac

SEQ ID NO: 163455 - DNA, 25 bp, Artificial
  Probe
gatagaagtaacgggtgtgtcattt

SEQ ID NO: 163456 - DNA, 25 bp, Artificial
  Probe
cagcctcataatttaacctaagtgc

SEQ ID NO: 163457 - DNA, 25 bp, Artificial
  Probe
gtcttccagcctcataatttaacct

SEQ ID NO: 163458 - DNA, 25 bp, Artificial
  Probe
ccttgtcttccagcctcataattta

SEQ ID NO: 163459 - DNA, 25 bp, Artificial
  Probe
ccagcctcataatttaacctaagtg

SEQ ID NO: 163460 - DNA, 25 bp, Artificial
  Probe
tccagcctcataatttaacctaagt

SEQ ID NO: 163461 - DNA, 25 bp, Artificial
  Probe
ttgtcttccagcctcataatttaac

SEQ ID NO: 163462 - DNA, 25 bp, Artificial
  Probe
tgaggaacagttgacttctttctta

SEQ ID NO: 163463 - DNA, 25 bp, Artificial
  Probe
tcttccagcctcataatttaaccta

SEQ ID NO: 163464 - DNA, 25 bp, Artificial
  Probe
tgtcttccagcctcataatttaacc

SEQ ID NO: 163465 - DNA, 25 bp, Artificial
  Probe
gaggaacagttgacttctttcttac

SEQ ID NO: 163466 - DNA, 25 bp, Artificial
  Probe
ttgaggaacagttgacttctttctt

SEQ ID NO: 163467 - DNA, 25 bp, Artificial
  Probe
atagaagtaacgggtgtgtcatttc

SEQ ID NO: 163468 - DNA, 25 bp, Artificial
  Probe
cttgtcttccagcctcataatttaa

SEQ ID NO: 163469 - DNA, 25 bp, Artificial
  Probe
cttgaggaacagttgacttctttct

SEQ ID NO: 163470 - DNA, 25 bp, Artificial
  Probe
tcttgaggaacagttgacttctttc

SEQ ID NO: 163471 - DNA, 25 bp, Artificial
  Probe
aggaacagttgacttctttcttact

SEQ ID NO: 163472 - DNA, 25 bp, Artificial
  Probe
tagccttgtcttccagcctcataat

SEQ ID NO: 163473 - DNA, 25 bp, Artificial
  Probe
ttccagcctcataatttaacctaag

SEQ ID NO: 163474 - DNA, 25 bp, Artificial
  Probe
cttccagcctcataatttaacctaa

SEQ ID NO: 163475 - DNA, 25 bp, Artificial
  Probe
ataggaacaggcagaaatgtcttta

SEQ ID NO: 163476 - DNA, 25 bp, Artificial
  Probe
tataggaacaggcagaaatgtcttt

SEQ ID NO: 163477 - DNA, 25 bp, Artificial
  Probe
gaacttgacagtggctattaggcaa

SEQ ID NO: 163478 - DNA, 25 bp, Artificial
  Probe
taggaacaggcagaaatgtctttag

SEQ ID NO: 163479 - DNA, 25 bp, Artificial
  Probe
gtataggaacaggcagaaatgtctt

SEQ ID NO: 163480 - DNA, 25 bp, Artificial
  Probe
gtcatttccaacggtcatgtataat

SEQ ID NO: 163481 - DNA, 25 bp, Artificial
  Probe
tgtcatttccaacggtcatgtataa

SEQ ID NO: 163482 - DNA, 25 bp, Artificial
  Probe
gtgtcatttccaacggtcatgtata

SEQ ID NO: 163483 - DNA, 25 bp, Artificial
  Probe
ggatagaagtaacgggtgtgtcatt

SEQ ID NO: 163484 - DNA, 25 bp, Artificial
  Probe
aactaacttatatttcccttcacga

SEQ ID NO: 163485 - DNA, 25 bp, Artificial
  Probe
tgtataggaacaggcagaaatgtct

SEQ ID NO: 163486 - DNA, 25 bp, Artificial
  Probe
gtcttgaggaacagttgacttcttt

SEQ ID NO: 163487 - DNA, 25 bp, Artificial
  Probe
tcatttccaacggtcatgtataatt

SEQ ID NO: 163488 - DNA, 25 bp, Artificial
  Probe
gtattcctcatgtcctgtgctaacg

SEQ ID NO: 163489 - DNA, 25 bp, Artificial
  Probe
tttgtggttcaggtaacagtctttg

SEQ ID NO: 163490 - DNA, 25 bp, Artificial
  Probe
actaacttatatttcccttcacgaa

SEQ ID NO: 163491 - DNA, 25 bp, Artificial
  Probe
gaaggatagaagtaacgggtgtgtc

SEQ ID NO: 163492 - DNA, 25 bp, Artificial
  Probe
cgtgaagtattcctcatgtcctgtg

SEQ ID NO: 163493 - DNA, 25 bp, Artificial
  Probe
tagaagtaacgggtgtgtcatttcc

SEQ ID NO: 163494 - DNA, 25 bp, Artificial
  Probe
catttccaacggtcatgtataattt

SEQ ID NO: 163495 - DNA, 25 bp, Artificial
  Probe
taatttaacctaagtgcaatgcctg

SEQ ID NO: 163496 - DNA, 25 bp, Artificial
  Probe
agcctcataatttaacctaagtgca

SEQ ID NO: 163497 - DNA, 25 bp, Artificial
  Probe
tcaggatgaggtctgtaaggatagg

SEQ ID NO: 163498 - DNA, 25 bp, Artificial
  Probe
gaagtaagacacaaggacacacagg

SEQ ID NO: 163499 - DNA, 25 bp, Artificial
  Probe
ggaagtaagacacaaggacacacag

SEQ ID NO: 163500 - DNA, 25 bp, Artificial
  Probe
gaacaaagtcttgatctcaggatga

SEQ ID NO: 163501 - DNA, 25 bp, Artificial
  Probe
ggaacaaagtcttgatctcaggatg

SEQ ID NO: 163502 - DNA, 25 bp, Artificial
  Probe
aagtaagacacaaggacacacaggt

SEQ ID NO: 163503 - DNA, 25 bp, Artificial
  Probe
aggatgaggtctgtaaggataggca

SEQ ID NO: 163504 - DNA, 25 bp, Artificial
  Probe
cacattccgtacactcttgttctcc

SEQ ID NO: 163505 - DNA, 25 bp, Artificial
  Probe
ccacattccgtacactcttgttctc

SEQ ID NO: 163506 - DNA, 25 bp, Artificial
  Probe
gggaacaaagtcttgatctcaggat

SEQ ID NO: 163507 - DNA, 25 bp, Artificial
  Probe
gtccacattccgtacactcttgttc

SEQ ID NO: 163508 - DNA, 25 bp, Artificial
  Probe
ggatgaggtctgtaaggataggcag

SEQ ID NO: 163509 - DNA, 25 bp, Artificial
  Probe
caggatgaggtctgtaaggataggc

SEQ ID NO: 163510 - DNA, 25 bp, Artificial
  Probe
tccacattccgtacactcttgttct

SEQ ID NO: 163511 - DNA, 25 bp, Artificial
  Probe
ctcaggatgaggtctgtaaggatag

SEQ ID NO: 163512 - DNA, 25 bp, Artificial
  Probe
ttgatctcaggatgaggtctgtaag

SEQ ID NO: 163513 - DNA, 25 bp, Artificial
  Probe
cttgatctcaggatgaggtctgtaa

SEQ ID NO: 163514 - DNA, 25 bp, Artificial
  Probe
tctcaggatgaggtctgtaaggata

SEQ ID NO: 163515 - DNA, 25 bp, Artificial
  Probe
cggaagtaagacacaaggacacaca

SEQ ID NO: 163516 - DNA, 25 bp, Artificial
  Probe
tgagttcagttcccagtaaccacat

SEQ ID NO: 163517 - DNA, 25 bp, Artificial
  Probe
gtgggaacaaagtcttgatctcagg

SEQ ID NO: 163518 - DNA, 25 bp, Artificial
  Probe
ggtgggaacaaagtcttgatctcag

SEQ ID NO: 163519 - DNA, 25 bp, Artificial
  Probe
tcttgatctcaggatgaggtctgta

SEQ ID NO: 163520 - DNA, 25 bp, Artificial
  Probe
tgtccacattccgtacactcttgtt

SEQ ID NO: 163521 - DNA, 25 bp, Artificial
  Probe
atctcaggatgaggtctgtaaggat

SEQ ID NO: 163522 - DNA, 25 bp, Artificial
  Probe
gagttcagttcccagtaaccacatg

SEQ ID NO: 163523 - DNA, 25 bp, Artificial
  Probe
tgggaacaaagtcttgatctcagga

SEQ ID NO: 163524 - DNA, 25 bp, Artificial
  Probe
taagacacaaggacacacaggtgac

SEQ ID NO: 163525 - DNA, 25 bp, Artificial
  Probe
gtaagacacaaggacacacaggtga

SEQ ID NO: 163526 - DNA, 25 bp, Artificial
  Probe
agtaagacacaaggacacacaggtg

SEQ ID NO: 163527 - DNA, 25 bp, Artificial
  Probe
aagtcttgatctcaggatgaggtct

SEQ ID NO: 163528 - DNA, 25 bp, Artificial
  Probe
ctgtccacattccgtacactcttgt

SEQ ID NO: 163529 - DNA, 25 bp, Artificial
  Probe
cttccagaggtcctgagttcagttc

SEQ ID NO: 163530 - DNA, 25 bp, Artificial
  Probe
gatctcaggatgaggtctgtaagga

SEQ ID NO: 163531 - DNA, 25 bp, Artificial
  Probe
acattccgtacactcttgttctccg

SEQ ID NO: 163532 - DNA, 25 bp, Artificial
  Probe
atgaggtctgtaaggataggcagag

SEQ ID NO: 163533 - DNA, 25 bp, Artificial
  Probe
gatgaggtctgtaaggataggcaga

SEQ ID NO: 163534 - DNA, 25 bp, Artificial
  Probe
tgatctcaggatgaggtctgtaagg

SEQ ID NO: 163535 - DNA, 25 bp, Artificial
  Probe
aacaaagtcttgatctcaggatgag

SEQ ID NO: 163536 - DNA, 25 bp, Artificial
  Probe
tcttccagaggtcctgagttcagtt

SEQ ID NO: 163537 - DNA, 25 bp, Artificial
  Probe
agtcttgatctcaggatgaggtctg

SEQ ID NO: 163538 - DNA, 25 bp, Artificial
  Probe
agggtgggaacaaagtcttgatctc

SEQ ID NO: 163539 - DNA, 25 bp, Artificial
  Probe
gaagagagcgacactgcactcatat

SEQ ID NO: 163540 - DNA, 25 bp, Artificial
  Probe
gtcttgatctcaggatgaggtctgt

SEQ ID NO: 163541 - DNA, 25 bp, Artificial
  Probe
aaagtcttgatctcaggatgaggtc

SEQ ID NO: 163542 - DNA, 25 bp, Artificial
  Probe
gatctgagcaggatacttcatgtag

SEQ ID NO: 163543 - DNA, 25 bp, Artificial
  Probe
atctgagcaggatacttcatgtagg

SEQ ID NO: 163544 - DNA, 25 bp, Artificial
  Probe
ctgagcaggatacttcatgtaggac

SEQ ID NO: 163545 - DNA, 25 bp, Artificial
  Probe
tctgagcaggatacttcatgtagga

SEQ ID NO: 163546 - DNA, 25 bp, Artificial
  Probe
gtgttcattctctgtgtgtgtgttt

SEQ ID NO: 163547 - DNA, 25 bp, Artificial
  Probe
ggtgttcattctctgtgtgtgtgtt

SEQ ID NO: 163548 - DNA, 25 bp, Artificial
  Probe
tgtaggacataactcacctttgaac

SEQ ID NO: 163549 - DNA, 25 bp, Artificial
  Probe
cttcatgtaggacataactcacctt

SEQ ID NO: 163550 - DNA, 25 bp, Artificial
  Probe
gcaggatacttcatgtaggacataa

SEQ ID NO: 163551 - DNA, 25 bp, Artificial
  Probe
tgagcaggatacttcatgtaggaca

SEQ ID NO: 163552 - DNA, 25 bp, Artificial
  Probe
tacttcatgtaggacataactcacc

SEQ ID NO: 163553 - DNA, 25 bp, Artificial
  Probe
agcaggatacttcatgtaggacata

SEQ ID NO: 163554 - DNA, 25 bp, Artificial
  Probe
gtaggacataactcacctttgaacc

SEQ ID NO: 163555 - DNA, 25 bp, Artificial
  Probe
acttcatgtaggacataactcacct

SEQ ID NO: 163556 - DNA, 25 bp, Artificial
  Probe
cacatacacacacacacacacacag

SEQ ID NO: 163557 - DNA, 25 bp, Artificial
  Probe
agatctgagcaggatacttcatgta

SEQ ID NO: 163558 - DNA, 25 bp, Artificial
  Probe
ctggtgttcattctctgtgtgtgtg

SEQ ID NO: 163559 - DNA, 25 bp, Artificial
  Probe
aggatacttcatgtaggacataact

SEQ ID NO: 163560 - DNA, 25 bp, Artificial
  Probe
caggatacttcatgtaggacataac

SEQ ID NO: 163561 - DNA, 25 bp, Artificial
  Probe
gagcaggatacttcatgtaggacat

SEQ ID NO: 163562 - DNA, 25 bp, Artificial
  Probe
cctctgcaccatgttcttgagataa

SEQ ID NO: 163563 - DNA, 25 bp, Artificial
  Probe
ggatacttcatgtaggacataactc

SEQ ID NO: 163564 - DNA, 25 bp, Artificial
  Probe
aagatctgagcaggatacttcatgt

SEQ ID NO: 163565 - DNA, 25 bp, Artificial
  Probe
taggacataactcacctttgaaccc

SEQ ID NO: 163566 - DNA, 25 bp, Artificial
  Probe
atacttcatgtaggacataactcac

SEQ ID NO: 163567 - DNA, 25 bp, Artificial
  Probe
ctctgcaccatgttcttgagataaa

SEQ ID NO: 163568 - DNA, 25 bp, Artificial
  Probe
gatacttcatgtaggacataactca

SEQ ID NO: 163569 - DNA, 25 bp, Artificial
  Probe
tggtgttcattctctgtgtgtgtgt

SEQ ID NO: 163570 - DNA, 25 bp, Artificial
  Probe
atgtaggacataactcacctttgaa

SEQ ID NO: 163571 - DNA, 25 bp, Artificial
  Probe
tgttcattctctgtgtgtgtgtttt

SEQ ID NO: 163572 - DNA, 25 bp, Artificial
  Probe
catgtaggacataactcacctttga

SEQ ID NO: 163573 - DNA, 25 bp, Artificial
  Probe
tcatgtaggacataactcacctttg

SEQ ID NO: 163574 - DNA, 25 bp, Artificial
  Probe
ttcatgtaggacataactcaccttt

SEQ ID NO: 163575 - DNA, 25 bp, Artificial
  Probe
gaaagggtatctggctcatggattg

SEQ ID NO: 163576 - DNA, 25 bp, Artificial
  Probe
aaagatctgagcaggatacttcatg

SEQ ID NO: 163577 - DNA, 25 bp, Artificial
  Probe
caaagatctgagcaggatacttcat

SEQ ID NO: 163578 - DNA, 25 bp, Artificial
  Probe
tcttcttctttagttcatgagctgg

SEQ ID NO: 163579 - DNA, 25 bp, Artificial
  Probe
gtcaaagatctgagcaggatacttc

SEQ ID NO: 163580 - DNA, 25 bp, Artificial
  Probe
cttcttctttagttcatgagctggt

SEQ ID NO: 163581 - DNA, 25 bp, Artificial
  Probe
tcaaagatctgagcaggatacttca

SEQ ID NO: 163582 - DNA, 25 bp, Artificial
  Probe
ttcttcttctttagttcatgagctg

SEQ ID NO: 163583 - DNA, 25 bp, Artificial
  Probe
ttcttctttagttcatgagctggtg

SEQ ID NO: 163584 - DNA, 25 bp, Artificial
  Probe
ttctttagttcatgagctggtgttc

SEQ ID NO: 163585 - DNA, 25 bp, Artificial
  Probe
cttctttagttcatgagctggtgtt

SEQ ID NO: 163586 - DNA, 25 bp, Artificial
  Probe
cttcttcttctttagttcatgagct

SEQ ID NO: 163587 - DNA, 25 bp, Artificial
  Probe
cgctatgtaatctcgtgatctgata

SEQ ID NO: 163588 - DNA, 25 bp, Artificial
  Probe
tagttcatgtgcgtctagtataggt

SEQ ID NO: 163589 - DNA, 25 bp, Artificial
  Probe
caccatgtcagagtcaatctaatct

SEQ ID NO: 163590 - DNA, 25 bp, Artificial
  Probe
tcaccatgtcagagtcaatctaatc

SEQ ID NO: 163591 - DNA, 25 bp, Artificial
  Probe
atgtcagagtcaatctaatctaagc

SEQ ID NO: 163592 - DNA, 25 bp, Artificial
  Probe
ctcaccatgtcagagtcaatctaat

SEQ ID NO: 163593 - DNA, 25 bp, Artificial
  Probe
accatgtcagagtcaatctaatcta

SEQ ID NO: 163594 - DNA, 25 bp, Artificial
  Probe
gctatgtaatctcgtgatctgatat

SEQ ID NO: 163595 - DNA, 25 bp, Artificial
  Probe
agttcatgtgcgtctagtataggtg

SEQ ID NO: 163596 - DNA, 25 bp, Artificial
  Probe
ccgctatgtaatctcgtgatctgat

SEQ ID NO: 163597 - DNA, 25 bp, Artificial
  Probe
tgtcagagtcaatctaatctaagct

SEQ ID NO: 163598 - DNA, 25 bp, Artificial
  Probe
ccatgtcagagtcaatctaatctaa

SEQ ID NO: 163599 - DNA, 25 bp, Artificial
  Probe
agacaattcaaagactggagaagag

SEQ ID NO: 163600 - DNA, 25 bp, Artificial
  Probe
ctagttcatgtgcgtctagtatagg

SEQ ID NO: 163601 - DNA, 25 bp, Artificial
  Probe
gctagttcatgtgcgtctagtatag

SEQ ID NO: 163602 - DNA, 25 bp, Artificial
  Probe
cgtgatctgatatttccgtttgtac

SEQ ID NO: 163603 - DNA, 25 bp, Artificial
  Probe
tcgtgatctgatatttccgtttgta

SEQ ID NO: 163604 - DNA, 25 bp, Artificial
  Probe
atctcgtgatctgatatttccgttt

SEQ ID NO: 163605 - DNA, 25 bp, Artificial
  Probe
aatctcgtgatctgatatttccgtt

SEQ ID NO: 163606 - DNA, 25 bp, Artificial
  Probe
gttcatgtgcgtctagtataggtgg

SEQ ID NO: 163607 - DNA, 25 bp, Artificial
  Probe
taatctcgtgatctgatatttccgt

SEQ ID NO: 163608 - DNA, 25 bp, Artificial
  Probe
caattcaaagactggagaagaggac

SEQ ID NO: 163609 - DNA, 25 bp, Artificial
  Probe
gacaattcaaagactggagaagagg

SEQ ID NO: 163610 - DNA, 25 bp, Artificial
  Probe
gtaatctcgtgatctgatatttccg

SEQ ID NO: 163611 - DNA, 25 bp, Artificial
  Probe
ttcatgtgcgtctagtataggtgga

SEQ ID NO: 163612 - DNA, 25 bp, Artificial
  Probe
tctcgtgatctgatatttccgtttg

SEQ ID NO: 163613 - DNA, 25 bp, Artificial
  Probe
ctcgtgatctgatatttccgtttgt

SEQ ID NO: 163614 - DNA, 25 bp, Artificial
  Probe
aattcaaagactggagaagaggaca

SEQ ID NO: 163615 - DNA, 25 bp, Artificial
  Probe
acaattcaaagactggagaagagga

SEQ ID NO: 163616 - DNA, 25 bp, Artificial
  Probe
ggagcatgagcagtatgttcatata

SEQ ID NO: 163617 - DNA, 25 bp, Artificial
  Probe
cagacaattcaaagactggagaaga

SEQ ID NO: 163618 - DNA, 25 bp, Artificial
  Probe
agctagttcatgtgcgtctagtata

SEQ ID NO: 163619 - DNA, 25 bp, Artificial
  Probe
gcgtctagtataggtggacatttac

SEQ ID NO: 163620 - DNA, 25 bp, Artificial
  Probe
tgcgtctagtataggtggacattta

SEQ ID NO: 163621 - DNA, 25 bp, Artificial
  Probe
tgtaatctcgtgatctgatatttcc

SEQ ID NO: 163622 - DNA, 25 bp, Artificial
  Probe
attcaaagactggagaagaggacac

SEQ ID NO: 163623 - DNA, 25 bp, Artificial
  Probe
gagcatgagcagtatgttcatataa

SEQ ID NO: 163624 - DNA, 25 bp, Artificial
  Probe
catgtcagagtcaatctaatctaag

SEQ ID NO: 163625 - DNA, 25 bp, Artificial
  Probe
tgtgcgtctagtataggtggacatt

SEQ ID NO: 163626 - DNA, 25 bp, Artificial
  Probe
gtcctgtgtttgtaaacccaagtag

SEQ ID NO: 163627 - DNA, 25 bp, Artificial
  Probe
cgtctagtataggtggacatttacc

SEQ ID NO: 163628 - DNA, 25 bp, Artificial
  Probe
aggagcatgagcagtatgttcatat

SEQ ID NO: 163629 - DNA, 25 bp, Artificial
  Probe
agcatgagcagtatgttcatataat

SEQ ID NO: 163630 - DNA, 25 bp, Artificial
  Probe
gtctagtataggtggacatttacca

SEQ ID NO: 163631 - DNA, 25 bp, Artificial
  Probe
tgtcctgtgtttgtaaacccaagta

SEQ ID NO: 163632 - DNA, 25 bp, Artificial
  Probe
ggaatcataattggcgtcttgttag

SEQ ID NO: 163633 - DNA, 25 bp, Artificial
  Probe
gaatcataattggcgtcttgttagc

SEQ ID NO: 163634 - DNA, 25 bp, Artificial
  Probe
cggaatcataattggcgtcttgtta

SEQ ID NO: 163635 - DNA, 25 bp, Artificial
  Probe
tcggaatcataattggcgtcttgtt

SEQ ID NO: 163636 - DNA, 25 bp, Artificial
  Probe
ctttaggctaggaaatgagaccaac

SEQ ID NO: 163637 - DNA, 25 bp, Artificial
  Probe
gataagaaagatggcttggctgtag

SEQ ID NO: 163638 - DNA, 25 bp, Artificial
  Probe
agataagaaagatggcttggctgta

SEQ ID NO: 163639 - DNA, 25 bp, Artificial
  Probe
aacgcagaccacagataagaaagat

SEQ ID NO: 163640 - DNA, 25 bp, Artificial
  Probe
ataagaaagatggcttggctgtagt

SEQ ID NO: 163641 - DNA, 25 bp, Artificial
  Probe
aaacgcagaccacagataagaaaga

SEQ ID NO: 163642 - DNA, 25 bp, Artificial
  Probe
gtcggaatcataattggcgtcttgt

SEQ ID NO: 163643 - DNA, 25 bp, Artificial
  Probe
tttaggctaggaaatgagaccaacc

SEQ ID NO: 163644 - DNA, 25 bp, Artificial
  Probe
gctttaggctaggaaatgagaccaa

SEQ ID NO: 163645 - DNA, 25 bp, Artificial
  Probe
acgcagaccacagataagaaagatg

SEQ ID NO: 163646 - DNA, 25 bp, Artificial
  Probe
taagaaagatggcttggctgtagtg

SEQ ID NO: 163647 - DNA, 25 bp, Artificial
  Probe
gaccacagataagaaagatggcttg

SEQ ID NO: 163648 - DNA, 25 bp, Artificial
  Probe
agaccacagataagaaagatggctt

SEQ ID NO: 163649 - DNA, 25 bp, Artificial
  Probe
cacagataagaaagatggcttggct

SEQ ID NO: 163650 - DNA, 25 bp, Artificial
  Probe
gctaggaaatgagaccaaccagttt

SEQ ID NO: 163651 - DNA, 25 bp, Artificial
  Probe
ctgctttaggctaggaaatgagacc

SEQ ID NO: 163652 - DNA, 25 bp, Artificial
  Probe
ggtcggaatcataattggcgtcttg

SEQ ID NO: 163653 - DNA, 25 bp, Artificial
  Probe
ctaggaaatgagaccaaccagtttc

SEQ ID NO: 163654 - DNA, 25 bp, Artificial
  Probe
ttaggctaggaaatgagaccaacca

SEQ ID NO: 163655 - DNA, 25 bp, Artificial
  Probe
cagaccacagataagaaagatggct

SEQ ID NO: 163656 - DNA, 25 bp, Artificial
  Probe
tgctttaggctaggaaatgagacca

SEQ ID NO: 163657 - DNA, 25 bp, Artificial
  Probe
tggtcggaatcataattggcgtctt

SEQ ID NO: 163658 - DNA, 25 bp, Artificial
  Probe
cagataagaaagatggcttggctgt

SEQ ID NO: 163659 - DNA, 25 bp, Artificial
  Probe
acagataagaaagatggcttggctg

SEQ ID NO: 163660 - DNA, 25 bp, Artificial
  Probe
taggctaggaaatgagaccaaccag

SEQ ID NO: 163661 - DNA, 25 bp, Artificial
  Probe
aacaactcaccccaatagagataac

SEQ ID NO: 163662 - DNA, 25 bp, Artificial
  Probe
aaacaactcaccccaatagagataa

SEQ ID NO: 163663 - DNA, 25 bp, Artificial
  Probe
aaaacaactcaccccaatagagata

SEQ ID NO: 163664 - DNA, 25 bp, Artificial
  Probe
cctgctttaggctaggaaatgagac

SEQ ID NO: 163665 - DNA, 25 bp, Artificial
  Probe
accacagataagaaagatggcttgg

SEQ ID NO: 163666 - DNA, 25 bp, Artificial
  Probe
gaaaacaactcaccccaatagagat

SEQ ID NO: 163667 - DNA, 25 bp, Artificial
  Probe
atttggaaaatgttacctcacagag

SEQ ID NO: 163668 - DNA, 25 bp, Artificial
  Probe
aatttggaaaatgttacctcacaga

SEQ ID NO: 163669 - DNA, 25 bp, Artificial
  Probe
agaatttggaaaatgttacctcaca

SEQ ID NO: 163670 - DNA, 25 bp, Artificial
  Probe
gaatttggaaaatgttacctcacag

SEQ ID NO: 163671 - DNA, 25 bp, Artificial
  Probe
agaaaacaactcaccccaatagaga

SEQ ID NO: 163672 - DNA, 25 bp, Artificial
  Probe
accatctgcgtttggaaatcaaatt

SEQ ID NO: 163673 - DNA, 25 bp, Artificial
  Probe
aaccatctgcgtttggaaatcaaat

SEQ ID NO: 163674 - DNA, 25 bp, Artificial
  Probe
ctggtcggaatcataattggcgtct

SEQ ID NO: 163675 - DNA, 25 bp, Artificial
  Probe
tagtgaccctggtcggaatcataat

SEQ ID NO: 163676 - DNA, 25 bp, Artificial
  Probe
aagaatttggaaaatgttacctcac

SEQ ID NO: 163677 - DNA, 25 bp, Artificial
  Probe
aacctggactattctctggacaata

SEQ ID NO: 163678 - DNA, 25 bp, Artificial
  Probe
ctctcctggattctatacaacctgg

SEQ ID NO: 163679 - DNA, 25 bp, Artificial
  Probe
caacctggactattctctggacaat

SEQ ID NO: 163680 - DNA, 25 bp, Artificial
  Probe
ggtatcatctgccttatcagtatct

SEQ ID NO: 163681 - DNA, 25 bp, Artificial
  Probe
aggtatcatctgccttatcagtatc

SEQ ID NO: 163682 - DNA, 25 bp, Artificial
  Probe
gctctcctggattctatacaacctg

SEQ ID NO: 163683 - DNA, 25 bp, Artificial
  Probe
tattctctggacaataggaagccaa

SEQ ID NO: 163684 - DNA, 25 bp, Artificial
  Probe
tatcataaggtgcattcttctccaa

SEQ ID NO: 163685 - DNA, 25 bp, Artificial
  Probe
ttatcataaggtgcattcttctcca

SEQ ID NO: 163686 - DNA, 25 bp, Artificial
  Probe
ttattctcgcagcaaatcccttatt

SEQ ID NO: 163687 - DNA, 25 bp, Artificial
  Probe
aagactttggatttcattgatgtgc

SEQ ID NO: 163688 - DNA, 25 bp, Artificial
  Probe
gtatcatctgccttatcagtatctt

SEQ ID NO: 163689 - DNA, 25 bp, Artificial
  Probe
tattctcgcagcaaatcccttattc

SEQ ID NO: 163690 - DNA, 25 bp, Artificial
  Probe
cttattctcgcagcaaatcccttat

SEQ ID NO: 163691 - DNA, 25 bp, Artificial
  Probe
atcataaggtgcattcttctccaac

SEQ ID NO: 163692 - DNA, 25 bp, Artificial
  Probe
gactttggatttcattgatgtgctg

SEQ ID NO: 163693 - DNA, 25 bp, Artificial
  Probe
agactttggatttcattgatgtgct

SEQ ID NO: 163694 - DNA, 25 bp, Artificial
  Probe
gccaggagaagtccagtgaatatat

SEQ ID NO: 163695 - DNA, 25 bp, Artificial
  Probe
caagactttggatttcattgatgtg

SEQ ID NO: 163696 - DNA, 25 bp, Artificial
  Probe
ggctctcctggattctatacaacct

SEQ ID NO: 163697 - DNA, 25 bp, Artificial
  Probe
ctggattctatacaacctggcgaac

SEQ ID NO: 163698 - DNA, 25 bp, Artificial
  Probe
aagagaccagaatgaaacgcaaatt

SEQ ID NO: 163699 - DNA, 25 bp, Artificial
  Probe
catctgccttatcagtatctttgga

SEQ ID NO: 163700 - DNA, 25 bp, Artificial
  Probe
tcatctgccttatcagtatctttgg

SEQ ID NO: 163701 - DNA, 25 bp, Artificial
  Probe
tctcctggattctatacaacctggc

SEQ ID NO: 163702 - DNA, 25 bp, Artificial
  Probe
tcttattctcgcagcaaatccctta

SEQ ID NO: 163703 - DNA, 25 bp, Artificial
  Probe
tctgccttatcagtatctttggaat

SEQ ID NO: 163704 - DNA, 25 bp, Artificial
  Probe
atctgccttatcagtatctttggaa

SEQ ID NO: 163705 - DNA, 25 bp, Artificial
  Probe
caagagaccagaatgaaacgcaaat

SEQ ID NO: 163706 - DNA, 25 bp, Artificial
  Probe
gattctatacaacctggcgaacgac

SEQ ID NO: 163707 - DNA, 25 bp, Artificial
  Probe
tgccaggagaagtccagtgaatata

SEQ ID NO: 163708 - DNA, 25 bp, Artificial
  Probe
aactgtcacccataccagaatctta

SEQ ID NO: 163709 - DNA, 25 bp, Artificial
  Probe
ctgccttatcagtatctttggaatt

SEQ ID NO: 163710 - DNA, 25 bp, Artificial
  Probe
cccttattcagctccatttccatta

SEQ ID NO: 163711 - DNA, 25 bp, Artificial
  Probe
atcatctgccttatcagtatctttg

SEQ ID NO: 163712 - DNA, 25 bp, Artificial
  Probe
ctttggatttcattgatgtgctgct

SEQ ID NO: 163713 - DNA, 25 bp, Artificial
  Probe
ccttattcagctccatttccattat

SEQ ID NO: 163714 - DNA, 25 bp, Artificial
  Probe
tttggatttcattgatgtgctgctc

SEQ ID NO: 163715 - DNA, 25 bp, Artificial
  Probe
gacctttgacttcgtctaactgatc

SEQ ID NO: 163716 - DNA, 25 bp, Artificial
  Probe
actgtcacccataccagaatcttac

SEQ ID NO: 163717 - DNA, 25 bp, Artificial
  Probe
ggactattctctggacaataggaag

SEQ ID NO: 163718 - DNA, 25 bp, Artificial
  Probe
tggactattctctggacaataggaa

SEQ ID NO: 163719 - DNA, 25 bp, Artificial
  Probe
gactattctctggacaataggaagc

SEQ ID NO: 163720 - DNA, 25 bp, Artificial
  Probe
attctcgcagcaaatcccttattca

SEQ ID NO: 163721 - DNA, 25 bp, Artificial
  Probe
ctggactattctctggacaatagga

SEQ ID NO: 163722 - DNA, 25 bp, Artificial
  Probe
ttatatccgaagcacagatgttgac

SEQ ID NO: 163723 - DNA, 25 bp, Artificial
  Probe
actaagttgaaggagttgtcagaat

SEQ ID NO: 163724 - DNA, 25 bp, Artificial
  Probe
ctaagttgaaggagttgtcagaatt

SEQ ID NO: 163725 - DNA, 25 bp, Artificial
  Probe
tgaaggagttgtcagaattatctct

SEQ ID NO: 163726 - DNA, 25 bp, Artificial
  Probe
gttgaaggagttgtcagaattatct

SEQ ID NO: 163727 - DNA, 25 bp, Artificial
  Probe
agttgaaggagttgtcagaattatc

SEQ ID NO: 163728 - DNA, 25 bp, Artificial
  Probe
tatatccgaagcacagatgttgaca

SEQ ID NO: 163729 - DNA, 25 bp, Artificial
  Probe
gactaagttgaaggagttgtcagaa

SEQ ID NO: 163730 - DNA, 25 bp, Artificial
  Probe
ttgaaggagttgtcagaattatctc

SEQ ID NO: 163731 - DNA, 25 bp, Artificial
  Probe
aagttgaaggagttgtcagaattat

SEQ ID NO: 163732 - DNA, 25 bp, Artificial
  Probe
taagttgaaggagttgtcagaatta

SEQ ID NO: 163733 - DNA, 25 bp, Artificial
  Probe
ccacataatggaattgtaccaggat

SEQ ID NO: 163734 - DNA, 25 bp, Artificial
  Probe
ccatgactaagttgaaggagttgtc

SEQ ID NO: 163735 - DNA, 25 bp, Artificial
  Probe
tttacgaccctttatattgcgagag

SEQ ID NO: 163736 - DNA, 25 bp, Artificial
  Probe
ctttacgaccctttatattgcgaga

SEQ ID NO: 163737 - DNA, 25 bp, Artificial
  Probe
tttatatccgaagcacagatgttga

SEQ ID NO: 163738 - DNA, 25 bp, Artificial
  Probe
gtttatatccgaagcacagatgttg

SEQ ID NO: 163739 - DNA, 25 bp, Artificial
  Probe
tttgaaatctggagtaggctttacg

SEQ ID NO: 163740 - DNA, 25 bp, Artificial
  Probe
atatccgaagcacagatgttgacag

SEQ ID NO: 163741 - DNA, 25 bp, Artificial
  Probe
ttatattgcgagagtgttcacaatt

SEQ ID NO: 163742 - DNA, 25 bp, Artificial
  Probe
cctttatattgcgagagtgttcaca

SEQ ID NO: 163743 - DNA, 25 bp, Artificial
  Probe
aattcacaagcagaaagagaaatct

SEQ ID NO: 163744 - DNA, 25 bp, Artificial
  Probe
gaccctttatattgcgagagtgttc

SEQ ID NO: 163745 - DNA, 25 bp, Artificial
  Probe
ggtttatatccgaagcacagatgtt

SEQ ID NO: 163746 - DNA, 25 bp, Artificial
  Probe
ctttatattgcgagagtgttcacaa

SEQ ID NO: 163747 - DNA, 25 bp, Artificial
  Probe
tataaggagaagatacgggagattc

SEQ ID NO: 163748 - DNA, 25 bp, Artificial
  Probe
cacataatggaattgtaccaggata

SEQ ID NO: 163749 - DNA, 25 bp, Artificial
  Probe
ttacgaccctttatattgcgagagt

SEQ ID NO: 163750 - DNA, 25 bp, Artificial
  Probe
caggtttatatccgaagcacagatg

SEQ ID NO: 163751 - DNA, 25 bp, Artificial
  Probe
taatggaattgtaccaggataatgg

SEQ ID NO: 163752 - DNA, 25 bp, Artificial
  Probe
ttgaaatctggagtaggctttacga

SEQ ID NO: 163753 - DNA, 25 bp, Artificial
  Probe
ttcacaagcagaaagagaaatctag

SEQ ID NO: 163754 - DNA, 25 bp, Artificial
  Probe
tgaacaactcctataaacatgacca

SEQ ID NO: 163755 - DNA, 25 bp, Artificial
  Probe
gtcctggtcaatgaaattctcaaga

SEQ ID NO: 163756 - DNA, 25 bp, Artificial
  Probe
attcacaagcagaaagagaaatcta

SEQ ID NO: 163757 - DNA, 25 bp, Artificial
  Probe
agatacgggagattcttgaacaact

SEQ ID NO: 163758 - DNA, 25 bp, Artificial
  Probe
gaacaactcctataaacatgaccag

SEQ ID NO: 163759 - DNA, 25 bp, Artificial
  Probe
atataaggagaagatacgggagatt

SEQ ID NO: 163760 - DNA, 25 bp, Artificial
  Probe
ctgccacataatggaattgtaccag

SEQ ID NO: 163761 - DNA, 25 bp, Artificial
  Probe
ctggtcaatgaaattctcaagaaca

SEQ ID NO: 163762 - DNA, 25 bp, Artificial
  Probe
cctggtcaatgaaattctcaagaac

SEQ ID NO: 163763 - DNA, 25 bp, Artificial
  Probe
tcctggtcaatgaaattctcaagaa

SEQ ID NO: 163764 - DNA, 25 bp, Artificial
  Probe
ccctttatattgcgagagtgttcac

SEQ ID NO: 163765 - DNA, 25 bp, Artificial
  Probe
accctttatattgcgagagtgttca

SEQ ID NO: 163766 - DNA, 25 bp, Artificial
  Probe
ctctctctgaggatcggttgctata

SEQ ID NO: 163767 - DNA, 25 bp, Artificial
  Probe
tatgacattcttgaccagtaccgta

SEQ ID NO: 163768 - DNA, 25 bp, Artificial
  Probe
cttatgacattcttgaccagtaccg

SEQ ID NO: 163769 - DNA, 25 bp, Artificial
  Probe
atgacattcttgaccagtaccgtat

SEQ ID NO: 163770 - DNA, 25 bp, Artificial
  Probe
ttatgacattcttgaccagtaccgt

SEQ ID NO: 163771 - DNA, 25 bp, Artificial
  Probe
aagacctgtgtttactaagataccg

SEQ ID NO: 163772 - DNA, 25 bp, Artificial
  Probe
cccaagacctgtgtttactaagata

SEQ ID NO: 163773 - DNA, 25 bp, Artificial
  Probe
tgacattcttgaccagtaccgtatg

SEQ ID NO: 163774 - DNA, 25 bp, Artificial
  Probe
acattcccaatttgccctacttaat

SEQ ID NO: 163775 - DNA, 25 bp, Artificial
  Probe
caagacctgtgtttactaagatacc

SEQ ID NO: 163776 - DNA, 25 bp, Artificial
  Probe
ccaagacctgtgtttactaagatac

SEQ ID NO: 163777 - DNA, 25 bp, Artificial
  Probe
tcccaagacctgtgtttactaagat

SEQ ID NO: 163778 - DNA, 25 bp, Artificial
  Probe
aactatgaggagaagagatacgtca

SEQ ID NO: 163779 - DNA, 25 bp, Artificial
  Probe
gacattcccaatttgccctacttaa

SEQ ID NO: 163780 - DNA, 25 bp, Artificial
  Probe
acacagattcaaactatgaggagaa

SEQ ID NO: 163781 - DNA, 25 bp, Artificial
  Probe
ctcccaagacctgtgtttactaaga

SEQ ID NO: 163782 - DNA, 25 bp, Artificial
  Probe
tcaaactatgaggagaagagatacg

SEQ ID NO: 163783 - DNA, 25 bp, Artificial
  Probe
acagattcaaactatgaggagaaga

SEQ ID NO: 163784 - DNA, 25 bp, Artificial
  Probe
cacagattcaaactatgaggagaag

SEQ ID NO: 163785 - DNA, 25 bp, Artificial
  Probe
ttctcccaagacctgtgtttactaa

SEQ ID NO: 163786 - DNA, 25 bp, Artificial
  Probe
tttctcccaagacctgtgtttacta

SEQ ID NO: 163787 - DNA, 25 bp, Artificial
  Probe
tacttaattgatgggtcacacaagg

SEQ ID NO: 163788 - DNA, 25 bp, Artificial
  Probe
tacacagattcaaactatgaggaga

SEQ ID NO: 163789 - DNA, 25 bp, Artificial
  Probe
cattcccaatttgccctacttaatt

SEQ ID NO: 163790 - DNA, 25 bp, Artificial
  Probe
attcttgaccagtaccgtatgtttg

SEQ ID NO: 163791 - DNA, 25 bp, Artificial
  Probe
tctcccaagacctgtgtttactaag

SEQ ID NO: 163792 - DNA, 25 bp, Artificial
  Probe
agattcaaactatgaggagaagaga

SEQ ID NO: 163793 - DNA, 25 bp, Artificial
  Probe
cagattcaaactatgaggagaagag

SEQ ID NO: 163794 - DNA, 25 bp, Artificial
  Probe
gaagccagagttcttgaagtccatc

SEQ ID NO: 163795 - DNA, 25 bp, Artificial
  Probe
agacctgtgtttactaagataccgc

SEQ ID NO: 163796 - DNA, 25 bp, Artificial
  Probe
cattcttgaccagtaccgtatgttt

SEQ ID NO: 163797 - DNA, 25 bp, Artificial
  Probe
tggctgagtgagaaattcaatcttg

SEQ ID NO: 163798 - DNA, 25 bp, Artificial
  Probe
gtggctgagtgagaaattcaatctt

SEQ ID NO: 163799 - DNA, 25 bp, Artificial
  Probe
gacctgtgtttactaagataccgca

SEQ ID NO: 163800 - DNA, 25 bp, Artificial
  Probe
cttaattgatgggtcacacaaggtc

SEQ ID NO: 163801 - DNA, 25 bp, Artificial
  Probe
atacacagattcaaactatgaggag

SEQ ID NO: 163802 - DNA, 25 bp, Artificial
  Probe
ctgaagaagatctctgcttacatga

SEQ ID NO: 163803 - DNA, 25 bp, Artificial
  Probe
tgaagaagatctctgcttacatgaa

SEQ ID NO: 163804 - DNA, 25 bp, Artificial
  Probe
ttcttgaccagtaccgtatgtttga

SEQ ID NO: 163805 - DNA, 25 bp, Artificial
  Probe
aagaagatctctgcttacatgaaga

SEQ ID NO: 163806 - DNA, 25 bp, Artificial
  Probe
ctgtgtttactaagataccgcagtg

SEQ ID NO: 163807 - DNA, 25 bp, Artificial
  Probe
ctttctcccaagacctgtgtttact

SEQ ID NO: 163808 - DNA, 25 bp, Artificial
  Probe
gaagaagatctctgcttacatgaag

SEQ ID NO: 163809 - DNA, 25 bp, Artificial
  Probe
gattcaaactatgaggagaagagat

SEQ ID NO: 163810 - DNA, 25 bp, Artificial
  Probe
ggctgagtgagaaattcaatcttgg

SEQ ID NO: 163811 - DNA, 25 bp, Artificial
  Probe
cctgaagaagatctctgcttacatg

SEQ ID NO: 163812 - DNA, 25 bp, Artificial
  Probe
cttcagtcagatgatgagatggaac

SEQ ID NO: 163813 - DNA, 25 bp, Artificial
  Probe
ttcagtcagatgatgagatggaact

SEQ ID NO: 163814 - DNA, 25 bp, Artificial
  Probe
taccttcagtcagatgatgagatgg

SEQ ID NO: 163815 - DNA, 25 bp, Artificial
  Probe
gtaccttcagtcagatgatgagatg

SEQ ID NO: 163816 - DNA, 25 bp, Artificial
  Probe
tgtaccttcagtcagatgatgagat

SEQ ID NO: 163817 - DNA, 25 bp, Artificial
  Probe
atgtaccttcagtcagatgatgaga

SEQ ID NO: 163818 - DNA, 25 bp, Artificial
  Probe
ccttcagtcagatgatgagatggaa

SEQ ID NO: 163819 - DNA, 25 bp, Artificial
  Probe
catgtaccttcagtcagatgatgag

SEQ ID NO: 163820 - DNA, 25 bp, Artificial
  Probe
accttcagtcagatgatgagatgga

SEQ ID NO: 163821 - DNA, 25 bp, Artificial
  Probe
gatgatgagatggaactggaggaga

SEQ ID NO: 163822 - DNA, 25 bp, Artificial
  Probe
agatgatgagatggaactggaggag

SEQ ID NO: 163823 - DNA, 25 bp, Artificial
  Probe
gtcagatgatgagatggaactggag

SEQ ID NO: 163824 - DNA, 25 bp, Artificial
  Probe
atgatgagatggaactggaggagac

SEQ ID NO: 163825 - DNA, 25 bp, Artificial
  Probe
agtcagatgatgagatggaactgga

SEQ ID NO: 163826 - DNA, 25 bp, Artificial
  Probe
ttgcctactacaaattgaacgatgt

SEQ ID NO: 163827 - DNA, 25 bp, Artificial
  Probe
catgcagcagaacctggtatattac

SEQ ID NO: 163828 - DNA, 25 bp, Artificial
  Probe
tcatgcagcagaacctggtatatta

SEQ ID NO: 163829 - DNA, 25 bp, Artificial
  Probe
tgcctactacaaattgaacgatgtg

SEQ ID NO: 163830 - DNA, 25 bp, Artificial
  Probe
cagatgatgagatggaactggagga

SEQ ID NO: 163831 - DNA, 25 bp, Artificial
  Probe
tcagatgatgagatggaactggagg

SEQ ID NO: 163832 - DNA, 25 bp, Artificial
  Probe
ggagttgctagacttcacacacatg

SEQ ID NO: 163833 - DNA, 25 bp, Artificial
  Probe
gcctactacaaattgaacgatgtgc

SEQ ID NO: 163834 - DNA, 25 bp, Artificial
  Probe
tttgcctactacaaattgaacgatg

SEQ ID NO: 163835 - DNA, 25 bp, Artificial
  Probe
gtttgcctactacaaattgaacgat

SEQ ID NO: 163836 - DNA, 25 bp, Artificial
  Probe
gtcatgcagcagaacctggtatatt

SEQ ID NO: 163837 - DNA, 25 bp, Artificial
  Probe
agtttgcctactacaaattgaacga

SEQ ID NO: 163838 - DNA, 25 bp, Artificial
  Probe
cagtttgcctactacaaattgaacg

SEQ ID NO: 163839 - DNA, 25 bp, Artificial
  Probe
ggggcaggaactatttattaaaact

SEQ ID NO: 163840 - DNA, 25 bp, Artificial
  Probe
attaaaacttaaaatcggggttggg

SEQ ID NO: 163841 - DNA, 25 bp, Artificial
  Probe
acatgtaccttcagtcagatgatga

SEQ ID NO: 163842 - DNA, 25 bp, Artificial
  Probe
cacatgtaccttcagtcagatgatg

SEQ ID NO: 163843 - DNA, 25 bp, Artificial
  Probe
cctactacaaattgaacgatgtgca

SEQ ID NO: 163844 - DNA, 25 bp, Artificial
  Probe
ctagacttcacacacatgtaccttc

SEQ ID NO: 163845 - DNA, 25 bp, Artificial
  Probe
gaactggaggagacggaatcacttc

SEQ ID NO: 163846 - DNA, 25 bp, Artificial
  Probe
acacatgtaccttcagtcagatgat

SEQ ID NO: 163847 - DNA, 25 bp, Artificial
  Probe
taccacaaccagacctctgaacttc

SEQ ID NO: 163848 - DNA, 25 bp, Artificial
  Probe
ctaccacaaccagacctctgaactt

SEQ ID NO: 163849 - DNA, 25 bp, Artificial
  Probe
gcagtttgcctactacaaattgaac

SEQ ID NO: 163850 - DNA, 25 bp, Artificial
  Probe
tagacttcacacacatgtaccttca

SEQ ID NO: 163851 - DNA, 25 bp, Artificial
  Probe
cagaacctggtatattaccgcttcc

SEQ ID NO: 163852 - DNA, 25 bp, Artificial
  Probe
ttaaaacttaaaatcggggttgggg

SEQ ID NO: 163853 - DNA, 25 bp, Artificial
  Probe
gttgctagacttcacacacatgtac

SEQ ID NO: 163854 - DNA, 25 bp, Artificial
  Probe
agttgctagacttcacacacatgta

SEQ ID NO: 163855 - DNA, 25 bp, Artificial
  Probe
gaacctggtatattaccgcttccac

SEQ ID NO: 163856 - DNA, 25 bp, Artificial
  Probe
agaacctggtatattaccgcttcca

SEQ ID NO: 163857 - DNA, 25 bp, Artificial
  Probe
gaggtagatgaagaagaggaagaag

SEQ ID NO: 163858 - DNA, 25 bp, Artificial
  Probe
agaagaagactgatgaggatgacta

SEQ ID NO: 163859 - DNA, 25 bp, Artificial
  Probe
atgaggtagatgaagaagaggaaga

SEQ ID NO: 163860 - DNA, 25 bp, Artificial
  Probe
caatgaggtagatgaagaagaggaa

SEQ ID NO: 163861 - DNA, 25 bp, Artificial
  Probe
tgacaatgaggtagatgaagaagag

SEQ ID NO: 163862 - DNA, 25 bp, Artificial
  Probe
ctgacaatgaggtagatgaagaaga

SEQ ID NO: 163863 - DNA, 25 bp, Artificial
  Probe
gtagatgaagaagaggaagaaggtg

SEQ ID NO: 163864 - DNA, 25 bp, Artificial
  Probe
tgaggtagatgaagaagaggaagaa

SEQ ID NO: 163865 - DNA, 25 bp, Artificial
  Probe
gacaatgaggtagatgaagaagagg

SEQ ID NO: 163866 - DNA, 25 bp, Artificial
  Probe
aatgaggtagatgaagaagaggaag

SEQ ID NO: 163867 - DNA, 25 bp, Artificial
  Probe
acaatgaggtagatgaagaagagga

SEQ ID NO: 163868 - DNA, 25 bp, Artificial
  Probe
aggtagatgaagaagaggaagaagg

SEQ ID NO: 163869 - DNA, 25 bp, Artificial
  Probe
tagatgaagaagaggaagaaggtgg

SEQ ID NO: 163870 - DNA, 25 bp, Artificial
  Probe
ggtagatgaagaagaggaagaaggt

SEQ ID NO: 163871 - DNA, 25 bp, Artificial
  Probe
gctgacaatgaggtagatgaagaag

SEQ ID NO: 163872 - DNA, 25 bp, Artificial
  Probe
gaagaagactgatgaggatgactag

SEQ ID NO: 163873 - DNA, 25 bp, Artificial
  Probe
aagaagactgatgaggatgactaga

SEQ ID NO: 163874 - DNA, 25 bp, Artificial
  Probe
agaagactgatgaggatgactagac

SEQ ID NO: 163875 - DNA, 25 bp, Artificial
  Probe
gaagactgatgaggatgactagaca

SEQ ID NO: 163876 - DNA, 25 bp, Artificial
  Probe
cttgaaggagaagaaggaagttgtg

SEQ ID NO: 163877 - DNA, 25 bp, Artificial
  Probe
aaggacttgaaggagaagaaggaag

SEQ ID NO: 163878 - DNA, 25 bp, Artificial
  Probe
ggctgacaatgaggtagatgaagaa

SEQ ID NO: 163879 - DNA, 25 bp, Artificial
  Probe
aagactgatgaggatgactagacag

SEQ ID NO: 163880 - DNA, 25 bp, Artificial
  Probe
caagaagcagaagaagactgatgag

SEQ ID NO: 163881 - DNA, 25 bp, Artificial
  Probe
cagaagaagactgatgaggatgact

SEQ ID NO: 163882 - DNA, 25 bp, Artificial
  Probe
ttgaaggagaagaaggaagttgtgg

SEQ ID NO: 163883 - DNA, 25 bp, Artificial
  Probe
gaggctgacaatgaggtagatgaag

SEQ ID NO: 163884 - DNA, 25 bp, Artificial
  Probe
gaaggagaagaaggaagttgtggag

SEQ ID NO: 163885 - DNA, 25 bp, Artificial
  Probe
gaagcagaagaagactgatgaggat

SEQ ID NO: 163886 - DNA, 25 bp, Artificial
  Probe
aggctgacaatgaggtagatgaaga

SEQ ID NO: 163887 - DNA, 25 bp, Artificial
  Probe
aagaagcagaagaagactgatgagg

SEQ ID NO: 163888 - DNA, 25 bp, Artificial
  Probe
caaggacttgaaggagaagaaggaa

SEQ ID NO: 163889 - DNA, 25 bp, Artificial
  Probe
aagcagaagaagactgatgaggatg

SEQ ID NO: 163890 - DNA, 25 bp, Artificial
  Probe
tgaaggagaagaaggaagttgtgga

SEQ ID NO: 163891 - DNA, 25 bp, Artificial
  Probe
gtagctgaggatgatgaggatgatg

SEQ ID NO: 163892 - DNA, 25 bp, Artificial
  Probe
tagctgaggatgatgaggatgatga

SEQ ID NO: 163893 - DNA, 25 bp, Artificial
  Probe
gcagaagaagactgatgaggatgac

SEQ ID NO: 163894 - DNA, 25 bp, Artificial
  Probe
agaagcagaagaagactgatgagga

SEQ ID NO: 163895 - DNA, 25 bp, Artificial
  Probe
caccaaggacttgaaggagaagaag

SEQ ID NO: 163896 - DNA, 25 bp, Artificial
  Probe
agcagaagaagactgatgaggatga

SEQ ID NO: 163897 - DNA, 25 bp, Artificial
  Probe
actgatgaggatgactagacagcaa

SEQ ID NO: 163898 - DNA, 25 bp, Artificial
  Probe
gacttgaaggagaagaaggaagttg

SEQ ID NO: 163899 - DNA, 25 bp, Artificial
  Probe
agctgaggatgatgaggatgatgat

SEQ ID NO: 163900 - DNA, 25 bp, Artificial
  Probe
ggaggctgacaatgaggtagatgaa

SEQ ID NO: 163901 - DNA, 25 bp, Artificial
  Probe
aaggagaagaaggaagttgtggagg

SEQ ID NO: 163902 - DNA, 25 bp, Artificial
  Probe
acaatgtaaggaaggacaatcaaga

SEQ ID NO: 163903 - DNA, 25 bp, Artificial
  Probe
cacaatgtaaggaaggacaatcaag

SEQ ID NO: 163904 - DNA, 25 bp, Artificial
  Probe
atgtaaggaaggacaatcaagatgg

SEQ ID NO: 163905 - DNA, 25 bp, Artificial
  Probe
aatgtaaggaaggacaatcaagatg

SEQ ID NO: 163906 - DNA, 25 bp, Artificial
  Probe
caatgtaaggaaggacaatcaagat

SEQ ID NO: 163907 - DNA, 25 bp, Artificial
  Probe
ctggactcaaggtactaagtattgc

SEQ ID NO: 163908 - DNA, 25 bp, Artificial
  Probe
gaaggacaatcaagatggctcaatg

SEQ ID NO: 163909 - DNA, 25 bp, Artificial
  Probe
ccacaatgtaaggaaggacaatcaa

SEQ ID NO: 163910 - DNA, 25 bp, Artificial
  Probe
taaggaaggacaatcaagatggctc

SEQ ID NO: 163911 - DNA, 25 bp, Artificial
  Probe
taatccacaatgtaaggaaggacaa

SEQ ID NO: 163912 - DNA, 25 bp, Artificial
  Probe
ttaatccacaatgtaaggaaggaca

SEQ ID NO: 163913 - DNA, 25 bp, Artificial
  Probe
aatccacaatgtaaggaaggacaat

SEQ ID NO: 163914 - DNA, 25 bp, Artificial
  Probe
cttaatccacaatgtaaggaaggac

SEQ ID NO: 163915 - DNA, 25 bp, Artificial
  Probe
tcttaatccacaatgtaaggaagga

SEQ ID NO: 163916 - DNA, 25 bp, Artificial
  Probe
gtaaggaaggacaatcaagatggct

SEQ ID NO: 163917 - DNA, 25 bp, Artificial
  Probe
atccacaatgtaaggaaggacaatc

SEQ ID NO: 163918 - DNA, 25 bp, Artificial
  Probe
cctggactcaaggtactaagtattg

SEQ ID NO: 163919 - DNA, 25 bp, Artificial
  Probe
tcctactcagattctattcggaacc

SEQ ID NO: 163920 - DNA, 25 bp, Artificial
  Probe
ggttcctactcagattctattcgga

SEQ ID NO: 163921 - DNA, 25 bp, Artificial
  Probe
atctcagttacaacaggctggatag

SEQ ID NO: 163922 - DNA, 25 bp, Artificial
  Probe
tggactcaaggtactaagtattgcc

SEQ ID NO: 163923 - DNA, 25 bp, Artificial
  Probe
gctaaactcgctcaatctatctttc

SEQ ID NO: 163924 - DNA, 25 bp, Artificial
  Probe
aaactcgctcaatctatctttcact

SEQ ID NO: 163925 - DNA, 25 bp, Artificial
  Probe
atcttaatccacaatgtaaggaagg

SEQ ID NO: 163926 - DNA, 25 bp, Artificial
  Probe
aactcgctcaatctatctttcactg

SEQ ID NO: 163927 - DNA, 25 bp, Artificial
  Probe
gcctggactcaaggtactaagtatt

SEQ ID NO: 163928 - DNA, 25 bp, Artificial
  Probe
taaactcgctcaatctatctttcac

SEQ ID NO: 163929 - DNA, 25 bp, Artificial
  Probe
ggaaggacaatcaagatggctcaat

SEQ ID NO: 163930 - DNA, 25 bp, Artificial
  Probe
tccatcggtgctcacaaataaatat

SEQ ID NO: 163931 - DNA, 25 bp, Artificial
  Probe
tccacaatgtaaggaaggacaatca

SEQ ID NO: 163932 - DNA, 25 bp, Artificial
  Probe
gatctcagttacaacaggctggata

SEQ ID NO: 163933 - DNA, 25 bp, Artificial
  Probe
ccatcggtgctcacaaataaatata

SEQ ID NO: 163934 - DNA, 25 bp, Artificial
  Probe
cgtataactctggcgtagtcatagc

SEQ ID NO: 163935 - DNA, 25 bp, Artificial
  Probe
gcgtataactctggcgtagtcatag

SEQ ID NO: 163936 - DNA, 25 bp, Artificial
  Probe
ctaaactcgctcaatctatctttca

SEQ ID NO: 163937 - DNA, 25 bp, Artificial
  Probe
ctactcagattctattcggaaccct

SEQ ID NO: 163938 - DNA, 25 bp, Artificial
  Probe
caatcaagatggctcaatgggtaaa

SEQ ID NO: 163939 - DNA, 25 bp, Artificial
  Probe
ctggtcaacaaatcctctgctttaa

SEQ ID NO: 163940 - DNA, 25 bp, Artificial
  Probe
ttagcgtgcttgatctcagttacaa

SEQ ID NO: 163941 - DNA, 25 bp, Artificial
  Probe
gtccatcggtgctcacaaataaata

SEQ ID NO: 163942 - DNA, 25 bp, Artificial
  Probe
tgtaaggaaggacaatcaagatggc

SEQ ID NO: 163943 - DNA, 25 bp, Artificial
  Probe
aaggacaatcaagatggctcaatgg

SEQ ID NO: 163944 - DNA, 25 bp, Artificial
  Probe
cttagcgtgcttgatctcagttaca

SEQ ID NO: 163945 - DNA, 25 bp, Artificial
  Probe
agcctggactcaaggtactaagtat

SEQ ID NO: 163946 - DNA, 25 bp, Artificial
  Probe
gggttcctactcagattctattcgg

SEQ ID NO: 163947 - DNA, 25 bp, Artificial
  Probe
ctctctccagacagacaatacataa

SEQ ID NO: 163948 - DNA, 25 bp, Artificial
  Probe
cctctctccagacagacaatacata

SEQ ID NO: 163949 - DNA, 25 bp, Artificial
  Probe
aatacaggctccatagaattgcttc

SEQ ID NO: 163950 - DNA, 25 bp, Artificial
  Probe
ggtctcactcaagaatctcaatgaa

SEQ ID NO: 163951 - DNA, 25 bp, Artificial
  Probe
caggtctcactcaagaatctcaatg

SEQ ID NO: 163952 - DNA, 25 bp, Artificial
  Probe
gtctcactcaagaatctcaatgaat

SEQ ID NO: 163953 - DNA, 25 bp, Artificial
  Probe
aggtctcactcaagaatctcaatga

SEQ ID NO: 163954 - DNA, 25 bp, Artificial
  Probe
catcctctctccagacagacaatac

SEQ ID NO: 163955 - DNA, 25 bp, Artificial
  Probe
tcatcctctctccagacagacaata

SEQ ID NO: 163956 - DNA, 25 bp, Artificial
  Probe
ccaggtctcactcaagaatctcaat

SEQ ID NO: 163957 - DNA, 25 bp, Artificial
  Probe
tcctctctccagacagacaatacat

SEQ ID NO: 163958 - DNA, 25 bp, Artificial
  Probe
atcctctctccagacagacaataca

SEQ ID NO: 163959 - DNA, 25 bp, Artificial
  Probe
cctcctggattatattatggactca

SEQ ID NO: 163960 - DNA, 25 bp, Artificial
  Probe
atacaggctccatagaattgcttcc

SEQ ID NO: 163961 - DNA, 25 bp, Artificial
  Probe
ttgtaccaggtctcactcaagaatc

SEQ ID NO: 163962 - DNA, 25 bp, Artificial
  Probe
agtgtaaatctaaacggctaaggaa

SEQ ID NO: 163963 - DNA, 25 bp, Artificial
  Probe
gtaccaggtctcactcaagaatctc

SEQ ID NO: 163964 - DNA, 25 bp, Artificial
  Probe
tcctccatgcggcaacattatatat

SEQ ID NO: 163965 - DNA, 25 bp, Artificial
  Probe
atcctccatgcggcaacattatata

SEQ ID NO: 163966 - DNA, 25 bp, Artificial
  Probe
tatcctccatgcggcaacattatat

SEQ ID NO: 163967 - DNA, 25 bp, Artificial
  Probe
taccaggtctcactcaagaatctca

SEQ ID NO: 163968 - DNA, 25 bp, Artificial
  Probe
atacataaaggatagagaggcagtg

SEQ ID NO: 163969 - DNA, 25 bp, Artificial
  Probe
gtgtaaatctaaacggctaaggaaa

SEQ ID NO: 163970 - DNA, 25 bp, Artificial
  Probe
cagtgtaaatctaaacggctaagga

SEQ ID NO: 163971 - DNA, 25 bp, Artificial
  Probe
tcagtgtaaatctaaacggctaagg

SEQ ID NO: 163972 - DNA, 25 bp, Artificial
  Probe
tctcactcaagaatctcaatgaata

SEQ ID NO: 163973 - DNA, 25 bp, Artificial
  Probe
taaatacaggctccatagaattgct

SEQ ID NO: 163974 - DNA, 25 bp, Artificial
  Probe
gtaaatacaggctccatagaattgc

SEQ ID NO: 163975 - DNA, 25 bp, Artificial
  Probe
ttcagtgtaaatctaaacggctaag

SEQ ID NO: 163976 - DNA, 25 bp, Artificial
  Probe
ggaatgttggctgaatgtttgttaa

SEQ ID NO: 163977 - DNA, 25 bp, Artificial
  Probe
aaatacaggctccatagaattgctt

SEQ ID NO: 163978 - DNA, 25 bp, Artificial
  Probe
acaatacataaaggatagagaggca

SEQ ID NO: 163979 - DNA, 25 bp, Artificial
  Probe
ttatcctccatgcggcaacattata

SEQ ID NO: 163980 - DNA, 25 bp, Artificial
  Probe
tacataaaggatagagaggcagtgg

SEQ ID NO: 163981 - DNA, 25 bp, Artificial
  Probe
cctccatgcggcaacattatatata

SEQ ID NO: 163982 - DNA, 25 bp, Artificial
  Probe
tctccagacagacaatacataaagg

SEQ ID NO: 163983 - DNA, 25 bp, Artificial
  Probe
aaattcagtgtaaatctaaacggct

SEQ ID NO: 163984 - DNA, 25 bp, Artificial
  Probe
aatacataaaggatagagaggcagt

SEQ ID NO: 163985 - DNA, 25 bp, Artificial
  Probe
gaaattcagtgtaaatctaaacggc

SEQ ID NO: 163986 - DNA, 25 bp, Artificial
  Probe
caatacataaaggatagagaggcag

SEQ ID NO: 163987 - DNA, 25 bp, Artificial
  Probe
gacaatacataaaggatagagaggc

SEQ ID NO: 163988 - DNA, 25 bp, Artificial
  Probe
attcagtgtaaatctaaacggctaa

SEQ ID NO: 163989 - DNA, 25 bp, Artificial
  Probe
tgtaccaggtctcactcaagaatct

SEQ ID NO: 163990 - DNA, 25 bp, Artificial
  Probe
tctctccagacagacaatacataaa

SEQ ID NO: 163991 - DNA, 25 bp, Artificial
  Probe
ctccatgcggcaacattatatatat

SEQ ID NO: 163992 - DNA, 25 bp, Artificial
  Probe
gtgagatgacaggatatgtggtaac

SEQ ID NO: 163993 - DNA, 25 bp, Artificial
  Probe
agtgagatgacaggatatgtggtaa

SEQ ID NO: 163994 - DNA, 25 bp, Artificial
  Probe
atcttgaattggatgcgttacacac

SEQ ID NO: 163995 - DNA, 25 bp, Artificial
  Probe
cagtgagatgacaggatatgtggta

SEQ ID NO: 163996 - DNA, 25 bp, Artificial
  Probe
tgagatgacaggatatgtggtaacc

SEQ ID NO: 163997 - DNA, 25 bp, Artificial
  Probe
tggatgacttcacagacttctacct

SEQ ID NO: 163998 - DNA, 25 bp, Artificial
  Probe
cccagaaatatgatgactcctttga

SEQ ID NO: 163999 - DNA, 25 bp, Artificial
  Probe
aaatatgatgactcctttgatgacg

SEQ ID NO: 164000 - DNA, 25 bp, Artificial
  Probe
gactgtgagctgaagatcctagatt

SEQ ID NO: 164001 - DNA, 25 bp, Artificial
  Probe
cttgaattggatgcgttacacacag

SEQ ID NO: 164002 - DNA, 25 bp, Artificial
  Probe
gacagtgagatgacaggatatgtgg

SEQ ID NO: 164003 - DNA, 25 bp, Artificial
  Probe
ggacagtgagatgacaggatatgtg

SEQ ID NO: 164004 - DNA, 25 bp, Artificial
  Probe
gatgacttcacagacttctacctgg

SEQ ID NO: 164005 - DNA, 25 bp, Artificial
  Probe
ggatgacttcacagacttctacctg

SEQ ID NO: 164006 - DNA, 25 bp, Artificial
  Probe
ctggatgacttcacagacttctacc

SEQ ID NO: 164007 - DNA, 25 bp, Artificial
  Probe
aatccagtttcttgtgtatcagatg

SEQ ID NO: 164008 - DNA, 25 bp, Artificial
  Probe
ccagaaatatgatgactcctttgat

SEQ ID NO: 164009 - DNA, 25 bp, Artificial
  Probe
gatgagactctggatgacttcacag

SEQ ID NO: 164010 - DNA, 25 bp, Artificial
  Probe
atccagtttcttgtgtatcagatgc

SEQ ID NO: 164011 - DNA, 25 bp, Artificial
  Probe
gaatccagtttcttgtgtatcagat

SEQ ID NO: 164012 - DNA, 25 bp, Artificial
  Probe
gcccagaaatatgatgactcctttg

SEQ ID NO: 164013 - DNA, 25 bp, Artificial
  Probe
ttgaattggatgcgttacacacaga

SEQ ID NO: 164014 - DNA, 25 bp, Artificial
  Probe
tcttgaattggatgcgttacacaca

SEQ ID NO: 164015 - DNA, 25 bp, Artificial
  Probe
acagtgagatgacaggatatgtggt

SEQ ID NO: 164016 - DNA, 25 bp, Artificial
  Probe
atgacttcacagacttctacctggt

SEQ ID NO: 164017 - DNA, 25 bp, Artificial
  Probe
tccagtttcttgtgtatcagatgct

SEQ ID NO: 164018 - DNA, 25 bp, Artificial
  Probe
gaaatatgatgactcctttgatgac

SEQ ID NO: 164019 - DNA, 25 bp, Artificial
  Probe
cagaaatatgatgactcctttgatg

SEQ ID NO: 164020 - DNA, 25 bp, Artificial
  Probe
caccagaggtcatcttgaattggat

SEQ ID NO: 164021 - DNA, 25 bp, Artificial
  Probe
agaaatatgatgactcctttgatga

SEQ ID NO: 164022 - DNA, 25 bp, Artificial
  Probe
ctgagtgaagacagaatccagtttc

SEQ ID NO: 164023 - DNA, 25 bp, Artificial
  Probe
tggcagagatgattactggaaagat

SEQ ID NO: 164024 - DNA, 25 bp, Artificial
  Probe
atggcagagatgattactggaaaga

SEQ ID NO: 164025 - DNA, 25 bp, Artificial
  Probe
ggcagagatgattactggaaagatc

SEQ ID NO: 164026 - DNA, 25 bp, Artificial
  Probe
tgattactggaaagatcctgttcaa

SEQ ID NO: 164027 - DNA, 25 bp, Artificial
  Probe
gagatgattactggaaagatcctgt

SEQ ID NO: 164028 - DNA, 25 bp, Artificial
  Probe
atgattactggaaagatcctgttca

SEQ ID NO: 164029 - DNA, 25 bp, Artificial
  Probe
agagatgattactggaaagatcctg

SEQ ID NO: 164030 - DNA, 25 bp, Artificial
  Probe
cagagatgattactggaaagatcct

SEQ ID NO: 164031 - DNA, 25 bp, Artificial
  Probe
aattggatgcgttacacacagacag

SEQ ID NO: 164032 - DNA, 25 bp, Artificial
  Probe
gaattggatgcgttacacacagaca

SEQ ID NO: 164033 - DNA, 25 bp, Artificial
  Probe
tgaattggatgcgttacacacagac

SEQ ID NO: 164034 - DNA, 25 bp, Artificial
  Probe
actgtgagctgaagatcctagattt

SEQ ID NO: 164035 - DNA, 25 bp, Artificial
  Probe
tatgatgactcctttgatgacgtag

SEQ ID NO: 164036 - DNA, 25 bp, Artificial
  Probe
aatatgatgactcctttgatgacgt

SEQ ID NO: 164037 - DNA, 25 bp, Artificial
  Probe
ctcatactcaagacactggactaag

SEQ ID NO: 164038 - DNA, 25 bp, Artificial
  Probe
cctcatactcaagacactggactaa

SEQ ID NO: 164039 - DNA, 25 bp, Artificial
  Probe
tcatactcaagacactggactaagt

SEQ ID NO: 164040 - DNA, 25 bp, Artificial
  Probe
atctacgatgctattctcaatcatt

SEQ ID NO: 164041 - DNA, 25 bp, Artificial
  Probe
atatctacgatgctattctcaatca

SEQ ID NO: 164042 - DNA, 25 bp, Artificial
  Probe
tatctacgatgctattctcaatcat

SEQ ID NO: 164043 - DNA, 25 bp, Artificial
  Probe
acagaatgggttattatctttgcct

SEQ ID NO: 164044 - DNA, 25 bp, Artificial
  Probe
cacagaatgggttattatctttgcc

SEQ ID NO: 164045 - DNA, 25 bp, Artificial
  Probe
tcctcatactcaagacactggacta

SEQ ID NO: 164046 - DNA, 25 bp, Artificial
  Probe
gtcactcctcatactcaagacactg

SEQ ID NO: 164047 - DNA, 25 bp, Artificial
  Probe
tcactcctcatactcaagacactgg

SEQ ID NO: 164048 - DNA, 25 bp, Artificial
  Probe
gatcgtcactcctcatactcaagac

SEQ ID NO: 164049 - DNA, 25 bp, Artificial
  Probe
cagaatgggttattatctttgccta

SEQ ID NO: 164050 - DNA, 25 bp, Artificial
  Probe
atcgtcactcctcatactcaagaca

SEQ ID NO: 164051 - DNA, 25 bp, Artificial
  Probe
tctacgatgctattctcaatcattt

SEQ ID NO: 164052 - DNA, 25 bp, Artificial
  Probe
aatatctacgatgctattctcaatc

SEQ ID NO: 164053 - DNA, 25 bp, Artificial
  Probe
agaatgggttattatctttgcctaa

SEQ ID NO: 164054 - DNA, 25 bp, Artificial
  Probe
ccaagagcaaagatagaggaggttc

SEQ ID NO: 164055 - DNA, 25 bp, Artificial
  Probe
gtgaccaagagcaaagatagaggag

SEQ ID NO: 164056 - DNA, 25 bp, Artificial
  Probe
ccacagaatgggttattatctttgc

SEQ ID NO: 164057 - DNA, 25 bp, Artificial
  Probe
ctcctcatactcaagacactggact

SEQ ID NO: 164058 - DNA, 25 bp, Artificial
  Probe
gaatgggttattatctttgcctaaa

SEQ ID NO: 164059 - DNA, 25 bp, Artificial
  Probe
actcctcatactcaagacactggac

SEQ ID NO: 164060 - DNA, 25 bp, Artificial
  Probe
cactcctcatactcaagacactgga

SEQ ID NO: 164061 - DNA, 25 bp, Artificial
  Probe
cgtcactcctcatactcaagacact

SEQ ID NO: 164062 - DNA, 25 bp, Artificial
  Probe
tcgtcactcctcatactcaagacac

SEQ ID NO: 164063 - DNA, 25 bp, Artificial
  Probe
ctgagtaccgtgtgaggaaattctt

SEQ ID NO: 164064 - DNA, 25 bp, Artificial
  Probe
cttccgagatgtcctatgttcctgg

SEQ ID NO: 164065 - DNA, 25 bp, Artificial
  Probe
ggatcgtcactcctcatactcaaga

SEQ ID NO: 164066 - DNA, 25 bp, Artificial
  Probe
tgagtaccgtgtgaggaaattcttg

SEQ ID NO: 164067 - DNA, 25 bp, Artificial
  Probe
ctaccatgctggctaagatgattcc

SEQ ID NO: 164068 - DNA, 25 bp, Artificial
  Probe
cctaccatgctggctaagatgattc

SEQ ID NO: 164069 - DNA, 25 bp, Artificial
  Probe
aagatagaggaggttccaagggatt

SEQ ID NO: 164070 - DNA, 25 bp, Artificial
  Probe
aaagatagaggaggttccaagggat

SEQ ID NO: 164071 - DNA, 25 bp, Artificial
  Probe
tgaccaagagcaaagatagaggagg

SEQ ID NO: 164072 - DNA, 25 bp, Artificial
  Probe
acgatgctattctcaatcattttca

SEQ ID NO: 164073 - DNA, 25 bp, Artificial
  Probe
gagcaaagatagaggaggttccaag

SEQ ID NO: 164074 - DNA, 25 bp, Artificial
  Probe
caagagcaaagatagaggaggttcc

SEQ ID NO: 164075 - DNA, 25 bp, Artificial
  Probe
tttacaacagtgaccaagggaaacg

SEQ ID NO: 164076 - DNA, 25 bp, Artificial
  Probe
gagtaccgtgtgaggaaattcttgg

SEQ ID NO: 164077 - DNA, 25 bp, Artificial
  Probe
cgatgctattctcaatcattttcag

SEQ ID NO: 164078 - DNA, 25 bp, Artificial
  Probe
agatagaggaggttccaagggattc

SEQ ID NO: 164079 - DNA, 25 bp, Artificial
  Probe
ttaatatctacgatgctattctcaa

SEQ ID NO: 164080 - DNA, 25 bp, Artificial
  Probe
agagcaaagatagaggaggttccaa

SEQ ID NO: 164081 - DNA, 25 bp, Artificial
  Probe
aagagcaaagatagaggaggttcca

SEQ ID NO: 164082 - DNA, 25 bp, Artificial
  Probe
tactatcatcttatgctgctggaag

SEQ ID NO: 164083 - DNA, 25 bp, Artificial
  Probe
ttactatcatcttatgctgctggaa

SEQ ID NO: 164084 - DNA, 25 bp, Artificial
  Probe
attactatcatcttatgctgctgga

SEQ ID NO: 164085 - DNA, 25 bp, Artificial
  Probe
aattactatcatcttatgctgctgg

SEQ ID NO: 164086 - DNA, 25 bp, Artificial
  Probe
aaattactatcatcttatgctgctg

SEQ ID NO: 164087 - DNA, 25 bp, Artificial
  Probe
caaattactatcatcttatgctgct

SEQ ID NO: 164088 - DNA, 25 bp, Artificial
  Probe
tcaaattactatcatcttatgctgc

SEQ ID NO: 164089 - DNA, 25 bp, Artificial
  Probe
actatcatcttatgctgctggaagc

SEQ ID NO: 164090 - DNA, 25 bp, Artificial
  Probe
ttttactgctgtgggattttctttc

SEQ ID NO: 164091 - DNA, 25 bp, Artificial
  Probe
cttttactgctgtgggattttcttt

SEQ ID NO: 164092 - DNA, 25 bp, Artificial
  Probe
aagtcagcaaaaccagaaatcaaat

SEQ ID NO: 164093 - DNA, 25 bp, Artificial
  Probe
gaagtcagcaaaaccagaaatcaaa

SEQ ID NO: 164094 - DNA, 25 bp, Artificial
  Probe
tttactgctgtgggattttctttct

SEQ ID NO: 164095 - DNA, 25 bp, Artificial
  Probe
tcttttactgctgtgggattttctt

SEQ ID NO: 164096 - DNA, 25 bp, Artificial
  Probe
agtcagcaaaaccagaaatcaaatt

SEQ ID NO: 164097 - DNA, 25 bp, Artificial
  Probe
ctatcatcttatgctgctggaagct

SEQ ID NO: 164098 - DNA, 25 bp, Artificial
  Probe
ttactgctgtgggattttctttctg

SEQ ID NO: 164099 - DNA, 25 bp, Artificial
  Probe
gtcttttactgctgtgggattttct

SEQ ID NO: 164100 - DNA, 25 bp, Artificial
  Probe
cagcaaaaccagaaatcaaattact

SEQ ID NO: 164101 - DNA, 25 bp, Artificial
  Probe
tcagcaaaaccagaaatcaaattac

SEQ ID NO: 164102 - DNA, 25 bp, Artificial
  Probe
gtcagcaaaaccagaaatcaaatta

SEQ ID NO: 164103 - DNA, 25 bp, Artificial
  Probe
tgtcttttactgctgtgggattttc

SEQ ID NO: 164104 - DNA, 25 bp, Artificial
  Probe
ctgtcttttactgctgtgggatttt

SEQ ID NO: 164105 - DNA, 25 bp, Artificial
  Probe
gctgtgggattttctttctgcttaa

SEQ ID NO: 164106 - DNA, 25 bp, Artificial
  Probe
tgaagtcagcaaaaccagaaatcaa

SEQ ID NO: 164107 - DNA, 25 bp, Artificial
  Probe
ttgaagtcagcaaaaccagaaatca

SEQ ID NO: 164108 - DNA, 25 bp, Artificial
  Probe
accagaaatcaaattactatcatct

SEQ ID NO: 164109 - DNA, 25 bp, Artificial
  Probe
cttaaagagaggggattccacactg

SEQ ID NO: 164110 - DNA, 25 bp, Artificial
  Probe
agcaaaaccagaaatcaaattacta

SEQ ID NO: 164111 - DNA, 25 bp, Artificial
  Probe
tgctgtgggattttctttctgctta

SEQ ID NO: 164112 - DNA, 25 bp, Artificial
  Probe
aaccagaaatcaaattactatcatc

SEQ ID NO: 164113 - DNA, 25 bp, Artificial
  Probe
atcatcttatgctgctggaagctta

SEQ ID NO: 164114 - DNA, 25 bp, Artificial
  Probe
tatcatcttatgctgctggaagctt

SEQ ID NO: 164115 - DNA, 25 bp, Artificial
  Probe
tttgaagtcagcaaaaccagaaatc

SEQ ID NO: 164116 - DNA, 25 bp, Artificial
  Probe
tactgctgtgggattttctttctgc

SEQ ID NO: 164117 - DNA, 25 bp, Artificial
  Probe
gcaaaaccagaaatcaaattactat

SEQ ID NO: 164118 - DNA, 25 bp, Artificial
  Probe
tcatcttatgctgctggaagcttaa

SEQ ID NO: 164119 - DNA, 25 bp, Artificial
  Probe
gctgtcttttactgctgtgggattt

SEQ ID NO: 164120 - DNA, 25 bp, Artificial
  Probe
ccagaaatcaaattactatcatctt

SEQ ID NO: 164121 - DNA, 25 bp, Artificial
  Probe
atcaaattactatcatcttatgctg

SEQ ID NO: 164122 - DNA, 25 bp, Artificial
  Probe
ctgctgtgggattttctttctgctt

SEQ ID NO: 164123 - DNA, 25 bp, Artificial
  Probe
taagttcctgggctgctgtctttta

SEQ ID NO: 164124 - DNA, 25 bp, Artificial
  Probe
gcttaaagagaggggattccacact

SEQ ID NO: 164125 - DNA, 25 bp, Artificial
  Probe
gacaacgaatgtaagttcctgggct

SEQ ID NO: 164126 - DNA, 25 bp, Artificial
  Probe
atcttatgctgctggaagcttaaag

SEQ ID NO: 164127 - DNA, 25 bp, Artificial
  Probe
catctctactgttctgttagcatca

SEQ ID NO: 164128 - DNA, 25 bp, Artificial
  Probe
gcatctctactgttctgttagcatc

SEQ ID NO: 164129 - DNA, 25 bp, Artificial
  Probe
gaagtatccaattatgtgacaacct

SEQ ID NO: 164130 - DNA, 25 bp, Artificial
  Probe
agaagtatccaattatgtgacaacc

SEQ ID NO: 164131 - DNA, 25 bp, Artificial
  Probe
gttcctcaccaataacttcagagaa

SEQ ID NO: 164132 - DNA, 25 bp, Artificial
  Probe
aagtatccaattatgtgacaacctt

SEQ ID NO: 164133 - DNA, 25 bp, Artificial
  Probe
atctctactgttctgttagcatcag

SEQ ID NO: 164134 - DNA, 25 bp, Artificial
  Probe
tgaggcatctctactgttctgttag

SEQ ID NO: 164135 - DNA, 25 bp, Artificial
  Probe
ctgaggcatctctactgttctgtta

SEQ ID NO: 164136 - DNA, 25 bp, Artificial
  Probe
gagaagtatccaattatgtgacaac

SEQ ID NO: 164137 - DNA, 25 bp, Artificial
  Probe
ggcatctctactgttctgttagcat

SEQ ID NO: 164138 - DNA, 25 bp, Artificial
  Probe
agagaagtatccaattatgtgacaa

SEQ ID NO: 164139 - DNA, 25 bp, Artificial
  Probe
tcattgtccatgcctacagataatt

SEQ ID NO: 164140 - DNA, 25 bp, Artificial
  Probe
gtcattgtccatgcctacagataat

SEQ ID NO: 164141 - DNA, 25 bp, Artificial
  Probe
ctctactgttctgttagcatcagga

SEQ ID NO: 164142 - DNA, 25 bp, Artificial
  Probe
tctctactgttctgttagcatcagg

SEQ ID NO: 164143 - DNA, 25 bp, Artificial
  Probe
aatcactgaggcatctctactgttc

SEQ ID NO: 164144 - DNA, 25 bp, Artificial
  Probe
ctactgttctgttagcatcaggact

SEQ ID NO: 164145 - DNA, 25 bp, Artificial
  Probe
tctactgttctgttagcatcaggac

SEQ ID NO: 164146 - DNA, 25 bp, Artificial
  Probe
cttatcaatgaactgtggcaggaag

SEQ ID NO: 164147 - DNA, 25 bp, Artificial
  Probe
tgttctgttagcatcaggactgtag

SEQ ID NO: 164148 - DNA, 25 bp, Artificial
  Probe
ctgttctgttagcatcaggactgta

SEQ ID NO: 164149 - DNA, 25 bp, Artificial
  Probe
tactgttctgttagcatcaggactg

SEQ ID NO: 164150 - DNA, 25 bp, Artificial
  Probe
gtcctgctttcaacttaaatcactg

SEQ ID NO: 164151 - DNA, 25 bp, Artificial
  Probe
gttactggtttcctttgacaataca

SEQ ID NO: 164152 - DNA, 25 bp, Artificial
  Probe
tgtcctgctttcaacttaaatcact

SEQ ID NO: 164153 - DNA, 25 bp, Artificial
  Probe
agttactggtttcctttgacaatac

SEQ ID NO: 164154 - DNA, 25 bp, Artificial
  Probe
tgtcattgtccatgcctacagataa

SEQ ID NO: 164155 - DNA, 25 bp, Artificial
  Probe
gtacagagtagagaagtatccaatt

SEQ ID NO: 164156 - DNA, 25 bp, Artificial
  Probe
tagaatagtgctttgcccttatcaa

SEQ ID NO: 164157 - DNA, 25 bp, Artificial
  Probe
ctagaatagtgctttgcccttatca

SEQ ID NO: 164158 - DNA, 25 bp, Artificial
  Probe
tagagaagtatccaattatgtgaca

SEQ ID NO: 164159 - DNA, 25 bp, Artificial
  Probe
gaatagtgctttgcccttatcaatg

SEQ ID NO: 164160 - DNA, 25 bp, Artificial
  Probe
agaatagtgctttgcccttatcaat

SEQ ID NO: 164161 - DNA, 25 bp, Artificial
  Probe
gaggcatctctactgttctgttagc

SEQ ID NO: 164162 - DNA, 25 bp, Artificial
  Probe
atcactgaggcatctctactgttct

SEQ ID NO: 164163 - DNA, 25 bp, Artificial
  Probe
tttcaacttaaatcactgaggcatc

SEQ ID NO: 164164 - DNA, 25 bp, Artificial
  Probe
ctttcaacttaaatcactgaggcat

SEQ ID NO: 164165 - DNA, 25 bp, Artificial
  Probe
actggtttcctttgacaatacataa

SEQ ID NO: 164166 - DNA, 25 bp, Artificial
  Probe
ttactggtttcctttgacaatacat

SEQ ID NO: 164167 - DNA, 25 bp, Artificial
  Probe
atagtgctttgcccttatcaatgaa

SEQ ID NO: 164168 - DNA, 25 bp, Artificial
  Probe
aatagtgctttgcccttatcaatga

SEQ ID NO: 164169 - DNA, 25 bp, Artificial
  Probe
ttcaacttaaatcactgaggcatct

SEQ ID NO: 164170 - DNA, 25 bp, Artificial
  Probe
ctgctttcaacttaaatcactgagg

SEQ ID NO: 164171 - DNA, 25 bp, Artificial
  Probe
cctgctttcaacttaaatcactgag

SEQ ID NO: 164172 - DNA, 25 bp, Artificial
  Probe
tgaggaagaaggagaggaatactaa

SEQ ID NO: 164173 - DNA, 25 bp, Artificial
  Probe
gtgaggaagaaggagaggaatacta

SEQ ID NO: 164174 - DNA, 25 bp, Artificial
  Probe
tagagaaggattatgaggaggttgg

SEQ ID NO: 164175 - DNA, 25 bp, Artificial
  Probe
aaggaagatgctgccaataactatg

SEQ ID NO: 164176 - DNA, 25 bp, Artificial
  Probe
caaggaagatgctgccaataactat

SEQ ID NO: 164177 - DNA, 25 bp, Artificial
  Probe
ctagagaaggattatgaggaggttg

SEQ ID NO: 164178 - DNA, 25 bp, Artificial
  Probe
attatgaggaggttggtgtggattc

SEQ ID NO: 164179 - DNA, 25 bp, Artificial
  Probe
gattatgaggaggttggtgtggatt

SEQ ID NO: 164180 - DNA, 25 bp, Artificial
  Probe
gagaaggattatgaggaggttggtg

SEQ ID NO: 164181 - DNA, 25 bp, Artificial
  Probe
cacagttattgatgaagttcgcact

SEQ ID NO: 164182 - DNA, 25 bp, Artificial
  Probe
agagaaggattatgaggaggttggt

SEQ ID NO: 164183 - DNA, 25 bp, Artificial
  Probe
cctagagaaggattatgaggaggtt

SEQ ID NO: 164184 - DNA, 25 bp, Artificial
  Probe
ggtgaggaagaaggagaggaatact

SEQ ID NO: 164185 - DNA, 25 bp, Artificial
  Probe
ccacagttattgatgaagttcgcac

SEQ ID NO: 164186 - DNA, 25 bp, Artificial
  Probe
gaaggattatgaggaggttggtgtg

SEQ ID NO: 164187 - DNA, 25 bp, Artificial
  Probe
ctggcttcaaggttggcattaatta

SEQ ID NO: 164188 - DNA, 25 bp, Artificial
  Probe
agaaggattatgaggaggttggtgt

SEQ ID NO: 164189 - DNA, 25 bp, Artificial
  Probe
ataggtcaaattgtgtcttccatca

SEQ ID NO: 164190 - DNA, 25 bp, Artificial
  Probe
tggcttcaaggttggcattaattac

SEQ ID NO: 164191 - DNA, 25 bp, Artificial
  Probe
gaggaagaaggagaggaatactaaa

SEQ ID NO: 164192 - DNA, 25 bp, Artificial
  Probe
gataggtcaaattgtgtcttccatc

SEQ ID NO: 164193 - DNA, 25 bp, Artificial
  Probe
ttatgaggaggttggtgtggattct

SEQ ID NO: 164194 - DNA, 25 bp, Artificial
  Probe
gttaatttgtatgtggcaatgtgtg

SEQ ID NO: 164195 - DNA, 25 bp, Artificial
  Probe
agttaatttgtatgtggcaatgtgt

SEQ ID NO: 164196 - DNA, 25 bp, Artificial
  Probe
cagttaatttgtatgtggcaatgtg

SEQ ID NO: 164197 - DNA, 25 bp, Artificial
  Probe
tcagttaatttgtatgtggcaatgt

SEQ ID NO: 164198 - DNA, 25 bp, Artificial
  Probe
cttcaaggttggcattaattaccag

SEQ ID NO: 164199 - DNA, 25 bp, Artificial
  Probe
aggaagatgctgccaataactatgc

SEQ ID NO: 164200 - DNA, 25 bp, Artificial
  Probe
aggaagaaggagaggaatactaaat

SEQ ID NO: 164201 - DNA, 25 bp, Artificial
  Probe
tgataggtcaaattgtgtcttccat

SEQ ID NO: 164202 - DNA, 25 bp, Artificial
  Probe
ctacaccattggcaaggagatcatt

SEQ ID NO: 164203 - DNA, 25 bp, Artificial
  Probe
gcccaacctacactaacttaaacag

SEQ ID NO: 164204 - DNA, 25 bp, Artificial
  Probe
ggaacccacagttattgatgaagtt

SEQ ID NO: 164205 - DNA, 25 bp, Artificial
  Probe
caatgtgtgctttcatacagttact

SEQ ID NO: 164206 - DNA, 25 bp, Artificial
  Probe
aacccacagttattgatgaagttcg

SEQ ID NO: 164207 - DNA, 25 bp, Artificial
  Probe
cactaacttaaacaggttgataggt

SEQ ID NO: 164208 - DNA, 25 bp, Artificial
  Probe
acactaacttaaacaggttgatagg

SEQ ID NO: 164209 - DNA, 25 bp, Artificial
  Probe
caagtttgatctgatgtatgccaag

SEQ ID NO: 164210 - DNA, 25 bp, Artificial
  Probe
actaacttaaacaggttgataggtc

SEQ ID NO: 164211 - DNA, 25 bp, Artificial
  Probe
atcagttaatttgtatgtggcaatg

SEQ ID NO: 164212 - DNA, 25 bp, Artificial
  Probe
ttaagtgtgaatgatttgtcagaga

SEQ ID NO: 164213 - DNA, 25 bp, Artificial
  Probe
taagtgtgaatgatttgtcagagac

SEQ ID NO: 164214 - DNA, 25 bp, Artificial
  Probe
ctttcacagggatgtttattctggt

SEQ ID NO: 164215 - DNA, 25 bp, Artificial
  Probe
tacaccattggcaaggagatcattg

SEQ ID NO: 164216 - DNA, 25 bp, Artificial
  Probe
tttcacagggatgtttattctggtc

SEQ ID NO: 164217 - DNA, 25 bp, Artificial
  Probe
ggatggagcattgtgtatctgaata

SEQ ID NO: 164218 - DNA, 25 bp, Artificial
  Probe
gatggagcattgtgtatctgaatag

SEQ ID NO: 164219 - DNA, 25 bp, Artificial
  Probe
atggagcattgtgtatctgaataga

SEQ ID NO: 164220 - DNA, 25 bp, Artificial
  Probe
tcaaccttaatgaattacagcaacg

SEQ ID NO: 164221 - DNA, 25 bp, Artificial
  Probe
tcctcaaccttaatgaattacagca

SEQ ID NO: 164222 - DNA, 25 bp, Artificial
  Probe
cctcaaccttaatgaattacagcaa

SEQ ID NO: 164223 - DNA, 25 bp, Artificial
  Probe
atcctcaaccttaatgaattacagc

SEQ ID NO: 164224 - DNA, 25 bp, Artificial
  Probe
cctaagaatcagaagatcattgtgg

SEQ ID NO: 164225 - DNA, 25 bp, Artificial
  Probe
aagaatcagaagatcattgtggatg

SEQ ID NO: 164226 - DNA, 25 bp, Artificial
  Probe
ctcaaccttaatgaattacagcaac

SEQ ID NO: 164227 - DNA, 25 bp, Artificial
  Probe
agaatcagaagatcattgtggatgc

SEQ ID NO: 164228 - DNA, 25 bp, Artificial
  Probe
tggatggagcattgtgtatctgaat

SEQ ID NO: 164229 - DNA, 25 bp, Artificial
  Probe
ctaagaatcagaagatcattgtgga

SEQ ID NO: 164230 - DNA, 25 bp, Artificial
  Probe
aagatgtggatggagcattgtgtat

SEQ ID NO: 164231 - DNA, 25 bp, Artificial
  Probe
gaatcagaagatcattgtggatgcc

SEQ ID NO: 164232 - DNA, 25 bp, Artificial
  Probe
aaccttaatgaattacagcaacgtc

SEQ ID NO: 164233 - DNA, 25 bp, Artificial
  Probe
gatgtggatggagcattgtgtatct

SEQ ID NO: 164234 - DNA, 25 bp, Artificial
  Probe
agatgtggatggagcattgtgtatc

SEQ ID NO: 164235 - DNA, 25 bp, Artificial
  Probe
caaccttaatgaattacagcaacgt

SEQ ID NO: 164236 - DNA, 25 bp, Artificial
  Probe
taagaatcagaagatcattgtggat

SEQ ID NO: 164237 - DNA, 25 bp, Artificial
  Probe
aataccaaccctaagaatcagaaga

SEQ ID NO: 164238 - DNA, 25 bp, Artificial
  Probe
gtggatggagcattgtgtatctgaa

SEQ ID NO: 164239 - DNA, 25 bp, Artificial
  Probe
gaagatgtggatggagcattgtgta

SEQ ID NO: 164240 - DNA, 25 bp, Artificial
  Probe
tgtatctgaatagatggtgtgtgtc

SEQ ID NO: 164241 - DNA, 25 bp, Artificial
  Probe
gcattgtgtatctgaatagatggtg

SEQ ID NO: 164242 - DNA, 25 bp, Artificial
  Probe
agcattgtgtatctgaatagatggt

SEQ ID NO: 164243 - DNA, 25 bp, Artificial
  Probe
ttgtgtatctgaatagatggtgtgt

SEQ ID NO: 164244 - DNA, 25 bp, Artificial
  Probe
gtgtatctgaatagatggtgtgtgt

SEQ ID NO: 164245 - DNA, 25 bp, Artificial
  Probe
tgtgtatctgaatagatggtgtgtg

SEQ ID NO: 164246 - DNA, 25 bp, Artificial
  Probe
tggagcattgtgtatctgaatagat

SEQ ID NO: 164247 - DNA, 25 bp, Artificial
  Probe
gagcattgtgtatctgaatagatgg

SEQ ID NO: 164248 - DNA, 25 bp, Artificial
  Probe
ggagcattgtgtatctgaatagatg

SEQ ID NO: 164249 - DNA, 25 bp, Artificial
  Probe
atgtggatggagcattgtgtatctg

SEQ ID NO: 164250 - DNA, 25 bp, Artificial
  Probe
ataccaaccctaagaatcagaagat

SEQ ID NO: 164251 - DNA, 25 bp, Artificial
  Probe
tatctgaatagatggtgtgtgtcct

SEQ ID NO: 164252 - DNA, 25 bp, Artificial
  Probe
gtatctgaatagatggtgtgtgtcc

SEQ ID NO: 164253 - DNA, 25 bp, Artificial
  Probe
cgttaataccaaccctaagaatcag

SEQ ID NO: 164254 - DNA, 25 bp, Artificial
  Probe
tcacagtgctacataaagatggtat

SEQ ID NO: 164255 - DNA, 25 bp, Artificial
  Probe
atcacagtgctacataaagatggta

SEQ ID NO: 164256 - DNA, 25 bp, Artificial
  Probe
gcgttaataccaaccctaagaatca

SEQ ID NO: 164257 - DNA, 25 bp, Artificial
  Probe
accttaatgaattacagcaacgtcc

SEQ ID NO: 164258 - DNA, 25 bp, Artificial
  Probe
ctttgggaaatcctcaaccttaatg

SEQ ID NO: 164259 - DNA, 25 bp, Artificial
  Probe
tctttgggaaatcctcaaccttaat

SEQ ID NO: 164260 - DNA, 25 bp, Artificial
  Probe
attgtgtatctgaatagatggtgtg

SEQ ID NO: 164261 - DNA, 25 bp, Artificial
  Probe
cattgtgtatctgaatagatggtgt

SEQ ID NO: 164262 - DNA, 25 bp, Artificial
  Probe
tacggaagtagaagtgatggatgaa

SEQ ID NO: 164263 - DNA, 25 bp, Artificial
  Probe
ggacatcatctctaacgcattcaga

SEQ ID NO: 164264 - DNA, 25 bp, Artificial
  Probe
ttgtggttgtcttatattcattccc

SEQ ID NO: 164265 - DNA, 25 bp, Artificial
  Probe
ggaagtagaagtgatggatgaaacc

SEQ ID NO: 164266 - DNA, 25 bp, Artificial
  Probe
cggaagtagaagtgatggatgaaac

SEQ ID NO: 164267 - DNA, 25 bp, Artificial
  Probe
tgtttatatgctgtctcgtgattaa

SEQ ID NO: 164268 - DNA, 25 bp, Artificial
  Probe
acggaagtagaagtgatggatgaaa

SEQ ID NO: 164269 - DNA, 25 bp, Artificial
  Probe
atgtttatatgctgtctcgtgatta

SEQ ID NO: 164270 - DNA, 25 bp, Artificial
  Probe
catgtttatatgctgtctcgtgatt

SEQ ID NO: 164271 - DNA, 25 bp, Artificial
  Probe
ctacggaagtagaagtgatggatga

SEQ ID NO: 164272 - DNA, 25 bp, Artificial
  Probe
cggacatcatctctaacgcattcag

SEQ ID NO: 164273 - DNA, 25 bp, Artificial
  Probe
tttgtggttgtcttatattcattcc

SEQ ID NO: 164274 - DNA, 25 bp, Artificial
  Probe
aagtagaagtgatggatgaaaccaa

SEQ ID NO: 164275 - DNA, 25 bp, Artificial
  Probe
gttctacaaatggagagctaaacac

SEQ ID NO: 164276 - DNA, 25 bp, Artificial
  Probe
agttctacaaatggagagctaaaca

SEQ ID NO: 164277 - DNA, 25 bp, Artificial
  Probe
agtagaagtgatggatgaaaccaag

SEQ ID NO: 164278 - DNA, 25 bp, Artificial
  Probe
gaagtagaagtgatggatgaaacca

SEQ ID NO: 164279 - DNA, 25 bp, Artificial
  Probe
cctacggaagtagaagtgatggatg

SEQ ID NO: 164280 - DNA, 25 bp, Artificial
  Probe
tagaagtgatggatgaaaccaagtg

SEQ ID NO: 164281 - DNA, 25 bp, Artificial
  Probe
gtagaagtgatggatgaaaccaagt

SEQ ID NO: 164282 - DNA, 25 bp, Artificial
  Probe
gtttatatgctgtctcgtgattaaa

SEQ ID NO: 164283 - DNA, 25 bp, Artificial
  Probe
aagttctacaaatggagagctaaac

SEQ ID NO: 164284 - DNA, 25 bp, Artificial
  Probe
ttctacaaatggagagctaaacacg

SEQ ID NO: 164285 - DNA, 25 bp, Artificial
  Probe
gacatcatctctaacgcattcagag

SEQ ID NO: 164286 - DNA, 25 bp, Artificial
  Probe
gtaagttctacaaatggagagctaa

SEQ ID NO: 164287 - DNA, 25 bp, Artificial
  Probe
tacaaatggagagctaaacacggat

SEQ ID NO: 164288 - DNA, 25 bp, Artificial
  Probe
tctaacgcattcagaggagaagagc

SEQ ID NO: 164289 - DNA, 25 bp, Artificial
  Probe
aaacgaaggaaaaggaaaaccatac

SEQ ID NO: 164290 - DNA, 25 bp, Artificial
  Probe
caaacgaaggaaaaggaaaaccata

SEQ ID NO: 164291 - DNA, 25 bp, Artificial
  Probe
tgtggttgtcttatattcattcccc

SEQ ID NO: 164292 - DNA, 25 bp, Artificial
  Probe
atcatctctaacgcattcagaggag

SEQ ID NO: 164293 - DNA, 25 bp, Artificial
  Probe
taacgcattcagaggagaagagcag

SEQ ID NO: 164294 - DNA, 25 bp, Artificial
  Probe
ctaacgcattcagaggagaagagca

SEQ ID NO: 164295 - DNA, 25 bp, Artificial
  Probe
gaaggaaaaggaaaaccatacaacg

SEQ ID NO: 164296 - DNA, 25 bp, Artificial
  Probe
cgaaggaaaaggaaaaccatacaac

SEQ ID NO: 164297 - DNA, 25 bp, Artificial
  Probe
acgaaggaaaaggaaaaccatacaa

SEQ ID NO: 164298 - DNA, 25 bp, Artificial
  Probe
aacgaaggaaaaggaaaaccataca

SEQ ID NO: 164299 - DNA, 25 bp, Artificial
  Probe
ctacaaatggagagctaaacacgga

SEQ ID NO: 164300 - DNA, 25 bp, Artificial
  Probe
taagttctacaaatggagagctaaa

SEQ ID NO: 164301 - DNA, 25 bp, Artificial
  Probe
catcatctctaacgcattcagagga

SEQ ID NO: 164302 - DNA, 25 bp, Artificial
  Probe
gaagactctgatcatgaggatggaa

SEQ ID NO: 164303 - DNA, 25 bp, Artificial
  Probe
atctctaacgcattcagaggagaag

SEQ ID NO: 164304 - DNA, 25 bp, Artificial
  Probe
tcaaacgaaggaaaaggaaaaccat

SEQ ID NO: 164305 - DNA, 25 bp, Artificial
  Probe
tctacaaatggagagctaaacacgg

SEQ ID NO: 164306 - DNA, 25 bp, Artificial
  Probe
acatcatctctaacgcattcagagg

SEQ ID NO: 164307 - DNA, 25 bp, Artificial
  Probe
gtctatcttcttgtgagggattgtg

SEQ ID NO: 164308 - DNA, 25 bp, Artificial
  Probe
cttatgtgaagacgtacttgagacc

SEQ ID NO: 164309 - DNA, 25 bp, Artificial
  Probe
ccttatgtgaagacgtacttgagac

SEQ ID NO: 164310 - DNA, 25 bp, Artificial
  Probe
ttatgtgaagacgtacttgagacca

SEQ ID NO: 164311 - DNA, 25 bp, Artificial
  Probe
aatgacttcataggtggtgtgtctc

SEQ ID NO: 164312 - DNA, 25 bp, Artificial
  Probe
tatcttcttgtgagggattgtggag

SEQ ID NO: 164313 - DNA, 25 bp, Artificial
  Probe
ctatcttcttgtgagggattgtgga

SEQ ID NO: 164314 - DNA, 25 bp, Artificial
  Probe
tctatcttcttgtgagggattgtgg

SEQ ID NO: 164315 - DNA, 25 bp, Artificial
  Probe
ggtctatcttcttgtgagggattgt

SEQ ID NO: 164316 - DNA, 25 bp, Artificial
  Probe
aatccaatgacttcataggtggtgt

SEQ ID NO: 164317 - DNA, 25 bp, Artificial
  Probe
tatgtgaagacgtacttgagaccag

SEQ ID NO: 164318 - DNA, 25 bp, Artificial
  Probe
caatgacttcataggtggtgtgtct

SEQ ID NO: 164319 - DNA, 25 bp, Artificial
  Probe
gtgtgtaaagaagaagacgctgaac

SEQ ID NO: 164320 - DNA, 25 bp, Artificial
  Probe
aacactggagagactgtctacatca

SEQ ID NO: 164321 - DNA, 25 bp, Artificial
  Probe
gggtctatcttcttgtgagggattg

SEQ ID NO: 164322 - DNA, 25 bp, Artificial
  Probe
ctactctgacccttatgtgaagacg

SEQ ID NO: 164323 - DNA, 25 bp, Artificial
  Probe
atccaatgacttcataggtggtgtg

SEQ ID NO: 164324 - DNA, 25 bp, Artificial
  Probe
atgacttcataggtggtgtgtctct

SEQ ID NO: 164325 - DNA, 25 bp, Artificial
  Probe
tgggtctatcttcttgtgagggatt

SEQ ID NO: 164326 - DNA, 25 bp, Artificial
  Probe
gctactctgacccttatgtgaagac

SEQ ID NO: 164327 - DNA, 25 bp, Artificial
  Probe
ggcaaatccaatgacttcataggtg

SEQ ID NO: 164328 - DNA, 25 bp, Artificial
  Probe
gcataagacgtgtgtaaagaagaag

SEQ ID NO: 164329 - DNA, 25 bp, Artificial
  Probe
agcataagacgtgtgtaaagaagaa

SEQ ID NO: 164330 - DNA, 25 bp, Artificial
  Probe
aagcataagacgtgtgtaaagaaga

SEQ ID NO: 164331 - DNA, 25 bp, Artificial
  Probe
caagcataagacgtgtgtaaagaag

SEQ ID NO: 164332 - DNA, 25 bp, Artificial
  Probe
taagaaatccaagcataagacgtgt

SEQ ID NO: 164333 - DNA, 25 bp, Artificial
  Probe
ataagaaatccaagcataagacgtg

SEQ ID NO: 164334 - DNA, 25 bp, Artificial
  Probe
acactggagagactgtctacatcag

SEQ ID NO: 164335 - DNA, 25 bp, Artificial
  Probe
gataagaaatccaagcataagacgt

SEQ ID NO: 164336 - DNA, 25 bp, Artificial
  Probe
aatccaagcataagacgtgtgtaaa

SEQ ID NO: 164337 - DNA, 25 bp, Artificial
  Probe
aaatccaagcataagacgtgtgtaa

SEQ ID NO: 164338 - DNA, 25 bp, Artificial
  Probe
aaatccaatgacttcataggtggtg

SEQ ID NO: 164339 - DNA, 25 bp, Artificial
  Probe
caaatccaatgacttcataggtggt

SEQ ID NO: 164340 - DNA, 25 bp, Artificial
  Probe
ataagacgtgtgtaaagaagaagac

SEQ ID NO: 164341 - DNA, 25 bp, Artificial
  Probe
cataagacgtgtgtaaagaagaaga

SEQ ID NO: 164342 - DNA, 25 bp, Artificial
  Probe
aaacactggagagactgtctacatc

SEQ ID NO: 164343 - DNA, 25 bp, Artificial
  Probe
gaaacactggagagactgtctacat

SEQ ID NO: 164344 - DNA, 25 bp, Artificial
  Probe
ttaacggctactctgacccttatgt

SEQ ID NO: 164345 - DNA, 25 bp, Artificial
  Probe
atccaagcataagacgtgtgtaaag

SEQ ID NO: 164346 - DNA, 25 bp, Artificial
  Probe
gaaatccaagcataagacgtgtgta

SEQ ID NO: 164347 - DNA, 25 bp, Artificial
  Probe
ccaagcataagacgtgtgtaaagaa

SEQ ID NO: 164348 - DNA, 25 bp, Artificial
  Probe
tgacttcataggtggtgtgtctctg

SEQ ID NO: 164349 - DNA, 25 bp, Artificial
  Probe
tgtgtaaagaagaagacgctgaacc

SEQ ID NO: 164350 - DNA, 25 bp, Artificial
  Probe
gtgggtctatcttcttgtgagggat

SEQ ID NO: 164351 - DNA, 25 bp, Artificial
  Probe
aatggatgttaacggctactctgac

SEQ ID NO: 164352 - DNA, 25 bp, Artificial
  Probe
ctccttcatcattcaacaagacatc

SEQ ID NO: 164353 - DNA, 25 bp, Artificial
  Probe
gtccttctccttcatcattcaacaa

SEQ ID NO: 164354 - DNA, 25 bp, Artificial
  Probe
tctccttcatcattcaacaagacat

SEQ ID NO: 164355 - DNA, 25 bp, Artificial
  Probe
cttctccttcatcattcaacaagac

SEQ ID NO: 164356 - DNA, 25 bp, Artificial
  Probe
ttctccttcatcattcaacaagaca

SEQ ID NO: 164357 - DNA, 25 bp, Artificial
  Probe
tccttctccttcatcattcaacaag

SEQ ID NO: 164358 - DNA, 25 bp, Artificial
  Probe
ccttctccttcatcattcaacaaga

SEQ ID NO: 164359 - DNA, 25 bp, Artificial
  Probe
tccttcatcattcaacaagacatcc

SEQ ID NO: 164360 - DNA, 25 bp, Artificial
  Probe
ctgtccttctccttcatcattcaac

SEQ ID NO: 164361 - DNA, 25 bp, Artificial
  Probe
gactactatgagacagatgaagtgg

SEQ ID NO: 164362 - DNA, 25 bp, Artificial
  Probe
tgtatgactactatgagacagatga

SEQ ID NO: 164363 - DNA, 25 bp, Artificial
  Probe
gtgtatgactactatgagacagatg

SEQ ID NO: 164364 - DNA, 25 bp, Artificial
  Probe
tgactactatgagacagatgaagtg

SEQ ID NO: 164365 - DNA, 25 bp, Artificial
  Probe
actgtccttctccttcatcattcaa

SEQ ID NO: 164366 - DNA, 25 bp, Artificial
  Probe
agtgtatgactactatgagacagat

SEQ ID NO: 164367 - DNA, 25 bp, Artificial
  Probe
tactatgagacagatgaagtggctt

SEQ ID NO: 164368 - DNA, 25 bp, Artificial
  Probe
ctactatgagacagatgaagtggct

SEQ ID NO: 164369 - DNA, 25 bp, Artificial
  Probe
atgactactatgagacagatgaagt

SEQ ID NO: 164370 - DNA, 25 bp, Artificial
  Probe
actactatgagacagatgaagtggc

SEQ ID NO: 164371 - DNA, 25 bp, Artificial
  Probe
cactgtccttctccttcatcattca

SEQ ID NO: 164372 - DNA, 25 bp, Artificial
  Probe
aactcatatctgtggacaaggcatt

SEQ ID NO: 164373 - DNA, 25 bp, Artificial
  Probe
acactgtccttctccttcatcattc

SEQ ID NO: 164374 - DNA, 25 bp, Artificial
  Probe
aagtgtatgactactatgagacaga

SEQ ID NO: 164375 - DNA, 25 bp, Artificial
  Probe
tgtccttctccttcatcattcaaca

SEQ ID NO: 164376 - DNA, 25 bp, Artificial
  Probe
attcaacaagacatcccagtaaaga

SEQ ID NO: 164377 - DNA, 25 bp, Artificial
  Probe
cattcaacaagacatcccagtaaag

SEQ ID NO: 164378 - DNA, 25 bp, Artificial
  Probe
atcattcaacaagacatcccagtaa

SEQ ID NO: 164379 - DNA, 25 bp, Artificial
  Probe
tcattcaacaagacatcccagtaaa

SEQ ID NO: 164380 - DNA, 25 bp, Artificial
  Probe
gtatgactactatgagacagatgaa

SEQ ID NO: 164381 - DNA, 25 bp, Artificial
  Probe
catcattcaacaagacatcccagta

SEQ ID NO: 164382 - DNA, 25 bp, Artificial
  Probe
tcaacaagacatcccagtaaagaac

SEQ ID NO: 164383 - DNA, 25 bp, Artificial
  Probe
ttcaacaagacatcccagtaaagaa

SEQ ID NO: 164384 - DNA, 25 bp, Artificial
  Probe
tatgactactatgagacagatgaag

SEQ ID NO: 164385 - DNA, 25 bp, Artificial
  Probe
ttcatcattcaacaagacatcccag

SEQ ID NO: 164386 - DNA, 25 bp, Artificial
  Probe
tggtgatttgtgtttgtctctgaaa

SEQ ID NO: 164387 - DNA, 25 bp, Artificial
  Probe
gattgctgatgtgaagatgctctct

SEQ ID NO: 164388 - DNA, 25 bp, Artificial
  Probe
actcatatctgtggacaaggcattg

SEQ ID NO: 164389 - DNA, 25 bp, Artificial
  Probe
catggtgattgctgatgtgaagatg

SEQ ID NO: 164390 - DNA, 25 bp, Artificial
  Probe
cttcatcattcaacaagacatccca

SEQ ID NO: 164391 - DNA, 25 bp, Artificial
  Probe
ttgaaactcatatctgtggacaagg

SEQ ID NO: 164392 - DNA, 25 bp, Artificial
  Probe
tttgaaactcatatctgtggacaag

SEQ ID NO: 164393 - DNA, 25 bp, Artificial
  Probe
attgctgatgtgaagatgctctctg

SEQ ID NO: 164394 - DNA, 25 bp, Artificial
  Probe
tgattgctgatgtgaagatgctctc

SEQ ID NO: 164395 - DNA, 25 bp, Artificial
  Probe
aacaagacatcccagtaaagaacct

SEQ ID NO: 164396 - DNA, 25 bp, Artificial
  Probe
caacaagacatcccagtaaagaacc

SEQ ID NO: 164397 - DNA, 25 bp, Artificial
  Probe
taatgtgtcttagcaatagtagtcg

SEQ ID NO: 164398 - DNA, 25 bp, Artificial
  Probe
tgtgatataagccaatgtgattagt

SEQ ID NO: 164399 - DNA, 25 bp, Artificial
  Probe
actgtgatataagccaatgtgatta

SEQ ID NO: 164400 - DNA, 25 bp, Artificial
  Probe
tactgtgatataagccaatgtgatt

SEQ ID NO: 164401 - DNA, 25 bp, Artificial
  Probe
ttactgtgatataagccaatgtgat

SEQ ID NO: 164402 - DNA, 25 bp, Artificial
  Probe
gtgatataagccaatgtgattagtg

SEQ ID NO: 164403 - DNA, 25 bp, Artificial
  Probe
acctacttactgtgatataagccaa

SEQ ID NO: 164404 - DNA, 25 bp, Artificial
  Probe
ctgtgatataagccaatgtgattag

SEQ ID NO: 164405 - DNA, 25 bp, Artificial
  Probe
acttactgtgatataagccaatgtg

SEQ ID NO: 164406 - DNA, 25 bp, Artificial
  Probe
cttactgtgatataagccaatgtga

SEQ ID NO: 164407 - DNA, 25 bp, Artificial
  Probe
caatagtagtcgataggaagctgtt

SEQ ID NO: 164408 - DNA, 25 bp, Artificial
  Probe
ttagcaatagtagtcgataggaagc

SEQ ID NO: 164409 - DNA, 25 bp, Artificial
  Probe
aatgtgtcttagcaatagtagtcga

SEQ ID NO: 164410 - DNA, 25 bp, Artificial
  Probe
atgtgtcttagcaatagtagtcgat

SEQ ID NO: 164411 - DNA, 25 bp, Artificial
  Probe
tgtcttagcaatagtagtcgatagg

SEQ ID NO: 164412 - DNA, 25 bp, Artificial
  Probe
tacctacttactgtgatataagcca

SEQ ID NO: 164413 - DNA, 25 bp, Artificial
  Probe
gtcttagcaatagtagtcgatagga

SEQ ID NO: 164414 - DNA, 25 bp, Artificial
  Probe
gcaataggaattaatgtgtcttagc

SEQ ID NO: 164415 - DNA, 25 bp, Artificial
  Probe
tgtgtcttagcaatagtagtcgata

SEQ ID NO: 164416 - DNA, 25 bp, Artificial
  Probe
aatcttgtatagagttcaggaagtt

SEQ ID NO: 164417 - DNA, 25 bp, Artificial
  Probe
tgatataagccaatgtgattagtgg

SEQ ID NO: 164418 - DNA, 25 bp, Artificial
  Probe
gtgtcttagcaatagtagtcgatag

SEQ ID NO: 164419 - DNA, 25 bp, Artificial
  Probe
cctacttactgtgatataagccaat

SEQ ID NO: 164420 - DNA, 25 bp, Artificial
  Probe
tcttagcaatagtagtcgataggaa

SEQ ID NO: 164421 - DNA, 25 bp, Artificial
  Probe
gatataagccaatgtgattagtgga

SEQ ID NO: 164422 - DNA, 25 bp, Artificial
  Probe
cccttaggtggatttcagattagat

SEQ ID NO: 164423 - DNA, 25 bp, Artificial
  Probe
ttctctatggtgctgaagattgaaa

SEQ ID NO: 164424 - DNA, 25 bp, Artificial
  Probe
agggcaacagagataaattagtagt

SEQ ID NO: 164425 - DNA, 25 bp, Artificial
  Probe
tctctatggtgctgaagattgaaac

SEQ ID NO: 164426 - DNA, 25 bp, Artificial
  Probe
cttagcaatagtagtcgataggaag

SEQ ID NO: 164427 - DNA, 25 bp, Artificial
  Probe
gcaatagtagtcgataggaagctgt

SEQ ID NO: 164428 - DNA, 25 bp, Artificial
  Probe
atttcagattagatattcccagggc

SEQ ID NO: 164429 - DNA, 25 bp, Artificial
  Probe
tacttactgtgatataagccaatgt

SEQ ID NO: 164430 - DNA, 25 bp, Artificial
  Probe
gagtttacttctctatggtgctgaa

SEQ ID NO: 164431 - DNA, 25 bp, Artificial
  Probe
atataagccaatgtgattagtggaa

SEQ ID NO: 164432 - DNA, 25 bp, Artificial
  Probe
ttacctacttactgtgatataagcc

SEQ ID NO: 164433 - DNA, 25 bp, Artificial
  Probe
tgtatagagttcaggaagtttgttc

SEQ ID NO: 164434 - DNA, 25 bp, Artificial
  Probe
cttgtatagagttcaggaagtttgt

SEQ ID NO: 164435 - DNA, 25 bp, Artificial
  Probe
aagggcaacagagataaattagtag

SEQ ID NO: 164436 - DNA, 25 bp, Artificial
  Probe
ttgtatagagttcaggaagtttgtt

SEQ ID NO: 164437 - DNA, 25 bp, Artificial
  Probe
atagagttcaggaagtttgttcttt

SEQ ID NO: 164438 - DNA, 25 bp, Artificial
  Probe
gtatagagttcaggaagtttgttct

SEQ ID NO: 164439 - DNA, 25 bp, Artificial
  Probe
tcttgtatagagttcaggaagtttg

SEQ ID NO: 164440 - DNA, 25 bp, Artificial
  Probe
gcccttaggtggatttcagattaga

SEQ ID NO: 164441 - DNA, 25 bp, Artificial
  Probe
gatttcagattagatattcccaggg

SEQ ID NO: 164442 - DNA, 25 bp, Artificial
  Probe
caggcagataccaacagtctcttaa

SEQ ID NO: 164443 - DNA, 25 bp, Artificial
  Probe
ctgcctagtattagccatacagact

SEQ ID NO: 164444 - DNA, 25 bp, Artificial
  Probe
tactgcctagtattagccatacaga

SEQ ID NO: 164445 - DNA, 25 bp, Artificial
  Probe
tgcctagtattagccatacagactg

SEQ ID NO: 164446 - DNA, 25 bp, Artificial
  Probe
actgcctagtattagccatacagac

SEQ ID NO: 164447 - DNA, 25 bp, Artificial
  Probe
ctttgctaatccacttgaactttgt

SEQ ID NO: 164448 - DNA, 25 bp, Artificial
  Probe
tctttgctaatccacttgaactttg

SEQ ID NO: 164449 - DNA, 25 bp, Artificial
  Probe
catctttgctaatccacttgaactt

SEQ ID NO: 164450 - DNA, 25 bp, Artificial
  Probe
taaatcccactaccacaaagcaata

SEQ ID NO: 164451 - DNA, 25 bp, Artificial
  Probe
atcccactaccacaaagcaatataa

SEQ ID NO: 164452 - DNA, 25 bp, Artificial
  Probe
aatcccactaccacaaagcaatata

SEQ ID NO: 164453 - DNA, 25 bp, Artificial
  Probe
tcccactaccacaaagcaatataaa

SEQ ID NO: 164454 - DNA, 25 bp, Artificial
  Probe
cctagtattagccatacagactgtg

SEQ ID NO: 164455 - DNA, 25 bp, Artificial
  Probe
aaatcccactaccacaaagcaatat

SEQ ID NO: 164456 - DNA, 25 bp, Artificial
  Probe
atctttgctaatccacttgaacttt

SEQ ID NO: 164457 - DNA, 25 bp, Artificial
  Probe
ctagtattagccatacagactgtgt

SEQ ID NO: 164458 - DNA, 25 bp, Artificial
  Probe
atttgtgtttatgagactgggtagc

SEQ ID NO: 164459 - DNA, 25 bp, Artificial
  Probe
catttgtgtttatgagactgggtag

SEQ ID NO: 164460 - DNA, 25 bp, Artificial
  Probe
gactgtgtttctgataataggagcc

SEQ ID NO: 164461 - DNA, 25 bp, Artificial
  Probe
ttaaatcccactaccacaaagcaat

SEQ ID NO: 164462 - DNA, 25 bp, Artificial
  Probe
tttgctaatccacttgaactttgtt

SEQ ID NO: 164463 - DNA, 25 bp, Artificial
  Probe
agactgtgtttctgataataggagc

SEQ ID NO: 164464 - DNA, 25 bp, Artificial
  Probe
tccacttgaactttgttattgatgc

SEQ ID NO: 164465 - DNA, 25 bp, Artificial
  Probe
tagttaaaggaaacaggcagatacc

SEQ ID NO: 164466 - DNA, 25 bp, Artificial
  Probe
tagtattagccatacagactgtgtt

SEQ ID NO: 164467 - DNA, 25 bp, Artificial
  Probe
acaggcagataccaacagtctctta

SEQ ID NO: 164468 - DNA, 25 bp, Artificial
  Probe
ttaaaggaaacaggcagataccaac

SEQ ID NO: 164469 - DNA, 25 bp, Artificial
  Probe
ttgctaatccacttgaactttgtta

SEQ ID NO: 164470 - DNA, 25 bp, Artificial
  Probe
cttgaactttgttattgatgccgag

SEQ ID NO: 164471 - DNA, 25 bp, Artificial
  Probe
ccacttgaactttgttattgatgcc

SEQ ID NO: 164472 - DNA, 25 bp, Artificial
  Probe
tgctaatccacttgaactttgttat

SEQ ID NO: 164473 - DNA, 25 bp, Artificial
  Probe
gcctagtattagccatacagactgt

SEQ ID NO: 164474 - DNA, 25 bp, Artificial
  Probe
gttaaaggaaacaggcagataccaa

SEQ ID NO: 164475 - DNA, 25 bp, Artificial
  Probe
gcatagttaaaggaaacaggcagat

SEQ ID NO: 164476 - DNA, 25 bp, Artificial
  Probe
ggacaagaagattcagaaatagagt

SEQ ID NO: 164477 - DNA, 25 bp, Artificial
  Probe
tggacaagaagattcagaaatagag

SEQ ID NO: 164478 - DNA, 25 bp, Artificial
  Probe
acttgaactttgttattgatgccga

SEQ ID NO: 164479 - DNA, 25 bp, Artificial
  Probe
cacttgaactttgttattgatgccg

SEQ ID NO: 164480 - DNA, 25 bp, Artificial
  Probe
gttaaatcccactaccacaaagcaa

SEQ ID NO: 164481 - DNA, 25 bp, Artificial
  Probe
aggcagataccaacagtctcttaaa

SEQ ID NO: 164482 - DNA, 25 bp, Artificial
  Probe
atagttaaaggaaacaggcagatac

SEQ ID NO: 164483 - DNA, 25 bp, Artificial
  Probe
catagttaaaggaaacaggcagata

SEQ ID NO: 164484 - DNA, 25 bp, Artificial
  Probe
ttattgatgccgagtcctctctctt

SEQ ID NO: 164485 - DNA, 25 bp, Artificial
  Probe
ctgtgtttctgataataggagccca

SEQ ID NO: 164486 - DNA, 25 bp, Artificial
  Probe
actgtgtttctgataataggagccc

SEQ ID NO: 164487 - DNA, 25 bp, Artificial
  Probe
agcaccttctatttccttgtattca

SEQ ID NO: 164488 - DNA, 25 bp, Artificial
  Probe
gcaccttctatttccttgtattcat

SEQ ID NO: 164489 - DNA, 25 bp, Artificial
  Probe
cctagcaccttctatttccttgtat

SEQ ID NO: 164490 - DNA, 25 bp, Artificial
  Probe
tcctagcaccttctatttccttgta

SEQ ID NO: 164491 - DNA, 25 bp, Artificial
  Probe
cttcctagcaccttctatttccttg

SEQ ID NO: 164492 - DNA, 25 bp, Artificial
  Probe
tagcaccttctatttccttgtattc

SEQ ID NO: 164493 - DNA, 25 bp, Artificial
  Probe
acttcctagcaccttctatttcctt

SEQ ID NO: 164494 - DNA, 25 bp, Artificial
  Probe
cataccaatggacatcctctttgat

SEQ ID NO: 164495 - DNA, 25 bp, Artificial
  Probe
ttcctagcaccttctatttccttgt

SEQ ID NO: 164496 - DNA, 25 bp, Artificial
  Probe
accttctatttccttgtattcatgc

SEQ ID NO: 164497 - DNA, 25 bp, Artificial
  Probe
ctagcaccttctatttccttgtatt

SEQ ID NO: 164498 - DNA, 25 bp, Artificial
  Probe
cacttcctagcaccttctatttcct

SEQ ID NO: 164499 - DNA, 25 bp, Artificial
  Probe
ccttctatttccttgtattcatgct

SEQ ID NO: 164500 - DNA, 25 bp, Artificial
  Probe
gtacttggaatagtcattgccatgc

SEQ ID NO: 164501 - DNA, 25 bp, Artificial
  Probe
tttccttgtattcatgctaaacacc

SEQ ID NO: 164502 - DNA, 25 bp, Artificial
  Probe
tacttggaatagtcattgccatgct

SEQ ID NO: 164503 - DNA, 25 bp, Artificial
  Probe
tccttgtattcatgctaaacaccat

SEQ ID NO: 164504 - DNA, 25 bp, Artificial
  Probe
ttccttgtattcatgctaaacacca

SEQ ID NO: 164505 - DNA, 25 bp, Artificial
  Probe
atcttctctgccaaccaggtacata

SEQ ID NO: 164506 - DNA, 25 bp, Artificial
  Probe
tacagagcttatcctgcataaccag

SEQ ID NO: 164507 - DNA, 25 bp, Artificial
  Probe
ctacagagcttatcctgcataacca

SEQ ID NO: 164508 - DNA, 25 bp, Artificial
  Probe
ttggagtagaagctgtgtattcctg

SEQ ID NO: 164509 - DNA, 25 bp, Artificial
  Probe
ccttgtattcatgctaaacaccata

SEQ ID NO: 164510 - DNA, 25 bp, Artificial
  Probe
aagaagtcttgttagcctggtctgt

SEQ ID NO: 164511 - DNA, 25 bp, Artificial
  Probe
ttcttagcagtacttggaatagtca

SEQ ID NO: 164512 - DNA, 25 bp, Artificial
  Probe
aagtcttgttagcctggtctgtctc

SEQ ID NO: 164513 - DNA, 25 bp, Artificial
  Probe
gaagtcttgttagcctggtctgtct

SEQ ID NO: 164514 - DNA, 25 bp, Artificial
  Probe
tcttagcagtacttggaatagtcat

SEQ ID NO: 164515 - DNA, 25 bp, Artificial
  Probe
ccacttcctagcaccttctatttcc

SEQ ID NO: 164516 - DNA, 25 bp, Artificial
  Probe
cccacttcctagcaccttctatttc

SEQ ID NO: 164517 - DNA, 25 bp, Artificial
  Probe
caccttctatttccttgtattcatg

SEQ ID NO: 164518 - DNA, 25 bp, Artificial
  Probe
agaagtcttgttagcctggtctgtc

SEQ ID NO: 164519 - DNA, 25 bp, Artificial
  Probe
cagtacagagtcctcagaaacagtg

SEQ ID NO: 164520 - DNA, 25 bp, Artificial
  Probe
ttagcagtacttggaatagtcattg

SEQ ID NO: 164521 - DNA, 25 bp, Artificial
  Probe
cctacagagcttatcctgcataacc

SEQ ID NO: 164522 - DNA, 25 bp, Artificial
  Probe
cttagcagtacttggaatagtcatt

SEQ ID NO: 164523 - DNA, 25 bp, Artificial
  Probe
atttccttgtattcatgctaaacac

SEQ ID NO: 164524 - DNA, 25 bp, Artificial
  Probe
gttgcataccaatggacatcctctt

SEQ ID NO: 164525 - DNA, 25 bp, Artificial
  Probe
tagaagctgtgtattcctgcctcaa

SEQ ID NO: 164526 - DNA, 25 bp, Artificial
  Probe
acagtacagagtcctcagaaacagt

SEQ ID NO: 164527 - DNA, 25 bp, Artificial
  Probe
gcataccaatggacatcctctttga

SEQ ID NO: 164528 - DNA, 25 bp, Artificial
  Probe
gagaaaacaagcaaccaataaaagc

SEQ ID NO: 164529 - DNA, 25 bp, Artificial
  Probe
agtacttggaatagtcattgccatg

SEQ ID NO: 164530 - DNA, 25 bp, Artificial
  Probe
cagtacttggaatagtcattgccat

SEQ ID NO: 164531 - DNA, 25 bp, Artificial
  Probe
gacagtacagagtcctcagaaacag

SEQ ID NO: 164532 - DNA, 25 bp, Artificial
  Probe
tccataataatcaccgtcattgtca

SEQ ID NO: 164533 - DNA, 25 bp, Artificial
  Probe
gtccataataatcaccgtcattgtc

SEQ ID NO: 164534 - DNA, 25 bp, Artificial
  Probe
ttgtcattgcgtccataataatcac

SEQ ID NO: 164535 - DNA, 25 bp, Artificial
  Probe
atgtcctgttaatgatagtggtctc

SEQ ID NO: 164536 - DNA, 25 bp, Artificial
  Probe
ccataataatcaccgtcattgtcat

SEQ ID NO: 164537 - DNA, 25 bp, Artificial
  Probe
gtcctgttaatgatagtggtctctg

SEQ ID NO: 164538 - DNA, 25 bp, Artificial
  Probe
ctgttaatgatagtggtctctgctc

SEQ ID NO: 164539 - DNA, 25 bp, Artificial
  Probe
tgtcctgttaatgatagtggtctct

SEQ ID NO: 164540 - DNA, 25 bp, Artificial
  Probe
cgtccataataatcaccgtcattgt

SEQ ID NO: 164541 - DNA, 25 bp, Artificial
  Probe
aataatcaccgtcattgtcatcaac

SEQ ID NO: 164542 - DNA, 25 bp, Artificial
  Probe
tgtcattgcgtccataataatcacc

SEQ ID NO: 164543 - DNA, 25 bp, Artificial
  Probe
ataataatcaccgtcattgtcatca

SEQ ID NO: 164544 - DNA, 25 bp, Artificial
  Probe
cataataatcaccgtcattgtcatc

SEQ ID NO: 164545 - DNA, 25 bp, Artificial
  Probe
cctgttaatgatagtggtctctgct

SEQ ID NO: 164546 - DNA, 25 bp, Artificial
  Probe
tcctgttaatgatagtggtctctgc

SEQ ID NO: 164547 - DNA, 25 bp, Artificial
  Probe
tgttaatgatagtggtctctgctca

SEQ ID NO: 164548 - DNA, 25 bp, Artificial
  Probe
taataatcaccgtcattgtcatcaa

SEQ ID NO: 164549 - DNA, 25 bp, Artificial
  Probe
catgtcctgttaatgatagtggtct

SEQ ID NO: 164550 - DNA, 25 bp, Artificial
  Probe
ataatcaccgtcattgtcatcaaca

SEQ ID NO: 164551 - DNA, 25 bp, Artificial
  Probe
tctgcctctctacttcattgtcaac

SEQ ID NO: 164552 - DNA, 25 bp, Artificial
  Probe
gtctgcctctctacttcattgtcaa

SEQ ID NO: 164553 - DNA, 25 bp, Artificial
  Probe
gcgtccataataatcaccgtcattg

SEQ ID NO: 164554 - DNA, 25 bp, Artificial
  Probe
cattgcgtccataataatcaccgtc

SEQ ID NO: 164555 - DNA, 25 bp, Artificial
  Probe
gtcattgcgtccataataatcaccg

SEQ ID NO: 164556 - DNA, 25 bp, Artificial
  Probe
gttaatgatagtggtctctgctcac

SEQ ID NO: 164557 - DNA, 25 bp, Artificial
  Probe
taatcaccgtcattgtcatcaacac

SEQ ID NO: 164558 - DNA, 25 bp, Artificial
  Probe
ttaatgatagtggtctctgctcaca

SEQ ID NO: 164559 - DNA, 25 bp, Artificial
  Probe
gctcttctccttcttaaccagtctg

SEQ ID NO: 164560 - DNA, 25 bp, Artificial
  Probe
tgcgtccataataatcaccgtcatt

SEQ ID NO: 164561 - DNA, 25 bp, Artificial
  Probe
ttgcgtccataataatcaccgtcat

SEQ ID NO: 164562 - DNA, 25 bp, Artificial
  Probe
attgcgtccataataatcaccgtca

SEQ ID NO: 164563 - DNA, 25 bp, Artificial
  Probe
tcattgcgtccataataatcaccgt

SEQ ID NO: 164564 - DNA, 25 bp, Artificial
  Probe
tacttcattgtcaacgtcatcattc

SEQ ID NO: 164565 - DNA, 25 bp, Artificial
  Probe
ctacttcattgtcaacgtcatcatt

SEQ ID NO: 164566 - DNA, 25 bp, Artificial
  Probe
tctacttcattgtcaacgtcatcat

SEQ ID NO: 164567 - DNA, 25 bp, Artificial
  Probe
gtctttgtcattgcgtccataataa

SEQ ID NO: 164568 - DNA, 25 bp, Artificial
  Probe
tctctacttcattgtcaacgtcatc

SEQ ID NO: 164569 - DNA, 25 bp, Artificial
  Probe
ctctctacttcattgtcaacgtcat

SEQ ID NO: 164570 - DNA, 25 bp, Artificial
  Probe
tttgtcattgcgtccataataatca

SEQ ID NO: 164571 - DNA, 25 bp, Artificial
  Probe
tgctcttctccttcttaaccagtct

SEQ ID NO: 164572 - DNA, 25 bp, Artificial
  Probe
ctgctatgtccttaaagtatctccc

SEQ ID NO: 164573 - DNA, 25 bp, Artificial
  Probe
taatgatagtggtctctgctcacac

SEQ ID NO: 164574 - DNA, 25 bp, Artificial
  Probe
agaccatccagagataaacaagaaa

SEQ ID NO: 164575 - DNA, 25 bp, Artificial
  Probe
aagaccatccagagataaacaagaa

SEQ ID NO: 164576 - DNA, 25 bp, Artificial
  Probe
aaagaccatccagagataaacaaga

SEQ ID NO: 164577 - DNA, 25 bp, Artificial
  Probe
tgtcaagattaagtcataccagcaa

SEQ ID NO: 164578 - DNA, 25 bp, Artificial
  Probe
acactgtcaagattaagtcatacca

SEQ ID NO: 164579 - DNA, 25 bp, Artificial
  Probe
tcttctaagtctggctcttgttgat

SEQ ID NO: 164580 - DNA, 25 bp, Artificial
  Probe
atcttctaagtctggctcttgttga

SEQ ID NO: 164581 - DNA, 25 bp, Artificial
  Probe
cttctaagtctggctcttgttgatc

SEQ ID NO: 164582 - DNA, 25 bp, Artificial
  Probe
gatcttctaagtctggctcttgttg

SEQ ID NO: 164583 - DNA, 25 bp, Artificial
  Probe
ctgtcaagattaagtcataccagca

SEQ ID NO: 164584 - DNA, 25 bp, Artificial
  Probe
actgtcaagattaagtcataccagc

SEQ ID NO: 164585 - DNA, 25 bp, Artificial
  Probe
cactgtcaagattaagtcataccag

SEQ ID NO: 164586 - DNA, 25 bp, Artificial
  Probe
gtgtcaccttcttctgtcaacatac

SEQ ID NO: 164587 - DNA, 25 bp, Artificial
  Probe
tgtcaccttcttctgtcaacataca

SEQ ID NO: 164588 - DNA, 25 bp, Artificial
  Probe
tgtgtcaccttcttctgtcaacata

SEQ ID NO: 164589 - DNA, 25 bp, Artificial
  Probe
tgctgagatgtttagatgctgataa

SEQ ID NO: 164590 - DNA, 25 bp, Artificial
  Probe
ttgctgagatgtttagatgctgata

SEQ ID NO: 164591 - DNA, 25 bp, Artificial
  Probe
taatcatcccttctttacacacaca

SEQ ID NO: 164592 - DNA, 25 bp, Artificial
  Probe
caacaataacaaagcaacaactacg

SEQ ID NO: 164593 - DNA, 25 bp, Artificial
  Probe
gcaacaataacaaagcaacaactac

SEQ ID NO: 164594 - DNA, 25 bp, Artificial
  Probe
agcaacaataacaaagcaacaacta

SEQ ID NO: 164595 - DNA, 25 bp, Artificial
  Probe
tgtgaaatgggtgtaatatagggtt

SEQ ID NO: 164596 - DNA, 25 bp, Artificial
  Probe
atattaaatccctcctgtctcctct

SEQ ID NO: 164597 - DNA, 25 bp, Artificial
  Probe
attgctgagatgtttagatgctgat

SEQ ID NO: 164598 - DNA, 25 bp, Artificial
  Probe
aatgggtgtaatatagggtttgtcg

SEQ ID NO: 164599 - DNA, 25 bp, Artificial
  Probe
atgtgaaatgggtgtaatatagggt

SEQ ID NO: 164600 - DNA, 25 bp, Artificial
  Probe
gacactgtcaagattaagtcatacc

SEQ ID NO: 164601 - DNA, 25 bp, Artificial
  Probe
ggacactgtcaagattaagtcatac

SEQ ID NO: 164602 - DNA, 25 bp, Artificial
  Probe
ctgaaactatgtgaaatgggtgtaa

SEQ ID NO: 164603 - DNA, 25 bp, Artificial
  Probe
aaattgctgagatgtttagatgctg

SEQ ID NO: 164604 - DNA, 25 bp, Artificial
  Probe
caaattgctgagatgtttagatgct

SEQ ID NO: 164605 - DNA, 25 bp, Artificial
  Probe
accaaattgctgagatgtttagatg

SEQ ID NO: 164606 - DNA, 25 bp, Artificial
  Probe
gtcaagattaagtcataccagcaaa

SEQ ID NO: 164607 - DNA, 25 bp, Artificial
  Probe
tattaaatccctcctgtctcctctg

SEQ ID NO: 164608 - DNA, 25 bp, Artificial
  Probe
ctctgttggtttgtgaagtgatttg

SEQ ID NO: 164609 - DNA, 25 bp, Artificial
  Probe
tgtatattaaatccctcctgtctcc

SEQ ID NO: 164610 - DNA, 25 bp, Artificial
  Probe
acacacacaaatggatttaacacac

SEQ ID NO: 164611 - DNA, 25 bp, Artificial
  Probe
cacacacacaaatggatttaacaca

SEQ ID NO: 164612 - DNA, 25 bp, Artificial
  Probe
acacacacacaaatggatttaacac

SEQ ID NO: 164613 - DNA, 25 bp, Artificial
  Probe
cacacacacacaaatggatttaaca

SEQ ID NO: 164614 - DNA, 25 bp, Artificial
  Probe
acacacacacacaaatggatttaac

SEQ ID NO: 164615 - DNA, 25 bp, Artificial
  Probe
cacacacacacacaaatggatttaa

SEQ ID NO: 164616 - DNA, 25 bp, Artificial
  Probe
caataacaaagcaacaactacgcat

SEQ ID NO: 164617 - DNA, 25 bp, Artificial
  Probe
aacagcaacaataacaaagcaacaa

SEQ ID NO: 164618 - DNA, 25 bp, Artificial
  Probe
aattgctgagatgtttagatgctga

SEQ ID NO: 164619 - DNA, 25 bp, Artificial
  Probe
ctgttggtttgtgaagtgatttgac

SEQ ID NO: 164620 - DNA, 25 bp, Artificial
  Probe
aatcatcccttctttacacacacac

SEQ ID NO: 164621 - DNA, 25 bp, Artificial
  Probe
ataatcatcccttctttacacacac

SEQ ID NO: 164622 - DNA, 25 bp, Artificial
  Probe
gcttgtctgaataatgtcttactgt

SEQ ID NO: 164623 - DNA, 25 bp, Artificial
  Probe
agcttgtctgaataatgtcttactg

SEQ ID NO: 164624 - DNA, 25 bp, Artificial
  Probe
tgtctgaataatgtcttactgtagt

SEQ ID NO: 164625 - DNA, 25 bp, Artificial
  Probe
agaacagcttgtctgaataatgtct

SEQ ID NO: 164626 - DNA, 25 bp, Artificial
  Probe
gaacagcttgtctgaataatgtctt

SEQ ID NO: 164627 - DNA, 25 bp, Artificial
  Probe
acagcttgtctgaataatgtcttac

SEQ ID NO: 164628 - DNA, 25 bp, Artificial
  Probe
cagcttgtctgaataatgtcttact

SEQ ID NO: 164629 - DNA, 25 bp, Artificial
  Probe
ttgtgaagttcagccagtgtcttaa

SEQ ID NO: 164630 - DNA, 25 bp, Artificial
  Probe
aacagcttgtctgaataatgtctta

SEQ ID NO: 164631 - DNA, 25 bp, Artificial
  Probe
ctgtatggatttgggagttagggag

SEQ ID NO: 164632 - DNA, 25 bp, Artificial
  Probe
ttgtctgaataatgtcttactgtag

SEQ ID NO: 164633 - DNA, 25 bp, Artificial
  Probe
cttgtctgaataatgtcttactgta

SEQ ID NO: 164634 - DNA, 25 bp, Artificial
  Probe
tctgaataatgtcttactgtagttg

SEQ ID NO: 164635 - DNA, 25 bp, Artificial
  Probe
gtctgaataatgtcttactgtagtt

SEQ ID NO: 164636 - DNA, 25 bp, Artificial
  Probe
tatggatttgggagttagggaggag

SEQ ID NO: 164637 - DNA, 25 bp, Artificial
  Probe
gtatggatttgggagttagggagga

SEQ ID NO: 164638 - DNA, 25 bp, Artificial
  Probe
gtggctgtatggatttgggagttag

SEQ ID NO: 164639 - DNA, 25 bp, Artificial
  Probe
tgtatggatttgggagttagggagg

SEQ ID NO: 164640 - DNA, 25 bp, Artificial
  Probe
tttgtgaagttcagccagtgtctta

SEQ ID NO: 164641 - DNA, 25 bp, Artificial
  Probe
aaattggagcaaagccactgttaaa

SEQ ID NO: 164642 - DNA, 25 bp, Artificial
  Probe
agtggctgtatggatttgggagtta

SEQ ID NO: 164643 - DNA, 25 bp, Artificial
  Probe
tgtgaagttcagccagtgtcttaag

SEQ ID NO: 164644 - DNA, 25 bp, Artificial
  Probe
cagaacagcttgtctgaataatgtc

SEQ ID NO: 164645 - DNA, 25 bp, Artificial
  Probe
cacagaacagcttgtctgaataatg

SEQ ID NO: 164646 - DNA, 25 bp, Artificial
  Probe
acagaacagcttgtctgaataatgt

SEQ ID NO: 164647 - DNA, 25 bp, Artificial
  Probe
ccacagaacagcttgtctgaataat

SEQ ID NO: 164648 - DNA, 25 bp, Artificial
  Probe
gctgtatggatttgggagttaggga

SEQ ID NO: 164649 - DNA, 25 bp, Artificial
  Probe
attgagtggctgtatggatttggga

SEQ ID NO: 164650 - DNA, 25 bp, Artificial
  Probe
taccacagaacagcttgtctgaata

SEQ ID NO: 164651 - DNA, 25 bp, Artificial
  Probe
tggctgtatggatttgggagttagg

SEQ ID NO: 164652 - DNA, 25 bp, Artificial
  Probe
aacagtaccacagaacagcttgtct

SEQ ID NO: 164653 - DNA, 25 bp, Artificial
  Probe
atttgggagttagggaggaggtgta

SEQ ID NO: 164654 - DNA, 25 bp, Artificial
  Probe
ctttgtgaagttcagccagtgtctt

SEQ ID NO: 164655 - DNA, 25 bp, Artificial
  Probe
accacagaacagcttgtctgaataa

SEQ ID NO: 164656 - DNA, 25 bp, Artificial
  Probe
aaacagtaccacagaacagcttgtc

SEQ ID NO: 164657 - DNA, 25 bp, Artificial
  Probe
gagtggctgtatggatttgggagtt

SEQ ID NO: 164658 - DNA, 25 bp, Artificial
  Probe
ttgagtggctgtatggatttgggag

SEQ ID NO: 164659 - DNA, 25 bp, Artificial
  Probe
gtaccacagaacagcttgtctgaat

SEQ ID NO: 164660 - DNA, 25 bp, Artificial
  Probe
ggctgtatggatttgggagttaggg

SEQ ID NO: 164661 - DNA, 25 bp, Artificial
  Probe
agttagggaggaggtgtactagcag

SEQ ID NO: 164662 - DNA, 25 bp, Artificial
  Probe
gagttagggaggaggtgtactagca

SEQ ID NO: 164663 - DNA, 25 bp, Artificial
  Probe
aattggagcaaagccactgttaaaa

SEQ ID NO: 164664 - DNA, 25 bp, Artificial
  Probe
gggagttagggaggaggtgtactag

SEQ ID NO: 164665 - DNA, 25 bp, Artificial
  Probe
attggagcaaagccactgttaaaag

SEQ ID NO: 164666 - DNA, 25 bp, Artificial
  Probe
atggatttgggagttagggaggagg

SEQ ID NO: 164667 - DNA, 25 bp, Artificial
  Probe
ccatctattctctcggtgccattac

SEQ ID NO: 164668 - DNA, 25 bp, Artificial
  Probe
tccatctattctctcggtgccatta

SEQ ID NO: 164669 - DNA, 25 bp, Artificial
  Probe
catctattctctcggtgccattacg

SEQ ID NO: 164670 - DNA, 25 bp, Artificial
  Probe
aatttcctttctcactcgtacatct

SEQ ID NO: 164671 - DNA, 25 bp, Artificial
  Probe
atttcctttctcactcgtacatctc

SEQ ID NO: 164672 - DNA, 25 bp, Artificial
  Probe
taatttcctttctcactcgtacatc

SEQ ID NO: 164673 - DNA, 25 bp, Artificial
  Probe
ctttctcactcgtacatctcgtttc

SEQ ID NO: 164674 - DNA, 25 bp, Artificial
  Probe
ccacttgtctgatgcaatcttcatt

SEQ ID NO: 164675 - DNA, 25 bp, Artificial
  Probe
tttaatttcctttctcactcgtaca

SEQ ID NO: 164676 - DNA, 25 bp, Artificial
  Probe
ttctcactcgtacatctcgtttcat

SEQ ID NO: 164677 - DNA, 25 bp, Artificial
  Probe
ttaatttcctttctcactcgtacat

SEQ ID NO: 164678 - DNA, 25 bp, Artificial
  Probe
tttctcactcgtacatctcgtttca

SEQ ID NO: 164679 - DNA, 25 bp, Artificial
  Probe
tctcactcgtacatctcgtttcatc

SEQ ID NO: 164680 - DNA, 25 bp, Artificial
  Probe
tccacttgtctgatgcaatcttcat

SEQ ID NO: 164681 - DNA, 25 bp, Artificial
  Probe
ctccatctattctctcggtgccatt

SEQ ID NO: 164682 - DNA, 25 bp, Artificial
  Probe
gagtcgagtacatttgctttacaag

SEQ ID NO: 164683 - DNA, 25 bp, Artificial
  Probe
tttcctttctcactcgtacatctcg

SEQ ID NO: 164684 - DNA, 25 bp, Artificial
  Probe
tcgagtacatttgctttacaagtga

SEQ ID NO: 164685 - DNA, 25 bp, Artificial
  Probe
gtcgagtacatttgctttacaagtg

SEQ ID NO: 164686 - DNA, 25 bp, Artificial
  Probe
agtcgagtacatttgctttacaagt

SEQ ID NO: 164687 - DNA, 25 bp, Artificial
  Probe
ttccacttgtctgatgcaatcttca

SEQ ID NO: 164688 - DNA, 25 bp, Artificial
  Probe
ggagtcgagtacatttgctttacaa

SEQ ID NO: 164689 - DNA, 25 bp, Artificial
  Probe
cctttctcactcgtacatctcgttt

SEQ ID NO: 164690 - DNA, 25 bp, Artificial
  Probe
cacttgtctgatgcaatcttcattt

SEQ ID NO: 164691 - DNA, 25 bp, Artificial
  Probe
acttgtctgatgcaatcttcattta

SEQ ID NO: 164692 - DNA, 25 bp, Artificial
  Probe
ctattctctcggtgccattacgttc

SEQ ID NO: 164693 - DNA, 25 bp, Artificial
  Probe
atgggagtcgagtacatttgcttta

SEQ ID NO: 164694 - DNA, 25 bp, Artificial
  Probe
attttctccatctattctctcggtg

SEQ ID NO: 164695 - DNA, 25 bp, Artificial
  Probe
atctattctctcggtgccattacgt

SEQ ID NO: 164696 - DNA, 25 bp, Artificial
  Probe
gattttctccatctattctctcggt

SEQ ID NO: 164697 - DNA, 25 bp, Artificial
  Probe
tgattttctccatctattctctcgg

SEQ ID NO: 164698 - DNA, 25 bp, Artificial
  Probe
gtctgatgcaatcttcatttattcc

SEQ ID NO: 164699 - DNA, 25 bp, Artificial
  Probe
tctgatgcaatcttcatttattcct

SEQ ID NO: 164700 - DNA, 25 bp, Artificial
  Probe
tttccacttgtctgatgcaatcttc

SEQ ID NO: 164701 - DNA, 25 bp, Artificial
  Probe
ctttccacttgtctgatgcaatctt

SEQ ID NO: 164702 - DNA, 25 bp, Artificial
  Probe
cccctgattcacattttaatttcct

SEQ ID NO: 164703 - DNA, 25 bp, Artificial
  Probe
tcccctgattcacattttaatttcc

SEQ ID NO: 164704 - DNA, 25 bp, Artificial
  Probe
gttctcccctgattcacattttaat

SEQ ID NO: 164705 - DNA, 25 bp, Artificial
  Probe
ctcgtacatctcgtttcatcgtctc

SEQ ID NO: 164706 - DNA, 25 bp, Artificial
  Probe
ctgattttctccatctattctctcg

SEQ ID NO: 164707 - DNA, 25 bp, Artificial
  Probe
tcctttctcactcgtacatctcgtt

SEQ ID NO: 164708 - DNA, 25 bp, Artificial
  Probe
ttcctttctcactcgtacatctcgt

SEQ ID NO: 164709 - DNA, 25 bp, Artificial
  Probe
tattctctcggtgccattacgttct

SEQ ID NO: 164710 - DNA, 25 bp, Artificial
  Probe
tctattctctcggtgccattacgtt

SEQ ID NO: 164711 - DNA, 25 bp, Artificial
  Probe
ctcactcgtacatctcgtttcatcg

SEQ ID NO: 164712 - DNA, 25 bp, Artificial
  Probe
tgtctatcttatcttgccgagtcat

SEQ ID NO: 164713 - DNA, 25 bp, Artificial
  Probe
ttgtctatcttatcttgccgagtca

SEQ ID NO: 164714 - DNA, 25 bp, Artificial
  Probe
tagagcacagacagaagagaatcac

SEQ ID NO: 164715 - DNA, 25 bp, Artificial
  Probe
gtctatcttatcttgccgagtcatg

SEQ ID NO: 164716 - DNA, 25 bp, Artificial
  Probe
ctagagcacagacagaagagaatca

SEQ ID NO: 164717 - DNA, 25 bp, Artificial
  Probe
tagaccaacagcacagaatattagg

SEQ ID NO: 164718 - DNA, 25 bp, Artificial
  Probe
cctagagcacagacagaagagaatc

SEQ ID NO: 164719 - DNA, 25 bp, Artificial
  Probe
atagaccaacagcacagaatattag

SEQ ID NO: 164720 - DNA, 25 bp, Artificial
  Probe
ttatgtcaactgactgccatgaata

SEQ ID NO: 164721 - DNA, 25 bp, Artificial
  Probe
attcttattcagcaacaaatccacc

SEQ ID NO: 164722 - DNA, 25 bp, Artificial
  Probe
tttgtctatcttatcttgccgagtc

SEQ ID NO: 164723 - DNA, 25 bp, Artificial
  Probe
tatgtcaactgactgccatgaatag

SEQ ID NO: 164724 - DNA, 25 bp, Artificial
  Probe
gtttgtctatcttatcttgccgagt

SEQ ID NO: 164725 - DNA, 25 bp, Artificial
  Probe
tctatcttatcttgccgagtcatgc

SEQ ID NO: 164726 - DNA, 25 bp, Artificial
  Probe
ttcttattcagcaacaaatccacca

SEQ ID NO: 164727 - DNA, 25 bp, Artificial
  Probe
agagcacagacagaagagaatcact

SEQ ID NO: 164728 - DNA, 25 bp, Artificial
  Probe
tgcaagcataatatacaatccactt

SEQ ID NO: 164729 - DNA, 25 bp, Artificial
  Probe
atatagaccaacagcacagaatatt

SEQ ID NO: 164730 - DNA, 25 bp, Artificial
  Probe
tcttattcagcaacaaatccaccag

SEQ ID NO: 164731 - DNA, 25 bp, Artificial
  Probe
cgtttgtctatcttatcttgccgag

SEQ ID NO: 164732 - DNA, 25 bp, Artificial
  Probe
cccacagataaatgaggaaagtcaa

SEQ ID NO: 164733 - DNA, 25 bp, Artificial
  Probe
tcaactgactgccatgaatagtgtt

SEQ ID NO: 164734 - DNA, 25 bp, Artificial
  Probe
ccacagataaatgaggaaagtcaat

SEQ ID NO: 164735 - DNA, 25 bp, Artificial
  Probe
tatatagaccaacagcacagaatat

SEQ ID NO: 164736 - DNA, 25 bp, Artificial
  Probe
gcccaccaggattatttacatgata

SEQ ID NO: 164737 - DNA, 25 bp, Artificial
  Probe
taatcccatttacatgctacattgc

SEQ ID NO: 164738 - DNA, 25 bp, Artificial
  Probe
tatagaccaacagcacagaatatta

SEQ ID NO: 164739 - DNA, 25 bp, Artificial
  Probe
cccaccaggattatttacatgatac

SEQ ID NO: 164740 - DNA, 25 bp, Artificial
  Probe
atgtcaactgactgccatgaatagt

SEQ ID NO: 164741 - DNA, 25 bp, Artificial
  Probe
tacattgcgacacatccctacatag

SEQ ID NO: 164742 - DNA, 25 bp, Artificial
  Probe
ctacattgcgacacatccctacata

SEQ ID NO: 164743 - DNA, 25 bp, Artificial
  Probe
gcaagcataatatacaatccacttt

SEQ ID NO: 164744 - DNA, 25 bp, Artificial
  Probe
agcacagaatattagggaggagaat

SEQ ID NO: 164745 - DNA, 25 bp, Artificial
  Probe
ctatcttatcttgccgagtcatgcc

SEQ ID NO: 164746 - DNA, 25 bp, Artificial
  Probe
ttcatgggctgttagaatatttcac

SEQ ID NO: 164747 - DNA, 25 bp, Artificial
  Probe
ccaccaggattatttacatgataca

SEQ ID NO: 164748 - DNA, 25 bp, Artificial
  Probe
gagcacagacagaagagaatcactg

SEQ ID NO: 164749 - DNA, 25 bp, Artificial
  Probe
gcacagaatattagggaggagaata

SEQ ID NO: 164750 - DNA, 25 bp, Artificial
  Probe
atttacatgctacattgcgacacat

SEQ ID NO: 164751 - DNA, 25 bp, Artificial
  Probe
agcccaccaggattatttacatgat

SEQ ID NO: 164752 - DNA, 25 bp, Artificial
  Probe
tgatgttatctatcccagcctagag

SEQ ID NO: 164753 - DNA, 25 bp, Artificial
  Probe
ctgatgttatctatcccagcctaga

SEQ ID NO: 164754 - DNA, 25 bp, Artificial
  Probe
tttcatgggctgttagaatatttca

SEQ ID NO: 164755 - DNA, 25 bp, Artificial
  Probe
cagcacagaatattagggaggagaa

SEQ ID NO: 164756 - DNA, 25 bp, Artificial
  Probe
tgattcttattcagcaacaaatcca

SEQ ID NO: 164757 - DNA, 25 bp, Artificial
  Probe
cactcttctggttcttcaacatcta

SEQ ID NO: 164758 - DNA, 25 bp, Artificial
  Probe
actcttctggttcttcaacatctat

SEQ ID NO: 164759 - DNA, 25 bp, Artificial
  Probe
ctcttctggttcttcaacatctatg

SEQ ID NO: 164760 - DNA, 25 bp, Artificial
  Probe
agagttaatagagactggcttagga

SEQ ID NO: 164761 - DNA, 25 bp, Artificial
  Probe
gagttaatagagactggcttaggag

SEQ ID NO: 164762 - DNA, 25 bp, Artificial
  Probe
cttctggttcttcaacatctatgac

SEQ ID NO: 164763 - DNA, 25 bp, Artificial
  Probe
tcttctggttcttcaacatctatga

SEQ ID NO: 164764 - DNA, 25 bp, Artificial
  Probe
agttaatagagactggcttaggagg

SEQ ID NO: 164765 - DNA, 25 bp, Artificial
  Probe
cagagttaatagagactggcttagg

SEQ ID NO: 164766 - DNA, 25 bp, Artificial
  Probe
tcagagttaatagagactggcttag

SEQ ID NO: 164767 - DNA, 25 bp, Artificial
  Probe
ctcagagttaatagagactggctta

SEQ ID NO: 164768 - DNA, 25 bp, Artificial
  Probe
ctggttcttcaacatctatgacctt

SEQ ID NO: 164769 - DNA, 25 bp, Artificial
  Probe
ttctggttcttcaacatctatgacc

SEQ ID NO: 164770 - DNA, 25 bp, Artificial
  Probe
tctggttcttcaacatctatgacct

SEQ ID NO: 164771 - DNA, 25 bp, Artificial
  Probe
accaccttaactgttgctttgtatg

SEQ ID NO: 164772 - DNA, 25 bp, Artificial
  Probe
caccaccttaactgttgctttgtat

SEQ ID NO: 164773 - DNA, 25 bp, Artificial
  Probe
gttaatagagactggcttaggaggg

SEQ ID NO: 164774 - DNA, 25 bp, Artificial
  Probe
ccactcttctggttcttcaacatct

SEQ ID NO: 164775 - DNA, 25 bp, Artificial
  Probe
tccactcttctggttcttcaacatc

SEQ ID NO: 164776 - DNA, 25 bp, Artificial
  Probe
ctccactcttctggttcttcaacat

SEQ ID NO: 164777 - DNA, 25 bp, Artificial
  Probe
tggttcttcaacatctatgaccttt

SEQ ID NO: 164778 - DNA, 25 bp, Artificial
  Probe
caccttaactgttgctttgtatgcc

SEQ ID NO: 164779 - DNA, 25 bp, Artificial
  Probe
ccaccttaactgttgctttgtatgc

SEQ ID NO: 164780 - DNA, 25 bp, Artificial
  Probe
tctcagagttaatagagactggctt

SEQ ID NO: 164781 - DNA, 25 bp, Artificial
  Probe
ctctcagagttaatagagactggct

SEQ ID NO: 164782 - DNA, 25 bp, Artificial
  Probe
ttaatagagactggcttaggagggc

SEQ ID NO: 164783 - DNA, 25 bp, Artificial
  Probe
catacaaaagcaacagttaaggtgg

SEQ ID NO: 164784 - DNA, 25 bp, Artificial
  Probe
acatctatgaccttttattggcttc

SEQ ID NO: 164785 - DNA, 25 bp, Artificial
  Probe
caacagttaaggtggtgcaggtatc

SEQ ID NO: 164786 - DNA, 25 bp, Artificial
  Probe
gatacctgcaccaccttaactgttg

SEQ ID NO: 164787 - DNA, 25 bp, Artificial
  Probe
ggaaaactgaaaaggttgaaggaaa

SEQ ID NO: 164788 - DNA, 25 bp, Artificial
  Probe
tttccttcaaccttttcagttttcc

SEQ ID NO: 164789 - DNA, 25 bp, Artificial
  Probe
gaaaactgaaaaggttgaaggaaac

SEQ ID NO: 164790 - DNA, 25 bp, Artificial
  Probe
gtttccttcaaccttttcagttttc

SEQ ID NO: 164791 - DNA, 25 bp, Artificial
  Probe
atacaaaagcaacagttaaggtggt

SEQ ID NO: 164792 - DNA, 25 bp, Artificial
  Probe
aacagttaaggtggtgcaggtatct

SEQ ID NO: 164793 - DNA, 25 bp, Artificial
  Probe
agatacctgcaccaccttaactgtt

SEQ ID NO: 164794 - DNA, 25 bp, Artificial
  Probe
aacatctatgaccttttattggctt

SEQ ID NO: 164795 - DNA, 25 bp, Artificial
  Probe
aaaactgaaaaggttgaaggaaacg

SEQ ID NO: 164796 - DNA, 25 bp, Artificial
  Probe
cgtttccttcaaccttttcagtttt

SEQ ID NO: 164797 - DNA, 25 bp, Artificial
  Probe
tttattggcttcagcactctcagag

SEQ ID NO: 164798 - DNA, 25 bp, Artificial
  Probe
caacatctatgaccttttattggct

SEQ ID NO: 164799 - DNA, 25 bp, Artificial
  Probe
gcatacaaaagcaacagttaaggtg

SEQ ID NO: 164800 - DNA, 25 bp, Artificial
  Probe
tcaacatctatgaccttttattggc

SEQ ID NO: 164801 - DNA, 25 bp, Artificial
  Probe
tggaaaactgaaaaggttgaaggaa

SEQ ID NO: 164802 - DNA, 25 bp, Artificial
  Probe
cttaacaagaacaagaagttggtca

SEQ ID NO: 164803 - DNA, 25 bp, Artificial
  Probe
cacaatcaagttccagatgaagaag

SEQ ID NO: 164804 - DNA, 25 bp, Artificial
  Probe
ttaacaagaacaagaagttggtcaa

SEQ ID NO: 164805 - DNA, 25 bp, Artificial
  Probe
gcttaacaagaacaagaagttggtc

SEQ ID NO: 164806 - DNA, 25 bp, Artificial
  Probe
aatccacaatcaagttccagatgaa

SEQ ID NO: 164807 - DNA, 25 bp, Artificial
  Probe
aatcaagttccagatgaagaaggtg

SEQ ID NO: 164808 - DNA, 25 bp, Artificial
  Probe
caatcaagttccagatgaagaaggt

SEQ ID NO: 164809 - DNA, 25 bp, Artificial
  Probe
acaatcaagttccagatgaagaagg

SEQ ID NO: 164810 - DNA, 25 bp, Artificial
  Probe
atccacaatcaagttccagatgaag

SEQ ID NO: 164811 - DNA, 25 bp, Artificial
  Probe
ccacaatcaagttccagatgaagaa

SEQ ID NO: 164812 - DNA, 25 bp, Artificial
  Probe
tcaacttcttggtgtccttactcaa

SEQ ID NO: 164813 - DNA, 25 bp, Artificial
  Probe
tccacaatcaagttccagatgaaga

SEQ ID NO: 164814 - DNA, 25 bp, Artificial
  Probe
gtcaacttcttggtgtccttactca

SEQ ID NO: 164815 - DNA, 25 bp, Artificial
  Probe
tgtcaacttcttggtgtccttactc

SEQ ID NO: 164816 - DNA, 25 bp, Artificial
  Probe
ctgtcaacttcttggtgtccttact

SEQ ID NO: 164817 - DNA, 25 bp, Artificial
  Probe
agcttaacaagaacaagaagttggt

SEQ ID NO: 164818 - DNA, 25 bp, Artificial
  Probe
gaaatccacaatcaagttccagatg

SEQ ID NO: 164819 - DNA, 25 bp, Artificial
  Probe
taacaagaacaagaagttggtcaaa

SEQ ID NO: 164820 - DNA, 25 bp, Artificial
  Probe
aaatccacaatcaagttccagatga

SEQ ID NO: 164821 - DNA, 25 bp, Artificial
  Probe
tgaaatccacaatcaagttccagat

SEQ ID NO: 164822 - DNA, 25 bp, Artificial
  Probe
atcaagttccagatgaagaaggtgc

SEQ ID NO: 164823 - DNA, 25 bp, Artificial
  Probe
atgaggtgaaatccacaatcaagtt

SEQ ID NO: 164824 - DNA, 25 bp, Artificial
  Probe
tctgtattaggacgctccaataaac

SEQ ID NO: 164825 - DNA, 25 bp, Artificial
  Probe
gtctgtattaggacgctccaataaa

SEQ ID NO: 164826 - DNA, 25 bp, Artificial
  Probe
gatgaggtgaaatccacaatcaagt

SEQ ID NO: 164827 - DNA, 25 bp, Artificial
  Probe
gtattaggacgctccaataaacctc

SEQ ID NO: 164828 - DNA, 25 bp, Artificial
  Probe
gtgaaatccacaatcaagttccaga

SEQ ID NO: 164829 - DNA, 25 bp, Artificial
  Probe
tgaggtgaaatccacaatcaagttc

SEQ ID NO: 164830 - DNA, 25 bp, Artificial
  Probe
ctgtattaggacgctccaataaacc

SEQ ID NO: 164831 - DNA, 25 bp, Artificial
  Probe
gctgtcaacttcttggtgtccttac

SEQ ID NO: 164832 - DNA, 25 bp, Artificial
  Probe
tgtattaggacgctccaataaacct

SEQ ID NO: 164833 - DNA, 25 bp, Artificial
  Probe
tcaagttccagatgaagaaggtgct

SEQ ID NO: 164834 - DNA, 25 bp, Artificial
  Probe
gaggtgaaatccacaatcaagttcc

SEQ ID NO: 164835 - DNA, 25 bp, Artificial
  Probe
ggtgaaatccacaatcaagttccag

SEQ ID NO: 164836 - DNA, 25 bp, Artificial
  Probe
atgacgagctagtctacaacatcca

SEQ ID NO: 164837 - DNA, 25 bp, Artificial
  Probe
tattaggacgctccaataaacctcg

SEQ ID NO: 164838 - DNA, 25 bp, Artificial
  Probe
caagttccagatgaagaaggtgctg

SEQ ID NO: 164839 - DNA, 25 bp, Artificial
  Probe
ctcaagaagcttaacaagaacaaga

SEQ ID NO: 164840 - DNA, 25 bp, Artificial
  Probe
caacttcttggtgtccttactcaag

SEQ ID NO: 164841 - DNA, 25 bp, Artificial
  Probe
aggtgaaatccacaatcaagttcca

SEQ ID NO: 164842 - DNA, 25 bp, Artificial
  Probe
aagcttaacaagaacaagaagttgg

SEQ ID NO: 164843 - DNA, 25 bp, Artificial
  Probe
aagaagcttaacaagaacaagaagt

SEQ ID NO: 164844 - DNA, 25 bp, Artificial
  Probe
tcaagaagcttaacaagaacaagaa

SEQ ID NO: 164845 - DNA, 25 bp, Artificial
  Probe
agaagcttaacaagaacaagaagtt

SEQ ID NO: 164846 - DNA, 25 bp, Artificial
  Probe
ctagtctacaacatccacctggctg

SEQ ID NO: 164847 - DNA, 25 bp, Artificial
  Probe
aacaatcacctccagttattacaga

SEQ ID NO: 164848 - DNA, 25 bp, Artificial
  Probe
gaacaatcacctccagttattacag

SEQ ID NO: 164849 - DNA, 25 bp, Artificial
  Probe
cgaacaatcacctccagttattaca

SEQ ID NO: 164850 - DNA, 25 bp, Artificial
  Probe
acaatcacctccagttattacagag

SEQ ID NO: 164851 - DNA, 25 bp, Artificial
  Probe
ttattcaagttactcctgattggcg

SEQ ID NO: 164852 - DNA, 25 bp, Artificial
  Probe
atagttgtgtatgatgtgacagacc

SEQ ID NO: 164853 - DNA, 25 bp, Artificial
  Probe
tagactacacaacagccaaggaatt

SEQ ID NO: 164854 - DNA, 25 bp, Artificial
  Probe
catagttgtgtatgatgtgacagac

SEQ ID NO: 164855 - DNA, 25 bp, Artificial
  Probe
tagttgtgtatgatgtgacagacca

SEQ ID NO: 164856 - DNA, 25 bp, Artificial
  Probe
tattcaagttactcctgattggcga

SEQ ID NO: 164857 - DNA, 25 bp, Artificial
  Probe
aagatacggactatagagctagacg

SEQ ID NO: 164858 - DNA, 25 bp, Artificial
  Probe
caagatacggactatagagctagac

SEQ ID NO: 164859 - DNA, 25 bp, Artificial
  Probe
tcaagatacggactatagagctaga

SEQ ID NO: 164860 - DNA, 25 bp, Artificial
  Probe
tcgaacaatcacctccagttattac

SEQ ID NO: 164861 - DNA, 25 bp, Artificial
  Probe
gtgtggatttcaagatacggactat

SEQ ID NO: 164862 - DNA, 25 bp, Artificial
  Probe
gtagactacacaacagccaaggaat

SEQ ID NO: 164863 - DNA, 25 bp, Artificial
  Probe
cctgaccacaaagaaagtagtagac

SEQ ID NO: 164864 - DNA, 25 bp, Artificial
  Probe
gacctgaccacaaagaaagtagtag

SEQ ID NO: 164865 - DNA, 25 bp, Artificial
  Probe
ttcaagatacggactatagagctag

SEQ ID NO: 164866 - DNA, 25 bp, Artificial
  Probe
tgtggatttcaagatacggactata

SEQ ID NO: 164867 - DNA, 25 bp, Artificial
  Probe
acctgaccacaaagaaagtagtaga

SEQ ID NO: 164868 - DNA, 25 bp, Artificial
  Probe
tagtagactacacaacagccaagga

SEQ ID NO: 164869 - DNA, 25 bp, Artificial
  Probe
tgacctgaccacaaagaaagtagta

SEQ ID NO: 164870 - DNA, 25 bp, Artificial
  Probe
agttgtgtatgatgtgacagaccag

SEQ ID NO: 164871 - DNA, 25 bp, Artificial
  Probe
ctgaccacaaagaaagtagtagact

SEQ ID NO: 164872 - DNA, 25 bp, Artificial
  Probe
tttattcaagttactcctgattggc

SEQ ID NO: 164873 - DNA, 25 bp, Artificial
  Probe
acgattggtgtggatttcaagatac

SEQ ID NO: 164874 - DNA, 25 bp, Artificial
  Probe
agatacggactatagagctagacgg

SEQ ID NO: 164875 - DNA, 25 bp, Artificial
  Probe
attcaagttactcctgattggcgac

SEQ ID NO: 164876 - DNA, 25 bp, Artificial
  Probe
ggtgtggatttcaagatacggacta

SEQ ID NO: 164877 - DNA, 25 bp, Artificial
  Probe
tgaccacaaagaaagtagtagacta

SEQ ID NO: 164878 - DNA, 25 bp, Artificial
  Probe
agtagactacacaacagccaaggaa

SEQ ID NO: 164879 - DNA, 25 bp, Artificial
  Probe
gattggtgtggatttcaagatacgg

SEQ ID NO: 164880 - DNA, 25 bp, Artificial
  Probe
attggtgtggatttcaagatacgga

SEQ ID NO: 164881 - DNA, 25 bp, Artificial
  Probe
gttgtgtatgatgtgacagaccagg

SEQ ID NO: 164882 - DNA, 25 bp, Artificial
  Probe
gacagaccaggagtccttcaataac

SEQ ID NO: 164883 - DNA, 25 bp, Artificial
  Probe
cgattggtgtggatttcaagatacg

SEQ ID NO: 164884 - DNA, 25 bp, Artificial
  Probe
cacgattggtgtggatttcaagata

SEQ ID NO: 164885 - DNA, 25 bp, Artificial
  Probe
ttgtgtatgatgtgacagaccagga

SEQ ID NO: 164886 - DNA, 25 bp, Artificial
  Probe
agactacacaacagccaaggaattt

SEQ ID NO: 164887 - DNA, 25 bp, Artificial
  Probe
gactacacaacagccaaggaatttg

SEQ ID NO: 164888 - DNA, 25 bp, Artificial
  Probe
tgacagaccaggagtccttcaataa

SEQ ID NO: 164889 - DNA, 25 bp, Artificial
  Probe
atttcaagatacggactatagagct

SEQ ID NO: 164890 - DNA, 25 bp, Artificial
  Probe
tgtatgatgtgacagaccaggagtc

SEQ ID NO: 164891 - DNA, 25 bp, Artificial
  Probe
aagtagtagactacacaacagccaa

SEQ ID NO: 164892 - DNA, 25 bp, Artificial
  Probe
ctaccgaagattcagacatggattc

SEQ ID NO: 164893 - DNA, 25 bp, Artificial
  Probe
tctaccgaagattcagacatggatt

SEQ ID NO: 164894 - DNA, 25 bp, Artificial
  Probe
taccgaagattcagacatggattcc

SEQ ID NO: 164895 - DNA, 25 bp, Artificial
  Probe
caagagaaagtataactggagtgcc

SEQ ID NO: 164896 - DNA, 25 bp, Artificial
  Probe
gtagaagcaagatgacgaaaggaac

SEQ ID NO: 164897 - DNA, 25 bp, Artificial
  Probe
gaagattcagacatggattccgtga

SEQ ID NO: 164898 - DNA, 25 bp, Artificial
  Probe
cgcaagagaaagtataactggagtg

SEQ ID NO: 164899 - DNA, 25 bp, Artificial
  Probe
ggtagaagcaagatgacgaaaggaa

SEQ ID NO: 164900 - DNA, 25 bp, Artificial
  Probe
gagaaagtataactggagtgccaag

SEQ ID NO: 164901 - DNA, 25 bp, Artificial
  Probe
agagaaagtataactggagtgccaa

SEQ ID NO: 164902 - DNA, 25 bp, Artificial
  Probe
aagagaaagtataactggagtgcca

SEQ ID NO: 164903 - DNA, 25 bp, Artificial
  Probe
tagaagcaagatgacgaaaggaacg

SEQ ID NO: 164904 - DNA, 25 bp, Artificial
  Probe
gatgaggcacctaaagatcgtctac

SEQ ID NO: 164905 - DNA, 25 bp, Artificial
  Probe
cgaagattcagacatggattccgtg

SEQ ID NO: 164906 - DNA, 25 bp, Artificial
  Probe
tataactggagtgccaaggctaaga

SEQ ID NO: 164907 - DNA, 25 bp, Artificial
  Probe
gtataactggagtgccaaggctaag

SEQ ID NO: 164908 - DNA, 25 bp, Artificial
  Probe
aagattcagacatggattccgtgaa

SEQ ID NO: 164909 - DNA, 25 bp, Artificial
  Probe
taaagatcgtctaccgaagattcag

SEQ ID NO: 164910 - DNA, 25 bp, Artificial
  Probe
ctaaagatcgtctaccgaagattca

SEQ ID NO: 164911 - DNA, 25 bp, Artificial
  Probe
cctaaagatcgtctaccgaagattc

SEQ ID NO: 164912 - DNA, 25 bp, Artificial
  Probe
agaaagtataactggagtgccaagg

SEQ ID NO: 164913 - DNA, 25 bp, Artificial
  Probe
acctaaagatcgtctaccgaagatt

SEQ ID NO: 164914 - DNA, 25 bp, Artificial
  Probe
agtataactggagtgccaaggctaa

SEQ ID NO: 164915 - DNA, 25 bp, Artificial
  Probe
aagtataactggagtgccaaggcta

SEQ ID NO: 164916 - DNA, 25 bp, Artificial
  Probe
aaagatcgtctaccgaagattcaga

SEQ ID NO: 164917 - DNA, 25 bp, Artificial
  Probe
agattcagacatggattccgtgaag

SEQ ID NO: 164918 - DNA, 25 bp, Artificial
  Probe
tcttgaggatttcaatcggtcataa

SEQ ID NO: 164919 - DNA, 25 bp, Artificial
  Probe
ccagttcatcttgaggatttcaatc

SEQ ID NO: 164920 - DNA, 25 bp, Artificial
  Probe
tccagttcatcttgaggatttcaat

SEQ ID NO: 164921 - DNA, 25 bp, Artificial
  Probe
atcttgaggatttcaatcggtcata

SEQ ID NO: 164922 - DNA, 25 bp, Artificial
  Probe
cagttcatcttgaggatttcaatcg

SEQ ID NO: 164923 - DNA, 25 bp, Artificial
  Probe
aaggaacaacacctaaacccaagag

SEQ ID NO: 164924 - DNA, 25 bp, Artificial
  Probe
gaaggaacaacacctaaacccaaga

SEQ ID NO: 164925 - DNA, 25 bp, Artificial
  Probe
cttgaggatttcaatcggtcataaa

SEQ ID NO: 164926 - DNA, 25 bp, Artificial
  Probe
cacctaaagatcgtctaccgaagat

SEQ ID NO: 164927 - DNA, 25 bp, Artificial
  Probe
ttcatcttgaggatttcaatcggtc

SEQ ID NO: 164928 - DNA, 25 bp, Artificial
  Probe
agttcatcttgaggatttcaatcgg

SEQ ID NO: 164929 - DNA, 25 bp, Artificial
  Probe
tcggtcataaaataaatcttctggt

SEQ ID NO: 164930 - DNA, 25 bp, Artificial
  Probe
catcttgaggatttcaatcggtcat

SEQ ID NO: 164931 - DNA, 25 bp, Artificial
  Probe
tgaaggaacaacacctaaacccaag

SEQ ID NO: 164932 - DNA, 25 bp, Artificial
  Probe
gttcatcttgaggatttcaatcggt

SEQ ID NO: 164933 - DNA, 25 bp, Artificial
  Probe
gtctaccgaagattcagacatggat

SEQ ID NO: 164934 - DNA, 25 bp, Artificial
  Probe
aagatcgtctaccgaagattcagac

SEQ ID NO: 164935 - DNA, 25 bp, Artificial
  Probe
gatcgtctaccgaagattcagacat

SEQ ID NO: 164936 - DNA, 25 bp, Artificial
  Probe
ggatgaggcacctaaagatcgtcta

SEQ ID NO: 164937 - DNA, 25 bp, Artificial
  Probe
ttatcagagaactcaatggtgtgtg

SEQ ID NO: 164938 - DNA, 25 bp, Artificial
  Probe
tcaagtacacagcatcagaataagt

SEQ ID NO: 164939 - DNA, 25 bp, Artificial
  Probe
ctcaagtacacagcatcagaataag

SEQ ID NO: 164940 - DNA, 25 bp, Artificial
  Probe
caagtacacagcatcagaataagtt

SEQ ID NO: 164941 - DNA, 25 bp, Artificial
  Probe
cctcaagtacacagcatcagaataa

SEQ ID NO: 164942 - DNA, 25 bp, Artificial
  Probe
tcctcaagtacacagcatcagaata

SEQ ID NO: 164943 - DNA, 25 bp, Artificial
  Probe
atcctcaagtacacagcatcagaat

SEQ ID NO: 164944 - DNA, 25 bp, Artificial
  Probe
tatcagagaactcaatggtgtgtgg

SEQ ID NO: 164945 - DNA, 25 bp, Artificial
  Probe
aagtaccttggaatctctatcagaa

SEQ ID NO: 164946 - DNA, 25 bp, Artificial
  Probe
tcatgtatcctcctgattattgtgt

SEQ ID NO: 164947 - DNA, 25 bp, Artificial
  Probe
agtacacagcatcagaataagttaa

SEQ ID NO: 164948 - DNA, 25 bp, Artificial
  Probe
aagtacacagcatcagaataagtta

SEQ ID NO: 164949 - DNA, 25 bp, Artificial
  Probe
tgtcttcatccactatcgaatactg

SEQ ID NO: 164950 - DNA, 25 bp, Artificial
  Probe
catgtaatgtagacagacctctgac

SEQ ID NO: 164951 - DNA, 25 bp, Artificial
  Probe
gcatgtcttcatccactatcgaata

SEQ ID NO: 164952 - DNA, 25 bp, Artificial
  Probe
atgtaatgtagacagacctctgaca

SEQ ID NO: 164953 - DNA, 25 bp, Artificial
  Probe
catgtcttcatccactatcgaatac

SEQ ID NO: 164954 - DNA, 25 bp, Artificial
  Probe
atgtcttcatccactatcgaatact

SEQ ID NO: 164955 - DNA, 25 bp, Artificial
  Probe
catgtatcctcctgattattgtgta

SEQ ID NO: 164956 - DNA, 25 bp, Artificial
  Probe
atcagaaacctattgggaaactaca

SEQ ID NO: 164957 - DNA, 25 bp, Artificial
  Probe
gtcttcatccactatcgaatactga

SEQ ID NO: 164958 - DNA, 25 bp, Artificial
  Probe
tgtatcctcctgattattgtgtatt

SEQ ID NO: 164959 - DNA, 25 bp, Artificial
  Probe
tttatcagagaactcaatggtgtgt

SEQ ID NO: 164960 - DNA, 25 bp, Artificial
  Probe
tgatatggacaagcagaaatctacc

SEQ ID NO: 164961 - DNA, 25 bp, Artificial
  Probe
gacttaatgaaattgttgatgctgc

SEQ ID NO: 164962 - DNA, 25 bp, Artificial
  Probe
catcctcaagtacacagcatcagaa

SEQ ID NO: 164963 - DNA, 25 bp, Artificial
  Probe
gtatgttgcacgtcttcatcaatta

SEQ ID NO: 164964 - DNA, 25 bp, Artificial
  Probe
tcctcctgattattgtgtattctaa

SEQ ID NO: 164965 - DNA, 25 bp, Artificial
  Probe
tatgttgcacgtcttcatcaattag

SEQ ID NO: 164966 - DNA, 25 bp, Artificial
  Probe
atttatcagagaactcaatggtgtg

SEQ ID NO: 164967 - DNA, 25 bp, Artificial
  Probe
cttaatgaaattgttgatgctgcca

SEQ ID NO: 164968 - DNA, 25 bp, Artificial
  Probe
acttaatgaaattgttgatgctgcc

SEQ ID NO: 164969 - DNA, 25 bp, Artificial
  Probe
tcttcatccactatcgaatactgat

SEQ ID NO: 164970 - DNA, 25 bp, Artificial
  Probe
atgtatcctcctgattattgtgtat

SEQ ID NO: 164971 - DNA, 25 bp, Artificial
  Probe
aactgatgaaattactcggatggac

SEQ ID NO: 164972 - DNA, 25 bp, Artificial
  Probe
caactgatgaaattactcggatgga

SEQ ID NO: 164973 - DNA, 25 bp, Artificial
  Probe
taccttggaatctctatcagaaacc

SEQ ID NO: 164974 - DNA, 25 bp, Artificial
  Probe
gatatggacaagcagaaatctaccc

SEQ ID NO: 164975 - DNA, 25 bp, Artificial
  Probe
atatggacaagcagaaatctaccct

SEQ ID NO: 164976 - DNA, 25 bp, Artificial
  Probe
tcagaaacctattgggaaactacaa

SEQ ID NO: 164977 - DNA, 25 bp, Artificial
  Probe
ccttggaatctctatcagaaaccta

SEQ ID NO: 164978 - DNA, 25 bp, Artificial
  Probe
cttcatccactatcgaatactgatc

SEQ ID NO: 164979 - DNA, 25 bp, Artificial
  Probe
aaatgatatggacaagcagaaatct

SEQ ID NO: 164980 - DNA, 25 bp, Artificial
  Probe
tctatcagaaacctattgggaaact

SEQ ID NO: 164981 - DNA, 25 bp, Artificial
  Probe
accttggaatctctatcagaaacct

SEQ ID NO: 164982 - DNA, 25 bp, Artificial
  Probe
gctatgaggagaagagatacaccat

SEQ ID NO: 164983 - DNA, 25 bp, Artificial
  Probe
ttcattgcttacgatgttcttgaga

SEQ ID NO: 164984 - DNA, 25 bp, Artificial
  Probe
tcattgcttacgatgttcttgagag

SEQ ID NO: 164985 - DNA, 25 bp, Artificial
  Probe
ctatgaggagaagagatacaccatg

SEQ ID NO: 164986 - DNA, 25 bp, Artificial
  Probe
attgcttacgatgttcttgagagga

SEQ ID NO: 164987 - DNA, 25 bp, Artificial
  Probe
cattgcttacgatgttcttgagagg

SEQ ID NO: 164988 - DNA, 25 bp, Artificial
  Probe
ttgcttacgatgttcttgagaggaa

SEQ ID NO: 164989 - DNA, 25 bp, Artificial
  Probe
tttgctataaccctgactttgagaa

SEQ ID NO: 164990 - DNA, 25 bp, Artificial
  Probe
ctttgtggatttcattgcttacgat

SEQ ID NO: 164991 - DNA, 25 bp, Artificial
  Probe
ctttgctataaccctgactttgaga

SEQ ID NO: 164992 - DNA, 25 bp, Artificial
  Probe
gagactttgctataaccctgacttt

SEQ ID NO: 164993 - DNA, 25 bp, Artificial
  Probe
gagctatgaggagaagagatacacc

SEQ ID NO: 164994 - DNA, 25 bp, Artificial
  Probe
actttgctataaccctgactttgag

SEQ ID NO: 164995 - DNA, 25 bp, Artificial
  Probe
gactttgctataaccctgactttga

SEQ ID NO: 164996 - DNA, 25 bp, Artificial
  Probe
agactttgctataaccctgactttg

SEQ ID NO: 164997 - DNA, 25 bp, Artificial
  Probe
ggatttcattgcttacgatgttctt

SEQ ID NO: 164998 - DNA, 25 bp, Artificial
  Probe
tctatctggagacagtagattgcta

SEQ ID NO: 164999 - DNA, 25 bp, Artificial
  Probe
ttgctataaccctgactttgagaag

SEQ ID NO: 165000 - DNA, 25 bp, Artificial
  Probe
ctatctggagacagtagattgctag

SEQ ID NO: 165001 - DNA, 25 bp, Artificial
  Probe
gatttcattgcttacgatgttcttg

SEQ ID NO: 165002 - DNA, 25 bp, Artificial
  Probe
tttgtggatttcattgcttacgatg

SEQ ID NO: 165003 - DNA, 25 bp, Artificial
  Probe
cgagctatgaggagaagagatacac

SEQ ID NO: 165004 - DNA, 25 bp, Artificial
  Probe
aatagccttctaaagttaaagtgcc

SEQ ID NO: 165005 - DNA, 25 bp, Artificial
  Probe
atagccttctaaagttaaagtgccc

SEQ ID NO: 165006 - DNA, 25 bp, Artificial
  Probe
tggatttcattgcttacgatgttct

SEQ ID NO: 165007 - DNA, 25 bp, Artificial
  Probe
gtggatttcattgcttacgatgttc

SEQ ID NO: 165008 - DNA, 25 bp, Artificial
  Probe
agctatgaggagaagagatacacca

SEQ ID NO: 165009 - DNA, 25 bp, Artificial
  Probe
tcgagctatgaggagaagagataca

SEQ ID NO: 165010 - DNA, 25 bp, Artificial
  Probe
tttcattgcttacgatgttcttgag

SEQ ID NO: 165011 - DNA, 25 bp, Artificial
  Probe
atttcattgcttacgatgttcttga

SEQ ID NO: 165012 - DNA, 25 bp, Artificial
  Probe
tacttaattgatgggtcacacaaga

SEQ ID NO: 165013 - DNA, 25 bp, Artificial
  Probe
acttaattgatgggtcacacaagat

SEQ ID NO: 165014 - DNA, 25 bp, Artificial
  Probe
tgaccacaaaccagaataaatcatt

SEQ ID NO: 165015 - DNA, 25 bp, Artificial
  Probe
tgtggatttcattgcttacgatgtt

SEQ ID NO: 165016 - DNA, 25 bp, Artificial
  Probe
ttgtggatttcattgcttacgatgt

SEQ ID NO: 165017 - DNA, 25 bp, Artificial
  Probe
ctagcaactcctttccattagcaaa

SEQ ID NO: 165018 - DNA, 25 bp, Artificial
  Probe
cctctgttcacaaagatggctattt

SEQ ID NO: 165019 - DNA, 25 bp, Artificial
  Probe
cctttgtggatttcattgcttacga

SEQ ID NO: 165020 - DNA, 25 bp, Artificial
  Probe
cttaattgatgggtcacacaagatc

SEQ ID NO: 165021 - DNA, 25 bp, Artificial
  Probe
ctgaccacaaaccagaataaatcat

SEQ ID NO: 165022 - DNA, 25 bp, Artificial
  Probe
ctcctgaccacaaaccagaataaat

SEQ ID NO: 165023 - DNA, 25 bp, Artificial
  Probe
tcctgaccacaaaccagaataaatc

SEQ ID NO: 165024 - DNA, 25 bp, Artificial
  Probe
acctttgtggatttcattgcttacg

SEQ ID NO: 165025 - DNA, 25 bp, Artificial
  Probe
cgagactttgctataaccctgactt

SEQ ID NO: 165026 - DNA, 25 bp, Artificial
  Probe
cctgaccacaaaccagaataaatca

SEQ ID NO: 165027 - DNA, 25 bp, Artificial
  Probe
gatcattgtcatcttggaaggtgtg

SEQ ID NO: 165028 - DNA, 25 bp, Artificial
  Probe
attgtcatcttggaaggtgtggtag

SEQ ID NO: 165029 - DNA, 25 bp, Artificial
  Probe
aagtgaagtacggtatgtagagtgc

SEQ ID NO: 165030 - DNA, 25 bp, Artificial
  Probe
cattgtcatcttggaaggtgtggta

SEQ ID NO: 165031 - DNA, 25 bp, Artificial
  Probe
tacttgtcactatgctatttctggc

SEQ ID NO: 165032 - DNA, 25 bp, Artificial
  Probe
atcattgtcatcttggaaggtgtgg

SEQ ID NO: 165033 - DNA, 25 bp, Artificial
  Probe
atacttgtcactatgctatttctgg

SEQ ID NO: 165034 - DNA, 25 bp, Artificial
  Probe
aaagtgaagtacggtatgtagagtg

SEQ ID NO: 165035 - DNA, 25 bp, Artificial
  Probe
gaaagtgaagtacggtatgtagagt

SEQ ID NO: 165036 - DNA, 25 bp, Artificial
  Probe
atggaaagtgaagtacggtatgtag

SEQ ID NO: 165037 - DNA, 25 bp, Artificial
  Probe
ggaaagtgaagtacggtatgtagag

SEQ ID NO: 165038 - DNA, 25 bp, Artificial
  Probe
ctggagatcattgtcatcttggaag

SEQ ID NO: 165039 - DNA, 25 bp, Artificial
  Probe
tggaaagtgaagtacggtatgtaga

SEQ ID NO: 165040 - DNA, 25 bp, Artificial
  Probe
gagatcattgtcatcttggaaggtg

SEQ ID NO: 165041 - DNA, 25 bp, Artificial
  Probe
catggaaagtgaagtacggtatgta

SEQ ID NO: 165042 - DNA, 25 bp, Artificial
  Probe
tgtcatcttggaaggtgtggtagaa

SEQ ID NO: 165043 - DNA, 25 bp, Artificial
  Probe
ttgtcatcttggaaggtgtggtaga

SEQ ID NO: 165044 - DNA, 25 bp, Artificial
  Probe
agatcattgtcatcttggaaggtgt

SEQ ID NO: 165045 - DNA, 25 bp, Artificial
  Probe
aagaaatattggaaagttcaccctg

SEQ ID NO: 165046 - DNA, 25 bp, Artificial
  Probe
caatgccttgtctaggttgtcagaa

SEQ ID NO: 165047 - DNA, 25 bp, Artificial
  Probe
agaaatattggaaagttcaccctgg

SEQ ID NO: 165048 - DNA, 25 bp, Artificial
  Probe
gatacttgtcactatgctatttctg

SEQ ID NO: 165049 - DNA, 25 bp, Artificial
  Probe
gaaatattggaaagttcaccctggt

SEQ ID NO: 165050 - DNA, 25 bp, Artificial
  Probe
aaagaaatattggaaagttcaccct

SEQ ID NO: 165051 - DNA, 25 bp, Artificial
  Probe
tcatcttggaaggtgtggtagaaac

SEQ ID NO: 165052 - DNA, 25 bp, Artificial
  Probe
gtcatcttggaaggtgtggtagaaa

SEQ ID NO: 165053 - DNA, 25 bp, Artificial
  Probe
ggagatcattgtcatcttggaaggt

SEQ ID NO: 165054 - DNA, 25 bp, Artificial
  Probe
tggagatcattgtcatcttggaagg

SEQ ID NO: 165055 - DNA, 25 bp, Artificial
  Probe
cctggagatcattgtcatcttggaa

SEQ ID NO: 165056 - DNA, 25 bp, Artificial
  Probe
gagtgccatacaagatctacttcag

SEQ ID NO: 165057 - DNA, 25 bp, Artificial
  Probe
gtgagtgccatacaagatctacttc

SEQ ID NO: 165058 - DNA, 25 bp, Artificial
  Probe
agtgaagtacggtatgtagagtgcc

SEQ ID NO: 165059 - DNA, 25 bp, Artificial
  Probe
tgagtgccatacaagatctacttca

SEQ ID NO: 165060 - DNA, 25 bp, Artificial
  Probe
agatacttgtcactatgctatttct

SEQ ID NO: 165061 - DNA, 25 bp, Artificial
  Probe
tcattgtcatcttggaaggtgtggt

SEQ ID NO: 165062 - DNA, 25 bp, Artificial
  Probe
agtgccatacaagatctacttcagg

SEQ ID NO: 165063 - DNA, 25 bp, Artificial
  Probe
tgtgagtgccatacaagatctactt

SEQ ID NO: 165064 - DNA, 25 bp, Artificial
  Probe
gacctggagatcattgtcatcttgg

SEQ ID NO: 165065 - DNA, 25 bp, Artificial
  Probe
ggacctggagatcattgtcatcttg

SEQ ID NO: 165066 - DNA, 25 bp, Artificial
  Probe
aggacctggagatcattgtcatctt

SEQ ID NO: 165067 - DNA, 25 bp, Artificial
  Probe
cacatggaaagtgaagtacggtatg

SEQ ID NO: 165068 - DNA, 25 bp, Artificial
  Probe
aagaaggaggcaaatgattggagac

SEQ ID NO: 165069 - DNA, 25 bp, Artificial
  Probe
caagaaggaggcaaatgattggaga

SEQ ID NO: 165070 - DNA, 25 bp, Artificial
  Probe
tattgctgtttctgtagccactaag

SEQ ID NO: 165071 - DNA, 25 bp, Artificial
  Probe
ctattgctgtttctgtagccactaa

SEQ ID NO: 165072 - DNA, 25 bp, Artificial
  Probe
ttcagttaattcaggcatctatgga

SEQ ID NO: 165073 - DNA, 25 bp, Artificial
  Probe
cttcagttaattcaggcatctatgg

SEQ ID NO: 165074 - DNA, 25 bp, Artificial
  Probe
tcagttaattcaggcatctatggat

SEQ ID NO: 165075 - DNA, 25 bp, Artificial
  Probe
taattcaggcatctatggatacact

SEQ ID NO: 165076 - DNA, 25 bp, Artificial
  Probe
tcttcagttaattcaggcatctatg

SEQ ID NO: 165077 - DNA, 25 bp, Artificial
  Probe
gacaagattatctcgttggcaatag

SEQ ID NO: 165078 - DNA, 25 bp, Artificial
  Probe
ttaattcaggcatctatggatacac

SEQ ID NO: 165079 - DNA, 25 bp, Artificial
  Probe
gttaattcaggcatctatggataca

SEQ ID NO: 165080 - DNA, 25 bp, Artificial
  Probe
ttacctagttcaagttctctaccat

SEQ ID NO: 165081 - DNA, 25 bp, Artificial
  Probe
ctagttcaagttctctaccatgtgg

SEQ ID NO: 165082 - DNA, 25 bp, Artificial
  Probe
cctagttcaagttctctaccatgtg

SEQ ID NO: 165083 - DNA, 25 bp, Artificial
  Probe
tacctagttcaagttctctaccatg

SEQ ID NO: 165084 - DNA, 25 bp, Artificial
  Probe
acaagattatctcgttggcaatagg

SEQ ID NO: 165085 - DNA, 25 bp, Artificial
  Probe
ggacaagattatctcgttggcaata

SEQ ID NO: 165086 - DNA, 25 bp, Artificial
  Probe
acctagttcaagttctctaccatgt

SEQ ID NO: 165087 - DNA, 25 bp, Artificial
  Probe
tagttcaagttctctaccatgtgga

SEQ ID NO: 165088 - DNA, 25 bp, Artificial
  Probe
agttaattcaggcatctatggatac

SEQ ID NO: 165089 - DNA, 25 bp, Artificial
  Probe
cagttaattcaggcatctatggata

SEQ ID NO: 165090 - DNA, 25 bp, Artificial
  Probe
aattcaggcatctatggatacactg

SEQ ID NO: 165091 - DNA, 25 bp, Artificial
  Probe
gatcttcagttaattcaggcatcta

SEQ ID NO: 165092 - DNA, 25 bp, Artificial
  Probe
atcttcagttaattcaggcatctat

SEQ ID NO: 165093 - DNA, 25 bp, Artificial
  Probe
ttcaggcatctatggatacactgta

SEQ ID NO: 165094 - DNA, 25 bp, Artificial
  Probe
gttcaagttctctaccatgtggaag

SEQ ID NO: 165095 - DNA, 25 bp, Artificial
  Probe
attcaggcatctatggatacactgt

SEQ ID NO: 165096 - DNA, 25 bp, Artificial
  Probe
ttcaagttctctaccatgtggaaga

SEQ ID NO: 165097 - DNA, 25 bp, Artificial
  Probe
tagacatgactgatgaggaattgct

SEQ ID NO: 165098 - DNA, 25 bp, Artificial
  Probe
agttcaagttctctaccatgtggaa

SEQ ID NO: 165099 - DNA, 25 bp, Artificial
  Probe
agaggaagccattagaggatgagaa

SEQ ID NO: 165100 - DNA, 25 bp, Artificial
  Probe
aagattatctcgttggcaataggct

SEQ ID NO: 165101 - DNA, 25 bp, Artificial
  Probe
caagattatctcgttggcaataggc

SEQ ID NO: 165102 - DNA, 25 bp, Artificial
  Probe
gattatctcgttggcaataggctga

SEQ ID NO: 165103 - DNA, 25 bp, Artificial
  Probe
tcaggcatctatggatacactgtac

SEQ ID NO: 165104 - DNA, 25 bp, Artificial
  Probe
taaggaatgatgggagtttgatgtt

SEQ ID NO: 165105 - DNA, 25 bp, Artificial
  Probe
ctgggatgctatttggttgtagtta

SEQ ID NO: 165106 - DNA, 25 bp, Artificial
  Probe
tagttctccattacccttacattcc

SEQ ID NO: 165107 - DNA, 25 bp, Artificial
  Probe
ctaaggaatgatgggagtttgatgt

SEQ ID NO: 165108 - DNA, 25 bp, Artificial
  Probe
tgggatgctatttggttgtagttaa

SEQ ID NO: 165109 - DNA, 25 bp, Artificial
  Probe
tatagacatgactgatgaggaattg

SEQ ID NO: 165110 - DNA, 25 bp, Artificial
  Probe
gggatgctatttggttgtagttaaa

SEQ ID NO: 165111 - DNA, 25 bp, Artificial
  Probe
catatagacatgactgatgaggaat

SEQ ID NO: 165112 - DNA, 25 bp, Artificial
  Probe
gaccagagccattctcaactacatt

SEQ ID NO: 165113 - DNA, 25 bp, Artificial
  Probe
cttgatgtgttgtgaaacttagagg

SEQ ID NO: 165114 - DNA, 25 bp, Artificial
  Probe
gaactcttgatgtgttgtgaaactt

SEQ ID NO: 165115 - DNA, 25 bp, Artificial
  Probe
cattaaccaactgtttagcaactca

SEQ ID NO: 165116 - DNA, 25 bp, Artificial
  Probe
actcttgatgtgttgtgaaacttag

SEQ ID NO: 165117 - DNA, 25 bp, Artificial
  Probe
tagatgtaagactagagaggttcca

SEQ ID NO: 165118 - DNA, 25 bp, Artificial
  Probe
tgtaagactagagaggttccatcag

SEQ ID NO: 165119 - DNA, 25 bp, Artificial
  Probe
gtagatgtaagactagagaggttcc

SEQ ID NO: 165120 - DNA, 25 bp, Artificial
  Probe
atgtaagactagagaggttccatca

SEQ ID NO: 165121 - DNA, 25 bp, Artificial
  Probe
agatgtaagactagagaggttccat

SEQ ID NO: 165122 - DNA, 25 bp, Artificial
  Probe
ggatgtagatgtaagactagagagg

SEQ ID NO: 165123 - DNA, 25 bp, Artificial
  Probe
gtaagactagagaggttccatcagg

SEQ ID NO: 165124 - DNA, 25 bp, Artificial
  Probe
tgtagatgtaagactagagaggttc

SEQ ID NO: 165125 - DNA, 25 bp, Artificial
  Probe
gatgtagatgtaagactagagaggt

SEQ ID NO: 165126 - DNA, 25 bp, Artificial
  Probe
atgtagatgtaagactagagaggtt

SEQ ID NO: 165127 - DNA, 25 bp, Artificial
  Probe
catttggaacattggacagaaactc

SEQ ID NO: 165128 - DNA, 25 bp, Artificial
  Probe
atttggaacattggacagaaactca

SEQ ID NO: 165129 - DNA, 25 bp, Artificial
  Probe
taagactagagaggttccatcaggc

SEQ ID NO: 165130 - DNA, 25 bp, Artificial
  Probe
gggatgtagatgtaagactagagag

SEQ ID NO: 165131 - DNA, 25 bp, Artificial
  Probe
gaacattggacagaaactcaaagag

SEQ ID NO: 165132 - DNA, 25 bp, Artificial
  Probe
ttggaacattggacagaaactcaaa

SEQ ID NO: 165133 - DNA, 25 bp, Artificial
  Probe
tttggaacattggacagaaactcaa

SEQ ID NO: 165134 - DNA, 25 bp, Artificial
  Probe
ggaacattggacagaaactcaaaga

SEQ ID NO: 165135 - DNA, 25 bp, Artificial
  Probe
tggaacattggacagaaactcaaag

SEQ ID NO: 165136 - DNA, 25 bp, Artificial
  Probe
ccaatttgtcatcctgtgaagactt

SEQ ID NO: 165137 - DNA, 25 bp, Artificial
  Probe
gatgtaagactagagaggttccatc

SEQ ID NO: 165138 - DNA, 25 bp, Artificial
  Probe
caatttgtcatcctgtgaagacttc

SEQ ID NO: 165139 - DNA, 25 bp, Artificial
  Probe
cctaaattacctgcccatttgactg

SEQ ID NO: 165140 - DNA, 25 bp, Artificial
  Probe
aatttgtcatcctgtgaagacttcc

SEQ ID NO: 165141 - DNA, 25 bp, Artificial
  Probe
ttggagaatatgaattggcctggta

SEQ ID NO: 165142 - DNA, 25 bp, Artificial
  Probe
tgctcccaaccatttatcaaccttt

SEQ ID NO: 165143 - DNA, 25 bp, Artificial
  Probe
taattggagaatatgaattggcctg

SEQ ID NO: 165144 - DNA, 25 bp, Artificial
  Probe
aattggagaatatgaattggcctgg

SEQ ID NO: 165145 - DNA, 25 bp, Artificial
  Probe
attggagaatatgaattggcctggt

SEQ ID NO: 165146 - DNA, 25 bp, Artificial
  Probe
ctaaattacctgcccatttgactgg

SEQ ID NO: 165147 - DNA, 25 bp, Artificial
  Probe
ctgctcccaaccatttatcaacctt

SEQ ID NO: 165148 - DNA, 25 bp, Artificial
  Probe
tggagaatatgaattggcctggtac

SEQ ID NO: 165149 - DNA, 25 bp, Artificial
  Probe
ccatttggaacattggacagaaact

SEQ ID NO: 165150 - DNA, 25 bp, Artificial
  Probe
ataattggagaatatgaattggcct

SEQ ID NO: 165151 - DNA, 25 bp, Artificial
  Probe
ccctaaattacctgcccatttgact

SEQ ID NO: 165152 - DNA, 25 bp, Artificial
  Probe
atcttgttttgtctcttccctactg

SEQ ID NO: 165153 - DNA, 25 bp, Artificial
  Probe
catcttgttttgtctcttccctact

SEQ ID NO: 165154 - DNA, 25 bp, Artificial
  Probe
taaattacctgcccatttgactgga

SEQ ID NO: 165155 - DNA, 25 bp, Artificial
  Probe
ggaaggggatgtagatgtaagacta

SEQ ID NO: 165156 - DNA, 25 bp, Artificial
  Probe
atcaataccagcgagagccagtaac

SEQ ID NO: 165157 - DNA, 25 bp, Artificial
  Probe
catcaataccagcgagagccagtaa

SEQ ID NO: 165158 - DNA, 25 bp, Artificial
  Probe
gttttgtctcttccctactgtcttc

SEQ ID NO: 165159 - DNA, 25 bp, Artificial
  Probe
acccacagagaaataaaaggaattg

SEQ ID NO: 165160 - DNA, 25 bp, Artificial
  Probe
cacccacagagaaataaaaggaatt

SEQ ID NO: 165161 - DNA, 25 bp, Artificial
  Probe
cccacagagaaataaaaggaattga

SEQ ID NO: 165162 - DNA, 25 bp, Artificial
  Probe
gtctcttgttcatgtaccgattctt

SEQ ID NO: 165163 - DNA, 25 bp, Artificial
  Probe
aatgtctcttgttcatgtaccgatt

SEQ ID NO: 165164 - DNA, 25 bp, Artificial
  Probe
atgtctcttgttcatgtaccgattc

SEQ ID NO: 165165 - DNA, 25 bp, Artificial
  Probe
tgtctcttgttcatgtaccgattct

SEQ ID NO: 165166 - DNA, 25 bp, Artificial
  Probe
aggaagtcatagacaatccgttcta

SEQ ID NO: 165167 - DNA, 25 bp, Artificial
  Probe
gaggaagtcatagacaatccgttct

SEQ ID NO: 165168 - DNA, 25 bp, Artificial
  Probe
gctgtcttctggattgagtttatca

SEQ ID NO: 165169 - DNA, 25 bp, Artificial
  Probe
ctcttgttcatgtaccgattctttg

SEQ ID NO: 165170 - DNA, 25 bp, Artificial
  Probe
tctcttgttcatgtaccgattcttt

SEQ ID NO: 165171 - DNA, 25 bp, Artificial
  Probe
cttgttcatgtaccgattctttgta

SEQ ID NO: 165172 - DNA, 25 bp, Artificial
  Probe
tcttgttcatgtaccgattctttgt

SEQ ID NO: 165173 - DNA, 25 bp, Artificial
  Probe
caacattaggacccaataccagagt

SEQ ID NO: 165174 - DNA, 25 bp, Artificial
  Probe
ctgtcttctggattgagtttatcat

SEQ ID NO: 165175 - DNA, 25 bp, Artificial
  Probe
aaatgtctcttgttcatgtaccgat

SEQ ID NO: 165176 - DNA, 25 bp, Artificial
  Probe
tgttcatgtaccgattctttgtaaa

SEQ ID NO: 165177 - DNA, 25 bp, Artificial
  Probe
ttgttcatgtaccgattctttgtaa

SEQ ID NO: 165178 - DNA, 25 bp, Artificial
  Probe
ctatgattggcattcctctgtttgg

SEQ ID NO: 165179 - DNA, 25 bp, Artificial
  Probe
cctatgattggcattcctctgtttg

SEQ ID NO: 165180 - DNA, 25 bp, Artificial
  Probe
tatgaggcaatctatcatggaatcc

SEQ ID NO: 165181 - DNA, 25 bp, Artificial
  Probe
ctctatgaggcaatctatcatggaa

SEQ ID NO: 165182 - DNA, 25 bp, Artificial
  Probe
ggcaatctatcatggaatccctatg

SEQ ID NO: 165183 - DNA, 25 bp, Artificial
  Probe
gcactggaggaagtcatagacaatc

SEQ ID NO: 165184 - DNA, 25 bp, Artificial
  Probe
attaggacccaataccagagtctac

SEQ ID NO: 165185 - DNA, 25 bp, Artificial
  Probe
cattaggacccaataccagagtcta

SEQ ID NO: 165186 - DNA, 25 bp, Artificial
  Probe
gtcttctggattgagtttatcatgc

SEQ ID NO: 165187 - DNA, 25 bp, Artificial
  Probe
ggaggaagtcatagacaatccgttc

SEQ ID NO: 165188 - DNA, 25 bp, Artificial
  Probe
tctatgaggcaatctatcatggaat

SEQ ID NO: 165189 - DNA, 25 bp, Artificial
  Probe
ctatgaggcaatctatcatggaatc

SEQ ID NO: 165190 - DNA, 25 bp, Artificial
  Probe
caataccagagtctacaagtggctc

SEQ ID NO: 165191 - DNA, 25 bp, Artificial
  Probe
gctgtttcattgaatatcaggacaa

SEQ ID NO: 165192 - DNA, 25 bp, Artificial
  Probe
tggagatcaacctgataatattgcc

SEQ ID NO: 165193 - DNA, 25 bp, Artificial
  Probe
gagctgtcttctggattgagtttat

SEQ ID NO: 165194 - DNA, 25 bp, Artificial
  Probe
gttcatgtaccgattctttgtaaag

SEQ ID NO: 165195 - DNA, 25 bp, Artificial
  Probe
agctgtcttctggattgagtttatc

SEQ ID NO: 165196 - DNA, 25 bp, Artificial
  Probe
tcttctggattgagtttatcatgcg

SEQ ID NO: 165197 - DNA, 25 bp, Artificial
  Probe
tgtcttctggattgagtttatcatg

SEQ ID NO: 165198 - DNA, 25 bp, Artificial
  Probe
ttggagatcaacctgataatattgc

SEQ ID NO: 165199 - DNA, 25 bp, Artificial
  Probe
aacattaggacccaataccagagtc

SEQ ID NO: 165200 - DNA, 25 bp, Artificial
  Probe
tcaacctgataatattgcccacatg

SEQ ID NO: 165201 - DNA, 25 bp, Artificial
  Probe
aggcaatctatcatggaatccctat

SEQ ID NO: 165202 - DNA, 25 bp, Artificial
  Probe
tggaggaagtcatagacaatccgtt

SEQ ID NO: 165203 - DNA, 25 bp, Artificial
  Probe
ccctatgattggcattcctctgttt

SEQ ID NO: 165204 - DNA, 25 bp, Artificial
  Probe
agagctgtcttctggattgagttta

SEQ ID NO: 165205 - DNA, 25 bp, Artificial
  Probe
ggaagtcatagacaatccgttctat

SEQ ID NO: 165206 - DNA, 25 bp, Artificial
  Probe
gaggcaatctatcatggaatcccta

SEQ ID NO: 165207 - DNA, 25 bp, Artificial
  Probe
aaagcagaaatgaagatgaggaaac

SEQ ID NO: 165208 - DNA, 25 bp, Artificial
  Probe
aagcagaaatgaagatgaggaaaca

SEQ ID NO: 165209 - DNA, 25 bp, Artificial
  Probe
agcagaaatgaagatgaggaaacat

SEQ ID NO: 165210 - DNA, 25 bp, Artificial
  Probe
gcttatgtcttctaattgcccaaag

SEQ ID NO: 165211 - DNA, 25 bp, Artificial
  Probe
ttacaactgtcctagaaataccact

SEQ ID NO: 165212 - DNA, 25 bp, Artificial
  Probe
aactgtcctagaaataccactatgt

SEQ ID NO: 165213 - DNA, 25 bp, Artificial
  Probe
acaactgtcctagaaataccactat

SEQ ID NO: 165214 - DNA, 25 bp, Artificial
  Probe
tgcccaaagataacaattctacatt

SEQ ID NO: 165215 - DNA, 25 bp, Artificial
  Probe
taccactatgtactttcttcttccc

SEQ ID NO: 165216 - DNA, 25 bp, Artificial
  Probe
ccactatgtactttcttcttcccac

SEQ ID NO: 165217 - DNA, 25 bp, Artificial
  Probe
ttgcccaaagataacaattctacat

SEQ ID NO: 165218 - DNA, 25 bp, Artificial
  Probe
caactgtcctagaaataccactatg

SEQ ID NO: 165219 - DNA, 25 bp, Artificial
  Probe
accactatgtactttcttcttccca

SEQ ID NO: 165220 - DNA, 25 bp, Artificial
  Probe
tttacaactgtcctagaaataccac

SEQ ID NO: 165221 - DNA, 25 bp, Artificial
  Probe
tacaactgtcctagaaataccacta

SEQ ID NO: 165222 - DNA, 25 bp, Artificial
  Probe
ccacagcttatgtcttctaattgcc

SEQ ID NO: 165223 - DNA, 25 bp, Artificial
  Probe
actgtcctagaaataccactatgta

SEQ ID NO: 165224 - DNA, 25 bp, Artificial
  Probe
actatgtactttcttcttcccacag

SEQ ID NO: 165225 - DNA, 25 bp, Artificial
  Probe
cactatgtactttcttcttcccaca

SEQ ID NO: 165226 - DNA, 25 bp, Artificial
  Probe
tgtcctagaaataccactatgtact

SEQ ID NO: 165227 - DNA, 25 bp, Artificial
  Probe
acattctattgtgatgtcttctgac

SEQ ID NO: 165228 - DNA, 25 bp, Artificial
  Probe
tactttcttcttcccacagcttatg

SEQ ID NO: 165229 - DNA, 25 bp, Artificial
  Probe
gtactttcttcttcccacagcttat

SEQ ID NO: 165230 - DNA, 25 bp, Artificial
  Probe
agcttatgtcttctaattgcccaaa

SEQ ID NO: 165231 - DNA, 25 bp, Artificial
  Probe
ctatgtactttcttcttcccacagc

SEQ ID NO: 165232 - DNA, 25 bp, Artificial
  Probe
ctgtcctagaaataccactatgtac

SEQ ID NO: 165233 - DNA, 25 bp, Artificial
  Probe
aagatgaggaaacattctattgtga

SEQ ID NO: 165234 - DNA, 25 bp, Artificial
  Probe
tgaagatgaggaaacattctattgt

SEQ ID NO: 165235 - DNA, 25 bp, Artificial
  Probe
gatgaggaaacattctattgtgatg

SEQ ID NO: 165236 - DNA, 25 bp, Artificial
  Probe
ataccactatgtactttcttcttcc

SEQ ID NO: 165237 - DNA, 25 bp, Artificial
  Probe
cagcttatgtcttctaattgcccaa

SEQ ID NO: 165238 - DNA, 25 bp, Artificial
  Probe
agatgaggaaacattctattgtgat

SEQ ID NO: 165239 - DNA, 25 bp, Artificial
  Probe
gaagatgaggaaacattctattgtg

SEQ ID NO: 165240 - DNA, 25 bp, Artificial
  Probe
aacattctattgtgatgtcttctga

SEQ ID NO: 165241 - DNA, 25 bp, Artificial
  Probe
gcccaaagataacaattctacatta

SEQ ID NO: 165242 - DNA, 25 bp, Artificial
  Probe
ttcccacagcttatgtcttctaatt

SEQ ID NO: 165243 - DNA, 25 bp, Artificial
  Probe
cttcccacagcttatgtcttctaat

SEQ ID NO: 165244 - DNA, 25 bp, Artificial
  Probe
gcagaaatgaagatgaggaaacatt

SEQ ID NO: 165245 - DNA, 25 bp, Artificial
  Probe
tcccacagcttatgtcttctaattg

SEQ ID NO: 165246 - DNA, 25 bp, Artificial
  Probe
atgaagatgaggaaacattctattg

SEQ ID NO: 165247 - DNA, 25 bp, Artificial
  Probe
tcttcccacagcttatgtcttctaa

SEQ ID NO: 165248 - DNA, 25 bp, Artificial
  Probe
ttcttcccacagcttatgtcttcta

SEQ ID NO: 165249 - DNA, 25 bp, Artificial
  Probe
gtcctagaaataccactatgtactt

SEQ ID NO: 165250 - DNA, 25 bp, Artificial
  Probe
attgcccaaagataacaattctaca

SEQ ID NO: 165251 - DNA, 25 bp, Artificial
  Probe
atttacaactgtcctagaaatacca

SEQ ID NO: 165252 - DNA, 25 bp, Artificial
  Probe
ccttattctatccactccttcttcc

SEQ ID NO: 165253 - DNA, 25 bp, Artificial
  Probe
tccttattctatccactccttcttc

SEQ ID NO: 165254 - DNA, 25 bp, Artificial
  Probe
ctccttattctatccactccttctt

SEQ ID NO: 165255 - DNA, 25 bp, Artificial
  Probe
gctccttattctatccactccttct

SEQ ID NO: 165256 - DNA, 25 bp, Artificial
  Probe
tagctccttattctatccactcctt

SEQ ID NO: 165257 - DNA, 25 bp, Artificial
  Probe
ctagctccttattctatccactcct

SEQ ID NO: 165258 - DNA, 25 bp, Artificial
  Probe
tctagctccttattctatccactcc

SEQ ID NO: 165259 - DNA, 25 bp, Artificial
  Probe
tctctagctccttattctatccact

SEQ ID NO: 165260 - DNA, 25 bp, Artificial
  Probe
ctctagctccttattctatccactc

SEQ ID NO: 165261 - DNA, 25 bp, Artificial
  Probe
agctccttattctatccactccttc

SEQ ID NO: 165262 - DNA, 25 bp, Artificial
  Probe
ttctctagctccttattctatccac

SEQ ID NO: 165263 - DNA, 25 bp, Artificial
  Probe
cttattctatccactccttcttccc

SEQ ID NO: 165264 - DNA, 25 bp, Artificial
  Probe
ttattctatccactccttcttccca

SEQ ID NO: 165265 - DNA, 25 bp, Artificial
  Probe
tattctatccactccttcttcccag

SEQ ID NO: 165266 - DNA, 25 bp, Artificial
  Probe
caggaggatctaggtaggaagacag

SEQ ID NO: 165267 - DNA, 25 bp, Artificial
  Probe
gtgtcactgaagaagaaagaagatc

SEQ ID NO: 165268 - DNA, 25 bp, Artificial
  Probe
tgtcactgaagaagaaagaagatcc

SEQ ID NO: 165269 - DNA, 25 bp, Artificial
  Probe
cactgaagaagaaagaagatccctc

SEQ ID NO: 165270 - DNA, 25 bp, Artificial
  Probe
ctgaagaagaaagaagatccctctc

SEQ ID NO: 165271 - DNA, 25 bp, Artificial
  Probe
tcactgaagaagaaagaagatccct

SEQ ID NO: 165272 - DNA, 25 bp, Artificial
  Probe
gtcactgaagaagaaagaagatccc

SEQ ID NO: 165273 - DNA, 25 bp, Artificial
  Probe
actgaagaagaaagaagatccctct

SEQ ID NO: 165274 - DNA, 25 bp, Artificial
  Probe
ttctgaaagaggtgacagtttatcc

SEQ ID NO: 165275 - DNA, 25 bp, Artificial
  Probe
tgaacctgagtgtttccatgaataa

SEQ ID NO: 165276 - DNA, 25 bp, Artificial
  Probe
gaacctgagtgtttccatgaataaa

SEQ ID NO: 165277 - DNA, 25 bp, Artificial
  Probe
ctagatggacttggaatgttgcctg

SEQ ID NO: 165278 - DNA, 25 bp, Artificial
  Probe
ctgaacctgagtgtttccatgaata

SEQ ID NO: 165279 - DNA, 25 bp, Artificial
  Probe
tgaagaagaaagaagatccctctcc

SEQ ID NO: 165280 - DNA, 25 bp, Artificial
  Probe
tttctgaaagaggtgacagtttatc

SEQ ID NO: 165281 - DNA, 25 bp, Artificial
  Probe
agtgtcactgaagaagaaagaagat

SEQ ID NO: 165282 - DNA, 25 bp, Artificial
  Probe
gagtgtcactgaagaagaaagaaga

SEQ ID NO: 165283 - DNA, 25 bp, Artificial
  Probe
agagtgtcactgaagaagaaagaag

SEQ ID NO: 165284 - DNA, 25 bp, Artificial
  Probe
actagatggacttggaatgttgcct

SEQ ID NO: 165285 - DNA, 25 bp, Artificial
  Probe
cactagatggacttggaatgttgcc

SEQ ID NO: 165286 - DNA, 25 bp, Artificial
  Probe
ggcactagatggacttggaatgttg

SEQ ID NO: 165287 - DNA, 25 bp, Artificial
  Probe
tctgaaagaggtgacagtttatccc

SEQ ID NO: 165288 - DNA, 25 bp, Artificial
  Probe
gaagaagaaagaagatccctctccc

SEQ ID NO: 165289 - DNA, 25 bp, Artificial
  Probe
cagagtgtcactgaagaagaaagaa

SEQ ID NO: 165290 - DNA, 25 bp, Artificial
  Probe
ttcaatggagtggcttaggagtcag

SEQ ID NO: 165291 - DNA, 25 bp, Artificial
  Probe
cttcaatggagtggcttaggagtca

SEQ ID NO: 165292 - DNA, 25 bp, Artificial
  Probe
gccaagctgcacgatttaatatatg

SEQ ID NO: 165293 - DNA, 25 bp, Artificial
  Probe
tggcactagatggacttggaatgtt

SEQ ID NO: 165294 - DNA, 25 bp, Artificial
  Probe
tttctctagctccttattctatcca

SEQ ID NO: 165295 - DNA, 25 bp, Artificial
  Probe
ctctggcactagatggacttggaat

SEQ ID NO: 165296 - DNA, 25 bp, Artificial
  Probe
ctttctctagctccttattctatcc

SEQ ID NO: 165297 - DNA, 25 bp, Artificial
  Probe
tagtgtggtggatgatagaagttga

SEQ ID NO: 165298 - DNA, 25 bp, Artificial
  Probe
ctagtgtggtggatgatagaagttg

SEQ ID NO: 165299 - DNA, 25 bp, Artificial
  Probe
agtgtggtggatgatagaagttgaa

SEQ ID NO: 165300 - DNA, 25 bp, Artificial
  Probe
gtgtggtggatgatagaagttgaac

SEQ ID NO: 165301 - DNA, 25 bp, Artificial
  Probe
gcatgtaggctatataactccagat

SEQ ID NO: 165302 - DNA, 25 bp, Artificial
  Probe
catgatgtggcatattctggtatcc

SEQ ID NO: 165303 - DNA, 25 bp, Artificial
  Probe
atctctgtctatctctatctctacc

SEQ ID NO: 165304 - DNA, 25 bp, Artificial
  Probe
cattcactgattattcgagcactag

SEQ ID NO: 165305 - DNA, 25 bp, Artificial
  Probe
atctagtgtggtggatgatagaagt

SEQ ID NO: 165306 - DNA, 25 bp, Artificial
  Probe
attcactgattattcgagcactagg

SEQ ID NO: 165307 - DNA, 25 bp, Artificial
  Probe
tctagtgtggtggatgatagaagtt

SEQ ID NO: 165308 - DNA, 25 bp, Artificial
  Probe
ccattcactgattattcgagcacta

SEQ ID NO: 165309 - DNA, 25 bp, Artificial
  Probe
tgtggtggatgatagaagttgaact

SEQ ID NO: 165310 - DNA, 25 bp, Artificial
  Probe
gatctagtgtggtggatgatagaag

SEQ ID NO: 165311 - DNA, 25 bp, Artificial
  Probe
ttgaacttgctttattgctatgtgt

SEQ ID NO: 165312 - DNA, 25 bp, Artificial
  Probe
tgcatgtaggctatataactccaga

SEQ ID NO: 165313 - DNA, 25 bp, Artificial
  Probe
gtgcatgtaggctatataactccag

SEQ ID NO: 165314 - DNA, 25 bp, Artificial
  Probe
ttcactgattattcgagcactagga

SEQ ID NO: 165315 - DNA, 25 bp, Artificial
  Probe
ctctgtctccatctccctatctatc

SEQ ID NO: 165316 - DNA, 25 bp, Artificial
  Probe
ctgtctccatctccctatctatcta

SEQ ID NO: 165317 - DNA, 25 bp, Artificial
  Probe
gtggtgcatgtaggctatataactc

SEQ ID NO: 165318 - DNA, 25 bp, Artificial
  Probe
ttccattcactgattattcgagcac

SEQ ID NO: 165319 - DNA, 25 bp, Artificial
  Probe
gttgaacttgctttattgctatgtg

SEQ ID NO: 165320 - DNA, 25 bp, Artificial
  Probe
tctgtctccatctccctatctatct

SEQ ID NO: 165321 - DNA, 25 bp, Artificial
  Probe
tctctgtctccatctccctatctat

SEQ ID NO: 165322 - DNA, 25 bp, Artificial
  Probe
tctctgtctatctctatctctaccc

SEQ ID NO: 165323 - DNA, 25 bp, Artificial
  Probe
ttctcctacttgggtttgaacttag

SEQ ID NO: 165324 - DNA, 25 bp, Artificial
  Probe
ttctctgtctccatctccctatcta

SEQ ID NO: 165325 - DNA, 25 bp, Artificial
  Probe
atgatgaacaaagcaatgaaacacc

SEQ ID NO: 165326 - DNA, 25 bp, Artificial
  Probe
tatgatgaacaaagcaatgaaacac

SEQ ID NO: 165327 - DNA, 25 bp, Artificial
  Probe
attctcctacttgggtttgaactta

SEQ ID NO: 165328 - DNA, 25 bp, Artificial
  Probe
accttatgatgaacaaagcaatgaa

SEQ ID NO: 165329 - DNA, 25 bp, Artificial
  Probe
tgaacttgctttattgctatgtgtt

SEQ ID NO: 165330 - DNA, 25 bp, Artificial
  Probe
tcactgattattcgagcactaggag

SEQ ID NO: 165331 - DNA, 25 bp, Artificial
  Probe
tgtctccatctccctatctatctat

SEQ ID NO: 165332 - DNA, 25 bp, Artificial
  Probe
gattctcctacttgggtttgaactt

SEQ ID NO: 165333 - DNA, 25 bp, Artificial
  Probe
gatgaacaaagcaatgaaacacctc

SEQ ID NO: 165334 - DNA, 25 bp, Artificial
  Probe
catgtaggctatataactccagatt

SEQ ID NO: 165335 - DNA, 25 bp, Artificial
  Probe
gtctccatctccctatctatctatc

SEQ ID NO: 165336 - DNA, 25 bp, Artificial
  Probe
atgaacaaagcaatgaaacacctct

SEQ ID NO: 165337 - DNA, 25 bp, Artificial
  Probe
taccttatgatgaacaaagcaatga

SEQ ID NO: 165338 - DNA, 25 bp, Artificial
  Probe
cattgacagaacgtgtattaagtgg

SEQ ID NO: 165339 - DNA, 25 bp, Artificial
  Probe
gcattcattgacagaacgtgtatta

SEQ ID NO: 165340 - DNA, 25 bp, Artificial
  Probe
ggtgcatgtaggctatataactcca

SEQ ID NO: 165341 - DNA, 25 bp, Artificial
  Probe
tggtgcatgtaggctatataactcc

SEQ ID NO: 165342 - DNA, 25 bp, Artificial
  Probe
tatgagtaagaccttcctgactatt

SEQ ID NO: 165343 - DNA, 25 bp, Artificial
  Probe
atatgagtaagaccttcctgactat

SEQ ID NO: 165344 - DNA, 25 bp, Artificial
  Probe
ttccatgtccaatagagcctaactg

SEQ ID NO: 165345 - DNA, 25 bp, Artificial
  Probe
ggtcaatcccatctgtgtataagtt

SEQ ID NO: 165346 - DNA, 25 bp, Artificial
  Probe
atgtccaatagagcctaactgtttc

SEQ ID NO: 165347 - DNA, 25 bp, Artificial
  Probe
ccatgtccaatagagcctaactgtt

SEQ ID NO: 165348 - DNA, 25 bp, Artificial
  Probe
tccaatagagcctaactgtttcttt

SEQ ID NO: 165349 - DNA, 25 bp, Artificial
  Probe
gtccaatagagcctaactgtttctt

SEQ ID NO: 165350 - DNA, 25 bp, Artificial
  Probe
taacttaacaatctcttgagggctg

SEQ ID NO: 165351 - DNA, 25 bp, Artificial
  Probe
gtaacttaacaatctcttgagggct

SEQ ID NO: 165352 - DNA, 25 bp, Artificial
  Probe
agtaacttaacaatctcttgagggc

SEQ ID NO: 165353 - DNA, 25 bp, Artificial
  Probe
cacatatgagtaagaccttcctgac

SEQ ID NO: 165354 - DNA, 25 bp, Artificial
  Probe
tgtccaatagagcctaactgtttct

SEQ ID NO: 165355 - DNA, 25 bp, Artificial
  Probe
atgagtaagaccttcctgactattt

SEQ ID NO: 165356 - DNA, 25 bp, Artificial
  Probe
gtcaatcccatctgtgtataagtta

SEQ ID NO: 165357 - DNA, 25 bp, Artificial
  Probe
tccatgtccaatagagcctaactgt

SEQ ID NO: 165358 - DNA, 25 bp, Artificial
  Probe
catgtccaatagagcctaactgttt

SEQ ID NO: 165359 - DNA, 25 bp, Artificial
  Probe
acatatgagtaagaccttcctgact

SEQ ID NO: 165360 - DNA, 25 bp, Artificial
  Probe
tccatcgctgtattatatagacatt

SEQ ID NO: 165361 - DNA, 25 bp, Artificial
  Probe
ttccatcgctgtattatatagacat

SEQ ID NO: 165362 - DNA, 25 bp, Artificial
  Probe
tttccatgtccaatagagcctaact

SEQ ID NO: 165363 - DNA, 25 bp, Artificial
  Probe
catatgagtaagaccttcctgacta

SEQ ID NO: 165364 - DNA, 25 bp, Artificial
  Probe
gcacatatgagtaagaccttcctga

SEQ ID NO: 165365 - DNA, 25 bp, Artificial
  Probe
ttaaacatcactcacatgaggagag

SEQ ID NO: 165366 - DNA, 25 bp, Artificial
  Probe
tgcacatatgagtaagaccttcctg

SEQ ID NO: 165367 - DNA, 25 bp, Artificial
  Probe
ctataaagtcccagcttgtcagtag

SEQ ID NO: 165368 - DNA, 25 bp, Artificial
  Probe
tagtaacttaacaatctcttgaggg

SEQ ID NO: 165369 - DNA, 25 bp, Artificial
  Probe
tataaagtcccagcttgtcagtaga

SEQ ID NO: 165370 - DNA, 25 bp, Artificial
  Probe
ttagtaacttaacaatctcttgagg

SEQ ID NO: 165371 - DNA, 25 bp, Artificial
  Probe
tcaatcccatctgtgtataagttat

SEQ ID NO: 165372 - DNA, 25 bp, Artificial
  Probe
tttaaacatcactcacatgaggaga

SEQ ID NO: 165373 - DNA, 25 bp, Artificial
  Probe
cctataaagtcccagcttgtcagta

SEQ ID NO: 165374 - DNA, 25 bp, Artificial
  Probe
catgttgatgagatcatagcgttgg

SEQ ID NO: 165375 - DNA, 25 bp, Artificial
  Probe
taaacatcactcacatgaggagagc

SEQ ID NO: 165376 - DNA, 25 bp, Artificial
  Probe
tttccatcgctgtattatatagaca

SEQ ID NO: 165377 - DNA, 25 bp, Artificial
  Probe
ctctatgctataggttgtgtgccta

SEQ ID NO: 165378 - DNA, 25 bp, Artificial
  Probe
gagagcctctatgctataggttgtg

SEQ ID NO: 165379 - DNA, 25 bp, Artificial
  Probe
gtacagtgtttgggataaggtggac

SEQ ID NO: 165380 - DNA, 25 bp, Artificial
  Probe
caatcccatctgtgtataagttatt

SEQ ID NO: 165381 - DNA, 25 bp, Artificial
  Probe
atttagatcaaactgtggtaacatg

SEQ ID NO: 165382 - DNA, 25 bp, Artificial
  Probe
ctatgctataggttgtgtgcctact

SEQ ID NO: 165383 - DNA, 25 bp, Artificial
  Probe
tctatgctataggttgtgtgcctac

SEQ ID NO: 165384 - DNA, 25 bp, Artificial
  Probe
aacttaacaatctcttgagggctgc

SEQ ID NO: 165385 - DNA, 25 bp, Artificial
  Probe
atcgctgtattatatagacatttgc

SEQ ID NO: 165386 - DNA, 25 bp, Artificial
  Probe
ccaatagagcctaactgtttctttt

SEQ ID NO: 165387 - DNA, 25 bp, Artificial
  Probe
tatatgtctcctcacctccatctac

SEQ ID NO: 165388 - DNA, 25 bp, Artificial
  Probe
attatatgtctcctcacctccatct

SEQ ID NO: 165389 - DNA, 25 bp, Artificial
  Probe
gattatatgtctcctcacctccatc

SEQ ID NO: 165390 - DNA, 25 bp, Artificial
  Probe
ttatatgtctcctcacctccatcta

SEQ ID NO: 165391 - DNA, 25 bp, Artificial
  Probe
cgattatatgtctcctcacctccat

SEQ ID NO: 165392 - DNA, 25 bp, Artificial
  Probe
ttgcgattatatgtctcctcacctc

SEQ ID NO: 165393 - DNA, 25 bp, Artificial
  Probe
tcctcacctccatctacatcttcat

SEQ ID NO: 165394 - DNA, 25 bp, Artificial
  Probe
tctcctcacctccatctacatcttc

SEQ ID NO: 165395 - DNA, 25 bp, Artificial
  Probe
atatgtctcctcacctccatctaca

SEQ ID NO: 165396 - DNA, 25 bp, Artificial
  Probe
aagaacaaggtatcggacgtatatc

SEQ ID NO: 165397 - DNA, 25 bp, Artificial
  Probe
gaagaacaaggtatcggacgtatat

SEQ ID NO: 165398 - DNA, 25 bp, Artificial
  Probe
ctcctcacctccatctacatcttca

SEQ ID NO: 165399 - DNA, 25 bp, Artificial
  Probe
gtctcctcacctccatctacatctt

SEQ ID NO: 165400 - DNA, 25 bp, Artificial
  Probe
tctttgcgattatatgtctcctcac

SEQ ID NO: 165401 - DNA, 25 bp, Artificial
  Probe
ggagcgtgaattatcaactgtcaac

SEQ ID NO: 165402 - DNA, 25 bp, Artificial
  Probe
agaagaacaaggtatcggacgtata

SEQ ID NO: 165403 - DNA, 25 bp, Artificial
  Probe
atctttgcgattatatgtctcctca

SEQ ID NO: 165404 - DNA, 25 bp, Artificial
  Probe
gtctgtgtcattgtctacgtcatag

SEQ ID NO: 165405 - DNA, 25 bp, Artificial
  Probe
tcatctttgcgattatatgtctcct

SEQ ID NO: 165406 - DNA, 25 bp, Artificial
  Probe
cctcacctccatctacatcttcatg

SEQ ID NO: 165407 - DNA, 25 bp, Artificial
  Probe
catctttgcgattatatgtctcctc

SEQ ID NO: 165408 - DNA, 25 bp, Artificial
  Probe
ttggtccttacagcttcatcatctt

SEQ ID NO: 165409 - DNA, 25 bp, Artificial
  Probe
ctttgcgattatatgtctcctcacc

SEQ ID NO: 165410 - DNA, 25 bp, Artificial
  Probe
aagaagaacaaggtatcggacgtat

SEQ ID NO: 165411 - DNA, 25 bp, Artificial
  Probe
atcatctttgcgattatatgtctcc

SEQ ID NO: 165412 - DNA, 25 bp, Artificial
  Probe
gcttcatcatctttgcgattatatg

SEQ ID NO: 165413 - DNA, 25 bp, Artificial
  Probe
tttgcgattatatgtctcctcacct

SEQ ID NO: 165414 - DNA, 25 bp, Artificial
  Probe
ctagactttggttctgggttcttag

SEQ ID NO: 165415 - DNA, 25 bp, Artificial
  Probe
gatttactactacgctgaccagatc

SEQ ID NO: 165416 - DNA, 25 bp, Artificial
  Probe
tagactttggttctgggttcttagt

SEQ ID NO: 165417 - DNA, 25 bp, Artificial
  Probe
cttggtccttacagcttcatcatct

SEQ ID NO: 165418 - DNA, 25 bp, Artificial
  Probe
ctgtgtcattgtctacgtcatagga

SEQ ID NO: 165419 - DNA, 25 bp, Artificial
  Probe
tctgtgtcattgtctacgtcatagg

SEQ ID NO: 165420 - DNA, 25 bp, Artificial
  Probe
tcatcatctttgcgattatatgtct

SEQ ID NO: 165421 - DNA, 25 bp, Artificial
  Probe
gcgattatatgtctcctcacctcca

SEQ ID NO: 165422 - DNA, 25 bp, Artificial
  Probe
tgcgattatatgtctcctcacctcc

SEQ ID NO: 165423 - DNA, 25 bp, Artificial
  Probe
catcatctttgcgattatatgtctc

SEQ ID NO: 165424 - DNA, 25 bp, Artificial
  Probe
ctatgtcagcatcgtctgtgtcatt

SEQ ID NO: 165425 - DNA, 25 bp, Artificial
  Probe
cgatttactactacgctgaccagat

SEQ ID NO: 165426 - DNA, 25 bp, Artificial
  Probe
caagaagaacaaggtatcggacgta

SEQ ID NO: 165427 - DNA, 25 bp, Artificial
  Probe
ctttggttctgggttcttagtgtct

SEQ ID NO: 165428 - DNA, 25 bp, Artificial
  Probe
ttactactacgctgaccagatctac

SEQ ID NO: 165429 - DNA, 25 bp, Artificial
  Probe
tatgtcagcatcgtctgtgtcattg

SEQ ID NO: 165430 - DNA, 25 bp, Artificial
  Probe
ttcatcatctttgcgattatatgtc

SEQ ID NO: 165431 - DNA, 25 bp, Artificial
  Probe
cttcatcatctttgcgattatatgt

SEQ ID NO: 165432 - DNA, 25 bp, Artificial
  Probe
aaggcagacatcttgatagttcaga

SEQ ID NO: 165433 - DNA, 25 bp, Artificial
  Probe
catgtctccaacttgtaaccaatat

SEQ ID NO: 165434 - DNA, 25 bp, Artificial
  Probe
atatataagtgactggttagctggc

SEQ ID NO: 165435 - DNA, 25 bp, Artificial
  Probe
gcatgtctccaacttgtaaccaata

SEQ ID NO: 165436 - DNA, 25 bp, Artificial
  Probe
acacattgaagatgaggtattgtac

SEQ ID NO: 165437 - DNA, 25 bp, Artificial
  Probe
aacacattgaagatgaggtattgta

SEQ ID NO: 165438 - DNA, 25 bp, Artificial
  Probe
taacacattgaagatgaggtattgt

SEQ ID NO: 165439 - DNA, 25 bp, Artificial
  Probe
tatataagtgactggttagctggca

SEQ ID NO: 165440 - DNA, 25 bp, Artificial
  Probe
ttaacacattgaagatgaggtattg

SEQ ID NO: 165441 - DNA, 25 bp, Artificial
  Probe
atataagtgactggttagctggcat

SEQ ID NO: 165442 - DNA, 25 bp, Artificial
  Probe
atgtctccaacttgtaaccaatatt

SEQ ID NO: 165443 - DNA, 25 bp, Artificial
  Probe
cgagcaactttaacacattgaagat

SEQ ID NO: 165444 - DNA, 25 bp, Artificial
  Probe
agcaactttaacacattgaagatga

SEQ ID NO: 165445 - DNA, 25 bp, Artificial
  Probe
tgatagttcagatgggctttaatgt

SEQ ID NO: 165446 - DNA, 25 bp, Artificial
  Probe
tcttgatagttcagatgggctttaa

SEQ ID NO: 165447 - DNA, 25 bp, Artificial
  Probe
gcaactttaacacattgaagatgag

SEQ ID NO: 165448 - DNA, 25 bp, Artificial
  Probe
gagcaactttaacacattgaagatg

SEQ ID NO: 165449 - DNA, 25 bp, Artificial
  Probe
aactttaacacattgaagatgaggt

SEQ ID NO: 165450 - DNA, 25 bp, Artificial
  Probe
tataagtgactggttagctggcatc

SEQ ID NO: 165451 - DNA, 25 bp, Artificial
  Probe
taccatttgaatgattgactgtgtg

SEQ ID NO: 165452 - DNA, 25 bp, Artificial
  Probe
ccttaccatttgaatgattgactgt

SEQ ID NO: 165453 - DNA, 25 bp, Artificial
  Probe
aggcagacatcttgatagttcagat

SEQ ID NO: 165454 - DNA, 25 bp, Artificial
  Probe
gatagttcagatgggctttaatgta

SEQ ID NO: 165455 - DNA, 25 bp, Artificial
  Probe
tccttaccatttgaatgattgactg

SEQ ID NO: 165456 - DNA, 25 bp, Artificial
  Probe
ttgatagttcagatgggctttaatg

SEQ ID NO: 165457 - DNA, 25 bp, Artificial
  Probe
ttaccatttgaatgattgactgtgt

SEQ ID NO: 165458 - DNA, 25 bp, Artificial
  Probe
caactttaacacattgaagatgagg

SEQ ID NO: 165459 - DNA, 25 bp, Artificial
  Probe
cttgatagttcagatgggctttaat

SEQ ID NO: 165460 - DNA, 25 bp, Artificial
  Probe
cttaccatttgaatgattgactgtg

SEQ ID NO: 165461 - DNA, 25 bp, Artificial
  Probe
accatttgaatgattgactgtgtgt

SEQ ID NO: 165462 - DNA, 25 bp, Artificial
  Probe
ttccttaccatttgaatgattgact

SEQ ID NO: 165463 - DNA, 25 bp, Artificial
  Probe
atagttcagatgggctttaatgtac

SEQ ID NO: 165464 - DNA, 25 bp, Artificial
  Probe
actttaacacattgaagatgaggta

SEQ ID NO: 165465 - DNA, 25 bp, Artificial
  Probe
tagttcagatgggctttaatgtact

SEQ ID NO: 165466 - DNA, 25 bp, Artificial
  Probe
atttgaatgattgactgtgtgtcct

SEQ ID NO: 165467 - DNA, 25 bp, Artificial
  Probe
catttgaatgattgactgtgtgtcc

SEQ ID NO: 165468 - DNA, 25 bp, Artificial
  Probe
ccatttgaatgattgactgtgtgtc

SEQ ID NO: 165469 - DNA, 25 bp, Artificial
  Probe
ttcagatgggctttaatgtactgtt

SEQ ID NO: 165470 - DNA, 25 bp, Artificial
  Probe
tttccttaccatttgaatgattgac

SEQ ID NO: 165471 - DNA, 25 bp, Artificial
  Probe
gtttccttaccatttgaatgattga

SEQ ID NO: 165472 - DNA, 25 bp, Artificial
  Probe
agttcagatgggctttaatgtactg

SEQ ID NO: 165473 - DNA, 25 bp, Artificial
  Probe
cttagttcggtttccttaccatttg

SEQ ID NO: 165474 - DNA, 25 bp, Artificial
  Probe
tcttagttcggtttccttaccattt

SEQ ID NO: 165475 - DNA, 25 bp, Artificial
  Probe
tcagatgggctttaatgtactgttg

SEQ ID NO: 165476 - DNA, 25 bp, Artificial
  Probe
gttcagatgggctttaatgtactgt

SEQ ID NO: 165477 - DNA, 25 bp, Artificial
  Probe
cttatcaagttactccttctctccg

SEQ ID NO: 165478 - DNA, 25 bp, Artificial
  Probe
gcacgattcttatcaagttactcct

SEQ ID NO: 165479 - DNA, 25 bp, Artificial
  Probe
tcttatcaagttactccttctctcc

SEQ ID NO: 165480 - DNA, 25 bp, Artificial
  Probe
cacgattcttatcaagttactcctt

SEQ ID NO: 165481 - DNA, 25 bp, Artificial
  Probe
acgattcttatcaagttactccttc

SEQ ID NO: 165482 - DNA, 25 bp, Artificial
  Probe
cgattcttatcaagttactccttct

SEQ ID NO: 165483 - DNA, 25 bp, Artificial
  Probe
ttcttatcaagttactccttctctc

SEQ ID NO: 165484 - DNA, 25 bp, Artificial
  Probe
tgcacgattcttatcaagttactcc

SEQ ID NO: 165485 - DNA, 25 bp, Artificial
  Probe
gttctttgcgtttaatctaagtagc

SEQ ID NO: 165486 - DNA, 25 bp, Artificial
  Probe
attcttatcaagttactccttctct

SEQ ID NO: 165487 - DNA, 25 bp, Artificial
  Probe
gattcttatcaagttactccttctc

SEQ ID NO: 165488 - DNA, 25 bp, Artificial
  Probe
tgcgtttaatctaagtagctgtgta

SEQ ID NO: 165489 - DNA, 25 bp, Artificial
  Probe
tttgcgtttaatctaagtagctgtg

SEQ ID NO: 165490 - DNA, 25 bp, Artificial
  Probe
tgttctttgcgtttaatctaagtag

SEQ ID NO: 165491 - DNA, 25 bp, Artificial
  Probe
gcgtttaatctaagtagctgtgtaa

SEQ ID NO: 165492 - DNA, 25 bp, Artificial
  Probe
ttgcgtttaatctaagtagctgtgt

SEQ ID NO: 165493 - DNA, 25 bp, Artificial
  Probe
ctttgcgtttaatctaagtagctgt

SEQ ID NO: 165494 - DNA, 25 bp, Artificial
  Probe
catgttctttgcgtttaatctaagt

SEQ ID NO: 165495 - DNA, 25 bp, Artificial
  Probe
ggagttcagtttaaagttacagcct

SEQ ID NO: 165496 - DNA, 25 bp, Artificial
  Probe
tctttgcgtttaatctaagtagctg

SEQ ID NO: 165497 - DNA, 25 bp, Artificial
  Probe
gagttcagtttaaagttacagcctt

SEQ ID NO: 165498 - DNA, 25 bp, Artificial
  Probe
ttatcaagttactccttctctccgg

SEQ ID NO: 165499 - DNA, 25 bp, Artificial
  Probe
atacggtaattgatttgagtttgtt

SEQ ID NO: 165500 - DNA, 25 bp, Artificial
  Probe
ttctttgcgtttaatctaagtagct

SEQ ID NO: 165501 - DNA, 25 bp, Artificial
  Probe
cggtaattgatttgagtttgttaca

SEQ ID NO: 165502 - DNA, 25 bp, Artificial
  Probe
acggtaattgatttgagtttgttac

SEQ ID NO: 165503 - DNA, 25 bp, Artificial
  Probe
atgttctttgcgtttaatctaagta

SEQ ID NO: 165504 - DNA, 25 bp, Artificial
  Probe
tacggtaattgatttgagtttgtta

SEQ ID NO: 165505 - DNA, 25 bp, Artificial
  Probe
cggagttcagtttaaagttacagcc

SEQ ID NO: 165506 - DNA, 25 bp, Artificial
  Probe
tatacggtaattgatttgagtttgt

SEQ ID NO: 165507 - DNA, 25 bp, Artificial
  Probe
ttcaaattaaggttgcatgttcttt

SEQ ID NO: 165508 - DNA, 25 bp, Artificial
  Probe
attcaaattaaggttgcatgttctt

SEQ ID NO: 165509 - DNA, 25 bp, Artificial
  Probe
acagccttttatacggtaattgatt

SEQ ID NO: 165510 - DNA, 25 bp, Artificial
  Probe
gcatgttctttgcgtttaatctaag

SEQ ID NO: 165511 - DNA, 25 bp, Artificial
  Probe
agttcagtttaaagttacagccttt

SEQ ID NO: 165512 - DNA, 25 bp, Artificial
  Probe
gttggctagagacagactcttgatg

SEQ ID NO: 165513 - DNA, 25 bp, Artificial
  Probe
cgtttaatctaagtagctgtgtaaa

SEQ ID NO: 165514 - DNA, 25 bp, Artificial
  Probe
tattcaaattaaggttgcatgttct

SEQ ID NO: 165515 - DNA, 25 bp, Artificial
  Probe
gacaagaagaaggtgctggacaagt

SEQ ID NO: 165516 - DNA, 25 bp, Artificial
  Probe
tgacaagaagaaggtgctggacaag

SEQ ID NO: 165517 - DNA, 25 bp, Artificial
  Probe
ctgacaagaagaaggtgctggacaa

SEQ ID NO: 165518 - DNA, 25 bp, Artificial
  Probe
tacagccttttatacggtaattgat

SEQ ID NO: 165519 - DNA, 25 bp, Artificial
  Probe
gccttttatacggtaattgatttga

SEQ ID NO: 165520 - DNA, 25 bp, Artificial
  Probe
agccttttatacggtaattgatttg

SEQ ID NO: 165521 - DNA, 25 bp, Artificial
  Probe
cagccttttatacggtaattgattt

SEQ ID NO: 165522 - DNA, 25 bp, Artificial
  Probe
aattctgaggcttctgatatgtgat

SEQ ID NO: 165523 - DNA, 25 bp, Artificial
  Probe
taattctgaggcttctgatatgtga

SEQ ID NO: 165524 - DNA, 25 bp, Artificial
  Probe
agacatataattctgaggcttctga

SEQ ID NO: 165525 - DNA, 25 bp, Artificial
  Probe
attctgaggcttctgatatgtgatc

SEQ ID NO: 165526 - DNA, 25 bp, Artificial
  Probe
ataattctgaggcttctgatatgtg

SEQ ID NO: 165527 - DNA, 25 bp, Artificial
  Probe
ctgagatcacttggacataaccttc

SEQ ID NO: 165528 - DNA, 25 bp, Artificial
  Probe
gacatataattctgaggcttctgat

SEQ ID NO: 165529 - DNA, 25 bp, Artificial
  Probe
aagacatataattctgaggcttctg

SEQ ID NO: 165530 - DNA, 25 bp, Artificial
  Probe
cctgagatcacttggacataacctt

SEQ ID NO: 165531 - DNA, 25 bp, Artificial
  Probe
aagtacattggaggagttctattcc

SEQ ID NO: 165532 - DNA, 25 bp, Artificial
  Probe
tctggatgtgattggattcctactt

SEQ ID NO: 165533 - DNA, 25 bp, Artificial
  Probe
ctctctggatgtgattggattccta

SEQ ID NO: 165534 - DNA, 25 bp, Artificial
  Probe
agttctattccctccttcctatgta

SEQ ID NO: 165535 - DNA, 25 bp, Artificial
  Probe
ctctggatgtgattggattcctact

SEQ ID NO: 165536 - DNA, 25 bp, Artificial
  Probe
tctctggatgtgattggattcctac

SEQ ID NO: 165537 - DNA, 25 bp, Artificial
  Probe
gcactggaggaagacatagacaatc

SEQ ID NO: 165538 - DNA, 25 bp, Artificial
  Probe
ctatgattggcattcccttatttgg

SEQ ID NO: 165539 - DNA, 25 bp, Artificial
  Probe
cctatgattggcattcccttatttg

SEQ ID NO: 165540 - DNA, 25 bp, Artificial
  Probe
aaggatattgaagacttcgtccaga

SEQ ID NO: 165541 - DNA, 25 bp, Artificial
  Probe
caaggatattgaagacttcgtccag

SEQ ID NO: 165542 - DNA, 25 bp, Artificial
  Probe
tataattctgaggcttctgatatgt

SEQ ID NO: 165543 - DNA, 25 bp, Artificial
  Probe
acatataattctgaggcttctgata

SEQ ID NO: 165544 - DNA, 25 bp, Artificial
  Probe
ccctatgattggcattcccttattt

SEQ ID NO: 165545 - DNA, 25 bp, Artificial
  Probe
cttaggacccaataccagactctac

SEQ ID NO: 165546 - DNA, 25 bp, Artificial
  Probe
aggatattgaagacttcgtccagag

SEQ ID NO: 165547 - DNA, 25 bp, Artificial
  Probe
tggttccaaacatttagagagaaga

SEQ ID NO: 165548 - DNA, 25 bp, Artificial
  Probe
ggttccaaacatttagagagaagaa

SEQ ID NO: 165549 - DNA, 25 bp, Artificial
  Probe
cacctgagatcacttggacataacc

SEQ ID NO: 165550 - DNA, 25 bp, Artificial
  Probe
atccctatgattggcattcccttat

SEQ ID NO: 165551 - DNA, 25 bp, Artificial
  Probe
gacattcatagagagggtacacaat

SEQ ID NO: 165552 - DNA, 25 bp, Artificial
  Probe
gttctattccctccttcctatgtac

SEQ ID NO: 165553 - DNA, 25 bp, Artificial
  Probe
ttctattccctccttcctatgtacc

SEQ ID NO: 165554 - DNA, 25 bp, Artificial
  Probe
aataccagactctacaagtggcttc

SEQ ID NO: 165555 - DNA, 25 bp, Artificial
  Probe
acctgagatcacttggacataacct

SEQ ID NO: 165556 - DNA, 25 bp, Artificial
  Probe
tccctatgattggcattcccttatt

SEQ ID NO: 165557 - DNA, 25 bp, Artificial
  Probe
gagataatgggcaaagcagaaatgt

SEQ ID NO: 165558 - DNA, 25 bp, Artificial
  Probe
tgagataatgggcaaagcagaaatg

SEQ ID NO: 165559 - DNA, 25 bp, Artificial
  Probe
tgagatcacttggacataaccttcc

SEQ ID NO: 165560 - DNA, 25 bp, Artificial
  Probe
gagttctattccctccttcctatgt

SEQ ID NO: 165561 - DNA, 25 bp, Artificial
  Probe
caataccagactctacaagtggctt

SEQ ID NO: 165562 - DNA, 25 bp, Artificial
  Probe
taggacccaataccagactctacaa

SEQ ID NO: 165563 - DNA, 25 bp, Artificial
  Probe
ttaggacccaataccagactctaca

SEQ ID NO: 165564 - DNA, 25 bp, Artificial
  Probe
agtcactgtagtccttgctctaaag

SEQ ID NO: 165565 - DNA, 25 bp, Artificial
  Probe
acattcatagagagggtacacaata

SEQ ID NO: 165566 - DNA, 25 bp, Artificial
  Probe
agataatgggcaaagcagaaatgtg

SEQ ID NO: 165567 - DNA, 25 bp, Artificial
  Probe
gatcattggtacgaagactatcctg

SEQ ID NO: 165568 - DNA, 25 bp, Artificial
  Probe
ttatgtcaagagtcaacaaggtgat

SEQ ID NO: 165569 - DNA, 25 bp, Artificial
  Probe
gttatgtcaagagtcaacaaggtga

SEQ ID NO: 165570 - DNA, 25 bp, Artificial
  Probe
atcattggtacgaagactatcctgg

SEQ ID NO: 165571 - DNA, 25 bp, Artificial
  Probe
tatgtcaagagtcaacaaggtgatc

SEQ ID NO: 165572 - DNA, 25 bp, Artificial
  Probe
ctcattaccctctttatctccaaca

SEQ ID NO: 165573 - DNA, 25 bp, Artificial
  Probe
cctcattaccctctttatctccaac

SEQ ID NO: 165574 - DNA, 25 bp, Artificial
  Probe
agtccaacatcattgaggcgattaa

SEQ ID NO: 165575 - DNA, 25 bp, Artificial
  Probe
aagtccaacatcattgaggcgatta

SEQ ID NO: 165576 - DNA, 25 bp, Artificial
  Probe
taagtccaacatcattgaggcgatt

SEQ ID NO: 165577 - DNA, 25 bp, Artificial
  Probe
ttaagtccaacatcattgaggcgat

SEQ ID NO: 165578 - DNA, 25 bp, Artificial
  Probe
acctcattaccctctttatctccaa

SEQ ID NO: 165579 - DNA, 25 bp, Artificial
  Probe
ctgacctcattaccctctttatctc

SEQ ID NO: 165580 - DNA, 25 bp, Artificial
  Probe
tcattaccctctttatctccaacat

SEQ ID NO: 165581 - DNA, 25 bp, Artificial
  Probe
gacctcattaccctctttatctcca

SEQ ID NO: 165582 - DNA, 25 bp, Artificial
  Probe
gtccaacatcattgaggcgattaat

SEQ ID NO: 165583 - DNA, 25 bp, Artificial
  Probe
tgacctcattaccctctttatctcc

SEQ ID NO: 165584 - DNA, 25 bp, Artificial
  Probe
cctgacctcattaccctctttatct

SEQ ID NO: 165585 - DNA, 25 bp, Artificial
  Probe
gattaatgagctgctagtggaactg

SEQ ID NO: 165586 - DNA, 25 bp, Artificial
  Probe
cattaccctctttatctccaacatt

SEQ ID NO: 165587 - DNA, 25 bp, Artificial
  Probe
attaccctctttatctccaacattg

SEQ ID NO: 165588 - DNA, 25 bp, Artificial
  Probe
cagaagaggaagttccatgtcattg

SEQ ID NO: 165589 - DNA, 25 bp, Artificial
  Probe
ccctgacctcattaccctctttatc

SEQ ID NO: 165590 - DNA, 25 bp, Artificial
  Probe
ctgtgtttgtttcaggaacttcaac

SEQ ID NO: 165591 - DNA, 25 bp, Artificial
  Probe
tttgtgactaggctgtgtttgtttc

SEQ ID NO: 165592 - DNA, 25 bp, Artificial
  Probe
ctttgtgactaggctgtgtttgttt

SEQ ID NO: 165593 - DNA, 25 bp, Artificial
  Probe
attaatgagctgctagtggaactgg

SEQ ID NO: 165594 - DNA, 25 bp, Artificial
  Probe
ccagaagaggaagttccatgtcatt

SEQ ID NO: 165595 - DNA, 25 bp, Artificial
  Probe
tccaacatcattgaggcgattaatg

SEQ ID NO: 165596 - DNA, 25 bp, Artificial
  Probe
tgtgtttgtttcaggaacttcaacc

SEQ ID NO: 165597 - DNA, 25 bp, Artificial
  Probe
attgaggcgattaatgagctgctag

SEQ ID NO: 165598 - DNA, 25 bp, Artificial
  Probe
cgattaatgagctgctagtggaact

SEQ ID NO: 165599 - DNA, 25 bp, Artificial
  Probe
catgttcaagctctctcctcagttc

SEQ ID NO: 165600 - DNA, 25 bp, Artificial
  Probe
gaagaagattcatttcacaagtttg

SEQ ID NO: 165601 - DNA, 25 bp, Artificial
  Probe
atgaccattggcttctctaggacag

SEQ ID NO: 165602 - DNA, 25 bp, Artificial
  Probe
tgtttgtttcaggaacttcaacctc

SEQ ID NO: 165603 - DNA, 25 bp, Artificial
  Probe
ctgttatgtcaagagtcaacaaggt

SEQ ID NO: 165604 - DNA, 25 bp, Artificial
  Probe
tgatcattggtacgaagactatcct

SEQ ID NO: 165605 - DNA, 25 bp, Artificial
  Probe
gtgatcattggtacgaagactatcc

SEQ ID NO: 165606 - DNA, 25 bp, Artificial
  Probe
ggtgatcattggtacgaagactatc

SEQ ID NO: 165607 - DNA, 25 bp, Artificial
  Probe
aggtgatcattggtacgaagactat

SEQ ID NO: 165608 - DNA, 25 bp, Artificial
  Probe
ttgctgttatgtcaagagtcaacaa

SEQ ID NO: 165609 - DNA, 25 bp, Artificial
  Probe
aaggtgatcattggtacgaagacta

SEQ ID NO: 165610 - DNA, 25 bp, Artificial
  Probe
tgttatgtcaagagtcaacaaggtg

SEQ ID NO: 165611 - DNA, 25 bp, Artificial
  Probe
gtgtttgtttcaggaacttcaacct

SEQ ID NO: 165612 - DNA, 25 bp, Artificial
  Probe
agtctcggattgttggaggatataa

SEQ ID NO: 165613 - DNA, 25 bp, Artificial
  Probe
gctatcatcaatgaatacctatgcg

SEQ ID NO: 165614 - DNA, 25 bp, Artificial
  Probe
aagtggctatcatcaatgaatacct

SEQ ID NO: 165615 - DNA, 25 bp, Artificial
  Probe
caagtggctatcatcaatgaatacc

SEQ ID NO: 165616 - DNA, 25 bp, Artificial
  Probe
gcaagtggctatcatcaatgaatac

SEQ ID NO: 165617 - DNA, 25 bp, Artificial
  Probe
ggctatcatcaatgaatacctatgc

SEQ ID NO: 165618 - DNA, 25 bp, Artificial
  Probe
ctatcatcaatgaatacctatgcgg

SEQ ID NO: 165619 - DNA, 25 bp, Artificial
  Probe
cagtctcggattgttggaggatata

SEQ ID NO: 165620 - DNA, 25 bp, Artificial
  Probe
agtggctatcatcaatgaataccta

SEQ ID NO: 165621 - DNA, 25 bp, Artificial
  Probe
ggcaagtggctatcatcaatgaata

SEQ ID NO: 165622 - DNA, 25 bp, Artificial
  Probe
gaattacctgatgatctccagtgtg

SEQ ID NO: 165623 - DNA, 25 bp, Artificial
  Probe
tggctatcatcaatgaatacctatg

SEQ ID NO: 165624 - DNA, 25 bp, Artificial
  Probe
gtggctatcatcaatgaatacctat

SEQ ID NO: 165625 - DNA, 25 bp, Artificial
  Probe
aattacctgatgatctccagtgtgt

SEQ ID NO: 165626 - DNA, 25 bp, Artificial
  Probe
cggattgttggaggatataaatgtg

SEQ ID NO: 165627 - DNA, 25 bp, Artificial
  Probe
tcggattgttggaggatataaatgt

SEQ ID NO: 165628 - DNA, 25 bp, Artificial
  Probe
ctatttgaagatgaaccctttgctc

SEQ ID NO: 165629 - DNA, 25 bp, Artificial
  Probe
aacctatttgaagatgaaccctttg

SEQ ID NO: 165630 - DNA, 25 bp, Artificial
  Probe
acaacctatttgaagatgaaccctt

SEQ ID NO: 165631 - DNA, 25 bp, Artificial
  Probe
aacaacctatttgaagatgaaccct

SEQ ID NO: 165632 - DNA, 25 bp, Artificial
  Probe
aaacaacctatttgaagatgaaccc

SEQ ID NO: 165633 - DNA, 25 bp, Artificial
  Probe
caacctatttgaagatgaacccttt

SEQ ID NO: 165634 - DNA, 25 bp, Artificial
  Probe
ggattgttggaggatataaatgtga

SEQ ID NO: 165635 - DNA, 25 bp, Artificial
  Probe
cctatttgaagatgaaccctttgct

SEQ ID NO: 165636 - DNA, 25 bp, Artificial
  Probe
attacctgatgatctccagtgtgtg

SEQ ID NO: 165637 - DNA, 25 bp, Artificial
  Probe
ggaattacctgatgatctccagtgt

SEQ ID NO: 165638 - DNA, 25 bp, Artificial
  Probe
tatttgaagatgaaccctttgctca

SEQ ID NO: 165639 - DNA, 25 bp, Artificial
  Probe
ctactgtctaatgagaagtgcatcg

SEQ ID NO: 165640 - DNA, 25 bp, Artificial
  Probe
cgaaacaacctatttgaagatgaac

SEQ ID NO: 165641 - DNA, 25 bp, Artificial
  Probe
gtctcggattgttggaggatataaa

SEQ ID NO: 165642 - DNA, 25 bp, Artificial
  Probe
ctgtctaatgagaagtgcatcgaag

SEQ ID NO: 165643 - DNA, 25 bp, Artificial
  Probe
tgttggaggatataaatgtgagaag

SEQ ID NO: 165644 - DNA, 25 bp, Artificial
  Probe
acctatttgaagatgaaccctttgc

SEQ ID NO: 165645 - DNA, 25 bp, Artificial
  Probe
tactgtctaatgagaagtgcatcga

SEQ ID NO: 165646 - DNA, 25 bp, Artificial
  Probe
ctcggattgttggaggatataaatg

SEQ ID NO: 165647 - DNA, 25 bp, Artificial
  Probe
tctcggattgttggaggatataaat

SEQ ID NO: 165648 - DNA, 25 bp, Artificial
  Probe
gaaacaacctatttgaagatgaacc

SEQ ID NO: 165649 - DNA, 25 bp, Artificial
  Probe
gttggaggatataaatgtgagaaga

SEQ ID NO: 165650 - DNA, 25 bp, Artificial
  Probe
cctgaattgggaattacctgatgat

SEQ ID NO: 165651 - DNA, 25 bp, Artificial
  Probe
tggcaagtggctatcatcaatgaat

SEQ ID NO: 165652 - DNA, 25 bp, Artificial
  Probe
tatcatcaatgaatacctatgcggg

SEQ ID NO: 165653 - DNA, 25 bp, Artificial
  Probe
ttgttggaggatataaatgtgagaa

SEQ ID NO: 165654 - DNA, 25 bp, Artificial
  Probe
atttgaagatgaaccctttgctcag

SEQ ID NO: 165655 - DNA, 25 bp, Artificial
  Probe
tgaattgggaattacctgatgatct

SEQ ID NO: 165656 - DNA, 25 bp, Artificial
  Probe
attgttggaggatataaatgtgaga

SEQ ID NO: 165657 - DNA, 25 bp, Artificial
  Probe
tttctttcttggaatagagtcaccc

SEQ ID NO: 165658 - DNA, 25 bp, Artificial
  Probe
ctttcttgtttccttgtgacggttg

SEQ ID NO: 165659 - DNA, 25 bp, Artificial
  Probe
agggaaggattttctttcttggaat

SEQ ID NO: 165660 - DNA, 25 bp, Artificial
  Probe
taagggaaggattttctttcttgga

SEQ ID NO: 165661 - DNA, 25 bp, Artificial
  Probe
ttgaaaccttttagaaaacccttgg

SEQ ID NO: 165662 - DNA, 25 bp, Artificial
  Probe
ccttgaaaccttttagaaaaccctt

SEQ ID NO: 165663 - DNA, 25 bp, Artificial
  Probe
aagggaaggattttctttcttggaa

SEQ ID NO: 165664 - DNA, 25 bp, Artificial
  Probe
ctaagggaaggattttctttcttgg

SEQ ID NO: 165665 - DNA, 25 bp, Artificial
  Probe
ttcttgtttccttgtgacggttgtt

SEQ ID NO: 165666 - DNA, 25 bp, Artificial
  Probe
tttcttgtttccttgtgacggttgt

SEQ ID NO: 165667 - DNA, 25 bp, Artificial
  Probe
gagccttgaaaccttttagaaaacc

SEQ ID NO: 165668 - DNA, 25 bp, Artificial
  Probe
caagattcagaatgactactgatgt

SEQ ID NO: 165669 - DNA, 25 bp, Artificial
  Probe
gatggcatctagggcttcttctcta

SEQ ID NO: 165670 - DNA, 25 bp, Artificial
  Probe
cttgaaaccttttagaaaacccttg

SEQ ID NO: 165671 - DNA, 25 bp, Artificial
  Probe
gggaaggattttctttcttggaata

SEQ ID NO: 165672 - DNA, 25 bp, Artificial
  Probe
atggcatctagggcttcttctctac

SEQ ID NO: 165673 - DNA, 25 bp, Artificial
  Probe
tcaagattcagaatgactactgatg

SEQ ID NO: 165674 - DNA, 25 bp, Artificial
  Probe
cgagccttgaaaccttttagaaaac

SEQ ID NO: 165675 - DNA, 25 bp, Artificial
  Probe
ttttctttcttggaatagagtcacc

SEQ ID NO: 165676 - DNA, 25 bp, Artificial
  Probe
ttctctgtctaccctcctagtcctc

SEQ ID NO: 165677 - DNA, 25 bp, Artificial
  Probe
aaaccttttagaaaacccttgggaa

SEQ ID NO: 165678 - DNA, 25 bp, Artificial
  Probe
cctttcttgtttccttgtgacggtt

SEQ ID NO: 165679 - DNA, 25 bp, Artificial
  Probe
aagattcagaatgactactgatgtt

SEQ ID NO: 165680 - DNA, 25 bp, Artificial
  Probe
cttgtgacggttgttgacatctgtg

SEQ ID NO: 165681 - DNA, 25 bp, Artificial
  Probe
gaaaccttttagaaaacccttggga

SEQ ID NO: 165682 - DNA, 25 bp, Artificial
  Probe
gccttgaaaccttttagaaaaccct

SEQ ID NO: 165683 - DNA, 25 bp, Artificial
  Probe
agccttgaaaccttttagaaaaccc

SEQ ID NO: 165684 - DNA, 25 bp, Artificial
  Probe
aaccttttagaaaacccttgggaac

SEQ ID NO: 165685 - DNA, 25 bp, Artificial
  Probe
tgaaaccttttagaaaacccttggg

SEQ ID NO: 165686 - DNA, 25 bp, Artificial
  Probe
ttctttcttggaatagagtcacccc

SEQ ID NO: 165687 - DNA, 25 bp, Artificial
  Probe
ttcaagattcagaatgactactgat

SEQ ID NO: 165688 - DNA, 25 bp, Artificial
  Probe
ttccttgtgacggttgttgacatct

SEQ ID NO: 165689 - DNA, 25 bp, Artificial
  Probe
cttgtttccttgtgacggttgttga

SEQ ID NO: 165690 - DNA, 25 bp, Artificial
  Probe
tcttgtttccttgtgacggttgttg

SEQ ID NO: 165691 - DNA, 25 bp, Artificial
  Probe
cctaagggaaggattttctttcttg

SEQ ID NO: 165692 - DNA, 25 bp, Artificial
  Probe
ggaaggattttctttcttggaatag

SEQ ID NO: 165693 - DNA, 25 bp, Artificial
  Probe
aggattttctttcttggaatagagt

SEQ ID NO: 165694 - DNA, 25 bp, Artificial
  Probe
ggattttctttcttggaatagagtc

SEQ ID NO: 165695 - DNA, 25 bp, Artificial
  Probe
atcgagccttgaaaccttttagaaa

SEQ ID NO: 165696 - DNA, 25 bp, Artificial
  Probe
aatcgagccttgaaaccttttagaa

SEQ ID NO: 165697 - DNA, 25 bp, Artificial
  Probe
tcgagccttgaaaccttttagaaaa

SEQ ID NO: 165698 - DNA, 25 bp, Artificial
  Probe
ttgtttccttgtgacggttgttgac

SEQ ID NO: 165699 - DNA, 25 bp, Artificial
  Probe
tttccttgtgacggttgttgacatc

SEQ ID NO: 165700 - DNA, 25 bp, Artificial
  Probe
gaatcgagccttgaaaccttttaga

SEQ ID NO: 165701 - DNA, 25 bp, Artificial
  Probe
attttctttcttggaatagagtcac

SEQ ID NO: 165702 - DNA, 25 bp, Artificial
  Probe
tctcctctctctctctctctcttag

SEQ ID NO: 165703 - DNA, 25 bp, Artificial
  Probe
gtctcctctctctctctctctctta

SEQ ID NO: 165704 - DNA, 25 bp, Artificial
  Probe
ttaatcgtctcctctctctctctct

SEQ ID NO: 165705 - DNA, 25 bp, Artificial
  Probe
taatcgtctcctctctctctctctc

SEQ ID NO: 165706 - DNA, 25 bp, Artificial
  Probe
cctctctctctctctctcttaggaa

SEQ ID NO: 165707 - DNA, 25 bp, Artificial
  Probe
ctcctctctctctctctctcttagg

SEQ ID NO: 165708 - DNA, 25 bp, Artificial
  Probe
ctctctctctctctctcttaggaaa

SEQ ID NO: 165709 - DNA, 25 bp, Artificial
  Probe
tctctctctctctcttaggaaatca

SEQ ID NO: 165710 - DNA, 25 bp, Artificial
  Probe
tctctctctctctctcttaggaaat

SEQ ID NO: 165711 - DNA, 25 bp, Artificial
  Probe
tttaatcgtctcctctctctctctc

SEQ ID NO: 165712 - DNA, 25 bp, Artificial
  Probe
ttaggaaatcaaagagcaggaagtg

SEQ ID NO: 165713 - DNA, 25 bp, Artificial
  Probe
ctctctctctctctcttaggaaatc

SEQ ID NO: 165714 - DNA, 25 bp, Artificial
  Probe
aatcgtctcctctctctctctctct

SEQ ID NO: 165715 - DNA, 25 bp, Artificial
  Probe
gtttaatcgtctcctctctctctct

SEQ ID NO: 165716 - DNA, 25 bp, Artificial
  Probe
cttaggaaatcaaagagcaggaagt

SEQ ID NO: 165717 - DNA, 25 bp, Artificial
  Probe
ctctctctctctcttaggaaatcaa

SEQ ID NO: 165718 - DNA, 25 bp, Artificial
  Probe
tctctctctctcttaggaaatcaaa

SEQ ID NO: 165719 - DNA, 25 bp, Artificial
  Probe
ggtttaatcgtctcctctctctctc

SEQ ID NO: 165720 - DNA, 25 bp, Artificial
  Probe
atcgtctcctctctctctctctctc

SEQ ID NO: 165721 - DNA, 25 bp, Artificial
  Probe
tatttgacatcaacgattccaactg

SEQ ID NO: 165722 - DNA, 25 bp, Artificial
  Probe
gtatttgacatcaacgattccaact

SEQ ID NO: 165723 - DNA, 25 bp, Artificial
  Probe
ctctctctctcttaggaaatcaaag

SEQ ID NO: 165724 - DNA, 25 bp, Artificial
  Probe
cgtctcctctctctctctctctctt

SEQ ID NO: 165725 - DNA, 25 bp, Artificial
  Probe
taggaaatcaaagagcaggaagtgg

SEQ ID NO: 165726 - DNA, 25 bp, Artificial
  Probe
atttgacatcaacgattccaactgg

SEQ ID NO: 165727 - DNA, 25 bp, Artificial
  Probe
ttgacatcaacgattccaactggtg

SEQ ID NO: 165728 - DNA, 25 bp, Artificial
  Probe
tcgtctcctctctctctctctctct

SEQ ID NO: 165729 - DNA, 25 bp, Artificial
  Probe
cggtttaatcgtctcctctctctct

SEQ ID NO: 165730 - DNA, 25 bp, Artificial
  Probe
tcttaggaaatcaaagagcaggaag

SEQ ID NO: 165731 - DNA, 25 bp, Artificial
  Probe
tagcacttttaatagcactctgacg

SEQ ID NO: 165732 - DNA, 25 bp, Artificial
  Probe
tctctctctcttaggaaatcaaaga

SEQ ID NO: 165733 - DNA, 25 bp, Artificial
  Probe
cctagcacttttaatagcactctga

SEQ ID NO: 165734 - DNA, 25 bp, Artificial
  Probe
caaaccagcctagcacttttaatag

SEQ ID NO: 165735 - DNA, 25 bp, Artificial
  Probe
ctagcacttttaatagcactctgac

SEQ ID NO: 165736 - DNA, 25 bp, Artificial
  Probe
tcaaaccagcctagcacttttaata

SEQ ID NO: 165737 - DNA, 25 bp, Artificial
  Probe
atcaaaccagcctagcacttttaat

SEQ ID NO: 165738 - DNA, 25 bp, Artificial
  Probe
tttgacatcaacgattccaactggt

SEQ ID NO: 165739 - DNA, 25 bp, Artificial
  Probe
cgtatttgacatcaacgattccaac

SEQ ID NO: 165740 - DNA, 25 bp, Artificial
  Probe
aatcaaaccagcctagcacttttaa

SEQ ID NO: 165741 - DNA, 25 bp, Artificial
  Probe
aaatcaaaccagcctagcactttta

SEQ ID NO: 165742 - DNA, 25 bp, Artificial
  Probe
aaaccagcctagcacttttaatagc

SEQ ID NO: 165743 - DNA, 25 bp, Artificial
  Probe
gcctagcacttttaatagcactctg

SEQ ID NO: 165744 - DNA, 25 bp, Artificial
  Probe
agcctagcacttttaatagcactct

SEQ ID NO: 165745 - DNA, 25 bp, Artificial
  Probe
cagcctagcacttttaatagcactc

SEQ ID NO: 165746 - DNA, 25 bp, Artificial
  Probe
tcctctctctctctctctcttagga

SEQ ID NO: 165747 - DNA, 25 bp, Artificial
  Probe
cttcatccgcaagttctatacagag

SEQ ID NO: 165748 - DNA, 25 bp, Artificial
  Probe
catccgcaagttctatacagagttc

SEQ ID NO: 165749 - DNA, 25 bp, Artificial
  Probe
tcatccgcaagttctatacagagtt

SEQ ID NO: 165750 - DNA, 25 bp, Artificial
  Probe
ttcatccgcaagttctatacagagt

SEQ ID NO: 165751 - DNA, 25 bp, Artificial
  Probe
agattcacaacctctatgactcctc

SEQ ID NO: 165752 - DNA, 25 bp, Artificial
  Probe
gagattcacaacctctatgactcct

SEQ ID NO: 165753 - DNA, 25 bp, Artificial
  Probe
ctctatgactcctcggaatcctcta

SEQ ID NO: 165754 - DNA, 25 bp, Artificial
  Probe
tgagattcacaacctctatgactcc

SEQ ID NO: 165755 - DNA, 25 bp, Artificial
  Probe
tctatgactcctcggaatcctctag

SEQ ID NO: 165756 - DNA, 25 bp, Artificial
  Probe
ccttcatccgcaagttctatacaga

SEQ ID NO: 165757 - DNA, 25 bp, Artificial
  Probe
ctacactctcagcaacatggactat

SEQ ID NO: 165758 - DNA, 25 bp, Artificial
  Probe
accttcatccgcaagttctatacag

SEQ ID NO: 165759 - DNA, 25 bp, Artificial
  Probe
atccgcaagttctatacagagttcg

SEQ ID NO: 165760 - DNA, 25 bp, Artificial
  Probe
caccttcatccgcaagttctataca

SEQ ID NO: 165761 - DNA, 25 bp, Artificial
  Probe
agtcttcctttaccaatgttacctc

SEQ ID NO: 165762 - DNA, 25 bp, Artificial
  Probe
ggagtcaaagagaagagagcaaata

SEQ ID NO: 165763 - DNA, 25 bp, Artificial
  Probe
tacactctcagcaacatggactatg

SEQ ID NO: 165764 - DNA, 25 bp, Artificial
  Probe
gattcacaacctctatgactcctcg

SEQ ID NO: 165765 - DNA, 25 bp, Artificial
  Probe
aataattacgttgtgaactgtagcc

SEQ ID NO: 165766 - DNA, 25 bp, Artificial
  Probe
aagtcttcctttaccaatgttacct

SEQ ID NO: 165767 - DNA, 25 bp, Artificial
  Probe
ataattacgttgtgaactgtagcca

SEQ ID NO: 165768 - DNA, 25 bp, Artificial
  Probe
gtcttcctttaccaatgttacctcc

SEQ ID NO: 165769 - DNA, 25 bp, Artificial
  Probe
gagtcaaagagaagagagcaaataa

SEQ ID NO: 165770 - DNA, 25 bp, Artificial
  Probe
tactatggtgagatcggcattggta

SEQ ID NO: 165771 - DNA, 25 bp, Artificial
  Probe
ccaccttcatccgcaagttctatac

SEQ ID NO: 165772 - DNA, 25 bp, Artificial
  Probe
agtcaaagagaagagagcaaataat

SEQ ID NO: 165773 - DNA, 25 bp, Artificial
  Probe
tcaagaagtcttcctttaccaatgt

SEQ ID NO: 165774 - DNA, 25 bp, Artificial
  Probe
tcatcaagaagtcttcctttaccaa

SEQ ID NO: 165775 - DNA, 25 bp, Artificial
  Probe
ttcatcaagaagtcttcctttacca

SEQ ID NO: 165776 - DNA, 25 bp, Artificial
  Probe
tcttcctttaccaatgttacctccc

SEQ ID NO: 165777 - DNA, 25 bp, Artificial
  Probe
gaagtcttcctttaccaatgttacc

SEQ ID NO: 165778 - DNA, 25 bp, Artificial
  Probe
caagaagtcttcctttaccaatgtt

SEQ ID NO: 165779 - DNA, 25 bp, Artificial
  Probe
taattacgttgtgaactgtagccag

SEQ ID NO: 165780 - DNA, 25 bp, Artificial
  Probe
acaacctctatgactcctcggaatc

SEQ ID NO: 165781 - DNA, 25 bp, Artificial
  Probe
atcaagaagtcttcctttaccaatg

SEQ ID NO: 165782 - DNA, 25 bp, Artificial
  Probe
catcaagaagtcttcctttaccaat

SEQ ID NO: 165783 - DNA, 25 bp, Artificial
  Probe
ctatgactcctcggaatcctctagc

SEQ ID NO: 165784 - DNA, 25 bp, Artificial
  Probe
attcatcaagaagtcttcctttacc

SEQ ID NO: 165785 - DNA, 25 bp, Artificial
  Probe
agaagtcttcctttaccaatgttac

SEQ ID NO: 165786 - DNA, 25 bp, Artificial
  Probe
aacattaccagggcaactttcacta

SEQ ID NO: 165787 - DNA, 25 bp, Artificial
  Probe
gggagtcaaagagaagagagcaaat

SEQ ID NO: 165788 - DNA, 25 bp, Artificial
  Probe
cacaacctctatgactcctcggaat

SEQ ID NO: 165789 - DNA, 25 bp, Artificial
  Probe
gtcaaagagaagagagcaaataatt

SEQ ID NO: 165790 - DNA, 25 bp, Artificial
  Probe
attcacaacctctatgactcctcgg

SEQ ID NO: 165791 - DNA, 25 bp, Artificial
  Probe
tcttgttgctctggacctcttgtag

SEQ ID NO: 165792 - DNA, 25 bp, Artificial
  Probe
aatcaaaggtcaaagcatacaagag

SEQ ID NO: 165793 - DNA, 25 bp, Artificial
  Probe
caatcaaaggtcaaagcatacaaga

SEQ ID NO: 165794 - DNA, 25 bp, Artificial
  Probe
atcaaaggtcaaagcatacaagaga

SEQ ID NO: 165795 - DNA, 25 bp, Artificial
  Probe
gcaatcaaaggtcaaagcatacaag

SEQ ID NO: 165796 - DNA, 25 bp, Artificial
  Probe
tgaaagaactcacttaccaaactga

SEQ ID NO: 165797 - DNA, 25 bp, Artificial
  Probe
tgtacttacgactttgggagataaa

SEQ ID NO: 165798 - DNA, 25 bp, Artificial
  Probe
ttgtacttacgactttgggagataa

SEQ ID NO: 165799 - DNA, 25 bp, Artificial
  Probe
tttgtacttacgactttgggagata

SEQ ID NO: 165800 - DNA, 25 bp, Artificial
  Probe
gaaagtgaccaaagagatgagcaaa

SEQ ID NO: 165801 - DNA, 25 bp, Artificial
  Probe
aaacatgagagaagagtgaaagaac

SEQ ID NO: 165802 - DNA, 25 bp, Artificial
  Probe
caaacatgagagaagagtgaaagaa

SEQ ID NO: 165803 - DNA, 25 bp, Artificial
  Probe
aaaggtcaaagcatacaagagacaa

SEQ ID NO: 165804 - DNA, 25 bp, Artificial
  Probe
gcaaacatgagagaagagtgaaaga

SEQ ID NO: 165805 - DNA, 25 bp, Artificial
  Probe
aacatgagagaagagtgaaagaact

SEQ ID NO: 165806 - DNA, 25 bp, Artificial
  Probe
aaggtcaaagcatacaagagacaag

SEQ ID NO: 165807 - DNA, 25 bp, Artificial
  Probe
tcaaaggtcaaagcatacaagagac

SEQ ID NO: 165808 - DNA, 25 bp, Artificial
  Probe
caaaggtcaaagcatacaagagaca

SEQ ID NO: 165809 - DNA, 25 bp, Artificial
  Probe
aaagcaggaaagtgaccaaagagat

SEQ ID NO: 165810 - DNA, 25 bp, Artificial
  Probe
cgcaaacatgagagaagagtgaaag

SEQ ID NO: 165811 - DNA, 25 bp, Artificial
  Probe
ggaaagtgaccaaagagatgagcaa

SEQ ID NO: 165812 - DNA, 25 bp, Artificial
  Probe
aagcaggaaagtgaccaaagagatg

SEQ ID NO: 165813 - DNA, 25 bp, Artificial
  Probe
caaagcaggaaagtgaccaaagaga

SEQ ID NO: 165814 - DNA, 25 bp, Artificial
  Probe
caaagagatgagcaaaatgtgaaga

SEQ ID NO: 165815 - DNA, 25 bp, Artificial
  Probe
aaagagatgagcaaaatgtgaagat

SEQ ID NO: 165816 - DNA, 25 bp, Artificial
  Probe
ccaaagagatgagcaaaatgtgaag

SEQ ID NO: 165817 - DNA, 25 bp, Artificial
  Probe
aagtgaccaaagagatgagcaaaat

SEQ ID NO: 165818 - DNA, 25 bp, Artificial
  Probe
caggaaagtgaccaaagagatgagc

SEQ ID NO: 165819 - DNA, 25 bp, Artificial
  Probe
gcaggaaagtgaccaaagagatgag

SEQ ID NO: 165820 - DNA, 25 bp, Artificial
  Probe
aaagtgaccaaagagatgagcaaaa

SEQ ID NO: 165821 - DNA, 25 bp, Artificial
  Probe
cttgaaggagaagttgaaaacgaac

SEQ ID NO: 165822 - DNA, 25 bp, Artificial
  Probe
accaaagagatgagcaaaatgtgaa

SEQ ID NO: 165823 - DNA, 25 bp, Artificial
  Probe
gacaaactgcaatcaaaggtcaaag

SEQ ID NO: 165824 - DNA, 25 bp, Artificial
  Probe
aaggagaagttgaaaacgaacagaa

SEQ ID NO: 165825 - DNA, 25 bp, Artificial
  Probe
ttcacaccaaaatcataagcgaaga

SEQ ID NO: 165826 - DNA, 25 bp, Artificial
  Probe
gttcacaccaaaatcataagcgaag

SEQ ID NO: 165827 - DNA, 25 bp, Artificial
  Probe
ttttgtacttacgactttgggagat

SEQ ID NO: 165828 - DNA, 25 bp, Artificial
  Probe
attttgtacttacgactttgggaga

SEQ ID NO: 165829 - DNA, 25 bp, Artificial
  Probe
cattttgtacttacgactttgggag

SEQ ID NO: 165830 - DNA, 25 bp, Artificial
  Probe
tcactccattttgtacttacgactt

SEQ ID NO: 165831 - DNA, 25 bp, Artificial
  Probe
tttgtcactccattttgtacttacg

SEQ ID NO: 165832 - DNA, 25 bp, Artificial
  Probe
tcacaccaaaatcataagcgaagag

SEQ ID NO: 165833 - DNA, 25 bp, Artificial
  Probe
ttgtcactccattttgtacttacga

SEQ ID NO: 165834 - DNA, 25 bp, Artificial
  Probe
actccattttgtacttacgactttg

SEQ ID NO: 165835 - DNA, 25 bp, Artificial
  Probe
cactccattttgtacttacgacttt

SEQ ID NO: 165836 - DNA, 25 bp, Artificial
  Probe
aagagatgagcaaaatgtgaagatc

SEQ ID NO: 165837 - DNA, 25 bp, Artificial
  Probe
caacaaccacaataacaaggaacaa

SEQ ID NO: 165838 - DNA, 25 bp, Artificial
  Probe
ttatcctggagtgatacatcgtaac

SEQ ID NO: 165839 - DNA, 25 bp, Artificial
  Probe
aagtgtacgattcaggtcttagtct

SEQ ID NO: 165840 - DNA, 25 bp, Artificial
  Probe
tatcctggagtgatacatcgtaacc

SEQ ID NO: 165841 - DNA, 25 bp, Artificial
  Probe
tatctctgtcactaactcgtgtctc

SEQ ID NO: 165842 - DNA, 25 bp, Artificial
  Probe
gaactgaagtaccattctcacaacc

SEQ ID NO: 165843 - DNA, 25 bp, Artificial
  Probe
gcaacaaccacaataacaaggaaca

SEQ ID NO: 165844 - DNA, 25 bp, Artificial
  Probe
gtatctctgtcactaactcgtgtct

SEQ ID NO: 165845 - DNA, 25 bp, Artificial
  Probe
agtatctctgtcactaactcgtgtc

SEQ ID NO: 165846 - DNA, 25 bp, Artificial
  Probe
cagtatctctgtcactaactcgtgt

SEQ ID NO: 165847 - DNA, 25 bp, Artificial
  Probe
aactgaagtaccattctcacaacct

SEQ ID NO: 165848 - DNA, 25 bp, Artificial
  Probe
aataacaaggaacaaacaaactcgt

SEQ ID NO: 165849 - DNA, 25 bp, Artificial
  Probe
ccacaataacaaggaacaaacaaac

SEQ ID NO: 165850 - DNA, 25 bp, Artificial
  Probe
accacaataacaaggaacaaacaaa

SEQ ID NO: 165851 - DNA, 25 bp, Artificial
  Probe
aaccacaataacaaggaacaaacaa

SEQ ID NO: 165852 - DNA, 25 bp, Artificial
  Probe
aacaaccacaataacaaggaacaaa

SEQ ID NO: 165853 - DNA, 25 bp, Artificial
  Probe
caataacaaggaacaaacaaactcg

SEQ ID NO: 165854 - DNA, 25 bp, Artificial
  Probe
caaccacaataacaaggaacaaaca

SEQ ID NO: 165855 - DNA, 25 bp, Artificial
  Probe
acaaccacaataacaaggaacaaac

SEQ ID NO: 165856 - DNA, 25 bp, Artificial
  Probe
agtgtacgattcaggtcttagtctg

SEQ ID NO: 165857 - DNA, 25 bp, Artificial
  Probe
aaagaaagggaggcgataatgtaag

SEQ ID NO: 165858 - DNA, 25 bp, Artificial
  Probe
cacaataacaaggaacaaacaaact

SEQ ID NO: 165859 - DNA, 25 bp, Artificial
  Probe
ataacaaggaacaaacaaactcgtt

SEQ ID NO: 165860 - DNA, 25 bp, Artificial
  Probe
actgaagtaccattctcacaacctc

SEQ ID NO: 165861 - DNA, 25 bp, Artificial
  Probe
acaataacaaggaacaaacaaactc

SEQ ID NO: 165862 - DNA, 25 bp, Artificial
  Probe
ctagaactgaagtaccattctcaca

SEQ ID NO: 165863 - DNA, 25 bp, Artificial
  Probe
aagaaagggaggcgataatgtaagt

SEQ ID NO: 165864 - DNA, 25 bp, Artificial
  Probe
cctagaactgaagtaccattctcac

SEQ ID NO: 165865 - DNA, 25 bp, Artificial
  Probe
tagaactgaagtaccattctcacaa

SEQ ID NO: 165866 - DNA, 25 bp, Artificial
  Probe
acctagaactgaagtaccattctca

SEQ ID NO: 165867 - DNA, 25 bp, Artificial
  Probe
agaactgaagtaccattctcacaac

SEQ ID NO: 165868 - DNA, 25 bp, Artificial
  Probe
aacgatgaaagaaagtgtacgattc

SEQ ID NO: 165869 - DNA, 25 bp, Artificial
  Probe
aaagtgtacgattcaggtcttagtc

SEQ ID NO: 165870 - DNA, 25 bp, Artificial
  Probe
gaaagtgtacgattcaggtcttagt

SEQ ID NO: 165871 - DNA, 25 bp, Artificial
  Probe
atctctgtcactaactcgtgtctct

SEQ ID NO: 165872 - DNA, 25 bp, Artificial
  Probe
agaaagtgtacgattcaggtcttag

SEQ ID NO: 165873 - DNA, 25 bp, Artificial
  Probe
tacctagaactgaagtaccattctc

SEQ ID NO: 165874 - DNA, 25 bp, Artificial
  Probe
taacgatgaaagaaagtgtacgatt

SEQ ID NO: 165875 - DNA, 25 bp, Artificial
  Probe
gtgtacgattcaggtcttagtctgg

SEQ ID NO: 165876 - DNA, 25 bp, Artificial
  Probe
ctctgtcactaactcgtgtctcttg

SEQ ID NO: 165877 - DNA, 25 bp, Artificial
  Probe
tctctgtcactaactcgtgtctctt

SEQ ID NO: 165878 - DNA, 25 bp, Artificial
  Probe
gaaagaaagtgtacgattcaggtct

SEQ ID NO: 165879 - DNA, 25 bp, Artificial
  Probe
aatttatcctggagtgatacatcgt

SEQ ID NO: 165880 - DNA, 25 bp, Artificial
  Probe
ataacgatgaaagaaagtgtacgat

SEQ ID NO: 165881 - DNA, 25 bp, Artificial
  Probe
ctgaagtaccattctcacaacctcc

SEQ ID NO: 165882 - DNA, 25 bp, Artificial
  Probe
cggatatataggtatggtatgagcc

SEQ ID NO: 165883 - DNA, 25 bp, Artificial
  Probe
tcggatatataggtatggtatgagc

SEQ ID NO: 165884 - DNA, 25 bp, Artificial
  Probe
ggatatataggtatggtatgagcca

SEQ ID NO: 165885 - DNA, 25 bp, Artificial
  Probe
tggtatgagccataatatctattgg

SEQ ID NO: 165886 - DNA, 25 bp, Artificial
  Probe
ttcggatatataggtatggtatgag

SEQ ID NO: 165887 - DNA, 25 bp, Artificial
  Probe
gatatataggtatggtatgagccat

SEQ ID NO: 165888 - DNA, 25 bp, Artificial
  Probe
atggtatgagccataatatctattg

SEQ ID NO: 165889 - DNA, 25 bp, Artificial
  Probe
aaccattatgtctttctcaataaaa

SEQ ID NO: 165890 - DNA, 25 bp, Artificial
  Probe
aatgtgtagaatcagcgaagaagat

SEQ ID NO: 165891 - DNA, 25 bp, Artificial
  Probe
ttctaaggcttctgtgttaattcat

SEQ ID NO: 165892 - DNA, 25 bp, Artificial
  Probe
atgtgtagaatcagcgaagaagatc

SEQ ID NO: 165893 - DNA, 25 bp, Artificial
  Probe
tctaaggcttctgtgttaattcata

SEQ ID NO: 165894 - DNA, 25 bp, Artificial
  Probe
ttcagttaattcagtcagctatgga

SEQ ID NO: 165895 - DNA, 25 bp, Artificial
  Probe
tcagttaattcagtcagctatggat

SEQ ID NO: 165896 - DNA, 25 bp, Artificial
  Probe
cttcagttaattcagtcagctatgg

SEQ ID NO: 165897 - DNA, 25 bp, Artificial
  Probe
ggcttctgtgttaattcatatagac

SEQ ID NO: 165898 - DNA, 25 bp, Artificial
  Probe
tcttcagttaattcagtcagctatg

SEQ ID NO: 165899 - DNA, 25 bp, Artificial
  Probe
aggcttctgtgttaattcatataga

SEQ ID NO: 165900 - DNA, 25 bp, Artificial
  Probe
gaaatgtgtagaatcagcgaagaag

SEQ ID NO: 165901 - DNA, 25 bp, Artificial
  Probe
aaatgtgtagaatcagcgaagaaga

SEQ ID NO: 165902 - DNA, 25 bp, Artificial
  Probe
agaaatgtgtagaatcagcgaagaa

SEQ ID NO: 165903 - DNA, 25 bp, Artificial
  Probe
ttaattcagtcagctatggatacac

SEQ ID NO: 165904 - DNA, 25 bp, Artificial
  Probe
gttaattcagtcagctatggataca

SEQ ID NO: 165905 - DNA, 25 bp, Artificial
  Probe
gatcttcagttaattcagtcagcta

SEQ ID NO: 165906 - DNA, 25 bp, Artificial
  Probe
taattcagtcagctatggatacact

SEQ ID NO: 165907 - DNA, 25 bp, Artificial
  Probe
gagaaatgtgtagaatcagcgaaga

SEQ ID NO: 165908 - DNA, 25 bp, Artificial
  Probe
agttaattcagtcagctatggatac

SEQ ID NO: 165909 - DNA, 25 bp, Artificial
  Probe
cagttaattcagtcagctatggata

SEQ ID NO: 165910 - DNA, 25 bp, Artificial
  Probe
aaggcttctgtgttaattcatatag

SEQ ID NO: 165911 - DNA, 25 bp, Artificial
  Probe
ctaaggcttctgtgttaattcatat

SEQ ID NO: 165912 - DNA, 25 bp, Artificial
  Probe
tttctaaggcttctgtgttaattca

SEQ ID NO: 165913 - DNA, 25 bp, Artificial
  Probe
ctaaatgttgaccgtacttattggg

SEQ ID NO: 165914 - DNA, 25 bp, Artificial
  Probe
atgagaaatgtgtagaatcagcgaa

SEQ ID NO: 165915 - DNA, 25 bp, Artificial
  Probe
atcttcagttaattcagtcagctat

SEQ ID NO: 165916 - DNA, 25 bp, Artificial
  Probe
gatgagaaatgtgtagaatcagcga

SEQ ID NO: 165917 - DNA, 25 bp, Artificial
  Probe
actaaatgttgaccgtacttattgg

SEQ ID NO: 165918 - DNA, 25 bp, Artificial
  Probe
aaatgttgaccgtacttattgggag

SEQ ID NO: 165919 - DNA, 25 bp, Artificial
  Probe
atgtttccctggttgaacttctcta

SEQ ID NO: 165920 - DNA, 25 bp, Artificial
  Probe
tgagaaatgtgtagaatcagcgaag

SEQ ID NO: 165921 - DNA, 25 bp, Artificial
  Probe
tttgactaaatgttgaccgtactta

SEQ ID NO: 165922 - DNA, 25 bp, Artificial
  Probe
agatcttcagttaattcagtcagct

SEQ ID NO: 165923 - DNA, 25 bp, Artificial
  Probe
tgactaaatgttgaccgtacttatt

SEQ ID NO: 165924 - DNA, 25 bp, Artificial
  Probe
ttgactaaatgttgaccgtacttat

SEQ ID NO: 165925 - DNA, 25 bp, Artificial
  Probe
gaaaccctcgtgtcaaactctctta

SEQ ID NO: 165926 - DNA, 25 bp, Artificial
  Probe
taatctttccttatggagagtgtcc

SEQ ID NO: 165927 - DNA, 25 bp, Artificial
  Probe
gactaaatgttgaccgtacttattg

SEQ ID NO: 165928 - DNA, 25 bp, Artificial
  Probe
ctttccttatggagagtgtcctttc

SEQ ID NO: 165929 - DNA, 25 bp, Artificial
  Probe
tgtttccctggttgaacttctctac

SEQ ID NO: 165930 - DNA, 25 bp, Artificial
  Probe
atctttccttatggagagtgtcctt

SEQ ID NO: 165931 - DNA, 25 bp, Artificial
  Probe
aatctttccttatggagagtgtcct

SEQ ID NO: 165932 - DNA, 25 bp, Artificial
  Probe
aatagctgtcatatccttgtcaaac

SEQ ID NO: 165933 - DNA, 25 bp, Artificial
  Probe
ggttgaacttctctaccatgtggaa

SEQ ID NO: 165934 - DNA, 25 bp, Artificial
  Probe
tttccttatggagagtgtcctttct

SEQ ID NO: 165935 - DNA, 25 bp, Artificial
  Probe
tgtcaggttaggtatgtgtaagtaa

SEQ ID NO: 165936 - DNA, 25 bp, Artificial
  Probe
ctgtcaggttaggtatgtgtaagta

SEQ ID NO: 165937 - DNA, 25 bp, Artificial
  Probe
ttaagccataatcttccttctcagc

SEQ ID NO: 165938 - DNA, 25 bp, Artificial
  Probe
attggacctgtcttgttaatgtagc

SEQ ID NO: 165939 - DNA, 25 bp, Artificial
  Probe
tcaatatagttcctcctgttgtgac

SEQ ID NO: 165940 - DNA, 25 bp, Artificial
  Probe
caatatagttcctcctgttgtgacc

SEQ ID NO: 165941 - DNA, 25 bp, Artificial
  Probe
ttcaatatagttcctcctgttgtga

SEQ ID NO: 165942 - DNA, 25 bp, Artificial
  Probe
ccataatcttccttctcagccttct

SEQ ID NO: 165943 - DNA, 25 bp, Artificial
  Probe
tgacagtccagaagaactagagtaa

SEQ ID NO: 165944 - DNA, 25 bp, Artificial
  Probe
ttgacagtccagaagaactagagta

SEQ ID NO: 165945 - DNA, 25 bp, Artificial
  Probe
ttatcattggacctgtcttgttaat

SEQ ID NO: 165946 - DNA, 25 bp, Artificial
  Probe
attatcattggacctgtcttgttaa

SEQ ID NO: 165947 - DNA, 25 bp, Artificial
  Probe
cagtctcaagtcttatatctggcaa

SEQ ID NO: 165948 - DNA, 25 bp, Artificial
  Probe
atattatcattggacctgtcttgtt

SEQ ID NO: 165949 - DNA, 25 bp, Artificial
  Probe
cataatcttccttctcagccttctg

SEQ ID NO: 165950 - DNA, 25 bp, Artificial
  Probe
taagccataatcttccttctcagcc

SEQ ID NO: 165951 - DNA, 25 bp, Artificial
  Probe
cttgacagtccagaagaactagagt

SEQ ID NO: 165952 - DNA, 25 bp, Artificial
  Probe
ataatcttccttctcagccttctgt

SEQ ID NO: 165953 - DNA, 25 bp, Artificial
  Probe
aaccttgacagtccagaagaactag

SEQ ID NO: 165954 - DNA, 25 bp, Artificial
  Probe
ccttgacagtccagaagaactagag

SEQ ID NO: 165955 - DNA, 25 bp, Artificial
  Probe
acacagtatattatcattggacctg

SEQ ID NO: 165956 - DNA, 25 bp, Artificial
  Probe
tattatcattggacctgtcttgtta

SEQ ID NO: 165957 - DNA, 25 bp, Artificial
  Probe
ttatttgtgtgagtatgtgtgtgtg

SEQ ID NO: 165958 - DNA, 25 bp, Artificial
  Probe
gacctttcaatatagttcctcctgt

SEQ ID NO: 165959 - DNA, 25 bp, Artificial
  Probe
ctcaagtcttatatctggcaaacct

SEQ ID NO: 165960 - DNA, 25 bp, Artificial
  Probe
tctcaagtcttatatctggcaaacc

SEQ ID NO: 165961 - DNA, 25 bp, Artificial
  Probe
ttggacctgtcttgttaatgtagcc

SEQ ID NO: 165962 - DNA, 25 bp, Artificial
  Probe
gtctcaagtcttatatctggcaaac

SEQ ID NO: 165963 - DNA, 25 bp, Artificial
  Probe
agtctcaagtcttatatctggcaaa

SEQ ID NO: 165964 - DNA, 25 bp, Artificial
  Probe
taatcttccttctcagccttctgtg

SEQ ID NO: 165965 - DNA, 25 bp, Artificial
  Probe
aatgttatacccagtctcaagtctt

SEQ ID NO: 165966 - DNA, 25 bp, Artificial
  Probe
acctttcaatatagttcctcctgtt

SEQ ID NO: 165967 - DNA, 25 bp, Artificial
  Probe
tcctctcaactttcctaattctgtg

SEQ ID NO: 165968 - DNA, 25 bp, Artificial
  Probe
gtcctctcaactttcctaattctgt

SEQ ID NO: 165969 - DNA, 25 bp, Artificial
  Probe
tgtaatgttatacccagtctcaagt

SEQ ID NO: 165970 - DNA, 25 bp, Artificial
  Probe
tttatttgtgtgagtatgtgtgtgt

SEQ ID NO: 165971 - DNA, 25 bp, Artificial
  Probe
tcaagtcttatatctggcaaacctt

SEQ ID NO: 165972 - DNA, 25 bp, Artificial
  Probe
tatattatcattggacctgtcttgt

SEQ ID NO: 165973 - DNA, 25 bp, Artificial
  Probe
caactttcctaattctgtgaccttt

SEQ ID NO: 165974 - DNA, 25 bp, Artificial
  Probe
tcattggacctgtcttgttaatgta

SEQ ID NO: 165975 - DNA, 25 bp, Artificial
  Probe
cattggacctgtcttgttaatgtag

SEQ ID NO: 165976 - DNA, 25 bp, Artificial
  Probe
atcattggacctgtcttgttaatgt

SEQ ID NO: 165977 - DNA, 25 bp, Artificial
  Probe
aactttcctaattctgtgacctttc

SEQ ID NO: 165978 - DNA, 25 bp, Artificial
  Probe
gtatattatcattggacctgtcttg

SEQ ID NO: 165979 - DNA, 25 bp, Artificial
  Probe
tatttgtgtgagtatgtgtgtgtgg

SEQ ID NO: 165980 - DNA, 25 bp, Artificial
  Probe
ttctggactgataatgacctctgag

SEQ ID NO: 165981 - DNA, 25 bp, Artificial
  Probe
ggcacagttccagaatatataagag

SEQ ID NO: 165982 - DNA, 25 bp, Artificial
  Probe
tcaacacgagtacatctcttacatt

SEQ ID NO: 165983 - DNA, 25 bp, Artificial
  Probe
ctcaacacgagtacatctcttacat

SEQ ID NO: 165984 - DNA, 25 bp, Artificial
  Probe
ttctcaacacgagtacatctcttac

SEQ ID NO: 165985 - DNA, 25 bp, Artificial
  Probe
cattctcaacacgagtacatctctt

SEQ ID NO: 165986 - DNA, 25 bp, Artificial
  Probe
attctcaacacgagtacatctctta

SEQ ID NO: 165987 - DNA, 25 bp, Artificial
  Probe
tatataagagtctgtggaggtgatt

SEQ ID NO: 165988 - DNA, 25 bp, Artificial
  Probe
tctcaacacgagtacatctcttaca

SEQ ID NO: 165989 - DNA, 25 bp, Artificial
  Probe
ctcattctcaacacgagtacatctc

SEQ ID NO: 165990 - DNA, 25 bp, Artificial
  Probe
aatatataagagtctgtggaggtga

SEQ ID NO: 165991 - DNA, 25 bp, Artificial
  Probe
gcacagttccagaatatataagagt

SEQ ID NO: 165992 - DNA, 25 bp, Artificial
  Probe
acacgagtacatctcttacattaga

SEQ ID NO: 165993 - DNA, 25 bp, Artificial
  Probe
gaatatataagagtctgtggaggtg

SEQ ID NO: 165994 - DNA, 25 bp, Artificial
  Probe
tcattctcaacacgagtacatctct

SEQ ID NO: 165995 - DNA, 25 bp, Artificial
  Probe
atatataagagtctgtggaggtgat

SEQ ID NO: 165996 - DNA, 25 bp, Artificial
  Probe
caacacgagtacatctcttacatta

SEQ ID NO: 165997 - DNA, 25 bp, Artificial
  Probe
agaatatataagagtctgtggaggt

SEQ ID NO: 165998 - DNA, 25 bp, Artificial
  Probe
aacacgagtacatctcttacattag

SEQ ID NO: 165999 - DNA, 25 bp, Artificial
  Probe
aaggttatgtcagaatggaagtttg

SEQ ID NO: 166000 - DNA, 25 bp, Artificial
  Probe
ctttctggactgataatgacctctg

SEQ ID NO: 166001 - DNA, 25 bp, Artificial
  Probe
tttctggactgataatgacctctga

SEQ ID NO: 166002 - DNA, 25 bp, Artificial
  Probe
ataagagtctgtggaggtgatttaa

SEQ ID NO: 166003 - DNA, 25 bp, Artificial
  Probe
atataagagtctgtggaggtgattt

SEQ ID NO: 166004 - DNA, 25 bp, Artificial
  Probe
aaaggttatgtcagaatggaagttt

SEQ ID NO: 166005 - DNA, 25 bp, Artificial
  Probe
gagacctttctggactgataatgac

SEQ ID NO: 166006 - DNA, 25 bp, Artificial
  Probe
ctgagacctttctggactgataatg

SEQ ID NO: 166007 - DNA, 25 bp, Artificial
  Probe
tgagacctttctggactgataatga

SEQ ID NO: 166008 - DNA, 25 bp, Artificial
  Probe
cctttctggactgataatgacctct

SEQ ID NO: 166009 - DNA, 25 bp, Artificial
  Probe
ttatgtcagaatggaagtttgatgc

SEQ ID NO: 166010 - DNA, 25 bp, Artificial
  Probe
aggttatgtcagaatggaagtttga

SEQ ID NO: 166011 - DNA, 25 bp, Artificial
  Probe
ggttatgtcagaatggaagtttgat

SEQ ID NO: 166012 - DNA, 25 bp, Artificial
  Probe
tataagagtctgtggaggtgattta

SEQ ID NO: 166013 - DNA, 25 bp, Artificial
  Probe
gggcacagttccagaatatataaga

SEQ ID NO: 166014 - DNA, 25 bp, Artificial
  Probe
acctttctggactgataatgacctc

SEQ ID NO: 166015 - DNA, 25 bp, Artificial
  Probe
gacctttctggactgataatgacct

SEQ ID NO: 166016 - DNA, 25 bp, Artificial
  Probe
cctgagacctttctggactgataat

SEQ ID NO: 166017 - DNA, 25 bp, Artificial
  Probe
tttgggaacttaacatttctgtcag

SEQ ID NO: 166018 - DNA, 25 bp, Artificial
  Probe
gctcattctcaacacgagtacatct

SEQ ID NO: 166019 - DNA, 25 bp, Artificial
  Probe
tatgtcagaatggaagtttgatgcc

SEQ ID NO: 166020 - DNA, 25 bp, Artificial
  Probe
agacctttctggactgataatgacc

SEQ ID NO: 166021 - DNA, 25 bp, Artificial
  Probe
gttatgtcagaatggaagtttgatg

SEQ ID NO: 166022 - DNA, 25 bp, Artificial
  Probe
taagagtctgtggaggtgatttaaa

SEQ ID NO: 166023 - DNA, 25 bp, Artificial
  Probe
tgggaacttaacatttctgtcagat

SEQ ID NO: 166024 - DNA, 25 bp, Artificial
  Probe
ttgggaacttaacatttctgtcaga

SEQ ID NO: 166025 - DNA, 25 bp, Artificial
  Probe
gtgacattgagttgtaagcagaata

SEQ ID NO: 166026 - DNA, 25 bp, Artificial
  Probe
tgacattgagttgtaagcagaataa

SEQ ID NO: 166027 - DNA, 25 bp, Artificial
  Probe
ggtgacattgagttgtaagcagaat

SEQ ID NO: 166028 - DNA, 25 bp, Artificial
  Probe
gacattgagttgtaagcagaataat

SEQ ID NO: 166029 - DNA, 25 bp, Artificial
  Probe
aggtgacattgagttgtaagcagaa

SEQ ID NO: 166030 - DNA, 25 bp, Artificial
  Probe
aaggtgacattgagttgtaagcaga

SEQ ID NO: 166031 - DNA, 25 bp, Artificial
  Probe
aggaaaggtgacattgagttgtaag

SEQ ID NO: 166032 - DNA, 25 bp, Artificial
  Probe
gaggaaaggtgacattgagttgtaa

SEQ ID NO: 166033 - DNA, 25 bp, Artificial
  Probe
aaaggaggaaaggtgacattgagtt

SEQ ID NO: 166034 - DNA, 25 bp, Artificial
  Probe
aaaggtgacattgagttgtaagcag

SEQ ID NO: 166035 - DNA, 25 bp, Artificial
  Probe
gaaaggtgacattgagttgtaagca

SEQ ID NO: 166036 - DNA, 25 bp, Artificial
  Probe
acattgagttgtaagcagaataata

SEQ ID NO: 166037 - DNA, 25 bp, Artificial
  Probe
aaggaggaaaggtgacattgagttg

SEQ ID NO: 166038 - DNA, 25 bp, Artificial
  Probe
ggaaaggtgacattgagttgtaagc

SEQ ID NO: 166039 - DNA, 25 bp, Artificial
  Probe
ggaggaaaggtgacattgagttgta

SEQ ID NO: 166040 - DNA, 25 bp, Artificial
  Probe
cattgagttgtaagcagaataataa

SEQ ID NO: 166041 - DNA, 25 bp, Artificial
  Probe
attactcatatggtgctaacagtac

SEQ ID NO: 166042 - DNA, 25 bp, Artificial
  Probe
cattactcatatggtgctaacagta

SEQ ID NO: 166043 - DNA, 25 bp, Artificial
  Probe
tctgaggctgatccattactcatat

SEQ ID NO: 166044 - DNA, 25 bp, Artificial
  Probe
aagaaacaaggtgacagtaaaagga

SEQ ID NO: 166045 - DNA, 25 bp, Artificial
  Probe
caagaaacaaggtgacagtaaaagg

SEQ ID NO: 166046 - DNA, 25 bp, Artificial
  Probe
ccaagaaacaaggtgacagtaaaag

SEQ ID NO: 166047 - DNA, 25 bp, Artificial
  Probe
taaaaggaggaaaggtgacattgag

SEQ ID NO: 166048 - DNA, 25 bp, Artificial
  Probe
ttactcatatggtgctaacagtact

SEQ ID NO: 166049 - DNA, 25 bp, Artificial
  Probe
gtaaaaggaggaaaggtgacattga

SEQ ID NO: 166050 - DNA, 25 bp, Artificial
  Probe
agtaaaaggaggaaaggtgacattg

SEQ ID NO: 166051 - DNA, 25 bp, Artificial
  Probe
cagtaaaaggaggaaaggtgacatt

SEQ ID NO: 166052 - DNA, 25 bp, Artificial
  Probe
agaaacaaggtgacagtaaaaggag

SEQ ID NO: 166053 - DNA, 25 bp, Artificial
  Probe
gtctgaggctgatccattactcata

SEQ ID NO: 166054 - DNA, 25 bp, Artificial
  Probe
gcccaagaaacaaggtgacagtaaa

SEQ ID NO: 166055 - DNA, 25 bp, Artificial
  Probe
caaggtgacagtaaaaggaggaaag

SEQ ID NO: 166056 - DNA, 25 bp, Artificial
  Probe
cccaagaaacaaggtgacagtaaaa

SEQ ID NO: 166057 - DNA, 25 bp, Artificial
  Probe
gaaacaaggtgacagtaaaaggagg

SEQ ID NO: 166058 - DNA, 25 bp, Artificial
  Probe
acagtaaaaggaggaaaggtgacat

SEQ ID NO: 166059 - DNA, 25 bp, Artificial
  Probe
acaaggtgacagtaaaaggaggaaa

SEQ ID NO: 166060 - DNA, 25 bp, Artificial
  Probe
aacaaggtgacagtaaaaggaggaa

SEQ ID NO: 166061 - DNA, 25 bp, Artificial
  Probe
aaacaaggtgacagtaaaaggagga

SEQ ID NO: 166062 - DNA, 25 bp, Artificial
  Probe
aaaaggaggaaaggtgacattgagt

SEQ ID NO: 166063 - DNA, 25 bp, Artificial
  Probe
agtcacacaaagcccaagaaacaag

SEQ ID NO: 166064 - DNA, 25 bp, Artificial
  Probe
gacagtaaaaggaggaaaggtgaca

SEQ ID NO: 166065 - DNA, 25 bp, Artificial
  Probe
tgacagtaaaaggaggaaaggtgac

SEQ ID NO: 166066 - DNA, 25 bp, Artificial
  Probe
gtgacagtaaaaggaggaaaggtga

SEQ ID NO: 166067 - DNA, 25 bp, Artificial
  Probe
aaggtgacagtaaaaggaggaaagg

SEQ ID NO: 166068 - DNA, 25 bp, Artificial
  Probe
agcccaagaaacaaggtgacagtaa

SEQ ID NO: 166069 - DNA, 25 bp, Artificial
  Probe
aagcccaagaaacaaggtgacagta

SEQ ID NO: 166070 - DNA, 25 bp, Artificial
  Probe
ttggagagaatcgtagactcagacc

SEQ ID NO: 166071 - DNA, 25 bp, Artificial
  Probe
ctttggagagaatcgtagactcaga

SEQ ID NO: 166072 - DNA, 25 bp, Artificial
  Probe
tctttggagagaatcgtagactcag

SEQ ID NO: 166073 - DNA, 25 bp, Artificial
  Probe
tttggagagaatcgtagactcagac

SEQ ID NO: 166074 - DNA, 25 bp, Artificial
  Probe
ggagagaatcgtagactcagacctg

SEQ ID NO: 166075 - DNA, 25 bp, Artificial
  Probe
cgttggtcataatttatctgtactc

SEQ ID NO: 166076 - DNA, 25 bp, Artificial
  Probe
tggagagaatcgtagactcagacct

SEQ ID NO: 166077 - DNA, 25 bp, Artificial
  Probe
gttggtcataatttatctgtactcc

SEQ ID NO: 166078 - DNA, 25 bp, Artificial
  Probe
gagaatcgtagactcagacctggtg

SEQ ID NO: 166079 - DNA, 25 bp, Artificial
  Probe
agagaatcgtagactcagacctggt

SEQ ID NO: 166080 - DNA, 25 bp, Artificial
  Probe
acgttggtcataatttatctgtact

SEQ ID NO: 166081 - DNA, 25 bp, Artificial
  Probe
ctgggacgttggtcataatttatct

SEQ ID NO: 166082 - DNA, 25 bp, Artificial
  Probe
gggacgttggtcataatttatctgt

SEQ ID NO: 166083 - DNA, 25 bp, Artificial
  Probe
tgggacgttggtcataatttatctg

SEQ ID NO: 166084 - DNA, 25 bp, Artificial
  Probe
ggtcataatttatctgtactccatg

SEQ ID NO: 166085 - DNA, 25 bp, Artificial
  Probe
ggacgttggtcataatttatctgta

SEQ ID NO: 166086 - DNA, 25 bp, Artificial
  Probe
caaccctagactcgtcctcactatc

SEQ ID NO: 166087 - DNA, 25 bp, Artificial
  Probe
aaatcttccaagtcgagacactgag

SEQ ID NO: 166088 - DNA, 25 bp, Artificial
  Probe
ttggtcataatttatctgtactcca

SEQ ID NO: 166089 - DNA, 25 bp, Artificial
  Probe
gctgggacgttggtcataatttatc

SEQ ID NO: 166090 - DNA, 25 bp, Artificial
  Probe
gacgttggtcataatttatctgtac

SEQ ID NO: 166091 - DNA, 25 bp, Artificial
  Probe
tggtcataatttatctgtactccat

SEQ ID NO: 166092 - DNA, 25 bp, Artificial
  Probe
aatcttccaagtcgagacactgagg

SEQ ID NO: 166093 - DNA, 25 bp, Artificial
  Probe
ctctttggagagaatcgtagactca

SEQ ID NO: 166094 - DNA, 25 bp, Artificial
  Probe
tgctgggacgttggtcataatttat

SEQ ID NO: 166095 - DNA, 25 bp, Artificial
  Probe
tagactcagacctggtgcttcagaa

SEQ ID NO: 166096 - DNA, 25 bp, Artificial
  Probe
atatgctgaaaatcttccaagtcga

SEQ ID NO: 166097 - DNA, 25 bp, Artificial
  Probe
tatgctgaaaatcttccaagtcgag

SEQ ID NO: 166098 - DNA, 25 bp, Artificial
  Probe
cattggtagctctttggagagaatc

SEQ ID NO: 166099 - DNA, 25 bp, Artificial
  Probe
aaccctagactcgtcctcactatcc

SEQ ID NO: 166100 - DNA, 25 bp, Artificial
  Probe
tagctctttggagagaatcgtagac

SEQ ID NO: 166101 - DNA, 25 bp, Artificial
  Probe
gtagctctttggagagaatcgtaga

SEQ ID NO: 166102 - DNA, 25 bp, Artificial
  Probe
ctgctgggacgttggtcataattta

SEQ ID NO: 166103 - DNA, 25 bp, Artificial
  Probe
gctctttggagagaatcgtagactc

SEQ ID NO: 166104 - DNA, 25 bp, Artificial
  Probe
ccatatgctgaaaatcttccaagtc

SEQ ID NO: 166105 - DNA, 25 bp, Artificial
  Probe
ccaaccctagactcgtcctcactat

SEQ ID NO: 166106 - DNA, 25 bp, Artificial
  Probe
ctgaaaatcttccaagtcgagacac

SEQ ID NO: 166107 - DNA, 25 bp, Artificial
  Probe
caccatatgctgaaaatcttccaag

SEQ ID NO: 166108 - DNA, 25 bp, Artificial
  Probe
catatgctgaaaatcttccaagtcg

SEQ ID NO: 166109 - DNA, 25 bp, Artificial
  Probe
accatatgctgaaaatcttccaagt

SEQ ID NO: 166110 - DNA, 25 bp, Artificial
  Probe
gaaaatcttccaagtcgagacactg

SEQ ID NO: 166111 - DNA, 25 bp, Artificial
  Probe
ggtagctctttggagagaatcgtag

SEQ ID NO: 166112 - DNA, 25 bp, Artificial
  Probe
tcaccatatgctgaaaatcttccaa

SEQ ID NO: 166113 - DNA, 25 bp, Artificial
  Probe
aaaatcttccaagtcgagacactga

SEQ ID NO: 166114 - DNA, 25 bp, Artificial
  Probe
tgaaaatcttccaagtcgagacact

SEQ ID NO: 166115 - DNA, 25 bp, Artificial
  Probe
caattcacacagaccttatcattcc

SEQ ID NO: 166116 - DNA, 25 bp, Artificial
  Probe
cctcaattcacacagaccttatcat

SEQ ID NO: 166117 - DNA, 25 bp, Artificial
  Probe
agtagttggaacagtattgaacagt

SEQ ID NO: 166118 - DNA, 25 bp, Artificial
  Probe
gtagttggaacagtattgaacagtc

SEQ ID NO: 166119 - DNA, 25 bp, Artificial
  Probe
cagtagttggaacagtattgaacag

SEQ ID NO: 166120 - DNA, 25 bp, Artificial
  Probe
tcaattcacacagaccttatcattc

SEQ ID NO: 166121 - DNA, 25 bp, Artificial
  Probe
ctcaattcacacagaccttatcatt

SEQ ID NO: 166122 - DNA, 25 bp, Artificial
  Probe
tcagtagttggaacagtattgaaca

SEQ ID NO: 166123 - DNA, 25 bp, Artificial
  Probe
ctcctgaacaagtaagtgtctgatt

SEQ ID NO: 166124 - DNA, 25 bp, Artificial
  Probe
cctgaacaagtaagtgtctgattga

SEQ ID NO: 166125 - DNA, 25 bp, Artificial
  Probe
tcctgaacaagtaagtgtctgattg

SEQ ID NO: 166126 - DNA, 25 bp, Artificial
  Probe
ctgaacaagtaagtgtctgattgac

SEQ ID NO: 166127 - DNA, 25 bp, Artificial
  Probe
tagttggaacagtattgaacagtcc

SEQ ID NO: 166128 - DNA, 25 bp, Artificial
  Probe
aacaggtagagagacatcttgtgac

SEQ ID NO: 166129 - DNA, 25 bp, Artificial
  Probe
ttatcattccctccttgtttctcag

SEQ ID NO: 166130 - DNA, 25 bp, Artificial
  Probe
cttatcattccctccttgtttctca

SEQ ID NO: 166131 - DNA, 25 bp, Artificial
  Probe
ccttatcattccctccttgtttctc

SEQ ID NO: 166132 - DNA, 25 bp, Artificial
  Probe
tatcattccctccttgtttctcaga

SEQ ID NO: 166133 - DNA, 25 bp, Artificial
  Probe
gaccttatcattccctccttgtttc

SEQ ID NO: 166134 - DNA, 25 bp, Artificial
  Probe
aattcacacagaccttatcattccc

SEQ ID NO: 166135 - DNA, 25 bp, Artificial
  Probe
tttaggctcaaatctcagtttctac

SEQ ID NO: 166136 - DNA, 25 bp, Artificial
  Probe
accttatcattccctccttgtttct

SEQ ID NO: 166137 - DNA, 25 bp, Artificial
  Probe
agaccttatcattccctccttgttt

SEQ ID NO: 166138 - DNA, 25 bp, Artificial
  Probe
gctcctgaacaagtaagtgtctgat

SEQ ID NO: 166139 - DNA, 25 bp, Artificial
  Probe
attcacacagaccttatcattccct

SEQ ID NO: 166140 - DNA, 25 bp, Artificial
  Probe
cccaacaacaaattctcttacttga

SEQ ID NO: 166141 - DNA, 25 bp, Artificial
  Probe
aggctcaaatctcagtttctactta

SEQ ID NO: 166142 - DNA, 25 bp, Artificial
  Probe
taggctcaaatctcagtttctactt

SEQ ID NO: 166143 - DNA, 25 bp, Artificial
  Probe
ttaggctcaaatctcagtttctact

SEQ ID NO: 166144 - DNA, 25 bp, Artificial
  Probe
cagaccttatcattccctccttgtt

SEQ ID NO: 166145 - DNA, 25 bp, Artificial
  Probe
ttcacacagaccttatcattccctc

SEQ ID NO: 166146 - DNA, 25 bp, Artificial
  Probe
catactgatgttaagggagacagaa

SEQ ID NO: 166147 - DNA, 25 bp, Artificial
  Probe
ggctcaaatctcagtttctacttat

SEQ ID NO: 166148 - DNA, 25 bp, Artificial
  Probe
gaaacaggtagagagacatcttgtg

SEQ ID NO: 166149 - DNA, 25 bp, Artificial
  Probe
atactgatgttaagggagacagaag

SEQ ID NO: 166150 - DNA, 25 bp, Artificial
  Probe
tactgatgttaagggagacagaagt

SEQ ID NO: 166151 - DNA, 25 bp, Artificial
  Probe
aaacaggtagagagacatcttgtga

SEQ ID NO: 166152 - DNA, 25 bp, Artificial
  Probe
tgaacagtccatacttgatttacaa

SEQ ID NO: 166153 - DNA, 25 bp, Artificial
  Probe
ttgaacagtccatacttgatttaca

SEQ ID NO: 166154 - DNA, 25 bp, Artificial
  Probe
atcattccctccttgtttctcagaa

SEQ ID NO: 166155 - DNA, 25 bp, Artificial
  Probe
ccctcaattcacacagaccttatca

SEQ ID NO: 166156 - DNA, 25 bp, Artificial
  Probe
ttcagtagttggaacagtattgaac

SEQ ID NO: 166157 - DNA, 25 bp, Artificial
  Probe
ccatactgatgttaagggagacaga

SEQ ID NO: 166158 - DNA, 25 bp, Artificial
  Probe
ctacttattagctgtgggtctatgg

SEQ ID NO: 166159 - DNA, 25 bp, Artificial
  Probe
gtttctacttattagctgtgggtct

SEQ ID NO: 166160 - DNA, 25 bp, Artificial
  Probe
atactggttactgttcctggtagag

SEQ ID NO: 166161 - DNA, 25 bp, Artificial
  Probe
catactggttactgttcctggtaga

SEQ ID NO: 166162 - DNA, 25 bp, Artificial
  Probe
tactggttactgttcctggtagaga

SEQ ID NO: 166163 - DNA, 25 bp, Artificial
  Probe
gttactgttcctggtagagaagtct

SEQ ID NO: 166164 - DNA, 25 bp, Artificial
  Probe
aattctccactgagttctaagacag

SEQ ID NO: 166165 - DNA, 25 bp, Artificial
  Probe
attctccactgagttctaagacaga

SEQ ID NO: 166166 - DNA, 25 bp, Artificial
  Probe
ctggttactgttcctggtagagaag

SEQ ID NO: 166167 - DNA, 25 bp, Artificial
  Probe
acatactggttactgttcctggtag

SEQ ID NO: 166168 - DNA, 25 bp, Artificial
  Probe
ttactgttcctggtagagaagtcta

SEQ ID NO: 166169 - DNA, 25 bp, Artificial
  Probe
ggttactgttcctggtagagaagtc

SEQ ID NO: 166170 - DNA, 25 bp, Artificial
  Probe
tactgttcctggtagagaagtctag

SEQ ID NO: 166171 - DNA, 25 bp, Artificial
  Probe
cacatactggttactgttcctggta

SEQ ID NO: 166172 - DNA, 25 bp, Artificial
  Probe
actggttactgttcctggtagagaa

SEQ ID NO: 166173 - DNA, 25 bp, Artificial
  Probe
tggttactgttcctggtagagaagt

SEQ ID NO: 166174 - DNA, 25 bp, Artificial
  Probe
aggtccttatctctcccaattatga

SEQ ID NO: 166175 - DNA, 25 bp, Artificial
  Probe
tcataggtccttatctctcccaatt

SEQ ID NO: 166176 - DNA, 25 bp, Artificial
  Probe
atcataggtccttatctctcccaat

SEQ ID NO: 166177 - DNA, 25 bp, Artificial
  Probe
ttatgtccatccgtcatttatgtcc

SEQ ID NO: 166178 - DNA, 25 bp, Artificial
  Probe
tttatgtccatccgtcatttatgtc

SEQ ID NO: 166179 - DNA, 25 bp, Artificial
  Probe
ctcatttatgtccatccgtcattta

SEQ ID NO: 166180 - DNA, 25 bp, Artificial
  Probe
cctcatttatgtccatccgtcattt

SEQ ID NO: 166181 - DNA, 25 bp, Artificial
  Probe
taggtccttatctctcccaattatg

SEQ ID NO: 166182 - DNA, 25 bp, Artificial
  Probe
cataggtccttatctctcccaatta

SEQ ID NO: 166183 - DNA, 25 bp, Artificial
  Probe
ttctccactgagttctaagacagaa

SEQ ID NO: 166184 - DNA, 25 bp, Artificial
  Probe
atttatgtccatccgtcatttatgt

SEQ ID NO: 166185 - DNA, 25 bp, Artificial
  Probe
cttatctctcccaattatgagtgct

SEQ ID NO: 166186 - DNA, 25 bp, Artificial
  Probe
ggtccttatctctcccaattatgag

SEQ ID NO: 166187 - DNA, 25 bp, Artificial
  Probe
aaattctccactgagttctaagaca

SEQ ID NO: 166188 - DNA, 25 bp, Artificial
  Probe
gatcataggtccttatctctcccaa

SEQ ID NO: 166189 - DNA, 25 bp, Artificial
  Probe
ccctattgaaattctccactgagtt

SEQ ID NO: 166190 - DNA, 25 bp, Artificial
  Probe
tgaaattctccactgagttctaaga

SEQ ID NO: 166191 - DNA, 25 bp, Artificial
  Probe
cctattgaaattctccactgagttc

SEQ ID NO: 166192 - DNA, 25 bp, Artificial
  Probe
tatctctcccaattatgagtgctac

SEQ ID NO: 166193 - DNA, 25 bp, Artificial
  Probe
gtatcctaccctgcttagataatcg

SEQ ID NO: 166194 - DNA, 25 bp, Artificial
  Probe
tccttatctctcccaattatgagtg

SEQ ID NO: 166195 - DNA, 25 bp, Artificial
  Probe
gtccttatctctcccaattatgagt

SEQ ID NO: 166196 - DNA, 25 bp, Artificial
  Probe
catttatgtccatccgtcatttatg

SEQ ID NO: 166197 - DNA, 25 bp, Artificial
  Probe
tcatttatgtccatccgtcatttat

SEQ ID NO: 166198 - DNA, 25 bp, Artificial
  Probe
tgagtatcctaccctgcttagataa

SEQ ID NO: 166199 - DNA, 25 bp, Artificial
  Probe
gtgagtatcctaccctgcttagata

SEQ ID NO: 166200 - DNA, 25 bp, Artificial
  Probe
atctctcccaattatgagtgctact

SEQ ID NO: 166201 - DNA, 25 bp, Artificial
  Probe
ccttatctctcccaattatgagtgc

SEQ ID NO: 166202 - DNA, 25 bp, Artificial
  Probe
tctccactgagttctaagacagaag

SEQ ID NO: 166203 - DNA, 25 bp, Artificial
  Probe
gaaattctccactgagttctaagac

SEQ ID NO: 166204 - DNA, 25 bp, Artificial
  Probe
actgttcctggtagagaagtctagg

SEQ ID NO: 166205 - DNA, 25 bp, Artificial
  Probe
tacactctgctcaccaagaactatc

SEQ ID NO: 166206 - DNA, 25 bp, Artificial
  Probe
ctacactctgctcaccaagaactat

SEQ ID NO: 166207 - DNA, 25 bp, Artificial
  Probe
catccttggtatcgtccttctcttc

SEQ ID NO: 166208 - DNA, 25 bp, Artificial
  Probe
atccttggtatcgtccttctcttct

SEQ ID NO: 166209 - DNA, 25 bp, Artificial
  Probe
tcatccttggtatcgtccttctctt

SEQ ID NO: 166210 - DNA, 25 bp, Artificial
  Probe
tctacactctgctcaccaagaacta

SEQ ID NO: 166211 - DNA, 25 bp, Artificial
  Probe
accaagaactatcgagagtacctac

SEQ ID NO: 166212 - DNA, 25 bp, Artificial
  Probe
caccaagaactatcgagagtaccta

SEQ ID NO: 166213 - DNA, 25 bp, Artificial
  Probe
ctcatccttggtatcgtccttctct

SEQ ID NO: 166214 - DNA, 25 bp, Artificial
  Probe
aagaactatcgagagtacctacgtg

SEQ ID NO: 166215 - DNA, 25 bp, Artificial
  Probe
caagaactatcgagagtacctacgt

SEQ ID NO: 166216 - DNA, 25 bp, Artificial
  Probe
tccttggtatcgtccttctcttctg

SEQ ID NO: 166217 - DNA, 25 bp, Artificial
  Probe
ccaagaactatcgagagtacctacg

SEQ ID NO: 166218 - DNA, 25 bp, Artificial
  Probe
ctcaccaagaactatcgagagtacc

SEQ ID NO: 166219 - DNA, 25 bp, Artificial
  Probe
tcaccaagaactatcgagagtacct

SEQ ID NO: 166220 - DNA, 25 bp, Artificial
  Probe
gctcaccaagaactatcgagagtac

SEQ ID NO: 166221 - DNA, 25 bp, Artificial
  Probe
ctctacactctgctcaccaagaact

SEQ ID NO: 166222 - DNA, 25 bp, Artificial
  Probe
cctcatccttggtatcgtccttctc

SEQ ID NO: 166223 - DNA, 25 bp, Artificial
  Probe
tgctcaccaagaactatcgagagta

SEQ ID NO: 166224 - DNA, 25 bp, Artificial
  Probe
agaactatcgagagtacctacgtgg

SEQ ID NO: 166225 - DNA, 25 bp, Artificial
  Probe
ccttggtatcgtccttctcttctgg

SEQ ID NO: 166226 - DNA, 25 bp, Artificial
  Probe
catcaatcccttgctctacactctg

SEQ ID NO: 166227 - DNA, 25 bp, Artificial
  Probe
acactctgctcaccaagaactatcg

SEQ ID NO: 166228 - DNA, 25 bp, Artificial
  Probe
tctgctcaccaagaactatcgagag

SEQ ID NO: 166229 - DNA, 25 bp, Artificial
  Probe
ctctgctcaccaagaactatcgaga

SEQ ID NO: 166230 - DNA, 25 bp, Artificial
  Probe
ctgctcaccaagaactatcgagagt

SEQ ID NO: 166231 - DNA, 25 bp, Artificial
  Probe
actctgctcaccaagaactatcgag

SEQ ID NO: 166232 - DNA, 25 bp, Artificial
  Probe
cactctgctcaccaagaactatcga

SEQ ID NO: 166233 - DNA, 25 bp, Artificial
  Probe
cttggtatcgtccttctcttctggg

SEQ ID NO: 166234 - DNA, 25 bp, Artificial
  Probe
tacctcatccttggtatcgtccttc

SEQ ID NO: 166235 - DNA, 25 bp, Artificial
  Probe
ctacctcatccttggtatcgtcctt

SEQ ID NO: 166236 - DNA, 25 bp, Artificial
  Probe
gaactatcgagagtacctacgtggc

SEQ ID NO: 166237 - DNA, 25 bp, Artificial
  Probe
gctctacactctgctcaccaagaac

SEQ ID NO: 166238 - DNA, 25 bp, Artificial
  Probe
acctcatccttggtatcgtccttct

SEQ ID NO: 166239 - DNA, 25 bp, Artificial
  Probe
ctctacctcatccttggtatcgtcc

SEQ ID NO: 166240 - DNA, 25 bp, Artificial
  Probe
atcaatcccttgctctacactctgc

SEQ ID NO: 166241 - DNA, 25 bp, Artificial
  Probe
tctacctcatccttggtatcgtcct

SEQ ID NO: 166242 - DNA, 25 bp, Artificial
  Probe
ggtgctctacctcatccttggtatc

SEQ ID NO: 166243 - DNA, 25 bp, Artificial
  Probe
gctctacctcatccttggtatcgtc

SEQ ID NO: 166244 - DNA, 25 bp, Artificial
  Probe
caatcccttgctctacactctgctc

SEQ ID NO: 166245 - DNA, 25 bp, Artificial
  Probe
gtgctctacctcatccttggtatcg

SEQ ID NO: 166246 - DNA, 25 bp, Artificial
  Probe
tgctctacctcatccttggtatcgt

SEQ ID NO: 166247 - DNA, 25 bp, Artificial
  Probe
agaatcccctgctcaaacctaactg

SEQ ID NO: 166248 - DNA, 25 bp, Artificial
  Probe
tactggctatctcagcaagcttctt

SEQ ID NO: 166249 - DNA, 25 bp, Artificial
  Probe
gctatctcagcaagcttctttcaag

SEQ ID NO: 166250 - DNA, 25 bp, Artificial
  Probe
ttagcctagttggacttactctctt

SEQ ID NO: 166251 - DNA, 25 bp, Artificial
  Probe
tagcctagttggacttactctcttg

SEQ ID NO: 166252 - DNA, 25 bp, Artificial
  Probe
ctgccttgacctccattctaatctc

SEQ ID NO: 166253 - DNA, 25 bp, Artificial
  Probe
cagagagctaaggtaagtgtctaag

SEQ ID NO: 166254 - DNA, 25 bp, Artificial
  Probe
ctaaggtaagtgtctaagcaggctc

SEQ ID NO: 166255 - DNA, 25 bp, Artificial
  Probe
acagagagctaaggtaagtgtctaa

SEQ ID NO: 166256 - DNA, 25 bp, Artificial
  Probe
tattaaacctaacaagtctgccaaa

SEQ ID NO: 166257 - DNA, 25 bp, Artificial
  Probe
ttattaaacctaacaagtctgccaa

SEQ ID NO: 166258 - DNA, 25 bp, Artificial
  Probe
tttattaaacctaacaagtctgcca

SEQ ID NO: 166259 - DNA, 25 bp, Artificial
  Probe
catacctttgtagatgtcacctgtg

SEQ ID NO: 166260 - DNA, 25 bp, Artificial
  Probe
ctttagcctagttggacttactctc

SEQ ID NO: 166261 - DNA, 25 bp, Artificial
  Probe
tttagcctagttggacttactctct

SEQ ID NO: 166262 - DNA, 25 bp, Artificial
  Probe
ttcctgccttgacctccattctaat

SEQ ID NO: 166263 - DNA, 25 bp, Artificial
  Probe
tgccttgacctccattctaatctca

SEQ ID NO: 166264 - DNA, 25 bp, Artificial
  Probe
cctttagcctagttggacttactct

SEQ ID NO: 166265 - DNA, 25 bp, Artificial
  Probe
ctctacactgtcctttagcctagtt

SEQ ID NO: 166266 - DNA, 25 bp, Artificial
  Probe
tctacactgtcctttagcctagttg

SEQ ID NO: 166267 - DNA, 25 bp, Artificial
  Probe
agcctagttggacttactctcttgg

SEQ ID NO: 166268 - DNA, 25 bp, Artificial
  Probe
tgggattctgaagtgtttctgtgaa

SEQ ID NO: 166269 - DNA, 25 bp, Artificial
  Probe
cctgccttgacctccattctaatct

SEQ ID NO: 166270 - DNA, 25 bp, Artificial
  Probe
tcctgccttgacctccattctaatc

SEQ ID NO: 166271 - DNA, 25 bp, Artificial
  Probe
taaattgaggtacatttcctgcctt

SEQ ID NO: 166272 - DNA, 25 bp, Artificial
  Probe
ttaaattgaggtacatttcctgcct

SEQ ID NO: 166273 - DNA, 25 bp, Artificial
  Probe
atacctttgtagatgtcacctgtgc

SEQ ID NO: 166274 - DNA, 25 bp, Artificial
  Probe
ctgggattctgaagtgtttctgtga

SEQ ID NO: 166275 - DNA, 25 bp, Artificial
  Probe
tcctttagcctagttggacttactc

SEQ ID NO: 166276 - DNA, 25 bp, Artificial
  Probe
agagagctaaggtaagtgtctaagc

SEQ ID NO: 166277 - DNA, 25 bp, Artificial
  Probe
agagctaaggtaagtgtctaagcag

SEQ ID NO: 166278 - DNA, 25 bp, Artificial
  Probe
taaggtaagtgtctaagcaggctcg

SEQ ID NO: 166279 - DNA, 25 bp, Artificial
  Probe
gagagctaaggtaagtgtctaagca

SEQ ID NO: 166280 - DNA, 25 bp, Artificial
  Probe
ctacactgtcctttagcctagttgg

SEQ ID NO: 166281 - DNA, 25 bp, Artificial
  Probe
aaactctcatcctgggattctgaag

SEQ ID NO: 166282 - DNA, 25 bp, Artificial
  Probe
aaattgaggtacatttcctgccttg

SEQ ID NO: 166283 - DNA, 25 bp, Artificial
  Probe
atcctgggattctgaagtgtttctg

SEQ ID NO: 166284 - DNA, 25 bp, Artificial
  Probe
catcctgggattctgaagtgtttct

SEQ ID NO: 166285 - DNA, 25 bp, Artificial
  Probe
tttaaattgaggtacatttcctgcc

SEQ ID NO: 166286 - DNA, 25 bp, Artificial
  Probe
gccttgacctccattctaatctcaa

SEQ ID NO: 166287 - DNA, 25 bp, Artificial
  Probe
cctctacactgtcctttagcctagt

SEQ ID NO: 166288 - DNA, 25 bp, Artificial
  Probe
gggattctgaagtgtttctgtgaaa

SEQ ID NO: 166289 - DNA, 25 bp, Artificial
  Probe
ctcatcctgggattctgaagtgttt

SEQ ID NO: 166290 - DNA, 25 bp, Artificial
  Probe
tctaatctcaaaactctcatcctgg

SEQ ID NO: 166291 - DNA, 25 bp, Artificial
  Probe
cctgaggctccttgaataccagtag

SEQ ID NO: 166292 - DNA, 25 bp, Artificial
  Probe
ctaatctcaaaactctcatcctggg

SEQ ID NO: 166293 - DNA, 25 bp, Artificial
  Probe
acctccattctaatctcaaaactct

SEQ ID NO: 166294 - DNA, 25 bp, Artificial
  Probe
tcatcctgggattctgaagtgtttc

SEQ ID NO: 166295 - DNA, 25 bp, Artificial
  Probe
ttggtattcatcacaatccttcagt

SEQ ID NO: 166296 - DNA, 25 bp, Artificial
  Probe
taaggtggatagtgatgactgaaga

SEQ ID NO: 166297 - DNA, 25 bp, Artificial
  Probe
ataaggtggatagtgatgactgaag

SEQ ID NO: 166298 - DNA, 25 bp, Artificial
  Probe
aataaggtggatagtgatgactgaa

SEQ ID NO: 166299 - DNA, 25 bp, Artificial
  Probe
gtgatgactgaagacacctgaataa

SEQ ID NO: 166300 - DNA, 25 bp, Artificial
  Probe
aaggtggatagtgatgactgaagac

SEQ ID NO: 166301 - DNA, 25 bp, Artificial
  Probe
ggtattcatcacaatccttcagtgt

SEQ ID NO: 166302 - DNA, 25 bp, Artificial
  Probe
tggtattcatcacaatccttcagtg

SEQ ID NO: 166303 - DNA, 25 bp, Artificial
  Probe
agtgatgactgaagacacctgaata

SEQ ID NO: 166304 - DNA, 25 bp, Artificial
  Probe
tagtgatgactgaagacacctgaat

SEQ ID NO: 166305 - DNA, 25 bp, Artificial
  Probe
atagtgatgactgaagacacctgaa

SEQ ID NO: 166306 - DNA, 25 bp, Artificial
  Probe
gatagtgatgactgaagacacctga

SEQ ID NO: 166307 - DNA, 25 bp, Artificial
  Probe
tgatgactgaagacacctgaataaa

SEQ ID NO: 166308 - DNA, 25 bp, Artificial
  Probe
aggaaataaggtggatagtgatgac

SEQ ID NO: 166309 - DNA, 25 bp, Artificial
  Probe
caggaaataaggtggatagtgatga

SEQ ID NO: 166310 - DNA, 25 bp, Artificial
  Probe
cttaggtttattggcagatttgagg

SEQ ID NO: 166311 - DNA, 25 bp, Artificial
  Probe
gtcatcagcatctttggtattcatc

SEQ ID NO: 166312 - DNA, 25 bp, Artificial
  Probe
gatgactgaagacacctgaataaac

SEQ ID NO: 166313 - DNA, 25 bp, Artificial
  Probe
catcagcatctttggtattcatcac

SEQ ID NO: 166314 - DNA, 25 bp, Artificial
  Probe
tcatcagcatctttggtattcatca

SEQ ID NO: 166315 - DNA, 25 bp, Artificial
  Probe
gtctcaggaaataaggtggatagtg

SEQ ID NO: 166316 - DNA, 25 bp, Artificial
  Probe
gcttaggtttattggcagatttgag

SEQ ID NO: 166317 - DNA, 25 bp, Artificial
  Probe
atcagcatctttggtattcatcaca

SEQ ID NO: 166318 - DNA, 25 bp, Artificial
  Probe
tgtcatcagcatctttggtattcat

SEQ ID NO: 166319 - DNA, 25 bp, Artificial
  Probe
tgtctcaggaaataaggtggatagt

SEQ ID NO: 166320 - DNA, 25 bp, Artificial
  Probe
aatgatgttaaatgatgtccaaggc

SEQ ID NO: 166321 - DNA, 25 bp, Artificial
  Probe
cttgtgatgtctaagaccattgagg

SEQ ID NO: 166322 - DNA, 25 bp, Artificial
  Probe
atgactgaagacacctgaataaacc

SEQ ID NO: 166323 - DNA, 25 bp, Artificial
  Probe
atgatgttaaatgatgtccaaggct

SEQ ID NO: 166324 - DNA, 25 bp, Artificial
  Probe
gactgaagacacctgaataaacctc

SEQ ID NO: 166325 - DNA, 25 bp, Artificial
  Probe
tgatgttaaatgatgtccaaggctt

SEQ ID NO: 166326 - DNA, 25 bp, Artificial
  Probe
gtgtcatcagcatctttggtattca

SEQ ID NO: 166327 - DNA, 25 bp, Artificial
  Probe
tgtgtcatcagcatctttggtattc

SEQ ID NO: 166328 - DNA, 25 bp, Artificial
  Probe
aggtggatagtgatgactgaagaca

SEQ ID NO: 166329 - DNA, 25 bp, Artificial
  Probe
cagcatctttggtattcatcacaat

SEQ ID NO: 166330 - DNA, 25 bp, Artificial
  Probe
agcatctttggtattcatcacaatc

SEQ ID NO: 166331 - DNA, 25 bp, Artificial
  Probe
gcatctttggtattcatcacaatcc

SEQ ID NO: 166332 - DNA, 25 bp, Artificial
  Probe
gcttgtgatgtctaagaccattgag

SEQ ID NO: 166333 - DNA, 25 bp, Artificial
  Probe
ttaggtttattggcagatttgaggc

SEQ ID NO: 166334 - DNA, 25 bp, Artificial
  Probe
tttggtattcatcacaatccttcag

SEQ ID NO: 166335 - DNA, 25 bp, Artificial
  Probe
ctttggtattcatcacaatccttca

SEQ ID NO: 166336 - DNA, 25 bp, Artificial
  Probe
tcagcatctttggtattcatcacaa

SEQ ID NO: 166337 - DNA, 25 bp, Artificial
  Probe
ggaaataaggtggatagtgatgact

SEQ ID NO: 166338 - DNA, 25 bp, Artificial
  Probe
tcaggaaataaggtggatagtgatg

SEQ ID NO: 166339 - DNA, 25 bp, Artificial
  Probe
ctcaggaaataaggtggatagtgat

SEQ ID NO: 166340 - DNA, 25 bp, Artificial
  Probe
caccctccagtcttattaatctccc

SEQ ID NO: 166341 - DNA, 25 bp, Artificial
  Probe
ctaaccatgtgcatcaaggagagtc

SEQ ID NO: 166342 - DNA, 25 bp, Artificial
  Probe
gcaccctccagtcttattaatctcc

SEQ ID NO: 166343 - DNA, 25 bp, Artificial
  Probe
tgcaccctccagtcttattaatctc

SEQ ID NO: 166344 - DNA, 25 bp, Artificial
  Probe
taaccatgtgcatcaaggagagtct

SEQ ID NO: 166345 - DNA, 25 bp, Artificial
  Probe
tcttattaatctcccgctgctgttc

SEQ ID NO: 166346 - DNA, 25 bp, Artificial
  Probe
gtcttattaatctcccgctgctgtt

SEQ ID NO: 166347 - DNA, 25 bp, Artificial
  Probe
ctgcaccctccagtcttattaatct

SEQ ID NO: 166348 - DNA, 25 bp, Artificial
  Probe
ctccagtcttattaatctcccgctg

SEQ ID NO: 166349 - DNA, 25 bp, Artificial
  Probe
accctccagtcttattaatctcccg

SEQ ID NO: 166350 - DNA, 25 bp, Artificial
  Probe
cctccagtcttattaatctcccgct

SEQ ID NO: 166351 - DNA, 25 bp, Artificial
  Probe
ccaaagggaacatctgtgtcatcag

SEQ ID NO: 166352 - DNA, 25 bp, Artificial
  Probe
cttattaatctcccgctgctgttcc

SEQ ID NO: 166353 - DNA, 25 bp, Artificial
  Probe
agtcttattaatctcccgctgctgt

SEQ ID NO: 166354 - DNA, 25 bp, Artificial
  Probe
cagtcttattaatctcccgctgctg

SEQ ID NO: 166355 - DNA, 25 bp, Artificial
  Probe
catctgtgtcatcagcatctttggg

SEQ ID NO: 166356 - DNA, 25 bp, Artificial
  Probe
caaagggaacatctgtgtcatcagc

SEQ ID NO: 166357 - DNA, 25 bp, Artificial
  Probe
gctgcaccctccagtcttattaatc

SEQ ID NO: 166358 - DNA, 25 bp, Artificial
  Probe
cctaaccatgtgcatcaaggagagt

SEQ ID NO: 166359 - DNA, 25 bp, Artificial
  Probe
acctctggcttttattcccttctca

SEQ ID NO: 166360 - DNA, 25 bp, Artificial
  Probe
aaccatgtgcatcaaggagagtctg

SEQ ID NO: 166361 - DNA, 25 bp, Artificial
  Probe
ccctccagtcttattaatctcccgc

SEQ ID NO: 166362 - DNA, 25 bp, Artificial
  Probe
cctctggcttttattcccttctcag

SEQ ID NO: 166363 - DNA, 25 bp, Artificial
  Probe
ccagtcttattaatctcccgctgct

SEQ ID NO: 166364 - DNA, 25 bp, Artificial
  Probe
tccagtcttattaatctcccgctgc

SEQ ID NO: 166365 - DNA, 25 bp, Artificial
  Probe
ttattaatctcccgctgctgttccc

SEQ ID NO: 166366 - DNA, 25 bp, Artificial
  Probe
ctttgacccagaaaacccacagaag

SEQ ID NO: 166367 - DNA, 25 bp, Artificial
  Probe
cttcctaaccatgtgcatcaaggag

SEQ ID NO: 166368 - DNA, 25 bp, Artificial
  Probe
tttgacccagaaaacccacagaaga

SEQ ID NO: 166369 - DNA, 25 bp, Artificial
  Probe
ggctgcaccctccagtcttattaat

SEQ ID NO: 166370 - DNA, 25 bp, Artificial
  Probe
ttcctaaccatgtgcatcaaggaga

SEQ ID NO: 166371 - DNA, 25 bp, Artificial
  Probe
ttgacccagaaaacccacagaagag

SEQ ID NO: 166372 - DNA, 25 bp, Artificial
  Probe
ctctggcttttattcccttctcagc

SEQ ID NO: 166373 - DNA, 25 bp, Artificial
  Probe
tcctaaccatgtgcatcaaggagag

SEQ ID NO: 166374 - DNA, 25 bp, Artificial
  Probe
cccaaagggaacatctgtgtcatca

SEQ ID NO: 166375 - DNA, 25 bp, Artificial
  Probe
atctttggggttcaccacaatcctt

SEQ ID NO: 166376 - DNA, 25 bp, Artificial
  Probe
ccttcctaaccatgtgcatcaagga

SEQ ID NO: 166377 - DNA, 25 bp, Artificial
  Probe
atctgtgtcatcagcatctttgggg

SEQ ID NO: 166378 - DNA, 25 bp, Artificial
  Probe
tctttggggttcaccacaatccttc

SEQ ID NO: 166379 - DNA, 25 bp, Artificial
  Probe
catctttggggttcaccacaatcct

SEQ ID NO: 166380 - DNA, 25 bp, Artificial
  Probe
tttggggttcaccacaatccttcag

SEQ ID NO: 166381 - DNA, 25 bp, Artificial
  Probe
ctttggggttcaccacaatccttca

SEQ ID NO: 166382 - DNA, 25 bp, Artificial
  Probe
tctggcttttattcccttctcagcg

SEQ ID NO: 166383 - DNA, 25 bp, Artificial
  Probe
gaggtcacctctggcttttattccc

SEQ ID NO: 166384 - DNA, 25 bp, Artificial
  Probe
gaaaacccacagaagaggtcacctc

SEQ ID NO: 166385 - DNA, 25 bp, Artificial
  Probe
actaagtatcagcataggatgttgt

SEQ ID NO: 166386 - DNA, 25 bp, Artificial
  Probe
ctaagtatcagcataggatgttgtt

SEQ ID NO: 166387 - DNA, 25 bp, Artificial
  Probe
tatacaacacaatgtcaggacttga

SEQ ID NO: 166388 - DNA, 25 bp, Artificial
  Probe
tacatacctacatgactcattggaa

SEQ ID NO: 166389 - DNA, 25 bp, Artificial
  Probe
atacatacctacatgactcattgga

SEQ ID NO: 166390 - DNA, 25 bp, Artificial
  Probe
tactaagtatcagcataggatgttg

SEQ ID NO: 166391 - DNA, 25 bp, Artificial
  Probe
cttactaagtatcagcataggatgt

SEQ ID NO: 166392 - DNA, 25 bp, Artificial
  Probe
aagtatcagcataggatgttgtttg

SEQ ID NO: 166393 - DNA, 25 bp, Artificial
  Probe
tgtgccagtttgaattatctaggaa

SEQ ID NO: 166394 - DNA, 25 bp, Artificial
  Probe
ttgtgccagtttgaattatctagga

SEQ ID NO: 166395 - DNA, 25 bp, Artificial
  Probe
gtgccagtttgaattatctaggaag

SEQ ID NO: 166396 - DNA, 25 bp, Artificial
  Probe
attatctaggaaggttagggaaagc

SEQ ID NO: 166397 - DNA, 25 bp, Artificial
  Probe
gccagtttgaattatctaggaaggt

SEQ ID NO: 166398 - DNA, 25 bp, Artificial
  Probe
tgccagtttgaattatctaggaagg

SEQ ID NO: 166399 - DNA, 25 bp, Artificial
  Probe
tttgtgccagtttgaattatctagg

SEQ ID NO: 166400 - DNA, 25 bp, Artificial
  Probe
gtatcagcataggatgttgtttgac

SEQ ID NO: 166401 - DNA, 25 bp, Artificial
  Probe
agtatcagcataggatgttgtttga

SEQ ID NO: 166402 - DNA, 25 bp, Artificial
  Probe
tatacatacctacatgactcattgg

SEQ ID NO: 166403 - DNA, 25 bp, Artificial
  Probe
ttactaagtatcagcataggatgtt

SEQ ID NO: 166404 - DNA, 25 bp, Artificial
  Probe
gtatacaacacaatgtcaggacttg

SEQ ID NO: 166405 - DNA, 25 bp, Artificial
  Probe
agtatacaacacaatgtcaggactt

SEQ ID NO: 166406 - DNA, 25 bp, Artificial
  Probe
tatcagcataggatgttgtttgaca

SEQ ID NO: 166407 - DNA, 25 bp, Artificial
  Probe
gaataacatctaccctgcctacctc

SEQ ID NO: 166408 - DNA, 25 bp, Artificial
  Probe
cagtatacaacacaatgtcaggact

SEQ ID NO: 166409 - DNA, 25 bp, Artificial
  Probe
ccagtttgaattatctaggaaggtt

SEQ ID NO: 166410 - DNA, 25 bp, Artificial
  Probe
tgaattatctaggaaggttagggaa

SEQ ID NO: 166411 - DNA, 25 bp, Artificial
  Probe
ttgaattatctaggaaggttaggga

SEQ ID NO: 166412 - DNA, 25 bp, Artificial
  Probe
atacctacatgactcattggaaaca

SEQ ID NO: 166413 - DNA, 25 bp, Artificial
  Probe
acatacctacatgactcattggaaa

SEQ ID NO: 166414 - DNA, 25 bp, Artificial
  Probe
catacctacatgactcattggaaac

SEQ ID NO: 166415 - DNA, 25 bp, Artificial
  Probe
ctacatgactcattggaaacaacag

SEQ ID NO: 166416 - DNA, 25 bp, Artificial
  Probe
tacctacatgactcattggaaacaa

SEQ ID NO: 166417 - DNA, 25 bp, Artificial
  Probe
tttctatacaccttctcctactttg

SEQ ID NO: 166418 - DNA, 25 bp, Artificial
  Probe
gtttctatacaccttctcctacttt

SEQ ID NO: 166419 - DNA, 25 bp, Artificial
  Probe
atcaatatcataagagatgtgcagt

SEQ ID NO: 166420 - DNA, 25 bp, Artificial
  Probe
taagtatcagcataggatgttgttt

SEQ ID NO: 166421 - DNA, 25 bp, Artificial
  Probe
cataagagatgtgcagtatacaaca

SEQ ID NO: 166422 - DNA, 25 bp, Artificial
  Probe
tctatacaccttctcctactttgtt

SEQ ID NO: 166423 - DNA, 25 bp, Artificial
  Probe
ttctatacaccttctcctactttgt

SEQ ID NO: 166424 - DNA, 25 bp, Artificial
  Probe
tgtttctatacaccttctcctactt

SEQ ID NO: 166425 - DNA, 25 bp, Artificial
  Probe
tgaaatagatcagtaacaagggaga

SEQ ID NO: 166426 - DNA, 25 bp, Artificial
  Probe
gtgaaatagatcagtaacaagggag

SEQ ID NO: 166427 - DNA, 25 bp, Artificial
  Probe
tgtgaaatagatcagtaacaaggga

SEQ ID NO: 166428 - DNA, 25 bp, Artificial
  Probe
tcataagagatgtgcagtatacaac

SEQ ID NO: 166429 - DNA, 25 bp, Artificial
  Probe
ttatctaggaaggttagggaaagct

SEQ ID NO: 166430 - DNA, 25 bp, Artificial
  Probe
ttaagagtatcaagcaagtgaaggt

SEQ ID NO: 166431 - DNA, 25 bp, Artificial
  Probe
taagagtatcaagcaagtgaaggtg

SEQ ID NO: 166432 - DNA, 25 bp, Artificial
  Probe
ctaaccagtcacagacatacacaag

SEQ ID NO: 166433 - DNA, 25 bp, Artificial
  Probe
tctaaccagtcacagacatacacaa

SEQ ID NO: 166434 - DNA, 25 bp, Artificial
  Probe
gattcttcacaactcaggctcttta

SEQ ID NO: 166435 - DNA, 25 bp, Artificial
  Probe
ttgtaactgctctttaattgtctgg

SEQ ID NO: 166436 - DNA, 25 bp, Artificial
  Probe
attcttcacaactcaggctctttac

SEQ ID NO: 166437 - DNA, 25 bp, Artificial
  Probe
taaccagtcacagacatacacaagg

SEQ ID NO: 166438 - DNA, 25 bp, Artificial
  Probe
aagagtatcaagcaagtgaaggtgg

SEQ ID NO: 166439 - DNA, 25 bp, Artificial
  Probe
catccacacacagagagaagtcttg

SEQ ID NO: 166440 - DNA, 25 bp, Artificial
  Probe
tttactcaagaatggtctgaatccc

SEQ ID NO: 166441 - DNA, 25 bp, Artificial
  Probe
ctttactcaagaatggtctgaatcc

SEQ ID NO: 166442 - DNA, 25 bp, Artificial
  Probe
tgtaactgctctttaattgtctggc

SEQ ID NO: 166443 - DNA, 25 bp, Artificial
  Probe
ttcttcacaactcaggctctttact

SEQ ID NO: 166444 - DNA, 25 bp, Artificial
  Probe
caacagtattccactcccaaagtag

SEQ ID NO: 166445 - DNA, 25 bp, Artificial
  Probe
cgactagacttaagagtatcaagca

SEQ ID NO: 166446 - DNA, 25 bp, Artificial
  Probe
acgactagacttaagagtatcaagc

SEQ ID NO: 166447 - DNA, 25 bp, Artificial
  Probe
cttaagagtatcaagcaagtgaagg

SEQ ID NO: 166448 - DNA, 25 bp, Artificial
  Probe
ttcacaactcaggctctttactcaa

SEQ ID NO: 166449 - DNA, 25 bp, Artificial
  Probe
tcttcacaactcaggctctttactc

SEQ ID NO: 166450 - DNA, 25 bp, Artificial
  Probe
attgtaactgctctttaattgtctg

SEQ ID NO: 166451 - DNA, 25 bp, Artificial
  Probe
cattgtaactgctctttaattgtct

SEQ ID NO: 166452 - DNA, 25 bp, Artificial
  Probe
tcattgtaactgctctttaattgtc

SEQ ID NO: 166453 - DNA, 25 bp, Artificial
  Probe
cttcacaactcaggctctttactca

SEQ ID NO: 166454 - DNA, 25 bp, Artificial
  Probe
tcacaactcaggctctttactcaag

SEQ ID NO: 166455 - DNA, 25 bp, Artificial
  Probe
ccaacagtattccactcccaaagta

SEQ ID NO: 166456 - DNA, 25 bp, Artificial
  Probe
ttagcctggacctgattcttcacaa

SEQ ID NO: 166457 - DNA, 25 bp, Artificial
  Probe
tgattcttcacaactcaggctcttt

SEQ ID NO: 166458 - DNA, 25 bp, Artificial
  Probe
actagacttaagagtatcaagcaag

SEQ ID NO: 166459 - DNA, 25 bp, Artificial
  Probe
gactagacttaagagtatcaagcaa

SEQ ID NO: 166460 - DNA, 25 bp, Artificial
  Probe
aacagtattccactcccaaagtagc

SEQ ID NO: 166461 - DNA, 25 bp, Artificial
  Probe
atcattgtaactgctctttaattgt

SEQ ID NO: 166462 - DNA, 25 bp, Artificial
  Probe
aaccagtcacagacatacacaagga

SEQ ID NO: 166463 - DNA, 25 bp, Artificial
  Probe
ccatccacacacagagagaagtctt

SEQ ID NO: 166464 - DNA, 25 bp, Artificial
  Probe
ttactcaagaatggtctgaatccca

SEQ ID NO: 166465 - DNA, 25 bp, Artificial
  Probe
catcattgtaactgctctttaattg

SEQ ID NO: 166466 - DNA, 25 bp, Artificial
  Probe
aacgactagacttaagagtatcaag

SEQ ID NO: 166467 - DNA, 25 bp, Artificial
  Probe
aaatgagtaaactcgggagggttag

SEQ ID NO: 166468 - DNA, 25 bp, Artificial
  Probe
gctctttactcaagaatggtctgaa

SEQ ID NO: 166469 - DNA, 25 bp, Artificial
  Probe
aactcaggctctttactcaagaatg

SEQ ID NO: 166470 - DNA, 25 bp, Artificial
  Probe
caactcaggctctttactcaagaat

SEQ ID NO: 166471 - DNA, 25 bp, Artificial
  Probe
tactcaagaatggtctgaatcccac

SEQ ID NO: 166472 - DNA, 25 bp, Artificial
  Probe
caaatgagtaaactcgggagggtta

SEQ ID NO: 166473 - DNA, 25 bp, Artificial
  Probe
cctggacctgattcttcacaactca

SEQ ID NO: 166474 - DNA, 25 bp, Artificial
  Probe
accagtcacagacatacacaaggag

SEQ ID NO: 166475 - DNA, 25 bp, Artificial
  Probe
ccagcatcatcacaacttcttatat

SEQ ID NO: 166476 - DNA, 25 bp, Artificial
  Probe
gccagcatcatcacaacttcttata

SEQ ID NO: 166477 - DNA, 25 bp, Artificial
  Probe
cttcttggcttctgtagttctccta

SEQ ID NO: 166478 - DNA, 25 bp, Artificial
  Probe
ctcttgctaactgaagtatgtcaac

SEQ ID NO: 166479 - DNA, 25 bp, Artificial
  Probe
taactgctcttgctaactgaagtat

SEQ ID NO: 166480 - DNA, 25 bp, Artificial
  Probe
ctaactgctcttgctaactgaagta

SEQ ID NO: 166481 - DNA, 25 bp, Artificial
  Probe
tcttgctaactgaagtatgtcaacc

SEQ ID NO: 166482 - DNA, 25 bp, Artificial
  Probe
ctgctcttgctaactgaagtatgtc

SEQ ID NO: 166483 - DNA, 25 bp, Artificial
  Probe
cctacttaatcttccttgaccatgt

SEQ ID NO: 166484 - DNA, 25 bp, Artificial
  Probe
gctcttgctaactgaagtatgtcaa

SEQ ID NO: 166485 - DNA, 25 bp, Artificial
  Probe
aactgctcttgctaactgaagtatg

SEQ ID NO: 166486 - DNA, 25 bp, Artificial
  Probe
ttcttggcttctgtagttctcctag

SEQ ID NO: 166487 - DNA, 25 bp, Artificial
  Probe
tacttaatcttccttgaccatgtgc

SEQ ID NO: 166488 - DNA, 25 bp, Artificial
  Probe
ctacttaatcttccttgaccatgtg

SEQ ID NO: 166489 - DNA, 25 bp, Artificial
  Probe
cagcatcatcacaacttcttatatg

SEQ ID NO: 166490 - DNA, 25 bp, Artificial
  Probe
tgctcttgctaactgaagtatgtca

SEQ ID NO: 166491 - DNA, 25 bp, Artificial
  Probe
actgctcttgctaactgaagtatgt

SEQ ID NO: 166492 - DNA, 25 bp, Artificial
  Probe
agccagcatcatcacaacttcttat

SEQ ID NO: 166493 - DNA, 25 bp, Artificial
  Probe
acctaacccatcaaattctatcctg

SEQ ID NO: 166494 - DNA, 25 bp, Artificial
  Probe
gacctaacccatcaaattctatcct

SEQ ID NO: 166495 - DNA, 25 bp, Artificial
  Probe
aacaaagacctaacccatcaaattc

SEQ ID NO: 166496 - DNA, 25 bp, Artificial
  Probe
aaacaaagacctaacccatcaaatt

SEQ ID NO: 166497 - DNA, 25 bp, Artificial
  Probe
agacctaacccatcaaattctatcc

SEQ ID NO: 166498 - DNA, 25 bp, Artificial
  Probe
acaaagacctaacccatcaaattct

SEQ ID NO: 166499 - DNA, 25 bp, Artificial
  Probe
taagaaagtgactctaaccagggat

SEQ ID NO: 166500 - DNA, 25 bp, Artificial
  Probe
acagtaagaaagtgactctaaccag

SEQ ID NO: 166501 - DNA, 25 bp, Artificial
  Probe
cagtaagaaagtgactctaaccagg

SEQ ID NO: 166502 - DNA, 25 bp, Artificial
  Probe
cagccagcatcatcacaacttctta

SEQ ID NO: 166503 - DNA, 25 bp, Artificial
  Probe
caaagacctaacccatcaaattcta

SEQ ID NO: 166504 - DNA, 25 bp, Artificial
  Probe
gctaactgctcttgctaactgaagt

SEQ ID NO: 166505 - DNA, 25 bp, Artificial
  Probe
gtaagaaagtgactctaaccaggga

SEQ ID NO: 166506 - DNA, 25 bp, Artificial
  Probe
ccctacttaatcttccttgaccatg

SEQ ID NO: 166507 - DNA, 25 bp, Artificial
  Probe
agtaagaaagtgactctaaccaggg

SEQ ID NO: 166508 - DNA, 25 bp, Artificial
  Probe
aagacctaacccatcaaattctatc

SEQ ID NO: 166509 - DNA, 25 bp, Artificial
  Probe
acttaatcttccttgaccatgtgcc

SEQ ID NO: 166510 - DNA, 25 bp, Artificial
  Probe
ctgaagtatgtcaacccaggatatg

SEQ ID NO: 166511 - DNA, 25 bp, Artificial
  Probe
gcttctttgtcaccattaattccat

SEQ ID NO: 166512 - DNA, 25 bp, Artificial
  Probe
cttgctaactgaagtatgtcaaccc

SEQ ID NO: 166513 - DNA, 25 bp, Artificial
  Probe
actgaagtatgtcaacccaggatat

SEQ ID NO: 166514 - DNA, 25 bp, Artificial
  Probe
aagaaagtgactctaaccagggatg

SEQ ID NO: 166515 - DNA, 25 bp, Artificial
  Probe
cacagtaagaaagtgactctaacca

SEQ ID NO: 166516 - DNA, 25 bp, Artificial
  Probe
gtagacagcagctcctctcataatg

SEQ ID NO: 166517 - DNA, 25 bp, Artificial
  Probe
cacccaaattgatgatgtttattca

SEQ ID NO: 166518 - DNA, 25 bp, Artificial
  Probe
aactgaagtatgtcaacccaggata

SEQ ID NO: 166519 - DNA, 25 bp, Artificial
  Probe
taactgaagtatgtcaacccaggat

SEQ ID NO: 166520 - DNA, 25 bp, Artificial
  Probe
ttgaaggaacaggaagataggtatt

SEQ ID NO: 166521 - DNA, 25 bp, Artificial
  Probe
gaaggaacaggaagataggtattcg

SEQ ID NO: 166522 - DNA, 25 bp, Artificial
  Probe
tgaaggaacaggaagataggtattc

SEQ ID NO: 166523 - DNA, 25 bp, Artificial
  Probe
gttgaaggaacaggaagataggtat

SEQ ID NO: 166524 - DNA, 25 bp, Artificial
  Probe
tgaagttgaaggaacaggaagatag

SEQ ID NO: 166525 - DNA, 25 bp, Artificial
  Probe
taatgaagttgaaggaacaggaaga

SEQ ID NO: 166526 - DNA, 25 bp, Artificial
  Probe
aatgaagttgaaggaacaggaagat

SEQ ID NO: 166527 - DNA, 25 bp, Artificial
  Probe
atgaagttgaaggaacaggaagata

SEQ ID NO: 166528 - DNA, 25 bp, Artificial
  Probe
agttgaaggaacaggaagataggta

SEQ ID NO: 166529 - DNA, 25 bp, Artificial
  Probe
gaagttgaaggaacaggaagatagg

SEQ ID NO: 166530 - DNA, 25 bp, Artificial
  Probe
ttaatgaagttgaaggaacaggaag

SEQ ID NO: 166531 - DNA, 25 bp, Artificial
  Probe
aagttgaaggaacaggaagataggt

SEQ ID NO: 166532 - DNA, 25 bp, Artificial
  Probe
gagatcatctgtacgcattaaccac

SEQ ID NO: 166533 - DNA, 25 bp, Artificial
  Probe
tacgcattaaccacagacaagacat

SEQ ID NO: 166534 - DNA, 25 bp, Artificial
  Probe
acaggaagataggtattcgagatca

SEQ ID NO: 166535 - DNA, 25 bp, Artificial
  Probe
aacaggaagataggtattcgagatc

SEQ ID NO: 166536 - DNA, 25 bp, Artificial
  Probe
gaacaggaagataggtattcgagat

SEQ ID NO: 166537 - DNA, 25 bp, Artificial
  Probe
attcgagatcatctgtacgcattaa

SEQ ID NO: 166538 - DNA, 25 bp, Artificial
  Probe
tattcgagatcatctgtacgcatta

SEQ ID NO: 166539 - DNA, 25 bp, Artificial
  Probe
caggaagataggtattcgagatcat

SEQ ID NO: 166540 - DNA, 25 bp, Artificial
  Probe
aaggaacaggaagataggtattcga

SEQ ID NO: 166541 - DNA, 25 bp, Artificial
  Probe
ataggtattcgagatcatctgtacg

SEQ ID NO: 166542 - DNA, 25 bp, Artificial
  Probe
attaatgaagttgaaggaacaggaa

SEQ ID NO: 166543 - DNA, 25 bp, Artificial
  Probe
aggaagataggtattcgagatcatc

SEQ ID NO: 166544 - DNA, 25 bp, Artificial
  Probe
gtattcgagatcatctgtacgcatt

SEQ ID NO: 166545 - DNA, 25 bp, Artificial
  Probe
ggaacaggaagataggtattcgaga

SEQ ID NO: 166546 - DNA, 25 bp, Artificial
  Probe
aggaacaggaagataggtattcgag

SEQ ID NO: 166547 - DNA, 25 bp, Artificial
  Probe
gcattaaccacagacaagacattta

SEQ ID NO: 166548 - DNA, 25 bp, Artificial
  Probe
gagagctattaatgaagttgaagga

SEQ ID NO: 166549 - DNA, 25 bp, Artificial
  Probe
agagagctattaatgaagttgaagg

SEQ ID NO: 166550 - DNA, 25 bp, Artificial
  Probe
ttcgagatcatctgtacgcattaac

SEQ ID NO: 166551 - DNA, 25 bp, Artificial
  Probe
attaaccacagacaagacatttacc

SEQ ID NO: 166552 - DNA, 25 bp, Artificial
  Probe
tggaactcaagagagctattaatga

SEQ ID NO: 166553 - DNA, 25 bp, Artificial
  Probe
aagaaagagattcggtgagtatgac

SEQ ID NO: 166554 - DNA, 25 bp, Artificial
  Probe
caagaaagagattcggtgagtatga

SEQ ID NO: 166555 - DNA, 25 bp, Artificial
  Probe
gctattaatgaagttgaaggaacag

SEQ ID NO: 166556 - DNA, 25 bp, Artificial
  Probe
ttaaccacagacaagacatttaccc

SEQ ID NO: 166557 - DNA, 25 bp, Artificial
  Probe
agacaagacatttaccctagtgaac

SEQ ID NO: 166558 - DNA, 25 bp, Artificial
  Probe
cagacaagacatttaccctagtgaa

SEQ ID NO: 166559 - DNA, 25 bp, Artificial
  Probe
agctattaatgaagttgaaggaaca

SEQ ID NO: 166560 - DNA, 25 bp, Artificial
  Probe
caagacatttaccctagtgaacagt

SEQ ID NO: 166561 - DNA, 25 bp, Artificial
  Probe
acaagacatttaccctagtgaacag

SEQ ID NO: 166562 - DNA, 25 bp, Artificial
  Probe
gacaagacatttaccctagtgaaca

SEQ ID NO: 166563 - DNA, 25 bp, Artificial
  Probe
agatcatctgtacgcattaaccaca

SEQ ID NO: 166564 - DNA, 25 bp, Artificial
  Probe
taggtattcgagatcatctgtacgc

SEQ ID NO: 166565 - DNA, 25 bp, Artificial
  Probe
ccattgagtgttttcacatctttga

SEQ ID NO: 166566 - DNA, 25 bp, Artificial
  Probe
cccattgagtgttttcacatctttg

SEQ ID NO: 166567 - DNA, 25 bp, Artificial
  Probe
gcccattgagtgttttcacatcttt

SEQ ID NO: 166568 - DNA, 25 bp, Artificial
  Probe
attgagtgttttcacatctttgaac

SEQ ID NO: 166569 - DNA, 25 bp, Artificial
  Probe
cattgagtgttttcacatctttgaa

SEQ ID NO: 166570 - DNA, 25 bp, Artificial
  Probe
tgagtgttttcacatctttgaacaa

SEQ ID NO: 166571 - DNA, 25 bp, Artificial
  Probe
ttgagtgttttcacatctttgaaca

SEQ ID NO: 166572 - DNA, 25 bp, Artificial
  Probe
gagtgttttcacatctttgaacaaa

SEQ ID NO: 166573 - DNA, 25 bp, Artificial
  Probe
agtgttttcacatctttgaacaaag

SEQ ID NO: 166574 - DNA, 25 bp, Artificial
  Probe
tttcacatctttgaacaaagagaag

SEQ ID NO: 166575 - DNA, 25 bp, Artificial
  Probe
ggcccattgagtgttttcacatctt

SEQ ID NO: 166576 - DNA, 25 bp, Artificial
  Probe
gtgttttcacatctttgaacaaaga

SEQ ID NO: 166577 - DNA, 25 bp, Artificial
  Probe
ctggcccattgagtgttttcacatc

SEQ ID NO: 166578 - DNA, 25 bp, Artificial
  Probe
tgttttcacatctttgaacaaagag

SEQ ID NO: 166579 - DNA, 25 bp, Artificial
  Probe
gttttcacatctttgaacaaagaga

SEQ ID NO: 166580 - DNA, 25 bp, Artificial
  Probe
tggcccattgagtgttttcacatct

SEQ ID NO: 166581 - DNA, 25 bp, Artificial
  Probe
tctggcccattgagtgttttcacat

SEQ ID NO: 166582 - DNA, 25 bp, Artificial
  Probe
ttttcacatctttgaacaaagagaa

SEQ ID NO: 166583 - DNA, 25 bp, Artificial
  Probe
gtagttaatcagccttctccttcac

SEQ ID NO: 166584 - DNA, 25 bp, Artificial
  Probe
ggacaagttctggagatacaatgaa

SEQ ID NO: 166585 - DNA, 25 bp, Artificial
  Probe
gtgcttattacctgaagttggagaa

SEQ ID NO: 166586 - DNA, 25 bp, Artificial
  Probe
tgtagttaatcagccttctccttca

SEQ ID NO: 166587 - DNA, 25 bp, Artificial
  Probe
tgcttattacctgaagttggagaac

SEQ ID NO: 166588 - DNA, 25 bp, Artificial
  Probe
ctgtctcctgctctgtagttaatca

SEQ ID NO: 166589 - DNA, 25 bp, Artificial
  Probe
gcttattacctgaagttggagaacc

SEQ ID NO: 166590 - DNA, 25 bp, Artificial
  Probe
tagttaatcagccttctccttcacc

SEQ ID NO: 166591 - DNA, 25 bp, Artificial
  Probe
caagttctggagatacaatgaagta

SEQ ID NO: 166592 - DNA, 25 bp, Artificial
  Probe
ctgtagttaatcagccttctccttc

SEQ ID NO: 166593 - DNA, 25 bp, Artificial
  Probe
cctgtctcctgctctgtagttaatc

SEQ ID NO: 166594 - DNA, 25 bp, Artificial
  Probe
tctgtagttaatcagccttctcctt

SEQ ID NO: 166595 - DNA, 25 bp, Artificial
  Probe
ctctgtagttaatcagccttctcct

SEQ ID NO: 166596 - DNA, 25 bp, Artificial
  Probe
tgtctcctgctctgtagttaatcag

SEQ ID NO: 166597 - DNA, 25 bp, Artificial
  Probe
aagttctggagatacaatgaagtaa

SEQ ID NO: 166598 - DNA, 25 bp, Artificial
  Probe
cttattacctgaagttggagaacca

SEQ ID NO: 166599 - DNA, 25 bp, Artificial
  Probe
tggtgatttcagatttaagagggtg

SEQ ID NO: 166600 - DNA, 25 bp, Artificial
  Probe
cttcttgcttctccctttaacagtt

SEQ ID NO: 166601 - DNA, 25 bp, Artificial
  Probe
gctatttcttcaagggtgcttatta

SEQ ID NO: 166602 - DNA, 25 bp, Artificial
  Probe
ttcttgcttctccctttaacagttc

SEQ ID NO: 166603 - DNA, 25 bp, Artificial
  Probe
aaagtctgaagagtgtgaagtttgg

SEQ ID NO: 166604 - DNA, 25 bp, Artificial
  Probe
ccaaagtctgaagagtgtgaagttt

SEQ ID NO: 166605 - DNA, 25 bp, Artificial
  Probe
atttcagatttaagagggtggcttc

SEQ ID NO: 166606 - DNA, 25 bp, Artificial
  Probe
gatttcagatttaagagggtggctt

SEQ ID NO: 166607 - DNA, 25 bp, Artificial
  Probe
ggtgatttcagatttaagagggtgg

SEQ ID NO: 166608 - DNA, 25 bp, Artificial
  Probe
agttaatcagccttctccttcacct

SEQ ID NO: 166609 - DNA, 25 bp, Artificial
  Probe
gtctgaagagtgtgaagtttggaag

SEQ ID NO: 166610 - DNA, 25 bp, Artificial
  Probe
gaaccaaagtctgaagagtgtgaag

SEQ ID NO: 166611 - DNA, 25 bp, Artificial
  Probe
tcttcttcttcaaggatcggtttat

SEQ ID NO: 166612 - DNA, 25 bp, Artificial
  Probe
atcttcttcttcaaggatcggttta

SEQ ID NO: 166613 - DNA, 25 bp, Artificial
  Probe
ggtgcttattacctgaagttggaga

SEQ ID NO: 166614 - DNA, 25 bp, Artificial
  Probe
cttcttcaaggatcggtttatttgg

SEQ ID NO: 166615 - DNA, 25 bp, Artificial
  Probe
tgatttcagatttaagagggtggct

SEQ ID NO: 166616 - DNA, 25 bp, Artificial
  Probe
gtgatttcagatttaagagggtggc

SEQ ID NO: 166617 - DNA, 25 bp, Artificial
  Probe
cttcttcttcaaggatcggtttatt

SEQ ID NO: 166618 - DNA, 25 bp, Artificial
  Probe
caggttctccagcatgaatgatctt

SEQ ID NO: 166619 - DNA, 25 bp, Artificial
  Probe
agtctgaagagtgtgaagtttggaa

SEQ ID NO: 166620 - DNA, 25 bp, Artificial
  Probe
aagtctgaagagtgtgaagtttgga

SEQ ID NO: 166621 - DNA, 25 bp, Artificial
  Probe
gggacaagttctggagatacaatga

SEQ ID NO: 166622 - DNA, 25 bp, Artificial
  Probe
tcttcttcaaggatcggtttatttg

SEQ ID NO: 166623 - DNA, 25 bp, Artificial
  Probe
ctggtgatttcagatttaagagggt

SEQ ID NO: 166624 - DNA, 25 bp, Artificial
  Probe
tttcagatttaagagggtggcttct

SEQ ID NO: 166625 - DNA, 25 bp, Artificial
  Probe
ttcttcttcaaggatcggtttattt

SEQ ID NO: 166626 - DNA, 25 bp, Artificial
  Probe
accaaagtctgaagagtgtgaagtt

SEQ ID NO: 166627 - DNA, 25 bp, Artificial
  Probe
aaccaaagtctgaagagtgtgaagt

SEQ ID NO: 166628 - DNA, 25 bp, Artificial
  Probe
tatggtaggattggatgtctgattg

SEQ ID NO: 166629 - DNA, 25 bp, Artificial
  Probe
ggagttacattggtgctaaggatta

SEQ ID NO: 166630 - DNA, 25 bp, Artificial
  Probe
ggattggatgtctgattgcttacta

SEQ ID NO: 166631 - DNA, 25 bp, Artificial
  Probe
taggattggatgtctgattgcttac

SEQ ID NO: 166632 - DNA, 25 bp, Artificial
  Probe
gtaggattggatgtctgattgctta

SEQ ID NO: 166633 - DNA, 25 bp, Artificial
  Probe
ctatggtaggattggatgtctgatt

SEQ ID NO: 166634 - DNA, 25 bp, Artificial
  Probe
gattggatgtctgattgcttactaa

SEQ ID NO: 166635 - DNA, 25 bp, Artificial
  Probe
gagttacattggtgctaaggattaa

SEQ ID NO: 166636 - DNA, 25 bp, Artificial
  Probe
atgaatgacttgctctctggtgtat

SEQ ID NO: 166637 - DNA, 25 bp, Artificial
  Probe
aggattggatgtctgattgcttact

SEQ ID NO: 166638 - DNA, 25 bp, Artificial
  Probe
aatgaatgacttgctctctggtgta

SEQ ID NO: 166639 - DNA, 25 bp, Artificial
  Probe
tggagttacattggtgctaaggatt

SEQ ID NO: 166640 - DNA, 25 bp, Artificial
  Probe
ctggagttacattggtgctaaggat

SEQ ID NO: 166641 - DNA, 25 bp, Artificial
  Probe
gaactggagttacattggtgctaag

SEQ ID NO: 166642 - DNA, 25 bp, Artificial
  Probe
tgaatgacttgctctctggtgtatg

SEQ ID NO: 166643 - DNA, 25 bp, Artificial
  Probe
atccaggtggcttcaagtaatcatt

SEQ ID NO: 166644 - DNA, 25 bp, Artificial
  Probe
ggtaggattggatgtctgattgctt

SEQ ID NO: 166645 - DNA, 25 bp, Artificial
  Probe
atggtaggattggatgtctgattgc

SEQ ID NO: 166646 - DNA, 25 bp, Artificial
  Probe
gatagcttggaactggagttacatt

SEQ ID NO: 166647 - DNA, 25 bp, Artificial
  Probe
atagcttggaactggagttacattg

SEQ ID NO: 166648 - DNA, 25 bp, Artificial
  Probe
tggatgtctgattgcttactaaact

SEQ ID NO: 166649 - DNA, 25 bp, Artificial
  Probe
agatagcttggaactggagttacat

SEQ ID NO: 166650 - DNA, 25 bp, Artificial
  Probe
ttggatgtctgattgcttactaaac

SEQ ID NO: 166651 - DNA, 25 bp, Artificial
  Probe
atttaatctttaggttggagggaca

SEQ ID NO: 166652 - DNA, 25 bp, Artificial
  Probe
aacaatgaatgacttgctctctggt

SEQ ID NO: 166653 - DNA, 25 bp, Artificial
  Probe
tccaacaaaggtaaataaatcagca

SEQ ID NO: 166654 - DNA, 25 bp, Artificial
  Probe
ggatgtctgattgcttactaaactt

SEQ ID NO: 166655 - DNA, 25 bp, Artificial
  Probe
catccaggtggcttcaagtaatcat

SEQ ID NO: 166656 - DNA, 25 bp, Artificial
  Probe
aaccattaaccattgagccatcttt

SEQ ID NO: 166657 - DNA, 25 bp, Artificial
  Probe
aaaccattaaccattgagccatctt

SEQ ID NO: 166658 - DNA, 25 bp, Artificial
  Probe
aagaaaccattaaccattgagccat

SEQ ID NO: 166659 - DNA, 25 bp, Artificial
  Probe
ttaatctttaggttggagggacaag

SEQ ID NO: 166660 - DNA, 25 bp, Artificial
  Probe
tttaatctttaggttggagggacaa

SEQ ID NO: 166661 - DNA, 25 bp, Artificial
  Probe
gaatgacttgctctctggtgtatgg

SEQ ID NO: 166662 - DNA, 25 bp, Artificial
  Probe
taaacaatgaatgacttgctctctg

SEQ ID NO: 166663 - DNA, 25 bp, Artificial
  Probe
tgtgtttgctttgtaggtatagaaa

SEQ ID NO: 166664 - DNA, 25 bp, Artificial
  Probe
tctaaacaatgaatgacttgctctc

SEQ ID NO: 166665 - DNA, 25 bp, Artificial
  Probe
aaagaaaccattaaccattgagcca

SEQ ID NO: 166666 - DNA, 25 bp, Artificial
  Probe
ctaaacaatgaatgacttgctctct

SEQ ID NO: 166667 - DNA, 25 bp, Artificial
  Probe
attggatgtctgattgcttactaaa

SEQ ID NO: 166668 - DNA, 25 bp, Artificial
  Probe
tcgttactatgacactatacccagc

SEQ ID NO: 166669 - DNA, 25 bp, Artificial
  Probe
atcagatagcttggaactggagtta

SEQ ID NO: 166670 - DNA, 25 bp, Artificial
  Probe
atgtgtttgctttgtaggtatagaa

SEQ ID NO: 166671 - DNA, 25 bp, Artificial
  Probe
aatgtgtttgctttgtaggtataga

SEQ ID NO: 166672 - DNA, 25 bp, Artificial
  Probe
gaaaccattaaccattgagccatct

SEQ ID NO: 166673 - DNA, 25 bp, Artificial
  Probe
ctgagtatagaagttgtcacctgga

SEQ ID NO: 166674 - DNA, 25 bp, Artificial
  Probe
gctcttcttctactggtctgatgtt

SEQ ID NO: 166675 - DNA, 25 bp, Artificial
  Probe
ttgctgagtatagaagttgtcacct

SEQ ID NO: 166676 - DNA, 25 bp, Artificial
  Probe
tatagaagttgtcacctggacgatt

SEQ ID NO: 166677 - DNA, 25 bp, Artificial
  Probe
tgctgagtatagaagttgtcacctg

SEQ ID NO: 166678 - DNA, 25 bp, Artificial
  Probe
tgagtatagaagttgtcacctggac

SEQ ID NO: 166679 - DNA, 25 bp, Artificial
  Probe
tgtatataagcctctgcaatgttct

SEQ ID NO: 166680 - DNA, 25 bp, Artificial
  Probe
gtatagaagttgtcacctggacgat

SEQ ID NO: 166681 - DNA, 25 bp, Artificial
  Probe
ctcttcttctactggtctgatgttt

SEQ ID NO: 166682 - DNA, 25 bp, Artificial
  Probe
gtatataagcctctgcaatgttctc

SEQ ID NO: 166683 - DNA, 25 bp, Artificial
  Probe
tatataagcctctgcaatgttctct

SEQ ID NO: 166684 - DNA, 25 bp, Artificial
  Probe
atataagcctctgcaatgttctctt

SEQ ID NO: 166685 - DNA, 25 bp, Artificial
  Probe
tggtttgctgagtatagaagttgtc

SEQ ID NO: 166686 - DNA, 25 bp, Artificial
  Probe
ctggtttgctgagtatagaagttgt

SEQ ID NO: 166687 - DNA, 25 bp, Artificial
  Probe
atgtatataagcctctgcaatgttc

SEQ ID NO: 166688 - DNA, 25 bp, Artificial
  Probe
gctgagtatagaagttgtcacctgg

SEQ ID NO: 166689 - DNA, 25 bp, Artificial
  Probe
tctggtttgctgagtatagaagttg

SEQ ID NO: 166690 - DNA, 25 bp, Artificial
  Probe
gtctggtttgctgagtatagaagtt

SEQ ID NO: 166691 - DNA, 25 bp, Artificial
  Probe
atagaagttgtcacctggacgattc

SEQ ID NO: 166692 - DNA, 25 bp, Artificial
  Probe
tataagcctctgcaatgttctcttg

SEQ ID NO: 166693 - DNA, 25 bp, Artificial
  Probe
gagtatagaagttgtcacctggacg

SEQ ID NO: 166694 - DNA, 25 bp, Artificial
  Probe
gtttgctgagtatagaagttgtcac

SEQ ID NO: 166695 - DNA, 25 bp, Artificial
  Probe
ttctgtgtctggtttgctgagtata

SEQ ID NO: 166696 - DNA, 25 bp, Artificial
  Probe
ctaggaccagaggaaataagtgact

SEQ ID NO: 166697 - DNA, 25 bp, Artificial
  Probe
gtgtctggtttgctgagtatagaag

SEQ ID NO: 166698 - DNA, 25 bp, Artificial
  Probe
tttgctgagtatagaagttgtcacc

SEQ ID NO: 166699 - DNA, 25 bp, Artificial
  Probe
ggtttgctgagtatagaagttgtca

SEQ ID NO: 166700 - DNA, 25 bp, Artificial
  Probe
tgtctggtttgctgagtatagaagt

SEQ ID NO: 166701 - DNA, 25 bp, Artificial
  Probe
agtatagaagttgtcacctggacga

SEQ ID NO: 166702 - DNA, 25 bp, Artificial
  Probe
tgtgtctggtttgctgagtatagaa

SEQ ID NO: 166703 - DNA, 25 bp, Artificial
  Probe
tctgtgtctggtttgctgagtatag

SEQ ID NO: 166704 - DNA, 25 bp, Artificial
  Probe
tatgtatataagcctctgcaatgtt

SEQ ID NO: 166705 - DNA, 25 bp, Artificial
  Probe
cagaggaaataagtgactgttctca

SEQ ID NO: 166706 - DNA, 25 bp, Artificial
  Probe
ccagaggaaataagtgactgttctc

SEQ ID NO: 166707 - DNA, 25 bp, Artificial
  Probe
ttatgtatataagcctctgcaatgt

SEQ ID NO: 166708 - DNA, 25 bp, Artificial
  Probe
ctgtgtctggtttgctgagtataga

SEQ ID NO: 166709 - DNA, 25 bp, Artificial
  Probe
agacaatttcagatgtgatcggata

SEQ ID NO: 166710 - DNA, 25 bp, Artificial
  Probe
agctcttcttctactggtctgatgt

SEQ ID NO: 166711 - DNA, 25 bp, Artificial
  Probe
gaccagaggaaataagtgactgttc

SEQ ID NO: 166712 - DNA, 25 bp, Artificial
  Probe
taggaccagaggaaataagtgactg

SEQ ID NO: 166713 - DNA, 25 bp, Artificial
  Probe
aagtgtaaattatctatggctttgc

SEQ ID NO: 166714 - DNA, 25 bp, Artificial
  Probe
atacagacaatttcagatgtgatcg

SEQ ID NO: 166715 - DNA, 25 bp, Artificial
  Probe
accagaggaaataagtgactgttct

SEQ ID NO: 166716 - DNA, 25 bp, Artificial
  Probe
gacaatttcagatgtgatcggatat

SEQ ID NO: 166717 - DNA, 25 bp, Artificial
  Probe
tacagacaatttcagatgtgatcgg

SEQ ID NO: 166718 - DNA, 25 bp, Artificial
  Probe
gttctctctcttctgtactctctct

SEQ ID NO: 166719 - DNA, 25 bp, Artificial
  Probe
ttctctctcttctgtactctctctt

SEQ ID NO: 166720 - DNA, 25 bp, Artificial
  Probe
cgttctctctcttctgtactctctc

SEQ ID NO: 166721 - DNA, 25 bp, Artificial
  Probe
ttccttccgttctctctcttctgta

SEQ ID NO: 166722 - DNA, 25 bp, Artificial
  Probe
cttccgttctctctcttctgtactc

SEQ ID NO: 166723 - DNA, 25 bp, Artificial
  Probe
ttccgttctctctcttctgtactct

SEQ ID NO: 166724 - DNA, 25 bp, Artificial
  Probe
tactctctctttaggttcttcgcta

SEQ ID NO: 166725 - DNA, 25 bp, Artificial
  Probe
tctctttaggttcttcgctatgttc

SEQ ID NO: 166726 - DNA, 25 bp, Artificial
  Probe
ctctctttaggttcttcgctatgtt

SEQ ID NO: 166727 - DNA, 25 bp, Artificial
  Probe
ctctctctttaggttcttcgctatg

SEQ ID NO: 166728 - DNA, 25 bp, Artificial
  Probe
actctctctttaggttcttcgctat

SEQ ID NO: 166729 - DNA, 25 bp, Artificial
  Probe
ccgttctctctcttctgtactctct

SEQ ID NO: 166730 - DNA, 25 bp, Artificial
  Probe
tccgttctctctcttctgtactctc

SEQ ID NO: 166731 - DNA, 25 bp, Artificial
  Probe
tctctctttaggttcttcgctatgt

SEQ ID NO: 166732 - DNA, 25 bp, Artificial
  Probe
ctctttaggttcttcgctatgttcc

SEQ ID NO: 166733 - DNA, 25 bp, Artificial
  Probe
ccaagtttcccaattctgagattct

SEQ ID NO: 166734 - DNA, 25 bp, Artificial
  Probe
atttctagtaatgcctgtcctttct

SEQ ID NO: 166735 - DNA, 25 bp, Artificial
  Probe
caagtttcccaattctgagattctt

SEQ ID NO: 166736 - DNA, 25 bp, Artificial
  Probe
tttctagtaatgcctgtcctttctg

SEQ ID NO: 166737 - DNA, 25 bp, Artificial
  Probe
aagtttcccaattctgagattcttc

SEQ ID NO: 166738 - DNA, 25 bp, Artificial
  Probe
accaagtttcccaattctgagattc

SEQ ID NO: 166739 - DNA, 25 bp, Artificial
  Probe
aatttctagtaatgcctgtcctttc

SEQ ID NO: 166740 - DNA, 25 bp, Artificial
  Probe
gtttcccaattctgagattcttcac

SEQ ID NO: 166741 - DNA, 25 bp, Artificial
  Probe
agtttcccaattctgagattcttca

SEQ ID NO: 166742 - DNA, 25 bp, Artificial
  Probe
ctgtactctctctttaggttcttcg

SEQ ID NO: 166743 - DNA, 25 bp, Artificial
  Probe
caccaagtttcccaattctgagatt

SEQ ID NO: 166744 - DNA, 25 bp, Artificial
  Probe
tctcttctgtactctctctttaggt

SEQ ID NO: 166745 - DNA, 25 bp, Artificial
  Probe
tctctctcttctgtactctctcttt

SEQ ID NO: 166746 - DNA, 25 bp, Artificial
  Probe
caattctgagattcttcacccttca

SEQ ID NO: 166747 - DNA, 25 bp, Artificial
  Probe
ctctcttctgtactctctctttagg

SEQ ID NO: 166748 - DNA, 25 bp, Artificial
  Probe
tttcccaattctgagattcttcacc

SEQ ID NO: 166749 - DNA, 25 bp, Artificial
  Probe
ttctagtaatgcctgtcctttctgt

SEQ ID NO: 166750 - DNA, 25 bp, Artificial
  Probe
tctgtactctctctttaggttcttc

SEQ ID NO: 166751 - DNA, 25 bp, Artificial
  Probe
cttctgtactctctctttaggttct

SEQ ID NO: 166752 - DNA, 25 bp, Artificial
  Probe
tcttctgtactctctctttaggttc

SEQ ID NO: 166753 - DNA, 25 bp, Artificial
  Probe
ctcttctgtactctctctttaggtt

SEQ ID NO: 166754 - DNA, 25 bp, Artificial
  Probe
ccttccgttctctctcttctgtact

SEQ ID NO: 166755 - DNA, 25 bp, Artificial
  Probe
tccttccgttctctctcttctgtac

SEQ ID NO: 166756 - DNA, 25 bp, Artificial
  Probe
ccaattctgagattcttcacccttc

SEQ ID NO: 166757 - DNA, 25 bp, Artificial
  Probe
ttctgtactctctctttaggttctt

SEQ ID NO: 166758 - DNA, 25 bp, Artificial
  Probe
gtactctctctttaggttcttcgct

SEQ ID NO: 166759 - DNA, 25 bp, Artificial
  Probe
tctctcttctgtactctctctttag

SEQ ID NO: 166760 - DNA, 25 bp, Artificial
  Probe
ctctctcttctgtactctctcttta

SEQ ID NO: 166761 - DNA, 25 bp, Artificial
  Probe
tctagtaatgcctgtcctttctgtg

SEQ ID NO: 166762 - DNA, 25 bp, Artificial
  Probe
tgtactctctctttaggttcttcgc

SEQ ID NO: 166763 - DNA, 25 bp, Artificial
  Probe
cttcaacagaggaatggatacagaa

SEQ ID NO: 166764 - DNA, 25 bp, Artificial
  Probe
atggtatgtactcactgatatgtgg

SEQ ID NO: 166765 - DNA, 25 bp, Artificial
  Probe
gtatgtactcactgatatgtggcta

SEQ ID NO: 166766 - DNA, 25 bp, Artificial
  Probe
atgtactcactgatatgtggctatt

SEQ ID NO: 166767 - DNA, 25 bp, Artificial
  Probe
tctacacaatggaatattactcagc

SEQ ID NO: 166768 - DNA, 25 bp, Artificial
  Probe
ctaacccaaacacagaaagacatac

SEQ ID NO: 166769 - DNA, 25 bp, Artificial
  Probe
tgtactcactgatatgtggctatta

SEQ ID NO: 166770 - DNA, 25 bp, Artificial
  Probe
taacccaaacacagaaagacataca

SEQ ID NO: 166771 - DNA, 25 bp, Artificial
  Probe
ccttcaacagaggaatggatacaga

SEQ ID NO: 166772 - DNA, 25 bp, Artificial
  Probe
atggctgagaaacacctaaagaaat

SEQ ID NO: 166773 - DNA, 25 bp, Artificial
  Probe
ctacacaatggaatattactcagct

SEQ ID NO: 166774 - DNA, 25 bp, Artificial
  Probe
tatgtactcactgatatgtggctat

SEQ ID NO: 166775 - DNA, 25 bp, Artificial
  Probe
aacccaaacacagaaagacatacat

SEQ ID NO: 166776 - DNA, 25 bp, Artificial
  Probe
aatggctgagaaacacctaaagaaa

SEQ ID NO: 166777 - DNA, 25 bp, Artificial
  Probe
catggtatgtactcactgatatgtg

SEQ ID NO: 166778 - DNA, 25 bp, Artificial
  Probe
ttcaacagaggaatggatacagaaa

SEQ ID NO: 166779 - DNA, 25 bp, Artificial
  Probe
tttatgaaattcgtaggcaaatggc

SEQ ID NO: 166780 - DNA, 25 bp, Artificial
  Probe
gtactcactgatatgtggctattag

SEQ ID NO: 166781 - DNA, 25 bp, Artificial
  Probe
gtggtacatctacacaatggaatat

SEQ ID NO: 166782 - DNA, 25 bp, Artificial
  Probe
gctaacccaaacacagaaagacata

SEQ ID NO: 166783 - DNA, 25 bp, Artificial
  Probe
gaatggctgagaaacacctaaagaa

SEQ ID NO: 166784 - DNA, 25 bp, Artificial
  Probe
ggtatgtactcactgatatgtggct

SEQ ID NO: 166785 - DNA, 25 bp, Artificial
  Probe
ctttatgaaattcgtaggcaaatgg

SEQ ID NO: 166786 - DNA, 25 bp, Artificial
  Probe
acatctttagtcataagggaaatgc

SEQ ID NO: 166787 - DNA, 25 bp, Artificial
  Probe
tggctgagaaacacctaaagaaatg

SEQ ID NO: 166788 - DNA, 25 bp, Artificial
  Probe
tggtatgtactcactgatatgtggc

SEQ ID NO: 166789 - DNA, 25 bp, Artificial
  Probe
ccactatgttcattgcagccttatt

SEQ ID NO: 166790 - DNA, 25 bp, Artificial
  Probe
ttatgaaattcgtaggcaaatggct

SEQ ID NO: 166791 - DNA, 25 bp, Artificial
  Probe
acacaatggaatattactcagctat

SEQ ID NO: 166792 - DNA, 25 bp, Artificial
  Probe
tggtacatctacacaatggaatatt

SEQ ID NO: 166793 - DNA, 25 bp, Artificial
  Probe
actttatgaaattcgtaggcaaatg

SEQ ID NO: 166794 - DNA, 25 bp, Artificial
  Probe
gttcaacatctttagtcataaggga

SEQ ID NO: 166795 - DNA, 25 bp, Artificial
  Probe
gctatacctctcttgggcatatacc

SEQ ID NO: 166796 - DNA, 25 bp, Artificial
  Probe
acaatggaatattactcagctatca

SEQ ID NO: 166797 - DNA, 25 bp, Artificial
  Probe
caaacacagaaagacatacatggta

SEQ ID NO: 166798 - DNA, 25 bp, Artificial
  Probe
gactttatgaaattcgtaggcaaat

SEQ ID NO: 166799 - DNA, 25 bp, Artificial
  Probe
tatgaaattcgtaggcaaatggctg

SEQ ID NO: 166800 - DNA, 25 bp, Artificial
  Probe
cacaatggaatattactcagctatc

SEQ ID NO: 166801 - DNA, 25 bp, Artificial
  Probe
tccactatgttcattgcagccttat

SEQ ID NO: 166802 - DNA, 25 bp, Artificial
  Probe
tcaacatctttagtcataagggaaa

SEQ ID NO: 166803 - DNA, 25 bp, Artificial
  Probe
ttcaacatctttagtcataagggaa

SEQ ID NO: 166804 - DNA, 25 bp, Artificial
  Probe
acccaaacacagaaagacatacatg

SEQ ID NO: 166805 - DNA, 25 bp, Artificial
  Probe
tacacaatggaatattactcagcta

SEQ ID NO: 166806 - DNA, 25 bp, Artificial
  Probe
ggctgagaaacacctaaagaaatgt

SEQ ID NO: 166807 - DNA, 25 bp, Artificial
  Probe
gcagccttatttataatagccagaa

SEQ ID NO: 166808 - DNA, 25 bp, Artificial
  Probe
tgattgttcacagtcagttacagat

SEQ ID NO: 166809 - DNA, 25 bp, Artificial
  Probe
ttgttcacagtcagttacagattga

SEQ ID NO: 166810 - DNA, 25 bp, Artificial
  Probe
ttgattgttcacagtcagttacaga

SEQ ID NO: 166811 - DNA, 25 bp, Artificial
  Probe
attgttcacagtcagttacagattg

SEQ ID NO: 166812 - DNA, 25 bp, Artificial
  Probe
attgattgttcacagtcagttacag

SEQ ID NO: 166813 - DNA, 25 bp, Artificial
  Probe
gattgttcacagtcagttacagatt

SEQ ID NO: 166814 - DNA, 25 bp, Artificial
  Probe
aattgattgttcacagtcagttaca

SEQ ID NO: 166815 - DNA, 25 bp, Artificial
  Probe
ttcacagtcagttacagattgaact

SEQ ID NO: 166816 - DNA, 25 bp, Artificial
  Probe
tgttcacagtcagttacagattgaa

SEQ ID NO: 166817 - DNA, 25 bp, Artificial
  Probe
tcacagtcagttacagattgaactc

SEQ ID NO: 166818 - DNA, 25 bp, Artificial
  Probe
cagtcagttacagattgaactcctg

SEQ ID NO: 166819 - DNA, 25 bp, Artificial
  Probe
acagtcagttacagattgaactcct

SEQ ID NO: 166820 - DNA, 25 bp, Artificial
  Probe
cacagtcagttacagattgaactcc

SEQ ID NO: 166821 - DNA, 25 bp, Artificial
  Probe
caattgattgttcacagtcagttac

SEQ ID NO: 166822 - DNA, 25 bp, Artificial
  Probe
cagattgaactcctgttctacactt

SEQ ID NO: 166823 - DNA, 25 bp, Artificial
  Probe
tacagattgaactcctgttctacac

SEQ ID NO: 166824 - DNA, 25 bp, Artificial
  Probe
cagttacagattgaactcctgttct

SEQ ID NO: 166825 - DNA, 25 bp, Artificial
  Probe
tcagttacagattgaactcctgttc

SEQ ID NO: 166826 - DNA, 25 bp, Artificial
  Probe
ttacagattgaactcctgttctaca

SEQ ID NO: 166827 - DNA, 25 bp, Artificial
  Probe
gtcagttacagattgaactcctgtt

SEQ ID NO: 166828 - DNA, 25 bp, Artificial
  Probe
gttacagattgaactcctgttctac

SEQ ID NO: 166829 - DNA, 25 bp, Artificial
  Probe
agttacagattgaactcctgttcta

SEQ ID NO: 166830 - DNA, 25 bp, Artificial
  Probe
acagattgaactcctgttctacact

SEQ ID NO: 166831 - DNA, 25 bp, Artificial
  Probe
agtcagttacagattgaactcctgt

SEQ ID NO: 166832 - DNA, 25 bp, Artificial
  Probe
agattgaactcctgttctacacttt

SEQ ID NO: 166833 - DNA, 25 bp, Artificial
  Probe
gattgaactcctgttctacactttc

SEQ ID NO: 166834 - DNA, 25 bp, Artificial
  Probe
attgaactcctgttctacactttcc

SEQ ID NO: 166835 - DNA, 25 bp, Artificial
  Probe
ttgaactcctgttctacactttccc

SEQ ID NO: 166836 - DNA, 25 bp, Artificial
  Probe
tgaactcctgttctacactttcccc

SEQ ID NO: 166837 - DNA, 25 bp, Artificial
  Probe
cacaatcacacacacacaatccaag

SEQ ID NO: 166838 - DNA, 25 bp, Artificial
  Probe
cacacacaatcacacacacacaatc

SEQ ID NO: 166839 - DNA, 25 bp, Artificial
  Probe
acacaatcacacacacacaatccaa

SEQ ID NO: 166840 - DNA, 25 bp, Artificial
  Probe
tcaatagatgtggaggtgaaccaac

SEQ ID NO: 166841 - DNA, 25 bp, Artificial
  Probe
acacacacaatcacacacacacaat

SEQ ID NO: 166842 - DNA, 25 bp, Artificial
  Probe
aatagatgtggaggtgaaccaacac

SEQ ID NO: 166843 - DNA, 25 bp, Artificial
  Probe
caatagatgtggaggtgaaccaaca

SEQ ID NO: 166844 - DNA, 25 bp, Artificial
  Probe
ttcaatagatgtggaggtgaaccaa

SEQ ID NO: 166845 - DNA, 25 bp, Artificial
  Probe
cacacaatcacacacacacaatcca

SEQ ID NO: 166846 - DNA, 25 bp, Artificial
  Probe
acacacaatcacacacacacaatcc

SEQ ID NO: 166847 - DNA, 25 bp, Artificial
  Probe
atcacacacacaatcacacacacac

SEQ ID NO: 166848 - DNA, 25 bp, Artificial
  Probe
catcacacacacaatcacacacaca

SEQ ID NO: 166849 - DNA, 25 bp, Artificial
  Probe
acatcacacacacaatcacacacac

SEQ ID NO: 166850 - DNA, 25 bp, Artificial
  Probe
cacatcacacacacaatcacacaca

SEQ ID NO: 166851 - DNA, 25 bp, Artificial
  Probe
acacatcacacacacaatcacacac

SEQ ID NO: 166852 - DNA, 25 bp, Artificial
  Probe
cacacatcacacacacaatcacaca

SEQ ID NO: 166853 - DNA, 25 bp, Artificial
  Probe
acacacatcacacacacaatcacac

SEQ ID NO: 166854 - DNA, 25 bp, Artificial
  Probe
cacacacatcacacacacaatcaca

SEQ ID NO: 166855 - DNA, 25 bp, Artificial
  Probe
acacacacatcacacacacaatcac

SEQ ID NO: 166856 - DNA, 25 bp, Artificial
  Probe
cacacacacatcacacacacaatca

SEQ ID NO: 166857 - DNA, 25 bp, Artificial
  Probe
acacacacacatcacacacacaatc

SEQ ID NO: 166858 - DNA, 25 bp, Artificial
  Probe
cttcaatagatgtggaggtgaacca

SEQ ID NO: 166859 - DNA, 25 bp, Artificial
  Probe
accctatagtgagtcgtatacatca

SEQ ID NO: 166860 - DNA, 25 bp, Artificial
  Probe
cacacacacacatcacacacacaat

SEQ ID NO: 166861 - DNA, 25 bp, Artificial
  Probe
acaatcacacacacacaatccaagc

SEQ ID NO: 166862 - DNA, 25 bp, Artificial
  Probe
cacacacacaatcacacacacacaa

SEQ ID NO: 166863 - DNA, 25 bp, Artificial
  Probe
caccctatagtgagtcgtatacatc

SEQ ID NO: 166864 - DNA, 25 bp, Artificial
  Probe
taagcttcaatagatgtggaggtga

SEQ ID NO: 166865 - DNA, 25 bp, Artificial
  Probe
agcttcaatagatgtggaggtgaac

SEQ ID NO: 166866 - DNA, 25 bp, Artificial
  Probe
gcttcaatagatgtggaggtgaacc

SEQ ID NO: 166867 - DNA, 25 bp, Artificial
  Probe
caatcacacacacacaatccaagcc

SEQ ID NO: 166868 - DNA, 25 bp, Artificial
  Probe
cacacacaatccaagccgaattctt

SEQ ID NO: 166869 - DNA, 25 bp, Artificial
  Probe
aagcttcaatagatgtggaggtgaa

SEQ ID NO: 166870 - DNA, 25 bp, Artificial
  Probe
caattcaccctatagtgagtcgtat

SEQ ID NO: 166871 - DNA, 25 bp, Artificial
  Probe
tcaccctatagtgagtcgtatacat

SEQ ID NO: 166872 - DNA, 25 bp, Artificial
  Probe
ttcaccctatagtgagtcgtataca

SEQ ID NO: 166873 - DNA, 25 bp, Artificial
  Probe
ccctatagtgagtcgtatacatcac

SEQ ID NO: 166874 - DNA, 25 bp, Artificial
  Probe
ccaattcaccctatagtgagtcgta

SEQ ID NO: 166875 - DNA, 25 bp, Artificial
  Probe
attcaccctatagtgagtcgtatac

SEQ ID NO: 166876 - DNA, 25 bp, Artificial
  Probe
aattcaccctatagtgagtcgtata

SEQ ID NO: 166877 - DNA, 25 bp, Artificial
  Probe
cacacacacaatccaagccgaattc

SEQ ID NO: 166878 - DNA, 25 bp, Artificial
  Probe
atagatgtggaggtgaaccaacaca

SEQ ID NO: 166879 - DNA, 25 bp, Artificial
  Probe
tatacatcactggccgtcgttttac

SEQ ID NO: 166880 - DNA, 25 bp, Artificial
  Probe
gtatacatcactggccgtcgtttta

SEQ ID NO: 166881 - DNA, 25 bp, Artificial
  Probe
acacacaatccaagccgaattcttg

SEQ ID NO: 166882 - DNA, 25 bp, Artificial
  Probe
ctgttgttacttgtgtagcattcta

SEQ ID NO: 166883 - DNA, 25 bp, Artificial
  Probe
cctgttgttacttgtgtagcattct

SEQ ID NO: 166884 - DNA, 25 bp, Artificial
  Probe
tgttgttacttgtgtagcattctag

SEQ ID NO: 166885 - DNA, 25 bp, Artificial
  Probe
ctaattcgttgatcttcgctgtatg

SEQ ID NO: 166886 - DNA, 25 bp, Artificial
  Probe
tctaattcgttgatcttcgctgtat

SEQ ID NO: 166887 - DNA, 25 bp, Artificial
  Probe
ttctaattcgttgatcttcgctgta

SEQ ID NO: 166888 - DNA, 25 bp, Artificial
  Probe
taattcgttgatcttcgctgtatga

SEQ ID NO: 166889 - DNA, 25 bp, Artificial
  Probe
atcttctaattcgttgatcttcgct

SEQ ID NO: 166890 - DNA, 25 bp, Artificial
  Probe
tatcttctaattcgttgatcttcgc

SEQ ID NO: 166891 - DNA, 25 bp, Artificial
  Probe
tcttctaattcgttgatcttcgctg

SEQ ID NO: 166892 - DNA, 25 bp, Artificial
  Probe
cttctaattcgttgatcttcgctgt

SEQ ID NO: 166893 - DNA, 25 bp, Artificial
  Probe
aattcgttgatcttcgctgtatgac

SEQ ID NO: 166894 - DNA, 25 bp, Artificial
  Probe
ctaatgacaaccttgactctcagag

SEQ ID NO: 166895 - DNA, 25 bp, Artificial
  Probe
tcctctctcattcaaggtaactgtt

SEQ ID NO: 166896 - DNA, 25 bp, Artificial
  Probe
ttcctctctcattcaaggtaactgt

SEQ ID NO: 166897 - DNA, 25 bp, Artificial
  Probe
taatgacaaccttgactctcagaga

SEQ ID NO: 166898 - DNA, 25 bp, Artificial
  Probe
gcctgttgttacttgtgtagcattc

SEQ ID NO: 166899 - DNA, 25 bp, Artificial
  Probe
aatgacaaccttgactctcagagat

SEQ ID NO: 166900 - DNA, 25 bp, Artificial
  Probe
gctaatgacaaccttgactctcaga

SEQ ID NO: 166901 - DNA, 25 bp, Artificial
  Probe
atagttctgttggaatgtgatcctg

SEQ ID NO: 166902 - DNA, 25 bp, Artificial
  Probe
tatagttctgttggaatgtgatcct

SEQ ID NO: 166903 - DNA, 25 bp, Artificial
  Probe
ttcgctaatgacaaccttgactctc

SEQ ID NO: 166904 - DNA, 25 bp, Artificial
  Probe
ttatttcgctaatgacaaccttgac

SEQ ID NO: 166905 - DNA, 25 bp, Artificial
  Probe
tatttcgctaatgacaaccttgact

SEQ ID NO: 166906 - DNA, 25 bp, Artificial
  Probe
tttatttcgctaatgacaaccttga

SEQ ID NO: 166907 - DNA, 25 bp, Artificial
  Probe
tagttctgttggaatgtgatcctga

SEQ ID NO: 166908 - DNA, 25 bp, Artificial
  Probe
ttatagttctgttggaatgtgatcc

SEQ ID NO: 166909 - DNA, 25 bp, Artificial
  Probe
tgtatcttccacactgcttgacatt

SEQ ID NO: 166910 - DNA, 25 bp, Artificial
  Probe
atgacaaccttgactctcagagatg

SEQ ID NO: 166911 - DNA, 25 bp, Artificial
  Probe
ctctctcattcaaggtaactgtttg

SEQ ID NO: 166912 - DNA, 25 bp, Artificial
  Probe
gtatcttccacactgcttgacattt

SEQ ID NO: 166913 - DNA, 25 bp, Artificial
  Probe
tgataagtttggctactgtaatggt

SEQ ID NO: 166914 - DNA, 25 bp, Artificial
  Probe
atttcgctaatgacaaccttgactc

SEQ ID NO: 166915 - DNA, 25 bp, Artificial
  Probe
aattgatacctcatctttccgagag

SEQ ID NO: 166916 - DNA, 25 bp, Artificial
  Probe
aaattgatacctcatctttccgaga

SEQ ID NO: 166917 - DNA, 25 bp, Artificial
  Probe
ttgataagtttggctactgtaatgg

SEQ ID NO: 166918 - DNA, 25 bp, Artificial
  Probe
ctctcattcaaggtaactgtttgct

SEQ ID NO: 166919 - DNA, 25 bp, Artificial
  Probe
tctctcattcaaggtaactgtttgc

SEQ ID NO: 166920 - DNA, 25 bp, Artificial
  Probe
gcagtgtaaattgatacctcatctt

SEQ ID NO: 166921 - DNA, 25 bp, Artificial
  Probe
tgtaaattgatacctcatctttccg

SEQ ID NO: 166922 - DNA, 25 bp, Artificial
  Probe
attgatacctcatctttccgagagt

SEQ ID NO: 166923 - DNA, 25 bp, Artificial
  Probe
agttctgttggaatgtgatcctgaa

SEQ ID NO: 166924 - DNA, 25 bp, Artificial
  Probe
tctcattcaaggtaactgtttgctg

SEQ ID NO: 166925 - DNA, 25 bp, Artificial
  Probe
gtaaattgatacctcatctttccga

SEQ ID NO: 166926 - DNA, 25 bp, Artificial
  Probe
attcgttgatcttcgctgtatgaca

SEQ ID NO: 166927 - DNA, 25 bp, Artificial
  Probe
ttgtcctggatgtatgatactgtta

SEQ ID NO: 166928 - DNA, 25 bp, Artificial
  Probe
tgtcctggatgtatgatactgttat

SEQ ID NO: 166929 - DNA, 25 bp, Artificial
  Probe
aattattattattcagccacgaggt

SEQ ID NO: 166930 - DNA, 25 bp, Artificial
  Probe
ttattattattcagccacgaggtgt

SEQ ID NO: 166931 - DNA, 25 bp, Artificial
  Probe
tattattattcagccacgaggtgtc

SEQ ID NO: 166932 - DNA, 25 bp, Artificial
  Probe
caaggcataggatatagaaggcagg

SEQ ID NO: 166933 - DNA, 25 bp, Artificial
  Probe
ccaaggcataggatatagaaggcag

SEQ ID NO: 166934 - DNA, 25 bp, Artificial
  Probe
attattattattcagccacgaggtg

SEQ ID NO: 166935 - DNA, 25 bp, Artificial
  Probe
ttctgttctgtttctgttggtgata

SEQ ID NO: 166936 - DNA, 25 bp, Artificial
  Probe
tttgtttctgttctgtttctgttgg

SEQ ID NO: 166937 - DNA, 25 bp, Artificial
  Probe
attattattcagccacgaggtgtct

SEQ ID NO: 166938 - DNA, 25 bp, Artificial
  Probe
tctgttctgtttctgttggtgatac

SEQ ID NO: 166939 - DNA, 25 bp, Artificial
  Probe
tttctgttctgtttctgttggtgat

SEQ ID NO: 166940 - DNA, 25 bp, Artificial
  Probe
ttattattcagccacgaggtgtctt

SEQ ID NO: 166941 - DNA, 25 bp, Artificial
  Probe
gtcctggatgtatgatactgttata

SEQ ID NO: 166942 - DNA, 25 bp, Artificial
  Probe
tttgtcctggatgtatgatactgtt

SEQ ID NO: 166943 - DNA, 25 bp, Artificial
  Probe
gtttgtcctggatgtatgatactgt

SEQ ID NO: 166944 - DNA, 25 bp, Artificial
  Probe
ttgtttctgttctgtttctgttggt

SEQ ID NO: 166945 - DNA, 25 bp, Artificial
  Probe
ggtttgtcctggatgtatgatactg

SEQ ID NO: 166946 - DNA, 25 bp, Artificial
  Probe
gtttctgttctgtttctgttggtga

SEQ ID NO: 166947 - DNA, 25 bp, Artificial
  Probe
ttctgtttctgttggtgatacaatg

SEQ ID NO: 166948 - DNA, 25 bp, Artificial
  Probe
gttctgtttctgttggtgatacaat

SEQ ID NO: 166949 - DNA, 25 bp, Artificial
  Probe
tctgtttctgttggtgatacaatgt

SEQ ID NO: 166950 - DNA, 25 bp, Artificial
  Probe
taagaaagacctgggtgtactactg

SEQ ID NO: 166951 - DNA, 25 bp, Artificial
  Probe
tgtttctgttctgtttctgttggtg

SEQ ID NO: 166952 - DNA, 25 bp, Artificial
  Probe
gtaagaaagacctgggtgtactact

SEQ ID NO: 166953 - DNA, 25 bp, Artificial
  Probe
tgttctgtttctgttggtgatacaa

SEQ ID NO: 166954 - DNA, 25 bp, Artificial
  Probe
cctccttaaagagttggtgtaagaa

SEQ ID NO: 166955 - DNA, 25 bp, Artificial
  Probe
ctgggtttgtcctggatgtatgata

SEQ ID NO: 166956 - DNA, 25 bp, Artificial
  Probe
gggtttgtcctggatgtatgatact

SEQ ID NO: 166957 - DNA, 25 bp, Artificial
  Probe
tgtaagaaagacctgggtgtactac

SEQ ID NO: 166958 - DNA, 25 bp, Artificial
  Probe
gtgtaagaaagacctgggtgtacta

SEQ ID NO: 166959 - DNA, 25 bp, Artificial
  Probe
ctgttctgtttctgttggtgataca

SEQ ID NO: 166960 - DNA, 25 bp, Artificial
  Probe
ctgtttctgttggtgatacaatgta

SEQ ID NO: 166961 - DNA, 25 bp, Artificial
  Probe
tgggtttgtcctggatgtatgatac

SEQ ID NO: 166962 - DNA, 25 bp, Artificial
  Probe
ccttaaagagttggtgtaagaaaga

SEQ ID NO: 166963 - DNA, 25 bp, Artificial
  Probe
tccttaaagagttggtgtaagaaag

SEQ ID NO: 166964 - DNA, 25 bp, Artificial
  Probe
ctccttaaagagttggtgtaagaaa

SEQ ID NO: 166965 - DNA, 25 bp, Artificial
  Probe
ccctccttaaagagttggtgtaaga

SEQ ID NO: 166966 - DNA, 25 bp, Artificial
  Probe
taaagagttggtgtaagaaagacct

SEQ ID NO: 166967 - DNA, 25 bp, Artificial
  Probe
taattattattattcagccacgagg

SEQ ID NO: 166968 - DNA, 25 bp, Artificial
  Probe
aaagagttggtgtaagaaagacctg

SEQ ID NO: 166969 - DNA, 25 bp, Artificial
  Probe
ggaaccttagtgtatacctcctcac

SEQ ID NO: 166970 - DNA, 25 bp, Artificial
  Probe
ttaaagagttggtgtaagaaagacc

SEQ ID NO: 166971 - DNA, 25 bp, Artificial
  Probe
tcctggatgtatgatactgttataa

SEQ ID NO: 166972 - DNA, 25 bp, Artificial
  Probe
cagtccaagcagtaactatgttctt

SEQ ID NO: 166973 - DNA, 25 bp, Artificial
  Probe
ctgtcaactttagatgtcacttctg

SEQ ID NO: 166974 - DNA, 25 bp, Artificial
  Probe
tctgtcaactttagatgtcacttct

SEQ ID NO: 166975 - DNA, 25 bp, Artificial
  Probe
gtctgtcaactttagatgtcacttc

SEQ ID NO: 166976 - DNA, 25 bp, Artificial
  Probe
gtcaactttagatgtcacttctggt

SEQ ID NO: 166977 - DNA, 25 bp, Artificial
  Probe
tgtcaactttagatgtcacttctgg

SEQ ID NO: 166978 - DNA, 25 bp, Artificial
  Probe
cgtctgtcaactttagatgtcactt

SEQ ID NO: 166979 - DNA, 25 bp, Artificial
  Probe
agtccaagcagtaactatgttcttt

SEQ ID NO: 166980 - DNA, 25 bp, Artificial
  Probe
gcagtccaagcagtaactatgttct

SEQ ID NO: 166981 - DNA, 25 bp, Artificial
  Probe
gtccaagcagtaactatgttcttta

SEQ ID NO: 166982 - DNA, 25 bp, Artificial
  Probe
ctttagcgtaggaaatgagaccaac

SEQ ID NO: 166983 - DNA, 25 bp, Artificial
  Probe
aatttggaaatgttacctcacagag

SEQ ID NO: 166984 - DNA, 25 bp, Artificial
  Probe
gaatttggaaatgttacctcacaga

SEQ ID NO: 166985 - DNA, 25 bp, Artificial
  Probe
agaatttggaaatgttacctcacag

SEQ ID NO: 166986 - DNA, 25 bp, Artificial
  Probe
aactatgttctttactttcacaggc

SEQ ID NO: 166987 - DNA, 25 bp, Artificial
  Probe
aaagaatttggaaatgttacctcac

SEQ ID NO: 166988 - DNA, 25 bp, Artificial
  Probe
aaggacaataggattaattgacggt

SEQ ID NO: 166989 - DNA, 25 bp, Artificial
  Probe
aagaatttggaaatgttacctcaca

SEQ ID NO: 166990 - DNA, 25 bp, Artificial
  Probe
aggacaataggattaattgacggtg

SEQ ID NO: 166991 - DNA, 25 bp, Artificial
  Probe
aataggattaattgacggtgggaaa

SEQ ID NO: 166992 - DNA, 25 bp, Artificial
  Probe
ataggattaattgacggtgggaaag

SEQ ID NO: 166993 - DNA, 25 bp, Artificial
  Probe
tcaactttagatgtcacttctggtg

SEQ ID NO: 166994 - DNA, 25 bp, Artificial
  Probe
ggacaataggattaattgacggtgg

SEQ ID NO: 166995 - DNA, 25 bp, Artificial
  Probe
tccaagcagtaactatgttctttac

SEQ ID NO: 166996 - DNA, 25 bp, Artificial
  Probe
tttagcgtaggaaatgagaccaacc

SEQ ID NO: 166997 - DNA, 25 bp, Artificial
  Probe
cgtaggaaatgagaccaaccagttt

SEQ ID NO: 166998 - DNA, 25 bp, Artificial
  Probe
cgcagtccaagcagtaactatgttc

SEQ ID NO: 166999 - DNA, 25 bp, Artificial
  Probe
taggattaattgacggtgggaaagg

SEQ ID NO: 167000 - DNA, 25 bp, Artificial
  Probe
tgtgtacaatcatgagtccaacatt

SEQ ID NO: 167001 - DNA, 25 bp, Artificial
  Probe
ttgtgtacaatcatgagtccaacat

SEQ ID NO: 167002 - DNA, 25 bp, Artificial
  Probe
gtaggaaatgagaccaaccagtttc

SEQ ID NO: 167003 - DNA, 25 bp, Artificial
  Probe
gctttagcgtaggaaatgagaccaa

SEQ ID NO: 167004 - DNA, 25 bp, Artificial
  Probe
acgtctgtcaactttagatgtcact

SEQ ID NO: 167005 - DNA, 25 bp, Artificial
  Probe
cacgtctgtcaactttagatgtcac

SEQ ID NO: 167006 - DNA, 25 bp, Artificial
  Probe
caataggattaattgacggtgggaa

SEQ ID NO: 167007 - DNA, 25 bp, Artificial
  Probe
aaaggacaataggattaattgacgg

SEQ ID NO: 167008 - DNA, 25 bp, Artificial
  Probe
ctgctttagcgtaggaaatgagacc

SEQ ID NO: 167009 - DNA, 25 bp, Artificial
  Probe
ttagcgtaggaaatgagaccaacca

SEQ ID NO: 167010 - DNA, 25 bp, Artificial
  Probe
taactatgttctttactttcacagg

SEQ ID NO: 167011 - DNA, 25 bp, Artificial
  Probe
accatctgcctttggaaatcaaatt

SEQ ID NO: 167012 - DNA, 25 bp, Artificial
  Probe
aaccatctgcctttggaaatcaaat

SEQ ID NO: 167013 - DNA, 25 bp, Artificial
  Probe
gacaataggattaattgacggtggg

SEQ ID NO: 167014 - DNA, 25 bp, Artificial
  Probe
acacgtctgtcaactttagatgtca

SEQ ID NO: 167015 - DNA, 25 bp, Artificial
  Probe
acaataggattaattgacggtggga

SEQ ID NO: 167016 - DNA, 25 bp, Artificial
  Probe
attgtgtacaatcatgagtccaaca

SEQ ID NO: 167017 - DNA, 25 bp, Artificial
  Probe
ctaactggattgtcctatgtgtctt

SEQ ID NO: 167018 - DNA, 25 bp, Artificial
  Probe
cctaactggattgtcctatgtgtct

SEQ ID NO: 167019 - DNA, 25 bp, Artificial
  Probe
tcctaactggattgtcctatgtgtc

SEQ ID NO: 167020 - DNA, 25 bp, Artificial
  Probe
ctcctaactggattgtcctatgtgt

SEQ ID NO: 167021 - DNA, 25 bp, Artificial
  Probe
ctcctcctaactggattgtcctatg

SEQ ID NO: 167022 - DNA, 25 bp, Artificial
  Probe
gattgtcctatgtgtctttgcttct

SEQ ID NO: 167023 - DNA, 25 bp, Artificial
  Probe
attgtcctatgtgtctttgcttctg

SEQ ID NO: 167024 - DNA, 25 bp, Artificial
  Probe
cctcctaactggattgtcctatgtg

SEQ ID NO: 167025 - DNA, 25 bp, Artificial
  Probe
tcctcctaactggattgtcctatgt

SEQ ID NO: 167026 - DNA, 25 bp, Artificial
  Probe
aacctttgaaagagcactacaagtt

SEQ ID NO: 167027 - DNA, 25 bp, Artificial
  Probe
aaacctttgaaagagcactacaagt

SEQ ID NO: 167028 - DNA, 25 bp, Artificial
  Probe
ttgtcctatgtgtctttgcttctgt

SEQ ID NO: 167029 - DNA, 25 bp, Artificial
  Probe
taactggattgtcctatgtgtcttt

SEQ ID NO: 167030 - DNA, 25 bp, Artificial
  Probe
acctttgaaagagcactacaagttg

SEQ ID NO: 167031 - DNA, 25 bp, Artificial
  Probe
aactggattgtcctatgtgtctttg

SEQ ID NO: 167032 - DNA, 25 bp, Artificial
  Probe
caactggagaactactgcaactagg

SEQ ID NO: 167033 - DNA, 25 bp, Artificial
  Probe
ctttgaaagagcactacaagttgtg

SEQ ID NO: 167034 - DNA, 25 bp, Artificial
  Probe
gctcctcctaactggattgtcctat

SEQ ID NO: 167035 - DNA, 25 bp, Artificial
  Probe
cctttgaaagagcactacaagttgt

SEQ ID NO: 167036 - DNA, 25 bp, Artificial
  Probe
ggatggtaacaggatgtgtaggttt

SEQ ID NO: 167037 - DNA, 25 bp, Artificial
  Probe
ggagtgagaatccttccttaagtct

SEQ ID NO: 167038 - DNA, 25 bp, Artificial
  Probe
tgtcctatgtgtctttgcttctgtg

SEQ ID NO: 167039 - DNA, 25 bp, Artificial
  Probe
tttgaaagagcactacaagttgtgt

SEQ ID NO: 167040 - DNA, 25 bp, Artificial
  Probe
ggattgtcctatgtgtctttgcttc

SEQ ID NO: 167041 - DNA, 25 bp, Artificial
  Probe
ttgaaagagcactacaagttgtgtg

SEQ ID NO: 167042 - DNA, 25 bp, Artificial
  Probe
gaaagagcactacaagttgtgtgta

SEQ ID NO: 167043 - DNA, 25 bp, Artificial
  Probe
tggattgtcctatgtgtctttgctt

SEQ ID NO: 167044 - DNA, 25 bp, Artificial
  Probe
aaagagcactacaagttgtgtgtac

SEQ ID NO: 167045 - DNA, 25 bp, Artificial
  Probe
ttagcaggggataaagtgagagaaa

SEQ ID NO: 167046 - DNA, 25 bp, Artificial
  Probe
tagcaggggataaagtgagagaaag

SEQ ID NO: 167047 - DNA, 25 bp, Artificial
  Probe
atatgtccattcatgaccagtgact

SEQ ID NO: 167048 - DNA, 25 bp, Artificial
  Probe
catatgtccattcatgaccagtgac

SEQ ID NO: 167049 - DNA, 25 bp, Artificial
  Probe
ctggattgtcctatgtgtctttgct

SEQ ID NO: 167050 - DNA, 25 bp, Artificial
  Probe
tatgtccattcatgaccagtgactt

SEQ ID NO: 167051 - DNA, 25 bp, Artificial
  Probe
tgaataaaacctttgaaagagcact

SEQ ID NO: 167052 - DNA, 25 bp, Artificial
  Probe
tagctgccaagaaggagtgagaatc

SEQ ID NO: 167053 - DNA, 25 bp, Artificial
  Probe
aaaacctttgaaagagcactacaag

SEQ ID NO: 167054 - DNA, 25 bp, Artificial
  Probe
cttagcaggggataaagtgagagaa

SEQ ID NO: 167055 - DNA, 25 bp, Artificial
  Probe
tgagggatggtaacaggatgtgtag

SEQ ID NO: 167056 - DNA, 25 bp, Artificial
  Probe
ataaaacctttgaaagagcactaca

SEQ ID NO: 167057 - DNA, 25 bp, Artificial
  Probe
actggattgtcctatgtgtctttgc

SEQ ID NO: 167058 - DNA, 25 bp, Artificial
  Probe
tgaaagagcactacaagttgtgtgt

SEQ ID NO: 167059 - DNA, 25 bp, Artificial
  Probe
taaaacctttgaaagagcactacaa

SEQ ID NO: 167060 - DNA, 25 bp, Artificial
  Probe
gatggtaacaggatgtgtaggtttt

SEQ ID NO: 167061 - DNA, 25 bp, Artificial
  Probe
ctgagggatggtaacaggatgtgta

SEQ ID NO: 167062 - DNA, 25 bp, Artificial
  Probe
cactggatactgtcaagaggtaatt

SEQ ID NO: 167063 - DNA, 25 bp, Artificial
  Probe
actggatactgtcaagaggtaattc

SEQ ID NO: 167064 - DNA, 25 bp, Artificial
  Probe
ctggatactgtcaagaggtaattcg

SEQ ID NO: 167065 - DNA, 25 bp, Artificial
  Probe
gttccttacaatgtgtcacttgaag

SEQ ID NO: 167066 - DNA, 25 bp, Artificial
  Probe
ctggtgatgtgctagataggaagaa

SEQ ID NO: 167067 - DNA, 25 bp, Artificial
  Probe
gcactggatactgtcaagaggtaat

SEQ ID NO: 167068 - DNA, 25 bp, Artificial
  Probe
ggttccttacaatgtgtcacttgaa

SEQ ID NO: 167069 - DNA, 25 bp, Artificial
  Probe
tggatactgtcaagaggtaattcgc

SEQ ID NO: 167070 - DNA, 25 bp, Artificial
  Probe
cttacaatgtgtcacttgaaggcaa

SEQ ID NO: 167071 - DNA, 25 bp, Artificial
  Probe
aggttccttacaatgtgtcacttga

SEQ ID NO: 167072 - DNA, 25 bp, Artificial
  Probe
caggttccttacaatgtgtcacttg

SEQ ID NO: 167073 - DNA, 25 bp, Artificial
  Probe
ttacaatgtgtcacttgaaggcaac

SEQ ID NO: 167074 - DNA, 25 bp, Artificial
  Probe
ggatactgtcaagaggtaattcgcc

SEQ ID NO: 167075 - DNA, 25 bp, Artificial
  Probe
ggtgatgtgctagataggaagaaag

SEQ ID NO: 167076 - DNA, 25 bp, Artificial
  Probe
gctcgttcctttcctgttatgatac

SEQ ID NO: 167077 - DNA, 25 bp, Artificial
  Probe
ggactttgagggacatttcattaaa

SEQ ID NO: 167078 - DNA, 25 bp, Artificial
  Probe
tggtgatgtgctagataggaagaaa

SEQ ID NO: 167079 - DNA, 25 bp, Artificial
  Probe
gggactttgagggacatttcattaa

SEQ ID NO: 167080 - DNA, 25 bp, Artificial
  Probe
ctgatgggtttgtcttgaagaatac

SEQ ID NO: 167081 - DNA, 25 bp, Artificial
  Probe
acactgtcataaatcactacaacct

SEQ ID NO: 167082 - DNA, 25 bp, Artificial
  Probe
tcgttcctttcctgttatgatacat

SEQ ID NO: 167083 - DNA, 25 bp, Artificial
  Probe
cactgtcataaatcactacaacctg

SEQ ID NO: 167084 - DNA, 25 bp, Artificial
  Probe
cctgatgggtttgtcttgaagaata

SEQ ID NO: 167085 - DNA, 25 bp, Artificial
  Probe
ctcgttcctttcctgttatgataca

SEQ ID NO: 167086 - DNA, 25 bp, Artificial
  Probe
actgtcataaatcactacaacctgg

SEQ ID NO: 167087 - DNA, 25 bp, Artificial
  Probe
tttagagattactcatttacggtgc

SEQ ID NO: 167088 - DNA, 25 bp, Artificial
  Probe
tcctttcctgttatgatacatttgc

SEQ ID NO: 167089 - DNA, 25 bp, Artificial
  Probe
cagtgggcaaagtgaaatgtaattt

SEQ ID NO: 167090 - DNA, 25 bp, Artificial
  Probe
cgttcctttcctgttatgatacatt

SEQ ID NO: 167091 - DNA, 25 bp, Artificial
  Probe
agggactttgagggacatttcatta

SEQ ID NO: 167092 - DNA, 25 bp, Artificial
  Probe
tacaatgtgtcacttgaaggcaaca

SEQ ID NO: 167093 - DNA, 25 bp, Artificial
  Probe
tacactgtcataaatcactacaacc

SEQ ID NO: 167094 - DNA, 25 bp, Artificial
  Probe
ggctcgttcctttcctgttatgata

SEQ ID NO: 167095 - DNA, 25 bp, Artificial
  Probe
ccagtgggcaaagtgaaatgtaatt

SEQ ID NO: 167096 - DNA, 25 bp, Artificial
  Probe
ctgtcataaatcactacaacctggc

SEQ ID NO: 167097 - DNA, 25 bp, Artificial
  Probe
gctggtgatgtgctagataggaaga

SEQ ID NO: 167098 - DNA, 25 bp, Artificial
  Probe
aagggactttgagggacatttcatt

SEQ ID NO: 167099 - DNA, 25 bp, Artificial
  Probe
gcaggttccttacaatgtgtcactt

SEQ ID NO: 167100 - DNA, 25 bp, Artificial
  Probe
tgctggtgatgtgctagataggaag

SEQ ID NO: 167101 - DNA, 25 bp, Artificial
  Probe
ctgctggtgatgtgctagataggaa

SEQ ID NO: 167102 - DNA, 25 bp, Artificial
  Probe
gtttgtcttgaagaatacccagtgc

SEQ ID NO: 167103 - DNA, 25 bp, Artificial
  Probe
cgcactggatactgtcaagaggtaa

SEQ ID NO: 167104 - DNA, 25 bp, Artificial
  Probe
gactttgagggacatttcattaaat

SEQ ID NO: 167105 - DNA, 25 bp, Artificial
  Probe
tgatgggtttgtcttgaagaatacc

SEQ ID NO: 167106 - DNA, 25 bp, Artificial
  Probe
gttatgatacatttgcacgtacagc

SEQ ID NO: 167107 - DNA, 25 bp, Artificial
  Probe
caaaatcctccccatcaaggagctt

SEQ ID NO: 167108 - DNA, 25 bp, Artificial
  Probe
ggacaaaatcctccccatcaaggag

SEQ ID NO: 167109 - DNA, 25 bp, Artificial
  Probe
cttgctaagtgttgagtgactacta

SEQ ID NO: 167110 - DNA, 25 bp, Artificial
  Probe
tgctaagtgttgagtgactactatt

SEQ ID NO: 167111 - DNA, 25 bp, Artificial
  Probe
ttgctaagtgttgagtgactactat

SEQ ID NO: 167112 - DNA, 25 bp, Artificial
  Probe
gcttgctaagtgttgagtgactact

SEQ ID NO: 167113 - DNA, 25 bp, Artificial
  Probe
aagtgttgagtgactactatttggg

SEQ ID NO: 167114 - DNA, 25 bp, Artificial
  Probe
atattgtagcaactccgaaatggtc

SEQ ID NO: 167115 - DNA, 25 bp, Artificial
  Probe
ctatattgttgcctaccctacacat

SEQ ID NO: 167116 - DNA, 25 bp, Artificial
  Probe
atattgttgcctaccctacacattt

SEQ ID NO: 167117 - DNA, 25 bp, Artificial
  Probe
tatattgttgcctaccctacacatt

SEQ ID NO: 167118 - DNA, 25 bp, Artificial
  Probe
gctaagtgttgagtgactactattt

SEQ ID NO: 167119 - DNA, 25 bp, Artificial
  Probe
taagtgttgagtgactactatttgg

SEQ ID NO: 167120 - DNA, 25 bp, Artificial
  Probe
cctatattgttgcctaccctacaca

SEQ ID NO: 167121 - DNA, 25 bp, Artificial
  Probe
tattgtagcaactccgaaatggtca

SEQ ID NO: 167122 - DNA, 25 bp, Artificial
  Probe
tgtgtgtgtgtgtgtgtgatgtaac

SEQ ID NO: 167123 - DNA, 25 bp, Artificial
  Probe
gtgtgtgtgtgtgtgtgtgatgtaa

SEQ ID NO: 167124 - DNA, 25 bp, Artificial
  Probe
aatattgtagcaactccgaaatggt

SEQ ID NO: 167125 - DNA, 25 bp, Artificial
  Probe
ggcttgctaagtgttgagtgactac

SEQ ID NO: 167126 - DNA, 25 bp, Artificial
  Probe
ccctatattgttgcctaccctacac

SEQ ID NO: 167127 - DNA, 25 bp, Artificial
  Probe
agtgttgagtgactactatttgggc

SEQ ID NO: 167128 - DNA, 25 bp, Artificial
  Probe
tgtgtgtgtgtgtgtgatgtaacag

SEQ ID NO: 167129 - DNA, 25 bp, Artificial
  Probe
tggcttgctaagtgttgagtgacta

SEQ ID NO: 167130 - DNA, 25 bp, Artificial
  Probe
attgtagcaactccgaaatggtcat

SEQ ID NO: 167131 - DNA, 25 bp, Artificial
  Probe
tgtgtgtgtgtgtgtgtgtgatgta

SEQ ID NO: 167132 - DNA, 25 bp, Artificial
  Probe
ttagcaatggaagagcaggaaggag

SEQ ID NO: 167133 - DNA, 25 bp, Artificial
  Probe
ctaagtgttgagtgactactatttg

SEQ ID NO: 167134 - DNA, 25 bp, Artificial
  Probe
gtgtgtgtgtgtgtgtgatgtaaca

SEQ ID NO: 167135 - DNA, 25 bp, Artificial
  Probe
cttagcaatggaagagcaggaagga

SEQ ID NO: 167136 - DNA, 25 bp, Artificial
  Probe
ttgtagcaactccgaaatggtcatt

SEQ ID NO: 167137 - DNA, 25 bp, Artificial
  Probe
tgccctatattgttgcctaccctac

SEQ ID NO: 167138 - DNA, 25 bp, Artificial
  Probe
gtgccctatattgttgcctacccta

SEQ ID NO: 167139 - DNA, 25 bp, Artificial
  Probe
gttgcctaccctacacattttcttc

SEQ ID NO: 167140 - DNA, 25 bp, Artificial
  Probe
tattgttgcctaccctacacatttt

SEQ ID NO: 167141 - DNA, 25 bp, Artificial
  Probe
gaagaggtggtgccctatattgttg

SEQ ID NO: 167142 - DNA, 25 bp, Artificial
  Probe
agaagaggtggtgccctatattgtt

SEQ ID NO: 167143 - DNA, 25 bp, Artificial
  Probe
ctaccctacacattttcttccccaa

SEQ ID NO: 167144 - DNA, 25 bp, Artificial
  Probe
ctcagaagcacccatcttaaagcac

SEQ ID NO: 167145 - DNA, 25 bp, Artificial
  Probe
taagaggcttagcaatggaagagca

SEQ ID NO: 167146 - DNA, 25 bp, Artificial
  Probe
tgtagcaactccgaaatggtcattt

SEQ ID NO: 167147 - DNA, 25 bp, Artificial
  Probe
gccctatattgttgcctaccctaca

SEQ ID NO: 167148 - DNA, 25 bp, Artificial
  Probe
tccctcagaagcacccatcttaaag

SEQ ID NO: 167149 - DNA, 25 bp, Artificial
  Probe
ctccctcagaagcacccatcttaaa

SEQ ID NO: 167150 - DNA, 25 bp, Artificial
  Probe
taccctacacattttcttccccaac

SEQ ID NO: 167151 - DNA, 25 bp, Artificial
  Probe
attgttgcctaccctacacattttc

SEQ ID NO: 167152 - DNA, 25 bp, Artificial
  Probe
gagaagaggtggtgccctatattgt

SEQ ID NO: 167153 - DNA, 25 bp, Artificial
  Probe
attttcttccccaacccttcctaag

SEQ ID NO: 167154 - DNA, 25 bp, Artificial
  Probe
ggatctggaagagtcaaactatgag

SEQ ID NO: 167155 - DNA, 25 bp, Artificial
  Probe
gatctggaagagtcaaactatgagc

SEQ ID NO: 167156 - DNA, 25 bp, Artificial
  Probe
gggatctggaagagtcaaactatga

SEQ ID NO: 167157 - DNA, 25 bp, Artificial
  Probe
aacctgacaactgacaatgccaatg

SEQ ID NO: 167158 - DNA, 25 bp, Artificial
  Probe
caacctgacaactgacaatgccaat

SEQ ID NO: 167159 - DNA, 25 bp, Artificial
  Probe
atctggaagagtcaaactatgagct

SEQ ID NO: 167160 - DNA, 25 bp, Artificial
  Probe
tacagcaaatactacaaaaccatcg

SEQ ID NO: 167161 - DNA, 25 bp, Artificial
  Probe
ggactacagcaaatactacaaaacc

SEQ ID NO: 167162 - DNA, 25 bp, Artificial
  Probe
gggactacagcaaatactacaaaac

SEQ ID NO: 167163 - DNA, 25 bp, Artificial
  Probe
gactacagcaaatactacaaaacca

SEQ ID NO: 167164 - DNA, 25 bp, Artificial
  Probe
tctggaagagtcaaactatgagctg

SEQ ID NO: 167165 - DNA, 25 bp, Artificial
  Probe
cgggatctggaagagtcaaactatg

SEQ ID NO: 167166 - DNA, 25 bp, Artificial
  Probe
cgggactacagcaaatactacaaaa

SEQ ID NO: 167167 - DNA, 25 bp, Artificial
  Probe
cttctctctggaaatgaaaaggtga

SEQ ID NO: 167168 - DNA, 25 bp, Artificial
  Probe
gtcaaactatgagctggagggtaaa

SEQ ID NO: 167169 - DNA, 25 bp, Artificial
  Probe
actacagcaaatactacaaaaccat

SEQ ID NO: 167170 - DNA, 25 bp, Artificial
  Probe
ttctctctggaaatgaaaaggtgac

SEQ ID NO: 167171 - DNA, 25 bp, Artificial
  Probe
taaaatcaaggagtggtacgagaag

SEQ ID NO: 167172 - DNA, 25 bp, Artificial
  Probe
gtaaaatcaaggagtggtacgagaa

SEQ ID NO: 167173 - DNA, 25 bp, Artificial
  Probe
ctacagcaaatactacaaaaccatc

SEQ ID NO: 167174 - DNA, 25 bp, Artificial
  Probe
gaagagtcaaactatgagctggagg

SEQ ID NO: 167175 - DNA, 25 bp, Artificial
  Probe
ggaagagtcaaactatgagctggag

SEQ ID NO: 167176 - DNA, 25 bp, Artificial
  Probe
ctggaagagtcaaactatgagctgg

SEQ ID NO: 167177 - DNA, 25 bp, Artificial
  Probe
agtcaaactatgagctggagggtaa

SEQ ID NO: 167178 - DNA, 25 bp, Artificial
  Probe
aaactatgagctggagggtaaaatc

SEQ ID NO: 167179 - DNA, 25 bp, Artificial
  Probe
atactacaaaaccatcgaagacctt

SEQ ID NO: 167180 - DNA, 25 bp, Artificial
  Probe
aatactacaaaaccatcgaagacct

SEQ ID NO: 167181 - DNA, 25 bp, Artificial
  Probe
actacaaaaccatcgaagaccttaa

SEQ ID NO: 167182 - DNA, 25 bp, Artificial
  Probe
gcaaatactacaaaaccatcgaaga

SEQ ID NO: 167183 - DNA, 25 bp, Artificial
  Probe
agcaaatactacaaaaccatcgaag

SEQ ID NO: 167184 - DNA, 25 bp, Artificial
  Probe
cagcaaatactacaaaaccatcgaa

SEQ ID NO: 167185 - DNA, 25 bp, Artificial
  Probe
tggaagagtcaaactatgagctgga

SEQ ID NO: 167186 - DNA, 25 bp, Artificial
  Probe
caaactatgagctggagggtaaaat

SEQ ID NO: 167187 - DNA, 25 bp, Artificial
  Probe
tactacaaaaccatcgaagacctta

SEQ ID NO: 167188 - DNA, 25 bp, Artificial
  Probe
ggtaaaatcaaggagtggtacgaga

SEQ ID NO: 167189 - DNA, 25 bp, Artificial
  Probe
tacaaaaccatcgaagaccttaaag

SEQ ID NO: 167190 - DNA, 25 bp, Artificial
  Probe
ctacaaaaccatcgaagaccttaaa

SEQ ID NO: 167191 - DNA, 25 bp, Artificial
  Probe
aaatactacaaaaccatcgaagacc

SEQ ID NO: 167192 - DNA, 25 bp, Artificial
  Probe
aaatcaaggagtggtacgagaagca

SEQ ID NO: 167193 - DNA, 25 bp, Artificial
  Probe
tctctctggaaatgaaaaggtgacc

SEQ ID NO: 167194 - DNA, 25 bp, Artificial
  Probe
acagcaaatactacaaaaccatcga

SEQ ID NO: 167195 - DNA, 25 bp, Artificial
  Probe
ccgggactacagcaaatactacaaa

SEQ ID NO: 167196 - DNA, 25 bp, Artificial
  Probe
gagtcaaactatgagctggagggta

SEQ ID NO: 167197 - DNA, 25 bp, Artificial
  Probe
tggagggtaaaatcaaggagtggta

SEQ ID NO: 167198 - DNA, 25 bp, Artificial
  Probe
aatcaaggagtggtacgagaagcac

SEQ ID NO: 167199 - DNA, 25 bp, Artificial
  Probe
ttacttcttgtcacattgttatgcc

SEQ ID NO: 167200 - DNA, 25 bp, Artificial
  Probe
tacttcttgtcacattgttatgcca

SEQ ID NO: 167201 - DNA, 25 bp, Artificial
  Probe
acttcttgtcacattgttatgccaa

SEQ ID NO: 167202 - DNA, 25 bp, Artificial
  Probe
gcactctaacttatgtgaactgaga

SEQ ID NO: 167203 - DNA, 25 bp, Artificial
  Probe
aatgcttgatattgtgaaaggtgag

SEQ ID NO: 167204 - DNA, 25 bp, Artificial
  Probe
gcttgatattgtgaaaggtgagatt

SEQ ID NO: 167205 - DNA, 25 bp, Artificial
  Probe
tgcttgatattgtgaaaggtgagat

SEQ ID NO: 167206 - DNA, 25 bp, Artificial
  Probe
atgcttgatattgtgaaaggtgaga

SEQ ID NO: 167207 - DNA, 25 bp, Artificial
  Probe
cttcttgtcacattgttatgccaat

SEQ ID NO: 167208 - DNA, 25 bp, Artificial
  Probe
aaatgcttgatattgtgaaaggtga

SEQ ID NO: 167209 - DNA, 25 bp, Artificial
  Probe
ttcttgtcacattgttatgccaata

SEQ ID NO: 167210 - DNA, 25 bp, Artificial
  Probe
tcttgtcacattgttatgccaatat

SEQ ID NO: 167211 - DNA, 25 bp, Artificial
  Probe
gtgagcaaatgcgaatacagtaaat

SEQ ID NO: 167212 - DNA, 25 bp, Artificial
  Probe
tgagattcttcaccaacatttcatt

SEQ ID NO: 167213 - DNA, 25 bp, Artificial
  Probe
tgagcaaatgcgaatacagtaaata

SEQ ID NO: 167214 - DNA, 25 bp, Artificial
  Probe
gagattcttcaccaacatttcattt

SEQ ID NO: 167215 - DNA, 25 bp, Artificial
  Probe
agcaattattgaaacggtgtaatgt

SEQ ID NO: 167216 - DNA, 25 bp, Artificial
  Probe
gcaattattgaaacggtgtaatgtt

SEQ ID NO: 167217 - DNA, 25 bp, Artificial
  Probe
atgcactctaacttatgtgaactga

SEQ ID NO: 167218 - DNA, 25 bp, Artificial
  Probe
tttacttcttgtcacattgttatgc

SEQ ID NO: 167219 - DNA, 25 bp, Artificial
  Probe
cttcaccaacatttcatttacttct

SEQ ID NO: 167220 - DNA, 25 bp, Artificial
  Probe
tcttcaccaacatttcatttacttc

SEQ ID NO: 167221 - DNA, 25 bp, Artificial
  Probe
tgcactctaacttatgtgaactgag

SEQ ID NO: 167222 - DNA, 25 bp, Artificial
  Probe
aatgcactctaacttatgtgaactg

SEQ ID NO: 167223 - DNA, 25 bp, Artificial
  Probe
tgatattgtgaaaggtgagattctt

SEQ ID NO: 167224 - DNA, 25 bp, Artificial
  Probe
ttgatattgtgaaaggtgagattct

SEQ ID NO: 167225 - DNA, 25 bp, Artificial
  Probe
aagcaattattgaaacggtgtaatg

SEQ ID NO: 167226 - DNA, 25 bp, Artificial
  Probe
tcaccaacatttcatttacttcttg

SEQ ID NO: 167227 - DNA, 25 bp, Artificial
  Probe
cttgatattgtgaaaggtgagattc

SEQ ID NO: 167228 - DNA, 25 bp, Artificial
  Probe
aattattgaaacggtgtaatgttgt

SEQ ID NO: 167229 - DNA, 25 bp, Artificial
  Probe
caccaacatttcatttacttcttgt

SEQ ID NO: 167230 - DNA, 25 bp, Artificial
  Probe
ttcaccaacatttcatttacttctt

SEQ ID NO: 167231 - DNA, 25 bp, Artificial
  Probe
ttcttcaccaacatttcatttactt

SEQ ID NO: 167232 - DNA, 25 bp, Artificial
  Probe
gatattgtgaaaggtgagattcttc

SEQ ID NO: 167233 - DNA, 25 bp, Artificial
  Probe
aaagcaattattgaaacggtgtaat

SEQ ID NO: 167234 - DNA, 25 bp, Artificial
  Probe
gagcaaatgcgaatacagtaaatat

SEQ ID NO: 167235 - DNA, 25 bp, Artificial
  Probe
ccaacatttcatttacttcttgtca

SEQ ID NO: 167236 - DNA, 25 bp, Artificial
  Probe
cttgtcacattgttatgccaatata

SEQ ID NO: 167237 - DNA, 25 bp, Artificial
  Probe
ttcatttacttcttgtcacattgtt

SEQ ID NO: 167238 - DNA, 25 bp, Artificial
  Probe
tttcatttacttcttgtcacattgt

SEQ ID NO: 167239 - DNA, 25 bp, Artificial
  Probe
accaacatttcatttacttcttgtc

SEQ ID NO: 167240 - DNA, 25 bp, Artificial
  Probe
attcttcaccaacatttcatttact

SEQ ID NO: 167241 - DNA, 25 bp, Artificial
  Probe
ttattgaaacggtgtaatgttgtac

SEQ ID NO: 167242 - DNA, 25 bp, Artificial
  Probe
tgtgagcaaatgcgaatacagtaaa

SEQ ID NO: 167243 - DNA, 25 bp, Artificial
  Probe
gattcttcaccaacatttcatttac

SEQ ID NO: 167244 - DNA, 25 bp, Artificial
  Probe
cacccatttgctacaactatgagat

SEQ ID NO: 167245 - DNA, 25 bp, Artificial
  Probe
cgaactggatcacaaacacatattc

SEQ ID NO: 167246 - DNA, 25 bp, Artificial
  Probe
acgaactggatcacaaacacatatt

SEQ ID NO: 167247 - DNA, 25 bp, Artificial
  Probe
cactcaacagtcataaacaccaaga

SEQ ID NO: 167248 - DNA, 25 bp, Artificial
  Probe
tcactcaacagtcataaacaccaag

SEQ ID NO: 167249 - DNA, 25 bp, Artificial
  Probe
gtcactcaacagtcataaacaccaa

SEQ ID NO: 167250 - DNA, 25 bp, Artificial
  Probe
acccatttgctacaactatgagatc

SEQ ID NO: 167251 - DNA, 25 bp, Artificial
  Probe
gacgaactggatcacaaacacatat

SEQ ID NO: 167252 - DNA, 25 bp, Artificial
  Probe
aaacaaagacgaactggatcacaaa

SEQ ID NO: 167253 - DNA, 25 bp, Artificial
  Probe
cccatttgctacaactatgagatcc

SEQ ID NO: 167254 - DNA, 25 bp, Artificial
  Probe
gagaagtgggtttgatctgtttgaa

SEQ ID NO: 167255 - DNA, 25 bp, Artificial
  Probe
actcaacagtcataaacaccaagac

SEQ ID NO: 167256 - DNA, 25 bp, Artificial
  Probe
ccatagtaaacatctgttccacaac

SEQ ID NO: 167257 - DNA, 25 bp, Artificial
  Probe
accatagtaaacatctgttccacaa

SEQ ID NO: 167258 - DNA, 25 bp, Artificial
  Probe
gtttgatctgtttgaacaagaacca

SEQ ID NO: 167259 - DNA, 25 bp, Artificial
  Probe
agtaaacatctgttccacaacttca

SEQ ID NO: 167260 - DNA, 25 bp, Artificial
  Probe
agaagtgggtttgatctgtttgaac

SEQ ID NO: 167261 - DNA, 25 bp, Artificial
  Probe
caccatagtaaacatctgttccaca

SEQ ID NO: 167262 - DNA, 25 bp, Artificial
  Probe
ccatttgctacaactatgagatccg

SEQ ID NO: 167263 - DNA, 25 bp, Artificial
  Probe
tttgatctgtttgaacaagaaccag

SEQ ID NO: 167264 - DNA, 25 bp, Artificial
  Probe
gtaaacatctgttccacaacttcag

SEQ ID NO: 167265 - DNA, 25 bp, Artificial
  Probe
aacatctgttccacaacttcagcta

SEQ ID NO: 167266 - DNA, 25 bp, Artificial
  Probe
cggatagaatgctgcaccatagtaa

SEQ ID NO: 167267 - DNA, 25 bp, Artificial
  Probe
tagtaaacatctgttccacaacttc

SEQ ID NO: 167268 - DNA, 25 bp, Artificial
  Probe
catagtaaacatctgttccacaact

SEQ ID NO: 167269 - DNA, 25 bp, Artificial
  Probe
gggtttgatctgtttgaacaagaac

SEQ ID NO: 167270 - DNA, 25 bp, Artificial
  Probe
gaactggatcacaaacacatattcc

SEQ ID NO: 167271 - DNA, 25 bp, Artificial
  Probe
actggatcacaaacacatattcctt

SEQ ID NO: 167272 - DNA, 25 bp, Artificial
  Probe
aactggatcacaaacacatattcct

SEQ ID NO: 167273 - DNA, 25 bp, Artificial
  Probe
agacgaactggatcacaaacacata

SEQ ID NO: 167274 - DNA, 25 bp, Artificial
  Probe
aacaaagacgaactggatcacaaac

SEQ ID NO: 167275 - DNA, 25 bp, Artificial
  Probe
tgggtttgatctgtttgaacaagaa

SEQ ID NO: 167276 - DNA, 25 bp, Artificial
  Probe
ctcaacagtcataaacaccaagacc

SEQ ID NO: 167277 - DNA, 25 bp, Artificial
  Probe
ctggatcacaaacacatattccttt

SEQ ID NO: 167278 - DNA, 25 bp, Artificial
  Probe
gcaccatagtaaacatctgttccac

SEQ ID NO: 167279 - DNA, 25 bp, Artificial
  Probe
ccacccatttgctacaactatgaga

SEQ ID NO: 167280 - DNA, 25 bp, Artificial
  Probe
aagtgggtttgatctgtttgaacaa

SEQ ID NO: 167281 - DNA, 25 bp, Artificial
  Probe
caacagtcataaacaccaagacctg

SEQ ID NO: 167282 - DNA, 25 bp, Artificial
  Probe
tcaacagtcataaacaccaagacct

SEQ ID NO: 167283 - DNA, 25 bp, Artificial
  Probe
gatagaatgctgcaccatagtaaac

SEQ ID NO: 167284 - DNA, 25 bp, Artificial
  Probe
atagtaaacatctgttccacaactt

SEQ ID NO: 167285 - DNA, 25 bp, Artificial
  Probe
tagaatgctgcaccatagtaaacat

SEQ ID NO: 167286 - DNA, 25 bp, Artificial
  Probe
atagaatgctgcaccatagtaaaca

SEQ ID NO: 167287 - DNA, 25 bp, Artificial
  Probe
ggatagaatgctgcaccatagtaaa

SEQ ID NO: 167288 - DNA, 25 bp, Artificial
  Probe
gtggtcactcaacagtcataaacac

SEQ ID NO: 167289 - DNA, 25 bp, Artificial
  Probe
ccttcttctgctggttattgaacaa

SEQ ID NO: 167290 - DNA, 25 bp, Artificial
  Probe
aatggattggaagtgagaacaggtt

SEQ ID NO: 167291 - DNA, 25 bp, Artificial
  Probe
gacaatggattggaagtgagaacag

SEQ ID NO: 167292 - DNA, 25 bp, Artificial
  Probe
cagacaatggattggaagtgagaac

SEQ ID NO: 167293 - DNA, 25 bp, Artificial
  Probe
agacaatggattggaagtgagaaca

SEQ ID NO: 167294 - DNA, 25 bp, Artificial
  Probe
ttgagtcctttcgtagcagtattta

SEQ ID NO: 167295 - DNA, 25 bp, Artificial
  Probe
atttgagtcctttcgtagcagtatt

SEQ ID NO: 167296 - DNA, 25 bp, Artificial
  Probe
ttagcagacaatggattggaagtga

SEQ ID NO: 167297 - DNA, 25 bp, Artificial
  Probe
tgagtcctttcgtagcagtatttat

SEQ ID NO: 167298 - DNA, 25 bp, Artificial
  Probe
ttatgcccttactgtttgtagagac

SEQ ID NO: 167299 - DNA, 25 bp, Artificial
  Probe
tttgagtcctttcgtagcagtattt

SEQ ID NO: 167300 - DNA, 25 bp, Artificial
  Probe
attatgcccttactgtttgtagaga

SEQ ID NO: 167301 - DNA, 25 bp, Artificial
  Probe
gatttgagtcctttcgtagcagtat

SEQ ID NO: 167302 - DNA, 25 bp, Artificial
  Probe
acgtgtgttcttgatgtatactgta

SEQ ID NO: 167303 - DNA, 25 bp, Artificial
  Probe
cgtgtgttcttgatgtatactgtag

SEQ ID NO: 167304 - DNA, 25 bp, Artificial
  Probe
ttcttctgctggttattgaacaaag

SEQ ID NO: 167305 - DNA, 25 bp, Artificial
  Probe
cttcttctgctggttattgaacaaa

SEQ ID NO: 167306 - DNA, 25 bp, Artificial
  Probe
tagcagacaatggattggaagtgag

SEQ ID NO: 167307 - DNA, 25 bp, Artificial
  Probe
gagtcctttcgtagcagtatttatt

SEQ ID NO: 167308 - DNA, 25 bp, Artificial
  Probe
ttattgaacaaagcagttggttgag

SEQ ID NO: 167309 - DNA, 25 bp, Artificial
  Probe
gttattgaacaaagcagttggttga

SEQ ID NO: 167310 - DNA, 25 bp, Artificial
  Probe
agatttgagtcctttcgtagcagta

SEQ ID NO: 167311 - DNA, 25 bp, Artificial
  Probe
tattgaacaaagcagttggttgaga

SEQ ID NO: 167312 - DNA, 25 bp, Artificial
  Probe
gtgtgttcttgatgtatactgtagt

SEQ ID NO: 167313 - DNA, 25 bp, Artificial
  Probe
ttaggatttaggattagtgaacacg

SEQ ID NO: 167314 - DNA, 25 bp, Artificial
  Probe
caatggattggaagtgagaacaggt

SEQ ID NO: 167315 - DNA, 25 bp, Artificial
  Probe
acaatggattggaagtgagaacagg

SEQ ID NO: 167316 - DNA, 25 bp, Artificial
  Probe
tattatgcccttactgtttgtagag

SEQ ID NO: 167317 - DNA, 25 bp, Artificial
  Probe
ggttattgaacaaagcagttggttg

SEQ ID NO: 167318 - DNA, 25 bp, Artificial
  Probe
tttcccttcttctgctggttattga

SEQ ID NO: 167319 - DNA, 25 bp, Artificial
  Probe
tggttattgaacaaagcagttggtt

SEQ ID NO: 167320 - DNA, 25 bp, Artificial
  Probe
tatgcccttactgtttgtagagaca

SEQ ID NO: 167321 - DNA, 25 bp, Artificial
  Probe
ttcccttcttctgctggttattgaa

SEQ ID NO: 167322 - DNA, 25 bp, Artificial
  Probe
tttagcagacaatggattggaagtg

SEQ ID NO: 167323 - DNA, 25 bp, Artificial
  Probe
ttattatgcccttactgtttgtaga

SEQ ID NO: 167324 - DNA, 25 bp, Artificial
  Probe
atggattggaagtgagaacaggttt

SEQ ID NO: 167325 - DNA, 25 bp, Artificial
  Probe
gcagacaatggattggaagtgagaa

SEQ ID NO: 167326 - DNA, 25 bp, Artificial
  Probe
agtcctttcgtagcagtatttatta

SEQ ID NO: 167327 - DNA, 25 bp, Artificial
  Probe
tgtgttcttgatgtatactgtagtt

SEQ ID NO: 167328 - DNA, 25 bp, Artificial
  Probe
attgaacaaagcagttggttgagac

SEQ ID NO: 167329 - DNA, 25 bp, Artificial
  Probe
cagatttgagtcctttcgtagcagt

SEQ ID NO: 167330 - DNA, 25 bp, Artificial
  Probe
acagatttgagtcctttcgtagcag

SEQ ID NO: 167331 - DNA, 25 bp, Artificial
  Probe
taggatttaggattagtgaacacgt

SEQ ID NO: 167332 - DNA, 25 bp, Artificial
  Probe
tcccttcttctgctggttattgaac

SEQ ID NO: 167333 - DNA, 25 bp, Artificial
  Probe
tttattatgcccttactgtttgtag

SEQ ID NO: 167334 - DNA, 25 bp, Artificial
  Probe
gatgtgtgtactcggttctcttatg

SEQ ID NO: 167335 - DNA, 25 bp, Artificial
  Probe
agatgtgtgtactcggttctcttat

SEQ ID NO: 167336 - DNA, 25 bp, Artificial
  Probe
atgtgtgtactcggttctcttatgt

SEQ ID NO: 167337 - DNA, 25 bp, Artificial
  Probe
tgatgtcatgctgattctaaccaat

SEQ ID NO: 167338 - DNA, 25 bp, Artificial
  Probe
tgtgtgtactcggttctcttatgtt

SEQ ID NO: 167339 - DNA, 25 bp, Artificial
  Probe
ctgatgtcatgctgattctaaccaa

SEQ ID NO: 167340 - DNA, 25 bp, Artificial
  Probe
caataccatgaagaggaactcagac

SEQ ID NO: 167341 - DNA, 25 bp, Artificial
  Probe
aataccatgaagaggaactcagaca

SEQ ID NO: 167342 - DNA, 25 bp, Artificial
  Probe
ggtatgaatagtaacctgtcagagc

SEQ ID NO: 167343 - DNA, 25 bp, Artificial
  Probe
tatgaatagtaacctgtcagagctg

SEQ ID NO: 167344 - DNA, 25 bp, Artificial
  Probe
gtatgaatagtaacctgtcagagct

SEQ ID NO: 167345 - DNA, 25 bp, Artificial
  Probe
ataccatgaagaggaactcagacag

SEQ ID NO: 167346 - DNA, 25 bp, Artificial
  Probe
aagccaagagagatttccattagat

SEQ ID NO: 167347 - DNA, 25 bp, Artificial
  Probe
attctaaccaatcctaaacaaagcc

SEQ ID NO: 167348 - DNA, 25 bp, Artificial
  Probe
ccaataccatgaagaggaactcaga

SEQ ID NO: 167349 - DNA, 25 bp, Artificial
  Probe
atctgctgatgtcatgctgattcta

SEQ ID NO: 167350 - DNA, 25 bp, Artificial
  Probe
gaagccaagagagatttccattaga

SEQ ID NO: 167351 - DNA, 25 bp, Artificial
  Probe
agaagccaagagagatttccattag

SEQ ID NO: 167352 - DNA, 25 bp, Artificial
  Probe
ttctcttatgtttgtaaagggtgga

SEQ ID NO: 167353 - DNA, 25 bp, Artificial
  Probe
gttctcttatgtttgtaaagggtgg

SEQ ID NO: 167354 - DNA, 25 bp, Artificial
  Probe
ggttctcttatgtttgtaaagggtg

SEQ ID NO: 167355 - DNA, 25 bp, Artificial
  Probe
ctcggttctcttatgtttgtaaagg

SEQ ID NO: 167356 - DNA, 25 bp, Artificial
  Probe
gatgtcatgctgattctaaccaatc

SEQ ID NO: 167357 - DNA, 25 bp, Artificial
  Probe
agccaagagagatttccattagata

SEQ ID NO: 167358 - DNA, 25 bp, Artificial
  Probe
ctcttatgtttgtaaagggtggact

SEQ ID NO: 167359 - DNA, 25 bp, Artificial
  Probe
tctcttatgtttgtaaagggtggac

SEQ ID NO: 167360 - DNA, 25 bp, Artificial
  Probe
tcatgctgattctaaccaatcctaa

SEQ ID NO: 167361 - DNA, 25 bp, Artificial
  Probe
gtcatgctgattctaaccaatccta

SEQ ID NO: 167362 - DNA, 25 bp, Artificial
  Probe
aatccctatgaagaacactatgact

SEQ ID NO: 167363 - DNA, 25 bp, Artificial
  Probe
cagaagccaagagagatttccatta

SEQ ID NO: 167364 - DNA, 25 bp, Artificial
  Probe
ctgctgatgtcatgctgattctaac

SEQ ID NO: 167365 - DNA, 25 bp, Artificial
  Probe
tcttatgtttgtaaagggtggacta

SEQ ID NO: 167366 - DNA, 25 bp, Artificial
  Probe
ttctaaccaatcctaaacaaagccc

SEQ ID NO: 167367 - DNA, 25 bp, Artificial
  Probe
gccaagagagatttccattagatag

SEQ ID NO: 167368 - DNA, 25 bp, Artificial
  Probe
gaatccctatgaagaacactatgac

SEQ ID NO: 167369 - DNA, 25 bp, Artificial
  Probe
tcggttctcttatgtttgtaaaggg

SEQ ID NO: 167370 - DNA, 25 bp, Artificial
  Probe
actcggttctcttatgtttgtaaag

SEQ ID NO: 167371 - DNA, 25 bp, Artificial
  Probe
tccctatgaagaacactatgacttt

SEQ ID NO: 167372 - DNA, 25 bp, Artificial
  Probe
agaatccctatgaagaacactatga

SEQ ID NO: 167373 - DNA, 25 bp, Artificial
  Probe
tctgctgatgtcatgctgattctaa

SEQ ID NO: 167374 - DNA, 25 bp, Artificial
  Probe
cggttctcttatgtttgtaaagggt

SEQ ID NO: 167375 - DNA, 25 bp, Artificial
  Probe
atccctatgaagaacactatgactt

SEQ ID NO: 167376 - DNA, 25 bp, Artificial
  Probe
atgtcatgctgattctaaccaatcc

SEQ ID NO: 167377 - DNA, 25 bp, Artificial
  Probe
tatgtttgtaaagggtggactattc

SEQ ID NO: 167378 - DNA, 25 bp, Artificial
  Probe
tgattctagtaagaggtgggtatga

SEQ ID NO: 167379 - DNA, 25 bp, Artificial
  Probe
ttctatgttcctgatattgtgtgct

SEQ ID NO: 167380 - DNA, 25 bp, Artificial
  Probe
gttctatgttcctgatattgtgtgc

SEQ ID NO: 167381 - DNA, 25 bp, Artificial
  Probe
tctatgttcctgatattgtgtgctc

SEQ ID NO: 167382 - DNA, 25 bp, Artificial
  Probe
tgttctatgttcctgatattgtgtg

SEQ ID NO: 167383 - DNA, 25 bp, Artificial
  Probe
gtgttctatgttcctgatattgtgt

SEQ ID NO: 167384 - DNA, 25 bp, Artificial
  Probe
tgtgttctatgttcctgatattgtg

SEQ ID NO: 167385 - DNA, 25 bp, Artificial
  Probe
gtgtgttctatgttcctgatattgt

SEQ ID NO: 167386 - DNA, 25 bp, Artificial
  Probe
ttaatatgtgtgtgtgtgtgtgtgt

SEQ ID NO: 167387 - DNA, 25 bp, Artificial
  Probe
agtgtgttctatgttcctgatattg

SEQ ID NO: 167388 - DNA, 25 bp, Artificial
  Probe
caagtgtgttctatgttcctgatat

SEQ ID NO: 167389 - DNA, 25 bp, Artificial
  Probe
tatgttcctgatattgtgtgctcat

SEQ ID NO: 167390 - DNA, 25 bp, Artificial
  Probe
ctatgttcctgatattgtgtgctca

SEQ ID NO: 167391 - DNA, 25 bp, Artificial
  Probe
taatatgtgtgtgtgtgtgtgtgtg

SEQ ID NO: 167392 - DNA, 25 bp, Artificial
  Probe
aatggcttgaccttaacctaactga

SEQ ID NO: 167393 - DNA, 25 bp, Artificial
  Probe
acaagtgtgttctatgttcctgata

SEQ ID NO: 167394 - DNA, 25 bp, Artificial
  Probe
aagtgtgttctatgttcctgatatt

SEQ ID NO: 167395 - DNA, 25 bp, Artificial
  Probe
caatggcttgaccttaacctaactg

SEQ ID NO: 167396 - DNA, 25 bp, Artificial
  Probe
tgtactgttatcaatgacacaagtg

SEQ ID NO: 167397 - DNA, 25 bp, Artificial
  Probe
atggcttgaccttaacctaactgac

SEQ ID NO: 167398 - DNA, 25 bp, Artificial
  Probe
atgttcctgatattgtgtgctcatg

SEQ ID NO: 167399 - DNA, 25 bp, Artificial
  Probe
atgtactgttatcaatgacacaagt

SEQ ID NO: 167400 - DNA, 25 bp, Artificial
  Probe
tagaggcagagtcatatttccaaag

SEQ ID NO: 167401 - DNA, 25 bp, Artificial
  Probe
ttagaggcagagtcatatttccaaa

SEQ ID NO: 167402 - DNA, 25 bp, Artificial
  Probe
gttagaggcagagtcatatttccaa

SEQ ID NO: 167403 - DNA, 25 bp, Artificial
  Probe
gtactgttatcaatgacacaagtgt

SEQ ID NO: 167404 - DNA, 25 bp, Artificial
  Probe
ggtagttagaggcagagtcatattt

SEQ ID NO: 167405 - DNA, 25 bp, Artificial
  Probe
tgctaatgtactgttatcaatgaca

SEQ ID NO: 167406 - DNA, 25 bp, Artificial
  Probe
tttaatatgtgtgtgtgtgtgtgtg

SEQ ID NO: 167407 - DNA, 25 bp, Artificial
  Probe
tagttagaggcagagtcatatttcc

SEQ ID NO: 167408 - DNA, 25 bp, Artificial
  Probe
agttagaggcagagtcatatttcca

SEQ ID NO: 167409 - DNA, 25 bp, Artificial
  Probe
gctaatgtactgttatcaatgacac

SEQ ID NO: 167410 - DNA, 25 bp, Artificial
  Probe
gggtagttagaggcagagtcatatt

SEQ ID NO: 167411 - DNA, 25 bp, Artificial
  Probe
gatgaagggaaggacaagattctac

SEQ ID NO: 167412 - DNA, 25 bp, Artificial
  Probe
tactgttatcaatgacacaagtgtg

SEQ ID NO: 167413 - DNA, 25 bp, Artificial
  Probe
gtagttagaggcagagtcatatttc

SEQ ID NO: 167414 - DNA, 25 bp, Artificial
  Probe
ccaatggcttgaccttaacctaact

SEQ ID NO: 167415 - DNA, 25 bp, Artificial
  Probe
gaccaatggcttgaccttaacctaa

SEQ ID NO: 167416 - DNA, 25 bp, Artificial
  Probe
cacaagtgtgttctatgttcctgat

SEQ ID NO: 167417 - DNA, 25 bp, Artificial
  Probe
ttgctaatgtactgttatcaatgac

SEQ ID NO: 167418 - DNA, 25 bp, Artificial
  Probe
gcagagtcatatttccaaagtgatt

SEQ ID NO: 167419 - DNA, 25 bp, Artificial
  Probe
gaggcagagtcatatttccaaagtg

SEQ ID NO: 167420 - DNA, 25 bp, Artificial
  Probe
atatgtgtgtgtgtgtgtgtgtgtg

SEQ ID NO: 167421 - DNA, 25 bp, Artificial
  Probe
agaggcagagtcatatttccaaagt

SEQ ID NO: 167422 - DNA, 25 bp, Artificial
  Probe
agggtagttagaggcagagtcatat

SEQ ID NO: 167423 - DNA, 25 bp, Artificial
  Probe
aatatgtgtgtgtgtgtgtgtgtgt

SEQ ID NO: 167424 - DNA, 25 bp, Artificial
  Probe
tcttctgtgatctcagtgttgtatt

SEQ ID NO: 167425 - DNA, 25 bp, Artificial
  Probe
gtcttctgtgatctcagtgttgtat

SEQ ID NO: 167426 - DNA, 25 bp, Artificial
  Probe
tgtcttctgtgatctcagtgttgta

SEQ ID NO: 167427 - DNA, 25 bp, Artificial
  Probe
cgttgttacccagagcctttaatat

SEQ ID NO: 167428 - DNA, 25 bp, Artificial
  Probe
ttcaacttcatctgtgtttgtcttc

SEQ ID NO: 167429 - DNA, 25 bp, Artificial
  Probe
aacttcatctgtgtttgtcttctgt

SEQ ID NO: 167430 - DNA, 25 bp, Artificial
  Probe
gttgttgttggataacgaaattacg

SEQ ID NO: 167431 - DNA, 25 bp, Artificial
  Probe
acttcatctgtgtttgtcttctgtg

SEQ ID NO: 167432 - DNA, 25 bp, Artificial
  Probe
tttcaacttcatctgtgtttgtctt

SEQ ID NO: 167433 - DNA, 25 bp, Artificial
  Probe
caacttcatctgtgtttgtcttctg

SEQ ID NO: 167434 - DNA, 25 bp, Artificial
  Probe
tcaacttcatctgtgtttgtcttct

SEQ ID NO: 167435 - DNA, 25 bp, Artificial
  Probe
atttcaacttcatctgtgtttgtct

SEQ ID NO: 167436 - DNA, 25 bp, Artificial
  Probe
ttgtcttctgtgatctcagtgttgt

SEQ ID NO: 167437 - DNA, 25 bp, Artificial
  Probe
ccaactgttactgccaaattgaatt

SEQ ID NO: 167438 - DNA, 25 bp, Artificial
  Probe
tgtgatctcagtgttgtatttacct

SEQ ID NO: 167439 - DNA, 25 bp, Artificial
  Probe
ttcatctgtgtttgtcttctgtgat

SEQ ID NO: 167440 - DNA, 25 bp, Artificial
  Probe
gttgttacccagagcctttaatata

SEQ ID NO: 167441 - DNA, 25 bp, Artificial
  Probe
tcgttgttacccagagcctttaata

SEQ ID NO: 167442 - DNA, 25 bp, Artificial
  Probe
atctgtgtttgtcttctgtgatctc

SEQ ID NO: 167443 - DNA, 25 bp, Artificial
  Probe
tttgttgttgttggataacgaaatt

SEQ ID NO: 167444 - DNA, 25 bp, Artificial
  Probe
tagacgccatctggagtattcctaa

SEQ ID NO: 167445 - DNA, 25 bp, Artificial
  Probe
tgttgttgttggataacgaaattac

SEQ ID NO: 167446 - DNA, 25 bp, Artificial
  Probe
cttcatctgtgtttgtcttctgtga

SEQ ID NO: 167447 - DNA, 25 bp, Artificial
  Probe
tacagtagacgccatctggagtatt

SEQ ID NO: 167448 - DNA, 25 bp, Artificial
  Probe
catctgtgtttgtcttctgtgatct

SEQ ID NO: 167449 - DNA, 25 bp, Artificial
  Probe
aatttcaacttcatctgtgtttgtc

SEQ ID NO: 167450 - DNA, 25 bp, Artificial
  Probe
gtgatctcagtgttgtatttacctt

SEQ ID NO: 167451 - DNA, 25 bp, Artificial
  Probe
tcatctgtgtttgtcttctgtgatc

SEQ ID NO: 167452 - DNA, 25 bp, Artificial
  Probe
ttgttacccagagcctttaatataa

SEQ ID NO: 167453 - DNA, 25 bp, Artificial
  Probe
ttgttgttgttggataacgaaatta

SEQ ID NO: 167454 - DNA, 25 bp, Artificial
  Probe
tctgtgtttgtcttctgtgatctca

SEQ ID NO: 167455 - DNA, 25 bp, Artificial
  Probe
gataaggtttcatcttgcccaactg

SEQ ID NO: 167456 - DNA, 25 bp, Artificial
  Probe
ttcgttgttacccagagcctttaat

SEQ ID NO: 167457 - DNA, 25 bp, Artificial
  Probe
ctgtgatctcagtgttgtatttacc

SEQ ID NO: 167458 - DNA, 25 bp, Artificial
  Probe
tgttacccagagcctttaatataat

SEQ ID NO: 167459 - DNA, 25 bp, Artificial
  Probe
cttctgtgatctcagtgttgtattt

SEQ ID NO: 167460 - DNA, 25 bp, Artificial
  Probe
gtagacgccatctggagtattccta

SEQ ID NO: 167461 - DNA, 25 bp, Artificial
  Probe
cccaactgttactgccaaattgaat

SEQ ID NO: 167462 - DNA, 25 bp, Artificial
  Probe
tttgtcttctgtgatctcagtgttg

SEQ ID NO: 167463 - DNA, 25 bp, Artificial
  Probe
gtttgtcttctgtgatctcagtgtt

SEQ ID NO: 167464 - DNA, 25 bp, Artificial
  Probe
ctgtaaacgagtgcggatttgtaac

SEQ ID NO: 167465 - DNA, 25 bp, Artificial
  Probe
tctgtaaacgagtgcggatttgtaa

SEQ ID NO: 167466 - DNA, 25 bp, Artificial
  Probe
gtttcatcttgcccaactgttactg

SEQ ID NO: 167467 - DNA, 25 bp, Artificial
  Probe
tctgtgatctcagtgttgtatttac

SEQ ID NO: 167468 - DNA, 25 bp, Artificial
  Probe
ataaggtttcatcttgcccaactgt

SEQ ID NO: 167469 - DNA, 25 bp, Artificial
  Probe
ccaggtcaggaagatgctacaataa

SEQ ID NO: 167470 - DNA, 25 bp, Artificial
  Probe
caggtcaggaagatgctacaataaa

SEQ ID NO: 167471 - DNA, 25 bp, Artificial
  Probe
atcacagtcaagcctacctcttcaa

SEQ ID NO: 167472 - DNA, 25 bp, Artificial
  Probe
tcacagtcaagcctacctcttcaag

SEQ ID NO: 167473 - DNA, 25 bp, Artificial
  Probe
gatcacagtcaagcctacctcttca

SEQ ID NO: 167474 - DNA, 25 bp, Artificial
  Probe
tcaggaagatgctacaataaaagga

SEQ ID NO: 167475 - DNA, 25 bp, Artificial
  Probe
gtcaggaagatgctacaataaaagg

SEQ ID NO: 167476 - DNA, 25 bp, Artificial
  Probe
ggtcaggaagatgctacaataaaag

SEQ ID NO: 167477 - DNA, 25 bp, Artificial
  Probe
aggtcaggaagatgctacaataaaa

SEQ ID NO: 167478 - DNA, 25 bp, Artificial
  Probe
caggaagatgctacaataaaaggag

SEQ ID NO: 167479 - DNA, 25 bp, Artificial
  Probe
aggaagatgctacaataaaaggaga

SEQ ID NO: 167480 - DNA, 25 bp, Artificial
  Probe
cccaggtcaggaagatgctacaata

SEQ ID NO: 167481 - DNA, 25 bp, Artificial
  Probe
ggaagatgctacaataaaaggagaa

SEQ ID NO: 167482 - DNA, 25 bp, Artificial
  Probe
ccacaatcaacgccatcaactatgc

SEQ ID NO: 167483 - DNA, 25 bp, Artificial
  Probe
ctacaataaaaggagaaagccctgg

SEQ ID NO: 167484 - DNA, 25 bp, Artificial
  Probe
gaagatgctacaataaaaggagaaa

SEQ ID NO: 167485 - DNA, 25 bp, Artificial
  Probe
aagatgctacaataaaaggagaaag

SEQ ID NO: 167486 - DNA, 25 bp, Artificial
  Probe
cccacaatcaacgccatcaactatg

SEQ ID NO: 167487 - DNA, 25 bp, Artificial
  Probe
gatgctacaataaaaggagaaagcc

SEQ ID NO: 167488 - DNA, 25 bp, Artificial
  Probe
agatgctacaataaaaggagaaagc

SEQ ID NO: 167489 - DNA, 25 bp, Artificial
  Probe
ataaaaggagaaagccctgggattt

SEQ ID NO: 167490 - DNA, 25 bp, Artificial
  Probe
aataaaaggagaaagccctgggatt

SEQ ID NO: 167491 - DNA, 25 bp, Artificial
  Probe
aggaccgaacccagtgaaattcttc

SEQ ID NO: 167492 - DNA, 25 bp, Artificial
  Probe
atgctacaataaaaggagaaagccc

SEQ ID NO: 167493 - DNA, 25 bp, Artificial
  Probe
tgatcacagtcaagcctacctcttc

SEQ ID NO: 167494 - DNA, 25 bp, Artificial
  Probe
tacaataaaaggagaaagccctggg

SEQ ID NO: 167495 - DNA, 25 bp, Artificial
  Probe
accgaacccagtgaaattcttcaag

SEQ ID NO: 167496 - DNA, 25 bp, Artificial
  Probe
gaccgaacccagtgaaattcttcaa

SEQ ID NO: 167497 - DNA, 25 bp, Artificial
  Probe
gctacaataaaaggagaaagccctg

SEQ ID NO: 167498 - DNA, 25 bp, Artificial
  Probe
ctgatcacagtcaagcctacctctt

SEQ ID NO: 167499 - DNA, 25 bp, Artificial
  Probe
caataaaaggagaaagccctgggat

SEQ ID NO: 167500 - DNA, 25 bp, Artificial
  Probe
tgctacaataaaaggagaaagccct

SEQ ID NO: 167501 - DNA, 25 bp, Artificial
  Probe
caggaccgaacccagtgaaattctt

SEQ ID NO: 167502 - DNA, 25 bp, Artificial
  Probe
taaaaggagaaagccctgggatttg

SEQ ID NO: 167503 - DNA, 25 bp, Artificial
  Probe
aaggagaaagccctgggatttgttt

SEQ ID NO: 167504 - DNA, 25 bp, Artificial
  Probe
aaaggagaaagccctgggatttgtt

SEQ ID NO: 167505 - DNA, 25 bp, Artificial
  Probe
cgaacccagtgaaattcttcaaggg

SEQ ID NO: 167506 - DNA, 25 bp, Artificial
  Probe
ccgaacccagtgaaattcttcaagg

SEQ ID NO: 167507 - DNA, 25 bp, Artificial
  Probe
acaataaaaggagaaagccctggga

SEQ ID NO: 167508 - DNA, 25 bp, Artificial
  Probe
agtgaaattcttcaaggggctgatc

SEQ ID NO: 167509 - DNA, 25 bp, Artificial
  Probe
cagtgaaattcttcaaggggctgat

SEQ ID NO: 167510 - DNA, 25 bp, Artificial
  Probe
ggaccgaacccagtgaaattcttca

SEQ ID NO: 167511 - DNA, 25 bp, Artificial
  Probe
gaacccagtgaaattcttcaagggg

SEQ ID NO: 167512 - DNA, 25 bp, Artificial
  Probe
aggagaaagccctgggatttgtttt

SEQ ID NO: 167513 - DNA, 25 bp, Artificial
  Probe
aaaaggagaaagccctgggatttgt

SEQ ID NO: 167514 - DNA, 25 bp, Artificial
  Probe
tatcacaagatgaagattgagaggc

SEQ ID NO: 167515 - DNA, 25 bp, Artificial
  Probe
ctatcacaagatgaagattgagagg

SEQ ID NO: 167516 - DNA, 25 bp, Artificial
  Probe
cctatcacaagatgaagattgagag

SEQ ID NO: 167517 - DNA, 25 bp, Artificial
  Probe
aagacaaggaggaagtacagaggaa

SEQ ID NO: 167518 - DNA, 25 bp, Artificial
  Probe
catccctgcctaattgaaatcttat

SEQ ID NO: 167519 - DNA, 25 bp, Artificial
  Probe
ccctatcacaagatgaagattgaga

SEQ ID NO: 167520 - DNA, 25 bp, Artificial
  Probe
agacaaggaggaagtacagaggaag

SEQ ID NO: 167521 - DNA, 25 bp, Artificial
  Probe
gaagacaaggaggaagtacagagga

SEQ ID NO: 167522 - DNA, 25 bp, Artificial
  Probe
gccctatcacaagatgaagattgag

SEQ ID NO: 167523 - DNA, 25 bp, Artificial
  Probe
atccctgcctaattgaaatcttatt

SEQ ID NO: 167524 - DNA, 25 bp, Artificial
  Probe
tggaagacaaggaggaagtacagag

SEQ ID NO: 167525 - DNA, 25 bp, Artificial
  Probe
tccctgcctaattgaaatcttattt

SEQ ID NO: 167526 - DNA, 25 bp, Artificial
  Probe
gtggaagacaaggaggaagtacaga

SEQ ID NO: 167527 - DNA, 25 bp, Artificial
  Probe
ttatttaaacttcaagcccacacct

SEQ ID NO: 167528 - DNA, 25 bp, Artificial
  Probe
tcttatttaaacttcaagcccacac

SEQ ID NO: 167529 - DNA, 25 bp, Artificial
  Probe
cttatttaaacttcaagcccacacc

SEQ ID NO: 167530 - DNA, 25 bp, Artificial
  Probe
tatttaaacttcaagcccacacctc

SEQ ID NO: 167531 - DNA, 25 bp, Artificial
  Probe
atcttatttaaacttcaagcccaca

SEQ ID NO: 167532 - DNA, 25 bp, Artificial
  Probe
ggaagacaaggaggaagtacagagg

SEQ ID NO: 167533 - DNA, 25 bp, Artificial
  Probe
cgccctatcacaagatgaagattga

SEQ ID NO: 167534 - DNA, 25 bp, Artificial
  Probe
aatcttatttaaacttcaagcccac

SEQ ID NO: 167535 - DNA, 25 bp, Artificial
  Probe
ccctgcctaattgaaatcttattta

SEQ ID NO: 167536 - DNA, 25 bp, Artificial
  Probe
tctggtggaagacaaggaggaagta

SEQ ID NO: 167537 - DNA, 25 bp, Artificial
  Probe
gactccaaacagttcacgtattacc

SEQ ID NO: 167538 - DNA, 25 bp, Artificial
  Probe
gtattaccctctggtggaagacaag

SEQ ID NO: 167539 - DNA, 25 bp, Artificial
  Probe
ggtggaagacaaggaggaagtacag

SEQ ID NO: 167540 - DNA, 25 bp, Artificial
  Probe
ctggtggaagacaaggaggaagtac

SEQ ID NO: 167541 - DNA, 25 bp, Artificial
  Probe
cgactccaaacagttcacgtattac

SEQ ID NO: 167542 - DNA, 25 bp, Artificial
  Probe
gacaaggaggaagtacagaggaagc

SEQ ID NO: 167543 - DNA, 25 bp, Artificial
  Probe
caaacagttcacgtattaccctctg

SEQ ID NO: 167544 - DNA, 25 bp, Artificial
  Probe
atcacaagatgaagattgagaggcc

SEQ ID NO: 167545 - DNA, 25 bp, Artificial
  Probe
atttaaacttcaagcccacacctca

SEQ ID NO: 167546 - DNA, 25 bp, Artificial
  Probe
gcatccctgcctaattgaaatctta

SEQ ID NO: 167547 - DNA, 25 bp, Artificial
  Probe
ccaaacagttcacgtattaccctct

SEQ ID NO: 167548 - DNA, 25 bp, Artificial
  Probe
tccaaacagttcacgtattaccctc

SEQ ID NO: 167549 - DNA, 25 bp, Artificial
  Probe
ctccaaacagttcacgtattaccct

SEQ ID NO: 167550 - DNA, 25 bp, Artificial
  Probe
ccgccctatcacaagatgaagattg

SEQ ID NO: 167551 - DNA, 25 bp, Artificial
  Probe
aaatcttatttaaacttcaagccca

SEQ ID NO: 167552 - DNA, 25 bp, Artificial
  Probe
actccaaacagttcacgtattaccc

SEQ ID NO: 167553 - DNA, 25 bp, Artificial
  Probe
tttaaacttcaagcccacacctcag

SEQ ID NO: 167554 - DNA, 25 bp, Artificial
  Probe
accgccctatcacaagatgaagatt

SEQ ID NO: 167555 - DNA, 25 bp, Artificial
  Probe
tattaccctctggtggaagacaagg

SEQ ID NO: 167556 - DNA, 25 bp, Artificial
  Probe
aaacagttcacgtattaccctctgg

SEQ ID NO: 167557 - DNA, 25 bp, Artificial
  Probe
ccgactccaaacagttcacgtatta

SEQ ID NO: 167558 - DNA, 25 bp, Artificial
  Probe
tacagcatccctgcctaattgaaat

SEQ ID NO: 167559 - DNA, 25 bp, Artificial
  Probe
ctagctggttcatccttagtaatgg

SEQ ID NO: 167560 - DNA, 25 bp, Artificial
  Probe
cctagctggttcatccttagtaatg

SEQ ID NO: 167561 - DNA, 25 bp, Artificial
  Probe
gaggacatcaacggagagatttatg

SEQ ID NO: 167562 - DNA, 25 bp, Artificial
  Probe
tcaacggagagatttatgaggagta

SEQ ID NO: 167563 - DNA, 25 bp, Artificial
  Probe
caacggagagatttatgaggagtac

SEQ ID NO: 167564 - DNA, 25 bp, Artificial
  Probe
catcaacggagagatttatgaggag

SEQ ID NO: 167565 - DNA, 25 bp, Artificial
  Probe
agagatttatgaggagtacgaggag

SEQ ID NO: 167566 - DNA, 25 bp, Artificial
  Probe
gagagatttatgaggagtacgagga

SEQ ID NO: 167567 - DNA, 25 bp, Artificial
  Probe
tagctggttcatccttagtaatggc

SEQ ID NO: 167568 - DNA, 25 bp, Artificial
  Probe
atcaacggagagatttatgaggagt

SEQ ID NO: 167569 - DNA, 25 bp, Artificial
  Probe
gacatcaacggagagatttatgagg

SEQ ID NO: 167570 - DNA, 25 bp, Artificial
  Probe
ggacatcaacggagagatttatgag

SEQ ID NO: 167571 - DNA, 25 bp, Artificial
  Probe
gctcatacactgactgttatttgaa

SEQ ID NO: 167572 - DNA, 25 bp, Artificial
  Probe
acatcaacggagagatttatgagga

SEQ ID NO: 167573 - DNA, 25 bp, Artificial
  Probe
aggacatcaacggagagatttatga

SEQ ID NO: 167574 - DNA, 25 bp, Artificial
  Probe
tgaggacatcaacggagagatttat

SEQ ID NO: 167575 - DNA, 25 bp, Artificial
  Probe
gctcgctcatacactgactgttatt

SEQ ID NO: 167576 - DNA, 25 bp, Artificial
  Probe
ctcgctcatacactgactgttattt

SEQ ID NO: 167577 - DNA, 25 bp, Artificial
  Probe
cactgactgttatttgaactgttag

SEQ ID NO: 167578 - DNA, 25 bp, Artificial
  Probe
gatttatgaggagtacgaggaggag

SEQ ID NO: 167579 - DNA, 25 bp, Artificial
  Probe
gagatttatgaggagtacgaggagg

SEQ ID NO: 167580 - DNA, 25 bp, Artificial
  Probe
ggagagatttatgaggagtacgagg

SEQ ID NO: 167581 - DNA, 25 bp, Artificial
  Probe
actgttagtcttagatagttgggat

SEQ ID NO: 167582 - DNA, 25 bp, Artificial
  Probe
actgactgttatttgaactgttagt

SEQ ID NO: 167583 - DNA, 25 bp, Artificial
  Probe
cgctcatacactgactgttatttga

SEQ ID NO: 167584 - DNA, 25 bp, Artificial
  Probe
tcgctcatacactgactgttatttg

SEQ ID NO: 167585 - DNA, 25 bp, Artificial
  Probe
acactgactgttatttgaactgtta

SEQ ID NO: 167586 - DNA, 25 bp, Artificial
  Probe
tacactgactgttatttgaactgtt

SEQ ID NO: 167587 - DNA, 25 bp, Artificial
  Probe
aacggagagatttatgaggagtacg

SEQ ID NO: 167588 - DNA, 25 bp, Artificial
  Probe
ctgaggacatcaacggagagattta

SEQ ID NO: 167589 - DNA, 25 bp, Artificial
  Probe
ttatgaggagtacgaggaggaggat

SEQ ID NO: 167590 - DNA, 25 bp, Artificial
  Probe
agatttatgaggagtacgaggagga

SEQ ID NO: 167591 - DNA, 25 bp, Artificial
  Probe
cggagagatttatgaggagtacgag

SEQ ID NO: 167592 - DNA, 25 bp, Artificial
  Probe
atacactgactgttatttgaactgt

SEQ ID NO: 167593 - DNA, 25 bp, Artificial
  Probe
catacactgactgttatttgaactg

SEQ ID NO: 167594 - DNA, 25 bp, Artificial
  Probe
tcatacactgactgttatttgaact

SEQ ID NO: 167595 - DNA, 25 bp, Artificial
  Probe
ctcatacactgactgttatttgaac

SEQ ID NO: 167596 - DNA, 25 bp, Artificial
  Probe
ccctagctggttcatccttagtaat

SEQ ID NO: 167597 - DNA, 25 bp, Artificial
  Probe
acggagagatttatgaggagtacga

SEQ ID NO: 167598 - DNA, 25 bp, Artificial
  Probe
atttatgaggagtacgaggaggagg

SEQ ID NO: 167599 - DNA, 25 bp, Artificial
  Probe
tgaactgttagtcttagatagttgg

SEQ ID NO: 167600 - DNA, 25 bp, Artificial
  Probe
tatgaggagtacgaggaggaggatg

SEQ ID NO: 167601 - DNA, 25 bp, Artificial
  Probe
tagctcgctcatacactgactgtta

SEQ ID NO: 167602 - DNA, 25 bp, Artificial
  Probe
ctgttagtcttagatagttgggata

SEQ ID NO: 167603 - DNA, 25 bp, Artificial
  Probe
cattagctcgctcatacactgactg

SEQ ID NO: 167604 - DNA, 25 bp, Artificial
  Probe
ataatagactagccacactcactct

SEQ ID NO: 167605 - DNA, 25 bp, Artificial
  Probe
tataatagactagccacactcactc

SEQ ID NO: 167606 - DNA, 25 bp, Artificial
  Probe
gccacactcactctgaagaattatt

SEQ ID NO: 167607 - DNA, 25 bp, Artificial
  Probe
taatagactagccacactcactctg

SEQ ID NO: 167608 - DNA, 25 bp, Artificial
  Probe
tagccacactcactctgaagaatta

SEQ ID NO: 167609 - DNA, 25 bp, Artificial
  Probe
agccacactcactctgaagaattat

SEQ ID NO: 167610 - DNA, 25 bp, Artificial
  Probe
ttataatagactagccacactcact

SEQ ID NO: 167611 - DNA, 25 bp, Artificial
  Probe
aagtcatagtggatacctcggatct

SEQ ID NO: 167612 - DNA, 25 bp, Artificial
  Probe
taaagtcatagtggatacctcggat

SEQ ID NO: 167613 - DNA, 25 bp, Artificial
  Probe
ctagccacactcactctgaagaatt

SEQ ID NO: 167614 - DNA, 25 bp, Artificial
  Probe
ttaaagtcatagtggatacctcgga

SEQ ID NO: 167615 - DNA, 25 bp, Artificial
  Probe
atagactagccacactcactctgaa

SEQ ID NO: 167616 - DNA, 25 bp, Artificial
  Probe
aatagactagccacactcactctga

SEQ ID NO: 167617 - DNA, 25 bp, Artificial
  Probe
agtcatagtggatacctcggatctg

SEQ ID NO: 167618 - DNA, 25 bp, Artificial
  Probe
ccacactcactctgaagaattattt

SEQ ID NO: 167619 - DNA, 25 bp, Artificial
  Probe
tagactagccacactcactctgaag

SEQ ID NO: 167620 - DNA, 25 bp, Artificial
  Probe
aaagtcatagtggatacctcggatc

SEQ ID NO: 167621 - DNA, 25 bp, Artificial
  Probe
actagccacactcactctgaagaat

SEQ ID NO: 167622 - DNA, 25 bp, Artificial
  Probe
tttaaagtcatagtggatacctcgg

SEQ ID NO: 167623 - DNA, 25 bp, Artificial
  Probe
gataaatattgctgtcagagaaggt

SEQ ID NO: 167624 - DNA, 25 bp, Artificial
  Probe
agataaatattgctgtcagagaagg

SEQ ID NO: 167625 - DNA, 25 bp, Artificial
  Probe
taaatattgctgtcagagaaggttt

SEQ ID NO: 167626 - DNA, 25 bp, Artificial
  Probe
ataaatattgctgtcagagaaggtt

SEQ ID NO: 167627 - DNA, 25 bp, Artificial
  Probe
tttataatagactagccacactcac

SEQ ID NO: 167628 - DNA, 25 bp, Artificial
  Probe
aggtggattcagcagaaggtaactc

SEQ ID NO: 167629 - DNA, 25 bp, Artificial
  Probe
gaggtggattcagcagaaggtaact

SEQ ID NO: 167630 - DNA, 25 bp, Artificial
  Probe
gactagccacactcactctgaagaa

SEQ ID NO: 167631 - DNA, 25 bp, Artificial
  Probe
ggattcagcagaaggtaactcctct

SEQ ID NO: 167632 - DNA, 25 bp, Artificial
  Probe
gtcatagtggatacctcggatctgc

SEQ ID NO: 167633 - DNA, 25 bp, Artificial
  Probe
tccatcaacaagataaatattgctg

SEQ ID NO: 167634 - DNA, 25 bp, Artificial
  Probe
acaagataaatattgctgtcagaga

SEQ ID NO: 167635 - DNA, 25 bp, Artificial
  Probe
tggattcagcagaaggtaactcctc

SEQ ID NO: 167636 - DNA, 25 bp, Artificial
  Probe
ccatcaacaagataaatattgctgt

SEQ ID NO: 167637 - DNA, 25 bp, Artificial
  Probe
cacactcactctgaagaattattta

SEQ ID NO: 167638 - DNA, 25 bp, Artificial
  Probe
ctgtcagagaaggttttcattttca

SEQ ID NO: 167639 - DNA, 25 bp, Artificial
  Probe
tgtcagagaaggttttcattttcat

SEQ ID NO: 167640 - DNA, 25 bp, Artificial
  Probe
tattgctgtcagagaaggttttcat

SEQ ID NO: 167641 - DNA, 25 bp, Artificial
  Probe
atattgctgtcagagaaggttttca

SEQ ID NO: 167642 - DNA, 25 bp, Artificial
  Probe
caacaagataaatattgctgtcaga

SEQ ID NO: 167643 - DNA, 25 bp, Artificial
  Probe
tcaacaagataaatattgctgtcag

SEQ ID NO: 167644 - DNA, 25 bp, Artificial
  Probe
gctgtcagagaaggttttcattttc

SEQ ID NO: 167645 - DNA, 25 bp, Artificial
  Probe
attgctgtcagagaaggttttcatt

SEQ ID NO: 167646 - DNA, 25 bp, Artificial
  Probe
caagataaatattgctgtcagagaa

SEQ ID NO: 167647 - DNA, 25 bp, Artificial
  Probe
gtggattcagcagaaggtaactcct

SEQ ID NO: 167648 - DNA, 25 bp, Artificial
  Probe
tgctgtcagagaaggttttcatttt

SEQ ID NO: 167649 - DNA, 25 bp, Artificial
  Probe
ttacaagaacataccacactgcgat

SEQ ID NO: 167650 - DNA, 25 bp, Artificial
  Probe
gggattcttcgttgctttgatttat

SEQ ID NO: 167651 - DNA, 25 bp, Artificial
  Probe
aaatgatgtgactttgggattcttc

SEQ ID NO: 167652 - DNA, 25 bp, Artificial
  Probe
tctaaatgatgtgactttgggattc

SEQ ID NO: 167653 - DNA, 25 bp, Artificial
  Probe
ctaaatgatgtgactttgggattct

SEQ ID NO: 167654 - DNA, 25 bp, Artificial
  Probe
tgggattcttcgttgctttgattta

SEQ ID NO: 167655 - DNA, 25 bp, Artificial
  Probe
ggattcttcgttgctttgatttatt

SEQ ID NO: 167656 - DNA, 25 bp, Artificial
  Probe
cacctctaccaatgtttacaagaac

SEQ ID NO: 167657 - DNA, 25 bp, Artificial
  Probe
ctccacctctaccaatgtttacaag

SEQ ID NO: 167658 - DNA, 25 bp, Artificial
  Probe
taaatgatgtgactttgggattctt

SEQ ID NO: 167659 - DNA, 25 bp, Artificial
  Probe
ccacctctaccaatgtttacaagaa

SEQ ID NO: 167660 - DNA, 25 bp, Artificial
  Probe
tctccacctctaccaatgtttacaa

SEQ ID NO: 167661 - DNA, 25 bp, Artificial
  Probe
aatgatgtgactttgggattcttcg

SEQ ID NO: 167662 - DNA, 25 bp, Artificial
  Probe
caggaaatgcttctttgtctttgtg

SEQ ID NO: 167663 - DNA, 25 bp, Artificial
  Probe
tacaagaacataccacactgcgatg

SEQ ID NO: 167664 - DNA, 25 bp, Artificial
  Probe
tccacctctaccaatgtttacaaga

SEQ ID NO: 167665 - DNA, 25 bp, Artificial
  Probe
ttgggattcttcgttgctttgattt

SEQ ID NO: 167666 - DNA, 25 bp, Artificial
  Probe
tttgggattcttcgttgctttgatt

SEQ ID NO: 167667 - DNA, 25 bp, Artificial
  Probe
ctctccacctctaccaatgtttaca

SEQ ID NO: 167668 - DNA, 25 bp, Artificial
  Probe
gatattgctctccacctctaccaat

SEQ ID NO: 167669 - DNA, 25 bp, Artificial
  Probe
tgtctaaatgatgtgactttgggat

SEQ ID NO: 167670 - DNA, 25 bp, Artificial
  Probe
atgtctaaatgatgtgactttggga

SEQ ID NO: 167671 - DNA, 25 bp, Artificial
  Probe
gtctaaatgatgtgactttgggatt

SEQ ID NO: 167672 - DNA, 25 bp, Artificial
  Probe
atattgctctccacctctaccaatg

SEQ ID NO: 167673 - DNA, 25 bp, Artificial
  Probe
ctttgggattcttcgttgctttgat

SEQ ID NO: 167674 - DNA, 25 bp, Artificial
  Probe
acaggaaatgcttctttgtctttgt

SEQ ID NO: 167675 - DNA, 25 bp, Artificial
  Probe
gatgtgactttgggattcttcgttg

SEQ ID NO: 167676 - DNA, 25 bp, Artificial
  Probe
atgatgtgactttgggattcttcgt

SEQ ID NO: 167677 - DNA, 25 bp, Artificial
  Probe
tgatgtgactttgggattcttcgtt

SEQ ID NO: 167678 - DNA, 25 bp, Artificial
  Probe
catgtctaaatgatgtgactttggg

SEQ ID NO: 167679 - DNA, 25 bp, Artificial
  Probe
tttacaagaacataccacactgcga

SEQ ID NO: 167680 - DNA, 25 bp, Artificial
  Probe
gattcttcgttgctttgatttattt

SEQ ID NO: 167681 - DNA, 25 bp, Artificial
  Probe
gctctccacctctaccaatgtttac

SEQ ID NO: 167682 - DNA, 25 bp, Artificial
  Probe
gtttacaagaacataccacactgcg

SEQ ID NO: 167683 - DNA, 25 bp, Artificial
  Probe
aggaaatgcttctttgtctttgtgc

SEQ ID NO: 167684 - DNA, 25 bp, Artificial
  Probe
ggatattgctctccacctctaccaa

SEQ ID NO: 167685 - DNA, 25 bp, Artificial
  Probe
gactttgggattcttcgttgctttg

SEQ ID NO: 167686 - DNA, 25 bp, Artificial
  Probe
tattgctctccacctctaccaatgt

SEQ ID NO: 167687 - DNA, 25 bp, Artificial
  Probe
tgctctccacctctaccaatgttta

SEQ ID NO: 167688 - DNA, 25 bp, Artificial
  Probe
actttgggattcttcgttgctttga

SEQ ID NO: 167689 - DNA, 25 bp, Artificial
  Probe
tgactttgggattcttcgttgcttt

SEQ ID NO: 167690 - DNA, 25 bp, Artificial
  Probe
tcttcgttgctttgatttattttgc

SEQ ID NO: 167691 - DNA, 25 bp, Artificial
  Probe
ttgctttgatttattttgccactga

SEQ ID NO: 167692 - DNA, 25 bp, Artificial
  Probe
gttgctttgatttattttgccactg

SEQ ID NO: 167693 - DNA, 25 bp, Artificial
  Probe
cttcgttgctttgatttattttgcc

SEQ ID NO: 167694 - DNA, 25 bp, Artificial
  Probe
atgctgagttacaagttaggtcatt

SEQ ID NO: 167695 - DNA, 25 bp, Artificial
  Probe
gtatgctgagttacaagttaggtca

SEQ ID NO: 167696 - DNA, 25 bp, Artificial
  Probe
tatgctgagttacaagttaggtcat

SEQ ID NO: 167697 - DNA, 25 bp, Artificial
  Probe
tggtaatgaaggcatgtaagttatc

SEQ ID NO: 167698 - DNA, 25 bp, Artificial
  Probe
ctggtaatgaaggcatgtaagttat

SEQ ID NO: 167699 - DNA, 25 bp, Artificial
  Probe
attaaggtgttcctggtaatgaagg

SEQ ID NO: 167700 - DNA, 25 bp, Artificial
  Probe
tgctctggaatagactgttgttgaa

SEQ ID NO: 167701 - DNA, 25 bp, Artificial
  Probe
ggtaatgaaggcatgtaagttatca

SEQ ID NO: 167702 - DNA, 25 bp, Artificial
  Probe
cctggtaatgaaggcatgtaagtta

SEQ ID NO: 167703 - DNA, 25 bp, Artificial
  Probe
tattaaggtgttcctggtaatgaag

SEQ ID NO: 167704 - DNA, 25 bp, Artificial
  Probe
ttatcctgtgctctggaatagactg

SEQ ID NO: 167705 - DNA, 25 bp, Artificial
  Probe
gttatcctgtgctctggaatagact

SEQ ID NO: 167706 - DNA, 25 bp, Artificial
  Probe
gtgctctggaatagactgttgttga

SEQ ID NO: 167707 - DNA, 25 bp, Artificial
  Probe
ctgtgctctggaatagactgttgtt

SEQ ID NO: 167708 - DNA, 25 bp, Artificial
  Probe
tgtatgctgagttacaagttaggtc

SEQ ID NO: 167709 - DNA, 25 bp, Artificial
  Probe
ctgtatgctgagttacaagttaggt

SEQ ID NO: 167710 - DNA, 25 bp, Artificial
  Probe
tgctgtatgctgagttacaagttag

SEQ ID NO: 167711 - DNA, 25 bp, Artificial
  Probe
tgtgctctggaatagactgttgttg

SEQ ID NO: 167712 - DNA, 25 bp, Artificial
  Probe
gttcctggtaatgaaggcatgtaag

SEQ ID NO: 167713 - DNA, 25 bp, Artificial
  Probe
ctctggaatagactgttgttgaaat

SEQ ID NO: 167714 - DNA, 25 bp, Artificial
  Probe
gtgctgtatgctgagttacaagtta

SEQ ID NO: 167715 - DNA, 25 bp, Artificial
  Probe
taagtgtcaaactctatctttccgt

SEQ ID NO: 167716 - DNA, 25 bp, Artificial
  Probe
tgctgagttacaagttaggtcattt

SEQ ID NO: 167717 - DNA, 25 bp, Artificial
  Probe
gctctggaatagactgttgttgaaa

SEQ ID NO: 167718 - DNA, 25 bp, Artificial
  Probe
atattaaggtgttcctggtaatgaa

SEQ ID NO: 167719 - DNA, 25 bp, Artificial
  Probe
gctgtatgctgagttacaagttagg

SEQ ID NO: 167720 - DNA, 25 bp, Artificial
  Probe
aagtgtcaaactctatctttccgtg

SEQ ID NO: 167721 - DNA, 25 bp, Artificial
  Probe
tcctggtaatgaaggcatgtaagtt

SEQ ID NO: 167722 - DNA, 25 bp, Artificial
  Probe
ttcctggtaatgaaggcatgtaagt

SEQ ID NO: 167723 - DNA, 25 bp, Artificial
  Probe
aactctatctttccgtgtgctgtat

SEQ ID NO: 167724 - DNA, 25 bp, Artificial
  Probe
gtgtcaaactctatctttccgtgtg

SEQ ID NO: 167725 - DNA, 25 bp, Artificial
  Probe
gctgagttacaagttaggtcattta

SEQ ID NO: 167726 - DNA, 25 bp, Artificial
  Probe
gaagatatattaaggtgttcctggt

SEQ ID NO: 167727 - DNA, 25 bp, Artificial
  Probe
ggttatcctgtgctctggaatagac

SEQ ID NO: 167728 - DNA, 25 bp, Artificial
  Probe
ataagtgtcaaactctatctttccg

SEQ ID NO: 167729 - DNA, 25 bp, Artificial
  Probe
tgttcctggtaatgaaggcatgtaa

SEQ ID NO: 167730 - DNA, 25 bp, Artificial
  Probe
aaactctatctttccgtgtgctgta

SEQ ID NO: 167731 - DNA, 25 bp, Artificial
  Probe
tatcctgtgctctggaatagactgt

SEQ ID NO: 167732 - DNA, 25 bp, Artificial
  Probe
ttaaggtgttcctggtaatgaaggc

SEQ ID NO: 167733 - DNA, 25 bp, Artificial
  Probe
agaagatatattaaggtgttcctgg

SEQ ID NO: 167734 - DNA, 25 bp, Artificial
  Probe
attgctagtttaatattgcgtcagg

SEQ ID NO: 167735 - DNA, 25 bp, Artificial
  Probe
ttgctagtttaatattgcgtcaggt

SEQ ID NO: 167736 - DNA, 25 bp, Artificial
  Probe
tctggaatagactgttgttgaaata

SEQ ID NO: 167737 - DNA, 25 bp, Artificial
  Probe
tagtttaatattgcgtcaggtcgtc

SEQ ID NO: 167738 - DNA, 25 bp, Artificial
  Probe
ctagtttaatattgcgtcaggtcgt

SEQ ID NO: 167739 - DNA, 25 bp, Artificial
  Probe
ctatccagcagatgaggaacaagtt

SEQ ID NO: 167740 - DNA, 25 bp, Artificial
  Probe
ctctatccagcagatgaggaacaag

SEQ ID NO: 167741 - DNA, 25 bp, Artificial
  Probe
tctatccagcagatgaggaacaagt

SEQ ID NO: 167742 - DNA, 25 bp, Artificial
  Probe
actctatccagcagatgaggaacaa

SEQ ID NO: 167743 - DNA, 25 bp, Artificial
  Probe
ctcatatcaacccgtgtgtctcttc

SEQ ID NO: 167744 - DNA, 25 bp, Artificial
  Probe
gactctatccagcagatgaggaaca

SEQ ID NO: 167745 - DNA, 25 bp, Artificial
  Probe
tatccagcagatgaggaacaagttt

SEQ ID NO: 167746 - DNA, 25 bp, Artificial
  Probe
ggactctatccagcagatgaggaac

SEQ ID NO: 167747 - DNA, 25 bp, Artificial
  Probe
ctgtgtgtgtcagcgagagatactg

SEQ ID NO: 167748 - DNA, 25 bp, Artificial
  Probe
ctgcttagctctgtgaaggagatca

SEQ ID NO: 167749 - DNA, 25 bp, Artificial
  Probe
tgcttagctctgtgaaggagatcag

SEQ ID NO: 167750 - DNA, 25 bp, Artificial
  Probe
ctggagaaggactgagaaaatctgt

SEQ ID NO: 167751 - DNA, 25 bp, Artificial
  Probe
atccagcagatgaggaacaagtttg

SEQ ID NO: 167752 - DNA, 25 bp, Artificial
  Probe
cctcatatcaacccgtgtgtctctt

SEQ ID NO: 167753 - DNA, 25 bp, Artificial
  Probe
ctctgtgaaggagatcagcgacatt

SEQ ID NO: 167754 - DNA, 25 bp, Artificial
  Probe
tggagaaggactgagaaaatctgtg

SEQ ID NO: 167755 - DNA, 25 bp, Artificial
  Probe
tctgtgaaggagatcagcgacattg

SEQ ID NO: 167756 - DNA, 25 bp, Artificial
  Probe
tcatatcaacccgtgtgtctcttcg

SEQ ID NO: 167757 - DNA, 25 bp, Artificial
  Probe
ctgtgtgagctacgtggactctatc

SEQ ID NO: 167758 - DNA, 25 bp, Artificial
  Probe
ctgtgaaggagatcagcgacattgt

SEQ ID NO: 167759 - DNA, 25 bp, Artificial
  Probe
cctggagaaggactgagaaaatctg

SEQ ID NO: 167760 - DNA, 25 bp, Artificial
  Probe
tctgtgtgagctacgtggactctat

SEQ ID NO: 167761 - DNA, 25 bp, Artificial
  Probe
tgtgaaggagatcagcgacattgtc

SEQ ID NO: 167762 - DNA, 25 bp, Artificial
  Probe
gagaaggactgagaaaatctgtgcc

SEQ ID NO: 167763 - DNA, 25 bp, Artificial
  Probe
ggagaaggactgagaaaatctgtgc

SEQ ID NO: 167764 - DNA, 25 bp, Artificial
  Probe
ttctgtgtgagctacgtggactcta

SEQ ID NO: 167765 - DNA, 25 bp, Artificial
  Probe
catatcaacccgtgtgtctcttcga

SEQ ID NO: 167766 - DNA, 25 bp, Artificial
  Probe
tatcaacaagctggagagcaacctc

SEQ ID NO: 167767 - DNA, 25 bp, Artificial
  Probe
ctatcaacaagctggagagcaacct

SEQ ID NO: 167768 - DNA, 25 bp, Artificial
  Probe
cttagctctgtgaaggagatcagcg

SEQ ID NO: 167769 - DNA, 25 bp, Artificial
  Probe
gcttagctctgtgaaggagatcagc

SEQ ID NO: 167770 - DNA, 25 bp, Artificial
  Probe
gctgcttagctctgtgaaggagatc

SEQ ID NO: 167771 - DNA, 25 bp, Artificial
  Probe
ttagctctgtgaaggagatcagcga

SEQ ID NO: 167772 - DNA, 25 bp, Artificial
  Probe
agaaggactgagaaaatctgtgccc

SEQ ID NO: 167773 - DNA, 25 bp, Artificial
  Probe
gcctggagaaggactgagaaaatct

SEQ ID NO: 167774 - DNA, 25 bp, Artificial
  Probe
agcctggagaaggactgagaaaatc

SEQ ID NO: 167775 - DNA, 25 bp, Artificial
  Probe
atatcaacccgtgtgtctcttcgaa

SEQ ID NO: 167776 - DNA, 25 bp, Artificial
  Probe
gcagatgaggaacaagtttgccttc

SEQ ID NO: 167777 - DNA, 25 bp, Artificial
  Probe
cagcctggagaaggactgagaaaat

SEQ ID NO: 167778 - DNA, 25 bp, Artificial
  Probe
tatcaacccgtgtgtctcttcgaaa

SEQ ID NO: 167779 - DNA, 25 bp, Artificial
  Probe
tggactctatccagcagatgaggaa

SEQ ID NO: 167780 - DNA, 25 bp, Artificial
  Probe
agcagatgaggaacaagtttgcctt

SEQ ID NO: 167781 - DNA, 25 bp, Artificial
  Probe
cagatgaggaacaagtttgccttcc

SEQ ID NO: 167782 - DNA, 25 bp, Artificial
  Probe
ctacgtggactctatccagcagatg

SEQ ID NO: 167783 - DNA, 25 bp, Artificial
  Probe
tacgtggactctatccagcagatga

SEQ ID NO: 167784 - DNA, 25 bp, Artificial
  Probe
ctctggtacatctattctcacacac

SEQ ID NO: 167785 - DNA, 25 bp, Artificial
  Probe
cactctggtacatctattctcacac

SEQ ID NO: 167786 - DNA, 25 bp, Artificial
  Probe
actctggtacatctattctcacaca

SEQ ID NO: 167787 - DNA, 25 bp, Artificial
  Probe
gcactctggtacatctattctcaca

SEQ ID NO: 167788 - DNA, 25 bp, Artificial
  Probe
tctggtacatctattctcacacacg

SEQ ID NO: 167789 - DNA, 25 bp, Artificial
  Probe
ctgcactctggtacatctattctca

SEQ ID NO: 167790 - DNA, 25 bp, Artificial
  Probe
tgcactctggtacatctattctcac

SEQ ID NO: 167791 - DNA, 25 bp, Artificial
  Probe
ctggtacatctattctcacacacgt

SEQ ID NO: 167792 - DNA, 25 bp, Artificial
  Probe
gctgcactctggtacatctattctc

SEQ ID NO: 167793 - DNA, 25 bp, Artificial
  Probe
agctgcactctggtacatctattct

SEQ ID NO: 167794 - DNA, 25 bp, Artificial
  Probe
agaaggtgacatggtggaactcatc

SEQ ID NO: 167795 - DNA, 25 bp, Artificial
  Probe
cagaaggtgacatggtggaactcat

SEQ ID NO: 167796 - DNA, 25 bp, Artificial
  Probe
gtacaggtgagcatgtctccattga

SEQ ID NO: 167797 - DNA, 25 bp, Artificial
  Probe
tacaggtgagcatgtctccattgac

SEQ ID NO: 167798 - DNA, 25 bp, Artificial
  Probe
gagcatgtctccattgacctctgag

SEQ ID NO: 167799 - DNA, 25 bp, Artificial
  Probe
tttcagctttctcctccgtgtctac

SEQ ID NO: 167800 - DNA, 25 bp, Artificial
  Probe
gtttcagctttctcctccgtgtcta

SEQ ID NO: 167801 - DNA, 25 bp, Artificial
  Probe
ctttctcctccgtgtctacatggtg

SEQ ID NO: 167802 - DNA, 25 bp, Artificial
  Probe
gaaggtgacatggtggaactcatcc

SEQ ID NO: 167803 - DNA, 25 bp, Artificial
  Probe
cagctttctcctccgtgtctacatg

SEQ ID NO: 167804 - DNA, 25 bp, Artificial
  Probe
ctagcaccttgtcccaggaagtcta

SEQ ID NO: 167805 - DNA, 25 bp, Artificial
  Probe
tcagctttctcctccgtgtctacat

SEQ ID NO: 167806 - DNA, 25 bp, Artificial
  Probe
gacatggtggaactcatccagagtc

SEQ ID NO: 167807 - DNA, 25 bp, Artificial
  Probe
gtgacatggtggaactcatccagag

SEQ ID NO: 167808 - DNA, 25 bp, Artificial
  Probe
ccatcaatcctctcatctattcctt

SEQ ID NO: 167809 - DNA, 25 bp, Artificial
  Probe
atcaatcctctcatctattccttcc

SEQ ID NO: 167810 - DNA, 25 bp, Artificial
  Probe
cagccatcaatcctctcatctattc

SEQ ID NO: 167811 - DNA, 25 bp, Artificial
  Probe
tcagccatcaatcctctcatctatt

SEQ ID NO: 167812 - DNA, 25 bp, Artificial
  Probe
tcaatcctctcatctattccttccg

SEQ ID NO: 167813 - DNA, 25 bp, Artificial
  Probe
catcaatcctctcatctattccttc

SEQ ID NO: 167814 - DNA, 25 bp, Artificial
  Probe
ctcagccatcaatcctctcatctat

SEQ ID NO: 167815 - DNA, 25 bp, Artificial
  Probe
gccatcaatcctctcatctattcct

SEQ ID NO: 167816 - DNA, 25 bp, Artificial
  Probe
agccatcaatcctctcatctattcc

SEQ ID NO: 167817 - DNA, 25 bp, Artificial
  Probe
atcttagcctgacagtgattgagaa

SEQ ID NO: 167818 - DNA, 25 bp, Artificial
  Probe
ttagcctgacagtgattgagaacat

SEQ ID NO: 167819 - DNA, 25 bp, Artificial
  Probe
actcagccatcaatcctctcatcta

SEQ ID NO: 167820 - DNA, 25 bp, Artificial
  Probe
gatcttagcctgacagtgattgaga

SEQ ID NO: 167821 - DNA, 25 bp, Artificial
  Probe
cttagcctgacagtgattgagaaca

SEQ ID NO: 167822 - DNA, 25 bp, Artificial
  Probe
tcttagcctgacagtgattgagaac

SEQ ID NO: 167823 - DNA, 25 bp, Artificial
  Probe
caatcctctcatctattccttccgc

SEQ ID NO: 167824 - DNA, 25 bp, Artificial
  Probe
tagcctgacagtgattgagaacatg

SEQ ID NO: 167825 - DNA, 25 bp, Artificial
  Probe
aatcctctcatctattccttccgca

SEQ ID NO: 167826 - DNA, 25 bp, Artificial
  Probe
aactcagccatcaatcctctcatct

SEQ ID NO: 167827 - DNA, 25 bp, Artificial
  Probe
caactcagccatcaatcctctcatc

SEQ ID NO: 167828 - DNA, 25 bp, Artificial
  Probe
atcctctcatctattccttccgcag

SEQ ID NO: 167829 - DNA, 25 bp, Artificial
  Probe
tcaactcagccatcaatcctctcat

SEQ ID NO: 167830 - DNA, 25 bp, Artificial
  Probe
ctcaactcagccatcaatcctctca

SEQ ID NO: 167831 - DNA, 25 bp, Artificial
  Probe
agatcttagcctgacagtgattgag

SEQ ID NO: 167832 - DNA, 25 bp, Artificial
  Probe
ctgacagtgattgagaacatgcctg

SEQ ID NO: 167833 - DNA, 25 bp, Artificial
  Probe
cctgacagtgattgagaacatgcct

SEQ ID NO: 167834 - DNA, 25 bp, Artificial
  Probe
cttcgaggtcactcagcttcaagat

SEQ ID NO: 167835 - DNA, 25 bp, Artificial
  Probe
ttcgaggtcactcagcttcaagatg

SEQ ID NO: 167836 - DNA, 25 bp, Artificial
  Probe
catgatgaatgtttggcagggagtg

SEQ ID NO: 167837 - DNA, 25 bp, Artificial
  Probe
gtgagaagggactggacacaagatc

SEQ ID NO: 167838 - DNA, 25 bp, Artificial
  Probe
cacgaaactccccatgatgaatgtt

SEQ ID NO: 167839 - DNA, 25 bp, Artificial
  Probe
gaaactccccatgatgaatgtttgg

SEQ ID NO: 167840 - DNA, 25 bp, Artificial
  Probe
cgaaactccccatgatgaatgtttg

SEQ ID NO: 167841 - DNA, 25 bp, Artificial
  Probe
acgaaactccccatgatgaatgttt

SEQ ID NO: 167842 - DNA, 25 bp, Artificial
  Probe
ttccacgaaactccccatgatgaat

SEQ ID NO: 167843 - DNA, 25 bp, Artificial
  Probe
tgagaagggactggacacaagatct

SEQ ID NO: 167844 - DNA, 25 bp, Artificial
  Probe
cttccacgaaactccccatgatgaa

SEQ ID NO: 167845 - DNA, 25 bp, Artificial
  Probe
tccacgaaactccccatgatgaatg

SEQ ID NO: 167846 - DNA, 25 bp, Artificial
  Probe
aaactccccatgatgaatgtttggc

SEQ ID NO: 167847 - DNA, 25 bp, Artificial
  Probe
ccacgaaactccccatgatgaatgt

SEQ ID NO: 167848 - DNA, 25 bp, Artificial
  Probe
aactccccatgatgaatgtttggca

SEQ ID NO: 167849 - DNA, 25 bp, Artificial
  Probe
tatccacaactgttccattaacgag

SEQ ID NO: 167850 - DNA, 25 bp, Artificial
  Probe
gtatccacaactgttccattaacga

SEQ ID NO: 167851 - DNA, 25 bp, Artificial
  Probe
ggtatccacaactgttccattaacg

SEQ ID NO: 167852 - DNA, 25 bp, Artificial
  Probe
cggtatccacaactgttccattaac

SEQ ID NO: 167853 - DNA, 25 bp, Artificial
  Probe
tgttccattaacgagacctgcttaa

SEQ ID NO: 167854 - DNA, 25 bp, Artificial
  Probe
atccacaactgttccattaacgaga

SEQ ID NO: 167855 - DNA, 25 bp, Artificial
  Probe
ctgttccattaacgagacctgctta

SEQ ID NO: 167856 - DNA, 25 bp, Artificial
  Probe
cattaacgagacctgcttaaacatc

SEQ ID NO: 167857 - DNA, 25 bp, Artificial
  Probe
acaactgttccattaacgagacctg

SEQ ID NO: 167858 - DNA, 25 bp, Artificial
  Probe
cacaactgttccattaacgagacct

SEQ ID NO: 167859 - DNA, 25 bp, Artificial
  Probe
tccacaactgttccattaacgagac

SEQ ID NO: 167860 - DNA, 25 bp, Artificial
  Probe
attaacgagacctgcttaaacatcc

SEQ ID NO: 167861 - DNA, 25 bp, Artificial
  Probe
ccattaacgagacctgcttaaacat

SEQ ID NO: 167862 - DNA, 25 bp, Artificial
  Probe
ttccattaacgagacctgcttaaac

SEQ ID NO: 167863 - DNA, 25 bp, Artificial
  Probe
gttccattaacgagacctgcttaaa

SEQ ID NO: 167864 - DNA, 25 bp, Artificial
  Probe
ttaacgagacctgcttaaacatcca

SEQ ID NO: 167865 - DNA, 25 bp, Artificial
  Probe
tccattaacgagacctgcttaaaca

SEQ ID NO: 167866 - DNA, 25 bp, Artificial
  Probe
ccacaactgttccattaacgagacc

SEQ ID NO: 167867 - DNA, 25 bp, Artificial
  Probe
caactgttccattaacgagacctgc

SEQ ID NO: 167868 - DNA, 25 bp, Artificial
  Probe
actgttccattaacgagacctgctt

SEQ ID NO: 167869 - DNA, 25 bp, Artificial
  Probe
aactgttccattaacgagacctgct

SEQ ID NO: 167870 - DNA, 25 bp, Artificial
  Probe
taacgagacctgcttaaacatccag

SEQ ID NO: 167871 - DNA, 25 bp, Artificial
  Probe
ccggtatccacaactgttccattaa

SEQ ID NO: 167872 - DNA, 25 bp, Artificial
  Probe
aacgagacctgcttaaacatccagg

SEQ ID NO: 167873 - DNA, 25 bp, Artificial
  Probe
aaggaaagttgagagttagaaggaa

SEQ ID NO: 167874 - DNA, 25 bp, Artificial
  Probe
aaaggaaagttgagagttagaagga

SEQ ID NO: 167875 - DNA, 25 bp, Artificial
  Probe
tagtttattccattcagccaagcat

SEQ ID NO: 167876 - DNA, 25 bp, Artificial
  Probe
aggtagtttattccattcagccaag

SEQ ID NO: 167877 - DNA, 25 bp, Artificial
  Probe
cctttctcatccagtaattccacat

SEQ ID NO: 167878 - DNA, 25 bp, Artificial
  Probe
caggtagtttattccattcagccaa

SEQ ID NO: 167879 - DNA, 25 bp, Artificial
  Probe
aggaaagttgagagttagaaggaac

SEQ ID NO: 167880 - DNA, 25 bp, Artificial
  Probe
gtagtttattccattcagccaagca

SEQ ID NO: 167881 - DNA, 25 bp, Artificial
  Probe
atccagtaattccacatgcaggtat

SEQ ID NO: 167882 - DNA, 25 bp, Artificial
  Probe
gtttattccattcagccaagcatct

SEQ ID NO: 167883 - DNA, 25 bp, Artificial
  Probe
agtttattccattcagccaagcatc

SEQ ID NO: 167884 - DNA, 25 bp, Artificial
  Probe
tccagtaattccacatgcaggtatt

SEQ ID NO: 167885 - DNA, 25 bp, Artificial
  Probe
caccaggtagtttattccattcagc

SEQ ID NO: 167886 - DNA, 25 bp, Artificial
  Probe
gcaccaggtagtttattccattcag

SEQ ID NO: 167887 - DNA, 25 bp, Artificial
  Probe
ctttctcatccagtaattccacatg

SEQ ID NO: 167888 - DNA, 25 bp, Artificial
  Probe
gtagtctagcaccaggtcttacact

SEQ ID NO: 167889 - DNA, 25 bp, Artificial
  Probe
ggtagtttattccattcagccaagc

SEQ ID NO: 167890 - DNA, 25 bp, Artificial
  Probe
ttctcatccagtaattccacatgca

SEQ ID NO: 167891 - DNA, 25 bp, Artificial
  Probe
cttctgaagaactatggtgacacgg

SEQ ID NO: 167892 - DNA, 25 bp, Artificial
  Probe
tttctcatccagtaattccacatgc

SEQ ID NO: 167893 - DNA, 25 bp, Artificial
  Probe
tagtctagcaccaggtcttacactg

SEQ ID NO: 167894 - DNA, 25 bp, Artificial
  Probe
ccaggtagtttattccattcagcca

SEQ ID NO: 167895 - DNA, 25 bp, Artificial
  Probe
catccagtaattccacatgcaggta

SEQ ID NO: 167896 - DNA, 25 bp, Artificial
  Probe
tctcatccagtaattccacatgcag

SEQ ID NO: 167897 - DNA, 25 bp, Artificial
  Probe
tttattccattcagccaagcatctg

SEQ ID NO: 167898 - DNA, 25 bp, Artificial
  Probe
accaggtagtttattccattcagcc

SEQ ID NO: 167899 - DNA, 25 bp, Artificial
  Probe
cagtaattccacatgcaggtatttg

SEQ ID NO: 167900 - DNA, 25 bp, Artificial
  Probe
ttcctgcctttctcatccagtaatt

SEQ ID NO: 167901 - DNA, 25 bp, Artificial
  Probe
tttcctgcctttctcatccagtaat

SEQ ID NO: 167902 - DNA, 25 bp, Artificial
  Probe
ttctgaagaactatggtgacacggt

SEQ ID NO: 167903 - DNA, 25 bp, Artificial
  Probe
atcttctgaagaactatggtgacac

SEQ ID NO: 167904 - DNA, 25 bp, Artificial
  Probe
catcttctgaagaactatggtgaca

SEQ ID NO: 167905 - DNA, 25 bp, Artificial
  Probe
gcctttctcatccagtaattccaca

SEQ ID NO: 167906 - DNA, 25 bp, Artificial
  Probe
tgcctttctcatccagtaattccac

SEQ ID NO: 167907 - DNA, 25 bp, Artificial
  Probe
ttgagagttagaaggaacttgccaa

SEQ ID NO: 167908 - DNA, 25 bp, Artificial
  Probe
ccagtaattccacatgcaggtattt

SEQ ID NO: 167909 - DNA, 25 bp, Artificial
  Probe
gtctgccatcttctgaagaactatg

SEQ ID NO: 167910 - DNA, 25 bp, Artificial
  Probe
tcctgcctttctcatccagtaattc

SEQ ID NO: 167911 - DNA, 25 bp, Artificial
  Probe
ttattccattcagccaagcatctgg

SEQ ID NO: 167912 - DNA, 25 bp, Artificial
  Probe
tgtctgccatcttctgaagaactat

SEQ ID NO: 167913 - DNA, 25 bp, Artificial
  Probe
ctgcctttctcatccagtaattcca

SEQ ID NO: 167914 - DNA, 25 bp, Artificial
  Probe
gaaagccaggcatgaagaaacatag

SEQ ID NO: 167915 - DNA, 25 bp, Artificial
  Probe
agttgagagttagaaggaacttgcc

SEQ ID NO: 167916 - DNA, 25 bp, Artificial
  Probe
taattccacatgcaggtatttgtac

SEQ ID NO: 167917 - DNA, 25 bp, Artificial
  Probe
gtaattccacatgcaggtatttgta

SEQ ID NO: 167918 - DNA, 25 bp, Artificial
  Probe
acagcgaaataaaaggcaataagtt

SEQ ID NO: 167919 - DNA, 25 bp, Artificial
  Probe
agacagcgaaataaaaggcaataag

SEQ ID NO: 167920 - DNA, 25 bp, Artificial
  Probe
gacagcgaaataaaaggcaataagt

SEQ ID NO: 167921 - DNA, 25 bp, Artificial
  Probe
cagacagcgaaataaaaggcaataa

SEQ ID NO: 167922 - DNA, 25 bp, Artificial
  Probe
agcgaaataaaaggcaataagttga

SEQ ID NO: 167923 - DNA, 25 bp, Artificial
  Probe
cagcgaaataaaaggcaataagttg

SEQ ID NO: 167924 - DNA, 25 bp, Artificial
  Probe
gcgaaataaaaggcaataagttgaa

SEQ ID NO: 167925 - DNA, 25 bp, Artificial
  Probe
gcagacagcgaaataaaaggcaata

SEQ ID NO: 167926 - DNA, 25 bp, Artificial
  Probe
cgaaataaaaggcaataagttgaaa

SEQ ID NO: 167927 - DNA, 25 bp, Artificial
  Probe
gtgtgtgtgtgtgtgtgtgaaagac

SEQ ID NO: 167928 - DNA, 25 bp, Artificial
  Probe
agagcatgagtgtgtacaagcttag

SEQ ID NO: 167929 - DNA, 25 bp, Artificial
  Probe
gagagcatgagtgtgtacaagctta

SEQ ID NO: 167930 - DNA, 25 bp, Artificial
  Probe
cctacccttggtgctgtcataaaag

SEQ ID NO: 167931 - DNA, 25 bp, Artificial
  Probe
ggcagacagcgaaataaaaggcaat

SEQ ID NO: 167932 - DNA, 25 bp, Artificial
  Probe
acagagagcatgagtgtgtacaagc

SEQ ID NO: 167933 - DNA, 25 bp, Artificial
  Probe
gagcatgagtgtgtacaagcttagc

SEQ ID NO: 167934 - DNA, 25 bp, Artificial
  Probe
agagagcatgagtgtgtacaagctt

SEQ ID NO: 167935 - DNA, 25 bp, Artificial
  Probe
gaaataaaaggcaataagttgaaaa

SEQ ID NO: 167936 - DNA, 25 bp, Artificial
  Probe
cagagagcatgagtgtgtacaagct

SEQ ID NO: 167937 - DNA, 25 bp, Artificial
  Probe
atgagtgtgtacaagcttagccctg

SEQ ID NO: 167938 - DNA, 25 bp, Artificial
  Probe
catgagtgtgtacaagcttagccct

SEQ ID NO: 167939 - DNA, 25 bp, Artificial
  Probe
cacagagagcatgagtgtgtacaag

SEQ ID NO: 167940 - DNA, 25 bp, Artificial
  Probe
gcctacccttggtgctgtcataaaa

SEQ ID NO: 167941 - DNA, 25 bp, Artificial
  Probe
ctacccttggtgctgtcataaaagg

SEQ ID NO: 167942 - DNA, 25 bp, Artificial
  Probe
agcatgagtgtgtacaagcttagcc

SEQ ID NO: 167943 - DNA, 25 bp, Artificial
  Probe
gcacagagagcatgagtgtgtacaa

SEQ ID NO: 167944 - DNA, 25 bp, Artificial
  Probe
ttgctgaagatattgtgaagaccta

SEQ ID NO: 167945 - DNA, 25 bp, Artificial
  Probe
tgctgaagatattgtgaagacctac

SEQ ID NO: 167946 - DNA, 25 bp, Artificial
  Probe
cctcatattgcgttactactgacta

SEQ ID NO: 167947 - DNA, 25 bp, Artificial
  Probe
gctgaagatattgtgaagacctaca

SEQ ID NO: 167948 - DNA, 25 bp, Artificial
  Probe
tattgcgttactactgactaatgaa

SEQ ID NO: 167949 - DNA, 25 bp, Artificial
  Probe
agatattgtgaagacctacacttgg

SEQ ID NO: 167950 - DNA, 25 bp, Artificial
  Probe
ctcatattgcgttactactgactaa

SEQ ID NO: 167951 - DNA, 25 bp, Artificial
  Probe
atattgcgttactactgactaatga

SEQ ID NO: 167952 - DNA, 25 bp, Artificial
  Probe
tgaagatattgtgaagacctacact

SEQ ID NO: 167953 - DNA, 25 bp, Artificial
  Probe
catattgcgttactactgactaatg

SEQ ID NO: 167954 - DNA, 25 bp, Artificial
  Probe
ctgaagatattgtgaagacctacac

SEQ ID NO: 167955 - DNA, 25 bp, Artificial
  Probe
gatattgtgaagacctacacttggc

SEQ ID NO: 167956 - DNA, 25 bp, Artificial
  Probe
aagatattgtgaagacctacacttg

SEQ ID NO: 167957 - DNA, 25 bp, Artificial
  Probe
tcatattgcgttactactgactaat

SEQ ID NO: 167958 - DNA, 25 bp, Artificial
  Probe
atattgtgaagacctacacttggct

SEQ ID NO: 167959 - DNA, 25 bp, Artificial
  Probe
gaagatattgtgaagacctacactt

SEQ ID NO: 167960 - DNA, 25 bp, Artificial
  Probe
gcctcatattgcgttactactgact

SEQ ID NO: 167961 - DNA, 25 bp, Artificial
  Probe
tttgctgaagatattgtgaagacct

SEQ ID NO: 167962 - DNA, 25 bp, Artificial
  Probe
atttgctgaagatattgtgaagacc

SEQ ID NO: 167963 - DNA, 25 bp, Artificial
  Probe
attgtgaagacctacacttggctta

SEQ ID NO: 167964 - DNA, 25 bp, Artificial
  Probe
tattgtgaagacctacacttggctt

SEQ ID NO: 167965 - DNA, 25 bp, Artificial
  Probe
aaaccctcaaggctttctatatcaa

SEQ ID NO: 167966 - DNA, 25 bp, Artificial
  Probe
aacaaaccctcaaggctttctatat

SEQ ID NO: 167967 - DNA, 25 bp, Artificial
  Probe
ataacaaaccctcaaggctttctat

SEQ ID NO: 167968 - DNA, 25 bp, Artificial
  Probe
ttgtgaagacctacacttggcttaa

SEQ ID NO: 167969 - DNA, 25 bp, Artificial
  Probe
taacaaaccctcaaggctttctata

SEQ ID NO: 167970 - DNA, 25 bp, Artificial
  Probe
caaaccctcaaggctttctatatca

SEQ ID NO: 167971 - DNA, 25 bp, Artificial
  Probe
acaaaccctcaaggctttctatatc

SEQ ID NO: 167972 - DNA, 25 bp, Artificial
  Probe
ccactccacttaattcaaagatgtc

SEQ ID NO: 167973 - DNA, 25 bp, Artificial
  Probe
taacccactccacttaattcaaaga

SEQ ID NO: 167974 - DNA, 25 bp, Artificial
  Probe
aacccactccacttaattcaaagat

SEQ ID NO: 167975 - DNA, 25 bp, Artificial
  Probe
ccctcaaggctttctatatcaagtt

SEQ ID NO: 167976 - DNA, 25 bp, Artificial
  Probe
aaccctcaaggctttctatatcaag

SEQ ID NO: 167977 - DNA, 25 bp, Artificial
  Probe
attgcgttactactgactaatgaaa

SEQ ID NO: 167978 - DNA, 25 bp, Artificial
  Probe
ctcaaggctttctatatcaagttgg

SEQ ID NO: 167979 - DNA, 25 bp, Artificial
  Probe
cataacaaaccctcaaggctttcta

SEQ ID NO: 167980 - DNA, 25 bp, Artificial
  Probe
cccactccacttaattcaaagatgt

SEQ ID NO: 167981 - DNA, 25 bp, Artificial
  Probe
acccactccacttaattcaaagatg

SEQ ID NO: 167982 - DNA, 25 bp, Artificial
  Probe
atattctttcccactttccctttgc

SEQ ID NO: 167983 - DNA, 25 bp, Artificial
  Probe
cactccacttaattcaaagatgtct

SEQ ID NO: 167984 - DNA, 25 bp, Artificial
  Probe
cctcaaggctttctatatcaagttg

SEQ ID NO: 167985 - DNA, 25 bp, Artificial
  Probe
ttaacccactccacttaattcaaag

SEQ ID NO: 167986 - DNA, 25 bp, Artificial
  Probe
cttaacccactccacttaattcaaa

SEQ ID NO: 167987 - DNA, 25 bp, Artificial
  Probe
tcaaggctttctatatcaagttggc

SEQ ID NO: 167988 - DNA, 25 bp, Artificial
  Probe
accctcaaggctttctatatcaagt

SEQ ID NO: 167989 - DNA, 25 bp, Artificial
  Probe
agagcctgctgtaattataagatgt

SEQ ID NO: 167990 - DNA, 25 bp, Artificial
  Probe
gagcctgctgtaattataagatgtt

SEQ ID NO: 167991 - DNA, 25 bp, Artificial
  Probe
aagagcctgctgtaattataagatg

SEQ ID NO: 167992 - DNA, 25 bp, Artificial
  Probe
agacgttctataagtgttagcaagt

SEQ ID NO: 167993 - DNA, 25 bp, Artificial
  Probe
gcttaatttgtgttgttgttatccc

SEQ ID NO: 167994 - DNA, 25 bp, Artificial
  Probe
agagacgttctataagtgttagcaa

SEQ ID NO: 167995 - DNA, 25 bp, Artificial
  Probe
aagagacgttctataagtgttagca

SEQ ID NO: 167996 - DNA, 25 bp, Artificial
  Probe
gagacgttctataagtgttagcaag

SEQ ID NO: 167997 - DNA, 25 bp, Artificial
  Probe
gacgttctataagtgttagcaagta

SEQ ID NO: 167998 - DNA, 25 bp, Artificial
  Probe
ccaagatgcttaatttgtgttgttg

SEQ ID NO: 167999 - DNA, 25 bp, Artificial
  Probe
tgcttaatttgtgttgttgttatcc

SEQ ID NO: 168000 - DNA, 25 bp, Artificial
  Probe
ttaagagcctgctgtaattataaga

SEQ ID NO: 168001 - DNA, 25 bp, Artificial
  Probe
caagatgcttaatttgtgttgttgt

SEQ ID NO: 168002 - DNA, 25 bp, Artificial
  Probe
tacatatggtccagataagtgagtg

SEQ ID NO: 168003 - DNA, 25 bp, Artificial
  Probe
tgttacatatggtccagataagtga

SEQ ID NO: 168004 - DNA, 25 bp, Artificial
  Probe
aagatgcttaatttgtgttgttgtt

SEQ ID NO: 168005 - DNA, 25 bp, Artificial
  Probe
tataagtgttagcaagtatatgggc

SEQ ID NO: 168006 - DNA, 25 bp, Artificial
  Probe
taagagcctgctgtaattataagat

SEQ ID NO: 168007 - DNA, 25 bp, Artificial
  Probe
gccaagatgcttaatttgtgttgtt

SEQ ID NO: 168008 - DNA, 25 bp, Artificial
  Probe
ttacatatggtccagataagtgagt

SEQ ID NO: 168009 - DNA, 25 bp, Artificial
  Probe
acgttctataagtgttagcaagtat

SEQ ID NO: 168010 - DNA, 25 bp, Artificial
  Probe
gttacatatggtccagataagtgag

SEQ ID NO: 168011 - DNA, 25 bp, Artificial
  Probe
agatgcttaatttgtgttgttgtta

SEQ ID NO: 168012 - DNA, 25 bp, Artificial
  Probe
cagataagtgagtgccgtttcatac

SEQ ID NO: 168013 - DNA, 25 bp, Artificial
  Probe
tttactaatattcctgagcatgggc

SEQ ID NO: 168014 - DNA, 25 bp, Artificial
  Probe
gaagaatgttacatatggtccagat

SEQ ID NO: 168015 - DNA, 25 bp, Artificial
  Probe
ctttactaatattcctgagcatggg

SEQ ID NO: 168016 - DNA, 25 bp, Artificial
  Probe
atctgagggtgagaagtaacaactg

SEQ ID NO: 168017 - DNA, 25 bp, Artificial
  Probe
cgttctataagtgttagcaagtata

SEQ ID NO: 168018 - DNA, 25 bp, Artificial
  Probe
cgaagttgtttaacatctgtggttt

SEQ ID NO: 168019 - DNA, 25 bp, Artificial
  Probe
atgttacatatggtccagataagtg

SEQ ID NO: 168020 - DNA, 25 bp, Artificial
  Probe
agcctgctgtaattataagatgttt

SEQ ID NO: 168021 - DNA, 25 bp, Artificial
  Probe
acatatggtccagataagtgagtgc

SEQ ID NO: 168022 - DNA, 25 bp, Artificial
  Probe
gtaagggaaagagctacagtgaatc

SEQ ID NO: 168023 - DNA, 25 bp, Artificial
  Probe
ggaagaatgttacatatggtccaga

SEQ ID NO: 168024 - DNA, 25 bp, Artificial
  Probe
taagggaaagagctacagtgaatca

SEQ ID NO: 168025 - DNA, 25 bp, Artificial
  Probe
gatctgagggtgagaagtaacaact

SEQ ID NO: 168026 - DNA, 25 bp, Artificial
  Probe
gtgagaagtaacaactggcaggatc

SEQ ID NO: 168027 - DNA, 25 bp, Artificial
  Probe
gagaagtaacaactggcaggatctg

SEQ ID NO: 168028 - DNA, 25 bp, Artificial
  Probe
tgagaagtaacaactggcaggatct

SEQ ID NO: 168029 - DNA, 25 bp, Artificial
  Probe
atgcttaatttgtgttgttgttatc

SEQ ID NO: 168030 - DNA, 25 bp, Artificial
  Probe
gatgcttaatttgtgttgttgttat

SEQ ID NO: 168031 - DNA, 25 bp, Artificial
  Probe
atatggtccagataagtgagtgccg

SEQ ID NO: 168032 - DNA, 25 bp, Artificial
  Probe
ttgaagatccatttaaccttaaagc

SEQ ID NO: 168033 - DNA, 25 bp, Artificial
  Probe
agataagtgagtgccgtttcatacc

SEQ ID NO: 168034 - DNA, 25 bp, Artificial
  Probe
tagtggaagacctacaagatgtgat

SEQ ID NO: 168035 - DNA, 25 bp, Artificial
  Probe
agtggaagacctacaagatgtgatc

SEQ ID NO: 168036 - DNA, 25 bp, Artificial
  Probe
tttaatgacacccgtatcagaagat

SEQ ID NO: 168037 - DNA, 25 bp, Artificial
  Probe
ttaatgacacccgtatcagaagatg

SEQ ID NO: 168038 - DNA, 25 bp, Artificial
  Probe
cttagatacgcctactttaccctcc

SEQ ID NO: 168039 - DNA, 25 bp, Artificial
  Probe
tagattctttcttgaacacttccag

SEQ ID NO: 168040 - DNA, 25 bp, Artificial
  Probe
attctttcttgaacacttccagcaa

SEQ ID NO: 168041 - DNA, 25 bp, Artificial
  Probe
taatgacacccgtatcagaagatga

SEQ ID NO: 168042 - DNA, 25 bp, Artificial
  Probe
agattctttcttgaacacttccagc

SEQ ID NO: 168043 - DNA, 25 bp, Artificial
  Probe
gattctttcttgaacacttccagca

SEQ ID NO: 168044 - DNA, 25 bp, Artificial
  Probe
gtagtggaagacctacaagatgtga

SEQ ID NO: 168045 - DNA, 25 bp, Artificial
  Probe
ttagatacgcctactttaccctcca

SEQ ID NO: 168046 - DNA, 25 bp, Artificial
  Probe
atagattctttcttgaacacttcca

SEQ ID NO: 168047 - DNA, 25 bp, Artificial
  Probe
gcttagatacgcctactttaccctc

SEQ ID NO: 168048 - DNA, 25 bp, Artificial
  Probe
aatgacacccgtatcagaagatgaa

SEQ ID NO: 168049 - DNA, 25 bp, Artificial
  Probe
ccatctttagaactccagctatcaa

SEQ ID NO: 168050 - DNA, 25 bp, Artificial
  Probe
ctccatctttagaactccagctatc

SEQ ID NO: 168051 - DNA, 25 bp, Artificial
  Probe
gatcaagcaggaatctgatgaatcc

SEQ ID NO: 168052 - DNA, 25 bp, Artificial
  Probe
cagctcaagaaattaaatacggtcc

SEQ ID NO: 168053 - DNA, 25 bp, Artificial
  Probe
cctggcagctcaagaaattaaatac

SEQ ID NO: 168054 - DNA, 25 bp, Artificial
  Probe
ttctttcttgaacacttccagcaac

SEQ ID NO: 168055 - DNA, 25 bp, Artificial
  Probe
tccatctttagaactccagctatca

SEQ ID NO: 168056 - DNA, 25 bp, Artificial
  Probe
actccatctttagaactccagctat

SEQ ID NO: 168057 - DNA, 25 bp, Artificial
  Probe
agaatggaccaccgttactgaagaa

SEQ ID NO: 168058 - DNA, 25 bp, Artificial
  Probe
gcagctcaagaaattaaatacggtc

SEQ ID NO: 168059 - DNA, 25 bp, Artificial
  Probe
ctggcagctcaagaaattaaatacg

SEQ ID NO: 168060 - DNA, 25 bp, Artificial
  Probe
atgacacccgtatcagaagatgaag

SEQ ID NO: 168061 - DNA, 25 bp, Artificial
  Probe
aactccatctttagaactccagcta

SEQ ID NO: 168062 - DNA, 25 bp, Artificial
  Probe
agctcaagaaattaaatacggtccc

SEQ ID NO: 168063 - DNA, 25 bp, Artificial
  Probe
atgagaatggaccaccgttactgaa

SEQ ID NO: 168064 - DNA, 25 bp, Artificial
  Probe
acccgtatcagaagatgaagacaac

SEQ ID NO: 168065 - DNA, 25 bp, Artificial
  Probe
cacccgtatcagaagatgaagacaa

SEQ ID NO: 168066 - DNA, 25 bp, Artificial
  Probe
ccctggcagctcaagaaattaaata

SEQ ID NO: 168067 - DNA, 25 bp, Artificial
  Probe
catctttagaactccagctatcaaa

SEQ ID NO: 168068 - DNA, 25 bp, Artificial
  Probe
acactccagtttatagattctttct

SEQ ID NO: 168069 - DNA, 25 bp, Artificial
  Probe
aaactccatctttagaactccagct

SEQ ID NO: 168070 - DNA, 25 bp, Artificial
  Probe
tagatacgcctactttaccctccac

SEQ ID NO: 168071 - DNA, 25 bp, Artificial
  Probe
ggcagctcaagaaattaaatacggt

SEQ ID NO: 168072 - DNA, 25 bp, Artificial
  Probe
tggcagctcaagaaattaaatacgg

SEQ ID NO: 168073 - DNA, 25 bp, Artificial
  Probe
gacacccgtatcagaagatgaagac

SEQ ID NO: 168074 - DNA, 25 bp, Artificial
  Probe
gagaatggaccaccgttactgaaga

SEQ ID NO: 168075 - DNA, 25 bp, Artificial
  Probe
gaatggaccaccgttactgaagaaa

SEQ ID NO: 168076 - DNA, 25 bp, Artificial
  Probe
tacaagatgtgatcaagcaggaatc

SEQ ID NO: 168077 - DNA, 25 bp, Artificial
  Probe
ctacaagatgtgatcaagcaggaat

SEQ ID NO: 168078 - DNA, 25 bp, Artificial
  Probe
ggaagacctacaagatgtgatcaag

SEQ ID NO: 168079 - DNA, 25 bp, Artificial
  Probe
gtttcattcccgaccctttatacta

SEQ ID NO: 168080 - DNA, 25 bp, Artificial
  Probe
tttcattcccgaccctttatactat

SEQ ID NO: 168081 - DNA, 25 bp, Artificial
  Probe
ttcattcccgaccctttatactatg

SEQ ID NO: 168082 - DNA, 25 bp, Artificial
  Probe
acagttgaaataaacagacagcaaa

SEQ ID NO: 168083 - DNA, 25 bp, Artificial
  Probe
ctgtttcattcccgaccctttatac

SEQ ID NO: 168084 - DNA, 25 bp, Artificial
  Probe
tctgtttcattcccgaccctttata

SEQ ID NO: 168085 - DNA, 25 bp, Artificial
  Probe
ttaagagacaactaagcctttcgtg

SEQ ID NO: 168086 - DNA, 25 bp, Artificial
  Probe
tacagttgaaataaacagacagcaa

SEQ ID NO: 168087 - DNA, 25 bp, Artificial
  Probe
tgtttcattcccgaccctttatact

SEQ ID NO: 168088 - DNA, 25 bp, Artificial
  Probe
gtacagttgaaataaacagacagca

SEQ ID NO: 168089 - DNA, 25 bp, Artificial
  Probe
ttctgtttcattcccgaccctttat

SEQ ID NO: 168090 - DNA, 25 bp, Artificial
  Probe
tcattcccgaccctttatactatgc

SEQ ID NO: 168091 - DNA, 25 bp, Artificial
  Probe
tgaacttaagagacaactaagcctt

SEQ ID NO: 168092 - DNA, 25 bp, Artificial
  Probe
catgaacttaagagacaactaagcc

SEQ ID NO: 168093 - DNA, 25 bp, Artificial
  Probe
atgaacttaagagacaactaagcct

SEQ ID NO: 168094 - DNA, 25 bp, Artificial
  Probe
acatgaacttaagagacaactaagc

SEQ ID NO: 168095 - DNA, 25 bp, Artificial
  Probe
taagagacaactaagcctttcgtgt

SEQ ID NO: 168096 - DNA, 25 bp, Artificial
  Probe
cttctgtttcattcccgacccttta

SEQ ID NO: 168097 - DNA, 25 bp, Artificial
  Probe
agagacaactaagcctttcgtgttt

SEQ ID NO: 168098 - DNA, 25 bp, Artificial
  Probe
aagagacaactaagcctttcgtgtt

SEQ ID NO: 168099 - DNA, 25 bp, Artificial
  Probe
tgaaataaacagacagcaaaatggt

SEQ ID NO: 168100 - DNA, 25 bp, Artificial
  Probe
ttctactctgtgatcgattcaatgc

SEQ ID NO: 168101 - DNA, 25 bp, Artificial
  Probe
agtacatgaacttaagagacaacta

SEQ ID NO: 168102 - DNA, 25 bp, Artificial
  Probe
cattcccgaccctttatactatgca

SEQ ID NO: 168103 - DNA, 25 bp, Artificial
  Probe
ttgaaataaacagacagcaaaatgg

SEQ ID NO: 168104 - DNA, 25 bp, Artificial
  Probe
cagttgaaataaacagacagcaaaa

SEQ ID NO: 168105 - DNA, 25 bp, Artificial
  Probe
gtacatgaacttaagagacaactaa

SEQ ID NO: 168106 - DNA, 25 bp, Artificial
  Probe
gaaataaacagacagcaaaatggta

SEQ ID NO: 168107 - DNA, 25 bp, Artificial
  Probe
cttaagagacaactaagcctttcgt

SEQ ID NO: 168108 - DNA, 25 bp, Artificial
  Probe
acttaagagacaactaagcctttcg

SEQ ID NO: 168109 - DNA, 25 bp, Artificial
  Probe
aacttaagagacaactaagcctttc

SEQ ID NO: 168110 - DNA, 25 bp, Artificial
  Probe
gaacttaagagacaactaagccttt

SEQ ID NO: 168111 - DNA, 25 bp, Artificial
  Probe
ataaacagacagcaaaatggtaaaa

SEQ ID NO: 168112 - DNA, 25 bp, Artificial
  Probe
aataaacagacagcaaaatggtaaa

SEQ ID NO: 168113 - DNA, 25 bp, Artificial
  Probe
aaataaacagacagcaaaatggtaa

SEQ ID NO: 168114 - DNA, 25 bp, Artificial
  Probe
gttgaaataaacagacagcaaaatg

SEQ ID NO: 168115 - DNA, 25 bp, Artificial
  Probe
agttgaaataaacagacagcaaaat

SEQ ID NO: 168116 - DNA, 25 bp, Artificial
  Probe
tctactctgtgatcgattcaatgcc

SEQ ID NO: 168117 - DNA, 25 bp, Artificial
  Probe
aagtacatgaacttaagagacaact

SEQ ID NO: 168118 - DNA, 25 bp, Artificial
  Probe
gagacaactaagcctttcgtgtttt

SEQ ID NO: 168119 - DNA, 25 bp, Artificial
  Probe
tgtacagttgaaataaacagacagc

SEQ ID NO: 168120 - DNA, 25 bp, Artificial
  Probe
attcaatgcccgatgcttctgtttc

SEQ ID NO: 168121 - DNA, 25 bp, Artificial
  Probe
gattcaatgcccgatgcttctgttt

SEQ ID NO: 168122 - DNA, 25 bp, Artificial
  Probe
tacatgaacttaagagacaactaag

SEQ ID NO: 168123 - DNA, 25 bp, Artificial
  Probe
tttctactctgtgatcgattcaatg

SEQ ID NO: 168124 - DNA, 25 bp, Artificial
  Probe
ccacactgttacgatgcaattctag

SEQ ID NO: 168125 - DNA, 25 bp, Artificial
  Probe
cacactgttacgatgcaattctagc

SEQ ID NO: 168126 - DNA, 25 bp, Artificial
  Probe
accacactgttacgatgcaattcta

SEQ ID NO: 168127 - DNA, 25 bp, Artificial
  Probe
gaattgcatttcttaccagtgtgac

SEQ ID NO: 168128 - DNA, 25 bp, Artificial
  Probe
gaatagaaacagtggtttgaagacc

SEQ ID NO: 168129 - DNA, 25 bp, Artificial
  Probe
ggaatagaaacagtggtttgaagac

SEQ ID NO: 168130 - DNA, 25 bp, Artificial
  Probe
tggaatagaaacagtggtttgaaga

SEQ ID NO: 168131 - DNA, 25 bp, Artificial
  Probe
ctggaatagaaacagtggtttgaag

SEQ ID NO: 168132 - DNA, 25 bp, Artificial
  Probe
tctggaatagaaacagtggtttgaa

SEQ ID NO: 168133 - DNA, 25 bp, Artificial
  Probe
ttctggaatagaaacagtggtttga

SEQ ID NO: 168134 - DNA, 25 bp, Artificial
  Probe
cttctggaatagaaacagtggtttg

SEQ ID NO: 168135 - DNA, 25 bp, Artificial
  Probe
ttcagtaggcttctggaatagaaac

SEQ ID NO: 168136 - DNA, 25 bp, Artificial
  Probe
tttcagtaggcttctggaatagaaa

SEQ ID NO: 168137 - DNA, 25 bp, Artificial
  Probe
cagtaggcttctggaatagaaacag

SEQ ID NO: 168138 - DNA, 25 bp, Artificial
  Probe
aatagaaacagtggtttgaagaccc

SEQ ID NO: 168139 - DNA, 25 bp, Artificial
  Probe
gtaggcttctggaatagaaacagtg

SEQ ID NO: 168140 - DNA, 25 bp, Artificial
  Probe
agtaggcttctggaatagaaacagt

SEQ ID NO: 168141 - DNA, 25 bp, Artificial
  Probe
tcagtaggcttctggaatagaaaca

SEQ ID NO: 168142 - DNA, 25 bp, Artificial
  Probe
cactgttacgatgcaattctagcca

SEQ ID NO: 168143 - DNA, 25 bp, Artificial
  Probe
acactgttacgatgcaattctagcc

SEQ ID NO: 168144 - DNA, 25 bp, Artificial
  Probe
aattgcatttcttaccagtgtgacc

SEQ ID NO: 168145 - DNA, 25 bp, Artificial
  Probe
gcttctggaatagaaacagtggttt

SEQ ID NO: 168146 - DNA, 25 bp, Artificial
  Probe
gaccacactgttacgatgcaattct

SEQ ID NO: 168147 - DNA, 25 bp, Artificial
  Probe
tcctagtcttatggaaagcaaatat

SEQ ID NO: 168148 - DNA, 25 bp, Artificial
  Probe
agtcttatggaaagcaaatatacaa

SEQ ID NO: 168149 - DNA, 25 bp, Artificial
  Probe
taggcttctggaatagaaacagtgg

SEQ ID NO: 168150 - DNA, 25 bp, Artificial
  Probe
tgaccacactgttacgatgcaattc

SEQ ID NO: 168151 - DNA, 25 bp, Artificial
  Probe
atgattttcagtaggcttctggaat

SEQ ID NO: 168152 - DNA, 25 bp, Artificial
  Probe
tgattttcagtaggcttctggaata

SEQ ID NO: 168153 - DNA, 25 bp, Artificial
  Probe
aatgattttcagtaggcttctggaa

SEQ ID NO: 168154 - DNA, 25 bp, Artificial
  Probe
attttcagtaggcttctggaataga

SEQ ID NO: 168155 - DNA, 25 bp, Artificial
  Probe
tttggctagaattgcatttcttacc

SEQ ID NO: 168156 - DNA, 25 bp, Artificial
  Probe
tagaattgcatttcttaccagtgtg

SEQ ID NO: 168157 - DNA, 25 bp, Artificial
  Probe
gattttcagtaggcttctggaatag

SEQ ID NO: 168158 - DNA, 25 bp, Artificial
  Probe
gctagaattgcatttcttaccagtg

SEQ ID NO: 168159 - DNA, 25 bp, Artificial
  Probe
tacaatgattttcagtaggcttctg

SEQ ID NO: 168160 - DNA, 25 bp, Artificial
  Probe
attgcatttcttaccagtgtgacca

SEQ ID NO: 168161 - DNA, 25 bp, Artificial
  Probe
ctagaattgcatttcttaccagtgt

SEQ ID NO: 168162 - DNA, 25 bp, Artificial
  Probe
caatgattttcagtaggcttctgga

SEQ ID NO: 168163 - DNA, 25 bp, Artificial
  Probe
atacaatgattttcagtaggcttct

SEQ ID NO: 168164 - DNA, 25 bp, Artificial
  Probe
agaattgcatttcttaccagtgtga

SEQ ID NO: 168165 - DNA, 25 bp, Artificial
  Probe
ttggctagaattgcatttcttacca

SEQ ID NO: 168166 - DNA, 25 bp, Artificial
  Probe
cctagtcttatggaaagcaaatata

SEQ ID NO: 168167 - DNA, 25 bp, Artificial
  Probe
acaatgattttcagtaggcttctgg

SEQ ID NO: 168168 - DNA, 25 bp, Artificial
  Probe
ggctagaattgcatttcttaccagt

SEQ ID NO: 168169 - DNA, 25 bp, Artificial
  Probe
tactatggaagccacatcactattg

SEQ ID NO: 168170 - DNA, 25 bp, Artificial
  Probe
gtactatggaagccacatcactatt

SEQ ID NO: 168171 - DNA, 25 bp, Artificial
  Probe
ttgtgtctgtcatttctctttcaaa

SEQ ID NO: 168172 - DNA, 25 bp, Artificial
  Probe
tttgtgtctgtcatttctctttcaa

SEQ ID NO: 168173 - DNA, 25 bp, Artificial
  Probe
cgtactatggaagccacatcactat

SEQ ID NO: 168174 - DNA, 25 bp, Artificial
  Probe
actatggaagccacatcactattgg

SEQ ID NO: 168175 - DNA, 25 bp, Artificial
  Probe
atttggtgaacaacgtactatggaa

SEQ ID NO: 168176 - DNA, 25 bp, Artificial
  Probe
ccttagatttggtgaacaacgtact

SEQ ID NO: 168177 - DNA, 25 bp, Artificial
  Probe
gatttggtgaacaacgtactatgga

SEQ ID NO: 168178 - DNA, 25 bp, Artificial
  Probe
agatttggtgaacaacgtactatgg

SEQ ID NO: 168179 - DNA, 25 bp, Artificial
  Probe
tagatttggtgaacaacgtactatg

SEQ ID NO: 168180 - DNA, 25 bp, Artificial
  Probe
cttagatttggtgaacaacgtacta

SEQ ID NO: 168181 - DNA, 25 bp, Artificial
  Probe
tttggtgaacaacgtactatggaag

SEQ ID NO: 168182 - DNA, 25 bp, Artificial
  Probe
ggtgaccttagatttggtgaacaac

SEQ ID NO: 168183 - DNA, 25 bp, Artificial
  Probe
gtcttttgtgtctgtcatttctctt

SEQ ID NO: 168184 - DNA, 25 bp, Artificial
  Probe
agtcttttgtgtctgtcatttctct

SEQ ID NO: 168185 - DNA, 25 bp, Artificial
  Probe
ttaaaacactaacggaaacccaaaa

SEQ ID NO: 168186 - DNA, 25 bp, Artificial
  Probe
cttaaaacactaacggaaacccaaa

SEQ ID NO: 168187 - DNA, 25 bp, Artificial
  Probe
ttttgtgtctgtcatttctctttca

SEQ ID NO: 168188 - DNA, 25 bp, Artificial
  Probe
ttggtgaacaacgtactatggaagc

SEQ ID NO: 168189 - DNA, 25 bp, Artificial
  Probe
tgtgtctgtcatttctctttcaaaa

SEQ ID NO: 168190 - DNA, 25 bp, Artificial
  Probe
tcttttgtgtctgtcatttctcttt

SEQ ID NO: 168191 - DNA, 25 bp, Artificial
  Probe
ttagatttggtgaacaacgtactat

SEQ ID NO: 168192 - DNA, 25 bp, Artificial
  Probe
tcttaaaacactaacggaaacccaa

SEQ ID NO: 168193 - DNA, 25 bp, Artificial
  Probe
gccccattttctttacagtcttttg

SEQ ID NO: 168194 - DNA, 25 bp, Artificial
  Probe
cttttgtgtctgtcatttctctttc

SEQ ID NO: 168195 - DNA, 25 bp, Artificial
  Probe
gtgaccttagatttggtgaacaacg

SEQ ID NO: 168196 - DNA, 25 bp, Artificial
  Probe
cttggggaaatgctatcagaaattc

SEQ ID NO: 168197 - DNA, 25 bp, Artificial
  Probe
gttcttaaaacactaacggaaaccc

SEQ ID NO: 168198 - DNA, 25 bp, Artificial
  Probe
ttcttaaaacactaacggaaaccca

SEQ ID NO: 168199 - DNA, 25 bp, Artificial
  Probe
agttcttaaaacactaacggaaacc

SEQ ID NO: 168200 - DNA, 25 bp, Artificial
  Probe
ccttggggaaatgctatcagaaatt

SEQ ID NO: 168201 - DNA, 25 bp, Artificial
  Probe
gaccttagatttggtgaacaacgta

SEQ ID NO: 168202 - DNA, 25 bp, Artificial
  Probe
acgtactatggaagccacatcacta

SEQ ID NO: 168203 - DNA, 25 bp, Artificial
  Probe
ccccattttctttacagtcttttgt

SEQ ID NO: 168204 - DNA, 25 bp, Artificial
  Probe
accttagatttggtgaacaacgtac

SEQ ID NO: 168205 - DNA, 25 bp, Artificial
  Probe
aggtgaccttagatttggtgaacaa

SEQ ID NO: 168206 - DNA, 25 bp, Artificial
  Probe
aacaacgtactatggaagccacatc

SEQ ID NO: 168207 - DNA, 25 bp, Artificial
  Probe
gaacaacgtactatggaagccacat

SEQ ID NO: 168208 - DNA, 25 bp, Artificial
  Probe
ttggggaaatgctatcagaaattcg

SEQ ID NO: 168209 - DNA, 25 bp, Artificial
  Probe
cagtcttttgtgtctgtcatttctc

SEQ ID NO: 168210 - DNA, 25 bp, Artificial
  Probe
ctatggaagccacatcactattggg

SEQ ID NO: 168211 - DNA, 25 bp, Artificial
  Probe
cccattttctttacagtcttttgtg

SEQ ID NO: 168212 - DNA, 25 bp, Artificial
  Probe
aattcgccccattttctttacagtc

SEQ ID NO: 168213 - DNA, 25 bp, Artificial
  Probe
cgccccattttctttacagtctttt

SEQ ID NO: 168214 - DNA, 25 bp, Artificial
  Probe
aggttcatctcttggtcattttagc

SEQ ID NO: 168215 - DNA, 25 bp, Artificial
  Probe
gctagaggttcatctcttggtcatt

SEQ ID NO: 168216 - DNA, 25 bp, Artificial
  Probe
gaggttcatctcttggtcattttag

SEQ ID NO: 168217 - DNA, 25 bp, Artificial
  Probe
ggttcatctcttggtcattttagcc

SEQ ID NO: 168218 - DNA, 25 bp, Artificial
  Probe
ctagaggttcatctcttggtcattt

SEQ ID NO: 168219 - DNA, 25 bp, Artificial
  Probe
ttcatctcttggtcattttagccac

SEQ ID NO: 168220 - DNA, 25 bp, Artificial
  Probe
gttcatctcttggtcattttagcca

SEQ ID NO: 168221 - DNA, 25 bp, Artificial
  Probe
ggctagaggttcatctcttggtcat

SEQ ID NO: 168222 - DNA, 25 bp, Artificial
  Probe
ccttaggttacccatctgacactgc

SEQ ID NO: 168223 - DNA, 25 bp, Artificial
  Probe
gccttaggttacccatctgacactg

SEQ ID NO: 168224 - DNA, 25 bp, Artificial
  Probe
cttaggttacccatctgacactgcg

SEQ ID NO: 168225 - DNA, 25 bp, Artificial
  Probe
tcatctcttggtcattttagccacc

SEQ ID NO: 168226 - DNA, 25 bp, Artificial
  Probe
agaggttcatctcttggtcatttta

SEQ ID NO: 168227 - DNA, 25 bp, Artificial
  Probe
tagaggttcatctcttggtcatttt

SEQ ID NO: 168228 - DNA, 25 bp, Artificial
  Probe
ttttgtatgagccattttgtataaa

SEQ ID NO: 168229 - DNA, 25 bp, Artificial
  Probe
catctcttggtcattttagccaccc

SEQ ID NO: 168230 - DNA, 25 bp, Artificial
  Probe
atctcttggtcattttagccaccca

SEQ ID NO: 168231 - DNA, 25 bp, Artificial
  Probe
ttgtatgagccattttgtataaatt

SEQ ID NO: 168232 - DNA, 25 bp, Artificial
  Probe
tttgtatgagccattttgtataaat

SEQ ID NO: 168233 - DNA, 25 bp, Artificial
  Probe
tctcttggtcattttagccacccac

SEQ ID NO: 168234 - DNA, 25 bp, Artificial
  Probe
ctggtatttgttggggacaccctag

SEQ ID NO: 168235 - DNA, 25 bp, Artificial
  Probe
atagcatccagaagaagtgttgaag

SEQ ID NO: 168236 - DNA, 25 bp, Artificial
  Probe
tgatgacaatgtagaggatgacttc

SEQ ID NO: 168237 - DNA, 25 bp, Artificial
  Probe
gatgatgacaatgtagaggatgact

SEQ ID NO: 168238 - DNA, 25 bp, Artificial
  Probe
atgatgacaatgtagaggatgactt

SEQ ID NO: 168239 - DNA, 25 bp, Artificial
  Probe
catagcatccagaagaagtgttgaa

SEQ ID NO: 168240 - DNA, 25 bp, Artificial
  Probe
ccagaagaagtgttgaagtaaccta

SEQ ID NO: 168241 - DNA, 25 bp, Artificial
  Probe
catccagaagaagtgttgaagtaac

SEQ ID NO: 168242 - DNA, 25 bp, Artificial
  Probe
ggatgatgacaatgtagaggatgac

SEQ ID NO: 168243 - DNA, 25 bp, Artificial
  Probe
gcatccagaagaagtgttgaagtaa

SEQ ID NO: 168244 - DNA, 25 bp, Artificial
  Probe
atccagaagaagtgttgaagtaacc

SEQ ID NO: 168245 - DNA, 25 bp, Artificial
  Probe
gatgacaatgtagaggatgacttct

SEQ ID NO: 168246 - DNA, 25 bp, Artificial
  Probe
ttcatagcatccagaagaagtgttg

SEQ ID NO: 168247 - DNA, 25 bp, Artificial
  Probe
ggatgacttctctaatcagttacga

SEQ ID NO: 168248 - DNA, 25 bp, Artificial
  Probe
aggatgacttctctaatcagttacg

SEQ ID NO: 168249 - DNA, 25 bp, Artificial
  Probe
atgacttctctaatcagttacgagc

SEQ ID NO: 168250 - DNA, 25 bp, Artificial
  Probe
cagaagaagtgttgaagtaacctaa

SEQ ID NO: 168251 - DNA, 25 bp, Artificial
  Probe
atgacaatgtagaggatgacttctc

SEQ ID NO: 168252 - DNA, 25 bp, Artificial
  Probe
ctggcttagatgaagatgaagatgc

SEQ ID NO: 168253 - DNA, 25 bp, Artificial
  Probe
gctggcttagatgaagatgaagatg

SEQ ID NO: 168254 - DNA, 25 bp, Artificial
  Probe
tccagaagaagtgttgaagtaacct

SEQ ID NO: 168255 - DNA, 25 bp, Artificial
  Probe
agcatccagaagaagtgttgaagta

SEQ ID NO: 168256 - DNA, 25 bp, Artificial
  Probe
tagcatccagaagaagtgttgaagt

SEQ ID NO: 168257 - DNA, 25 bp, Artificial
  Probe
acttgacctgcttaatacattctag

SEQ ID NO: 168258 - DNA, 25 bp, Artificial
  Probe
aacttgacctgcttaatacattcta

SEQ ID NO: 168259 - DNA, 25 bp, Artificial
  Probe
gatgacttctctaatcagttacgag

SEQ ID NO: 168260 - DNA, 25 bp, Artificial
  Probe
tcatagcatccagaagaagtgttga

SEQ ID NO: 168261 - DNA, 25 bp, Artificial
  Probe
acatggttataagatggagacttca

SEQ ID NO: 168262 - DNA, 25 bp, Artificial
  Probe
gaggatgacttctctaatcagttac

SEQ ID NO: 168263 - DNA, 25 bp, Artificial
  Probe
cttgacctgcttaatacattctagg

SEQ ID NO: 168264 - DNA, 25 bp, Artificial
  Probe
ggttataagatggagacttcatagc

SEQ ID NO: 168265 - DNA, 25 bp, Artificial
  Probe
ggctggcttagatgaagatgaagat

SEQ ID NO: 168266 - DNA, 25 bp, Artificial
  Probe
aacatggttataagatggagacttc

SEQ ID NO: 168267 - DNA, 25 bp, Artificial
  Probe
acctaaacttgacctgcttaataca

SEQ ID NO: 168268 - DNA, 25 bp, Artificial
  Probe
catggttataagatggagacttcat

SEQ ID NO: 168269 - DNA, 25 bp, Artificial
  Probe
gttataagatggagacttcatagca

SEQ ID NO: 168270 - DNA, 25 bp, Artificial
  Probe
ttagatgaagatgaagatgcacatg

SEQ ID NO: 168271 - DNA, 25 bp, Artificial
  Probe
tgacttctctaatcagttacgagct

SEQ ID NO: 168272 - DNA, 25 bp, Artificial
  Probe
aacctaaacttgacctgcttaatac

SEQ ID NO: 168273 - DNA, 25 bp, Artificial
  Probe
gtaacctaaacttgacctgcttaat

SEQ ID NO: 168274 - DNA, 25 bp, Artificial
  Probe
cttagatgaagatgaagatgcacat

SEQ ID NO: 168275 - DNA, 25 bp, Artificial
  Probe
cctaaacttgacctgcttaatacat

SEQ ID NO: 168276 - DNA, 25 bp, Artificial
  Probe
gcttagatgaagatgaagatgcaca

SEQ ID NO: 168277 - DNA, 25 bp, Artificial
  Probe
aaacttgacctgcttaatacattct

SEQ ID NO: 168278 - DNA, 25 bp, Artificial
  Probe
gacttctctaatcagttacgagctg

SEQ ID NO: 168279 - DNA, 25 bp, Artificial
  Probe
agtaacctaaacttgacctgcttaa

SEQ ID NO: 168280 - DNA, 25 bp, Artificial
  Probe
gtcctgttgtggtgaactgttatag

SEQ ID NO: 168281 - DNA, 25 bp, Artificial
  Probe
attgtatatgtgtagcgatgtgatc

SEQ ID NO: 168282 - DNA, 25 bp, Artificial
  Probe
tctctgaggtgaagcgagttattaa

SEQ ID NO: 168283 - DNA, 25 bp, Artificial
  Probe
ctgaggtgaagcgagttattaattg

SEQ ID NO: 168284 - DNA, 25 bp, Artificial
  Probe
tctgaggtgaagcgagttattaatt

SEQ ID NO: 168285 - DNA, 25 bp, Artificial
  Probe
gaggtgaagcgagttattaattgac

SEQ ID NO: 168286 - DNA, 25 bp, Artificial
  Probe
tgaggtgaagcgagttattaattga

SEQ ID NO: 168287 - DNA, 25 bp, Artificial
  Probe
tattgtatatgtgtagcgatgtgat

SEQ ID NO: 168288 - DNA, 25 bp, Artificial
  Probe
atattgtatatgtgtagcgatgtga

SEQ ID NO: 168289 - DNA, 25 bp, Artificial
  Probe
gatcacactgtcttggaattacatt

SEQ ID NO: 168290 - DNA, 25 bp, Artificial
  Probe
tcacactgtcttggaattacattaa

SEQ ID NO: 168291 - DNA, 25 bp, Artificial
  Probe
gtctctgaggtgaagcgagttatta

SEQ ID NO: 168292 - DNA, 25 bp, Artificial
  Probe
atcacactgtcttggaattacatta

SEQ ID NO: 168293 - DNA, 25 bp, Artificial
  Probe
tggtgaactgttatagcttgttact

SEQ ID NO: 168294 - DNA, 25 bp, Artificial
  Probe
gtggtgaactgttatagcttgttac

SEQ ID NO: 168295 - DNA, 25 bp, Artificial
  Probe
tgtggtgaactgttatagcttgtta

SEQ ID NO: 168296 - DNA, 25 bp, Artificial
  Probe
ggtcctgttgtggtgaactgttata

SEQ ID NO: 168297 - DNA, 25 bp, Artificial
  Probe
ctctgaggtgaagcgagttattaat

SEQ ID NO: 168298 - DNA, 25 bp, Artificial
  Probe
ggtgaactgttatagcttgttactc

SEQ ID NO: 168299 - DNA, 25 bp, Artificial
  Probe
ttgtggtgaactgttatagcttgtt

SEQ ID NO: 168300 - DNA, 25 bp, Artificial
  Probe
ctgttgtggtgaactgttatagctt

SEQ ID NO: 168301 - DNA, 25 bp, Artificial
  Probe
tcctgttgtggtgaactgttatagc

SEQ ID NO: 168302 - DNA, 25 bp, Artificial
  Probe
gtgaactgttatagcttgttactca

SEQ ID NO: 168303 - DNA, 25 bp, Artificial
  Probe
gttgtggtgaactgttatagcttgt

SEQ ID NO: 168304 - DNA, 25 bp, Artificial
  Probe
tgttgtggtgaactgttatagcttg

SEQ ID NO: 168305 - DNA, 25 bp, Artificial
  Probe
cattaaactgtttggaatcactgga

SEQ ID NO: 168306 - DNA, 25 bp, Artificial
  Probe
atattactaactgtagggtgaggcg

SEQ ID NO: 168307 - DNA, 25 bp, Artificial
  Probe
ttaaactgtttggaatcactggaaa

SEQ ID NO: 168308 - DNA, 25 bp, Artificial
  Probe
attaaactgtttggaatcactggaa

SEQ ID NO: 168309 - DNA, 25 bp, Artificial
  Probe
tgaactgttatagcttgttactcag

SEQ ID NO: 168310 - DNA, 25 bp, Artificial
  Probe
aggtgaagcgagttattaattgacc

SEQ ID NO: 168311 - DNA, 25 bp, Artificial
  Probe
agcgagttattaattgaccctgtaa

SEQ ID NO: 168312 - DNA, 25 bp, Artificial
  Probe
aagcgagttattaattgaccctgta

SEQ ID NO: 168313 - DNA, 25 bp, Artificial
  Probe
taactgatgaagttgtcgctactaa

SEQ ID NO: 168314 - DNA, 25 bp, Artificial
  Probe
ttaactgatgaagttgtcgctacta

SEQ ID NO: 168315 - DNA, 25 bp, Artificial
  Probe
aattcttaactgatgaagttgtcgc

SEQ ID NO: 168316 - DNA, 25 bp, Artificial
  Probe
acattaaactgtttggaatcactgg

SEQ ID NO: 168317 - DNA, 25 bp, Artificial
  Probe
ttcttaactgatgaagttgtcgcta

SEQ ID NO: 168318 - DNA, 25 bp, Artificial
  Probe
aatattactaactgtagggtgaggc

SEQ ID NO: 168319 - DNA, 25 bp, Artificial
  Probe
gcgagttattaattgaccctgtaaa

SEQ ID NO: 168320 - DNA, 25 bp, Artificial
  Probe
attcttaactgatgaagttgtcgct

SEQ ID NO: 168321 - DNA, 25 bp, Artificial
  Probe
cttaactgatgaagttgtcgctact

SEQ ID NO: 168322 - DNA, 25 bp, Artificial
  Probe
tcttaactgatgaagttgtcgctac

SEQ ID NO: 168323 - DNA, 25 bp, Artificial
  Probe
gaagcgagttattaattgaccctgt

SEQ ID NO: 168324 - DNA, 25 bp, Artificial
  Probe
tgaagcgagttattaattgaccctg

SEQ ID NO: 168325 - DNA, 25 bp, Artificial
  Probe
ttatagagtgtccatagtgtcctgt

SEQ ID NO: 168326 - DNA, 25 bp, Artificial
  Probe
cttatagagtgtccatagtgtcctg

SEQ ID NO: 168327 - DNA, 25 bp, Artificial
  Probe
tatagagtgtccatagtgtcctgtc

SEQ ID NO: 168328 - DNA, 25 bp, Artificial
  Probe
tcttatagagtgtccatagtgtcct

SEQ ID NO: 168329 - DNA, 25 bp, Artificial
  Probe
atagagtgtccatagtgtcctgtca

SEQ ID NO: 168330 - DNA, 25 bp, Artificial
  Probe
tagagtgtccatagtgtcctgtcaa

SEQ ID NO: 168331 - DNA, 25 bp, Artificial
  Probe
atcatttacattatgtgggaagggt

SEQ ID NO: 168332 - DNA, 25 bp, Artificial
  Probe
catcatttacattatgtgggaaggg

SEQ ID NO: 168333 - DNA, 25 bp, Artificial
  Probe
gcatcatttacattatgtgggaagg

SEQ ID NO: 168334 - DNA, 25 bp, Artificial
  Probe
cagcatcatttacattatgtgggaa

SEQ ID NO: 168335 - DNA, 25 bp, Artificial
  Probe
agcatcatttacattatgtgggaag

SEQ ID NO: 168336 - DNA, 25 bp, Artificial
  Probe
atttacattatgtgggaagggtgac

SEQ ID NO: 168337 - DNA, 25 bp, Artificial
  Probe
catttacattatgtgggaagggtga

SEQ ID NO: 168338 - DNA, 25 bp, Artificial
  Probe
tcatttacattatgtgggaagggtg

SEQ ID NO: 168339 - DNA, 25 bp, Artificial
  Probe
gctactttgaaatcacggatgagtc

SEQ ID NO: 168340 - DNA, 25 bp, Artificial
  Probe
ggacgccagcatcatttacattatg

SEQ ID NO: 168341 - DNA, 25 bp, Artificial
  Probe
ctcttatagagtgtccatagtgtcc

SEQ ID NO: 168342 - DNA, 25 bp, Artificial
  Probe
ctactttgaaatcacggatgagtcc

SEQ ID NO: 168343 - DNA, 25 bp, Artificial
  Probe
tttacattatgtgggaagggtgaca

SEQ ID NO: 168344 - DNA, 25 bp, Artificial
  Probe
gagtgtccatagtgtcctgtcaaac

SEQ ID NO: 168345 - DNA, 25 bp, Artificial
  Probe
ccagcatcatttacattatgtggga

SEQ ID NO: 168346 - DNA, 25 bp, Artificial
  Probe
gacgccagcatcatttacattatgt

SEQ ID NO: 168347 - DNA, 25 bp, Artificial
  Probe
agagtgtccatagtgtcctgtcaaa

SEQ ID NO: 168348 - DNA, 25 bp, Artificial
  Probe
ttacattatgtgggaagggtgacag

SEQ ID NO: 168349 - DNA, 25 bp, Artificial
  Probe
acgccagcatcatttacattatgtg

SEQ ID NO: 168350 - DNA, 25 bp, Artificial
  Probe
cagtatccgctactttgaaatcacg

SEQ ID NO: 168351 - DNA, 25 bp, Artificial
  Probe
tactttgaaatcacggatgagtccc

SEQ ID NO: 168352 - DNA, 25 bp, Artificial
  Probe
gcagtatccgctactttgaaatcac

SEQ ID NO: 168353 - DNA, 25 bp, Artificial
  Probe
gtgtgaacttcttctcatgacagtc

SEQ ID NO: 168354 - DNA, 25 bp, Artificial
  Probe
agtgtgaacttcttctcatgacagt

SEQ ID NO: 168355 - DNA, 25 bp, Artificial
  Probe
cgctactttgaaatcacggatgagt

SEQ ID NO: 168356 - DNA, 25 bp, Artificial
  Probe
cagcagtatccgctactttgaaatc

SEQ ID NO: 168357 - DNA, 25 bp, Artificial
  Probe
gccagcatcatttacattatgtggg

SEQ ID NO: 168358 - DNA, 25 bp, Artificial
  Probe
cggacgccagcatcatttacattat

SEQ ID NO: 168359 - DNA, 25 bp, Artificial
  Probe
agcagtatccgctactttgaaatca

SEQ ID NO: 168360 - DNA, 25 bp, Artificial
  Probe
agtgtccatagtgtcctgtcaaaca

SEQ ID NO: 168361 - DNA, 25 bp, Artificial
  Probe
acgagagaaagtgtgaacttcttct

SEQ ID NO: 168362 - DNA, 25 bp, Artificial
  Probe
cacgagagaaagtgtgaacttcttc

SEQ ID NO: 168363 - DNA, 25 bp, Artificial
  Probe
cgccagcatcatttacattatgtgg

SEQ ID NO: 168364 - DNA, 25 bp, Artificial
  Probe
tgtgaacttcttctcatgacagtcc

SEQ ID NO: 168365 - DNA, 25 bp, Artificial
  Probe
gcttccgttttcagagataaaagac

SEQ ID NO: 168366 - DNA, 25 bp, Artificial
  Probe
acagcagtatccgctactttgaaat

SEQ ID NO: 168367 - DNA, 25 bp, Artificial
  Probe
cttccgttttcagagataaaagaca

SEQ ID NO: 168368 - DNA, 25 bp, Artificial
  Probe
ccgttttcagagataaaagacattg

SEQ ID NO: 168369 - DNA, 25 bp, Artificial
  Probe
tccgttttcagagataaaagacatt

SEQ ID NO: 168370 - DNA, 25 bp, Artificial
  Probe
gaagacttggagaacacattgaagg

SEQ ID NO: 168371 - DNA, 25 bp, Artificial
  Probe
ggaagacttggagaacacattgaag

SEQ ID NO: 168372 - DNA, 25 bp, Artificial
  Probe
cttggagaacacattgaaggctcta

SEQ ID NO: 168373 - DNA, 25 bp, Artificial
  Probe
aacagtgagatttacgactacctac

SEQ ID NO: 168374 - DNA, 25 bp, Artificial
  Probe
ttggagaacacattgaaggctctac

SEQ ID NO: 168375 - DNA, 25 bp, Artificial
  Probe
gaacagtgagatttacgactaccta

SEQ ID NO: 168376 - DNA, 25 bp, Artificial
  Probe
gagaacagtgagatttacgactacc

SEQ ID NO: 168377 - DNA, 25 bp, Artificial
  Probe
ggagaacagtgagatttacgactac

SEQ ID NO: 168378 - DNA, 25 bp, Artificial
  Probe
agaacagtgagatttacgactacct

SEQ ID NO: 168379 - DNA, 25 bp, Artificial
  Probe
tggagaacagtgagatttacgacta

SEQ ID NO: 168380 - DNA, 25 bp, Artificial
  Probe
aagacttggagaacacattgaaggc

SEQ ID NO: 168381 - DNA, 25 bp, Artificial
  Probe
acagtgagatttacgactacctacg

SEQ ID NO: 168382 - DNA, 25 bp, Artificial
  Probe
gtggagaacagtgagatttacgact

SEQ ID NO: 168383 - DNA, 25 bp, Artificial
  Probe
gggaagacttggagaacacattgaa

SEQ ID NO: 168384 - DNA, 25 bp, Artificial
  Probe
caagtggattgctatcgagagtctg

SEQ ID NO: 168385 - DNA, 25 bp, Artificial
  Probe
tcaagtggattgctatcgagagtct

SEQ ID NO: 168386 - DNA, 25 bp, Artificial
  Probe
gtcaagtggattgctatcgagagtc

SEQ ID NO: 168387 - DNA, 25 bp, Artificial
  Probe
cagtcaagtggattgctatcgagag

SEQ ID NO: 168388 - DNA, 25 bp, Artificial
  Probe
gacttggagaacacattgaaggctc

SEQ ID NO: 168389 - DNA, 25 bp, Artificial
  Probe
ggtggagaacagtgagatttacgac

SEQ ID NO: 168390 - DNA, 25 bp, Artificial
  Probe
agacttggagaacacattgaaggct

SEQ ID NO: 168391 - DNA, 25 bp, Artificial
  Probe
agtcaagtggattgctatcgagagt

SEQ ID NO: 168392 - DNA, 25 bp, Artificial
  Probe
acttggagaacacattgaaggctct

SEQ ID NO: 168393 - DNA, 25 bp, Artificial
  Probe
tggagaacacattgaaggctctacc

SEQ ID NO: 168394 - DNA, 25 bp, Artificial
  Probe
gatgccagtcaagtggattgctatc

SEQ ID NO: 168395 - DNA, 25 bp, Artificial
  Probe
aagtggattgctatcgagagtctgg

SEQ ID NO: 168396 - DNA, 25 bp, Artificial
  Probe
agatgccagtcaagtggattgctat

SEQ ID NO: 168397 - DNA, 25 bp, Artificial
  Probe
gggtggagaacagtgagatttacga

SEQ ID NO: 168398 - DNA, 25 bp, Artificial
  Probe
aagatgccagtcaagtggattgcta

SEQ ID NO: 168399 - DNA, 25 bp, Artificial
  Probe
gagatttacgactacctacgtcaag

SEQ ID NO: 168400 - DNA, 25 bp, Artificial
  Probe
tgagatttacgactacctacgtcaa

SEQ ID NO: 168401 - DNA, 25 bp, Artificial
  Probe
cagatcgagtctacaccagcaagag

SEQ ID NO: 168402 - DNA, 25 bp, Artificial
  Probe
ttacgactacctacgtcaaggaaat

SEQ ID NO: 168403 - DNA, 25 bp, Artificial
  Probe
atttacgactacctacgtcaaggaa

SEQ ID NO: 168404 - DNA, 25 bp, Artificial
  Probe
tttacgactacctacgtcaaggaaa

SEQ ID NO: 168405 - DNA, 25 bp, Artificial
  Probe
agtgagatttacgactacctacgtc

SEQ ID NO: 168406 - DNA, 25 bp, Artificial
  Probe
agatttacgactacctacgtcaagg

SEQ ID NO: 168407 - DNA, 25 bp, Artificial
  Probe
tacgactacctacgtcaaggaaatc

SEQ ID NO: 168408 - DNA, 25 bp, Artificial
  Probe
gatttacgactacctacgtcaagga

SEQ ID NO: 168409 - DNA, 25 bp, Artificial
  Probe
gtgagatttacgactacctacgtca

SEQ ID NO: 168410 - DNA, 25 bp, Artificial
  Probe
cagtgagatttacgactacctacgt

SEQ ID NO: 168411 - DNA, 25 bp, Artificial
  Probe
ccagtcaagtggattgctatcgaga

SEQ ID NO: 168412 - DNA, 25 bp, Artificial
  Probe
agatcgagtctacaccagcaagagt

SEQ ID NO: 168413 - DNA, 25 bp, Artificial
  Probe
cgggaagacttggagaacacattga

SEQ ID NO: 168414 - DNA, 25 bp, Artificial
  Probe
gagagtctggcagatcgagtctaca

SEQ ID NO: 168415 - DNA, 25 bp, Artificial
  Probe
atttactcccgtggcttccaaattc

SEQ ID NO: 168416 - DNA, 25 bp, Artificial
  Probe
aaatttactcccgtggcttccaaat

SEQ ID NO: 168417 - DNA, 25 bp, Artificial
  Probe
aatttactcccgtggcttccaaatt

SEQ ID NO: 168418 - DNA, 25 bp, Artificial
  Probe
ctccagtggcacctaaatttactcc

SEQ ID NO: 168419 - DNA, 25 bp, Artificial
  Probe
ctagcttcacctatgctcagcagaa

SEQ ID NO: 168420 - DNA, 25 bp, Artificial
  Probe
tagcttcacctatgctcagcagaag

SEQ ID NO: 168421 - DNA, 25 bp, Artificial
  Probe
taaatttactcccgtggcttccaaa

SEQ ID NO: 168422 - DNA, 25 bp, Artificial
  Probe
tttactcccgtggcttccaaattca

SEQ ID NO: 168423 - DNA, 25 bp, Artificial
  Probe
ggagaagcccctagttcaagagaag

SEQ ID NO: 168424 - DNA, 25 bp, Artificial
  Probe
ctaaatttactcccgtggcttccaa

SEQ ID NO: 168425 - DNA, 25 bp, Artificial
  Probe
gctccagtggcacctaaatttactc

SEQ ID NO: 168426 - DNA, 25 bp, Artificial
  Probe
cacctatgctcagcagaaggagaag

SEQ ID NO: 168427 - DNA, 25 bp, Artificial
  Probe
ttactcccgtggcttccaaattcag

SEQ ID NO: 168428 - DNA, 25 bp, Artificial
  Probe
taagtttgctccagtggcacctaaa

SEQ ID NO: 168429 - DNA, 25 bp, Artificial
  Probe
caaaaccaaaaccaggtacgttctc

SEQ ID NO: 168430 - DNA, 25 bp, Artificial
  Probe
ctcaaaaccaaaaccaggtacgttc

SEQ ID NO: 168431 - DNA, 25 bp, Artificial
  Probe
cttcacctatgctcagcagaaggag

SEQ ID NO: 168432 - DNA, 25 bp, Artificial
  Probe
cacctaaatttactcccgtggcttc

SEQ ID NO: 168433 - DNA, 25 bp, Artificial
  Probe
gaaggagaagcccctagttcaagag

SEQ ID NO: 168434 - DNA, 25 bp, Artificial
  Probe
tttgctccagtggcacctaaattta

SEQ ID NO: 168435 - DNA, 25 bp, Artificial
  Probe
tcaaaaccaaaaccaggtacgttct

SEQ ID NO: 168436 - DNA, 25 bp, Artificial
  Probe
tcacctatgctcagcagaaggagaa

SEQ ID NO: 168437 - DNA, 25 bp, Artificial
  Probe
ttcacctatgctcagcagaaggaga

SEQ ID NO: 168438 - DNA, 25 bp, Artificial
  Probe
gagaagcccctagttcaagagaagc

SEQ ID NO: 168439 - DNA, 25 bp, Artificial
  Probe
ctaagtttgctccagtggcacctaa

SEQ ID NO: 168440 - DNA, 25 bp, Artificial
  Probe
gtttgctccagtggcacctaaattt

SEQ ID NO: 168441 - DNA, 25 bp, Artificial
  Probe
tccagtggcacctaaatttactccc

SEQ ID NO: 168442 - DNA, 25 bp, Artificial
  Probe
cagaaggagaagcccctagttcaag

SEQ ID NO: 168443 - DNA, 25 bp, Artificial
  Probe
acctaaatttactcccgtggcttcc

SEQ ID NO: 168444 - DNA, 25 bp, Artificial
  Probe
aggagaagcccctagttcaagagaa

SEQ ID NO: 168445 - DNA, 25 bp, Artificial
  Probe
aaggagaagcccctagttcaagaga

SEQ ID NO: 168446 - DNA, 25 bp, Artificial
  Probe
agaaggagaagcccctagttcaaga

SEQ ID NO: 168447 - DNA, 25 bp, Artificial
  Probe
agtttgctccagtggcacctaaatt

SEQ ID NO: 168448 - DNA, 25 bp, Artificial
  Probe
aagtttgctccagtggcacctaaat

SEQ ID NO: 168449 - DNA, 25 bp, Artificial
  Probe
gaagcccctagttcaagagaagcag

SEQ ID NO: 168450 - DNA, 25 bp, Artificial
  Probe
ttgctccagtggcacctaaatttac

SEQ ID NO: 168451 - DNA, 25 bp, Artificial
  Probe
aaaaccaaaaccaggtacgttctcc

SEQ ID NO: 168452 - DNA, 25 bp, Artificial
  Probe
cagtggcacctaaatttactcccgt

SEQ ID NO: 168453 - DNA, 25 bp, Artificial
  Probe
cctaaatttactcccgtggcttcca

SEQ ID NO: 168454 - DNA, 25 bp, Artificial
  Probe
agtggcacctaaatttactcccgtg

SEQ ID NO: 168455 - DNA, 25 bp, Artificial
  Probe
aaaccaaaaccaggtacgttctcct

SEQ ID NO: 168456 - DNA, 25 bp, Artificial
  Probe
ccagctcaaaaccaaaaccaggtac

SEQ ID NO: 168457 - DNA, 25 bp, Artificial
  Probe
tgctccagtggcacctaaatttact

SEQ ID NO: 168458 - DNA, 25 bp, Artificial
  Probe
gctcaaaaccaaaaccaggtacgtt

SEQ ID NO: 168459 - DNA, 25 bp, Artificial
  Probe
cagctcaaaaccaaaaccaggtacg

SEQ ID NO: 168460 - DNA, 25 bp, Artificial
  Probe
attaaggaacaatcaagatgacgga

SEQ ID NO: 168461 - DNA, 25 bp, Artificial
  Probe
aattaaggaacaatcaagatgacgg

SEQ ID NO: 168462 - DNA, 25 bp, Artificial
  Probe
ttaaggaacaatcaagatgacggag

SEQ ID NO: 168463 - DNA, 25 bp, Artificial
  Probe
ctggaattaaggaacaatcaagatg

SEQ ID NO: 168464 - DNA, 25 bp, Artificial
  Probe
taaggaacaatcaagatgacggaga

SEQ ID NO: 168465 - DNA, 25 bp, Artificial
  Probe
gaattaaggaacaatcaagatgacg

SEQ ID NO: 168466 - DNA, 25 bp, Artificial
  Probe
aagatgacgagagtctaaccaagta

SEQ ID NO: 168467 - DNA, 25 bp, Artificial
  Probe
acgagagtctaaccaagtacaagaa

SEQ ID NO: 168468 - DNA, 25 bp, Artificial
  Probe
tggaattaaggaacaatcaagatga

SEQ ID NO: 168469 - DNA, 25 bp, Artificial
  Probe
ggaattaaggaacaatcaagatgac

SEQ ID NO: 168470 - DNA, 25 bp, Artificial
  Probe
cctggaattaaggaacaatcaagat

SEQ ID NO: 168471 - DNA, 25 bp, Artificial
  Probe
aacaatcaagatgacggagaaggat

SEQ ID NO: 168472 - DNA, 25 bp, Artificial
  Probe
gcctggaattaaggaacaatcaaga

SEQ ID NO: 168473 - DNA, 25 bp, Artificial
  Probe
agcctggaattaaggaacaatcaag

SEQ ID NO: 168474 - DNA, 25 bp, Artificial
  Probe
gagcctggaattaaggaacaatcaa

SEQ ID NO: 168475 - DNA, 25 bp, Artificial
  Probe
aatcaagatgacggagaaggatgag

SEQ ID NO: 168476 - DNA, 25 bp, Artificial
  Probe
aaggaacaatcaagatgacggagaa

SEQ ID NO: 168477 - DNA, 25 bp, Artificial
  Probe
atgacgagagtctaaccaagtacaa

SEQ ID NO: 168478 - DNA, 25 bp, Artificial
  Probe
agatgacgagagtctaaccaagtac

SEQ ID NO: 168479 - DNA, 25 bp, Artificial
  Probe
caatcaagatgacggagaaggatga

SEQ ID NO: 168480 - DNA, 25 bp, Artificial
  Probe
gacgagagtctaaccaagtacaaga

SEQ ID NO: 168481 - DNA, 25 bp, Artificial
  Probe
gatgacgagagtctaaccaagtaca

SEQ ID NO: 168482 - DNA, 25 bp, Artificial
  Probe
gaacaatcaagatgacggagaagga

SEQ ID NO: 168483 - DNA, 25 bp, Artificial
  Probe
aggaacaatcaagatgacggagaag

SEQ ID NO: 168484 - DNA, 25 bp, Artificial
  Probe
acaatcaagatgacggagaaggatg

SEQ ID NO: 168485 - DNA, 25 bp, Artificial
  Probe
tgacgagagtctaaccaagtacaag

SEQ ID NO: 168486 - DNA, 25 bp, Artificial
  Probe
aggagcctggaattaaggaacaatc

SEQ ID NO: 168487 - DNA, 25 bp, Artificial
  Probe
cgagagtctaaccaagtacaagaaa

SEQ ID NO: 168488 - DNA, 25 bp, Artificial
  Probe
ggagcctggaattaaggaacaatca

SEQ ID NO: 168489 - DNA, 25 bp, Artificial
  Probe
caaagatgacgagagtctaaccaag

SEQ ID NO: 168490 - DNA, 25 bp, Artificial
  Probe
atggacaaagatgacgagagtctaa

SEQ ID NO: 168491 - DNA, 25 bp, Artificial
  Probe
ggaacaatcaagatgacggagaagg

SEQ ID NO: 168492 - DNA, 25 bp, Artificial
  Probe
aaagatgacgagagtctaaccaagt

SEQ ID NO: 168493 - DNA, 25 bp, Artificial
  Probe
tcagaagtcagagttgagagacagg

SEQ ID NO: 168494 - DNA, 25 bp, Artificial
  Probe
gatggacaaagatgacgagagtcta

SEQ ID NO: 168495 - DNA, 25 bp, Artificial
  Probe
acaaagatgacgagagtctaaccaa

SEQ ID NO: 168496 - DNA, 25 bp, Artificial
  Probe
gacaaagatgacgagagtctaacca

SEQ ID NO: 168497 - DNA, 25 bp, Artificial
  Probe
tggacaaagatgacgagagtctaac

SEQ ID NO: 168498 - DNA, 25 bp, Artificial
  Probe
caggagcctggaattaaggaacaat

SEQ ID NO: 168499 - DNA, 25 bp, Artificial
  Probe
ttccttcctgttctaactgccagta

SEQ ID NO: 168500 - DNA, 25 bp, Artificial
  Probe
agaggtaacctacagagacacacag

SEQ ID NO: 168501 - DNA, 25 bp, Artificial
  Probe
ggacaaagatgacgagagtctaacc

SEQ ID NO: 168502 - DNA, 25 bp, Artificial
  Probe
atcaagatgacggagaaggatgagc

SEQ ID NO: 168503 - DNA, 25 bp, Artificial
  Probe
gagatggacaaagatgacgagagtc

SEQ ID NO: 168504 - DNA, 25 bp, Artificial
  Probe
cagaggtaacctacagagacacaca

SEQ ID NO: 168505 - DNA, 25 bp, Artificial
  Probe
gtgtctcagttgttcaatctcagtg

SEQ ID NO: 168506 - DNA, 25 bp, Artificial
  Probe
gtgtgtctcagttgttcaatctcag

SEQ ID NO: 168507 - DNA, 25 bp, Artificial
  Probe
ctcagttgttcaatctcagtgcttc

SEQ ID NO: 168508 - DNA, 25 bp, Artificial
  Probe
tgtgtctcagttgttcaatctcagt

SEQ ID NO: 168509 - DNA, 25 bp, Artificial
  Probe
tctcagttgttcaatctcagtgctt

SEQ ID NO: 168510 - DNA, 25 bp, Artificial
  Probe
aaggtgtgtctcagttgttcaatct

SEQ ID NO: 168511 - DNA, 25 bp, Artificial
  Probe
tctggacttaacaaccttgtgaata

SEQ ID NO: 168512 - DNA, 25 bp, Artificial
  Probe
ctggacttaacaaccttgtgaatag

SEQ ID NO: 168513 - DNA, 25 bp, Artificial
  Probe
ttctggacttaacaaccttgtgaat

SEQ ID NO: 168514 - DNA, 25 bp, Artificial
  Probe
gacttaacaaccttgtgaatagcac

SEQ ID NO: 168515 - DNA, 25 bp, Artificial
  Probe
ggacttaacaaccttgtgaatagca

SEQ ID NO: 168516 - DNA, 25 bp, Artificial
  Probe
tggacttaacaaccttgtgaatagc

SEQ ID NO: 168517 - DNA, 25 bp, Artificial
  Probe
aggtgtgtctcagttgttcaatctc

SEQ ID NO: 168518 - DNA, 25 bp, Artificial
  Probe
aatagcacagtcaagagaaatggat

SEQ ID NO: 168519 - DNA, 25 bp, Artificial
  Probe
tagcacagtcaagagaaatggatac

SEQ ID NO: 168520 - DNA, 25 bp, Artificial
  Probe
atagcacagtcaagagaaatggata

SEQ ID NO: 168521 - DNA, 25 bp, Artificial
  Probe
gaatagcacagtcaagagaaatgga

SEQ ID NO: 168522 - DNA, 25 bp, Artificial
  Probe
agttgttcaatctcagtgcttcctc

SEQ ID NO: 168523 - DNA, 25 bp, Artificial
  Probe
ggtgtgtctcagttgttcaatctca

SEQ ID NO: 168524 - DNA, 25 bp, Artificial
  Probe
gctccatattctggtattgtgatta

SEQ ID NO: 168525 - DNA, 25 bp, Artificial
  Probe
ccataggaagtaacactgtagagct

SEQ ID NO: 168526 - DNA, 25 bp, Artificial
  Probe
gtctcagttgttcaatctcagtgct

SEQ ID NO: 168527 - DNA, 25 bp, Artificial
  Probe
atagcccataggaagtaacactgta

SEQ ID NO: 168528 - DNA, 25 bp, Artificial
  Probe
cagttgttcaatctcagtgcttcct

SEQ ID NO: 168529 - DNA, 25 bp, Artificial
  Probe
tcagttgttcaatctcagtgcttcc

SEQ ID NO: 168530 - DNA, 25 bp, Artificial
  Probe
tgtctcagttgttcaatctcagtgc

SEQ ID NO: 168531 - DNA, 25 bp, Artificial
  Probe
tgaatagcacagtcaagagaaatgg

SEQ ID NO: 168532 - DNA, 25 bp, Artificial
  Probe
agctccatattctggtattgtgatt

SEQ ID NO: 168533 - DNA, 25 bp, Artificial
  Probe
tagcccataggaagtaacactgtag

SEQ ID NO: 168534 - DNA, 25 bp, Artificial
  Probe
gtgaatagcacagtcaagagaaatg

SEQ ID NO: 168535 - DNA, 25 bp, Artificial
  Probe
cacagtcaagagaaatggatacctg

SEQ ID NO: 168536 - DNA, 25 bp, Artificial
  Probe
cttgaattgatgccctttgatgtgt

SEQ ID NO: 168537 - DNA, 25 bp, Artificial
  Probe
catagcccataggaagtaacactgt

SEQ ID NO: 168538 - DNA, 25 bp, Artificial
  Probe
gcacagtcaagagaaatggatacct

SEQ ID NO: 168539 - DNA, 25 bp, Artificial
  Probe
agcacagtcaagagaaatggatacc

SEQ ID NO: 168540 - DNA, 25 bp, Artificial
  Probe
tttctggacttaacaaccttgtgaa

SEQ ID NO: 168541 - DNA, 25 bp, Artificial
  Probe
cccataggaagtaacactgtagagc

SEQ ID NO: 168542 - DNA, 25 bp, Artificial
  Probe
gcccataggaagtaacactgtagag

SEQ ID NO: 168543 - DNA, 25 bp, Artificial
  Probe
ttgaattgatgccctttgatgtgtg

SEQ ID NO: 168544 - DNA, 25 bp, Artificial
  Probe
gtttctggacttaacaaccttgtga

SEQ ID NO: 168545 - DNA, 25 bp, Artificial
  Probe
agcccataggaagtaacactgtaga

SEQ ID NO: 168546 - DNA, 25 bp, Artificial
  Probe
tcaagagaaatggatacctgcatag

SEQ ID NO: 168547 - DNA, 25 bp, Artificial
  Probe
gtcaagagaaatggatacctgcata

SEQ ID NO: 168548 - DNA, 25 bp, Artificial
  Probe
ccttgaattgatgccctttgatgtg

SEQ ID NO: 168549 - DNA, 25 bp, Artificial
  Probe
gttgttcaatctcagtgcttcctcg

SEQ ID NO: 168550 - DNA, 25 bp, Artificial
  Probe
gagaagagtggagcataggataacc

SEQ ID NO: 168551 - DNA, 25 bp, Artificial
  Probe
ggagaagagtggagcataggataac

SEQ ID NO: 168552 - DNA, 25 bp, Artificial
  Probe
ggtactatctcagttagccactctg

SEQ ID NO: 168553 - DNA, 25 bp, Artificial
  Probe
cccaaacttctaccaatactaggac

SEQ ID NO: 168554 - DNA, 25 bp, Artificial
  Probe
ccaaacttctaccaatactaggact

SEQ ID NO: 168555 - DNA, 25 bp, Artificial
  Probe
ggttgttatgataactgtgacacac

SEQ ID NO: 168556 - DNA, 25 bp, Artificial
  Probe
acacacacacacacactttgataaa

SEQ ID NO: 168557 - DNA, 25 bp, Artificial
  Probe
actaggacttgggttgttatgataa

SEQ ID NO: 168558 - DNA, 25 bp, Artificial
  Probe
aatactaggacttgggttgttatga

SEQ ID NO: 168559 - DNA, 25 bp, Artificial
  Probe
atactaggacttgggttgttatgat

SEQ ID NO: 168560 - DNA, 25 bp, Artificial
  Probe
tactatctcagttagccactctggt

SEQ ID NO: 168561 - DNA, 25 bp, Artificial
  Probe
gtactatctcagttagccactctgg

SEQ ID NO: 168562 - DNA, 25 bp, Artificial
  Probe
caatactaggacttgggttgttatg

SEQ ID NO: 168563 - DNA, 25 bp, Artificial
  Probe
tactaggacttgggttgttatgata

SEQ ID NO: 168564 - DNA, 25 bp, Artificial
  Probe
cacacacacacacacactttgataa

SEQ ID NO: 168565 - DNA, 25 bp, Artificial
  Probe
agaagagtggagcataggataacca

SEQ ID NO: 168566 - DNA, 25 bp, Artificial
  Probe
caaacttctaccaatactaggactt

SEQ ID NO: 168567 - DNA, 25 bp, Artificial
  Probe
ttcatagggagaagagtggagcata

SEQ ID NO: 168568 - DNA, 25 bp, Artificial
  Probe
tatctcagttagccactctggtcaa

SEQ ID NO: 168569 - DNA, 25 bp, Artificial
  Probe
aattgtcaagagaacctcatgcctc

SEQ ID NO: 168570 - DNA, 25 bp, Artificial
  Probe
gagcataggataaccacctcagtct

SEQ ID NO: 168571 - DNA, 25 bp, Artificial
  Probe
tcatagggagaagagtggagcatag

SEQ ID NO: 168572 - DNA, 25 bp, Artificial
  Probe
aaacttctaccaatactaggacttg

SEQ ID NO: 168573 - DNA, 25 bp, Artificial
  Probe
gggagaagagtggagcataggataa

SEQ ID NO: 168574 - DNA, 25 bp, Artificial
  Probe
ctatctcagttagccactctggtca

SEQ ID NO: 168575 - DNA, 25 bp, Artificial
  Probe
actatctcagttagccactctggtc

SEQ ID NO: 168576 - DNA, 25 bp, Artificial
  Probe
agcataggataaccacctcagtctg

SEQ ID NO: 168577 - DNA, 25 bp, Artificial
  Probe
cttgggttgttatgataactgtgac

SEQ ID NO: 168578 - DNA, 25 bp, Artificial
  Probe
acttgggttgttatgataactgtga

SEQ ID NO: 168579 - DNA, 25 bp, Artificial
  Probe
gacttgggttgttatgataactgtg

SEQ ID NO: 168580 - DNA, 25 bp, Artificial
  Probe
ttgggttgttatgataactgtgaca

SEQ ID NO: 168581 - DNA, 25 bp, Artificial
  Probe
aggacttgggttgttatgataactg

SEQ ID NO: 168582 - DNA, 25 bp, Artificial
  Probe
ggacttgggttgttatgataactgt

SEQ ID NO: 168583 - DNA, 25 bp, Artificial
  Probe
acacacacacacacacactttgata

SEQ ID NO: 168584 - DNA, 25 bp, Artificial
  Probe
taggacttgggttgttatgataact

SEQ ID NO: 168585 - DNA, 25 bp, Artificial
  Probe
tttcatagggagaagagtggagcat

SEQ ID NO: 168586 - DNA, 25 bp, Artificial
  Probe
tgggttgttatgataactgtgacac

SEQ ID NO: 168587 - DNA, 25 bp, Artificial
  Probe
ctaggacttgggttgttatgataac

SEQ ID NO: 168588 - DNA, 25 bp, Artificial
  Probe
gggttgttatgataactgtgacaca

SEQ ID NO: 168589 - DNA, 25 bp, Artificial
  Probe
gggtactatctcagttagccactct

SEQ ID NO: 168590 - DNA, 25 bp, Artificial
  Probe
agggtactatctcagttagccactc

SEQ ID NO: 168591 - DNA, 25 bp, Artificial
  Probe
cacacacacacacactttgataaaa

SEQ ID NO: 168592 - DNA, 25 bp, Artificial
  Probe
aagagaacctcatgcctcaccttag

SEQ ID NO: 168593 - DNA, 25 bp, Artificial
  Probe
catagggagaagagtggagcatagg

SEQ ID NO: 168594 - DNA, 25 bp, Artificial
  Probe
cagggtactatctcagttagccact

SEQ ID NO: 168595 - DNA, 25 bp, Artificial
  Probe
attatgttgccttcttgtttctcac

SEQ ID NO: 168596 - DNA, 25 bp, Artificial
  Probe
tacccaagaaaccaaagaaatgaag

SEQ ID NO: 168597 - DNA, 25 bp, Artificial
  Probe
ctacccaagaaaccaaagaaatgaa

SEQ ID NO: 168598 - DNA, 25 bp, Artificial
  Probe
actacccaagaaaccaaagaaatga

SEQ ID NO: 168599 - DNA, 25 bp, Artificial
  Probe
cactacccaagaaaccaaagaaatg

SEQ ID NO: 168600 - DNA, 25 bp, Artificial
  Probe
tatgttgccttcttgtttctcactt

SEQ ID NO: 168601 - DNA, 25 bp, Artificial
  Probe
ttatgttgccttcttgtttctcact

SEQ ID NO: 168602 - DNA, 25 bp, Artificial
  Probe
gtccttacttcctaacatctttctg

SEQ ID NO: 168603 - DNA, 25 bp, Artificial
  Probe
tccttacttcctaacatctttctga

SEQ ID NO: 168604 - DNA, 25 bp, Artificial
  Probe
tattatgttgccttcttgtttctca

SEQ ID NO: 168605 - DNA, 25 bp, Artificial
  Probe
ccactacccaagaaaccaaagaaat

SEQ ID NO: 168606 - DNA, 25 bp, Artificial
  Probe
agctgtccttacttcctaacatctt

SEQ ID NO: 168607 - DNA, 25 bp, Artificial
  Probe
atgttgccttcttgtttctcacttt

SEQ ID NO: 168608 - DNA, 25 bp, Artificial
  Probe
gccttcttgtttctcactttgatat

SEQ ID NO: 168609 - DNA, 25 bp, Artificial
  Probe
tgccttcttgtttctcactttgata

SEQ ID NO: 168610 - DNA, 25 bp, Artificial
  Probe
taactgctttgcttcttgagtagag

SEQ ID NO: 168611 - DNA, 25 bp, Artificial
  Probe
cttgcggatttatgtttcagtgtac

SEQ ID NO: 168612 - DNA, 25 bp, Artificial
  Probe
acttgcggatttatgtttcagtgta

SEQ ID NO: 168613 - DNA, 25 bp, Artificial
  Probe
gtaactgctttgcttcttgagtaga

SEQ ID NO: 168614 - DNA, 25 bp, Artificial
  Probe
ttgcggatttatgtttcagtgtact

SEQ ID NO: 168615 - DNA, 25 bp, Artificial
  Probe
gctgtccttacttcctaacatcttt

SEQ ID NO: 168616 - DNA, 25 bp, Artificial
  Probe
ttgccttcttgtttctcactttgat

SEQ ID NO: 168617 - DNA, 25 bp, Artificial
  Probe
ccttacttcctaacatctttctgat

SEQ ID NO: 168618 - DNA, 25 bp, Artificial
  Probe
tgtccttacttcctaacatctttct

SEQ ID NO: 168619 - DNA, 25 bp, Artificial
  Probe
ctgtccttacttcctaacatctttc

SEQ ID NO: 168620 - DNA, 25 bp, Artificial
  Probe
ttattatgttgccttcttgtttctc

SEQ ID NO: 168621 - DNA, 25 bp, Artificial
  Probe
tgttgccttcttgtttctcactttg

SEQ ID NO: 168622 - DNA, 25 bp, Artificial
  Probe
ggtaactgctttgcttcttgagtag

SEQ ID NO: 168623 - DNA, 25 bp, Artificial
  Probe
atacactgtttgaatgtgctggtaa

SEQ ID NO: 168624 - DNA, 25 bp, Artificial
  Probe
aatacactgtttgaatgtgctggta

SEQ ID NO: 168625 - DNA, 25 bp, Artificial
  Probe
acccaagaaaccaaagaaatgaagc

SEQ ID NO: 168626 - DNA, 25 bp, Artificial
  Probe
aaagccttgattaaagaggaagttt

SEQ ID NO: 168627 - DNA, 25 bp, Artificial
  Probe
acttcctaacatctttctgataaca

SEQ ID NO: 168628 - DNA, 25 bp, Artificial
  Probe
tatgtgtggtgacttgcggatttat

SEQ ID NO: 168629 - DNA, 25 bp, Artificial
  Probe
gacttgcggatttatgtttcagtgt

SEQ ID NO: 168630 - DNA, 25 bp, Artificial
  Probe
tgacttgcggatttatgtttcagtg

SEQ ID NO: 168631 - DNA, 25 bp, Artificial
  Probe
gtgacttgcggatttatgtttcagt

SEQ ID NO: 168632 - DNA, 25 bp, Artificial
  Probe
gttgccttcttgtttctcactttga

SEQ ID NO: 168633 - DNA, 25 bp, Artificial
  Probe
tttgaatgtgctggtaactgctttg

SEQ ID NO: 168634 - DNA, 25 bp, Artificial
  Probe
tggtaactgctttgcttcttgagta

SEQ ID NO: 168635 - DNA, 25 bp, Artificial
  Probe
ccaagaaaccaaagaaatgaagctg

SEQ ID NO: 168636 - DNA, 25 bp, Artificial
  Probe
tacactgtttgaatgtgctggtaac

SEQ ID NO: 168637 - DNA, 25 bp, Artificial
  Probe
attattatgttgccttcttgtttct

SEQ ID NO: 168638 - DNA, 25 bp, Artificial
  Probe
cattattatgttgccttcttgtttc

SEQ ID NO: 168639 - DNA, 25 bp, Artificial
  Probe
cggatttatgtttcagtgtactgga

SEQ ID NO: 168640 - DNA, 25 bp, Artificial
  Probe
caaataaactccaactctgcccaaa

SEQ ID NO: 168641 - DNA, 25 bp, Artificial
  Probe
aaataaactccaactctgcccaaaa

SEQ ID NO: 168642 - DNA, 25 bp, Artificial
  Probe
attacagtatgaagggagccgtgac

SEQ ID NO: 168643 - DNA, 25 bp, Artificial
  Probe
cattacagtatgaagggagccgtga

SEQ ID NO: 168644 - DNA, 25 bp, Artificial
  Probe
tcctcattacagtatgaagggagcc

SEQ ID NO: 168645 - DNA, 25 bp, Artificial
  Probe
ctcattacagtatgaagggagccgt

SEQ ID NO: 168646 - DNA, 25 bp, Artificial
  Probe
gcaaataaactccaactctgcccaa

SEQ ID NO: 168647 - DNA, 25 bp, Artificial
  Probe
tcattacagtatgaagggagccgtg

SEQ ID NO: 168648 - DNA, 25 bp, Artificial
  Probe
cctcctcattacagtatgaagggag

SEQ ID NO: 168649 - DNA, 25 bp, Artificial
  Probe
cctcattacagtatgaagggagccg

SEQ ID NO: 168650 - DNA, 25 bp, Artificial
  Probe
cagcaaataaactccaactctgccc

SEQ ID NO: 168651 - DNA, 25 bp, Artificial
  Probe
ctcctcattacagtatgaagggagc

SEQ ID NO: 168652 - DNA, 25 bp, Artificial
  Probe
agcaaataaactccaactctgccca

SEQ ID NO: 168653 - DNA, 25 bp, Artificial
  Probe
tgcccctcctcattacagtatgaag

SEQ ID NO: 168654 - DNA, 25 bp, Artificial
  Probe
ctgcccctcctcattacagtatgaa

SEQ ID NO: 168655 - DNA, 25 bp, Artificial
  Probe
gcccctcctcattacagtatgaagg

SEQ ID NO: 168656 - DNA, 25 bp, Artificial
  Probe
cctgcccctcctcattacagtatga

SEQ ID NO: 168657 - DNA, 25 bp, Artificial
  Probe
taccgtaaattccagtatagcattg

SEQ ID NO: 168658 - DNA, 25 bp, Artificial
  Probe
cagtaccgtaaattccagtatagca

SEQ ID NO: 168659 - DNA, 25 bp, Artificial
  Probe
cccagtaccgtaaattccagtatag

SEQ ID NO: 168660 - DNA, 25 bp, Artificial
  Probe
agtaccgtaaattccagtatagcat

SEQ ID NO: 168661 - DNA, 25 bp, Artificial
  Probe
ccagtaccgtaaattccagtatagc

SEQ ID NO: 168662 - DNA, 25 bp, Artificial
  Probe
gtaccgtaaattccagtatagcatt

SEQ ID NO: 168663 - DNA, 25 bp, Artificial
  Probe
accgtaaattccagtatagcattgc

SEQ ID NO: 168664 - DNA, 25 bp, Artificial
  Probe
cgtaaattccagtatagcattgcat

SEQ ID NO: 168665 - DNA, 25 bp, Artificial
  Probe
ccagtatagcattgcatattattct

SEQ ID NO: 168666 - DNA, 25 bp, Artificial
  Probe
tccagtatagcattgcatattattc

SEQ ID NO: 168667 - DNA, 25 bp, Artificial
  Probe
ccgtaaattccagtatagcattgca

SEQ ID NO: 168668 - DNA, 25 bp, Artificial
  Probe
gatcttcagtctccgaaggtcttac

SEQ ID NO: 168669 - DNA, 25 bp, Artificial
  Probe
cgctgctgttagtagttttcattta

SEQ ID NO: 168670 - DNA, 25 bp, Artificial
  Probe
ttccagtatagcattgcatattatt

SEQ ID NO: 168671 - DNA, 25 bp, Artificial
  Probe
aattccagtatagcattgcatatta

SEQ ID NO: 168672 - DNA, 25 bp, Artificial
  Probe
gctgctgttagtagttttcatttag

SEQ ID NO: 168673 - DNA, 25 bp, Artificial
  Probe
acgctgctgttagtagttttcattt

SEQ ID NO: 168674 - DNA, 25 bp, Artificial
  Probe
atcttcagtctccgaaggtcttaca

SEQ ID NO: 168675 - DNA, 25 bp, Artificial
  Probe
attccagtatagcattgcatattat

SEQ ID NO: 168676 - DNA, 25 bp, Artificial
  Probe
gaaacttagatcttcagtctccgaa

SEQ ID NO: 168677 - DNA, 25 bp, Artificial
  Probe
gtaaattccagtatagcattgcata

SEQ ID NO: 168678 - DNA, 25 bp, Artificial
  Probe
ccccagtaccgtaaattccagtata

SEQ ID NO: 168679 - DNA, 25 bp, Artificial
  Probe
cacgctgctgttagtagttttcatt

SEQ ID NO: 168680 - DNA, 25 bp, Artificial
  Probe
aaattccagtatagcattgcatatt

SEQ ID NO: 168681 - DNA, 25 bp, Artificial
  Probe
tcttcagtctccgaaggtcttacag

SEQ ID NO: 168682 - DNA, 25 bp, Artificial
  Probe
ttttaaagtcgatctatcccttccc

SEQ ID NO: 168683 - DNA, 25 bp, Artificial
  Probe
gccttttaaagtcgatctatccctt

SEQ ID NO: 168684 - DNA, 25 bp, Artificial
  Probe
aacttagatcttcagtctccgaagg

SEQ ID NO: 168685 - DNA, 25 bp, Artificial
  Probe
cttttaaagtcgatctatcccttcc

SEQ ID NO: 168686 - DNA, 25 bp, Artificial
  Probe
ccttttaaagtcgatctatcccttc

SEQ ID NO: 168687 - DNA, 25 bp, Artificial
  Probe
ctgctgttagtagttttcatttaga

SEQ ID NO: 168688 - DNA, 25 bp, Artificial
  Probe
cttagatcttcagtctccgaaggtc

SEQ ID NO: 168689 - DNA, 25 bp, Artificial
  Probe
tgccttttaaagtcgatctatccct

SEQ ID NO: 168690 - DNA, 25 bp, Artificial
  Probe
gtgccttttaaagtcgatctatccc

SEQ ID NO: 168691 - DNA, 25 bp, Artificial
  Probe
ggaaacttagatcttcagtctccga

SEQ ID NO: 168692 - DNA, 25 bp, Artificial
  Probe
tttaaagtcgatctatcccttcccc

SEQ ID NO: 168693 - DNA, 25 bp, Artificial
  Probe
taaattccagtatagcattgcatat

SEQ ID NO: 168694 - DNA, 25 bp, Artificial
  Probe
cagtatagcattgcatattattctt

SEQ ID NO: 168695 - DNA, 25 bp, Artificial
  Probe
agatcttcagtctccgaaggtctta

SEQ ID NO: 168696 - DNA, 25 bp, Artificial
  Probe
tagatcttcagtctccgaaggtctt

SEQ ID NO: 168697 - DNA, 25 bp, Artificial
  Probe
ttagatcttcagtctccgaaggtct

SEQ ID NO: 168698 - DNA, 25 bp, Artificial
  Probe
cgtgccttttaaagtcgatctatcc

SEQ ID NO: 168699 - DNA, 25 bp, Artificial
  Probe
acttagatcttcagtctccgaaggt

SEQ ID NO: 168700 - DNA, 25 bp, Artificial
  Probe
cttcagtctccgaaggtcttacagg

SEQ ID NO: 168701 - DNA, 25 bp, Artificial
  Probe
tgctgttagtagttttcatttagaa

SEQ ID NO: 168702 - DNA, 25 bp, Artificial
  Probe
tacgaggaagaaactacaagtgatg

SEQ ID NO: 168703 - DNA, 25 bp, Artificial
  Probe
ttacgaggaagaaactacaagtgat

SEQ ID NO: 168704 - DNA, 25 bp, Artificial
  Probe
gttacgaggaagaaactacaagtga

SEQ ID NO: 168705 - DNA, 25 bp, Artificial
  Probe
aggaagaaactacaagtgatgttca

SEQ ID NO: 168706 - DNA, 25 bp, Artificial
  Probe
atgttacgaggaagaaactacaagt

SEQ ID NO: 168707 - DNA, 25 bp, Artificial
  Probe
gaggaagaaactacaagtgatgttc

SEQ ID NO: 168708 - DNA, 25 bp, Artificial
  Probe
ggaagaaactacaagtgatgttcaa

SEQ ID NO: 168709 - DNA, 25 bp, Artificial
  Probe
tgttacgaggaagaaactacaagtg

SEQ ID NO: 168710 - DNA, 25 bp, Artificial
  Probe
cgaggaagaaactacaagtgatgtt

SEQ ID NO: 168711 - DNA, 25 bp, Artificial
  Probe
actcatgttacgaggaagaaactac

SEQ ID NO: 168712 - DNA, 25 bp, Artificial
  Probe
cactcatgttacgaggaagaaacta

SEQ ID NO: 168713 - DNA, 25 bp, Artificial
  Probe
tcatgttacgaggaagaaactacaa

SEQ ID NO: 168714 - DNA, 25 bp, Artificial
  Probe
catgttacgaggaagaaactacaag

SEQ ID NO: 168715 - DNA, 25 bp, Artificial
  Probe
ctcatgttacgaggaagaaactaca

SEQ ID NO: 168716 - DNA, 25 bp, Artificial
  Probe
acgaggaagaaactacaagtgatgt

SEQ ID NO: 168717 - DNA, 25 bp, Artificial
  Probe
gaagaaactacaagtgatgttcaaa

SEQ ID NO: 168718 - DNA, 25 bp, Artificial
  Probe
gaaactacaagtgatgttcaaatct

SEQ ID NO: 168719 - DNA, 25 bp, Artificial
  Probe
agaaactacaagtgatgttcaaatc

SEQ ID NO: 168720 - DNA, 25 bp, Artificial
  Probe
tacctttgggttcaggcattatttg

SEQ ID NO: 168721 - DNA, 25 bp, Artificial
  Probe
agatgctttgtaatctactgtccag

SEQ ID NO: 168722 - DNA, 25 bp, Artificial
  Probe
gagatgctttgtaatctactgtcca

SEQ ID NO: 168723 - DNA, 25 bp, Artificial
  Probe
atcggagatgctttgtaatctactg

SEQ ID NO: 168724 - DNA, 25 bp, Artificial
  Probe
ttacagatgcagccacagattgatc

SEQ ID NO: 168725 - DNA, 25 bp, Artificial
  Probe
gatcggagatgctttgtaatctact

SEQ ID NO: 168726 - DNA, 25 bp, Artificial
  Probe
ggagatgctttgtaatctactgtcc

SEQ ID NO: 168727 - DNA, 25 bp, Artificial
  Probe
tgatcggagatgctttgtaatctac

SEQ ID NO: 168728 - DNA, 25 bp, Artificial
  Probe
gtgatcggagatgctttgtaatcta

SEQ ID NO: 168729 - DNA, 25 bp, Artificial
  Probe
gtacctttgggttcaggcattattt

SEQ ID NO: 168730 - DNA, 25 bp, Artificial
  Probe
aagaaactacaagtgatgttcaaat

SEQ ID NO: 168731 - DNA, 25 bp, Artificial
  Probe
caactaaccaaacaactgggaagag

SEQ ID NO: 168732 - DNA, 25 bp, Artificial
  Probe
cggagatgctttgtaatctactgtc

SEQ ID NO: 168733 - DNA, 25 bp, Artificial
  Probe
gttacagatgcagccacagattgat

SEQ ID NO: 168734 - DNA, 25 bp, Artificial
  Probe
tatgtacctttgggttcaggcatta

SEQ ID NO: 168735 - DNA, 25 bp, Artificial
  Probe
tcggagatgctttgtaatctactgt

SEQ ID NO: 168736 - DNA, 25 bp, Artificial
  Probe
aagcactcatgttacgaggaagaaa

SEQ ID NO: 168737 - DNA, 25 bp, Artificial
  Probe
aaagcactcatgttacgaggaagaa

SEQ ID NO: 168738 - DNA, 25 bp, Artificial
  Probe
atgtacctttgggttcaggcattat

SEQ ID NO: 168739 - DNA, 25 bp, Artificial
  Probe
gatgctttgtaatctactgtccagc

SEQ ID NO: 168740 - DNA, 25 bp, Artificial
  Probe
taacgtgatcggagatgctttgtaa

SEQ ID NO: 168741 - DNA, 25 bp, Artificial
  Probe
ttaacgtgatcggagatgctttgta

SEQ ID NO: 168742 - DNA, 25 bp, Artificial
  Probe
gaaagcactcatgttacgaggaaga

SEQ ID NO: 168743 - DNA, 25 bp, Artificial
  Probe
tgtacctttgggttcaggcattatt

SEQ ID NO: 168744 - DNA, 25 bp, Artificial
  Probe
ttatgtacctttgggttcaggcatt

SEQ ID NO: 168745 - DNA, 25 bp, Artificial
  Probe
tttatgtacctttgggttcaggcat

SEQ ID NO: 168746 - DNA, 25 bp, Artificial
  Probe
aaactacaagtgatgttcaaatcta

SEQ ID NO: 168747 - DNA, 25 bp, Artificial
  Probe
aaggacatcatctatattggtggtg

SEQ ID NO: 168748 - DNA, 25 bp, Artificial
  Probe
tcaacaccaaggacatcatctatat

SEQ ID NO: 168749 - DNA, 25 bp, Artificial
  Probe
cctgacagtgccgagtatattatta

SEQ ID NO: 168750 - DNA, 25 bp, Artificial
  Probe
caaggacatcatctatattggtggt

SEQ ID NO: 168751 - DNA, 25 bp, Artificial
  Probe
caacaccaaggacatcatctatatt

SEQ ID NO: 168752 - DNA, 25 bp, Artificial
  Probe
aagacttcattagccttggactaca

SEQ ID NO: 168753 - DNA, 25 bp, Artificial
  Probe
agacttcattagccttggactacag

SEQ ID NO: 168754 - DNA, 25 bp, Artificial
  Probe
aacaccaaggacatcatctatattg

SEQ ID NO: 168755 - DNA, 25 bp, Artificial
  Probe
ccatcttgtcttcaactaccaactg

SEQ ID NO: 168756 - DNA, 25 bp, Artificial
  Probe
gtcaacaccaaggacatcatctata

SEQ ID NO: 168757 - DNA, 25 bp, Artificial
  Probe
ctgacagtgccgagtatattattat

SEQ ID NO: 168758 - DNA, 25 bp, Artificial
  Probe
aggacatcatctatattggtggtgc

SEQ ID NO: 168759 - DNA, 25 bp, Artificial
  Probe
catcttgtcttcaactaccaactgg

SEQ ID NO: 168760 - DNA, 25 bp, Artificial
  Probe
tgacagtgccgagtatattattatt

SEQ ID NO: 168761 - DNA, 25 bp, Artificial
  Probe
gcctgacagtgccgagtatattatt

SEQ ID NO: 168762 - DNA, 25 bp, Artificial
  Probe
cttcattagccttggactacaggat

SEQ ID NO: 168763 - DNA, 25 bp, Artificial
  Probe
aaagacttcattagccttggactac

SEQ ID NO: 168764 - DNA, 25 bp, Artificial
  Probe
ttcattagccttggactacaggatg

SEQ ID NO: 168765 - DNA, 25 bp, Artificial
  Probe
ggacatcatctatattggtggtgcc

SEQ ID NO: 168766 - DNA, 25 bp, Artificial
  Probe
caaagacttcattagccttggacta

SEQ ID NO: 168767 - DNA, 25 bp, Artificial
  Probe
gccatcttgtcttcaactaccaact

SEQ ID NO: 168768 - DNA, 25 bp, Artificial
  Probe
agcctgacagtgccgagtatattat

SEQ ID NO: 168769 - DNA, 25 bp, Artificial
  Probe
cgtcaacaccaaggacatcatctat

SEQ ID NO: 168770 - DNA, 25 bp, Artificial
  Probe
gacttcattagccttggactacagg

SEQ ID NO: 168771 - DNA, 25 bp, Artificial
  Probe
acttcattagccttggactacagga

SEQ ID NO: 168772 - DNA, 25 bp, Artificial
  Probe
gacagtgccgagtatattattatta

SEQ ID NO: 168773 - DNA, 25 bp, Artificial
  Probe
cagcctgacagtgccgagtatatta

SEQ ID NO: 168774 - DNA, 25 bp, Artificial
  Probe
atcttgtcttcaactaccaactggg

SEQ ID NO: 168775 - DNA, 25 bp, Artificial
  Probe
gacatcatctatattggtggtgccc

SEQ ID NO: 168776 - DNA, 25 bp, Artificial
  Probe
tcattagccttggactacaggatgg

SEQ ID NO: 168777 - DNA, 25 bp, Artificial
  Probe
gatcacaggctgtctcaagaatctg

SEQ ID NO: 168778 - DNA, 25 bp, Artificial
  Probe
acagtgccgagtatattattattaa

SEQ ID NO: 168779 - DNA, 25 bp, Artificial
  Probe
gcaaagacttcattagccttggact

SEQ ID NO: 168780 - DNA, 25 bp, Artificial
  Probe
agcaaagacttcattagccttggac

SEQ ID NO: 168781 - DNA, 25 bp, Artificial
  Probe
cagcaaagacttcattagccttgga

SEQ ID NO: 168782 - DNA, 25 bp, Artificial
  Probe
acaccaaggacatcatctatattgg

SEQ ID NO: 168783 - DNA, 25 bp, Artificial
  Probe
ccaaggacatcatctatattggtgg

SEQ ID NO: 168784 - DNA, 25 bp, Artificial
  Probe
ccgtcaacaccaaggacatcatcta

SEQ ID NO: 168785 - DNA, 25 bp, Artificial
  Probe
ggatcacaggctgtctcaagaatct

SEQ ID NO: 168786 - DNA, 25 bp, Artificial
  Probe
atcacaggctgtctcaagaatctgg

SEQ ID NO: 168787 - DNA, 25 bp, Artificial
  Probe
ggccatcttgtcttcaactaccaac

SEQ ID NO: 168788 - DNA, 25 bp, Artificial
  Probe
gcagcaaagacttcattagccttgg

SEQ ID NO: 168789 - DNA, 25 bp, Artificial
  Probe
tcttgtcttcaactaccaactgggc

SEQ ID NO: 168790 - DNA, 25 bp, Artificial
  Probe
cgcagcaaagacttcattagccttg

SEQ ID NO: 168791 - DNA, 25 bp, Artificial
  Probe
ttgtcttcaactaccaactgggcag

SEQ ID NO: 168792 - DNA, 25 bp, Artificial
  Probe
tcatcagacatcagcagacctactc

SEQ ID NO: 168793 - DNA, 25 bp, Artificial
  Probe
ctcatcagacatcagcagacctact

SEQ ID NO: 168794 - DNA, 25 bp, Artificial
  Probe
catcagacatcagcagacctactct

SEQ ID NO: 168795 - DNA, 25 bp, Artificial
  Probe
agaggacacactccaagtagaagag

SEQ ID NO: 168796 - DNA, 25 bp, Artificial
  Probe
cagaggacacactccaagtagaaga

SEQ ID NO: 168797 - DNA, 25 bp, Artificial
  Probe
ttaagtcacttctcaccagacacca

SEQ ID NO: 168798 - DNA, 25 bp, Artificial
  Probe
cctcatcagacatcagcagacctac

SEQ ID NO: 168799 - DNA, 25 bp, Artificial
  Probe
ttcacctccacagacataggaagac

SEQ ID NO: 168800 - DNA, 25 bp, Artificial
  Probe
tttgtaaacagcttatgtgggtagg

SEQ ID NO: 168801 - DNA, 25 bp, Artificial
  Probe
gacacactccaagtagaagaggctt

SEQ ID NO: 168802 - DNA, 25 bp, Artificial
  Probe
taagtcacttctcaccagacaccag

SEQ ID NO: 168803 - DNA, 25 bp, Artificial
  Probe
tttaagtcacttctcaccagacacc

SEQ ID NO: 168804 - DNA, 25 bp, Artificial
  Probe
gaggacacactccaagtagaagagg

SEQ ID NO: 168805 - DNA, 25 bp, Artificial
  Probe
ctagtgaatgttcccggaaatagag

SEQ ID NO: 168806 - DNA, 25 bp, Artificial
  Probe
tttcacctccacagacataggaaga

SEQ ID NO: 168807 - DNA, 25 bp, Artificial
  Probe
gtttcacctccacagacataggaag

SEQ ID NO: 168808 - DNA, 25 bp, Artificial
  Probe
gtgaatgttcccggaaatagagtag

SEQ ID NO: 168809 - DNA, 25 bp, Artificial
  Probe
ccagaggacacactccaagtagaag

SEQ ID NO: 168810 - DNA, 25 bp, Artificial
  Probe
gcttttggttttaagtcacttctca

SEQ ID NO: 168811 - DNA, 25 bp, Artificial
  Probe
tgcttttggttttaagtcacttctc

SEQ ID NO: 168812 - DNA, 25 bp, Artificial
  Probe
agtgaatgttcccggaaatagagta

SEQ ID NO: 168813 - DNA, 25 bp, Artificial
  Probe
tagtgaatgttcccggaaatagagt

SEQ ID NO: 168814 - DNA, 25 bp, Artificial
  Probe
ttgtaaacagcttatgtgggtaggg

SEQ ID NO: 168815 - DNA, 25 bp, Artificial
  Probe
actagtgaatgttcccggaaataga

SEQ ID NO: 168816 - DNA, 25 bp, Artificial
  Probe
acacactccaagtagaagaggcttt

SEQ ID NO: 168817 - DNA, 25 bp, Artificial
  Probe
gtaaacagcttatgtgggtagggag

SEQ ID NO: 168818 - DNA, 25 bp, Artificial
  Probe
cttttggttttaagtcacttctcac

SEQ ID NO: 168819 - DNA, 25 bp, Artificial
  Probe
tttgcctgacctgttgtttcctttc

SEQ ID NO: 168820 - DNA, 25 bp, Artificial
  Probe
tgaatgttcccggaaatagagtagg

SEQ ID NO: 168821 - DNA, 25 bp, Artificial
  Probe
tcagtccagttggtagagaagcctt

SEQ ID NO: 168822 - DNA, 25 bp, Artificial
  Probe
aaatagagtaggggaaaagtccttg

SEQ ID NO: 168823 - DNA, 25 bp, Artificial
  Probe
gaaatagagtaggggaaaagtcctt

SEQ ID NO: 168824 - DNA, 25 bp, Artificial
  Probe
taaacagcttatgtgggtagggagt

SEQ ID NO: 168825 - DNA, 25 bp, Artificial
  Probe
ttttaagtcacttctcaccagacac

SEQ ID NO: 168826 - DNA, 25 bp, Artificial
  Probe
gttttaagtcacttctcaccagaca

SEQ ID NO: 168827 - DNA, 25 bp, Artificial
  Probe
gtgcttttggttttaagtcacttct

SEQ ID NO: 168828 - DNA, 25 bp, Artificial
  Probe
gactcagtccagttggtagagaagc

SEQ ID NO: 168829 - DNA, 25 bp, Artificial
  Probe
agtccagttggtagagaagcctttg

SEQ ID NO: 168830 - DNA, 25 bp, Artificial
  Probe
cagtccagttggtagagaagccttt

SEQ ID NO: 168831 - DNA, 25 bp, Artificial
  Probe
ggaaatagagtaggggaaaagtcct

SEQ ID NO: 168832 - DNA, 25 bp, Artificial
  Probe
tgtaaacagcttatgtgggtaggga

SEQ ID NO: 168833 - DNA, 25 bp, Artificial
  Probe
accagaggacacactccaagtagaa

SEQ ID NO: 168834 - DNA, 25 bp, Artificial
  Probe
gtttgcctgacctgttgtttccttt

SEQ ID NO: 168835 - DNA, 25 bp, Artificial
  Probe
acagacataggaagacccaagtgtg

SEQ ID NO: 168836 - DNA, 25 bp, Artificial
  Probe
ttttggttttaagtcacttctcacc

SEQ ID NO: 168837 - DNA, 25 bp, Artificial
  Probe
aatgatacacttcagctccttcttc

SEQ ID NO: 168838 - DNA, 25 bp, Artificial
  Probe
gaatgatacacttcagctccttctt

SEQ ID NO: 168839 - DNA, 25 bp, Artificial
  Probe
ctagaccttccactccattacagtc

SEQ ID NO: 168840 - DNA, 25 bp, Artificial
  Probe
cagaatgatacacttcagctccttc

SEQ ID NO: 168841 - DNA, 25 bp, Artificial
  Probe
atatgcagaatgatacacttcagct

SEQ ID NO: 168842 - DNA, 25 bp, Artificial
  Probe
tatgcagaatgatacacttcagctc

SEQ ID NO: 168843 - DNA, 25 bp, Artificial
  Probe
tatatgcagaatgatacacttcagc

SEQ ID NO: 168844 - DNA, 25 bp, Artificial
  Probe
atgatacacttcagctccttcttcc

SEQ ID NO: 168845 - DNA, 25 bp, Artificial
  Probe
tagaccttccactccattacagtcc

SEQ ID NO: 168846 - DNA, 25 bp, Artificial
  Probe
ccagtatatgcagaatgatacactt

SEQ ID NO: 168847 - DNA, 25 bp, Artificial
  Probe
agaatgatacacttcagctccttct

SEQ ID NO: 168848 - DNA, 25 bp, Artificial
  Probe
gcagaatgatacacttcagctcctt

SEQ ID NO: 168849 - DNA, 25 bp, Artificial
  Probe
gctagaccttccactccattacagt

SEQ ID NO: 168850 - DNA, 25 bp, Artificial
  Probe
agtatatgcagaatgatacacttca

SEQ ID NO: 168851 - DNA, 25 bp, Artificial
  Probe
accttccactccattacagtccttg

SEQ ID NO: 168852 - DNA, 25 bp, Artificial
  Probe
atgcagaatgatacacttcagctcc

SEQ ID NO: 168853 - DNA, 25 bp, Artificial
  Probe
gtatatgcagaatgatacacttcag

SEQ ID NO: 168854 - DNA, 25 bp, Artificial
  Probe
cagtatatgcagaatgatacacttc

SEQ ID NO: 168855 - DNA, 25 bp, Artificial
  Probe
gaccttccactccattacagtcctt

SEQ ID NO: 168856 - DNA, 25 bp, Artificial
  Probe
ggctagaccttccactccattacag

SEQ ID NO: 168857 - DNA, 25 bp, Artificial
  Probe
atacacttcagctccttcttcccta

SEQ ID NO: 168858 - DNA, 25 bp, Artificial
  Probe
cccagtatatgcagaatgatacact

SEQ ID NO: 168859 - DNA, 25 bp, Artificial
  Probe
ttacagtccttggcaagaaacgaat

SEQ ID NO: 168860 - DNA, 25 bp, Artificial
  Probe
attacagtccttggcaagaaacgaa

SEQ ID NO: 168861 - DNA, 25 bp, Artificial
  Probe
gcccagtatatgcagaatgatacac

SEQ ID NO: 168862 - DNA, 25 bp, Artificial
  Probe
caggctagaccttccactccattac

SEQ ID NO: 168863 - DNA, 25 bp, Artificial
  Probe
tacacttcagctccttcttccctag

SEQ ID NO: 168864 - DNA, 25 bp, Artificial
  Probe
agaccttccactccattacagtcct

SEQ ID NO: 168865 - DNA, 25 bp, Artificial
  Probe
tgcagaatgatacacttcagctcct

SEQ ID NO: 168866 - DNA, 25 bp, Artificial
  Probe
cttggcaagaaacgaatgaggatct

SEQ ID NO: 168867 - DNA, 25 bp, Artificial
  Probe
actccattacagtccttggcaagaa

SEQ ID NO: 168868 - DNA, 25 bp, Artificial
  Probe
ttggcaagaaacgaatgaggatctg

SEQ ID NO: 168869 - DNA, 25 bp, Artificial
  Probe
tacagtccttggcaagaaacgaatg

SEQ ID NO: 168870 - DNA, 25 bp, Artificial
  Probe
cattacagtccttggcaagaaacga

SEQ ID NO: 168871 - DNA, 25 bp, Artificial
  Probe
ctttgcttgacaatgctttcctcct

SEQ ID NO: 168872 - DNA, 25 bp, Artificial
  Probe
aggctagaccttccactccattaca

SEQ ID NO: 168873 - DNA, 25 bp, Artificial
  Probe
ctccattacagtccttggcaagaaa

SEQ ID NO: 168874 - DNA, 25 bp, Artificial
  Probe
gatacacttcagctccttcttccct

SEQ ID NO: 168875 - DNA, 25 bp, Artificial
  Probe
tttgcttgacaatgctttcctcctg

SEQ ID NO: 168876 - DNA, 25 bp, Artificial
  Probe
cttgacaatgctttcctcctgcttc

SEQ ID NO: 168877 - DNA, 25 bp, Artificial
  Probe
tccattacagtccttggcaagaaac

SEQ ID NO: 168878 - DNA, 25 bp, Artificial
  Probe
ccttccactccattacagtccttgg

SEQ ID NO: 168879 - DNA, 25 bp, Artificial
  Probe
ctggcccagtatatgcagaatgata

SEQ ID NO: 168880 - DNA, 25 bp, Artificial
  Probe
cactccattacagtccttggcaaga

SEQ ID NO: 168881 - DNA, 25 bp, Artificial
  Probe
tgatacacttcagctccttcttccc

SEQ ID NO: 168882 - DNA, 25 bp, Artificial
  Probe
cattcatcacactgttccctaaaga

SEQ ID NO: 168883 - DNA, 25 bp, Artificial
  Probe
gatataaactttgtcctgttggctg

SEQ ID NO: 168884 - DNA, 25 bp, Artificial
  Probe
agatataaactttgtcctgttggct

SEQ ID NO: 168885 - DNA, 25 bp, Artificial
  Probe
atcacactgttccctaaagaagaaa

SEQ ID NO: 168886 - DNA, 25 bp, Artificial
  Probe
attcatcacactgttccctaaagaa

SEQ ID NO: 168887 - DNA, 25 bp, Artificial
  Probe
aagatataaactttgtcctgttggc

SEQ ID NO: 168888 - DNA, 25 bp, Artificial
  Probe
atataaactttgtcctgttggctgt

SEQ ID NO: 168889 - DNA, 25 bp, Artificial
  Probe
catcacactgttccctaaagaagaa

SEQ ID NO: 168890 - DNA, 25 bp, Artificial
  Probe
ttcatcacactgttccctaaagaag

SEQ ID NO: 168891 - DNA, 25 bp, Artificial
  Probe
gccaagatataaactttgtcctgtt

SEQ ID NO: 168892 - DNA, 25 bp, Artificial
  Probe
tataaactttgtcctgttggctgtc

SEQ ID NO: 168893 - DNA, 25 bp, Artificial
  Probe
tcatcacactgttccctaaagaaga

SEQ ID NO: 168894 - DNA, 25 bp, Artificial
  Probe
caagatataaactttgtcctgttgg

SEQ ID NO: 168895 - DNA, 25 bp, Artificial
  Probe
ccaagatataaactttgtcctgttg

SEQ ID NO: 168896 - DNA, 25 bp, Artificial
  Probe
gcattcatcacactgttccctaaag

SEQ ID NO: 168897 - DNA, 25 bp, Artificial
  Probe
catgtcacctcagttcaaggatctc

SEQ ID NO: 168898 - DNA, 25 bp, Artificial
  Probe
atgtcacctcagttcaaggatctca

SEQ ID NO: 168899 - DNA, 25 bp, Artificial
  Probe
ataaactttgtcctgttggctgtca

SEQ ID NO: 168900 - DNA, 25 bp, Artificial
  Probe
gacagacaagctaattcgcatcagt

SEQ ID NO: 168901 - DNA, 25 bp, Artificial
  Probe
tgtcacctcagttcaaggatctcaa

SEQ ID NO: 168902 - DNA, 25 bp, Artificial
  Probe
taaactttgtcctgttggctgtcaa

SEQ ID NO: 168903 - DNA, 25 bp, Artificial
  Probe
ggcattcatcacactgttccctaaa

SEQ ID NO: 168904 - DNA, 25 bp, Artificial
  Probe
acagacaagctaattcgcatcagtg

SEQ ID NO: 168905 - DNA, 25 bp, Artificial
  Probe
aatcctctactcacagtacaggcag

SEQ ID NO: 168906 - DNA, 25 bp, Artificial
  Probe
cctaaagaagaaaagacctaccctt

SEQ ID NO: 168907 - DNA, 25 bp, Artificial
  Probe
ttccctaaagaagaaaagacctacc

SEQ ID NO: 168908 - DNA, 25 bp, Artificial
  Probe
cactgttccctaaagaagaaaagac

SEQ ID NO: 168909 - DNA, 25 bp, Artificial
  Probe
ctgttccctaaagaagaaaagacct

SEQ ID NO: 168910 - DNA, 25 bp, Artificial
  Probe
actgttccctaaagaagaaaagacc

SEQ ID NO: 168911 - DNA, 25 bp, Artificial
  Probe
taaagaagaaaagacctacccttgc

SEQ ID NO: 168912 - DNA, 25 bp, Artificial
  Probe
acactgttccctaaagaagaaaaga

SEQ ID NO: 168913 - DNA, 25 bp, Artificial
  Probe
cacactgttccctaaagaagaaaag

SEQ ID NO: 168914 - DNA, 25 bp, Artificial
  Probe
tcacctcagttcaaggatctcaaac

SEQ ID NO: 168915 - DNA, 25 bp, Artificial
  Probe
gtcacctcagttcaaggatctcaaa

SEQ ID NO: 168916 - DNA, 25 bp, Artificial
  Probe
tgttccctaaagaagaaaagaccta

SEQ ID NO: 168917 - DNA, 25 bp, Artificial
  Probe
tcacactgttccctaaagaagaaaa

SEQ ID NO: 168918 - DNA, 25 bp, Artificial
  Probe
agttcaaggatctcaaactcaactt

SEQ ID NO: 168919 - DNA, 25 bp, Artificial
  Probe
ctaaagaagaaaagacctacccttg

SEQ ID NO: 168920 - DNA, 25 bp, Artificial
  Probe
gttccctaaagaagaaaagacctac

SEQ ID NO: 168921 - DNA, 25 bp, Artificial
  Probe
ccctaaagaagaaaagacctaccct

SEQ ID NO: 168922 - DNA, 25 bp, Artificial
  Probe
tccctaaagaagaaaagacctaccc

SEQ ID NO: 168923 - DNA, 25 bp, Artificial
  Probe
ctcagttcaaggatctcaaactcaa

SEQ ID NO: 168924 - DNA, 25 bp, Artificial
  Probe
cagttcaaggatctcaaactcaact

SEQ ID NO: 168925 - DNA, 25 bp, Artificial
  Probe
tcagttcaaggatctcaaactcaac

SEQ ID NO: 168926 - DNA, 25 bp, Artificial
  Probe
tcctctactcacagtacaggcagta

SEQ ID NO: 168927 - DNA, 25 bp, Artificial
  Probe
agaaacagaagaaatgattccctcc

SEQ ID NO: 168928 - DNA, 25 bp, Artificial
  Probe
ggttggagaaacagaagaaatgatt

SEQ ID NO: 168929 - DNA, 25 bp, Artificial
  Probe
tggttggagaaacagaagaaatgat

SEQ ID NO: 168930 - DNA, 25 bp, Artificial
  Probe
aaacagaagaaatgattccctccag

SEQ ID NO: 168931 - DNA, 25 bp, Artificial
  Probe
gaaacagaagaaatgattccctcca

SEQ ID NO: 168932 - DNA, 25 bp, Artificial
  Probe
agccatttgtaccttagtcttagtg

SEQ ID NO: 168933 - DNA, 25 bp, Artificial
  Probe
gccatttgtaccttagtcttagtgt

SEQ ID NO: 168934 - DNA, 25 bp, Artificial
  Probe
gagaaacagaagaaatgattccctc

SEQ ID NO: 168935 - DNA, 25 bp, Artificial
  Probe
gttggagaaacagaagaaatgattc

SEQ ID NO: 168936 - DNA, 25 bp, Artificial
  Probe
ttgtaccttagtcttagtgtttggc

SEQ ID NO: 168937 - DNA, 25 bp, Artificial
  Probe
aatagacctaagccatttgtacctt

SEQ ID NO: 168938 - DNA, 25 bp, Artificial
  Probe
aagccatttgtaccttagtcttagt

SEQ ID NO: 168939 - DNA, 25 bp, Artificial
  Probe
aacagaagaaatgattccctccaga

SEQ ID NO: 168940 - DNA, 25 bp, Artificial
  Probe
ctcactaagcaaatgtacctaccac

SEQ ID NO: 168941 - DNA, 25 bp, Artificial
  Probe
tttgtaccttagtcttagtgtttgg

SEQ ID NO: 168942 - DNA, 25 bp, Artificial
  Probe
ccatttgtaccttagtcttagtgtt

SEQ ID NO: 168943 - DNA, 25 bp, Artificial
  Probe
acagaagaaatgattccctccagag

SEQ ID NO: 168944 - DNA, 25 bp, Artificial
  Probe
aaatagacctaagccatttgtacct

SEQ ID NO: 168945 - DNA, 25 bp, Artificial
  Probe
ctggttggagaaacagaagaaatga

SEQ ID NO: 168946 - DNA, 25 bp, Artificial
  Probe
ttggagaaacagaagaaatgattcc

SEQ ID NO: 168947 - DNA, 25 bp, Artificial
  Probe
ggagaaacagaagaaatgattccct

SEQ ID NO: 168948 - DNA, 25 bp, Artificial
  Probe
cctcactaagcaaatgtacctacca

SEQ ID NO: 168949 - DNA, 25 bp, Artificial
  Probe
tggagaaacagaagaaatgattccc

SEQ ID NO: 168950 - DNA, 25 bp, Artificial
  Probe
atagacctaagccatttgtacctta

SEQ ID NO: 168951 - DNA, 25 bp, Artificial
  Probe
ctaagcaaatgtacctaccaccagt

SEQ ID NO: 168952 - DNA, 25 bp, Artificial
  Probe
actaagcaaatgtacctaccaccag

SEQ ID NO: 168953 - DNA, 25 bp, Artificial
  Probe
tcactaagcaaatgtacctaccacc

SEQ ID NO: 168954 - DNA, 25 bp, Artificial
  Probe
cctggttggagaaacagaagaaatg

SEQ ID NO: 168955 - DNA, 25 bp, Artificial
  Probe
taagcaaatgtacctaccaccagtg

SEQ ID NO: 168956 - DNA, 25 bp, Artificial
  Probe
cactaagcaaatgtacctaccacca

SEQ ID NO: 168957 - DNA, 25 bp, Artificial
  Probe
gtgaaagacacttgaatttcccttt

SEQ ID NO: 168958 - DNA, 25 bp, Artificial
  Probe
ccctcactaagcaaatgtacctacc

SEQ ID NO: 168959 - DNA, 25 bp, Artificial
  Probe
taagccatttgtaccttagtcttag

SEQ ID NO: 168960 - DNA, 25 bp, Artificial
  Probe
cttacgcttcactctgatctgtgtg

SEQ ID NO: 168961 - DNA, 25 bp, Artificial
  Probe
cagaagaaatgattccctccagagc

SEQ ID NO: 168962 - DNA, 25 bp, Artificial
  Probe
cttcactctgatctgtgtgcttcac

SEQ ID NO: 168963 - DNA, 25 bp, Artificial
  Probe
ttagcaatcttactgttttctggtg

SEQ ID NO: 168964 - DNA, 25 bp, Artificial
  Probe
ggtgaaagacacttgaatttccctt

SEQ ID NO: 168965 - DNA, 25 bp, Artificial
  Probe
aaggtgaaagacacttgaatttccc

SEQ ID NO: 168966 - DNA, 25 bp, Artificial
  Probe
atttgtaccttagtcttagtgtttg

SEQ ID NO: 168967 - DNA, 25 bp, Artificial
  Probe
catttgtaccttagtcttagtgttt

SEQ ID NO: 168968 - DNA, 25 bp, Artificial
  Probe
gccctcactaagcaaatgtacctac

SEQ ID NO: 168969 - DNA, 25 bp, Artificial
  Probe
tttagcaatcttactgttttctggt

SEQ ID NO: 168970 - DNA, 25 bp, Artificial
  Probe
tagtcttagtgtttggcctcatcta

SEQ ID NO: 168971 - DNA, 25 bp, Artificial
  Probe
caagaggggtccattttaatgaatt

SEQ ID NO: 168972 - DNA, 25 bp, Artificial
  Probe
acgaataagttaatgttggaagagg

SEQ ID NO: 168973 - DNA, 25 bp, Artificial
  Probe
cgaataagttaatgttggaagagga

SEQ ID NO: 168974 - DNA, 25 bp, Artificial
  Probe
aataagttaatgttggaagaggacc

SEQ ID NO: 168975 - DNA, 25 bp, Artificial
  Probe
cctacgaataagttaatgttggaag

SEQ ID NO: 168976 - DNA, 25 bp, Artificial
  Probe
gaataagttaatgttggaagaggac

SEQ ID NO: 168977 - DNA, 25 bp, Artificial
  Probe
tcttactttgccatttcacttgttc

SEQ ID NO: 168978 - DNA, 25 bp, Artificial
  Probe
gtcttactttgccatttcacttgtt

SEQ ID NO: 168979 - DNA, 25 bp, Artificial
  Probe
ataagttaatgttggaagaggaccc

SEQ ID NO: 168980 - DNA, 25 bp, Artificial
  Probe
ccctacgaataagttaatgttggaa

SEQ ID NO: 168981 - DNA, 25 bp, Artificial
  Probe
cttactttgccatttcacttgttcg

SEQ ID NO: 168982 - DNA, 25 bp, Artificial
  Probe
taagttaatgttggaagaggaccct

SEQ ID NO: 168983 - DNA, 25 bp, Artificial
  Probe
tacgaataagttaatgttggaagag

SEQ ID NO: 168984 - DNA, 25 bp, Artificial
  Probe
ctacgaataagttaatgttggaaga

SEQ ID NO: 168985 - DNA, 25 bp, Artificial
  Probe
ggtcttactttgccatttcacttgt

SEQ ID NO: 168986 - DNA, 25 bp, Artificial
  Probe
gagtttcaacatcagggtgtatgag

SEQ ID NO: 168987 - DNA, 25 bp, Artificial
  Probe
gagagtttcaacatcagggtgtatg

SEQ ID NO: 168988 - DNA, 25 bp, Artificial
  Probe
agagagtttcaacatcagggtgtat

SEQ ID NO: 168989 - DNA, 25 bp, Artificial
  Probe
agagtttcaacatcagggtgtatga

SEQ ID NO: 168990 - DNA, 25 bp, Artificial
  Probe
ttactttgccatttcacttgttcgg

SEQ ID NO: 168991 - DNA, 25 bp, Artificial
  Probe
cggtcttactttgccatttcacttg

SEQ ID NO: 168992 - DNA, 25 bp, Artificial
  Probe
cagagagtttcaacatcagggtgta

SEQ ID NO: 168993 - DNA, 25 bp, Artificial
  Probe
acggtcttactttgccatttcactt

SEQ ID NO: 168994 - DNA, 25 bp, Artificial
  Probe
gagacccctacgaataagttaatgt

SEQ ID NO: 168995 - DNA, 25 bp, Artificial
  Probe
cccctacgaataagttaatgttgga

SEQ ID NO: 168996 - DNA, 25 bp, Artificial
  Probe
gacccctacgaataagttaatgttg

SEQ ID NO: 168997 - DNA, 25 bp, Artificial
  Probe
agacccctacgaataagttaatgtt

SEQ ID NO: 168998 - DNA, 25 bp, Artificial
  Probe
ggagacccctacgaataagttaatg

SEQ ID NO: 168999 - DNA, 25 bp, Artificial
  Probe
acccctacgaataagttaatgttgg

SEQ ID NO: 169000 - DNA, 25 bp, Artificial
  Probe
tggagacccctacgaataagttaat

SEQ ID NO: 169001 - DNA, 25 bp, Artificial
  Probe
cacgaggagaagcagatagtaaaag

SEQ ID NO: 169002 - DNA, 25 bp, Artificial
  Probe
aagttaatgttggaagaggaccctc

SEQ ID NO: 169003 - DNA, 25 bp, Artificial
  Probe
agtttcaacatcagggtgtatgagc

SEQ ID NO: 169004 - DNA, 25 bp, Artificial
  Probe
ttaatgttggaagaggaccctcatg

SEQ ID NO: 169005 - DNA, 25 bp, Artificial
  Probe
gttaatgttggaagaggaccctcat

SEQ ID NO: 169006 - DNA, 25 bp, Artificial
  Probe
ctggagacccctacgaataagttaa

SEQ ID NO: 169007 - DNA, 25 bp, Artificial
  Probe
gaagcagatagtaaaagccacagag

SEQ ID NO: 169008 - DNA, 25 bp, Artificial
  Probe
gagaagcagatagtaaaagccacag

SEQ ID NO: 169009 - DNA, 25 bp, Artificial
  Probe
cacggtcttactttgccatttcact

SEQ ID NO: 169010 - DNA, 25 bp, Artificial
  Probe
gatagaattcctagtctcaaacgcc

SEQ ID NO: 169011 - DNA, 25 bp, Artificial
  Probe
agaagcagatagtaaaagccacaga

SEQ ID NO: 169012 - DNA, 25 bp, Artificial
  Probe
tctggagacccctacgaataagtta

SEQ ID NO: 169013 - DNA, 25 bp, Artificial
  Probe
atagaattcctagtctcaaacgcca

SEQ ID NO: 169014 - DNA, 25 bp, Artificial
  Probe
tactttgccatttcacttgttcggg

SEQ ID NO: 169015 - DNA, 25 bp, Artificial
  Probe
acacggtcttactttgccatttcac

SEQ ID NO: 169016 - DNA, 25 bp, Artificial
  Probe
accctcatgggaaatggatagaatt

SEQ ID NO: 169017 - DNA, 25 bp, Artificial
  Probe
atactcaggcttcaggttatagtca

SEQ ID NO: 169018 - DNA, 25 bp, Artificial
  Probe
tactcaggcttcaggttatagtcaa

SEQ ID NO: 169019 - DNA, 25 bp, Artificial
  Probe
tatactcaggcttcaggttatagtc

SEQ ID NO: 169020 - DNA, 25 bp, Artificial
  Probe
cttcaggttatagtcaaggctatgc

SEQ ID NO: 169021 - DNA, 25 bp, Artificial
  Probe
gcttcaggttatagtcaaggctatg

SEQ ID NO: 169022 - DNA, 25 bp, Artificial
  Probe
actcaggcttcaggttatagtcaag

SEQ ID NO: 169023 - DNA, 25 bp, Artificial
  Probe
ctcaggcttcaggttatagtcaagg

SEQ ID NO: 169024 - DNA, 25 bp, Artificial
  Probe
ggcttcaggttatagtcaaggctat

SEQ ID NO: 169025 - DNA, 25 bp, Artificial
  Probe
aggcttcaggttatagtcaaggcta

SEQ ID NO: 169026 - DNA, 25 bp, Artificial
  Probe
cctatactcaggcttcaggttatag

SEQ ID NO: 169027 - DNA, 25 bp, Artificial
  Probe
ctatactcaggcttcaggttatagt

SEQ ID NO: 169028 - DNA, 25 bp, Artificial
  Probe
caggcttcaggttatagtcaaggct

SEQ ID NO: 169029 - DNA, 25 bp, Artificial
  Probe
tcaggcttcaggttatagtcaaggc

SEQ ID NO: 169030 - DNA, 25 bp, Artificial
  Probe
ctctagtacctcagtcgcaaccatt

SEQ ID NO: 169031 - DNA, 25 bp, Artificial
  Probe
tctagtacctcagtcgcaaccattg

SEQ ID NO: 169032 - DNA, 25 bp, Artificial
  Probe
ccatgacctatactcaggcttcagg

SEQ ID NO: 169033 - DNA, 25 bp, Artificial
  Probe
aagtgagttcagagagtggaacaag

SEQ ID NO: 169034 - DNA, 25 bp, Artificial
  Probe
gaagtgagttcagagagtggaacaa

SEQ ID NO: 169035 - DNA, 25 bp, Artificial
  Probe
ttcaggttatagtcaaggctatgcc

SEQ ID NO: 169036 - DNA, 25 bp, Artificial
  Probe
caaggactgtggatcttacttgacc

SEQ ID NO: 169037 - DNA, 25 bp, Artificial
  Probe
aaggactgtggatcttacttgaccc

SEQ ID NO: 169038 - DNA, 25 bp, Artificial
  Probe
acctatactcaggcttcaggttata

SEQ ID NO: 169039 - DNA, 25 bp, Artificial
  Probe
ctgtggatcttacttgacccctatg

SEQ ID NO: 169040 - DNA, 25 bp, Artificial
  Probe
gacctatactcaggcttcaggttat

SEQ ID NO: 169041 - DNA, 25 bp, Artificial
  Probe
actgtggatcttacttgacccctat

SEQ ID NO: 169042 - DNA, 25 bp, Artificial
  Probe
gtgagttcagagagtggaacaagtg

SEQ ID NO: 169043 - DNA, 25 bp, Artificial
  Probe
gcaaggactgtggatcttacttgac

SEQ ID NO: 169044 - DNA, 25 bp, Artificial
  Probe
agtgagttcagagagtggaacaagt

SEQ ID NO: 169045 - DNA, 25 bp, Artificial
  Probe
tgacctatactcaggcttcaggtta

SEQ ID NO: 169046 - DNA, 25 bp, Artificial
  Probe
gactgtggatcttacttgaccccta

SEQ ID NO: 169047 - DNA, 25 bp, Artificial
  Probe
cccatgacctatactcaggcttcag

SEQ ID NO: 169048 - DNA, 25 bp, Artificial
  Probe
ggaagtgagttcagagagtggaaca

SEQ ID NO: 169049 - DNA, 25 bp, Artificial
  Probe
atgacctatactcaggcttcaggtt

SEQ ID NO: 169050 - DNA, 25 bp, Artificial
  Probe
tgagttcagagagtggaacaagtgg

SEQ ID NO: 169051 - DNA, 25 bp, Artificial
  Probe
gtcctaccccatgacctatactcag

SEQ ID NO: 169052 - DNA, 25 bp, Artificial
  Probe
ggcaaggactgtggatcttacttga

SEQ ID NO: 169053 - DNA, 25 bp, Artificial
  Probe
tcaggttatagtcaaggctatgccg

SEQ ID NO: 169054 - DNA, 25 bp, Artificial
  Probe
tgtggatcttacttgacccctatgc

SEQ ID NO: 169055 - DNA, 25 bp, Artificial
  Probe
catgacctatactcaggcttcaggt

SEQ ID NO: 169056 - DNA, 25 bp, Artificial
  Probe
tcctaccccatgacctatactcagg

SEQ ID NO: 169057 - DNA, 25 bp, Artificial
  Probe
gtggatcttacttgacccctatgca

SEQ ID NO: 169058 - DNA, 25 bp, Artificial
  Probe
taccccatgacctatactcaggctt

SEQ ID NO: 169059 - DNA, 25 bp, Artificial
  Probe
gatcttacttgacccctatgcatca

SEQ ID NO: 169060 - DNA, 25 bp, Artificial
  Probe
atcttacttgacccctatgcatcac

SEQ ID NO: 169061 - DNA, 25 bp, Artificial
  Probe
ggatcttacttgacccctatgcatc

SEQ ID NO: 169062 - DNA, 25 bp, Artificial
  Probe
ataactatgttgctctgttctgagg

SEQ ID NO: 169063 - DNA, 25 bp, Artificial
  Probe
agtcatagcatactgtctacaactt

SEQ ID NO: 169064 - DNA, 25 bp, Artificial
  Probe
cctaataactatgttgctctgttct

SEQ ID NO: 169065 - DNA, 25 bp, Artificial
  Probe
aataactatgttgctctgttctgag

SEQ ID NO: 169066 - DNA, 25 bp, Artificial
  Probe
taataactatgttgctctgttctga

SEQ ID NO: 169067 - DNA, 25 bp, Artificial
  Probe
ctaataactatgttgctctgttctg

SEQ ID NO: 169068 - DNA, 25 bp, Artificial
  Probe
tagtcattcagtgtaaagagagagc

SEQ ID NO: 169069 - DNA, 25 bp, Artificial
  Probe
ccctaataactatgttgctctgttc

SEQ ID NO: 169070 - DNA, 25 bp, Artificial
  Probe
tcatagcatactgtctacaactttg

SEQ ID NO: 169071 - DNA, 25 bp, Artificial
  Probe
gtcatagcatactgtctacaacttt

SEQ ID NO: 169072 - DNA, 25 bp, Artificial
  Probe
tgttagtcattcagtgtaaagagag

SEQ ID NO: 169073 - DNA, 25 bp, Artificial
  Probe
gttagtcattcagtgtaaagagaga

SEQ ID NO: 169074 - DNA, 25 bp, Artificial
  Probe
ttgttagtcattcagtgtaaagaga

SEQ ID NO: 169075 - DNA, 25 bp, Artificial
  Probe
ttagtcattcagtgtaaagagagag

SEQ ID NO: 169076 - DNA, 25 bp, Artificial
  Probe
gcatactgtctacaactttgttagt

SEQ ID NO: 169077 - DNA, 25 bp, Artificial
  Probe
taactatgttgctctgttctgaggg

SEQ ID NO: 169078 - DNA, 25 bp, Artificial
  Probe
attcagtgtaaagagagagcttgtc

SEQ ID NO: 169079 - DNA, 25 bp, Artificial
  Probe
tcattcagtgtaaagagagagcttg

SEQ ID NO: 169080 - DNA, 25 bp, Artificial
  Probe
gtcattcagtgtaaagagagagctt

SEQ ID NO: 169081 - DNA, 25 bp, Artificial
  Probe
cagtgtaaagagagagcttgtctag

SEQ ID NO: 169082 - DNA, 25 bp, Artificial
  Probe
caactttgttagtcattcagtgtaa

SEQ ID NO: 169083 - DNA, 25 bp, Artificial
  Probe
catagcatactgtctacaactttgt

SEQ ID NO: 169084 - DNA, 25 bp, Artificial
  Probe
cattcagtgtaaagagagagcttgt

SEQ ID NO: 169085 - DNA, 25 bp, Artificial
  Probe
tcagtgtaaagagagagcttgtcta

SEQ ID NO: 169086 - DNA, 25 bp, Artificial
  Probe
agtcattcagtgtaaagagagagct

SEQ ID NO: 169087 - DNA, 25 bp, Artificial
  Probe
tttgttagtcattcagtgtaaagag

SEQ ID NO: 169088 - DNA, 25 bp, Artificial
  Probe
agcatactgtctacaactttgttag

SEQ ID NO: 169089 - DNA, 25 bp, Artificial
  Probe
acaactttgttagtcattcagtgta

SEQ ID NO: 169090 - DNA, 25 bp, Artificial
  Probe
tacaactttgttagtcattcagtgt

SEQ ID NO: 169091 - DNA, 25 bp, Artificial
  Probe
cctggaagagtcactgagtacttat

SEQ ID NO: 169092 - DNA, 25 bp, Artificial
  Probe
ctggaagagtcactgagtacttata

SEQ ID NO: 169093 - DNA, 25 bp, Artificial
  Probe
tgtctacaactttgttagtcattca

SEQ ID NO: 169094 - DNA, 25 bp, Artificial
  Probe
actgtctacaactttgttagtcatt

SEQ ID NO: 169095 - DNA, 25 bp, Artificial
  Probe
agtgtaaagagagagcttgtctagg

SEQ ID NO: 169096 - DNA, 25 bp, Artificial
  Probe
ttcagtgtaaagagagagcttgtct

SEQ ID NO: 169097 - DNA, 25 bp, Artificial
  Probe
ctacaactttgttagtcattcagtg

SEQ ID NO: 169098 - DNA, 25 bp, Artificial
  Probe
atagcatactgtctacaactttgtt

SEQ ID NO: 169099 - DNA, 25 bp, Artificial
  Probe
tctacaactttgttagtcattcagt

SEQ ID NO: 169100 - DNA, 25 bp, Artificial
  Probe
tggaagagtcactgagtacttatat

SEQ ID NO: 169101 - DNA, 25 bp, Artificial
  Probe
tcctggaagagtcactgagtactta

SEQ ID NO: 169102 - DNA, 25 bp, Artificial
  Probe
gtctacaactttgttagtcattcag

SEQ ID NO: 169103 - DNA, 25 bp, Artificial
  Probe
ctgtctacaactttgttagtcattc

SEQ ID NO: 169104 - DNA, 25 bp, Artificial
  Probe
aactttgttagtcattcagtgtaaa

SEQ ID NO: 169105 - DNA, 25 bp, Artificial
  Probe
tagcatactgtctacaactttgtta

SEQ ID NO: 169106 - DNA, 25 bp, Artificial
  Probe
tactgtctacaactttgttagtcat

SEQ ID NO: 169107 - DNA, 25 bp, Artificial
  Probe
gtagaggtcaatgaagaaggaactg

SEQ ID NO: 169108 - DNA, 25 bp, Artificial
  Probe
tagaggtcaatgaagaaggaactga

SEQ ID NO: 169109 - DNA, 25 bp, Artificial
  Probe
ggtagaggtcaatgaagaaggaact

SEQ ID NO: 169110 - DNA, 25 bp, Artificial
  Probe
tggtagaggtcaatgaagaaggaac

SEQ ID NO: 169111 - DNA, 25 bp, Artificial
  Probe
gtggtagaggtcaatgaagaaggaa

SEQ ID NO: 169112 - DNA, 25 bp, Artificial
  Probe
ttcaatgagatcaaggctgacttat

SEQ ID NO: 169113 - DNA, 25 bp, Artificial
  Probe
tcaatgagatcaaggctgacttatc

SEQ ID NO: 169114 - DNA, 25 bp, Artificial
  Probe
cttcaatgagatcaaggctgactta

SEQ ID NO: 169115 - DNA, 25 bp, Artificial
  Probe
atcaaggctgacttatctggaatgt

SEQ ID NO: 169116 - DNA, 25 bp, Artificial
  Probe
tgtgtggtagaggtcaatgaagaag

SEQ ID NO: 169117 - DNA, 25 bp, Artificial
  Probe
gatcaaggctgacttatctggaatg

SEQ ID NO: 169118 - DNA, 25 bp, Artificial
  Probe
agaggtcaatgaagaaggaactgag

SEQ ID NO: 169119 - DNA, 25 bp, Artificial
  Probe
gtgtgtggtagaggtcaatgaagaa

SEQ ID NO: 169120 - DNA, 25 bp, Artificial
  Probe
acttatctggaatgtgtcctgagaa

SEQ ID NO: 169121 - DNA, 25 bp, Artificial
  Probe
tcatctccataaactcacattcact

SEQ ID NO: 169122 - DNA, 25 bp, Artificial
  Probe
ctcatctccataaactcacattcac

SEQ ID NO: 169123 - DNA, 25 bp, Artificial
  Probe
tctcatctccataaactcacattca

SEQ ID NO: 169124 - DNA, 25 bp, Artificial
  Probe
gacttatctggaatgtgtcctgaga

SEQ ID NO: 169125 - DNA, 25 bp, Artificial
  Probe
tgtggtagaggtcaatgaagaagga

SEQ ID NO: 169126 - DNA, 25 bp, Artificial
  Probe
gtgtggtagaggtcaatgaagaagg

SEQ ID NO: 169127 - DNA, 25 bp, Artificial
  Probe
gagtgtgtggtagaggtcaatgaag

SEQ ID NO: 169128 - DNA, 25 bp, Artificial
  Probe
tcaaggctgacttatctggaatgtg

SEQ ID NO: 169129 - DNA, 25 bp, Artificial
  Probe
caaggctgacttatctggaatgtgt

SEQ ID NO: 169130 - DNA, 25 bp, Artificial
  Probe
ggttctcatctccataaactcacat

SEQ ID NO: 169131 - DNA, 25 bp, Artificial
  Probe
tgacttatctggaatgtgtcctgag

SEQ ID NO: 169132 - DNA, 25 bp, Artificial
  Probe
ctgacttatctggaatgtgtcctga

SEQ ID NO: 169133 - DNA, 25 bp, Artificial
  Probe
ttctcatctccataaactcacattc

SEQ ID NO: 169134 - DNA, 25 bp, Artificial
  Probe
aatgagatcaaggctgacttatctg

SEQ ID NO: 169135 - DNA, 25 bp, Artificial
  Probe
caatgagatcaaggctgacttatct

SEQ ID NO: 169136 - DNA, 25 bp, Artificial
  Probe
caggttctcatctccataaactcac

SEQ ID NO: 169137 - DNA, 25 bp, Artificial
  Probe
gaggtcaatgaagaaggaactgagg

SEQ ID NO: 169138 - DNA, 25 bp, Artificial
  Probe
agtgtgtggtagaggtcaatgaaga

SEQ ID NO: 169139 - DNA, 25 bp, Artificial
  Probe
aggttctcatctccataaactcaca

SEQ ID NO: 169140 - DNA, 25 bp, Artificial
  Probe
catctccataaactcacattcacta

SEQ ID NO: 169141 - DNA, 25 bp, Artificial
  Probe
aaggctgacttatctggaatgtgtc

SEQ ID NO: 169142 - DNA, 25 bp, Artificial
  Probe
gttctcatctccataaactcacatt

SEQ ID NO: 169143 - DNA, 25 bp, Artificial
  Probe
agatcaaggctgacttatctggaat

SEQ ID NO: 169144 - DNA, 25 bp, Artificial
  Probe
tttcttcatcaggcacaatcaaacc

SEQ ID NO: 169145 - DNA, 25 bp, Artificial
  Probe
gagatcaaggctgacttatctggaa

SEQ ID NO: 169146 - DNA, 25 bp, Artificial
  Probe
atgagatcaaggctgacttatctgg

SEQ ID NO: 169147 - DNA, 25 bp, Artificial
  Probe
tgttacagttgtagtgaatataccc

SEQ ID NO: 169148 - DNA, 25 bp, Artificial
  Probe
ttgttacagttgtagtgaatatacc

SEQ ID NO: 169149 - DNA, 25 bp, Artificial
  Probe
ttatctggaatgtgtcctgagaaag

SEQ ID NO: 169150 - DNA, 25 bp, Artificial
  Probe
cttatctggaatgtgtcctgagaaa

SEQ ID NO: 169151 - DNA, 25 bp, Artificial
  Probe
atctccataaactcacattcactat

SEQ ID NO: 169152 - DNA, 25 bp, Artificial
  Probe
ctcactcaacttccgtctatcctaa

SEQ ID NO: 169153 - DNA, 25 bp, Artificial
  Probe
ctctgagaatacaagatactgccac

SEQ ID NO: 169154 - DNA, 25 bp, Artificial
  Probe
tctgagaatacaagatactgccact

SEQ ID NO: 169155 - DNA, 25 bp, Artificial
  Probe
tcactcaacttccgtctatcctaac

SEQ ID NO: 169156 - DNA, 25 bp, Artificial
  Probe
aacagtgatgaggaagacgatagag

SEQ ID NO: 169157 - DNA, 25 bp, Artificial
  Probe
ctgagaatacaagatactgccactc

SEQ ID NO: 169158 - DNA, 25 bp, Artificial
  Probe
caacagtgatgaggaagacgataga

SEQ ID NO: 169159 - DNA, 25 bp, Artificial
  Probe
tctctgagaatacaagatactgcca

SEQ ID NO: 169160 - DNA, 25 bp, Artificial
  Probe
cagtgatgaggaagacgatagagtg

SEQ ID NO: 169161 - DNA, 25 bp, Artificial
  Probe
cactcaacttccgtctatcctaacc

SEQ ID NO: 169162 - DNA, 25 bp, Artificial
  Probe
tcaacagtgatgaggaagacgatag

SEQ ID NO: 169163 - DNA, 25 bp, Artificial
  Probe
tgagaatacaagatactgccactcc

SEQ ID NO: 169164 - DNA, 25 bp, Artificial
  Probe
agtgatgaggaagacgatagagtgt

SEQ ID NO: 169165 - DNA, 25 bp, Artificial
  Probe
acagtgatgaggaagacgatagagt

SEQ ID NO: 169166 - DNA, 25 bp, Artificial
  Probe
cctcactcaacttccgtctatccta

SEQ ID NO: 169167 - DNA, 25 bp, Artificial
  Probe
gtgatgaggaagacgatagagtgtc

SEQ ID NO: 169168 - DNA, 25 bp, Artificial
  Probe
aatacaagatactgccactcccttc

SEQ ID NO: 169169 - DNA, 25 bp, Artificial
  Probe
gaatacaagatactgccactccctt

SEQ ID NO: 169170 - DNA, 25 bp, Artificial
  Probe
aaacaaaggtgacgactcctctata

SEQ ID NO: 169171 - DNA, 25 bp, Artificial
  Probe
tttctctgttctaagtctcactggc

SEQ ID NO: 169172 - DNA, 25 bp, Artificial
  Probe
agaatacaagatactgccactccct

SEQ ID NO: 169173 - DNA, 25 bp, Artificial
  Probe
ctcctcactcaacttccgtctatcc

SEQ ID NO: 169174 - DNA, 25 bp, Artificial
  Probe
cctcctcactcaacttccgtctatc

SEQ ID NO: 169175 - DNA, 25 bp, Artificial
  Probe
ttctctgagaatacaagatactgcc

SEQ ID NO: 169176 - DNA, 25 bp, Artificial
  Probe
atacaagatactgccactcccttct

SEQ ID NO: 169177 - DNA, 25 bp, Artificial
  Probe
gagaatacaagatactgccactccc

SEQ ID NO: 169178 - DNA, 25 bp, Artificial
  Probe
atagagtgtctgtgcagagtttaaa

SEQ ID NO: 169179 - DNA, 25 bp, Artificial
  Probe
gatagagtgtctgtgcagagtttaa

SEQ ID NO: 169180 - DNA, 25 bp, Artificial
  Probe
tgtctgtgcagagtttaaagaatct

SEQ ID NO: 169181 - DNA, 25 bp, Artificial
  Probe
gtgtctgtgcagagtttaaagaatc

SEQ ID NO: 169182 - DNA, 25 bp, Artificial
  Probe
tagagtgtctgtgcagagtttaaag

SEQ ID NO: 169183 - DNA, 25 bp, Artificial
  Probe
agtgtctgtgcagagtttaaagaat

SEQ ID NO: 169184 - DNA, 25 bp, Artificial
  Probe
ctcctctatagctgatttcctcaac

SEQ ID NO: 169185 - DNA, 25 bp, Artificial
  Probe
ctcaacttccgtctatcctaaccct

SEQ ID NO: 169186 - DNA, 25 bp, Artificial
  Probe
actcctctatagctgatttcctcaa

SEQ ID NO: 169187 - DNA, 25 bp, Artificial
  Probe
tgacgactcctctatagctgatttc

SEQ ID NO: 169188 - DNA, 25 bp, Artificial
  Probe
tatagctgatttcctcaacagtgat

SEQ ID NO: 169189 - DNA, 25 bp, Artificial
  Probe
tcctctatagctgatttcctcaaca

SEQ ID NO: 169190 - DNA, 25 bp, Artificial
  Probe
ggtgacgactcctctatagctgatt

SEQ ID NO: 169191 - DNA, 25 bp, Artificial
  Probe
gactcctctatagctgatttcctca

SEQ ID NO: 169192 - DNA, 25 bp, Artificial
  Probe
tcctcactcaacttccgtctatcct

SEQ ID NO: 169193 - DNA, 25 bp, Artificial
  Probe
ctgtgcagagtttaaagaatctagt

SEQ ID NO: 169194 - DNA, 25 bp, Artificial
  Probe
gtctgtgcagagtttaaagaatcta

SEQ ID NO: 169195 - DNA, 25 bp, Artificial
  Probe
gagtgtctgtgcagagtttaaagaa

SEQ ID NO: 169196 - DNA, 25 bp, Artificial
  Probe
atagctgatttcctcaacagtgatg

SEQ ID NO: 169197 - DNA, 25 bp, Artificial
  Probe
gggacttctacattaagcaaatcaa

SEQ ID NO: 169198 - DNA, 25 bp, Artificial
  Probe
ggacttctacattaagcaaatcaac

SEQ ID NO: 169199 - DNA, 25 bp, Artificial
  Probe
gacttctacattaagcaaatcaaca

SEQ ID NO: 169200 - DNA, 25 bp, Artificial
  Probe
acttctacattaagcaaatcaacaa

SEQ ID NO: 169201 - DNA, 25 bp, Artificial
  Probe
atggggacttctacattaagcaaat

SEQ ID NO: 169202 - DNA, 25 bp, Artificial
  Probe
ggggacttctacattaagcaaatca

SEQ ID NO: 169203 - DNA, 25 bp, Artificial
  Probe
tggggacttctacattaagcaaatc

SEQ ID NO: 169204 - DNA, 25 bp, Artificial
  Probe
ctactccagttacctctgccagtac

SEQ ID NO: 169205 - DNA, 25 bp, Artificial
  Probe
cttctacattaagcaaatcaacaat

SEQ ID NO: 169206 - DNA, 25 bp, Artificial
  Probe
catggggacttctacattaagcaaa

SEQ ID NO: 169207 - DNA, 25 bp, Artificial
  Probe
cacacatggggacttctacattaag

SEQ ID NO: 169208 - DNA, 25 bp, Artificial
  Probe
acacacatggggacttctacattaa

SEQ ID NO: 169209 - DNA, 25 bp, Artificial
  Probe
aacacacatggggacttctacatta

SEQ ID NO: 169210 - DNA, 25 bp, Artificial
  Probe
acatggggacttctacattaagcaa

SEQ ID NO: 169211 - DNA, 25 bp, Artificial
  Probe
ttctacattaagcaaatcaacaatg

SEQ ID NO: 169212 - DNA, 25 bp, Artificial
  Probe
cacatggggacttctacattaagca

SEQ ID NO: 169213 - DNA, 25 bp, Artificial
  Probe
acacatggggacttctacattaagc

SEQ ID NO: 169214 - DNA, 25 bp, Artificial
  Probe
gaacacacatggggacttctacatt

SEQ ID NO: 169215 - DNA, 25 bp, Artificial
  Probe
tactccagttacctctgccagtacc

SEQ ID NO: 169216 - DNA, 25 bp, Artificial
  Probe
gctactccagttacctctgccagta

SEQ ID NO: 169217 - DNA, 25 bp, Artificial
  Probe
caagacattgacgagtgcgaaacag

SEQ ID NO: 169218 - DNA, 25 bp, Artificial
  Probe
ttcagatccaggcaacctctgtcta

SEQ ID NO: 169219 - DNA, 25 bp, Artificial
  Probe
acattaagcaaatcaacaatgtcag

SEQ ID NO: 169220 - DNA, 25 bp, Artificial
  Probe
ggaacacacatggggacttctacat

SEQ ID NO: 169221 - DNA, 25 bp, Artificial
  Probe
tacattaagcaaatcaacaatgtca

SEQ ID NO: 169222 - DNA, 25 bp, Artificial
  Probe
tctacattaagcaaatcaacaatgt

SEQ ID NO: 169223 - DNA, 25 bp, Artificial
  Probe
ctacattaagcaaatcaacaatgtc

SEQ ID NO: 169224 - DNA, 25 bp, Artificial
  Probe
tcttgaattacctccgagatgacac

SEQ ID NO: 169225 - DNA, 25 bp, Artificial
  Probe
cttgaattacctccgagatgacacc

SEQ ID NO: 169226 - DNA, 25 bp, Artificial
  Probe
atcttgaattacctccgagatgaca

SEQ ID NO: 169227 - DNA, 25 bp, Artificial
  Probe
gtacaacaggagcaataacaagtac

SEQ ID NO: 169228 - DNA, 25 bp, Artificial
  Probe
tacaacaggagcaataacaagtact

SEQ ID NO: 169229 - DNA, 25 bp, Artificial
  Probe
caccatcttgaattacctccgagat

SEQ ID NO: 169230 - DNA, 25 bp, Artificial
  Probe
ctttggcaccatcttgaattacctc

SEQ ID NO: 169231 - DNA, 25 bp, Artificial
  Probe
caataacaagtactcgtacaccagc

SEQ ID NO: 169232 - DNA, 25 bp, Artificial
  Probe
gcaataacaagtactcgtacaccag

SEQ ID NO: 169233 - DNA, 25 bp, Artificial
  Probe
actttggcaccatcttgaattacct

SEQ ID NO: 169234 - DNA, 25 bp, Artificial
  Probe
cactttggcaccatcttgaattacc

SEQ ID NO: 169235 - DNA, 25 bp, Artificial
  Probe
acaacaggagcaataacaagtactc

SEQ ID NO: 169236 - DNA, 25 bp, Artificial
  Probe
caggagcaataacaagtactcgtac

SEQ ID NO: 169237 - DNA, 25 bp, Artificial
  Probe
ataacaagtactcgtacaccagcaa

SEQ ID NO: 169238 - DNA, 25 bp, Artificial
  Probe
aataacaagtactcgtacaccagca

SEQ ID NO: 169239 - DNA, 25 bp, Artificial
  Probe
agcaataacaagtactcgtacacca

SEQ ID NO: 169240 - DNA, 25 bp, Artificial
  Probe
aaatattacctcattcaagggctgg

SEQ ID NO: 169241 - DNA, 25 bp, Artificial
  Probe
gagcaataacaagtactcgtacacc

SEQ ID NO: 169242 - DNA, 25 bp, Artificial
  Probe
ggagcaataacaagtactcgtacac

SEQ ID NO: 169243 - DNA, 25 bp, Artificial
  Probe
aggagcaataacaagtactcgtaca

SEQ ID NO: 169244 - DNA, 25 bp, Artificial
  Probe
acaggagcaataacaagtactcgta

SEQ ID NO: 169245 - DNA, 25 bp, Artificial
  Probe
tgtacaacaggagcaataacaagta

SEQ ID NO: 169246 - DNA, 25 bp, Artificial
  Probe
caacaggagcaataacaagtactcg

SEQ ID NO: 169247 - DNA, 25 bp, Artificial
  Probe
gcactttggcaccatcttgaattac

SEQ ID NO: 169248 - DNA, 25 bp, Artificial
  Probe
agcactttggcaccatcttgaatta

SEQ ID NO: 169249 - DNA, 25 bp, Artificial
  Probe
gaaatccaggaattgatggctgaag

SEQ ID NO: 169250 - DNA, 25 bp, Artificial
  Probe
ttgaattacctccgagatgacaccg

SEQ ID NO: 169251 - DNA, 25 bp, Artificial
  Probe
tttggcaccatcttgaattacctcc

SEQ ID NO: 169252 - DNA, 25 bp, Artificial
  Probe
aacaggagcaataacaagtactcgt

SEQ ID NO: 169253 - DNA, 25 bp, Artificial
  Probe
atattacctcattcaagggctggtg

SEQ ID NO: 169254 - DNA, 25 bp, Artificial
  Probe
taacaagtactcgtacaccagcaac

SEQ ID NO: 169255 - DNA, 25 bp, Artificial
  Probe
gcaccatcttgaattacctccgaga

SEQ ID NO: 169256 - DNA, 25 bp, Artificial
  Probe
agaaatccaggaattgatggctgaa

SEQ ID NO: 169257 - DNA, 25 bp, Artificial
  Probe
aagaaatccaggaattgatggctga

SEQ ID NO: 169258 - DNA, 25 bp, Artificial
  Probe
caagaaatccaggaattgatggctg

SEQ ID NO: 169259 - DNA, 25 bp, Artificial
  Probe
aatattacctcattcaagggctggt

SEQ ID NO: 169260 - DNA, 25 bp, Artificial
  Probe
tactcgtacaccagcaactctgatg

SEQ ID NO: 169261 - DNA, 25 bp, Artificial
  Probe
gtactcgtacaccagcaactctgat

SEQ ID NO: 169262 - DNA, 25 bp, Artificial
  Probe
ggaattgatggctgaagcaaaatat

SEQ ID NO: 169263 - DNA, 25 bp, Artificial
  Probe
gcaactctgatgatcacctactgaa

SEQ ID NO: 169264 - DNA, 25 bp, Artificial
  Probe
gatcctcatagaccgttgtggaaag

SEQ ID NO: 169265 - DNA, 25 bp, Artificial
  Probe
gatggctgaagcaaaatattacctc

SEQ ID NO: 169266 - DNA, 25 bp, Artificial
  Probe
aggaattgatggctgaagcaaaata

SEQ ID NO: 169267 - DNA, 25 bp, Artificial
  Probe
tgatggctgaagcaaaatattacct

SEQ ID NO: 169268 - DNA, 25 bp, Artificial
  Probe
aagcactttggcaccatcttgaatt

SEQ ID NO: 169269 - DNA, 25 bp, Artificial
  Probe
cagaagtgttacaaggttggttgag

SEQ ID NO: 169270 - DNA, 25 bp, Artificial
  Probe
gttagatagtatttgggagccttga

SEQ ID NO: 169271 - DNA, 25 bp, Artificial
  Probe
tgttagatagtatttgggagccttg

SEQ ID NO: 169272 - DNA, 25 bp, Artificial
  Probe
gtagataaagatgttagggacggag

SEQ ID NO: 169273 - DNA, 25 bp, Artificial
  Probe
agatagtatttgggagccttgattt

SEQ ID NO: 169274 - DNA, 25 bp, Artificial
  Probe
tagataaagatgttagggacggagt

SEQ ID NO: 169275 - DNA, 25 bp, Artificial
  Probe
atgtagataaagatgttagggacgg

SEQ ID NO: 169276 - DNA, 25 bp, Artificial
  Probe
tatttgggagccttgatttacagtt

SEQ ID NO: 169277 - DNA, 25 bp, Artificial
  Probe
gatgttagatagtatttgggagcct

SEQ ID NO: 169278 - DNA, 25 bp, Artificial
  Probe
tagtatttgggagccttgatttaca

SEQ ID NO: 169279 - DNA, 25 bp, Artificial
  Probe
ggatgttagatagtatttgggagcc

SEQ ID NO: 169280 - DNA, 25 bp, Artificial
  Probe
gggatgttagatagtatttgggagc

SEQ ID NO: 169281 - DNA, 25 bp, Artificial
  Probe
tgtagataaagatgttagggacgga

SEQ ID NO: 169282 - DNA, 25 bp, Artificial
  Probe
tgggatgttagatagtatttgggag

SEQ ID NO: 169283 - DNA, 25 bp, Artificial
  Probe
ctgggatgttagatagtatttggga

SEQ ID NO: 169284 - DNA, 25 bp, Artificial
  Probe
ttgccttgggacctatctgattata

SEQ ID NO: 169285 - DNA, 25 bp, Artificial
  Probe
atgttagatagtatttgggagcctt

SEQ ID NO: 169286 - DNA, 25 bp, Artificial
  Probe
agtatttgggagccttgatttacag

SEQ ID NO: 169287 - DNA, 25 bp, Artificial
  Probe
tagatagtatttgggagccttgatt

SEQ ID NO: 169288 - DNA, 25 bp, Artificial
  Probe
ttagatagtatttgggagccttgat

SEQ ID NO: 169289 - DNA, 25 bp, Artificial
  Probe
gtatttgggagccttgatttacagt

SEQ ID NO: 169290 - DNA, 25 bp, Artificial
  Probe
ggagtgtctgggatgttagatagta

SEQ ID NO: 169291 - DNA, 25 bp, Artificial
  Probe
tctgggatgttagatagtatttggg

SEQ ID NO: 169292 - DNA, 25 bp, Artificial
  Probe
agaagtgttacaaggttggttgagg

SEQ ID NO: 169293 - DNA, 25 bp, Artificial
  Probe
atagtatttgggagccttgatttac

SEQ ID NO: 169294 - DNA, 25 bp, Artificial
  Probe
atttgggagccttgatttacagttc

SEQ ID NO: 169295 - DNA, 25 bp, Artificial
  Probe
gagtgtctgggatgttagatagtat

SEQ ID NO: 169296 - DNA, 25 bp, Artificial
  Probe
atggagtgtctgggatgttagatag

SEQ ID NO: 169297 - DNA, 25 bp, Artificial
  Probe
gatggagtgtctgggatgttagata

SEQ ID NO: 169298 - DNA, 25 bp, Artificial
  Probe
cttgatttacagttctgctctcgtt

SEQ ID NO: 169299 - DNA, 25 bp, Artificial
  Probe
gatagtatttgggagccttgattta

SEQ ID NO: 169300 - DNA, 25 bp, Artificial
  Probe
agataaagatgttagggacggagtg

SEQ ID NO: 169301 - DNA, 25 bp, Artificial
  Probe
ttagatggagtgtctgggatgttag

SEQ ID NO: 169302 - DNA, 25 bp, Artificial
  Probe
ttgatttacagttctgctctcgttg

SEQ ID NO: 169303 - DNA, 25 bp, Artificial
  Probe
gtctgggatgttagatagtatttgg

SEQ ID NO: 169304 - DNA, 25 bp, Artificial
  Probe
agtgtctgggatgttagatagtatt

SEQ ID NO: 169305 - DNA, 25 bp, Artificial
  Probe
gttagatggagtgtctgggatgtta

SEQ ID NO: 169306 - DNA, 25 bp, Artificial
  Probe
gttgccttgggacctatctgattat

SEQ ID NO: 169307 - DNA, 25 bp, Artificial
  Probe
gccttgggacctatctgattatagt

SEQ ID NO: 169308 - DNA, 25 bp, Artificial
  Probe
tgccttgggacctatctgattatag

SEQ ID NO: 169309 - DNA, 25 bp, Artificial
  Probe
tagatggagtgtctgggatgttaga

SEQ ID NO: 169310 - DNA, 25 bp, Artificial
  Probe
tttgggagccttgatttacagttct

SEQ ID NO: 169311 - DNA, 25 bp, Artificial
  Probe
catgtagataaagatgttagggacg

SEQ ID NO: 169312 - DNA, 25 bp, Artificial
  Probe
tgtctgggatgttagatagtatttg

SEQ ID NO: 169313 - DNA, 25 bp, Artificial
  Probe
gtgtctgggatgttagatagtattt

SEQ ID NO: 169314 - DNA, 25 bp, Artificial
  Probe
cggaagaatgagaagatagagttca

SEQ ID NO: 169315 - DNA, 25 bp, Artificial
  Probe
tgagaagatagagttcatggaggac

SEQ ID NO: 169316 - DNA, 25 bp, Artificial
  Probe
gagaagatagagttcatggaggacc

SEQ ID NO: 169317 - DNA, 25 bp, Artificial
  Probe
aagatgagttagtaacacagaggcg

SEQ ID NO: 169318 - DNA, 25 bp, Artificial
  Probe
gagaatggaaactacgacaaagatg

SEQ ID NO: 169319 - DNA, 25 bp, Artificial
  Probe
tgagaatggaaactacgacaaagat

SEQ ID NO: 169320 - DNA, 25 bp, Artificial
  Probe
aagttagaccagactgagaatggaa

SEQ ID NO: 169321 - DNA, 25 bp, Artificial
  Probe
ctgagaatggaaactacgacaaaga

SEQ ID NO: 169322 - DNA, 25 bp, Artificial
  Probe
actgagaatggaaactacgacaaag

SEQ ID NO: 169323 - DNA, 25 bp, Artificial
  Probe
gactgagaatggaaactacgacaaa

SEQ ID NO: 169324 - DNA, 25 bp, Artificial
  Probe
aaagatgagttagtaacacagaggc

SEQ ID NO: 169325 - DNA, 25 bp, Artificial
  Probe
agaaagttagaccagactgagaatg

SEQ ID NO: 169326 - DNA, 25 bp, Artificial
  Probe
gagaaagttagaccagactgagaat

SEQ ID NO: 169327 - DNA, 25 bp, Artificial
  Probe
agactgagaatggaaactacgacaa

SEQ ID NO: 169328 - DNA, 25 bp, Artificial
  Probe
gaaagatgagttagtaacacagagg

SEQ ID NO: 169329 - DNA, 25 bp, Artificial
  Probe
agaatggaaactacgacaaagatgt

SEQ ID NO: 169330 - DNA, 25 bp, Artificial
  Probe
gaatggaaactacgacaaagatgtg

SEQ ID NO: 169331 - DNA, 25 bp, Artificial
  Probe
aatggaaactacgacaaagatgtga

SEQ ID NO: 169332 - DNA, 25 bp, Artificial
  Probe
atgagaagatagagttcatggagga

SEQ ID NO: 169333 - DNA, 25 bp, Artificial
  Probe
ggagaaagttagaccagactgagaa

SEQ ID NO: 169334 - DNA, 25 bp, Artificial
  Probe
gctgaaagatgagttagtaacacag

SEQ ID NO: 169335 - DNA, 25 bp, Artificial
  Probe
aatgagaagatagagttcatggagg

SEQ ID NO: 169336 - DNA, 25 bp, Artificial
  Probe
atggaaactacgacaaagatgtgag

SEQ ID NO: 169337 - DNA, 25 bp, Artificial
  Probe
ttccagttcatcagggtcacttaat

SEQ ID NO: 169338 - DNA, 25 bp, Artificial
  Probe
tgaaagatgagttagtaacacagag

SEQ ID NO: 169339 - DNA, 25 bp, Artificial
  Probe
gaagatagagttcatggaggaccac

SEQ ID NO: 169340 - DNA, 25 bp, Artificial
  Probe
ccggaagaatgagaagatagagttc

SEQ ID NO: 169341 - DNA, 25 bp, Artificial
  Probe
gatagagttcatggaggaccacatc

SEQ ID NO: 169342 - DNA, 25 bp, Artificial
  Probe
agaagatagagttcatggaggacca

SEQ ID NO: 169343 - DNA, 25 bp, Artificial
  Probe
ggaagagctgaaagatgagttagta

SEQ ID NO: 169344 - DNA, 25 bp, Artificial
  Probe
cagactgagaatggaaactacgaca

SEQ ID NO: 169345 - DNA, 25 bp, Artificial
  Probe
agaatgagaagatagagttcatgga

SEQ ID NO: 169346 - DNA, 25 bp, Artificial
  Probe
gaatgagaagatagagttcatggag

SEQ ID NO: 169347 - DNA, 25 bp, Artificial
  Probe
agctgaaagatgagttagtaacaca

SEQ ID NO: 169348 - DNA, 25 bp, Artificial
  Probe
tagaccagactgagaatggaaacta

SEQ ID NO: 169349 - DNA, 25 bp, Artificial
  Probe
tccagttcatcagggtcacttaatg

SEQ ID NO: 169350 - DNA, 25 bp, Artificial
  Probe
gagctgaaagatgagttagtaacac

SEQ ID NO: 169351 - DNA, 25 bp, Artificial
  Probe
gtggaagagctgaaagatgagttag

SEQ ID NO: 169352 - DNA, 25 bp, Artificial
  Probe
agatagagttcatggaggaccacat

SEQ ID NO: 169353 - DNA, 25 bp, Artificial
  Probe
agagctgaaagatgagttagtaaca

SEQ ID NO: 169354 - DNA, 25 bp, Artificial
  Probe
catgctgattgacaggatagtgagg

SEQ ID NO: 169355 - DNA, 25 bp, Artificial
  Probe
ccatgctgattgacaggatagtgag

SEQ ID NO: 169356 - DNA, 25 bp, Artificial
  Probe
gaaagttagaccagactgagaatgg

SEQ ID NO: 169357 - DNA, 25 bp, Artificial
  Probe
ctgaaagatgagttagtaacacaga

SEQ ID NO: 169358 - DNA, 25 bp, Artificial
  Probe
aagatagagttcatggaggaccaca

SEQ ID NO: 169359 - DNA, 25 bp, Artificial
  Probe
ttcattatctgctcttatgccttct

SEQ ID NO: 169360 - DNA, 25 bp, Artificial
  Probe
tcattatctgctcttatgccttcta

SEQ ID NO: 169361 - DNA, 25 bp, Artificial
  Probe
cattatctgctcttatgccttctaa

SEQ ID NO: 169362 - DNA, 25 bp, Artificial
  Probe
tatctgctcttatgccttctaaacc

SEQ ID NO: 169363 - DNA, 25 bp, Artificial
  Probe
gccattcatcactttaatctttgct

SEQ ID NO: 169364 - DNA, 25 bp, Artificial
  Probe
agccattcatcactttaatctttgc

SEQ ID NO: 169365 - DNA, 25 bp, Artificial
  Probe
agagaacaagccattcatcacttta

SEQ ID NO: 169366 - DNA, 25 bp, Artificial
  Probe
gagaacaagccattcatcactttaa

SEQ ID NO: 169367 - DNA, 25 bp, Artificial
  Probe
tttcattatctgctcttatgccttc

SEQ ID NO: 169368 - DNA, 25 bp, Artificial
  Probe
aaccagcgtttgtaatctttcattc

SEQ ID NO: 169369 - DNA, 25 bp, Artificial
  Probe
gaaccagcgtttgtaatctttcatt

SEQ ID NO: 169370 - DNA, 25 bp, Artificial
  Probe
ttatctgctcttatgccttctaaac

SEQ ID NO: 169371 - DNA, 25 bp, Artificial
  Probe
acaagccattcatcactttaatctt

SEQ ID NO: 169372 - DNA, 25 bp, Artificial
  Probe
aacaagccattcatcactttaatct

SEQ ID NO: 169373 - DNA, 25 bp, Artificial
  Probe
agaacaagccattcatcactttaat

SEQ ID NO: 169374 - DNA, 25 bp, Artificial
  Probe
gaacaagccattcatcactttaatc

SEQ ID NO: 169375 - DNA, 25 bp, Artificial
  Probe
aagagaacaagccattcatcacttt

SEQ ID NO: 169376 - DNA, 25 bp, Artificial
  Probe
aaagagaacaagccattcatcactt

SEQ ID NO: 169377 - DNA, 25 bp, Artificial
  Probe
atctgctcttatgccttctaaacct

SEQ ID NO: 169378 - DNA, 25 bp, Artificial
  Probe
atcacaaagagaacaagccattcat

SEQ ID NO: 169379 - DNA, 25 bp, Artificial
  Probe
agaaccagcgtttgtaatctttcat

SEQ ID NO: 169380 - DNA, 25 bp, Artificial
  Probe
ctcttatgccttctaaacctcctgt

SEQ ID NO: 169381 - DNA, 25 bp, Artificial
  Probe
atttcattatctgctcttatgcctt

SEQ ID NO: 169382 - DNA, 25 bp, Artificial
  Probe
tctttgctatttcattatctgctct

SEQ ID NO: 169383 - DNA, 25 bp, Artificial
  Probe
tcttatgccttctaaacctcctgtt

SEQ ID NO: 169384 - DNA, 25 bp, Artificial
  Probe
agcgtttgtaatctttcattcccag

SEQ ID NO: 169385 - DNA, 25 bp, Artificial
  Probe
atttattgtggattgaatcatgccc

SEQ ID NO: 169386 - DNA, 25 bp, Artificial
  Probe
gctatttcattatctgctcttatgc

SEQ ID NO: 169387 - DNA, 25 bp, Artificial
  Probe
caaagagaacaagccattcatcact

SEQ ID NO: 169388 - DNA, 25 bp, Artificial
  Probe
tcacaaagagaacaagccattcatc

SEQ ID NO: 169389 - DNA, 25 bp, Artificial
  Probe
aagccattcatcactttaatctttg

SEQ ID NO: 169390 - DNA, 25 bp, Artificial
  Probe
caagccattcatcactttaatcttt

SEQ ID NO: 169391 - DNA, 25 bp, Artificial
  Probe
cagcgtttgtaatctttcattccca

SEQ ID NO: 169392 - DNA, 25 bp, Artificial
  Probe
accagcgtttgtaatctttcattcc

SEQ ID NO: 169393 - DNA, 25 bp, Artificial
  Probe
acatctcttcaaacatggaacctag

SEQ ID NO: 169394 - DNA, 25 bp, Artificial
  Probe
ctacatctcttcaaacatggaacct

SEQ ID NO: 169395 - DNA, 25 bp, Artificial
  Probe
tacatctcttcaaacatggaaccta

SEQ ID NO: 169396 - DNA, 25 bp, Artificial
  Probe
tctgctcttatgccttctaaacctc

SEQ ID NO: 169397 - DNA, 25 bp, Artificial
  Probe
tattgtggattgaatcatgcccttt

SEQ ID NO: 169398 - DNA, 25 bp, Artificial
  Probe
ttattgtggattgaatcatgccctt

SEQ ID NO: 169399 - DNA, 25 bp, Artificial
  Probe
tttattgtggattgaatcatgccct

SEQ ID NO: 169400 - DNA, 25 bp, Artificial
  Probe
attatctgctcttatgccttctaaa

SEQ ID NO: 169401 - DNA, 25 bp, Artificial
  Probe
acaaagagaacaagccattcatcac

SEQ ID NO: 169402 - DNA, 25 bp, Artificial
  Probe
cacaaagagaacaagccattcatca

SEQ ID NO: 169403 - DNA, 25 bp, Artificial
  Probe
catcacaaagagaacaagccattca

SEQ ID NO: 169404 - DNA, 25 bp, Artificial
  Probe
acaagcctacaatgaactatgagaa

SEQ ID NO: 169405 - DNA, 25 bp, Artificial
  Probe
aacaagcctacaatgaactatgaga

SEQ ID NO: 169406 - DNA, 25 bp, Artificial
  Probe
gacttgaagactctgattggataca

SEQ ID NO: 169407 - DNA, 25 bp, Artificial
  Probe
tgacttgaagactctgattggatac

SEQ ID NO: 169408 - DNA, 25 bp, Artificial
  Probe
gtgacttgaagactctgattggata

SEQ ID NO: 169409 - DNA, 25 bp, Artificial
  Probe
tgtgacttgaagactctgattggat

SEQ ID NO: 169410 - DNA, 25 bp, Artificial
  Probe
gaacttcttactgacaaggatgctc

SEQ ID NO: 169411 - DNA, 25 bp, Artificial
  Probe
ttgaacttcttactgacaaggatgc

SEQ ID NO: 169412 - DNA, 25 bp, Artificial
  Probe
cttgaagactctgattggatacagt

SEQ ID NO: 169413 - DNA, 25 bp, Artificial
  Probe
acttgaagactctgattggatacag

SEQ ID NO: 169414 - DNA, 25 bp, Artificial
  Probe
ttgaagactctgattggatacagtg

SEQ ID NO: 169415 - DNA, 25 bp, Artificial
  Probe
tgaacttcttactgacaaggatgct

SEQ ID NO: 169416 - DNA, 25 bp, Artificial
  Probe
ctgtgacttgaagactctgattgga

SEQ ID NO: 169417 - DNA, 25 bp, Artificial
  Probe
tctgtgacttgaagactctgattgg

SEQ ID NO: 169418 - DNA, 25 bp, Artificial
  Probe
caatgaactatgagaaacttagccg

SEQ ID NO: 169419 - DNA, 25 bp, Artificial
  Probe
aatgaactatgagaaacttagccgt

SEQ ID NO: 169420 - DNA, 25 bp, Artificial
  Probe
agcctacaatgaactatgagaaact

SEQ ID NO: 169421 - DNA, 25 bp, Artificial
  Probe
aaacaagcctacaatgaactatgag

SEQ ID NO: 169422 - DNA, 25 bp, Artificial
  Probe
atgaactatgagaaacttagccgtg

SEQ ID NO: 169423 - DNA, 25 bp, Artificial
  Probe
acaatgaactatgagaaacttagcc

SEQ ID NO: 169424 - DNA, 25 bp, Artificial
  Probe
gcctacaatgaactatgagaaactt

SEQ ID NO: 169425 - DNA, 25 bp, Artificial
  Probe
aagcctacaatgaactatgagaaac

SEQ ID NO: 169426 - DNA, 25 bp, Artificial
  Probe
caagcctacaatgaactatgagaaa

SEQ ID NO: 169427 - DNA, 25 bp, Artificial
  Probe
aacttcttactgacaaggatgctcg

SEQ ID NO: 169428 - DNA, 25 bp, Artificial
  Probe
tgaagactctgattggatacagtgc

SEQ ID NO: 169429 - DNA, 25 bp, Artificial
  Probe
taaagttcaaggcaagagatttgtg

SEQ ID NO: 169430 - DNA, 25 bp, Artificial
  Probe
gtaaagttcaaggcaagagatttgt

SEQ ID NO: 169431 - DNA, 25 bp, Artificial
  Probe
tgtaaagttcaaggcaagagatttg

SEQ ID NO: 169432 - DNA, 25 bp, Artificial
  Probe
gatttgtaaagttcaaggcaagaga

SEQ ID NO: 169433 - DNA, 25 bp, Artificial
  Probe
ttgtaaagttcaaggcaagagattt

SEQ ID NO: 169434 - DNA, 25 bp, Artificial
  Probe
tttgtaaagttcaaggcaagagatt

SEQ ID NO: 169435 - DNA, 25 bp, Artificial
  Probe
tgatttgtaaagttcaaggcaagag

SEQ ID NO: 169436 - DNA, 25 bp, Artificial
  Probe
tgtatttcttgggttggtgatgaag

SEQ ID NO: 169437 - DNA, 25 bp, Artificial
  Probe
ctgtatttcttgggttggtgatgaa

SEQ ID NO: 169438 - DNA, 25 bp, Artificial
  Probe
aagttcaaggcaagagatttgtgta

SEQ ID NO: 169439 - DNA, 25 bp, Artificial
  Probe
atttgtaaagttcaaggcaagagat

SEQ ID NO: 169440 - DNA, 25 bp, Artificial
  Probe
atgatttgtaaagttcaaggcaaga

SEQ ID NO: 169441 - DNA, 25 bp, Artificial
  Probe
gactgtatttcttgggttggtgatg

SEQ ID NO: 169442 - DNA, 25 bp, Artificial
  Probe
aaagttcaaggcaagagatttgtgt

SEQ ID NO: 169443 - DNA, 25 bp, Artificial
  Probe
gtatttcttgggttggtgatgaagg

SEQ ID NO: 169444 - DNA, 25 bp, Artificial
  Probe
actgtatttcttgggttggtgatga

SEQ ID NO: 169445 - DNA, 25 bp, Artificial
  Probe
gtgcattacggtattattatgatgg

SEQ ID NO: 169446 - DNA, 25 bp, Artificial
  Probe
agactgtatttcttgggttggtgat

SEQ ID NO: 169447 - DNA, 25 bp, Artificial
  Probe
catgatttgtaaagttcaaggcaag

SEQ ID NO: 169448 - DNA, 25 bp, Artificial
  Probe
agttcaaggcaagagatttgtgtac

SEQ ID NO: 169449 - DNA, 25 bp, Artificial
  Probe
ttatccattgaagaaggttaccgac

SEQ ID NO: 169450 - DNA, 25 bp, Artificial
  Probe
tatccattgaagaaggttaccgact

SEQ ID NO: 169451 - DNA, 25 bp, Artificial
  Probe
caatacaagagtaacttcatggcag

SEQ ID NO: 169452 - DNA, 25 bp, Artificial
  Probe
gtcatactcattggacatcagagac

SEQ ID NO: 169453 - DNA, 25 bp, Artificial
  Probe
agtcatactcattggacatcagaga

SEQ ID NO: 169454 - DNA, 25 bp, Artificial
  Probe
gtgatgttcctgaatatccactgtt

SEQ ID NO: 169455 - DNA, 25 bp, Artificial
  Probe
atccattgaagaaggttaccgactt

SEQ ID NO: 169456 - DNA, 25 bp, Artificial
  Probe
aatacaagagtaacttcatggcagc

SEQ ID NO: 169457 - DNA, 25 bp, Artificial
  Probe
tcatactcattggacatcagagacg

SEQ ID NO: 169458 - DNA, 25 bp, Artificial
  Probe
aagaatgagcatcgacgatattaga

SEQ ID NO: 169459 - DNA, 25 bp, Artificial
  Probe
caagaatgagcatcgacgatattag

SEQ ID NO: 169460 - DNA, 25 bp, Artificial
  Probe
gcaatacaagagtaacttcatggca

SEQ ID NO: 169461 - DNA, 25 bp, Artificial
  Probe
agaatgagcatcgacgatattagac

SEQ ID NO: 169462 - DNA, 25 bp, Artificial
  Probe
atattagacgaatcggagtcatact

SEQ ID NO: 169463 - DNA, 25 bp, Artificial
  Probe
gatattagacgaatcggagtcatac

SEQ ID NO: 169464 - DNA, 25 bp, Artificial
  Probe
tcaagaatgagcatcgacgatatta

SEQ ID NO: 169465 - DNA, 25 bp, Artificial
  Probe
atgttcctgaatatccactgtttgt

SEQ ID NO: 169466 - DNA, 25 bp, Artificial
  Probe
gatgttcctgaatatccactgtttg

SEQ ID NO: 169467 - DNA, 25 bp, Artificial
  Probe
tgatgttcctgaatatccactgttt

SEQ ID NO: 169468 - DNA, 25 bp, Artificial
  Probe
ttcaagaatgagcatcgacgatatt

SEQ ID NO: 169469 - DNA, 25 bp, Artificial
  Probe
ggcaatacaagagtaacttcatggc

SEQ ID NO: 169470 - DNA, 25 bp, Artificial
  Probe
tgttcctgaatatccactgtttgtc

SEQ ID NO: 169471 - DNA, 25 bp, Artificial
  Probe
gaatgagcatcgacgatattagacg

SEQ ID NO: 169472 - DNA, 25 bp, Artificial
  Probe
tgactggctggattctataaagatg

SEQ ID NO: 169473 - DNA, 25 bp, Artificial
  Probe
gtgactggctggattctataaagat

SEQ ID NO: 169474 - DNA, 25 bp, Artificial
  Probe
tttatccattgaagaaggttaccga

SEQ ID NO: 169475 - DNA, 25 bp, Artificial
  Probe
gactggctggattctataaagatgg

SEQ ID NO: 169476 - DNA, 25 bp, Artificial
  Probe
ggtgatgttcctgaatatccactgt

SEQ ID NO: 169477 - DNA, 25 bp, Artificial
  Probe
ctggtgatgttcctgaatatccact

SEQ ID NO: 169478 - DNA, 25 bp, Artificial
  Probe
ttcctgaatatccactgtttgtcac

SEQ ID NO: 169479 - DNA, 25 bp, Artificial
  Probe
gttcctgaatatccactgtttgtca

SEQ ID NO: 169480 - DNA, 25 bp, Artificial
  Probe
tggtgatgttcctgaatatccactg

SEQ ID NO: 169481 - DNA, 25 bp, Artificial
  Probe
gatctgatttcaagaatgagcatcg

SEQ ID NO: 169482 - DNA, 25 bp, Artificial
  Probe
actggctggattctataaagatggg

SEQ ID NO: 169483 - DNA, 25 bp, Artificial
  Probe
ggtgactggctggattctataaaga

SEQ ID NO: 169484 - DNA, 25 bp, Artificial
  Probe
tgatctgatttcaagaatgagcatc

SEQ ID NO: 169485 - DNA, 25 bp, Artificial
  Probe
atacaagagtaacttcatggcagcg

SEQ ID NO: 169486 - DNA, 25 bp, Artificial
  Probe
gaaatgtccaaccaggatgttattt

SEQ ID NO: 169487 - DNA, 25 bp, Artificial
  Probe
gggcaatacaagagtaacttcatgg

SEQ ID NO: 169488 - DNA, 25 bp, Artificial
  Probe
gggtgactggctggattctataaag

SEQ ID NO: 169489 - DNA, 25 bp, Artificial
  Probe
tcctgaatatccactgtttgtcaca

SEQ ID NO: 169490 - DNA, 25 bp, Artificial
  Probe
ggaaatgtccaaccaggatgttatt

SEQ ID NO: 169491 - DNA, 25 bp, Artificial
  Probe
cctggtgatgttcctgaatatccac

SEQ ID NO: 169492 - DNA, 25 bp, Artificial
  Probe
gaggtgatgtcctatggagagagac

SEQ ID NO: 169493 - DNA, 25 bp, Artificial
  Probe
atctgatttcaagaatgagcatcga

SEQ ID NO: 169494 - DNA, 25 bp, Artificial
  Probe
tatgactgaccaatgtgataaggac

SEQ ID NO: 169495 - DNA, 25 bp, Artificial
  Probe
ctatgactgaccaatgtgataagga

SEQ ID NO: 169496 - DNA, 25 bp, Artificial
  Probe
atgactgaccaatgtgataaggact

SEQ ID NO: 169497 - DNA, 25 bp, Artificial
  Probe
tgactgaccaatgtgataaggactt

SEQ ID NO: 169498 - DNA, 25 bp, Artificial
  Probe
cctatgactgaccaatgtgataagg

SEQ ID NO: 169499 - DNA, 25 bp, Artificial
  Probe
actgaccaatgtgataaggacttta

SEQ ID NO: 169500 - DNA, 25 bp, Artificial
  Probe
ccctatgactgaccaatgtgataag

SEQ ID NO: 169501 - DNA, 25 bp, Artificial
  Probe
ctgaccaatgtgataaggactttac

SEQ ID NO: 169502 - DNA, 25 bp, Artificial
  Probe
gactgaccaatgtgataaggacttt

SEQ ID NO: 169503 - DNA, 25 bp, Artificial
  Probe
tggttaaatggaatagaggtcttga

SEQ ID NO: 169504 - DNA, 25 bp, Artificial
  Probe
tttcatagaatcctaccctctcaga

SEQ ID NO: 169505 - DNA, 25 bp, Artificial
  Probe
ttcatagaatcctaccctctcagat

SEQ ID NO: 169506 - DNA, 25 bp, Artificial
  Probe
tcatagaatcctaccctctcagatg

SEQ ID NO: 169507 - DNA, 25 bp, Artificial
  Probe
ttggttaaatggaatagaggtcttg

SEQ ID NO: 169508 - DNA, 25 bp, Artificial
  Probe
catagaatcctaccctctcagatgg

SEQ ID NO: 169509 - DNA, 25 bp, Artificial
  Probe
gctatttggaggaaagaatatggat

SEQ ID NO: 169510 - DNA, 25 bp, Artificial
  Probe
gcacatctgtaaatgactatatggt

SEQ ID NO: 169511 - DNA, 25 bp, Artificial
  Probe
ggttaaatggaatagaggtcttgat

SEQ ID NO: 169512 - DNA, 25 bp, Artificial
  Probe
tgaccaatgtgataaggactttaca

SEQ ID NO: 169513 - DNA, 25 bp, Artificial
  Probe
ggaatagaggtcttgatctttggaa

SEQ ID NO: 169514 - DNA, 25 bp, Artificial
  Probe
atggaatagaggtcttgatctttgg

SEQ ID NO: 169515 - DNA, 25 bp, Artificial
  Probe
atagaggtcttgatctttggaatgc

SEQ ID NO: 169516 - DNA, 25 bp, Artificial
  Probe
tggaatagaggtcttgatctttgga

SEQ ID NO: 169517 - DNA, 25 bp, Artificial
  Probe
gaccaatgtgataaggactttacaa

SEQ ID NO: 169518 - DNA, 25 bp, Artificial
  Probe
attggttaaatggaatagaggtctt

SEQ ID NO: 169519 - DNA, 25 bp, Artificial
  Probe
accaatgtgataaggactttacaaa

SEQ ID NO: 169520 - DNA, 25 bp, Artificial
  Probe
aatagaggtcttgatctttggaatg

SEQ ID NO: 169521 - DNA, 25 bp, Artificial
  Probe
aatggaatagaggtcttgatctttg

SEQ ID NO: 169522 - DNA, 25 bp, Artificial
  Probe
caatgttgtacctcggttcactgtt

SEQ ID NO: 169523 - DNA, 25 bp, Artificial
  Probe
gaatagaggtcttgatctttggaat

SEQ ID NO: 169524 - DNA, 25 bp, Artificial
  Probe
ctcaatgttgtacctcggttcactg

SEQ ID NO: 169525 - DNA, 25 bp, Artificial
  Probe
agctatttggaggaaagaatatgga

SEQ ID NO: 169526 - DNA, 25 bp, Artificial
  Probe
aaatggaatagaggtcttgatcttt

SEQ ID NO: 169527 - DNA, 25 bp, Artificial
  Probe
aagctatttggaggaaagaatatgg

SEQ ID NO: 169528 - DNA, 25 bp, Artificial
  Probe
ggtaggtgttgtgatgggaaagaaa

SEQ ID NO: 169529 - DNA, 25 bp, Artificial
  Probe
aatcttggcagacataagaggacac

SEQ ID NO: 169530 - DNA, 25 bp, Artificial
  Probe
gcattggttaaatggaatagaggtc

SEQ ID NO: 169531 - DNA, 25 bp, Artificial
  Probe
agcattggttaaatggaatagaggt

SEQ ID NO: 169532 - DNA, 25 bp, Artificial
  Probe
cccatgcacatctgtaaatgactat

SEQ ID NO: 169533 - DNA, 25 bp, Artificial
  Probe
atagaatcctaccctctcagatggt

SEQ ID NO: 169534 - DNA, 25 bp, Artificial
  Probe
actcaatgttgtacctcggttcact

SEQ ID NO: 169535 - DNA, 25 bp, Artificial
  Probe
cactcaatgttgtacctcggttcac

SEQ ID NO: 169536 - DNA, 25 bp, Artificial
  Probe
aagcattggttaaatggaatagagg

SEQ ID NO: 169537 - DNA, 25 bp, Artificial
  Probe
gttaaatggaatagaggtcttgatc

SEQ ID NO: 169538 - DNA, 25 bp, Artificial
  Probe
tgcacatctgtaaatgactatatgg

SEQ ID NO: 169539 - DNA, 25 bp, Artificial
  Probe
tacaactaagaagcattcactggaa

SEQ ID NO: 169540 - DNA, 25 bp, Artificial
  Probe
acaactaagaagcattcactggaag

SEQ ID NO: 169541 - DNA, 25 bp, Artificial
  Probe
gtacaactaagaagcattcactgga

SEQ ID NO: 169542 - DNA, 25 bp, Artificial
  Probe
caactaagaagcattcactggaagg

SEQ ID NO: 169543 - DNA, 25 bp, Artificial
  Probe
tggtacaactaagaagcattcactg

SEQ ID NO: 169544 - DNA, 25 bp, Artificial
  Probe
ggtacaactaagaagcattcactgg

SEQ ID NO: 169545 - DNA, 25 bp, Artificial
  Probe
gtggtggtacaactaagaagcattc

SEQ ID NO: 169546 - DNA, 25 bp, Artificial
  Probe
gtggtacaactaagaagcattcact

SEQ ID NO: 169547 - DNA, 25 bp, Artificial
  Probe
tggtggtacaactaagaagcattca

SEQ ID NO: 169548 - DNA, 25 bp, Artificial
  Probe
gaagaaagcaggaatgttcagaaac

SEQ ID NO: 169549 - DNA, 25 bp, Artificial
  Probe
ggaacaaagagaagaccttaggaaa

SEQ ID NO: 169550 - DNA, 25 bp, Artificial
  Probe
tacccaggagacaagagaagaaatt

SEQ ID NO: 169551 - DNA, 25 bp, Artificial
  Probe
ggtggtacaactaagaagcattcac

SEQ ID NO: 169552 - DNA, 25 bp, Artificial
  Probe
ggctctgtgtaagaaatatgctgat

SEQ ID NO: 169553 - DNA, 25 bp, Artificial
  Probe
tgtggtggtacaactaagaagcatt

SEQ ID NO: 169554 - DNA, 25 bp, Artificial
  Probe
gagacaagagaagaaattcctggac

SEQ ID NO: 169555 - DNA, 25 bp, Artificial
  Probe
ggaacttcaacgtcataataagacc

SEQ ID NO: 169556 - DNA, 25 bp, Artificial
  Probe
aaatatgctgatctcctggaagaaa

SEQ ID NO: 169557 - DNA, 25 bp, Artificial
  Probe
gtaagaaatatgctgatctcctgga

SEQ ID NO: 169558 - DNA, 25 bp, Artificial
  Probe
tgtaagaaatatgctgatctcctgg

SEQ ID NO: 169559 - DNA, 25 bp, Artificial
  Probe
gctctgtgtaagaaatatgctgatc

SEQ ID NO: 169560 - DNA, 25 bp, Artificial
  Probe
gactttgtaacgaacaccagaaatt

SEQ ID NO: 169561 - DNA, 25 bp, Artificial
  Probe
aatatgctgatctcctggaagaaag

SEQ ID NO: 169562 - DNA, 25 bp, Artificial
  Probe
gaaatatgctgatctcctggaagaa

SEQ ID NO: 169563 - DNA, 25 bp, Artificial
  Probe
aagaaatatgctgatctcctggaag

SEQ ID NO: 169564 - DNA, 25 bp, Artificial
  Probe
ggaagaaagcaggaatgttcagaaa

SEQ ID NO: 169565 - DNA, 25 bp, Artificial
  Probe
tgtgtaagaaatatgctgatctcct

SEQ ID NO: 169566 - DNA, 25 bp, Artificial
  Probe
taagaaatatgctgatctcctggaa

SEQ ID NO: 169567 - DNA, 25 bp, Artificial
  Probe
gtgtaagaaatatgctgatctcctg

SEQ ID NO: 169568 - DNA, 25 bp, Artificial
  Probe
ctgtgtaagaaatatgctgatctcc

SEQ ID NO: 169569 - DNA, 25 bp, Artificial
  Probe
gaacttcaacgtcataataagacct

SEQ ID NO: 169570 - DNA, 25 bp, Artificial
  Probe
agaaatatgctgatctcctggaaga

SEQ ID NO: 169571 - DNA, 25 bp, Artificial
  Probe
aagagaagaaattcctggacgagaa

SEQ ID NO: 169572 - DNA, 25 bp, Artificial
  Probe
tgactttgtaacgaacaccagaaat

SEQ ID NO: 169573 - DNA, 25 bp, Artificial
  Probe
aacttcaacgtcataataagacctt

SEQ ID NO: 169574 - DNA, 25 bp, Artificial
  Probe
gtacccaggagacaagagaagaaat

SEQ ID NO: 169575 - DNA, 25 bp, Artificial
  Probe
tctgtgtaagaaatatgctgatctc

SEQ ID NO: 169576 - DNA, 25 bp, Artificial
  Probe
ctctgtgtaagaaatatgctgatct

SEQ ID NO: 169577 - DNA, 25 bp, Artificial
  Probe
agagaagaaattcctggacgagaag

SEQ ID NO: 169578 - DNA, 25 bp, Artificial
  Probe
aggaacaaagagaagaccttaggaa

SEQ ID NO: 169579 - DNA, 25 bp, Artificial
  Probe
acccaggagacaagagaagaaattc

SEQ ID NO: 169580 - DNA, 25 bp, Artificial
  Probe
attcttcagcatcaagactccagtt

SEQ ID NO: 169581 - DNA, 25 bp, Artificial
  Probe
caagagaagaaattcctggacgaga

SEQ ID NO: 169582 - DNA, 25 bp, Artificial
  Probe
tggaagaaagcaggaatgttcagaa

SEQ ID NO: 169583 - DNA, 25 bp, Artificial
  Probe
caggaacaaagagaagaccttagga

SEQ ID NO: 169584 - DNA, 25 bp, Artificial
  Probe
aacaagtcttatagaacatgagcaa

SEQ ID NO: 169585 - DNA, 25 bp, Artificial
  Probe
agtcctataagtgcagtatatgtgg

SEQ ID NO: 169586 - DNA, 25 bp, Artificial
  Probe
cgagaagtcctataagtgcagtata

SEQ ID NO: 169587 - DNA, 25 bp, Artificial
  Probe
tgccatttgcttattgtagtttgta

SEQ ID NO: 169588 - DNA, 25 bp, Artificial
  Probe
tataactcatctcttgctacccatc

SEQ ID NO: 169589 - DNA, 25 bp, Artificial
  Probe
gtgccatttgcttattgtagtttgt

SEQ ID NO: 169590 - DNA, 25 bp, Artificial
  Probe
tgtgccatttgcttattgtagtttg

SEQ ID NO: 169591 - DNA, 25 bp, Artificial
  Probe
atgtgccatttgcttattgtagttt

SEQ ID NO: 169592 - DNA, 25 bp, Artificial
  Probe
gtatgtgccatttgcttattgtagt

SEQ ID NO: 169593 - DNA, 25 bp, Artificial
  Probe
aagagtatgtgccatttgcttattg

SEQ ID NO: 169594 - DNA, 25 bp, Artificial
  Probe
agtatgtgccatttgcttattgtag

SEQ ID NO: 169595 - DNA, 25 bp, Artificial
  Probe
gagtatgtgccatttgcttattgta

SEQ ID NO: 169596 - DNA, 25 bp, Artificial
  Probe
ataactcatctcttgctacccatca

SEQ ID NO: 169597 - DNA, 25 bp, Artificial
  Probe
cttatcccttaggtctactcggtaa

SEQ ID NO: 169598 - DNA, 25 bp, Artificial
  Probe
ctatgatggcatccactaacgatac

SEQ ID NO: 169599 - DNA, 25 bp, Artificial
  Probe
tatgtgccatttgcttattgtagtt

SEQ ID NO: 169600 - DNA, 25 bp, Artificial
  Probe
gatctgtaagaaccaagatggactt

SEQ ID NO: 169601 - DNA, 25 bp, Artificial
  Probe
agagtatgtgccatttgcttattgt

SEQ ID NO: 169602 - DNA, 25 bp, Artificial
  Probe
taactcatctcttgctacccatcag

SEQ ID NO: 169603 - DNA, 25 bp, Artificial
  Probe
acttatcccttaggtctactcggta

SEQ ID NO: 169604 - DNA, 25 bp, Artificial
  Probe
gccatttgcttattgtagtttgtat

SEQ ID NO: 169605 - DNA, 25 bp, Artificial
  Probe
aagtcctataagtgcagtatatgtg

SEQ ID NO: 169606 - DNA, 25 bp, Artificial
  Probe
gcgagaagtcctataagtgcagtat

SEQ ID NO: 169607 - DNA, 25 bp, Artificial
  Probe
ggcatccactaacgataccaagatc

SEQ ID NO: 169608 - DNA, 25 bp, Artificial
  Probe
tatgatggcatccactaacgatacc

SEQ ID NO: 169609 - DNA, 25 bp, Artificial
  Probe
catcacaaggagaaactcttcactc

SEQ ID NO: 169610 - DNA, 25 bp, Artificial
  Probe
ttatcccttaggtctactcggtaag

SEQ ID NO: 169611 - DNA, 25 bp, Artificial
  Probe
tgatgacttatcccttaggtctact

SEQ ID NO: 169612 - DNA, 25 bp, Artificial
  Probe
tttataactcatctcttgctaccca

SEQ ID NO: 169613 - DNA, 25 bp, Artificial
  Probe
gtcctataagtgcagtatatgtgga

SEQ ID NO: 169614 - DNA, 25 bp, Artificial
  Probe
atgacttatcccttaggtctactcg

SEQ ID NO: 169615 - DNA, 25 bp, Artificial
  Probe
ttataactcatctcttgctacccat

SEQ ID NO: 169616 - DNA, 25 bp, Artificial
  Probe
gatgacttatcccttaggtctactc

SEQ ID NO: 169617 - DNA, 25 bp, Artificial
  Probe
gaagtcctataagtgcagtatatgt

SEQ ID NO: 169618 - DNA, 25 bp, Artificial
  Probe
ccactaacgataccaagatctgtaa

SEQ ID NO: 169619 - DNA, 25 bp, Artificial
  Probe
atcacaaggagaaactcttcactca

SEQ ID NO: 169620 - DNA, 25 bp, Artificial
  Probe
tatcccttaggtctactcggtaaga

SEQ ID NO: 169621 - DNA, 25 bp, Artificial
  Probe
agtaatgatgacttatcccttaggt

SEQ ID NO: 169622 - DNA, 25 bp, Artificial
  Probe
tccactaacgataccaagatctgta

SEQ ID NO: 169623 - DNA, 25 bp, Artificial
  Probe
atgatgacttatcccttaggtctac

SEQ ID NO: 169624 - DNA, 25 bp, Artificial
  Probe
taagagtatgtgccatttgcttatt

SEQ ID NO: 169625 - DNA, 25 bp, Artificial
  Probe
ttaagagtatgtgccatttgcttat

SEQ ID NO: 169626 - DNA, 25 bp, Artificial
  Probe
gctatgatggcatccactaacgata

SEQ ID NO: 169627 - DNA, 25 bp, Artificial
  Probe
tcctataagtgcagtatatgtggaa

SEQ ID NO: 169628 - DNA, 25 bp, Artificial
  Probe
aaggagttattacttgaaacactga

SEQ ID NO: 169629 - DNA, 25 bp, Artificial
  Probe
ccacactccaagatgcctcatataa

SEQ ID NO: 169630 - DNA, 25 bp, Artificial
  Probe
gagcagactgtgaatttgtgtattt

SEQ ID NO: 169631 - DNA, 25 bp, Artificial
  Probe
acactccaagatgcctcatataaag

SEQ ID NO: 169632 - DNA, 25 bp, Artificial
  Probe
cacactccaagatgcctcatataaa

SEQ ID NO: 169633 - DNA, 25 bp, Artificial
  Probe
agcagactgtgaatttgtgtattta

SEQ ID NO: 169634 - DNA, 25 bp, Artificial
  Probe
tctgataaacactggaagagtcatc

SEQ ID NO: 169635 - DNA, 25 bp, Artificial
  Probe
atctgataaacactggaagagtcat

SEQ ID NO: 169636 - DNA, 25 bp, Artificial
  Probe
gcagactgtgaatttgtgtatttaa

SEQ ID NO: 169637 - DNA, 25 bp, Artificial
  Probe
cgagcagactgtgaatttgtgtatt

SEQ ID NO: 169638 - DNA, 25 bp, Artificial
  Probe
catataaagggacatgaaggagacc

SEQ ID NO: 169639 - DNA, 25 bp, Artificial
  Probe
gatctgataaacactggaagagtca

SEQ ID NO: 169640 - DNA, 25 bp, Artificial
  Probe
gataaacactggaagagtcatcacg

SEQ ID NO: 169641 - DNA, 25 bp, Artificial
  Probe
ataaacactggaagagtcatcacga

SEQ ID NO: 169642 - DNA, 25 bp, Artificial
  Probe
caagatgcctcatataaagggacat

SEQ ID NO: 169643 - DNA, 25 bp, Artificial
  Probe
cactccaagatgcctcatataaagg

SEQ ID NO: 169644 - DNA, 25 bp, Artificial
  Probe
gactgtgaatttgtgtatttaatgc

SEQ ID NO: 169645 - DNA, 25 bp, Artificial
  Probe
taaacactggaagagtcatcacgag

SEQ ID NO: 169646 - DNA, 25 bp, Artificial
  Probe
aagatgcctcatataaagggacatg

SEQ ID NO: 169647 - DNA, 25 bp, Artificial
  Probe
acgagcagactgtgaatttgtgtat

SEQ ID NO: 169648 - DNA, 25 bp, Artificial
  Probe
actccaagatgcctcatataaaggg

SEQ ID NO: 169649 - DNA, 25 bp, Artificial
  Probe
ctccaagatgcctcatataaaggga

SEQ ID NO: 169650 - DNA, 25 bp, Artificial
  Probe
aaggatgctacctactcttccaaag

SEQ ID NO: 169651 - DNA, 25 bp, Artificial
  Probe
gtgtggaaggatgctacctactctt

SEQ ID NO: 169652 - DNA, 25 bp, Artificial
  Probe
aagtgtggaaggatgctacctactc

SEQ ID NO: 169653 - DNA, 25 bp, Artificial
  Probe
ccaagatgcctcatataaagggaca

SEQ ID NO: 169654 - DNA, 25 bp, Artificial
  Probe
tccaagatgcctcatataaagggac

SEQ ID NO: 169655 - DNA, 25 bp, Artificial
  Probe
gccacactccaagatgcctcatata

SEQ ID NO: 169656 - DNA, 25 bp, Artificial
  Probe
ctgataaacactggaagagtcatca

SEQ ID NO: 169657 - DNA, 25 bp, Artificial
  Probe
tgataaacactggaagagtcatcac

SEQ ID NO: 169658 - DNA, 25 bp, Artificial
  Probe
tacctactcttccaaagccagactc

SEQ ID NO: 169659 - DNA, 25 bp, Artificial
  Probe
ctacctactcttccaaagccagact

SEQ ID NO: 169660 - DNA, 25 bp, Artificial
  Probe
actgtgaatttgtgtatttaatgca

SEQ ID NO: 169661 - DNA, 25 bp, Artificial
  Probe
cctcatataaagggacatgaaggag

SEQ ID NO: 169662 - DNA, 25 bp, Artificial
  Probe
tcatataaagggacatgaaggagac

SEQ ID NO: 169663 - DNA, 25 bp, Artificial
  Probe
atgcctcatataaagggacatgaag

SEQ ID NO: 169664 - DNA, 25 bp, Artificial
  Probe
gatgcctcatataaagggacatgaa

SEQ ID NO: 169665 - DNA, 25 bp, Artificial
  Probe
ctcatataaagggacatgaaggaga

SEQ ID NO: 169666 - DNA, 25 bp, Artificial
  Probe
agatgcctcatataaagggacatga

SEQ ID NO: 169667 - DNA, 25 bp, Artificial
  Probe
agaagatctgataaacactggaaga

SEQ ID NO: 169668 - DNA, 25 bp, Artificial
  Probe
agatctgataaacactggaagagtc

SEQ ID NO: 169669 - DNA, 25 bp, Artificial
  Probe
aaagtgtggaaggatgctacctact

SEQ ID NO: 169670 - DNA, 25 bp, Artificial
  Probe
caaagtgtggaaggatgctacctac

SEQ ID NO: 169671 - DNA, 25 bp, Artificial
  Probe
gaagatctgataaacactggaagag

SEQ ID NO: 169672 - DNA, 25 bp, Artificial
  Probe
agtgtggaaggatgctacctactct

SEQ ID NO: 169673 - DNA, 25 bp, Artificial
  Probe
aagatctgataaacactggaagagt

SEQ ID NO: 169674 - DNA, 25 bp, Artificial
  Probe
atacctgcgaatggacttcttgtta

SEQ ID NO: 169675 - DNA, 25 bp, Artificial
  Probe
tacctgcgaatggacttcttgttaa

SEQ ID NO: 169676 - DNA, 25 bp, Artificial
  Probe
ttcaccatcacagagtgcttcatat

SEQ ID NO: 169677 - DNA, 25 bp, Artificial
  Probe
tcaccatcacagagtgcttcatatc

SEQ ID NO: 169678 - DNA, 25 bp, Artificial
  Probe
catacctgcgaatggacttcttgtt

SEQ ID NO: 169679 - DNA, 25 bp, Artificial
  Probe
gttcaccatcacagagtgcttcata

SEQ ID NO: 169680 - DNA, 25 bp, Artificial
  Probe
catcacaagacacagacagagcaag

SEQ ID NO: 169681 - DNA, 25 bp, Artificial
  Probe
caccatcacagagtgcttcatatcc

SEQ ID NO: 169682 - DNA, 25 bp, Artificial
  Probe
ctgcgaatggacttcttgttaaacc

SEQ ID NO: 169683 - DNA, 25 bp, Artificial
  Probe
cctgcgaatggacttcttgttaaac

SEQ ID NO: 169684 - DNA, 25 bp, Artificial
  Probe
catcacagagtgcttcatatccgac

SEQ ID NO: 169685 - DNA, 25 bp, Artificial
  Probe
acctgcgaatggacttcttgttaaa

SEQ ID NO: 169686 - DNA, 25 bp, Artificial
  Probe
atcacagagtgcttcatatccgaca

SEQ ID NO: 169687 - DNA, 25 bp, Artificial
  Probe
aagtgcctcctctacctacgaagaa

SEQ ID NO: 169688 - DNA, 25 bp, Artificial
  Probe
caagttcaccatcacagagtgcttc

SEQ ID NO: 169689 - DNA, 25 bp, Artificial
  Probe
ccatcacagagtgcttcatatccga

SEQ ID NO: 169690 - DNA, 25 bp, Artificial
  Probe
agttcaccatcacagagtgcttcat

SEQ ID NO: 169691 - DNA, 25 bp, Artificial
  Probe
atcacaagacacagacagagcaagg

SEQ ID NO: 169692 - DNA, 25 bp, Artificial
  Probe
tcacagagtgcttcatatccgacac

SEQ ID NO: 169693 - DNA, 25 bp, Artificial
  Probe
aagttcaccatcacagagtgcttca

SEQ ID NO: 169694 - DNA, 25 bp, Artificial
  Probe
ccatcacaagacacagacagagcaa

SEQ ID NO: 169695 - DNA, 25 bp, Artificial
  Probe
accatcacagagtgcttcatatccg

SEQ ID NO: 169696 - DNA, 25 bp, Artificial
  Probe
gaaagtgcctcctctacctacgaag

SEQ ID NO: 169697 - DNA, 25 bp, Artificial
  Probe
tgcgaatggacttcttgttaaaccg

SEQ ID NO: 169698 - DNA, 25 bp, Artificial
  Probe
tgcctcctctacctacgaagaactg

SEQ ID NO: 169699 - DNA, 25 bp, Artificial
  Probe
gtgcctcctctacctacgaagaact

SEQ ID NO: 169700 - DNA, 25 bp, Artificial
  Probe
agtgcctcctctacctacgaagaac

SEQ ID NO: 169701 - DNA, 25 bp, Artificial
  Probe
aaagtgcctcctctacctacgaaga

SEQ ID NO: 169702 - DNA, 25 bp, Artificial
  Probe
agaaagtgcctcctctacctacgaa

SEQ ID NO: 169703 - DNA, 25 bp, Artificial
  Probe
cacagaaagtgcctcctctacctac

SEQ ID NO: 169704 - DNA, 25 bp, Artificial
  Probe
tggacaaggaaagtgacagctacag

SEQ ID NO: 169705 - DNA, 25 bp, Artificial
  Probe
cagaaagtgcctcctctacctacga

SEQ ID NO: 169706 - DNA, 25 bp, Artificial
  Probe
gtggacaaggaaagtgacagctaca

SEQ ID NO: 169707 - DNA, 25 bp, Artificial
  Probe
cgaatggacttcttgttaaaccggg

SEQ ID NO: 169708 - DNA, 25 bp, Artificial
  Probe
ccacagaaagtgcctcctctaccta

SEQ ID NO: 169709 - DNA, 25 bp, Artificial
  Probe
gcgaatggacttcttgttaaaccgg

SEQ ID NO: 169710 - DNA, 25 bp, Artificial
  Probe
ccatacctgcgaatggacttcttgt

SEQ ID NO: 169711 - DNA, 25 bp, Artificial
  Probe
gaatggacttcttgttaaaccgggg

SEQ ID NO: 169712 - DNA, 25 bp, Artificial
  Probe
tgacctccagtaccccttcagaatc

SEQ ID NO: 169713 - DNA, 25 bp, Artificial
  Probe
ctgacctccagtaccccttcagaat

SEQ ID NO: 169714 - DNA, 25 bp, Artificial
  Probe
ttacctgagcagaacataagagtgg

SEQ ID NO: 169715 - DNA, 25 bp, Artificial
  Probe
tggtctttgaataatgttgtttgct

SEQ ID NO: 169716 - DNA, 25 bp, Artificial
  Probe
gtggtctttgaataatgttgtttgc

SEQ ID NO: 169717 - DNA, 25 bp, Artificial
  Probe
tttacctgagcagaacataagagtg

SEQ ID NO: 169718 - DNA, 25 bp, Artificial
  Probe
agtggtctttgaataatgttgtttg

SEQ ID NO: 169719 - DNA, 25 bp, Artificial
  Probe
agagtggtctttgaataatgttgtt

SEQ ID NO: 169720 - DNA, 25 bp, Artificial
  Probe
ggtctttgaataatgttgtttgcta

SEQ ID NO: 169721 - DNA, 25 bp, Artificial
  Probe
gagtggtctttgaataatgttgttt

SEQ ID NO: 169722 - DNA, 25 bp, Artificial
  Probe
attagtgacacgttattctgtggat

SEQ ID NO: 169723 - DNA, 25 bp, Artificial
  Probe
tgacacgttattctgtggatgtaat

SEQ ID NO: 169724 - DNA, 25 bp, Artificial
  Probe
gacacgttattctgtggatgtaatt

SEQ ID NO: 169725 - DNA, 25 bp, Artificial
  Probe
gattagtgacacgttattctgtgga

SEQ ID NO: 169726 - DNA, 25 bp, Artificial
  Probe
atgattagtgacacgttattctgtg

SEQ ID NO: 169727 - DNA, 25 bp, Artificial
  Probe
aatgattagtgacacgttattctgt

SEQ ID NO: 169728 - DNA, 25 bp, Artificial
  Probe
gaataatgttgtttgctacttctgt

SEQ ID NO: 169729 - DNA, 25 bp, Artificial
  Probe
tgaataatgttgtttgctacttctg

SEQ ID NO: 169730 - DNA, 25 bp, Artificial
  Probe
ttagtgacacgttattctgtggatg

SEQ ID NO: 169731 - DNA, 25 bp, Artificial
  Probe
tgattagtgacacgttattctgtgg

SEQ ID NO: 169732 - DNA, 25 bp, Artificial
  Probe
gtgacacgttattctgtggatgtaa

SEQ ID NO: 169733 - DNA, 25 bp, Artificial
  Probe
aatgttgtttgctacttctgtattt

SEQ ID NO: 169734 - DNA, 25 bp, Artificial
  Probe
agtgaaactcagaactccatgattc

SEQ ID NO: 169735 - DNA, 25 bp, Artificial
  Probe
tgtttatgccatcacaaagttgtaa

SEQ ID NO: 169736 - DNA, 25 bp, Artificial
  Probe
cagtgaaactcagaactccatgatt

SEQ ID NO: 169737 - DNA, 25 bp, Artificial
  Probe
gtctttgaataatgttgtttgctac

SEQ ID NO: 169738 - DNA, 25 bp, Artificial
  Probe
ccatctgaacaactggaatatagtt

SEQ ID NO: 169739 - DNA, 25 bp, Artificial
  Probe
agtgacacgttattctgtggatgta

SEQ ID NO: 169740 - DNA, 25 bp, Artificial
  Probe
tagtgacacgttattctgtggatgt

SEQ ID NO: 169741 - DNA, 25 bp, Artificial
  Probe
tctttgaataatgttgtttgctact

SEQ ID NO: 169742 - DNA, 25 bp, Artificial
  Probe
atgtaatttccatctgaacaactgg

SEQ ID NO: 169743 - DNA, 25 bp, Artificial
  Probe
tctaaggcagtgaaactcagaactc

SEQ ID NO: 169744 - DNA, 25 bp, Artificial
  Probe
ctgagcagaacataagagtggtctt

SEQ ID NO: 169745 - DNA, 25 bp, Artificial
  Probe
gtgtttatgccatcacaaagttgta

SEQ ID NO: 169746 - DNA, 25 bp, Artificial
  Probe
gtttatgccatcacaaagttgtaaa

SEQ ID NO: 169747 - DNA, 25 bp, Artificial
  Probe
tacctgagcagaacataagagtggt

SEQ ID NO: 169748 - DNA, 25 bp, Artificial
  Probe
ttgaataatgttgtttgctacttct

SEQ ID NO: 169749 - DNA, 25 bp, Artificial
  Probe
cctgagcagaacataagagtggtct

SEQ ID NO: 169750 - DNA, 25 bp, Artificial
  Probe
gctagtagtgtccaataaatatggg

SEQ ID NO: 169751 - DNA, 25 bp, Artificial
  Probe
gaggtgtttatgccatcacaaagtt

SEQ ID NO: 169752 - DNA, 25 bp, Artificial
  Probe
ttgaggtgtttatgccatcacaaag

SEQ ID NO: 169753 - DNA, 25 bp, Artificial
  Probe
cttgaggtgtttatgccatcacaaa

SEQ ID NO: 169754 - DNA, 25 bp, Artificial
  Probe
tgttgtttgctacttctgtatttat

SEQ ID NO: 169755 - DNA, 25 bp, Artificial
  Probe
atgttgtttgctacttctgtattta

SEQ ID NO: 169756 - DNA, 25 bp, Artificial
  Probe
taatgttgtttgctacttctgtatt

SEQ ID NO: 169757 - DNA, 25 bp, Artificial
  Probe
aataatgttgtttgctacttctgta

SEQ ID NO: 169758 - DNA, 25 bp, Artificial
  Probe
aggtgtttatgccatcacaaagttg

SEQ ID NO: 169759 - DNA, 25 bp, Artificial
  Probe
catatcagtatcatggagggacatt

SEQ ID NO: 169760 - DNA, 25 bp, Artificial
  Probe
tatcagtatcatggagggacattac

SEQ ID NO: 169761 - DNA, 25 bp, Artificial
  Probe
ctcctcctgtgcatatcagtatcat

SEQ ID NO: 169762 - DNA, 25 bp, Artificial
  Probe
tcctcctgtgcatatcagtatcatg

SEQ ID NO: 169763 - DNA, 25 bp, Artificial
  Probe
atatcagtatcatggagggacatta

SEQ ID NO: 169764 - DNA, 25 bp, Artificial
  Probe
gcatatcagtatcatggagggacat

SEQ ID NO: 169765 - DNA, 25 bp, Artificial
  Probe
tcctgtgcatatcagtatcatggag

SEQ ID NO: 169766 - DNA, 25 bp, Artificial
  Probe
ctcctgtgcatatcagtatcatgga

SEQ ID NO: 169767 - DNA, 25 bp, Artificial
  Probe
tcagtatcatggagggacattacta

SEQ ID NO: 169768 - DNA, 25 bp, Artificial
  Probe
atcagtatcatggagggacattact

SEQ ID NO: 169769 - DNA, 25 bp, Artificial
  Probe
cctcctgtgcatatcagtatcatgg

SEQ ID NO: 169770 - DNA, 25 bp, Artificial
  Probe
agtatcatggagggacattactatg

SEQ ID NO: 169771 - DNA, 25 bp, Artificial
  Probe
cagtatcatggagggacattactat

SEQ ID NO: 169772 - DNA, 25 bp, Artificial
  Probe
cctgtgcatatcagtatcatggagg

SEQ ID NO: 169773 - DNA, 25 bp, Artificial
  Probe
ggagggacattactatgatccactg

SEQ ID NO: 169774 - DNA, 25 bp, Artificial
  Probe
gtatcatggagggacattactatga

SEQ ID NO: 169775 - DNA, 25 bp, Artificial
  Probe
gagggacattactatgatccactgc

SEQ ID NO: 169776 - DNA, 25 bp, Artificial
  Probe
tcatggagggacattactatgatcc

SEQ ID NO: 169777 - DNA, 25 bp, Artificial
  Probe
gtgcatatcagtatcatggagggac

SEQ ID NO: 169778 - DNA, 25 bp, Artificial
  Probe
tgcatatcagtatcatggagggaca

SEQ ID NO: 169779 - DNA, 25 bp, Artificial
  Probe
tgtgcatatcagtatcatggaggga

SEQ ID NO: 169780 - DNA, 25 bp, Artificial
  Probe
gctcctcctgtgcatatcagtatca

SEQ ID NO: 169781 - DNA, 25 bp, Artificial
  Probe
ctgtgcatatcagtatcatggaggg

SEQ ID NO: 169782 - DNA, 25 bp, Artificial
  Probe
agggacattactatgatccactgca

SEQ ID NO: 169783 - DNA, 25 bp, Artificial
  Probe
tgctcctcctgtgcatatcagtatc

SEQ ID NO: 169784 - DNA, 25 bp, Artificial
  Probe
ctgctcctcctgtgcatatcagtat

SEQ ID NO: 169785 - DNA, 25 bp, Artificial
  Probe
atcatggagggacattactatgatc

SEQ ID NO: 169786 - DNA, 25 bp, Artificial
  Probe
atggagggacattactatgatccac

SEQ ID NO: 169787 - DNA, 25 bp, Artificial
  Probe
catggagggacattactatgatcca

SEQ ID NO: 169788 - DNA, 25 bp, Artificial
  Probe
tatcatggagggacattactatgat

SEQ ID NO: 169789 - DNA, 25 bp, Artificial
  Probe
tggagggacattactatgatccact

SEQ ID NO: 169790 - DNA, 25 bp, Artificial
  Probe
gtccagggaccaatctatacccatg

SEQ ID NO: 169791 - DNA, 25 bp, Artificial
  Probe
agtccagggaccaatctatacccat

SEQ ID NO: 169792 - DNA, 25 bp, Artificial
  Probe
cagtccagggaccaatctataccca

SEQ ID NO: 169793 - DNA, 25 bp, Artificial
  Probe
caatctatacccatggtgacagccc

SEQ ID NO: 169794 - DNA, 25 bp, Artificial
  Probe
ccaatctatacccatggtgacagcc

SEQ ID NO: 169795 - DNA, 25 bp, Artificial
  Probe
gaccaatctatacccatggtgacag

SEQ ID NO: 169796 - DNA, 25 bp, Artificial
  Probe
aatctatacccatggtgacagccct

SEQ ID NO: 169797 - DNA, 25 bp, Artificial
  Probe
tccagggaccaatctatacccatgg

SEQ ID NO: 169798 - DNA, 25 bp, Artificial
  Probe
ggaccaatctatacccatggtgaca

SEQ ID NO: 169799 - DNA, 25 bp, Artificial
  Probe
accaatctatacccatggtgacagc

SEQ ID NO: 169800 - DNA, 25 bp, Artificial
  Probe
gggaccaatctatacccatggtgac

SEQ ID NO: 169801 - DNA, 25 bp, Artificial
  Probe
cagggaccaatctatacccatggtg

SEQ ID NO: 169802 - DNA, 25 bp, Artificial
  Probe
agggaccaatctatacccatggtga

SEQ ID NO: 169803 - DNA, 25 bp, Artificial
  Probe
ccagggaccaatctatacccatggt

SEQ ID NO: 169804 - DNA, 25 bp, Artificial
  Probe
ttgtcttatctcctgccttgatctt

SEQ ID NO: 169805 - DNA, 25 bp, Artificial
  Probe
tgtcttatctcctgccttgatcttc

SEQ ID NO: 169806 - DNA, 25 bp, Artificial
  Probe
cttatctcctgccttgatcttccat

SEQ ID NO: 169807 - DNA, 25 bp, Artificial
  Probe
tggtaaagtagagattgtggtttgt

SEQ ID NO: 169808 - DNA, 25 bp, Artificial
  Probe
ttatctcctgccttgatcttccatg

SEQ ID NO: 169809 - DNA, 25 bp, Artificial
  Probe
ggtaaagtagagattgtggtttgtc

SEQ ID NO: 169810 - DNA, 25 bp, Artificial
  Probe
tccctgatttgtatggtttcttgaa

SEQ ID NO: 169811 - DNA, 25 bp, Artificial
  Probe
agatggtaaagtagagattgtggtt

SEQ ID NO: 169812 - DNA, 25 bp, Artificial
  Probe
aagatggtaaagtagagattgtggt

SEQ ID NO: 169813 - DNA, 25 bp, Artificial
  Probe
atccctgatttgtatggtttcttga

SEQ ID NO: 169814 - DNA, 25 bp, Artificial
  Probe
gtcttatctcctgccttgatcttcc

SEQ ID NO: 169815 - DNA, 25 bp, Artificial
  Probe
tttgagaacgcttgaactatccttt

SEQ ID NO: 169816 - DNA, 25 bp, Artificial
  Probe
catccctgatttgtatggtttcttg

SEQ ID NO: 169817 - DNA, 25 bp, Artificial
  Probe
atggtaaagtagagattgtggtttg

SEQ ID NO: 169818 - DNA, 25 bp, Artificial
  Probe
gatggtaaagtagagattgtggttt

SEQ ID NO: 169819 - DNA, 25 bp, Artificial
  Probe
ctttgagaacgcttgaactatcctt

SEQ ID NO: 169820 - DNA, 25 bp, Artificial
  Probe
ccctgatttgtatggtttcttgaaa

SEQ ID NO: 169821 - DNA, 25 bp, Artificial
  Probe
tcttatctcctgccttgatcttcca

SEQ ID NO: 169822 - DNA, 25 bp, Artificial
  Probe
caagatggtaaagtagagattgtgg

SEQ ID NO: 169823 - DNA, 25 bp, Artificial
  Probe
accctttctcaagtcttaatagtct

SEQ ID NO: 169824 - DNA, 25 bp, Artificial
  Probe
cattgaatgcagaggaagacttctt

SEQ ID NO: 169825 - DNA, 25 bp, Artificial
  Probe
gtatctgccatccctgatttgtatg

SEQ ID NO: 169826 - DNA, 25 bp, Artificial
  Probe
tgtatctgccatccctgatttgtat

SEQ ID NO: 169827 - DNA, 25 bp, Artificial
  Probe
gtaaagtagagattgtggtttgtct

SEQ ID NO: 169828 - DNA, 25 bp, Artificial
  Probe
ccaagtctctgatctagcttcttcc

SEQ ID NO: 169829 - DNA, 25 bp, Artificial
  Probe
cctgatttgtatggtttcttgaaag

SEQ ID NO: 169830 - DNA, 25 bp, Artificial
  Probe
gattgtggtttgtcttatctcctgc

SEQ ID NO: 169831 - DNA, 25 bp, Artificial
  Probe
agtagagattgtggtttgtcttatc

SEQ ID NO: 169832 - DNA, 25 bp, Artificial
  Probe
aaccctttctcaagtcttaatagtc

SEQ ID NO: 169833 - DNA, 25 bp, Artificial
  Probe
cactttgagaacgcttgaactatcc

SEQ ID NO: 169834 - DNA, 25 bp, Artificial
  Probe
ccactttgagaacgcttgaactatc

SEQ ID NO: 169835 - DNA, 25 bp, Artificial
  Probe
ttgtatggtttcttgaaagtcttct

SEQ ID NO: 169836 - DNA, 25 bp, Artificial
  Probe
tttgtcttatctcctgccttgatct

SEQ ID NO: 169837 - DNA, 25 bp, Artificial
  Probe
gtttgtcttatctcctgccttgatc

SEQ ID NO: 169838 - DNA, 25 bp, Artificial
  Probe
atggtttcttgaaagtcttctaaca

SEQ ID NO: 169839 - DNA, 25 bp, Artificial
  Probe
tatctcctgccttgatcttccatgt

SEQ ID NO: 169840 - DNA, 25 bp, Artificial
  Probe
tggtttcttgaaagtcttctaacaa

SEQ ID NO: 169841 - DNA, 25 bp, Artificial
  Probe
actttgagaacgcttgaactatcct

SEQ ID NO: 169842 - DNA, 25 bp, Artificial
  Probe
aaagtagagattgtggtttgtctta

SEQ ID NO: 169843 - DNA, 25 bp, Artificial
  Probe
taaagtagagattgtggtttgtctt

SEQ ID NO: 169844 - DNA, 25 bp, Artificial
  Probe
gtagacatgaccactctagcatcag

SEQ ID NO: 169845 - DNA, 25 bp, Artificial
  Probe
cagaggaagacttctttagagggaa

SEQ ID NO: 169846 - DNA, 25 bp, Artificial
  Probe
gtcttcctgactgttgaactctgac

SEQ ID NO: 169847 - DNA, 25 bp, Artificial
  Probe
gtgtatctgccatccctgatttgta

SEQ ID NO: 169848 - DNA, 25 bp, Artificial
  Probe
aagtagagattgtggtttgtcttat

SEQ ID NO: 169849 - DNA, 25 bp, Artificial
  Probe
agagatcacgtattaagctgtcaac

SEQ ID NO: 169850 - DNA, 25 bp, Artificial
  Probe
atcagcctcagagatcacgtattaa

SEQ ID NO: 169851 - DNA, 25 bp, Artificial
  Probe
gatcacgtattaagctgtcaacctt

SEQ ID NO: 169852 - DNA, 25 bp, Artificial
  Probe
gagatcacgtattaagctgtcaacc

SEQ ID NO: 169853 - DNA, 25 bp, Artificial
  Probe
aaatcctagatgagaacttgcctta

SEQ ID NO: 169854 - DNA, 25 bp, Artificial
  Probe
tcagcctcagagatcacgtattaag

SEQ ID NO: 169855 - DNA, 25 bp, Artificial
  Probe
agatcacgtattaagctgtcaacct

SEQ ID NO: 169856 - DNA, 25 bp, Artificial
  Probe
cagagatcacgtattaagctgtcaa

SEQ ID NO: 169857 - DNA, 25 bp, Artificial
  Probe
ctcagagatcacgtattaagctgtc

SEQ ID NO: 169858 - DNA, 25 bp, Artificial
  Probe
tcagagatcacgtattaagctgtca

SEQ ID NO: 169859 - DNA, 25 bp, Artificial
  Probe
tatatcagcatgattgtgaagaagc

SEQ ID NO: 169860 - DNA, 25 bp, Artificial
  Probe
cgtatatcagcatgattgtgaagaa

SEQ ID NO: 169861 - DNA, 25 bp, Artificial
  Probe
aagcgtatatcagcatgattgtgaa

SEQ ID NO: 169862 - DNA, 25 bp, Artificial
  Probe
gcgtatatcagcatgattgtgaaga

SEQ ID NO: 169863 - DNA, 25 bp, Artificial
  Probe
agcgtatatcagcatgattgtgaag

SEQ ID NO: 169864 - DNA, 25 bp, Artificial
  Probe
cctcagagatcacgtattaagctgt

SEQ ID NO: 169865 - DNA, 25 bp, Artificial
  Probe
atatcagcatgattgtgaagaagcg

SEQ ID NO: 169866 - DNA, 25 bp, Artificial
  Probe
tcacgtattaagctgtcaaccttta

SEQ ID NO: 169867 - DNA, 25 bp, Artificial
  Probe
cgtattaagctgtcaacctttaaca

SEQ ID NO: 169868 - DNA, 25 bp, Artificial
  Probe
atcacgtattaagctgtcaaccttt

SEQ ID NO: 169869 - DNA, 25 bp, Artificial
  Probe
cagcctcagagatcacgtattaagc

SEQ ID NO: 169870 - DNA, 25 bp, Artificial
  Probe
gtatatcagcatgattgtgaagaag

SEQ ID NO: 169871 - DNA, 25 bp, Artificial
  Probe
acgtattaagctgtcaacctttaac

SEQ ID NO: 169872 - DNA, 25 bp, Artificial
  Probe
cacgtattaagctgtcaacctttaa

SEQ ID NO: 169873 - DNA, 25 bp, Artificial
  Probe
gagtcatcacctagcacttcaggat

SEQ ID NO: 169874 - DNA, 25 bp, Artificial
  Probe
gatcagcctcagagatcacgtatta

SEQ ID NO: 169875 - DNA, 25 bp, Artificial
  Probe
gcctcagagatcacgtattaagctg

SEQ ID NO: 169876 - DNA, 25 bp, Artificial
  Probe
atgaaagcgtatatcagcatgattg

SEQ ID NO: 169877 - DNA, 25 bp, Artificial
  Probe
aaaatcctagatgagaacttgcctt

SEQ ID NO: 169878 - DNA, 25 bp, Artificial
  Probe
gaaagcgtatatcagcatgattgtg

SEQ ID NO: 169879 - DNA, 25 bp, Artificial
  Probe
aaagcgtatatcagcatgattgtga

SEQ ID NO: 169880 - DNA, 25 bp, Artificial
  Probe
tgaaagcgtatatcagcatgattgt

SEQ ID NO: 169881 - DNA, 25 bp, Artificial
  Probe
catgaaagcgtatatcagcatgatt

SEQ ID NO: 169882 - DNA, 25 bp, Artificial
  Probe
agcctcagagatcacgtattaagct

SEQ ID NO: 169883 - DNA, 25 bp, Artificial
  Probe
cagtatgagcacatcctctcgttcg

SEQ ID NO: 169884 - DNA, 25 bp, Artificial
  Probe
ggactcacacttcttgatgtcggag

SEQ ID NO: 169885 - DNA, 25 bp, Artificial
  Probe
agtcatcacctagcacttcaggatg

SEQ ID NO: 169886 - DNA, 25 bp, Artificial
  Probe
ttaagctgtcaacctttaacagtct

SEQ ID NO: 169887 - DNA, 25 bp, Artificial
  Probe
attaagctgtcaacctttaacagtc

SEQ ID NO: 169888 - DNA, 25 bp, Artificial
  Probe
gcacaatctcttaagctttagttaa

SEQ ID NO: 169889 - DNA, 25 bp, Artificial
  Probe
tattaagctgtcaacctttaacagt

SEQ ID NO: 169890 - DNA, 25 bp, Artificial
  Probe
cgatcagcctcagagatcacgtatt

SEQ ID NO: 169891 - DNA, 25 bp, Artificial
  Probe
gtattaagctgtcaacctttaacag

SEQ ID NO: 169892 - DNA, 25 bp, Artificial
  Probe
ccaagctcatgaaagcgtatatcag

SEQ ID NO: 169893 - DNA, 25 bp, Artificial
  Probe
gtcatcacctagcacttcaggatgg

SEQ ID NO: 169894 - DNA, 25 bp, Artificial
  Probe
gaagaagttgttccgagtgtaattg

SEQ ID NO: 169895 - DNA, 25 bp, Artificial
  Probe
aagaagttgttccgagtgtaattga

SEQ ID NO: 169896 - DNA, 25 bp, Artificial
  Probe
agaagttgttccgagtgtaattgag

SEQ ID NO: 169897 - DNA, 25 bp, Artificial
  Probe
gaagttgttccgagtgtaattgagc

SEQ ID NO: 169898 - DNA, 25 bp, Artificial
  Probe
tgtcaaggaattattggtaagctct

SEQ ID NO: 169899 - DNA, 25 bp, Artificial
  Probe
ttgtcaaggaattattggtaagctc

SEQ ID NO: 169900 - DNA, 25 bp, Artificial
  Probe
attcaaatgttctgtcctttcactg

SEQ ID NO: 169901 - DNA, 25 bp, Artificial
  Probe
gtcaaggaattattggtaagctctt

SEQ ID NO: 169902 - DNA, 25 bp, Artificial
  Probe
aattattggtaagctcttgattcga

SEQ ID NO: 169903 - DNA, 25 bp, Artificial
  Probe
gatgagtgctacattaccgagatgg

SEQ ID NO: 169904 - DNA, 25 bp, Artificial
  Probe
ctattgcaggaacttgttgagactt

SEQ ID NO: 169905 - DNA, 25 bp, Artificial
  Probe
aggaattattggtaagctcttgatt

SEQ ID NO: 169906 - DNA, 25 bp, Artificial
  Probe
tattgcaggaacttgttgagacttg

SEQ ID NO: 169907 - DNA, 25 bp, Artificial
  Probe
aaggaattattggtaagctcttgat

SEQ ID NO: 169908 - DNA, 25 bp, Artificial
  Probe
cattcaaatgttctgtcctttcact

SEQ ID NO: 169909 - DNA, 25 bp, Artificial
  Probe
ctccattcaaatgttctgtcctttc

SEQ ID NO: 169910 - DNA, 25 bp, Artificial
  Probe
aagacatggtcagtgtgaagagatt

SEQ ID NO: 169911 - DNA, 25 bp, Artificial
  Probe
gagcaggatcatgtataccatattg

SEQ ID NO: 169912 - DNA, 25 bp, Artificial
  Probe
ctgagcaggatcatgtataccatat

SEQ ID NO: 169913 - DNA, 25 bp, Artificial
  Probe
atgagtgctacattaccgagatgga

SEQ ID NO: 169914 - DNA, 25 bp, Artificial
  Probe
cgatgagtgctacattaccgagatg

SEQ ID NO: 169915 - DNA, 25 bp, Artificial
  Probe
ttcaaatgttctgtcctttcactga

SEQ ID NO: 169916 - DNA, 25 bp, Artificial
  Probe
ccattcaaatgttctgtcctttcac

SEQ ID NO: 169917 - DNA, 25 bp, Artificial
  Probe
tccattcaaatgttctgtcctttca

SEQ ID NO: 169918 - DNA, 25 bp, Artificial
  Probe
tgagcaggatcatgtataccatatt

SEQ ID NO: 169919 - DNA, 25 bp, Artificial
  Probe
tcaaatgttctgtcctttcactgag

SEQ ID NO: 169920 - DNA, 25 bp, Artificial
  Probe
agacatggtcagtgtgaagagattc

SEQ ID NO: 169921 - DNA, 25 bp, Artificial
  Probe
gtgtcttcataaaggttgacgaatt

SEQ ID NO: 169922 - DNA, 25 bp, Artificial
  Probe
gaaatggcgtgtcttcataaaggtt

SEQ ID NO: 169923 - DNA, 25 bp, Artificial
  Probe
aagttgttccgagtgtaattgagcc

SEQ ID NO: 169924 - DNA, 25 bp, Artificial
  Probe
gaattattggtaagctcttgattcg

SEQ ID NO: 169925 - DNA, 25 bp, Artificial
  Probe
tgagtgctacattaccgagatggag

SEQ ID NO: 169926 - DNA, 25 bp, Artificial
  Probe
aaatggcgtgtcttcataaaggttg

SEQ ID NO: 169927 - DNA, 25 bp, Artificial
  Probe
gcaggatcatgtataccatattgga

SEQ ID NO: 169928 - DNA, 25 bp, Artificial
  Probe
agcaggatcatgtataccatattgg

SEQ ID NO: 169929 - DNA, 25 bp, Artificial
  Probe
cctgagcaggatcatgtataccata

SEQ ID NO: 169930 - DNA, 25 bp, Artificial
  Probe
gctccattcaaatgttctgtccttt

SEQ ID NO: 169931 - DNA, 25 bp, Artificial
  Probe
caaatgttctgtcctttcactgagc

SEQ ID NO: 169932 - DNA, 25 bp, Artificial
  Probe
ggaattattggtaagctcttgattc

SEQ ID NO: 169933 - DNA, 25 bp, Artificial
  Probe
ggtcagtgtgaagagattccagaaa

SEQ ID NO: 169934 - DNA, 25 bp, Artificial
  Probe
tttgtcaaggaattattggtaagct

SEQ ID NO: 169935 - DNA, 25 bp, Artificial
  Probe
gacatggtcagtgtgaagagattcc

SEQ ID NO: 169936 - DNA, 25 bp, Artificial
  Probe
atggtcagtgtgaagagattccaga

SEQ ID NO: 169937 - DNA, 25 bp, Artificial
  Probe
ggatcatgtataccatattggaaca

SEQ ID NO: 169938 - DNA, 25 bp, Artificial
  Probe
tggtcagtgtgaagagattccagaa

SEQ ID NO: 169939 - DNA, 25 bp, Artificial
  Probe
gcacttaacaacactcttatcatag

SEQ ID NO: 169940 - DNA, 25 bp, Artificial
  Probe
ctgcacttaacaacactcttatcat

SEQ ID NO: 169941 - DNA, 25 bp, Artificial
  Probe
gacctatttatctgaaaccctcctg

SEQ ID NO: 169942 - DNA, 25 bp, Artificial
  Probe
tcctgcacttaacaacactcttatc

SEQ ID NO: 169943 - DNA, 25 bp, Artificial
  Probe
ctcctgcacttaacaacactcttat

SEQ ID NO: 169944 - DNA, 25 bp, Artificial
  Probe
cctgcacttaacaacactcttatca

SEQ ID NO: 169945 - DNA, 25 bp, Artificial
  Probe
attccttagacctttcgtaatgctg

SEQ ID NO: 169946 - DNA, 25 bp, Artificial
  Probe
ttgtattcctattggcttcaatgtc

SEQ ID NO: 169947 - DNA, 25 bp, Artificial
  Probe
ggaaggacctatttatctgaaaccc

SEQ ID NO: 169948 - DNA, 25 bp, Artificial
  Probe
cggaaggacctatttatctgaaacc

SEQ ID NO: 169949 - DNA, 25 bp, Artificial
  Probe
tttctttgtattcctattggcttca

SEQ ID NO: 169950 - DNA, 25 bp, Artificial
  Probe
tgtattcctattggcttcaatgtcg

SEQ ID NO: 169951 - DNA, 25 bp, Artificial
  Probe
tgcacttaacaacactcttatcata

SEQ ID NO: 169952 - DNA, 25 bp, Artificial
  Probe
gcggaaggacctatttatctgaaac

SEQ ID NO: 169953 - DNA, 25 bp, Artificial
  Probe
ttctttgtattcctattggcttcaa

SEQ ID NO: 169954 - DNA, 25 bp, Artificial
  Probe
tgcggaaggacctatttatctgaaa

SEQ ID NO: 169955 - DNA, 25 bp, Artificial
  Probe
acctatttatctgaaaccctcctgc

SEQ ID NO: 169956 - DNA, 25 bp, Artificial
  Probe
gctctgtctgaaacatttctttgta

SEQ ID NO: 169957 - DNA, 25 bp, Artificial
  Probe
actcttatcatagtgaacatactgt

SEQ ID NO: 169958 - DNA, 25 bp, Artificial
  Probe
catttctttgtattcctattggctt

SEQ ID NO: 169959 - DNA, 25 bp, Artificial
  Probe
aaggacctatttatctgaaaccctc

SEQ ID NO: 169960 - DNA, 25 bp, Artificial
  Probe
gaaggacctatttatctgaaaccct

SEQ ID NO: 169961 - DNA, 25 bp, Artificial
  Probe
acatttctttgtattcctattggct

SEQ ID NO: 169962 - DNA, 25 bp, Artificial
  Probe
cctcctgcacttaacaacactctta

SEQ ID NO: 169963 - DNA, 25 bp, Artificial
  Probe
atttctttgtattcctattggcttc

SEQ ID NO: 169964 - DNA, 25 bp, Artificial
  Probe
gtgctctgtctgaaacatttctttg

SEQ ID NO: 169965 - DNA, 25 bp, Artificial
  Probe
cacttaacaacactcttatcatagt

SEQ ID NO: 169966 - DNA, 25 bp, Artificial
  Probe
tgctctgtctgaaacatttctttgt

SEQ ID NO: 169967 - DNA, 25 bp, Artificial
  Probe
ttccttagacctttcgtaatgctgg

SEQ ID NO: 169968 - DNA, 25 bp, Artificial
  Probe
gtattcctattggcttcaatgtcga

SEQ ID NO: 169969 - DNA, 25 bp, Artificial
  Probe
tatgctttagcccacacttagagac

SEQ ID NO: 169970 - DNA, 25 bp, Artificial
  Probe
gtatgctttagcccacacttagaga

SEQ ID NO: 169971 - DNA, 25 bp, Artificial
  Probe
gtgcggaaggacctatttatctgaa

SEQ ID NO: 169972 - DNA, 25 bp, Artificial
  Probe
aacatttctttgtattcctattggc

SEQ ID NO: 169973 - DNA, 25 bp, Artificial
  Probe
ggacctatttatctgaaaccctcct

SEQ ID NO: 169974 - DNA, 25 bp, Artificial
  Probe
aggacctatttatctgaaaccctcc

SEQ ID NO: 169975 - DNA, 25 bp, Artificial
  Probe
ttcatgtgttgtcctacaagattca

SEQ ID NO: 169976 - DNA, 25 bp, Artificial
  Probe
cattcatgtgttgtcctacaagatt

SEQ ID NO: 169977 - DNA, 25 bp, Artificial
  Probe
acattcatgtgttgtcctacaagat

SEQ ID NO: 169978 - DNA, 25 bp, Artificial
  Probe
aacattcatgtgttgtcctacaaga

SEQ ID NO: 169979 - DNA, 25 bp, Artificial
  Probe
attcatgtgttgtcctacaagattc

SEQ ID NO: 169980 - DNA, 25 bp, Artificial
  Probe
gagtgcggaaggacctatttatctg

SEQ ID NO: 169981 - DNA, 25 bp, Artificial
  Probe
tcatgtgttgtcctacaagattcag

SEQ ID NO: 169982 - DNA, 25 bp, Artificial
  Probe
tgtctgaaacatttctttgtattcc

SEQ ID NO: 169983 - DNA, 25 bp, Artificial
  Probe
tgtcctacaagattcaggcatgttg

SEQ ID NO: 169984 - DNA, 25 bp, Artificial
  Probe
atacctatcatctgtctgtctgtct

SEQ ID NO: 169985 - DNA, 25 bp, Artificial
  Probe
catacctatcatctgtctgtctgtc

SEQ ID NO: 169986 - DNA, 25 bp, Artificial
  Probe
tacctatcatctgtctgtctgtctt

SEQ ID NO: 169987 - DNA, 25 bp, Artificial
  Probe
tgtattgatacttatgctgcttcca

SEQ ID NO: 169988 - DNA, 25 bp, Artificial
  Probe
gtgtattgatacttatgctgcttcc

SEQ ID NO: 169989 - DNA, 25 bp, Artificial
  Probe
acctatctacctacctacataccta

SEQ ID NO: 169990 - DNA, 25 bp, Artificial
  Probe
tacctatctacctacctacatacct

SEQ ID NO: 169991 - DNA, 25 bp, Artificial
  Probe
tgtctatctacctatctacctacct

SEQ ID NO: 169992 - DNA, 25 bp, Artificial
  Probe
acctacatacctatcatctgtctgt

SEQ ID NO: 169993 - DNA, 25 bp, Artificial
  Probe
acatacctatcatctgtctgtctgt

SEQ ID NO: 169994 - DNA, 25 bp, Artificial
  Probe
cctacatacctatcatctgtctgtc

SEQ ID NO: 169995 - DNA, 25 bp, Artificial
  Probe
acctacctacatacctatcatctgt

SEQ ID NO: 169996 - DNA, 25 bp, Artificial
  Probe
agtgtattgatacttatgctgcttc

SEQ ID NO: 169997 - DNA, 25 bp, Artificial
  Probe
ctacctatctacctacctacatacc

SEQ ID NO: 169998 - DNA, 25 bp, Artificial
  Probe
cctacctacatacctatcatctgtc

SEQ ID NO: 169999 - DNA, 25 bp, Artificial
  Probe
tattgatacttatgctgcttccaga

SEQ ID NO: 170000 - DNA, 25 bp, Artificial
  Probe
tacctacctacatacctatcatctg

SEQ ID NO: 170001 - DNA, 25 bp, Artificial
  Probe
gtattgatacttatgctgcttccag

SEQ ID NO: 170002 - DNA, 25 bp, Artificial
  Probe
tacatacctatcatctgtctgtctg

SEQ ID NO: 170003 - DNA, 25 bp, Artificial
  Probe
attgatacttatgctgcttccagac

SEQ ID NO: 170004 - DNA, 25 bp, Artificial
  Probe
ctacatacctatcatctgtctgtct

SEQ ID NO: 170005 - DNA, 25 bp, Artificial
  Probe
ctacctacctacatacctatcatct

SEQ ID NO: 170006 - DNA, 25 bp, Artificial
  Probe
tctacctacctacatacctatcatc

SEQ ID NO: 170007 - DNA, 25 bp, Artificial
  Probe
tacctacatacctatcatctgtctg

SEQ ID NO: 170008 - DNA, 25 bp, Artificial
  Probe
atacttatgctgcttccagactgat

SEQ ID NO: 170009 - DNA, 25 bp, Artificial
  Probe
ctacctacatacctatcatctgtct

SEQ ID NO: 170010 - DNA, 25 bp, Artificial
  Probe
ttgatacttatgctgcttccagact

SEQ ID NO: 170011 - DNA, 25 bp, Artificial
  Probe
tagtgtattgatacttatgctgctt

SEQ ID NO: 170012 - DNA, 25 bp, Artificial
  Probe
ttagtgtattgatacttatgctgct

SEQ ID NO: 170013 - DNA, 25 bp, Artificial
  Probe
gtctgtctgtctttcctaaatggta

SEQ ID NO: 170014 - DNA, 25 bp, Artificial
  Probe
ccatttctgtttcttccttgacttc

SEQ ID NO: 170015 - DNA, 25 bp, Artificial
  Probe
tctgtctgtctgtctttcctaaatg

SEQ ID NO: 170016 - DNA, 25 bp, Artificial
  Probe
catctgtctgtctgtctttcctaaa

SEQ ID NO: 170017 - DNA, 25 bp, Artificial
  Probe
ctatcatctgtctgtctgtctttcc

SEQ ID NO: 170018 - DNA, 25 bp, Artificial
  Probe
cctatcatctgtctgtctgtctttc

SEQ ID NO: 170019 - DNA, 25 bp, Artificial
  Probe
catttctgtttcttccttgacttct

SEQ ID NO: 170020 - DNA, 25 bp, Artificial
  Probe
ttatgctgcttccagactgatctaa

SEQ ID NO: 170021 - DNA, 25 bp, Artificial
  Probe
atctgtctgtctgtctttcctaaat

SEQ ID NO: 170022 - DNA, 25 bp, Artificial
  Probe
atcatctgtctgtctgtctttccta

SEQ ID NO: 170023 - DNA, 25 bp, Artificial
  Probe
tatcatctgtctgtctgtctttcct

SEQ ID NO: 170024 - DNA, 25 bp, Artificial
  Probe
cctatctacctacctacatacctat

SEQ ID NO: 170025 - DNA, 25 bp, Artificial
  Probe
tctacctatctacctacctacatac

SEQ ID NO: 170026 - DNA, 25 bp, Artificial
  Probe
gatacttatgctgcttccagactga

SEQ ID NO: 170027 - DNA, 25 bp, Artificial
  Probe
tcatctgtctgtctgtctttcctaa

SEQ ID NO: 170028 - DNA, 25 bp, Artificial
  Probe
acctatcatctgtctgtctgtcttt

SEQ ID NO: 170029 - DNA, 25 bp, Artificial
  Probe
ttcacaacatatcagacttcaccaa

SEQ ID NO: 170030 - DNA, 25 bp, Artificial
  Probe
attagttctggagtgattctgtcta

SEQ ID NO: 170031 - DNA, 25 bp, Artificial
  Probe
tattagttctggagtgattctgtct

SEQ ID NO: 170032 - DNA, 25 bp, Artificial
  Probe
ggactggattcttacttgagtatca

SEQ ID NO: 170033 - DNA, 25 bp, Artificial
  Probe
attatcatcacatggcatggatcat

SEQ ID NO: 170034 - DNA, 25 bp, Artificial
  Probe
atattagttctggagtgattctgtc

SEQ ID NO: 170035 - DNA, 25 bp, Artificial
  Probe
gatattagttctggagtgattctgt

SEQ ID NO: 170036 - DNA, 25 bp, Artificial
  Probe
ttatcatcacatggcatggatcatc

SEQ ID NO: 170037 - DNA, 25 bp, Artificial
  Probe
gtgtaactgaagcattatcatcaca

SEQ ID NO: 170038 - DNA, 25 bp, Artificial
  Probe
tgtaactgaagcattatcatcacat

SEQ ID NO: 170039 - DNA, 25 bp, Artificial
  Probe
ttagttctggagtgattctgtctaa

SEQ ID NO: 170040 - DNA, 25 bp, Artificial
  Probe
agtgtaactgaagcattatcatcac

SEQ ID NO: 170041 - DNA, 25 bp, Artificial
  Probe
cattatcatcacatggcatggatca

SEQ ID NO: 170042 - DNA, 25 bp, Artificial
  Probe
taactgaagcattatcatcacatgg

SEQ ID NO: 170043 - DNA, 25 bp, Artificial
  Probe
agatattagttctggagtgattctg

SEQ ID NO: 170044 - DNA, 25 bp, Artificial
  Probe
ctggattcttacttgagtatcatca

SEQ ID NO: 170045 - DNA, 25 bp, Artificial
  Probe
actggattcttacttgagtatcatc

SEQ ID NO: 170046 - DNA, 25 bp, Artificial
  Probe
gactggattcttacttgagtatcat

SEQ ID NO: 170047 - DNA, 25 bp, Artificial
  Probe
tatcatcacatggcatggatcatca

SEQ ID NO: 170048 - DNA, 25 bp, Artificial
  Probe
gtaactgaagcattatcatcacatg

SEQ ID NO: 170049 - DNA, 25 bp, Artificial
  Probe
ctaatatccaaggtagatagagtgc

SEQ ID NO: 170050 - DNA, 25 bp, Artificial
  Probe
agtatctcaataaagcacgcagtta

SEQ ID NO: 170051 - DNA, 25 bp, Artificial
  Probe
ctgaagcattatcatcacatggcat

SEQ ID NO: 170052 - DNA, 25 bp, Artificial
  Probe
cacaacatatcagacttcaccaaat

SEQ ID NO: 170053 - DNA, 25 bp, Artificial
  Probe
tcacaacatatcagacttcaccaaa

SEQ ID NO: 170054 - DNA, 25 bp, Artificial
  Probe
tttcacaacatatcagacttcacca

SEQ ID NO: 170055 - DNA, 25 bp, Artificial
  Probe
tacaatgggttcctttctatcctac

SEQ ID NO: 170056 - DNA, 25 bp, Artificial
  Probe
gtatctcaataaagcacgcagttac

SEQ ID NO: 170057 - DNA, 25 bp, Artificial
  Probe
agttctggagtgattctgtctaaat

SEQ ID NO: 170058 - DNA, 25 bp, Artificial
  Probe
caatgggttcctttctatcctacta

SEQ ID NO: 170059 - DNA, 25 bp, Artificial
  Probe
acaatgggttcctttctatcctact

SEQ ID NO: 170060 - DNA, 25 bp, Artificial
  Probe
aactgaagcattatcatcacatggc

SEQ ID NO: 170061 - DNA, 25 bp, Artificial
  Probe
gcgttctttattaccaccaagtatt

SEQ ID NO: 170062 - DNA, 25 bp, Artificial
  Probe
tagttctggagtgattctgtctaaa

SEQ ID NO: 170063 - DNA, 25 bp, Artificial
  Probe
cctttctatcctactaagacgcttt

SEQ ID NO: 170064 - DNA, 25 bp, Artificial
  Probe
ggttcctttctatcctactaagacg

SEQ ID NO: 170065 - DNA, 25 bp, Artificial
  Probe
tgggttcctttctatcctactaaga

SEQ ID NO: 170066 - DNA, 25 bp, Artificial
  Probe
tgaagcattatcatcacatggcatg

SEQ ID NO: 170067 - DNA, 25 bp, Artificial
  Probe
gggttcctttctatcctactaagac

SEQ ID NO: 170068 - DNA, 25 bp, Artificial
  Probe
tcctttctatcctactaagacgctt

SEQ ID NO: 170069 - DNA, 25 bp, Artificial
  Probe
ttcctttctatcctactaagacgct

SEQ ID NO: 170070 - DNA, 25 bp, Artificial
  Probe
gttcctttctatcctactaagacgc

SEQ ID NO: 170071 - DNA, 25 bp, Artificial
  Probe
atacaatgggttcctttctatccta

SEQ ID NO: 170072 - DNA, 25 bp, Artificial
  Probe
aagcataatttggacatcatttcgc

SEQ ID NO: 170073 - DNA, 25 bp, Artificial
  Probe
tatacaatgggttcctttctatcct

SEQ ID NO: 170074 - DNA, 25 bp, Artificial
  Probe
catcttcttaatgacctctgctctc

SEQ ID NO: 170075 - DNA, 25 bp, Artificial
  Probe
atcttcttaatgacctctgctctcc

SEQ ID NO: 170076 - DNA, 25 bp, Artificial
  Probe
ccatcttcttaatgacctctgctct

SEQ ID NO: 170077 - DNA, 25 bp, Artificial
  Probe
cttcaatactctcagaacgagcaag

SEQ ID NO: 170078 - DNA, 25 bp, Artificial
  Probe
ggatatgctagagatcgacttcaat

SEQ ID NO: 170079 - DNA, 25 bp, Artificial
  Probe
acttcaatactctcagaacgagcaa

SEQ ID NO: 170080 - DNA, 25 bp, Artificial
  Probe
cttcttaatgacctctgctctccac

SEQ ID NO: 170081 - DNA, 25 bp, Artificial
  Probe
agatcgacttcaatactctcagaac

SEQ ID NO: 170082 - DNA, 25 bp, Artificial
  Probe
ggacagacactgaggttagaatcat

SEQ ID NO: 170083 - DNA, 25 bp, Artificial
  Probe
gacagacactgaggttagaatcatg

SEQ ID NO: 170084 - DNA, 25 bp, Artificial
  Probe
tcttcttaatgacctctgctctcca

SEQ ID NO: 170085 - DNA, 25 bp, Artificial
  Probe
attacctgaactgtctgtcatgtga

SEQ ID NO: 170086 - DNA, 25 bp, Artificial
  Probe
cattacctgaactgtctgtcatgtg

SEQ ID NO: 170087 - DNA, 25 bp, Artificial
  Probe
tatgctagagatcgacttcaatact

SEQ ID NO: 170088 - DNA, 25 bp, Artificial
  Probe
gacttcaatactctcagaacgagca

SEQ ID NO: 170089 - DNA, 25 bp, Artificial
  Probe
gatcgacttcaatactctcagaacg

SEQ ID NO: 170090 - DNA, 25 bp, Artificial
  Probe
tctgtgagtctttacctaaaccttg

SEQ ID NO: 170091 - DNA, 25 bp, Artificial
  Probe
tgagtctttacctaaaccttgtgat

SEQ ID NO: 170092 - DNA, 25 bp, Artificial
  Probe
gtgagtctttacctaaaccttgtga

SEQ ID NO: 170093 - DNA, 25 bp, Artificial
  Probe
ctgtgagtctttacctaaaccttgt

SEQ ID NO: 170094 - DNA, 25 bp, Artificial
  Probe
atgctagagatcgacttcaatactc

SEQ ID NO: 170095 - DNA, 25 bp, Artificial
  Probe
tgtgagtctttacctaaaccttgtg

SEQ ID NO: 170096 - DNA, 25 bp, Artificial
  Probe
gattctcccttacccatcttcttaa

SEQ ID NO: 170097 - DNA, 25 bp, Artificial
  Probe
ttacccatcttcttaatgacctctg

SEQ ID NO: 170098 - DNA, 25 bp, Artificial
  Probe
ttctcccttacccatcttcttaatg

SEQ ID NO: 170099 - DNA, 25 bp, Artificial
  Probe
ccttacccatcttcttaatgacctc

SEQ ID NO: 170100 - DNA, 25 bp, Artificial
  Probe
ctcccttacccatcttcttaatgac

SEQ ID NO: 170101 - DNA, 25 bp, Artificial
  Probe
tctcccttacccatcttcttaatga

SEQ ID NO: 170102 - DNA, 25 bp, Artificial
  Probe
cttacccatcttcttaatgacctct

SEQ ID NO: 170103 - DNA, 25 bp, Artificial
  Probe
attctcccttacccatcttcttaat

SEQ ID NO: 170104 - DNA, 25 bp, Artificial
  Probe
ttcaatactctcagaacgagcaagg

SEQ ID NO: 170105 - DNA, 25 bp, Artificial
  Probe
gagtctttacctaaaccttgtgatt

SEQ ID NO: 170106 - DNA, 25 bp, Artificial
  Probe
ttacctgaactgtctgtcatgtgag

SEQ ID NO: 170107 - DNA, 25 bp, Artificial
  Probe
atatgctagagatcgacttcaatac

SEQ ID NO: 170108 - DNA, 25 bp, Artificial
  Probe
ctctgtgagtctttacctaaacctt

SEQ ID NO: 170109 - DNA, 25 bp, Artificial
  Probe
cccttacccatcttcttaatgacct

SEQ ID NO: 170110 - DNA, 25 bp, Artificial
  Probe
tcccttacccatcttcttaatgacc

SEQ ID NO: 170111 - DNA, 25 bp, Artificial
  Probe
ccctgagccattcataataatttga

SEQ ID NO: 170112 - DNA, 25 bp, Artificial
  Probe
tccctgagccattcataataatttg

SEQ ID NO: 170113 - DNA, 25 bp, Artificial
  Probe
gatatgctagagatcgacttcaata

SEQ ID NO: 170114 - DNA, 25 bp, Artificial
  Probe
ctgctctgtgagtctttacctaaac

SEQ ID NO: 170115 - DNA, 25 bp, Artificial
  Probe
tctgctctgtgagtctttacctaaa

SEQ ID NO: 170116 - DNA, 25 bp, Artificial
  Probe
tacccatcttcttaatgacctctgc

SEQ ID NO: 170117 - DNA, 25 bp, Artificial
  Probe
ctaaaccttgtgattaggagagtca

SEQ ID NO: 170118 - DNA, 25 bp, Artificial
  Probe
ctctgctctgtgagtctttacctaa

SEQ ID NO: 170119 - DNA, 25 bp, Artificial
  Probe
tattgaccgatactactcttgacca

SEQ ID NO: 170120 - DNA, 25 bp, Artificial
  Probe
atattgaccgatactactcttgacc

SEQ ID NO: 170121 - DNA, 25 bp, Artificial
  Probe
tgcgactatctctatattgaccgat

SEQ ID NO: 170122 - DNA, 25 bp, Artificial
  Probe
ttgcgactatctctatattgaccga

SEQ ID NO: 170123 - DNA, 25 bp, Artificial
  Probe
ttaactgccattactgtgctatgac

SEQ ID NO: 170124 - DNA, 25 bp, Artificial
  Probe
ttattggagatactctacttggcac

SEQ ID NO: 170125 - DNA, 25 bp, Artificial
  Probe
tattggagatactctacttggcaca

SEQ ID NO: 170126 - DNA, 25 bp, Artificial
  Probe
attgaccgatactactcttgaccac

SEQ ID NO: 170127 - DNA, 25 bp, Artificial
  Probe
gcgactatctctatattgaccgata

SEQ ID NO: 170128 - DNA, 25 bp, Artificial
  Probe
cagttctatctgatgaccttagtcc

SEQ ID NO: 170129 - DNA, 25 bp, Artificial
  Probe
gcagttctatctgatgaccttagtc

SEQ ID NO: 170130 - DNA, 25 bp, Artificial
  Probe
ataggtctgaaggatatgattctca

SEQ ID NO: 170131 - DNA, 25 bp, Artificial
  Probe
attggagatactctacttggcacag

SEQ ID NO: 170132 - DNA, 25 bp, Artificial
  Probe
tctctatattgaccgatactactct

SEQ ID NO: 170133 - DNA, 25 bp, Artificial
  Probe
tatattgaccgatactactcttgac

SEQ ID NO: 170134 - DNA, 25 bp, Artificial
  Probe
taactgccattactgtgctatgaca

SEQ ID NO: 170135 - DNA, 25 bp, Artificial
  Probe
cgactatctctatattgaccgatac

SEQ ID NO: 170136 - DNA, 25 bp, Artificial
  Probe
tttgcgactatctctatattgaccg

SEQ ID NO: 170137 - DNA, 25 bp, Artificial
  Probe
ctatattgaccgatactactcttga

SEQ ID NO: 170138 - DNA, 25 bp, Artificial
  Probe
tctatattgaccgatactactcttg

SEQ ID NO: 170139 - DNA, 25 bp, Artificial
  Probe
cataggtctgaaggatatgattctc

SEQ ID NO: 170140 - DNA, 25 bp, Artificial
  Probe
ctttaactgccattactgtgctatg

SEQ ID NO: 170141 - DNA, 25 bp, Artificial
  Probe
tttaactgccattactgtgctatga

SEQ ID NO: 170142 - DNA, 25 bp, Artificial
  Probe
gatacttgactgcctagagggatat

SEQ ID NO: 170143 - DNA, 25 bp, Artificial
  Probe
tgaaggactaattgaagggtgtgta

SEQ ID NO: 170144 - DNA, 25 bp, Artificial
  Probe
ctctatattgaccgatactactctt

SEQ ID NO: 170145 - DNA, 25 bp, Artificial
  Probe
atttgcgactatctctatattgacc

SEQ ID NO: 170146 - DNA, 25 bp, Artificial
  Probe
agtttcctctactaaagacctgaga

SEQ ID NO: 170147 - DNA, 25 bp, Artificial
  Probe
gagtttcctctactaaagacctgag

SEQ ID NO: 170148 - DNA, 25 bp, Artificial
  Probe
gctttaactgccattactgtgctat

SEQ ID NO: 170149 - DNA, 25 bp, Artificial
  Probe
gtttcctctactaaagacctgagaa

SEQ ID NO: 170150 - DNA, 25 bp, Artificial
  Probe
atggtacgatcacattctgtctcac

SEQ ID NO: 170151 - DNA, 25 bp, Artificial
  Probe
ttcctctactaaagacctgagaatg

SEQ ID NO: 170152 - DNA, 25 bp, Artificial
  Probe
tttattggagatactctacttggca

SEQ ID NO: 170153 - DNA, 25 bp, Artificial
  Probe
cttgaaggactaattgaagggtgtg

SEQ ID NO: 170154 - DNA, 25 bp, Artificial
  Probe
acatggattatttgcgactatctct

SEQ ID NO: 170155 - DNA, 25 bp, Artificial
  Probe
cacatggattatttgcgactatctc

SEQ ID NO: 170156 - DNA, 25 bp, Artificial
  Probe
gaaggactaattgaagggtgtgtac

SEQ ID NO: 170157 - DNA, 25 bp, Artificial
  Probe
ctaggactgatgaccttatcatagg

SEQ ID NO: 170158 - DNA, 25 bp, Artificial
  Probe
catactgagccacatggattatttg

SEQ ID NO: 170159 - DNA, 25 bp, Artificial
  Probe
tgcagttctatctgatgaccttagt

SEQ ID NO: 170160 - DNA, 25 bp, Artificial
  Probe
catggtacgatcacattctgtctca

SEQ ID NO: 170161 - DNA, 25 bp, Artificial
  Probe
atctctatattgaccgatactactc

SEQ ID NO: 170162 - DNA, 25 bp, Artificial
  Probe
aaggactaattgaagggtgtgtact

SEQ ID NO: 170163 - DNA, 25 bp, Artificial
  Probe
tcctctactaaagacctgagaatgc

SEQ ID NO: 170164 - DNA, 25 bp, Artificial
  Probe
tacacggtcagattcagttcactaa

SEQ ID NO: 170165 - DNA, 25 bp, Artificial
  Probe
atgctaacttgaatgcttgtcagta

SEQ ID NO: 170166 - DNA, 25 bp, Artificial
  Probe
ctacacggtcagattcagttcacta

SEQ ID NO: 170167 - DNA, 25 bp, Artificial
  Probe
caatgctaacttgaatgcttgtcag

SEQ ID NO: 170168 - DNA, 25 bp, Artificial
  Probe
aatgctaacttgaatgcttgtcagt

SEQ ID NO: 170169 - DNA, 25 bp, Artificial
  Probe
tcttctacacggtcagattcagttc

SEQ ID NO: 170170 - DNA, 25 bp, Artificial
  Probe
ctcttctacacggtcagattcagtt

SEQ ID NO: 170171 - DNA, 25 bp, Artificial
  Probe
aacttgaatgcttgtcagtacatac

SEQ ID NO: 170172 - DNA, 25 bp, Artificial
  Probe
aatgcttgtcagtacataccatcaa

SEQ ID NO: 170173 - DNA, 25 bp, Artificial
  Probe
ttgaatgcttgtcagtacataccat

SEQ ID NO: 170174 - DNA, 25 bp, Artificial
  Probe
ctaacttgaatgcttgtcagtacat

SEQ ID NO: 170175 - DNA, 25 bp, Artificial
  Probe
gaatgcttgtcagtacataccatca

SEQ ID NO: 170176 - DNA, 25 bp, Artificial
  Probe
tgaatgcttgtcagtacataccatc

SEQ ID NO: 170177 - DNA, 25 bp, Artificial
  Probe
cttctacacggtcagattcagttca

SEQ ID NO: 170178 - DNA, 25 bp, Artificial
  Probe
cttgaatgcttgtcagtacatacca

SEQ ID NO: 170179 - DNA, 25 bp, Artificial
  Probe
acttgaatgcttgtcagtacatacc

SEQ ID NO: 170180 - DNA, 25 bp, Artificial
  Probe
tgctaacttgaatgcttgtcagtac

SEQ ID NO: 170181 - DNA, 25 bp, Artificial
  Probe
ttctacacggtcagattcagttcac

SEQ ID NO: 170182 - DNA, 25 bp, Artificial
  Probe
gctaacttgaatgcttgtcagtaca

SEQ ID NO: 170183 - DNA, 25 bp, Artificial
  Probe
acggtcagattcagttcactaaata

SEQ ID NO: 170184 - DNA, 25 bp, Artificial
  Probe
taacttgaatgcttgtcagtacata

SEQ ID NO: 170185 - DNA, 25 bp, Artificial
  Probe
aatactatcaagacccaactggaag

SEQ ID NO: 170186 - DNA, 25 bp, Artificial
  Probe
cggtcagattcagttcactaaataa

SEQ ID NO: 170187 - DNA, 25 bp, Artificial
  Probe
cacggtcagattcagttcactaaat

SEQ ID NO: 170188 - DNA, 25 bp, Artificial
  Probe
cagggttgaacatacaataatgctt

SEQ ID NO: 170189 - DNA, 25 bp, Artificial
  Probe
cgacagggttgaacatacaataatg

SEQ ID NO: 170190 - DNA, 25 bp, Artificial
  Probe
gacagggttgaacatacaataatgc

SEQ ID NO: 170191 - DNA, 25 bp, Artificial
  Probe
gactcttctacacggtcagattcag

SEQ ID NO: 170192 - DNA, 25 bp, Artificial
  Probe
acagggttgaacatacaataatgct

SEQ ID NO: 170193 - DNA, 25 bp, Artificial
  Probe
gggttgaacatacaataatgctttg

SEQ ID NO: 170194 - DNA, 25 bp, Artificial
  Probe
agggttgaacatacaataatgcttt

SEQ ID NO: 170195 - DNA, 25 bp, Artificial
  Probe
taatactatcaagacccaactggaa

SEQ ID NO: 170196 - DNA, 25 bp, Artificial
  Probe
actcttctacacggtcagattcagt

SEQ ID NO: 170197 - DNA, 25 bp, Artificial
  Probe
ccgacagggttgaacatacaataat

SEQ ID NO: 170198 - DNA, 25 bp, Artificial
  Probe
ataatactatcaagacccaactgga

SEQ ID NO: 170199 - DNA, 25 bp, Artificial
  Probe
tctacacggtcagattcagttcact

SEQ ID NO: 170200 - DNA, 25 bp, Artificial
  Probe
ttacaagcatgaaagttatggtagc

SEQ ID NO: 170201 - DNA, 25 bp, Artificial
  Probe
tacaagcatgaaagttatggtagca

SEQ ID NO: 170202 - DNA, 25 bp, Artificial
  Probe
ggttgaacatacaataatgctttga

SEQ ID NO: 170203 - DNA, 25 bp, Artificial
  Probe
acacggtcagattcagttcactaaa

SEQ ID NO: 170204 - DNA, 25 bp, Artificial
  Probe
atcaatgctaacttgaatgcttgtc

SEQ ID NO: 170205 - DNA, 25 bp, Artificial
  Probe
gatcaatgctaacttgaatgcttgt

SEQ ID NO: 170206 - DNA, 25 bp, Artificial
  Probe
aataatactatcaagacccaactgg

SEQ ID NO: 170207 - DNA, 25 bp, Artificial
  Probe
acaagcatgaaagttatggtagcat

SEQ ID NO: 170208 - DNA, 25 bp, Artificial
  Probe
gtggctgaagatcaactttatgtat

SEQ ID NO: 170209 - DNA, 25 bp, Artificial
  Probe
ctacatctcacactcaagccttatt

SEQ ID NO: 170210 - DNA, 25 bp, Artificial
  Probe
acatctcacactcaagccttattaa

SEQ ID NO: 170211 - DNA, 25 bp, Artificial
  Probe
tcacactcaagccttattaaccata

SEQ ID NO: 170212 - DNA, 25 bp, Artificial
  Probe
catctcacactcaagccttattaac

SEQ ID NO: 170213 - DNA, 25 bp, Artificial
  Probe
aagcagaactctcataagccataag

SEQ ID NO: 170214 - DNA, 25 bp, Artificial
  Probe
atctcacactcaagccttattaacc

SEQ ID NO: 170215 - DNA, 25 bp, Artificial
  Probe
tacatctcacactcaagccttatta

SEQ ID NO: 170216 - DNA, 25 bp, Artificial
  Probe
ctcacactcaagccttattaaccat

SEQ ID NO: 170217 - DNA, 25 bp, Artificial
  Probe
caagcagaactctcataagccataa

SEQ ID NO: 170218 - DNA, 25 bp, Artificial
  Probe
tcataagccataagagagtccatct

SEQ ID NO: 170219 - DNA, 25 bp, Artificial
  Probe
cacactcaagccttattaaccataa

SEQ ID NO: 170220 - DNA, 25 bp, Artificial
  Probe
tcaagcagaactctcataagccata

SEQ ID NO: 170221 - DNA, 25 bp, Artificial
  Probe
ctcataagccataagagagtccatc

SEQ ID NO: 170222 - DNA, 25 bp, Artificial
  Probe
tctcacactcaagccttattaacca

SEQ ID NO: 170223 - DNA, 25 bp, Artificial
  Probe
agcagaactctcataagccataaga

SEQ ID NO: 170224 - DNA, 25 bp, Artificial
  Probe
cctacatctcacactcaagccttat

SEQ ID NO: 170225 - DNA, 25 bp, Artificial
  Probe
ctcaagcagaactctcataagccat

SEQ ID NO: 170226 - DNA, 25 bp, Artificial
  Probe
ctataaatgcgatgtgtgtgagaaa

SEQ ID NO: 170227 - DNA, 25 bp, Artificial
  Probe
ttcagaaacaactcaagccttaaag

SEQ ID NO: 170228 - DNA, 25 bp, Artificial
  Probe
tttaactacacctcactcctttctc

SEQ ID NO: 170229 - DNA, 25 bp, Artificial
  Probe
ataaatgcgatgtgtgtgagaaatc

SEQ ID NO: 170230 - DNA, 25 bp, Artificial
  Probe
tcatttaactacacctcactccttt

SEQ ID NO: 170231 - DNA, 25 bp, Artificial
  Probe
taactacacctcactcctttctcaa

SEQ ID NO: 170232 - DNA, 25 bp, Artificial
  Probe
tataaatgcgatgtgtgtgagaaat

SEQ ID NO: 170233 - DNA, 25 bp, Artificial
  Probe
catttaactacacctcactcctttc

SEQ ID NO: 170234 - DNA, 25 bp, Artificial
  Probe
atcatttaactacacctcactcctt

SEQ ID NO: 170235 - DNA, 25 bp, Artificial
  Probe
aatcatttaactacacctcactcct

SEQ ID NO: 170236 - DNA, 25 bp, Artificial
  Probe
atttaactacacctcactcctttct

SEQ ID NO: 170237 - DNA, 25 bp, Artificial
  Probe
cctttaagtgtgatgagtgtgagaa

SEQ ID NO: 170238 - DNA, 25 bp, Artificial
  Probe
ttaactacacctcactcctttctca

SEQ ID NO: 170239 - DNA, 25 bp, Artificial
  Probe
cttcagaaacaactcaagccttaaa

SEQ ID NO: 170240 - DNA, 25 bp, Artificial
  Probe
tttaagtgtgatgagtgtgagaaag

SEQ ID NO: 170241 - DNA, 25 bp, Artificial
  Probe
ctttaagtgtgatgagtgtgagaaa

SEQ ID NO: 170242 - DNA, 25 bp, Artificial
  Probe
tcttcagaaacaactcaagccttaa

SEQ ID NO: 170243 - DNA, 25 bp, Artificial
  Probe
cctataaatgcgatgtgtgtgagaa

SEQ ID NO: 170244 - DNA, 25 bp, Artificial
  Probe
atactagagagaagccctttgaatg

SEQ ID NO: 170245 - DNA, 25 bp, Artificial
  Probe
catactagagagaagccctttgaat

SEQ ID NO: 170246 - DNA, 25 bp, Artificial
  Probe
gagaagccgtatgagtgtgacatat

SEQ ID NO: 170247 - DNA, 25 bp, Artificial
  Probe
ttaagtgtgatgagtgtgagaaagc

SEQ ID NO: 170248 - DNA, 25 bp, Artificial
  Probe
aaatcatttaactacacctcactcc

SEQ ID NO: 170249 - DNA, 25 bp, Artificial
  Probe
ataagccataagagagtccatcttg

SEQ ID NO: 170250 - DNA, 25 bp, Artificial
  Probe
cataagccataagagagtccatctt

SEQ ID NO: 170251 - DNA, 25 bp, Artificial
  Probe
gtcttcagaaacaactcaagcctta

SEQ ID NO: 170252 - DNA, 25 bp, Artificial
  Probe
tactagagagaagccctttgaatgt

SEQ ID NO: 170253 - DNA, 25 bp, Artificial
  Probe
gcgatgtgtgtgagaaatcatttaa

SEQ ID NO: 170254 - DNA, 25 bp, Artificial
  Probe
ctatggaagtgggaaacatggtcag

SEQ ID NO: 170255 - DNA, 25 bp, Artificial
  Probe
tatggaagtgggaaacatggtcagg

SEQ ID NO: 170256 - DNA, 25 bp, Artificial
  Probe
cctatggaagtgggaaacatggtca

SEQ ID NO: 170257 - DNA, 25 bp, Artificial
  Probe
tcctatggaagtgggaaacatggtc

SEQ ID NO: 170258 - DNA, 25 bp, Artificial
  Probe
ggttcccatcctgagtttggaatta

SEQ ID NO: 170259 - DNA, 25 bp, Artificial
  Probe
ttttgtggttcccatcctgagtttg

SEQ ID NO: 170260 - DNA, 25 bp, Artificial
  Probe
tttgtggttcccatcctgagtttgg

SEQ ID NO: 170261 - DNA, 25 bp, Artificial
  Probe
ttcctatggaagtgggaaacatggt

SEQ ID NO: 170262 - DNA, 25 bp, Artificial
  Probe
tggttcccatcctgagtttggaatt

SEQ ID NO: 170263 - DNA, 25 bp, Artificial
  Probe
gtggttcccatcctgagtttggaat

SEQ ID NO: 170264 - DNA, 25 bp, Artificial
  Probe
atgtggagatcgctacctacaggaa

SEQ ID NO: 170265 - DNA, 25 bp, Artificial
  Probe
atgcagatgccaaattccaagactt

SEQ ID NO: 170266 - DNA, 25 bp, Artificial
  Probe
gatgtggagatcgctacctacagga

SEQ ID NO: 170267 - DNA, 25 bp, Artificial
  Probe
gatgcagatgccaaattccaagact

SEQ ID NO: 170268 - DNA, 25 bp, Artificial
  Probe
gtaccaggagctgatgaacgttaag

SEQ ID NO: 170269 - DNA, 25 bp, Artificial
  Probe
tgcagatgccaaattccaagacttg

SEQ ID NO: 170270 - DNA, 25 bp, Artificial
  Probe
cctcaaggatgcagatgccaaattc

SEQ ID NO: 170271 - DNA, 25 bp, Artificial
  Probe
agtaccaggagctgatgaacgttaa

SEQ ID NO: 170272 - DNA, 25 bp, Artificial
  Probe
aaggatgcagatgccaaattccaag

SEQ ID NO: 170273 - DNA, 25 bp, Artificial
  Probe
caaggatgcagatgccaaattccaa

SEQ ID NO: 170274 - DNA, 25 bp, Artificial
  Probe
gagtaccaggagctgatgaacgtta

SEQ ID NO: 170275 - DNA, 25 bp, Artificial
  Probe
ctcaaggatgcagatgccaaattcc

SEQ ID NO: 170276 - DNA, 25 bp, Artificial
  Probe
ggatgcagatgccaaattccaagac

SEQ ID NO: 170277 - DNA, 25 bp, Artificial
  Probe
agatgccaaattccaagacttgcag

SEQ ID NO: 170278 - DNA, 25 bp, Artificial
  Probe
aggatgcagatgccaaattccaaga

SEQ ID NO: 170279 - DNA, 25 bp, Artificial
  Probe
cagatgccaaattccaagacttgca

SEQ ID NO: 170280 - DNA, 25 bp, Artificial
  Probe
tcaaggatgcagatgccaaattcca

SEQ ID NO: 170281 - DNA, 25 bp, Artificial
  Probe
gatgccaaattccaagacttgcagg

SEQ ID NO: 170282 - DNA, 25 bp, Artificial
  Probe
taccaggagctgatgaacgttaagc

SEQ ID NO: 170283 - DNA, 25 bp, Artificial
  Probe
cgtgcaatgtcatttgaatttgtta

SEQ ID NO: 170284 - DNA, 25 bp, Artificial
  Probe
acgtgcaatgtcatttgaatttgtt

SEQ ID NO: 170285 - DNA, 25 bp, Artificial
  Probe
gtgcaatgtcatttgaatttgttaa

SEQ ID NO: 170286 - DNA, 25 bp, Artificial
  Probe
tgcaatgtcatttgaatttgttaat

SEQ ID NO: 170287 - DNA, 25 bp, Artificial
  Probe
gcaatgtcatttgaatttgttaata

SEQ ID NO: 170288 - DNA, 25 bp, Artificial
  Probe
ttgcaactacccactagaatcgcac

SEQ ID NO: 170289 - DNA, 25 bp, Artificial
  Probe
gagacagacagatagacagagagat

SEQ ID NO: 170290 - DNA, 25 bp, Artificial
  Probe
acagatagacagagagatagacaga

SEQ ID NO: 170291 - DNA, 25 bp, Artificial
  Probe
agacagatagacagagagatagaca

SEQ ID NO: 170292 - DNA, 25 bp, Artificial
  Probe
acagacagatagacagagagataga

SEQ ID NO: 170293 - DNA, 25 bp, Artificial
  Probe
agacagacagatagacagagagata

SEQ ID NO: 170294 - DNA, 25 bp, Artificial
  Probe
gacagatagacagagagatagacag

SEQ ID NO: 170295 - DNA, 25 bp, Artificial
  Probe
cagacagatagacagagagatagac

SEQ ID NO: 170296 - DNA, 25 bp, Artificial
  Probe
gacagacagatagacagagagatag

SEQ ID NO: 170297 - DNA, 25 bp, Artificial
  Probe
gatagacagacagagagacagagag

SEQ ID NO: 170298 - DNA, 25 bp, Artificial
  Probe
gagatagacagacagagagacagag

SEQ ID NO: 170299 - DNA, 25 bp, Artificial
  Probe
gagagacagacagatagacagagag

SEQ ID NO: 170300 - DNA, 25 bp, Artificial
  Probe
gagagacagagagacagacagatag

SEQ ID NO: 170301 - DNA, 25 bp, Artificial
  Probe
atagacagacagagagacagagaga

SEQ ID NO: 170302 - DNA, 25 bp, Artificial
  Probe
agatagacagacagagagacagaga

SEQ ID NO: 170303 - DNA, 25 bp, Artificial
  Probe
agagatagacagacagagagacaga

SEQ ID NO: 170304 - DNA, 25 bp, Artificial
  Probe
cagagatagacagacagagagacag

SEQ ID NO: 170305 - DNA, 25 bp, Artificial
  Probe
gacagagatagacagacagagagac

SEQ ID NO: 170306 - DNA, 25 bp, Artificial
  Probe
agacagagatagacagacagagaga

SEQ ID NO: 170307 - DNA, 25 bp, Artificial
  Probe
cagacagagatagacagacagagag

SEQ ID NO: 170308 - DNA, 25 bp, Artificial
  Probe
agagacagacagatagacagagaga

SEQ ID NO: 170309 - DNA, 25 bp, Artificial
  Probe
agagagacagacagatagacagaga

SEQ ID NO: 170310 - DNA, 25 bp, Artificial
  Probe
cagagagacagacagatagacagag

SEQ ID NO: 170311 - DNA, 25 bp, Artificial
  Probe
gagacagagagacagacagatagac

SEQ ID NO: 170312 - DNA, 25 bp, Artificial
  Probe
agagacagagagacagacagataga

SEQ ID NO: 170313 - DNA, 25 bp, Artificial
  Probe
agagagacagagagacagacagata

SEQ ID NO: 170314 - DNA, 25 bp, Artificial
  Probe
gacagagagacagacagatagacag

SEQ ID NO: 170315 - DNA, 25 bp, Artificial
  Probe
acagagatagacagacagagagaca

SEQ ID NO: 170316 - DNA, 25 bp, Artificial
  Probe
acagacagagatagacagacagaga

SEQ ID NO: 170317 - DNA, 25 bp, Artificial
  Probe
acagagagacagacagatagacaga

SEQ ID NO: 170318 - DNA, 25 bp, Artificial
  Probe
agacagagagacagacagatagaca

SEQ ID NO: 170319 - DNA, 25 bp, Artificial
  Probe
tagacagacagagagacagagagag

SEQ ID NO: 170320 - DNA, 25 bp, Artificial
  Probe
agacagagagatagacagatagatg

SEQ ID NO: 170321 - DNA, 25 bp, Artificial
  Probe
cagatagacagagagatagacagat

SEQ ID NO: 170322 - DNA, 25 bp, Artificial
  Probe
tagacagatagatggacagagagag

SEQ ID NO: 170323 - DNA, 25 bp, Artificial
  Probe
atagacagatagatggacagagaga

SEQ ID NO: 170324 - DNA, 25 bp, Artificial
  Probe
agatagacagatagatggacagaga

SEQ ID NO: 170325 - DNA, 25 bp, Artificial
  Probe
agagatagacagatagatggacaga

SEQ ID NO: 170326 - DNA, 25 bp, Artificial
  Probe
agagagatagacagatagatggaca

SEQ ID NO: 170327 - DNA, 25 bp, Artificial
  Probe
acagagagatagacagatagatgga

SEQ ID NO: 170328 - DNA, 25 bp, Artificial
  Probe
gcttgtaacttatgagacctcctat

SEQ ID NO: 170329 - DNA, 25 bp, Artificial
  Probe
gatagacagatagatggacagagag

SEQ ID NO: 170330 - DNA, 25 bp, Artificial
  Probe
gagatagacagatagatggacagag

SEQ ID NO: 170331 - DNA, 25 bp, Artificial
  Probe
gagagatagacagatagatggacag

SEQ ID NO: 170332 - DNA, 25 bp, Artificial
  Probe
cagagagatagacagatagatggac

SEQ ID NO: 170333 - DNA, 25 bp, Artificial
  Probe
gacagagagatagacagatagatgg

SEQ ID NO: 170334 - DNA, 25 bp, Artificial
  Probe
ggtatctgtccacacactattacaa

SEQ ID NO: 170335 - DNA, 25 bp, Artificial
  Probe
atctgtccacacactattacaactg

SEQ ID NO: 170336 - DNA, 25 bp, Artificial
  Probe
aggtatctgtccacacactattaca

SEQ ID NO: 170337 - DNA, 25 bp, Artificial
  Probe
tatctgtccacacactattacaact

SEQ ID NO: 170338 - DNA, 25 bp, Artificial
  Probe
gtatctgtccacacactattacaac

SEQ ID NO: 170339 - DNA, 25 bp, Artificial
  Probe
taggtatctgtccacacactattac

SEQ ID NO: 170340 - DNA, 25 bp, Artificial
  Probe
gtaggtatctgtccacacactatta

SEQ ID NO: 170341 - DNA, 25 bp, Artificial
  Probe
ctgtccacacactattacaactgta

SEQ ID NO: 170342 - DNA, 25 bp, Artificial
  Probe
catagaagttcattgctggtctgtg

SEQ ID NO: 170343 - DNA, 25 bp, Artificial
  Probe
ggtaggtatctgtccacacactatt

SEQ ID NO: 170344 - DNA, 25 bp, Artificial
  Probe
tctgtccacacactattacaactgt

SEQ ID NO: 170345 - DNA, 25 bp, Artificial
  Probe
atagaagttcattgctggtctgtgt

SEQ ID NO: 170346 - DNA, 25 bp, Artificial
  Probe
tagaagttcattgctggtctgtgtt

SEQ ID NO: 170347 - DNA, 25 bp, Artificial
  Probe
tgaatatgtgagctaaggagtagtt

SEQ ID NO: 170348 - DNA, 25 bp, Artificial
  Probe
atgaatatgtgagctaaggagtagt

SEQ ID NO: 170349 - DNA, 25 bp, Artificial
  Probe
ttcatattgttggtgcattcattgt

SEQ ID NO: 170350 - DNA, 25 bp, Artificial
  Probe
gttcatattgttggtgcattcattg

SEQ ID NO: 170351 - DNA, 25 bp, Artificial
  Probe
gggaagacacatagaaagagaaact

SEQ ID NO: 170352 - DNA, 25 bp, Artificial
  Probe
tcatattgttggtgcattcattgtg

SEQ ID NO: 170353 - DNA, 25 bp, Artificial
  Probe
ggttcatattgttggtgcattcatt

SEQ ID NO: 170354 - DNA, 25 bp, Artificial
  Probe
taaagtatattggaaaggtggagcc

SEQ ID NO: 170355 - DNA, 25 bp, Artificial
  Probe
ggaagacacatagaaagagaaactg

SEQ ID NO: 170356 - DNA, 25 bp, Artificial
  Probe
aagttgtctctgattaccatgctgt

SEQ ID NO: 170357 - DNA, 25 bp, Artificial
  Probe
gccaaagactaaatatcaacaagga

SEQ ID NO: 170358 - DNA, 25 bp, Artificial
  Probe
agccaaagactaaatatcaacaagg

SEQ ID NO: 170359 - DNA, 25 bp, Artificial
  Probe
ggagccaaagactaaatatcaacaa

SEQ ID NO: 170360 - DNA, 25 bp, Artificial
  Probe
catgaatatgtgagctaaggagtag

SEQ ID NO: 170361 - DNA, 25 bp, Artificial
  Probe
cattggtgtagaagaccttggttac

SEQ ID NO: 170362 - DNA, 25 bp, Artificial
  Probe
tggtctgtgttcctaaactatgaaa

SEQ ID NO: 170363 - DNA, 25 bp, Artificial
  Probe
ctggtctgtgttcctaaactatgaa

SEQ ID NO: 170364 - DNA, 25 bp, Artificial
  Probe
acattggtgtagaagaccttggtta

SEQ ID NO: 170365 - DNA, 25 bp, Artificial
  Probe
gtggagccaaagactaaatatcaac

SEQ ID NO: 170366 - DNA, 25 bp, Artificial
  Probe
aaaggtggagccaaagactaaatat

SEQ ID NO: 170367 - DNA, 25 bp, Artificial
  Probe
ggtctgtgttcctaaactatgaaac

SEQ ID NO: 170368 - DNA, 25 bp, Artificial
  Probe
tggagccaaagactaaatatcaaca

SEQ ID NO: 170369 - DNA, 25 bp, Artificial
  Probe
agtctttcggagtgtgaagtaattt

SEQ ID NO: 170370 - DNA, 25 bp, Artificial
  Probe
aaggtggagccaaagactaaatatc

SEQ ID NO: 170371 - DNA, 25 bp, Artificial
  Probe
catattgttggtgcattcattgtgg

SEQ ID NO: 170372 - DNA, 25 bp, Artificial
  Probe
ttaaagtatattggaaaggtggagc

SEQ ID NO: 170373 - DNA, 25 bp, Artificial
  Probe
gaaaggtggagccaaagactaaata

SEQ ID NO: 170374 - DNA, 25 bp, Artificial
  Probe
atattgttggtgcattcattgtgga

SEQ ID NO: 170375 - DNA, 25 bp, Artificial
  Probe
tgtccacacactattacaactgtaa

SEQ ID NO: 170376 - DNA, 25 bp, Artificial
  Probe
ggtggagccaaagactaaatatcaa

SEQ ID NO: 170377 - DNA, 25 bp, Artificial
  Probe
gagtctttcggagtgtgaagtaatt

SEQ ID NO: 170378 - DNA, 25 bp, Artificial
  Probe
gttcattgctggtctgtgttcctaa

SEQ ID NO: 170379 - DNA, 25 bp, Artificial
  Probe
tctgaatgagcccatcttgtggatt

SEQ ID NO: 170380 - DNA, 25 bp, Artificial
  Probe
ctctgaatgagcccatcttgtggat

SEQ ID NO: 170381 - DNA, 25 bp, Artificial
  Probe
cttgccagatagatgttgatgaatg

SEQ ID NO: 170382 - DNA, 25 bp, Artificial
  Probe
gagatacttgccagatagatgttga

SEQ ID NO: 170383 - DNA, 25 bp, Artificial
  Probe
tacttgccagatagatgttgatgaa

SEQ ID NO: 170384 - DNA, 25 bp, Artificial
  Probe
acttgccagatagatgttgatgaat

SEQ ID NO: 170385 - DNA, 25 bp, Artificial
  Probe
atacttgccagatagatgttgatga

SEQ ID NO: 170386 - DNA, 25 bp, Artificial
  Probe
gatacttgccagatagatgttgatg

SEQ ID NO: 170387 - DNA, 25 bp, Artificial
  Probe
agatacttgccagatagatgttgat

SEQ ID NO: 170388 - DNA, 25 bp, Artificial
  Probe
ggagatacttgccagatagatgttg

SEQ ID NO: 170389 - DNA, 25 bp, Artificial
  Probe
ttgccagatagatgttgatgaatgc

SEQ ID NO: 170390 - DNA, 25 bp, Artificial
  Probe
gtctctaggcacttctgagttcatt

SEQ ID NO: 170391 - DNA, 25 bp, Artificial
  Probe
ctgcttgtttatccctctctcttag

SEQ ID NO: 170392 - DNA, 25 bp, Artificial
  Probe
ccagatagatgttgatgaatgcagt

SEQ ID NO: 170393 - DNA, 25 bp, Artificial
  Probe
gctgtctccacctttgtcatattaa

SEQ ID NO: 170394 - DNA, 25 bp, Artificial
  Probe
agatagatgttgatgaatgcagtac

SEQ ID NO: 170395 - DNA, 25 bp, Artificial
  Probe
cagatagatgttgatgaatgcagta

SEQ ID NO: 170396 - DNA, 25 bp, Artificial
  Probe
ctgtctccacctttgtcatattaaa

SEQ ID NO: 170397 - DNA, 25 bp, Artificial
  Probe
cctgcttgtttatccctctctctta

SEQ ID NO: 170398 - DNA, 25 bp, Artificial
  Probe
gggagatacttgccagatagatgtt

SEQ ID NO: 170399 - DNA, 25 bp, Artificial
  Probe
tagatgttgatgaatgcagtacagg

SEQ ID NO: 170400 - DNA, 25 bp, Artificial
  Probe
cgggttgatgtattagaacagaaac

SEQ ID NO: 170401 - DNA, 25 bp, Artificial
  Probe
atagatgttgatgaatgcagtacag

SEQ ID NO: 170402 - DNA, 25 bp, Artificial
  Probe
gatagatgttgatgaatgcagtaca

SEQ ID NO: 170403 - DNA, 25 bp, Artificial
  Probe
tctaggcacttctgagttcatttat

SEQ ID NO: 170404 - DNA, 25 bp, Artificial
  Probe
ctctaggcacttctgagttcattta

SEQ ID NO: 170405 - DNA, 25 bp, Artificial
  Probe
gtgtcaatactgtgggaagttactg

SEQ ID NO: 170406 - DNA, 25 bp, Artificial
  Probe
ctgtgtcaatactgtgggaagttac

SEQ ID NO: 170407 - DNA, 25 bp, Artificial
  Probe
cagggagatacttgccagatagatg

SEQ ID NO: 170408 - DNA, 25 bp, Artificial
  Probe
gccagatagatgttgatgaatgcag

SEQ ID NO: 170409 - DNA, 25 bp, Artificial
  Probe
tgtgtcaatactgtgggaagttact

SEQ ID NO: 170410 - DNA, 25 bp, Artificial
  Probe
gggttgatgtattagaacagaaact

SEQ ID NO: 170411 - DNA, 25 bp, Artificial
  Probe
agggagatacttgccagatagatgt

SEQ ID NO: 170412 - DNA, 25 bp, Artificial
  Probe
ggctgtctccacctttgtcatatta

SEQ ID NO: 170413 - DNA, 25 bp, Artificial
  Probe
gatgttgatgaatgcagtacaggag

SEQ ID NO: 170414 - DNA, 25 bp, Artificial
  Probe
tctctaggcacttctgagttcattt

SEQ ID NO: 170415 - DNA, 25 bp, Artificial
  Probe
cttgtttatccctctctcttaggag

SEQ ID NO: 170416 - DNA, 25 bp, Artificial
  Probe
tacacactgtactactgccatgtag

SEQ ID NO: 170417 - DNA, 25 bp, Artificial
  Probe
gttgatgtattagaacagaaactgc

SEQ ID NO: 170418 - DNA, 25 bp, Artificial
  Probe
atgttgatgaatgcagtacaggaga

SEQ ID NO: 170419 - DNA, 25 bp, Artificial
  Probe
agatgttgatgaatgcagtacagga

SEQ ID NO: 170420 - DNA, 25 bp, Artificial
  Probe
ctaggcacttctgagttcatttata

SEQ ID NO: 170421 - DNA, 25 bp, Artificial
  Probe
tcaatactgtgggaagttactggtg

SEQ ID NO: 170422 - DNA, 25 bp, Artificial
  Probe
gtcaatactgtgggaagttactggt

SEQ ID NO: 170423 - DNA, 25 bp, Artificial
  Probe
tgtcaatactgtgggaagttactgg

SEQ ID NO: 170424 - DNA, 25 bp, Artificial
  Probe
tgcttgtttatccctctctcttagg

SEQ ID NO: 170425 - DNA, 25 bp, Artificial
  Probe
gcttgtttatccctctctcttagga

SEQ ID NO: 170426 - DNA, 25 bp, Artificial
  Probe
tatcgaaagcagagtgaaagtaagg

SEQ ID NO: 170427 - DNA, 25 bp, Artificial
  Probe
atatcgaaagcagagtgaaagtaag

SEQ ID NO: 170428 - DNA, 25 bp, Artificial
  Probe
cgtatatcgaaagcagagtgaaagt

SEQ ID NO: 170429 - DNA, 25 bp, Artificial
  Probe
gtatatcgaaagcagagtgaaagta

SEQ ID NO: 170430 - DNA, 25 bp, Artificial
  Probe
ctttcaacttaggtccctccaacag

SEQ ID NO: 170431 - DNA, 25 bp, Artificial
  Probe
tatatcgaaagcagagtgaaagtaa

SEQ ID NO: 170432 - DNA, 25 bp, Artificial
  Probe
gcgtatatcgaaagcagagtgaaag

SEQ ID NO: 170433 - DNA, 25 bp, Artificial
  Probe
agcgtatatcgaaagcagagtgaaa

SEQ ID NO: 170434 - DNA, 25 bp, Artificial
  Probe
gactttcaacttaggtccctccaac

SEQ ID NO: 170435 - DNA, 25 bp, Artificial
  Probe
actttcaacttaggtccctccaaca

SEQ ID NO: 170436 - DNA, 25 bp, Artificial
  Probe
gatagtccaggagttttgatacatc

SEQ ID NO: 170437 - DNA, 25 bp, Artificial
  Probe
tgactttcaacttaggtccctccaa

SEQ ID NO: 170438 - DNA, 25 bp, Artificial
  Probe
gagttttgatacatcctctgctgag

SEQ ID NO: 170439 - DNA, 25 bp, Artificial
  Probe
cagcgtatatcgaaagcagagtgaa

SEQ ID NO: 170440 - DNA, 25 bp, Artificial
  Probe
atagtccaggagttttgatacatcc

SEQ ID NO: 170441 - DNA, 25 bp, Artificial
  Probe
ggatagtccaggagttttgatacat

SEQ ID NO: 170442 - DNA, 25 bp, Artificial
  Probe
atcgaaagcagagtgaaagtaaggc

SEQ ID NO: 170443 - DNA, 25 bp, Artificial
  Probe
agggatagtccaggagttttgatac

SEQ ID NO: 170444 - DNA, 25 bp, Artificial
  Probe
cagggatagtccaggagttttgata

SEQ ID NO: 170445 - DNA, 25 bp, Artificial
  Probe
gggatagtccaggagttttgataca

SEQ ID NO: 170446 - DNA, 25 bp, Artificial
  Probe
ctcagcgtatatcgaaagcagagtg

SEQ ID NO: 170447 - DNA, 25 bp, Artificial
  Probe
cttgactttcaacttaggtccctcc

SEQ ID NO: 170448 - DNA, 25 bp, Artificial
  Probe
ccttgactttcaacttaggtccctc

SEQ ID NO: 170449 - DNA, 25 bp, Artificial
  Probe
ctcccttgactttcaacttaggtcc

SEQ ID NO: 170450 - DNA, 25 bp, Artificial
  Probe
tcagcgtatatcgaaagcagagtga

SEQ ID NO: 170451 - DNA, 25 bp, Artificial
  Probe
tttcaacttaggtccctccaacagc

SEQ ID NO: 170452 - DNA, 25 bp, Artificial
  Probe
ggagttttgatacatcctctgctga

SEQ ID NO: 170453 - DNA, 25 bp, Artificial
  Probe
taaggctcccttgactttcaactta

SEQ ID NO: 170454 - DNA, 25 bp, Artificial
  Probe
gaaagcagagtgaaagtaaggctcc

SEQ ID NO: 170455 - DNA, 25 bp, Artificial
  Probe
ttgactttcaacttaggtccctcca

SEQ ID NO: 170456 - DNA, 25 bp, Artificial
  Probe
gctcccttgactttcaacttaggtc

SEQ ID NO: 170457 - DNA, 25 bp, Artificial
  Probe
cgaaagcagagtgaaagtaaggctc

SEQ ID NO: 170458 - DNA, 25 bp, Artificial
  Probe
ctaccagggatagtccaggagtttt

SEQ ID NO: 170459 - DNA, 25 bp, Artificial
  Probe
aaggctcccttgactttcaacttag

SEQ ID NO: 170460 - DNA, 25 bp, Artificial
  Probe
cccttgactttcaacttaggtccct

SEQ ID NO: 170461 - DNA, 25 bp, Artificial
  Probe
tcccttgactttcaacttaggtccc

SEQ ID NO: 170462 - DNA, 25 bp, Artificial
  Probe
taccagggatagtccaggagttttg

SEQ ID NO: 170463 - DNA, 25 bp, Artificial
  Probe
gtaaggctcccttgactttcaactt

SEQ ID NO: 170464 - DNA, 25 bp, Artificial
  Probe
aagtaaggctcccttgactttcaac

SEQ ID NO: 170465 - DNA, 25 bp, Artificial
  Probe
ccagggatagtccaggagttttgat

SEQ ID NO: 170466 - DNA, 25 bp, Artificial
  Probe
aggctcccttgactttcaacttagg

SEQ ID NO: 170467 - DNA, 25 bp, Artificial
  Probe
gctaccagggatagtccaggagttt

SEQ ID NO: 170468 - DNA, 25 bp, Artificial
  Probe
tcgaaagcagagtgaaagtaaggct

SEQ ID NO: 170469 - DNA, 25 bp, Artificial
  Probe
aaagcagagtgaaagtaaggctccc

SEQ ID NO: 170470 - DNA, 25 bp, Artificial
  Probe
ggctcccttgactttcaacttaggt

SEQ ID NO: 170471 - DNA, 25 bp, Artificial
  Probe
catactcataacctcaggaacaaga

SEQ ID NO: 170472 - DNA, 25 bp, Artificial
  Probe
tcatactcataacctcaggaacaag

SEQ ID NO: 170473 - DNA, 25 bp, Artificial
  Probe
ctcatactcataacctcaggaacaa

SEQ ID NO: 170474 - DNA, 25 bp, Artificial
  Probe
tactcataacctcaggaacaagaga

SEQ ID NO: 170475 - DNA, 25 bp, Artificial
  Probe
atactcataacctcaggaacaagag

SEQ ID NO: 170476 - DNA, 25 bp, Artificial
  Probe
atcactgtgtacctgagagagaata

SEQ ID NO: 170477 - DNA, 25 bp, Artificial
  Probe
tcactgtgtacctgagagagaataa

SEQ ID NO: 170478 - DNA, 25 bp, Artificial
  Probe
aatcactgtgtacctgagagagaat

SEQ ID NO: 170479 - DNA, 25 bp, Artificial
  Probe
cataacctcaggaacaagagagtct

SEQ ID NO: 170480 - DNA, 25 bp, Artificial
  Probe
tcataacctcaggaacaagagagtc

SEQ ID NO: 170481 - DNA, 25 bp, Artificial
  Probe
ctcataacctcaggaacaagagagt

SEQ ID NO: 170482 - DNA, 25 bp, Artificial
  Probe
actcataacctcaggaacaagagag

SEQ ID NO: 170483 - DNA, 25 bp, Artificial
  Probe
gatgtgacctgcctcatactcataa

SEQ ID NO: 170484 - DNA, 25 bp, Artificial
  Probe
gaatcactgtgtacctgagagagaa

SEQ ID NO: 170485 - DNA, 25 bp, Artificial
  Probe
cctcatactcataacctcaggaaca

SEQ ID NO: 170486 - DNA, 25 bp, Artificial
  Probe
atgtgacctgcctcatactcataac

SEQ ID NO: 170487 - DNA, 25 bp, Artificial
  Probe
agaatcactgtgtacctgagagaga

SEQ ID NO: 170488 - DNA, 25 bp, Artificial
  Probe
tcttcacatcaaaggagtcatctac

SEQ ID NO: 170489 - DNA, 25 bp, Artificial
  Probe
cttcacatcaaaggagtcatctact

SEQ ID NO: 170490 - DNA, 25 bp, Artificial
  Probe
ttcacatcaaaggagtcatctactg

SEQ ID NO: 170491 - DNA, 25 bp, Artificial
  Probe
cagaatcactgtgtacctgagagag

SEQ ID NO: 170492 - DNA, 25 bp, Artificial
  Probe
actgtgtacctgagagagaataaac

SEQ ID NO: 170493 - DNA, 25 bp, Artificial
  Probe
cactgtgtacctgagagagaataaa

SEQ ID NO: 170494 - DNA, 25 bp, Artificial
  Probe
ctcttcacatcaaaggagtcatcta

SEQ ID NO: 170495 - DNA, 25 bp, Artificial
  Probe
ataacctcaggaacaagagagtctt

SEQ ID NO: 170496 - DNA, 25 bp, Artificial
  Probe
gcctcatactcataacctcaggaac

SEQ ID NO: 170497 - DNA, 25 bp, Artificial
  Probe
gacctgcctcatactcataacctca

SEQ ID NO: 170498 - DNA, 25 bp, Artificial
  Probe
catcaaaggagtcatctactgcttg

SEQ ID NO: 170499 - DNA, 25 bp, Artificial
  Probe
taacctcaggaacaagagagtcttc

SEQ ID NO: 170500 - DNA, 25 bp, Artificial
  Probe
tgcctcatactcataacctcaggaa

SEQ ID NO: 170501 - DNA, 25 bp, Artificial
  Probe
acatcaaaggagtcatctactgctt

SEQ ID NO: 170502 - DNA, 25 bp, Artificial
  Probe
ctgtgtacctgagagagaataaaca

SEQ ID NO: 170503 - DNA, 25 bp, Artificial
  Probe
tgacctgcctcatactcataacctc

SEQ ID NO: 170504 - DNA, 25 bp, Artificial
  Probe
tgtacctgagagagaataaacacag

SEQ ID NO: 170505 - DNA, 25 bp, Artificial
  Probe
ggatgtgacctgcctcatactcata

SEQ ID NO: 170506 - DNA, 25 bp, Artificial
  Probe
taaacctatttaagacacatccaca

SEQ ID NO: 170507 - DNA, 25 bp, Artificial
  Probe
gtacctgagagagaataaacacagc

SEQ ID NO: 170508 - DNA, 25 bp, Artificial
  Probe
gtgacctgcctcatactcataacct

SEQ ID NO: 170509 - DNA, 25 bp, Artificial
  Probe
ctgcctcatactcataacctcagga

SEQ ID NO: 170510 - DNA, 25 bp, Artificial
  Probe
gtaaacctatttaagacacatccac

SEQ ID NO: 170511 - DNA, 25 bp, Artificial
  Probe
acctgcctcatactcataacctcag

SEQ ID NO: 170512 - DNA, 25 bp, Artificial
  Probe
tacctgagagagaataaacacagcc

SEQ ID NO: 170513 - DNA, 25 bp, Artificial
  Probe
atcaaaggagtcatctactgcttgg

SEQ ID NO: 170514 - DNA, 25 bp, Artificial
  Probe
cacatcaaaggagtcatctactgct

SEQ ID NO: 170515 - DNA, 25 bp, Artificial
  Probe
tcacatcaaaggagtcatctactgc

SEQ ID NO: 170516 - DNA, 25 bp, Artificial
  Probe
ccaccctcctttatccatgtttata

SEQ ID NO: 170517 - DNA, 25 bp, Artificial
  Probe
cccaccctcctttatccatgtttat

SEQ ID NO: 170518 - DNA, 25 bp, Artificial
  Probe
ctacagacgatgagaagatcctggt

SEQ ID NO: 170519 - DNA, 25 bp, Artificial
  Probe
caccctcctttatccatgtttataa

SEQ ID NO: 170520 - DNA, 25 bp, Artificial
  Probe
tacagacgatgagaagatcctggtg

SEQ ID NO: 170521 - DNA, 25 bp, Artificial
  Probe
ctactcaagtgatatctgctgctgc

SEQ ID NO: 170522 - DNA, 25 bp, Artificial
  Probe
gctactcaagtgatatctgctgctg

SEQ ID NO: 170523 - DNA, 25 bp, Artificial
  Probe
accctcctttatccatgtttataat

SEQ ID NO: 170524 - DNA, 25 bp, Artificial
  Probe
cctacagacgatgagaagatcctgg

SEQ ID NO: 170525 - DNA, 25 bp, Artificial
  Probe
cctgaatgagctactcaagtgatat

SEQ ID NO: 170526 - DNA, 25 bp, Artificial
  Probe
aatgagctactcaagtgatatctgc

SEQ ID NO: 170527 - DNA, 25 bp, Artificial
  Probe
tgaatgagctactcaagtgatatct

SEQ ID NO: 170528 - DNA, 25 bp, Artificial
  Probe
atgagctactcaagtgatatctgct

SEQ ID NO: 170529 - DNA, 25 bp, Artificial
  Probe
gaatgagctactcaagtgatatctg

SEQ ID NO: 170530 - DNA, 25 bp, Artificial
  Probe
ctgaatgagctactcaagtgatatc

SEQ ID NO: 170531 - DNA, 25 bp, Artificial
  Probe
gcctgaatgagctactcaagtgata

SEQ ID NO: 170532 - DNA, 25 bp, Artificial
  Probe
ctttgttattgacatggggtctatg

SEQ ID NO: 170533 - DNA, 25 bp, Artificial
  Probe
gagctactcaagtgatatctgctgc

SEQ ID NO: 170534 - DNA, 25 bp, Artificial
  Probe
gctttgttattgacatggggtctat

SEQ ID NO: 170535 - DNA, 25 bp, Artificial
  Probe
tgagctactcaagtgatatctgctg

SEQ ID NO: 170536 - DNA, 25 bp, Artificial
  Probe
ccctacagacgatgagaagatcctg

SEQ ID NO: 170537 - DNA, 25 bp, Artificial
  Probe
agctactcaagtgatatctgctgct

SEQ ID NO: 170538 - DNA, 25 bp, Artificial
  Probe
ttttgagctttgttattgacatggg

SEQ ID NO: 170539 - DNA, 25 bp, Artificial
  Probe
cttttgagctttgttattgacatgg

SEQ ID NO: 170540 - DNA, 25 bp, Artificial
  Probe
tactcaagtgatatctgctgctgcc

SEQ ID NO: 170541 - DNA, 25 bp, Artificial
  Probe
gcccaccctcctttatccatgttta

SEQ ID NO: 170542 - DNA, 25 bp, Artificial
  Probe
tcttttgagctttgttattgacatg

SEQ ID NO: 170543 - DNA, 25 bp, Artificial
  Probe
gatcttttgagctttgttattgaca

SEQ ID NO: 170544 - DNA, 25 bp, Artificial
  Probe
ccctcctttatccatgtttataata

SEQ ID NO: 170545 - DNA, 25 bp, Artificial
  Probe
tttgagctttgttattgacatgggg

SEQ ID NO: 170546 - DNA, 25 bp, Artificial
  Probe
agctttgttattgacatggggtcta

SEQ ID NO: 170547 - DNA, 25 bp, Artificial
  Probe
tttgttattgacatggggtctatgt

SEQ ID NO: 170548 - DNA, 25 bp, Artificial
  Probe
atcttttgagctttgttattgacat

SEQ ID NO: 170549 - DNA, 25 bp, Artificial
  Probe
ttgttattgacatggggtctatgtg

SEQ ID NO: 170550 - DNA, 25 bp, Artificial
  Probe
aagcacagactgtagaaaccgagac

SEQ ID NO: 170551 - DNA, 25 bp, Artificial
  Probe
caagcacagactgtagaaaccgaga

SEQ ID NO: 170552 - DNA, 25 bp, Artificial
  Probe
ttgagctttgttattgacatggggt

SEQ ID NO: 170553 - DNA, 25 bp, Artificial
  Probe
agatcttttgagctttgttattgac

SEQ ID NO: 170554 - DNA, 25 bp, Artificial
  Probe
ctcccctacagacgatgagaagatc

SEQ ID NO: 170555 - DNA, 25 bp, Artificial
  Probe
cacagactgtagaaaccgagactgg

SEQ ID NO: 170556 - DNA, 25 bp, Artificial
  Probe
gagctttgttattgacatggggtct

SEQ ID NO: 170557 - DNA, 25 bp, Artificial
  Probe
tcctttatccatgtttataatatgc

SEQ ID NO: 170558 - DNA, 25 bp, Artificial
  Probe
tgagctttgttattgacatggggtc

SEQ ID NO: 170559 - DNA, 25 bp, Artificial
  Probe
cctttatccatgtttataatatgca

SEQ ID NO: 170560 - DNA, 25 bp, Artificial
  Probe
tgttattgacatggggtctatgtgc

SEQ ID NO: 170561 - DNA, 25 bp, Artificial
  Probe
cacttccatgtcctaacttatgagt

SEQ ID NO: 170562 - DNA, 25 bp, Artificial
  Probe
gcacttccatgtcctaacttatgag

SEQ ID NO: 170563 - DNA, 25 bp, Artificial
  Probe
ccaaagacatattcacacaacgaaa

SEQ ID NO: 170564 - DNA, 25 bp, Artificial
  Probe
caaagacatattcacacaacgaaac

SEQ ID NO: 170565 - DNA, 25 bp, Artificial
  Probe
gagacccaaagacatattcacacaa

SEQ ID NO: 170566 - DNA, 25 bp, Artificial
  Probe
aaagacatattcacacaacgaaacg

SEQ ID NO: 170567 - DNA, 25 bp, Artificial
  Probe
gatagcgagacccaaagacatattc

SEQ ID NO: 170568 - DNA, 25 bp, Artificial
  Probe
agacccaaagacatattcacacaac

SEQ ID NO: 170569 - DNA, 25 bp, Artificial
  Probe
ctgcacttccatgtcctaacttatg

SEQ ID NO: 170570 - DNA, 25 bp, Artificial
  Probe
atagcgagacccaaagacatattca

SEQ ID NO: 170571 - DNA, 25 bp, Artificial
  Probe
tgatagcgagacccaaagacatatt

SEQ ID NO: 170572 - DNA, 25 bp, Artificial
  Probe
tgcacttccatgtcctaacttatga

SEQ ID NO: 170573 - DNA, 25 bp, Artificial
  Probe
cccaaagacatattcacacaacgaa

SEQ ID NO: 170574 - DNA, 25 bp, Artificial
  Probe
ctgatagcgagacccaaagacatat

SEQ ID NO: 170575 - DNA, 25 bp, Artificial
  Probe
cttcatttggcaataaggtcggtag

SEQ ID NO: 170576 - DNA, 25 bp, Artificial
  Probe
cctgcacttccatgtcctaacttat

SEQ ID NO: 170577 - DNA, 25 bp, Artificial
  Probe
tcttcatttggcaataaggtcggta

SEQ ID NO: 170578 - DNA, 25 bp, Artificial
  Probe
tgactcttcatttggcaataaggtc

SEQ ID NO: 170579 - DNA, 25 bp, Artificial
  Probe
gacccaaagacatattcacacaacg

SEQ ID NO: 170580 - DNA, 25 bp, Artificial
  Probe
tagcgagacccaaagacatattcac

SEQ ID NO: 170581 - DNA, 25 bp, Artificial
  Probe
acttccatgtcctaacttatgagtt

SEQ ID NO: 170582 - DNA, 25 bp, Artificial
  Probe
acccaaagacatattcacacaacga

SEQ ID NO: 170583 - DNA, 25 bp, Artificial
  Probe
atttggcaataaggtcggtaggttt

SEQ ID NO: 170584 - DNA, 25 bp, Artificial
  Probe
cgagacccaaagacatattcacaca

SEQ ID NO: 170585 - DNA, 25 bp, Artificial
  Probe
ttatagagaagctgcaccgtgaatg

SEQ ID NO: 170586 - DNA, 25 bp, Artificial
  Probe
tgtataatgcaactaatgactcttc

SEQ ID NO: 170587 - DNA, 25 bp, Artificial
  Probe
gactcttcatttggcaataaggtcg

SEQ ID NO: 170588 - DNA, 25 bp, Artificial
  Probe
tctgatagcgagacccaaagacata

SEQ ID NO: 170589 - DNA, 25 bp, Artificial
  Probe
ttcatttggcaataaggtcggtagg

SEQ ID NO: 170590 - DNA, 25 bp, Artificial
  Probe
tcctgcacttccatgtcctaactta

SEQ ID NO: 170591 - DNA, 25 bp, Artificial
  Probe
gtataatgcaactaatgactcttca

SEQ ID NO: 170592 - DNA, 25 bp, Artificial
  Probe
ggtcggtaggttttatactgttaga

SEQ ID NO: 170593 - DNA, 25 bp, Artificial
  Probe
aggtcggtaggttttatactgttag

SEQ ID NO: 170594 - DNA, 25 bp, Artificial
  Probe
catttggcaataaggtcggtaggtt

SEQ ID NO: 170595 - DNA, 25 bp, Artificial
  Probe
aaggtcggtaggttttatactgtta

SEQ ID NO: 170596 - DNA, 25 bp, Artificial
  Probe
taaggtcggtaggttttatactgtt

SEQ ID NO: 170597 - DNA, 25 bp, Artificial
  Probe
atgactcttcatttggcaataaggt

SEQ ID NO: 170598 - DNA, 25 bp, Artificial
  Probe
ctcttcatttggcaataaggtcggt

SEQ ID NO: 170599 - DNA, 25 bp, Artificial
  Probe
actcttcatttggcaataaggtcgg

SEQ ID NO: 170600 - DNA, 25 bp, Artificial
  Probe
gcaataaggtcggtaggttttatac

SEQ ID NO: 170601 - DNA, 25 bp, Artificial
  Probe
ggcaataaggtcggtaggttttata

SEQ ID NO: 170602 - DNA, 25 bp, Artificial
  Probe
tatagagaagctgcaccgtgaatga

SEQ ID NO: 170603 - DNA, 25 bp, Artificial
  Probe
tttatagagaagctgcaccgtgaat

SEQ ID NO: 170604 - DNA, 25 bp, Artificial
  Probe
ataaggtcggtaggttttatactgt

SEQ ID NO: 170605 - DNA, 25 bp, Artificial
  Probe
tcggtaggttttatactgttagaga

SEQ ID NO: 170606 - DNA, 25 bp, Artificial
  Probe
tctacctgtcaatcaatgctgtatt

SEQ ID NO: 170607 - DNA, 25 bp, Artificial
  Probe
ttctacctgtcaatcaatgctgtat

SEQ ID NO: 170608 - DNA, 25 bp, Artificial
  Probe
aatcagagcttcaacagacatacaa

SEQ ID NO: 170609 - DNA, 25 bp, Artificial
  Probe
acctgtcaatcaatgctgtatttac

SEQ ID NO: 170610 - DNA, 25 bp, Artificial
  Probe
tttctacctgtcaatcaatgctgta

SEQ ID NO: 170611 - DNA, 25 bp, Artificial
  Probe
cctgtcaatcaatgctgtatttacg

SEQ ID NO: 170612 - DNA, 25 bp, Artificial
  Probe
taaacgccaagaaagattaaccaac

SEQ ID NO: 170613 - DNA, 25 bp, Artificial
  Probe
ctacctgtcaatcaatgctgtattt

SEQ ID NO: 170614 - DNA, 25 bp, Artificial
  Probe
accaacaatgcaactaatacatcaa

SEQ ID NO: 170615 - DNA, 25 bp, Artificial
  Probe
aaccaacaatgcaactaatacatca

SEQ ID NO: 170616 - DNA, 25 bp, Artificial
  Probe
gagtttctacctgtcaatcaatgct

SEQ ID NO: 170617 - DNA, 25 bp, Artificial
  Probe
acgagtttctacctgtcaatcaatg

SEQ ID NO: 170618 - DNA, 25 bp, Artificial
  Probe
cacgagtttctacctgtcaatcaat

SEQ ID NO: 170619 - DNA, 25 bp, Artificial
  Probe
ctgtcaatcaatgctgtatttacgc

SEQ ID NO: 170620 - DNA, 25 bp, Artificial
  Probe
agtttctacctgtcaatcaatgctg

SEQ ID NO: 170621 - DNA, 25 bp, Artificial
  Probe
cttaaacgccaagaaagattaacca

SEQ ID NO: 170622 - DNA, 25 bp, Artificial
  Probe
ttaaacgccaagaaagattaaccaa

SEQ ID NO: 170623 - DNA, 25 bp, Artificial
  Probe
aagacattgagagggaactagaaat

SEQ ID NO: 170624 - DNA, 25 bp, Artificial
  Probe
gcatatctttaatctgacagttcca

SEQ ID NO: 170625 - DNA, 25 bp, Artificial
  Probe
gtttctacctgtcaatcaatgctgt

SEQ ID NO: 170626 - DNA, 25 bp, Artificial
  Probe
cgccaagaaagattaaccaacaatg

SEQ ID NO: 170627 - DNA, 25 bp, Artificial
  Probe
acagactattgacacgagtttctac

SEQ ID NO: 170628 - DNA, 25 bp, Artificial
  Probe
cacagactattgacacgagtttcta

SEQ ID NO: 170629 - DNA, 25 bp, Artificial
  Probe
ttaacatctgatctaaaggcaaggt

SEQ ID NO: 170630 - DNA, 25 bp, Artificial
  Probe
agcatatctttaatctgacagttcc

SEQ ID NO: 170631 - DNA, 25 bp, Artificial
  Probe
gccaagaaagattaaccaacaatgc

SEQ ID NO: 170632 - DNA, 25 bp, Artificial
  Probe
taacatctgatctaaaggcaaggtg

SEQ ID NO: 170633 - DNA, 25 bp, Artificial
  Probe
aatcaatgctgtatttacgccgaat

SEQ ID NO: 170634 - DNA, 25 bp, Artificial
  Probe
tacctgtcaatcaatgctgtattta

SEQ ID NO: 170635 - DNA, 25 bp, Artificial
  Probe
taagacattgagagggaactagaaa

SEQ ID NO: 170636 - DNA, 25 bp, Artificial
  Probe
ccaacaatgcaactaatacatcaat

SEQ ID NO: 170637 - DNA, 25 bp, Artificial
  Probe
gactattgacacgagtttctacctg

SEQ ID NO: 170638 - DNA, 25 bp, Artificial
  Probe
agactattgacacgagtttctacct

SEQ ID NO: 170639 - DNA, 25 bp, Artificial
  Probe
cagactattgacacgagtttctacc

SEQ ID NO: 170640 - DNA, 25 bp, Artificial
  Probe
acgccaagaaagattaaccaacaat

SEQ ID NO: 170641 - DNA, 25 bp, Artificial
  Probe
agacattgagagggaactagaaata

SEQ ID NO: 170642 - DNA, 25 bp, Artificial
  Probe
ataagacattgagagggaactagaa

SEQ ID NO: 170643 - DNA, 25 bp, Artificial
  Probe
atcaatgctgtatttacgccgaatt

SEQ ID NO: 170644 - DNA, 25 bp, Artificial
  Probe
aacgccaagaaagattaaccaacaa

SEQ ID NO: 170645 - DNA, 25 bp, Artificial
  Probe
aaacgccaagaaagattaaccaaca

SEQ ID NO: 170646 - DNA, 25 bp, Artificial
  Probe
attaacatctgatctaaaggcaagg

SEQ ID NO: 170647 - DNA, 25 bp, Artificial
  Probe
cgagtttctacctgtcaatcaatgc

SEQ ID NO: 170648 - DNA, 25 bp, Artificial
  Probe
tgtcaatcaatgctgtatttacgcc

SEQ ID NO: 170649 - DNA, 25 bp, Artificial
  Probe
taaccaacaatgcaactaatacatc

SEQ ID NO: 170650 - DNA, 25 bp, Artificial
  Probe
actattgacacgagtttctacctgt

SEQ ID NO: 170651 - DNA, 25 bp, Artificial
  Probe
tacttgtaaataaagcctctgggtg

SEQ ID NO: 170652 - DNA, 25 bp, Artificial
  Probe
ttacttgtaaataaagcctctgggt

SEQ ID NO: 170653 - DNA, 25 bp, Artificial
  Probe
cagagaccagtgtgtttacttgtaa

SEQ ID NO: 170654 - DNA, 25 bp, Artificial
  Probe
tttacagagaccagtgtgtttactt

SEQ ID NO: 170655 - DNA, 25 bp, Artificial
  Probe
ttacagagaccagtgtgtttacttg

SEQ ID NO: 170656 - DNA, 25 bp, Artificial
  Probe
gtttacagagaccagtgtgtttact

SEQ ID NO: 170657 - DNA, 25 bp, Artificial
  Probe
agtttacagagaccagtgtgtttac

SEQ ID NO: 170658 - DNA, 25 bp, Artificial
  Probe
cagtttacagagaccagtgtgttta

SEQ ID NO: 170659 - DNA, 25 bp, Artificial
  Probe
acagagaccagtgtgtttacttgta

SEQ ID NO: 170660 - DNA, 25 bp, Artificial
  Probe
tacagagaccagtgtgtttacttgt

SEQ ID NO: 170661 - DNA, 25 bp, Artificial
  Probe
agagaccagtgtgtttacttgtaaa

SEQ ID NO: 170662 - DNA, 25 bp, Artificial
  Probe
tttacttgtaaataaagcctctggg

SEQ ID NO: 170663 - DNA, 25 bp, Artificial
  Probe
gagaccagtgtgtttacttgtaaat

SEQ ID NO: 170664 - DNA, 25 bp, Artificial
  Probe
cttgtaaataaagcctctgggtggt

SEQ ID NO: 170665 - DNA, 25 bp, Artificial
  Probe
acttgtaaataaagcctctgggtgg

SEQ ID NO: 170666 - DNA, 25 bp, Artificial
  Probe
ctgtggaaacatcttcaccctttac

SEQ ID NO: 170667 - DNA, 25 bp, Artificial
  Probe
tctgtggaaacatcttcacccttta

SEQ ID NO: 170668 - DNA, 25 bp, Artificial
  Probe
ttgtaaataaagcctctgggtggtg

SEQ ID NO: 170669 - DNA, 25 bp, Artificial
  Probe
gtttacttgtaaataaagcctctgg

SEQ ID NO: 170670 - DNA, 25 bp, Artificial
  Probe
gtgtgtttacttgtaaataaagcct

SEQ ID NO: 170671 - DNA, 25 bp, Artificial
  Probe
agaccagtgtgtttacttgtaaata

SEQ ID NO: 170672 - DNA, 25 bp, Artificial
  Probe
ctgaactggaaaccctgagaatgtt

SEQ ID NO: 170673 - DNA, 25 bp, Artificial
  Probe
agtgtgtttacttgtaaataaagcc

SEQ ID NO: 170674 - DNA, 25 bp, Artificial
  Probe
ctcaggaactccagtttacagagac

SEQ ID NO: 170675 - DNA, 25 bp, Artificial
  Probe
tgtgtttacttgtaaataaagcctc

SEQ ID NO: 170676 - DNA, 25 bp, Artificial
  Probe
gaagatggcaaagaagctcaagaag

SEQ ID NO: 170677 - DNA, 25 bp, Artificial
  Probe
ccagtttacagagaccagtgtgttt

SEQ ID NO: 170678 - DNA, 25 bp, Artificial
  Probe
ttctgtggaaacatcttcacccttt

SEQ ID NO: 170679 - DNA, 25 bp, Artificial
  Probe
gtctgaactggaaaccctgagaatg

SEQ ID NO: 170680 - DNA, 25 bp, Artificial
  Probe
tgtttacttgtaaataaagcctctg

SEQ ID NO: 170681 - DNA, 25 bp, Artificial
  Probe
gtgtttacttgtaaataaagcctct

SEQ ID NO: 170682 - DNA, 25 bp, Artificial
  Probe
gaccagtgtgtttacttgtaaataa

SEQ ID NO: 170683 - DNA, 25 bp, Artificial
  Probe
gaactccagtttacagagaccagtg

SEQ ID NO: 170684 - DNA, 25 bp, Artificial
  Probe
tgtcaacgagaagatggcaaagaag

SEQ ID NO: 170685 - DNA, 25 bp, Artificial
  Probe
ctgtcaacgagaagatggcaaagaa

SEQ ID NO: 170686 - DNA, 25 bp, Artificial
  Probe
agaagatggcaaagaagctcaagaa

SEQ ID NO: 170687 - DNA, 25 bp, Artificial
  Probe
gtacttgagccaggaggagtatgag

SEQ ID NO: 170688 - DNA, 25 bp, Artificial
  Probe
tctgaactggaaaccctgagaatgt

SEQ ID NO: 170689 - DNA, 25 bp, Artificial
  Probe
tgtggaaacatcttcaccctttacc

SEQ ID NO: 170690 - DNA, 25 bp, Artificial
  Probe
tggaaacatcttcaccctttaccag

SEQ ID NO: 170691 - DNA, 25 bp, Artificial
  Probe
cagtgtgtttacttgtaaataaagc

SEQ ID NO: 170692 - DNA, 25 bp, Artificial
  Probe
ctgttaatgcagtcctgttcctcag

SEQ ID NO: 170693 - DNA, 25 bp, Artificial
  Probe
accagtgtgtttacttgtaaataaa

SEQ ID NO: 170694 - DNA, 25 bp, Artificial
  Probe
cctcaggaactccagtttacagaga

SEQ ID NO: 170695 - DNA, 25 bp, Artificial
  Probe
tttctgtggaaacatcttcaccctt

SEQ ID NO: 170696 - DNA, 25 bp, Artificial
  Probe
aagaataaaggtctccaaagcatct

SEQ ID NO: 170697 - DNA, 25 bp, Artificial
  Probe
aaagaataaaggtctccaaagcatc

SEQ ID NO: 170698 - DNA, 25 bp, Artificial
  Probe
gaaagaataaaggtctccaaagcat

SEQ ID NO: 170699 - DNA, 25 bp, Artificial
  Probe
agaataaaggtctccaaagcatctg

SEQ ID NO: 170700 - DNA, 25 bp, Artificial
  Probe
cgaaagaataaaggtctccaaagca

SEQ ID NO: 170701 - DNA, 25 bp, Artificial
  Probe
agacctgatgtcatactgtgaggag

SEQ ID NO: 170702 - DNA, 25 bp, Artificial
  Probe
ctgatgtcatactgtgaggagcatg

SEQ ID NO: 170703 - DNA, 25 bp, Artificial
  Probe
gaataaaggtctccaaagcatctgc

SEQ ID NO: 170704 - DNA, 25 bp, Artificial
  Probe
catcgaaagaataaaggtctccaaa

SEQ ID NO: 170705 - DNA, 25 bp, Artificial
  Probe
ccatcgaaagaataaaggtctccaa

SEQ ID NO: 170706 - DNA, 25 bp, Artificial
  Probe
cagacctgatgtcatactgtgagga

SEQ ID NO: 170707 - DNA, 25 bp, Artificial
  Probe
atcgaaagaataaaggtctccaaag

SEQ ID NO: 170708 - DNA, 25 bp, Artificial
  Probe
ctccatcgaaagaataaaggtctcc

SEQ ID NO: 170709 - DNA, 25 bp, Artificial
  Probe
tcgaaagaataaaggtctccaaagc

SEQ ID NO: 170710 - DNA, 25 bp, Artificial
  Probe
tccatcgaaagaataaaggtctcca

SEQ ID NO: 170711 - DNA, 25 bp, Artificial
  Probe
cctccatcgaaagaataaaggtctc

SEQ ID NO: 170712 - DNA, 25 bp, Artificial
  Probe
cctgatgtcatactgtgaggagcat

SEQ ID NO: 170713 - DNA, 25 bp, Artificial
  Probe
gaagcctccatcgaaagaataaagg

SEQ ID NO: 170714 - DNA, 25 bp, Artificial
  Probe
ggaagcctccatcgaaagaataaag

SEQ ID NO: 170715 - DNA, 25 bp, Artificial
  Probe
aataaaggtctccaaagcatctgca

SEQ ID NO: 170716 - DNA, 25 bp, Artificial
  Probe
aagcctccatcgaaagaataaaggt

SEQ ID NO: 170717 - DNA, 25 bp, Artificial
  Probe
gacctgatgtcatactgtgaggagc

SEQ ID NO: 170718 - DNA, 25 bp, Artificial
  Probe
gcctccatcgaaagaataaaggtct

SEQ ID NO: 170719 - DNA, 25 bp, Artificial
  Probe
agcctccatcgaaagaataaaggtc
